United States Patent Application Publication US 2014/0004565 A1 - sequence listing, part 44

SEQ ID NO: 1018749 - RNA, 19 nt, Artificial Sequence
  Description of Artificial Sequence: Synthetic oligonucleotide
agcgcgcauauucggaggu

SEQ ID NO: 1018750 - RNA, 19 nt, Artificial Sequence
  Description of Artificial Sequence: Synthetic oligonucleotide
agggauuguucgcgcggcg

SEQ ID NO: 1018751 - RNA, 19 nt, Artificial Sequence
  Description of Artificial Sequence: Synthetic oligonucleotide
aacucucgagccaccucuc

SEQ ID NO: 1018752 - RNA, 19 nt, Artificial Sequence
  Description of Artificial Sequence: Synthetic oligonucleotide
ugucacccacccucagugc

SEQ ID NO: 1018753 - RNA, 19 nt, Artificial Sequence
  Description of Artificial Sequence: Synthetic oligonucleotide
cuccagaacgucauaccga

SEQ ID NO: 1018754 - RNA, 19 nt, Artificial Sequence
  Description of Artificial Sequence: Synthetic oligonucleotide
cugaaaucuccgcuaguga

SEQ ID NO: 1018755 - RNA, 19 nt, Artificial Sequence
  Description of Artificial Sequence: Synthetic oligonucleotide
ucgcaagggugcauagccu

SEQ ID NO: 1018756 - RNA, 19 nt, Artificial Sequence
  Description of Artificial Sequence: Synthetic oligonucleotide
cgugcucagcuccagaacg

SEQ ID NO: 1018757 - RNA, 19 nt, Artificial Sequence
  Description of Artificial Sequence: Synthetic oligonucleotide
  modified_base (14)..(14): a, c, u, g, unknown or other
cuuagccagcugcngaaaa

SEQ ID NO: 1018758 - RNA, 19 nt, Artificial Sequence
  Description of Artificial Sequence: Synthetic oligonucleotide
aggcaauucgugaccaucu

SEQ ID NO: 1018759 - RNA, 19 nt, Artificial Sequence
  Description of Artificial Sequence: Synthetic oligonucleotide
acgucauaccgagcagcgc

SEQ ID NO: 1018760 - RNA, 19 nt, Artificial Sequence
  Description of Artificial Sequence: Synthetic oligonucleotide
cuccgcccgccuuuuagcc

SEQ ID NO: 1018761 - RNA, 19 nt, Artificial Sequence
  Description of Artificial Sequence: Synthetic oligonucleotide
gccacaugaccauagcuga

SEQ ID NO: 1018762 - RNA, 19 nt, Artificial Sequence
  Description of Artificial Sequence: Synthetic oligonucleotide
caccgugcacaagagcucc

SEQ ID NO: 1018763 - RNA, 19 nt, Artificial Sequence
  Description of Artificial Sequence: Synthetic oligonucleotide
cgucauaccgagcagcgcc

SEQ ID NO: 1018764 - RNA, 19 nt, Artificial Sequence
  Description of Artificial Sequence: Synthetic oligonucleotide
cuccacccggaaucgggcg

SEQ ID NO: 1018765 - RNA, 19 nt, Artificial Sequence
  Description of Artificial Sequence: Synthetic oligonucleotide
accccggacacugcgccgc

SEQ ID NO: 1018766 - RNA, 19 nt, Artificial Sequence
  Description of Artificial Sequence: Synthetic oligonucleotide
guucgcgcggcggaguggg

SEQ ID NO: 1018767 - RNA, 19 nt, Artificial Sequence
  Description of Artificial Sequence: Synthetic oligonucleotide
ucucgcaagggugcauagc

SEQ ID NO: 1018768 - RNA, 19 nt, Artificial Sequence
  Description of Artificial Sequence: Synthetic oligonucleotide
cuuaguccugcagcugccc

SEQ ID NO: 1018769 - RNA, 19 nt, Artificial Sequence
  Description of Artificial Sequence: Synthetic oligonucleotide
cauagcuucuguggagcac

SEQ ID NO: 1018770 - RNA, 19 nt, Artificial Sequence
  Description of Artificial Sequence: Synthetic oligonucleotide
ugccccguagccucuucca

SEQ ID NO: 1018771 - RNA, 19 nt, Artificial Sequence
  Description of Artificial Sequence: Synthetic oligonucleotide
gguacagccgccccgggca

SEQ ID NO: 1018772 - RNA, 19 nt, Artificial Sequence
  Description of Artificial Sequence: Synthetic oligonucleotide
ucggccgcgcagcagcaga

SEQ ID NO: 1018773 - RNA, 19 nt, Artificial Sequence
  Description of Artificial Sequence: Synthetic oligonucleotide
ggccucgagagggacaugg

SEQ ID NO: 1018774 - RNA, 19 nt, Artificial Sequence
  Description of Artificial Sequence: Synthetic oligonucleotide
cauauucggaggugcccuc

SEQ ID NO: 1018775 - RNA, 19 nt, Artificial Sequence
  Description of Artificial Sequence: Synthetic oligonucleotide
accgguacagccgccccgg

SEQ ID NO: 1018776 - RNA, 19 nt, Artificial Sequence
  Description of Artificial Sequence: Synthetic oligonucleotide
uccugaugaaagcgcgcau

SEQ ID NO: 1018777 - RNA, 19 nt, Artificial Sequence
  Description of Artificial Sequence: Synthetic oligonucleotide
cacccucagugcuaaggug

SEQ ID NO: 1018778 - RNA, 19 nt, Artificial Sequence
  Description of Artificial Sequence: Synthetic oligonucleotide
cucucgcaagggugcauag

SEQ ID NO: 1018779 - RNA, 19 nt, Artificial Sequence
  Description of Artificial Sequence: Synthetic oligonucleotide
cucagaucacucccagcuc

SEQ ID NO: 1018780 - RNA, 19 nt, Artificial Sequence
  Description of Artificial Sequence: Synthetic oligonucleotide
cucgagagggacauggccu

SEQ ID NO: 1018781 - RNA, 19 nt, Artificial Sequence
  Description of Artificial Sequence: Synthetic oligonucleotide
agugcaccgugcacaagag

SEQ ID NO: 1018782 - RNA, 19 nt, Artificial Sequence
  Description of Artificial Sequence: Synthetic oligonucleotide
uggguguacccugucccug

SEQ ID NO: 1018783 - RNA, 19 nt, Artificial Sequence
  Description of Artificial Sequence: Synthetic oligonucleotide
ggcgcagggauuguucgcg

SEQ ID NO: 1018784 - RNA, 19 nt, Artificial Sequence
  Description of Artificial Sequence: Synthetic oligonucleotide
cccaguaccgcagucgucc

SEQ ID NO: 1018785 - RNA, 19 nt, Artificial Sequence
  Description of Artificial Sequence: Synthetic oligonucleotide
gcuuuccugaugaaagcgc

SEQ ID NO: 1018786 - RNA, 19 nt, Artificial Sequence
  Description of Artificial Sequence: Synthetic oligonucleotide
cgagcaaccgguacagccg

SEQ ID NO: 1018787 - RNA, 19 nt, Artificial Sequence
  Description of Artificial Sequence: Synthetic oligonucleotide
ggaccagaggucugcuuag

SEQ ID NO: 1018788 - RNA, 19 nt, Artificial Sequence
  Description of Artificial Sequence: Synthetic oligonucleotide
gaaucgggcgaguccucca

SEQ ID NO: 1018789 - RNA, 19 nt, Artificial Sequence
  Description of Artificial Sequence: Synthetic oligonucleotide
cauacaaggcgaaugcauu

SEQ ID NO: 1018790 - RNA, 19 nt, Artificial Sequence
  Description of Artificial Sequence: Synthetic oligonucleotide
ucgggcgaguccuccaguc

SEQ ID NO: 1018791 - RNA, 19 nt, Artificial Sequence
  Description of Artificial Sequence: Synthetic oligonucleotide
cagggauuguucgcgcggc

SEQ ID NO: 1018792 - RNA, 19 nt, Artificial Sequence
  Description of Artificial Sequence: Synthetic oligonucleotide
agaaaagucgugaccucuu

SEQ ID NO: 1018793 - RNA, 19 nt, Artificial Sequence
  Description of Artificial Sequence: Synthetic oligonucleotide
acaagagcuccugccgucu

SEQ ID NO: 1018794 - RNA, 19 nt, Artificial Sequence
  Description of Artificial Sequence: Synthetic oligonucleotide
caacucucgagccaccucu

SEQ ID NO: 1018795 - RNA, 19 nt, Artificial Sequence
  Description of Artificial Sequence: Synthetic oligonucleotide
uccggcuuccucugagguc

SEQ ID NO: 1018796 - RNA, 19 nt, Artificial Sequence
  Description of Artificial Sequence: Synthetic oligonucleotide
caccucucccgcuguagug

SEQ ID NO: 1018797 - RNA, 19 nt, Artificial Sequence
  Description of Artificial Sequence: Synthetic oligonucleotide
ugagcacaucggccacgag

SEQ ID NO: 1018798 - RNA, 19 nt, Artificial Sequence
  Description of Artificial Sequence: Synthetic oligonucleotide
cuccgcuagugaaggcacc

SEQ ID NO: 1018799 - RNA, 19 nt, Artificial Sequence
  Description of Artificial Sequence: Synthetic oligonucleotide
uuggccaaguaggcauuca

SEQ ID NO: 1018800 - RNA, 19 nt, Artificial Sequence
  Description of Artificial Sequence: Synthetic oligonucleotide
ccucgagagggacauggcc

SEQ ID NO: 1018801 - RNA, 19 nt, Artificial Sequence
  Description of Artificial Sequence: Synthetic oligonucleotide
uguucgcgcggcggagugg

SEQ ID NO: 1018802 - RNA, 19 nt, Artificial Sequence
  Description of Artificial Sequence: Synthetic oligonucleotide
caaccgguacagccgcccc

SEQ ID NO: 1018803 - RNA, 19 nt, Artificial Sequence
  Description of Artificial Sequence: Synthetic oligonucleotide
ggccaaguaggcauucacc

SEQ ID NO: 1018804 - RNA, 19 nt, Artificial Sequence
  Description of Artificial Sequence: Synthetic oligonucleotide
  modified_base (7)..(7): a, c, u, g, unknown or other
gcuggancuugaguagcag

SEQ ID NO: 1018805 - RNA, 19 nt, Artificial Sequence
  Description of Artificial Sequence: Synthetic oligonucleotide
uccgcccgccuuuuagcca

SEQ ID NO: 1018806 - RNA, 19 nt, Artificial Sequence
  Description of Artificial Sequence: Synthetic oligonucleotide
ccuuaaguguggguguacc

SEQ ID NO: 1018807 - RNA, 19 nt, Artificial Sequence
  Description of Artificial Sequence: Synthetic oligonucleotide
guccgugaagacgaaggca

SEQ ID NO: 1018808 - RNA, 19 nt, Artificial Sequence
  Description of Artificial Sequence: Synthetic oligonucleotide
cagacugucccuggggcuc

SEQ ID NO: 1018809 - RNA, 19 nt, Artificial Sequence
  Description of Artificial Sequence: Synthetic oligonucleotide
agucaggcuauaggcaaaa

SEQ ID NO: 1018810 - RNA, 19 nt, Artificial Sequence
  Description of Artificial Sequence: Synthetic oligonucleotide
cucauacaaggcgaaugca

SEQ ID NO: 1018811 - RNA, 19 nt, Artificial Sequence
  Description of Artificial Sequence: Synthetic oligonucleotide
agccucccuaccaacucuc

SEQ ID NO: 1018812 - RNA, 19 nt, Artificial Sequence
  Description of Artificial Sequence: Synthetic oligonucleotide
uaccgcagucguccugcug

SEQ ID NO: 1018813 - RNA, 19 nt, Artificial Sequence
  Description of Artificial Sequence: Synthetic oligonucleotide
cucgagccaccucucccgc

SEQ ID NO: 1018814 - RNA, 19 nt, Artificial Sequence
  Description of Artificial Sequence: Synthetic oligonucleotide
ggccuauuagcuggcaggc

SEQ ID NO: 1018815 - RNA, 19 nt, Artificial Sequence
  Description of Artificial Sequence: Synthetic oligonucleotide
gguuuccuuaaaucucaga

SEQ ID NO: 1018816 - RNA, 19 nt, Artificial Sequence
  Description of Artificial Sequence: Synthetic oligonucleotide
cucucccgcuguagugugg

SEQ ID NO: 1018817 - RNA, 19 nt, Artificial Sequence
  Description of Artificial Sequence: Synthetic oligonucleotide
gggauuguucgcgcggcgg

SEQ ID NO: 1018818 - RNA, 19 nt, Artificial Sequence
  Description of Artificial Sequence: Synthetic oligonucleotide
auuagcuggcaggcggcca

SEQ ID NO: 1018819 - RNA, 19 nt, Artificial Sequence
  Description of Artificial Sequence: Synthetic oligonucleotide
ugaugaaagcgcgcauauu

SEQ ID NO: 1018820 - RNA, 19 nt, Artificial Sequence
  Description of Artificial Sequence: Synthetic oligonucleotide
ggggccuauuagcuggcag

SEQ ID NO: 1018821 - RNA, 19 nt, Artificial Sequence
  Description of Artificial Sequence: Synthetic oligonucleotide
gugcaccgugcacaagagc

SEQ ID NO: 1018822 - RNA, 19 nt, Artificial Sequence
  Description of Artificial Sequence: Synthetic oligonucleotide
ggaacagccucaccgccuc

SEQ ID NO: 1018823 - RNA, 19 nt, Artificial Sequence
  Description of Artificial Sequence: Synthetic oligonucleotide
gucucaccaggccucgaga

SEQ ID NO: 1018824 - RNA, 19 nt, Artificial Sequence
  Description of Artificial Sequence: Synthetic oligonucleotide
ucauaccgagcagcgccga

SEQ ID NO: 1018825 - RNA, 19 nt, Artificial Sequence
  Description of Artificial Sequence: Synthetic oligonucleotide
  modified_base (4)..(4): a, c, u, g, unknown or other
ggancuugaguagcaggga

SEQ ID NO: 1018826 - RNA, 19 nt, Artificial Sequence
  Description of Artificial Sequence: Synthetic oligonucleotide
agacccaagcauagcuucu

SEQ ID NO: 1018827 - RNA, 19 nt, Artificial Sequence
  Description of Artificial Sequence: Synthetic oligonucleotide
gcgcugaaaucuccgcuag

SEQ ID NO: 1018828 - RNA, 19 nt, Artificial Sequence
  Description of Artificial Sequence: Synthetic oligonucleotide
auuguucgcgcggcggagu

SEQ ID NO: 1018829 - RNA, 19 nt, Artificial Sequence
  Description of Artificial Sequence: Synthetic oligonucleotide
ggacagugcaccgugcaca

SEQ ID NO: 1018830 - RNA, 19 nt, Artificial Sequence
  Description of Artificial Sequence: Synthetic oligonucleotide
aggaacagccucaccgccu

SEQ ID NO: 1018831 - RNA, 19 nt, Artificial Sequence
  Description of Artificial Sequence: Synthetic oligonucleotide
aguucguccuggagugcag

SEQ ID NO: 1018832 - RNA, 19 nt, Artificial Sequence
  Description of Artificial Sequence: Synthetic oligonucleotide
ucccagacccaagcauagc

SEQ ID NO: 1018833 - RNA, 19 nt, Artificial Sequence
  Description of Artificial Sequence: Synthetic oligonucleotide
caagagcuccugccgucug

SEQ ID NO: 1018834 - RNA, 19 nt, Artificial Sequence
  Description of Artificial Sequence: Synthetic oligonucleotide
gaacagccucaccgccucc

SEQ ID NO: 1018835 - RNA, 19 nt, Artificial Sequence
  Description of Artificial Sequence: Synthetic oligonucleotide
aucaggggcccggggcgcc

SEQ ID NO: 1018836 - RNA, 19 nt, Artificial Sequence
  Description of Artificial Sequence: Synthetic oligonucleotide
cgccuuuuagccaggcccg

SEQ ID NO: 1018837 - RNA, 19 nt, Artificial Sequence
  Description of Artificial Sequence: Synthetic oligonucleotide
agcaaccgguacagccgcc

SEQ ID NO: 1018838 - RNA, 19 nt, Artificial Sequence
  Description of Artificial Sequence: Synthetic oligonucleotide
ggauuguucgcgcggcgga

SEQ ID NO: 1018839 - RNA, 19 nt, Artificial Sequence
  Description of Artificial Sequence: Synthetic oligonucleotide
cuugaguagcagggaacca

SEQ ID NO: 1018840 - RNA, 19 nt, Artificial Sequence
  Description of Artificial Sequence: Synthetic oligonucleotide
cagagcuuuccugaugaaa

SEQ ID NO: 1018841 - RNA, 19 nt, Artificial Sequence
  Description of Artificial Sequence: Synthetic oligonucleotide
gugcuucccgucgagcaac

SEQ ID NO: 1018842 - RNA, 19 nt, Artificial Sequence
  Description of Artificial Sequence: Synthetic oligonucleotide
gaaugcauuccggcuccga

SEQ ID NO: 1018843 - RNA, 19 nt, Artificial Sequence
  Description of Artificial Sequence: Synthetic oligonucleotide
cugaugaaagcgcgcauau

SEQ ID NO: 1018844 - RNA, 19 nt, Artificial Sequence
  Description of Artificial Sequence: Synthetic oligonucleotide
agucguccugcuggcgccg

SEQ ID NO: 1018845 - RNA, 19 nt, Artificial Sequence
  Description of Artificial Sequence: Synthetic oligonucleotide
cucucggccccgaguccgg

SEQ ID NO: 1018846 - RNA, 19 nt, Artificial Sequence
  Description of Artificial Sequence: Synthetic oligonucleotide
ggcugcggaggguuguggc

SEQ ID NO: 1018847 - RNA, 19 nt, Artificial Sequence
  Description of Artificial Sequence: Synthetic oligonucleotide
uacagccgccccgggcacg

SEQ ID NO: 1018848 - RNA, 19 nt, Artificial Sequence
  Description of Artificial Sequence: Synthetic oligonucleotide
ccagaggucugcuuagcca

SEQ ID NO: 1018849 - RNA, 19 nt, Artificial Sequence
  Description of Artificial Sequence: Synthetic oligonucleotide
ggaaucgggcgaguccucc

SEQ ID NO: 1018850 - RNA, 19 nt, Artificial Sequence
  Description of Artificial Sequence: Synthetic oligonucleotide
acccggaaucgggcgaguc

SEQ ID NO: 1018851 - RNA, 19 nt, Artificial Sequence
  Description of Artificial Sequence: Synthetic oligonucleotide
ccggcuccgagccaagccc

SEQ ID NO: 1018852 - RNA, 19 nt, Artificial Sequence
  Description of Artificial Sequence: Synthetic oligonucleotide
gcgugcagggccucuccgg

SEQ ID NO: 1018853 - RNA, 19 nt, Artificial Sequence
  Description of Artificial Sequence: Synthetic oligonucleotide
cacccugcaucaggggccc

SEQ ID NO: 1018854 - RNA, 19 nt, Artificial Sequence
  Description of Artificial Sequence: Synthetic oligonucleotide
uucgcgcggcggagugggg

SEQ ID NO: 1018855 - RNA, 19 nt, Artificial Sequence
  Description of Artificial Sequence: Synthetic oligonucleotide
ggggaaaaguccuggugua

SEQ ID NO: 1018856 - RNA, 19 nt, Artificial Sequence
  Description of Artificial Sequence: Synthetic oligonucleotide
cgcaagggugcauagccug

SEQ ID NO: 1018857 - RNA, 19 nt, Artificial Sequence
  Description of Artificial Sequence: Synthetic oligonucleotide
ccgaaccccggacacugcg

SEQ ID NO: 1018858 - RNA, 19 nt, Artificial Sequence
  Description of Artificial Sequence: Synthetic oligonucleotide
ucguccugcuggcgccgcc

SEQ ID NO: 1018859 - RNA, 19 nt, Artificial Sequence
  Description of Artificial Sequence: Synthetic oligonucleotide
ggguagggcgcagggauug

SEQ ID NO: 1018860 - RNA, 19 nt, Artificial Sequence
  Description of Artificial Sequence: Synthetic oligonucleotide
cggaaggugcagcucauac

SEQ ID NO: 1018861 - RNA, 19 nt, Artificial Sequence
  Description of Artificial Sequence: Synthetic oligonucleotide
ccuuggugcuggcugggag

SEQ ID NO: 1018862 - RNA, 19 nt, Artificial Sequence
  Description of Artificial Sequence: Synthetic oligonucleotide
gccgccagagccagguagg

SEQ ID NO: 1018863 - RNA, 19 nt, Artificial Sequence
  Description of Artificial Sequence: Synthetic oligonucleotide
gcacacccugcaucagggg

SEQ ID NO: 1018864 - RNA, 19 nt, Artificial Sequence
  Description of Artificial Sequence: Synthetic oligonucleotide
gccuauuagcuggcaggcg

SEQ ID NO: 1018865 - RNA, 19 nt, Artificial Sequence
  Description of Artificial Sequence: Synthetic oligonucleotide
cccggaaucgggcgagucc

SEQ ID NO: 1018866 - RNA, 19 nt, Artificial Sequence
  Description of Artificial Sequence: Synthetic oligonucleotide
gcuccgcccgccuuuuagc

SEQ ID NO: 1018867 - RNA, 19 nt, Artificial Sequence
  Description of Artificial Sequence: Synthetic oligonucleotide
gcuguagugugggagucga

SEQ ID NO: 1018868 - RNA, 19 nt, Artificial Sequence
  Description of Artificial Sequence: Synthetic oligonucleotide
caguaccgcagucguccug

SEQ ID NO: 1018869 - RNA, 19 nt, Artificial Sequence
  Description of Artificial Sequence: Synthetic oligonucleotide
ccuuaaaucucagaucacu

SEQ ID NO: 1018870 - RNA, 19 nt, Artificial Sequence
  Description of Artificial Sequence: Synthetic oligonucleotide
caccugggcagugcuuccc

SEQ ID NO: 1018871 - RNA, 19 nt, Artificial Sequence
  Description of Artificial Sequence: Synthetic oligonucleotide
ugcccucggacagcucccc

SEQ ID NO: 1018872 - RNA, 19 nt, Artificial Sequence
  Description of Artificial Sequence: Synthetic oligonucleotide
ggccccucgcugcucauac

SEQ ID NO: 1018873 - RNA, 19 nt, Artificial Sequence
  Description of Artificial Sequence: Synthetic oligonucleotide
cagucaggcuauaggcaaa

SEQ ID NO: 1018874 - RNA, 19 nt, Artificial Sequence
  Description of Artificial Sequence: Synthetic oligonucleotide
ggcggccacaugaccauag

SEQ ID NO: 1018875 - RNA, 19 nt, Artificial Sequence
  Description of Artificial Sequence: Synthetic oligonucleotide
gcaggcggccacaugacca

SEQ ID NO: 1018876 - RNA, 19 nt, Artificial Sequence
  Description of Artificial Sequence: Synthetic oligonucleotide
caucaggggcccggggcgc

SEQ ID NO: 1018877 - RNA, 19 nt, Artificial Sequence
  Description of Artificial Sequence: Synthetic oligonucleotide
cgcuagugaaggcaccagc

SEQ ID NO: 1018878 - RNA, 19 nt, Artificial Sequence
  Description of Artificial Sequence: Synthetic oligonucleotide
ccgcccgccuuuuagccag

SEQ ID NO: 1018879 - RNA, 19 nt, Artificial Sequence
  Description of Artificial Sequence: Synthetic oligonucleotide
ggugcauagccuggaccug

SEQ ID NO: 1018880 - RNA, 19 nt, Artificial Sequence
  Description of Artificial Sequence: Synthetic oligonucleotide
gcaaccgguacagccgccc

SEQ ID NO: 1018881 - RNA, 19 nt, Artificial Sequence
  Description of Artificial Sequence: Synthetic oligonucleotide
gcuuaguccugcagcugcc

SEQ ID NO: 1018882 - RNA, 19 nt, Artificial Sequence
  Description of Artificial Sequence: Synthetic oligonucleotide
caguaccgcaggguugcug

SEQ ID NO: 1018883 - RNA, 19 nt, Artificial Sequence
  Description of Artificial Sequence: Synthetic oligonucleotide
gugaagacgaaggcacagu

SEQ ID NO: 1018884 - RNA, 19 nt, Artificial Sequence
  Description of Artificial Sequence: Synthetic oligonucleotide
ggcgaguccuccaguccgg

SEQ ID NO: 1018885 - RNA, 19 nt, Artificial Sequence
  Description of Artificial Sequence: Synthetic oligonucleotide
guacagccgccccgggcac

SEQ ID NO: 1018886 - RNA, 19 nt, Artificial Sequence
  Description of Artificial Sequence: Synthetic oligonucleotide
ggggauagcccuucugggu

SEQ ID NO: 1018887 - RNA, 19 nt, Artificial Sequence
  Description of Artificial Sequence: Synthetic oligonucleotide
cacaucggccacgagggua

SEQ ID NO: 1018888 - RNA, 19 nt, Artificial Sequence
  Description of Artificial Sequence: Synthetic oligonucleotide
guccggcuuccucugaggu

SEQ ID NO: 1018889 - RNA, 19 nt, Artificial Sequence
  Description of Artificial Sequence: Synthetic oligonucleotide
guggguguacccugucccu

SEQ ID NO: 1018890 - RNA, 19 nt, Artificial Sequence
  Description of Artificial Sequence: Synthetic oligonucleotide
cauagcugacacuguggau

SEQ ID NO: 1018891 - RNA, 19 nt, Artificial Sequence
  Description of Artificial Sequence: Synthetic oligonucleotide
auagcccuucugggugcag

SEQ ID NO: 1018892 - RNA, 19 nt, Artificial Sequence
  Description of Artificial Sequence: Synthetic oligonucleotide
ccagaacgucauaccgagc

SEQ ID NO: 1018893 - RNA, 19 nt, Artificial Sequence
  Description of Artificial Sequence: Synthetic oligonucleotide
gggcgcagggauuguucgc

SEQ ID NO: 1018894 - RNA, 19 nt, Artificial Sequence
  Description of Artificial Sequence: Synthetic oligonucleotide
gcauauucggaggugcccu

SEQ ID NO: 1018895 - RNA, 19 nt, Artificial Sequence
  Description of Artificial Sequence: Synthetic oligonucleotide
cgcgcauauucggaggugc

SEQ ID NO: 1018896 - RNA, 19 nt, Artificial Sequence
  Description of Artificial Sequence: Synthetic oligonucleotide
ucccaccugggcagugcuu

SEQ ID NO: 1018897 - RNA, 19 nt, Artificial Sequence
  Description of Artificial Sequence: Synthetic oligonucleotide
ggcgcgcagcgugucaucc

SEQ ID NO: 1018898 - RNA, 19 nt, Artificial Sequence
  Description of Artificial Sequence: Synthetic oligonucleotide
cagcgcugaaaucuccgcu

SEQ ID NO: 1018899 - RNA, 19 nt, Artificial Sequence
  Description of Artificial Sequence: Synthetic oligonucleotide
cgcgcagcgugucauccgg

SEQ ID NO: 1018900 - RNA, 19 nt, Artificial Sequence
  Description of Artificial Sequence: Synthetic oligonucleotide
ucucggccccgaguccggc

SEQ ID NO: 1018901 - RNA, 19 nt, Artificial Sequence
  Description of Artificial Sequence: Synthetic oligonucleotide
caugccccguagccucuuc

SEQ ID NO: 1018902 - RNA, 19 nt, Artificial Sequence
  Description of Artificial Sequence: Synthetic oligonucleotide
cgcauauucggaggugccc

SEQ ID NO: 1018903 - RNA, 19 nt, Artificial Sequence
  Description of Artificial Sequence: Synthetic oligonucleotide
cccucgcugcucauacaag

SEQ ID NO: 1018904 - RNA, 19 nt, Artificial Sequence
  Description of Artificial Sequence: Synthetic oligonucleotide
cgucgagcaaccgguacag

SEQ ID NO: 1018905 - RNA, 19 nt, Artificial Sequence
  Description of Artificial Sequence: Synthetic oligonucleotide
gcgcauauucggaggugcc

SEQ ID NO: 1018906 - RNA, 19 nt, Artificial Sequence
  Description of Artificial Sequence: Synthetic oligonucleotide
gguguacccugucccugca

SEQ ID NO: 1018907 - RNA, 19 nt, Artificial Sequence
  Description of Artificial Sequence: Synthetic oligonucleotide
uccucucgcaagggugcau

SEQ ID NO: 1018908 - RNA, 19 nt, Artificial Sequence
  Description of Artificial Sequence: Synthetic oligonucleotide
ucgugaccaucuggggaua

SEQ ID NO: 1018909 - RNA, 19 nt, Artificial Sequence
  Description of Artificial Sequence: Synthetic oligonucleotide
cauaccgagcagcgccgaa

SEQ ID NO: 1018910 - RNA, 19 nt, Artificial Sequence
  Description of Artificial Sequence: Synthetic oligonucleotide
ccaacucucgagccaccuc

SEQ ID NO: 1018911 - RNA, 19 nt, Artificial Sequence
  Description of Artificial Sequence: Synthetic oligonucleotide
gccucccuaccaacucucg

SEQ ID NO: 1018912 - RNA, 19 nt, Artificial Sequence
  Description of Artificial Sequence: Synthetic oligonucleotide
ccaggcguggcaggggccc

SEQ ID NO: 1018913 - RNA, 19 nt, Artificial Sequence
  Description of Artificial Sequence: Synthetic oligonucleotide
cgaaccccggacacugcgc

SEQ ID NO: 1018914 - RNA, 19 nt, Artificial Sequence
  Description of Artificial Sequence: Synthetic oligonucleotide
gcgcagggauuguucgcgc

SEQ ID NO: 1018915 - RNA, 19 nt, Artificial Sequence
  Description of Artificial Sequence: Synthetic oligonucleotide
gggguuggccaaguaggca

SEQ ID NO: 1018916 - RNA, 19 nt, Artificial Sequence
  Description of Artificial Sequence: Synthetic oligonucleotide
cccgucgagcaaccgguac

SEQ ID NO: 1018917 - RNA, 19 nt, Artificial Sequence
  Description of Artificial Sequence: Synthetic oligonucleotide
ccgucgagcaaccgguaca

SEQ ID NO: 1018918 - RNA, 19 nt, Artificial Sequence
  Description of Artificial Sequence: Synthetic oligonucleotide
cccagacccaagcauagcu

SEQ ID NO: 1018919 - RNA, 19 nt, Artificial Sequence
  Description of Artificial Sequence: Synthetic oligonucleotide
caucggccacgaggguacc

SEQ ID NO: 1018920 - RNA, 19 nt, Artificial Sequence
  Description of Artificial Sequence: Synthetic oligonucleotide
cccgccuuuuagccaggcc

SEQ ID NO: 1018921 - RNA, 19 nt, Artificial Sequence
  Description of Artificial Sequence: Synthetic oligonucleotide
ccugaugaaagcgcgcaua

SEQ ID NO: 1018922 - RNA, 19 nt, Artificial Sequence
  Description of Artificial Sequence: Synthetic oligonucleotide
cagcgccgaaccccggaca

SEQ ID NO: 1018923 - RNA, 19 nt, Artificial Sequence
  Description of Artificial Sequence: Synthetic oligonucleotide
accgugcacaagagcuccu

SEQ ID NO: 1018924 - RNA, 19 nt, Artificial Sequence
  Description of Artificial Sequence: Synthetic oligonucleotide
ccgcggggaaaaguccugg

SEQ ID NO: 1018925 - RNA, 19 nt, Artificial Sequence
  Description of Artificial Sequence: Synthetic oligonucleotide
gcuucccgucgagcaaccg

SEQ ID NO: 1018926 - RNA, 19 nt, Artificial Sequence
  Description of Artificial Sequence: Synthetic oligonucleotide
cugcggaggguuguggccu

SEQ ID NO: 1018927 - RNA, 19 nt, Artificial Sequence
  Description of Artificial Sequence: Synthetic oligonucleotide
ccuccaguccggcuuccuc

SEQ ID NO: 1018928 - RNA, 19 nt, Artificial Sequence
  Description of Artificial Sequence: Synthetic oligonucleotide
caccaggccucgagaggga

SEQ ID NO: 1018929 - RNA, 19 nt, Artificial Sequence
  Description of Artificial Sequence: Synthetic oligonucleotide
caggccucgagagggacau

SEQ ID NO: 1018930 - RNA, 19 nt, Artificial Sequence
  Description of Artificial Sequence: Synthetic oligonucleotide
gucguccugcuggcgccgc

SEQ ID NO: 1018931 - RNA, 19 nt, Artificial Sequence
  Description of Artificial Sequence: Synthetic oligonucleotide
gucggccgcgcagcagcag

SEQ ID NO: 1018932 - RNA, 19 nt, Artificial Sequence
  Description of Artificial Sequence: Synthetic oligonucleotide
gccucgagagggacauggc

SEQ ID NO: 1018933 - RNA, 19 nt, Artificial Sequence
  Description of Artificial Sequence: Synthetic oligonucleotide
ccgcagucguccugcuggc

SEQ ID NO: 1018934 - RNA, 19 nt, Artificial Sequence
  Description of Artificial Sequence: Synthetic oligonucleotide
ccucccuaccaacucucga

SEQ ID NO: 1018935 - RNA, 19 nt, Artificial Sequence
  Description of Artificial Sequence: Synthetic oligonucleotide
caggcggccacaugaccau

SEQ ID NO: 1018936 - RNA, 19 nt, Artificial Sequence
  Description of Artificial Sequence: Synthetic oligonucleotide
cuccucucgcaagggugca

SEQ ID NO: 1018937 - RNA, 19 nt, Artificial Sequence
  Description of Artificial Sequence: Synthetic oligonucleotide
ccgugcacaagagcuccug

SEQ ID NO: 1018938 - RNA, 19 nt, Artificial Sequence
  Description of Artificial Sequence: Synthetic oligonucleotide
cacccacccucagugcuaa

SEQ ID NO: 1018939 - RNA, 19 nt, Artificial Sequence
  Description of Artificial Sequence: Synthetic oligonucleotide
ccgugaagacgaaggcaca

SEQ ID NO: 1018940 - RNA, 19 nt, Artificial Sequence
  Description of Artificial Sequence: Synthetic oligonucleotide
cgcuccgcccgccuuuuag

SEQ ID NO: 1018941 - RNA, 19 nt, Artificial Sequence
  Description of Artificial Sequence: Synthetic oligonucleotide
cgggcgaguccuccagucc

SEQ ID NO: 1018942 - RNA, 19 nt, Artificial Sequence
  Description of Artificial Sequence: Synthetic oligonucleotide
gcgaguccuccaguccggc

SEQ ID NO: 1018943 - RNA, 19 nt, Artificial Sequence
  Description of Artificial Sequence: Synthetic oligonucleotide
gcgcgcauauucggaggug

SEQ ID NO: 1018944 - RNA, 19 nt, Artificial Sequence
  Description of Artificial Sequence: Synthetic oligonucleotide
gcagcccuuaagugugggu

SEQ ID NO: 1018945 - RNA, 19 nt, Artificial Sequence
  Description of Artificial Sequence: Synthetic oligonucleotide
cgguacagccgccccgggc

SEQ ID NO: 1018946 - RNA, 19 nt, Artificial Sequence
  Description of Artificial Sequence: Synthetic oligonucleotide
cgugaccaucuggggauag

SEQ ID NO: 1018947 - RNA, 19 nt, Artificial Sequence
  Description of Artificial Sequence: Synthetic oligonucleotide
cccgcuguagugugggagu

SEQ ID NO: 1018948 - RNA, 19 nt, Artificial Sequence
  Description of Artificial Sequence: Synthetic oligonucleotide
cacuguggauggguucugu

SEQ ID NO: 1018949 - RNA, 19 nt, Artificial Sequence
  Description of Artificial Sequence: Synthetic oligonucleotide
ccgcuguagugugggaguc

SEQ ID NO: 1018950 - RNA, 19 nt, Artificial Sequence
  Description of Artificial Sequence: Synthetic oligonucleotide
ccggaaucgggcgaguccu

SEQ ID NO: 1018951 - RNA, 19 nt, Artificial Sequence
  Description of Artificial Sequence: Synthetic oligonucleotide
ccagacccaagcauagcuu

SEQ ID NO: 1018952 - RNA, 19 nt, Artificial Sequence
  Description of Artificial Sequence: Synthetic oligonucleotide
ccagacugucccuggggcu

SEQ ID NO: 1018953 - RNA, 19 nt, Artificial Sequence
  Description of Artificial Sequence: Synthetic oligonucleotide
guagggcgcagggauuguu

SEQ ID NO: 1018954 - RNA, 19 nt, Artificial Sequence
  Description of Artificial Sequence: Synthetic oligonucleotide
cgaaugcauuccggcuccg

SEQ ID NO: 1018955 - RNA, 19 nt, Artificial Sequence
  Description of Artificial Sequence: Synthetic oligonucleotide
aggcggccacaugaccaua

SEQ ID NO: 1018956 - RNA, 19 nt, Artificial Sequence
  Description of Artificial Sequence: Synthetic oligonucleotide
cugucucaccaggccucga

SEQ ID NO: 1018957 - RNA, 19 nt, Artificial Sequence
  Description of Artificial Sequence: Synthetic oligonucleotide
gcccuuaagugugggugua

SEQ ID NO: 1018958 - RNA, 19 nt, Artificial Sequence
  Description of Artificial Sequence: Synthetic oligonucleotide
ccgguacagccgccccggg

SEQ ID NO: 1018959 - RNA, 19 nt, Artificial Sequence
  Description of Artificial Sequence: Synthetic oligonucleotide
gcgcagcgugucauccggc

SEQ ID NO: 1018960 - RNA, 19 nt, Artificial Sequence
  Description of Artificial Sequence: Synthetic oligonucleotide
gccgaaccccggacacugc

SEQ ID NO: 1018961 - RNA, 19 nt, Artificial Sequence
  Description of Artificial Sequence: Synthetic oligonucleotide
cggccgcgcagcagcagag

SEQ ID NO: 1018962 - RNA, 19 nt, Artificial Sequence
  Description of Artificial Sequence: Synthetic oligonucleotide
ccucucgcaagggugcaua

SEQ ID NO: 1018963 - RNA, 19 nt, Artificial Sequence
  Description of Artificial Sequence: Synthetic oligonucleotide
gcccgccuuuuagccaggc

SEQ ID NO: 1018964 - RNA, 19 nt, Artificial Sequence
  Description of Artificial Sequence: Synthetic oligonucleotide
gcuuggcccaugccccgua

SEQ ID NO: 1018965 - RNA, 19 nt, Artificial Sequence
  Description of Artificial Sequence: Synthetic oligonucleotide
cccggcaggucuggagcac

SEQ ID NO: 1018966 - RNA, 19 nt, Artificial Sequence
  Description of Artificial Sequence: Synthetic oligonucleotide
ggucggccgcgcagcagca

SEQ ID NO: 1018967 - RNA, 19 nt, Artificial Sequence
  Description of Artificial Sequence: Synthetic oligonucleotide
cgcagucguccugcuggcg

SEQ ID NO: 1018968 - RNA, 19 nt, Artificial Sequence
  Description of Artificial Sequence: Synthetic oligonucleotide
acgcuccgcccgccuuuua

SEQ ID NO: 1018969 - RNA, 19 nt, Artificial Sequence
  Description of Artificial Sequence: Synthetic oligonucleotide
ccccgcggggaaaaguccu

SEQ ID NO: 1018970 - RNA, 19 nt, Artificial Sequence
  Description of Artificial Sequence: Synthetic oligonucleotide
gcggucggccgcgcagcag

SEQ ID NO: 1018971 - RNA, 19 nt, Artificial Sequence
  Description of Artificial Sequence: Synthetic oligonucleotide
cggaaucgggcgaguccuc

SEQ ID NO: 1018972 - RNA, 19 nt, Artificial Sequence
  Description of Artificial Sequence: Synthetic oligonucleotide
gcccaguaccgcagucguc

SEQ ID NO: 1018973 - RNA, 19 nt, Artificial Sequence
  Description of Artificial Sequence: Synthetic oligonucleotide
ccaguccggcuuccucuga

SEQ ID NO: 1018974 - RNA, 19 nt, Artificial Sequence
  Description of Artificial Sequence: Synthetic oligonucleotide
gguagggcgcagggauugu

SEQ ID NO: 1018975 - RNA, 19 nt, Artificial Sequence
  Description of Artificial Sequence: Synthetic oligonucleotide
ccggcaggucuggagcaca

SEQ ID NO: 1018976 - RNA, 19 nt, Artificial Sequence
  Description of Artificial Sequence: Synthetic oligonucleotide
ccaguaccgcagucguccu

SEQ ID NO: 1018977 - RNA, 19 nt, Artificial Sequence
  Description of Artificial Sequence: Synthetic oligonucleotide
gcacaucggccacgagggu

SEQ ID NO: 1018978 - RNA, 19 nt, Artificial Sequence
  Description of Artificial Sequence: Synthetic oligonucleotide
  modified_base (17)..(17): a, c, u, g, unknown or other
ccgcaggguugcuggancu

SEQ ID NO: 1018979 - RNA, 19 nt, Artificial Sequence
  Description of Artificial Sequence: Synthetic oligonucleotide
cgucugcucagcgcugaaa

SEQ ID NO: 1018980 - RNA, 19 nt, Artificial Sequence
  Description of Artificial Sequence: Synthetic oligonucleotide
cgcggggaaaaguccuggu

SEQ ID NO: 1018981 - RNA, 19 nt, Artificial Sequence
  Description of Artificial Sequence: Synthetic oligonucleotide
gggguagggcgcagggauu

SEQ ID NO: 1018982 - RNA, 19 nt, Artificial Sequence
  Description of Artificial Sequence: Synthetic oligonucleotide
ccgucugcucagcgcugaa

SEQ ID NO: 1018983 - RNA, 19 nt, Artificial Sequence
  Description of Artificial Sequence: Synthetic oligonucleotide
cacccggaaucgggcgagu

SEQ ID NO: 1018984 - RNA, 19 nt, Artificial Sequence
  Description of Artificial Sequence: Synthetic oligonucleotide
cacgcuccgcccgccuuuu

SEQ ID NO: 1018985 - RNA, 19 nt, Artificial Sequence
  Description of Artificial Sequence: Synthetic oligonucleotide
ccggaaggugcagcucaua

SEQ ID NO: 1018986 - RNA, 19 nt, Artificial Sequence
  Description of Artificial Sequence: Synthetic oligonucleotide
gcgccgaaccccggacacu

SEQ ID NO: 1018987 - RNA, 19 nt, Artificial Sequence
  Description of Artificial Sequence: Synthetic oligonucleotide
cgccuccucucgcaagggu

SEQ ID NO: 1018988 - RNA, 19 nt, Artificial Sequence
  Description of Artificial Sequence: Synthetic oligonucleotide
ccaguaccgcaggguugcu

SEQ ID NO: 1018989 - RNA, 19 nt, Artificial Sequence
  Description of Artificial Sequence: Synthetic oligonucleotide
cgagagggacauggccuuu

SEQ ID NO: 1018990 - RNA, 19 nt, Artificial Sequence
  Description of Artificial Sequence: Synthetic oligonucleotide
ccgccagggcgcgcagcgu

SEQ ID NO: 1018991 - RNA, 19 nt, Artificial Sequence
  Description of Artificial Sequence: Synthetic oligonucleotide
  modified_base (1)..(1): a, c, u, g, unknown or other
ncuugaguagcagggaacc

SEQ ID NO: 1018992 - RNA, 19 nt, Artificial Sequence
  Description of Artificial Sequence: Synthetic oligonucleotide
uaugaauguaaucagacca

SEQ ID NO: 1018993 - RNA, 19 nt, Artificial Sequence
  Description of Artificial Sequence: Synthetic oligonucleotide
uauggaagcggccauaccg

SEQ ID NO: 1018994 - RNA, 19 nt, Artificial Sequence
  Description of Artificial Sequence: Synthetic oligonucleotide
ucugguguaacauucgagg

SEQ ID NO: 1018995 - RNA, 19 nt, Artificial Sequence
  Description of Artificial Sequence: Synthetic oligonucleotide
aaagcgacgcucuucuggc

SEQ ID NO: 1018996 - RNA, 19 nt, Artificial Sequence
  Description of Artificial Sequence: Synthetic oligonucleotide
uagaaggucauauacaacu

SEQ ID NO: 1018997 - RNA, 19 nt, Artificial Sequence
  Description of Artificial Sequence: Synthetic oligonucleotide
guauacuuagcccugauug

SEQ ID NO: 1018998 - RNA, 19 nt, Artificial Sequence
  Description of Artificial Sequence: Synthetic oligonucleotide
gauuugaccaucuuugcug

SEQ ID NO: 1018999 - RNA, 19 nt, Artificial Sequence
  Description of Artificial Sequence: Synthetic oligonucleotide
ugauuggccaaucuaaccc

SEQ ID NO: 1019000 - RNA, 19 nt, Artificial Sequence
  Description of Artificial Sequence: Synthetic oligonucleotide
uugaauuuauggaagcggc

SEQ ID NO: 1019001 - RNA, 19 nt, Artificial Sequence
  Description of Artificial Sequence: Synthetic oligonucleotide
ucuuccuaaguccuagccg

SEQ ID NO: 1019002 - RNA, 19 nt, Artificial Sequence
  Description of Artificial Sequence: Synthetic oligonucleotide
cugucaauaaaggugaugc

SEQ ID NO: 1019003 - RNA, 19 nt, Artificial Sequence
  Description of Artificial Sequence: Synthetic oligonucleotide
ugagaguucacccucuaca

SEQ ID NO: 1019004 - RNA, 19 nt, Artificial Sequence
  Description of Artificial Sequence: Synthetic oligonucleotide
aagacgcagguucccaucc

SEQ ID NO: 1019005 - RNA, 19 nt, Artificial Sequence
  Description of Artificial Sequence: Synthetic oligonucleotide
uaacauucgaggaaagcug

SEQ ID NO: 1019006 - RNA, 19 nt, Artificial Sequence
  Description of Artificial Sequence: Synthetic oligonucleotide
uuuugaauuuauggaagcg

SEQ ID NO: 1019007 - RNA, 19 nt, Artificial Sequence
  Description of Artificial Sequence: Synthetic oligonucleotide
agggaucuacacuaggagc

SEQ ID NO: 1019008 - RNA, 19 nt, Artificial Sequence
  Description of Artificial Sequence: Synthetic oligonucleotide
gauaugaauguaaucagac

SEQ ID NO: 1019009 - RNA, 19 nt, Artificial Sequence
  Description of Artificial Sequence: Synthetic oligonucleotide
cuagagauagaaauccaag

SEQ ID NO: 1019010 - RNA, 19 nt, Artificial Sequence
  Description of Artificial Sequence: Synthetic oligonucleotide
aaaagcgucugauauccca

SEQ ID NO: 1019011 - RNA, 19 nt, Artificial Sequence
  Description of Artificial Sequence: Synthetic oligonucleotide
acuacuuugccaguagagc

SEQ ID NO: 1019012 - RNA, 19 nt, Artificial Sequence
  Description of Artificial Sequence: Synthetic oligonucleotide
ugagauaccgggcaucacc

SEQ ID NO: 1019013 - RNA, 19 nt, Artificial Sequence
  Description of Artificial Sequence: Synthetic oligonucleotide
gagccaacaccuaacaucg

SEQ ID NO: 1019014 - RNA, 19 nt, Artificial Sequence
  Description of Artificial Sequence: Synthetic oligonucleotide
ugagacaucacucgagacu

SEQ ID NO: 1019015 - RNA, 19 nt, Artificial Sequence
  Description of Artificial Sequence: Synthetic oligonucleotide
aacgccacugcauucacgu

SEQ ID NO: 1019016 - RNA, 19 nt, Artificial Sequence
  Description of Artificial Sequence: Synthetic oligonucleotide
caaucuaacccucagugug

SEQ ID NO: 1019017 - RNA, 19 nt, Artificial Sequence
  Description of Artificial Sequence: Synthetic oligonucleotide
aagcuuaggucauugggca

SEQ ID NO: 1019018 - RNA, 19 nt, Artificial Sequence
  Description of Artificial Sequence: Synthetic oligonucleotide
uaacaucggaacaugauua

SEQ ID NO: 1019019 - RNA, 19 nt, Artificial Sequence
  Description of Artificial Sequence: Synthetic oligonucleotide
cagacaugaagauuugacc

SEQ ID NO: 1019020 - RNA, 19 nt, Artificial Sequence
  Description of Artificial Sequence: Synthetic oligonucleotide
gaagcggccauaccgacag

SEQ ID NO: 1019021 - RNA, 19 nt, Artificial Sequence
  Description of Artificial Sequence: Synthetic oligonucleotide
ugaauuuauggaagcggcc

SEQ ID NO: 1019022 - RNA, 19 nt, Artificial Sequence
  Description of Artificial Sequence: Synthetic oligonucleotide
agcuuaugucagcaaacgc

SEQ ID NO: 1019023 - RNA, 19 nt, Artificial Sequence
  Description of Artificial Sequence: Synthetic oligonucleotide
gaagacagcaaagcgacgc

SEQ ID NO: 1019024 - RNA, 19 nt, Artificial Sequence
  Description of Artificial Sequence: Synthetic oligonucleotide
auacuuagcccugauuggc

SEQ ID NO: 1019025 - RNA, 19 nt, Artificial Sequence
  Description of Artificial Sequence: Synthetic oligonucleotide
gaagcuuaggucauugggc

SEQ ID NO: 1019026 - RNA, 19 nt, Artificial Sequence
  Description of Artificial Sequence: Synthetic oligonucleotide
auccucgugagacucaauc

SEQ ID NO: 1019027 - RNA, 19 nt, Artificial Sequence
  Description of Artificial Sequence: Synthetic oligonucleotide
cacuuagaaggucauauac

SEQ ID NO: 1019028 - RNA, 19 nt, Artificial Sequence
  Description of Artificial Sequence: Synthetic oligonucleotide
aggccaguauacuuagccc

SEQ ID NO: 1019029 - RNA, 19 nt, Artificial Sequence
  Description of Artificial Sequence: Synthetic oligonucleotide
cuuagaaggucauauacaa

SEQ ID NO: 1019030 - RNA, 19 nt, Artificial Sequence
  Description of Artificial Sequence: Synthetic oligonucleotide
uuguaucuaucuccaaggc

SEQ ID NO: 1019031 - RNA, 19 nt, Artificial Sequence
  Description of Artificial Sequence: Synthetic oligonucleotide
gagacaucacucgagacug

SEQ ID NO: 1019032 - RNA, 19 nt, Artificial Sequence
  Description of Artificial Sequence: Synthetic oligonucleotide
ugugaaugcgugaggaagu

SEQ ID NO: 1019033 - RNA, 19 nt, Artificial Sequence
  Description of Artificial Sequence: Synthetic oligonucleotide
cuaaugggucucuucagag

SEQ ID NO: 1019034 - RNA, 19 nt, Artificial Sequence
  Description of Artificial Sequence: Synthetic oligonucleotide
caaagcgacgcucuucugg

SEQ ID NO: 1019035 - RNA, 19 nt, Artificial Sequence
  Description of Artificial Sequence: Synthetic oligonucleotide
aacuacuuugccaguagag

SEQ ID NO: 1019036 - RNA, 19 nt, Artificial Sequence
  Description of Artificial Sequence: Synthetic oligonucleotide
gugagacucaaucugaaga

SEQ ID NO: 1019037 - RNA, 19 nt, Artificial Sequence
  Description of Artificial Sequence: Synthetic oligonucleotide
cucaaucugaagaguacgc

SEQ ID NO: 1019038 - RNA, 19 nt, Artificial Sequence
  Description of Artificial Sequence: Synthetic oligonucleotide
cauaccgacagucguacag

SEQ ID NO: 1019039 - RNA, 19 nt, Artificial Sequence
  Description of Artificial Sequence: Synthetic oligonucleotide
cagauaacggaugugcugc

SEQ ID NO: 1019040 - RNA, 19 nt, Artificial Sequence
  Description of Artificial Sequence: Synthetic oligonucleotide
ugggcaagaagugagacau

SEQ ID NO: 1019041 - RNA, 19 nt, Artificial Sequence
  Description of Artificial Sequence: Synthetic oligonucleotide
caguagaauauggugagag

SEQ ID NO: 1019042 - RNA, 19 nt, Artificial Sequence
  Description of Artificial Sequence: Synthetic oligonucleotide
gaauuuauggaagcggcca

SEQ ID NO: 1019043 - RNA, 19 nt, Artificial Sequence
  Description of Artificial Sequence: Synthetic oligonucleotide
ugucaauaaaggugaugcc

SEQ ID NO: 1019044 - RNA, 19 nt, Artificial Sequence
  Description of Artificial Sequence: Synthetic oligonucleotide
uguaacauucgaggaaagc

SEQ ID NO: 1019045 - RNA, 19 nt, Artificial Sequence
  Description of Artificial Sequence: Synthetic oligonucleotide
auauugcagauaugaaugu

SEQ ID NO: 1019046 - RNA, 19 nt, Artificial Sequence
  Description of Artificial Sequence: Synthetic oligonucleotide
ucccaaaguuuaauggucu

SEQ ID NO: 1019047 - RNA, 19 nt, Artificial Sequence
  Description of Artificial Sequence: Synthetic oligonucleotide
aaggggugccaacugacgu

SEQ ID NO: 1019048 - RNA, 19 nt, Artificial Sequence
  Description of Artificial Sequence: Synthetic oligonucleotide
ucaaaggggugccaacuga

SEQ ID NO: 1019049 - RNA, 19 nt, Artificial Sequence
  Description of Artificial Sequence: Synthetic oligonucleotide
agugagacaucacucgaga

SEQ ID NO: 1019050 - RNA, 19 nt, Artificial Sequence
  Description of Artificial Sequence: Synthetic oligonucleotide
aguacgccgguuuuguucu

SEQ ID NO: 1019051 - RNA, 19 nt, Artificial Sequence
  Description of Artificial Sequence: Synthetic oligonucleotide
auugucugaucuuggcaag

SEQ ID NO: 1019052 - RNA, 19 nt, Artificial Sequence
  Description of Artificial Sequence: Synthetic oligonucleotide
agauaacggaugugcugcc

SEQ ID NO: 1019053 - RNA, 19 nt, Artificial Sequence
  Description of Artificial Sequence: Synthetic oligonucleotide
cugaggugaggaaaaggcc

SEQ ID NO: 1019054 - RNA, 19 nt, Artificial Sequence
  Description of Artificial Sequence: Synthetic oligonucleotide
uacuucucgcccaucugag

SEQ ID NO: 1019055 - RNA, 19 nt, Artificial Sequence
  Description of Artificial Sequence: Synthetic oligonucleotide
ucggcagcggaugagagug

SEQ ID NO: 1019056 - RNA, 19 nt, Artificial Sequence
  Description of Artificial Sequence: Synthetic oligonucleotide
ugguguaacauucgaggaa

SEQ ID NO: 1019057 - RNA, 19 nt, Artificial Sequence
  Description of Artificial Sequence: Synthetic oligonucleotide
gagaguagguaucagugaa

SEQ ID NO: 1019058 - RNA, 19 nt, Artificial Sequence
  Description of Artificial Sequence: Synthetic oligonucleotide
gaaugcgugaggaagucac

SEQ ID NO: 1019059 - RNA, 19 nt, Artificial Sequence
  Description of Artificial Sequence: Synthetic oligonucleotide
acaucuacugaggugagga

SEQ ID NO: 1019060 - RNA, 19 nt, Artificial Sequence
  Description of Artificial Sequence: Synthetic oligonucleotide
cuacuuugccaguagagca

SEQ ID NO: 1019061 - RNA, 19 nt, Artificial Sequence
  Description of Artificial Sequence: Synthetic oligonucleotide
auuguauuccagcucccca

SEQ ID NO: 1019062 - RNA, 19 nt, Artificial Sequence
  Description of Artificial Sequence: Synthetic oligonucleotide
gaagugggagcacagggga

SEQ ID NO: 1019063 - RNA, 19 nt, Artificial Sequence
  Description of Artificial Sequence: Synthetic oligonucleotide
auagucccaguuuugcugu

SEQ ID NO: 1019064 - RNA, 19 nt, Artificial Sequence
  Description of Artificial Sequence: Synthetic oligonucleotide
gggucauccucucucaugg

SEQ ID NO: 1019065 - RNA, 19 nt, Artificial Sequence
  Description of Artificial Sequence: Synthetic oligonucleotide
augaauguaaucagaccag

SEQ ID NO: 1019066 - RNA, 19 nt, Artificial Sequence
  Description of Artificial Sequence: Synthetic oligonucleotide
aguagaauauggugagagu

SEQ ID NO: 1019067 - RNA, 19 nt, Artificial Sequence
  Description of Artificial Sequence: Synthetic oligonucleotide
uacuuagcccugauuggcc

SEQ ID NO: 1019068 - RNA, 19 nt, Artificial Sequence
  Description of Artificial Sequence: Synthetic oligonucleotide
gcuuaugucagcaaacgcc

SEQ ID NO: 1019069 - RNA, 19 nt, Artificial Sequence
  Description of Artificial Sequence: Synthetic oligonucleotide
agaauauggugagaguuca

SEQ ID NO: 1019070 - RNA, 19 nt, Artificial Sequence
  Description of Artificial Sequence: Synthetic oligonucleotide
uugcagauaugaauguaau

SEQ ID NO: 1019071 - RNA, 19 nt, Artificial Sequence
  Description of Artificial Sequence: Synthetic oligonucleotide
aagacagcaaagcgacgcu

SEQ ID NO: 1019072 - RNA, 19 nt, Artificial Sequence
  Description of Artificial Sequence: Synthetic oligonucleotide
acaugaagauuugaccauc

SEQ ID NO: 1019073 - RNA, 19 nt, Artificial Sequence
  Description of Artificial Sequence: Synthetic oligonucleotide
gugugaaugcgugaggaag

SEQ ID NO: 1019074 - RNA, 19 nt, Artificial Sequence
  Description of Artificial Sequence: Synthetic oligonucleotide
gccaaucuaacccucagug

SEQ ID NO: 1019075 - RNA, 19 nt, Artificial Sequence
  Description of Artificial Sequence: Synthetic oligonucleotide
auucgaggaaagcugugcu

SEQ ID NO: 1019076 - RNA, 19 nt, Artificial Sequence
  Description of Artificial Sequence: Synthetic oligonucleotide
uuuauggaagcggccauac

SEQ ID NO: 1019077 - RNA, 19 nt, Artificial Sequence
  Description of Artificial Sequence: Synthetic oligonucleotide
ucgguaggucaucaaggag

SEQ ID NO: 1019078 - RNA, 19 nt, Artificial Sequence
  Description of Artificial Sequence: Synthetic oligonucleotide
aaaggggugccaacugacg

SEQ ID NO: 1019079 - RNA, 19 nt, Artificial Sequence
  Description of Artificial Sequence: Synthetic oligonucleotide
ugcagauaugaauguaauc

SEQ ID NO: 1019080 - RNA, 19 nt, Artificial Sequence
  Description of Artificial Sequence: Synthetic oligonucleotide
ucucauggugcgucggucc

SEQ ID NO: 1019081 - RNA, 19 nt, Artificial Sequence
  Description of Artificial Sequence: Synthetic oligonucleotide
gguggucacaucuacugag

SEQ ID NO: 1019082 - RNA, 19 nt, Artificial Sequence
  Description of Artificial Sequence: Synthetic oligonucleotide
ggaguuggagaugagauac

SEQ ID NO: 1019083 - RNA, 19 nt, Artificial Sequence
  Description of Artificial Sequence: Synthetic oligonucleotide
cagggaucuacacuaggag

SEQ ID NO: 1019084 - RNA, 19 nt, Artificial Sequence
  Description of Artificial Sequence: Synthetic oligonucleotide
cuggcuagagauagaaauc

SEQ ID NO: 1019085 - RNA, 19 nt, Artificial Sequence
  Description of Artificial Sequence: Synthetic oligonucleotide
gaucuuggcaagcagacau

SEQ ID NO: 1019086 - RNA, 19 nt, Artificial Sequence
  Description of Artificial Sequence: Synthetic oligonucleotide
aagcgacgcucuucuggcc

SEQ ID NO: 1019087 - RNA, 19 nt, Artificial Sequence
  Description of Artificial Sequence: Synthetic oligonucleotide
gaguacgccgguuuuguuc

SEQ ID NO: 1019088 - RNA, 19 nt, Artificial Sequence
  Description of Artificial Sequence: Synthetic oligonucleotide
uggcgugaugcuuccaugc

SEQ ID NO: 1019089 - RNA, 19 nt, Artificial Sequence
  Description of Artificial Sequence: Synthetic oligonucleotide
cacgucauccucgugagac

SEQ ID NO: 1019090 - RNA, 19 nt, Artificial Sequence
  Description of Artificial Sequence: Synthetic oligonucleotide
agggcauugcuaauggguc

SEQ ID NO: 1019091 - RNA, 19 nt, Artificial Sequence
  Description of Artificial Sequence: Synthetic oligonucleotide
cacuuugcagauggcaucg

SEQ ID NO: 1019092 - RNA, 19 nt, Artificial Sequence
  Description of Artificial Sequence: Synthetic oligonucleotide
agauaugaauguaaucaga

SEQ ID NO: 1019093 - RNA, 19 nt, Artificial Sequence
  Description of Artificial Sequence: Synthetic oligonucleotide
aagaguacgccgguuuugu

SEQ ID NO: 1019094 - RNA, 19 nt, Artificial Sequence
  Description of Artificial Sequence: Synthetic oligonucleotide
aaucuaacccucaguguga

SEQ ID NO: 1019095 - RNA, 19 nt, Artificial Sequence
  Description of Artificial Sequence: Synthetic oligonucleotide
ucuacacuaggagccaaca

SEQ ID NO: 1019096 - RNA, 19 nt, Artificial Sequence
  Description of Artificial Sequence: Synthetic oligonucleotide
guaacauucgaggaaagcu

SEQ ID NO: 1019097 - RNA, 19 nt, Artificial Sequence
  Description of Artificial Sequence: Synthetic oligonucleotide
caucggaacaugauuaaaa

SEQ ID NO: 1019098 - RNA, 19 nt, Artificial Sequence
  Description of Artificial Sequence: Synthetic oligonucleotide
uccuccuaguacuucucgc

SEQ ID NO: 1019099 - RNA, 19 nt, Artificial Sequence
  Description of Artificial Sequence: Synthetic oligonucleotide
acuaggagccaacaccuaa

SEQ ID NO: 1019100 - RNA, 19 nt, Artificial Sequence
  Description of Artificial Sequence: Synthetic oligonucleotide
gggaucuacacuaggagcc

SEQ ID NO: 1019101 - RNA, 19 nt, Artificial Sequence
  Description of Artificial Sequence: Synthetic oligonucleotide
ccagagaacaggauuuggg

SEQ ID NO: 1019102 - RNA, 19 nt, Artificial Sequence
  Description of Artificial Sequence: Synthetic oligonucleotide
cagagaacaggauuuggga

SEQ ID NO: 1019103 - RNA, 19 nt, Artificial Sequence
  Description of Artificial Sequence: Synthetic oligonucleotide
uggaaaagcgucugauauc

SEQ ID NO: 1019104 - RNA, 19 nt, Artificial Sequence
  Description of Artificial Sequence: Synthetic oligonucleotide
uucucggcuggaaaagcgu

SEQ ID NO: 1019105 - RNA, 19 nt, Artificial Sequence
  Description of Artificial Sequence: Synthetic oligonucleotide
uuauggaagcggccauacc

SEQ ID NO: 1019106 - RNA, 19 nt, Artificial Sequence
  Description of Artificial Sequence: Synthetic oligonucleotide
agugaagcuuaggucauug

SEQ ID NO: 1019107 - RNA, 19 nt, Artificial Sequence
  Description of Artificial Sequence: Synthetic oligonucleotide
ucuucaaaggggugccaac

SEQ ID NO: 1019108 - RNA, 19 nt, Artificial Sequence
  Description of Artificial Sequence: Synthetic oligonucleotide
cuccuaguacuucucgccc

SEQ ID NO: 1019109 - RNA, 19 nt, Artificial Sequence
  Description of Artificial Sequence: Synthetic oligonucleotide
gugaagcuuaggucauugg

SEQ ID NO: 1019110 - RNA, 19 nt, Artificial Sequence
  Description of Artificial Sequence: Synthetic oligonucleotide
ucagugaagcuuaggucau

SEQ ID NO: 1019111 - RNA, 19 nt, Artificial Sequence
  Description of Artificial Sequence: Synthetic oligonucleotide
agguggguuguaucuaucu

SEQ ID NO: 1019112 - RNA, 19 nt, Artificial Sequence
  Description of Artificial Sequence: Synthetic oligonucleotide
uccuaguacuucucgccca

SEQ ID NO: 1019113 - RNA, 19 nt, Artificial Sequence
  Description of Artificial Sequence: Synthetic oligonucleotide
acgucacgcacacaggccu

SEQ ID NO: 1019114 - RNA, 19 nt, Artificial Sequence
  Description of Artificial Sequence: Synthetic oligonucleotide
gacucaaucugaagaguac

SEQ ID NO: 1019115 - RNA, 19 nt, Artificial Sequence
  Description of Artificial Sequence: Synthetic oligonucleotide
ugaagaguacgccgguuuu

SEQ ID NO: 1019116 - RNA, 19 nt, Artificial Sequence
  Description of Artificial Sequence: Synthetic oligonucleotide
acaggggacauuucucaga

SEQ ID NO: 1019117 - RNA, 19 nt, Artificial Sequence
  Description of Artificial Sequence: Synthetic oligonucleotide
acuuagcccugauuggcca

SEQ ID NO: 1019118 - RNA, 19 nt, Artificial Sequence
  Description of Artificial Sequence: Synthetic oligonucleotide
uuugccaguagagcagcca

SEQ ID NO: 1019119 - RNA, 19 nt, Artificial Sequence
  Description of Artificial Sequence: Synthetic oligonucleotide
guacuucucgcccaucuga

SEQ ID NO: 1019120 - RNA, 19 nt, Artificial Sequence
  Description of Artificial Sequence: Synthetic oligonucleotide
aaagcgucugauaucccaa

SEQ ID NO: 1019121 - RNA, 19 nt, Artificial Sequence
  Description of Artificial Sequence: Synthetic oligonucleotide
ucucggcuggaaaagcguc

SEQ ID NO: 1019122 - RNA, 19 nt, Artificial Sequence
  Description of Artificial Sequence: Synthetic oligonucleotide
gagagugugcagcacucca

SEQ ID NO: 1019123 - RNA, 19 nt, Artificial Sequence
  Description of Artificial Sequence: Synthetic oligonucleotide
agaaaggccaguauacuua

SEQ ID NO: 1019124 - RNA, 19 nt, Artificial Sequence
  Description of Artificial Sequence: Synthetic oligonucleotide
aguucacccucuacagagc

SEQ ID NO: 1019125 - RNA, 19 nt, Artificial Sequence
  Description of Artificial Sequence: Synthetic oligonucleotide
ugucugaucuuggcaagca

SEQ ID NO: 1019126 - RNA, 19 nt, Artificial Sequence
  Description of Artificial Sequence: Synthetic oligonucleotide
ccgacagucguacagucgg

SEQ ID NO: 1019127 - RNA, 19 nt, Artificial Sequence
  Description of Artificial Sequence: Synthetic oligonucleotide
ggugaugccauccuggugu

SEQ ID NO: 1019128 - RNA, 19 nt, Artificial Sequence
  Description of Artificial Sequence: Synthetic oligonucleotide
ugcaccccagauaacggau

SEQ ID NO: 1019129 - RNA, 19 nt, Artificial Sequence
  Description of Artificial Sequence: Synthetic oligonucleotide
aaucggcagcggaugagag

SEQ ID NO: 1019130 - RNA, 19 nt, Artificial Sequence
  Description of Artificial Sequence: Synthetic oligonucleotide
ucguacagucggauugucu

SEQ ID NO: 1019131 - RNA, 19 nt, Artificial Sequence
  Description of Artificial Sequence: Synthetic oligonucleotide
cccucuacagagcuggugg

SEQ ID NO: 1019132 - RNA, 19 nt, Artificial Sequence
  Description of Artificial Sequence: Synthetic oligonucleotide
cagacugggugugaaugcg

SEQ ID NO: 1019133 - RNA, 19 nt, Artificial Sequence
  Description of Artificial Sequence: Synthetic oligonucleotide
cugguguaacauucgagga

SEQ ID NO: 1019134 - RNA, 19 nt, Artificial Sequence
  Description of Artificial Sequence: Synthetic oligonucleotide
cuacacuaggagccaacac

SEQ ID NO: 1019135 - RNA, 19 nt, Artificial Sequence
  Description of Artificial Sequence: Synthetic oligonucleotide
aggcgaccaucccaggcac

SEQ ID NO: 1019136 - RNA, 19 nt, Artificial Sequence
  Description of Artificial Sequence: Synthetic oligonucleotide
guccuagccgcccuguggc

SEQ ID NO: 1019137 - RNA, 19 nt, Artificial Sequence
  Description of Artificial Sequence: Synthetic oligonucleotide
ucuccaaggcgaccauccc

SEQ ID NO: 1019138 - RNA, 19 nt, Artificial Sequence
  Description of Artificial Sequence: Synthetic oligonucleotide
ucgugagacucaaucugaa

SEQ ID NO: 1019139 - RNA, 19 nt, Artificial Sequence
  Description of Artificial Sequence: Synthetic oligonucleotide
gugugcagcacuccauggc

SEQ ID NO: 1019140 - RNA, 19 nt, Artificial Sequence
  Description of Artificial Sequence: Synthetic oligonucleotide
uuccuaaguccuagccgcc

SEQ ID NO: 1019141 - RNA, 19 nt, Artificial Sequence
  Description of Artificial Sequence: Synthetic oligonucleotide
guggucacaucuacugagg

SEQ ID NO: 1019142 - RNA, 19 nt, Artificial Sequence
  Description of Artificial Sequence: Synthetic oligonucleotide
gauuggccaaucuaacccu

SEQ ID NO: 1019143 - RNA, 19 nt, Artificial Sequence
  Description of Artificial Sequence: Synthetic oligonucleotide
uaacggaugugcugccaca

SEQ ID NO: 1019144 - RNA, 19 nt, Artificial Sequence
  Description of Artificial Sequence: Synthetic oligonucleotide
uggaguuggagaugagaua

SEQ ID NO: 1019145 - RNA, 19 nt, Artificial Sequence
  Description of Artificial Sequence: Synthetic oligonucleotide
ccucgguaggucaucaagg

SEQ ID NO: 1019146 - RNA, 19 nt, Artificial Sequence
  Description of Artificial Sequence: Synthetic oligonucleotide
caguuuugcuguguggcag

SEQ ID NO: 1019147 - RNA, 19 nt, Artificial Sequence
  Description of Artificial Sequence: Synthetic oligonucleotide
agaguagguaucagugaag

SEQ ID NO: 1019148 - RNA, 19 nt, Artificial Sequence
  Description of Artificial Sequence: Synthetic oligonucleotide
ucauuggcuccuccuagua

SEQ ID NO: 1019149 - RNA, 19 nt, Artificial Sequence
  Description of Artificial Sequence: Synthetic oligonucleotide
aaacgccacugcauucacg

SEQ ID NO: 1019150 - RNA, 19 nt, Artificial Sequence
  Description of Artificial Sequence: Synthetic oligonucleotide
uccacagguggguuguauc

SEQ ID NO: 1019151 - RNA, 19 nt, Artificial Sequence
  Description of Artificial Sequence: Synthetic oligonucleotide
ucucucauggugcgucggu

SEQ ID NO: 1019152 - RNA, 19 nt, Artificial Sequence
  Description of Artificial Sequence: Synthetic oligonucleotide
ugccuucucggcuggaaaa

SEQ ID NO: 1019153 - RNA, 19 nt, Artificial Sequence
  Description of Artificial Sequence: Synthetic oligonucleotide
gugccaacugacgucacgc

SEQ ID NO: 1019154 - RNA, 19 nt, Artificial Sequence
  Description of Artificial Sequence: Synthetic oligonucleotide
uacgccgguuuuguucucg

SEQ ID NO: 1019155 - RNA, 19 nt, Artificial Sequence
  Description of Artificial Sequence: Synthetic oligonucleotide
acagucggauugucugauc

SEQ ID NO: 1019156 - RNA, 19 nt, Artificial Sequence
  Description of Artificial Sequence: Synthetic oligonucleotide
cauuggcuccuccuaguac

SEQ ID NO: 1019157 - RNA, 19 nt, Artificial Sequence
  Description of Artificial Sequence: Synthetic oligonucleotide
gacugggugugaaugcgug

SEQ ID NO: 1019158 - RNA, 19 nt, Artificial Sequence
  Description of Artificial Sequence: Synthetic oligonucleotide
cucgugagacucaaucuga

SEQ ID NO: 1019159 - RNA, 19 nt, Artificial Sequence
  Description of Artificial Sequence: Synthetic oligonucleotide
guagaauauggugagaguu

SEQ ID NO: 1019160 - RNA, 19 nt, Artificial Sequence
  Description of Artificial Sequence: Synthetic oligonucleotide
auugucuuguuggcagaag

SEQ ID NO: 1019161 - RNA, 19 nt, Artificial Sequence
  Description of Artificial Sequence: Synthetic oligonucleotide
aucuacacuaggagccaac

SEQ ID NO: 1019162 - RNA, 19 nt, Artificial Sequence
  Description of Artificial Sequence: Synthetic oligonucleotide
cguacagucggauugucug

SEQ ID NO: 1019163 - RNA, 19 nt, Artificial Sequence
  Description of Artificial Sequence: Synthetic oligonucleotide
agcgacgcucuucuggccu

SEQ ID NO: 1019164 - RNA, 19 nt, Artificial Sequence
  Description of Artificial Sequence: Synthetic oligonucleotide
aaugcgugaggaagucacu

SEQ ID NO: 1019165 - RNA, 19 nt, Artificial Sequence
  Description of Artificial Sequence: Synthetic oligonucleotide
ccuccuaguacuucucgcc

SEQ ID NO: 1019166 - RNA, 19 nt, Artificial Sequence
  Description of Artificial Sequence: Synthetic oligonucleotide
ugaaugcgugaggaaguca

SEQ ID NO: 1019167 - RNA, 19 nt, Artificial Sequence
  Description of Artificial Sequence: Synthetic oligonucleotide
auaccgacagucguacagu

SEQ ID NO: 1019168 - RNA, 19 nt, Artificial Sequence
  Description of Artificial Sequence: Synthetic oligonucleotide
agaaucggcagcggaugag

SEQ ID NO: 1019169 - RNA, 19 nt, Artificial Sequence
  Description of Artificial Sequence: Synthetic oligonucleotide
agacucaaucugaagagua

SEQ ID NO: 1019170 - RNA, 19 nt, Artificial Sequence
  Description of Artificial Sequence: Synthetic oligonucleotide
acaucacucgagacuguuc

SEQ ID NO: 1019171 - RNA, 19 nt, Artificial Sequence
  Description of Artificial Sequence: Synthetic oligonucleotide
gaaucggcagcggaugaga

SEQ ID NO: 1019172 - RNA, 19 nt, Artificial Sequence
  Description of Artificial Sequence: Synthetic oligonucleotide
cuuccccauagauauugca

SEQ ID NO: 1019173 - RNA, 19 nt, Artificial Sequence
  Description of Artificial Sequence: Synthetic oligonucleotide
agcggaugagagugugcag

SEQ ID NO: 1019174 - RNA, 19 nt, Artificial Sequence
  Description of Artificial Sequence: Synthetic oligonucleotide
ccgaagugggagcacaggg

SEQ ID NO: 1019175 - RNA, 19 nt, Artificial Sequence
  Description of Artificial Sequence: Synthetic oligonucleotide
uccuaaguccuagccgccc

SEQ ID NO: 1019176 - RNA, 19 nt, Artificial Sequence
  Description of Artificial Sequence: Synthetic oligonucleotide
ugccaacugacgucacgca

SEQ ID NO: 1019177 - RNA, 19 nt, Artificial Sequence
  Description of Artificial Sequence: Synthetic oligonucleotide
gagaaaggccaguauacuu

SEQ ID NO: 1019178 - RNA, 19 nt, Artificial Sequence
  Description of Artificial Sequence: Synthetic oligonucleotide
acugggugugaaugcguga

SEQ ID NO: 1019179 - RNA, 19 nt, Artificial Sequence
  Description of Artificial Sequence: Synthetic oligonucleotide
ccagauaacggaugugcug

SEQ ID NO: 1019180 - RNA, 19 nt, Artificial Sequence
  Description of Artificial Sequence: Synthetic oligonucleotide
guacagucggauugucuga

SEQ ID NO: 1019181 - RNA, 19 nt, Artificial Sequence
  Description of Artificial Sequence: Synthetic oligonucleotide
gguaucagugaagcuuagg

SEQ ID NO: 1019182 - RNA, 19 nt, Artificial Sequence
  Description of Artificial Sequence: Synthetic oligonucleotide
uccucucucauggugcguc

SEQ ID NO: 1019183 - RNA, 19 nt, Artificial Sequence
  Description of Artificial Sequence: Synthetic oligonucleotide
cuaacaucggaacaugauu

SEQ ID NO: 1019184 - RNA, 19 nt, Artificial Sequence
  Description of Artificial Sequence: Synthetic oligonucleotide
gggcagucuuccuaagucc

SEQ ID NO: 1019185 - RNA, 19 nt, Artificial Sequence
  Description of Artificial Sequence: Synthetic oligonucleotide
gaauguaaucagaccagcu

SEQ ID NO: 1019186 - RNA, 19 nt, Artificial Sequence
  Description of Artificial Sequence: Synthetic oligonucleotide
caaaguuuaauggucuggu

SEQ ID NO: 1019187 - RNA, 19 nt, Artificial Sequence
  Description of Artificial Sequence: Synthetic oligonucleotide
gcuuaggucauugggcaag

SEQ ID NO: 1019188 - RNA, 19 nt, Artificial Sequence
  Description of Artificial Sequence: Synthetic oligonucleotide
ugccgcagaaagccuucug

SEQ ID NO: 1019189 - RNA, 19 nt, Artificial Sequence
  Description of Artificial Sequence: Synthetic oligonucleotide
uacagucggauugucugau

SEQ ID NO: 1019190 - RNA, 19 nt, Artificial Sequence
  Description of Artificial Sequence: Synthetic oligonucleotide
gaaaagcgucugauauccc

SEQ ID NO: 1019191 - RNA, 19 nt, Artificial Sequence
  Description of Artificial Sequence: Synthetic oligonucleotide
gaauauggugagaguucac

SEQ ID NO: 1019192 - RNA, 19 nt, Artificial Sequence
  Description of Artificial Sequence: Synthetic oligonucleotide
aggugaugccauccuggug

SEQ ID NO: 1019193 - RNA, 19 nt, Artificial Sequence
  Description of Artificial Sequence: Synthetic oligonucleotide
ugcgugaggaagucacuuu

SEQ ID NO: 1019194 - RNA, 19 nt, Artificial Sequence
  Description of Artificial Sequence: Synthetic oligonucleotide
acgccgguuuuguucucgg

SEQ ID NO: 1019195 - RNA, 19 nt, Artificial Sequence
  Description of Artificial Sequence: Synthetic oligonucleotide
auggaagcggccauaccga

SEQ ID NO: 1019196 - RNA, 19 nt, Artificial Sequence
  Description of Artificial Sequence: Synthetic oligonucleotide
ggagcuuaugucagcaaac

SEQ ID NO: 1019197 - RNA, 19 nt, Artificial Sequence
  Description of Artificial Sequence: Synthetic oligonucleotide
cuaaguccuagccgcccug

SEQ ID NO: 1019198 - RNA, 19 nt, Artificial Sequence
  Description of Artificial Sequence: Synthetic oligonucleotide
cuggcgugaugcuuccaug

SEQ ID NO: 1019199 - RNA, 19 nt, Artificial Sequence
  Description of Artificial Sequence: Synthetic oligonucleotide
cccuugcugucaauaaagg

SEQ ID NO: 1019200 - RNA, 19 nt, Artificial Sequence
  Description of Artificial Sequence: Synthetic oligonucleotide
accgacagucguacagucg

SEQ ID NO: 1019201 - RNA, 19 nt, Artificial Sequence
  Description of Artificial Sequence: Synthetic oligonucleotide
gauaacggaugugcugcca

SEQ ID NO: 1019202 - RNA, 19 nt, Artificial Sequence
  Description of Artificial Sequence: Synthetic oligonucleotide
acagucguacagucggauu

SEQ ID NO: 1019203 - RNA, 19 nt, Artificial Sequence
  Description of Artificial Sequence: Synthetic oligonucleotide
caggauuugggagcuuaug

SEQ ID NO: 1019204 - RNA, 19 nt, Artificial Sequence
  Description of Artificial Sequence: Synthetic oligonucleotide
cuacugaggugaggaaaag

SEQ ID NO: 1019205 - RNA, 19 nt, Artificial Sequence
  Description of Artificial Sequence: Synthetic oligonucleotide
caaacgccacugcauucac

SEQ ID NO: 1019206 - RNA, 19 nt, Artificial Sequence
  Description of Artificial Sequence: Synthetic oligonucleotide
ggagaaucggcagcggaug

SEQ ID NO: 1019207 - RNA, 19 nt, Artificial Sequence
  Description of Artificial Sequence: Synthetic oligonucleotide
cuuugcccaguagaauaug

SEQ ID NO: 1019208 - RNA, 19 nt, Artificial Sequence
  Description of Artificial Sequence: Synthetic oligonucleotide
augagauaccgggcaucac

SEQ ID NO: 1019209 - RNA, 19 nt, Artificial Sequence
  Description of Artificial Sequence: Synthetic oligonucleotide
ccccagauaacggaugugc

SEQ ID NO: 1019210 - RNA, 19 nt, Artificial Sequence
  Description of Artificial Sequence: Synthetic oligonucleotide
caacuacuuugccaguaga

SEQ ID NO: 1019211 - RNA, 19 nt, Artificial Sequence
  Description of Artificial Sequence: Synthetic oligonucleotide
agucggauugucugaucuu

SEQ ID NO: 1019212 - RNA, 19 nt, Artificial Sequence
  Description of Artificial Sequence: Synthetic oligonucleotide
agauaccgggcaucacccu

SEQ ID NO: 1019213 - RNA, 19 nt, Artificial Sequence
  Description of Artificial Sequence: Synthetic oligonucleotide
auuuauggaagcggccaua

SEQ ID NO: 1019214 - RNA, 19 nt, Artificial Sequence
  Description of Artificial Sequence: Synthetic oligonucleotide
gcgguacugccaaagacgc

SEQ ID NO: 1019215 - RNA, 19 nt, Artificial Sequence
  Description of Artificial Sequence: Synthetic oligonucleotide
agcccugauuggccaaucu

SEQ ID NO: 1019216 - RNA, 19 nt, Artificial Sequence
  Description of Artificial Sequence: Synthetic oligonucleotide
ccgggcaucacccuugcug

SEQ ID NO: 1019217 - RNA, 19 nt, Artificial Sequence
  Description of Artificial Sequence: Synthetic oligonucleotide
agcuuaggucauugggcaa

SEQ ID NO: 1019218 - RNA, 19 nt, Artificial Sequence
  Description of Artificial Sequence: Synthetic oligonucleotide
ggcgugaugcuuccaugcc

SEQ ID NO: 1019219 - RNA, 19 nt, Artificial Sequence
  Description of Artificial Sequence: Synthetic oligonucleotide
ccgcagaaagccuucugag

SEQ ID NO: 1019220 - RNA, 19 nt, Artificial Sequence
  Description of Artificial Sequence: Synthetic oligonucleotide
ggccaguauacuuagcccu

SEQ ID NO: 1019221 - RNA, 19 nt, Artificial Sequence
  Description of Artificial Sequence: Synthetic oligonucleotide
cagcggaugagagugugca

SEQ ID NO: 1019222 - RNA, 19 nt, Artificial Sequence
  Description of Artificial Sequence: Synthetic oligonucleotide
acauucgaggaaagcugug

SEQ ID NO: 1019223 - RNA, 19 nt, Artificial Sequence
  Description of Artificial Sequence: Synthetic oligonucleotide
accgauagucccaguuuug

SEQ ID NO: 1019224 - RNA, 19 nt, Artificial Sequence
  Description of Artificial Sequence: Synthetic oligonucleotide
cucucucauggugcgucgg

SEQ ID NO: 1019225 - RNA, 19 nt, Artificial Sequence
  Description of Artificial Sequence: Synthetic oligonucleotide
gugaaugcgugaggaaguc

SEQ ID NO: 1019226 - RNA, 19 nt, Artificial Sequence
  Description of Artificial Sequence: Synthetic oligonucleotide
uuagcccugauuggccaau

SEQ ID NO: 1019227 - RNA, 19 nt, Artificial Sequence
  Description of Artificial Sequence: Synthetic oligonucleotide
gcugucaauaaaggugaug

SEQ ID NO: 1019228 - RNA, 19 nt, Artificial Sequence
  Description of Artificial Sequence: Synthetic oligonucleotide
cugcaccccagauaacgga

SEQ ID NO: 1019229 - RNA, 19 nt, Artificial Sequence
  Description of Artificial Sequence: Synthetic oligonucleotide
ccaacugacgucacgcaca

SEQ ID NO: 1019230 - RNA, 19 nt, Artificial Sequence
  Description of Artificial Sequence: Synthetic oligonucleotide
gccgcagaaagccuucuga

SEQ ID NO: 1019231 - RNA, 19 nt, Artificial Sequence
  Description of Artificial Sequence: Synthetic oligonucleotide
agccuggcgguacugccaa

SEQ ID NO: 1019232 - RNA, 19 nt, Artificial Sequence
  Description of Artificial Sequence: Synthetic oligonucleotide
cagucggauugucugaucu

SEQ ID NO: 1019233 - RNA, 19 nt, Artificial Sequence
  Description of Artificial Sequence: Synthetic oligonucleotide
gccaacugacgucacgcac

SEQ ID NO: 1019234 - RNA, 19 nt, Artificial Sequence
  Description of Artificial Sequence: Synthetic oligonucleotide
gauaccgggcaucacccuu

SEQ ID NO: 1019235 - RNA, 19 nt, Artificial Sequence
  Description of Artificial Sequence: Synthetic oligonucleotide
accuguugccaccgauagu

SEQ ID NO: 1019236 - RNA, 19 nt, Artificial Sequence
  Description of Artificial Sequence: Synthetic oligonucleotide
ucauggugcgucgguccca

SEQ ID NO: 1019237 - RNA, 19 nt, Artificial Sequence
  Description of Artificial Sequence: Synthetic oligonucleotide
agagugugcagcacuccau

SEQ ID NO: 1019238 - RNA, 19 nt, Artificial Sequence
  Description of Artificial Sequence: Synthetic oligonucleotide
ccgguuuuguucucgguca

SEQ ID NO: 1019239 - RNA, 19 nt, Artificial Sequence
  Description of Artificial Sequence: Synthetic oligonucleotide
cuuggcaagcagacaugaa

SEQ ID NO: 1019240 - RNA, 19 nt, Artificial Sequence
  Description of Artificial Sequence: Synthetic oligonucleotide
cuuagauccagggcagugu

SEQ ID NO: 1019241 - RNA, 19 nt, Artificial Sequence
  Description of Artificial Sequence: Synthetic oligonucleotide
cccugauuggccaaucuaa

SEQ ID NO: 1019242 - RNA, 19 nt, Artificial Sequence
  Description of Artificial Sequence: Synthetic oligonucleotide
ggccuuagauccagggcag

SEQ ID NO: 1019243 - RNA, 19 nt, Artificial Sequence
  Description of Artificial Sequence: Synthetic oligonucleotide
caucuacugaggugaggaa

SEQ ID NO: 1019244 - RNA, 19 nt, Artificial Sequence
  Description of Artificial Sequence: Synthetic oligonucleotide
agacugggugugaaugcgu

SEQ ID NO: 1019245 - RNA, 19 nt, Artificial Sequence
  Description of Artificial Sequence: Synthetic oligonucleotide
agguaucagugaagcuuag

SEQ ID NO: 1019246 - RNA, 19 nt, Artificial Sequence
  Description of Artificial Sequence: Synthetic oligonucleotide
agaguacgccgguuuuguu

SEQ ID NO: 1019247 - RNA, 19 nt, Artificial Sequence
  Description of Artificial Sequence: Synthetic oligonucleotide
gccauaccgacagucguac

SEQ ID NO: 1019248 - RNA, 19 nt, Artificial Sequence
  Description of Artificial Sequence: Synthetic oligonucleotide
ucgcccaucugaggagaca

SEQ ID NO: 1019249 - RNA, 19 nt, Artificial Sequence
  Description of Artificial Sequence: Synthetic oligonucleotide
cacgcacacaggccuugug

SEQ ID NO: 1019250 - RNA, 19 nt, Artificial Sequence
  Description of Artificial Sequence: Synthetic oligonucleotide
cggauugucugaucuuggc

SEQ ID NO: 1019251 - RNA, 19 nt, Artificial Sequence
  Description of Artificial Sequence: Synthetic oligonucleotide
gcggccauaccgacagucg

SEQ ID NO: 1019252 - RNA, 19 nt, Artificial Sequence
  Description of Artificial Sequence: Synthetic oligonucleotide
ggugugaaugcgugaggaa

SEQ ID NO: 1019253 - RNA, 19 nt, Artificial Sequence
  Description of Artificial Sequence: Synthetic oligonucleotide
gguaggucaucaaggagcu

SEQ ID NO: 1019254 - RNA, 19 nt, Artificial Sequence
  Description of Artificial Sequence: Synthetic oligonucleotide
cuggcgguacugccaaaga

SEQ ID NO: 1019255 - RNA, 19 nt, Artificial Sequence
  Description of Artificial Sequence: Synthetic oligonucleotide
accccagauaacggaugug

SEQ ID NO: 1019256 - RNA, 19 nt, Artificial Sequence
  Description of Artificial Sequence: Synthetic oligonucleotide
aucccacgaacugcugaca

SEQ ID NO: 1019257 - RNA, 19 nt, Artificial Sequence
  Description of Artificial Sequence: Synthetic oligonucleotide
ggcuagagauagaaaucca

SEQ ID NO: 1019258 - RNA, 19 nt, Artificial Sequence
  Description of Artificial Sequence: Synthetic oligonucleotide
agccaacaccuaacaucgg

SEQ ID NO: 1019259 - RNA, 19 nt, Artificial Sequence
  Description of Artificial Sequence: Synthetic oligonucleotide
cugaagaguacgccgguuu

SEQ ID NO: 1019260 - RNA, 19 nt, Artificial Sequence
  Description of Artificial Sequence: Synthetic oligonucleotide
ucacgcacacaggccuugu

SEQ ID NO: 1019261 - RNA, 19 nt, Artificial Sequence
  Description of Artificial Sequence: Synthetic oligonucleotide
caagcagacugggugugaa

SEQ ID NO: 1019262 - RNA, 19 nt, Artificial Sequence
  Description of Artificial Sequence: Synthetic oligonucleotide
cucggcuggaaaagcgucu

SEQ ID NO: 1019263 - RNA, 19 nt, Artificial Sequence
  Description of Artificial Sequence: Synthetic oligonucleotide
ggcagcggaugagagugug

SEQ ID NO: 1019264 - RNA, 19 nt, Artificial Sequence
  Description of Artificial Sequence: Synthetic oligonucleotide
gcgucugauaucccaaagu

SEQ ID NO: 1019265 - RNA, 19 nt, Artificial Sequence
  Description of Artificial Sequence: Synthetic oligonucleotide
gacagucguacagucggau

SEQ ID NO: 1019266 - RNA, 19 nt, Artificial Sequence
  Description of Artificial Sequence: Synthetic oligonucleotide
caaagacgcagguucccau

SEQ ID NO: 1019267 - RNA, 19 nt, Artificial Sequence
  Description of Artificial Sequence: Synthetic oligonucleotide
gucguacagucggauuguc

SEQ ID NO: 1019268 - RNA, 19 nt, Artificial Sequence
  Description of Artificial Sequence: Synthetic oligonucleotide
cacucuggcuagagauaga

SEQ ID NO: 1019269 - RNA, 19 nt, Artificial Sequence
  Description of Artificial Sequence: Synthetic oligonucleotide
agacaucacucgagacugu

SEQ ID NO: 1019270 - RNA, 19 nt, Artificial Sequence
  Description of Artificial Sequence: Synthetic oligonucleotide
uagcccugauuggccaauc

SEQ ID NO: 1019271 - RNA, 19 nt, Artificial Sequence
  Description of Artificial Sequence: Synthetic oligonucleotide
ccuaacaucggaacaugau

SEQ ID NO: 1019272 - RNA, 19 nt, Artificial Sequence
  Description of Artificial Sequence: Synthetic oligonucleotide
gggcauugcuaaugggucu

SEQ ID NO: 1019273 - RNA, 19 nt, Artificial Sequence
  Description of Artificial Sequence: Synthetic oligonucleotide
ccaucccacgaacugcuga

SEQ ID NO: 1019274 - RNA, 19 nt, Artificial Sequence
  Description of Artificial Sequence: Synthetic oligonucleotide
cagccuacaucccgggccu

SEQ ID NO: 1019275 - RNA, 19 nt, Artificial Sequence
  Description of Artificial Sequence: Synthetic oligonucleotide
ccaaucuaacccucagugu

SEQ ID NO: 1019276 - RNA, 19 nt, Artificial Sequence
  Description of Artificial Sequence: Synthetic oligonucleotide
gcccugauuggccaaucua

SEQ ID NO: 1019277 - RNA, 19 nt, Artificial Sequence
  Description of Artificial Sequence: Synthetic oligonucleotide
auccucucucauggugcgu

SEQ ID NO: 1019278 - RNA, 19 nt, Artificial Sequence
  Description of Artificial Sequence: Synthetic oligonucleotide
gcagcggaugagagugugc

SEQ ID NO: 1019279 - RNA, 19 nt, Artificial Sequence
  Description of Artificial Sequence: Synthetic oligonucleotide
ggaagcggccauaccgaca

SEQ ID NO: 1019280 - RNA, 19 nt, Artificial Sequence
  Description of Artificial Sequence: Synthetic oligonucleotide
gcaccgaagugggagcaca

SEQ ID NO: 1019281 - RNA, 19 nt, Artificial Sequence
  Description of Artificial Sequence: Synthetic oligonucleotide
ggccaaucuaacccucagu

SEQ ID NO: 1019282 - RNA, 19 nt, Artificial Sequence
  Description of Artificial Sequence: Synthetic oligonucleotide
gcgugaugcuuccaugccu

SEQ ID NO: 1019283 - RNA, 19 nt, Artificial Sequence
  Description of Artificial Sequence: Synthetic oligonucleotide
ggugcgucggucccacacu

SEQ ID NO: 1019284 - RNA, 19 nt, Artificial Sequence
  Description of Artificial Sequence: Synthetic oligonucleotide
guacgccgguuuuguucuc

SEQ ID NO: 1019285 - RNA, 19 nt, Artificial Sequence
  Description of Artificial Sequence: Synthetic oligonucleotide
gccuacaucccgggccuug

SEQ ID NO: 1019286 - RNA, 19 nt, Artificial Sequence
  Description of Artificial Sequence: Synthetic oligonucleotide
cccagauaacggaugugcu

SEQ ID NO: 1019287 - RNA, 19 nt, Artificial Sequence
  Description of Artificial Sequence: Synthetic oligonucleotide
gggagaaucggcagcggau

SEQ ID NO: 1019288 - RNA, 19 nt, Artificial Sequence
  Description of Artificial Sequence: Synthetic oligonucleotide
ccaguauacuuagcccuga

SEQ ID NO: 1019289 - RNA, 19 nt, Artificial Sequence
  Description of Artificial Sequence: Synthetic oligonucleotide
ggccauaccgacagucgua

SEQ ID NO: 1019290 - RNA, 19 nt, Artificial Sequence
  Description of Artificial Sequence: Synthetic oligonucleotide
gugcgucggucccacacuu

SEQ ID NO: 1019291 - RNA, 19 nt, Artificial Sequence
  Description of Artificial Sequence: Synthetic oligonucleotide
caucccgggccuugaugcu

SEQ ID NO: 1019292 - RNA, 19 nt, Artificial Sequence
  Description of Artificial Sequence: Synthetic oligonucleotide
ggcaaagggcauugcuaau

SEQ ID NO: 1019293 - RNA, 19 nt, Artificial Sequence
  Description of Artificial Sequence: Synthetic oligonucleotide
ggcaccgaagugggagcac

SEQ ID NO: 1019294 - RNA, 19 nt, Artificial Sequence
  Description of Artificial Sequence: Synthetic oligonucleotide
gggcaccgaagugggagca

SEQ ID NO: 1019295 - RNA, 19 nt, Artificial Sequence
  Description of Artificial Sequence: Synthetic oligonucleotide
ccaguagaauauggugaga

SEQ ID NO: 1019296 - RNA, 19 nt, Artificial Sequence
  Description of Artificial Sequence: Synthetic oligonucleotide
ccguucucucugguguaac

SEQ ID NO: 1019297 - RNA, 19 nt, Artificial Sequence
  Description of Artificial Sequence: Synthetic oligonucleotide
ccccauagauauugcagau

SEQ ID NO: 1019298 - RNA, 19 nt, Artificial Sequence
  Description of Artificial Sequence: Synthetic oligonucleotide
ccauaccgacagucguaca

SEQ ID NO: 1019299 - RNA, 19 nt, Artificial Sequence
  Description of Artificial Sequence: Synthetic oligonucleotide
ccuaguacuucucgcccau

SEQ ID NO: 1019300 - RNA, 19 nt, Artificial Sequence
  Description of Artificial Sequence: Synthetic oligonucleotide
ccaagcagacuggguguga

SEQ ID NO: 1019301 - RNA, 19 nt, Artificial Sequence
  Description of Artificial Sequence: Synthetic oligonucleotide
gaacaggauuugggagcuu

SEQ ID NO: 1019302 - RNA, 19 nt, Artificial Sequence
  Description of Artificial Sequence: Synthetic oligonucleotide
cccacgaacugcugacaau

SEQ ID NO: 1019303 - RNA, 19 nt, Artificial Sequence
  Description of Artificial Sequence: Synthetic oligonucleotide
cgguacugccaaagacgca

SEQ ID NO: 1019304 - RNA, 19 nt, Artificial Sequence
  Description of Artificial Sequence: Synthetic oligonucleotide
cagugaagcuuaggucauu

SEQ ID NO: 1019305 - RNA, 19 nt, Artificial Sequence
  Description of Artificial Sequence: Synthetic oligonucleotide
ccccguucucucuggugua

SEQ ID NO: 1019306 - RNA, 19 nt, Artificial Sequence
  Description of Artificial Sequence: Synthetic oligonucleotide
cggccauaccgacagucgu

SEQ ID NO: 1019307 - RNA, 19 nt, Artificial Sequence
  Description of Artificial Sequence: Synthetic oligonucleotide
gccuuagauccagggcagu

SEQ ID NO: 1019308 - RNA, 19 nt, Artificial Sequence
  Description of Artificial Sequence: Synthetic oligonucleotide
gcgacgcucuucuggccuu

SEQ ID NO: 1019309 - RNA, 19 nt, Artificial Sequence
  Description of Artificial Sequence: Synthetic oligonucleotide
ggcgaccaucccaggcacu

SEQ ID NO: 1019310 - RNA, 19 nt, Artificial Sequence
  Description of Artificial Sequence: Synthetic oligonucleotide
cgccgguuuuguucucggu

SEQ ID NO: 1019311 - RNA, 19 nt, Artificial Sequence
  Description of Artificial Sequence: Synthetic oligonucleotide
cggcagcggaugagagugu

SEQ ID NO: 1019312 - RNA, 19 nt, Artificial Sequence
  Description of Artificial Sequence: Synthetic oligonucleotide
cgacgcucuucuggccuua

SEQ ID NO: 1019313 - RNA, 19 nt, Artificial Sequence
  Description of Artificial Sequence: Synthetic oligonucleotide
uuuagagucacccugggag

SEQ ID NO: 1019314 - RNA, 19 nt, Artificial Sequence
  Description of Artificial Sequence: Synthetic oligonucleotide
  modified_base (7)..(7): a, c, u, g, unknown or other
ucaucgngaaauuugagcu

SEQ ID NO: 1019315 - RNA, 19 nt, Artificial Sequence
  Description of Artificial Sequence: Synthetic oligonucleotide
gaaaaccccaguuugagag

SEQ ID NO: 1019316 - RNA, 19 nt, Artificial Sequence
  Description of Artificial Sequence: Synthetic oligonucleotide
ugugacaucaauucagccc

SEQ ID NO: 1019317 - RNA, 19 nt, Artificial Sequence
  Description of Artificial Sequence: Synthetic oligonucleotide
auagauggcaacuagcugu

SEQ ID NO: 1019318 - RNA, 19 nt, Artificial Sequence
  Description of Artificial Sequence: Synthetic oligonucleotide
agaucuaggguucuaggac

SEQ ID NO: 1019319 - RNA, 19 nt, Artificial Sequence
  Description of Artificial Sequence: Synthetic oligonucleotide
  modified_base (2)..(2): a, c, u, g, unknown or other
gngaaauuugagcucauug

SEQ ID NO: 1019320 - RNA, 19 nt, Artificial Sequence
  Description of Artificial Sequence: Synthetic oligonucleotide
uugacaagguggaagauga

SEQ ID NO: 1019321 - RNA, 19 nt, Artificial Sequence
  Description of Artificial Sequence: Synthetic oligonucleotide
ugauuuagagucacccugg

SEQ ID NO: 1019322 - RNA, 19 nt, Artificial Sequence
  Description of Artificial Sequence: Synthetic oligonucleotide
cuuaaaggcugauuuagag

SEQ ID NO: 1019323 - RNA, 19 nt, Artificial Sequence
  Description of Artificial Sequence: Synthetic oligonucleotide
ggaacagucgcuuaaaggc

SEQ ID NO: 1019324 - RNA, 19 nt, Artificial Sequence
  Description of Artificial Sequence: Synthetic oligonucleotide
uuauccuugacuuugugua

SEQ ID NO: 1019325 - RNA, 19 nt, Artificial Sequence
  Description of Artificial Sequence: Synthetic oligonucleotide
aaauuugagcucauuggcg

SEQ ID NO: 1019326 - RNA, 19 nt, Artificial Sequence
  Description of Artificial Sequence: Synthetic oligonucleotide
uuguccaugagccagucac

SEQ ID NO: 1019327 - RNA, 19 nt, Artificial Sequence
  Description of Artificial Sequence: Synthetic oligonucleotide
ucagagagcggaaagccag

SEQ ID NO: 1019328 - RNA, 19 nt, Artificial Sequence
  Description of Artificial Sequence: Synthetic oligonucleotide
gugacaucaauucagcccc

SEQ ID NO: 1019329 - RNA, 19 nt, Artificial Sequence
  Description of Artificial Sequence: Synthetic oligonucleotide
cuagaaagugcuucgagac

SEQ ID NO: 1019330 - RNA, 19 nt, Artificial Sequence
  Description of Artificial Sequence: Synthetic oligonucleotide
cagggugcgaagaugaugg

SEQ ID NO: 1019331 - RNA, 19 nt, Artificial Sequence
  Description of Artificial Sequence: Synthetic oligonucleotide
  modified_base (8)..(8): a, c, u, g, unknown or other
cucaucgngaaauuugagc

SEQ ID NO: 1019332 - RNA, 19 nt, Artificial Sequence
  Description of Artificial Sequence: Synthetic oligonucleotide
cuugacuuuguguaggaac

SEQ ID NO: 1019333 - RNA, 19 nt, Artificial Sequence
  Description of Artificial Sequence: Synthetic oligonucleotide
ugacacugugaucuggccg

SEQ ID NO: 1019334 - RNA, 19 nt, Artificial Sequence
  Description of Artificial Sequence: Synthetic oligonucleotide
ucuuuucccuuucaggggc

SEQ ID NO: 1019335 - RNA, 19 nt, Artificial Sequence
  Description of Artificial Sequence: Synthetic oligonucleotide
aguuugagaggccauggag

SEQ ID NO: 1019336 - RNA, 19 nt, Artificial Sequence
  Description of Artificial Sequence: Synthetic oligonucleotide
aagcucaacagcccugagg

SEQ ID NO: 1019337 - RNA, 19 nt, Artificial Sequence
  Description of Artificial Sequence: Synthetic oligonucleotide
aggcccucgguauacaagc

SEQ ID NO: 1019338 - RNA, 19 nt, Artificial Sequence
  Description of Artificial Sequence: Synthetic oligonucleotide
gaagucuccauacugggca

SEQ ID NO: 1019339 - RNA, 19 nt, Artificial Sequence
  Description of Artificial Sequence: Synthetic oligonucleotide
agcauuuugccgcaacagg

SEQ ID NO: 1019340 - RNA, 19 nt, Artificial Sequence
  Description of Artificial Sequence: Synthetic oligonucleotide
uuagacuguccacacacac

SEQ ID NO: 1019341 - RNA, 19 nt, Artificial Sequence
  Description of Artificial Sequence: Synthetic oligonucleotide
  modified_base (10)..(10): a, c, u, g, unknown or other
aacucaucgngaaauuuga

SEQ ID NO: 1019342 - RNA, 19 nt, Artificial Sequence
  Description of Artificial Sequence: Synthetic oligonucleotide
cugauuuagagucacccug

SEQ ID NO: 1019343 - RNA, 19 nt, Artificial Sequence
  Description of Artificial Sequence: Synthetic oligonucleotide
agacgaaaaccccaguuug

SEQ ID NO: 1019344 - RNA, 19 nt, Artificial Sequence
  Description of Artificial Sequence: Synthetic oligonucleotide
ugauuugcgguagaggccc

SEQ ID NO: 1019345 - RNA, 19 nt, Artificial Sequence
  Description of Artificial Sequence: Synthetic oligonucleotide
aaggcugauuuagagucac

SEQ ID NO: 1019346 - RNA, 19 nt, Artificial Sequence
  Description of Artificial Sequence: Synthetic oligonucleotide
caucaauucagccccgggg

SEQ ID NO: 1019347 - RNA, 19 nt, Artificial Sequence
  Description of Artificial Sequence: Synthetic oligonucleotide
uucgccugcggcauggcgg

SEQ ID NO: 1019348 - RNA, 19 nt, Artificial Sequence
  Description of Artificial Sequence: Synthetic oligonucleotide
ucauagggagacgaaaacc

SEQ ID NO: 1019349 - RNA, 19 nt, Artificial Sequence
  Description of Artificial Sequence: Synthetic oligonucleotide
gaucuuucggaacacugac

SEQ ID NO: 1019350 - RNA, 19 nt, Artificial Sequence
  Description of Artificial Sequence: Synthetic oligonucleotide
uuauugagcaggaacucau

SEQ ID NO: 1019351 - RNA, 19 nt, Artificial Sequence
  Description of Artificial Sequence: Synthetic oligonucleotide
uuugccgcaacagggagag

SEQ ID NO: 1019352 - RNA, 19 nt, Artificial Sequence
  Description of Artificial Sequence: Synthetic oligonucleotide
  modified_base (11)..(11): a, c, u, g, unknown or other
gaacucaucgngaaauuug

SEQ ID NO: 1019353 - RNA, 19 nt, Artificial Sequence
  Description of Artificial Sequence: Synthetic oligonucleotide
aggaagucuccauacuggg

SEQ ID NO: 1019354 - RNA, 19 nt, Artificial Sequence
  Description of Artificial Sequence: Synthetic oligonucleotide
gauuuagagucacccuggg

SEQ ID NO: 1019355 - RNA, 19 nt, Artificial Sequence
  Description of Artificial Sequence: Synthetic oligonucleotide
ucacugguuagacugucca

SEQ ID NO: 1019356 - RNA, 19 nt, Artificial Sequence
  Description of Artificial Sequence: Synthetic oligonucleotide
ccugauuugcgguagaggc

SEQ ID NO: 1019357 - RNA, 19 nt, Artificial Sequence
  Description of Artificial Sequence: Synthetic oligonucleotide
uuagagucacccugggagc

SEQ ID NO: 1019358 - RNA, 19 nt, Artificial Sequence
  Description of Artificial Sequence: Synthetic oligonucleotide
acuuuguguaggaacaguc

SEQ ID NO: 1019359 - RNA, 19 nt, Artificial Sequence
  Description of Artificial Sequence: Synthetic oligonucleotide
uucgagacucuucuuggug

SEQ ID NO: 1019360 - RNA, 19 nt, Artificial Sequence
  Description of Artificial Sequence: Synthetic oligonucleotide
uuucggaacacugacucac

SEQ ID NO: 1019361 - RNA, 19 nt, Artificial Sequence
  Description of Artificial Sequence: Synthetic oligonucleotide
gaucuaggguucuaggaca

SEQ ID NO: 1019362 - RNA, 19 nt, Artificial Sequence
  Description of Artificial Sequence: Synthetic oligonucleotide
gacacugugaucuggccga

SEQ ID NO: 1019363 - RNA, 19 nt, Artificial Sequence
  Description of Artificial Sequence: Synthetic oligonucleotide
cuggcuagaaagugcuucg

SEQ ID NO: 1019364 - RNA, 19 nt, Artificial Sequence
  Description of Artificial Sequence: Synthetic oligonucleotide
agucuuccagcuugacugc

SEQ ID NO: 1019365 - RNA, 19 nt, Artificial Sequence
  Description of Artificial Sequence: Synthetic oligonucleotide
guuugagaggccauggagc

SEQ ID NO: 1019366 - RNA, 19 nt, Artificial Sequence
  Description of Artificial Sequence: Synthetic oligonucleotide
auuuugccgcaacagggag

SEQ ID NO: 1019367 - RNA, 19 nt, Artificial Sequence
  Description of Artificial Sequence: Synthetic oligonucleotide
uuuggccccaggaagucug

SEQ ID NO: 1019368 - RNA, 19 nt, Artificial Sequence
  Description of Artificial Sequence: Synthetic oligonucleotide
ggagcaguagcucugaauc

SEQ ID NO: 1019369 - RNA, 19 nt, Artificial Sequence
  Description of Artificial Sequence: Synthetic oligonucleotide
auguaccugguccugucgg

SEQ ID NO: 1019370 - RNA, 19 nt, Artificial Sequence
  Description of Artificial Sequence: Synthetic oligonucleotide
auagggagacgaaaacccc

SEQ ID NO: 1019371 - RNA, 19 nt, Artificial Sequence
  Description of Artificial Sequence: Synthetic oligonucleotide
uagggagacgaaaacccca

SEQ ID NO: 1019372 - RNA, 19 nt, Artificial Sequence
  Description of Artificial Sequence: Synthetic oligonucleotide
agucaccuuauugagcagg

SEQ ID NO: 1019373 - RNA, 19 nt, Artificial Sequence
  Description of Artificial Sequence: Synthetic oligonucleotide
gguuagacuguccacacac

SEQ ID NO: 1019374 - RNA, 19 nt, Artificial Sequence
  Description of Artificial Sequence: Synthetic oligonucleotide
cuaggguucuaggacaugc

SEQ ID NO: 1019375 - RNA, 19 nt, Artificial Sequence
  Description of Artificial Sequence: Synthetic oligonucleotide
ucgguauacaagccgugca

SEQ ID NO: 1019376 - RNA, 19 nt, Artificial Sequence
  Description of Artificial Sequence: Synthetic oligonucleotide
  modified_base (5)..(5): a, c, u, g, unknown or other
aucgngaaauuugagcuca

SEQ ID NO: 1019377 - RNA, 19 nt, Artificial Sequence
  Description of Artificial Sequence: Synthetic oligonucleotide
uucggaacacugacucacg

SEQ ID NO: 1019378 - RNA, 19 nt, Artificial Sequence
  Description of Artificial Sequence: Synthetic oligonucleotide
  modified_base (16)..(16): a, c, u, g, unknown or other
agcaggaacucaucgngaa

SEQ ID NO: 1019379 - RNA, 19 nt, Artificial Sequence
  Description of Artificial Sequence: Synthetic oligonucleotide
cugauuugcgguagaggcc

SEQ ID NO: 1019380 - RNA, 19 nt, Artificial Sequence
  Description of Artificial Sequence: Synthetic oligonucleotide
gggauuuuggcccggaccc

SEQ ID NO: 1019381 - RNA, 19 nt, Artificial Sequence
  Description of Artificial Sequence: Synthetic oligonucleotide
auacaagccgugcaucucu

SEQ ID NO: 1019382 - RNA, 19 nt, Artificial Sequence
  Description of Artificial Sequence: Synthetic oligonucleotide
acgugguaaucuucaguac

SEQ ID NO: 1019383 - RNA, 19 nt, Artificial Sequence
  Description of Artificial Sequence: Synthetic oligonucleotide
aggguucuaggacaugcag

SEQ ID NO: 1019384 - RNA, 19 nt, Artificial Sequence
  Description of Artificial Sequence: Synthetic oligonucleotide
acaucaauucagccccggg

SEQ ID NO: 1019385 - RNA, 19 nt, Artificial Sequence
  Description of Artificial Sequence: Synthetic oligonucleotide
ugaucuggccgaccuugcg

SEQ ID NO: 1019386 - RNA, 19 nt, Artificial Sequence
  Description of Artificial Sequence: Synthetic oligonucleotide
gaagccuugucacugguua

SEQ ID NO: 1019387 - RNA, 19 nt, Artificial Sequence
  Description of Artificial Sequence: Synthetic oligonucleotide
acugguuagacuguccaca

SEQ ID NO: 1019388 - RNA, 19 nt, Artificial Sequence
  Description of Artificial Sequence: Synthetic oligonucleotide
acugacucacgccacuucu

SEQ ID NO: 1019389 - RNA, 19 nt, Artificial Sequence
  Description of Artificial Sequence: Synthetic oligonucleotide
cacgccacuucucugacac

SEQ ID NO: 1019390 - RNA, 19 nt, Artificial Sequence
  Description of Artificial Sequence: Synthetic oligonucleotide
aagccgugcaucucuacau

SEQ ID NO: 1019391 - RNA, 19 nt, Artificial Sequence
  Description of Artificial Sequence: Synthetic oligonucleotide
agccagucaccuuauugag

SEQ ID NO: 1019392 - RNA, 19 nt, Artificial Sequence
  Description of Artificial Sequence: Synthetic oligonucleotide
aacacugacucacgccacu

SEQ ID NO: 1019393 - RNA, 19 nt, Artificial Sequence
  Description of Artificial Sequence: Synthetic oligonucleotide
aacagucgcuuaaaggcug

SEQ ID NO: 1019394 - RNA, 19 nt, Artificial Sequence
  Description of Artificial Sequence: Synthetic oligonucleotide
cauagauggcaacuagcug

SEQ ID NO: 1019395 - RNA, 19 nt, Artificial Sequence
  Description of Artificial Sequence: Synthetic oligonucleotide
ucuaggacaugcagacugu

SEQ ID NO: 1019396 - RNA, 19 nt, Artificial Sequence
  Description of Artificial Sequence: Synthetic oligonucleotide
ucggaacacugacucacgc

SEQ ID NO: 1019397 - RNA, 19 nt, Artificial Sequence
  Description of Artificial Sequence: Synthetic oligonucleotide
gagcauuuugccgcaacag

SEQ ID NO: 1019398 - RNA, 19 nt, Artificial Sequence
  Description of Artificial Sequence: Synthetic oligonucleotide
uuuugccgcaacagggaga

SEQ ID NO: 1019399 - RNA, 19 nt, Artificial Sequence
  Description of Artificial Sequence: Synthetic oligonucleotide
gcauuuugccgcaacaggg

SEQ ID NO: 1019400 - RNA, 19 nt, Artificial Sequence
  Description of Artificial Sequence: Synthetic oligonucleotide
agggagcgccuccagcucc

SEQ ID NO: 1019401 - RNA, 19 nt, Artificial Sequence
  Description of Artificial Sequence: Synthetic oligonucleotide
acgaaaaccccaguuugag

SEQ ID NO: 1019402 - RNA, 19 nt, Artificial Sequence
  Description of Artificial Sequence: Synthetic oligonucleotide
uuucgccugcggcauggcg

SEQ ID NO: 1019403 - RNA, 19 nt, Artificial Sequence
  Description of Artificial Sequence: Synthetic oligonucleotide
cugugacaucaauucagcc

SEQ ID NO: 1019404 - RNA, 19 nt, Artificial Sequence
  Description of Artificial Sequence: Synthetic oligonucleotide
ccauggagcauuuugccgc

SEQ ID NO: 1019405 - RNA, 19 nt, Artificial Sequence
  Description of Artificial Sequence: Synthetic oligonucleotide
ugacaucaauucagccccg

SEQ ID NO: 1019406 - RNA, 19 nt, Artificial Sequence
  Description of Artificial Sequence: Synthetic oligonucleotide
acucacgccacuucucuga

SEQ ID NO: 1019407 - RNA, 19 nt, Artificial Sequence
  Description of Artificial Sequence: Synthetic oligonucleotide
ugcgguuucgguucuuuuc

SEQ ID NO: 1019408 - RNA, 19 nt, Artificial Sequence
  Description of Artificial Sequence: Synthetic oligonucleotide
ugggcgcuuuucauucugg

SEQ ID NO: 1019409 - RNA, 19 nt, Artificial Sequence
  Description of Artificial Sequence: Synthetic oligonucleotide
  modified_base (6)..(6): a, c, u, g, unknown or other
caucgngaaauuugagcuc

SEQ ID NO: 1019410 - RNA, 19 nt, Artificial Sequence
  Description of Artificial Sequence: Synthetic oligonucleotide
uccggaagcucaacagccc

SEQ ID NO: 1019411 - RNA, 19 nt, Artificial Sequence
  Description of Artificial Sequence: Synthetic oligonucleotide
gggcgauguauacagaaug

SEQ ID NO: 1019412 - RNA, 19 nt, Artificial Sequence
  Description of Artificial Sequence: Synthetic oligonucleotide
cacgugguaaucuucagua

SEQ ID NO: 1019413 - RNA, 19 nt, Artificial Sequence
  Description of Artificial Sequence: Synthetic oligonucleotide
auagcauggauggggaagu

SEQ ID NO: 1019414 - RNA, 19 nt, Artificial Sequence
  Description of Artificial Sequence: Synthetic oligonucleotide
gcacgaugggcacagaagc

SEQ ID NO: 1019415 - RNA, 19 nt, Artificial Sequence
  Description of Artificial Sequence: Synthetic oligonucleotide
gaccuugcgguuucgguuc

SEQ ID NO: 1019416 - RNA, 19 nt, Artificial Sequence
  Description of Artificial Sequence: Synthetic oligonucleotide
auuuagagucacccuggga

SEQ ID NO: 1019417 - RNA, 19 nt, Artificial Sequence
  Description of Artificial Sequence: Synthetic oligonucleotide
cagcguagcaggcagggug

SEQ ID NO: 1019418 - RNA, 19 nt, Artificial Sequence
  Description of Artificial Sequence: Synthetic oligonucleotide
ugacuuuguguaggaacag

SEQ ID NO: 1019419 - RNA, 19 nt, Artificial Sequence
  Description of Artificial Sequence: Synthetic oligonucleotide
uaggguucuaggacaugca

SEQ ID NO: 1019420 - RNA, 19 nt, Artificial Sequence
  Description of Artificial Sequence: Synthetic oligonucleotide
acacgugguaaucuucagu

SEQ ID NO: 1019421 - RNA, 19 nt, Artificial Sequence
  Description of Artificial Sequence: Synthetic oligonucleotide
cacgaugggcacagaagcc

SEQ ID NO: 1019422 - RNA, 19 nt, Artificial Sequence
  Description of Artificial Sequence: Synthetic oligonucleotide
cugcauagauggcaacuag

SEQ ID NO: 1019423 - RNA, 19 nt, Artificial Sequence
  Description of Artificial Sequence: Synthetic oligonucleotide
ucccguguccgguuggcag

SEQ ID NO: 1019424 - RNA, 19 nt, Artificial Sequence
  Description of Artificial Sequence: Synthetic oligonucleotide
uccagcacgaugggcacag

SEQ ID NO: 1019425 - RNA, 19 nt, Artificial Sequence
  Description of Artificial Sequence: Synthetic oligonucleotide
caggaagucugacaucgug

SEQ ID NO: 1019426 - RNA, 19 nt, Artificial Sequence
  Description of Artificial Sequence: Synthetic oligonucleotide
acaugcgguucacauccuc

SEQ ID NO: 1019427 - RNA, 19 nt, Artificial Sequence
  Description of Artificial Sequence: Synthetic oligonucleotide
ucugaguugucagggcagc

SEQ ID NO: 1019428 - RNA, 19 nt, Artificial Sequence
  Description of Artificial Sequence: Synthetic oligonucleotide
ugacaagguggaagaugag

SEQ ID NO: 1019429 - RNA, 19 nt, Artificial Sequence
  Description of Artificial Sequence: Synthetic oligonucleotide
accugauuugcgguagagg

SEQ ID NO: 1019430 - RNA, 19 nt, Artificial Sequence
  Description of Artificial Sequence: Synthetic oligonucleotide
ugcggcauggcggugcugc

SEQ ID NO: 1019431 - RNA, 19 nt, Artificial Sequence
  Description of Artificial Sequence: Synthetic oligonucleotide
ggcugauuuagagucaccc

SEQ ID NO: 1019432 - RNA, 19 nt, Artificial Sequence
  Description of Artificial Sequence: Synthetic oligonucleotide
uguccgguuggcagcaccu

SEQ ID NO: 1019433 - RNA, 19 nt, Artificial Sequence
  Description of Artificial Sequence: Synthetic oligonucleotide
gacaucaauucagccccgg

SEQ ID NO: 1019434 - RNA, 19 nt, Artificial Sequence
  Description of Artificial Sequence: Synthetic oligonucleotide
uccgaguaccugcguuugg

SEQ ID NO: 1019435 - RNA, 19 nt, Artificial Sequence
  Description of Artificial Sequence: Synthetic oligonucleotide
cauuuugccgcaacaggga

SEQ ID NO: 1019436 - RNA, 19 nt, Artificial Sequence
  Description of Artificial Sequence: Synthetic oligonucleotide
acaagccgugcaucucuac

SEQ ID NO: 1019437 - RNA, 19 nt, Artificial Sequence
  Description of Artificial Sequence: Synthetic oligonucleotide
gguucacauccucaaguag

SEQ ID NO: 1019438 - RNA, 19 nt, Artificial Sequence
  Description of Artificial Sequence: Synthetic oligonucleotide
ugaguugucagggcagcgu

SEQ ID NO: 1019439 - RNA, 19 nt, Artificial Sequence
  Description of Artificial Sequence: Synthetic oligonucleotide
aaaggcugauuuagaguca

SEQ ID NO: 1019440 - RNA, 19 nt, Artificial Sequence
  Description of Artificial Sequence: Synthetic oligonucleotide
uguguaggagcaguagcuc

SEQ ID NO: 1019441 - RNA, 19 nt, Artificial Sequence
  Description of Artificial Sequence: Synthetic oligonucleotide
agcacgaugggcacagaag

SEQ ID NO: 1019442 - RNA, 19 nt, Artificial Sequence
  Description of Artificial Sequence: Synthetic oligonucleotide
cucgguauacaagccgugc

SEQ ID NO: 1019443 - RNA, 19 nt, Artificial Sequence
  Description of Artificial Sequence: Synthetic oligonucleotide
uggagcauuuugccgcaac

SEQ ID NO: 1019444 - RNA, 19 nt, Artificial Sequence
  Description of Artificial Sequence: Synthetic oligonucleotide
gucgcuuaaaggcugauuu

SEQ ID NO: 1019445 - RNA, 19 nt, Artificial Sequence
  Description of Artificial Sequence: Synthetic oligonucleotide
gcgcuuuucauucuggauc

SEQ ID NO: 1019446 - RNA, 19 nt, Artificial Sequence
  Description of Artificial Sequence: Synthetic oligonucleotide
cuccggguggucuucacuc

SEQ ID NO: 1019447 - RNA, 19 nt, Artificial Sequence
  Description of Artificial Sequence: Synthetic oligonucleotide
ggcuaccuugacaaggugg

SEQ ID NO: 1019448 - RNA, 19 nt, Artificial Sequence
  Description of Artificial Sequence: Synthetic oligonucleotide
gccauggagcauuuugccg

SEQ ID NO: 1019449 - RNA, 19 nt, Artificial Sequence
  Description of Artificial Sequence: Synthetic oligonucleotide
uccgguuggcagcaccuga

SEQ ID NO: 1019450 - RNA, 19 nt, Artificial Sequence
  Description of Artificial Sequence: Synthetic oligonucleotide
cccugugacaucaauucag

SEQ ID NO: 1019451 - RNA, 19 nt, Artificial Sequence
  Description of Artificial Sequence: Synthetic oligonucleotide
ugguuagacuguccacaca

SEQ ID NO: 1019452 - RNA, 19 nt, Artificial Sequence
  Description of Artificial Sequence: Synthetic oligonucleotide
agggugcgaagaugauggc

SEQ ID NO: 1019453 - RNA, 19 nt, Artificial Sequence
  Description of Artificial Sequence: Synthetic oligonucleotide
cagugccugccguaguucc

SEQ ID NO: 1019454 - RNA, 19 nt, Artificial Sequence
  Description of Artificial Sequence: Synthetic oligonucleotide
cgauguauacagaauguac

SEQ ID NO: 1019455 - RNA, 19 nt, Artificial Sequence
  Description of Artificial Sequence: Synthetic oligonucleotide
uggauggggaagucuucca

SEQ ID NO: 1019456 - RNA, 19 nt, Artificial Sequence
  Description of Artificial Sequence: Synthetic oligonucleotide
ugccguaguucccgugucc

SEQ ID NO: 1019457 - RNA, 19 nt, Artificial Sequence
  Description of Artificial Sequence: Synthetic oligonucleotide
gagcucauuggcguuggug

SEQ ID NO: 1019458 - RNA, 19 nt, Artificial Sequence
  Description of Artificial Sequence: Synthetic oligonucleotide
gcgguuucgguucuuuucc

SEQ ID NO: 1019459 - RNA, 19 nt, Artificial Sequence
  Description of Artificial Sequence: Synthetic oligonucleotide
guugucagggcagcguagc

SEQ ID NO: 1019460 - RNA, 19 nt, Artificial Sequence
  Description of Artificial Sequence: Synthetic oligonucleotide
ggcuagaaagugcuucgag

SEQ ID NO: 1019461 - RNA, 19 nt, Artificial Sequence
  Description of Artificial Sequence: Synthetic oligonucleotide
uuucgguucuuuucccuuu

SEQ ID NO: 1019462 - RNA, 19 nt, Artificial Sequence
  Description of Artificial Sequence: Synthetic oligonucleotide
ggggauuuuggcccggacc

SEQ ID NO: 1019463 - RNA, 19 nt, Artificial Sequence
  Description of Artificial Sequence: Synthetic oligonucleotide
agucugacaucguggucca

SEQ ID NO: 1019464 - RNA, 19 nt, Artificial Sequence
  Description of Artificial Sequence: Synthetic oligonucleotide
uccucaaguagggcuaccu

SEQ ID NO: 1019465 - RNA, 19 nt, Artificial Sequence
  Description of Artificial Sequence: Synthetic oligonucleotide
cuuauccuugacuuugugu

SEQ ID NO: 1019466 - RNA, 19 nt, Artificial Sequence
  Description of Artificial Sequence: Synthetic oligonucleotide
cacacacgugguaaucuuc

SEQ ID NO: 1019467 - RNA, 19 nt, Artificial Sequence
  Description of Artificial Sequence: Synthetic oligonucleotide
  modified_base (9)..(9): a, c, u, g, unknown or other
acucaucgngaaauuugag

SEQ ID NO: 1019468 - RNA, 19 nt, Artificial Sequence
  Description of Artificial Sequence: Synthetic oligonucleotide
uugucagggcagcguagca

SEQ ID NO: 1019469 - RNA, 19 nt, Artificial Sequence
  Description of Artificial Sequence: Synthetic oligonucleotide
ucgcuuaaaggcugauuua

SEQ ID NO: 1019470 - RNA, 19 nt, Artificial Sequence
  Description of Artificial Sequence: Synthetic oligonucleotide
guauacaagccgugcaucu

SEQ ID NO: 1019471 - RNA, 19 nt, Artificial Sequence
  Description of Artificial Sequence: Synthetic oligonucleotide
caugcgguucacauccuca

SEQ ID NO: 1019472 - RNA, 19 nt, Artificial Sequence
  Description of Artificial Sequence: Synthetic oligonucleotide
gacgaaaaccccaguuuga

SEQ ID NO: 1019473 - RNA, 19 nt, Artificial Sequence
  Description of Artificial Sequence: Synthetic oligonucleotide
agcaccugauuugcgguag

SEQ ID NO: 1019474 - RNA, 19 nt, Artificial Sequence
  Description of Artificial Sequence: Synthetic oligonucleotide
gggaacaguggccucccgg

SEQ ID NO: 1019475 - RNA, 19 nt, Artificial Sequence
  Description of Artificial Sequence: Synthetic oligonucleotide
cagagagcggaaagccagc

SEQ ID NO: 1019476 - RNA, 19 nt, Artificial Sequence
  Description of Artificial Sequence: Synthetic oligonucleotide
agccgugcaucucuacaug

SEQ ID NO: 1019477 - RNA, 19 nt, Artificial Sequence
  Description of Artificial Sequence: Synthetic oligonucleotide
agcggaaagccagcuccgc

SEQ ID NO: 1019478 - RNA, 19 nt, Artificial Sequence
  Description of Artificial Sequence: Synthetic oligonucleotide
gaagcucaacagcccugag

SEQ ID NO: 1019479 - RNA, 19 nt, Artificial Sequence
  Description of Artificial Sequence: Synthetic oligonucleotide
guaccugguccugucggcg

SEQ ID NO: 1019480 - RNA, 19 nt, Artificial Sequence
  Description of Artificial Sequence: Synthetic oligonucleotide
cacugguuagacuguccac

SEQ ID NO: 1019481 - RNA, 19 nt, Artificial Sequence
  Description of Artificial Sequence: Synthetic oligonucleotide
ugcggaaugcaaugcucuc

SEQ ID NO: 1019482 - RNA, 19 nt, Artificial Sequence
  Description of Artificial Sequence: Synthetic oligonucleotide
gacucacgccacuucucug

SEQ ID NO: 1019483 - RNA, 19 nt, Artificial Sequence
  Description of Artificial Sequence: Synthetic oligonucleotide
ugauagcauggauggggaa

SEQ ID NO: 1019484 - RNA, 19 nt, Artificial Sequence
  Description of Artificial Sequence: Synthetic oligonucleotide
cacacaccaaaguggccug

SEQ ID NO: 1019485 - RNA, 19 nt, Artificial Sequence
  Description of Artificial Sequence: Synthetic oligonucleotide
cucggcacccggaucacuc

SEQ ID NO: 1019486 - RNA, 19 nt, Artificial Sequence
  Description of Artificial Sequence: Synthetic oligonucleotide
ccagaucuaggguucuagg

SEQ ID NO: 1019487 - RNA, 19 nt, Artificial Sequence
  Description of Artificial Sequence: Synthetic oligonucleotide
gugacaugcgguucacauc

SEQ ID NO: 1019488 - RNA, 19 nt, Artificial Sequence
  Description of Artificial Sequence: Synthetic oligonucleotide
uggauccuucucagagagc

SEQ ID NO: 1019489 - RNA, 19 nt, Artificial Sequence
  Description of Artificial Sequence: Synthetic oligonucleotide
augcgguucacauccucaa

SEQ ID NO: 1019490 - RNA, 19 nt, Artificial Sequence
  Description of Artificial Sequence: Synthetic oligonucleotide
ggaacaguggccucccgga

SEQ ID NO: 1019491 - RNA, 19 nt, Artificial Sequence
  Description of Artificial Sequence: Synthetic oligonucleotide
aucgugguccagggauucc

SEQ ID NO: 1019492 - RNA, 19 nt, Artificial Sequence
  Description of Artificial Sequence: Synthetic oligonucleotide
gaguugucagggcagcgua

SEQ ID NO: 1019493 - RNA, 19 nt, Artificial Sequence
  Description of Artificial Sequence: Synthetic oligonucleotide
auuggcguuggugaucuuu

SEQ ID NO: 1019494 - RNA, 19 nt, Artificial Sequence
  Description of Artificial Sequence: Synthetic oligonucleotide
ugguaaucuucaguacauc

SEQ ID NO: 1019495 - RNA, 19 nt, Artificial Sequence
  Description of Artificial Sequence: Synthetic oligonucleotide
ucacauccucaaguagggc

SEQ ID NO: 1019496 - RNA, 19 nt, Artificial Sequence
  Description of Artificial Sequence: Synthetic oligonucleotide
  modified_base (4)..(4): a, c, u, g, unknown or other
ucgngaaauuugagcucau

SEQ ID NO: 1019497 - RNA, 19 nt, Artificial Sequence
  Description of Artificial Sequence: Synthetic oligonucleotide
aggggcuuuucgccugcgg

SEQ ID NO: 1019498 - RNA, 19 nt, Artificial Sequence
  Description of Artificial Sequence: Synthetic oligonucleotide
cacgggaacaguggccucc

SEQ ID NO: 1019499 - RNA, 19 nt, Artificial Sequence
  Description of Artificial Sequence: Synthetic oligonucleotide
cccggugauagcauggaug

SEQ ID NO: 1019500 - RNA, 19 nt, Artificial Sequence
  Description of Artificial Sequence: Synthetic oligonucleotide
gugauagcauggaugggga

SEQ ID NO: 1019501 - RNA, 19 nt, Artificial Sequence
  Description of Artificial Sequence: Synthetic oligonucleotide
cuuucggaacacugacuca

SEQ ID NO: 1019502 - RNA, 19 nt, Artificial Sequence
  Description of Artificial Sequence: Synthetic oligonucleotide
cugaguugucagggcagcg

SEQ ID NO: 1019503 - RNA, 19 nt, Artificial Sequence
  Description of Artificial Sequence: Synthetic oligonucleotide
uacaagccgugcaucucua

SEQ ID NO: 1019504 - RNA, 19 nt, Artificial Sequence
  Description of Artificial Sequence: Synthetic oligonucleotide
gaacacugacucacgccac

SEQ ID NO: 1019505 - RNA, 19 nt, Artificial Sequence
  Description of Artificial Sequence: Synthetic oligonucleotide
gcuaccuugacaaggugga

SEQ ID NO: 1019506 - RNA, 19 nt, Artificial Sequence
  Description of Artificial Sequence: Synthetic oligonucleotide
caaguagggcuaccuugac

SEQ ID NO: 1019507 - RNA, 19 nt, Artificial Sequence
  Description of Artificial Sequence: Synthetic oligonucleotide
uccucgucgccgccugcag

SEQ ID NO: 1019508 - RNA, 19 nt, Artificial Sequence
  Description of Artificial Sequence: Synthetic oligonucleotide
cuucuccggaagcucaaca

SEQ ID NO: 1019509 - RNA, 19 nt, Artificial Sequence
  Description of Artificial Sequence: Synthetic oligonucleotide
cucccguagccacugcuuc

SEQ ID NO: 1019510 - RNA, 19 nt, Artificial Sequence
  Description of Artificial Sequence: Synthetic oligonucleotide
ucuaggguucuaggacaug

SEQ ID NO: 1019511 - RNA, 19 nt, Artificial Sequence
  Description of Artificial Sequence: Synthetic oligonucleotide
ggagcauuuugccgcaaca

SEQ ID NO: 1019512 - RNA, 19 nt, Artificial Sequence
  Description of Artificial Sequence: Synthetic oligonucleotide
  modified_base (14)..(14): a, c, u, g, unknown or other
caggaacucaucgngaaau

SEQ ID NO: 1019513 - RNA, 19 nt, Artificial Sequence
  Description of Artificial Sequence: Synthetic oligonucleotide
gagagcggaaagccagcuc

SEQ ID NO: 1019514 - RNA, 19 nt, Artificial Sequence
  Description of Artificial Sequence: Synthetic oligonucleotide
uccggguggucuucacucu

SEQ ID NO: 1019515 - RNA, 19 nt, Artificial Sequence
  Description of Artificial Sequence: Synthetic oligonucleotide
gcccucgguauacaagccg

SEQ ID NO: 1019516 - RNA, 19 nt, Artificial Sequence
  Description of Artificial Sequence: Synthetic oligonucleotide
auccucaaguagggcuacc

SEQ ID NO: 1019517 - RNA, 19 nt, Artificial Sequence
  Description of Artificial Sequence: Synthetic oligonucleotide
uggggauuuuggcccggac

SEQ ID NO: 1019518 - RNA, 19 nt, Artificial Sequence
  Description of Artificial Sequence: Synthetic oligonucleotide
acauccucaaguagggcua

SEQ ID NO: 1019519 - RNA, 19 nt, Artificial Sequence
  Description of Artificial Sequence: Synthetic oligonucleotide
cugggcgcuuuucauucug

SEQ ID NO: 1019520 - RNA, 19 nt, Artificial Sequence
  Description of Artificial Sequence: Synthetic oligonucleotide
aggcugauuuagagucacc

SEQ ID NO: 1019521 - RNA, 19 nt, Artificial Sequence
  Description of Artificial Sequence: Synthetic oligonucleotide
gcguuggugaucuuucgga

SEQ ID NO: 1019522 - RNA, 19 nt, Artificial Sequence
  Description of Artificial Sequence: Synthetic oligonucleotide
auuugcgguagaggcccuc

SEQ ID NO: 1019523 - RNA, 19 nt, Artificial Sequence
  Description of Artificial Sequence: Synthetic oligonucleotide
ccaguuugagaggccaugg

SEQ ID NO: 1019524 - RNA, 19 nt, Artificial Sequence
  Description of Artificial Sequence: Synthetic oligonucleotide
ggcagcguagcaggcaggg

SEQ ID NO: 1019525 - RNA, 19 nt, Artificial Sequence
  Description of Artificial Sequence: Synthetic oligonucleotide
agaggcccucgguauacaa

SEQ ID NO: 1019526 - RNA, 19 nt, Artificial Sequence
  Description of Artificial Sequence: Synthetic oligonucleotide
caccugauuugcgguagag

SEQ ID NO: 1019527 - RNA, 19 nt, Artificial Sequence
  Description of Artificial Sequence: Synthetic oligonucleotide
guguccgguuggcagcacc

SEQ ID NO: 1019528 - RNA, 19 nt, Artificial Sequence
  Description of Artificial Sequence: Synthetic oligonucleotide
guuagacuguccacacaca

SEQ ID NO: 1019529 - RNA, 19 nt, Artificial Sequence
  Description of Artificial Sequence: Synthetic oligonucleotide
cucauuggcguuggugauc

SEQ ID NO: 1019530 - RNA, 19 nt, Artificial Sequence
  Description of Artificial Sequence: Synthetic oligonucleotide
cccggaucacucuuccucc

SEQ ID NO: 1019531 - RNA, 19 nt, Artificial Sequence
  Description of Artificial Sequence: Synthetic oligonucleotide
ucacgccacuucucugaca

SEQ ID NO: 1019532 - RNA, 19 nt, Artificial Sequence
  Description of Artificial Sequence: Synthetic oligonucleotide
ggcucucggcgccucacgg

SEQ ID NO: 1019533 - RNA, 19 nt, Artificial Sequence
  Description of Artificial Sequence: Synthetic oligonucleotide
ucggcacccggaucacucu

SEQ ID NO: 1019534 - RNA, 19 nt, Artificial Sequence
  Description of Artificial Sequence: Synthetic oligonucleotide
cacugacucacgccacuuc

SEQ ID NO: 1019535 - RNA, 19 nt, Artificial Sequence
  Description of Artificial Sequence: Synthetic oligonucleotide
gccguaguucccguguccg

SEQ ID NO: 1019536 - RNA, 19 nt, Artificial Sequence
  Description of Artificial Sequence: Synthetic oligonucleotide
ucuguccucgucgccgccu

SEQ ID NO: 1019537 - RNA, 19 nt, Artificial Sequence
  Description of Artificial Sequence: Synthetic oligonucleotide
acacugugaucuggccgac

SEQ ID NO: 1019538 - RNA, 19 nt, Artificial Sequence
  Description of Artificial Sequence: Synthetic oligonucleotide
guagcaggcagggugcgaa

SEQ ID NO: 1019539 - RNA, 19 nt, Artificial Sequence
  Description of Artificial Sequence: Synthetic oligonucleotide
gggugcgaagaugauggcc

SEQ ID NO: 1019540 - RNA, 19 nt, Artificial Sequence
  Description of Artificial Sequence: Synthetic oligonucleotide
gacuuuguguaggaacagu

SEQ ID NO: 1019541 - RNA, 19 nt, Artificial Sequence
  Description of Artificial Sequence: Synthetic oligonucleotide
cugcggaaugcaaugcucu

SEQ ID NO: 1019542 - RNA, 19 nt, Artificial Sequence
  Description of Artificial Sequence: Synthetic oligonucleotide
cauccucaaguagggcuac

SEQ ID NO: 1019543 - RNA, 19 nt, Artificial Sequence
  Description of Artificial Sequence: Synthetic oligonucleotide
caguuugagaggccaugga

SEQ ID NO: 1019544 - RNA, 19 nt, Artificial Sequence
  Description of Artificial Sequence: Synthetic oligonucleotide
agguggaagaugagccucu

SEQ ID NO: 1019545 - RNA, 19 nt, Artificial Sequence
  Description of Artificial Sequence: Synthetic oligonucleotide
caucgugguccagggauuc

SEQ ID NO: 1019546 - RNA, 19 nt, Artificial Sequence
  Description of Artificial Sequence: Synthetic oligonucleotide
cucucggcgccucacggga

SEQ ID NO: 1019547 - RNA, 19 nt, Artificial Sequence
  Description of Artificial Sequence: Synthetic oligonucleotide
ccugcggaaugcaaugcuc

SEQ ID NO: 1019548 - RNA, 19 nt, Artificial Sequence
  Description of Artificial Sequence: Synthetic oligonucleotide
ucauccuucugggcgcuuu

SEQ ID NO: 1019549 - RNA, 19 nt, Artificial Sequence
  Description of Artificial Sequence: Synthetic oligonucleotide
ucaggaccccggugauagc

SEQ ID NO: 1019550 - RNA, 19 nt, Artificial Sequence
  Description of Artificial Sequence: Synthetic oligonucleotide
gagucacccugggagccug

SEQ ID NO: 1019551 - RNA, 19 nt, Artificial Sequence
  Description of Artificial Sequence: Synthetic oligonucleotide
ccucacgggaacaguggcc

SEQ ID NO: 1019552 - RNA, 19 nt, Artificial Sequence
  Description of Artificial Sequence: Synthetic oligonucleotide
uugcgguuucgguucuuuu

SEQ ID NO: 1019553 - RNA, 19 nt, Artificial Sequence
  Description of Artificial Sequence: Synthetic oligonucleotide
gcuggucaggugcaaggac

SEQ ID NO: 1019554 - RNA, 19 nt, Artificial Sequence
  Description of Artificial Sequence: Synthetic oligonucleotide
cagacugucugucaugguu

SEQ ID NO: 1019555 - RNA, 19 nt, Artificial Sequence
  Description of Artificial Sequence: Synthetic oligonucleotide
ccucauagggagacgaaaa

SEQ ID NO: 1019556 - RNA, 19 nt, Artificial Sequence
  Description of Artificial Sequence: Synthetic oligonucleotide
gggcuuuucgccugcggca

SEQ ID NO: 1019557 - RNA, 19 nt, Artificial Sequence
  Description of Artificial Sequence: Synthetic oligonucleotide
gccucacgggaacaguggc

SEQ ID NO: 1019558 - RNA, 19 nt, Artificial Sequence
  Description of Artificial Sequence: Synthetic oligonucleotide
uccuggugacaugcgguuc

SEQ ID NO: 1019559 - RNA, 19 nt, Artificial Sequence
  Description of Artificial Sequence: Synthetic oligonucleotide
acagucgcuuaaaggcuga

SEQ ID NO: 1019560 - RNA, 19 nt, Artificial Sequence
  Description of Artificial Sequence: Synthetic oligonucleotide
uuuucgccugcggcauggc

SEQ ID NO: 1019561 - RNA, 19 nt, Artificial Sequence
  Description of Artificial Sequence: Synthetic oligonucleotide
cucggcgccucacgggaac

SEQ ID NO: 1019562 - RNA, 19 nt, Artificial Sequence
  Description of Artificial Sequence: Synthetic oligonucleotide
agucgcuuaaaggcugauu

SEQ ID NO: 1019563 - RNA, 19 nt, Artificial Sequence
  Description of Artificial Sequence: Synthetic oligonucleotide
caggaccccggugauagca

SEQ ID NO: 1019564 - RNA, 19 nt, Artificial Sequence
  Description of Artificial Sequence: Synthetic oligonucleotide
gcucucggcgccucacggg

SEQ ID NO: 1019565 - RNA, 19 nt, Artificial Sequence
  Description of Artificial Sequence: Synthetic oligonucleotide
gugaucuggccgaccuugc

SEQ ID NO: 1019566 - RNA, 19 nt, Artificial Sequence
  Description of Artificial Sequence: Synthetic oligonucleotide
cucacgggaacaguggccu

SEQ ID NO: 1019567 - RNA, 19 nt, Artificial Sequence
  Description of Artificial Sequence: Synthetic oligonucleotide
cuguccucgucgccgccug

SEQ ID NO: 1019568 - RNA, 19 nt, Artificial Sequence
  Description of Artificial Sequence: Synthetic oligonucleotide
gaaagugcuucgagacucu

SEQ ID NO: 1019569 - RNA, 19 nt, Artificial Sequence
  Description of Artificial Sequence: Synthetic oligonucleotide
cugccguaguucccguguc

SEQ ID NO: 1019570 - RNA, 19 nt, Artificial Sequence
  Description of Artificial Sequence: Synthetic oligonucleotide
cugcguuuggccccaggaa

SEQ ID NO: 1019571 - RNA, 19 nt, Artificial Sequence
  Description of Artificial Sequence: Synthetic oligonucleotide
ucacgggaacaguggccuc

SEQ ID NO: 1019572 - RNA, 19 nt, Artificial Sequence
  Description of Artificial Sequence: Synthetic oligonucleotide
ccgaguaccugcguuuggc

SEQ ID NO: 1019573 - RNA, 19 nt, Artificial Sequence
  Description of Artificial Sequence: Synthetic oligonucleotide
gcacccggaucacucuucc

SEQ ID NO: 1019574 - RNA, 19 nt, Artificial Sequence
  Description of Artificial Sequence: Synthetic oligonucleotide
uagaggcccucgguauaca

SEQ ID NO: 1019575 - RNA, 19 nt, Artificial Sequence
  Description of Artificial Sequence: Synthetic oligonucleotide
ucucggcgccucacgggaa

SEQ ID NO: 1019576 - RNA, 19 nt, Artificial Sequence
  Description of Artificial Sequence: Synthetic oligonucleotide
cagcacgaugggcacagaa

SEQ ID NO: 1019577 - RNA, 19 nt, Artificial Sequence
  Description of Artificial Sequence: Synthetic oligonucleotide
cuucgagacucuucuuggu

SEQ ID NO: 1019578 - RNA, 19 nt, Artificial Sequence
  Description of Artificial Sequence: Synthetic oligonucleotide
uucccguguccgguuggca

SEQ ID NO: 1019579 - RNA, 19 nt, Artificial Sequence
  Description of Artificial Sequence: Synthetic oligonucleotide
cgaguaccugcguuuggcc

SEQ ID NO: 1019580 - RNA, 19 nt, Artificial Sequence
  Description of Artificial Sequence: Synthetic oligonucleotide
ggggagcuugauguuggcc

SEQ ID NO: 1019581 - RNA, 19 nt, Artificial Sequence
  Description of Artificial Sequence: Synthetic oligonucleotide
cccguguccgguuggcagc

SEQ ID NO: 1019582 - RNA, 19 nt, Artificial Sequence
  Description of Artificial Sequence: Synthetic oligonucleotide
ggcgauguauacagaaugu

SEQ ID NO: 1019583 - RNA, 19 nt, Artificial Sequence
  Description of Artificial Sequence: Synthetic oligonucleotide
cacugugaucuggccgacc

SEQ ID NO: 1019584 - RNA, 19 nt, Artificial Sequence
  Description of Artificial Sequence: Synthetic oligonucleotide
ggauuuuggcccggacccc

SEQ ID NO: 1019585 - RNA, 19 nt, Artificial Sequence
  Description of Artificial Sequence: Synthetic oligonucleotide
agucuccauacugggcaaa

SEQ ID NO: 1019586 - RNA, 19 nt, Artificial Sequence
  Description of Artificial Sequence: Synthetic oligonucleotide
acacugacucacgccacuu

SEQ ID NO: 1019587 - RNA, 19 nt, Artificial Sequence
  Description of Artificial Sequence: Synthetic oligonucleotide
uccugucggcgggcgggcg

SEQ ID NO: 1019588 - RNA, 19 nt, Artificial Sequence
  Description of Artificial Sequence: Synthetic oligonucleotide
ccucgguauacaagccgug

SEQ ID NO: 1019589 - RNA, 19 nt, Artificial Sequence
  Description of Artificial Sequence: Synthetic oligonucleotide
gcgauguauacagaaugua

SEQ ID NO: 1019590 - RNA, 19 nt, Artificial Sequence
  Description of Artificial Sequence: Synthetic oligonucleotide
cuggcucggcacccggauc

SEQ ID NO: 1019591 - RNA, 19 nt, Artificial Sequence
  Description of Artificial Sequence: Synthetic oligonucleotide
ccguaguucccguguccgg

SEQ ID NO: 1019592 - RNA, 19 nt, Artificial Sequence
  Description of Artificial Sequence: Synthetic oligonucleotide
ccugcguuuggccccagga

SEQ ID NO: 1019593 - RNA, 19 nt, Artificial Sequence
  Description of Artificial Sequence: Synthetic oligonucleotide
ucuggccgaccuugcgguu

SEQ ID NO: 1019594 - RNA, 19 nt, Artificial Sequence
  Description of Artificial Sequence: Synthetic oligonucleotide
gucgccgccugcagccucc

SEQ ID NO: 1019595 - RNA, 19 nt, Artificial Sequence
  Description of Artificial Sequence: Synthetic oligonucleotide
cccguagccacugcuucag

SEQ ID NO: 1019596 - RNA, 19 nt, Artificial Sequence
  Description of Artificial Sequence: Synthetic oligonucleotide
gguuggcagcaccugauuu

SEQ ID NO: 1019597 - RNA, 19 nt, Artificial Sequence
  Description of Artificial Sequence: Synthetic oligonucleotide
gugcaaggacaggcccggg

SEQ ID NO: 1019598 - RNA, 19 nt, Artificial Sequence
  Description of Artificial Sequence: Synthetic oligonucleotide
gcgccucacgggaacagug

SEQ ID NO: 1019599 - RNA, 19 nt, Artificial Sequence
  Description of Artificial Sequence: Synthetic oligonucleotide
ggcgcuuuucauucuggau

SEQ ID NO: 1019600 - RNA, 19 nt, Artificial Sequence
  Description of Artificial Sequence: Synthetic oligonucleotide
cgguuucgguucuuuuccc

SEQ ID NO: 1019601 - RNA, 19 nt, Artificial Sequence
  Description of Artificial Sequence: Synthetic oligonucleotide
uccguuccaugagcaucuc

SEQ ID NO: 1019602 - RNA, 19 nt, Artificial Sequence
  Description of Artificial Sequence: Synthetic oligonucleotide
ggcccucgguauacaagcc

SEQ ID NO: 1019603 - RNA, 19 nt, Artificial Sequence
  Description of Artificial Sequence: Synthetic oligonucleotide
aggaccccggugauagcau

SEQ ID NO: 1019604 - RNA, 19 nt, Artificial Sequence
  Description of Artificial Sequence: Synthetic oligonucleotide
caggggcuuuucgccugcg

SEQ ID NO: 1019605 - RNA, 19 nt, Artificial Sequence
  Description of Artificial Sequence: Synthetic oligonucleotide
guacauccuucaugcuggu

SEQ ID NO: 1019606 - RNA, 19 nt, Artificial Sequence
  Description of Artificial Sequence: Synthetic oligonucleotide
cuaccuugacaagguggaa

SEQ ID NO: 1019607 - RNA, 19 nt, Artificial Sequence
  Description of Artificial Sequence: Synthetic oligonucleotide
ccugucggcgggcgggcgg

SEQ ID NO: 1019608 - RNA, 19 nt, Artificial Sequence
  Description of Artificial Sequence: Synthetic oligonucleotide
gcuuuucgccugcggcaug

SEQ ID NO: 1019609 - RNA, 19 nt, Artificial Sequence
  Description of Artificial Sequence: Synthetic oligonucleotide
guaguucccguguccgguu

SEQ ID NO: 1019610 - RNA, 19 nt, Artificial Sequence
  Description of Artificial Sequence: Synthetic oligonucleotide
gccgugcaucucuacaugu

SEQ ID NO: 1019611 - RNA, 19 nt, Artificial Sequence
  Description of Artificial Sequence: Synthetic oligonucleotide
ccucgucgccgccugcagc

SEQ ID NO: 1019612 - RNA, 19 nt, Artificial Sequence
  Description of Artificial Sequence: Synthetic oligonucleotide
gcguagcaggcagggugcg

SEQ ID NO: 1019613 - RNA, 19 nt, Artificial Sequence
  Description of Artificial Sequence: Synthetic oligonucleotide
gucugacaucgugguccag

SEQ ID NO: 1019614 - RNA, 19 nt, Artificial Sequence
  Description of Artificial Sequence: Synthetic oligonucleotide
ccaccugcccuccgcugcc

SEQ ID NO: 1019615 - RNA, 19 nt, Artificial Sequence
  Description of Artificial Sequence: Synthetic oligonucleotide
cccucgguauacaagccgu

SEQ ID NO: 1019616 - RNA, 19 nt, Artificial Sequence
  Description of Artificial Sequence: Synthetic oligonucleotide
gccugcggcauggcggugc

SEQ ID NO: 1019617 - RNA, 19 nt, Artificial Sequence
  Description of Artificial Sequence: Synthetic oligonucleotide
gcuucuccggaagcucaac

SEQ ID NO: 1019618 - RNA, 19 nt, Artificial Sequence
  Description of Artificial Sequence: Synthetic oligonucleotide
gcaccugauuugcgguaga

SEQ ID NO: 1019619 - RNA, 19 nt, Artificial Sequence
  Description of Artificial Sequence: Synthetic oligonucleotide
ggcacccggaucacucuuc

SEQ ID NO: 1019620 - RNA, 19 nt, Artificial Sequence
  Description of Artificial Sequence: Synthetic oligonucleotide
gggcagcguagcaggcagg

SEQ ID NO: 1019621 - RNA, 19 nt, Artificial Sequence
  Description of Artificial Sequence: Synthetic oligonucleotide
caacuagcuguuccugcuu

SEQ ID NO: 1019622 - RNA, 19 nt, Artificial Sequence
  Description of Artificial Sequence: Synthetic oligonucleotide
gccugcggaaugcaaugcu

SEQ ID NO: 1019623 - RNA, 19 nt, Artificial Sequence
  Description of Artificial Sequence: Synthetic oligonucleotide
ggguggucuucacucuugu

SEQ ID NO: 1019624 - RNA, 19 nt, Artificial Sequence
  Description of Artificial Sequence: Synthetic oligonucleotide
gcuccuggugacaugcggu

SEQ ID NO: 1019625 - RNA, 19 nt, Artificial Sequence
  Description of Artificial Sequence: Synthetic oligonucleotide
cuggggauuuuggcccgga

SEQ ID NO: 1019626 - RNA, 19 nt, Artificial Sequence
  Description of Artificial Sequence: Synthetic oligonucleotide
gccugccguaguucccgug

SEQ ID NO: 1019627 - RNA, 19 nt, Artificial Sequence
  Description of Artificial Sequence: Synthetic oligonucleotide
ccugccguaguucccgugu

SEQ ID NO: 1019628 - RNA, 19 nt, Artificial Sequence
  Description of Artificial Sequence: Synthetic oligonucleotide
cuugcgguuucgguucuuu

SEQ ID NO: 1019629 - RNA, 19 nt, Artificial Sequence
  Description of Artificial Sequence: Synthetic oligonucleotide
gggagacgaaaaccccagu

SEQ ID NO: 1019630 - RNA, 19 nt, Artificial Sequence
  Description of Artificial Sequence: Synthetic oligonucleotide
ccuggggauuuuggcccgg

SEQ ID NO: 1019631 - RNA, 19 nt, Artificial Sequence
  Description of Artificial Sequence: Synthetic oligonucleotide
gcguuuggccccaggaagu

SEQ ID NO: 1019632 - RNA, 19 nt, Artificial Sequence
  Description of Artificial Sequence: Synthetic oligonucleotide
ggggcgauguauacagaau

SEQ ID NO: 1019633 - RNA, 19 nt, Artificial Sequence
  Description of Artificial Sequence: Synthetic oligonucleotide
gcgggcgggcggcucucgg

SEQ ID NO: 1019634 - RNA, 19 nt, Artificial Sequence
  Description of Artificial Sequence: Synthetic oligonucleotide
ggguccgaguaccugcguu

SEQ ID NO: 1019635 - RNA, 19 nt, Artificial Sequence
  Description of Artificial Sequence: Synthetic oligonucleotide
ggcuuuucgccugcggcau

SEQ ID NO: 1019636 - RNA, 19 nt, Artificial Sequence
  Description of Artificial Sequence: Synthetic oligonucleotide
cguuuggccccaggaaguc

SEQ ID NO: 1019637 - RNA, 19 nt, Artificial Sequence
  Description of Artificial Sequence: Synthetic oligonucleotide
ccggaagcucaacagcccu

SEQ ID NO: 1019638 - RNA, 19 nt, Artificial Sequence
  Description of Artificial Sequence: Synthetic oligonucleotide
cacccggaucacucuuccu

SEQ ID NO: 1019639 - RNA, 19 nt, Artificial Sequence
  Description of Artificial Sequence: Synthetic oligonucleotide
ccgaccuugcgguuucggu

SEQ ID NO: 1019640 - RNA, 19 nt, Artificial Sequence
  Description of Artificial Sequence: Synthetic oligonucleotide
cugcagugccugccguagu

SEQ ID NO: 1019641 - RNA, 19 nt, Artificial Sequence
  Description of Artificial Sequence: Synthetic oligonucleotide
ggccgaccuugcgguuucg

SEQ ID NO: 1019642 - RNA, 19 nt, Artificial Sequence
  Description of Artificial Sequence: Synthetic oligonucleotide
ccagggugcccugugacau

SEQ ID NO: 1019643 - RNA, 19 nt, Artificial Sequence
  Description of Artificial Sequence: Synthetic oligonucleotide
ggcucggcacccggaucac

SEQ ID NO: 1019644 - RNA, 19 nt, Artificial Sequence
  Description of Artificial Sequence: Synthetic oligonucleotide
ccacacacgugguaaucuu

SEQ ID NO: 1019645 - RNA, 19 nt, Artificial Sequence
  Description of Artificial Sequence: Synthetic oligonucleotide
cugcggcauggcggugcug

SEQ ID NO: 1019646 - RNA, 19 nt, Artificial Sequence
  Description of Artificial Sequence: Synthetic oligonucleotide
cuggccgaccuugcgguuu

SEQ ID NO: 1019647 - RNA, 19 nt, Artificial Sequence
  Description of Artificial Sequence: Synthetic oligonucleotide
ccucaaguagggcuaccuu

SEQ ID NO: 1019648 - RNA, 19 nt, Artificial Sequence
  Description of Artificial Sequence: Synthetic oligonucleotide
ggcgggcgggcggcucucg

SEQ ID NO: 1019649 - RNA, 19 nt, Artificial Sequence
  Description of Artificial Sequence: Synthetic oligonucleotide
cguaguucccguguccggu

SEQ ID NO: 1019650 - RNA, 19 nt, Artificial Sequence
  Description of Artificial Sequence: Synthetic oligonucleotide
gucggcgggcgggcggcuc

SEQ ID NO: 1019651 - RNA, 19 nt, Artificial Sequence
  Description of Artificial Sequence: Synthetic oligonucleotide
ccgguuggcagcaccugau

SEQ ID NO: 1019652 - RNA, 19 nt, Artificial Sequence
  Description of Artificial Sequence: Synthetic oligonucleotide
cagugcccgccucauccuu

SEQ ID NO: 1019653 - RNA, 19 nt, Artificial Sequence
  Description of Artificial Sequence: Synthetic oligonucleotide
gcccuccgcugcccucugc

SEQ ID NO: 1019654 - RNA, 19 nt, Artificial Sequence
  Description of Artificial Sequence: Synthetic oligonucleotide
ccguguccgguuggcagca

SEQ ID NO: 1019655 - RNA, 19 nt, Artificial Sequence
  Description of Artificial Sequence: Synthetic oligonucleotide
ccggaucacucuuccuccu

SEQ ID NO: 1019656 - RNA, 19 nt, Artificial Sequence
  Description of Artificial Sequence: Synthetic oligonucleotide
cagucgcuuaaaggcugau

SEQ ID NO: 1019657 - RNA, 19 nt, Artificial Sequence
  Description of Artificial Sequence: Synthetic oligonucleotide
ccuccggguggucuucacu

SEQ ID NO: 1019658 - RNA, 19 nt, Artificial Sequence
  Description of Artificial Sequence: Synthetic oligonucleotide
gggguccgaguaccugcgu

SEQ ID NO: 1019659 - RNA, 19 nt, Artificial Sequence
  Description of Artificial Sequence: Synthetic oligonucleotide
gcagcguagcaggcagggu

SEQ ID NO: 1019660 - RNA, 19 nt, Artificial Sequence
  Description of Artificial Sequence: Synthetic oligonucleotide
gcggcauggcggugcugcu

SEQ ID NO: 1019661 - RNA, 19 nt, Artificial Sequence
  Description of Artificial Sequence: Synthetic oligonucleotide
cguagcaggcagggugcga

SEQ ID NO: 1019662 - RNA, 19 nt, Artificial Sequence
  Description of Artificial Sequence: Synthetic oligonucleotide
  modified_base (3)..(3): a, c, u, g, unknown or other
cgngaaauuugagcucauu

SEQ ID NO: 1019663 - RNA, 19 nt, Artificial Sequence
  Description of Artificial Sequence: Synthetic oligonucleotide
ccugcggcauggcggugcu

SEQ ID NO: 1019664 - RNA, 19 nt, Artificial Sequence
  Description of Artificial Sequence: Synthetic oligonucleotide
cauuggcguuggugaucuu

SEQ ID NO: 1019665 - RNA, 19 nt, Artificial Sequence
  Description of Artificial Sequence: Synthetic oligonucleotide
ccggguggucuucacucuu

SEQ ID NO: 1019666 - RNA, 19 nt, Artificial Sequence
  Description of Artificial Sequence: Synthetic oligonucleotide
ccccggugauagcauggau

SEQ ID NO: 1019667 - RNA, 19 nt, Artificial Sequence
  Description of Artificial Sequence: Synthetic oligonucleotide
cggcacccggaucacucuu

SEQ ID NO: 1019668 - RNA, 19 nt, Artificial Sequence
  Description of Artificial Sequence: Synthetic oligonucleotide
cgccugcggcauggcggug

SEQ ID NO: 1019669 - RNA, 19 nt, Artificial Sequence
  Description of Artificial Sequence: Synthetic oligonucleotide
cgggcggcucucggcgccu

SEQ ID NO: 1019670 - RNA, 19 nt, Artificial Sequence
  Description of Artificial Sequence: Synthetic oligonucleotide
  modified_base (1)..(1): a, c, u, g, unknown or other
ngaaauuugagcucauugg

SEQ ID NO: 1019671 - RNA, 19 nt, Artificial Sequence
  Description of Artificial Sequence: Synthetic oligonucleotide
aagaagaaguucuauaauc

SEQ ID NO: 1019672 - RNA, 19 nt, Artificial Sequence
  Description of Artificial Sequence: Synthetic oligonucleotide
aauaagaauguccaagcuc

SEQ ID NO: 1019673 - RNA, 19 nt, Artificial Sequence
  Description of Artificial Sequence: Synthetic oligonucleotide
aaaaccucaucauagagca

SEQ ID NO: 1019674 - RNA, 19 nt, Artificial Sequence
  Description of Artificial Sequence: Synthetic oligonucleotide
aauauaaggaugucaucac

SEQ ID NO: 1019675 - RNA, 19 nt, Artificial Sequence
  Description of Artificial Sequence: Synthetic oligonucleotide
uaaucuuuucaacagcugg

SEQ ID NO: 1019676 - RNA, 19 nt, Artificial Sequence
  Description of Artificial Sequence: Synthetic oligonucleotide
uuccaaacgacagagaugg

SEQ ID NO: 1019677 - RNA, 19 nt, Artificial Sequence
  Description of Artificial Sequence: Synthetic oligonucleotide
aaauucagauauaugauuc

SEQ ID NO: 1019678 - RNA, 19 nt, Artificial Sequence
  Description of Artificial Sequence: Synthetic oligonucleotide
ugaauuaacaucugcaaac

SEQ ID NO: 1019679 - RNA, 19 nt, Artificial Sequence
  Description of Artificial Sequence: Synthetic oligonucleotide
ugaaguucauuuaacuggg

SEQ ID NO: 1019680 - RNA, 19 nt, Artificial Sequence
  Description of Artificial Sequence: Synthetic oligonucleotide
agauauaugauuccaagga

SEQ ID NO: 1019681 - RNA, 19 nt, Artificial Sequence
  Description of Artificial Sequence: Synthetic oligonucleotide
uauaugauuccaaggagcc

SEQ ID NO: 1019682 - RNA, 19 nt, Artificial Sequence
  Description of Artificial Sequence: Synthetic oligonucleotide
ugacgaaugaaauugucag

SEQ ID NO: 1019683 - RNA, 19 nt, Artificial Sequence
  Description of Artificial Sequence: Synthetic oligonucleotide
auuaguaagugguauuaac

SEQ ID NO: 1019684 - RNA, 19 nt, Artificial Sequence
  Description of Artificial Sequence: Synthetic oligonucleotide
ucauagagcaaauagcucu

SEQ ID NO: 1019685 - RNA, 19 nt, Artificial Sequence
  Description of Artificial Sequence: Synthetic oligonucleotide
uuaagaagaaguucuauaa

SEQ ID NO: 1019686 - RNA, 19 nt, Artificial Sequence
  Description of Artificial Sequence: Synthetic oligonucleotide
aaauccagcaagcaggaga

SEQ ID NO: 1019687 - RNA, 19 nt, Artificial Sequence
  Description of Artificial Sequence: Synthetic oligonucleotide
uuaacauugccuucucugg

SEQ ID NO: 1019688 - RNA, 19 nt, Artificial Sequence
  Description of Artificial Sequence: Synthetic oligonucleotide
auuaacaaguccaagaucu

SEQ ID NO: 1019689 - RNA, 19 nt, Artificial Sequence
  Description of Artificial Sequence: Synthetic oligonucleotide
ucagauauaugauuccaag

SEQ ID NO: 1019690 - RNA, 19 nt, Artificial Sequence
  Description of Artificial Sequence: Synthetic oligonucleotide
uaugcaaagcauuccaucc

SEQ ID NO: 1019691 - RNA, 19 nt, Artificial Sequence
  Description of Artificial Sequence: Synthetic oligonucleotide
aagaagaguuugcacgagc

SEQ ID NO: 1019692 - RNA, 19 nt, Artificial Sequence
  Description of Artificial Sequence: Synthetic oligonucleotide
uuauaugacccucuugugc

SEQ ID NO: 1019693 - RNA, 19 nt, Artificial Sequence
  Description of Artificial Sequence: Synthetic oligonucleotide
uaucuguccacuuucaaca

SEQ ID NO: 1019694 - RNA, 19 nt, Artificial Sequence
  Description of Artificial Sequence: Synthetic oligonucleotide
ugcaguaauauuuccaggc

SEQ ID NO: 1019695 - RNA, 19 nt, Artificial Sequence
  Description of Artificial Sequence: Synthetic oligonucleotide
uaaaguaguugcauuagga

SEQ ID NO: 1019696 - RNA, 19 nt, Artificial Sequence
  Description of Artificial Sequence: Synthetic oligonucleotide
ucauacuucaggcaguaug

SEQ ID NO: 1019697 - RNA, 19 nt, Artificial Sequence
  Description of Artificial Sequence: Synthetic oligonucleotide
auauaugauuccaaggagc

SEQ ID NO: 1019698 - RNA, 19 nt, Artificial Sequence
  Description of Artificial Sequence: Synthetic oligonucleotide
agugauuuuagcuccaugu

SEQ ID NO: 1019699 - RNA, 19 nt, Artificial Sequence
  Description of Artificial Sequence: Synthetic oligonucleotide
aauugucagaacgaagacg

SEQ ID NO: 1019700 - RNA, 19 nt, Artificial Sequence
  Description of Artificial Sequence: Synthetic oligonucleotide
accgcuaggaugcuaaggc

SEQ ID NO: 1019701 - RNA, 19 nt, Artificial Sequence
  Description of Artificial Sequence: Synthetic oligonucleotide
agacguucugcuuuuaaac

SEQ ID NO: 1019702 - RNA, 19 nt, Artificial Sequence
  Description of Artificial Sequence: Synthetic oligonucleotide
gacaauugauauuugcacc

SEQ ID NO: 1019703 - RNA, 19 nt, Artificial Sequence
  Description of Artificial Sequence: Synthetic oligonucleotide
aaacauggaaaacuucuca

SEQ ID NO: 1019704 - RNA, 19 nt, Artificial Sequence
  Description of Artificial Sequence: Synthetic oligonucleotide
gaugcuaaggcgcaacucc

SEQ ID NO: 1019705 - RNA, 19 nt, Artificial Sequence
  Description of Artificial Sequence: Synthetic oligonucleotide
cacaaaggggaauugaacc

SEQ ID NO: 1019706 - RNA, 19 nt, Artificial Sequence
  Description of Artificial Sequence: Synthetic oligonucleotide
aauguccuugacucacugc

SEQ ID NO: 1019707 - RNA, 19 nt, Artificial Sequence
  Description of Artificial Sequence: Synthetic oligonucleotide
ugugauuuuccaauguccu

SEQ ID NO: 1019708 - RNA, 19 nt, Artificial Sequence
  Description of Artificial Sequence: Synthetic oligonucleotide
ugaaauugucagaacgaag

SEQ ID NO: 1019709 - RNA, 19 nt, Artificial Sequence
  Description of Artificial Sequence: Synthetic oligonucleotide
uugcauuaggaucugcucc

SEQ ID NO: 1019710 - RNA, 19 nt, Artificial Sequence
  Description of Artificial Sequence: Synthetic oligonucleotide
uuaucagcaacauccacac

SEQ ID NO: 1019711 - RNA, 19 nt, Artificial Sequence
  Description of Artificial Sequence: Synthetic oligonucleotide
aaguucauuuaacugggcu

SEQ ID NO: 1019712 - RNA, 19 nt, Artificial Sequence
  Description of Artificial Sequence: Synthetic oligonucleotide
caaacgacagagaugggcc

SEQ ID NO: 1019713 - RNA, 19 nt, Artificial Sequence
  Description of Artificial Sequence: Synthetic oligonucleotide
aaugaaauugucagaacga

SEQ ID NO: 1019714 - RNA, 19 nt, Artificial Sequence
  Description of Artificial Sequence: Synthetic oligonucleotide
aguccaaccgcuaggaugc

SEQ ID NO: 1019715 - RNA, 19 nt, Artificial Sequence
  Description of Artificial Sequence: Synthetic oligonucleotide
uuuuaaacugguccgaauu

SEQ ID NO: 1019716 - RNA, 19 nt, Artificial Sequence
  Description of Artificial Sequence: Synthetic oligonucleotide
auuacaguaaagaucagga

SEQ ID NO: 1019717 - RNA, 19 nt, Artificial Sequence
  Description of Artificial Sequence: Synthetic oligonucleotide
cuuuugguuagucucgccg

SEQ ID NO: 1019718 - RNA, 19 nt, Artificial Sequence
  Description of Artificial Sequence: Synthetic oligonucleotide
cagauauaugauuccaagg

SEQ ID NO: 1019719 - RNA, 19 nt, Artificial Sequence
  Description of Artificial Sequence: Synthetic oligonucleotide
gaauugaacccaaagacca

SEQ ID NO: 1019720 - RNA, 19 nt, Artificial Sequence
  Description of Artificial Sequence: Synthetic oligonucleotide
acaguccuuuuguaaagcc

SEQ ID NO: 1019721 - RNA, 19 nt, Artificial Sequence
  Description of Artificial Sequence: Synthetic oligonucleotide
agcaaauagcucugcagac

SEQ ID NO: 1019722 - RNA, 19 nt, Artificial Sequence
  Description of Artificial Sequence: Synthetic oligonucleotide
uaguaagugguauuaacaa

SEQ ID NO: 1019723 - RNA, 19 nt, Artificial Sequence
  Description of Artificial Sequence: Synthetic oligonucleotide
auugucagaacgaagacgu

SEQ ID NO: 1019724 - RNA, 19 nt, Artificial Sequence
  Description of Artificial Sequence: Synthetic oligonucleotide
cacaagugcgauuaguaag

SEQ ID NO: 1019725 - RNA, 19 nt, Artificial Sequence
  Description of Artificial Sequence: Synthetic oligonucleotide
aguuccacacauuuuauau

SEQ ID NO: 1019726 - RNA, 19 nt, Artificial Sequence
  Description of Artificial Sequence: Synthetic oligonucleotide
acaucugcaaacauucuac

SEQ ID NO: 1019727 - RNA, 19 nt, Artificial Sequence
  Description of Artificial Sequence: Synthetic oligonucleotide
ugugcagcggcaugaauag

SEQ ID NO: 1019728 - RNA, 19 nt, Artificial Sequence
  Description of Artificial Sequence: Synthetic oligonucleotide
aagugcgauuaguaagugg

SEQ ID NO: 1019729 - RNA, 19 nt, Artificial Sequence
  Description of Artificial Sequence: Synthetic oligonucleotide
uguugaagcaacagcuuca

SEQ ID NO: 1019730 - RNA, 19 nt, Artificial Sequence
  Description of Artificial Sequence: Synthetic oligonucleotide
cugcuuuuaaacugguccg

SEQ ID NO: 1019731 - RNA, 19 nt, Artificial Sequence
  Description of Artificial Sequence: Synthetic oligonucleotide
ucuaaaguaguugcauuag

SEQ ID NO: 1019732 - RNA, 19 nt, Artificial Sequence
  Description of Artificial Sequence: Synthetic oligonucleotide
ugugauaagcugcuucaug

SEQ ID NO: 1019733 - RNA, 19 nt, Artificial Sequence
  Description of Artificial Sequence: Synthetic oligonucleotide
ugcggaagagcccaagaag

SEQ ID NO: 1019734 - RNA, 19 nt, Artificial Sequence
  Description of Artificial Sequence: Synthetic oligonucleotide
caagggaguagcuuugucc

SEQ ID NO: 1019735 - RNA, 19 nt, Artificial Sequence
  Description of Artificial Sequence: Synthetic oligonucleotide
cauaugcugcggaagagcc

SEQ ID NO: 1019736 - RNA, 19 nt, Artificial Sequence
  Description of Artificial Sequence: Synthetic oligonucleotide
aguagcuuuguccaaggcu

SEQ ID NO: 1019737 - RNA, 19 nt, Artificial Sequence
  Description of Artificial Sequence: Synthetic oligonucleotide
cuaaaguaguugcauuagg

SEQ ID NO: 1019738 - RNA, 19 nt, Artificial Sequence
  Description of Artificial Sequence: Synthetic oligonucleotide
caacugacgaaugaaauug

SEQ ID NO: 1019739 - RNA, 19 nt, Artificial Sequence
  Description of Artificial Sequence: Synthetic oligonucleotide
uauuaacaaguccaagauc

SEQ ID NO: 1019740 - RNA, 19 nt, Artificial Sequence
  Description of Artificial Sequence: Synthetic oligonucleotide
uuuauaugacccucuugug

SEQ ID NO: 1019741 - RNA, 19 nt, Artificial Sequence
  Description of Artificial Sequence: Synthetic oligonucleotide
uccgaauuuccaaacgaca

SEQ ID NO: 1019742 - RNA, 19 nt, Artificial Sequence
  Description of Artificial Sequence: Synthetic oligonucleotide
gggaauugaacccaaagac

SEQ ID NO: 1019743 - RNA, 19 nt, Artificial Sequence
  Description of Artificial Sequence: Synthetic oligonucleotide
uuuccaaacgacagagaug

SEQ ID NO: 1019744 - RNA, 19 nt, Artificial Sequence
  Description of Artificial Sequence: Synthetic oligonucleotide
cauuacaguaaagaucagg

SEQ ID NO: 1019745 - RNA, 19 nt, Artificial Sequence
  Description of Artificial Sequence: Synthetic oligonucleotide
uaagaagaaguucuauaau

SEQ ID NO: 1019746 - RNA, 19 nt, Artificial Sequence
  Description of Artificial Sequence: Synthetic oligonucleotide
uucugcaguaauauuucca

SEQ ID NO: 1019747 - RNA, 19 nt, Artificial Sequence
  Description of Artificial Sequence: Synthetic oligonucleotide
uuaugcaaagcauuccauc

SEQ ID NO: 1019748 - RNA, 19 nt, Artificial Sequence
  Description of Artificial Sequence: Synthetic oligonucleotide
gaguccaaccgcuaggaug

SEQ ID NO: 1019749 - RNA, 19 nt, Artificial Sequence
  Description of Artificial Sequence: Synthetic oligonucleotide
aguaagccucuguaaaauc

SEQ ID NO: 1019750 - RNA, 19 nt, Artificial Sequence
  Description of Artificial Sequence: Synthetic oligonucleotide
uacacaaaggggaauugaa

SEQ ID NO: 1019751 - RNA, 19 nt, Artificial Sequence
  Description of Artificial Sequence: Synthetic oligonucleotide
auuccgaagucauccuggc

SEQ ID NO: 1019752 - RNA, 19 nt, Artificial Sequence
  Description of Artificial Sequence: Synthetic oligonucleotide
agugcgauuaguaaguggu

SEQ ID NO: 1019753 - RNA, 19 nt, Artificial Sequence
  Description of Artificial Sequence: Synthetic oligonucleotide
aagauguaaagcacagaag

SEQ ID NO: 1019754 - RNA, 19 nt, Artificial Sequence
  Description of Artificial Sequence: Synthetic oligonucleotide
gguauuaacaaguccaaga

SEQ ID NO: 1019755 - RNA, 19 nt, Artificial Sequence
  Description of Artificial Sequence: Synthetic oligonucleotide
uauuuccaggcauucuucc

SEQ ID NO: 1019756 - RNA, 19 nt, Artificial Sequence
  Description of Artificial Sequence: Synthetic oligonucleotide
augggucaaauccagcaag

SEQ ID NO: 1019757 - RNA, 19 nt, Artificial Sequence
  Description of Artificial Sequence: Synthetic oligonucleotide
uuuaaacugguccgaauuu

SEQ ID NO: 1019758 - RNA, 19 nt, Artificial Sequence
  Description of Artificial Sequence: Synthetic oligonucleotide
aaugggucaaauccagcaa

SEQ ID NO: 1019759 - RNA, 19 nt, Artificial Sequence
  Description of Artificial Sequence: Synthetic oligonucleotide
agaagccuuaugcaaagca

SEQ ID NO: 1019760 - RNA, 19 nt, Artificial Sequence
  Description of Artificial Sequence: Synthetic oligonucleotide
agcagcuacaaacaagggu

SEQ ID NO: 1019761 - RNA, 19 nt, Artificial Sequence
  Description of Artificial Sequence: Synthetic oligonucleotide
auuuuauaugacccucuug

SEQ ID NO: 1019762 - RNA, 19 nt, Artificial Sequence
  Description of Artificial Sequence: Synthetic oligonucleotide
uucgaggucuguuccaugc

SEQ ID NO: 1019763 - RNA, 19 nt, Artificial Sequence
  Description of Artificial Sequence: Synthetic oligonucleotide
aaacaagggugugauuccg

SEQ ID NO: 1019764 - RNA, 19 nt, Artificial Sequence
  Description of Artificial Sequence: Synthetic oligonucleotide
ugaacccaaagaccaagca

SEQ ID NO: 1019765 - RNA, 19 nt, Artificial Sequence
  Description of Artificial Sequence: Synthetic oligonucleotide
agcagagauaaucuuuuca

SEQ ID NO: 1019766 - RNA, 19 nt, Artificial Sequence
  Description of Artificial Sequence: Synthetic oligonucleotide
cugcaaacauucuacggag

SEQ ID NO: 1019767 - RNA, 19 nt, Artificial Sequence
  Description of Artificial Sequence: Synthetic oligonucleotide
agccgcuucgcccaagggc

SEQ ID NO: 1019768 - RNA, 19 nt, Artificial Sequence
  Description of Artificial Sequence: Synthetic oligonucleotide
aaucuuuucaacagcuggu

SEQ ID NO: 1019769 - RNA, 19 nt, Artificial Sequence
  Description of Artificial Sequence: Synthetic oligonucleotide
aguaugccaagugaaguuc

SEQ ID NO: 1019770 - RNA, 19 nt, Artificial Sequence
  Description of Artificial Sequence: Synthetic oligonucleotide
augugcuugaguaagccuc

SEQ ID NO: 1019771 - RNA, 19 nt, Artificial Sequence
  Description of Artificial Sequence: Synthetic oligonucleotide
aacgccacccaaucucggg

SEQ ID NO: 1019772 - RNA, 19 nt, Artificial Sequence
  Description of Artificial Sequence: Synthetic oligonucleotide
uacggaguugugauaagcu

SEQ ID NO: 1019773 - RNA, 19 nt, Artificial Sequence
  Description of Artificial Sequence: Synthetic oligonucleotide
agcugcuucaugaauuggc

SEQ ID NO: 1019774 - RNA, 19 nt, Artificial Sequence
  Description of Artificial Sequence: Synthetic oligonucleotide
cauagaauggaagccagug

SEQ ID NO: 1019775 - RNA, 19 nt, Artificial Sequence
  Description of Artificial Sequence: Synthetic oligonucleotide
uucagauauaugauuccaa

SEQ ID NO: 1019776 - RNA, 19 nt, Artificial Sequence
  Description of Artificial Sequence: Synthetic oligonucleotide
ugguccgaauuuccaaacg

SEQ ID NO: 1019777 - RNA, 19 nt, Artificial Sequence
  Description of Artificial Sequence: Synthetic oligonucleotide
uaagugguauuaacaaguc

SEQ ID NO: 1019778 - RNA, 19 nt, Artificial Sequence
  Description of Artificial Sequence: Synthetic oligonucleotide
aggggaauugaacccaaag

SEQ ID NO: 1019779 - RNA, 19 nt, Artificial Sequence
  Description of Artificial Sequence: Synthetic oligonucleotide
auauaaggaugucaucacu

SEQ ID NO: 1019780 - RNA, 19 nt, Artificial Sequence
  Description of Artificial Sequence: Synthetic oligonucleotide
guaagccucuguaaaaucc

SEQ ID NO: 1019781 - RNA, 19 nt, Artificial Sequence
  Description of Artificial Sequence: Synthetic oligonucleotide
ugguuagucucgccgagcc

SEQ ID NO: 1019782 - RNA, 19 nt, Artificial Sequence
  Description of Artificial Sequence: Synthetic oligonucleotide
ucccauacugagcagcuac

SEQ ID NO: 1019783 - RNA, 19 nt, Artificial Sequence
  Description of Artificial Sequence: Synthetic oligonucleotide
acguucugcuuuuaaacug

SEQ ID NO: 1019784 - RNA, 19 nt, Artificial Sequence
  Description of Artificial Sequence: Synthetic oligonucleotide
aauagcugcugguucugga

SEQ ID NO: 1019785 - RNA, 19 nt, Artificial Sequence
  Description of Artificial Sequence: Synthetic oligonucleotide
gaagaguuugcacgagcag

SEQ ID NO: 1019786 - RNA, 19 nt, Artificial Sequence
  Description of Artificial Sequence: Synthetic oligonucleotide
caucugcaaacauucuacg

SEQ ID NO: 1019787 - RNA, 19 nt, Artificial Sequence
  Description of Artificial Sequence: Synthetic oligonucleotide
guugugauaagcugcuuca

SEQ ID NO: 1019788 - RNA, 19 nt, Artificial Sequence
  Description of Artificial Sequence: Synthetic oligonucleotide
aaucucgggcuuccguagg

SEQ ID NO: 1019789 - RNA, 19 nt, Artificial Sequence
  Description of Artificial Sequence: Synthetic oligonucleotide
cacugcaagauguaaagca

SEQ ID NO: 1019790 - RNA, 19 nt, Artificial Sequence
  Description of Artificial Sequence: Synthetic oligonucleotide
aauaggcaacugccaauug

SEQ ID NO: 1019791 - RNA, 19 nt, Artificial Sequence
  Description of Artificial Sequence: Synthetic oligonucleotide
auagaauggaagccaguga

SEQ ID NO: 1019792 - RNA, 19 nt, Artificial Sequence
  Description of Artificial Sequence: Synthetic oligonucleotide
uugaggaguuuccuuaaaa

SEQ ID NO: 1019793 - RNA, 19 nt, Artificial Sequence
  Description of Artificial Sequence: Synthetic oligonucleotide
ugggucaaauccagcaagc

SEQ ID NO: 1019794 - RNA, 19 nt, Artificial Sequence
  Description of Artificial Sequence: Synthetic oligonucleotide
caucauagagcaaauagcu

SEQ ID NO: 1019795 - RNA, 19 nt, Artificial Sequence
  Description of Artificial Sequence: Synthetic oligonucleotide
uccccuguuaucagcaaca

SEQ ID NO: 1019796 - RNA, 19 nt, Artificial Sequence
  Description of Artificial Sequence: Synthetic oligonucleotide
gagucaacccaagagcugc

SEQ ID NO: 1019797 - RNA, 19 nt, Artificial Sequence
  Description of Artificial Sequence: Synthetic oligonucleotide
guuaucagcaacauccaca

SEQ ID NO: 1019798 - RNA, 19 nt, Artificial Sequence
  Description of Artificial Sequence: Synthetic oligonucleotide
aggcgcaacuccuugcaac

SEQ ID NO: 1019799 - RNA, 19 nt, Artificial Sequence
  Description of Artificial Sequence: Synthetic oligonucleotide
gaaguucuauaaucucagc

SEQ ID NO: 1019800 - RNA, 19 nt, Artificial Sequence
  Description of Artificial Sequence: Synthetic oligonucleotide
cuuaagaagaaguucuaua

SEQ ID NO: 1019801 - RNA, 19 nt, Artificial Sequence
  Description of Artificial Sequence: Synthetic oligonucleotide
augaauaggcaacugccaa

SEQ ID NO: 1019802 - RNA, 19 nt, Artificial Sequence
  Description of Artificial Sequence: Synthetic oligonucleotide
cacauuggaguccaaccgc

SEQ ID NO: 1019803 - RNA, 19 nt, Artificial Sequence
  Description of Artificial Sequence: Synthetic oligonucleotide
aaacgacagagaugggcca

SEQ ID NO: 1019804 - RNA, 19 nt, Artificial Sequence
  Description of Artificial Sequence: Synthetic oligonucleotide
uucuacggaguugugauaa

SEQ ID NO: 1019805 - RNA, 19 nt, Artificial Sequence
  Description of Artificial Sequence: Synthetic oligonucleotide
ucacaagugcgauuaguaa

SEQ ID NO: 1019806 - RNA, 19 nt, Artificial Sequence
  Description of Artificial Sequence: Synthetic oligonucleotide
uuacaguaaagaucaggau

SEQ ID NO: 1019807 - RNA, 19 nt, Artificial Sequence
  Description of Artificial Sequence: Synthetic oligonucleotide
ugugacuaaacagcauuga

SEQ ID NO: 1019808 - RNA, 19 nt, Artificial Sequence
  Description of Artificial Sequence: Synthetic oligonucleotide
guaaauauaaggaugucau

SEQ ID NO: 1019809 - RNA, 19 nt, Artificial Sequence
  Description of Artificial Sequence: Synthetic oligonucleotide
auucagauauaugauucca

SEQ ID NO: 1019810 - RNA, 19 nt, Artificial Sequence
  Description of Artificial Sequence: Synthetic oligonucleotide
ugugcuugaguaagccucu

SEQ ID NO: 1019811 - RNA, 19 nt, Artificial Sequence
  Description of Artificial Sequence: Synthetic oligonucleotide
ugagucaacccaagagcug

SEQ ID NO: 1019812 - RNA, 19 nt, Artificial Sequence
  Description of Artificial Sequence: Synthetic oligonucleotide
caaugggucaaauccagca

SEQ ID NO: 1019813 - RNA, 19 nt, Artificial Sequence
  Description of Artificial Sequence: Synthetic oligonucleotide
aaacacugcugaguaaaca

SEQ ID NO: 1019814 - RNA, 19 nt, Artificial Sequence
  Description of Artificial Sequence: Synthetic oligonucleotide
acggaguugugauaagcug

SEQ ID NO: 1019815 - RNA, 19 nt, Artificial Sequence
  Description of Artificial Sequence: Synthetic oligonucleotide
auacuucaggcaguaugcc

SEQ ID NO: 1019816 - RNA, 19 nt, Artificial Sequence
  Description of Artificial Sequence: Synthetic oligonucleotide
gagcaugugcuugaguaag

SEQ ID NO: 1019817 - RNA, 19 nt, Artificial Sequence
  Description of Artificial Sequence: Synthetic oligonucleotide
aacugguccgaauuuccaa

SEQ ID NO: 1019818 - RNA, 19 nt, Artificial Sequence
  Description of Artificial Sequence: Synthetic oligonucleotide
guuagucucgccgagccgc

SEQ ID NO: 1019819 - RNA, 19 nt, Artificial Sequence
  Description of Artificial Sequence: Synthetic oligonucleotide
auagccauucugcaguaau

SEQ ID NO: 1019820 - RNA, 19 nt, Artificial Sequence
  Description of Artificial Sequence: Synthetic oligonucleotide
aaccgcuaggaugcuaagg

SEQ ID NO: 1019821 - RNA, 19 nt, Artificial Sequence
  Description of Artificial Sequence: Synthetic oligonucleotide
auccccuguuaucagcaac

SEQ ID NO: 1019822 - RNA, 19 nt, Artificial Sequence
  Description of Artificial Sequence: Synthetic oligonucleotide
ggaauugaacccaaagacc

SEQ ID NO: 1019823 - RNA, 19 nt, Artificial Sequence
  Description of Artificial Sequence: Synthetic oligonucleotide
auuaacaucugcaaacauu

SEQ ID NO: 1019824 - RNA, 19 nt, Artificial Sequence
  Description of Artificial Sequence: Synthetic oligonucleotide
uuuugaggaguuuccuuaa

SEQ ID NO: 1019825 - RNA, 19 nt, Artificial Sequence
  Description of Artificial Sequence: Synthetic oligonucleotide
agcggcaugaauaggcaac

SEQ ID NO: 1019826 - RNA, 19 nt, Artificial Sequence
  Description of Artificial Sequence: Synthetic oligonucleotide
acaagugcgauuaguaagu

SEQ ID NO: 1019827 - RNA, 19 nt, Artificial Sequence
  Description of Artificial Sequence: Synthetic oligonucleotide
uacuucaggcaguaugcca

SEQ ID NO: 1019828 - RNA, 19 nt, Artificial Sequence
  Description of Artificial Sequence: Synthetic oligonucleotide
aguuugcacgagcagagau

SEQ ID NO: 1019829 - RNA, 19 nt, Artificial Sequence
  Description of Artificial Sequence: Synthetic oligonucleotide
cugacgaaugaaauuguca

SEQ ID NO: 1019830 - RNA, 19 nt, Artificial Sequence
  Description of Artificial Sequence: Synthetic oligonucleotide
uuuugugacuaaacagcau

SEQ ID NO: 1019831 - RNA, 19 nt, Artificial Sequence
  Description of Artificial Sequence: Synthetic oligonucleotide
ugaauaggcaacugccaau

SEQ ID NO: 1019832 - RNA, 19 nt, Artificial Sequence
  Description of Artificial Sequence: Synthetic oligonucleotide
uccaaggcuugacaauuga

SEQ ID NO: 1019833 - RNA, 19 nt, Artificial Sequence
  Description of Artificial Sequence: Synthetic oligonucleotide
gacgaaugaaauugucaga

SEQ ID NO: 1019834 - RNA, 19 nt, Artificial Sequence
  Description of Artificial Sequence: Synthetic oligonucleotide
guaagugguauuaacaagu

SEQ ID NO: 1019835 - RNA, 19 nt, Artificial Sequence
  Description of Artificial Sequence: Synthetic oligonucleotide
guugcauuaggaucugcuc

SEQ ID NO: 1019836 - RNA, 19 nt, Artificial Sequence
  Description of Artificial Sequence: Synthetic oligonucleotide
agcauaaguuauaaauuca

SEQ ID NO: 1019837 - RNA, 19 nt, Artificial Sequence
  Description of Artificial Sequence: Synthetic oligonucleotide
cuugcaacgccacccaauc

SEQ ID NO: 1019838 - RNA, 19 nt, Artificial Sequence
  Description of Artificial Sequence: Synthetic oligonucleotide
aaguagcaaaacauggaaa

SEQ ID NO: 1019839 - RNA, 19 nt, Artificial Sequence
  Description of Artificial Sequence: Synthetic oligonucleotide
ccacacauagaauggaagc

SEQ ID NO: 1019840 - RNA, 19 nt, Artificial Sequence
  Description of Artificial Sequence: Synthetic oligonucleotide
ugccaauugucuucauuac

SEQ ID NO: 1019841 - RNA, 19 nt, Artificial Sequence
  Description of Artificial Sequence: Synthetic oligonucleotide
acagcauaaguuauaaauu

SEQ ID NO: 1019842 - RNA, 19 nt, Artificial Sequence
  Description of Artificial Sequence: Synthetic oligonucleotide
agucucuuccaauuagaaa

SEQ ID NO: 1019843 - RNA, 19 nt, Artificial Sequence
  Description of Artificial Sequence: Synthetic oligonucleotide
cacauuuuauaugacccuc

SEQ ID NO: 1019844 - RNA, 19 nt, Artificial Sequence
  Description of Artificial Sequence: Synthetic oligonucleotide
ggcaugaauaggcaacugc

SEQ ID NO: 1019845 - RNA, 19 nt, Artificial Sequence
  Description of Artificial Sequence: Synthetic oligonucleotide
agucacaguccuuuuguaa

SEQ ID NO: 1019846 - RNA, 19 nt, Artificial Sequence
  Description of Artificial Sequence: Synthetic oligonucleotide
caugaauaggcaacugcca

SEQ ID NO: 1019847 - RNA, 19 nt, Artificial Sequence
  Description of Artificial Sequence: Synthetic oligonucleotide
uucaugaauuggcauccau

SEQ ID NO: 1019848 - RNA, 19 nt, Artificial Sequence
  Description of Artificial Sequence: Synthetic oligonucleotide
ugcgauuaguaagugguau

SEQ ID NO: 1019849 - RNA, 19 nt, Artificial Sequence
  Description of Artificial Sequence: Synthetic oligonucleotide
ugcaaacauucuacggagu

SEQ ID NO: 1019850 - RNA, 19 nt, Artificial Sequence
  Description of Artificial Sequence: Synthetic oligonucleotide
gcaugaauaggcaacugcc

SEQ ID NO: 1019851 - RNA, 19 nt, Artificial Sequence
  Description of Artificial Sequence: Synthetic oligonucleotide
augaaauugucagaacgaa

SEQ ID NO: 1019852 - RNA, 19 nt, Artificial Sequence
  Description of Artificial Sequence: Synthetic oligonucleotide
cugggaaguggcaacugac

SEQ ID NO: 1019853 - RNA, 19 nt, Artificial Sequence
  Description of Artificial Sequence: Synthetic oligonucleotide
ucuacggaguugugauaag

SEQ ID NO: 1019854 - RNA, 19 nt, Artificial Sequence
  Description of Artificial Sequence: Synthetic oligonucleotide
aguugcauuaggaucugcu

SEQ ID NO: 1019855 - RNA, 19 nt, Artificial Sequence
  Description of Artificial Sequence: Synthetic oligonucleotide
caaacauucuacggaguug

SEQ ID NO: 1019856 - RNA, 19 nt, Artificial Sequence
  Description of Artificial Sequence: Synthetic oligonucleotide
aacaauggggugguguuuu

SEQ ID NO: 1019857 - RNA, 19 nt, Artificial Sequence
  Description of Artificial Sequence: Synthetic oligonucleotide
cugccaauugucuucauua

SEQ ID NO: 1019858 - RNA, 19 nt, Artificial Sequence
  Description of Artificial Sequence: Synthetic oligonucleotide
ugcuuuuaaacugguccga

SEQ ID NO: 1019859 - RNA, 19 nt, Artificial Sequence
  Description of Artificial Sequence: Synthetic oligonucleotide
uucccguccuccaaacacu

SEQ ID NO: 1019860 - RNA, 19 nt, Artificial Sequence
  Description of Artificial Sequence: Synthetic oligonucleotide
uuuugugcuuuaacagcau

SEQ ID NO: 1019861 - RNA, 19 nt, Artificial Sequence
  Description of Artificial Sequence: Synthetic oligonucleotide
aguccuuuuguaaagccau

SEQ ID NO: 1019862 - RNA, 19 nt, Artificial Sequence
  Description of Artificial Sequence: Synthetic oligonucleotide
auaagcugcuucaugaauu

SEQ ID NO: 1019863 - RNA, 19 nt, Artificial Sequence
  Description of Artificial Sequence: Synthetic oligonucleotide
caaucucgggcuuccguag

SEQ ID NO: 1019864 - RNA, 19 nt, Artificial Sequence
  Description of Artificial Sequence: Synthetic oligonucleotide
cuacggaguugugauaagc

SEQ ID NO: 1019865 - RNA, 19 nt, Artificial Sequence
  Description of Artificial Sequence: Synthetic oligonucleotide
cacuuugucugguccagug

SEQ ID NO: 1019866 - RNA, 19 nt, Artificial Sequence
  Description of Artificial Sequence: Synthetic oligonucleotide
ugcuuaagaagaaguucua

SEQ ID NO: 1019867 - RNA, 19 nt, Artificial Sequence
  Description of Artificial Sequence: Synthetic oligonucleotide
ggcuccauacuucaaaaga

SEQ ID NO: 1019868 - RNA, 19 nt, Artificial Sequence
  Description of Artificial Sequence: Synthetic oligonucleotide
uuaacaaguccaagaucuu

SEQ ID NO: 1019869 - RNA, 19 nt, Artificial Sequence
  Description of Artificial Sequence: Synthetic oligonucleotide
gacguucugcuuuuaaacu

SEQ ID NO: 1019870 - RNA, 19 nt, Artificial Sequence
  Description of Artificial Sequence: Synthetic oligonucleotide
ucagaacgaagacguucug

SEQ ID NO: 1019871 - RNA, 19 nt, Artificial Sequence
  Description of Artificial Sequence: Synthetic oligonucleotide
acuuugucugguccagugu

SEQ ID NO: 1019872 - RNA, 19 nt, Artificial Sequence
  Description of Artificial Sequence: Synthetic oligonucleotide
cagaacgaagacguucugc

SEQ ID NO: 1019873 - RNA, 19 nt, Artificial Sequence
  Description of Artificial Sequence: Synthetic oligonucleotide
auaugcugcggaagagccc

SEQ ID NO: 1019874 - RNA, 19 nt, Artificial Sequence
  Description of Artificial Sequence: Synthetic oligonucleotide
ugucacaagugcgauuagu

SEQ ID NO: 1019875 - RNA, 19 nt, Artificial Sequence
  Description of Artificial Sequence: Synthetic oligonucleotide
caauugauauuugcaccag

SEQ ID NO: 1019876 - RNA, 19 nt, Artificial Sequence
  Description of Artificial Sequence: Synthetic oligonucleotide
uguccaaggcuugacaauu

SEQ ID NO: 1019877 - RNA, 19 nt, Artificial Sequence
  Description of Artificial Sequence: Synthetic oligonucleotide
agucaaugggucaaaucca

SEQ ID NO: 1019878 - RNA, 19 nt, Artificial Sequence
  Description of Artificial Sequence: Synthetic oligonucleotide
ccacauuggaguccaaccg

SEQ ID NO: 1019879 - RNA, 19 nt, Artificial Sequence
  Description of Artificial Sequence: Synthetic oligonucleotide
aaacugguccgaauuucca

SEQ ID NO: 1019880 - RNA, 19 nt, Artificial Sequence
  Description of Artificial Sequence: Synthetic oligonucleotide
agggugugauuccgaaguc

SEQ ID NO: 1019881 - RNA, 19 nt, Artificial Sequence
  Description of Artificial Sequence: Synthetic oligonucleotide
gaggaguuuccuuaaaauu

SEQ ID NO: 1019882 - RNA, 19 nt, Artificial Sequence
  Description of Artificial Sequence: Synthetic oligonucleotide
acaagggugugauuccgaa

SEQ ID NO: 1019883 - RNA, 19 nt, Artificial Sequence
  Description of Artificial Sequence: Synthetic oligonucleotide
acauuuuauaugacccucu

SEQ ID NO: 1019884 - RNA, 19 nt, Artificial Sequence
  Description of Artificial Sequence: Synthetic oligonucleotide
cauacacaaaggggaauug

SEQ ID NO: 1019885 - RNA, 19 nt, Artificial Sequence
  Description of Artificial Sequence: Synthetic oligonucleotide
ugcuugaguaagccucugu

SEQ ID NO: 1019886 - RNA, 19 nt, Artificial Sequence
  Description of Artificial Sequence: Synthetic oligonucleotide
acuucaggcaguaugccaa

SEQ ID NO: 1019887 - RNA, 19 nt, Artificial Sequence
  Description of Artificial Sequence: Synthetic oligonucleotide
cugcaagauguaaagcaca

SEQ ID NO: 1019888 - RNA, 19 nt, Artificial Sequence
  Description of Artificial Sequence: Synthetic oligonucleotide
cugguccgaauuuccaaac

SEQ ID NO: 1019889 - RNA, 19 nt, Artificial Sequence
  Description of Artificial Sequence: Synthetic oligonucleotide
gauuaguaagugguauuaa

SEQ ID NO: 1019890 - RNA, 19 nt, Artificial Sequence
  Description of Artificial Sequence: Synthetic oligonucleotide
aauuggcauccauccccug

SEQ ID NO: 1019891 - RNA, 19 nt, Artificial Sequence
  Description of Artificial Sequence: Synthetic oligonucleotide
aauuccaacugcagagcau

SEQ ID NO: 1019892 - RNA, 19 nt, Artificial Sequence
  Description of Artificial Sequence: Synthetic oligonucleotide
ggaucugucugaauuaaca

SEQ ID NO: 1019893 - RNA, 19 nt, Artificial Sequence
  Description of Artificial Sequence: Synthetic oligonucleotide
agucucgccgagccgcuuc

SEQ ID NO: 1019894 - RNA, 19 nt, Artificial Sequence
  Description of Artificial Sequence: Synthetic oligonucleotide
caauguccuugacucacug

SEQ ID NO: 1019895 - RNA, 19 nt, Artificial Sequence
  Description of Artificial Sequence: Synthetic oligonucleotide
guccagugucacaagugcg

SEQ ID NO: 1019896 - RNA, 19 nt, Artificial Sequence
  Description of Artificial Sequence: Synthetic oligonucleotide
aacaagggaguagcuuugu

SEQ ID NO: 1019897 - RNA, 19 nt, Artificial Sequence
  Description of Artificial Sequence: Synthetic oligonucleotide
ucuuugcauggcccauuug

SEQ ID NO: 1019898 - RNA, 19 nt, Artificial Sequence
  Description of Artificial Sequence: Synthetic oligonucleotide
ucagguggccucacuaauu

SEQ ID NO: 1019899 - RNA, 19 nt, Artificial Sequence
  Description of Artificial Sequence: Synthetic oligonucleotide
ggcauucgaggucuguucc

SEQ ID NO: 1019900 - RNA, 19 nt, Artificial Sequence
  Description of Artificial Sequence: Synthetic oligonucleotide
gaaguucauuuaacugggc

SEQ ID NO: 1019901 - RNA, 19 nt, Artificial Sequence
  Description of Artificial Sequence: Synthetic oligonucleotide
caauuccaacugcagagca

SEQ ID NO: 1019902 - RNA, 19 nt, Artificial Sequence
  Description of Artificial Sequence: Synthetic oligonucleotide
caucugugcaucuggggca

SEQ ID NO: 1019903 - RNA, 19 nt, Artificial Sequence
  Description of Artificial Sequence: Synthetic oligonucleotide
gaagacguucugcuuuuaa

SEQ ID NO: 1019904 - RNA, 19 nt, Artificial Sequence
  Description of Artificial Sequence: Synthetic oligonucleotide
cugagucaacccaagagcu

SEQ ID NO: 1019905 - RNA, 19 nt, Artificial Sequence
  Description of Artificial Sequence: Synthetic oligonucleotide
gcaacugccaauugucuuc

SEQ ID NO: 1019906 - RNA, 19 nt, Artificial Sequence
  Description of Artificial Sequence: Synthetic oligonucleotide
cauucuacggaguugugau

SEQ ID NO: 1019907 - RNA, 19 nt, Artificial Sequence
  Description of Artificial Sequence: Synthetic oligonucleotide
caguccuuuuguaaagcca

SEQ ID NO: 1019908 - RNA, 19 nt, Artificial Sequence
  Description of Artificial Sequence: Synthetic oligonucleotide
uccaaacgacagagauggg

SEQ ID NO: 1019909 - RNA, 19 nt, Artificial Sequence
  Description of Artificial Sequence: Synthetic oligonucleotide
gccucagaccuccacauug

SEQ ID NO: 1019910 - RNA, 19 nt, Artificial Sequence
  Description of Artificial Sequence: Synthetic oligonucleotide
aagggccgucucccagacc

SEQ ID NO: 1019911 - RNA, 19 nt, Artificial Sequence
  Description of Artificial Sequence: Synthetic oligonucleotide
ucgaggucuguuccaugcu

SEQ ID NO: 1019912 - RNA, 19 nt, Artificial Sequence
  Description of Artificial Sequence: Synthetic oligonucleotide
gguccgaauuuccaaacga

SEQ ID NO: 1019913 - RNA, 19 nt, Artificial Sequence
  Description of Artificial Sequence: Synthetic oligonucleotide
agucuuugucuuaauguau

SEQ ID NO: 1019914 - RNA, 19 nt, Artificial Sequence
  Description of Artificial Sequence: Synthetic oligonucleotide
ggggugguguuuucuaaag

SEQ ID NO: 1019915 - RNA, 19 nt, Artificial Sequence
  Description of Artificial Sequence: Synthetic oligonucleotide
cagcaacauccacacuucg

SEQ ID NO: 1019916 - RNA, 19 nt, Artificial Sequence
  Description of Artificial Sequence: Synthetic oligonucleotide
acugccaauugucuucauu

SEQ ID NO: 1019917 - RNA, 19 nt, Artificial Sequence
  Description of Artificial Sequence: Synthetic oligonucleotide
agguggccucacuaauuuc

SEQ ID NO: 1019918 - RNA, 19 nt, Artificial Sequence
  Description of Artificial Sequence: Synthetic oligonucleotide
guccgaauuuccaaacgac

SEQ ID NO: 1019919 - RNA, 19 nt, Artificial Sequence
  Description of Artificial Sequence: Synthetic oligonucleotide
caaaggggaauugaaccca

SEQ ID NO: 1019920 - RNA, 19 nt, Artificial Sequence
  Description of Artificial Sequence: Synthetic oligonucleotide
caggcaguaugccaaguga

SEQ ID NO: 1019921 - RNA, 19 nt, Artificial Sequence
  Description of Artificial Sequence: Synthetic oligonucleotide
cauccuggcauucgagguc

SEQ ID NO: 1019922 - RNA, 19 nt, Artificial Sequence
  Description of Artificial Sequence: Synthetic oligonucleotide
cggaguugugauaagcugc

SEQ ID NO: 1019923 - RNA, 19 nt, Artificial Sequence
  Description of Artificial Sequence: Synthetic oligonucleotide
uuagucucgccgagccgcu

SEQ ID NO: 1019924 - RNA, 19 nt, Artificial Sequence
  Description of Artificial Sequence: Synthetic oligonucleotide
uugcaacgccacccaaucu

SEQ ID NO: 1019925 - RNA, 19 nt, Artificial Sequence
  Description of Artificial Sequence: Synthetic oligonucleotide
gagcccaagaagaguuugc

SEQ ID NO: 1019926 - RNA, 19 nt, Artificial Sequence
  Description of Artificial Sequence: Synthetic oligonucleotide
gaaguggcaacugacgaau

SEQ ID NO: 1019927 - RNA, 19 nt, Artificial Sequence
  Description of Artificial Sequence: Synthetic oligonucleotide
uugguuagucucgccgagc

SEQ ID NO: 1019928 - RNA, 19 nt, Artificial Sequence
  Description of Artificial Sequence: Synthetic oligonucleotide
uaagaauguccaagcucuu

SEQ ID NO: 1019929 - RNA, 19 nt, Artificial Sequence
  Description of Artificial Sequence: Synthetic oligonucleotide
auccauccccuguuaucag

SEQ ID NO: 1019930 - RNA, 19 nt, Artificial Sequence
  Description of Artificial Sequence: Synthetic oligonucleotide
auucgaggucuguuccaug

SEQ ID NO: 1019931 - RNA, 19 nt, Artificial Sequence
  Description of Artificial Sequence: Synthetic oligonucleotide
acaggccauaugcugcgga

SEQ ID NO: 1019932 - RNA, 19 nt, Artificial Sequence
  Description of Artificial Sequence: Synthetic oligonucleotide
gucacaagugcgauuagua

SEQ ID NO: 1019933 - RNA, 19 nt, Artificial Sequence
  Description of Artificial Sequence: Synthetic oligonucleotide
auggaacacaggccauaug

SEQ ID NO: 1019934 - RNA, 19 nt, Artificial Sequence
  Description of Artificial Sequence: Synthetic oligonucleotide
guagcuuuguccaaggcuu

SEQ ID NO: 1019935 - RNA, 19 nt, Artificial Sequence
  Description of Artificial Sequence: Synthetic oligonucleotide
augauuccaaggagccgac

SEQ ID NO: 1019936 - RNA, 19 nt, Artificial Sequence
  Description of Artificial Sequence: Synthetic oligonucleotide
ucgcccaagggccgucucc

SEQ ID NO: 1019937 - RNA, 19 nt, Artificial Sequence
  Description of Artificial Sequence: Synthetic oligonucleotide
ucgccgagccgcuucgccc

SEQ ID NO: 1019938 - RNA, 19 nt, Artificial Sequence
  Description of Artificial Sequence: Synthetic oligonucleotide
gggaaguggcaacugacga

SEQ ID NO: 1019939 - RNA, 19 nt, Artificial Sequence
  Description of Artificial Sequence: Synthetic oligonucleotide
uaucagcaacauccacacu

SEQ ID NO: 1019940 - RNA, 19 nt, Artificial Sequence
  Description of Artificial Sequence: Synthetic oligonucleotide
aaggcgcaacuccuugcaa

SEQ ID NO: 1019941 - RNA, 19 nt, Artificial Sequence
  Description of Artificial Sequence: Synthetic oligonucleotide
ggcaguaugccaagugaag

SEQ ID NO: 1019942 - RNA, 19 nt, Artificial Sequence
  Description of Artificial Sequence: Synthetic oligonucleotide
caacgccacccaaucucgg

SEQ ID NO: 1019943 - RNA, 19 nt, Artificial Sequence
  Description of Artificial Sequence: Synthetic oligonucleotide
agccgacaagcaaacuuuc

SEQ ID NO: 1019944 - RNA, 19 nt, Artificial Sequence
  Description of Artificial Sequence: Synthetic oligonucleotide
acgagcagagauaaucuuu

SEQ ID NO: 1019945 - RNA, 19 nt, Artificial Sequence
  Description of Artificial Sequence: Synthetic oligonucleotide
acgaagacguucugcuuuu

SEQ ID NO: 1019946 - RNA, 19 nt, Artificial Sequence
  Description of Artificial Sequence: Synthetic oligonucleotide
ccucagaccuccacauugg

SEQ ID NO: 1019947 - RNA, 19 nt, Artificial Sequence
  Description of Artificial Sequence: Synthetic oligonucleotide
aaguggcaacugacgaaug

SEQ ID NO: 1019948 - RNA, 19 nt, Artificial Sequence
  Description of Artificial Sequence: Synthetic oligonucleotide
ccaaaguaaauauaaggau

SEQ ID NO: 1019949 - RNA, 19 nt, Artificial Sequence
  Description of Artificial Sequence: Synthetic oligonucleotide
gguuagucucgccgagccg

SEQ ID NO: 1019950 - RNA, 19 nt, Artificial Sequence
  Description of Artificial Sequence: Synthetic oligonucleotide
auucuacggaguugugaua

SEQ ID NO: 1019951 - RNA, 19 nt, Artificial Sequence
  Description of Artificial Sequence: Synthetic oligonucleotide
ucauuuaacugggcuccau

SEQ ID NO: 1019952 - RNA, 19 nt, Artificial Sequence
  Description of Artificial Sequence: Synthetic oligonucleotide
caacuccuugcaacgccac

SEQ ID NO: 1019953 - RNA, 19 nt, Artificial Sequence
  Description of Artificial Sequence: Synthetic oligonucleotide
ucaacccgcgucaggccuc

SEQ ID NO: 1019954 - RNA, 19 nt, Artificial Sequence
  Description of Artificial Sequence: Synthetic oligonucleotide
gaauaggcaacugccaauu

SEQ ID NO: 1019955 - RNA, 19 nt, Artificial Sequence
  Description of Artificial Sequence: Synthetic oligonucleotide
cauggcccauuugugcagc

SEQ ID NO: 1019956 - RNA, 19 nt, Artificial Sequence
  Description of Artificial Sequence: Synthetic oligonucleotide
gucucgccgagccgcuucg

SEQ ID NO: 1019957 - RNA, 19 nt, Artificial Sequence
  Description of Artificial Sequence: Synthetic oligonucleotide
gaguaagccucuguaaaau

SEQ ID NO: 1019958 - RNA, 19 nt, Artificial Sequence
  Description of Artificial Sequence: Synthetic oligonucleotide
gccgcuucgcccaagggcc

SEQ ID NO: 1019959 - RNA, 19 nt, Artificial Sequence
  Description of Artificial Sequence: Synthetic oligonucleotide
aggcaguaugccaagugaa

SEQ ID NO: 1019960 - RNA, 19 nt, Artificial Sequence
  Description of Artificial Sequence: Synthetic oligonucleotide
gcggaagagcccaagaaga

SEQ ID NO: 1019961 - RNA, 19 nt, Artificial Sequence
  Description of Artificial Sequence: Synthetic oligonucleotide
gacucacugcaagauguaa

SEQ ID NO: 1019962 - RNA, 19 nt, Artificial Sequence
  Description of Artificial Sequence: Synthetic oligonucleotide
cauccacacauagaaugga

SEQ ID NO: 1019963 - RNA, 19 nt, Artificial Sequence
  Description of Artificial Sequence: Synthetic oligonucleotide
caaccgcuaggaugcuaag

SEQ ID NO: 1019964 - RNA, 19 nt, Artificial Sequence
  Description of Artificial Sequence: Synthetic oligonucleotide
uaguugcauuaggaucugc

SEQ ID NO: 1019965 - RNA, 19 nt, Artificial Sequence
  Description of Artificial Sequence: Synthetic oligonucleotide
ugauuccaaggagccgaca

SEQ ID NO: 1019966 - RNA, 19 nt, Artificial Sequence
  Description of Artificial Sequence: Synthetic oligonucleotide
caguaauauuuccaggcau

SEQ ID NO: 1019967 - RNA, 19 nt, Artificial Sequence
  Description of Artificial Sequence: Synthetic oligonucleotide
caagggccgucucccagac

SEQ ID NO: 1019968 - RNA, 19 nt, Artificial Sequence
  Description of Artificial Sequence: Synthetic oligonucleotide
ccauaugcugcggaagagc

SEQ ID NO: 1019969 - RNA, 19 nt, Artificial Sequence
  Description of Artificial Sequence: Synthetic oligonucleotide
gacccgcucaacccgcguc

SEQ ID NO: 1019970 - RNA, 19 nt, Artificial Sequence
  Description of Artificial Sequence: Synthetic oligonucleotide
ggcuugacaauugauauuu

SEQ ID NO: 1019971 - RNA, 19 nt, Artificial Sequence
  Description of Artificial Sequence: Synthetic oligonucleotide
cugcggaagagcccaagaa

SEQ ID NO: 1019972 - RNA, 19 nt, Artificial Sequence
  Description of Artificial Sequence: Synthetic oligonucleotide
ugcugcggaagagcccaag

SEQ ID NO: 1019973 - RNA, 19 nt, Artificial Sequence
  Description of Artificial Sequence: Synthetic oligonucleotide
ccgcuaggaugcuaaggcg

SEQ ID NO: 1019974 - RNA, 19 nt, Artificial Sequence
  Description of Artificial Sequence: Synthetic oligonucleotide
caucacugacugagucaac

SEQ ID NO: 1019975 - RNA, 19 nt, Artificial Sequence
  Description of Artificial Sequence: Synthetic oligonucleotide
cacccaaucucgggcuucc

SEQ ID NO: 1019976 - RNA, 19 nt, Artificial Sequence
  Description of Artificial Sequence: Synthetic oligonucleotide
ugcagacuucugggaagug

SEQ ID NO: 1019977 - RNA, 19 nt, Artificial Sequence
  Description of Artificial Sequence: Synthetic oligonucleotide
gcucacuuugucuggucca

SEQ ID NO: 1019978 - RNA, 19 nt, Artificial Sequence
  Description of Artificial Sequence: Synthetic oligonucleotide
gagccgacaagcaaacuuu

SEQ ID NO: 1019979 - RNA, 19 nt, Artificial Sequence
  Description of Artificial Sequence: Synthetic oligonucleotide
aaaccucaucauagagcaa

SEQ ID NO: 1019980 - RNA, 19 nt, Artificial Sequence
  Description of Artificial Sequence: Synthetic oligonucleotide
aaggggaauugaacccaaa

SEQ ID NO: 1019981 - RNA, 19 nt, Artificial Sequence
  Description of Artificial Sequence: Synthetic oligonucleotide
ucucccagacccgcucaac

SEQ ID NO: 1019982 - RNA, 19 nt, Artificial Sequence
  Description of Artificial Sequence: Synthetic oligonucleotide
ggagccgacaagcaaacuu

SEQ ID NO: 1019983 - RNA, 19 nt, Artificial Sequence
  Description of Artificial Sequence: Synthetic oligonucleotide
cggaagagcccaagaagag

SEQ ID NO: 1019984 - RNA, 19 nt, Artificial Sequence
  Description of Artificial Sequence: Synthetic oligonucleotide
cuccuugcaacgccaccca

SEQ ID NO: 1019985 - RNA, 19 nt, Artificial Sequence
  Description of Artificial Sequence: Synthetic oligonucleotide
gcaaacauucuacggaguu

SEQ ID NO: 1019986 - RNA, 19 nt, Artificial Sequence
  Description of Artificial Sequence: Synthetic oligonucleotide
gcaacugacgaaugaaauu

SEQ ID NO: 1019987 - RNA, 19 nt, Artificial Sequence
  Description of Artificial Sequence: Synthetic oligonucleotide
gcaccagaugaaauaagaa

SEQ ID NO: 1019988 - RNA, 19 nt, Artificial Sequence
  Description of Artificial Sequence: Synthetic oligonucleotide
uucgcccaagggccgucuc

SEQ ID NO: 1019989 - RNA, 19 nt, Artificial Sequence
  Description of Artificial Sequence: Synthetic oligonucleotide
gaacgaagacguucugcuu

SEQ ID NO: 1019990 - RNA, 19 nt, Artificial Sequence
  Description of Artificial Sequence: Synthetic oligonucleotide
agucaacccaagagcugcu

SEQ ID NO: 1019991 - RNA, 19 nt, Artificial Sequence
  Description of Artificial Sequence: Synthetic oligonucleotide
ggaugcuaaggcgcaacuc

SEQ ID NO: 1019992 - RNA, 19 nt, Artificial Sequence
  Description of Artificial Sequence: Synthetic oligonucleotide
ggaguugugauaagcugcu

SEQ ID NO: 1019993 - RNA, 19 nt, Artificial Sequence
  Description of Artificial Sequence: Synthetic oligonucleotide
ccaaccgcuaggaugcuaa

SEQ ID NO: 1019994 - RNA, 19 nt, Artificial Sequence
  Description of Artificial Sequence: Synthetic oligonucleotide
cacaggccauaugcugcgg

SEQ ID NO: 1019995 - RNA, 19 nt, Artificial Sequence
  Description of Artificial Sequence: Synthetic oligonucleotide
gggugugauuccgaaguca

SEQ ID NO: 1019996 - RNA, 19 nt, Artificial Sequence
  Description of Artificial Sequence: Synthetic oligonucleotide
agacccgcucaacccgcgu

SEQ ID NO: 1019997 - RNA, 19 nt, Artificial Sequence
  Description of Artificial Sequence: Synthetic oligonucleotide
uugcacgagcagagauaau

SEQ ID NO: 1019998 - RNA, 19 nt, Artificial Sequence
  Description of Artificial Sequence: Synthetic oligonucleotide
gggucaaauccagcaagca

SEQ ID NO: 1019999 - RNA, 19 nt, Artificial Sequence
  Description of Artificial Sequence: Synthetic oligonucleotide
gacccucuugugcagcaau

SEQ ID NO: 1020000 - RNA, 19 nt, Artificial Sequence
  Description of Artificial Sequence: Synthetic oligonucleotide
gcuugacaauugauauuug

SEQ ID NO: 1020001 - RNA, 19 nt, Artificial Sequence
  Description of Artificial Sequence: Synthetic oligonucleotide
ccauccccuguuaucagca

SEQ ID NO: 1020002 - RNA, 19 nt, Artificial Sequence
  Description of Artificial Sequence: Synthetic oligonucleotide
cgcaacuccuugcaacgcc

SEQ ID NO: 1020003 - RNA, 19 nt, Artificial Sequence
  Description of Artificial Sequence: Synthetic oligonucleotide
cauuggaguccaaccgcua

SEQ ID NO: 1020004 - RNA, 19 nt, Artificial Sequence
  Description of Artificial Sequence: Synthetic oligonucleotide
gcugcggaagagcccaaga

SEQ ID NO: 1020005 - RNA, 19 nt, Artificial Sequence
  Description of Artificial Sequence: Synthetic oligonucleotide
gucagguggccucacuaau

SEQ ID NO: 1020006 - RNA, 19 nt, Artificial Sequence
  Description of Artificial Sequence: Synthetic oligonucleotide
cuucaugaauuggcaucca

SEQ ID NO: 1020007 - RNA, 19 nt, Artificial Sequence
  Description of Artificial Sequence: Synthetic oligonucleotide
cucaacccgcgucaggccu

SEQ ID NO: 1020008 - RNA, 19 nt, Artificial Sequence
  Description of Artificial Sequence: Synthetic oligonucleotide
gcuuuuaaacugguccgaa

SEQ ID NO: 1020009 - RNA, 19 nt, Artificial Sequence
  Description of Artificial Sequence: Synthetic oligonucleotide
gcucaacccgcgucaggcc

SEQ ID NO: 1020010 - RNA, 19 nt, Artificial Sequence
  Description of Artificial Sequence: Synthetic oligonucleotide
gcaacuccuugcaacgcca

SEQ ID NO: 1020011 - RNA, 19 nt, Artificial Sequence
  Description of Artificial Sequence: Synthetic oligonucleotide
cagcggcaugaauaggcaa

SEQ ID NO: 1020012 - RNA, 19 nt, Artificial Sequence
  Description of Artificial Sequence: Synthetic oligonucleotide
acccaaucucgggcuuccg

SEQ ID NO: 1020013 - RNA, 19 nt, Artificial Sequence
  Description of Artificial Sequence: Synthetic oligonucleotide
caaaagaaucugugugauu

SEQ ID NO: 1020014 - RNA, 19 nt, Artificial Sequence
  Description of Artificial Sequence: Synthetic oligonucleotide
ggagauguggcaaccacuu

SEQ ID NO: 1020015 - RNA, 19 nt, Artificial Sequence
  Description of Artificial Sequence: Synthetic oligonucleotide
gugcuugaguaagccucug

SEQ ID NO: 1020016 - RNA, 19 nt, Artificial Sequence
  Description of Artificial Sequence: Synthetic oligonucleotide
uccaaccgcuaggaugcua

SEQ ID NO: 1020017 - RNA, 19 nt, Artificial Sequence
  Description of Artificial Sequence: Synthetic oligonucleotide
cgcucaacccgcgucaggc

SEQ ID NO: 1020018 - RNA, 19 nt, Artificial Sequence
  Description of Artificial Sequence: Synthetic oligonucleotide
ggaagagcccaagaagagu

SEQ ID NO: 1020019 - RNA, 19 nt, Artificial Sequence
  Description of Artificial Sequence: Synthetic oligonucleotide
cugcuucaugaauuggcau

SEQ ID NO: 1020020 - RNA, 19 nt, Artificial Sequence
  Description of Artificial Sequence: Synthetic oligonucleotide
gguggaagucucuuccaau

SEQ ID NO: 1020021 - RNA, 19 nt, Artificial Sequence
  Description of Artificial Sequence: Synthetic oligonucleotide
gaagcccucaaaagucuuu

SEQ ID NO: 1020022 - RNA, 19 nt, Artificial Sequence
  Description of Artificial Sequence: Synthetic oligonucleotide
gagcugucagguggccuca

SEQ ID NO: 1020023 - RNA, 19 nt, Artificial Sequence
  Description of Artificial Sequence: Synthetic oligonucleotide
ccaaucucgggcuuccgua

SEQ ID NO: 1020024 - RNA, 19 nt, Artificial Sequence
  Description of Artificial Sequence: Synthetic oligonucleotide
cagguggccucacuaauuu

SEQ ID NO: 1020025 - RNA, 19 nt, Artificial Sequence
  Description of Artificial Sequence: Synthetic oligonucleotide
gugcgauuaguaaguggua

SEQ ID NO: 1020026 - RNA, 19 nt, Artificial Sequence
  Description of Artificial Sequence: Synthetic oligonucleotide
cauccccuguuaucagcaa

SEQ ID NO: 1020027 - RNA, 19 nt, Artificial Sequence
  Description of Artificial Sequence: Synthetic oligonucleotide
gcuuaagaagaaguucuau

SEQ ID NO: 1020028 - RNA, 19 nt, Artificial Sequence
  Description of Artificial Sequence: Synthetic oligonucleotide
aggagccgacaagcaaacu

SEQ ID NO: 1020029 - RNA, 19 nt, Artificial Sequence
  Description of Artificial Sequence: Synthetic oligonucleotide
gggugguguuuucuaaagu

SEQ ID NO: 1020030 - RNA, 19 nt, Artificial Sequence
  Description of Artificial Sequence: Synthetic oligonucleotide
cccaagggccgucucccag

SEQ ID NO: 1020031 - RNA, 19 nt, Artificial Sequence
  Description of Artificial Sequence: Synthetic oligonucleotide
cauucgaggucuguuccau

SEQ ID NO: 1020032 - RNA, 19 nt, Artificial Sequence
  Description of Artificial Sequence: Synthetic oligonucleotide
gcgauuaguaagugguauu

SEQ ID NO: 1020033 - RNA, 19 nt, Artificial Sequence
  Description of Artificial Sequence: Synthetic oligonucleotide
ccaaaagaaucugugugau

SEQ ID NO: 1020034 - RNA, 19 nt, Artificial Sequence
  Description of Artificial Sequence: Synthetic oligonucleotide
gcuccauguugaagcaaca

SEQ ID NO: 1020035 - RNA, 19 nt, Artificial Sequence
  Description of Artificial Sequence: Synthetic oligonucleotide
cgagccgcuucgcccaagg

SEQ ID NO: 1020036 - RNA, 19 nt, Artificial Sequence
  Description of Artificial Sequence: Synthetic oligonucleotide
ccaagggccgucucccaga

SEQ ID NO: 1020037 - RNA, 19 nt, Artificial Sequence
  Description of Artificial Sequence: Synthetic oligonucleotide
ccgcgucaggccucagacc

SEQ ID NO: 1020038 - RNA, 19 nt, Artificial Sequence
  Description of Artificial Sequence: Synthetic oligonucleotide
ccauacugagcagcuacaa

SEQ ID NO: 1020039 - RNA, 19 nt, Artificial Sequence
  Description of Artificial Sequence: Synthetic oligonucleotide
ggccgucucccagacccgc

SEQ ID NO: 1020040 - RNA, 19 nt, Artificial Sequence
  Description of Artificial Sequence: Synthetic oligonucleotide
ccgacaagcaaacuuucuu

SEQ ID NO: 1020041 - RNA, 19 nt, Artificial Sequence
  Description of Artificial Sequence: Synthetic oligonucleotide
ccgcuucgcccaagggccg

SEQ ID NO: 1020042 - RNA, 19 nt, Artificial Sequence
  Description of Artificial Sequence: Synthetic oligonucleotide
gcggcaugaauaggcaacu

SEQ ID NO: 1020043 - RNA, 19 nt, Artificial Sequence
  Description of Artificial Sequence: Synthetic oligonucleotide
ggcauccauccccuguuau

SEQ ID NO: 1020044 - RNA, 19 nt, Artificial Sequence
  Description of Artificial Sequence: Synthetic oligonucleotide
gccauucugcaguaauauu

SEQ ID NO: 1020045 - RNA, 19 nt, Artificial Sequence
  Description of Artificial Sequence: Synthetic oligonucleotide
ccaaggcuugacaauugau

SEQ ID NO: 1020046 - RNA, 19 nt, Artificial Sequence
  Description of Artificial Sequence: Synthetic oligonucleotide
aacccgcgucaggccucag

SEQ ID NO: 1020047 - RNA, 19 nt, Artificial Sequence
  Description of Artificial Sequence: Synthetic oligonucleotide
caacccgcgucaggccuca

SEQ ID NO: 1020048 - RNA, 19 nt, Artificial Sequence
  Description of Artificial Sequence: Synthetic oligonucleotide
gggccgucucccagacccg

SEQ ID NO: 1020049 - RNA, 19 nt, Artificial Sequence
  Description of Artificial Sequence: Synthetic oligonucleotide
uagucucgccgagccgcuu

SEQ ID NO: 1020050 - RNA, 19 nt, Artificial Sequence
  Description of Artificial Sequence: Synthetic oligonucleotide
ccgcucaacccgcgucagg

SEQ ID NO: 1020051 - RNA, 19 nt, Artificial Sequence
  Description of Artificial Sequence: Synthetic oligonucleotide
gaguugugauaagcugcuu

SEQ ID NO: 1020052 - RNA, 19 nt, Artificial Sequence
  Description of Artificial Sequence: Synthetic oligonucleotide
ccuugacucacugcaagau

SEQ ID NO: 1020053 - RNA, 19 nt, Artificial Sequence
  Description of Artificial Sequence: Synthetic oligonucleotide
gccgacaagcaaacuuucu

SEQ ID NO: 1020054 - RNA, 19 nt, Artificial Sequence
  Description of Artificial Sequence: Synthetic oligonucleotide
ccuugcaacgccacccaau

SEQ ID NO: 1020055 - RNA, 19 nt, Artificial Sequence
  Description of Artificial Sequence: Synthetic oligonucleotide
ccacccaaucucgggcuuc

SEQ ID NO: 1020056 - RNA, 19 nt, Artificial Sequence
  Description of Artificial Sequence: Synthetic oligonucleotide
gccauacacaaaggggaau

SEQ ID NO: 1020057 - RNA, 19 nt, Artificial Sequence
  Description of Artificial Sequence: Synthetic oligonucleotide
cggcaugaauaggcaacug

SEQ ID NO: 1020058 - RNA, 19 nt, Artificial Sequence
  Description of Artificial Sequence: Synthetic oligonucleotide
augcugcggaagagcccaa

SEQ ID NO: 1020059 - RNA, 19 nt, Artificial Sequence
  Description of Artificial Sequence: Synthetic oligonucleotide
cuucgcccaagggccgucu

SEQ ID NO: 1020060 - RNA, 19 nt, Artificial Sequence
  Description of Artificial Sequence: Synthetic oligonucleotide
cgccgagccgcuucgccca

SEQ ID NO: 1020061 - RNA, 19 nt, Artificial Sequence
  Description of Artificial Sequence: Synthetic oligonucleotide
gcuucgcccaagggccguc

SEQ ID NO: 1020062 - RNA, 19 nt, Artificial Sequence
  Description of Artificial Sequence: Synthetic oligonucleotide
gcgucaggccucagaccuc

SEQ ID NO: 1020063 - RNA, 19 nt, Artificial Sequence
  Description of Artificial Sequence: Synthetic oligonucleotide
guccaaccgcuaggaugcu

SEQ ID NO: 1020064 - RNA, 19 nt, Artificial Sequence
  Description of Artificial Sequence: Synthetic oligonucleotide
gccacccaaucucgggcuu

SEQ ID NO: 1020065 - RNA, 19 nt, Artificial Sequence
  Description of Artificial Sequence: Synthetic oligonucleotide
cgccacccaaucucgggcu

SEQ ID NO: 1020066 - RNA, 19 nt, Artificial Sequence
  Description of Artificial Sequence: Synthetic oligonucleotide
ccgagccgcuucgcccaag

SEQ ID NO: 1020067 - RNA, 19 nt, Artificial Sequence
  Description of Artificial Sequence: Synthetic oligonucleotide
cgaagacguucugcuuuua

SEQ ID NO: 1020068 - RNA, 19 nt, Artificial Sequence
  Description of Artificial Sequence: Synthetic oligonucleotide
cgcuucgcccaagggccgu

SEQ ID NO: 1020069 - RNA, 19 nt, Artificial Sequence
  Description of Artificial Sequence: Synthetic oligonucleotide
aaaguacccgauuacgucc

SEQ ID NO: 1020070 - RNA, 19 nt, Artificial Sequence
  Description of Artificial Sequence: Synthetic oligonucleotide
acgaauagcaucuauacag

SEQ ID NO: 1020071 - RNA, 19 nt, Artificial Sequence
  Description of Artificial Sequence: Synthetic oligonucleotide
aaauucacuccuuggcucg

SEQ ID NO: 1020072 - RNA, 19 nt, Artificial Sequence
  Description of Artificial Sequence: Synthetic oligonucleotide
aaucggaguuucuucuucc

SEQ ID NO: 1020073 - RNA, 19 nt, Artificial Sequence
  Description of Artificial Sequence: Synthetic oligonucleotide
aacauuauguacaauccag

SEQ ID NO: 1020074 - RNA, 19 nt, Artificial Sequence
  Description of Artificial Sequence: Synthetic oligonucleotide
auauaggauggucaucugc

SEQ ID NO: 1020075 - RNA, 19 nt, Artificial Sequence
  Description of Artificial Sequence: Synthetic oligonucleotide
aggacuaggggccaaaagg

SEQ ID NO: 1020076 - RNA, 19 nt, Artificial Sequence
  Description of Artificial Sequence: Synthetic oligonucleotide
gugaguaucauuaagccag

SEQ ID NO: 1020077 - RNA, 19 nt, Artificial Sequence
  Description of Artificial Sequence: Synthetic oligonucleotide
uucggcuccggccaaaucg

SEQ ID NO: 1020078 - RNA, 19 nt, Artificial Sequence
  Description of Artificial Sequence: Synthetic oligonucleotide
gauggugaucaccuuagcg

SEQ ID NO: 1020079 - RNA, 19 nt, Artificial Sequence
  Description of Artificial Sequence: Synthetic oligonucleotide
uauaggauggucaucugcu

SEQ ID NO: 1020080 - RNA, 19 nt, Artificial Sequence
  Description of Artificial Sequence: Synthetic oligonucleotide
cauuaagccagucagcccc

SEQ ID NO: 1020081 - RNA, 19 nt, Artificial Sequence
  Description of Artificial Sequence: Synthetic oligonucleotide
cugaucgucgcucagaaag

SEQ ID NO: 1020082 - RNA, 19 nt, Artificial Sequence
  Description of Artificial Sequence: Synthetic oligonucleotide
aaugucauauaggaugguc

SEQ ID NO: 1020083 - RNA, 19 nt, Artificial Sequence
  Description of Artificial Sequence: Synthetic oligonucleotide
aaaucggaguuucuucuuc

SEQ ID NO: 1020084 - RNA, 19 nt, Artificial Sequence
  Description of Artificial Sequence: Synthetic oligonucleotide
cauuauguacaauccagcc

SEQ ID NO: 1020085 - RNA, 19 nt, Artificial Sequence
  Description of Artificial Sequence: Synthetic oligonucleotide
uuuggagugcuuagguugg

SEQ ID NO: 1020086 - RNA, 19 nt, Artificial Sequence
  Description of Artificial Sequence: Synthetic oligonucleotide
cucgaaaagaaggaggugg

SEQ ID NO: 1020087 - RNA, 19 nt, Artificial Sequence
  Description of Artificial Sequence: Synthetic oligonucleotide
ucauauaggauggucaucu

SEQ ID NO: 1020088 - RNA, 19 nt, Artificial Sequence
  Description of Artificial Sequence: Synthetic oligonucleotide
uguacaauccagcccaaca

SEQ ID NO: 1020089 - RNA, 19 nt, Artificial Sequence
  Description of Artificial Sequence: Synthetic oligonucleotide
uagcagaucacuauccaug

SEQ ID NO: 1020090 - RNA, 19 nt, Artificial Sequence
  Description of Artificial Sequence: Synthetic oligonucleotide
uuagcguagcaguugggcg

SEQ ID NO: 1020091 - RNA, 19 nt, Artificial Sequence
  Description of Artificial Sequence: Synthetic oligonucleotide
cucaaauucacuccuuggc

SEQ ID NO: 1020092 - RNA, 19 nt, Artificial Sequence
  Description of Artificial Sequence: Synthetic oligonucleotide
cuaacaugaagcagagggg

SEQ ID NO: 1020093 - RNA, 19 nt, Artificial Sequence
  Description of Artificial Sequence: Synthetic oligonucleotide
cuuuagcagaucacuaucc

SEQ ID NO: 1020094 - RNA, 19 nt, Artificial Sequence
  Description of Artificial Sequence: Synthetic oligonucleotide
auggugaucaccuuagcgu

SEQ ID NO: 1020095 - RNA, 19 nt, Artificial Sequence
  Description of Artificial Sequence: Synthetic oligonucleotide
agaucacuauccaugaugg

SEQ ID NO: 1020096 - RNA, 19 nt, Artificial Sequence
  Description of Artificial Sequence: Synthetic oligonucleotide
gguaguaaccuucacugcg

SEQ ID NO: 1020097 - RNA, 19 nt, Artificial Sequence
  Description of Artificial Sequence: Synthetic oligonucleotide
ugagacucgauggugauca

SEQ ID NO: 1020098 - RNA, 19 nt, Artificial Sequence
  Description of Artificial Sequence: Synthetic oligonucleotide
uggcucgaaaagaaggagg

SEQ ID NO: 1020099 - RNA, 19 nt, Artificial Sequence
  Description of Artificial Sequence: Synthetic oligonucleotide
aguaucauuaagccaguca

SEQ ID NO: 1020100 - RNA, 19 nt, Artificial Sequence
  Description of Artificial Sequence: Synthetic oligonucleotide
aacgaauagcaucuauaca

SEQ ID NO: 1020101 - RNA, 19 nt, Artificial Sequence
  Description of Artificial Sequence: Synthetic oligonucleotide
uuagcuuuagcagaucacu

SEQ ID NO: 1020102 - RNA, 19 nt, Artificial Sequence
  Description of Artificial Sequence: Synthetic oligonucleotide
aacuugagcugguuuagcu

SEQ ID NO: 1020103 - RNA, 19 nt, Artificial Sequence
  Description of Artificial Sequence: Synthetic oligonucleotide
ucacuauuaacauuaugua

SEQ ID NO: 1020104 - RNA, 19 nt, Artificial Sequence
  Description of Artificial Sequence: Synthetic oligonucleotide
guuggugauugugugaugg

SEQ ID NO: 1020105 - RNA, 19 nt, Artificial Sequence
  Description of Artificial Sequence: Synthetic oligonucleotide
ugugugauggacccaguga

SEQ ID NO: 1020106 - RNA, 19 nt, Artificial Sequence
  Description of Artificial Sequence: Synthetic oligonucleotide
gaauagcaucuauacaggc

SEQ ID NO: 1020107 - RNA, 19 nt, Artificial Sequence
  Description of Artificial Sequence: Synthetic oligonucleotide
uuagguuggugauugugug

SEQ ID NO: 1020108 - RNA, 19 nt, Artificial Sequence
  Description of Artificial Sequence: Synthetic oligonucleotide
uaucauuaagccagucagc

SEQ ID NO: 1020109 - RNA, 19 nt, Artificial Sequence
  Description of Artificial Sequence: Synthetic oligonucleotide
auacgugagccgcaaauag

SEQ ID NO: 1020110 - RNA, 19 nt, Artificial Sequence
  Description of Artificial Sequence: Synthetic oligonucleotide
ugcaauagccgcucauacg

SEQ ID NO: 1020111 - RNA, 19 nt, Artificial Sequence
  Description of Artificial Sequence: Synthetic oligonucleotide
ucauccacgccaaugggcu

SEQ ID NO: 1020112 - RNA, 19 nt, Artificial Sequence
  Description of Artificial Sequence: Synthetic oligonucleotide
gaacguagcgcuucucccg

SEQ ID NO: 1020113 - RNA, 19 nt, Artificial Sequence
  Description of Artificial Sequence: Synthetic oligonucleotide
aauagcaucuauacaggcu

SEQ ID NO: 1020114 - RNA, 19 nt, Artificial Sequence
  Description of Artificial Sequence: Synthetic oligonucleotide
aauagccgcucauacguga

SEQ ID NO: 1020115 - RNA, 19 nt, Artificial Sequence
  Description of Artificial Sequence: Synthetic oligonucleotide
ucagaaaguacccgauuac

SEQ ID NO: 1020116 - RNA, 19 nt, Artificial Sequence
  Description of Artificial Sequence: Synthetic oligonucleotide
auuacguccccugaguguc

SEQ ID NO: 1020117 - RNA, 19 nt, Artificial Sequence
  Description of Artificial Sequence: Synthetic oligonucleotide
caucuauacaggcugguac

SEQ ID NO: 1020118 - RNA, 19 nt, Artificial Sequence
  Description of Artificial Sequence: Synthetic oligonucleotide
uucuuccggaacuugagcu

SEQ ID NO: 1020119 - RNA, 19 nt, Artificial Sequence
  Description of Artificial Sequence: Synthetic oligonucleotide
gugugauggacccagugag

SEQ ID NO: 1020120 - RNA, 19 nt, Artificial Sequence
  Description of Artificial Sequence: Synthetic oligonucleotide
cagaucacuauccaugaug

SEQ ID NO: 1020121 - RNA, 19 nt, Artificial Sequence
  Description of Artificial Sequence: Synthetic oligonucleotide
agugaguaucauuaagcca

SEQ ID NO: 1020122 - RNA, 19 nt, Artificial Sequence
  Description of Artificial Sequence: Synthetic oligonucleotide
ucgagugggaacuuguagu

SEQ ID NO: 1020123 - RNA, 19 nt, Artificial Sequence
  Description of Artificial Sequence: Synthetic oligonucleotide
ucgucgcucagaaaguacc

SEQ ID NO: 1020124 - RNA, 19 nt, Artificial Sequence
  Description of Artificial Sequence: Synthetic oligonucleotide
aguaaccuucacugcgugc

SEQ ID NO: 1020125 - RNA, 19 nt, Artificial Sequence
  Description of Artificial Sequence: Synthetic oligonucleotide
augguaucgugguccaccc

SEQ ID NO: 1020126 - RNA, 19 nt, Artificial Sequence
  Description of Artificial Sequence: Synthetic oligonucleotide
aauagcucaugucuuccaa

SEQ ID NO: 1020127 - RNA, 19 nt, Artificial Sequence
  Description of Artificial Sequence: Synthetic oligonucleotide
aaauagcucaugucuucca

SEQ ID NO: 1020128 - RNA, 19 nt, Artificial Sequence
  Description of Artificial Sequence: Synthetic oligonucleotide
aaguacccgauuacguccc

SEQ ID NO: 1020129 - RNA, 19 nt, Artificial Sequence
  Description of Artificial Sequence: Synthetic oligonucleotide
ugaacguagcgcuucuccc

SEQ ID NO: 1020130 - RNA, 19 nt, Artificial Sequence
  Description of Artificial Sequence: Synthetic oligonucleotide
gaugguaucgugguccacc

SEQ ID NO: 1020131 - RNA, 19 nt, Artificial Sequence
  Description of Artificial Sequence: Synthetic oligonucleotide
gggguaguaaccuucacug

SEQ ID NO: 1020132 - RNA, 19 nt, Artificial Sequence
  Description of Artificial Sequence: Synthetic oligonucleotide
ucggaguuucuucuuccgg

SEQ ID NO: 1020133 - RNA, 19 nt, Artificial Sequence
  Description of Artificial Sequence: Synthetic oligonucleotide
auauucuaucaccaucuca

SEQ ID NO: 1020134 - RNA, 19 nt, Artificial Sequence
  Description of Artificial Sequence: Synthetic oligonucleotide
ugucauauaggauggucau

SEQ ID NO: 1020135 - RNA, 19 nt, Artificial Sequence
  Description of Artificial Sequence: Synthetic oligonucleotide
accuuagcguagcaguugg

SEQ ID NO: 1020136 - RNA, 19 nt, Artificial Sequence
  Description of Artificial Sequence: Synthetic oligonucleotide
gcagcuacaaaacauuuac

SEQ ID NO: 1020137 - RNA, 19 nt, Artificial Sequence
  Description of Artificial Sequence: Synthetic oligonucleotide
ucauacgugagccgcaaau

SEQ ID NO: 1020138 - RNA, 19 nt, Artificial Sequence
  Description of Artificial Sequence: Synthetic oligonucleotide
aguugagggagccacggca

SEQ ID NO: 1020139 - RNA, 19 nt, Artificial Sequence
  Description of Artificial Sequence: Synthetic oligonucleotide
agacacgggaucuuguugu

SEQ ID NO: 1020140 - RNA, 19 nt, Artificial Sequence
  Description of Artificial Sequence: Synthetic oligonucleotide
ucgaaaagaaggagguggu

SEQ ID NO: 1020141 - RNA, 19 nt, Artificial Sequence
  Description of Artificial Sequence: Synthetic oligonucleotide
guuaccucaaaggacugag

SEQ ID NO: 1020142 - RNA, 19 nt, Artificial Sequence
  Description of Artificial Sequence: Synthetic oligonucleotide
ugaguuccaaaugucauau

SEQ ID NO: 1020143 - RNA, 19 nt, Artificial Sequence
  Description of Artificial Sequence: Synthetic oligonucleotide
ugucugaugcucccggggc

SEQ ID NO: 1020144 - RNA, 19 nt, Artificial Sequence
  Description of Artificial Sequence: Synthetic oligonucleotide
guagaucacaaucuucuuc

SEQ ID NO: 1020145 - RNA, 19 nt, Artificial Sequence
  Description of Artificial Sequence: Synthetic oligonucleotide
cagaaaguacccgauuacg

SEQ ID NO: 1020146 - RNA, 19 nt, Artificial Sequence
  Description of Artificial Sequence: Synthetic oligonucleotide
ucgcuuacgcuuuggagug

SEQ ID NO: 1020147 - RNA, 19 nt, Artificial Sequence
  Description of Artificial Sequence: Synthetic oligonucleotide
aaaauguggcguuggguuu

SEQ ID NO: 1020148 - RNA, 19 nt, Artificial Sequence
  Description of Artificial Sequence: Synthetic oligonucleotide
gguaucgugguccacccgg

SEQ ID NO: 1020149 - RNA, 19 nt, Artificial Sequence
  Description of Artificial Sequence: Synthetic oligonucleotide
uacgugagccgcaaauagc

SEQ ID NO: 1020150 - RNA, 19 nt, Artificial Sequence
  Description of Artificial Sequence: Synthetic oligonucleotide
uguuacaauaaaguuuaau

SEQ ID NO: 1020151 - RNA, 19 nt, Artificial Sequence
  Description of Artificial Sequence: Synthetic oligonucleotide
uacgcuuuggagugcuuag

SEQ ID NO: 1020152 - RNA, 19 nt, Artificial Sequence
  Description of Artificial Sequence: Synthetic oligonucleotide
cuuagcguagcaguugggc

SEQ ID NO: 1020153 - RNA, 19 nt, Artificial Sequence
  Description of Artificial Sequence: Synthetic oligonucleotide
cugaacguagcgcuucucc

SEQ ID NO: 1020154 - RNA, 19 nt, Artificial Sequence
  Description of Artificial Sequence: Synthetic oligonucleotide
uagcaucuauacaggcugg

SEQ ID NO: 1020155 - RNA, 19 nt, Artificial Sequence
  Description of Artificial Sequence: Synthetic oligonucleotide
ccagugaguaucauuaagc

SEQ ID NO: 1020156 - RNA, 19 nt, Artificial Sequence
  Description of Artificial Sequence: Synthetic oligonucleotide
ugaugggguaguaaccuuc

SEQ ID NO: 1020157 - RNA, 19 nt, Artificial Sequence
  Description of Artificial Sequence: Synthetic oligonucleotide
uacaggggagucaaaaguu

SEQ ID NO: 1020158 - RNA, 19 nt, Artificial Sequence
  Description of Artificial Sequence: Synthetic oligonucleotide
guuuagcuuuagcagauca

SEQ ID NO: 1020159 - RNA, 19 nt, Artificial Sequence
  Description of Artificial Sequence: Synthetic oligonucleotide
ucggcuccggccaaaucgg

SEQ ID NO: 1020160 - RNA, 19 nt, Artificial Sequence
  Description of Artificial Sequence: Synthetic oligonucleotide
ucauuaagccagucagccc

SEQ ID NO: 1020161 - RNA, 19 nt, Artificial Sequence
  Description of Artificial Sequence: Synthetic oligonucleotide
cucauccacgccaaugggc

SEQ ID NO: 1020162 - RNA, 19 nt, Artificial Sequence
  Description of Artificial Sequence: Synthetic oligonucleotide
aucggaguuucuucuuccg

SEQ ID NO: 1020163 - RNA, 19 nt, Artificial Sequence
  Description of Artificial Sequence: Synthetic oligonucleotide
uccauggcaaacagacccc

SEQ ID NO: 1020164 - RNA, 19 nt, Artificial Sequence
  Description of Artificial Sequence: Synthetic oligonucleotide
cauuuacagcuucuucucc

SEQ ID NO: 1020165 - RNA, 19 nt, Artificial Sequence
  Description of Artificial Sequence: Synthetic oligonucleotide
ccuuggcucgaaaagaagg

SEQ ID NO: 1020166 - RNA, 19 nt, Artificial Sequence
  Description of Artificial Sequence: Synthetic oligonucleotide
ugguuuagcuuuagcagau

SEQ ID NO: 1020167 - RNA, 19 nt, Artificial Sequence
  Description of Artificial Sequence: Synthetic oligonucleotide
agccgcucauacgugagcc

SEQ ID NO: 1020168 - RNA, 19 nt, Artificial Sequence
  Description of Artificial Sequence: Synthetic oligonucleotide
caaauagcucaugucuucc

SEQ ID NO: 1020169 - RNA, 19 nt, Artificial Sequence
  Description of Artificial Sequence: Synthetic oligonucleotide
gaguagaucacaaucuucu

SEQ ID NO: 1020170 - RNA, 19 nt, Artificial Sequence
  Description of Artificial Sequence: Synthetic oligonucleotide
ucgugguccacccggaaaa

SEQ ID NO: 1020171 - RNA, 19 nt, Artificial Sequence
  Description of Artificial Sequence: Synthetic oligonucleotide
agcuuuagcagaucacuau

SEQ ID NO: 1020172 - RNA, 19 nt, Artificial Sequence
  Description of Artificial Sequence: Synthetic oligonucleotide
cuaggggccaaaaggcccc

SEQ ID NO: 1020173 - RNA, 19 nt, Artificial Sequence
  Description of Artificial Sequence: Synthetic oligonucleotide
agaccccuaaacuggggag

SEQ ID NO: 1020174 - RNA, 19 nt, Artificial Sequence
  Description of Artificial Sequence: Synthetic oligonucleotide
ugaucgucgcucagaaagu

SEQ ID NO: 1020175 - RNA, 19 nt, Artificial Sequence
  Description of Artificial Sequence: Synthetic oligonucleotide
guaaccuucacugcgugca

SEQ ID NO: 1020176 - RNA, 19 nt, Artificial Sequence
  Description of Artificial Sequence: Synthetic oligonucleotide
augucauauaggaugguca

SEQ ID NO: 1020177 - RNA, 19 nt, Artificial Sequence
  Description of Artificial Sequence: Synthetic oligonucleotide
agaaaguacccgauuacgu

SEQ ID NO: 1020178 - RNA, 19 nt, Artificial Sequence
  Description of Artificial Sequence: Synthetic oligonucleotide
aaguuuaaucacaauuaua

SEQ ID NO: 1020179 - RNA, 19 nt, Artificial Sequence
  Description of Artificial Sequence: Synthetic oligonucleotide
cacuccuuggcucgaaaag

SEQ ID NO: 1020180 - RNA, 19 nt, Artificial Sequence
  Description of Artificial Sequence: Synthetic oligonucleotide
uagcguagcaguugggcgu

SEQ ID NO: 1020181 - RNA, 19 nt, Artificial Sequence
  Description of Artificial Sequence: Synthetic oligonucleotide
cucgagugggaacuuguag

SEQ ID NO: 1020182 - RNA, 19 nt, Artificial Sequence
  Description of Artificial Sequence: Synthetic oligonucleotide
ccagagaccccuaaacugg

SEQ ID NO: 1020183 - RNA, 19 nt, Artificial Sequence
  Description of Artificial Sequence: Synthetic oligonucleotide
uggugaucaccuuagcgua

SEQ ID NO: 1020184 - RNA, 19 nt, Artificial Sequence
  Description of Artificial Sequence: Synthetic oligonucleotide
cuaaacuggggaggggugg

SEQ ID NO: 1020185 - RNA, 19 nt, Artificial Sequence
  Description of Artificial Sequence: Synthetic oligonucleotide
uggcaaacagaccccacuc

SEQ ID NO: 1020186 - RNA, 19 nt, Artificial Sequence
  Description of Artificial Sequence: Synthetic oligonucleotide
agguugccgcacuuggugg

SEQ ID NO: 1020187 - RNA, 19 nt, Artificial Sequence
  Description of Artificial Sequence: Synthetic oligonucleotide
uaguaaccuucacugcgug

SEQ ID NO: 1020188 - RNA, 19 nt, Artificial Sequence
  Description of Artificial Sequence: Synthetic oligonucleotide
cuuggcucgaaaagaagga

SEQ ID NO: 1020189 - RNA, 19 nt, Artificial Sequence
  Description of Artificial Sequence: Synthetic oligonucleotide
cacauguggagauggggac

SEQ ID NO: 1020190 - RNA, 19 nt, Artificial Sequence
  Description of Artificial Sequence: Synthetic oligonucleotide
cagcagugguugaugaacc

SEQ ID NO: 1020191 - RNA, 19 nt, Artificial Sequence
  Description of Artificial Sequence: Synthetic oligonucleotide
ugaguaucauuaagccagu

SEQ ID NO: 1020192 - RNA, 19 nt, Artificial Sequence
  Description of Artificial Sequence: Synthetic oligonucleotide
ucgcucagaaaguacccga

SEQ ID NO: 1020193 - RNA, 19 nt, Artificial Sequence
  Description of Artificial Sequence: Synthetic oligonucleotide
gaccccuaaacuggggagg

SEQ ID NO: 1020194 - RNA, 19 nt, Artificial Sequence
  Description of Artificial Sequence: Synthetic oligonucleotide
gccccuaucccacaugugg

SEQ ID NO: 1020195 - RNA, 19 nt, Artificial Sequence
  Description of Artificial Sequence: Synthetic oligonucleotide
gauggacccagugaguauc

SEQ ID NO: 1020196 - RNA, 19 nt, Artificial Sequence
  Description of Artificial Sequence: Synthetic oligonucleotide
gacccagugaguaucauua

SEQ ID NO: 1020197 - RNA, 19 nt, Artificial Sequence
  Description of Artificial Sequence: Synthetic oligonucleotide
uagcuuuagcagaucacua

SEQ ID NO: 1020198 - RNA, 19 nt, Artificial Sequence
  Description of Artificial Sequence: Synthetic oligonucleotide
cugcaauagccgcucauac

SEQ ID NO: 1020199 - RNA, 19 nt, Artificial Sequence
  Description of Artificial Sequence: Synthetic oligonucleotide
aucccacauguggagaugg

SEQ ID NO: 1020200 - RNA, 19 nt, Artificial Sequence
  Description of Artificial Sequence: Synthetic oligonucleotide
aggggugacccacaggggu

SEQ ID NO: 1020201 - RNA, 19 nt, Artificial Sequence
  Description of Artificial Sequence: Synthetic oligonucleotide
gucgcuuacgcuuuggagu

SEQ ID NO: 1020202 - RNA, 19 nt, Artificial Sequence
  Description of Artificial Sequence: Synthetic oligonucleotide
caggggagucaaaaguuac

SEQ ID NO: 1020203 - RNA, 19 nt, Artificial Sequence
  Description of Artificial Sequence: Synthetic oligonucleotide
gcuuagggcgaccaagggg

SEQ ID NO: 1020204 - RNA, 19 nt, Artificial Sequence
  Description of Artificial Sequence: Synthetic oligonucleotide
uggugauugugugauggac

SEQ ID NO: 1020205 - RNA, 19 nt, Artificial Sequence
  Description of Artificial Sequence: Synthetic oligonucleotide
cagagaccccuaaacuggg

SEQ ID NO: 1020206 - RNA, 19 nt, Artificial Sequence
  Description of Artificial Sequence: Synthetic oligonucleotide
cugucugaugcucccgggg

SEQ ID NO: 1020207 - RNA, 19 nt, Artificial Sequence
  Description of Artificial Sequence: Synthetic oligonucleotide
agcugucgggcugagacag

SEQ ID NO: 1020208 - RNA, 19 nt, Artificial Sequence
  Description of Artificial Sequence: Synthetic oligonucleotide
gagaccccuaaacugggga

SEQ ID NO: 1020209 - RNA, 19 nt, Artificial Sequence
  Description of Artificial Sequence: Synthetic oligonucleotide
uccucgagugggaacuugu

SEQ ID NO: 1020210 - RNA, 19 nt, Artificial Sequence
  Description of Artificial Sequence: Synthetic oligonucleotide
uguggcguuggguuuucac

SEQ ID NO: 1020211 - RNA, 19 nt, Artificial Sequence
  Description of Artificial Sequence: Synthetic oligonucleotide
uacccgauuacguccccug

SEQ ID NO: 1020212 - RNA, 19 nt, Artificial Sequence
  Description of Artificial Sequence: Synthetic oligonucleotide
uuggugauugugugaugga

SEQ ID NO: 1020213 - RNA, 19 nt, Artificial Sequence
  Description of Artificial Sequence: Synthetic oligonucleotide
cagguugccgcacuuggug

SEQ ID NO: 1020214 - RNA, 19 nt, Artificial Sequence
  Description of Artificial Sequence: Synthetic oligonucleotide
gacuaggggccaaaaggcc

SEQ ID NO: 1020215 - RNA, 19 nt, Artificial Sequence
  Description of Artificial Sequence: Synthetic oligonucleotide
ggugauugugugauggacc

SEQ ID NO: 1020216 - RNA, 19 nt, Artificial Sequence
  Description of Artificial Sequence: Synthetic oligonucleotide
ucccacauguggagauggg

SEQ ID NO: 1020217 - RNA, 19 nt, Artificial Sequence
  Description of Artificial Sequence: Synthetic oligonucleotide
augcugcugcugcugcugc

SEQ ID NO: 1020218 - RNA, 19 nt, Artificial Sequence
  Description of Artificial Sequence: Synthetic oligonucleotide
aguacccgauuacgucccc

SEQ ID NO: 1020219 - RNA, 19 nt, Artificial Sequence
  Description of Artificial Sequence: Synthetic oligonucleotide
cacgccuuccagcugucgg

SEQ ID NO: 1020220 - RNA, 19 nt, Artificial Sequence
  Description of Artificial Sequence: Synthetic oligonucleotide
acgugagccgcaaauagcu

SEQ ID NO: 1020221 - RNA, 19 nt, Artificial Sequence
  Description of Artificial Sequence: Synthetic oligonucleotide
cucagaaaguacccgauua

SEQ ID NO: 1020222 - RNA, 19 nt, Artificial Sequence
  Description of Artificial Sequence: Synthetic oligonucleotide
agccgcaaauagcucaugu

SEQ ID NO: 1020223 - RNA, 19 nt, Artificial Sequence
  Description of Artificial Sequence: Synthetic oligonucleotide
uccacccggaaaagguagc

SEQ ID NO: 1020224 - RNA, 19 nt, Artificial Sequence
  Description of Artificial Sequence: Synthetic oligonucleotide
augggguaguaaccuucac

SEQ ID NO: 1020225 - RNA, 19 nt, Artificial Sequence
  Description of Artificial Sequence: Synthetic oligonucleotide
guacaggggagucaaaagu

SEQ ID NO: 1020226 - RNA, 19 nt, Artificial Sequence
  Description of Artificial Sequence: Synthetic oligonucleotide
gucgcucagaaaguacccg

SEQ ID NO: 1020227 - RNA, 19 nt, Artificial Sequence
  Description of Artificial Sequence: Synthetic oligonucleotide
cuuagguuggugauugugu

SEQ ID NO: 1020228 - RNA, 19 nt, Artificial Sequence
  Description of Artificial Sequence: Synthetic oligonucleotide
cauauucuaucaccaucuc

SEQ ID NO: 1020229 - RNA, 19 nt, Artificial Sequence
  Description of Artificial Sequence: Synthetic oligonucleotide
cccacuaacaugaagcaga

SEQ ID NO: 1020230 - RNA, 19 nt, Artificial Sequence
  Description of Artificial Sequence: Synthetic oligonucleotide
ggacuaggggccaaaaggc

SEQ ID NO: 1020231 - RNA, 19 nt, Artificial Sequence
  Description of Artificial Sequence: Synthetic oligonucleotide
gaugcugcugcugcugcug

SEQ ID NO: 1020232 - RNA, 19 nt, Artificial Sequence
  Description of Artificial Sequence: Synthetic oligonucleotide
aauguggcguuggguuuuc

SEQ ID NO: 1020233 - RNA, 19 nt, Artificial Sequence
  Description of Artificial Sequence: Synthetic oligonucleotide
cgaauagcaucuauacagg

SEQ ID NO: 1020234 - RNA, 19 nt, Artificial Sequence
  Description of Artificial Sequence: Synthetic oligonucleotide
ccaacauauucuaucacca

SEQ ID NO: 1020235 - RNA, 19 nt, Artificial Sequence
  Description of Artificial Sequence: Synthetic oligonucleotide
ucaguaaccgccgcugcuc

SEQ ID NO: 1020236 - RNA, 19 nt, Artificial Sequence
  Description of Artificial Sequence: Synthetic oligonucleotide
cauauaggauggucaucug

SEQ ID NO: 1020237 - RNA, 19 nt, Artificial Sequence
  Description of Artificial Sequence: Synthetic oligonucleotide
ugguaucgugguccacccg

SEQ ID NO: 1020238 - RNA, 19 nt, Artificial Sequence
  Description of Artificial Sequence: Synthetic oligonucleotide
uuccuccuccuccuccucc

SEQ ID NO: 1020239 - RNA, 19 nt, Artificial Sequence
  Description of Artificial Sequence: Synthetic oligonucleotide
cagacacgggaucuuguug

SEQ ID NO: 1020240 - RNA, 19 nt, Artificial Sequence
  Description of Artificial Sequence: Synthetic oligonucleotide
gauuacguccccugagugu

SEQ ID NO: 1020241 - RNA, 19 nt, Artificial Sequence
  Description of Artificial Sequence: Synthetic oligonucleotide
gcaauagccgcucauacgu

SEQ ID NO: 1020242 - RNA, 19 nt, Artificial Sequence
  Description of Artificial Sequence: Synthetic oligonucleotide
agcagugguugaugaaccu

SEQ ID NO: 1020243 - RNA, 19 nt, Artificial Sequence
  Description of Artificial Sequence: Synthetic oligonucleotide
ugaucaccuuagcguagca

SEQ ID NO: 1020244 - RNA, 19 nt, Artificial Sequence
  Description of Artificial Sequence: Synthetic oligonucleotide
aauaggggugagggcacca

SEQ ID NO: 1020245 - RNA, 19 nt, Artificial Sequence
  Description of Artificial Sequence: Synthetic oligonucleotide
accccuaaacuggggaggg

SEQ ID NO: 1020246 - RNA, 19 nt, Artificial Sequence
  Description of Artificial Sequence: Synthetic oligonucleotide
gcuuuagcagaucacuauc

SEQ ID NO: 1020247 - RNA, 19 nt, Artificial Sequence
  Description of Artificial Sequence: Synthetic oligonucleotide
caggacuaggggccaaaag

SEQ ID NO: 1020248 - RNA, 19 nt, Artificial Sequence
  Description of Artificial Sequence: Synthetic oligonucleotide
caacaagaagggccugccc

SEQ ID NO: 1020249 - RNA, 19 nt, Artificial Sequence
  Description of Artificial Sequence: Synthetic oligonucleotide
uauguacaauccagcccaa

SEQ ID NO: 1020250 - RNA, 19 nt, Artificial Sequence
  Description of Artificial Sequence: Synthetic oligonucleotide
guagcaguugggcgugcag

SEQ ID NO: 1020251 - RNA, 19 nt, Artificial Sequence
  Description of Artificial Sequence: Synthetic oligonucleotide
uuacgcuuuggagugcuua

SEQ ID NO: 1020252 - RNA, 19 nt, Artificial Sequence
  Description of Artificial Sequence: Synthetic oligonucleotide
cugucgggcugagacaggg

SEQ ID NO: 1020253 - RNA, 19 nt, Artificial Sequence
  Description of Artificial Sequence: Synthetic oligonucleotide
ugcucugaucgucgcucag

SEQ ID NO: 1020254 - RNA, 19 nt, Artificial Sequence
  Description of Artificial Sequence: Synthetic oligonucleotide
acagacacgggaucuuguu

SEQ ID NO: 1020255 - RNA, 19 nt, Artificial Sequence
  Description of Artificial Sequence: Synthetic oligonucleotide
caauagccgcucauacgug

SEQ ID NO: 1020256 - RNA, 19 nt, Artificial Sequence
  Description of Artificial Sequence: Synthetic oligonucleotide
uagccgcucauacgugagc

SEQ ID NO: 1020257 - RNA, 19 nt, Artificial Sequence
  Description of Artificial Sequence: Synthetic oligonucleotide
caauggcgcucaguaaccg

SEQ ID NO: 1020258 - RNA, 19 nt, Artificial Sequence
  Description of Artificial Sequence: Synthetic oligonucleotide
ugccaaugcccuccugaac

SEQ ID NO: 1020259 - RNA, 19 nt, Artificial Sequence
  Description of Artificial Sequence: Synthetic oligonucleotide
guuguccucgagugggaac

SEQ ID NO: 1020260 - RNA, 19 nt, Artificial Sequence
  Description of Artificial Sequence: Synthetic oligonucleotide
cugaguguccacgccuucc

SEQ ID NO: 1020261 - RNA, 19 nt, Artificial Sequence
  Description of Artificial Sequence: Synthetic oligonucleotide
ugauggacccagugaguau

SEQ ID NO: 1020262 - RNA, 19 nt, Artificial Sequence
  Description of Artificial Sequence: Synthetic oligonucleotide
gugaucaccuuagcguagc

SEQ ID NO: 1020263 - RNA, 19 nt, Artificial Sequence
  Description of Artificial Sequence: Synthetic oligonucleotide
gugccaauggcgcucagua

SEQ ID NO: 1020264 - RNA, 19 nt, Artificial Sequence
  Description of Artificial Sequence: Synthetic oligonucleotide
uccugaacguagcgcuucu

SEQ ID NO: 1020265 - RNA, 19 nt, Artificial Sequence
  Description of Artificial Sequence: Synthetic oligonucleotide
uggccgucuucgucgagug

SEQ ID NO: 1020266 - RNA, 19 nt, Artificial Sequence
  Description of Artificial Sequence: Synthetic oligonucleotide
uuacguccccugagugucc

SEQ ID NO: 1020267 - RNA, 19 nt, Artificial Sequence
  Description of Artificial Sequence: Synthetic oligonucleotide
cacuggucugcugcaauag

SEQ ID NO: 1020268 - RNA, 19 nt, Artificial Sequence
  Description of Artificial Sequence: Synthetic oligonucleotide
ugcugggagcuuagggcga

SEQ ID NO: 1020269 - RNA, 19 nt, Artificial Sequence
  Description of Artificial Sequence: Synthetic oligonucleotide
acgcuuuggagugcuuagg

SEQ ID NO: 1020270 - RNA, 19 nt, Artificial Sequence
  Description of Artificial Sequence: Synthetic oligonucleotide
ggagugcuuagguugguga

SEQ ID NO: 1020271 - RNA, 19 nt, Artificial Sequence
  Description of Artificial Sequence: Synthetic oligonucleotide
accccacucauggauucgg

SEQ ID NO: 1020272 - RNA, 19 nt, Artificial Sequence
  Description of Artificial Sequence: Synthetic oligonucleotide
auucggcuccggccaaauc

SEQ ID NO: 1020273 - RNA, 19 nt, Artificial Sequence
  Description of Artificial Sequence: Synthetic oligonucleotide
gccagguugccgcacuugg

SEQ ID NO: 1020274 - RNA, 19 nt, Artificial Sequence
  Description of Artificial Sequence: Synthetic oligonucleotide
ucgggcugagacagggcac

SEQ ID NO: 1020275 - RNA, 19 nt, Artificial Sequence
  Description of Artificial Sequence: Synthetic oligonucleotide
uucacuccuuggcucgaaa

SEQ ID NO: 1020276 - RNA, 19 nt, Artificial Sequence
  Description of Artificial Sequence: Synthetic oligonucleotide
uggagugcuuagguuggug

SEQ ID NO: 1020277 - RNA, 19 nt, Artificial Sequence
  Description of Artificial Sequence: Synthetic oligonucleotide
uaagccagucagccccacu

SEQ ID NO: 1020278 - RNA, 19 nt, Artificial Sequence
  Description of Artificial Sequence: Synthetic oligonucleotide
cuucgucgagugugggagc

SEQ ID NO: 1020279 - RNA, 19 nt, Artificial Sequence
  Description of Artificial Sequence: Synthetic oligonucleotide
auagccgcucauacgugag

SEQ ID NO: 1020280 - RNA, 19 nt, Artificial Sequence
  Description of Artificial Sequence: Synthetic oligonucleotide
acauguggagauggggaca

SEQ ID NO: 1020281 - RNA, 19 nt, Artificial Sequence
  Description of Artificial Sequence: Synthetic oligonucleotide
ugagcccacuaagggcugg

SEQ ID NO: 1020282 - RNA, 19 nt, Artificial Sequence
  Description of Artificial Sequence: Synthetic oligonucleotide
ccacuaacaugaagcagag

SEQ ID NO: 1020283 - RNA, 19 nt, Artificial Sequence
  Description of Artificial Sequence: Synthetic oligonucleotide
ugucgggcugagacagggc

SEQ ID NO: 1020284 - RNA, 19 nt, Artificial Sequence
  Description of Artificial Sequence: Synthetic oligonucleotide
uugagcugguuuagcuuua

SEQ ID NO: 1020285 - RNA, 19 nt, Artificial Sequence
  Description of Artificial Sequence: Synthetic oligonucleotide
ucccgcaugucagcuacca

SEQ ID NO: 1020286 - RNA, 19 nt, Artificial Sequence
  Description of Artificial Sequence: Synthetic oligonucleotide
ggguaguaaccuucacugc

SEQ ID NO: 1020287 - RNA, 19 nt, Artificial Sequence
  Description of Artificial Sequence: Synthetic oligonucleotide
acugcugcugcugcugcug

SEQ ID NO: 1020288 - RNA, 19 nt, Artificial Sequence
  Description of Artificial Sequence: Synthetic oligonucleotide
cccagugaguaucauuaag

SEQ ID NO: 1020289 - RNA, 19 nt, Artificial Sequence
  Description of Artificial Sequence: Synthetic oligonucleotide
gacacgggaucuuguuguc

SEQ ID NO: 1020290 - RNA, 19 nt, Artificial Sequence
  Description of Artificial Sequence: Synthetic oligonucleotide
ccaauggcgcucaguaacc

SEQ ID NO: 1020291 - RNA, 19 nt, Artificial Sequence
  Description of Artificial Sequence: Synthetic oligonucleotide
uccuccuccuccuccuccu

SEQ ID NO: 1020292 - RNA, 19 nt, Artificial Sequence
  Description of Artificial Sequence: Synthetic oligonucleotide
gaggggugacccacagggg

SEQ ID NO: 1020293 - RNA, 19 nt, Artificial Sequence
  Description of Artificial Sequence: Synthetic oligonucleotide
gggaauaaauaggggugag

SEQ ID NO: 1020294 - RNA, 19 nt, Artificial Sequence
  Description of Artificial Sequence: Synthetic oligonucleotide
ugauugugugauggaccca

SEQ ID NO: 1020295 - RNA, 19 nt, Artificial Sequence
  Description of Artificial Sequence: Synthetic oligonucleotide
gaccccacucauggauucg

SEQ ID NO: 1020296 - RNA, 19 nt, Artificial Sequence
  Description of Artificial Sequence: Synthetic oligonucleotide
ucugaucgucgcucagaaa

SEQ ID NO: 1020297 - RNA, 19 nt, Artificial Sequence
  Description of Artificial Sequence: Synthetic oligonucleotide
acucauggauucggcuccg

SEQ ID NO: 1020298 - RNA, 19 nt, Artificial Sequence
  Description of Artificial Sequence: Synthetic oligonucleotide
gcuuagguuggugauugug

SEQ ID NO: 1020299 - RNA, 19 nt, Artificial Sequence
  Description of Artificial Sequence: Synthetic oligonucleotide
aaccgccgcugcucugauc

SEQ ID NO: 1020300 - RNA, 19 nt, Artificial Sequence
  Description of Artificial Sequence: Synthetic oligonucleotide
agcaucuauacaggcuggu

SEQ ID NO: 1020301 - RNA, 19 nt, Artificial Sequence
  Description of Artificial Sequence: Synthetic oligonucleotide
agagaccccuaaacugggg

SEQ ID NO: 1020302 - RNA, 19 nt, Artificial Sequence
  Description of Artificial Sequence: Synthetic oligonucleotide
uguuguccucgagugggaa

SEQ ID NO: 1020303 - RNA, 19 nt, Artificial Sequence
  Description of Artificial Sequence: Synthetic oligonucleotide
cucugaucgucgcucagaa

SEQ ID NO: 1020304 - RNA, 19 nt, Artificial Sequence
  Description of Artificial Sequence: Synthetic oligonucleotide
agugcuuagguuggugauu

SEQ ID NO: 1020305 - RNA, 19 nt, Artificial Sequence
  Description of Artificial Sequence: Synthetic oligonucleotide
guggcguuggguuuucacu

SEQ ID NO: 1020306 - RNA, 19 nt, Artificial Sequence
  Description of Artificial Sequence: Synthetic oligonucleotide
caccuuagcguagcaguug

SEQ ID NO: 1020307 - RNA, 19 nt, Artificial Sequence
  Description of Artificial Sequence: Synthetic oligonucleotide
uggcggauguucuggccaa

SEQ ID NO: 1020308 - RNA, 19 nt, Artificial Sequence
  Description of Artificial Sequence: Synthetic oligonucleotide
gguugccgcacuugguggc

SEQ ID NO: 1020309 - RNA, 19 nt, Artificial Sequence
  Description of Artificial Sequence: Synthetic oligonucleotide
gugauggacccagugagua

SEQ ID NO: 1020310 - RNA, 19 nt, Artificial Sequence
  Description of Artificial Sequence: Synthetic oligonucleotide
ggggaauaaauagggguga

SEQ ID NO: 1020311 - RNA, 19 nt, Artificial Sequence
  Description of Artificial Sequence: Synthetic oligonucleotide
gggagucaaaaguuaccuc

SEQ ID NO: 1020312 - RNA, 19 nt, Artificial Sequence
  Description of Artificial Sequence: Synthetic oligonucleotide
agcguagcaguugggcgug

SEQ ID NO: 1020313 - RNA, 19 nt, Artificial Sequence
  Description of Artificial Sequence: Synthetic oligonucleotide
acccgauuacguccccuga

SEQ ID NO: 1020314 - RNA, 19 nt, Artificial Sequence
  Description of Artificial Sequence: Synthetic oligonucleotide
acaggggagucaaaaguua

SEQ ID NO: 1020315 - RNA, 19 nt, Artificial Sequence
  Description of Artificial Sequence: Synthetic oligonucleotide
gccgucuucgucgagugug

SEQ ID NO: 1020316 - RNA, 19 nt, Artificial Sequence
  Description of Artificial Sequence: Synthetic oligonucleotide
gaguaucauuaagccaguc

SEQ ID NO: 1020317 - RNA, 19 nt, Artificial Sequence
  Description of Artificial Sequence: Synthetic oligonucleotide
ucccucuucugcuccggau

SEQ ID NO: 1020318 - RNA, 19 nt, Artificial Sequence
  Description of Artificial Sequence: Synthetic oligonucleotide
gcacuugguggcaucaaug

SEQ ID NO: 1020319 - RNA, 19 nt, Artificial Sequence
  Description of Artificial Sequence: Synthetic oligonucleotide
auuaagccagucagcccca

SEQ ID NO: 1020320 - RNA, 19 nt, Artificial Sequence
  Description of Artificial Sequence: Synthetic oligonucleotide
guaaccgccgcugcucuga

SEQ ID NO: 1020321 - RNA, 19 nt, Artificial Sequence
  Description of Artificial Sequence: Synthetic oligonucleotide
ggugaucaccuuagcguag

SEQ ID NO: 1020322 - RNA, 19 nt, Artificial Sequence
  Description of Artificial Sequence: Synthetic oligonucleotide
uccuccuccuccuccucau

SEQ ID NO: 1020323 - RNA, 19 nt, Artificial Sequence
  Description of Artificial Sequence: Synthetic oligonucleotide
gaucgucgcucagaaagua

SEQ ID NO: 1020324 - RNA, 19 nt, Artificial Sequence
  Description of Artificial Sequence: Synthetic oligonucleotide
gcagugguugaugaaccug

SEQ ID NO: 1020325 - RNA, 19 nt, Artificial Sequence
  Description of Artificial Sequence: Synthetic oligonucleotide
gccgcaaauagcucauguc

SEQ ID NO: 1020326 - RNA, 19 nt, Artificial Sequence
  Description of Artificial Sequence: Synthetic oligonucleotide
ugauggcugaggugccaau

SEQ ID NO: 1020327 - RNA, 19 nt, Artificial Sequence
  Description of Artificial Sequence: Synthetic oligonucleotide
guaguaaccuucacugcgu

SEQ ID NO: 1020328 - RNA, 19 nt, Artificial Sequence
  Description of Artificial Sequence: Synthetic oligonucleotide
caccucaguugagggagcc

SEQ ID NO: 1020329 - RNA, 19 nt, Artificial Sequence
  Description of Artificial Sequence: Synthetic oligonucleotide
cuccugaacguagcgcuuc

SEQ ID NO: 1020330 - RNA, 19 nt, Artificial Sequence
  Description of Artificial Sequence: Synthetic oligonucleotide
cugagacagggcacacauc

SEQ ID NO: 1020331 - RNA, 19 nt, Artificial Sequence
  Description of Artificial Sequence: Synthetic oligonucleotide
cugcugcugcugcugcugc

SEQ ID NO: 1020332 - RNA, 19 nt, Artificial Sequence
  Description of Artificial Sequence: Synthetic oligonucleotide
ccaacgaauagcaucuaua

SEQ ID NO: 1020333 - RNA, 19 nt, Artificial Sequence
  Description of Artificial Sequence: Synthetic oligonucleotide
cauacgugagccgcaaaua

SEQ ID NO: 1020334 - RNA, 19 nt, Artificial Sequence
  Description of Artificial Sequence: Synthetic oligonucleotide
cacgggaucuuguuguccu

SEQ ID NO: 1020335 - RNA, 19 nt, Artificial Sequence
  Description of Artificial Sequence: Synthetic oligonucleotide
uggauucggcuccggccaa

SEQ ID NO: 1020336 - RNA, 19 nt, Artificial Sequence
  Description of Artificial Sequence: Synthetic oligonucleotide
uacguccccugagugucca

SEQ ID NO: 1020337 - RNA, 19 nt, Artificial Sequence
  Description of Artificial Sequence: Synthetic oligonucleotide
ccaacaagaagggccugcc

SEQ ID NO: 1020338 - RNA, 19 nt, Artificial Sequence
  Description of Artificial Sequence: Synthetic oligonucleotide
cccuaucccacauguggag

SEQ ID NO: 1020339 - RNA, 19 nt, Artificial Sequence
  Description of Artificial Sequence: Synthetic oligonucleotide
agccugucugaugcucccg

SEQ ID NO: 1020340 - RNA, 19 nt, Artificial Sequence
  Description of Artificial Sequence: Synthetic oligonucleotide
ugguggccgucuucgucga

SEQ ID NO: 1020341 - RNA, 19 nt, Artificial Sequence
  Description of Artificial Sequence: Synthetic oligonucleotide
ucagggccccuaucccaca

SEQ ID NO: 1020342 - RNA, 19 nt, Artificial Sequence
  Description of Artificial Sequence: Synthetic oligonucleotide
agcccacuaagggcugggg

SEQ ID NO: 1020343 - RNA, 19 nt, Artificial Sequence
  Description of Artificial Sequence: Synthetic oligonucleotide
cugagcccacuaagggcug

SEQ ID NO: 1020344 - RNA, 19 nt, Artificial Sequence
  Description of Artificial Sequence: Synthetic oligonucleotide
ugcugcugcugcugcugcu

SEQ ID NO: 1020345 - RNA, 19 nt, Artificial Sequence
  Description of Artificial Sequence: Synthetic oligonucleotide
uuaagccagucagccccac

SEQ ID NO: 1020346 - RNA, 19 nt, Artificial Sequence
  Description of Artificial Sequence: Synthetic oligonucleotide
cccgauuacguccccugag

SEQ ID NO: 1020347 - RNA, 19 nt, Artificial Sequence
  Description of Artificial Sequence: Synthetic oligonucleotide
gcugagacagggcacacau

SEQ ID NO: 1020348 - RNA, 19 nt, Artificial Sequence
  Description of Artificial Sequence: Synthetic oligonucleotide
uucucccgcaugucagcua

SEQ ID NO: 1020349 - RNA, 19 nt, Artificial Sequence
  Description of Artificial Sequence: Synthetic oligonucleotide
gagggugguugggcguggg

SEQ ID NO: 1020350 - RNA, 19 nt, Artificial Sequence
  Description of Artificial Sequence: Synthetic oligonucleotide
ccugucugaugcucccggg

SEQ ID NO: 1020351 - RNA, 19 nt, Artificial Sequence
  Description of Artificial Sequence: Synthetic oligonucleotide
cucauggauucggcuccgg

SEQ ID NO: 1020352 - RNA, 19 nt, Artificial Sequence
  Description of Artificial Sequence: Synthetic oligonucleotide
gccgcucauacgugagccg

SEQ ID NO: 1020353 - RNA, 19 nt, Artificial Sequence
  Description of Artificial Sequence: Synthetic oligonucleotide
ggcucgaaaagaaggaggu

SEQ ID NO: 1020354 - RNA, 19 nt, Artificial Sequence
  Description of Artificial Sequence: Synthetic oligonucleotide
ccggggcccaucuuggggc

SEQ ID NO: 1020355 - RNA, 19 nt, Artificial Sequence
  Description of Artificial Sequence: Synthetic oligonucleotide
cgucgcuuacgcuuuggag

SEQ ID NO: 1020356 - RNA, 19 nt, Artificial Sequence
  Description of Artificial Sequence: Synthetic oligonucleotide
ccgcaaauagcucaugucu

SEQ ID NO: 1020357 - RNA, 19 nt, Artificial Sequence
  Description of Artificial Sequence: Synthetic oligonucleotide
ccgucuucgucgagugugg

SEQ ID NO: 1020358 - RNA, 19 nt, Artificial Sequence
  Description of Artificial Sequence: Synthetic oligonucleotide
auggacccagugaguauca

SEQ ID NO: 1020359 - RNA, 19 nt, Artificial Sequence
  Description of Artificial Sequence: Synthetic oligonucleotide
cgucgcucagaaaguaccc

SEQ ID NO: 1020360 - RNA, 19 nt, Artificial Sequence
  Description of Artificial Sequence: Synthetic oligonucleotide
acguccccugaguguccac

SEQ ID NO: 1020361 - RNA, 19 nt, Artificial Sequence
  Description of Artificial Sequence: Synthetic oligonucleotide
ccuuagcguagcaguuggg

SEQ ID NO: 1020362 - RNA, 19 nt, Artificial Sequence
  Description of Artificial Sequence: Synthetic oligonucleotide
gcucgaaaagaaggaggug

SEQ ID NO: 1020363 - RNA, 19 nt, Artificial Sequence
  Description of Artificial Sequence: Synthetic oligonucleotide
gggaaguccccacuaacau

SEQ ID NO: 1020364 - RNA, 19 nt, Artificial Sequence
  Description of Artificial Sequence: Synthetic oligonucleotide
cccaacaagaagggccugc

SEQ ID NO: 1020365 - RNA, 19 nt, Artificial Sequence
  Description of Artificial Sequence: Synthetic oligonucleotide
gggaggggugacccacagg

SEQ ID NO: 1020366 - RNA, 19 nt, Artificial Sequence
  Description of Artificial Sequence: Synthetic oligonucleotide
gugguugggcgugggguac

SEQ ID NO: 1020367 - RNA, 19 nt, Artificial Sequence
  Description of Artificial Sequence: Synthetic oligonucleotide
gcaaacagaccccacucau

SEQ ID NO: 1020368 - RNA, 19 nt, Artificial Sequence
  Description of Artificial Sequence: Synthetic oligonucleotide
cgauuacguccccugagug

SEQ ID NO: 1020369 - RNA, 19 nt, Artificial Sequence
  Description of Artificial Sequence: Synthetic oligonucleotide
cugcucugaucgucgcuca

SEQ ID NO: 1020370 - RNA, 19 nt, Artificial Sequence
  Description of Artificial Sequence: Synthetic oligonucleotide
cucccgcaugucagcuacc

SEQ ID NO: 1020371 - RNA, 19 nt, Artificial Sequence
  Description of Artificial Sequence: Synthetic oligonucleotide
cugcugcugcugcugcuuc

SEQ ID NO: 1020372 - RNA, 19 nt, Artificial Sequence
  Description of Artificial Sequence: Synthetic oligonucleotide
gucgagugugggagcggag

SEQ ID NO: 1020373 - RNA, 19 nt, Artificial Sequence
  Description of Artificial Sequence: Synthetic oligonucleotide
cagcuuucagugccacaca

SEQ ID NO: 1020374 - RNA, 19 nt, Artificial Sequence
  Description of Artificial Sequence: Synthetic oligonucleotide
cuuccuccuccuccuccuc

SEQ ID NO: 1020375 - RNA, 19 nt, Artificial Sequence
  Description of Artificial Sequence: Synthetic oligonucleotide
guugccgcacuugguggca

SEQ ID NO: 1020376 - RNA, 19 nt, Artificial Sequence
  Description of Artificial Sequence: Synthetic oligonucleotide
caaaucggaguuucuucuu

SEQ ID NO: 1020377 - RNA, 19 nt, Artificial Sequence
  Description of Artificial Sequence: Synthetic oligonucleotide
ggugguugggcguggggua

SEQ ID NO: 1020378 - RNA, 19 nt, Artificial Sequence
  Description of Artificial Sequence: Synthetic oligonucleotide
acguagcgcuucucccgca

SEQ ID NO: 1020379 - RNA, 19 nt, Artificial Sequence
  Description of Artificial Sequence: Synthetic oligonucleotide
cagcugucgggcugagaca

SEQ ID NO: 1020380 - RNA, 19 nt, Artificial Sequence
  Description of Artificial Sequence: Synthetic oligonucleotide
ggcuccggccaaaucggag

SEQ ID NO: 1020381 - RNA, 19 nt, Artificial Sequence
  Description of Artificial Sequence: Synthetic oligonucleotide
gcugcugcugcugcugcug

SEQ ID NO: 1020382 - RNA, 19 nt, Artificial Sequence
  Description of Artificial Sequence: Synthetic oligonucleotide
ggcagcuacaaaacauuua

SEQ ID NO: 1020383 - RNA, 19 nt, Artificial Sequence
  Description of Artificial Sequence: Synthetic oligonucleotide
ugccgcacuugguggcauc

SEQ ID NO: 1020384 - RNA, 19 nt, Artificial Sequence
  Description of Artificial Sequence: Synthetic oligonucleotide
auucacuccuuggcucgaa

SEQ ID NO: 1020385 - RNA, 19 nt, Artificial Sequence
  Description of Artificial Sequence: Synthetic oligonucleotide
cucccuugcugggcucagg

SEQ ID NO: 1020386 - RNA, 19 nt, Artificial Sequence
  Description of Artificial Sequence: Synthetic oligonucleotide
cuccuccuccuccuccuca

SEQ ID NO: 1020387 - RNA, 19 nt, Artificial Sequence
  Description of Artificial Sequence: Synthetic oligonucleotide
ggcgcucaguaaccgccgc

SEQ ID NO: 1020388 - RNA, 19 nt, Artificial Sequence
  Description of Artificial Sequence: Synthetic oligonucleotide
uggacccagugaguaucau

SEQ ID NO: 1020389 - RNA, 19 nt, Artificial Sequence
  Description of Artificial Sequence: Synthetic oligonucleotide
ccccacuaacaugaagcag

SEQ ID NO: 1020390 - RNA, 19 nt, Artificial Sequence
  Description of Artificial Sequence: Synthetic oligonucleotide
gcuuucagugccacacaga

SEQ ID NO: 1020391 - RNA, 19 nt, Artificial Sequence
  Description of Artificial Sequence: Synthetic oligonucleotide
ccugaguuccaaaugucau

SEQ ID NO: 1020392 - RNA, 19 nt, Artificial Sequence
  Description of Artificial Sequence: Synthetic oligonucleotide
cugccccaccucaguugag

SEQ ID NO: 1020393 - RNA, 19 nt, Artificial Sequence
  Description of Artificial Sequence: Synthetic oligonucleotide
gcuccggccaaaucggagu

SEQ ID NO: 1020394 - RNA, 19 nt, Artificial Sequence
  Description of Artificial Sequence: Synthetic oligonucleotide
ccccuaucccacaugugga

SEQ ID NO: 1020395 - RNA, 19 nt, Artificial Sequence
  Description of Artificial Sequence: Synthetic oligonucleotide
caguugggcgugcagcagu

SEQ ID NO: 1020396 - RNA, 19 nt, Artificial Sequence
  Description of Artificial Sequence: Synthetic oligonucleotide
cgaaaagaaggagguggug

SEQ ID NO: 1020397 - RNA, 19 nt, Artificial Sequence
  Description of Artificial Sequence: Synthetic oligonucleotide
ccugccccaccucaguuga

SEQ ID NO: 1020398 - RNA, 19 nt, Artificial Sequence
  Description of Artificial Sequence: Synthetic oligonucleotide
gcucugaucgucgcucaga

SEQ ID NO: 1020399 - RNA, 19 nt, Artificial Sequence
  Description of Artificial Sequence: Synthetic oligonucleotide
gguugggcgugggguacag

SEQ ID NO: 1020400 - RNA, 19 nt, Artificial Sequence
  Description of Artificial Sequence: Synthetic oligonucleotide
cucauacgugagccgcaaa

SEQ ID NO: 1020401 - RNA, 19 nt, Artificial Sequence
  Description of Artificial Sequence: Synthetic oligonucleotide
ggggccgucgcuuacgcuu

SEQ ID NO: 1020402 - RNA, 19 nt, Artificial Sequence
  Description of Artificial Sequence: Synthetic oligonucleotide
uugccgcacuugguggcau

SEQ ID NO: 1020403 - RNA, 19 nt, Artificial Sequence
  Description of Artificial Sequence: Synthetic oligonucleotide
agcuaccaucuggcggaug

SEQ ID NO: 1020404 - RNA, 19 nt, Artificial Sequence
  Description of Artificial Sequence: Synthetic oligonucleotide
auguucuggccaacauauu

SEQ ID NO: 1020405 - RNA, 19 nt, Artificial Sequence
  Description of Artificial Sequence: Synthetic oligonucleotide
gggccccuaucccacaugu

SEQ ID NO: 1020406 - RNA, 19 nt, Artificial Sequence
  Description of Artificial Sequence: Synthetic oligonucleotide
gcaucuauacaggcuggua

SEQ ID NO: 1020407 - RNA, 19 nt, Artificial Sequence
  Description of Artificial Sequence: Synthetic oligonucleotide
cgauggugaucaccuuagc

SEQ ID NO: 1020408 - RNA, 19 nt, Artificial Sequence
  Description of Artificial Sequence: Synthetic oligonucleotide
gauucggcuccggccaaau

SEQ ID NO: 1020409 - RNA, 19 nt, Artificial Sequence
  Description of Artificial Sequence: Synthetic oligonucleotide
cugaugggguaguaaccuu

SEQ ID NO: 1020410 - RNA, 19 nt, Artificial Sequence
  Description of Artificial Sequence: Synthetic oligonucleotide
gccgucgcuuacgcuuugg

SEQ ID NO: 1020411 - RNA, 19 nt, Artificial Sequence
  Description of Artificial Sequence: Synthetic oligonucleotide
ggccagguugccgcacuug

SEQ ID NO: 1020412 - RNA, 19 nt, Artificial Sequence
  Description of Artificial Sequence: Synthetic oligonucleotide
cgugagccgcaaauagcuc

SEQ ID NO: 1020413 - RNA, 19 nt, Artificial Sequence
  Description of Artificial Sequence: Synthetic oligonucleotide
gcugucgggcugagacagg

SEQ ID NO: 1020414 - RNA, 19 nt, Artificial Sequence
  Description of Artificial Sequence: Synthetic oligonucleotide
ccauggcaaacagacccca

SEQ ID NO: 1020415 - RNA, 19 nt, Artificial Sequence
  Description of Artificial Sequence: Synthetic oligonucleotide
gcucauacgugagccgcaa

SEQ ID NO: 1020416 - RNA, 19 nt, Artificial Sequence
  Description of Artificial Sequence: Synthetic oligonucleotide
ccugauagcccuuccucau

SEQ ID NO: 1020417 - RNA, 19 nt, Artificial Sequence
  Description of Artificial Sequence: Synthetic oligonucleotide
guacccgauuacguccccu

SEQ ID NO: 1020418 - RNA, 19 nt, Artificial Sequence
  Description of Artificial Sequence: Synthetic oligonucleotide
auguggcguuggguuuuca

SEQ ID NO: 1020419 - RNA, 19 nt, Artificial Sequence
  Description of Artificial Sequence: Synthetic oligonucleotide
gcuuacgcuuuggagugcu

SEQ ID NO: 1020420 - RNA, 19 nt, Artificial Sequence
  Description of Artificial Sequence: Synthetic oligonucleotide
ggcguuggguuuucacuau

SEQ ID NO: 1020421 - RNA, 19 nt, Artificial Sequence
  Description of Artificial Sequence: Synthetic oligonucleotide
ccgauuacguccccugagu

SEQ ID NO: 1020422 - RNA, 19 nt, Artificial Sequence
  Description of Artificial Sequence: Synthetic oligonucleotide
ggccaaaucggaguuucuu

SEQ ID NO: 1020423 - RNA, 19 nt, Artificial Sequence
  Description of Artificial Sequence: Synthetic oligonucleotide
ccccuaaacuggggagggg

SEQ ID NO: 1020424 - RNA, 19 nt, Artificial Sequence
  Description of Artificial Sequence: Synthetic oligonucleotide
gccgcacuugguggcauca

SEQ ID NO: 1020425 - RNA, 19 nt, Artificial Sequence
  Description of Artificial Sequence: Synthetic oligonucleotide
cuccggccaaaucggaguu

SEQ ID NO: 1020426 - RNA, 19 nt, Artificial Sequence
  Description of Artificial Sequence: Synthetic oligonucleotide
cccacucauggauucggcu

SEQ ID NO: 1020427 - RNA, 19 nt, Artificial Sequence
  Description of Artificial Sequence: Synthetic oligonucleotide
gcagaucacuauccaugau

SEQ ID NO: 1020428 - RNA, 19 nt, Artificial Sequence
  Description of Artificial Sequence: Synthetic oligonucleotide
cacugcugcugcugcugcu

SEQ ID NO: 1020429 - RNA, 19 nt, Artificial Sequence
  Description of Artificial Sequence: Synthetic oligonucleotide
cccuaaacuggggaggggu

SEQ ID NO: 1020430 - RNA, 19 nt, Artificial Sequence
  Description of Artificial Sequence: Synthetic oligonucleotide
cgcaaauagcucaugucuu

SEQ ID NO: 1020431 - RNA, 19 nt, Artificial Sequence
  Description of Artificial Sequence: Synthetic oligonucleotide
ggugccaauggcgcucagu

SEQ ID NO: 1020432 - RNA, 19 nt, Artificial Sequence
  Description of Artificial Sequence: Synthetic oligonucleotide
ccucgagugggaacuugua

SEQ ID NO: 1020433 - RNA, 19 nt, Artificial Sequence
  Description of Artificial Sequence: Synthetic oligonucleotide
ccugaacguagcgcuucuc

SEQ ID NO: 1020434 - RNA, 19 nt, Artificial Sequence
  Description of Artificial Sequence: Synthetic oligonucleotide
ccgucgcuuacgcuuugga

SEQ ID NO: 1020435 - RNA, 19 nt, Artificial Sequence
  Description of Artificial Sequence: Synthetic oligonucleotide
cuuacgcuuuggagugcuu

SEQ ID NO: 1020436 - RNA, 19 nt, Artificial Sequence
  Description of Artificial Sequence: Synthetic oligonucleotide
ggccgucgcuuacgcuuug

SEQ ID NO: 1020437 - RNA, 19 nt, Artificial Sequence
  Description of Artificial Sequence: Synthetic oligonucleotide
ccacgccuuccagcugucg

SEQ ID NO: 1020438 - RNA, 19 nt, Artificial Sequence
  Description of Artificial Sequence: Synthetic oligonucleotide
cccaacgaauagcaucuau

SEQ ID NO: 1020439 - RNA, 19 nt, Artificial Sequence
  Description of Artificial Sequence: Synthetic oligonucleotide
cgcucauacgugagccgca

SEQ ID NO: 1020440 - RNA, 19 nt, Artificial Sequence
  Description of Artificial Sequence: Synthetic oligonucleotide
ccagguugccgcacuuggu

SEQ ID NO: 1020441 - RNA, 19 nt, Artificial Sequence
  Description of Artificial Sequence: Synthetic oligonucleotide
ccuccuccuccuccuccuc

SEQ ID NO: 1020442 - RNA, 19 nt, Artificial Sequence
  Description of Artificial Sequence: Synthetic oligonucleotide
gcgcucaguaaccgccgcu

SEQ ID NO: 1020443 - RNA, 19 nt, Artificial Sequence
  Description of Artificial Sequence: Synthetic oligonucleotide
cgucgagugugggagcgga

SEQ ID NO: 1020444 - RNA, 19 nt, Artificial Sequence
  Description of Artificial Sequence: Synthetic oligonucleotide
cagggccccuaucccacau

SEQ ID NO: 1020445 - RNA, 19 nt, Artificial Sequence
  Description of Artificial Sequence: Synthetic oligonucleotide
cugcugcugcugcugcuuu

SEQ ID NO: 1020446 - RNA, 19 nt, Artificial Sequence
  Description of Artificial Sequence: Synthetic oligonucleotide
cgcuuacgcuuuggagugc

SEQ ID NO: 1020447 - RNA, 19 nt, Artificial Sequence
  Description of Artificial Sequence: Synthetic oligonucleotide
gcugcugcugcugcugcuu

SEQ ID NO: 1020448 - RNA, 19 nt, Artificial Sequence
  Description of Artificial Sequence: Synthetic oligonucleotide
cggcagcuuucagugccac

SEQ ID NO: 1020449 - RNA, 19 nt, Artificial Sequence
  Description of Artificial Sequence: Synthetic oligonucleotide
gcgugggguacaggggagu

SEQ ID NO: 1020450 - RNA, 19 nt, Artificial Sequence
  Description of Artificial Sequence: Synthetic oligonucleotide
cccaggacuaggggccaaa

SEQ ID NO: 1020451 - RNA, 19 nt, Artificial Sequence
  Description of Artificial Sequence: Synthetic oligonucleotide
gggccgucgcuuacgcuuu

SEQ ID NO: 1020452 - RNA, 19 nt, Artificial Sequence
  Description of Artificial Sequence: Synthetic oligonucleotide
cagcuaccaucuggcggau

SEQ ID NO: 1020453 - RNA, 19 nt, Artificial Sequence
  Description of Artificial Sequence: Synthetic oligonucleotide
cggcuccggccaaaucgga

SEQ ID NO: 1020454 - RNA, 19 nt, Artificial Sequence
  Description of Artificial Sequence: Synthetic oligonucleotide
ccgcacuugguggcaucaa

SEQ ID NO: 1020455 - RNA, 19 nt, Artificial Sequence
  Description of Artificial Sequence: Synthetic oligonucleotide
ccgccgcugcucugaucgu

SEQ ID NO: 1020456 - RNA, 19 nt, Artificial Sequence
  Description of Artificial Sequence: Synthetic oligonucleotide
gcgccuccugauagcccuu

SEQ ID NO: 1020457 - RNA, 19 nt, Artificial Sequence
  Description of Artificial Sequence: Synthetic oligonucleotide
uaaaguucaaccuaaguga

SEQ ID NO: 1020458 - RNA, 19 nt, Artificial Sequence
  Description of Artificial Sequence: Synthetic oligonucleotide
ucuguuguagaagagaugg

SEQ ID NO: 1020459 - RNA, 19 nt, Artificial Sequence
  Description of Artificial Sequence: Synthetic oligonucleotide
aguaguuagguacuguagc

SEQ ID NO: 1020460 - RNA, 19 nt, Artificial Sequence
  Description of Artificial Sequence: Synthetic oligonucleotide
aauauguagaauucacaag

SEQ ID NO: 1020461 - RNA, 19 nt, Artificial Sequence
  Description of Artificial Sequence: Synthetic oligonucleotide
auauaugaaagacucauug

SEQ ID NO: 1020462 - RNA, 19 nt, Artificial Sequence
  Description of Artificial Sequence: Synthetic oligonucleotide
cuaaaguucaaccuaagug

SEQ ID NO: 1020463 - RNA, 19 nt, Artificial Sequence
  Description of Artificial Sequence: Synthetic oligonucleotide
aauggguaugaaauggugc

SEQ ID NO: 1020464 - RNA, 19 nt, Artificial Sequence
  Description of Artificial Sequence: Synthetic oligonucleotide
gaauaagugggcgugaagg

SEQ ID NO: 1020465 - RNA, 19 nt, Artificial Sequence
  Description of Artificial Sequence: Synthetic oligonucleotide
auaugaaagacucauugca

SEQ ID NO: 1020466 - RNA, 19 nt, Artificial Sequence
  Description of Artificial Sequence: Synthetic oligonucleotide
auuucagaccauuccaggc

SEQ ID NO: 1020467 - RNA, 19 nt, Artificial Sequence
  Description of Artificial Sequence: Synthetic oligonucleotide
uuucagaccauuccaggcg

SEQ ID NO: 1020468 - RNA, 19 nt, Artificial Sequence
  Description of Artificial Sequence: Synthetic oligonucleotide
uaugaaagacucauugcag

SEQ ID NO: 1020469 - RNA, 19 nt, Artificial Sequence
  Description of Artificial Sequence: Synthetic oligonucleotide
ugcaccuucaacuugguga

SEQ ID NO: 1020470 - RNA, 19 nt, Artificial Sequence
  Description of Artificial Sequence: Synthetic oligonucleotide
gagacuacacuacugugcg

SEQ ID NO: 1020471 - RNA, 19 nt, Artificial Sequence
  Description of Artificial Sequence: Synthetic oligonucleotide
agugguuuugcacgggucc

SEQ ID NO: 1020472 - RNA, 19 nt, Artificial Sequence
  Description of Artificial Sequence: Synthetic oligonucleotide
uauaugaaagacucauugc

SEQ ID NO: 1020473 - RNA, 19 nt, Artificial Sequence
  Description of Artificial Sequence: Synthetic oligonucleotide
acaaccauuggguuauccc

SEQ ID NO: 1020474 - RNA, 19 nt, Artificial Sequence
  Description of Artificial Sequence: Synthetic oligonucleotide
uccauguagaccaguauag

SEQ ID NO: 1020475 - RNA, 19 nt, Artificial Sequence
  Description of Artificial Sequence: Synthetic oligonucleotide
ugucauaacgugaaaggug

SEQ ID NO: 1020476 - RNA, 19 nt, Artificial Sequence
  Description of Artificial Sequence: Synthetic oligonucleotide
ucuacgaggaccuggaacu

SEQ ID NO: 1020477 - RNA, 19 nt, Artificial Sequence
  Description of Artificial Sequence: Synthetic oligonucleotide
uuaaacagguggaaaggcc

SEQ ID NO: 1020478 - RNA, 19 nt, Artificial Sequence
  Description of Artificial Sequence: Synthetic oligonucleotide
uuuugcacggguccuaucc

SEQ ID NO: 1020479 - RNA, 19 nt, Artificial Sequence
  Description of Artificial Sequence: Synthetic oligonucleotide
uguagaccaguauaggcgc

SEQ ID NO: 1020480 - RNA, 19 nt, Artificial Sequence
  Description of Artificial Sequence: Synthetic oligonucleotide
aauaagugggcgugaaggu

SEQ ID NO: 1020481 - RNA, 19 nt, Artificial Sequence
  Description of Artificial Sequence: Synthetic oligonucleotide
uucaaaguaaagccaugcc

SEQ ID NO: 1020482 - RNA, 19 nt, Artificial Sequence
  Description of Artificial Sequence: Synthetic oligonucleotide
uucccagagagaauaagug

SEQ ID NO: 1020483 - RNA, 19 nt, Artificial Sequence
  Description of Artificial Sequence: Synthetic oligonucleotide
ucuucgaaaagccacuguc

SEQ ID NO: 1020484 - RNA, 19 nt, Artificial Sequence
  Description of Artificial Sequence: Synthetic oligonucleotide
uauugaucaaccauucaua

SEQ ID NO: 1020485 - RNA, 19 nt, Artificial Sequence
  Description of Artificial Sequence: Synthetic oligonucleotide
aaaguucaaccuaagugag

SEQ ID NO: 1020486 - RNA, 19 nt, Artificial Sequence
  Description of Artificial Sequence: Synthetic oligonucleotide
gggaaugauaaauauguag

SEQ ID NO: 1020487 - RNA, 19 nt, Artificial Sequence
  Description of Artificial Sequence: Synthetic oligonucleotide
ucaauugucacggaucgca

SEQ ID NO: 1020488 - RNA, 19 nt, Artificial Sequence
  Description of Artificial Sequence: Synthetic oligonucleotide
ugcguugaguggaaggacg

SEQ ID NO: 1020489 - RNA, 19 nt, Artificial Sequence
  Description of Artificial Sequence: Synthetic oligonucleotide
uuggagaucuucgaaaagc

SEQ ID NO: 1020490 - RNA, 19 nt, Artificial Sequence
  Description of Artificial Sequence: Synthetic oligonucleotide
ggugucauaacgugaaagg

SEQ ID NO: 1020491 - RNA, 19 nt, Artificial Sequence
  Description of Artificial Sequence: Synthetic oligonucleotide
uaauggguaugaaauggug

SEQ ID NO: 1020492 - RNA, 19 nt, Artificial Sequence
  Description of Artificial Sequence: Synthetic oligonucleotide
uuuaacugcuggauguaca

SEQ ID NO: 1020493 - RNA, 19 nt, Artificial Sequence
  Description of Artificial Sequence: Synthetic oligonucleotide
aguuaaacagguggaaagg

SEQ ID NO: 1020494 - RNA, 19 nt, Artificial Sequence
  Description of Artificial Sequence: Synthetic oligonucleotide
accuaagugagugaagaac

SEQ ID NO: 1020495 - RNA, 19 nt, Artificial Sequence
  Description of Artificial Sequence: Synthetic oligonucleotide
aguucaaccuaagugagug

SEQ ID NO: 1020496 - RNA, 19 nt, Artificial Sequence
  Description of Artificial Sequence: Synthetic oligonucleotide
acaaaaggaguuaaacagg

SEQ ID NO: 1020497 - RNA, 19 nt, Artificial Sequence
  Description of Artificial Sequence: Synthetic oligonucleotide
gaaugauaaauauguagaa

SEQ ID NO: 1020498 - RNA, 19 nt, Artificial Sequence
  Description of Artificial Sequence: Synthetic oligonucleotide
agauauaugaaagacucau

SEQ ID NO: 1020499 - RNA, 19 nt, Artificial Sequence
  Description of Artificial Sequence: Synthetic oligonucleotide
gguaauggguaugaaaugg

SEQ ID NO: 1020500 - RNA, 19 nt, Artificial Sequence
  Description of Artificial Sequence: Synthetic oligonucleotide
auggguaugaaauggugca

SEQ ID NO: 1020501 - RNA, 19 nt, Artificial Sequence
  Description of Artificial Sequence: Synthetic oligonucleotide
auuggguuaucccaguagu

SEQ ID NO: 1020502 - RNA, 19 nt, Artificial Sequence
  Description of Artificial Sequence: Synthetic oligonucleotide
gucauaacgugaaaggugc

SEQ ID NO: 1020503 - RNA, 19 nt, Artificial Sequence
  Description of Artificial Sequence: Synthetic oligonucleotide
ucuucagugggcaccgucc

SEQ ID NO: 1020504 - RNA, 19 nt, Artificial Sequence
  Description of Artificial Sequence: Synthetic oligonucleotide
aagagauggacaaucggug

SEQ ID NO: 1020505 - RNA, 19 nt, Artificial Sequence
  Description of Artificial Sequence: Synthetic oligonucleotide
gcaaucuuagcucuuuugg

SEQ ID NO: 1020506 - RNA, 19 nt, Artificial Sequence
  Description of Artificial Sequence: Synthetic oligonucleotide
cuuccgcucucuuugagcc

SEQ ID NO: 1020507 - RNA, 19 nt, Artificial Sequence
  Description of Artificial Sequence: Synthetic oligonucleotide
aucaaccauucauagaacu

SEQ ID NO: 1020508 - RNA, 19 nt, Artificial Sequence
  Description of Artificial Sequence: Synthetic oligonucleotide
accuucaacuuggugagcc

SEQ ID NO: 1020509 - RNA, 19 nt, Artificial Sequence
  Description of Artificial Sequence: Synthetic oligonucleotide
uucggugaggcuaggagac

SEQ ID NO: 1020510 - RNA, 19 nt, Artificial Sequence
  Description of Artificial Sequence: Synthetic oligonucleotide
uuagguacuguagcaaggc

SEQ ID NO: 1020511 - RNA, 19 nt, Artificial Sequence
  Description of Artificial Sequence: Synthetic oligonucleotide
augaguauugcaagcaauc

SEQ ID NO: 1020512 - RNA, 19 nt, Artificial Sequence
  Description of Artificial Sequence: Synthetic oligonucleotide
aaagcugauuucuuugcuu

SEQ ID NO: 1020513 - RNA, 19 nt, Artificial Sequence
  Description of Artificial Sequence: Synthetic oligonucleotide
gaaggacgcaguaaguugc

SEQ ID NO: 1020514 - RNA, 19 nt, Artificial Sequence
  Description of Artificial Sequence: Synthetic oligonucleotide
uguauugaucaaccauuca

SEQ ID NO: 1020515 - RNA, 19 nt, Artificial Sequence
  Description of Artificial Sequence: Synthetic oligonucleotide
uccucuauuccucauguuu

SEQ ID NO: 1020516 - RNA, 19 nt, Artificial Sequence
  Description of Artificial Sequence: Synthetic oligonucleotide
uucagaccauuccaggcgc

SEQ ID NO: 1020517 - RNA, 19 nt, Artificial Sequence
  Description of Artificial Sequence: Synthetic oligonucleotide
ggaaugauaaauauguaga

SEQ ID NO: 1020518 - RNA, 19 nt, Artificial Sequence
  Description of Artificial Sequence: Synthetic oligonucleotide
ucugcuuguaaaccuggcu

SEQ ID NO: 1020519 - RNA, 19 nt, Artificial Sequence
  Description of Artificial Sequence: Synthetic oligonucleotide
aagcugauuucuuugcuuu

SEQ ID NO: 1020520 - RNA, 19 nt, Artificial Sequence
  Description of Artificial Sequence: Synthetic oligonucleotide
ucaaccuaagugagugaag

SEQ ID NO: 1020521 - RNA, 19 nt, Artificial Sequence
  Description of Artificial Sequence: Synthetic oligonucleotide
caaucgguggcaaacagca

SEQ ID NO: 1020522 - RNA, 19 nt, Artificial Sequence
  Description of Artificial Sequence: Synthetic oligonucleotide
ugaggcuaggagacugugg

SEQ ID NO: 1020523 - RNA, 19 nt, Artificial Sequence
  Description of Artificial Sequence: Synthetic oligonucleotide
ugaugugugcucccacuag

SEQ ID NO: 1020524 - RNA, 19 nt, Artificial Sequence
  Description of Artificial Sequence: Synthetic oligonucleotide
caaucaaggacguccgcag

SEQ ID NO: 1020525 - RNA, 19 nt, Artificial Sequence
  Description of Artificial Sequence: Synthetic oligonucleotide
uggcucuagaagcagcuca

SEQ ID NO: 1020526 - RNA, 19 nt, Artificial Sequence
  Description of Artificial Sequence: Synthetic oligonucleotide
uauugcaagcaaucuuagc

SEQ ID NO: 1020527 - RNA, 19 nt, Artificial Sequence
  Description of Artificial Sequence: Synthetic oligonucleotide
cuuucggugaggcuaggag

SEQ ID NO: 1020528 - RNA, 19 nt, Artificial Sequence
  Description of Artificial Sequence: Synthetic oligonucleotide
ggacccaacacaaacgugg

SEQ ID NO: 1020529 - RNA, 19 nt, Artificial Sequence
  Description of Artificial Sequence: Synthetic oligonucleotide
guuaaacagguggaaaggc

SEQ ID NO: 1020530 - RNA, 19 nt, Artificial Sequence
  Description of Artificial Sequence: Synthetic oligonucleotide
agagagaauaagugggcgu

SEQ ID NO: 1020531 - RNA, 19 nt, Artificial Sequence
  Description of Artificial Sequence: Synthetic oligonucleotide
gacaaucgguggcaaacag

SEQ ID NO: 1020532 - RNA, 19 nt, Artificial Sequence
  Description of Artificial Sequence: Synthetic oligonucleotide
ucgagagacuacacuacug

SEQ ID NO: 1020533 - RNA, 19 nt, Artificial Sequence
  Description of Artificial Sequence: Synthetic oligonucleotide
ugaaaggugcagucuguug

SEQ ID NO: 1020534 - RNA, 19 nt, Artificial Sequence
  Description of Artificial Sequence: Synthetic oligonucleotide
uuugagccagcacuuucug

SEQ ID NO: 1020535 - RNA, 19 nt, Artificial Sequence
  Description of Artificial Sequence: Synthetic oligonucleotide
ugaguauugcaagcaaucu

SEQ ID NO: 1020536 - RNA, 19 nt, Artificial Sequence
  Description of Artificial Sequence: Synthetic oligonucleotide
guuagguacuguagcaagg

SEQ ID NO: 1020537 - RNA, 19 nt, Artificial Sequence
  Description of Artificial Sequence: Synthetic oligonucleotide
aguauugcaagcaaucuua

SEQ ID NO: 1020538 - RNA, 19 nt, Artificial Sequence
  Description of Artificial Sequence: Synthetic oligonucleotide
caguaguuagguacuguag

SEQ ID NO: 1020539 - RNA, 19 nt, Artificial Sequence
  Description of Artificial Sequence: Synthetic oligonucleotide
ugugcucccacuagagugu

SEQ ID NO: 1020540 - RNA, 19 nt, Artificial Sequence
  Description of Artificial Sequence: Synthetic oligonucleotide
augaaggggauagaccuuc

SEQ ID NO: 1020541 - RNA, 19 nt, Artificial Sequence
  Description of Artificial Sequence: Synthetic oligonucleotide
guaguuagguacuguagca

SEQ ID NO: 1020542 - RNA, 19 nt, Artificial Sequence
  Description of Artificial Sequence: Synthetic oligonucleotide
agguagugaagacugaauu

SEQ ID NO: 1020543 - RNA, 19 nt, Artificial Sequence
  Description of Artificial Sequence: Synthetic oligonucleotide
gacgcaguaaguugcucug

SEQ ID NO: 1020544 - RNA, 19 nt, Artificial Sequence
  Description of Artificial Sequence: Synthetic oligonucleotide
acaaucgguggcaaacagc

SEQ ID NO: 1020545 - RNA, 19 nt, Artificial Sequence
  Description of Artificial Sequence: Synthetic oligonucleotide
ucgguggcaaacagcaaug

SEQ ID NO: 1020546 - RNA, 19 nt, Artificial Sequence
  Description of Artificial Sequence: Synthetic oligonucleotide
cauuggguuaucccaguag

SEQ ID NO: 1020547 - RNA, 19 nt, Artificial Sequence
  Description of Artificial Sequence: Synthetic oligonucleotide
ugcagcgguugccacauug

SEQ ID NO: 1020548 - RNA, 19 nt, Artificial Sequence
  Description of Artificial Sequence: Synthetic oligonucleotide
uauaggcgcggguaggcgc

SEQ ID NO: 1020549 - RNA, 19 nt, Artificial Sequence
  Description of Artificial Sequence: Synthetic oligonucleotide
cuguauugaucaaccauuc

SEQ ID NO: 1020550 - RNA, 19 nt, Artificial Sequence
  Description of Artificial Sequence: Synthetic oligonucleotide
acggguccuauccaggcuc

SEQ ID NO: 1020551 - RNA, 19 nt, Artificial Sequence
  Description of Artificial Sequence: Synthetic oligonucleotide
agaauaagugggcgugaag

SEQ ID NO: 1020552 - RNA, 19 nt, Artificial Sequence
  Description of Artificial Sequence: Synthetic oligonucleotide
aucgguggcaaacagcaau

SEQ ID NO: 1020553 - RNA, 19 nt, Artificial Sequence
  Description of Artificial Sequence: Synthetic oligonucleotide
aggugucauaacgugaaag

SEQ ID NO: 1020554 - RNA, 19 nt, Artificial Sequence
  Description of Artificial Sequence: Synthetic oligonucleotide
aggucucacaggcagcaag

SEQ ID NO: 1020555 - RNA, 19 nt, Artificial Sequence
  Description of Artificial Sequence: Synthetic oligonucleotide
aaucaaggacguccgcagu

SEQ ID NO: 1020556 - RNA, 19 nt, Artificial Sequence
  Description of Artificial Sequence: Synthetic oligonucleotide
cauaacgugaaaggugcag

SEQ ID NO: 1020557 - RNA, 19 nt, Artificial Sequence
  Description of Artificial Sequence: Synthetic oligonucleotide
aacgugguauuccugcauu

SEQ ID NO: 1020558 - RNA, 19 nt, Artificial Sequence
  Description of Artificial Sequence: Synthetic oligonucleotide
ugcguguggaacgaggcug

SEQ ID NO: 1020559 - RNA, 19 nt, Artificial Sequence
  Description of Artificial Sequence: Synthetic oligonucleotide
guggcuaucuuccugaggu

SEQ ID NO: 1020560 - RNA, 19 nt, Artificial Sequence
  Description of Artificial Sequence: Synthetic oligonucleotide
uuugcacggguccuaucca

SEQ ID NO: 1020561 - RNA, 19 nt, Artificial Sequence
  Description of Artificial Sequence: Synthetic oligonucleotide
aaacgugguauuccugcau

SEQ ID NO: 1020562 - RNA, 19 nt, Artificial Sequence
  Description of Artificial Sequence: Synthetic oligonucleotide
caaccauuggguuauccca

SEQ ID NO: 1020563 - RNA, 19 nt, Artificial Sequence
  Description of Artificial Sequence: Synthetic oligonucleotide
auaacgugaaaggugcagu

SEQ ID NO: 1020564 - RNA, 19 nt, Artificial Sequence
  Description of Artificial Sequence: Synthetic oligonucleotide
acaggacccaacacaaacg

SEQ ID NO: 1020565 - RNA, 19 nt, Artificial Sequence
  Description of Artificial Sequence: Synthetic oligonucleotide
cucuacgaggaccuggaac

SEQ ID NO: 1020566 - RNA, 19 nt, Artificial Sequence
  Description of Artificial Sequence: Synthetic oligonucleotide
gcgugaaggugucauaacg

SEQ ID NO: 1020567 - RNA, 19 nt, Artificial Sequence
  Description of Artificial Sequence: Synthetic oligonucleotide
aaccuaagugagugaagaa

SEQ ID NO: 1020568 - RNA, 19 nt, Artificial Sequence
  Description of Artificial Sequence: Synthetic oligonucleotide
gaugaacccugaugugugc

SEQ ID NO: 1020569 - RNA, 19 nt, Artificial Sequence
  Description of Artificial Sequence: Synthetic oligonucleotide
agacucauugcagcgauga

SEQ ID NO: 1020570 - RNA, 19 nt, Artificial Sequence
  Description of Artificial Sequence: Synthetic oligonucleotide
ucauagaacuuguucucua

SEQ ID NO: 1020571 - RNA, 19 nt, Artificial Sequence
  Description of Artificial Sequence: Synthetic oligonucleotide
aacugggccuuucggugag

SEQ ID NO: 1020572 - RNA, 19 nt, Artificial Sequence
  Description of Artificial Sequence: Synthetic oligonucleotide
cuuggagaucuucgaaaag

SEQ ID NO: 1020573 - RNA, 19 nt, Artificial Sequence
  Description of Artificial Sequence: Synthetic oligonucleotide
agcgucugcuuguaaaccu

SEQ ID NO: 1020574 - RNA, 19 nt, Artificial Sequence
  Description of Artificial Sequence: Synthetic oligonucleotide
uagaccaguauaggcgcgg

SEQ ID NO: 1020575 - RNA, 19 nt, Artificial Sequence
  Description of Artificial Sequence: Synthetic oligonucleotide
ggaaggacgcaguaaguug

SEQ ID NO: 1020576 - RNA, 19 nt, Artificial Sequence
  Description of Artificial Sequence: Synthetic oligonucleotide
caucugaggggccacauga

SEQ ID NO: 1020577 - RNA, 19 nt, Artificial Sequence
  Description of Artificial Sequence: Synthetic oligonucleotide
gcgguugccacauugcaag

SEQ ID NO: 1020578 - RNA, 19 nt, Artificial Sequence
  Description of Artificial Sequence: Synthetic oligonucleotide
ggguuaucccaguaguuag

SEQ ID NO: 1020579 - RNA, 19 nt, Artificial Sequence
  Description of Artificial Sequence: Synthetic oligonucleotide
uagcucuuuugguugcacc

SEQ ID NO: 1020580 - RNA, 19 nt, Artificial Sequence
  Description of Artificial Sequence: Synthetic oligonucleotide
ugugugcucccacuagagu

SEQ ID NO: 1020581 - RNA, 19 nt, Artificial Sequence
  Description of Artificial Sequence: Synthetic oligonucleotide
uguaucuuccgcucucuuu

SEQ ID NO: 1020582 - RNA, 19 nt, Artificial Sequence
  Description of Artificial Sequence: Synthetic oligonucleotide
ggauagaccuuccugguuc

SEQ ID NO: 1020583 - RNA, 19 nt, Artificial Sequence
  Description of Artificial Sequence: Synthetic oligonucleotide
uugccacauugcaaguuca

SEQ ID NO: 1020584 - RNA, 19 nt, Artificial Sequence
  Description of Artificial Sequence: Synthetic oligonucleotide
ucauaacgugaaaggugca

SEQ ID NO: 1020585 - RNA, 19 nt, Artificial Sequence
  Description of Artificial Sequence: Synthetic oligonucleotide
uccgcucucuuugagccag

SEQ ID NO: 1020586 - RNA, 19 nt, Artificial Sequence
  Description of Artificial Sequence: Synthetic oligonucleotide
caaccuaagugagugaaga

SEQ ID NO: 1020587 - RNA, 19 nt, Artificial Sequence
  Description of Artificial Sequence: Synthetic oligonucleotide
ugguugcaccuucaacuug

SEQ ID NO: 1020588 - RNA, 19 nt, Artificial Sequence
  Description of Artificial Sequence: Synthetic oligonucleotide
uggaacgaggcuguccagc

SEQ ID NO: 1020589 - RNA, 19 nt, Artificial Sequence
  Description of Artificial Sequence: Synthetic oligonucleotide
accgaaagauuaucaaaua

SEQ ID NO: 1020590 - RNA, 19 nt, Artificial Sequence
  Description of Artificial Sequence: Synthetic oligonucleotide
gaacccugaugugugcucc

SEQ ID NO: 1020591 - RNA, 19 nt, Artificial Sequence
  Description of Artificial Sequence: Synthetic oligonucleotide
ggauguacaagaagagcag

SEQ ID NO: 1020592 - RNA, 19 nt, Artificial Sequence
  Description of Artificial Sequence: Synthetic oligonucleotide
uaguuagguacuguagcaa

SEQ ID NO: 1020593 - RNA, 19 nt, Artificial Sequence
  Description of Artificial Sequence: Synthetic oligonucleotide
ccauucauagaacuuguuc

SEQ ID NO: 1020594 - RNA, 19 nt, Artificial Sequence
  Description of Artificial Sequence: Synthetic oligonucleotide
auaggcgcggguaggcgcc

SEQ ID NO: 1020595 - RNA, 19 nt, Artificial Sequence
  Description of Artificial Sequence: Synthetic oligonucleotide
ucaaggacguccgcaguga

SEQ ID NO: 1020596 - RNA, 19 nt, Artificial Sequence
  Description of Artificial Sequence: Synthetic oligonucleotide
cuggugacuguagucauuc

SEQ ID NO: 1020597 - RNA, 19 nt, Artificial Sequence
  Description of Artificial Sequence: Synthetic oligonucleotide
cagucaaacagguucgcaa

SEQ ID NO: 1020598 - RNA, 19 nt, Artificial Sequence
  Description of Artificial Sequence: Synthetic oligonucleotide
agugaagacugaauuugga

SEQ ID NO: 1020599 - RNA, 19 nt, Artificial Sequence
  Description of Artificial Sequence: Synthetic oligonucleotide
ccuucgaugaggaagcuga

SEQ ID NO: 1020600 - RNA, 19 nt, Artificial Sequence
  Description of Artificial Sequence: Synthetic oligonucleotide
aucuucgaaaagccacugu

SEQ ID NO: 1020601 - RNA, 19 nt, Artificial Sequence
  Description of Artificial Sequence: Synthetic oligonucleotide
agcgaugaacccugaugug

SEQ ID NO: 1020602 - RNA, 19 nt, Artificial Sequence
  Description of Artificial Sequence: Synthetic oligonucleotide
uuggguuaucccaguaguu

SEQ ID NO: 1020603 - RNA, 19 nt, Artificial Sequence
  Description of Artificial Sequence: Synthetic oligonucleotide
ugaacccugaugugugcuc

SEQ ID NO: 1020604 - RNA, 19 nt, Artificial Sequence
  Description of Artificial Sequence: Synthetic oligonucleotide
cucaccgaaagauuaucaa

SEQ ID NO: 1020605 - RNA, 19 nt, Artificial Sequence
  Description of Artificial Sequence: Synthetic oligonucleotide
caauucuuguugugacaac

SEQ ID NO: 1020606 - RNA, 19 nt, Artificial Sequence
  Description of Artificial Sequence: Synthetic oligonucleotide
agguucgcaaccaggcuuc

SEQ ID NO: 1020607 - RNA, 19 nt, Artificial Sequence
  Description of Artificial Sequence: Synthetic oligonucleotide
acagguucgcaaccaggcu

SEQ ID NO: 1020608 - RNA, 19 nt, Artificial Sequence
  Description of Artificial Sequence: Synthetic oligonucleotide
aaguucaaccuaagugagu

SEQ ID NO: 1020609 - RNA, 19 nt, Artificial Sequence
  Description of Artificial Sequence: Synthetic oligonucleotide
gacaacugggccuuucggu

SEQ ID NO: 1020610 - RNA, 19 nt, Artificial Sequence
  Description of Artificial Sequence: Synthetic oligonucleotide
cuucgaugaggaagcugag

SEQ ID NO: 1020611 - RNA, 19 nt, Artificial Sequence
  Description of Artificial Sequence: Synthetic oligonucleotide
uggccauaugguccuccag

SEQ ID NO: 1020612 - RNA, 19 nt, Artificial Sequence
  Description of Artificial Sequence: Synthetic oligonucleotide
agcuucucgagagacuaca

SEQ ID NO: 1020613 - RNA, 19 nt, Artificial Sequence
  Description of Artificial Sequence: Synthetic oligonucleotide
auguacaagaagagcagaa

SEQ ID NO: 1020614 - RNA, 19 nt, Artificial Sequence
  Description of Artificial Sequence: Synthetic oligonucleotide
cuccauguagaccaguaua

SEQ ID NO: 1020615 - RNA, 19 nt, Artificial Sequence
  Description of Artificial Sequence: Synthetic oligonucleotide
gguuaucccaguaguuagg

SEQ ID NO: 1020616 - RNA, 19 nt, Artificial Sequence
  Description of Artificial Sequence: Synthetic oligonucleotide
uguuuaacugcuggaugua

SEQ ID NO: 1020617 - RNA, 19 nt, Artificial Sequence
  Description of Artificial Sequence: Synthetic oligonucleotide
uucaauugucacggaucgc

SEQ ID NO: 1020618 - RNA, 19 nt, Artificial Sequence
  Description of Artificial Sequence: Synthetic oligonucleotide
guagaccaguauaggcgcg

SEQ ID NO: 1020619 - RNA, 19 nt, Artificial Sequence
  Description of Artificial Sequence: Synthetic oligonucleotide
ucgcaaccaggcuuccagc

SEQ ID NO: 1020620 - RNA, 19 nt, Artificial Sequence
  Description of Artificial Sequence: Synthetic oligonucleotide
guauaggcgcggguaggcg

SEQ ID NO: 1020621 - RNA, 19 nt, Artificial Sequence
  Description of Artificial Sequence: Synthetic oligonucleotide
cagcgaugaacccugaugu

SEQ ID NO: 1020622 - RNA, 19 nt, Artificial Sequence
  Description of Artificial Sequence: Synthetic oligonucleotide
uuaucccaguaguuaggua

SEQ ID NO: 1020623 - RNA, 19 nt, Artificial Sequence
  Description of Artificial Sequence: Synthetic oligonucleotide
agagaauaagugggcguga

SEQ ID NO: 1020624 - RNA, 19 nt, Artificial Sequence
  Description of Artificial Sequence: Synthetic oligonucleotide
ucggguguccucaccgaaa

SEQ ID NO: 1020625 - RNA, 19 nt, Artificial Sequence
  Description of Artificial Sequence: Synthetic oligonucleotide
aggaguuaaacagguggaa

SEQ ID NO: 1020626 - RNA, 19 nt, Artificial Sequence
  Description of Artificial Sequence: Synthetic oligonucleotide
agaccaguauaggcgcggg

SEQ ID NO: 1020627 - RNA, 19 nt, Artificial Sequence
  Description of Artificial Sequence: Synthetic oligonucleotide
uccucaccgaaagauuauc

SEQ ID NO: 1020628 - RNA, 19 nt, Artificial Sequence
  Description of Artificial Sequence: Synthetic oligonucleotide
gacguccgcagugagaucu

SEQ ID NO: 1020629 - RNA, 19 nt, Artificial Sequence
  Description of Artificial Sequence: Synthetic oligonucleotide
uggguaugaaauggugcaa

SEQ ID NO: 1020630 - RNA, 19 nt, Artificial Sequence
  Description of Artificial Sequence: Synthetic oligonucleotide
caaauggauuugcagucaa

SEQ ID NO: 1020631 - RNA, 19 nt, Artificial Sequence
  Description of Artificial Sequence: Synthetic oligonucleotide
agcgccaggacagcuucuc

SEQ ID NO: 1020632 - RNA, 19 nt, Artificial Sequence
  Description of Artificial Sequence: Synthetic oligonucleotide
aaggacgcaguaaguugcu

SEQ ID NO: 1020633 - RNA, 19 nt, Artificial Sequence
  Description of Artificial Sequence: Synthetic oligonucleotide
acgcaguaaguugcucugg

SEQ ID NO: 1020634 - RNA, 19 nt, Artificial Sequence
  Description of Artificial Sequence: Synthetic oligonucleotide
cagcgucugcuuguaaacc

SEQ ID NO: 1020635 - RNA, 19 nt, Artificial Sequence
  Description of Artificial Sequence: Synthetic oligonucleotide
caaggacguccgcagugag

SEQ ID NO: 1020636 - RNA, 19 nt, Artificial Sequence
  Description of Artificial Sequence: Synthetic oligonucleotide
ggguaggcgccuucugugg

SEQ ID NO: 1020637 - RNA, 19 nt, Artificial Sequence
  Description of Artificial Sequence: Synthetic oligonucleotide
gagaauaagugggcgugaa

SEQ ID NO: 1020638 - RNA, 19 nt, Artificial Sequence
  Description of Artificial Sequence: Synthetic oligonucleotide
agacuugaggcaagcagau

SEQ ID NO: 1020639 - RNA, 19 nt, Artificial Sequence
  Description of Artificial Sequence: Synthetic oligonucleotide
ugcuuacagugccuucgau

SEQ ID NO: 1020640 - RNA, 19 nt, Artificial Sequence
  Description of Artificial Sequence: Synthetic oligonucleotide
ugcaugcagcgguugccac

SEQ ID NO: 1020641 - RNA, 19 nt, Artificial Sequence
  Description of Artificial Sequence: Synthetic oligonucleotide
cuaggagacuguggucugc

SEQ ID NO: 1020642 - RNA, 19 nt, Artificial Sequence
  Description of Artificial Sequence: Synthetic oligonucleotide
caugaguauugcaagcaau

SEQ ID NO: 1020643 - RNA, 19 nt, Artificial Sequence
  Description of Artificial Sequence: Synthetic oligonucleotide
aagguggcaagagccggaa

SEQ ID NO: 1020644 - RNA, 19 nt, Artificial Sequence
  Description of Artificial Sequence: Synthetic oligonucleotide
gacuacacuacugugcguu

SEQ ID NO: 1020645 - RNA, 19 nt, Artificial Sequence
  Description of Artificial Sequence: Synthetic oligonucleotide
uacugugcguugaguggaa

SEQ ID NO: 1020646 - RNA, 19 nt, Artificial Sequence
  Description of Artificial Sequence: Synthetic oligonucleotide
cccacuagagugucugagc

SEQ ID NO: 1020647 - RNA, 19 nt, Artificial Sequence
  Description of Artificial Sequence: Synthetic oligonucleotide
gaucuguaucuuccgcucu

SEQ ID NO: 1020648 - RNA, 19 nt, Artificial Sequence
  Description of Artificial Sequence: Synthetic oligonucleotide
agacuacacuacugugcgu

SEQ ID NO: 1020649 - RNA, 19 nt, Artificial Sequence
  Description of Artificial Sequence: Synthetic oligonucleotide
ucccaguaguuagguacug

SEQ ID NO: 1020650 - RNA, 19 nt, Artificial Sequence
  Description of Artificial Sequence: Synthetic oligonucleotide
ccauguagaccaguauagg

SEQ ID NO: 1020651 - RNA, 19 nt, Artificial Sequence
  Description of Artificial Sequence: Synthetic oligonucleotide
aagagccggaagacucuug

SEQ ID NO: 1020652 - RNA, 19 nt, Artificial Sequence
  Description of Artificial Sequence: Synthetic oligonucleotide
gacuguagucauuccaauu

SEQ ID NO: 1020653 - RNA, 19 nt, Artificial Sequence
  Description of Artificial Sequence: Synthetic oligonucleotide
ucucuacgaggaccuggaa

SEQ ID NO: 1020654 - RNA, 19 nt, Artificial Sequence
  Description of Artificial Sequence: Synthetic oligonucleotide
guuaucccaguaguuaggu

SEQ ID NO: 1020655 - RNA, 19 nt, Artificial Sequence
  Description of Artificial Sequence: Synthetic oligonucleotide
ccagcgucugcuuguaaac

SEQ ID NO: 1020656 - RNA, 19 nt, Artificial Sequence
  Description of Artificial Sequence: Synthetic oligonucleotide
ccccaaucaaggacguccg

SEQ ID NO: 1020657 - RNA, 19 nt, Artificial Sequence
  Description of Artificial Sequence: Synthetic oligonucleotide
ggaaccaacaaaaggaguu

SEQ ID NO: 1020658 - RNA, 19 nt, Artificial Sequence
  Description of Artificial Sequence: Synthetic oligonucleotide
aggacgcaguaaguugcuc

SEQ ID NO: 1020659 - RNA, 19 nt, Artificial Sequence
  Description of Artificial Sequence: Synthetic oligonucleotide
cuguagucauuccaauucu

SEQ ID NO: 1020660 - RNA, 19 nt, Artificial Sequence
  Description of Artificial Sequence: Synthetic oligonucleotide
uaggcgccuucuguggccc

SEQ ID NO: 1020661 - RNA, 19 nt, Artificial Sequence
  Description of Artificial Sequence: Synthetic oligonucleotide
cauccucagucaguuggac

SEQ ID NO: 1020662 - RNA, 19 nt, Artificial Sequence
  Description of Artificial Sequence: Synthetic oligonucleotide
auggacaaucgguggcaaa

SEQ ID NO: 1020663 - RNA, 19 nt, Artificial Sequence
  Description of Artificial Sequence: Synthetic oligonucleotide
caggacccaacacaaacgu

SEQ ID NO: 1020664 - RNA, 19 nt, Artificial Sequence
  Description of Artificial Sequence: Synthetic oligonucleotide
caacugggccuuucgguga

SEQ ID NO: 1020665 - RNA, 19 nt, Artificial Sequence
  Description of Artificial Sequence: Synthetic oligonucleotide
gugaggcuaggagacugug

SEQ ID NO: 1020666 - RNA, 19 nt, Artificial Sequence
  Description of Artificial Sequence: Synthetic oligonucleotide
gcuaaaguucaaccuaagu

SEQ ID NO: 1020667 - RNA, 19 nt, Artificial Sequence
  Description of Artificial Sequence: Synthetic oligonucleotide
acgaggaccuggaacugcu

SEQ ID NO: 1020668 - RNA, 19 nt, Artificial Sequence
  Description of Artificial Sequence: Synthetic oligonucleotide
ggccacaugaguauugcaa

SEQ ID NO: 1020669 - RNA, 19 nt, Artificial Sequence
  Description of Artificial Sequence: Synthetic oligonucleotide
cuucucgagagacuacacu

SEQ ID NO: 1020670 - RNA, 19 nt, Artificial Sequence
  Description of Artificial Sequence: Synthetic oligonucleotide
aggacccaacacaaacgug

SEQ ID NO: 1020671 - RNA, 19 nt, Artificial Sequence
  Description of Artificial Sequence: Synthetic oligonucleotide
gauggacaaucgguggcaa

SEQ ID NO: 1020672 - RNA, 19 nt, Artificial Sequence
  Description of Artificial Sequence: Synthetic oligonucleotide
guggaacgaggcuguccag

SEQ ID NO: 1020673 - RNA, 19 nt, Artificial Sequence
  Description of Artificial Sequence: Synthetic oligonucleotide
cgaugaacccugaugugug

SEQ ID NO: 1020674 - RNA, 19 nt, Artificial Sequence
  Description of Artificial Sequence: Synthetic oligonucleotide
auuggguaauggguaugaa

SEQ ID NO: 1020675 - RNA, 19 nt, Artificial Sequence
  Description of Artificial Sequence: Synthetic oligonucleotide
gcugcguguggaacgaggc

SEQ ID NO: 1020676 - RNA, 19 nt, Artificial Sequence
  Description of Artificial Sequence: Synthetic oligonucleotide
cuacgaggaccuggaacug

SEQ ID NO: 1020677 - RNA, 19 nt, Artificial Sequence
  Description of Artificial Sequence: Synthetic oligonucleotide
gcccagugguuuugcacgg

SEQ ID NO: 1020678 - RNA, 19 nt, Artificial Sequence
  Description of Artificial Sequence: Synthetic oligonucleotide
cgauguccuguauugauca

SEQ ID NO: 1020679 - RNA, 19 nt, Artificial Sequence
  Description of Artificial Sequence: Synthetic oligonucleotide
aaucgguggcaaacagcaa

SEQ ID NO: 1020680 - RNA, 19 nt, Artificial Sequence
  Description of Artificial Sequence: Synthetic oligonucleotide
gcuaggagacuguggucug

SEQ ID NO: 1020681 - RNA, 19 nt, Artificial Sequence
  Description of Artificial Sequence: Synthetic oligonucleotide
ggacgcaguaaguugcucu

SEQ ID NO: 1020682 - RNA, 19 nt, Artificial Sequence
  Description of Artificial Sequence: Synthetic oligonucleotide
cuggccauaugguccucca

SEQ ID NO: 1020683 - RNA, 19 nt, Artificial Sequence
  Description of Artificial Sequence: Synthetic oligonucleotide
ccuguauugaucaaccauu

SEQ ID NO: 1020684 - RNA, 19 nt, Artificial Sequence
  Description of Artificial Sequence: Synthetic oligonucleotide
cucgagagacuacacuacu

SEQ ID NO: 1020685 - RNA, 19 nt, Artificial Sequence
  Description of Artificial Sequence: Synthetic oligonucleotide
agcgguugccacauugcaa

SEQ ID NO: 1020686 - RNA, 19 nt, Artificial Sequence
  Description of Artificial Sequence: Synthetic oligonucleotide
ggcuaggagacuguggucu

SEQ ID NO: 1020687 - RNA, 19 nt, Artificial Sequence
  Description of Artificial Sequence: Synthetic oligonucleotide
ugggcgugaaggugucaua

SEQ ID NO: 1020688 - RNA, 19 nt, Artificial Sequence
  Description of Artificial Sequence: Synthetic oligonucleotide
ccucaccgaaagauuauca

SEQ ID NO: 1020689 - RNA, 19 nt, Artificial Sequence
  Description of Artificial Sequence: Synthetic oligonucleotide
gguccuauccaggcucuug

SEQ ID NO: 1020690 - RNA, 19 nt, Artificial Sequence
  Description of Artificial Sequence: Synthetic oligonucleotide
uggcccgagucccgcacau

SEQ ID NO: 1020691 - RNA, 19 nt, Artificial Sequence
  Description of Artificial Sequence: Synthetic oligonucleotide
uugcagcgaugaacccuga

SEQ ID NO: 1020692 - RNA, 19 nt, Artificial Sequence
  Description of Artificial Sequence: Synthetic oligonucleotide
auuugcagucaaacagguu

SEQ ID NO: 1020693 - RNA, 19 nt, Artificial Sequence
  Description of Artificial Sequence: Synthetic oligonucleotide
gcguugaguggaaggacgc

SEQ ID NO: 1020694 - RNA, 19 nt, Artificial Sequence
  Description of Artificial Sequence: Synthetic oligonucleotide
gcacacaaccauuggguua

SEQ ID NO: 1020695 - RNA, 19 nt, Artificial Sequence
  Description of Artificial Sequence: Synthetic oligonucleotide
gcaucugaggggccacaug

SEQ ID NO: 1020696 - RNA, 19 nt, Artificial Sequence
  Description of Artificial Sequence: Synthetic oligonucleotide
ggaacgaggcuguccagcu

SEQ ID NO: 1020697 - RNA, 19 nt, Artificial Sequence
  Description of Artificial Sequence: Synthetic oligonucleotide
ucggugaggcuaggagacu

SEQ ID NO: 1020698 - RNA, 19 nt, Artificial Sequence
  Description of Artificial Sequence: Synthetic oligonucleotide
ggacaaucgguggcaaaca

SEQ ID NO: 1020699 - RNA, 19 nt, Artificial Sequence
  Description of Artificial Sequence: Synthetic oligonucleotide
ccaaucaaggacguccgca

SEQ ID NO: 1020700 - RNA, 19 nt, Artificial Sequence
  Description of Artificial Sequence: Synthetic oligonucleotide
ccgaaagauuaucaaauau

SEQ ID NO: 1020701 - RNA, 19 nt, Artificial Sequence
  Description of Artificial Sequence: Synthetic oligonucleotide
cagguucgcaaccaggcuu

SEQ ID NO: 1020702 - RNA, 19 nt, Artificial Sequence
  Description of Artificial Sequence: Synthetic oligonucleotide
gccuucuguggcccgaguc

SEQ ID NO: 1020703 - RNA, 19 nt, Artificial Sequence
  Description of Artificial Sequence: Synthetic oligonucleotide
cagcaagggugccuuucca

SEQ ID NO: 1020704 - RNA, 19 nt, Artificial Sequence
  Description of Artificial Sequence: Synthetic oligonucleotide
gggccuuucggugaggcua

SEQ ID NO: 1020705 - RNA, 19 nt, Artificial Sequence
  Description of Artificial Sequence: Synthetic oligonucleotide
gggcgugaaggugucauaa

SEQ ID NO: 1020706 - RNA, 19 nt, Artificial Sequence
  Description of Artificial Sequence: Synthetic oligonucleotide
gaccaguauaggcgcgggu

SEQ ID NO: 1020707 - RNA, 19 nt, Artificial Sequence
  Description of Artificial Sequence: Synthetic oligonucleotide
cucggguguccucaccgaa

SEQ ID NO: 1020708 - RNA, 19 nt, Artificial Sequence
  Description of Artificial Sequence: Synthetic oligonucleotide
ugggcaccguccuccucua

SEQ ID NO: 1020709 - RNA, 19 nt, Artificial Sequence
  Description of Artificial Sequence: Synthetic oligonucleotide
ggggauagaccuuccuggu

SEQ ID NO: 1020710 - RNA, 19 nt, Artificial Sequence
  Description of Artificial Sequence: Synthetic oligonucleotide
ccaaauggauuugcaguca

SEQ ID NO: 1020711 - RNA, 19 nt, Artificial Sequence
  Description of Artificial Sequence: Synthetic oligonucleotide
gcagucaaacagguucgca

SEQ ID NO: 1020712 - RNA, 19 nt, Artificial Sequence
  Description of Artificial Sequence: Synthetic oligonucleotide
cagcuuguagaaagagaau

SEQ ID NO: 1020713 - RNA, 19 nt, Artificial Sequence
  Description of Artificial Sequence: Synthetic oligonucleotide
cccaaucaaggacguccgc

SEQ ID NO: 1020714 - RNA, 19 nt, Artificial Sequence
  Description of Artificial Sequence: Synthetic oligonucleotide
caugcagcgguugccacau

SEQ ID NO: 1020715 - RNA, 19 nt, Artificial Sequence
  Description of Artificial Sequence: Synthetic oligonucleotide
cggguaggcgccuucugug

SEQ ID NO: 1020716 - RNA, 19 nt, Artificial Sequence
  Description of Artificial Sequence: Synthetic oligonucleotide
guucgcaaccaggcuucca

SEQ ID NO: 1020717 - RNA, 19 nt, Artificial Sequence
  Description of Artificial Sequence: Synthetic oligonucleotide
agaaugucuuggagaucuu

SEQ ID NO: 1020718 - RNA, 19 nt, Artificial Sequence
  Description of Artificial Sequence: Synthetic oligonucleotide
guggcccgagucccgcaca

SEQ ID NO: 1020719 - RNA, 19 nt, Artificial Sequence
  Description of Artificial Sequence: Synthetic oligonucleotide
cugcguguggaacgaggcu

SEQ ID NO: 1020720 - RNA, 19 nt, Artificial Sequence
  Description of Artificial Sequence: Synthetic oligonucleotide
gguucgcaaccaggcuucc

SEQ ID NO: 1020721 - RNA, 19 nt, Artificial Sequence
  Description of Artificial Sequence: Synthetic oligonucleotide
cugcugcguguggaacgag

SEQ ID NO: 1020722 - RNA, 19 nt, Artificial Sequence
  Description of Artificial Sequence: Synthetic oligonucleotide
cuguugccgauguccugua

SEQ ID NO: 1020723 - RNA, 19 nt, Artificial Sequence
  Description of Artificial Sequence: Synthetic oligonucleotide
ccugaugugugcucccacu

SEQ ID NO: 1020724 - RNA, 19 nt, Artificial Sequence
  Description of Artificial Sequence: Synthetic oligonucleotide
ccgagucccgcacauaggu

SEQ ID NO: 1020725 - RNA, 19 nt, Artificial Sequence
  Description of Artificial Sequence: Synthetic oligonucleotide
cccagugguuuugcacggg

SEQ ID NO: 1020726 - RNA, 19 nt, Artificial Sequence
  Description of Artificial Sequence: Synthetic oligonucleotide
cacggguccuauccaggcu

SEQ ID NO: 1020727 - RNA, 19 nt, Artificial Sequence
  Description of Artificial Sequence: Synthetic oligonucleotide
guguccucaccgaaagauu

SEQ ID NO: 1020728 - RNA, 19 nt, Artificial Sequence
  Description of Artificial Sequence: Synthetic oligonucleotide
ggugagcccaggccaauuu

SEQ ID NO: 1020729 - RNA, 19 nt, Artificial Sequence
  Description of Artificial Sequence: Synthetic oligonucleotide
guccucaccgaaagauuau

SEQ ID NO: 1020730 - RNA, 19 nt, Artificial Sequence
  Description of Artificial Sequence: Synthetic oligonucleotide
gcggguaggcgccuucugu

SEQ ID NO: 1020731 - RNA, 19 nt, Artificial Sequence
  Description of Artificial Sequence: Synthetic oligonucleotide
cugggccacucuuccccaa

SEQ ID NO: 1020732 - RNA, 19 nt, Artificial Sequence
  Description of Artificial Sequence: Synthetic oligonucleotide
gggauagaccuuccugguu

SEQ ID NO: 1020733 - RNA, 19 nt, Artificial Sequence
  Description of Artificial Sequence: Synthetic oligonucleotide
ggcaccguccuccucuauu

SEQ ID NO: 1020734 - RNA, 19 nt, Artificial Sequence
  Description of Artificial Sequence: Synthetic oligonucleotide
gguugccacauugcaaguu

SEQ ID NO: 1020735 - RNA, 19 nt, Artificial Sequence
  Description of Artificial Sequence: Synthetic oligonucleotide
ccuauccaggcucuuguuu

SEQ ID NO: 1020736 - RNA, 19 nt, Artificial Sequence
  Description of Artificial Sequence: Synthetic oligonucleotide
ggacguccgcagugagauc

SEQ ID NO: 1020737 - RNA, 19 nt, Artificial Sequence
  Description of Artificial Sequence: Synthetic oligonucleotide
ccauuggguuaucccagua

SEQ ID NO: 1020738 - RNA, 19 nt, Artificial Sequence
  Description of Artificial Sequence: Synthetic oligonucleotide
cuccucuauuccucauguu

SEQ ID NO: 1020739 - RNA, 19 nt, Artificial Sequence
  Description of Artificial Sequence: Synthetic oligonucleotide
ccucggguguccucaccga

SEQ ID NO: 1020740 - RNA, 19 nt, Artificial Sequence
  Description of Artificial Sequence: Synthetic oligonucleotide
caagagccggaagacucuu

SEQ ID NO: 1020741 - RNA, 19 nt, Artificial Sequence
  Description of Artificial Sequence: Synthetic oligonucleotide
ccccugguaucucugcugu

SEQ ID NO: 1020742 - RNA, 19 nt, Artificial Sequence
  Description of Artificial Sequence: Synthetic oligonucleotide
gccuuucggugaggcuagg

SEQ ID NO: 1020743 - RNA, 19 nt, Artificial Sequence
  Description of Artificial Sequence: Synthetic oligonucleotide
acguccgcagugagaucuu

SEQ ID NO: 1020744 - RNA, 19 nt, Artificial Sequence
  Description of Artificial Sequence: Synthetic oligonucleotide
ggcgcggguaggcgccuuc

SEQ ID NO: 1020745 - RNA, 19 nt, Artificial Sequence
  Description of Artificial Sequence: Synthetic oligonucleotide
ccuuucggugaggcuagga

SEQ ID NO: 1020746 - RNA, 19 nt, Artificial Sequence
  Description of Artificial Sequence: Synthetic oligonucleotide
gcgccuucuguggcccgag

SEQ ID NO: 1020747 - RNA, 19 nt, Artificial Sequence
  Description of Artificial Sequence: Synthetic oligonucleotide
gcguguggaacgaggcugu

SEQ ID NO: 1020748 - RNA, 19 nt, Artificial Sequence
  Description of Artificial Sequence: Synthetic oligonucleotide
gagcgccaggacagcuucu

SEQ ID NO: 1020749 - RNA, 19 nt, Artificial Sequence
  Description of Artificial Sequence: Synthetic oligonucleotide
cguugaguggaaggacgca

SEQ ID NO: 1020750 - RNA, 19 nt, Artificial Sequence
  Description of Artificial Sequence: Synthetic oligonucleotide
cguccgcagugagaucuug

SEQ ID NO: 1020751 - RNA, 19 nt, Artificial Sequence
  Description of Artificial Sequence: Synthetic oligonucleotide
ccauaugguccuccagcau

SEQ ID NO: 1020752 - RNA, 19 nt, Artificial Sequence
  Description of Artificial Sequence: Synthetic oligonucleotide
cgcggguaggcgccuucug

SEQ ID NO: 1020753 - RNA, 19 nt, Artificial Sequence
  Description of Artificial Sequence: Synthetic oligonucleotide
cccaguaguuagguacugu

SEQ ID NO: 1020754 - RNA, 19 nt, Artificial Sequence
  Description of Artificial Sequence: Synthetic oligonucleotide
ggccagcgucugcuuguaa

SEQ ID NO: 1020755 - RNA, 19 nt, Artificial Sequence
  Description of Artificial Sequence: Synthetic oligonucleotide
ccgcagugagaucuuguuu

SEQ ID NO: 1020756 - RNA, 19 nt, Artificial Sequence
  Description of Artificial Sequence: Synthetic oligonucleotide
aggcgcggguaggcgccuu

SEQ ID NO: 1020757 - RNA, 19 nt, Artificial Sequence
  Description of Artificial Sequence: Synthetic oligonucleotide
cggguccuauccaggcucu

SEQ ID NO: 1020758 - RNA, 19 nt, Artificial Sequence
  Description of Artificial Sequence: Synthetic oligonucleotide
gcgcggguaggcgccuucu

SEQ ID NO: 1020759 - RNA, 19 nt, Artificial Sequence
  Description of Artificial Sequence: Synthetic oligonucleotide
gggcaccguccuccucuau

SEQ ID NO: 1020760 - RNA, 19 nt, Artificial Sequence
  Description of Artificial Sequence: Synthetic oligonucleotide
uguugcuauaauaacagag

SEQ ID NO: 1020761 - RNA, 19 nt, Artificial Sequence
  Description of Artificial Sequence: Synthetic oligonucleotide
uguuauacacuccugaaca

SEQ ID NO: 1020762 - RNA, 19 nt, Artificial Sequence
  Description of Artificial Sequence: Synthetic oligonucleotide
uaugccacccaauuuaugg

SEQ ID NO: 1020763 - RNA, 19 nt, Artificial Sequence
  Description of Artificial Sequence: Synthetic oligonucleotide
aaugcgaaaguucaugucu

SEQ ID NO: 1020764 - RNA, 19 nt, Artificial Sequence
  Description of Artificial Sequence: Synthetic oligonucleotide
ucuacuuugucauaguucu

SEQ ID NO: 1020765 - RNA, 19 nt, Artificial Sequence
  Description of Artificial Sequence: Synthetic oligonucleotide
aagaaauugauccucaguu

SEQ ID NO: 1020766 - RNA, 19 nt, Artificial Sequence
  Description of Artificial Sequence: Synthetic oligonucleotide
auagucauuaauguggcgc

SEQ ID NO: 1020767 - RNA, 19 nt, Artificial Sequence
  Description of Artificial Sequence: Synthetic oligonucleotide
aaaccuguauuaaauggcc

SEQ ID NO: 1020768 - RNA, 19 nt, Artificial Sequence
  Description of Artificial Sequence: Synthetic oligonucleotide
uauaguccaauccaguccc

SEQ ID NO: 1020769 - RNA, 19 nt, Artificial Sequence
  Description of Artificial Sequence: Synthetic oligonucleotide
ugauguauaccugaugugg

SEQ ID NO: 1020770 - RNA, 19 nt, Artificial Sequence
  Description of Artificial Sequence: Synthetic oligonucleotide
aacaugucguucuccaugg

SEQ ID NO: 1020771 - RNA, 19 nt, Artificial Sequence
  Description of Artificial Sequence: Synthetic oligonucleotide
agguauaccaucuacuuug

SEQ ID NO: 1020772 - RNA, 19 nt, Artificial Sequence
  Description of Artificial Sequence: Synthetic oligonucleotide
aacuacuugggugugagag

SEQ ID NO: 1020773 - RNA, 19 nt, Artificial Sequence
  Description of Artificial Sequence: Synthetic oligonucleotide
aaagaagcgaagcgggauc

SEQ ID NO: 1020774 - RNA, 19 nt, Artificial Sequence
  Description of Artificial Sequence: Synthetic oligonucleotide
ugccuaucaaacuuguagg

SEQ ID NO: 1020775 - RNA, 19 nt, Artificial Sequence
  Description of Artificial Sequence: Synthetic oligonucleotide
aauuuauggggccuguaca

SEQ ID NO: 1020776 - RNA, 19 nt, Artificial Sequence
  Description of Artificial Sequence: Synthetic oligonucleotide
ucaaucacaccucaguaac

SEQ ID NO: 1020777 - RNA, 19 nt, Artificial Sequence
  Description of Artificial Sequence: Synthetic oligonucleotide
auagcugaucaacaugucg

SEQ ID NO: 1020778 - RNA, 19 nt, Artificial Sequence
  Description of Artificial Sequence: Synthetic oligonucleotide
acauuacugauguugaugu

SEQ ID NO: 1020779 - RNA, 19 nt, Artificial Sequence
  Description of Artificial Sequence: Synthetic oligonucleotide
uuaucccuaccacagagug

SEQ ID NO: 1020780 - RNA, 19 nt, Artificial Sequence
  Description of Artificial Sequence: Synthetic oligonucleotide
uugguugucgccaacccag

SEQ ID NO: 1020781 - RNA, 19 nt, Artificial Sequence
  Description of Artificial Sequence: Synthetic oligonucleotide
aacuaugagacaccaagau

SEQ ID NO: 1020782 - RNA, 19 nt, Artificial Sequence
  Description of Artificial Sequence: Synthetic oligonucleotide
agagccuccgcucaucccc

SEQ ID NO: 1020783 - RNA, 19 nt, Artificial Sequence
  Description of Artificial Sequence: Synthetic oligonucleotide
auuaauguggcgcaucccu

SEQ ID NO: 1020784 - RNA, 19 nt, Artificial Sequence
  Description of Artificial Sequence: Synthetic oligonucleotide
gugccuaucaaacuuguag

SEQ ID NO: 1020785 - RNA, 19 nt, Artificial Sequence
  Description of Artificial Sequence: Synthetic oligonucleotide
aucccuaccuuguauaguc

SEQ ID NO: 1020786 - RNA, 19 nt, Artificial Sequence
  Description of Artificial Sequence: Synthetic oligonucleotide
gcuauaauaacagagaaga

SEQ ID NO: 1020787 - RNA, 19 nt, Artificial Sequence
  Description of Artificial Sequence: Synthetic oligonucleotide
acaguaugaggucaugguc

SEQ ID NO: 1020788 - RNA, 19 nt, Artificial Sequence
  Description of Artificial Sequence: Synthetic oligonucleotide
cacauaguagccauagagc

SEQ ID NO: 1020789 - RNA, 19 nt, Artificial Sequence
  Description of Artificial Sequence: Synthetic oligonucleotide
agagaagcccugcauacgg

SEQ ID NO: 1020790 - RNA, 19 nt, Artificial Sequence
  Description of Artificial Sequence: Synthetic oligonucleotide
aauguggcgcaucccuacc

SEQ ID NO: 1020791 - RNA, 19 nt, Artificial Sequence
  Description of Artificial Sequence: Synthetic oligonucleotide
uucaacugcagacagggau

SEQ ID NO: 1020792 - RNA, 19 nt, Artificial Sequence
  Description of Artificial Sequence: Synthetic oligonucleotide
auggauuuuguagagauga

SEQ ID NO: 1020793 - RNA, 19 nt, Artificial Sequence
  Description of Artificial Sequence: Synthetic oligonucleotide
acccguagaagccaguagg

SEQ ID NO: 1020794 - RNA, 19 nt, Artificial Sequence
  Description of Artificial Sequence: Synthetic oligonucleotide
auggcaugcaagcuagugg

SEQ ID NO: 1020795 - RNA, 19 nt, Artificial Sequence
  Description of Artificial Sequence: Synthetic oligonucleotide
cugcauacggacuugggag

SEQ ID NO: 1020796 - RNA, 19 nt, Artificial Sequence
  Description of Artificial Sequence: Synthetic oligonucleotide
uguauaguccaauccaguc

SEQ ID NO: 1020797 - RNA, 19 nt, Artificial Sequence
  Description of Artificial Sequence: Synthetic oligonucleotide
guauaguccaauccagucc

SEQ ID NO: 1020798 - RNA, 19 nt, Artificial Sequence
  Description of Artificial Sequence: Synthetic oligonucleotide
accuguauuaaauggccag

SEQ ID NO: 1020799 - RNA, 19 nt, Artificial Sequence
  Description of Artificial Sequence: Synthetic oligonucleotide
agguagguauaccaucuac

SEQ ID NO: 1020800 - RNA, 19 nt, Artificial Sequence
  Description of Artificial Sequence: Synthetic oligonucleotide
uuuguuauacacuccugaa

SEQ ID NO: 1020801 - RNA, 19 nt, Artificial Sequence
  Description of Artificial Sequence: Synthetic oligonucleotide
cuggaugaagggcaaaugc

SEQ ID NO: 1020802 - RNA, 19 nt, Artificial Sequence
  Description of Artificial Sequence: Synthetic oligonucleotide
uggaugaagggcaaaugcu

SEQ ID NO: 1020803 - RNA, 19 nt, Artificial Sequence
  Description of Artificial Sequence: Synthetic oligonucleotide
auaggguagagguagguau

SEQ ID NO: 1020804 - RNA, 19 nt, Artificial Sequence
  Description of Artificial Sequence: Synthetic oligonucleotide
uuccauaugcaguggaaug

SEQ ID NO: 1020805 - RNA, 19 nt, Artificial Sequence
  Description of Artificial Sequence: Synthetic oligonucleotide
aaauggggcaugugccugg

SEQ ID NO: 1020806 - RNA, 19 nt, Artificial Sequence
  Description of Artificial Sequence: Synthetic oligonucleotide
aauugauccucaguuucag

SEQ ID NO: 1020807 - RNA, 19 nt, Artificial Sequence
  Description of Artificial Sequence: Synthetic oligonucleotide
aggagucuggcugagcucc

SEQ ID NO: 1020808 - RNA, 19 nt, Artificial Sequence
  Description of Artificial Sequence: Synthetic oligonucleotide
auugacucccaucugggcu

SEQ ID NO: 1020809 - RNA, 19 nt, Artificial Sequence
  Description of Artificial Sequence: Synthetic oligonucleotide
gacauuacugauguugaug

SEQ ID NO: 1020810 - RNA, 19 nt, Artificial Sequence
  Description of Artificial Sequence: Synthetic oligonucleotide
gucagcgagaaguaggagc

SEQ ID NO: 1020811 - RNA, 19 nt, Artificial Sequence
  Description of Artificial Sequence: Synthetic oligonucleotide
gaagcgggaucuugaaggg

SEQ ID NO: 1020812 - RNA, 19 nt, Artificial Sequence
  Description of Artificial Sequence: Synthetic oligonucleotide
ugccacccaauuuaugggg

SEQ ID NO: 1020813 - RNA, 19 nt, Artificial Sequence
  Description of Artificial Sequence: Synthetic oligonucleotide
accaagauuucuggaaccc

SEQ ID NO: 1020814 - RNA, 19 nt, Artificial Sequence
  Description of Artificial Sequence: Synthetic oligonucleotide
uguugauguauaccugaug

SEQ ID NO: 1020815 - RNA, 19 nt, Artificial Sequence
  Description of Artificial Sequence: Synthetic oligonucleotide
uggcaugcaagcuaguggu

SEQ ID NO: 1020816 - RNA, 19 nt, Artificial Sequence
  Description of Artificial Sequence: Synthetic oligonucleotide
acuacuugggugugagagg

SEQ ID NO: 1020817 - RNA, 19 nt, Artificial Sequence
  Description of Artificial Sequence: Synthetic oligonucleotide
agagcaacggaccuuccug

SEQ ID NO: 1020818 - RNA, 19 nt, Artificial Sequence
  Description of Artificial Sequence: Synthetic oligonucleotide
gaaguaggagcuuggcagc

SEQ ID NO: 1020819 - RNA, 19 nt, Artificial Sequence
  Description of Artificial Sequence: Synthetic oligonucleotide
auggugaucagugggacag

SEQ ID NO: 1020820 - RNA, 19 nt, Artificial Sequence
  Description of Artificial Sequence: Synthetic oligonucleotide
uugauguauaccugaugug

SEQ ID NO: 1020821 - RNA, 19 nt, Artificial Sequence
  Description of Artificial Sequence: Synthetic oligonucleotide
aucaacaugucguucucca

SEQ ID NO: 1020822 - RNA, 19 nt, Artificial Sequence
  Description of Artificial Sequence: Synthetic oligonucleotide
uaucccuaccacagagugg

SEQ ID NO: 1020823 - RNA, 19 nt, Artificial Sequence
  Description of Artificial Sequence: Synthetic oligonucleotide
aaucacaccucaguaacaa

SEQ ID NO: 1020824 - RNA, 19 nt, Artificial Sequence
  Description of Artificial Sequence: Synthetic oligonucleotide
gguaucauaguuguuggag

SEQ ID NO: 1020825 - RNA, 19 nt, Artificial Sequence
  Description of Artificial Sequence: Synthetic oligonucleotide
ggagaauaaagaaaauggc

SEQ ID NO: 1020826 - RNA, 19 nt, Artificial Sequence
  Description of Artificial Sequence: Synthetic oligonucleotide
uuguauaguccaauccagu

SEQ ID NO: 1020827 - RNA, 19 nt, Artificial Sequence
  Description of Artificial Sequence: Synthetic oligonucleotide
uuuuccauaugcaguggaa

SEQ ID NO: 1020828 - RNA, 19 nt, Artificial Sequence
  Description of Artificial Sequence: Synthetic oligonucleotide
aaaagaagcgaagcgggau

SEQ ID NO: 1020829 - RNA, 19 nt, Artificial Sequence
  Description of Artificial Sequence: Synthetic oligonucleotide
auuuauggggccuguacaa

SEQ ID NO: 1020830 - RNA, 19 nt, Artificial Sequence
  Description of Artificial Sequence: Synthetic oligonucleotide
ugaucauuguuggacauau

SEQ ID NO: 1020831 - RNA, 19 nt, Artificial Sequence
  Description of Artificial Sequence: Synthetic oligonucleotide
caauuuauggggccuguac

SEQ ID NO: 1020832 - RNA, 19 nt, Artificial Sequence
  Description of Artificial Sequence: Synthetic oligonucleotide
augccacccaauuuauggg

SEQ ID NO: 1020833 - RNA, 19 nt, Artificial Sequence
  Description of Artificial Sequence: Synthetic oligonucleotide
ggcaaaugcugauacuugg

SEQ ID NO: 1020834 - RNA, 19 nt, Artificial Sequence
  Description of Artificial Sequence: Synthetic oligonucleotide
uguggaucagacagugugu

SEQ ID NO: 1020835 - RNA, 19 nt, Artificial Sequence
  Description of Artificial Sequence: Synthetic oligonucleotide
gagcaacggaccuuccugg

SEQ ID NO: 1020836 - RNA, 19 nt, Artificial Sequence
  Description of Artificial Sequence: Synthetic oligonucleotide
uauggggccuguacaaaug

SEQ ID NO: 1020837 - RNA, 19 nt, Artificial Sequence
  Description of Artificial Sequence: Synthetic oligonucleotide
uguuggagugccuaucaaa

SEQ ID NO: 1020838 - RNA, 19 nt, Artificial Sequence
  Description of Artificial Sequence: Synthetic oligonucleotide
aguaagagaagcccugcau

SEQ ID NO: 1020839 - RNA, 19 nt, Artificial Sequence
  Description of Artificial Sequence: Synthetic oligonucleotide
guugacuuaucccuaccac

SEQ ID NO: 1020840 - RNA, 19 nt, Artificial Sequence
  Description of Artificial Sequence: Synthetic oligonucleotide
cacguuauaggguagaggu

SEQ ID NO: 1020841 - RNA, 19 nt, Artificial Sequence
  Description of Artificial Sequence: Synthetic oligonucleotide
ugcggucaguccaugcagg

SEQ ID NO: 1020842 - RNA, 19 nt, Artificial Sequence
  Description of Artificial Sequence: Synthetic oligonucleotide
accauugacacacuacuuu

SEQ ID NO: 1020843 - RNA, 19 nt, Artificial Sequence
  Description of Artificial Sequence: Synthetic oligonucleotide
guuggagugccuaucaaac

SEQ ID NO: 1020844 - RNA, 19 nt, Artificial Sequence
  Description of Artificial Sequence: Synthetic oligonucleotide
agggauggauuuuguagag

SEQ ID NO: 1020845 - RNA, 19 nt, Artificial Sequence
  Description of Artificial Sequence: Synthetic oligonucleotide
aagagcaacggaccuuccu

SEQ ID NO: 1020846 - RNA, 19 nt, Artificial Sequence
  Description of Artificial Sequence: Synthetic oligonucleotide
agaaauugauccucaguuu

SEQ ID NO: 1020847 - RNA, 19 nt, Artificial Sequence
  Description of Artificial Sequence: Synthetic oligonucleotide
uagagguagguauaccauc

SEQ ID NO: 1020848 - RNA, 19 nt, Artificial Sequence
  Description of Artificial Sequence: Synthetic oligonucleotide
aucccuaccacagagugga

SEQ ID NO: 1020849 - RNA, 19 nt, Artificial Sequence
  Description of Artificial Sequence: Synthetic oligonucleotide
auguuggggacaucagauc

SEQ ID NO: 1020850 - RNA, 19 nt, Artificial Sequence
  Description of Artificial Sequence: Synthetic oligonucleotide
aggguugacuuaucccuac

SEQ ID NO: 1020851 - RNA, 19 nt, Artificial Sequence
  Description of Artificial Sequence: Synthetic oligonucleotide
ggcuuauggucacugaugc

SEQ ID NO: 1020852 - RNA, 19 nt, Artificial Sequence
  Description of Artificial Sequence: Synthetic oligonucleotide
uaauguggcgcaucccuac

SEQ ID NO: 1020853 - RNA, 19 nt, Artificial Sequence
  Description of Artificial Sequence: Synthetic oligonucleotide
uuauacacuccugaacaaa

SEQ ID NO: 1020854 - RNA, 19 nt, Artificial Sequence
  Description of Artificial Sequence: Synthetic oligonucleotide
auuguuggacauaugggga

SEQ ID NO: 1020855 - RNA, 19 nt, Artificial Sequence
  Description of Artificial Sequence: Synthetic oligonucleotide
ugacguagcucuucagugu

SEQ ID NO: 1020856 - RNA, 19 nt, Artificial Sequence
  Description of Artificial Sequence: Synthetic oligonucleotide
ugcauacggacuugggaga

SEQ ID NO: 1020857 - RNA, 19 nt, Artificial Sequence
  Description of Artificial Sequence: Synthetic oligonucleotide
cgaagcgggaucuugaagg

SEQ ID NO: 1020858 - RNA, 19 nt, Artificial Sequence
  Description of Artificial Sequence: Synthetic oligonucleotide
uggaggauacucagcugcc

SEQ ID NO: 1020859 - RNA, 19 nt, Artificial Sequence
  Description of Artificial Sequence: Synthetic oligonucleotide
uacccguagaagccaguag

SEQ ID NO: 1020860 - RNA, 19 nt, Artificial Sequence
  Description of Artificial Sequence: Synthetic oligonucleotide
aggagacuugguugucgcc

SEQ ID NO: 1020861 - RNA, 19 nt, Artificial Sequence
  Description of Artificial Sequence: Synthetic oligonucleotide
uugucgccaacccaggcau

SEQ ID NO: 1020862 - RNA, 19 nt, Artificial Sequence
  Description of Artificial Sequence: Synthetic oligonucleotide
uuguugcuauaauaacaga

SEQ ID NO: 1020863 - RNA, 19 nt, Artificial Sequence
  Description of Artificial Sequence: Synthetic oligonucleotide
uuaugccacccaauuuaug

SEQ ID NO: 1020864 - RNA, 19 nt, Artificial Sequence
  Description of Artificial Sequence: Synthetic oligonucleotide
auguauaccugaugugggu

SEQ ID NO: 1020865 - RNA, 19 nt, Artificial Sequence
  Description of Artificial Sequence: Synthetic oligonucleotide
ugcgaaaguucaugucucc

SEQ ID NO: 1020866 - RNA, 19 nt, Artificial Sequence
  Description of Artificial Sequence: Synthetic oligonucleotide
uuauggggccuguacaaau

SEQ ID NO: 1020867 - RNA, 19 nt, Artificial Sequence
  Description of Artificial Sequence: Synthetic oligonucleotide
aacggaccuuccuggaacu

SEQ ID NO: 1020868 - RNA, 19 nt, Artificial Sequence
  Description of Artificial Sequence: Synthetic oligonucleotide
gcagacgggaagcacaucc

SEQ ID NO: 1020869 - RNA, 19 nt, Artificial Sequence
  Description of Artificial Sequence: Synthetic oligonucleotide
caagcagauguugacuccc

SEQ ID NO: 1020870 - RNA, 19 nt, Artificial Sequence
  Description of Artificial Sequence: Synthetic oligonucleotide
guuucaaucacaccucagu

SEQ ID NO: 1020871 - RNA, 19 nt, Artificial Sequence
  Description of Artificial Sequence: Synthetic oligonucleotide
uauagcugaucaacauguc

SEQ ID NO: 1020872 - RNA, 19 nt, Artificial Sequence
  Description of Artificial Sequence: Synthetic oligonucleotide
aguuguuggagugccuauc

SEQ ID NO: 1020873 - RNA, 19 nt, Artificial Sequence
  Description of Artificial Sequence: Synthetic oligonucleotide
agguauagcugaucaacau

SEQ ID NO: 1020874 - RNA, 19 nt, Artificial Sequence
  Description of Artificial Sequence: Synthetic oligonucleotide
agagguagguauaccaucu

SEQ ID NO: 1020875 - RNA, 19 nt, Artificial Sequence
  Description of Artificial Sequence: Synthetic oligonucleotide
gaguccacguuauagggua

SEQ ID NO: 1020876 - RNA, 19 nt, Artificial Sequence
  Description of Artificial Sequence: Synthetic oligonucleotide
uuaauguggcgcaucccua

SEQ ID NO: 1020877 - RNA, 19 nt, Artificial Sequence
  Description of Artificial Sequence: Synthetic oligonucleotide
gacggcgugaaaggaaugc

SEQ ID NO: 1020878 - RNA, 19 nt, Artificial Sequence
  Description of Artificial Sequence: Synthetic oligonucleotide
guaagagaagcccugcaua

SEQ ID NO: 1020879 - RNA, 19 nt, Artificial Sequence
  Description of Artificial Sequence: Synthetic oligonucleotide
aggcccuagaacuuccuga

SEQ ID NO: 1020880 - RNA, 19 nt, Artificial Sequence
  Description of Artificial Sequence: Synthetic oligonucleotide
gagaagaaauugauccuca

SEQ ID NO: 1020881 - RNA, 19 nt, Artificial Sequence
  Description of Artificial Sequence: Synthetic oligonucleotide
uggagauuguugcuauaau

SEQ ID NO: 1020882 - RNA, 19 nt, Artificial Sequence
  Description of Artificial Sequence: Synthetic oligonucleotide
augcgaaaguucaugucuc

SEQ ID NO: 1020883 - RNA, 19 nt, Artificial Sequence
  Description of Artificial Sequence: Synthetic oligonucleotide
caaugcgaaaguucauguc

SEQ ID NO: 1020884 - RNA, 19 nt, Artificial Sequence
  Description of Artificial Sequence: Synthetic oligonucleotide
caacggaccuuccuggaac

SEQ ID NO: 1020885 - RNA, 19 nt, Artificial Sequence
  Description of Artificial Sequence: Synthetic oligonucleotide
cacaggaugcggucagucc

SEQ ID NO: 1020886 - RNA, 19 nt, Artificial Sequence
  Description of Artificial Sequence: Synthetic oligonucleotide
gaggauacucagcugccuc

SEQ ID NO: 1020887 - RNA, 19 nt, Artificial Sequence
  Description of Artificial Sequence: Synthetic oligonucleotide
cauugacucccaucugggc

SEQ ID NO: 1020888 - RNA, 19 nt, Artificial Sequence
  Description of Artificial Sequence: Synthetic oligonucleotide
uuauaggguagagguaggu

SEQ ID NO: 1020889 - RNA, 19 nt, Artificial Sequence
  Description of Artificial Sequence: Synthetic oligonucleotide
guuauaggguagagguagg

SEQ ID NO: 1020890 - RNA, 19 nt, Artificial Sequence
  Description of Artificial Sequence: Synthetic oligonucleotide
ugguugucgccaacccagg

SEQ ID NO: 1020891 - RNA, 19 nt, Artificial Sequence
  Description of Artificial Sequence: Synthetic oligonucleotide
gccuguacaaaugugaaca

SEQ ID NO: 1020892 - RNA, 19 nt, Artificial Sequence
  Description of Artificial Sequence: Synthetic oligonucleotide
uaccuuguauaguccaauc

SEQ ID NO: 1020893 - RNA, 19 nt, Artificial Sequence
  Description of Artificial Sequence: Synthetic oligonucleotide
uugacacacuacuuuguuu

SEQ ID NO: 1020894 - RNA, 19 nt, Artificial Sequence
  Description of Artificial Sequence: Synthetic oligonucleotide
aggacacauagucauuaau

SEQ ID NO: 1020895 - RNA, 19 nt, Artificial Sequence
  Description of Artificial Sequence: Synthetic oligonucleotide
gguaguacugcuuuguuau

SEQ ID NO: 1020896 - RNA, 19 nt, Artificial Sequence
  Description of Artificial Sequence: Synthetic oligonucleotide
uccacguuauaggguagag

SEQ ID NO: 1020897 - RNA, 19 nt, Artificial Sequence
  Description of Artificial Sequence: Synthetic oligonucleotide
uaggguagagguagguaua

SEQ ID NO: 1020898 - RNA, 19 nt, Artificial Sequence
  Description of Artificial Sequence: Synthetic oligonucleotide
ccuggcacaacuacuuggg

SEQ ID NO: 1020899 - RNA, 19 nt, Artificial Sequence
  Description of Artificial Sequence: Synthetic oligonucleotide
caacuaugagacaccaaga

SEQ ID NO: 1020900 - RNA, 19 nt, Artificial Sequence
  Description of Artificial Sequence: Synthetic oligonucleotide
uccgcccugaauucauuga

SEQ ID NO: 1020901 - RNA, 19 nt, Artificial Sequence
  Description of Artificial Sequence: Synthetic oligonucleotide
cuauaauaacagagaagaa

SEQ ID NO: 1020902 - RNA, 19 nt, Artificial Sequence
  Description of Artificial Sequence: Synthetic oligonucleotide
uuggcuuaugccacccaau

SEQ ID NO: 1020903 - RNA, 19 nt, Artificial Sequence
  Description of Artificial Sequence: Synthetic oligonucleotide
agcgagaaguaggagcuug

SEQ ID NO: 1020904 - RNA, 19 nt, Artificial Sequence
  Description of Artificial Sequence: Synthetic oligonucleotide
cagugacaggcuuaugguc

SEQ ID NO: 1020905 - RNA, 19 nt, Artificial Sequence
  Description of Artificial Sequence: Synthetic oligonucleotide
cguuauaggguagagguag

SEQ ID NO: 1020906 - RNA, 19 nt, Artificial Sequence
  Description of Artificial Sequence: Synthetic oligonucleotide
auucggucaaaguguucca

SEQ ID NO: 1020907 - RNA, 19 nt, Artificial Sequence
  Description of Artificial Sequence: Synthetic oligonucleotide
acgucucuuggcaaugcgg

SEQ ID NO: 1020908 - RNA, 19 nt, Artificial Sequence
  Description of Artificial Sequence: Synthetic oligonucleotide
gagcuucaagcagauguug

SEQ ID NO: 1020909 - RNA, 19 nt, Artificial Sequence
  Description of Artificial Sequence: Synthetic oligonucleotide
augcucacauaguagccau

SEQ ID NO: 1020910 - RNA, 19 nt, Artificial Sequence
  Description of Artificial Sequence: Synthetic oligonucleotide
uuuauggggccuguacaaa

SEQ ID NO: 1020911 - RNA, 19 nt, Artificial Sequence
  Description of Artificial Sequence: Synthetic oligonucleotide
uaguccaauccagucccag

SEQ ID NO: 1020912 - RNA, 19 nt, Artificial Sequence
  Description of Artificial Sequence: Synthetic oligonucleotide
ggagauuguugcuauaaua

SEQ ID NO: 1020913 - RNA, 19 nt, Artificial Sequence
  Description of Artificial Sequence: Synthetic oligonucleotide
auacggacuugggagaccu

SEQ ID NO: 1020914 - RNA, 19 nt, Artificial Sequence
  Description of Artificial Sequence: Synthetic oligonucleotide
uaggacacauagucauuaa

SEQ ID NO: 1020915 - RNA, 19 nt, Artificial Sequence
  Description of Artificial Sequence: Synthetic oligonucleotide
caggauucggucaaagugu

SEQ ID NO: 1020916 - RNA, 19 nt, Artificial Sequence
  Description of Artificial Sequence: Synthetic oligonucleotide
augcugauacuuggcaaag

SEQ ID NO: 1020917 - RNA, 19 nt, Artificial Sequence
  Description of Artificial Sequence: Synthetic oligonucleotide
uggcugacguagcucuuca

SEQ ID NO: 1020918 - RNA, 19 nt, Artificial Sequence
  Description of Artificial Sequence: Synthetic oligonucleotide
gcucacauaguagccauag

SEQ ID NO: 1020919 - RNA, 19 nt, Artificial Sequence
  Description of Artificial Sequence: Synthetic oligonucleotide
uugguaguacugcuuuguu

SEQ ID NO: 1020920 - RNA, 19 nt, Artificial Sequence
  Description of Artificial Sequence: Synthetic oligonucleotide
ccuuguauaguccaaucca

SEQ ID NO: 1020921 - RNA, 19 nt, Artificial Sequence
  Description of Artificial Sequence: Synthetic oligonucleotide
acggacuugggagaccuug

SEQ ID NO: 1020922 - RNA, 19 nt, Artificial Sequence
  Description of Artificial Sequence: Synthetic oligonucleotide
uauaccugauguggguggu

SEQ ID NO: 1020923 - RNA, 19 nt, Artificial Sequence
  Description of Artificial Sequence: Synthetic oligonucleotide
gacgggaagcacauccaug

SEQ ID NO: 1020924 - RNA, 19 nt, Artificial Sequence
  Description of Artificial Sequence: Synthetic oligonucleotide
ggacauauggggaggcagg

SEQ ID NO: 1020925 - RNA, 19 nt, Artificial Sequence
  Description of Artificial Sequence: Synthetic oligonucleotide
cauuaauguggcgcauccc

SEQ ID NO: 1020926 - RNA, 19 nt, Artificial Sequence
  Description of Artificial Sequence: Synthetic oligonucleotide
agacuugguugucgccaac

SEQ ID NO: 1020927 - RNA, 19 nt, Artificial Sequence
  Description of Artificial Sequence: Synthetic oligonucleotide
uaguggucuuuuccauaug

SEQ ID NO: 1020928 - RNA, 19 nt, Artificial Sequence
  Description of Artificial Sequence: Synthetic oligonucleotide
aucuugaaggguugacuua

SEQ ID NO: 1020929 - RNA, 19 nt, Artificial Sequence
  Description of Artificial Sequence: Synthetic oligonucleotide
cagugggucacgucucuug

SEQ ID NO: 1020930 - RNA, 19 nt, Artificial Sequence
  Description of Artificial Sequence: Synthetic oligonucleotide
agcuaguggucuuuuccau

SEQ ID NO: 1020931 - RNA, 19 nt, Artificial Sequence
  Description of Artificial Sequence: Synthetic oligonucleotide
guuggcuuaugccacccaa

SEQ ID NO: 1020932 - RNA, 19 nt, Artificial Sequence
  Description of Artificial Sequence: Synthetic oligonucleotide
ucguucuccaugguccaca

SEQ ID NO: 1020933 - RNA, 19 nt, Artificial Sequence
  Description of Artificial Sequence: Synthetic oligonucleotide
gugugagagggaguguuug

SEQ ID NO: 1020934 - RNA, 19 nt, Artificial Sequence
  Description of Artificial Sequence: Synthetic oligonucleotide
agaguggagauuguugcua

SEQ ID NO: 1020935 - RNA, 19 nt, Artificial Sequence
  Description of Artificial Sequence: Synthetic oligonucleotide
gguugacuuaucccuacca

SEQ ID NO: 1020936 - RNA, 19 nt, Artificial Sequence
  Description of Artificial Sequence: Synthetic oligonucleotide
ggcacaacuacuugggugu

SEQ ID NO: 1020937 - RNA, 19 nt, Artificial Sequence
  Description of Artificial Sequence: Synthetic oligonucleotide
gucgccaacccaggcauag

SEQ ID NO: 1020938 - RNA, 19 nt, Artificial Sequence
  Description of Artificial Sequence: Synthetic oligonucleotide
cccguagaagccaguaggg

SEQ ID NO: 1020939 - RNA, 19 nt, Artificial Sequence
  Description of Artificial Sequence: Synthetic oligonucleotide
guggagauuguugcuauaa

SEQ ID NO: 1020940 - RNA, 19 nt, Artificial Sequence
  Description of Artificial Sequence: Synthetic oligonucleotide
ugcugauacuuggcaaaga

SEQ ID NO: 1020941 - RNA, 19 nt, Artificial Sequence
  Description of Artificial Sequence: Synthetic oligonucleotide
cuccgcccugaauucauug

SEQ ID NO: 1020942 - RNA, 19 nt, Artificial Sequence
  Description of Artificial Sequence: Synthetic oligonucleotide
auguggcgcaucccuaccu

SEQ ID NO: 1020943 - RNA, 19 nt, Artificial Sequence
  Description of Artificial Sequence: Synthetic oligonucleotide
agcaacggaccuuccugga

SEQ ID NO: 1020944 - RNA, 19 nt, Artificial Sequence
  Description of Artificial Sequence: Synthetic oligonucleotide
caaucacaccucaguaaca

SEQ ID NO: 1020945 - RNA, 19 nt, Artificial Sequence
  Description of Artificial Sequence: Synthetic oligonucleotide
gagacuugguugucgccaa

SEQ ID NO: 1020946 - RNA, 19 nt, Artificial Sequence
  Description of Artificial Sequence: Synthetic oligonucleotide
gaucauuguuggacauaug

SEQ ID NO: 1020947 - RNA, 19 nt, Artificial Sequence
  Description of Artificial Sequence: Synthetic oligonucleotide
ccuaucaaacuuguaggug

SEQ ID NO: 1020948 - RNA, 19 nt, Artificial Sequence
  Description of Artificial Sequence: Synthetic oligonucleotide
gugucagcgagaaguagga

SEQ ID NO: 1020949 - RNA, 19 nt, Artificial Sequence
  Description of Artificial Sequence: Synthetic oligonucleotide
aaggguugacuuaucccua

SEQ ID NO: 1020950 - RNA, 19 nt, Artificial Sequence
  Description of Artificial Sequence: Synthetic oligonucleotide
aucacaccucaguaacaaa

SEQ ID NO: 1020951 - RNA, 19 nt, Artificial Sequence
  Description of Artificial Sequence: Synthetic oligonucleotide
cuagccuccgcccugaauu

SEQ ID NO: 1020952 - RNA, 19 nt, Artificial Sequence
  Description of Artificial Sequence: Synthetic oligonucleotide
agcgaagcgggaucuugaa

SEQ ID NO: 1020953 - RNA, 19 nt, Artificial Sequence
  Description of Artificial Sequence: Synthetic oligonucleotide
ggagacuugguugucgcca

SEQ ID NO: 1020954 - RNA, 19 nt, Artificial Sequence
  Description of Artificial Sequence: Synthetic oligonucleotide
gggacauuacugauguuga

SEQ ID NO: 1020955 - RNA, 19 nt, Artificial Sequence
  Description of Artificial Sequence: Synthetic oligonucleotide
cccaggacggcgugaaagg

SEQ ID NO: 1020956 - RNA, 19 nt, Artificial Sequence
  Description of Artificial Sequence: Synthetic oligonucleotide
ugcggagcugauccuucuc

SEQ ID NO: 1020957 - RNA, 19 nt, Artificial Sequence
  Description of Artificial Sequence: Synthetic oligonucleotide
cauacggacuugggagacc

SEQ ID NO: 1020958 - RNA, 19 nt, Artificial Sequence
  Description of Artificial Sequence: Synthetic oligonucleotide
acggcgugaaaggaaugca

SEQ ID NO: 1020959 - RNA, 19 nt, Artificial Sequence
  Description of Artificial Sequence: Synthetic oligonucleotide
agcgggaucuugaaggguu

SEQ ID NO: 1020960 - RNA, 19 nt, Artificial Sequence
  Description of Artificial Sequence: Synthetic oligonucleotide
guggcgcaucccuaccuug

SEQ ID NO: 1020961 - RNA, 19 nt, Artificial Sequence
  Description of Artificial Sequence: Synthetic oligonucleotide
uccuggcagugcugaagca

SEQ ID NO: 1020962 - RNA, 19 nt, Artificial Sequence
  Description of Artificial Sequence: Synthetic oligonucleotide
uagccuccgcccugaauuc

SEQ ID NO: 1020963 - RNA, 19 nt, Artificial Sequence
  Description of Artificial Sequence: Synthetic oligonucleotide
caguaagagaagcccugca

SEQ ID NO: 1020964 - RNA, 19 nt, Artificial Sequence
  Description of Artificial Sequence: Synthetic oligonucleotide
gggacaacuaugagacacc

SEQ ID NO: 1020965 - RNA, 19 nt, Artificial Sequence
  Description of Artificial Sequence: Synthetic oligonucleotide
aggacggcgugaaaggaau

SEQ ID NO: 1020966 - RNA, 19 nt, Artificial Sequence
  Description of Artificial Sequence: Synthetic oligonucleotide
ucgccaacccaggcauagg

SEQ ID NO: 1020967 - RNA, 19 nt, Artificial Sequence
  Description of Artificial Sequence: Synthetic oligonucleotide
cuuaugccacccaauuuau

SEQ ID NO: 1020968 - RNA, 19 nt, Artificial Sequence
  Description of Artificial Sequence: Synthetic oligonucleotide
cuuaucccuaccacagagu

SEQ ID NO: 1020969 - RNA, 19 nt, Artificial Sequence
  Description of Artificial Sequence: Synthetic oligonucleotide
cuucacugguaucauaguu

SEQ ID NO: 1020970 - RNA, 19 nt, Artificial Sequence
  Description of Artificial Sequence: Synthetic oligonucleotide
gagguagguauaccaucua

SEQ ID NO: 1020971 - RNA, 19 nt, Artificial Sequence
  Description of Artificial Sequence: Synthetic oligonucleotide
ccacccaauuuauggggcc

SEQ ID NO: 1020972 - RNA, 19 nt, Artificial Sequence
  Description of Artificial Sequence: Synthetic oligonucleotide
auagagcuucaagcagaug

SEQ ID NO: 1020973 - RNA, 19 nt, Artificial Sequence
  Description of Artificial Sequence: Synthetic oligonucleotide
gguugucgccaacccaggc

SEQ ID NO: 1020974 - RNA, 19 nt, Artificial Sequence
  Description of Artificial Sequence: Synthetic oligonucleotide
cuugggagaccuugacaaa

SEQ ID NO: 1020975 - RNA, 19 nt, Artificial Sequence
  Description of Artificial Sequence: Synthetic oligonucleotide
ccacguuauaggguagagg

SEQ ID NO: 1020976 - RNA, 19 nt, Artificial Sequence
  Description of Artificial Sequence: Synthetic oligonucleotide
aguccacguuauaggguag

SEQ ID NO: 1020977 - RNA, 19 nt, Artificial Sequence
  Description of Artificial Sequence: Synthetic oligonucleotide
ggacaacuaugagacacca

SEQ ID NO: 1020978 - RNA, 19 nt, Artificial Sequence
  Description of Artificial Sequence: Synthetic oligonucleotide
ggguugacuuaucccuacc

SEQ ID NO: 1020979 - RNA, 19 nt, Artificial Sequence
  Description of Artificial Sequence: Synthetic oligonucleotide
gacauauggggaggcaggu

SEQ ID NO: 1020980 - RNA, 19 nt, Artificial Sequence
  Description of Artificial Sequence: Synthetic oligonucleotide
ucccuaccacagaguggag

SEQ ID NO: 1020981 - RNA, 19 nt, Artificial Sequence
  Description of Artificial Sequence: Synthetic oligonucleotide
gcgaagcgggaucuugaag

SEQ ID NO: 1020982 - RNA, 19 nt, Artificial Sequence
  Description of Artificial Sequence: Synthetic oligonucleotide
gagaagcccugcauacgga

SEQ ID NO: 1020983 - RNA, 19 nt, Artificial Sequence
  Description of Artificial Sequence: Synthetic oligonucleotide
ccgcugaucauuguuggac

SEQ ID NO: 1020984 - RNA, 19 nt, Artificial Sequence
  Description of Artificial Sequence: Synthetic oligonucleotide
gcgagaaguaggagcuugg

SEQ ID NO: 1020985 - RNA, 19 nt, Artificial Sequence
  Description of Artificial Sequence: Synthetic oligonucleotide
cuucaacugcagacaggga

SEQ ID NO: 1020986 - RNA, 19 nt, Artificial Sequence
  Description of Artificial Sequence: Synthetic oligonucleotide
ccugcauacggacuuggga

SEQ ID NO: 1020987 - RNA, 19 nt, Artificial Sequence
  Description of Artificial Sequence: Synthetic oligonucleotide
acggaccuuccuggaacuc

SEQ ID NO: 1020988 - RNA, 19 nt, Artificial Sequence
  Description of Artificial Sequence: Synthetic oligonucleotide
gccuaucaaacuuguaggu

SEQ ID NO: 1020989 - RNA, 19 nt, Artificial Sequence
  Description of Artificial Sequence: Synthetic oligonucleotide
cuucaccauugacacacua

SEQ ID NO: 1020990 - RNA, 19 nt, Artificial Sequence
  Description of Artificial Sequence: Synthetic oligonucleotide
ccgcccugaauucauugac

SEQ ID NO: 1020991 - RNA, 19 nt, Artificial Sequence
  Description of Artificial Sequence: Synthetic oligonucleotide
aggucauguggcugacgua

SEQ ID NO: 1020992 - RNA, 19 nt, Artificial Sequence
  Description of Artificial Sequence: Synthetic oligonucleotide
caucuacuuugucauaguu

SEQ ID NO: 1020993 - RNA, 19 nt, Artificial Sequence
  Description of Artificial Sequence: Synthetic oligonucleotide
gugaucagugggacagaca

SEQ ID NO: 1020994 - RNA, 19 nt, Artificial Sequence
  Description of Artificial Sequence: Synthetic oligonucleotide
guccacguuauaggguaga

SEQ ID NO: 1020995 - RNA, 19 nt, Artificial Sequence
  Description of Artificial Sequence: Synthetic oligonucleotide
gcugaucaacaugucguuc

SEQ ID NO: 1020996 - RNA, 19 nt, Artificial Sequence
  Description of Artificial Sequence: Synthetic oligonucleotide
caggcuuauggucacugau

SEQ ID NO: 1020997 - RNA, 19 nt, Artificial Sequence
  Description of Artificial Sequence: Synthetic oligonucleotide
acguuauaggguagaggua

SEQ ID NO: 1020998 - RNA, 19 nt, Artificial Sequence
  Description of Artificial Sequence: Synthetic oligonucleotide
guacccguagaagccagua

SEQ ID NO: 1020999 - RNA, 19 nt, Artificial Sequence
  Description of Artificial Sequence: Synthetic oligonucleotide
ugucgccaacccaggcaua

SEQ ID NO: 1021000 - RNA, 19 nt, Artificial Sequence
  Description of Artificial Sequence: Synthetic oligonucleotide
ugggugugagagggagugu

SEQ ID NO: 1021001 - RNA, 19 nt, Artificial Sequence
  Description of Artificial Sequence: Synthetic oligonucleotide
gggaucuugaaggguugac

SEQ ID NO: 1021002 - RNA, 19 nt, Artificial Sequence
  Description of Artificial Sequence: Synthetic oligonucleotide
caguuucagggacauuacu

SEQ ID NO: 1021003 - RNA, 19 nt, Artificial Sequence
  Description of Artificial Sequence: Synthetic oligonucleotide
aguacccguagaagccagu

SEQ ID NO: 1021004 - RNA, 19 nt, Artificial Sequence
  Description of Artificial Sequence: Synthetic oligonucleotide
gcaagcuaguggucuuuuc

SEQ ID NO: 1021005 - RNA, 19 nt, Artificial Sequence
  Description of Artificial Sequence: Synthetic oligonucleotide
gcauacggacuugggagac

SEQ ID NO: 1021006 - RNA, 19 nt, Artificial Sequence
  Description of Artificial Sequence: Synthetic oligonucleotide
cccugcauacggacuuggg

SEQ ID NO: 1021007 - RNA, 19 nt, Artificial Sequence
  Description of Artificial Sequence: Synthetic oligonucleotide
caacuacuugggugugaga

SEQ ID NO: 1021008 - RNA, 19 nt, Artificial Sequence
  Description of Artificial Sequence: Synthetic oligonucleotide
aggaugcggucaguccaug

SEQ ID NO: 1021009 - RNA, 19 nt, Artificial Sequence
  Description of Artificial Sequence: Synthetic oligonucleotide
cacaacuacuuggguguga

SEQ ID NO: 1021010 - RNA, 19 nt, Artificial Sequence
  Description of Artificial Sequence: Synthetic oligonucleotide
augcaagcuaguggucuuu

SEQ ID NO: 1021011 - RNA, 19 nt, Artificial Sequence
  Description of Artificial Sequence: Synthetic oligonucleotide
gggauggauuuuguagaga

SEQ ID NO: 1021012 - RNA, 19 nt, Artificial Sequence
  Description of Artificial Sequence: Synthetic oligonucleotide
cuaccuuguauaguccaau

SEQ ID NO: 1021013 - RNA, 19 nt, Artificial Sequence
  Description of Artificial Sequence: Synthetic oligonucleotide
ccagugacaggcuuauggu

SEQ ID NO: 1021014 - RNA, 19 nt, Artificial Sequence
  Description of Artificial Sequence: Synthetic oligonucleotide
uacggacuugggagaccuu

SEQ ID NO: 1021015 - RNA, 19 nt, Artificial Sequence
  Description of Artificial Sequence: Synthetic oligonucleotide
ggcccuagaacuuccugau

SEQ ID NO: 1021016 - RNA, 19 nt, Artificial Sequence
  Description of Artificial Sequence: Synthetic oligonucleotide
caugcaagcuaguggucuu

SEQ ID NO: 1021017 - RNA, 19 nt, Artificial Sequence
  Description of Artificial Sequence: Synthetic oligonucleotide
gcaguugaugaugcucaca

SEQ ID NO: 1021018 - RNA, 19 nt, Artificial Sequence
  Description of Artificial Sequence: Synthetic oligonucleotide
ugcagacgggaagcacauc

SEQ ID NO: 1021019 - RNA, 19 nt, Artificial Sequence
  Description of Artificial Sequence: Synthetic oligonucleotide
auaccugaugugggugguu

SEQ ID NO: 1021020 - RNA, 19 nt, Artificial Sequence
  Description of Artificial Sequence: Synthetic oligonucleotide
agccuccgcccugaauuca

SEQ ID NO: 1021021 - RNA, 19 nt, Artificial Sequence
  Description of Artificial Sequence: Synthetic oligonucleotide
caguagggauggauuuugu

SEQ ID NO: 1021022 - RNA, 19 nt, Artificial Sequence
  Description of Artificial Sequence: Synthetic oligonucleotide
cgcugaucauuguuggaca

SEQ ID NO: 1021023 - RNA, 19 nt, Artificial Sequence
  Description of Artificial Sequence: Synthetic oligonucleotide
gguauaccaucuacuuugu

SEQ ID NO: 1021024 - RNA, 19 nt, Artificial Sequence
  Description of Artificial Sequence: Synthetic oligonucleotide
caucccuaccuuguauagu

SEQ ID NO: 1021025 - RNA, 19 nt, Artificial Sequence
  Description of Artificial Sequence: Synthetic oligonucleotide
cuggcacaacuacuugggu

SEQ ID NO: 1021026 - RNA, 19 nt, Artificial Sequence
  Description of Artificial Sequence: Synthetic oligonucleotide
ggucacgucucuuggcaau

SEQ ID NO: 1021027 - RNA, 19 nt, Artificial Sequence
  Description of Artificial Sequence: Synthetic oligonucleotide
gcgggaucuugaaggguug

SEQ ID NO: 1021028 - RNA, 19 nt, Artificial Sequence
  Description of Artificial Sequence: Synthetic oligonucleotide
gccgcugaucauuguugga

SEQ ID NO: 1021029 - RNA, 19 nt, Artificial Sequence
  Description of Artificial Sequence: Synthetic oligonucleotide
ggacggcgugaaaggaaug

SEQ ID NO: 1021030 - RNA, 19 nt, Artificial Sequence
  Description of Artificial Sequence: Synthetic oligonucleotide
gaucuggcuuccagcucua

SEQ ID NO: 1021031 - RNA, 19 nt, Artificial Sequence
  Description of Artificial Sequence: Synthetic oligonucleotide
gcuuauggucacugaugcu

SEQ ID NO: 1021032 - RNA, 19 nt, Artificial Sequence
  Description of Artificial Sequence: Synthetic oligonucleotide
ggauucggucaaaguguuc

SEQ ID NO: 1021033 - RNA, 19 nt, Artificial Sequence
  Description of Artificial Sequence: Synthetic oligonucleotide
ggcaugcaagcuagugguc

SEQ ID NO: 1021034 - RNA, 19 nt, Artificial Sequence
  Description of Artificial Sequence: Synthetic oligonucleotide
gcccuagaacuuccugauc

SEQ ID NO: 1021035 - RNA, 19 nt, Artificial Sequence
  Description of Artificial Sequence: Synthetic oligonucleotide
cuacuuugucauaguucuu

SEQ ID NO: 1021036 - RNA, 19 nt, Artificial Sequence
  Description of Artificial Sequence: Synthetic oligonucleotide
ugagcuccccugggagguu

SEQ ID NO: 1021037 - RNA, 19 nt, Artificial Sequence
  Description of Artificial Sequence: Synthetic oligonucleotide
gguggcaguugaugaugcu

SEQ ID NO: 1021038 - RNA, 19 nt, Artificial Sequence
  Description of Artificial Sequence: Synthetic oligonucleotide
ccguagaagccaguaggga

SEQ ID NO: 1021039 - RNA, 19 nt, Artificial Sequence
  Description of Artificial Sequence: Synthetic oligonucleotide
cauccccauggggacaacu

SEQ ID NO: 1021040 - RNA, 19 nt, Artificial Sequence
  Description of Artificial Sequence: Synthetic oligonucleotide
cgcaucccuaccuuguaua

SEQ ID NO: 1021041 - RNA, 19 nt, Artificial Sequence
  Description of Artificial Sequence: Synthetic oligonucleotide
ccaggacggcgugaaagga

SEQ ID NO: 1021042 - RNA, 19 nt, Artificial Sequence
  Description of Artificial Sequence: Synthetic oligonucleotide
cggacuugggagaccuuga

SEQ ID NO: 1021043 - RNA, 19 nt, Artificial Sequence
  Description of Artificial Sequence: Synthetic oligonucleotide
gaccuuccuggaacucccu

SEQ ID NO: 1021044 - RNA, 19 nt, Artificial Sequence
  Description of Artificial Sequence: Synthetic oligonucleotide
gcucuagccuccgcccuga

SEQ ID NO: 1021045 - RNA, 19 nt, Artificial Sequence
  Description of Artificial Sequence: Synthetic oligonucleotide
ccaugcaggcuuucguuuu

SEQ ID NO: 1021046 - RNA, 19 nt, Artificial Sequence
  Description of Artificial Sequence: Synthetic oligonucleotide
ggugugagagggaguguuu

SEQ ID NO: 1021047 - RNA, 19 nt, Artificial Sequence
  Description of Artificial Sequence: Synthetic oligonucleotide
ccaauuuauggggccugua

SEQ ID NO: 1021048 - RNA, 19 nt, Artificial Sequence
  Description of Artificial Sequence: Synthetic oligonucleotide
gcgcaucccuaccuuguau

SEQ ID NO: 1021049 - RNA, 19 nt, Artificial Sequence
  Description of Artificial Sequence: Synthetic oligonucleotide
cgcccugaauucauugacu

SEQ ID NO: 1021050 - RNA, 19 nt, Artificial Sequence
  Description of Artificial Sequence: Synthetic oligonucleotide
cccaauuuauggggccugu

SEQ ID NO: 1021051 - RNA, 19 nt, Artificial Sequence
  Description of Artificial Sequence: Synthetic oligonucleotide
cagcgagaaguaggagcuu

SEQ ID NO: 1021052 - RNA, 19 nt, Artificial Sequence
  Description of Artificial Sequence: Synthetic oligonucleotide
ggucaugguccaggauguu

SEQ ID NO: 1021053 - RNA, 19 nt, Artificial Sequence
  Description of Artificial Sequence: Synthetic oligonucleotide
ccuccgcccugaauucauu

SEQ ID NO: 1021054 - RNA, 19 nt, Artificial Sequence
  Description of Artificial Sequence: Synthetic oligonucleotide
aacaaagucggcuucguag

SEQ ID NO: 1021055 - RNA, 19 nt, Artificial Sequence
  Description of Artificial Sequence: Synthetic oligonucleotide
aaaaguacgguccuucgug

SEQ ID NO: 1021056 - RNA, 19 nt, Artificial Sequence
  Description of Artificial Sequence: Synthetic oligonucleotide
uucguauuaaauauaucug

SEQ ID NO: 1021057 - RNA, 19 nt, Artificial Sequence
  Description of Artificial Sequence: Synthetic oligonucleotide
cuucguagaguuuauagag

SEQ ID NO: 1021058 - RNA, 19 nt, Artificial Sequence
  Description of Artificial Sequence: Synthetic oligonucleotide
aguuuauagagcuguugcc

SEQ ID NO: 1021059 - RNA, 19 nt, Artificial Sequence
  Description of Artificial Sequence: Synthetic oligonucleotide
uguggaguaaacaaaucca

SEQ ID NO: 1021060 - RNA, 19 nt, Artificial Sequence
  Description of Artificial Sequence: Synthetic oligonucleotide
ucguauuaaauauaucuga

SEQ ID NO: 1021061 - RNA, 19 nt, Artificial Sequence
  Description of Artificial Sequence: Synthetic oligonucleotide
uccaguucgaacuugcugc

SEQ ID NO: 1021062 - RNA, 19 nt, Artificial Sequence
  Description of Artificial Sequence: Synthetic oligonucleotide
aaaguacgguccuucgugg

SEQ ID NO: 1021063 - RNA, 19 nt, Artificial Sequence
  Description of Artificial Sequence: Synthetic oligonucleotide
uaccugucacaccagaagg

SEQ ID NO: 1021064 - RNA, 19 nt, Artificial Sequence
  Description of Artificial Sequence: Synthetic oligonucleotide
ucgcucaacacaaucauca

SEQ ID NO: 1021065 - RNA, 19 nt, Artificial Sequence
  Description of Artificial Sequence: Synthetic oligonucleotide
aucagaagugaacacguuc

SEQ ID NO: 1021066 - RNA, 19 nt, Artificial Sequence
  Description of Artificial Sequence: Synthetic oligonucleotide
agaaucaugagagccgacc

SEQ ID NO: 1021067 - RNA, 19 nt, Artificial Sequence
  Description of Artificial Sequence: Synthetic oligonucleotide
aaagcaccaccucacuggg

SEQ ID NO: 1021068 - RNA, 19 nt, Artificial Sequence
  Description of Artificial Sequence: Synthetic oligonucleotide
caguguuccaugaauacag

SEQ ID NO: 1021069 - RNA, 19 nt, Artificial Sequence
  Description of Artificial Sequence: Synthetic oligonucleotide
ucaaaaguacgguccuucg

SEQ ID NO: 1021070 - RNA, 19 nt, Artificial Sequence
  Description of Artificial Sequence: Synthetic oligonucleotide
guugucccaauauacaaug

SEQ ID NO: 1021071 - RNA, 19 nt, Artificial Sequence
  Description of Artificial Sequence: Synthetic oligonucleotide
acaaugaucaaaagaauca

SEQ ID NO: 1021072 - RNA, 19 nt, Artificial Sequence
  Description of Artificial Sequence: Synthetic oligonucleotide
aacacaaucaucacucgcu

SEQ ID NO: 1021073 - RNA, 19 nt, Artificial Sequence
  Description of Artificial Sequence: Synthetic oligonucleotide
ucguagaguuuauagagcu

SEQ ID NO: 1021074 - RNA, 19 nt, Artificial Sequence
  Description of Artificial Sequence: Synthetic oligonucleotide
augaucaaaagaaucauga

SEQ ID NO: 1021075 - RNA, 19 nt, Artificial Sequence
  Description of Artificial Sequence: Synthetic oligonucleotide
agguguggcauccucuacc

SEQ ID NO: 1021076 - RNA, 19 nt, Artificial Sequence
  Description of Artificial Sequence: Synthetic oligonucleotide
aaaacccuggagugugagg

SEQ ID NO: 1021077 - RNA, 19 nt, Artificial Sequence
  Description of Artificial Sequence: Synthetic oligonucleotide
uucguagaguuuauagagc

SEQ ID NO: 1021078 - RNA, 19 nt, Artificial Sequence
  Description of Artificial Sequence: Synthetic oligonucleotide
aagagaacaaagucggcuu

SEQ ID NO: 1021079 - RNA, 19 nt, Artificial Sequence
  Description of Artificial Sequence: Synthetic oligonucleotide
aaagaaucaugagagccga

SEQ ID NO: 1021080 - RNA, 19 nt, Artificial Sequence
  Description of Artificial Sequence: Synthetic oligonucleotide
aaacccuggagugugaggu

SEQ ID NO: 1021081 - RNA, 19 nt, Artificial Sequence
  Description of Artificial Sequence: Synthetic oligonucleotide
ucugcuucgcaucggaacu

SEQ ID NO: 1021082 - RNA, 19 nt, Artificial Sequence
  Description of Artificial Sequence: Synthetic oligonucleotide
gguuuaauggggcucgugg

SEQ ID NO: 1021083 - RNA, 19 nt, Artificial Sequence
  Description of Artificial Sequence: Synthetic oligonucleotide
uccauguggcucaggaccg

SEQ ID NO: 1021084 - RNA, 19 nt, Artificial Sequence
  Description of Artificial Sequence: Synthetic oligonucleotide
uccucaaagcaccaccuca

SEQ ID NO: 1021085 - RNA, 19 nt, Artificial Sequence
  Description of Artificial Sequence: Synthetic oligonucleotide
ucuaagcagguuuuccggc

SEQ ID NO: 1021086 - RNA, 19 nt, Artificial Sequence
  Description of Artificial Sequence: Synthetic oligonucleotide
ugucccaauauacaaugau

SEQ ID NO: 1021087 - RNA, 19 nt, Artificial Sequence
  Description of Artificial Sequence: Synthetic oligonucleotide
uuggguuuaauggggcucg

SEQ ID NO: 1021088 - RNA, 19 nt, Artificial Sequence
  Description of Artificial Sequence: Synthetic oligonucleotide
gucauagucuaucuggcac

SEQ ID NO: 1021089 - RNA, 19 nt, Artificial Sequence
  Description of Artificial Sequence: Synthetic oligonucleotide
ucgcaucggaacuaaguag

SEQ ID NO: 1021090 - RNA, 19 nt, Artificial Sequence
  Description of Artificial Sequence: Synthetic oligonucleotide
uccacgaucaggugguuga

SEQ ID NO: 1021091 - RNA, 19 nt, Artificial Sequence
  Description of Artificial Sequence: Synthetic oligonucleotide
uucgcaucggaacuaagua

SEQ ID NO: 1021092 - RNA, 19 nt, Artificial Sequence
  Description of Artificial Sequence: Synthetic oligonucleotide
aaguacgguccuucguggg

SEQ ID NO: 1021093 - RNA, 19 nt, Artificial Sequence
  Description of Artificial Sequence: Synthetic oligonucleotide
gggagaugaaccuagcgcc

SEQ ID NO: 1021094 - RNA, 19 nt, Artificial Sequence
  Description of Artificial Sequence: Synthetic oligonucleotide
aaugccaggcuagcguugg

SEQ ID NO: 1021095 - RNA, 19 nt, Artificial Sequence
  Description of Artificial Sequence: Synthetic oligonucleotide
uccguggucuccaguaggg

SEQ ID NO: 1021096 - RNA, 19 nt, Artificial Sequence
  Description of Artificial Sequence: Synthetic oligonucleotide
uaacaguguuccaugaaua

SEQ ID NO: 1021097 - RNA, 19 nt, Artificial Sequence
  Description of Artificial Sequence: Synthetic oligonucleotide
acuuguugaaagucaggug

SEQ ID NO: 1021098 - RNA, 19 nt, Artificial Sequence
  Description of Artificial Sequence: Synthetic oligonucleotide
gaagccaggagggaacccg

SEQ ID NO: 1021099 - RNA, 19 nt, Artificial Sequence
  Description of Artificial Sequence: Synthetic oligonucleotide
aguacgguccuucgugggg

SEQ ID NO: 1021100 - RNA, 19 nt, Artificial Sequence
  Description of Artificial Sequence: Synthetic oligonucleotide
aagguguggcauccucuac

SEQ ID NO: 1021101 - RNA, 19 nt, Artificial Sequence
  Description of Artificial Sequence: Synthetic oligonucleotide
cugggaguccacuuugagg

SEQ ID NO: 1021102 - RNA, 19 nt, Artificial Sequence
  Description of Artificial Sequence: Synthetic oligonucleotide
guucucaccgcccaacccc

SEQ ID NO: 1021103 - RNA, 19 nt, Artificial Sequence
  Description of Artificial Sequence: Synthetic oligonucleotide
uuccguggucuccaguagg

SEQ ID NO: 1021104 - RNA, 19 nt, Artificial Sequence
  Description of Artificial Sequence: Synthetic oligonucleotide
ugaacacguucucaccgcc

SEQ ID NO: 1021105 - RNA, 19 nt, Artificial Sequence
  Description of Artificial Sequence: Synthetic oligonucleotide
cuagggucuuggaaguucc

SEQ ID NO: 1021106 - RNA, 19 nt, Artificial Sequence
  Description of Artificial Sequence: Synthetic oligonucleotide
auacagccggagcaugggc

SEQ ID NO: 1021107 - RNA, 19 nt, Artificial Sequence
  Description of Artificial Sequence: Synthetic oligonucleotide
ucccgcacgaacaggaacu

SEQ ID NO: 1021108 - RNA, 19 nt, Artificial Sequence
  Description of Artificial Sequence: Synthetic oligonucleotide
aagucggcuucguagaguu

SEQ ID NO: 1021109 - RNA, 19 nt, Artificial Sequence
  Description of Artificial Sequence: Synthetic oligonucleotide
ucucgcucaacacaaucau

SEQ ID NO: 1021110 - RNA, 19 nt, Artificial Sequence
  Description of Artificial Sequence: Synthetic oligonucleotide
gugggugcuuauuuggugc

SEQ ID NO: 1021111 - RNA, 19 nt, Artificial Sequence
  Description of Artificial Sequence: Synthetic oligonucleotide
acuuucguauuaaauauau

SEQ ID NO: 1021112 - RNA, 19 nt, Artificial Sequence
  Description of Artificial Sequence: Synthetic oligonucleotide
cacguucuccuccaugugg

SEQ ID NO: 1021113 - RNA, 19 nt, Artificial Sequence
  Description of Artificial Sequence: Synthetic oligonucleotide
agaggcgguacaccugucg

SEQ ID NO: 1021114 - RNA, 19 nt, Artificial Sequence
  Description of Artificial Sequence: Synthetic oligonucleotide
gaacuaaguagugugucca

SEQ ID NO: 1021115 - RNA, 19 nt, Artificial Sequence
  Description of Artificial Sequence: Synthetic oligonucleotide
uggggugugcaaaacccug

SEQ ID NO: 1021116 - RNA, 19 nt, Artificial Sequence
  Description of Artificial Sequence: Synthetic oligonucleotide
augggcaccgcgaacuugc

SEQ ID NO: 1021117 - RNA, 19 nt, Artificial Sequence
  Description of Artificial Sequence: Synthetic oligonucleotide
uggcgaucguccacgauca

SEQ ID NO: 1021118 - RNA, 19 nt, Artificial Sequence
  Description of Artificial Sequence: Synthetic oligonucleotide
uccuucguggggaaugcca

SEQ ID NO: 1021119 - RNA, 19 nt, Artificial Sequence
  Description of Artificial Sequence: Synthetic oligonucleotide
agaguuuauagagcuguug

SEQ ID NO: 1021120 - RNA, 19 nt, Artificial Sequence
  Description of Artificial Sequence: Synthetic oligonucleotide
acguucucaccgcccaacc

SEQ ID NO: 1021121 - RNA, 19 nt, Artificial Sequence
  Description of Artificial Sequence: Synthetic oligonucleotide
cuagcguuggcacagaagu

SEQ ID NO: 1021122 - RNA, 19 nt, Artificial Sequence
  Description of Artificial Sequence: Synthetic oligonucleotide
cuucaugaggugacgcgag

SEQ ID NO: 1021123 - RNA, 19 nt, Artificial Sequence
  Description of Artificial Sequence: Synthetic oligonucleotide
ucuaccugucacaccagaa

SEQ ID NO: 1021124 - RNA, 19 nt, Artificial Sequence
  Description of Artificial Sequence: Synthetic oligonucleotide
aggcgguacaccugucgcc

SEQ ID NO: 1021125 - RNA, 19 nt, Artificial Sequence
  Description of Artificial Sequence: Synthetic oligonucleotide
acguucuccuccauguggc

SEQ ID NO: 1021126 - RNA, 19 nt, Artificial Sequence
  Description of Artificial Sequence: Synthetic oligonucleotide
ggaacuaaguagugugucc

SEQ ID NO: 1021127 - RNA, 19 nt, Artificial Sequence
  Description of Artificial Sequence: Synthetic oligonucleotide
gaugaccccguggcgaucg

SEQ ID NO: 1021128 - RNA, 19 nt, Artificial Sequence
  Description of Artificial Sequence: Synthetic oligonucleotide
acgaagucauagucuaucu

SEQ ID NO: 1021129 - RNA, 19 nt, Artificial Sequence
  Description of Artificial Sequence: Synthetic oligonucleotide
aguguuccaugaauacagc

SEQ ID NO: 1021130 - RNA, 19 nt, Artificial Sequence
  Description of Artificial Sequence: Synthetic oligonucleotide
cauagucuaucuggcacgg

SEQ ID NO: 1021131 - RNA, 19 nt, Artificial Sequence
  Description of Artificial Sequence: Synthetic oligonucleotide
acguugucccaauauacaa

SEQ ID NO: 1021132 - RNA, 19 nt, Artificial Sequence
  Description of Artificial Sequence: Synthetic oligonucleotide
gaggcgguacaccugucgc

SEQ ID NO: 1021133 - RNA, 19 nt, Artificial Sequence
  Description of Artificial Sequence: Synthetic oligonucleotide
guccuguuccgguaacugg

SEQ ID NO: 1021134 - RNA, 19 nt, Artificial Sequence
  Description of Artificial Sequence: Synthetic oligonucleotide
cucacugggacagucguug

SEQ ID NO: 1021135 - RNA, 19 nt, Artificial Sequence
  Description of Artificial Sequence: Synthetic oligonucleotide
uggauagggaggugugcag

SEQ ID NO: 1021136 - RNA, 19 nt, Artificial Sequence
  Description of Artificial Sequence: Synthetic oligonucleotide
uccaguugguacaggcuac

SEQ ID NO: 1021137 - RNA, 19 nt, Artificial Sequence
  Description of Artificial Sequence: Synthetic oligonucleotide
uccccacgaagucauaguc

SEQ ID NO: 1021138 - RNA, 19 nt, Artificial Sequence
  Description of Artificial Sequence: Synthetic oligonucleotide
agcguuggcacagaagucu

SEQ ID NO: 1021139 - RNA, 19 nt, Artificial Sequence
  Description of Artificial Sequence: Synthetic oligonucleotide
agaugaaccuagcgccccg

SEQ ID NO: 1021140 - RNA, 19 nt, Artificial Sequence
  Description of Artificial Sequence: Synthetic oligonucleotide
ugacgcgagaacuucccgu

SEQ ID NO: 1021141 - RNA, 19 nt, Artificial Sequence
  Description of Artificial Sequence: Synthetic oligonucleotide
aguuccguggucuccagua

SEQ ID NO: 1021142 - RNA, 19 nt, Artificial Sequence
  Description of Artificial Sequence: Synthetic oligonucleotide
aacuucccguagcggcgcc

SEQ ID NO: 1021143 - RNA, 19 nt, Artificial Sequence
  Description of Artificial Sequence: Synthetic oligonucleotide
ucucgguaggggcugcccc

SEQ ID NO: 1021144 - RNA, 19 nt, Artificial Sequence
  Description of Artificial Sequence: Synthetic oligonucleotide
gcuugggguagccaaagag

SEQ ID NO: 1021145 - RNA, 19 nt, Artificial Sequence
  Description of Artificial Sequence: Synthetic oligonucleotide
cagacggaagagccgaggc

SEQ ID NO: 1021146 - RNA, 19 nt, Artificial Sequence
  Description of Artificial Sequence: Synthetic oligonucleotide
ugguguacuucuuuagcuu

SEQ ID NO: 1021147 - RNA, 19 nt, Artificial Sequence
  Description of Artificial Sequence: Synthetic oligonucleotide
gcuuauuuggugcugggga

SEQ ID NO: 1021148 - RNA, 19 nt, Artificial Sequence
  Description of Artificial Sequence: Synthetic oligonucleotide
aggucauucugcuucgcau

SEQ ID NO: 1021149 - RNA, 19 nt, Artificial Sequence
  Description of Artificial Sequence: Synthetic oligonucleotide
cuccaguucgaacuugcug

SEQ ID NO: 1021150 - RNA, 19 nt, Artificial Sequence
  Description of Artificial Sequence: Synthetic oligonucleotide
acgaucaggugguugaguu

SEQ ID NO: 1021151 - RNA, 19 nt, Artificial Sequence
  Description of Artificial Sequence: Synthetic oligonucleotide
caugaggugacgcgagaac

SEQ ID NO: 1021152 - RNA, 19 nt, Artificial Sequence
  Description of Artificial Sequence: Synthetic oligonucleotide
auccucuaccugucacacc

SEQ ID NO: 1021153 - RNA, 19 nt, Artificial Sequence
  Description of Artificial Sequence: Synthetic oligonucleotide
uagcgccccgcuauugccg

SEQ ID NO: 1021154 - RNA, 19 nt, Artificial Sequence
  Description of Artificial Sequence: Synthetic oligonucleotide
augaggugacgcgagaacu

SEQ ID NO: 1021155 - RNA, 19 nt, Artificial Sequence
  Description of Artificial Sequence: Synthetic oligonucleotide
gucguagccucucacguuc

SEQ ID NO: 1021156 - RNA, 19 nt, Artificial Sequence
  Description of Artificial Sequence: Synthetic oligonucleotide
uaauggggcucgugggugc

SEQ ID NO: 1021157 - RNA, 19 nt, Artificial Sequence
  Description of Artificial Sequence: Synthetic oligonucleotide
ugaauacagcuguggagua

SEQ ID NO: 1021158 - RNA, 19 nt, Artificial Sequence
  Description of Artificial Sequence: Synthetic oligonucleotide
gucccaauauacaaugauc

SEQ ID NO: 1021159 - RNA, 19 nt, Artificial Sequence
  Description of Artificial Sequence: Synthetic oligonucleotide
augagagccgaccccagaa

SEQ ID NO: 1021160 - RNA, 19 nt, Artificial Sequence
  Description of Artificial Sequence: Synthetic oligonucleotide
cacgaagucauagucuauc

SEQ ID NO: 1021161 - RNA, 19 nt, Artificial Sequence
  Description of Artificial Sequence: Synthetic oligonucleotide
ugaccuucaugaggugacg

SEQ ID NO: 1021162 - RNA, 19 nt, Artificial Sequence
  Description of Artificial Sequence: Synthetic oligonucleotide
ucgugggugcuuauuuggu

SEQ ID NO: 1021163 - RNA, 19 nt, Artificial Sequence
  Description of Artificial Sequence: Synthetic oligonucleotide
ugaggugacgcgagaacuu

SEQ ID NO: 1021164 - RNA, 19 nt, Artificial Sequence
  Description of Artificial Sequence: Synthetic oligonucleotide
gauugcaaaaggguggggu

SEQ ID NO: 1021165 - RNA, 19 nt, Artificial Sequence
  Description of Artificial Sequence: Synthetic oligonucleotide
gcugauaugaggcgcacga

SEQ ID NO: 1021166 - RNA, 19 nt, Artificial Sequence
  Description of Artificial Sequence: Synthetic oligonucleotide
cuucguggggaaugccagg

SEQ ID NO: 1021167 - RNA, 19 nt, Artificial Sequence
  Description of Artificial Sequence: Synthetic oligonucleotide
cuagcgccccgcuauugcc

SEQ ID NO: 1021168 - RNA, 19 nt, Artificial Sequence
  Description of Artificial Sequence: Synthetic oligonucleotide
cagugcucguugaagggug

SEQ ID NO: 1021169 - RNA, 19 nt, Artificial Sequence
  Description of Artificial Sequence: Synthetic oligonucleotide
ggugcuuauuuggugcugg

SEQ ID NO: 1021170 - RNA, 19 nt, Artificial Sequence
  Description of Artificial Sequence: Synthetic oligonucleotide
cucgguaggggcugccccg

SEQ ID NO: 1021171 - RNA, 19 nt, Artificial Sequence
  Description of Artificial Sequence: Synthetic oligonucleotide
cacguugucccaauauaca

SEQ ID NO: 1021172 - RNA, 19 nt, Artificial Sequence
  Description of Artificial Sequence: Synthetic oligonucleotide
ggaguugugcacgugcucc

SEQ ID NO: 1021173 - RNA, 19 nt, Artificial Sequence
  Description of Artificial Sequence: Synthetic oligonucleotide
gcuucguagaguuuauaga

SEQ ID NO: 1021174 - RNA, 19 nt, Artificial Sequence
  Description of Artificial Sequence: Synthetic oligonucleotide
guagaugaccccguggcga

SEQ ID NO: 1021175 - RNA, 19 nt, Artificial Sequence
  Description of Artificial Sequence: Synthetic oligonucleotide
ugcaaaaggguggggugug

SEQ ID NO: 1021176 - RNA, 19 nt, Artificial Sequence
  Description of Artificial Sequence: Synthetic oligonucleotide
gugcuuauuuggugcuggg

SEQ ID NO: 1021177 - RNA, 19 nt, Artificial Sequence
  Description of Artificial Sequence: Synthetic oligonucleotide
aguugguacaggcuaccuu

SEQ ID NO: 1021178 - RNA, 19 nt, Artificial Sequence
  Description of Artificial Sequence: Synthetic oligonucleotide
gauguguggccuggauagg

SEQ ID NO: 1021179 - RNA, 19 nt, Artificial Sequence
  Description of Artificial Sequence: Synthetic oligonucleotide
gcgagaacuucccguagcg

SEQ ID NO: 1021180 - RNA, 19 nt, Artificial Sequence
  Description of Artificial Sequence: Synthetic oligonucleotide
ucuaucuggcacggguggc

SEQ ID NO: 1021181 - RNA, 19 nt, Artificial Sequence
  Description of Artificial Sequence: Synthetic oligonucleotide
gcuggaguugugcacgugc

SEQ ID NO: 1021182 - RNA, 19 nt, Artificial Sequence
  Description of Artificial Sequence: Synthetic oligonucleotide
guuccguggucuccaguag

SEQ ID NO: 1021183 - RNA, 19 nt, Artificial Sequence
  Description of Artificial Sequence: Synthetic oligonucleotide
ucgggcgccacgcuuuacu

SEQ ID NO: 1021184 - RNA, 19 nt, Artificial Sequence
  Description of Artificial Sequence: Synthetic oligonucleotide
gaccuugagaccagcgcug

SEQ ID NO: 1021185 - RNA, 19 nt, Artificial Sequence
  Description of Artificial Sequence: Synthetic oligonucleotide
uacaggcuaccuugggcac

SEQ ID NO: 1021186 - RNA, 19 nt, Artificial Sequence
  Description of Artificial Sequence: Synthetic oligonucleotide
ggguggaccagucguagcc

SEQ ID NO: 1021187 - RNA, 19 nt, Artificial Sequence
  Description of Artificial Sequence: Synthetic oligonucleotide
uggaaguuccguggucucc

SEQ ID NO: 1021188 - RNA, 19 nt, Artificial Sequence
  Description of Artificial Sequence: Synthetic oligonucleotide
uagaguuuauagagcuguu

SEQ ID NO: 1021189 - RNA, 19 nt, Artificial Sequence
  Description of Artificial Sequence: Synthetic oligonucleotide
agccgaggcuuggucaugc

SEQ ID NO: 1021190 - RNA, 19 nt, Artificial Sequence
  Description of Artificial Sequence: Synthetic oligonucleotide
cucgcucaacacaaucauc

SEQ ID NO: 1021191 - RNA, 19 nt, Artificial Sequence
  Description of Artificial Sequence: Synthetic oligonucleotide
caucacucgcuuccaguug

SEQ ID NO: 1021192 - RNA, 19 nt, Artificial Sequence
  Description of Artificial Sequence: Synthetic oligonucleotide
ccacguugucccaauauac

SEQ ID NO: 1021193 - RNA, 19 nt, Artificial Sequence
  Description of Artificial Sequence: Synthetic oligonucleotide
cacgcuuuacuccagcucu

SEQ ID NO: 1021194 - RNA, 19 nt, Artificial Sequence
  Description of Artificial Sequence: Synthetic oligonucleotide
ggcaaaccaguccuccucc

SEQ ID NO: 1021195 - RNA, 19 nt, Artificial Sequence
  Description of Artificial Sequence: Synthetic oligonucleotide
gacgcgagaacuucccgua

SEQ ID NO: 1021196 - RNA, 19 nt, Artificial Sequence
  Description of Artificial Sequence: Synthetic oligonucleotide
gaacacguucucaccgccc

SEQ ID NO: 1021197 - RNA, 19 nt, Artificial Sequence
  Description of Artificial Sequence: Synthetic oligonucleotide
uagcguuggcacagaaguc

SEQ ID NO: 1021198 - RNA, 19 nt, Artificial Sequence
  Description of Artificial Sequence: Synthetic oligonucleotide
acaggcuaccuugggcacg

SEQ ID NO: 1021199 - RNA, 19 nt, Artificial Sequence
  Description of Artificial Sequence: Synthetic oligonucleotide
auggguggaccagucguag

SEQ ID NO: 1021200 - RNA, 19 nt, Artificial Sequence
  Description of Artificial Sequence: Synthetic oligonucleotide
agauugcaaaagggugggg

SEQ ID NO: 1021201 - RNA, 19 nt, Artificial Sequence
  Description of Artificial Sequence: Synthetic oligonucleotide
ggugugcaaaacccuggag

SEQ ID NO: 1021202 - RNA, 19 nt, Artificial Sequence
  Description of Artificial Sequence: Synthetic oligonucleotide
gaugaaccuagcgccccgc

SEQ ID NO: 1021203 - RNA, 19 nt, Artificial Sequence
  Description of Artificial Sequence: Synthetic oligonucleotide
uuuugucgggcgccacgcu

SEQ ID NO: 1021204 - RNA, 19 nt, Artificial Sequence
  Description of Artificial Sequence: Synthetic oligonucleotide
cuucgcaucggaacuaagu

SEQ ID NO: 1021205 - RNA, 19 nt, Artificial Sequence
  Description of Artificial Sequence: Synthetic oligonucleotide
uggguggaccagucguagc

SEQ ID NO: 1021206 - RNA, 19 nt, Artificial Sequence
  Description of Artificial Sequence: Synthetic oligonucleotide
guggggaaugccaggcuag

SEQ ID NO: 1021207 - RNA, 19 nt, Artificial Sequence
  Description of Artificial Sequence: Synthetic oligonucleotide
ggggagcucagucucuaag

SEQ ID NO: 1021208 - RNA, 19 nt, Artificial Sequence
  Description of Artificial Sequence: Synthetic oligonucleotide
gaaccuagcgccccgcuau

SEQ ID NO: 1021209 - RNA, 19 nt, Artificial Sequence
  Description of Artificial Sequence: Synthetic oligonucleotide
guagcggcgccagaacuug

SEQ ID NO: 1021210 - RNA, 19 nt, Artificial Sequence
  Description of Artificial Sequence: Synthetic oligonucleotide
ccucaaagcaccaccucac

SEQ ID NO: 1021211 - RNA, 19 nt, Artificial Sequence
  Description of Artificial Sequence: Synthetic oligonucleotide
gaggugacgcgagaacuuc

SEQ ID NO: 1021212 - RNA, 19 nt, Artificial Sequence
  Description of Artificial Sequence: Synthetic oligonucleotide
uaguuggggaugucaucaa

SEQ ID NO: 1021213 - RNA, 19 nt, Artificial Sequence
  Description of Artificial Sequence: Synthetic oligonucleotide
auagucuaucuggcacggg

SEQ ID NO: 1021214 - RNA, 19 nt, Artificial Sequence
  Description of Artificial Sequence: Synthetic oligonucleotide
ccaguucgaacuugcugcg

SEQ ID NO: 1021215 - RNA, 19 nt, Artificial Sequence
  Description of Artificial Sequence: Synthetic oligonucleotide
acgcgagaacuucccguag

SEQ ID NO: 1021216 - RNA, 19 nt, Artificial Sequence
  Description of Artificial Sequence: Synthetic oligonucleotide
cuggagugugaggugcuag

SEQ ID NO: 1021217 - RNA, 19 nt, Artificial Sequence
  Description of Artificial Sequence: Synthetic oligonucleotide
ugaggcgcacgaagggguc

SEQ ID NO: 1021218 - RNA, 19 nt, Artificial Sequence
  Description of Artificial Sequence: Synthetic oligonucleotide
ugggcgucauggguggacc

SEQ ID NO: 1021219 - RNA, 19 nt, Artificial Sequence
  Description of Artificial Sequence: Synthetic oligonucleotide
cuauugccgucaccgccgc

SEQ ID NO: 1021220 - RNA, 19 nt, Artificial Sequence
  Description of Artificial Sequence: Synthetic oligonucleotide
ggugugguuggcauacagc

SEQ ID NO: 1021221 - RNA, 19 nt, Artificial Sequence
  Description of Artificial Sequence: Synthetic oligonucleotide
ccuucguggggaaugccag

SEQ ID NO: 1021222 - RNA, 19 nt, Artificial Sequence
  Description of Artificial Sequence: Synthetic oligonucleotide
uugucgggcgccacgcuuu

SEQ ID NO: 1021223 - RNA, 19 nt, Artificial Sequence
  Description of Artificial Sequence: Synthetic oligonucleotide
cacuuucguauuaaauaua

SEQ ID NO: 1021224 - RNA, 19 nt, Artificial Sequence
  Description of Artificial Sequence: Synthetic oligonucleotide
cucaccgcccaaccccggg

SEQ ID NO: 1021225 - RNA, 19 nt, Artificial Sequence
  Description of Artificial Sequence: Synthetic oligonucleotide
acgaaggggucccgcacga

SEQ ID NO: 1021226 - RNA, 19 nt, Artificial Sequence
  Description of Artificial Sequence: Synthetic oligonucleotide
ggagaugaaccuagcgccc

SEQ ID NO: 1021227 - RNA, 19 nt, Artificial Sequence
  Description of Artificial Sequence: Synthetic oligonucleotide
uguguggguccaacaggua

SEQ ID NO: 1021228 - RNA, 19 nt, Artificial Sequence
  Description of Artificial Sequence: Synthetic oligonucleotide
gccucgcucaccgaggcgg

SEQ ID NO: 1021229 - RNA, 19 nt, Artificial Sequence
  Description of Artificial Sequence: Synthetic oligonucleotide
ugucgccagugcucguuga

SEQ ID NO: 1021230 - RNA, 19 nt, Artificial Sequence
  Description of Artificial Sequence: Synthetic oligonucleotide
ucguagccucucacguucu

SEQ ID NO: 1021231 - RNA, 19 nt, Artificial Sequence
  Description of Artificial Sequence: Synthetic oligonucleotide
aggcugauaugaggcgcac

SEQ ID NO: 1021232 - RNA, 19 nt, Artificial Sequence
  Description of Artificial Sequence: Synthetic oligonucleotide
cuaagcagguuuuccggcu

SEQ ID NO: 1021233 - RNA, 19 nt, Artificial Sequence
  Description of Artificial Sequence: Synthetic oligonucleotide
ccggucuggguucugcugg

SEQ ID NO: 1021234 - RNA, 19 nt, Artificial Sequence
  Description of Artificial Sequence: Synthetic oligonucleotide
cuuggaaguuccguggucu

SEQ ID NO: 1021235 - RNA, 19 nt, Artificial Sequence
  Description of Artificial Sequence: Synthetic oligonucleotide
ggugacgcgagaacuuccc

SEQ ID NO: 1021236 - RNA, 19 nt, Artificial Sequence
  Description of Artificial Sequence: Synthetic oligonucleotide
ggggugugcaaaacccugg

SEQ ID NO: 1021237 - RNA, 19 nt, Artificial Sequence
  Description of Artificial Sequence: Synthetic oligonucleotide
cauguggcucaggaccggc

SEQ ID NO: 1021238 - RNA, 19 nt, Artificial Sequence
  Description of Artificial Sequence: Synthetic oligonucleotide
gcgaucguccacgaucagg

SEQ ID NO: 1021239 - RNA, 19 nt, Artificial Sequence
  Description of Artificial Sequence: Synthetic oligonucleotide
ggcuaccuugggcacguag

SEQ ID NO: 1021240 - RNA, 19 nt, Artificial Sequence
  Description of Artificial Sequence: Synthetic oligonucleotide
ugcuucgcaucggaacuaa

SEQ ID NO: 1021241 - RNA, 19 nt, Artificial Sequence
  Description of Artificial Sequence: Synthetic oligonucleotide
cacguucucaccgcccaac

SEQ ID NO: 1021242 - RNA, 19 nt, Artificial Sequence
  Description of Artificial Sequence: Synthetic oligonucleotide
ggcgaaggagaccuugaga

SEQ ID NO: 1021243 - RNA, 19 nt, Artificial Sequence
  Description of Artificial Sequence: Synthetic oligonucleotide
caaaaguacgguccuucgu

SEQ ID NO: 1021244 - RNA, 19 nt, Artificial Sequence
  Description of Artificial Sequence: Synthetic oligonucleotide
gcucgugggugcuuauuug

SEQ ID NO: 1021245 - RNA, 19 nt, Artificial Sequence
  Description of Artificial Sequence: Synthetic oligonucleotide
gaacuugcugcggaaggcu

SEQ ID NO: 1021246 - RNA, 19 nt, Artificial Sequence
  Description of Artificial Sequence: Synthetic oligonucleotide
ccaugaauacagcugugga

SEQ ID NO: 1021247 - RNA, 19 nt, Artificial Sequence
  Description of Artificial Sequence: Synthetic oligonucleotide
gacauggugcugggagaug

SEQ ID NO: 1021248 - RNA, 19 nt, Artificial Sequence
  Description of Artificial Sequence: Synthetic oligonucleotide
gcucguugaagggugccag

SEQ ID NO: 1021249 - RNA, 19 nt, Artificial Sequence
  Description of Artificial Sequence: Synthetic oligonucleotide
acgcuuuacuccagcucuc

SEQ ID NO: 1021250 - RNA, 19 nt, Artificial Sequence
  Description of Artificial Sequence: Synthetic oligonucleotide
gcuagcguuggcacagaag

SEQ ID NO: 1021251 - RNA, 19 nt, Artificial Sequence
  Description of Artificial Sequence: Synthetic oligonucleotide
agcgccccgcuauugccgu

SEQ ID NO: 1021252 - RNA, 19 nt, Artificial Sequence
  Description of Artificial Sequence: Synthetic oligonucleotide
aaccuagcgccccgcuauu

SEQ ID NO: 1021253 - RNA, 19 nt, Artificial Sequence
  Description of Artificial Sequence: Synthetic oligonucleotide
aguccacuuugagggaccu

SEQ ID NO: 1021254 - RNA, 19 nt, Artificial Sequence
  Description of Artificial Sequence: Synthetic oligonucleotide
gaggcgcacgaaggggucc

SEQ ID NO: 1021255 - RNA, 19 nt, Artificial Sequence
  Description of Artificial Sequence: Synthetic oligonucleotide
ucgcucaccgaggcgggca

SEQ ID NO: 1021256 - RNA, 19 nt, Artificial Sequence
  Description of Artificial Sequence: Synthetic oligonucleotide
cuaucuggcacggguggca

SEQ ID NO: 1021257 - RNA, 19 nt, Artificial Sequence
  Description of Artificial Sequence: Synthetic oligonucleotide
ugugaggugcuagggucuu

SEQ ID NO: 1021258 - RNA, 19 nt, Artificial Sequence
  Description of Artificial Sequence: Synthetic oligonucleotide
gcugcugcugcugcugcgg

SEQ ID NO: 1021259 - RNA, 19 nt, Artificial Sequence
  Description of Artificial Sequence: Synthetic oligonucleotide
accuugagaccagcgcuga

SEQ ID NO: 1021260 - RNA, 19 nt, Artificial Sequence
  Description of Artificial Sequence: Synthetic oligonucleotide
ggggaaugccaggcuagcg

SEQ ID NO: 1021261 - RNA, 19 nt, Artificial Sequence
  Description of Artificial Sequence: Synthetic oligonucleotide
gaccagucguagccucuca

SEQ ID NO: 1021262 - RNA, 19 nt, Artificial Sequence
  Description of Artificial Sequence: Synthetic oligonucleotide
caugggcaccgcgaacuug

SEQ ID NO: 1021263 - RNA, 19 nt, Artificial Sequence
  Description of Artificial Sequence: Synthetic oligonucleotide
guccacgaucaggugguug

SEQ ID NO: 1021264 - RNA, 19 nt, Artificial Sequence
  Description of Artificial Sequence: Synthetic oligonucleotide
uacgguccuucguggggaa

SEQ ID NO: 1021265 - RNA, 19 nt, Artificial Sequence
  Description of Artificial Sequence: Synthetic oligonucleotide
ccuagcgccccgcuauugc

SEQ ID NO: 1021266 - RNA, 19 nt, Artificial Sequence
  Description of Artificial Sequence: Synthetic oligonucleotide
gugcuagggucuuggaagu

SEQ ID NO: 1021267 - RNA, 19 nt, Artificial Sequence
  Description of Artificial Sequence: Synthetic oligonucleotide
gcuagggucuuggaaguuc

SEQ ID NO: 1021268 - RNA, 19 nt, Artificial Sequence
  Description of Artificial Sequence: Synthetic oligonucleotide
ggauagggaggugugcaga

SEQ ID NO: 1021269 - RNA, 19 nt, Artificial Sequence
  Description of Artificial Sequence: Synthetic oligonucleotide
gguuuuccggcuuggggua

SEQ ID NO: 1021270 - RNA, 19 nt, Artificial Sequence
  Description of Artificial Sequence: Synthetic oligonucleotide
gaagcggcuccaggaugug

SEQ ID NO: 1021271 - RNA, 19 nt, Artificial Sequence
  Description of Artificial Sequence: Synthetic oligonucleotide
gcaucggaacuaaguagug

SEQ ID NO: 1021272 - RNA, 19 nt, Artificial Sequence
  Description of Artificial Sequence: Synthetic oligonucleotide
cuggaguugugcacgugcu

SEQ ID NO: 1021273 - RNA, 19 nt, Artificial Sequence
  Description of Artificial Sequence: Synthetic oligonucleotide
uggggagcucagucucuaa

SEQ ID NO: 1021274 - RNA, 19 nt, Artificial Sequence
  Description of Artificial Sequence: Synthetic oligonucleotide
ugcuggaguugugcacgug

SEQ ID NO: 1021275 - RNA, 19 nt, Artificial Sequence
  Description of Artificial Sequence: Synthetic oligonucleotide
ccucacuucagucuugugu

SEQ ID NO: 1021276 - RNA, 19 nt, Artificial Sequence
  Description of Artificial Sequence: Synthetic oligonucleotide
gcacguagcaguagaugac

SEQ ID NO: 1021277 - RNA, 19 nt, Artificial Sequence
  Description of Artificial Sequence: Synthetic oligonucleotide
cccaauauacaaugaucaa

SEQ ID NO: 1021278 - RNA, 19 nt, Artificial Sequence
  Description of Artificial Sequence: Synthetic oligonucleotide
gguccuucguggggaaugc

SEQ ID NO: 1021279 - RNA, 19 nt, Artificial Sequence
  Description of Artificial Sequence: Synthetic oligonucleotide
gugcucguugaagggugcc

SEQ ID NO: 1021280 - RNA, 19 nt, Artificial Sequence
  Description of Artificial Sequence: Synthetic oligonucleotide
cugggcgucauggguggac

SEQ ID NO: 1021281 - RNA, 19 nt, Artificial Sequence
  Description of Artificial Sequence: Synthetic oligonucleotide
caccgcgaacuugcgguag

SEQ ID NO: 1021282 - RNA, 19 nt, Artificial Sequence
  Description of Artificial Sequence: Synthetic oligonucleotide
ggaacccggaaggcgcagg

SEQ ID NO: 1021283 - RNA, 19 nt, Artificial Sequence
  Description of Artificial Sequence: Synthetic oligonucleotide
gggcgccacgcuuuacucc

SEQ ID NO: 1021284 - RNA, 19 nt, Artificial Sequence
  Description of Artificial Sequence: Synthetic oligonucleotide
gguggcagaggcgguacac

SEQ ID NO: 1021285 - RNA, 19 nt, Artificial Sequence
  Description of Artificial Sequence: Synthetic oligonucleotide
uggguuuaauggggcucgu

SEQ ID NO: 1021286 - RNA, 19 nt, Artificial Sequence
  Description of Artificial Sequence: Synthetic oligonucleotide
gucucgguaggggcugccc

SEQ ID NO: 1021287 - RNA, 19 nt, Artificial Sequence
  Description of Artificial Sequence: Synthetic oligonucleotide
ugucgggcgccacgcuuua

SEQ ID NO: 1021288 - RNA, 19 nt, Artificial Sequence
  Description of Artificial Sequence: Synthetic oligonucleotide
uggccguccuguuccggua

SEQ ID NO: 1021289 - RNA, 19 nt, Artificial Sequence
  Description of Artificial Sequence: Synthetic oligonucleotide
ggcgguacaccugucgcca

SEQ ID NO: 1021290 - RNA, 19 nt, Artificial Sequence
  Description of Artificial Sequence: Synthetic oligonucleotide
cuccauccucaaagcacca

SEQ ID NO: 1021291 - RNA, 19 nt, Artificial Sequence
  Description of Artificial Sequence: Synthetic oligonucleotide
caucggaacuaaguagugu

SEQ ID NO: 1021292 - RNA, 19 nt, Artificial Sequence
  Description of Artificial Sequence: Synthetic oligonucleotide
accuagcgccccgcuauug

SEQ ID NO: 1021293 - RNA, 19 nt, Artificial Sequence
  Description of Artificial Sequence: Synthetic oligonucleotide
ccuggauagggaggugugc

SEQ ID NO: 1021294 - RNA, 19 nt, Artificial Sequence
  Description of Artificial Sequence: Synthetic oligonucleotide
gguuggcauacagccggag

SEQ ID NO: 1021295 - RNA, 19 nt, Artificial Sequence
  Description of Artificial Sequence: Synthetic oligonucleotide
gucgccagugcucguugaa

SEQ ID NO: 1021296 - RNA, 19 nt, Artificial Sequence
  Description of Artificial Sequence: Synthetic oligonucleotide
cucccacuuucguauuaaa

SEQ ID NO: 1021297 - RNA, 19 nt, Artificial Sequence
  Description of Artificial Sequence: Synthetic oligonucleotide
gcagauagaagugggcagu

SEQ ID NO: 1021298 - RNA, 19 nt, Artificial Sequence
  Description of Artificial Sequence: Synthetic oligonucleotide
gcagaggcgguacaccugu

SEQ ID NO: 1021299 - RNA, 19 nt, Artificial Sequence
  Description of Artificial Sequence: Synthetic oligonucleotide
cagucucuaagcagguuuu

SEQ ID NO: 1021300 - RNA, 19 nt, Artificial Sequence
  Description of Artificial Sequence: Synthetic oligonucleotide
ccuucaugaggugacgcga

SEQ ID NO: 1021301 - RNA, 19 nt, Artificial Sequence
  Description of Artificial Sequence: Synthetic oligonucleotide
auguggcucaggaccggcu

SEQ ID NO: 1021302 - RNA, 19 nt, Artificial Sequence
  Description of Artificial Sequence: Synthetic oligonucleotide
gcugcuggccguccuguuc

SEQ ID NO: 1021303 - RNA, 19 nt, Artificial Sequence
  Description of Artificial Sequence: Synthetic oligonucleotide
ugcuagggucuuggaaguu

SEQ ID NO: 1021304 - RNA, 19 nt, Artificial Sequence
  Description of Artificial Sequence: Synthetic oligonucleotide
cugauaugaggcgcacgaa

SEQ ID NO: 1021305 - RNA, 19 nt, Artificial Sequence
  Description of Artificial Sequence: Synthetic oligonucleotide
gcggcgccagaacuuguug

SEQ ID NO: 1021306 - RNA, 19 nt, Artificial Sequence
  Description of Artificial Sequence: Synthetic oligonucleotide
cguucucaccgcccaaccc

SEQ ID NO: 1021307 - RNA, 19 nt, Artificial Sequence
  Description of Artificial Sequence: Synthetic oligonucleotide
ggguuuaauggggcucgug

SEQ ID NO: 1021308 - RNA, 19 nt, Artificial Sequence
  Description of Artificial Sequence: Synthetic oligonucleotide
gagccgaggcuuggucaug

SEQ ID NO: 1021309 - RNA, 19 nt, Artificial Sequence
  Description of Artificial Sequence: Synthetic oligonucleotide
guccuucguggggaaugcc

SEQ ID NO: 1021310 - RNA, 19 nt, Artificial Sequence
  Description of Artificial Sequence: Synthetic oligonucleotide
agggaacccggaaggcgca

SEQ ID NO: 1021311 - RNA, 19 nt, Artificial Sequence
  Description of Artificial Sequence: Synthetic oligonucleotide
cgcucaacacaaucaucac

SEQ ID NO: 1021312 - RNA, 19 nt, Artificial Sequence
  Description of Artificial Sequence: Synthetic oligonucleotide
ccgaggcuuggucaugcug

SEQ ID NO: 1021313 - RNA, 19 nt, Artificial Sequence
  Description of Artificial Sequence: Synthetic oligonucleotide
cgaucguccacgaucaggu

SEQ ID NO: 1021314 - RNA, 19 nt, Artificial Sequence
  Description of Artificial Sequence: Synthetic oligonucleotide
gcaaaaggguggggugugc

SEQ ID NO: 1021315 - RNA, 19 nt, Artificial Sequence
  Description of Artificial Sequence: Synthetic oligonucleotide
cgcaucggaacuaaguagu

SEQ ID NO: 1021316 - RNA, 19 nt, Artificial Sequence
  Description of Artificial Sequence: Synthetic oligonucleotide
ggaagcggcuccaggaugu

SEQ ID NO: 1021317 - RNA, 19 nt, Artificial Sequence
  Description of Artificial Sequence: Synthetic oligonucleotide
gggacagucguuggguuua

SEQ ID NO: 1021318 - RNA, 19 nt, Artificial Sequence
  Description of Artificial Sequence: Synthetic oligonucleotide
gggugcuuauuuggugcug

SEQ ID NO: 1021319 - RNA, 19 nt, Artificial Sequence
  Description of Artificial Sequence: Synthetic oligonucleotide
ccaaccccggggugggaag

SEQ ID NO: 1021320 - RNA, 19 nt, Artificial Sequence
  Description of Artificial Sequence: Synthetic oligonucleotide
gggaguccacuuugaggga

SEQ ID NO: 1021321 - RNA, 19 nt, Artificial Sequence
  Description of Artificial Sequence: Synthetic oligonucleotide
cagaggcgguacaccuguc

SEQ ID NO: 1021322 - RNA, 19 nt, Artificial Sequence
  Description of Artificial Sequence: Synthetic oligonucleotide
caggaccggcuugcugggg

SEQ ID NO: 1021323 - RNA, 19 nt, Artificial Sequence
  Description of Artificial Sequence: Synthetic oligonucleotide
gcuucgcaucggaacuaag

SEQ ID NO: 1021324 - RNA, 19 nt, Artificial Sequence
  Description of Artificial Sequence: Synthetic oligonucleotide
cccacguugucccaauaua

SEQ ID NO: 1021325 - RNA, 19 nt, Artificial Sequence
  Description of Artificial Sequence: Synthetic oligonucleotide
gcgguacaccugucgccag

SEQ ID NO: 1021326 - RNA, 19 nt, Artificial Sequence
  Description of Artificial Sequence: Synthetic oligonucleotide
agcggcgccagaacuuguu

SEQ ID NO: 1021327 - RNA, 19 nt, Artificial Sequence
  Description of Artificial Sequence: Synthetic oligonucleotide
ggcgaucguccacgaucag

SEQ ID NO: 1021328 - RNA, 19 nt, Artificial Sequence
  Description of Artificial Sequence: Synthetic oligonucleotide
gcguuggcacagaagucuc

SEQ ID NO: 1021329 - RNA, 19 nt, Artificial Sequence
  Description of Artificial Sequence: Synthetic oligonucleotide
ggcucgugggugcuuauuu

SEQ ID NO: 1021330 - RNA, 19 nt, Artificial Sequence
  Description of Artificial Sequence: Synthetic oligonucleotide
ccauguggcucaggaccgg

SEQ ID NO: 1021331 - RNA, 19 nt, Artificial Sequence
  Description of Artificial Sequence: Synthetic oligonucleotide
ccggagcaugggcaccgcg

SEQ ID NO: 1021332 - RNA, 19 nt, Artificial Sequence
  Description of Artificial Sequence: Synthetic oligonucleotide
guccacuuugagggaccuc

SEQ ID NO: 1021333 - RNA, 19 nt, Artificial Sequence
  Description of Artificial Sequence: Synthetic oligonucleotide
ggcuagcguuggcacagaa

SEQ ID NO: 1021334 - RNA, 19 nt, Artificial Sequence
  Description of Artificial Sequence: Synthetic oligonucleotide
gggcgucauggguggacca

SEQ ID NO: 1021335 - RNA, 19 nt, Artificial Sequence
  Description of Artificial Sequence: Synthetic oligonucleotide
cccguagcggcgccagaac

SEQ ID NO: 1021336 - RNA, 19 nt, Artificial Sequence
  Description of Artificial Sequence: Synthetic oligonucleotide
gggaacccggaaggcgcag

SEQ ID NO: 1021337 - RNA, 19 nt, Artificial Sequence
  Description of Artificial Sequence: Synthetic oligonucleotide
cugcuucgcaucggaacua

SEQ ID NO: 1021338 - RNA, 19 nt, Artificial Sequence
  Description of Artificial Sequence: Synthetic oligonucleotide
gcuggccguccuguuccgg

SEQ ID NO: 1021339 - RNA, 19 nt, Artificial Sequence
  Description of Artificial Sequence: Synthetic oligonucleotide
ccgcccaaccccggggugg

SEQ ID NO: 1021340 - RNA, 19 nt, Artificial Sequence
  Description of Artificial Sequence: Synthetic oligonucleotide
cacgaucaggugguugagu

SEQ ID NO: 1021341 - RNA, 19 nt, Artificial Sequence
  Description of Artificial Sequence: Synthetic oligonucleotide
aggcuagcguuggcacaga

SEQ ID NO: 1021342 - RNA, 19 nt, Artificial Sequence
  Description of Artificial Sequence: Synthetic oligonucleotide
gccguccuguuccgguaac

SEQ ID NO: 1021343 - RNA, 19 nt, Artificial Sequence
  Description of Artificial Sequence: Synthetic oligonucleotide
cuugcugcggaaggcugau

SEQ ID NO: 1021344 - RNA, 19 nt, Artificial Sequence
  Description of Artificial Sequence: Synthetic oligonucleotide
caguugguacaggcuaccu

SEQ ID NO: 1021345 - RNA, 19 nt, Artificial Sequence
  Description of Artificial Sequence: Synthetic oligonucleotide
ggccguccuguuccgguaa

SEQ ID NO: 1021346 - RNA, 19 nt, Artificial Sequence
  Description of Artificial Sequence: Synthetic oligonucleotide
ggucucgguaggggcugcc

SEQ ID NO: 1021347 - RNA, 19 nt, Artificial Sequence
  Description of Artificial Sequence: Synthetic oligonucleotide
ccgcugcugcugcugcugc

SEQ ID NO: 1021348 - RNA, 19 nt, Artificial Sequence
  Description of Artificial Sequence: Synthetic oligonucleotide
ggcgcacgaaggggucccg

SEQ ID NO: 1021349 - RNA, 19 nt, Artificial Sequence
  Description of Artificial Sequence: Synthetic oligonucleotide
gcccacguugucccaauau

SEQ ID NO: 1021350 - RNA, 19 nt, Artificial Sequence
  Description of Artificial Sequence: Synthetic oligonucleotide
gcucaccgaggcgggcagg

SEQ ID NO: 1021351 - RNA, 19 nt, Artificial Sequence
  Description of Artificial Sequence: Synthetic oligonucleotide
cguugucccaauauacaau

SEQ ID NO: 1021352 - RNA, 19 nt, Artificial Sequence
  Description of Artificial Sequence: Synthetic oligonucleotide
cgcugcugcugcugcugcg

SEQ ID NO: 1021353 - RNA, 19 nt, Artificial Sequence
  Description of Artificial Sequence: Synthetic oligonucleotide
agucggcuucguagaguuu

SEQ ID NO: 1021354 - RNA, 19 nt, Artificial Sequence
  Description of Artificial Sequence: Synthetic oligonucleotide
gcacgaacaggaacuuggu

SEQ ID NO: 1021355 - RNA, 19 nt, Artificial Sequence
  Description of Artificial Sequence: Synthetic oligonucleotide
cggcgccagaacuuguuga

SEQ ID NO: 1021356 - RNA, 19 nt, Artificial Sequence
  Description of Artificial Sequence: Synthetic oligonucleotide
cacucgcuuccaguuggua

SEQ ID NO: 1021357 - RNA, 19 nt, Artificial Sequence
  Description of Artificial Sequence: Synthetic oligonucleotide
gcgccagaacuuguugaaa

SEQ ID NO: 1021358 - RNA, 19 nt, Artificial Sequence
  Description of Artificial Sequence: Synthetic oligonucleotide
gacagucguuggguuuaau

SEQ ID NO: 1021359 - RNA, 19 nt, Artificial Sequence
  Description of Artificial Sequence: Synthetic oligonucleotide
gucgggcgccacgcuuuac

SEQ ID NO: 1021360 - RNA, 19 nt, Artificial Sequence
  Description of Artificial Sequence: Synthetic oligonucleotide
gcgcacgaaggggucccgc

SEQ ID NO: 1021361 - RNA, 19 nt, Artificial Sequence
  Description of Artificial Sequence: Synthetic oligonucleotide
ccccgcuauugccgucacc

SEQ ID NO: 1021362 - RNA, 19 nt, Artificial Sequence
  Description of Artificial Sequence: Synthetic oligonucleotide
ggacagucguuggguuuaa

SEQ ID NO: 1021363 - RNA, 19 nt, Artificial Sequence
  Description of Artificial Sequence: Synthetic oligonucleotide
cacggguggcagaggcggu

SEQ ID NO: 1021364 - RNA, 19 nt, Artificial Sequence
  Description of Artificial Sequence: Synthetic oligonucleotide
ccguagcggcgccagaacu

SEQ ID NO: 1021365 - RNA, 19 nt, Artificial Sequence
  Description of Artificial Sequence: Synthetic oligonucleotide
gcgucauggguggaccagu

SEQ ID NO: 1021366 - RNA, 19 nt, Artificial Sequence
  Description of Artificial Sequence: Synthetic oligonucleotide
gccccgcuauugccgucac

SEQ ID NO: 1021367 - RNA, 19 nt, Artificial Sequence
  Description of Artificial Sequence: Synthetic oligonucleotide
ccuugagaccagcgcugaa

SEQ ID NO: 1021368 - RNA, 19 nt, Artificial Sequence
  Description of Artificial Sequence: Synthetic oligonucleotide
gcuggggagcucagucucu

SEQ ID NO: 1021369 - RNA, 19 nt, Artificial Sequence
  Description of Artificial Sequence: Synthetic oligonucleotide
gccggagcaugggcaccgc

SEQ ID NO: 1021370 - RNA, 19 nt, Artificial Sequence
  Description of Artificial Sequence: Synthetic oligonucleotide
ccguggucuccaguaggga

SEQ ID NO: 1021371 - RNA, 19 nt, Artificial Sequence
  Description of Artificial Sequence: Synthetic oligonucleotide
ccacgaagucauagucuau

SEQ ID NO: 1021372 - RNA, 19 nt, Artificial Sequence
  Description of Artificial Sequence: Synthetic oligonucleotide
cguagcggcgccagaacuu

SEQ ID NO: 1021373 - RNA, 19 nt, Artificial Sequence
  Description of Artificial Sequence: Synthetic oligonucleotide
gccgaggcuuggucaugcu

SEQ ID NO: 1021374 - RNA, 19 nt, Artificial Sequence
  Description of Artificial Sequence: Synthetic oligonucleotide
ccacaccuggccccucacu

SEQ ID NO: 1021375 - RNA, 19 nt, Artificial Sequence
  Description of Artificial Sequence: Synthetic oligonucleotide
aggcuaccuugggcacgua

SEQ ID NO: 1021376 - RNA, 19 nt, Artificial Sequence
  Description of Artificial Sequence: Synthetic oligonucleotide
gcgccccgcuauugccguc

SEQ ID NO: 1021377 - RNA, 19 nt, Artificial Sequence
  Description of Artificial Sequence: Synthetic oligonucleotide
cgccccgcuauugccguca

SEQ ID NO: 1021378 - RNA, 19 nt, Artificial Sequence
  Description of Artificial Sequence: Synthetic oligonucleotide
ggggcucgugggugcuuau

SEQ ID NO: 1021379 - RNA, 19 nt, Artificial Sequence
  Description of Artificial Sequence: Synthetic oligonucleotide
gggcucgugggugcuuauu

SEQ ID NO: 1021380 - RNA, 19 nt, Artificial Sequence
  Description of Artificial Sequence: Synthetic oligonucleotide
cccgcacgaacaggaacuu

SEQ ID NO: 1021381 - RNA, 19 nt, Artificial Sequence
  Description of Artificial Sequence: Synthetic oligonucleotide
cggcuucguagaguuuaua

SEQ ID NO: 1021382 - RNA, 19 nt, Artificial Sequence
  Description of Artificial Sequence: Synthetic oligonucleotide
cguccacgaucaggugguu

SEQ ID NO: 1021383 - RNA, 19 nt, Artificial Sequence
  Description of Artificial Sequence: Synthetic oligonucleotide
aauaaagacauuugaacag

SEQ ID NO: 1021384 - RNA, 19 nt, Artificial Sequence
  Description of Artificial Sequence: Synthetic oligonucleotide
ucuuauauaaagaagagau

SEQ ID NO: 1021385 - RNA, 19 nt, Artificial Sequence
  Description of Artificial Sequence: Synthetic oligonucleotide
ugacuuaaaguuuagaaag

SEQ ID NO: 1021386 - RNA, 19 nt, Artificial Sequence
  Description of Artificial Sequence: Synthetic oligonucleotide
uuauaacacggcaagaggg

SEQ ID NO: 1021387 - RNA, 19 nt, Artificial Sequence
  Description of Artificial Sequence: Synthetic oligonucleotide
aggauuaacacuaugacac

SEQ ID NO: 1021388 - RNA, 19 nt, Artificial Sequence
  Description of Artificial Sequence: Synthetic oligonucleotide
aauaguguccuuucuuuac

SEQ ID NO: 1021389 - RNA, 19 nt, Artificial Sequence
  Description of Artificial Sequence: Synthetic oligonucleotide
guugcaaacggucaaaggg

SEQ ID NO: 1021390 - RNA, 19 nt, Artificial Sequence
  Description of Artificial Sequence: Synthetic oligonucleotide
uauuaugacacauaugcac

SEQ ID NO: 1021391 - RNA, 19 nt, Artificial Sequence
  Description of Artificial Sequence: Synthetic oligonucleotide
gauguuauaacacggcaag

SEQ ID NO: 1021392 - RNA, 19 nt, Artificial Sequence
  Description of Artificial Sequence: Synthetic oligonucleotide
aagagauauuuucauaugu

SEQ ID NO: 1021393 - RNA, 19 nt, Artificial Sequence
  Description of Artificial Sequence: Synthetic oligonucleotide
ugaguauguagccaaagug

SEQ ID NO: 1021394 - RNA, 19 nt, Artificial Sequence
  Description of Artificial Sequence: Synthetic oligonucleotide
auaggaaagaagcaaucgg

SEQ ID NO: 1021395 - RNA, 19 nt, Artificial Sequence
  Description of Artificial Sequence: Synthetic oligonucleotide
aaucgucauauuaugacac

SEQ ID NO: 1021396 - RNA, 19 nt, Artificial Sequence
  Description of Artificial Sequence: Synthetic oligonucleotide
uuucauauguaauaguguc

SEQ ID NO: 1021397 - RNA, 19 nt, Artificial Sequence
  Description of Artificial Sequence: Synthetic oligonucleotide
aaucggacaauuucuaagu

SEQ ID NO: 1021398 - RNA, 19 nt, Artificial Sequence
  Description of Artificial Sequence: Synthetic oligonucleotide
acgauguugagccaucccc

SEQ ID NO: 1021399 - RNA, 19 nt, Artificial Sequence
  Description of Artificial Sequence: Synthetic oligonucleotide
uagccaaaacaucauaucc

SEQ ID NO: 1021400 - RNA, 19 nt, Artificial Sequence
  Description of Artificial Sequence: Synthetic oligonucleotide
gaaaucgucauauuaugac

SEQ ID NO: 1021401 - RNA, 19 nt, Artificial Sequence
  Description of Artificial Sequence: Synthetic oligonucleotide
ucucuuauauaaagaagag

SEQ ID NO: 1021402 - RNA, 19 nt, Artificial Sequence
  Description of Artificial Sequence: Synthetic oligonucleotide
aaggauuaacacuaugaca

SEQ ID NO: 1021403 - RNA, 19 nt, Artificial Sequence
  Description of Artificial Sequence: Synthetic oligonucleotide
aauggugacaauuuccaaa

SEQ ID NO: 1021404 - RNA, 19 nt, Artificial Sequence
  Description of Artificial Sequence: Synthetic oligonucleotide
ugacaauuuccaaauuggg

SEQ ID NO: 1021405 - RNA, 19 nt, Artificial Sequence
  Description of Artificial Sequence: Synthetic oligonucleotide
cuguaggucguuuaaauag

SEQ ID NO: 1021406 - RNA, 19 nt, Artificial Sequence
  Description of Artificial Sequence: Synthetic oligonucleotide
accaguaguccucagggcc

SEQ ID NO: 1021407 - RNA, 19 nt, Artificial Sequence
  Description of Artificial Sequence: Synthetic oligonucleotide
aagucuccgagcuucuggc

SEQ ID NO: 1021408 - RNA, 19 nt, Artificial Sequence
  Description of Artificial Sequence: Synthetic oligonucleotide
uuaacacuaugacacacug

SEQ ID NO: 1021409 - RNA, 19 nt, Artificial Sequence
  Description of Artificial Sequence: Synthetic oligonucleotide
aaacauaucacuguaggaa

SEQ ID NO: 1021410 - RNA, 19 nt, Artificial Sequence
  Description of Artificial Sequence: Synthetic oligonucleotide
acuuggauguuauaacacg

SEQ ID NO: 1021411 - RNA, 19 nt, Artificial Sequence
  Description of Artificial Sequence: Synthetic oligonucleotide
uguuauaacacggcaagag

SEQ ID NO: 1021412 - RNA, 19 nt, Artificial Sequence
  Description of Artificial Sequence: Synthetic oligonucleotide
uuuacagaaaucgucauau

SEQ ID NO: 1021413 - RNA, 19 nt, Artificial Sequence
  Description of Artificial Sequence: Synthetic oligonucleotide
uccauaaguucacuguggg

SEQ ID NO: 1021414 - RNA, 19 nt, Artificial Sequence
  Description of Artificial Sequence: Synthetic oligonucleotide
guuauaacacggcaagagg

SEQ ID NO: 1021415 - RNA, 19 nt, Artificial Sequence
  Description of Artificial Sequence: Synthetic oligonucleotide
agugcgacccuguaggucg

SEQ ID NO: 1021416 - RNA, 19 nt, Artificial Sequence
  Description of Artificial Sequence: Synthetic oligonucleotide
uucauauguaauagugucc

SEQ ID NO: 1021417 - RNA, 19 nt, Artificial Sequence
  Description of Artificial Sequence: Synthetic oligonucleotide
ugccauagaacucccaacc

SEQ ID NO: 1021418 - RNA, 19 nt, Artificial Sequence
  Description of Artificial Sequence: Synthetic oligonucleotide
aguggagcccaguagaguc

SEQ ID NO: 1021419 - RNA, 19 nt, Artificial Sequence
  Description of Artificial Sequence: Synthetic oligonucleotide
aguauaagaccacuuccuc

SEQ ID NO: 1021420 - RNA, 19 nt, Artificial Sequence
  Description of Artificial Sequence: Synthetic oligonucleotide
aagugcuugguuuugcaca

SEQ ID NO: 1021421 - RNA, 19 nt, Artificial Sequence
  Description of Artificial Sequence: Synthetic oligonucleotide
aucggcgccauauucaagg

SEQ ID NO: 1021422 - RNA, 19 nt, Artificial Sequence
  Description of Artificial Sequence: Synthetic oligonucleotide
acaagcuucaugcagugca

SEQ ID NO: 1021423 - RNA, 19 nt, Artificial Sequence
  Description of Artificial Sequence: Synthetic oligonucleotide
cauaaguucacuguggguc

SEQ ID NO: 1021424 - RNA, 19 nt, Artificial Sequence
  Description of Artificial Sequence: Synthetic oligonucleotide
ucuccaggcaguauaagac

SEQ ID NO: 1021425 - RNA, 19 nt, Artificial Sequence
  Description of Artificial Sequence: Synthetic oligonucleotide
uauaagaccacuuccucau

SEQ ID NO: 1021426 - RNA, 19 nt, Artificial Sequence
  Description of Artificial Sequence: Synthetic oligonucleotide
uauaacacggcaagaggga

SEQ ID NO: 1021427 - RNA, 19 nt, Artificial Sequence
  Description of Artificial Sequence: Synthetic oligonucleotide
uucuaccugaguauguagc

SEQ ID NO: 1021428 - RNA, 19 nt, Artificial Sequence
  Description of Artificial Sequence: Synthetic oligonucleotide
ucuccauaaguucacugug

SEQ ID NO: 1021429 - RNA, 19 nt, Artificial Sequence
  Description of Artificial Sequence: Synthetic oligonucleotide
auauaaagaagagauauuu

SEQ ID NO: 1021430 - RNA, 19 nt, Artificial Sequence
  Description of Artificial Sequence: Synthetic oligonucleotide
ugcguugucacgaugguuc

SEQ ID NO: 1021431 - RNA, 19 nt, Artificial Sequence
  Description of Artificial Sequence: Synthetic oligonucleotide
guuucguggccccugagcg

SEQ ID NO: 1021432 - RNA, 19 nt, Artificial Sequence
  Description of Artificial Sequence: Synthetic oligonucleotide
cucagugcgacccuguagg

SEQ ID NO: 1021433 - RNA, 19 nt, Artificial Sequence
  Description of Artificial Sequence: Synthetic oligonucleotide
aggucguuuaaauagucug

SEQ ID NO: 1021434 - RNA, 19 nt, Artificial Sequence
  Description of Artificial Sequence: Synthetic oligonucleotide
uugagcacaucugagagca

SEQ ID NO: 1021435 - RNA, 19 nt, Artificial Sequence
  Description of Artificial Sequence: Synthetic oligonucleotide
gagaacuugagcguggcag

SEQ ID NO: 1021436 - RNA, 19 nt, Artificial Sequence
  Description of Artificial Sequence: Synthetic oligonucleotide
gaagagauauuuucauaug

SEQ ID NO: 1021437 - RNA, 19 nt, Artificial Sequence
  Description of Artificial Sequence: Synthetic oligonucleotide
aauugcagcggaauauccg

SEQ ID NO: 1021438 - RNA, 19 nt, Artificial Sequence
  Description of Artificial Sequence: Synthetic oligonucleotide
caaggauuaacacuaugac

SEQ ID NO: 1021439 - RNA, 19 nt, Artificial Sequence
  Description of Artificial Sequence: Synthetic oligonucleotide
ucuaccugaguauguagcc

SEQ ID NO: 1021440 - RNA, 19 nt, Artificial Sequence
  Description of Artificial Sequence: Synthetic oligonucleotide
cauaggaaagaagcaaucg

SEQ ID NO: 1021441 - RNA, 19 nt, Artificial Sequence
  Description of Artificial Sequence: Synthetic oligonucleotide
aguauguagccaaaguggg

SEQ ID NO: 1021442 - RNA, 19 nt, Artificial Sequence
  Description of Artificial Sequence: Synthetic oligonucleotide
uggauguuauaacacggca

SEQ ID NO: 1021443 - RNA, 19 nt, Artificial Sequence
  Description of Artificial Sequence: Synthetic oligonucleotide
aauuguugcaaacggucaa

SEQ ID NO: 1021444 - RNA, 19 nt, Artificial Sequence
  Description of Artificial Sequence: Synthetic oligonucleotide
ugcacaguaaccugcguug

SEQ ID NO: 1021445 - RNA, 19 nt, Artificial Sequence
  Description of Artificial Sequence: Synthetic oligonucleotide
uugcauugguggaugaaag

SEQ ID NO: 1021446 - RNA, 19 nt, Artificial Sequence
  Description of Artificial Sequence: Synthetic oligonucleotide
ucauauuaugacacauaug

SEQ ID NO: 1021447 - RNA, 19 nt, Artificial Sequence
  Description of Artificial Sequence: Synthetic oligonucleotide
uuggauguuauaacacggc

SEQ ID NO: 1021448 - RNA, 19 nt, Artificial Sequence
  Description of Artificial Sequence: Synthetic oligonucleotide
uauaaagaagagauauuuu

SEQ ID NO: 1021449 - RNA, 19 nt, Artificial Sequence
  Description of Artificial Sequence: Synthetic oligonucleotide
aaaacugacuuaaaguuua

SEQ ID NO: 1021450 - RNA, 19 nt, Artificial Sequence
  Description of Artificial Sequence: Synthetic oligonucleotide
uguugcaaacggucaaagg

SEQ ID NO: 1021451 - RNA, 19 nt, Artificial Sequence
  Description of Artificial Sequence: Synthetic oligonucleotide
gucgguaaaacucugcuuc

SEQ ID NO: 1021452 - RNA, 19 nt, Artificial Sequence
  Description of Artificial Sequence: Synthetic oligonucleotide
uaugcacaaggauuaacac

SEQ ID NO: 1021453 - RNA, 19 nt, Artificial Sequence
  Description of Artificial Sequence: Synthetic oligonucleotide
agaccugucgguaaaacuc

SEQ ID NO: 1021454 - RNA, 19 nt, Artificial Sequence
  Description of Artificial Sequence: Synthetic oligonucleotide
gagagcagaagccaguuuc

SEQ ID NO: 1021455 - RNA, 19 nt, Artificial Sequence
  Description of Artificial Sequence: Synthetic oligonucleotide
uguaggucguuuaaauagu

SEQ ID NO: 1021456 - RNA, 19 nt, Artificial Sequence
  Description of Artificial Sequence: Synthetic oligonucleotide
ucaucugguucacacacac

SEQ ID NO: 1021457 - RNA, 19 nt, Artificial Sequence
  Description of Artificial Sequence: Synthetic oligonucleotide
uaauugcagcggaauaucc

SEQ ID NO: 1021458 - RNA, 19 nt, Artificial Sequence
  Description of Artificial Sequence: Synthetic oligonucleotide
uugccacuugcauuggugg

SEQ ID NO: 1021459 - RNA, 19 nt, Artificial Sequence
  Description of Artificial Sequence: Synthetic oligonucleotide
uuagccaaaacaucauauc

SEQ ID NO: 1021460 - RNA, 19 nt, Artificial Sequence
  Description of Artificial Sequence: Synthetic oligonucleotide
auauucaaggagguggcgg

SEQ ID NO: 1021461 - RNA, 19 nt, Artificial Sequence
  Description of Artificial Sequence: Synthetic oligonucleotide
ucguagucuguacugggag

SEQ ID NO: 1021462 - RNA, 19 nt, Artificial Sequence
  Description of Artificial Sequence: Synthetic oligonucleotide
gauuugagggacucuucag

SEQ ID NO: 1021463 - RNA, 19 nt, Artificial Sequence
  Description of Artificial Sequence: Synthetic oligonucleotide
ggugacaauuuccaaauug

SEQ ID NO: 1021464 - RNA, 19 nt, Artificial Sequence
  Description of Artificial Sequence: Synthetic oligonucleotide
aagaagagauauuuucaua

SEQ ID NO: 1021465 - RNA, 19 nt, Artificial Sequence
  Description of Artificial Sequence: Synthetic oligonucleotide
uauucaaggagguggcgga

SEQ ID NO: 1021466 - RNA, 19 nt, Artificial Sequence
  Description of Artificial Sequence: Synthetic oligonucleotide
cagaaaucgucauauuaug

SEQ ID NO: 1021467 - RNA, 19 nt, Artificial Sequence
  Description of Artificial Sequence: Synthetic oligonucleotide
ugacaauaagucuccgagc

SEQ ID NO: 1021468 - RNA, 19 nt, Artificial Sequence
  Description of Artificial Sequence: Synthetic oligonucleotide
caugcagugcacaguaacc

SEQ ID NO: 1021469 - RNA, 19 nt, Artificial Sequence
  Description of Artificial Sequence: Synthetic oligonucleotide
cugcaguuaacaucggcgc

SEQ ID NO: 1021470 - RNA, 19 nt, Artificial Sequence
  Description of Artificial Sequence: Synthetic oligonucleotide
acaauucguagucuguacu

SEQ ID NO: 1021471 - RNA, 19 nt, Artificial Sequence
  Description of Artificial Sequence: Synthetic oligonucleotide
uguugagccauccccuggc

SEQ ID NO: 1021472 - RNA, 19 nt, Artificial Sequence
  Description of Artificial Sequence: Synthetic oligonucleotide
uggcacaagcuucaugcag

SEQ ID NO: 1021473 - RNA, 19 nt, Artificial Sequence
  Description of Artificial Sequence: Synthetic oligonucleotide
auuggugaauuccaccaga

SEQ ID NO: 1021474 - RNA, 19 nt, Artificial Sequence
  Description of Artificial Sequence: Synthetic oligonucleotide
ugcaguuaacaucggcgcc

SEQ ID NO: 1021475 - RNA, 19 nt, Artificial Sequence
  Description of Artificial Sequence: Synthetic oligonucleotide
uugggauaauugcagcgga

SEQ ID NO: 1021476 - RNA, 19 nt, Artificial Sequence
  Description of Artificial Sequence: Synthetic oligonucleotide
aagcaaucggacaauuucu

SEQ ID NO: 1021477 - RNA, 19 nt, Artificial Sequence
  Description of Artificial Sequence: Synthetic oligonucleotide
ugcaaacggucaaagggcu

SEQ ID NO: 1021478 - RNA, 19 nt, Artificial Sequence
  Description of Artificial Sequence: Synthetic oligonucleotide
cauuuucaaccucuugagc

SEQ ID NO: 1021479 - RNA, 19 nt, Artificial Sequence
  Description of Artificial Sequence: Synthetic oligonucleotide
gacaauucguagucuguac

SEQ ID NO: 1021480 - RNA, 19 nt, Artificial Sequence
  Description of Artificial Sequence: Synthetic oligonucleotide
gguguauuucugcagcggg

SEQ ID NO: 1021481 - RNA, 19 nt, Artificial Sequence
  Description of Artificial Sequence: Synthetic oligonucleotide
cuuggcuggugacaauucg

SEQ ID NO: 1021482 - RNA, 19 nt, Artificial Sequence
  Description of Artificial Sequence: Synthetic oligonucleotide
ucgguguauuucugcagcg

SEQ ID NO: 1021483 - RNA, 19 nt, Artificial Sequence
  Description of Artificial Sequence: Synthetic oligonucleotide
cacuuggauguuauaacac

SEQ ID NO: 1021484 - RNA, 19 nt, Artificial Sequence
  Description of Artificial Sequence: Synthetic oligonucleotide
caauaagucuccgagcuuc

SEQ ID NO: 1021485 - RNA, 19 nt, Artificial Sequence
  Description of Artificial Sequence: Synthetic oligonucleotide
auaguguccuuucuuuaca

SEQ ID NO: 1021486 - RNA, 19 nt, Artificial Sequence
  Description of Artificial Sequence: Synthetic oligonucleotide
agcaugugugcacugaaaa

SEQ ID NO: 1021487 - RNA, 19 nt, Artificial Sequence
  Description of Artificial Sequence: Synthetic oligonucleotide
cacuaugacacacuguaca

SEQ ID NO: 1021488 - RNA, 19 nt, Artificial Sequence
  Description of Artificial Sequence: Synthetic oligonucleotide
ugagccauccccuggcaca

SEQ ID NO: 1021489 - RNA, 19 nt, Artificial Sequence
  Description of Artificial Sequence: Synthetic oligonucleotide
uuguucuccaggcaguaua

SEQ ID NO: 1021490 - RNA, 19 nt, Artificial Sequence
  Description of Artificial Sequence: Synthetic oligonucleotide
gcaguauaagaccacuucc

SEQ ID NO: 1021491 - RNA, 19 nt, Artificial Sequence
  Description of Artificial Sequence: Synthetic oligonucleotide
cacauaguagucuccggug

SEQ ID NO: 1021492 - RNA, 19 nt, Artificial Sequence
  Description of Artificial Sequence: Synthetic oligonucleotide
uaacaucggcgccauauuc

SEQ ID NO: 1021493 - RNA, 19 nt, Artificial Sequence
  Description of Artificial Sequence: Synthetic oligonucleotide
uacaucucucaaagcaugu

SEQ ID NO: 1021494 - RNA, 19 nt, Artificial Sequence
  Description of Artificial Sequence: Synthetic oligonucleotide
uccacauaguagucuccgg

SEQ ID NO: 1021495 - RNA, 19 nt, Artificial Sequence
  Description of Artificial Sequence: Synthetic oligonucleotide
uucguagucuguacuggga

SEQ ID NO: 1021496 - RNA, 19 nt, Artificial Sequence
  Description of Artificial Sequence: Synthetic oligonucleotide
uugcagcggaauauccggg

SEQ ID NO: 1021497 - RNA, 19 nt, Artificial Sequence
  Description of Artificial Sequence: Synthetic oligonucleotide
cuugagcacaucugagagc

SEQ ID NO: 1021498 - RNA, 19 nt, Artificial Sequence
  Description of Artificial Sequence: Synthetic oligonucleotide
aguaaccugcguugucacg

SEQ ID NO: 1021499 - RNA, 19 nt, Artificial Sequence
  Description of Artificial Sequence: Synthetic oligonucleotide
guugucgguguauuucugc

SEQ ID NO: 1021500 - RNA, 19 nt, Artificial Sequence
  Description of Artificial Sequence: Synthetic oligonucleotide
ugagcgacggacacuugga

SEQ ID NO: 1021501 - RNA, 19 nt, Artificial Sequence
  Description of Artificial Sequence: Synthetic oligonucleotide
uuggcuggugacaauucgu

SEQ ID NO: 1021502 - RNA, 19 nt, Artificial Sequence
  Description of Artificial Sequence: Synthetic oligonucleotide
aucggacaauuucuaagug

SEQ ID NO: 1021503 - RNA, 19 nt, Artificial Sequence
  Description of Artificial Sequence: Synthetic oligonucleotide
cuggugacaauucguaguc

SEQ ID NO: 1021504 - RNA, 19 nt, Artificial Sequence
  Description of Artificial Sequence: Synthetic oligonucleotide
aacaucggcgccauauuca

SEQ ID NO: 1021505 - RNA, 19 nt, Artificial Sequence
  Description of Artificial Sequence: Synthetic oligonucleotide
uuguucauugucacuggau

SEQ ID NO: 1021506 - RNA, 19 nt, Artificial Sequence
  Description of Artificial Sequence: Synthetic oligonucleotide
cacauaugcacaaggauua

SEQ ID NO: 1021507 - RNA, 19 nt, Artificial Sequence
  Description of Artificial Sequence: Synthetic oligonucleotide
ugcagugcacaguaaccug

SEQ ID NO: 1021508 - RNA, 19 nt, Artificial Sequence
  Description of Artificial Sequence: Synthetic oligonucleotide
cauggggcgagacugggug

SEQ ID NO: 1021509 - RNA, 19 nt, Artificial Sequence
  Description of Artificial Sequence: Synthetic oligonucleotide
gucauauuaugacacauau

SEQ ID NO: 1021510 - RNA, 19 nt, Artificial Sequence
  Description of Artificial Sequence: Synthetic oligonucleotide
uaguagucuccggugauug

SEQ ID NO: 1021511 - RNA, 19 nt, Artificial Sequence
  Description of Artificial Sequence: Synthetic oligonucleotide
aguagucuccggugauugg

SEQ ID NO: 1021512 - RNA, 19 nt, Artificial Sequence
  Description of Artificial Sequence: Synthetic oligonucleotide
uuggugaauuccaccagau

SEQ ID NO: 1021513 - RNA, 19 nt, Artificial Sequence
  Description of Artificial Sequence: Synthetic oligonucleotide
caaacauaucacuguagga

SEQ ID NO: 1021514 - RNA, 19 nt, Artificial Sequence
  Description of Artificial Sequence: Synthetic oligonucleotide
agaaaucgucauauuauga

SEQ ID NO: 1021515 - RNA, 19 nt, Artificial Sequence
  Description of Artificial Sequence: Synthetic oligonucleotide
auaacacggcaagagggag

SEQ ID NO: 1021516 - RNA, 19 nt, Artificial Sequence
  Description of Artificial Sequence: Synthetic oligonucleotide
agacauuugaacagcuuca

SEQ ID NO: 1021517 - RNA, 19 nt, Artificial Sequence
  Description of Artificial Sequence: Synthetic oligonucleotide
ucuccggugauuggcaagc

SEQ ID NO: 1021518 - RNA, 19 nt, Artificial Sequence
  Description of Artificial Sequence: Synthetic oligonucleotide
ugauuggcaagccccuccu

SEQ ID NO: 1021519 - RNA, 19 nt, Artificial Sequence
  Description of Artificial Sequence: Synthetic oligonucleotide
agccaaaacaucauaucca

SEQ ID NO: 1021520 - RNA, 19 nt, Artificial Sequence
  Description of Artificial Sequence: Synthetic oligonucleotide
cuccacauaguagucuccg

SEQ ID NO: 1021521 - RNA, 19 nt, Artificial Sequence
  Description of Artificial Sequence: Synthetic oligonucleotide
uccgggaggacauuuucaa

SEQ ID NO: 1021522 - RNA, 19 nt, Artificial Sequence
  Description of Artificial Sequence: Synthetic oligonucleotide
agagcagaagccaguuucg

SEQ ID NO: 1021523 - RNA, 19 nt, Artificial Sequence
  Description of Artificial Sequence: Synthetic oligonucleotide
uguugucgguguauuucug

SEQ ID NO: 1021524 - RNA, 19 nt, Artificial Sequence
  Description of Artificial Sequence: Synthetic oligonucleotide
agagaccugucgguaaaac

SEQ ID NO: 1021525 - RNA, 19 nt, Artificial Sequence
  Description of Artificial Sequence: Synthetic oligonucleotide
caauuguugcaaacgguca

SEQ ID NO: 1021526 - RNA, 19 nt, Artificial Sequence
  Description of Artificial Sequence: Synthetic oligonucleotide
cuggcgugcagcuuggguc

SEQ ID NO: 1021527 - RNA, 19 nt, Artificial Sequence
  Description of Artificial Sequence: Synthetic oligonucleotide
guauguagccaaagugggg

SEQ ID NO: 1021528 - RNA, 19 nt, Artificial Sequence
  Description of Artificial Sequence: Synthetic oligonucleotide
aaacugacuuaaaguuuag

SEQ ID NO: 1021529 - RNA, 19 nt, Artificial Sequence
  Description of Artificial Sequence: Synthetic oligonucleotide
aacucccaaccaccacugg

SEQ ID NO: 1021530 - RNA, 19 nt, Artificial Sequence
  Description of Artificial Sequence: Synthetic oligonucleotide
uauccgggaggacauuuuc

SEQ ID NO: 1021531 - RNA, 19 nt, Artificial Sequence
  Description of Artificial Sequence: Synthetic oligonucleotide
gauaauugcagcggaauau

SEQ ID NO: 1021532 - RNA, 19 nt, Artificial Sequence
  Description of Artificial Sequence: Synthetic oligonucleotide
auguagccaaagugggguc

SEQ ID NO: 1021533 - RNA, 19 nt, Artificial Sequence
  Description of Artificial Sequence: Synthetic oligonucleotide
aauauccgggaggacauuu

SEQ ID NO: 1021534 - RNA, 19 nt, Artificial Sequence
  Description of Artificial Sequence: Synthetic oligonucleotide
accugcguugucacgaugg

SEQ ID NO: 1021535 - RNA, 19 nt, Artificial Sequence
  Description of Artificial Sequence: Synthetic oligonucleotide
uaacacggcaagagggagu

SEQ ID NO: 1021536 - RNA, 19 nt, Artificial Sequence
  Description of Artificial Sequence: Synthetic oligonucleotide
ucgguaaaacucugcuucu

SEQ ID NO: 1021537 - RNA, 19 nt, Artificial Sequence
  Description of Artificial Sequence: Synthetic oligonucleotide
aucgucauauuaugacaca

SEQ ID NO: 1021538 - RNA, 19 nt, Artificial Sequence
  Description of Artificial Sequence: Synthetic oligonucleotide
uuaacaucggcgccauauu

SEQ ID NO: 1021539 - RNA, 19 nt, Artificial Sequence
  Description of Artificial Sequence: Synthetic oligonucleotide
agcgacggacacuuggaug

SEQ ID NO: 1021540 - RNA, 19 nt, Artificial Sequence
  Description of Artificial Sequence: Synthetic oligonucleotide
gacgauguugagccauccc

SEQ ID NO: 1021541 - RNA, 19 nt, Artificial Sequence
  Description of Artificial Sequence: Synthetic oligonucleotide
auagccuagccgggcagcc

SEQ ID NO: 1021542 - RNA, 19 nt, Artificial Sequence
  Description of Artificial Sequence: Synthetic oligonucleotide
guagucuccggugauuggc

SEQ ID NO: 1021543 - RNA, 19 nt, Artificial Sequence
  Description of Artificial Sequence: Synthetic oligonucleotide
acucccaaccaccacugga

SEQ ID NO: 1021544 - RNA, 19 nt, Artificial Sequence
  Description of Artificial Sequence: Synthetic oligonucleotide
agagauauuuucauaugua

SEQ ID NO: 1021545 - RNA, 19 nt, Artificial Sequence
  Description of Artificial Sequence: Synthetic oligonucleotide
guaaccugcguugucacga

SEQ ID NO: 1021546 - RNA, 19 nt, Artificial Sequence
  Description of Artificial Sequence: Synthetic oligonucleotide
uccggugauuggcaagccc

SEQ ID NO: 1021547 - RNA, 19 nt, Artificial Sequence
  Description of Artificial Sequence: Synthetic oligonucleotide
ucgucauauuaugacacau

SEQ ID NO: 1021548 - RNA, 19 nt, Artificial Sequence
  Description of Artificial Sequence: Synthetic oligonucleotide
uagucuccggugauuggca

SEQ ID NO: 1021549 - RNA, 19 nt, Artificial Sequence
  Description of Artificial Sequence: Synthetic oligonucleotide
ugcagcggaauauccggga

SEQ ID NO: 1021550 - RNA, 19 nt, Artificial Sequence
  Description of Artificial Sequence: Synthetic oligonucleotide
cucuuauauaaagaagaga

SEQ ID NO: 1021551 - RNA, 19 nt, Artificial Sequence
  Description of Artificial Sequence: Synthetic oligonucleotide
ggaguguucagaaaacuca

SEQ ID NO: 1021552 - RNA, 19 nt, Artificial Sequence
  Description of Artificial Sequence: Synthetic oligonucleotide
aacggucaaagggcuuugg

SEQ ID NO: 1021553 - RNA, 19 nt, Artificial Sequence
  Description of Artificial Sequence: Synthetic oligonucleotide
caagcuucaugcagugcac

SEQ ID NO: 1021554 - RNA, 19 nt, Artificial Sequence
  Description of Artificial Sequence: Synthetic oligonucleotide
gaugguucuaccugaguau

SEQ ID NO: 1021555 - RNA, 19 nt, Artificial Sequence
  Description of Artificial Sequence: Synthetic oligonucleotide
ugacaauucguagucugua

SEQ ID NO: 1021556 - RNA, 19 nt, Artificial Sequence
  Description of Artificial Sequence: Synthetic oligonucleotide
augguucuaccugaguaug

SEQ ID NO: 1021557 - RNA, 19 nt, Artificial Sequence
  Description of Artificial Sequence: Synthetic oligonucleotide
aauaagucuccgagcuucu

SEQ ID NO: 1021558 - RNA, 19 nt, Artificial Sequence
  Description of Artificial Sequence: Synthetic oligonucleotide
cuaaguggucauucuccac

SEQ ID NO: 1021559 - RNA, 19 nt, Artificial Sequence
  Description of Artificial Sequence: Synthetic oligonucleotide
ugguucuaccugaguaugu

SEQ ID NO: 1021560 - RNA, 19 nt, Artificial Sequence
  Description of Artificial Sequence: Synthetic oligonucleotide
agucuccgagcuucuggcg

SEQ ID NO: 1021561 - RNA, 19 nt, Artificial Sequence
  Description of Artificial Sequence: Synthetic oligonucleotide
uggcuggugacaauucgua

SEQ ID NO: 1021562 - RNA, 19 nt, Artificial Sequence
  Description of Artificial Sequence: Synthetic oligonucleotide
cagcggaauauccgggagg

SEQ ID NO: 1021563 - RNA, 19 nt, Artificial Sequence
  Description of Artificial Sequence: Synthetic oligonucleotide
ucuccgagcuucuggcggc

SEQ ID NO: 1021564 - RNA, 19 nt, Artificial Sequence
  Description of Artificial Sequence: Synthetic oligonucleotide
ugggauaauugcagcggaa

SEQ ID NO: 1021565 - RNA, 19 nt, Artificial Sequence
  Description of Artificial Sequence: Synthetic oligonucleotide
agccucuguugccuuuggc

SEQ ID NO: 1021566 - RNA, 19 nt, Artificial Sequence
  Description of Artificial Sequence: Synthetic oligonucleotide
uggugaauuccaccagauc

SEQ ID NO: 1021567 - RNA, 19 nt, Artificial Sequence
  Description of Artificial Sequence: Synthetic oligonucleotide
ucuugcuuggcuggugaca

SEQ ID NO: 1021568 - RNA, 19 nt, Artificial Sequence
  Description of Artificial Sequence: Synthetic oligonucleotide
gucacuaggguggagccac

SEQ ID NO: 1021569 - RNA, 19 nt, Artificial Sequence
  Description of Artificial Sequence: Synthetic oligonucleotide
agcggaauauccgggagga

SEQ ID NO: 1021570 - RNA, 19 nt, Artificial Sequence
  Description of Artificial Sequence: Synthetic oligonucleotide
acacuaugacacacuguac

SEQ ID NO: 1021571 - RNA, 19 nt, Artificial Sequence
  Description of Artificial Sequence: Synthetic oligonucleotide
gcaauuguugcaaacgguc

SEQ ID NO: 1021572 - RNA, 19 nt, Artificial Sequence
  Description of Artificial Sequence: Synthetic oligonucleotide
agcucauuggugaauucca

SEQ ID NO: 1021573 - RNA, 19 nt, Artificial Sequence
  Description of Artificial Sequence: Synthetic oligonucleotide
ugcagagaccugucgguaa

SEQ ID NO: 1021574 - RNA, 19 nt, Artificial Sequence
  Description of Artificial Sequence: Synthetic oligonucleotide
aaacggucaaagggcuuug

SEQ ID NO: 1021575 - RNA, 19 nt, Artificial Sequence
  Description of Artificial Sequence: Synthetic oligonucleotide
acaucggcgccauauucaa

SEQ ID NO: 1021576 - RNA, 19 nt, Artificial Sequence
  Description of Artificial Sequence: Synthetic oligonucleotide
cuggguggucucuugagga

SEQ ID NO: 1021577 - RNA, 19 nt, Artificial Sequence
  Description of Artificial Sequence: Synthetic oligonucleotide
ggauuugagggacucuuca

SEQ ID NO: 1021578 - RNA, 19 nt, Artificial Sequence
  Description of Artificial Sequence: Synthetic oligonucleotide
cuaggguggagccacucca

SEQ ID NO: 1021579 - RNA, 19 nt, Artificial Sequence
  Description of Artificial Sequence: Synthetic oligonucleotide
gagacuugcagagaccugu

SEQ ID NO: 1021580 - RNA, 19 nt, Artificial Sequence
  Description of Artificial Sequence: Synthetic oligonucleotide
caauuuccaaauugggaua

SEQ ID NO: 1021581 - RNA, 19 nt, Artificial Sequence
  Description of Artificial Sequence: Synthetic oligonucleotide
caguauaagaccacuuccu

SEQ ID NO: 1021582 - RNA, 19 nt, Artificial Sequence
  Description of Artificial Sequence: Synthetic oligonucleotide
ccggugauuggcaagcccc

SEQ ID NO: 1021583 - RNA, 19 nt, Artificial Sequence
  Description of Artificial Sequence: Synthetic oligonucleotide
guuaacaucggcgccauau

SEQ ID NO: 1021584 - RNA, 19 nt, Artificial Sequence
  Description of Artificial Sequence: Synthetic oligonucleotide
gagacuggguggucucuug

SEQ ID NO: 1021585 - RNA, 19 nt, Artificial Sequence
  Description of Artificial Sequence: Synthetic oligonucleotide
auggggcgagacugggugg

SEQ ID NO: 1021586 - RNA, 19 nt, Artificial Sequence
  Description of Artificial Sequence: Synthetic oligonucleotide
uuucguggccccugagcga

SEQ ID NO: 1021587 - RNA, 19 nt, Artificial Sequence
  Description of Artificial Sequence: Synthetic oligonucleotide
uucaaccucuugagcacau

SEQ ID NO: 1021588 - RNA, 19 nt, Artificial Sequence
  Description of Artificial Sequence: Synthetic oligonucleotide
caguaaccugcguugucac

SEQ ID NO: 1021589 - RNA, 19 nt, Artificial Sequence
  Description of Artificial Sequence: Synthetic oligonucleotide
aaccugcguugucacgaug

SEQ ID NO: 1021590 - RNA, 19 nt, Artificial Sequence
  Description of Artificial Sequence: Synthetic oligonucleotide
aacuugagcguggcagcug

SEQ ID NO: 1021591 - RNA, 19 nt, Artificial Sequence
  Description of Artificial Sequence: Synthetic oligonucleotide
ccccgugucacuagggugg

SEQ ID NO: 1021592 - RNA, 19 nt, Artificial Sequence
  Description of Artificial Sequence: Synthetic oligonucleotide
guuagccaaaacaucauau

SEQ ID NO: 1021593 - RNA, 19 nt, Artificial Sequence
  Description of Artificial Sequence: Synthetic oligonucleotide
cuugcauugguggaugaaa

SEQ ID NO: 1021594 - RNA, 19 nt, Artificial Sequence
  Description of Artificial Sequence: Synthetic oligonucleotide
cuucaugggcggagagccg

SEQ ID NO: 1021595 - RNA, 19 nt, Artificial Sequence
  Description of Artificial Sequence: Synthetic oligonucleotide
uccuugcuuucagaguuga

SEQ ID NO: 1021596 - RNA, 19 nt, Artificial Sequence
  Description of Artificial Sequence: Synthetic oligonucleotide
ugggcacugcaguuaacau

SEQ ID NO: 1021597 - RNA, 19 nt, Artificial Sequence
  Description of Artificial Sequence: Synthetic oligonucleotide
auguuauaacacggcaaga

SEQ ID NO: 1021598 - RNA, 19 nt, Artificial Sequence
  Description of Artificial Sequence: Synthetic oligonucleotide
uugagcguggcagcugugu

SEQ ID NO: 1021599 - RNA, 19 nt, Artificial Sequence
  Description of Artificial Sequence: Synthetic oligonucleotide
gagaccugucgguaaaacu

SEQ ID NO: 1021600 - RNA, 19 nt, Artificial Sequence
  Description of Artificial Sequence: Synthetic oligonucleotide
ccugguuccauccugggca

SEQ ID NO: 1021601 - RNA, 19 nt, Artificial Sequence
  Description of Artificial Sequence: Synthetic oligonucleotide
guaggucguuuaaauaguc

SEQ ID NO: 1021602 - RNA, 19 nt, Artificial Sequence
  Description of Artificial Sequence: Synthetic oligonucleotide
agacuggguggucucuuga

SEQ ID NO: 1021603 - RNA, 19 nt, Artificial Sequence
  Description of Artificial Sequence: Synthetic oligonucleotide
ucagugcgacccuguaggu

SEQ ID NO: 1021604 - RNA, 19 nt, Artificial Sequence
  Description of Artificial Sequence: Synthetic oligonucleotide
ucggcgccauauucaagga

SEQ ID NO: 1021605 - RNA, 19 nt, Artificial Sequence
  Description of Artificial Sequence: Synthetic oligonucleotide
ggcuggugacaauucguag

SEQ ID NO: 1021606 - RNA, 19 nt, Artificial Sequence
  Description of Artificial Sequence: Synthetic oligonucleotide
gagaacacaggcaagccuu

SEQ ID NO: 1021607 - RNA, 19 nt, Artificial Sequence
  Description of Artificial Sequence: Synthetic oligonucleotide
ugucacuaggguggagcca

SEQ ID NO: 1021608 - RNA, 19 nt, Artificial Sequence
  Description of Artificial Sequence: Synthetic oligonucleotide
gagggucucgccagcauuc

SEQ ID NO: 1021609 - RNA, 19 nt, Artificial Sequence
  Description of Artificial Sequence: Synthetic oligonucleotide
cugguuccauccugggcac

SEQ ID NO: 1021610 - RNA, 19 nt, Artificial Sequence
  Description of Artificial Sequence: Synthetic oligonucleotide
ccagcauucuuguugacaa

SEQ ID NO: 1021611 - RNA, 19 nt, Artificial Sequence
  Description of Artificial Sequence: Synthetic oligonucleotide
uggcaagccccuccuggac

SEQ ID NO: 1021612 - RNA, 19 nt, Artificial Sequence
  Description of Artificial Sequence: Synthetic oligonucleotide
agugcacaguaaccugcgu

SEQ ID NO: 1021613 - RNA, 19 nt, Artificial Sequence
  Description of Artificial Sequence: Synthetic oligonucleotide
agacuugcagagaccuguc

SEQ ID NO: 1021614 - RNA, 19 nt, Artificial Sequence
  Description of Artificial Sequence: Synthetic oligonucleotide
cauagccuagccgggcagc

SEQ ID NO: 1021615 - RNA, 19 nt, Artificial Sequence
  Description of Artificial Sequence: Synthetic oligonucleotide
cuugcuuggcuggugacaa

SEQ ID NO: 1021616 - RNA, 19 nt, Artificial Sequence
  Description of Artificial Sequence: Synthetic oligonucleotide
ucuggcggcauggggcgag

SEQ ID NO: 1021617 - RNA, 19 nt, Artificial Sequence
  Description of Artificial Sequence: Synthetic oligonucleotide
cugaguauguagccaaagu

SEQ ID NO: 1021618 - RNA, 19 nt, Artificial Sequence
  Description of Artificial Sequence: Synthetic oligonucleotide
uggugacaauuuccaaauu

SEQ ID NO: 1021619 - RNA, 19 nt, Artificial Sequence
  Description of Artificial Sequence: Synthetic oligonucleotide
ggauguuauaacacggcaa

SEQ ID NO: 1021620 - RNA, 19 nt, Artificial Sequence
  Description of Artificial Sequence: Synthetic oligonucleotide
gacccuguaggucguuuaa

SEQ ID NO: 1021621 - RNA, 19 nt, Artificial Sequence
  Description of Artificial Sequence: Synthetic oligonucleotide
ggauaauugcagcggaaua

SEQ ID NO: 1021622 - RNA, 19 nt, Artificial Sequence
  Description of Artificial Sequence: Synthetic oligonucleotide
agguaucaagugcuugguu

SEQ ID NO: 1021623 - RNA, 19 nt, Artificial Sequence
  Description of Artificial Sequence: Synthetic oligonucleotide
auaagucuccgagcuucug

SEQ ID NO: 1021624 - RNA, 19 nt, Artificial Sequence
  Description of Artificial Sequence: Synthetic oligonucleotide
ucaugggcggagagccgga

SEQ ID NO: 1021625 - RNA, 19 nt, Artificial Sequence
  Description of Artificial Sequence: Synthetic oligonucleotide
uaaccugcguugucacgau

SEQ ID NO: 1021626 - RNA, 19 nt, Artificial Sequence
  Description of Artificial Sequence: Synthetic oligonucleotide
gcagcggaauauccgggag

SEQ ID NO: 1021627 - RNA, 19 nt, Artificial Sequence
  Description of Artificial Sequence: Synthetic oligonucleotide
cuaccugaguauguagcca

SEQ ID NO: 1021628 - RNA, 19 nt, Artificial Sequence
  Description of Artificial Sequence: Synthetic oligonucleotide
agcaaucggacaauuucua

SEQ ID NO: 1021629 - RNA, 19 nt, Artificial Sequence
  Description of Artificial Sequence: Synthetic oligonucleotide
gggaguguucagaaaacuc

SEQ ID NO: 1021630 - RNA, 19 nt, Artificial Sequence
  Description of Artificial Sequence: Synthetic oligonucleotide
gcugccauagaacucccaa

SEQ ID NO: 1021631 - RNA, 19 nt, Artificial Sequence
  Description of Artificial Sequence: Synthetic oligonucleotide
aggccugguuccauccugg

SEQ ID NO: 1021632 - RNA, 19 nt, Artificial Sequence
  Description of Artificial Sequence: Synthetic oligonucleotide
caauggugacaauuuccaa

SEQ ID NO: 1021633 - RNA, 19 nt, Artificial Sequence
  Description of Artificial Sequence: Synthetic oligonucleotide
cugucgguaaaacucugcu

SEQ ID NO: 1021634 - RNA, 19 nt, Artificial Sequence
  Description of Artificial Sequence: Synthetic oligonucleotide
caucggcgccauauucaag

SEQ ID NO: 1021635 - RNA, 19 nt, Artificial Sequence
  Description of Artificial Sequence: Synthetic oligonucleotide
aguucacugugggucauuu

SEQ ID NO: 1021636 - RNA, 19 nt, Artificial Sequence
  Description of Artificial Sequence: Synthetic oligonucleotide
gcuggugacaauucguagu

SEQ ID NO: 1021637 - RNA, 19 nt, Artificial Sequence
  Description of Artificial Sequence: Synthetic oligonucleotide
cugugcacagcacaucugu

SEQ ID NO: 1021638 - RNA, 19 nt, Artificial Sequence
  Description of Artificial Sequence: Synthetic oligonucleotide
auaguagucuccggugauu

SEQ ID NO: 1021639 - RNA, 19 nt, Artificial Sequence
  Description of Artificial Sequence: Synthetic oligonucleotide
gcgacggacacuuggaugu

SEQ ID NO: 1021640 - RNA, 19 nt, Artificial Sequence
  Description of Artificial Sequence: Synthetic oligonucleotide
gguuagccaaaacaucaua

SEQ ID NO: 1021641 - RNA, 19 nt, Artificial Sequence
  Description of Artificial Sequence: Synthetic oligonucleotide
gcaguuaacaucggcgcca

SEQ ID NO: 1021642 - RNA, 19 nt, Artificial Sequence
  Description of Artificial Sequence: Synthetic oligonucleotide
gaccugucgguaaaacucu

SEQ ID NO: 1021643 - RNA, 19 nt, Artificial Sequence
  Description of Artificial Sequence: Synthetic oligonucleotide
gcggcauggggcgagacug

SEQ ID NO: 1021644 - RNA, 19 nt, Artificial Sequence
  Description of Artificial Sequence: Synthetic oligonucleotide
acuugcauugguggaugaa

SEQ ID NO: 1021645 - RNA, 19 nt, Artificial Sequence
  Description of Artificial Sequence: Synthetic oligonucleotide
gagccggagaacacaggca

SEQ ID NO: 1021646 - RNA, 19 nt, Artificial Sequence
  Description of Artificial Sequence: Synthetic oligonucleotide
aaaguggggucagcaccau

SEQ ID NO: 1021647 - RNA, 19 nt, Artificial Sequence
  Description of Artificial Sequence: Synthetic oligonucleotide
gccauagaacucccaacca

SEQ ID NO: 1021648 - RNA, 19 nt, Artificial Sequence
  Description of Artificial Sequence: Synthetic oligonucleotide
caguaguccucagggcccc

SEQ ID NO: 1021649 - RNA, 19 nt, Artificial Sequence
  Description of Artificial Sequence: Synthetic oligonucleotide
uggccccugagcgacggac

SEQ ID NO: 1021650 - RNA, 19 nt, Artificial Sequence
  Description of Artificial Sequence: Synthetic oligonucleotide
ucaaccucuugagcacauc

SEQ ID NO: 1021651 - RNA, 19 nt, Artificial Sequence
  Description of Artificial Sequence: Synthetic oligonucleotide
guugagccauccccuggca

SEQ ID NO: 1021652 - RNA, 19 nt, Artificial Sequence
  Description of Artificial Sequence: Synthetic oligonucleotide
gcaaucggacaauuucuaa

SEQ ID NO: 1021653 - RNA, 19 nt, Artificial Sequence
  Description of Artificial Sequence: Synthetic oligonucleotide
augggcggagagccggaga

SEQ ID NO: 1021654 - RNA, 19 nt, Artificial Sequence
  Description of Artificial Sequence: Synthetic oligonucleotide
acggacacuuggauguuau

SEQ ID NO: 1021655 - RNA, 19 nt, Artificial Sequence
  Description of Artificial Sequence: Synthetic oligonucleotide
gggaggacauuuucaaccu

SEQ ID NO: 1021656 - RNA, 19 nt, Artificial Sequence
  Description of Artificial Sequence: Synthetic oligonucleotide
cucaaagcaugugugcacu

SEQ ID NO: 1021657 - RNA, 19 nt, Artificial Sequence
  Description of Artificial Sequence: Synthetic oligonucleotide
ucucgcuguugucggugua

SEQ ID NO: 1021658 - RNA, 19 nt, Artificial Sequence
  Description of Artificial Sequence: Synthetic oligonucleotide
gcaagagggaguguucaga

SEQ ID NO: 1021659 - RNA, 19 nt, Artificial Sequence
  Description of Artificial Sequence: Synthetic oligonucleotide
ggucguuuaaauagucugu

SEQ ID NO: 1021660 - RNA, 19 nt, Artificial Sequence
  Description of Artificial Sequence: Synthetic oligonucleotide
gccauccccuggcacaagc

SEQ ID NO: 1021661 - RNA, 19 nt, Artificial Sequence
  Description of Artificial Sequence: Synthetic oligonucleotide
gugacaauucguagucugu

SEQ ID NO: 1021662 - RNA, 19 nt, Artificial Sequence
  Description of Artificial Sequence: Synthetic oligonucleotide
aaguucacugugggucauu

SEQ ID NO: 1021663 - RNA, 19 nt, Artificial Sequence
  Description of Artificial Sequence: Synthetic oligonucleotide
caguuucguggccccugag

SEQ ID NO: 1021664 - RNA, 19 nt, Artificial Sequence
  Description of Artificial Sequence: Synthetic oligonucleotide
ccaaccaccacuggaguca

SEQ ID NO: 1021665 - RNA, 19 nt, Artificial Sequence
  Description of Artificial Sequence: Synthetic oligonucleotide
cauaguagucuccggugau

SEQ ID NO: 1021666 - RNA, 19 nt, Artificial Sequence
  Description of Artificial Sequence: Synthetic oligonucleotide
cagugcgacccuguagguc

SEQ ID NO: 1021667 - RNA, 19 nt, Artificial Sequence
  Description of Artificial Sequence: Synthetic oligonucleotide
auauccgggaggacauuuu

SEQ ID NO: 1021668 - RNA, 19 nt, Artificial Sequence
  Description of Artificial Sequence: Synthetic oligonucleotide
ggcggagagccggagaaca

SEQ ID NO: 1021669 - RNA, 19 nt, Artificial Sequence
  Description of Artificial Sequence: Synthetic oligonucleotide
ggacgauguugagccaucc

SEQ ID NO: 1021670 - RNA, 19 nt, Artificial Sequence
  Description of Artificial Sequence: Synthetic oligonucleotide
acccuguaggucguuuaaa

SEQ ID NO: 1021671 - RNA, 19 nt, Artificial Sequence
  Description of Artificial Sequence: Synthetic oligonucleotide
aggcaguauaagaccacuu

SEQ ID NO: 1021672 - RNA, 19 nt, Artificial Sequence
  Description of Artificial Sequence: Synthetic oligonucleotide
gguggaugaaaggcucuuc

SEQ ID NO: 1021673 - RNA, 19 nt, Artificial Sequence
  Description of Artificial Sequence: Synthetic oligonucleotide
cuccggugauuggcaagcc

SEQ ID NO: 1021674 - RNA, 19 nt, Artificial Sequence
  Description of Artificial Sequence: Synthetic oligonucleotide
caugggcggagagccggag

SEQ ID NO: 1021675 - RNA, 19 nt, Artificial Sequence
  Description of Artificial Sequence: Synthetic oligonucleotide
ggaauauccgggaggacau

SEQ ID NO: 1021676 - RNA, 19 nt, Artificial Sequence
  Description of Artificial Sequence: Synthetic oligonucleotide
agggucucgccagcauucu

SEQ ID NO: 1021677 - RNA, 19 nt, Artificial Sequence
  Description of Artificial Sequence: Synthetic oligonucleotide
cgaugguucacaucacaga

SEQ ID NO: 1021678 - RNA, 19 nt, Artificial Sequence
  Description of Artificial Sequence: Synthetic oligonucleotide
ccuguaggucguuuaaaua

SEQ ID NO: 1021679 - RNA, 19 nt, Artificial Sequence
  Description of Artificial Sequence: Synthetic oligonucleotide
cuagccgggcagcccgcug

SEQ ID NO: 1021680 - RNA, 19 nt, Artificial Sequence
  Description of Artificial Sequence: Synthetic oligonucleotide
gcagagaccugucgguaaa

SEQ ID NO: 1021681 - RNA, 19 nt, Artificial Sequence
  Description of Artificial Sequence: Synthetic oligonucleotide
gagccauccccuggcacaa

SEQ ID NO: 1021682 - RNA, 19 nt, Artificial Sequence
  Description of Artificial Sequence: Synthetic oligonucleotide
ggagaacuugagcguggca

SEQ ID NO: 1021683 - RNA, 19 nt, Artificial Sequence
  Description of Artificial Sequence: Synthetic oligonucleotide
ccgggaggacauuuucaac

SEQ ID NO: 1021684 - RNA, 19 nt, Artificial Sequence
  Description of Artificial Sequence: Synthetic oligonucleotide
gacggacacuuggauguua

SEQ ID NO: 1021685 - RNA, 19 nt, Artificial Sequence
  Description of Artificial Sequence: Synthetic oligonucleotide
gggauaauugcagcggaau

SEQ ID NO: 1021686 - RNA, 19 nt, Artificial Sequence
  Description of Artificial Sequence: Synthetic oligonucleotide
ggcgagacuggguggucuc

SEQ ID NO: 1021687 - RNA, 19 nt, Artificial Sequence
  Description of Artificial Sequence: Synthetic oligonucleotide
gcguugucacgaugguuca

SEQ ID NO: 1021688 - RNA, 19 nt, Artificial Sequence
  Description of Artificial Sequence: Synthetic oligonucleotide
aguuaacaucggcgccaua

SEQ ID NO: 1021689 - RNA, 19 nt, Artificial Sequence
  Description of Artificial Sequence: Synthetic oligonucleotide
ccacauaguagucuccggu

SEQ ID NO: 1021690 - RNA, 19 nt, Artificial Sequence
  Description of Artificial Sequence: Synthetic oligonucleotide
gccaguuucguggccccug

SEQ ID NO: 1021691 - RNA, 19 nt, Artificial Sequence
  Description of Artificial Sequence: Synthetic oligonucleotide
gccccugagcgacggacac

SEQ ID NO: 1021692 - RNA, 19 nt, Artificial Sequence
  Description of Artificial Sequence: Synthetic oligonucleotide
cccggauggcuucucgcug

SEQ ID NO: 1021693 - RNA, 19 nt, Artificial Sequence
  Description of Artificial Sequence: Synthetic oligonucleotide
ggugauuggcaagccccuc

SEQ ID NO: 1021694 - RNA, 19 nt, Artificial Sequence
  Description of Artificial Sequence: Synthetic oligonucleotide
cggagaacacaggcaagcc

SEQ ID NO: 1021695 - RNA, 19 nt, Artificial Sequence
  Description of Artificial Sequence: Synthetic oligonucleotide
cacggcaagagggaguguu

SEQ ID NO: 1021696 - RNA, 19 nt, Artificial Sequence
  Description of Artificial Sequence: Synthetic oligonucleotide
cagcgggaggcagccuggc

SEQ ID NO: 1021697 - RNA, 19 nt, Artificial Sequence
  Description of Artificial Sequence: Synthetic oligonucleotide
ggcucaccaguaguccuca

SEQ ID NO: 1021698 - RNA, 19 nt, Artificial Sequence
  Description of Artificial Sequence: Synthetic oligonucleotide
guggagcccaguagagucu

SEQ ID NO: 1021699 - RNA, 19 nt, Artificial Sequence
  Description of Artificial Sequence: Synthetic oligonucleotide
ggcucuucaugggcggaga

SEQ ID NO: 1021700 - RNA, 19 nt, Artificial Sequence
  Description of Artificial Sequence: Synthetic oligonucleotide
agccauccccuggcacaag

SEQ ID NO: 1021701 - RNA, 19 nt, Artificial Sequence
  Description of Artificial Sequence: Synthetic oligonucleotide
uggcggcauggggcgagac

SEQ ID NO: 1021702 - RNA, 19 nt, Artificial Sequence
  Description of Artificial Sequence: Synthetic oligonucleotide
ccuggacuccugagguauc

SEQ ID NO: 1021703 - RNA, 19 nt, Artificial Sequence
  Description of Artificial Sequence: Synthetic oligonucleotide
ccauaaguucacugugggu

SEQ ID NO: 1021704 - RNA, 19 nt, Artificial Sequence
  Description of Artificial Sequence: Synthetic oligonucleotide
cggcgccauauucaaggag

SEQ ID NO: 1021705 - RNA, 19 nt, Artificial Sequence
  Description of Artificial Sequence: Synthetic oligonucleotide
gaauauccgggaggacauu

SEQ ID NO: 1021706 - RNA, 19 nt, Artificial Sequence
  Description of Artificial Sequence: Synthetic oligonucleotide
acacggcaagagggagugu

SEQ ID NO: 1021707 - RNA, 19 nt, Artificial Sequence
  Description of Artificial Sequence: Synthetic oligonucleotide
ccgagcuucuggcggcaug

SEQ ID NO: 1021708 - RNA, 19 nt, Artificial Sequence
  Description of Artificial Sequence: Synthetic oligonucleotide
ggagggucucgccagcauu

SEQ ID NO: 1021709 - RNA, 19 nt, Artificial Sequence
  Description of Artificial Sequence: Synthetic oligonucleotide
cucgcuguugucgguguau

SEQ ID NO: 1021710 - RNA, 19 nt, Artificial Sequence
  Description of Artificial Sequence: Synthetic oligonucleotide
cagcauucuuguugacaau

SEQ ID NO: 1021711 - RNA, 19 nt, Artificial Sequence
  Description of Artificial Sequence: Synthetic oligonucleotide
ccaguuucguggccccuga

SEQ ID NO: 1021712 - RNA, 19 nt, Artificial Sequence
  Description of Artificial Sequence: Synthetic oligonucleotide
ggguuagccaaaacaucau

SEQ ID NO: 1021713 - RNA, 19 nt, Artificial Sequence
  Description of Artificial Sequence: Synthetic oligonucleotide
cuuguucuccaggcaguau

SEQ ID NO: 1021714 - RNA, 19 nt, Artificial Sequence
  Description of Artificial Sequence: Synthetic oligonucleotide
gcggagagccggagaacac

SEQ ID NO: 1021715 - RNA, 19 nt, Artificial Sequence
  Description of Artificial Sequence: Synthetic oligonucleotide
cggcauggggcgagacugg

SEQ ID NO: 1021716 - RNA, 19 nt, Artificial Sequence
  Description of Artificial Sequence: Synthetic oligonucleotide
cggacgauguugagccauc

SEQ ID NO: 1021717 - RNA, 19 nt, Artificial Sequence
  Description of Artificial Sequence: Synthetic oligonucleotide
gccacuugcauugguggau

SEQ ID NO: 1021718 - RNA, 19 nt, Artificial Sequence
  Description of Artificial Sequence: Synthetic oligonucleotide
caguuaacaucggcgccau

SEQ ID NO: 1021719 - RNA, 19 nt, Artificial Sequence
  Description of Artificial Sequence: Synthetic oligonucleotide
ggcggacgauguugagcca

SEQ ID NO: 1021720 - RNA, 19 nt, Artificial Sequence
  Description of Artificial Sequence: Synthetic oligonucleotide
ggcaagccuuguucauugu

SEQ ID NO: 1021721 - RNA, 19 nt, Artificial Sequence
  Description of Artificial Sequence: Synthetic oligonucleotide
cuccgagcuucuggcggca

SEQ ID NO: 1021722 - RNA, 19 nt, Artificial Sequence
  Description of Artificial Sequence: Synthetic oligonucleotide
ugcgacccuguaggucguu

SEQ ID NO: 1021723 - RNA, 19 nt, Artificial Sequence
  Description of Artificial Sequence: Synthetic oligonucleotide
ggccccugagcgacggaca

SEQ ID NO: 1021724 - RNA, 19 nt, Artificial Sequence
  Description of Artificial Sequence: Synthetic oligonucleotide
ggcggcauggggcgagacu

SEQ ID NO: 1021725 - RNA, 19 nt, Artificial Sequence
  Description of Artificial Sequence: Synthetic oligonucleotide
cguggccccugagcgacgg

SEQ ID NO: 1021726 - RNA, 19 nt, Artificial Sequence
  Description of Artificial Sequence: Synthetic oligonucleotide
gcgccauauucaaggaggu

SEQ ID NO: 1021727 - RNA, 19 nt, Artificial Sequence
  Description of Artificial Sequence: Synthetic oligonucleotide
gcggaauauccgggaggac

SEQ ID NO: 1021728 - RNA, 19 nt, Artificial Sequence
  Description of Artificial Sequence: Synthetic oligonucleotide
gggcggagagccggagaac

SEQ ID NO: 1021729 - RNA, 19 nt, Artificial Sequence
  Description of Artificial Sequence: Synthetic oligonucleotide
cguugucacgaugguucac

SEQ ID NO: 1021730 - RNA, 19 nt, Artificial Sequence
  Description of Artificial Sequence: Synthetic oligonucleotide
gcggacgauguugagccau

SEQ ID NO: 1021731 - RNA, 19 nt, Artificial Sequence
  Description of Artificial Sequence: Synthetic oligonucleotide
cugcguugucacgaugguu

SEQ ID NO: 1021732 - RNA, 19 nt, Artificial Sequence
  Description of Artificial Sequence: Synthetic oligonucleotide
gggcgagacuggguggucu

SEQ ID NO: 1021733 - RNA, 19 nt, Artificial Sequence
  Description of Artificial Sequence: Synthetic oligonucleotide
gccucgaggcuggcgugca

SEQ ID NO: 1021734 - RNA, 19 nt, Artificial Sequence
  Description of Artificial Sequence: Synthetic oligonucleotide
cgacccuguaggucguuua

SEQ ID NO: 1021735 - RNA, 19 nt, Artificial Sequence
  Description of Artificial Sequence: Synthetic oligonucleotide
ggggcgagacugggugguc

SEQ ID NO: 1021736 - RNA, 19 nt, Artificial Sequence
  Description of Artificial Sequence: Synthetic oligonucleotide
gcaaacggucaaagggcuu

SEQ ID NO: 1021737 - RNA, 19 nt, Artificial Sequence
  Description of Artificial Sequence: Synthetic oligonucleotide
ccgugucacuaggguggag

SEQ ID NO: 1021738 - RNA, 19 nt, Artificial Sequence
  Description of Artificial Sequence: Synthetic oligonucleotide
cggugauuggcaagccccu

SEQ ID NO: 1021739 - RNA, 19 nt, Artificial Sequence
  Description of Artificial Sequence: Synthetic oligonucleotide
gcauggggcgagacugggu

SEQ ID NO: 1021740 - RNA, 19 nt, Artificial Sequence
  Description of Artificial Sequence: Synthetic oligonucleotide
cggacacuuggauguuaua

SEQ ID NO: 1021741 - RNA, 19 nt, Artificial Sequence
  Description of Artificial Sequence: Synthetic oligonucleotide
gcgacccuguaggucguuu

SEQ ID NO: 1021742 - RNA, 19 nt, Artificial Sequence
  Description of Artificial Sequence: Synthetic oligonucleotide
cgagacuggguggucucuu

SEQ ID NO: 1021743 - RNA, 19 nt, Artificial Sequence
  Description of Artificial Sequence: Synthetic oligonucleotide
cgacggacacuuggauguu

SEQ ID NO: 1021744 - RNA, 19 nt, Artificial Sequence
  Description of Artificial Sequence: Synthetic oligonucleotide
auagauaacggacaguggc

SEQ ID NO: 1021745 - RNA, 19 nt, Artificial Sequence
  Description of Artificial Sequence: Synthetic oligonucleotide
aauaauaacggcugccagg

SEQ ID NO: 1021746 - RNA, 19 nt, Artificial Sequence
  Description of Artificial Sequence: Synthetic oligonucleotide
uccaucaugaguuauaugu

SEQ ID NO: 1021747 - RNA, 19 nt, Artificial Sequence
  Description of Artificial Sequence: Synthetic oligonucleotide
ugacuguucaguuugaugc

SEQ ID NO: 1021748 - RNA, 19 nt, Artificial Sequence
  Description of Artificial Sequence: Synthetic oligonucleotide
aaugagauuacugaggcca

SEQ ID NO: 1021749 - RNA, 19 nt, Artificial Sequence
  Description of Artificial Sequence: Synthetic oligonucleotide
auugcugguaacuguaucc

SEQ ID NO: 1021750 - RNA, 19 nt, Artificial Sequence
  Description of Artificial Sequence: Synthetic oligonucleotide
auuacugaggccaagggcc

SEQ ID NO: 1021751 - RNA, 19 nt, Artificial Sequence
  Description of Artificial Sequence: Synthetic oligonucleotide
uucacaauaauaacggcug

SEQ ID NO: 1021752 - RNA, 19 nt, Artificial Sequence
  Description of Artificial Sequence: Synthetic oligonucleotide
ucuauaaauauccguaucu

SEQ ID NO: 1021753 - RNA, 19 nt, Artificial Sequence
  Description of Artificial Sequence: Synthetic oligonucleotide
aaauauccguaucuggcac

SEQ ID NO: 1021754 - RNA, 19 nt, Artificial Sequence
  Description of Artificial Sequence: Synthetic oligonucleotide
auauacaugggauggaguc

SEQ ID NO: 1021755 - RNA, 19 nt, Artificial Sequence
  Description of Artificial Sequence: Synthetic oligonucleotide
aaggaaaugccaguggccc

SEQ ID NO: 1021756 - RNA, 19 nt, Artificial Sequence
  Description of Artificial Sequence: Synthetic oligonucleotide
gauaucgucaccaaagaag

SEQ ID NO: 1021757 - RNA, 19 nt, Artificial Sequence
  Description of Artificial Sequence: Synthetic oligonucleotide
aaugagcgugaguaguucc

SEQ ID NO: 1021758 - RNA, 19 nt, Artificial Sequence
  Description of Artificial Sequence: Synthetic oligonucleotide
ucaguuuugcaccaaagga

SEQ ID NO: 1021759 - RNA, 19 nt, Artificial Sequence
  Description of Artificial Sequence: Synthetic oligonucleotide
ucggaaaauauucuucagg

SEQ ID NO: 1021760 - RNA, 19 nt, Artificial Sequence
  Description of Artificial Sequence: Synthetic oligonucleotide
aaagaugcugcuuagugau

SEQ ID NO: 1021761 - RNA, 19 nt, Artificial Sequence
  Description of Artificial Sequence: Synthetic oligonucleotide
agaguuugguggcugaagc

SEQ ID NO: 1021762 - RNA, 19 nt, Artificial Sequence
  Description of Artificial Sequence: Synthetic oligonucleotide
aaaggucacagcgucaugg

SEQ ID NO: 1021763 - RNA, 19 nt, Artificial Sequence
  Description of Artificial Sequence: Synthetic oligonucleotide
aaguguugcaaacaacucu

SEQ ID NO: 1021764 - RNA, 19 nt, Artificial Sequence
  Description of Artificial Sequence: Synthetic oligonucleotide
cacgucucuauaaauaucc

SEQ ID NO: 1021765 - RNA, 19 nt, Artificial Sequence
  Description of Artificial Sequence: Synthetic oligonucleotide
agggucuuaaugcacacgg

SEQ ID NO: 1021766 - RNA, 19 nt, Artificial Sequence
  Description of Artificial Sequence: Synthetic oligonucleotide
gaaaucgggagucccaagg

SEQ ID NO: 1021767 - RNA, 19 nt, Artificial Sequence
  Description of Artificial Sequence: Synthetic oligonucleotide
aagccuaccacagcaaugg

SEQ ID NO: 1021768 - RNA, 19 nt, Artificial Sequence
  Description of Artificial Sequence: Synthetic oligonucleotide
guauagauaacggacagug

SEQ ID NO: 1021769 - RNA, 19 nt, Artificial Sequence
  Description of Artificial Sequence: Synthetic oligonucleotide
guauccacaaaggagagag

SEQ ID NO: 1021770 - RNA, 19 nt, Artificial Sequence
  Description of Artificial Sequence: Synthetic oligonucleotide
uauagauaacggacagugg

SEQ ID NO: 1021771 - RNA, 19 nt, Artificial Sequence
  Description of Artificial Sequence: Synthetic oligonucleotide
guuacuguccacucgguag

SEQ ID NO: 1021772 - RNA, 19 nt, Artificial Sequence
  Description of Artificial Sequence: Synthetic oligonucleotide
agugauaucgucaccaaag

SEQ ID NO: 1021773 - RNA, 19 nt, Artificial Sequence
  Description of Artificial Sequence: Synthetic oligonucleotide
agagugacuguucaguuug

SEQ ID NO: 1021774 - RNA, 19 nt, Artificial Sequence
  Description of Artificial Sequence: Synthetic oligonucleotide
cucaggucuaggaugaggg

SEQ ID NO: 1021775 - RNA, 19 nt, Artificial Sequence
  Description of Artificial Sequence: Synthetic oligonucleotide
uaaauauccguaucuggca

SEQ ID NO: 1021776 - RNA, 19 nt, Artificial Sequence
  Description of Artificial Sequence: Synthetic oligonucleotide
agcggaagaccuuuacucc

SEQ ID NO: 1021777 - RNA, 19 nt, Artificial Sequence
  Description of Artificial Sequence: Synthetic oligonucleotide
gauguacacuuccaccucg

SEQ ID NO: 1021778 - RNA, 19 nt, Artificial Sequence
  Description of Artificial Sequence: Synthetic oligonucleotide
aagaccuuuacuccaggga

SEQ ID NO: 1021779 - RNA, 19 nt, Artificial Sequence
  Description of Artificial Sequence: Synthetic oligonucleotide
gaaguguccggccucaagc

SEQ ID NO: 1021780 - RNA, 19 nt, Artificial Sequence
  Description of Artificial Sequence: Synthetic oligonucleotide
auccguaucuggcacuugc

SEQ ID NO: 1021781 - RNA, 19 nt, Artificial Sequence
  Description of Artificial Sequence: Synthetic oligonucleotide
aguaaaugguggcugagga

SEQ ID NO: 1021782 - RNA, 19 nt, Artificial Sequence
  Description of Artificial Sequence: Synthetic oligonucleotide
uagauaacggacaguggcc

SEQ ID NO: 1021783 - RNA, 19 nt, Artificial Sequence
  Description of Artificial Sequence: Synthetic oligonucleotide
aauguccagguucagcaga

SEQ ID NO: 1021784 - RNA, 19 nt, Artificial Sequence
  Description of Artificial Sequence: Synthetic oligonucleotide
ucgaaagugguguugacau

SEQ ID NO: 1021785 - RNA, 19 nt, Artificial Sequence
  Description of Artificial Sequence: Synthetic oligonucleotide
ugaguaguuccccagguau

SEQ ID NO: 1021786 - RNA, 19 nt, Artificial Sequence
  Description of Artificial Sequence: Synthetic oligonucleotide
cacgguauccacaaaggag

SEQ ID NO: 1021787 - RNA, 19 nt, Artificial Sequence
  Description of Artificial Sequence: Synthetic oligonucleotide
agauaacggacaguggccc

SEQ ID NO: 1021788 - RNA, 19 nt, Artificial Sequence
  Description of Artificial Sequence: Synthetic oligonucleotide
gaagucucggaaaauauuc

SEQ ID NO: 1021789 - RNA, 19 nt, Artificial Sequence
  Description of Artificial Sequence: Synthetic oligonucleotide
agauuacugaggccaaggg

SEQ ID NO: 1021790 - RNA, 19 nt, Artificial Sequence
  Description of Artificial Sequence: Synthetic oligonucleotide
aaguaaaugguggcugagg

SEQ ID NO: 1021791 - RNA, 19 nt, Artificial Sequence
  Description of Artificial Sequence: Synthetic oligonucleotide
caaacaacucugucguugg

SEQ ID NO: 1021792 - RNA, 19 nt, Artificial Sequence
  Description of Artificial Sequence: Synthetic oligonucleotide
ugguggagggcaaagguca

SEQ ID NO: 1021793 - RNA, 19 nt, Artificial Sequence
  Description of Artificial Sequence: Synthetic oligonucleotide
acaaguguugcaaacaacu

SEQ ID NO: 1021794 - RNA, 19 nt, Artificial Sequence
  Description of Artificial Sequence: Synthetic oligonucleotide
uuacuguccacucgguagc

SEQ ID NO: 1021795 - RNA, 19 nt, Artificial Sequence
  Description of Artificial Sequence: Synthetic oligonucleotide
accacgucuauccggaauc

SEQ ID NO: 1021796 - RNA, 19 nt, Artificial Sequence
  Description of Artificial Sequence: Synthetic oligonucleotide
gaagaccuuuacuccaggg

SEQ ID NO: 1021797 - RNA, 19 nt, Artificial Sequence
  Description of Artificial Sequence: Synthetic oligonucleotide
gaauacuauggaaacugcc

SEQ ID NO: 1021798 - RNA, 19 nt, Artificial Sequence
  Description of Artificial Sequence: Synthetic oligonucleotide
uccuguaccaggcuccgag

SEQ ID NO: 1021799 - RNA, 19 nt, Artificial Sequence
  Description of Artificial Sequence: Synthetic oligonucleotide
agguucagcagaauggugg

SEQ ID NO: 1021800 - RNA, 19 nt, Artificial Sequence
  Description of Artificial Sequence: Synthetic oligonucleotide
aaacugaggagaucuugga

SEQ ID NO: 1021801 - RNA, 19 nt, Artificial Sequence
  Description of Artificial Sequence: Synthetic oligonucleotide
aagugguguugacauugac

SEQ ID NO: 1021802 - RNA, 19 nt, Artificial Sequence
  Description of Artificial Sequence: Synthetic oligonucleotide
auaauaacggcugccagga

SEQ ID NO: 1021803 - RNA, 19 nt, Artificial Sequence
  Description of Artificial Sequence: Synthetic oligonucleotide
uauccggaaucuuucauuc

SEQ ID NO: 1021804 - RNA, 19 nt, Artificial Sequence
  Description of Artificial Sequence: Synthetic oligonucleotide
aauauccguaucuggcacu

SEQ ID NO: 1021805 - RNA, 19 nt, Artificial Sequence
  Description of Artificial Sequence: Synthetic oligonucleotide
agaauacuauggaaacugc

SEQ ID NO: 1021806 - RNA, 19 nt, Artificial Sequence
  Description of Artificial Sequence: Synthetic oligonucleotide
gagcggaagaccuuuacuc

SEQ ID NO: 1021807 - RNA, 19 nt, Artificial Sequence
  Description of Artificial Sequence: Synthetic oligonucleotide
agauacagcuccagcaacc

SEQ ID NO: 1021808 - RNA, 19 nt, Artificial Sequence
  Description of Artificial Sequence: Synthetic oligonucleotide
aacaggcugcgauguacac

SEQ ID NO: 1021809 - RNA, 19 nt, Artificial Sequence
  Description of Artificial Sequence: Synthetic oligonucleotide
gugcauauacaugggaugg

SEQ ID NO: 1021810 - RNA, 19 nt, Artificial Sequence
  Description of Artificial Sequence: Synthetic oligonucleotide
uuugcgcagaccuccagca

SEQ ID NO: 1021811 - RNA, 19 nt, Artificial Sequence
  Description of Artificial Sequence: Synthetic oligonucleotide
cauugacugaaacugagga

SEQ ID NO: 1021812 - RNA, 19 nt, Artificial Sequence
  Description of Artificial Sequence: Synthetic oligonucleotide
cacacgguauccacaaagg

SEQ ID NO: 1021813 - RNA, 19 nt, Artificial Sequence
  Description of Artificial Sequence: Synthetic oligonucleotide
gacauugacugaaacugag

SEQ ID NO: 1021814 - RNA, 19 nt, Artificial Sequence
  Description of Artificial Sequence: Synthetic oligonucleotide
cuguauagauaacggacag

SEQ ID NO: 1021815 - RNA, 19 nt, Artificial Sequence
  Description of Artificial Sequence: Synthetic oligonucleotide
ucacaauaauaacggcugc

SEQ ID NO: 1021816 - RNA, 19 nt, Artificial Sequence
  Description of Artificial Sequence: Synthetic oligonucleotide
ucucuauaaauauccguau

SEQ ID NO: 1021817 - RNA, 19 nt, Artificial Sequence
  Description of Artificial Sequence: Synthetic oligonucleotide
gagaagauacagcuccagc

SEQ ID NO: 1021818 - RNA, 19 nt, Artificial Sequence
  Description of Artificial Sequence: Synthetic oligonucleotide
aucacaaguaccacgcccg

SEQ ID NO: 1021819 - RNA, 19 nt, Artificial Sequence
  Description of Artificial Sequence: Synthetic oligonucleotide
auaucgucaccaaagaagu

SEQ ID NO: 1021820 - RNA, 19 nt, Artificial Sequence
  Description of Artificial Sequence: Synthetic oligonucleotide
aaacaacucugucguuggg

SEQ ID NO: 1021821 - RNA, 19 nt, Artificial Sequence
  Description of Artificial Sequence: Synthetic oligonucleotide
uguugacauugacugaaac

SEQ ID NO: 1021822 - RNA, 19 nt, Artificial Sequence
  Description of Artificial Sequence: Synthetic oligonucleotide
cugcauucggaucaccacg

SEQ ID NO: 1021823 - RNA, 19 nt, Artificial Sequence
  Description of Artificial Sequence: Synthetic oligonucleotide
ugcaauacccugccccagg

SEQ ID NO: 1021824 - RNA, 19 nt, Artificial Sequence
  Description of Artificial Sequence: Synthetic oligonucleotide
ugacauugacugaaacuga

SEQ ID NO: 1021825 - RNA, 19 nt, Artificial Sequence
  Description of Artificial Sequence: Synthetic oligonucleotide
uauacaugggauggagucc

SEQ ID NO: 1021826 - RNA, 19 nt, Artificial Sequence
  Description of Artificial Sequence: Synthetic oligonucleotide
augucuucgaaaguggugu

SEQ ID NO: 1021827 - RNA, 19 nt, Artificial Sequence
  Description of Artificial Sequence: Synthetic oligonucleotide
cuuuacuccagggaccucc

SEQ ID NO: 1021828 - RNA, 19 nt, Artificial Sequence
  Description of Artificial Sequence: Synthetic oligonucleotide
acaauaauaacggcugcca

SEQ ID NO: 1021829 - RNA, 19 nt, Artificial Sequence
  Description of Artificial Sequence: Synthetic oligonucleotide
uugauugcugguaacugua

SEQ ID NO: 1021830 - RNA, 19 nt, Artificial Sequence
  Description of Artificial Sequence: Synthetic oligonucleotide
acuguaacaggcugcgaug

SEQ ID NO: 1021831 - RNA, 19 nt, Artificial Sequence
  Description of Artificial Sequence: Synthetic oligonucleotide
ucuugauugcugguaacug

SEQ ID NO: 1021832 - RNA, 19 nt, Artificial Sequence
  Description of Artificial Sequence: Synthetic oligonucleotide
cuuagugauaucgucacca

SEQ ID NO: 1021833 - RNA, 19 nt, Artificial Sequence
  Description of Artificial Sequence: Synthetic oligonucleotide
ugcauucggaucaccacga

SEQ ID NO: 1021834 - RNA, 19 nt, Artificial Sequence
  Description of Artificial Sequence: Synthetic oligonucleotide
aggaaaugccaguggcccc

SEQ ID NO: 1021835 - RNA, 19 nt, Artificial Sequence
  Description of Artificial Sequence: Synthetic oligonucleotide
acucgauuugcuuuccaca

SEQ ID NO: 1021836 - RNA, 19 nt, Artificial Sequence
  Description of Artificial Sequence: Synthetic oligonucleotide
caauaauaacggcugccag

SEQ ID NO: 1021837 - RNA, 19 nt, Artificial Sequence
  Description of Artificial Sequence: Synthetic oligonucleotide
cagccugacugcaauaccc

SEQ ID NO: 1021838 - RNA, 19 nt, Artificial Sequence
  Description of Artificial Sequence: Synthetic oligonucleotide
augcugcuuagugauaucg

SEQ ID NO: 1021839 - RNA, 19 nt, Artificial Sequence
  Description of Artificial Sequence: Synthetic oligonucleotide
acagggaaacacuggaaga

SEQ ID NO: 1021840 - RNA, 19 nt, Artificial Sequence
  Description of Artificial Sequence: Synthetic oligonucleotide
auaacggcugccaggacgg

SEQ ID NO: 1021841 - RNA, 19 nt, Artificial Sequence
  Description of Artificial Sequence: Synthetic oligonucleotide
uggcaaaguaaaugguggc

SEQ ID NO: 1021842 - RNA, 19 nt, Artificial Sequence
  Description of Artificial Sequence: Synthetic oligonucleotide
agagaacugcuucaucaug

SEQ ID NO: 1021843 - RNA, 19 nt, Artificial Sequence
  Description of Artificial Sequence: Synthetic oligonucleotide
ucugccacgucucuauaaa

SEQ ID NO: 1021844 - RNA, 19 nt, Artificial Sequence
  Description of Artificial Sequence: Synthetic oligonucleotide
aaguguccggccucaagcu

SEQ ID NO: 1021845 - RNA, 19 nt, Artificial Sequence
  Description of Artificial Sequence: Synthetic oligonucleotide
uguugcaaacaacucuguc

SEQ ID NO: 1021846 - RNA, 19 nt, Artificial Sequence
  Description of Artificial Sequence: Synthetic oligonucleotide
acuguauagauaacggaca

SEQ ID NO: 1021847 - RNA, 19 nt, Artificial Sequence
  Description of Artificial Sequence: Synthetic oligonucleotide
gguauggaagccuggcugg

SEQ ID NO: 1021848 - RNA, 19 nt, Artificial Sequence
  Description of Artificial Sequence: Synthetic oligonucleotide
caccaucacaaguaccacg

SEQ ID NO: 1021849 - RNA, 19 nt, Artificial Sequence
  Description of Artificial Sequence: Synthetic oligonucleotide
cacagugccaggcacaguc

SEQ ID NO: 1021850 - RNA, 19 nt, Artificial Sequence
  Description of Artificial Sequence: Synthetic oligonucleotide
acgguauccacaaaggaga

SEQ ID NO: 1021851 - RNA, 19 nt, Artificial Sequence
  Description of Artificial Sequence: Synthetic oligonucleotide
ccaaugagauuacugaggc

SEQ ID NO: 1021852 - RNA, 19 nt, Artificial Sequence
  Description of Artificial Sequence: Synthetic oligonucleotide
cacaauaauaacggcugcc

SEQ ID NO: 1021853 - RNA, 19 nt, Artificial Sequence
  Description of Artificial Sequence: Synthetic oligonucleotide
ugagauggcaauggcgaag

SEQ ID NO: 1021854 - RNA, 19 nt, Artificial Sequence
  Description of Artificial Sequence: Synthetic oligonucleotide
uaacaggcugcgauguaca

SEQ ID NO: 1021855 - RNA, 19 nt, Artificial Sequence
  Description of Artificial Sequence: Synthetic oligonucleotide
cagcacuguauagauaacg

SEQ ID NO: 1021856 - RNA, 19 nt, Artificial Sequence
  Description of Artificial Sequence: Synthetic oligonucleotide
cucuauaaauauccguauc

SEQ ID NO: 1021857 - RNA, 19 nt, Artificial Sequence
  Description of Artificial Sequence: Synthetic oligonucleotide
aaucuuucauucaguuuug

SEQ ID NO: 1021858 - RNA, 19 nt, Artificial Sequence
  Description of Artificial Sequence: Synthetic oligonucleotide
uucguuucaucuucauuuc

SEQ ID NO: 1021859 - RNA, 19 nt, Artificial Sequence
  Description of Artificial Sequence: Synthetic oligonucleotide
uucgaaagugguguugaca

SEQ ID NO: 1021860 - RNA, 19 nt, Artificial Sequence
  Description of Artificial Sequence: Synthetic oligonucleotide
aaggucacagcgucaugga

SEQ ID NO: 1021861 - RNA, 19 nt, Artificial Sequence
  Description of Artificial Sequence: Synthetic oligonucleotide
ucuauccggaaucuuucau

SEQ ID NO: 1021862 - RNA, 19 nt, Artificial Sequence
  Description of Artificial Sequence: Synthetic oligonucleotide
caaguguugcaaacaacuc

SEQ ID NO: 1021863 - RNA, 19 nt, Artificial Sequence
  Description of Artificial Sequence: Synthetic oligonucleotide
uugaugccaaacacauuac

SEQ ID NO: 1021864 - RNA, 19 nt, Artificial Sequence
  Description of Artificial Sequence: Synthetic oligonucleotide
acugcaauacccugcccca

SEQ ID NO: 1021865 - RNA, 19 nt, Artificial Sequence
  Description of Artificial Sequence: Synthetic oligonucleotide
uuagugauaucgucaccaa

SEQ ID NO: 1021866 - RNA, 19 nt, Artificial Sequence
  Description of Artificial Sequence: Synthetic oligonucleotide
ugccacgucucuauaaaua

SEQ ID NO: 1021867 - RNA, 19 nt, Artificial Sequence
  Description of Artificial Sequence: Synthetic oligonucleotide
uugcaccaaaggaaaugcc

SEQ ID NO: 1021868 - RNA, 19 nt, Artificial Sequence
  Description of Artificial Sequence: Synthetic oligonucleotide
aggagcggaagaccuuuac

SEQ ID NO: 1021869 - RNA, 19 nt, Artificial Sequence
  Description of Artificial Sequence: Synthetic oligonucleotide
cauucggaucaccacgagc

SEQ ID NO: 1021870 - RNA, 19 nt, Artificial Sequence
  Description of Artificial Sequence: Synthetic oligonucleotide
aaagaaguguccggccuca

SEQ ID NO: 1021871 - RNA, 19 nt, Artificial Sequence
  Description of Artificial Sequence: Synthetic oligonucleotide
aagucucggaaaauauucu

SEQ ID NO: 1021872 - RNA, 19 nt, Artificial Sequence
  Description of Artificial Sequence: Synthetic oligonucleotide
agggccagacuuccggugg

SEQ ID NO: 1021873 - RNA, 19 nt, Artificial Sequence
  Description of Artificial Sequence: Synthetic oligonucleotide
uuacugaggccaagggcca

SEQ ID NO: 1021874 - RNA, 19 nt, Artificial Sequence
  Description of Artificial Sequence: Synthetic oligonucleotide
cuuugcgcagaccuccagc

SEQ ID NO: 1021875 - RNA, 19 nt, Artificial Sequence
  Description of Artificial Sequence: Synthetic oligonucleotide
aggucacagcgucauggac

SEQ ID NO: 1021876 - RNA, 19 nt, Artificial Sequence
  Description of Artificial Sequence: Synthetic oligonucleotide
caagugagauggcaauggc

SEQ ID NO: 1021877 - RNA, 19 nt, Artificial Sequence
  Description of Artificial Sequence: Synthetic oligonucleotide
ucuuagggccagacuuccg

SEQ ID NO: 1021878 - RNA, 19 nt, Artificial Sequence
  Description of Artificial Sequence: Synthetic oligonucleotide
uuaaugcacacgguaucca

SEQ ID NO: 1021879 - RNA, 19 nt, Artificial Sequence
  Description of Artificial Sequence: Synthetic oligonucleotide
gucucuauaaauauccgua

SEQ ID NO: 1021880 - RNA, 19 nt, Artificial Sequence
  Description of Artificial Sequence: Synthetic oligonucleotide
ugaaaucgggagucccaag

SEQ ID NO: 1021881 - RNA, 19 nt, Artificial Sequence
  Description of Artificial Sequence: Synthetic oligonucleotide
acacgguauccacaaagga

SEQ ID NO: 1021882 - RNA, 19 nt, Artificial Sequence
  Description of Artificial Sequence: Synthetic oligonucleotide
auacaugggauggaguccu

SEQ ID NO: 1021883 - RNA, 19 nt, Artificial Sequence
  Description of Artificial Sequence: Synthetic oligonucleotide
ucugguguaccuuggccuc

SEQ ID NO: 1021884 - RNA, 19 nt, Artificial Sequence
  Description of Artificial Sequence: Synthetic oligonucleotide
caaugagauuacugaggcc

SEQ ID NO: 1021885 - RNA, 19 nt, Artificial Sequence
  Description of Artificial Sequence: Synthetic oligonucleotide
ugacugaaacugaggagau

SEQ ID NO: 1021886 - RNA, 19 nt, Artificial Sequence
  Description of Artificial Sequence: Synthetic oligonucleotide
uccguaucuggcacuugcc

SEQ ID NO: 1021887 - RNA, 19 nt, Artificial Sequence
  Description of Artificial Sequence: Synthetic oligonucleotide
uccggccucaagcugggug

SEQ ID NO: 1021888 - RNA, 19 nt, Artificial Sequence
  Description of Artificial Sequence: Synthetic oligonucleotide
uucggaucaccacgagcag

SEQ ID NO: 1021889 - RNA, 19 nt, Artificial Sequence
  Description of Artificial Sequence: Synthetic oligonucleotide
uagugauaucgucaccaaa

SEQ ID NO: 1021890 - RNA, 19 nt, Artificial Sequence
  Description of Artificial Sequence: Synthetic oligonucleotide
agcgugaguaguuccccag

SEQ ID NO: 1021891 - RNA, 19 nt, Artificial Sequence
  Description of Artificial Sequence: Synthetic oligonucleotide
ccagagguaggaaaucucc

SEQ ID NO: 1021892 - RNA, 19 nt, Artificial Sequence
  Description of Artificial Sequence: Synthetic oligonucleotide
caaaguaaaugguggcuga

SEQ ID NO: 1021893 - RNA, 19 nt, Artificial Sequence
  Description of Artificial Sequence: Synthetic oligonucleotide
gaagccuaccacagcaaug

SEQ ID NO: 1021894 - RNA, 19 nt, Artificial Sequence
  Description of Artificial Sequence: Synthetic oligonucleotide
ccaguggccccaaugagcg

SEQ ID NO: 1021895 - RNA, 19 nt, Artificial Sequence
  Description of Artificial Sequence: Synthetic oligonucleotide
cacucgauuugcuuuccac

SEQ ID NO: 1021896 - RNA, 19 nt, Artificial Sequence
  Description of Artificial Sequence: Synthetic oligonucleotide
agucucggaaaauauucuu

SEQ ID NO: 1021897 - RNA, 19 nt, Artificial Sequence
  Description of Artificial Sequence: Synthetic oligonucleotide
uggcacuugccccaggaua

SEQ ID NO: 1021898 - RNA, 19 nt, Artificial Sequence
  Description of Artificial Sequence: Synthetic oligonucleotide
cacucgguagccaugccuc

SEQ ID NO: 1021899 - RNA, 19 nt, Artificial Sequence
  Description of Artificial Sequence: Synthetic oligonucleotide
gcacacgguauccacaaag

SEQ ID NO: 1021900 - RNA, 19 nt, Artificial Sequence
  Description of Artificial Sequence: Synthetic oligonucleotide
caccaaagaaguguccggc

SEQ ID NO: 1021901 - RNA, 19 nt, Artificial Sequence
  Description of Artificial Sequence: Synthetic oligonucleotide
ucacaaguaccacgcccgc

SEQ ID NO: 1021902 - RNA, 19 nt, Artificial Sequence
  Description of Artificial Sequence: Synthetic oligonucleotide
ucgaucucccggaagucuc

SEQ ID NO: 1021903 - RNA, 19 nt, Artificial Sequence
  Description of Artificial Sequence: Synthetic oligonucleotide
cucacagggaaacacugga

SEQ ID NO: 1021904 - RNA, 19 nt, Artificial Sequence
  Description of Artificial Sequence: Synthetic oligonucleotide
cccaaaagagaagauacag

SEQ ID NO: 1021905 - RNA, 19 nt, Artificial Sequence
  Description of Artificial Sequence: Synthetic oligonucleotide
guaucuggcacuugcccca

SEQ ID NO: 1021906 - RNA, 19 nt, Artificial Sequence
  Description of Artificial Sequence: Synthetic oligonucleotide
ugagauuacugaggccaag

SEQ ID NO: 1021907 - RNA, 19 nt, Artificial Sequence
  Description of Artificial Sequence: Synthetic oligonucleotide
cuauggaaacugccaggcc

SEQ ID NO: 1021908 - RNA, 19 nt, Artificial Sequence
  Description of Artificial Sequence: Synthetic oligonucleotide
gaguuugguggcugaagca

SEQ ID NO: 1021909 - RNA, 19 nt, Artificial Sequence
  Description of Artificial Sequence: Synthetic oligonucleotide
ugagcgugaguaguucccc

SEQ ID NO: 1021910 - RNA, 19 nt, Artificial Sequence
  Description of Artificial Sequence: Synthetic oligonucleotide
auaacggacaguggcccag

SEQ ID NO: 1021911 - RNA, 19 nt, Artificial Sequence
  Description of Artificial Sequence: Synthetic oligonucleotide
cuugggcaggucucggaag

SEQ ID NO: 1021912 - RNA, 19 nt, Artificial Sequence
  Description of Artificial Sequence: Synthetic oligonucleotide
uagcagguccacucgauuu

SEQ ID NO: 1021913 - RNA, 19 nt, Artificial Sequence
  Description of Artificial Sequence: Synthetic oligonucleotide
gacaguggcccagagugac

SEQ ID NO: 1021914 - RNA, 19 nt, Artificial Sequence
  Description of Artificial Sequence: Synthetic oligonucleotide
caaagaaguguccggccuc

SEQ ID NO: 1021915 - RNA, 19 nt, Artificial Sequence
  Description of Artificial Sequence: Synthetic oligonucleotide
cucggcauuggcaaaguaa

SEQ ID NO: 1021916 - RNA, 19 nt, Artificial Sequence
  Description of Artificial Sequence: Synthetic oligonucleotide
gcaaacaacucugucguug

SEQ ID NO: 1021917 - RNA, 19 nt, Artificial Sequence
  Description of Artificial Sequence: Synthetic oligonucleotide
gacuguaacaggcugcgau

SEQ ID NO: 1021918 - RNA, 19 nt, Artificial Sequence
  Description of Artificial Sequence: Synthetic oligonucleotide
ugcauauacaugggaugga

SEQ ID NO: 1021919 - RNA, 19 nt, Artificial Sequence
  Description of Artificial Sequence: Synthetic oligonucleotide
uguccggccucaagcuggg

SEQ ID NO: 1021920 - RNA, 19 nt, Artificial Sequence
  Description of Artificial Sequence: Synthetic oligonucleotide
agccuaccacagcaauggc

SEQ ID NO: 1021921 - RNA, 19 nt, Artificial Sequence
  Description of Artificial Sequence: Synthetic oligonucleotide
ucguuggguggcacugggg

SEQ ID NO: 1021922 - RNA, 19 nt, Artificial Sequence
  Description of Artificial Sequence: Synthetic oligonucleotide
ugggugaucacaggacugu

SEQ ID NO: 1021923 - RNA, 19 nt, Artificial Sequence
  Description of Artificial Sequence: Synthetic oligonucleotide
uuagcagguccacucgauu

SEQ ID NO: 1021924 - RNA, 19 nt, Artificial Sequence
  Description of Artificial Sequence: Synthetic oligonucleotide
aagagaagauacagcucca

SEQ ID NO: 1021925 - RNA, 19 nt, Artificial Sequence
  Description of Artificial Sequence: Synthetic oligonucleotide
acgucucuauaaauauccg

SEQ ID NO: 1021926 - RNA, 19 nt, Artificial Sequence
  Description of Artificial Sequence: Synthetic oligonucleotide
gcugguaacuguauccucc

SEQ ID NO: 1021927 - RNA, 19 nt, Artificial Sequence
  Description of Artificial Sequence: Synthetic oligonucleotide
gauaacggacaguggccca

SEQ ID NO: 1021928 - RNA, 19 nt, Artificial Sequence
  Description of Artificial Sequence: Synthetic oligonucleotide
agucucgggcagcuuugcg

SEQ ID NO: 1021929 - RNA, 19 nt, Artificial Sequence
  Description of Artificial Sequence: Synthetic oligonucleotide
cuccgagacauggagcagc

SEQ ID NO: 1021930 - RNA, 19 nt, Artificial Sequence
  Description of Artificial Sequence: Synthetic oligonucleotide
aguguccggccucaagcug

SEQ ID NO: 1021931 - RNA, 19 nt, Artificial Sequence
  Description of Artificial Sequence: Synthetic oligonucleotide
cagcgucauggacagagac

SEQ ID NO: 1021932 - RNA, 19 nt, Artificial Sequence
  Description of Artificial Sequence: Synthetic oligonucleotide
ucggaucaccacgagcagc

SEQ ID NO: 1021933 - RNA, 19 nt, Artificial Sequence
  Description of Artificial Sequence: Synthetic oligonucleotide
cagcuuugcgcagaccucc

SEQ ID NO: 1021934 - RNA, 19 nt, Artificial Sequence
  Description of Artificial Sequence: Synthetic oligonucleotide
cucuuagggccagacuucc

SEQ ID NO: 1021935 - RNA, 19 nt, Artificial Sequence
  Description of Artificial Sequence: Synthetic oligonucleotide
uuggagccuugacaguuuc

SEQ ID NO: 1021936 - RNA, 19 nt, Artificial Sequence
  Description of Artificial Sequence: Synthetic oligonucleotide
ggauagaguaauggggcag

SEQ ID NO: 1021937 - RNA, 19 nt, Artificial Sequence
  Description of Artificial Sequence: Synthetic oligonucleotide
aggguauggaagccuggcu

SEQ ID NO: 1021938 - RNA, 19 nt, Artificial Sequence
  Description of Artificial Sequence: Synthetic oligonucleotide
gugaccuagaggcaggagu

SEQ ID NO: 1021939 - RNA, 19 nt, Artificial Sequence
  Description of Artificial Sequence: Synthetic oligonucleotide
ugccccaggauagaguaau

SEQ ID NO: 1021940 - RNA, 19 nt, Artificial Sequence
  Description of Artificial Sequence: Synthetic oligonucleotide
agagugcagaugucagaga

SEQ ID NO: 1021941 - RNA, 19 nt, Artificial Sequence
  Description of Artificial Sequence: Synthetic oligonucleotide
cugcgauguacacuuccac

SEQ ID NO: 1021942 - RNA, 19 nt, Artificial Sequence
  Description of Artificial Sequence: Synthetic oligonucleotide
cuugauugcugguaacugu

SEQ ID NO: 1021943 - RNA, 19 nt, Artificial Sequence
  Description of Artificial Sequence: Synthetic oligonucleotide
acugaaaucgggaguccca

SEQ ID NO: 1021944 - RNA, 19 nt, Artificial Sequence
  Description of Artificial Sequence: Synthetic oligonucleotide
augaggguauggaagccug

SEQ ID NO: 1021945 - RNA, 19 nt, Artificial Sequence
  Description of Artificial Sequence: Synthetic oligonucleotide
cuucgaaagugguguugac

SEQ ID NO: 1021946 - RNA, 19 nt, Artificial Sequence
  Description of Artificial Sequence: Synthetic oligonucleotide
ugcugguaacuguauccuc

SEQ ID NO: 1021947 - RNA, 19 nt, Artificial Sequence
  Description of Artificial Sequence: Synthetic oligonucleotide
gguaucagcccugugguga

SEQ ID NO: 1021948 - RNA, 19 nt, Artificial Sequence
  Description of Artificial Sequence: Synthetic oligonucleotide
cagguucagcagaauggug

SEQ ID NO: 1021949 - RNA, 19 nt, Artificial Sequence
  Description of Artificial Sequence: Synthetic oligonucleotide
gcccuuuagauucacaaua

SEQ ID NO: 1021950 - RNA, 19 nt, Artificial Sequence
  Description of Artificial Sequence: Synthetic oligonucleotide
gccacaagcgcugugacca

SEQ ID NO: 1021951 - RNA, 19 nt, Artificial Sequence
  Description of Artificial Sequence: Synthetic oligonucleotide
ugaggagcggaagaccuuu

SEQ ID NO: 1021952 - RNA, 19 nt, Artificial Sequence
  Description of Artificial Sequence: Synthetic oligonucleotide
auccggaaucuuucauuca

SEQ ID NO: 1021953 - RNA, 19 nt, Artificial Sequence
  Description of Artificial Sequence: Synthetic oligonucleotide
caccacgagcagcagggag

SEQ ID NO: 1021954 - RNA, 19 nt, Artificial Sequence
  Description of Artificial Sequence: Synthetic oligonucleotide
uaauaacggcugccaggac

SEQ ID NO: 1021955 - RNA, 19 nt, Artificial Sequence
  Description of Artificial Sequence: Synthetic oligonucleotide
aagcugccaaugagauuac

SEQ ID NO: 1021956 - RNA, 19 nt, Artificial Sequence
  Description of Artificial Sequence: Synthetic oligonucleotide
ugguuacuguccacucggu

SEQ ID NO: 1021957 - RNA, 19 nt, Artificial Sequence
  Description of Artificial Sequence: Synthetic oligonucleotide
auagaguaauggggcagcu

SEQ ID NO: 1021958 - RNA, 19 nt, Artificial Sequence
  Description of Artificial Sequence: Synthetic oligonucleotide
cagggagaauacuauggaa

SEQ ID NO: 1021959 - RNA, 19 nt, Artificial Sequence
  Description of Artificial Sequence: Synthetic oligonucleotide
acuuccggugguggagggc

SEQ ID NO: 1021960 - RNA, 19 nt, Artificial Sequence
  Description of Artificial Sequence: Synthetic oligonucleotide
acaagcgcugugaccacag

SEQ ID NO: 1021961 - RNA, 19 nt, Artificial Sequence
  Description of Artificial Sequence: Synthetic oligonucleotide
caauggcgaagccuaccac

SEQ ID NO: 1021962 - RNA, 19 nt, Artificial Sequence
  Description of Artificial Sequence: Synthetic oligonucleotide
gucuucgaaagugguguug

SEQ ID NO: 1021963 - RNA, 19 nt, Artificial Sequence
  Description of Artificial Sequence: Synthetic oligonucleotide
gucuauccggaaucuuuca

SEQ ID NO: 1021964 - RNA, 19 nt, Artificial Sequence
  Description of Artificial Sequence: Synthetic oligonucleotide
caugaguuauaugugcaua

SEQ ID NO: 1021965 - RNA, 19 nt, Artificial Sequence
  Description of Artificial Sequence: Synthetic oligonucleotide
caaugagcgugaguaguuc

SEQ ID NO: 1021966 - RNA, 19 nt, Artificial Sequence
  Description of Artificial Sequence: Synthetic oligonucleotide
cagggucuuaaugcacacg

SEQ ID NO: 1021967 - RNA, 19 nt, Artificial Sequence
  Description of Artificial Sequence: Synthetic oligonucleotide
ggagaugagguggucaaca

SEQ ID NO: 1021968 - RNA, 19 nt, Artificial Sequence
  Description of Artificial Sequence: Synthetic oligonucleotide
gaccugucacaaccuccag

SEQ ID NO: 1021969 - RNA, 19 nt, Artificial Sequence
  Description of Artificial Sequence: Synthetic oligonucleotide
cguaucuggcacuugcccc

SEQ ID NO: 1021970 - RNA, 19 nt, Artificial Sequence
  Description of Artificial Sequence: Synthetic oligonucleotide
auggcgcuucaacuuuuca

SEQ ID NO: 1021971 - RNA, 19 nt, Artificial Sequence
  Description of Artificial Sequence: Synthetic oligonucleotide
uacaugggauggaguccug

SEQ ID NO: 1021972 - RNA, 19 nt, Artificial Sequence
  Description of Artificial Sequence: Synthetic oligonucleotide
agagagugcucaggucuag

SEQ ID NO: 1021973 - RNA, 19 nt, Artificial Sequence
  Description of Artificial Sequence: Synthetic oligonucleotide
uugcgcagaccuccagcac

SEQ ID NO: 1021974 - RNA, 19 nt, Artificial Sequence
  Description of Artificial Sequence: Synthetic oligonucleotide
cuucccaagugagauggca

SEQ ID NO: 1021975 - RNA, 19 nt, Artificial Sequence
  Description of Artificial Sequence: Synthetic oligonucleotide
uacuguccacucgguagcc

SEQ ID NO: 1021976 - RNA, 19 nt, Artificial Sequence
  Description of Artificial Sequence: Synthetic oligonucleotide
gcaauggcgaagccuacca

SEQ ID NO: 1021977 - RNA, 19 nt, Artificial Sequence
  Description of Artificial Sequence: Synthetic oligonucleotide
agguccacucgauuugcuu

SEQ ID NO: 1021978 - RNA, 19 nt, Artificial Sequence
  Description of Artificial Sequence: Synthetic oligonucleotide
auauccguaucuggcacuu

SEQ ID NO: 1021979 - RNA, 19 nt, Artificial Sequence
  Description of Artificial Sequence: Synthetic oligonucleotide
acgucuauccggaaucuuu

SEQ ID NO: 1021980 - RNA, 19 nt, Artificial Sequence
  Description of Artificial Sequence: Synthetic oligonucleotide
cacaaguaccacgcccgcc

SEQ ID NO: 1021981 - RNA, 19 nt, Artificial Sequence
  Description of Artificial Sequence: Synthetic oligonucleotide
auuagcagguccacucgau

SEQ ID NO: 1021982 - RNA, 19 nt, Artificial Sequence
  Description of Artificial Sequence: Synthetic oligonucleotide
gcgugaguaguuccccagg

SEQ ID NO: 1021983 - RNA, 19 nt, Artificial Sequence
  Description of Artificial Sequence: Synthetic oligonucleotide
acggacaguggcccagagu

SEQ ID NO: 1021984 - RNA, 19 nt, Artificial Sequence
  Description of Artificial Sequence: Synthetic oligonucleotide
cuuccggugguggagggca

SEQ ID NO: 1021985 - RNA, 19 nt, Artificial Sequence
  Description of Artificial Sequence: Synthetic oligonucleotide
uggcccagagugacuguuc

SEQ ID NO: 1021986 - RNA, 19 nt, Artificial Sequence
  Description of Artificial Sequence: Synthetic oligonucleotide
gcgucauggacagagacaa

SEQ ID NO: 1021987 - RNA, 19 nt, Artificial Sequence
  Description of Artificial Sequence: Synthetic oligonucleotide
cugguguaccuuggccucg

SEQ ID NO: 1021988 - RNA, 19 nt, Artificial Sequence
  Description of Artificial Sequence: Synthetic oligonucleotide
gacugaaacugaggagauc

SEQ ID NO: 1021989 - RNA, 19 nt, Artificial Sequence
  Description of Artificial Sequence: Synthetic oligonucleotide
gcucacagggaaacacugg

SEQ ID NO: 1021990 - RNA, 19 nt, Artificial Sequence
  Description of Artificial Sequence: Synthetic oligonucleotide
ccguaucuggcacuugccc

SEQ ID NO: 1021991 - RNA, 19 nt, Artificial Sequence
  Description of Artificial Sequence: Synthetic oligonucleotide
ugggcaggucucggaagag

SEQ ID NO: 1021992 - RNA, 19 nt, Artificial Sequence
  Description of Artificial Sequence: Synthetic oligonucleotide
gauggcgcuucaacuuuuc

SEQ ID NO: 1021993 - RNA, 19 nt, Artificial Sequence
  Description of Artificial Sequence: Synthetic oligonucleotide
gcuuagugauaucgucacc

SEQ ID NO: 1021994 - RNA, 19 nt, Artificial Sequence
  Description of Artificial Sequence: Synthetic oligonucleotide
cauccacaccacacuucug

SEQ ID NO: 1021995 - RNA, 19 nt, Artificial Sequence
  Description of Artificial Sequence: Synthetic oligonucleotide
gcauuucccacaaguguug

SEQ ID NO: 1021996 - RNA, 19 nt, Artificial Sequence
  Description of Artificial Sequence: Synthetic oligonucleotide
ugcacacgguauccacaaa

SEQ ID NO: 1021997 - RNA, 19 nt, Artificial Sequence
  Description of Artificial Sequence: Synthetic oligonucleotide
cucaagcugggugaucaca

SEQ ID NO: 1021998 - RNA, 19 nt, Artificial Sequence
  Description of Artificial Sequence: Synthetic oligonucleotide
gcggaagaccuuuacucca

SEQ ID NO: 1021999 - RNA, 19 nt, Artificial Sequence
  Description of Artificial Sequence: Synthetic oligonucleotide
caaguaccacgcccgccac

SEQ ID NO: 1022000 - RNA, 19 nt, Artificial Sequence
  Description of Artificial Sequence: Synthetic oligonucleotide
ugcaaacaacucugucguu

SEQ ID NO: 1022001 - RNA, 19 nt, Artificial Sequence
  Description of Artificial Sequence: Synthetic oligonucleotide
gagugcucaggucuaggau

SEQ ID NO: 1022002 - RNA, 19 nt, Artificial Sequence
  Description of Artificial Sequence: Synthetic oligonucleotide
cuauccggaaucuuucauu

SEQ ID NO: 1022003 - RNA, 19 nt, Artificial Sequence
  Description of Artificial Sequence: Synthetic oligonucleotide
uauccguaucuggcacuug

SEQ ID NO: 1022004 - RNA, 19 nt, Artificial Sequence
  Description of Artificial Sequence: Synthetic oligonucleotide
ugcccuguuucugggacuu

SEQ ID NO: 1022005 - RNA, 19 nt, Artificial Sequence
  Description of Artificial Sequence: Synthetic oligonucleotide
cugaaaucgggagucccaa

SEQ ID NO: 1022006 - RNA, 19 nt, Artificial Sequence
  Description of Artificial Sequence: Synthetic oligonucleotide
gcgcuucaacuuuucauuc

SEQ ID NO: 1022007 - RNA, 19 nt, Artificial Sequence
  Description of Artificial Sequence: Synthetic oligonucleotide
cugcaauacccugccccag

SEQ ID NO: 1022008 - RNA, 19 nt, Artificial Sequence
  Description of Artificial Sequence: Synthetic oligonucleotide
ggcgcuucaacuuuucauu

SEQ ID NO: 1022009 - RNA, 19 nt, Artificial Sequence
  Description of Artificial Sequence: Synthetic oligonucleotide
ggcagauggcgcuucaacu

SEQ ID NO: 1022010 - RNA, 19 nt, Artificial Sequence
  Description of Artificial Sequence: Synthetic oligonucleotide
ggaaacacuggaagaagcu

SEQ ID NO: 1022011 - RNA, 19 nt, Artificial Sequence
  Description of Artificial Sequence: Synthetic oligonucleotide
ccccugaguauucugccac

SEQ ID NO: 1022012 - RNA, 19 nt, Artificial Sequence
  Description of Artificial Sequence: Synthetic oligonucleotide
gagagagugcucaggucua

SEQ ID NO: 1022013 - RNA, 19 nt, Artificial Sequence
  Description of Artificial Sequence: Synthetic oligonucleotide
ccacgucucuauaaauauc

SEQ ID NO: 1022014 - RNA, 19 nt, Artificial Sequence
  Description of Artificial Sequence: Synthetic oligonucleotide
guaccaggcuccgagacau

SEQ ID NO: 1022015 - RNA, 19 nt, Artificial Sequence
  Description of Artificial Sequence: Synthetic oligonucleotide
cccuuuagauucacaauaa

SEQ ID NO: 1022016 - RNA, 19 nt, Artificial Sequence
  Description of Artificial Sequence: Synthetic oligonucleotide
gggguaucagcccuguggu

SEQ ID NO: 1022017 - RNA, 19 nt, Artificial Sequence
  Description of Artificial Sequence: Synthetic oligonucleotide
cggaagagaucccaaaaga

SEQ ID NO: 1022018 - RNA, 19 nt, Artificial Sequence
  Description of Artificial Sequence: Synthetic oligonucleotide
cgucuauccggaaucuuuc

SEQ ID NO: 1022019 - RNA, 19 nt, Artificial Sequence
  Description of Artificial Sequence: Synthetic oligonucleotide
ggcaauggcgaagccuacc

SEQ ID NO: 1022020 - RNA, 19 nt, Artificial Sequence
  Description of Artificial Sequence: Synthetic oligonucleotide
cccggugcccuccuguacc

SEQ ID NO: 1022021 - RNA, 19 nt, Artificial Sequence
  Description of Artificial Sequence: Synthetic oligonucleotide
gccacgucucuauaaauau

SEQ ID NO: 1022022 - RNA, 19 nt, Artificial Sequence
  Description of Artificial Sequence: Synthetic oligonucleotide
ggcccagagugacuguuca

SEQ ID NO: 1022023 - RNA, 19 nt, Artificial Sequence
  Description of Artificial Sequence: Synthetic oligonucleotide
gcauucggaucaccacgag

SEQ ID NO: 1022024 - RNA, 19 nt, Artificial Sequence
  Description of Artificial Sequence: Synthetic oligonucleotide
gagugacuguucaguuuga

SEQ ID NO: 1022025 - RNA, 19 nt, Artificial Sequence
  Description of Artificial Sequence: Synthetic oligonucleotide
ggagaauacuauggaaacu

SEQ ID NO: 1022026 - RNA, 19 nt, Artificial Sequence
  Description of Artificial Sequence: Synthetic oligonucleotide
gccagccugacugcaauac

SEQ ID NO: 1022027 - RNA, 19 nt, Artificial Sequence
  Description of Artificial Sequence: Synthetic oligonucleotide
cagcaaccugcguguugcc

SEQ ID NO: 1022028 - RNA, 19 nt, Artificial Sequence
  Description of Artificial Sequence: Synthetic oligonucleotide
ggagcggaagaccuuuacu

SEQ ID NO: 1022029 - RNA, 19 nt, Artificial Sequence
  Description of Artificial Sequence: Synthetic oligonucleotide
gcugggugaucacaggacu

SEQ ID NO: 1022030 - RNA, 19 nt, Artificial Sequence
  Description of Artificial Sequence: Synthetic oligonucleotide
guucaugguuggagccuug

SEQ ID NO: 1022031 - RNA, 19 nt, Artificial Sequence
  Description of Artificial Sequence: Synthetic oligonucleotide
cuguaacaggcugcgaugu

SEQ ID NO: 1022032 - RNA, 19 nt, Artificial Sequence
  Description of Artificial Sequence: Synthetic oligonucleotide
ccccaccacgucuauccgg

SEQ ID NO: 1022033 - RNA, 19 nt, Artificial Sequence
  Description of Artificial Sequence: Synthetic oligonucleotide
gguuacuguccacucggua

SEQ ID NO: 1022034 - RNA, 19 nt, Artificial Sequence
  Description of Artificial Sequence: Synthetic oligonucleotide
aggugaccuagaggcagga

SEQ ID NO: 1022035 - RNA, 19 nt, Artificial Sequence
  Description of Artificial Sequence: Synthetic oligonucleotide
uuccggugguggagggcaa

SEQ ID NO: 1022036 - RNA, 19 nt, Artificial Sequence
  Description of Artificial Sequence: Synthetic oligonucleotide
agcugccaaugagauuacu

SEQ ID NO: 1022037 - RNA, 19 nt, Artificial Sequence
  Description of Artificial Sequence: Synthetic oligonucleotide
cgguauccacaaaggagag

SEQ ID NO: 1022038 - RNA, 19 nt, Artificial Sequence
  Description of Artificial Sequence: Synthetic oligonucleotide
cccaccacgucuauccgga

SEQ ID NO: 1022039 - RNA, 19 nt, Artificial Sequence
  Description of Artificial Sequence: Synthetic oligonucleotide
ggugaccuagaggcaggag

SEQ ID NO: 1022040 - RNA, 19 nt, Artificial Sequence
  Description of Artificial Sequence: Synthetic oligonucleotide
uggaaacugccaggccaau

SEQ ID NO: 1022041 - RNA, 19 nt, Artificial Sequence
  Description of Artificial Sequence: Synthetic oligonucleotide
ccccaaugagcgugaguag

SEQ ID NO: 1022042 - RNA, 19 nt, Artificial Sequence
  Description of Artificial Sequence: Synthetic oligonucleotide
cgaucucccggaagucucg

SEQ ID NO: 1022043 - RNA, 19 nt, Artificial Sequence
  Description of Artificial Sequence: Synthetic oligonucleotide
gcucuuagggccagacuuc

SEQ ID NO: 1022044 - RNA, 19 nt, Artificial Sequence
  Description of Artificial Sequence: Synthetic oligonucleotide
ggucaccagccagauuagc

SEQ ID NO: 1022045 - RNA, 19 nt, Artificial Sequence
  Description of Artificial Sequence: Synthetic oligonucleotide
guaccacgcccgccacaag

SEQ ID NO: 1022046 - RNA, 19 nt, Artificial Sequence
  Description of Artificial Sequence: Synthetic oligonucleotide
agauggcgcuucaacuuuu

SEQ ID NO: 1022047 - RNA, 19 nt, Artificial Sequence
  Description of Artificial Sequence: Synthetic oligonucleotide
gcugaggagcggaagaccu

SEQ ID NO: 1022048 - RNA, 19 nt, Artificial Sequence
  Description of Artificial Sequence: Synthetic oligonucleotide
uaacggcugccaggacggc

SEQ ID NO: 1022049 - RNA, 19 nt, Artificial Sequence
  Description of Artificial Sequence: Synthetic oligonucleotide
guuuugcaccaaaggaaau

SEQ ID NO: 1022050 - RNA, 19 nt, Artificial Sequence
  Description of Artificial Sequence: Synthetic oligonucleotide
gccagauuagcagguccac

SEQ ID NO: 1022051 - RNA, 19 nt, Artificial Sequence
  Description of Artificial Sequence: Synthetic oligonucleotide
ccacaaaggagagagugcu

SEQ ID NO: 1022052 - RNA, 19 nt, Artificial Sequence
  Description of Artificial Sequence: Synthetic oligonucleotide
ccggccucaagcuggguga

SEQ ID NO: 1022053 - RNA, 19 nt, Artificial Sequence
  Description of Artificial Sequence: Synthetic oligonucleotide
cgauguacacuuccaccuc

SEQ ID NO: 1022054 - RNA, 19 nt, Artificial Sequence
  Description of Artificial Sequence: Synthetic oligonucleotide
cagauggcgcuucaacuuu

SEQ ID NO: 1022055 - RNA, 19 nt, Artificial Sequence
  Description of Artificial Sequence: Synthetic oligonucleotide
cacaagcgcugugaccaca

SEQ ID NO: 1022056 - RNA, 19 nt, Artificial Sequence
  Description of Artificial Sequence: Synthetic oligonucleotide
ggaagucucggaaaauauu

SEQ ID NO: 1022057 - RNA, 19 nt, Artificial Sequence
  Description of Artificial Sequence: Synthetic oligonucleotide
gguuggagccuugacaguu

SEQ ID NO: 1022058 - RNA, 19 nt, Artificial Sequence
  Description of Artificial Sequence: Synthetic oligonucleotide
cacuguagagcucggcauu

SEQ ID NO: 1022059 - RNA, 19 nt, Artificial Sequence
  Description of Artificial Sequence: Synthetic oligonucleotide
guguugcaaacaacucugu

SEQ ID NO: 1022060 - RNA, 19 nt, Artificial Sequence
  Description of Artificial Sequence: Synthetic oligonucleotide
ggucuaggaugaggguaug

SEQ ID NO: 1022061 - RNA, 19 nt, Artificial Sequence
  Description of Artificial Sequence: Synthetic oligonucleotide
gccccugaguauucugcca

SEQ ID NO: 1022062 - RNA, 19 nt, Artificial Sequence
  Description of Artificial Sequence: Synthetic oligonucleotide
cgucucuauaaauauccgu

SEQ ID NO: 1022063 - RNA, 19 nt, Artificial Sequence
  Description of Artificial Sequence: Synthetic oligonucleotide
cugccacgucucuauaaau

SEQ ID NO: 1022064 - RNA, 19 nt, Artificial Sequence
  Description of Artificial Sequence: Synthetic oligonucleotide
cugaaacugaggagaucuu

SEQ ID NO: 1022065 - RNA, 19 nt, Artificial Sequence
  Description of Artificial Sequence: Synthetic oligonucleotide
gcagcagggagaauacuau

SEQ ID NO: 1022066 - RNA, 19 nt, Artificial Sequence
  Description of Artificial Sequence: Synthetic oligonucleotide
gaggagcggaagaccuuua

SEQ ID NO: 1022067 - RNA, 19 nt, Artificial Sequence
  Description of Artificial Sequence: Synthetic oligonucleotide
cagcagaaugguggccaca

SEQ ID NO: 1022068 - RNA, 19 nt, Artificial Sequence
  Description of Artificial Sequence: Synthetic oligonucleotide
ccacaagcgcugugaccac

SEQ ID NO: 1022069 - RNA, 19 nt, Artificial Sequence
  Description of Artificial Sequence: Synthetic oligonucleotide
ccggaagucucggaaaaua

SEQ ID NO: 1022070 - RNA, 19 nt, Artificial Sequence
  Description of Artificial Sequence: Synthetic oligonucleotide
guuggagccuugacaguuu

SEQ ID NO: 1022071 - RNA, 19 nt, Artificial Sequence
  Description of Artificial Sequence: Synthetic oligonucleotide
ccgccacaagcgcugugac

SEQ ID NO: 1022072 - RNA, 19 nt, Artificial Sequence
  Description of Artificial Sequence: Synthetic oligonucleotide
ccggugguggagggcaaag

SEQ ID NO: 1022073 - RNA, 19 nt, Artificial Sequence
  Description of Artificial Sequence: Synthetic oligonucleotide
cccaaugagcgugaguagu

SEQ ID NO: 1022074 - RNA, 19 nt, Artificial Sequence
  Description of Artificial Sequence: Synthetic oligonucleotide
ccaaugagcgugaguaguu

SEQ ID NO: 1022075 - RNA, 19 nt, Artificial Sequence
  Description of Artificial Sequence: Synthetic oligonucleotide
cugaggagcggaagaccuu

SEQ ID NO: 1022076 - RNA, 19 nt, Artificial Sequence
  Description of Artificial Sequence: Synthetic oligonucleotide
cccgccacaagcgcuguga

SEQ ID NO: 1022077 - RNA, 19 nt, Artificial Sequence
  Description of Artificial Sequence: Synthetic oligonucleotide
ggacuguaacaggcugcga

SEQ ID NO: 1022078 - RNA, 19 nt, Artificial Sequence
  Description of Artificial Sequence: Synthetic oligonucleotide
cggaagucucggaaaauau

SEQ ID NO: 1022079 - RNA, 19 nt, Artificial Sequence
  Description of Artificial Sequence: Synthetic oligonucleotide
ccacgagcagcagggagaa

SEQ ID NO: 1022080 - RNA, 19 nt, Artificial Sequence
  Description of Artificial Sequence: Synthetic oligonucleotide
ccacucgauuugcuuucca

SEQ ID NO: 1022081 - RNA, 19 nt, Artificial Sequence
  Description of Artificial Sequence: Synthetic oligonucleotide
gcacuugccccaggauaga

SEQ ID NO: 1022082 - RNA, 19 nt, Artificial Sequence
  Description of Artificial Sequence: Synthetic oligonucleotide
ccggugcccuccuguacca

SEQ ID NO: 1022083 - RNA, 19 nt, Artificial Sequence
  Description of Artificial Sequence: Synthetic oligonucleotide
cacgucuauccggaaucuu

SEQ ID NO: 1022084 - RNA, 19 nt, Artificial Sequence
  Description of Artificial Sequence: Synthetic oligonucleotide
ggccucaagcugggugauc

SEQ ID NO: 1022085 - RNA, 19 nt, Artificial Sequence
  Description of Artificial Sequence: Synthetic oligonucleotide
gcccgccacaagcgcugug

SEQ ID NO: 1022086 - RNA, 19 nt, Artificial Sequence
  Description of Artificial Sequence: Synthetic oligonucleotide
caguggccccaaugagcgu

SEQ ID NO: 1022087 - RNA, 19 nt, Artificial Sequence
  Description of Artificial Sequence: Synthetic oligonucleotide
ccgagacauggagcagcuc

SEQ ID NO: 1022088 - RNA, 19 nt, Artificial Sequence
  Description of Artificial Sequence: Synthetic oligonucleotide
ccacgucuauccggaaucu

SEQ ID NO: 1022089 - RNA, 19 nt, Artificial Sequence
  Description of Artificial Sequence: Synthetic oligonucleotide
ccaccacgucuauccggaa

SEQ ID NO: 1022090 - RNA, 19 nt, Artificial Sequence
  Description of Artificial Sequence: Synthetic oligonucleotide
cuccagcaaccugcguguu

SEQ ID NO: 1022091 - RNA, 19 nt, Artificial Sequence
  Description of Artificial Sequence: Synthetic oligonucleotide
cccggaagucucggaaaau

SEQ ID NO: 1022092 - RNA, 19 nt, Artificial Sequence
  Description of Artificial Sequence: Synthetic oligonucleotide
guccggccucaagcugggu

SEQ ID NO: 1022093 - RNA, 19 nt, Artificial Sequence
  Description of Artificial Sequence: Synthetic oligonucleotide
cggccucaagcugggugau

SEQ ID NO: 1022094 - RNA, 19 nt, Artificial Sequence
  Description of Artificial Sequence: Synthetic oligonucleotide
cgcccgccacaagcgcugu

SEQ ID NO: 1022095 - RNA, 19 nt, Artificial Sequence
  Description of Artificial Sequence: Synthetic oligonucleotide
aaugauaaaauccaaaauc

SEQ ID NO: 1022096 - RNA, 19 nt, Artificial Sequence
  Description of Artificial Sequence: Synthetic oligonucleotide
aaucucauaguucaaauac

SEQ ID NO: 1022097 - RNA, 19 nt, Artificial Sequence
  Description of Artificial Sequence: Synthetic oligonucleotide
aauggcuuagauuaucacc

SEQ ID NO: 1022098 - RNA, 19 nt, Artificial Sequence
  Description of Artificial Sequence: Synthetic oligonucleotide
aaauacuuaugccugcucc

SEQ ID NO: 1022099 - RNA, 19 nt, Artificial Sequence
  Description of Artificial Sequence: Synthetic oligonucleotide
auuuuaauguguuucaggg

SEQ ID NO: 1022100 - RNA, 19 nt, Artificial Sequence
  Description of Artificial Sequence: Synthetic oligonucleotide
uuauauaccauuuacagua

SEQ ID NO: 1022101 - RNA, 19 nt, Artificial Sequence
  Description of Artificial Sequence: Synthetic oligonucleotide
uuuaauguguuucagggga

SEQ ID NO: 1022102 - RNA, 19 nt, Artificial Sequence
  Description of Artificial Sequence: Synthetic oligonucleotide
uagauuaucaccuuggccu

SEQ ID NO: 1022103 - RNA, 19 nt, Artificial Sequence
  Description of Artificial Sequence: Synthetic oligonucleotide
agacuaguaagccacaucg

SEQ ID NO: 1022104 - RNA, 19 nt, Artificial Sequence
  Description of Artificial Sequence: Synthetic oligonucleotide
uuuggcgacauuaucauag

SEQ ID NO: 1022105 - RNA, 19 nt, Artificial Sequence
  Description of Artificial Sequence: Synthetic oligonucleotide
ucaaauacggaucagucac

SEQ ID NO: 1022106 - RNA, 19 nt, Artificial Sequence
  Description of Artificial Sequence: Synthetic oligonucleotide
uaaaccuucucucaucccg

SEQ ID NO: 1022107 - RNA, 19 nt, Artificial Sequence
  Description of Artificial Sequence: Synthetic oligonucleotide
aagccuuaaaccuucucuc

SEQ ID NO: 1022108 - RNA, 19 nt, Artificial Sequence
  Description of Artificial Sequence: Synthetic oligonucleotide
uuauugugcacauuagcag

SEQ ID NO: 1022109 - RNA, 19 nt, Artificial Sequence
  Description of Artificial Sequence: Synthetic oligonucleotide
uauuauugugcacauuagc

SEQ ID NO: 1022110 - RNA, 19 nt, Artificial Sequence
  Description of Artificial Sequence: Synthetic oligonucleotide
ucaacaauuuuccccagcc

SEQ ID NO: 1022111 - RNA, 19 nt, Artificial Sequence
  Description of Artificial Sequence: Synthetic oligonucleotide
uguuuagggacacaacugc

SEQ ID NO: 1022112 - RNA, 19 nt, Artificial Sequence
  Description of Artificial Sequence: Synthetic oligonucleotide
uuugucccuaucauaaucc

SEQ ID NO: 1022113 - RNA, 19 nt, Artificial Sequence
  Description of Artificial Sequence: Synthetic oligonucleotide
uacaguaacagcucaaaac

SEQ ID NO: 1022114 - RNA, 19 nt, Artificial Sequence
  Description of Artificial Sequence: Synthetic oligonucleotide
auacagaagaaacacauaa

SEQ ID NO: 1022115 - RNA, 19 nt, Artificial Sequence
  Description of Artificial Sequence: Synthetic oligonucleotide
auucucagagccuuggccg

SEQ ID NO: 1022116 - RNA, 19 nt, Artificial Sequence
  Description of Artificial Sequence: Synthetic oligonucleotide
ucgaucaacaauuuucccc

SEQ ID NO: 1022117 - RNA, 19 nt, Artificial Sequence
  Description of Artificial Sequence: Synthetic oligonucleotide
caaacuuucagcuccucgg

SEQ ID NO: 1022118 - RNA, 19 nt, Artificial Sequence
  Description of Artificial Sequence: Synthetic oligonucleotide
gauaaaauccaaaaucuca

SEQ ID NO: 1022119 - RNA, 19 nt, Artificial Sequence
  Description of Artificial Sequence: Synthetic oligonucleotide
ucggacaaaacccagucug

SEQ ID NO: 1022120 - RNA, 19 nt, Artificial Sequence
  Description of Artificial Sequence: Synthetic oligonucleotide
uuagauuaucaccuuggcc

SEQ ID NO: 1022121 - RNA, 19 nt, Artificial Sequence
  Description of Artificial Sequence: Synthetic oligonucleotide
aauaaucuccuuguuuagg

SEQ ID NO: 1022122 - RNA, 19 nt, Artificial Sequence
  Description of Artificial Sequence: Synthetic oligonucleotide
ucauaguucaaauacggau

SEQ ID NO: 1022123 - RNA, 19 nt, Artificial Sequence
  Description of Artificial Sequence: Synthetic oligonucleotide
acaacuguagcacccgccc

SEQ ID NO: 1022124 - RNA, 19 nt, Artificial Sequence
  Description of Artificial Sequence: Synthetic oligonucleotide
uuugauccaaacuuucagc

SEQ ID NO: 1022125 - RNA, 19 nt, Artificial Sequence
  Description of Artificial Sequence: Synthetic oligonucleotide
auagauguaucuuuucugu

SEQ ID NO: 1022126 - RNA, 19 nt, Artificial Sequence
  Description of Artificial Sequence: Synthetic oligonucleotide
agcuaguuuggucaauggc

SEQ ID NO: 1022127 - RNA, 19 nt, Artificial Sequence
  Description of Artificial Sequence: Synthetic oligonucleotide
cauaguucaaauacggauc

SEQ ID NO: 1022128 - RNA, 19 nt, Artificial Sequence
  Description of Artificial Sequence: Synthetic oligonucleotide
ucgugggaaaacauguccg

SEQ ID NO: 1022129 - RNA, 19 nt, Artificial Sequence
  Description of Artificial Sequence: Synthetic oligonucleotide
uggaauaaacagcaauggc

SEQ ID NO: 1022130 - RNA, 19 nt, Artificial Sequence
  Description of Artificial Sequence: Synthetic oligonucleotide
ugaucgaaggucuuggagu

SEQ ID NO: 1022131 - RNA, 19 nt, Artificial Sequence
  Description of Artificial Sequence: Synthetic oligonucleotide
ucucggaaaucauugaacu

SEQ ID NO: 1022132 - RNA, 19 nt, Artificial Sequence
  Description of Artificial Sequence: Synthetic oligonucleotide
ucauaaaccaggugccggg

SEQ ID NO: 1022133 - RNA, 19 nt, Artificial Sequence
  Description of Artificial Sequence: Synthetic oligonucleotide
uuguuuagggacacaacug

SEQ ID NO: 1022134 - RNA, 19 nt, Artificial Sequence
  Description of Artificial Sequence: Synthetic oligonucleotide
uuuaacaguggcaaugaua

SEQ ID NO: 1022135 - RNA, 19 nt, Artificial Sequence
  Description of Artificial Sequence: Synthetic oligonucleotide
uuuagggacacaacugcug

SEQ ID NO: 1022136 - RNA, 19 nt, Artificial Sequence
  Description of Artificial Sequence: Synthetic oligonucleotide
acuuaugccugcuccaagg

SEQ ID NO: 1022137 - RNA, 19 nt, Artificial Sequence
  Description of Artificial Sequence: Synthetic oligonucleotide
uccuacuggaauaaacagc

SEQ ID NO: 1022138 - RNA, 19 nt, Artificial Sequence
  Description of Artificial Sequence: Synthetic oligonucleotide
aauccuacuggaauaaaca

SEQ ID NO: 1022139 - RNA, 19 nt, Artificial Sequence
  Description of Artificial Sequence: Synthetic oligonucleotide
uaucauaauccuuccagac

SEQ ID NO: 1022140 - RNA, 19 nt, Artificial Sequence
  Description of Artificial Sequence: Synthetic oligonucleotide
auaguucaaauacggauca

SEQ ID NO: 1022141 - RNA, 19 nt, Artificial Sequence
  Description of Artificial Sequence: Synthetic oligonucleotide
augaucagaacuaucuugg

SEQ ID NO: 1022142 - RNA, 19 nt, Artificial Sequence
  Description of Artificial Sequence: Synthetic oligonucleotide
auuauugugcacauuagca

SEQ ID NO: 1022143 - RNA, 19 nt, Artificial Sequence
  Description of Artificial Sequence: Synthetic oligonucleotide
uuccaguaaauauggaaug

SEQ ID NO: 1022144 - RNA, 19 nt, Artificial Sequence
  Description of Artificial Sequence: Synthetic oligonucleotide
auacggaucagucacucug

SEQ ID NO: 1022145 - RNA, 19 nt, Artificial Sequence
  Description of Artificial Sequence: Synthetic oligonucleotide
cuaguaagccacaucguag

SEQ ID NO: 1022146 - RNA, 19 nt, Artificial Sequence
  Description of Artificial Sequence: Synthetic oligonucleotide
aaauacggaucagucacuc

SEQ ID NO: 1022147 - RNA, 19 nt, Artificial Sequence
  Description of Artificial Sequence: Synthetic oligonucleotide
agguaguagccauagguag

SEQ ID NO: 1022148 - RNA, 19 nt, Artificial Sequence
  Description of Artificial Sequence: Synthetic oligonucleotide
uugaucgaaggucuuggag

SEQ ID NO: 1022149 - RNA, 19 nt, Artificial Sequence
  Description of Artificial Sequence: Synthetic oligonucleotide
uguaucuuuucuguacccg

SEQ ID NO: 1022150 - RNA, 19 nt, Artificial Sequence
  Description of Artificial Sequence: Synthetic oligonucleotide
ucccguucggacaaaaccc

SEQ ID NO: 1022151 - RNA, 19 nt, Artificial Sequence
  Description of Artificial Sequence: Synthetic oligonucleotide
ugucaauucgaucaacaau

SEQ ID NO: 1022152 - RNA, 19 nt, Artificial Sequence
  Description of Artificial Sequence: Synthetic oligonucleotide
gaucagucacucugcaugg

SEQ ID NO: 1022153 - RNA, 19 nt, Artificial Sequence
  Description of Artificial Sequence: Synthetic oligonucleotide
gacgagaccaucuccauca

SEQ ID NO: 1022154 - RNA, 19 nt, Artificial Sequence
  Description of Artificial Sequence: Synthetic oligonucleotide
aucguagcaauuguuuccc

SEQ ID NO: 1022155 - RNA, 19 nt, Artificial Sequence
  Description of Artificial Sequence: Synthetic oligonucleotide
uguaagaucuuccccguaa

SEQ ID NO: 1022156 - RNA, 19 nt, Artificial Sequence
  Description of Artificial Sequence: Synthetic oligonucleotide
acauaaagcauuugaaaua

SEQ ID NO: 1022157 - RNA, 19 nt, Artificial Sequence
  Description of Artificial Sequence: Synthetic oligonucleotide
gaauaaucuccuuguuuag

SEQ ID NO: 1022158 - RNA, 19 nt, Artificial Sequence
  Description of Artificial Sequence: Synthetic oligonucleotide
uuagcaggcccauacagaa

SEQ ID NO: 1022159 - RNA, 19 nt, Artificial Sequence
  Description of Artificial Sequence: Synthetic oligonucleotide
uccaucacugucaauucga

SEQ ID NO: 1022160 - RNA, 19 nt, Artificial Sequence
  Description of Artificial Sequence: Synthetic oligonucleotide
auaaaccaggugccgggcc

SEQ ID NO: 1022161 - RNA, 19 nt, Artificial Sequence
  Description of Artificial Sequence: Synthetic oligonucleotide
aagagaaaugcaauugcca

SEQ ID NO: 1022162 - RNA, 19 nt, Artificial Sequence
  Description of Artificial Sequence: Synthetic oligonucleotide
aaacuuucagcuccucggu

SEQ ID NO: 1022163 - RNA, 19 nt, Artificial Sequence
  Description of Artificial Sequence: Synthetic oligonucleotide
uccucgugggaaaacaugu

SEQ ID NO: 1022164 - RNA, 19 nt, Artificial Sequence
  Description of Artificial Sequence: Synthetic oligonucleotide
auauggguauuauugugca

SEQ ID NO: 1022165 - RNA, 19 nt, Artificial Sequence
  Description of Artificial Sequence: Synthetic oligonucleotide
gacacaacugcugugcacc

SEQ ID NO: 1022166 - RNA, 19 nt, Artificial Sequence
  Description of Artificial Sequence: Synthetic oligonucleotide
cuuagauuaucaccuuggc

SEQ ID NO: 1022167 - RNA, 19 nt, Artificial Sequence
  Description of Artificial Sequence: Synthetic oligonucleotide
auggcuuagauuaucaccu

SEQ ID NO: 1022168 - RNA, 19 nt, Artificial Sequence
  Description of Artificial Sequence: Synthetic oligonucleotide
ggaucagucacucugcaug

SEQ ID NO: 1022169 - RNA, 19 nt, Artificial Sequence
  Description of Artificial Sequence: Synthetic oligonucleotide
ugaucguacuggaagcucu

SEQ ID NO: 1022170 - RNA, 19 nt, Artificial Sequence
  Description of Artificial Sequence: Synthetic oligonucleotide
cauuagcaggcccauacag

SEQ ID NO: 1022171 - RNA, 19 nt, Artificial Sequence
  Description of Artificial Sequence: Synthetic oligonucleotide
agaggucagacuaguaagc

SEQ ID NO: 1022172 - RNA, 19 nt, Artificial Sequence
  Description of Artificial Sequence: Synthetic oligonucleotide
aguggguuuggcccgcagc

SEQ ID NO: 1022173 - RNA, 19 nt, Artificial Sequence
  Description of Artificial Sequence: Synthetic oligonucleotide
cucgugggaaaacaugucc

SEQ ID NO: 1022174 - RNA, 19 nt, Artificial Sequence
  Description of Artificial Sequence: Synthetic oligonucleotide
ucaucucuaaaauuacuuu

SEQ ID NO: 1022175 - RNA, 19 nt, Artificial Sequence
  Description of Artificial Sequence: Synthetic oligonucleotide
cacauuagcaggcccauac

SEQ ID NO: 1022176 - RNA, 19 nt, Artificial Sequence
  Description of Artificial Sequence: Synthetic oligonucleotide
auggcuauuuuccaguaaa

SEQ ID NO: 1022177 - RNA, 19 nt, Artificial Sequence
  Description of Artificial Sequence: Synthetic oligonucleotide
auggguauuauugugcaca

SEQ ID NO: 1022178 - RNA, 19 nt, Artificial Sequence
  Description of Artificial Sequence: Synthetic oligonucleotide
agcgggguuuccuagguag

SEQ ID NO: 1022179 - RNA, 19 nt, Artificial Sequence
  Description of Artificial Sequence: Synthetic oligonucleotide
uuuguaagaucuuccccgu

SEQ ID NO: 1022180 - RNA, 19 nt, Artificial Sequence
  Description of Artificial Sequence: Synthetic oligonucleotide
aucucggaaaucauugaac

SEQ ID NO: 1022181 - RNA, 19 nt, Artificial Sequence
  Description of Artificial Sequence: Synthetic oligonucleotide
cucccguucggacaaaacc

SEQ ID NO: 1022182 - RNA, 19 nt, Artificial Sequence
  Description of Artificial Sequence: Synthetic oligonucleotide
uaagccacaucguagcaau

SEQ ID NO: 1022183 - RNA, 19 nt, Artificial Sequence
  Description of Artificial Sequence: Synthetic oligonucleotide
ugugcguggucauaguccu

SEQ ID NO: 1022184 - RNA, 19 nt, Artificial Sequence
  Description of Artificial Sequence: Synthetic oligonucleotide
gaagccuuaaaccuucucu

SEQ ID NO: 1022185 - RNA, 19 nt, Artificial Sequence
  Description of Artificial Sequence: Synthetic oligonucleotide
uaauugguagccuggcuuc

SEQ ID NO: 1022186 - RNA, 19 nt, Artificial Sequence
  Description of Artificial Sequence: Synthetic oligonucleotide
uagguaguagccauaggua

SEQ ID NO: 1022187 - RNA, 19 nt, Artificial Sequence
  Description of Artificial Sequence: Synthetic oligonucleotide
uuacaguaacagcucaaaa

SEQ ID NO: 1022188 - RNA, 19 nt, Artificial Sequence
  Description of Artificial Sequence: Synthetic oligonucleotide
acuaguaagccacaucgua

SEQ ID NO: 1022189 - RNA, 19 nt, Artificial Sequence
  Description of Artificial Sequence: Synthetic oligonucleotide
aggcccauacagaagaaac

SEQ ID NO: 1022190 - RNA, 19 nt, Artificial Sequence
  Description of Artificial Sequence: Synthetic oligonucleotide
uccaguaaauauggaauga

SEQ ID NO: 1022191 - RNA, 19 nt, Artificial Sequence
  Description of Artificial Sequence: Synthetic oligonucleotide
agauuaucaccuuggccug

SEQ ID NO: 1022192 - RNA, 19 nt, Artificial Sequence
  Description of Artificial Sequence: Synthetic oligonucleotide
acccguuugauccaaacuu

SEQ ID NO: 1022193 - RNA, 19 nt, Artificial Sequence
  Description of Artificial Sequence: Synthetic oligonucleotide
uauauaccauuuacaguaa

SEQ ID NO: 1022194 - RNA, 19 nt, Artificial Sequence
  Description of Artificial Sequence: Synthetic oligonucleotide
ugcaccugacaacuguagc

SEQ ID NO: 1022195 - RNA, 19 nt, Artificial Sequence
  Description of Artificial Sequence: Synthetic oligonucleotide
uguuucaggggaaauccua

SEQ ID NO: 1022196 - RNA, 19 nt, Artificial Sequence
  Description of Artificial Sequence: Synthetic oligonucleotide
ugccaagauuuuaaugugu

SEQ ID NO: 1022197 - RNA, 19 nt, Artificial Sequence
  Description of Artificial Sequence: Synthetic oligonucleotide
aguucaaauacggaucagu

SEQ ID NO: 1022198 - RNA, 19 nt, Artificial Sequence
  Description of Artificial Sequence: Synthetic oligonucleotide
cuuugucccuaucauaauc

SEQ ID NO: 1022199 - RNA, 19 nt, Artificial Sequence
  Description of Artificial Sequence: Synthetic oligonucleotide
uucgaucaacaauuuuccc

SEQ ID NO: 1022200 - RNA, 19 nt, Artificial Sequence
  Description of Artificial Sequence: Synthetic oligonucleotide
aauacggaucagucacucu

SEQ ID NO: 1022201 - RNA, 19 nt, Artificial Sequence
  Description of Artificial Sequence: Synthetic oligonucleotide
uacggaucagucacucugc

SEQ ID NO: 1022202 - RNA, 19 nt, Artificial Sequence
  Description of Artificial Sequence: Synthetic oligonucleotide
uccagcguuuccaaaacua

SEQ ID NO: 1022203 - RNA, 19 nt, Artificial Sequence
  Description of Artificial Sequence: Synthetic oligonucleotide
aauucagcgggguuuccua

SEQ ID NO: 1022204 - RNA, 19 nt, Artificial Sequence
  Description of Artificial Sequence: Synthetic oligonucleotide
uuaauguguuucaggggaa

SEQ ID NO: 1022205 - RNA, 19 nt, Artificial Sequence
  Description of Artificial Sequence: Synthetic oligonucleotide
cucauaaaccaggugccgg

SEQ ID NO: 1022206 - RNA, 19 nt, Artificial Sequence
  Description of Artificial Sequence: Synthetic oligonucleotide
agccugcuuguauucuucc

SEQ ID NO: 1022207 - RNA, 19 nt, Artificial Sequence
  Description of Artificial Sequence: Synthetic oligonucleotide
agggccguuguccucgugg

SEQ ID NO: 1022208 - RNA, 19 nt, Artificial Sequence
  Description of Artificial Sequence: Synthetic oligonucleotide
uaaaccaggugccgggccu

SEQ ID NO: 1022209 - RNA, 19 nt, Artificial Sequence
  Description of Artificial Sequence: Synthetic oligonucleotide
ucagaacuaucuuggaauu

SEQ ID NO: 1022210 - RNA, 19 nt, Artificial Sequence
  Description of Artificial Sequence: Synthetic oligonucleotide
cuuguuuagggacacaacu

SEQ ID NO: 1022211 - RNA, 19 nt, Artificial Sequence
  Description of Artificial Sequence: Synthetic oligonucleotide
ccuacuggaauaaacagca

SEQ ID NO: 1022212 - RNA, 19 nt, Artificial Sequence
  Description of Artificial Sequence: Synthetic oligonucleotide
uuaugccugcuccaaggcu

SEQ ID NO: 1022213 - RNA, 19 nt, Artificial Sequence
  Description of Artificial Sequence: Synthetic oligonucleotide
ugaaauacuuaugccugcu

SEQ ID NO: 1022214 - RNA, 19 nt, Artificial Sequence
  Description of Artificial Sequence: Synthetic oligonucleotide
guauuauugugcacauuag

SEQ ID NO: 1022215 - RNA, 19 nt, Artificial Sequence
  Description of Artificial Sequence: Synthetic oligonucleotide
uacuuaugccugcuccaag

SEQ ID NO: 1022216 - RNA, 19 nt, Artificial Sequence
  Description of Artificial Sequence: Synthetic oligonucleotide
gcuuagauuaucaccuugg

SEQ ID NO: 1022217 - RNA, 19 nt, Artificial Sequence
  Description of Artificial Sequence: Synthetic oligonucleotide
aguuuggucaauggcuuag

SEQ ID NO: 1022218 - RNA, 19 nt, Artificial Sequence
  Description of Artificial Sequence: Synthetic oligonucleotide
cuacaauuuccuucauaug

SEQ ID NO: 1022219 - RNA, 19 nt, Artificial Sequence
  Description of Artificial Sequence: Synthetic oligonucleotide
gaucucggaaaucauugaa

SEQ ID NO: 1022220 - RNA, 19 nt, Artificial Sequence
  Description of Artificial Sequence: Synthetic oligonucleotide
uuuggucaauggcuuagau

SEQ ID NO: 1022221 - RNA, 19 nt, Artificial Sequence
  Description of Artificial Sequence: Synthetic oligonucleotide
cuuaguugaucgaaggucu

SEQ ID NO: 1022222 - RNA, 19 nt, Artificial Sequence
  Description of Artificial Sequence: Synthetic oligonucleotide
ccaguggcgaaucucaucc

SEQ ID NO: 1022223 - RNA, 19 nt, Artificial Sequence
  Description of Artificial Sequence: Synthetic oligonucleotide
uggucgcgagcagagaagg

SEQ ID NO: 1022224 - RNA, 19 nt, Artificial Sequence
  Description of Artificial Sequence: Synthetic oligonucleotide
gaaaacauguccgcaaugu

SEQ ID NO: 1022225 - RNA, 19 nt, Artificial Sequence
  Description of Artificial Sequence: Synthetic oligonucleotide
gaaauacuuaugccugcuc

SEQ ID NO: 1022226 - RNA, 19 nt, Artificial Sequence
  Description of Artificial Sequence: Synthetic oligonucleotide
cucggaaaucauugaacug

SEQ ID NO: 1022227 - RNA, 19 nt, Artificial Sequence
  Description of Artificial Sequence: Synthetic oligonucleotide
guccgggcuuaguugaucg

SEQ ID NO: 1022228 - RNA, 19 nt, Artificial Sequence
  Description of Artificial Sequence: Synthetic oligonucleotide
auagguagccugcuuguau

SEQ ID NO: 1022229 - RNA, 19 nt, Artificial Sequence
  Description of Artificial Sequence: Synthetic oligonucleotide
uccucgguggugacgagac

SEQ ID NO: 1022230 - RNA, 19 nt, Artificial Sequence
  Description of Artificial Sequence: Synthetic oligonucleotide
ucgcgagcagagaagggug

SEQ ID NO: 1022231 - RNA, 19 nt, Artificial Sequence
  Description of Artificial Sequence: Synthetic oligonucleotide
uccgcaauguacucauccu

SEQ ID NO: 1022232 - RNA, 19 nt, Artificial Sequence
  Description of Artificial Sequence: Synthetic oligonucleotide
uuccccguaauugguagcc

SEQ ID NO: 1022233 - RNA, 19 nt, Artificial Sequence
  Description of Artificial Sequence: Synthetic oligonucleotide
gaucaacaauuuuccccag

SEQ ID NO: 1022234 - RNA, 19 nt, Artificial Sequence
  Description of Artificial Sequence: Synthetic oligonucleotide
cacaaagccauccccguuc

SEQ ID NO: 1022235 - RNA, 19 nt, Artificial Sequence
  Description of Artificial Sequence: Synthetic oligonucleotide
agucgggccgcacuacgcg

SEQ ID NO: 1022236 - RNA, 19 nt, Artificial Sequence
  Description of Artificial Sequence: Synthetic oligonucleotide
acucauaaaccaggugccg

SEQ ID NO: 1022237 - RNA, 19 nt, Artificial Sequence
  Description of Artificial Sequence: Synthetic oligonucleotide
uggugacgagaccaucucc

SEQ ID NO: 1022238 - RNA, 19 nt, Artificial Sequence
  Description of Artificial Sequence: Synthetic oligonucleotide
caauggcuuagauuaucac

SEQ ID NO: 1022239 - RNA, 19 nt, Artificial Sequence
  Description of Artificial Sequence: Synthetic oligonucleotide
uguagcacccgcccagcac

SEQ ID NO: 1022240 - RNA, 19 nt, Artificial Sequence
  Description of Artificial Sequence: Synthetic oligonucleotide
gcgacauuaucauagaugu

SEQ ID NO: 1022241 - RNA, 19 nt, Artificial Sequence
  Description of Artificial Sequence: Synthetic oligonucleotide
agguagccugcuuguauuc

SEQ ID NO: 1022242 - RNA, 19 nt, Artificial Sequence
  Description of Artificial Sequence: Synthetic oligonucleotide
auucagcgggguuuccuag

SEQ ID NO: 1022243 - RNA, 19 nt, Artificial Sequence
  Description of Artificial Sequence: Synthetic oligonucleotide
ucguacuggaagcucuggu

SEQ ID NO: 1022244 - RNA, 19 nt, Artificial Sequence
  Description of Artificial Sequence: Synthetic oligonucleotide
uugucccuaucauaauccu

SEQ ID NO: 1022245 - RNA, 19 nt, Artificial Sequence
  Description of Artificial Sequence: Synthetic oligonucleotide
acugucaauucgaucaaca

SEQ ID NO: 1022246 - RNA, 19 nt, Artificial Sequence
  Description of Artificial Sequence: Synthetic oligonucleotide
ucccuaucauaauccuucc

SEQ ID NO: 1022247 - RNA, 19 nt, Artificial Sequence
  Description of Artificial Sequence: Synthetic oligonucleotide
cagcuaguuuggucaaugg

SEQ ID NO: 1022248 - RNA, 19 nt, Artificial Sequence
  Description of Artificial Sequence: Synthetic oligonucleotide
uagauguaucuuuucugua

SEQ ID NO: 1022249 - RNA, 19 nt, Artificial Sequence
  Description of Artificial Sequence: Synthetic oligonucleotide
uuggaauucagcgggguuu

SEQ ID NO: 1022250 - RNA, 19 nt, Artificial Sequence
  Description of Artificial Sequence: Synthetic oligonucleotide
aguaagccacaucguagca

SEQ ID NO: 1022251 - RNA, 19 nt, Artificial Sequence
  Description of Artificial Sequence: Synthetic oligonucleotide
aaccuucucucaucccgug

SEQ ID NO: 1022252 - RNA, 19 nt, Artificial Sequence
  Description of Artificial Sequence: Synthetic oligonucleotide
ccaguugucuagaaucucc

SEQ ID NO: 1022253 - RNA, 19 nt, Artificial Sequence
  Description of Artificial Sequence: Synthetic oligonucleotide
guagccauagguagccugc

SEQ ID NO: 1022254 - RNA, 19 nt, Artificial Sequence
  Description of Artificial Sequence: Synthetic oligonucleotide
ggcgacauuaucauagaug

SEQ ID NO: 1022255 - RNA, 19 nt, Artificial Sequence
  Description of Artificial Sequence: Synthetic oligonucleotide
ccgaguagccgucaggucg

SEQ ID NO: 1022256 - RNA, 19 nt, Artificial Sequence
  Description of Artificial Sequence: Synthetic oligonucleotide
agucacucugcauggcgug

SEQ ID NO: 1022257 - RNA, 19 nt, Artificial Sequence
  Description of Artificial Sequence: Synthetic oligonucleotide
uuggcgacauuaucauaga

SEQ ID NO: 1022258 - RNA, 19 nt, Artificial Sequence
  Description of Artificial Sequence: Synthetic oligonucleotide
gugaacuccucccgaguag

SEQ ID NO: 1022259 - RNA, 19 nt, Artificial Sequence
  Description of Artificial Sequence: Synthetic oligonucleotide
aaaccuucucucaucccgu

SEQ ID NO: 1022260 - RNA, 19 nt, Artificial Sequence
  Description of Artificial Sequence: Synthetic oligonucleotide
gcuauuuuccaguaaauau

SEQ ID NO: 1022261 - RNA, 19 nt, Artificial Sequence
  Description of Artificial Sequence: Synthetic oligonucleotide
ugcaauugccaagauuuua

SEQ ID NO: 1022262 - RNA, 19 nt, Artificial Sequence
  Description of Artificial Sequence: Synthetic oligonucleotide
cagggcgagucccaggcgg

SEQ ID NO: 1022263 - RNA, 19 nt, Artificial Sequence
  Description of Artificial Sequence: Synthetic oligonucleotide
auguccgcaauguacucau

SEQ ID NO: 1022264 - RNA, 19 nt, Artificial Sequence
  Description of Artificial Sequence: Synthetic oligonucleotide
ggucagacuaguaagccac

SEQ ID NO: 1022265 - RNA, 19 nt, Artificial Sequence
  Description of Artificial Sequence: Synthetic oligonucleotide
ucuguacccguuugaucca

SEQ ID NO: 1022266 - RNA, 19 nt, Artificial Sequence
  Description of Artificial Sequence: Synthetic oligonucleotide
uggguauuauugugcacau

SEQ ID NO: 1022267 - RNA, 19 nt, Artificial Sequence
  Description of Artificial Sequence: Synthetic oligonucleotide
agcguuuccaaaacuacaa

SEQ ID NO: 1022268 - RNA, 19 nt, Artificial Sequence
  Description of Artificial Sequence: Synthetic oligonucleotide
ugguuagcaucucauccuu

SEQ ID NO: 1022269 - RNA, 19 nt, Artificial Sequence
  Description of Artificial Sequence: Synthetic oligonucleotide
uuguccucgugggaaaaca

SEQ ID NO: 1022270 - RNA, 19 nt, Artificial Sequence
  Description of Artificial Sequence: Synthetic oligonucleotide
uggcgaaucucauccuugu

SEQ ID NO: 1022271 - RNA, 19 nt, Artificial Sequence
  Description of Artificial Sequence: Synthetic oligonucleotide
cugacaacuguagcacccg

SEQ ID NO: 1022272 - RNA, 19 nt, Artificial Sequence
  Description of Artificial Sequence: Synthetic oligonucleotide
guagcacccgcccagcaca

SEQ ID NO: 1022273 - RNA, 19 nt, Artificial Sequence
  Description of Artificial Sequence: Synthetic oligonucleotide
ugacgagaccaucuccauc

SEQ ID NO: 1022274 - RNA, 19 nt, Artificial Sequence
  Description of Artificial Sequence: Synthetic oligonucleotide
caccugacaacuguagcac

SEQ ID NO: 1022275 - RNA, 19 nt, Artificial Sequence
  Description of Artificial Sequence: Synthetic oligonucleotide
ugucccuaucauaauccuu

SEQ ID NO: 1022276 - RNA, 19 nt, Artificial Sequence
  Description of Artificial Sequence: Synthetic oligonucleotide
uggaagcucugguuguccu

SEQ ID NO: 1022277 - RNA, 19 nt, Artificial Sequence
  Description of Artificial Sequence: Synthetic oligonucleotide
uuaguugaucgaaggucuu

SEQ ID NO: 1022278 - RNA, 19 nt, Artificial Sequence
  Description of Artificial Sequence: Synthetic oligonucleotide
aucagucacucugcauggc

SEQ ID NO: 1022279 - RNA, 19 nt, Artificial Sequence
  Description of Artificial Sequence: Synthetic oligonucleotide
cgucaggucgccaucaagg

SEQ ID NO: 1022280 - RNA, 19 nt, Artificial Sequence
  Description of Artificial Sequence: Synthetic oligonucleotide
uguccucgugggaaaacau

SEQ ID NO: 1022281 - RNA, 19 nt, Artificial Sequence
  Description of Artificial Sequence: Synthetic oligonucleotide
gcuuaguugaucgaagguc

SEQ ID NO: 1022282 - RNA, 19 nt, Artificial Sequence
  Description of Artificial Sequence: Synthetic oligonucleotide
ggagaggucagacuaguaa

SEQ ID NO: 1022283 - RNA, 19 nt, Artificial Sequence
  Description of Artificial Sequence: Synthetic oligonucleotide
uagggacacaacugcugug

SEQ ID NO: 1022284 - RNA, 19 nt, Artificial Sequence
  Description of Artificial Sequence: Synthetic oligonucleotide
aaaccaggugccgggccuc

SEQ ID NO: 1022285 - RNA, 19 nt, Artificial Sequence
  Description of Artificial Sequence: Synthetic oligonucleotide
uaauguguuucaggggaaa

SEQ ID NO: 1022286 - RNA, 19 nt, Artificial Sequence
  Description of Artificial Sequence: Synthetic oligonucleotide
auaaacagcaauggcuauu

SEQ ID NO: 1022287 - RNA, 19 nt, Artificial Sequence
  Description of Artificial Sequence: Synthetic oligonucleotide
ucggccacaacaggaugag

SEQ ID NO: 1022288 - RNA, 19 nt, Artificial Sequence
  Description of Artificial Sequence: Synthetic oligonucleotide
uaguucaaauacggaucag

SEQ ID NO: 1022289 - RNA, 19 nt, Artificial Sequence
  Description of Artificial Sequence: Synthetic oligonucleotide
cacagucggccacaacagg

SEQ ID NO: 1022290 - RNA, 19 nt, Artificial Sequence
  Description of Artificial Sequence: Synthetic oligonucleotide
aaaacccagucuggcucag

SEQ ID NO: 1022291 - RNA, 19 nt, Artificial Sequence
  Description of Artificial Sequence: Synthetic oligonucleotide
gguaguagccauagguagc

SEQ ID NO: 1022292 - RNA, 19 nt, Artificial Sequence
  Description of Artificial Sequence: Synthetic oligonucleotide
cauaaaccaggugccgggc

SEQ ID NO: 1022293 - RNA, 19 nt, Artificial Sequence
  Description of Artificial Sequence: Synthetic oligonucleotide
gacaaaacccagucuggcu

SEQ ID NO: 1022294 - RNA, 19 nt, Artificial Sequence
  Description of Artificial Sequence: Synthetic oligonucleotide
acagucggccacaacagga

SEQ ID NO: 1022295 - RNA, 19 nt, Artificial Sequence
  Description of Artificial Sequence: Synthetic oligonucleotide
cagacuaguaagccacauc

SEQ ID NO: 1022296 - RNA, 19 nt, Artificial Sequence
  Description of Artificial Sequence: Synthetic oligonucleotide
agucggccacaacaggaug

SEQ ID NO: 1022297 - RNA, 19 nt, Artificial Sequence
  Description of Artificial Sequence: Synthetic oligonucleotide
aguggcgaaucucauccuu

SEQ ID NO: 1022298 - RNA, 19 nt, Artificial Sequence
  Description of Artificial Sequence: Synthetic oligonucleotide
guacccguuugauccaaac

SEQ ID NO: 1022299 - RNA, 19 nt, Artificial Sequence
  Description of Artificial Sequence: Synthetic oligonucleotide
ggucugaagccuuaaaccu

SEQ ID NO: 1022300 - RNA, 19 nt, Artificial Sequence
  Description of Artificial Sequence: Synthetic oligonucleotide
cugcuccaaggcuucagac

SEQ ID NO: 1022301 - RNA, 19 nt, Artificial Sequence
  Description of Artificial Sequence: Synthetic oligonucleotide
uggaauucagcgggguuuc

SEQ ID NO: 1022302 - RNA, 19 nt, Artificial Sequence
  Description of Artificial Sequence: Synthetic oligonucleotide
acgagaccaucuccaucac

SEQ ID NO: 1022303 - RNA, 19 nt, Artificial Sequence
  Description of Artificial Sequence: Synthetic oligonucleotide
gaucguacuggaagcucug

SEQ ID NO: 1022304 - RNA, 19 nt, Artificial Sequence
  Description of Artificial Sequence: Synthetic oligonucleotide
uccaguggcgaaucucauc

SEQ ID NO: 1022305 - RNA, 19 nt, Artificial Sequence
  Description of Artificial Sequence: Synthetic oligonucleotide
ucagacuaguaagccacau

SEQ ID NO: 1022306 - RNA, 19 nt, Artificial Sequence
  Description of Artificial Sequence: Synthetic oligonucleotide
uggcgacauuaucauagau

SEQ ID NO: 1022307 - RNA, 19 nt, Artificial Sequence
  Description of Artificial Sequence: Synthetic oligonucleotide
cagcguuuccaaaacuaca

SEQ ID NO: 1022308 - RNA, 19 nt, Artificial Sequence
  Description of Artificial Sequence: Synthetic oligonucleotide
guuguccucaggcggucgc

SEQ ID NO: 1022309 - RNA, 19 nt, Artificial Sequence
  Description of Artificial Sequence: Synthetic oligonucleotide
auuuacaguaacagcucaa

SEQ ID NO: 1022310 - RNA, 19 nt, Artificial Sequence
  Description of Artificial Sequence: Synthetic oligonucleotide
ucccguggcagcaucuuuu

SEQ ID NO: 1022311 - RNA, 19 nt, Artificial Sequence
  Description of Artificial Sequence: Synthetic oligonucleotide
cauggucgcgagcagagaa

SEQ ID NO: 1022312 - RNA, 19 nt, Artificial Sequence
  Description of Artificial Sequence: Synthetic oligonucleotide
aaacagcaauggcuauuuu

SEQ ID NO: 1022313 - RNA, 19 nt, Artificial Sequence
  Description of Artificial Sequence: Synthetic oligonucleotide
aaacccagucuggcucagg

SEQ ID NO: 1022314 - RNA, 19 nt, Artificial Sequence
  Description of Artificial Sequence: Synthetic oligonucleotide
guugaucgaaggucuugga

SEQ ID NO: 1022315 - RNA, 19 nt, Artificial Sequence
  Description of Artificial Sequence: Synthetic oligonucleotide
acggaucagucacucugca

SEQ ID NO: 1022316 - RNA, 19 nt, Artificial Sequence
  Description of Artificial Sequence: Synthetic oligonucleotide
auacuuaugccugcuccaa

SEQ ID NO: 1022317 - RNA, 19 nt, Artificial Sequence
  Description of Artificial Sequence: Synthetic oligonucleotide
ccagcguuuccaaaacuac

SEQ ID NO: 1022318 - RNA, 19 nt, Artificial Sequence
  Description of Artificial Sequence: Synthetic oligonucleotide
gcuaguuuggucaauggcu

SEQ ID NO: 1022319 - RNA, 19 nt, Artificial Sequence
  Description of Artificial Sequence: Synthetic oligonucleotide
ucgauguccuccagcguuu

SEQ ID NO: 1022320 - RNA, 19 nt, Artificial Sequence
  Description of Artificial Sequence: Synthetic oligonucleotide
uccucaggcggucgcucgc

SEQ ID NO: 1022321 - RNA, 19 nt, Artificial Sequence
  Description of Artificial Sequence: Synthetic oligonucleotide
uaguuuggucaauggcuua

SEQ ID NO: 1022322 - RNA, 19 nt, Artificial Sequence
  Description of Artificial Sequence: Synthetic oligonucleotide
ggacaaaacccagucuggc

SEQ ID NO: 1022323 - RNA, 19 nt, Artificial Sequence
  Description of Artificial Sequence: Synthetic oligonucleotide
ggugacgagaccaucucca

SEQ ID NO: 1022324 - RNA, 19 nt, Artificial Sequence
  Description of Artificial Sequence: Synthetic oligonucleotide
cugcugugcaccugacaac

SEQ ID NO: 1022325 - RNA, 19 nt, Artificial Sequence
  Description of Artificial Sequence: Synthetic oligonucleotide
uccgagucgggccgcacua

SEQ ID NO: 1022326 - RNA, 19 nt, Artificial Sequence
  Description of Artificial Sequence: Synthetic oligonucleotide
guccucgugggaaaacaug

SEQ ID NO: 1022327 - RNA, 19 nt, Artificial Sequence
  Description of Artificial Sequence: Synthetic oligonucleotide
uggccuguuucaucucuaa

SEQ ID NO: 1022328 - RNA, 19 nt, Artificial Sequence
  Description of Artificial Sequence: Synthetic oligonucleotide
uuggccuguuucaucucua

SEQ ID NO: 1022329 - RNA, 19 nt, Artificial Sequence
  Description of Artificial Sequence: Synthetic oligonucleotide
guggugacgagaccaucuc

SEQ ID NO: 1022330 - RNA, 19 nt, Artificial Sequence
  Description of Artificial Sequence: Synthetic oligonucleotide
gguuuccuagguaguagcc

SEQ ID NO: 1022331 - RNA, 19 nt, Artificial Sequence
  Description of Artificial Sequence: Synthetic oligonucleotide
accaaagauauggguauua

SEQ ID NO: 1022332 - RNA, 19 nt, Artificial Sequence
  Description of Artificial Sequence: Synthetic oligonucleotide
cuaguuuggucaauggcuu

SEQ ID NO: 1022333 - RNA, 19 nt, Artificial Sequence
  Description of Artificial Sequence: Synthetic oligonucleotide
ccuuaaaccuucucucauc

SEQ ID NO: 1022334 - RNA, 19 nt, Artificial Sequence
  Description of Artificial Sequence: Synthetic oligonucleotide
cuugcgcacaguggguuug

SEQ ID NO: 1022335 - RNA, 19 nt, Artificial Sequence
  Description of Artificial Sequence: Synthetic oligonucleotide
uguacccguuugauccaaa

SEQ ID NO: 1022336 - RNA, 19 nt, Artificial Sequence
  Description of Artificial Sequence: Synthetic oligonucleotide
auggucgcgagcagagaag

SEQ ID NO: 1022337 - RNA, 19 nt, Artificial Sequence
  Description of Artificial Sequence: Synthetic oligonucleotide
cccacagucggccacaaca

SEQ ID NO: 1022338 - RNA, 19 nt, Artificial Sequence
  Description of Artificial Sequence: Synthetic oligonucleotide
ucgggccgcacuacgcgcu

SEQ ID NO: 1022339 - RNA, 19 nt, Artificial Sequence
  Description of Artificial Sequence: Synthetic oligonucleotide
uccgggcuuaguugaucga

SEQ ID NO: 1022340 - RNA, 19 nt, Artificial Sequence
  Description of Artificial Sequence: Synthetic oligonucleotide
cacaucguagcaauuguuu

SEQ ID NO: 1022341 - RNA, 19 nt, Artificial Sequence
  Description of Artificial Sequence: Synthetic oligonucleotide
gggccguuguccucguggg

SEQ ID NO: 1022342 - RNA, 19 nt, Artificial Sequence
  Description of Artificial Sequence: Synthetic oligonucleotide
guaagccacaucguagcaa

SEQ ID NO: 1022343 - RNA, 19 nt, Artificial Sequence
  Description of Artificial Sequence: Synthetic oligonucleotide
gagucgggccgcacuacgc

SEQ ID NO: 1022344 - RNA, 19 nt, Artificial Sequence
  Description of Artificial Sequence: Synthetic oligonucleotide
gugaucguacuggaagcuc

SEQ ID NO: 1022345 - RNA, 19 nt, Artificial Sequence
  Description of Artificial Sequence: Synthetic oligonucleotide
gggguuuccuagguaguag

SEQ ID NO: 1022346 - RNA, 19 nt, Artificial Sequence
  Description of Artificial Sequence: Synthetic oligonucleotide
aggauccaguggcgaaucu

SEQ ID NO: 1022347 - RNA, 19 nt, Artificial Sequence
  Description of Artificial Sequence: Synthetic oligonucleotide
uagccauagguagccugcu

SEQ ID NO: 1022348 - RNA, 19 nt, Artificial Sequence
  Description of Artificial Sequence: Synthetic oligonucleotide
gucgggccgcacuacgcgc

SEQ ID NO: 1022349 - RNA, 19 nt, Artificial Sequence
  Description of Artificial Sequence: Synthetic oligonucleotide
guaagaucuuccccguaau

SEQ ID NO: 1022350 - RNA, 19 nt, Artificial Sequence
  Description of Artificial Sequence: Synthetic oligonucleotide
caauggcuauuuuccagua

SEQ ID NO: 1022351 - RNA, 19 nt, Artificial Sequence
  Description of Artificial Sequence: Synthetic oligonucleotide
caggcggucgcucgcccag

SEQ ID NO: 1022352 - RNA, 19 nt, Artificial Sequence
  Description of Artificial Sequence: Synthetic oligonucleotide
guuuagggacacaacugcu

SEQ ID NO: 1022353 - RNA, 19 nt, Artificial Sequence
  Description of Artificial Sequence: Synthetic oligonucleotide
gaauucagcgggguuuccu

SEQ ID NO: 1022354 - RNA, 19 nt, Artificial Sequence
  Description of Artificial Sequence: Synthetic oligonucleotide
ccgcaauguacucauccug

SEQ ID NO: 1022355 - RNA, 19 nt, Artificial Sequence
  Description of Artificial Sequence: Synthetic oligonucleotide
caccuuggccuguuucauc

SEQ ID NO: 1022356 - RNA, 19 nt, Artificial Sequence
  Description of Artificial Sequence: Synthetic oligonucleotide
ccguuugauccaaacuuuc

SEQ ID NO: 1022357 - RNA, 19 nt, Artificial Sequence
  Description of Artificial Sequence: Synthetic oligonucleotide
cgccaucaaggucugaagc

SEQ ID NO: 1022358 - RNA, 19 nt, Artificial Sequence
  Description of Artificial Sequence: Synthetic oligonucleotide
caaauacggaucagucacu

SEQ ID NO: 1022359 - RNA, 19 nt, Artificial Sequence
  Description of Artificial Sequence: Synthetic oligonucleotide
gacuaguaagccacaucgu

SEQ ID NO: 1022360 - RNA, 19 nt, Artificial Sequence
  Description of Artificial Sequence: Synthetic oligonucleotide
cucgcccagcuccgagucg

SEQ ID NO: 1022361 - RNA, 19 nt, Artificial Sequence
  Description of Artificial Sequence: Synthetic oligonucleotide
uagccgucaggucgccauc

SEQ ID NO: 1022362 - RNA, 19 nt, Artificial Sequence
  Description of Artificial Sequence: Synthetic oligonucleotide
caauugccaagauuuuaau

SEQ ID NO: 1022363 - RNA, 19 nt, Artificial Sequence
  Description of Artificial Sequence: Synthetic oligonucleotide
guagccgucaggucgccau

SEQ ID NO: 1022364 - RNA, 19 nt, Artificial Sequence
  Description of Artificial Sequence: Synthetic oligonucleotide
ggcccauacagaagaaaca

SEQ ID NO: 1022365 - RNA, 19 nt, Artificial Sequence
  Description of Artificial Sequence: Synthetic oligonucleotide
gucgcgagcagagaagggu

SEQ ID NO: 1022366 - RNA, 19 nt, Artificial Sequence
  Description of Artificial Sequence: Synthetic oligonucleotide
uggguuuggcccgcagcgu

SEQ ID NO: 1022367 - RNA, 19 nt, Artificial Sequence
  Description of Artificial Sequence: Synthetic oligonucleotide
cuuuggcgacauuaucaua

SEQ ID NO: 1022368 - RNA, 19 nt, Artificial Sequence
  Description of Artificial Sequence: Synthetic oligonucleotide
caacaauuuuccccagccu

SEQ ID NO: 1022369 - RNA, 19 nt, Artificial Sequence
  Description of Artificial Sequence: Synthetic oligonucleotide
uccccguaauugguagccu

SEQ ID NO: 1022370 - RNA, 19 nt, Artificial Sequence
  Description of Artificial Sequence: Synthetic oligonucleotide
cucaggcggucgcucgccc

SEQ ID NO: 1022371 - RNA, 19 nt, Artificial Sequence
  Description of Artificial Sequence: Synthetic oligonucleotide
gguuagcaucucauccuug

SEQ ID NO: 1022372 - RNA, 19 nt, Artificial Sequence
  Description of Artificial Sequence: Synthetic oligonucleotide
acccgcccagcacaccuga

SEQ ID NO: 1022373 - RNA, 19 nt, Artificial Sequence
  Description of Artificial Sequence: Synthetic oligonucleotide
cgaguagccgucaggucgc

SEQ ID NO: 1022374 - RNA, 19 nt, Artificial Sequence
  Description of Artificial Sequence: Synthetic oligonucleotide
cgcacuacgcgcuccuugc

SEQ ID NO: 1022375 - RNA, 19 nt, Artificial Sequence
  Description of Artificial Sequence: Synthetic oligonucleotide
ccccguaauugguagccug

SEQ ID NO: 1022376 - RNA, 19 nt, Artificial Sequence
  Description of Artificial Sequence: Synthetic oligonucleotide
ggcuuaguugaucgaaggu

SEQ ID NO: 1022377 - RNA, 19 nt, Artificial Sequence
  Description of Artificial Sequence: Synthetic oligonucleotide
ggauccaguggcgaaucuc

SEQ ID NO: 1022378 - RNA, 19 nt, Artificial Sequence
  Description of Artificial Sequence: Synthetic oligonucleotide
gucagacuaguaagccaca

SEQ ID NO: 1022379 - RNA, 19 nt, Artificial Sequence
  Description of Artificial Sequence: Synthetic oligonucleotide
cacaguggguuuggcccgc

SEQ ID NO: 1022380 - RNA, 19 nt, Artificial Sequence
  Description of Artificial Sequence: Synthetic oligonucleotide
aucccguggcagcaucuuu

SEQ ID NO: 1022381 - RNA, 19 nt, Artificial Sequence
  Description of Artificial Sequence: Synthetic oligonucleotide
gcgcacaguggguuuggcc

SEQ ID NO: 1022382 - RNA, 19 nt, Artificial Sequence
  Description of Artificial Sequence: Synthetic oligonucleotide
ccugugcguggucauaguc

SEQ ID NO: 1022383 - RNA, 19 nt, Artificial Sequence
  Description of Artificial Sequence: Synthetic oligonucleotide
ccuucaccacuguuuaaca

SEQ ID NO: 1022384 - RNA, 19 nt, Artificial Sequence
  Description of Artificial Sequence: Synthetic oligonucleotide
caccgcgcgccauggucgc

SEQ ID NO: 1022385 - RNA, 19 nt, Artificial Sequence
  Description of Artificial Sequence: Synthetic oligonucleotide
augcaauugccaagauuuu

SEQ ID NO: 1022386 - RNA, 19 nt, Artificial Sequence
  Description of Artificial Sequence: Synthetic oligonucleotide
agccgucaggucgccauca

SEQ ID NO: 1022387 - RNA, 19 nt, Artificial Sequence
  Description of Artificial Sequence: Synthetic oligonucleotide
gguuguccucaggcggucg

SEQ ID NO: 1022388 - RNA, 19 nt, Artificial Sequence
  Description of Artificial Sequence: Synthetic oligonucleotide
cuccccagcgaggggcgcg

SEQ ID NO: 1022389 - RNA, 19 nt, Artificial Sequence
  Description of Artificial Sequence: Synthetic oligonucleotide
cgggcuuaguugaucgaag

SEQ ID NO: 1022390 - RNA, 19 nt, Artificial Sequence
  Description of Artificial Sequence: Synthetic oligonucleotide
ccucgugggaaaacauguc

SEQ ID NO: 1022391 - RNA, 19 nt, Artificial Sequence
  Description of Artificial Sequence: Synthetic oligonucleotide
ccagacuuuggcgacauua

SEQ ID NO: 1022392 - RNA, 19 nt, Artificial Sequence
  Description of Artificial Sequence: Synthetic oligonucleotide
ccguucggacaaaacccag

SEQ ID NO: 1022393 - RNA, 19 nt, Artificial Sequence
  Description of Artificial Sequence: Synthetic oligonucleotide
ggucgcgagcagagaaggg

SEQ ID NO: 1022394 - RNA, 19 nt, Artificial Sequence
  Description of Artificial Sequence: Synthetic oligonucleotide
ugcucccguucggacaaaa

SEQ ID NO: 1022395 - RNA, 19 nt, Artificial Sequence
  Description of Artificial Sequence: Synthetic oligonucleotide
caguggguuuggcccgcag

SEQ ID NO: 1022396 - RNA, 19 nt, Artificial Sequence
  Description of Artificial Sequence: Synthetic oligonucleotide
ggcgcgcccgacuggcgcg

SEQ ID NO: 1022397 - RNA, 19 nt, Artificial Sequence
  Description of Artificial Sequence: Synthetic oligonucleotide
uugcucucguccgggcuua

SEQ ID NO: 1022398 - RNA, 19 nt, Artificial Sequence
  Description of Artificial Sequence: Synthetic oligonucleotide
cccguucggacaaaaccca

SEQ ID NO: 1022399 - RNA, 19 nt, Artificial Sequence
  Description of Artificial Sequence: Synthetic oligonucleotide
gccacaucguagcaauugu

SEQ ID NO: 1022400 - RNA, 19 nt, Artificial Sequence
  Description of Artificial Sequence: Synthetic oligonucleotide
cuuggaauucagcgggguu

SEQ ID NO: 1022401 - RNA, 19 nt, Artificial Sequence
  Description of Artificial Sequence: Synthetic oligonucleotide
gucugaagccuuaaaccuu

SEQ ID NO: 1022402 - RNA, 19 nt, Artificial Sequence
  Description of Artificial Sequence: Synthetic oligonucleotide
ccgcccagcacaccugaag

SEQ ID NO: 1022403 - RNA, 19 nt, Artificial Sequence
  Description of Artificial Sequence: Synthetic oligonucleotide
gugacgagaccaucuccau

SEQ ID NO: 1022404 - RNA, 19 nt, Artificial Sequence
  Description of Artificial Sequence: Synthetic oligonucleotide
agcgaggggcgcgcccgac

SEQ ID NO: 1022405 - RNA, 19 nt, Artificial Sequence
  Description of Artificial Sequence: Synthetic oligonucleotide
ggaauucagcgggguuucc

SEQ ID NO: 1022406 - RNA, 19 nt, Artificial Sequence
  Description of Artificial Sequence: Synthetic oligonucleotide
auccaguggcgaaucucau

SEQ ID NO: 1022407 - RNA, 19 nt, Artificial Sequence
  Description of Artificial Sequence: Synthetic oligonucleotide
cagucggccacaacaggau

SEQ ID NO: 1022408 - RNA, 19 nt, Artificial Sequence
  Description of Artificial Sequence: Synthetic oligonucleotide
uccagacuuuggcgacauu

SEQ ID NO: 1022409 - RNA, 19 nt, Artificial Sequence
  Description of Artificial Sequence: Synthetic oligonucleotide
gccguuguccucgugggaa

SEQ ID NO: 1022410 - RNA, 19 nt, Artificial Sequence
  Description of Artificial Sequence: Synthetic oligonucleotide
ggucgcucgcccagcuccg

SEQ ID NO: 1022411 - RNA, 19 nt, Artificial Sequence
  Description of Artificial Sequence: Synthetic oligonucleotide
caucaaggucugaagccuu

SEQ ID NO: 1022412 - RNA, 19 nt, Artificial Sequence
  Description of Artificial Sequence: Synthetic oligonucleotide
cgagucgggccgcacuacg

SEQ ID NO: 1022413 - RNA, 19 nt, Artificial Sequence
  Description of Artificial Sequence: Synthetic oligonucleotide
ugcucucguccgggcuuag

SEQ ID NO: 1022414 - RNA, 19 nt, Artificial Sequence
  Description of Artificial Sequence: Synthetic oligonucleotide
cuccagcguuuccaaaacu

SEQ ID NO: 1022415 - RNA, 19 nt, Artificial Sequence
  Description of Artificial Sequence: Synthetic oligonucleotide
aggucgccaucaaggucug

SEQ ID NO: 1022416 - RNA, 19 nt, Artificial Sequence
  Description of Artificial Sequence: Synthetic oligonucleotide
ccgcacuacgcgcuccuug

SEQ ID NO: 1022417 - RNA, 19 nt, Artificial Sequence
  Description of Artificial Sequence: Synthetic oligonucleotide
ccagggcgagucccaggcg

SEQ ID NO: 1022418 - RNA, 19 nt, Artificial Sequence
  Description of Artificial Sequence: Synthetic oligonucleotide
cuguacccguuugauccaa

SEQ ID NO: 1022419 - RNA, 19 nt, Artificial Sequence
  Description of Artificial Sequence: Synthetic oligonucleotide
gugcguggucauaguccug

SEQ ID NO: 1022420 - RNA, 19 nt, Artificial Sequence
  Description of Artificial Sequence: Synthetic oligonucleotide
gcguuuccaaaacuacaau

SEQ ID NO: 1022421 - RNA, 19 nt, Artificial Sequence
  Description of Artificial Sequence: Synthetic oligonucleotide
gaaggguggcggggcagua

SEQ ID NO: 1022422 - RNA, 19 nt, Artificial Sequence
  Description of Artificial Sequence: Synthetic oligonucleotide
gcucccguucggacaaaac

SEQ ID NO: 1022423 - RNA, 19 nt, Artificial Sequence
  Description of Artificial Sequence: Synthetic oligonucleotide
cccgaguagccgucagguc

SEQ ID NO: 1022424 - RNA, 19 nt, Artificial Sequence
  Description of Artificial Sequence: Synthetic oligonucleotide
ccaaggcuucagacuuuuc

SEQ ID NO: 1022425 - RNA, 19 nt, Artificial Sequence
  Description of Artificial Sequence: Synthetic oligonucleotide
caguggcgaaucucauccu

SEQ ID NO: 1022426 - RNA, 19 nt, Artificial Sequence
  Description of Artificial Sequence: Synthetic oligonucleotide
ccucaggcggucgcucgcc

SEQ ID NO: 1022427 - RNA, 19 nt, Artificial Sequence
  Description of Artificial Sequence: Synthetic oligonucleotide
agcuccgagucgggccgca

SEQ ID NO: 1022428 - RNA, 19 nt, Artificial Sequence
  Description of Artificial Sequence: Synthetic oligonucleotide
ggccguuguccucguggga

SEQ ID NO: 1022429 - RNA, 19 nt, Artificial Sequence
  Description of Artificial Sequence: Synthetic oligonucleotide
ccgggcuuaguugaucgaa

SEQ ID NO: 1022430 - RNA, 19 nt, Artificial Sequence
  Description of Artificial Sequence: Synthetic oligonucleotide
cagggccguuguccucgug

SEQ ID NO: 1022431 - RNA, 19 nt, Artificial Sequence
  Description of Artificial Sequence: Synthetic oligonucleotide
gggcgagucccaggcggcc

SEQ ID NO: 1022432 - RNA, 19 nt, Artificial Sequence
  Description of Artificial Sequence: Synthetic oligonucleotide
ggucaauggcuuagauuau

SEQ ID NO: 1022433 - RNA, 19 nt, Artificial Sequence
  Description of Artificial Sequence: Synthetic oligonucleotide
ggcgagucccaggcggcca

SEQ ID NO: 1022434 - RNA, 19 nt, Artificial Sequence
  Description of Artificial Sequence: Synthetic oligonucleotide
cagcgggguuuccuaggua

SEQ ID NO: 1022435 - RNA, 19 nt, Artificial Sequence
  Description of Artificial Sequence: Synthetic oligonucleotide
cguucggacaaaacccagu

SEQ ID NO: 1022436 - RNA, 19 nt, Artificial Sequence
  Description of Artificial Sequence: Synthetic oligonucleotide
gggccgcacuacgcgcucc

SEQ ID NO: 1022437 - RNA, 19 nt, Artificial Sequence
  Description of Artificial Sequence: Synthetic oligonucleotide
gccgucaggucgccaucaa

SEQ ID NO: 1022438 - RNA, 19 nt, Artificial Sequence
  Description of Artificial Sequence: Synthetic oligonucleotide
ccccguucuugucgauguc

SEQ ID NO: 1022439 - RNA, 19 nt, Artificial Sequence
  Description of Artificial Sequence: Synthetic oligonucleotide
ggggcgcgcccgacuggcg

SEQ ID NO: 1022440 - RNA, 19 nt, Artificial Sequence
  Description of Artificial Sequence: Synthetic oligonucleotide
ccgagucgggccgcacuac

SEQ ID NO: 1022441 - RNA, 19 nt, Artificial Sequence
  Description of Artificial Sequence: Synthetic oligonucleotide
gccuuggccgcuguccccu

SEQ ID NO: 1022442 - RNA, 19 nt, Artificial Sequence
  Description of Artificial Sequence: Synthetic oligonucleotide
cagcgaggggcgcgcccga

SEQ ID NO: 1022443 - RNA, 19 nt, Artificial Sequence
  Description of Artificial Sequence: Synthetic oligonucleotide
gcgcgcccgacuggcgcgg

SEQ ID NO: 1022444 - RNA, 19 nt, Artificial Sequence
  Description of Artificial Sequence: Synthetic oligonucleotide
ggccgcacuacgcgcuccu

SEQ ID NO: 1022445 - RNA, 19 nt, Artificial Sequence
  Description of Artificial Sequence: Synthetic oligonucleotide
cgugaucguacuggaagcu

SEQ ID NO: 1022446 - RNA, 19 nt, Artificial Sequence
  Description of Artificial Sequence: Synthetic oligonucleotide
cguccgggcuuaguugauc

SEQ ID NO: 1022447 - RNA, 19 nt, Artificial Sequence
  Description of Artificial Sequence: Synthetic oligonucleotide
ggguauuauugugcacauu

SEQ ID NO: 1022448 - RNA, 19 nt, Artificial Sequence
  Description of Artificial Sequence: Synthetic oligonucleotide
ggcggucgcucgcccagcu

SEQ ID NO: 1022449 - RNA, 19 nt, Artificial Sequence
  Description of Artificial Sequence: Synthetic oligonucleotide
gcgcgccauggucgcgagc

SEQ ID NO: 1022450 - RNA, 19 nt, Artificial Sequence
  Description of Artificial Sequence: Synthetic oligonucleotide
cauccccguucuugucgau

SEQ ID NO: 1022451 - RNA, 19 nt, Artificial Sequence
  Description of Artificial Sequence: Synthetic oligonucleotide
ccuuggccgcuguccccuc

SEQ ID NO: 1022452 - RNA, 19 nt, Artificial Sequence
  Description of Artificial Sequence: Synthetic oligonucleotide
ccuccccagcgaggggcgc

SEQ ID NO: 1022453 - RNA, 19 nt, Artificial Sequence
  Description of Artificial Sequence: Synthetic oligonucleotide
cgcgcgccauggucgcgag

SEQ ID NO: 1022454 - RNA, 19 nt, Artificial Sequence
  Description of Artificial Sequence: Synthetic oligonucleotide
ccuugcgcacaguggguuu

SEQ ID NO: 1022455 - RNA, 19 nt, Artificial Sequence
  Description of Artificial Sequence: Synthetic oligonucleotide
gcgaggggcgcgcccgacu

SEQ ID NO: 1022456 - RNA, 19 nt, Artificial Sequence
  Description of Artificial Sequence: Synthetic oligonucleotide
cguuguccucgugggaaaa

SEQ ID NO: 1022457 - RNA, 19 nt, Artificial Sequence
  Description of Artificial Sequence: Synthetic oligonucleotide
gugccgggccucagccugu

SEQ ID NO: 1022458 - RNA, 19 nt, Artificial Sequence
  Description of Artificial Sequence: Synthetic oligonucleotide
cggaucagucacucugcau

SEQ ID NO: 1022459 - RNA, 19 nt, Artificial Sequence
  Description of Artificial Sequence: Synthetic oligonucleotide
ccccaaucugaggaauaau

SEQ ID NO: 1022460 - RNA, 19 nt, Artificial Sequence
  Description of Artificial Sequence: Synthetic oligonucleotide
cccgcccagcacaccugaa

SEQ ID NO: 1022461 - RNA, 19 nt, Artificial Sequence
  Description of Artificial Sequence: Synthetic oligonucleotide
cgcucgcccagcuccgagu

SEQ ID NO: 1022462 - RNA, 19 nt, Artificial Sequence
  Description of Artificial Sequence: Synthetic oligonucleotide
gccgcacuacgcgcuccuu

SEQ ID NO: 1022463 - RNA, 19 nt, Artificial Sequence
  Description of Artificial Sequence: Synthetic oligonucleotide
gcggggcaguagggauucu

SEQ ID NO: 1022464 - RNA, 19 nt, Artificial Sequence
  Description of Artificial Sequence: Synthetic oligonucleotide
aauaguauuacaucugagg

SEQ ID NO: 1022465 - RNA, 19 nt, Artificial Sequence
  Description of Artificial Sequence: Synthetic oligonucleotide
aauccaauccaauucaggc

SEQ ID NO: 1022466 - RNA, 19 nt, Artificial Sequence
  Description of Artificial Sequence: Synthetic oligonucleotide
uaaaguaacagacaccacg

SEQ ID NO: 1022467 - RNA, 19 nt, Artificial Sequence
  Description of Artificial Sequence: Synthetic oligonucleotide
ucugauaaagccaacaacc

SEQ ID NO: 1022468 - RNA, 19 nt, Artificial Sequence
  Description of Artificial Sequence: Synthetic oligonucleotide
uaaauuucgaagaucaugc

SEQ ID NO: 1022469 - RNA, 19 nt, Artificial Sequence
  Description of Artificial Sequence: Synthetic oligonucleotide
uguuauaccauauuguugc

SEQ ID NO: 1022470 - RNA, 19 nt, Artificial Sequence
  Description of Artificial Sequence: Synthetic oligonucleotide
uuagugguaagauaaauag

SEQ ID NO: 1022471 - RNA, 19 nt, Artificial Sequence
  Description of Artificial Sequence: Synthetic oligonucleotide
aaagaauccauaaauuucg

SEQ ID NO: 1022472 - RNA, 19 nt, Artificial Sequence
  Description of Artificial Sequence: Synthetic oligonucleotide
uggaagaagaaucugaaug

SEQ ID NO: 1022473 - RNA, 19 nt, Artificial Sequence
  Description of Artificial Sequence: Synthetic oligonucleotide
aaauaguucaaucauuagu

SEQ ID NO: 1022474 - RNA, 19 nt, Artificial Sequence
  Description of Artificial Sequence: Synthetic oligonucleotide
aauacaaaugccuacuggu

SEQ ID NO: 1022475 - RNA, 19 nt, Artificial Sequence
  Description of Artificial Sequence: Synthetic oligonucleotide
aauccauaaauuucgaaga

SEQ ID NO: 1022476 - RNA, 19 nt, Artificial Sequence
  Description of Artificial Sequence: Synthetic oligonucleotide
agaguauagaauuugacca

SEQ ID NO: 1022477 - RNA, 19 nt, Artificial Sequence
  Description of Artificial Sequence: Synthetic oligonucleotide
aauuccagagaacuguagg

SEQ ID NO: 1022478 - RNA, 19 nt, Artificial Sequence
  Description of Artificial Sequence: Synthetic oligonucleotide
auacucaagagauuugugc

SEQ ID NO: 1022479 - RNA, 19 nt, Artificial Sequence
  Description of Artificial Sequence: Synthetic oligonucleotide
ugaaauugaacuuugugcu

SEQ ID NO: 1022480 - RNA, 19 nt, Artificial Sequence
  Description of Artificial Sequence: Synthetic oligonucleotide
gacuuuacaagcuaguuug

SEQ ID NO: 1022481 - RNA, 19 nt, Artificial Sequence
  Description of Artificial Sequence: Synthetic oligonucleotide
ucuggaaacaucaauaaaa

SEQ ID NO: 1022482 - RNA, 19 nt, Artificial Sequence
  Description of Artificial Sequence: Synthetic oligonucleotide
agauaaauaguauuacauc

SEQ ID NO: 1022483 - RNA, 19 nt, Artificial Sequence
  Description of Artificial Sequence: Synthetic oligonucleotide
uguuaaagaccccaugccg

SEQ ID NO: 1022484 - RNA, 19 nt, Artificial Sequence
  Description of Artificial Sequence: Synthetic oligonucleotide
acauaauccaauccaauuc

SEQ ID NO: 1022485 - RNA, 19 nt, Artificial Sequence
  Description of Artificial Sequence: Synthetic oligonucleotide
uacaauacgccauuguuag

SEQ ID NO: 1022486 - RNA, 19 nt, Artificial Sequence
  Description of Artificial Sequence: Synthetic oligonucleotide
uagaguauagaauuugacc

SEQ ID NO: 1022487 - RNA, 19 nt, Artificial Sequence
  Description of Artificial Sequence: Synthetic oligonucleotide
aacuauuuaaggcugagua

SEQ ID NO: 1022488 - RNA, 19 nt, Artificial Sequence
  Description of Artificial Sequence: Synthetic oligonucleotide
augacugagaaguaacagc

SEQ ID NO: 1022489 - RNA, 19 nt, Artificial Sequence
  Description of Artificial Sequence: Synthetic oligonucleotide
uuaucagagacccagcaca

SEQ ID NO: 1022490 - RNA, 19 nt, Artificial Sequence
  Description of Artificial Sequence: Synthetic oligonucleotide
ugcugaauagucuucaaag

SEQ ID NO: 1022491 - RNA, 19 nt, Artificial Sequence
  Description of Artificial Sequence: Synthetic oligonucleotide
aacuguuggaacuuuggag

SEQ ID NO: 1022492 - RNA, 19 nt, Artificial Sequence
  Description of Artificial Sequence: Synthetic oligonucleotide
uaggauucuccauuuaucg

SEQ ID NO: 1022493 - RNA, 19 nt, Artificial Sequence
  Description of Artificial Sequence: Synthetic oligonucleotide
uaucccaugagcuauugag

SEQ ID NO: 1022494 - RNA, 19 nt, Artificial Sequence
  Description of Artificial Sequence: Synthetic oligonucleotide
auuguuagaguauagaauu

SEQ ID NO: 1022495 - RNA, 19 nt, Artificial Sequence
  Description of Artificial Sequence: Synthetic oligonucleotide
auaguauuacaucugagga

SEQ ID NO: 1022496 - RNA, 19 nt, Artificial Sequence
  Description of Artificial Sequence: Synthetic oligonucleotide
aaaguaacagacaccacgg

SEQ ID NO: 1022497 - RNA, 19 nt, Artificial Sequence
  Description of Artificial Sequence: Synthetic oligonucleotide
uuucauuaucccaugagcu

SEQ ID NO: 1022498 - RNA, 19 nt, Artificial Sequence
  Description of Artificial Sequence: Synthetic oligonucleotide
uagaccaauuacaaaagcc

SEQ ID NO: 1022499 - RNA, 19 nt, Artificial Sequence
  Description of Artificial Sequence: Synthetic oligonucleotide
ugaacuuugugcugaauag

SEQ ID NO: 1022500 - RNA, 19 nt, Artificial Sequence
  Description of Artificial Sequence: Synthetic oligonucleotide
aguguauuuacaauacgcc

SEQ ID NO: 1022501 - RNA, 19 nt, Artificial Sequence
  Description of Artificial Sequence: Synthetic oligonucleotide
uguagagucaagaaagcac

SEQ ID NO: 1022502 - RNA, 19 nt, Artificial Sequence
  Description of Artificial Sequence: Synthetic oligonucleotide
acuauuuaaggcugaguac

SEQ ID NO: 1022503 - RNA, 19 nt, Artificial Sequence
  Description of Artificial Sequence: Synthetic oligonucleotide
aguauuacaucugaggaag

SEQ ID NO: 1022504 - RNA, 19 nt, Artificial Sequence
  Description of Artificial Sequence: Synthetic oligonucleotide
aacccuuaagaauagggcu

SEQ ID NO: 1022505 - RNA, 19 nt, Artificial Sequence
  Description of Artificial Sequence: Synthetic oligonucleotide
aauaucuggaaacaucaau

SEQ ID NO: 1022506 - RNA, 19 nt, Artificial Sequence
  Description of Artificial Sequence: Synthetic oligonucleotide
ucaugaaagaggaucauuc

SEQ ID NO: 1022507 - RNA, 19 nt, Artificial Sequence
  Description of Artificial Sequence: Synthetic oligonucleotide
uaagauaaauaguauuaca

SEQ ID NO: 1022508 - RNA, 19 nt, Artificial Sequence
  Description of Artificial Sequence: Synthetic oligonucleotide
caaaugaucuuauuccagg

SEQ ID NO: 1022509 - RNA, 19 nt, Artificial Sequence
  Description of Artificial Sequence: Synthetic oligonucleotide
uccaacuuuaucuacaaau

SEQ ID NO: 1022510 - RNA, 19 nt, Artificial Sequence
  Description of Artificial Sequence: Synthetic oligonucleotide
gaucaugccuaucaaaggc

SEQ ID NO: 1022511 - RNA, 19 nt, Artificial Sequence
  Description of Artificial Sequence: Synthetic oligonucleotide
aagaauagggcuuccagaa

SEQ ID NO: 1022512 - RNA, 19 nt, Artificial Sequence
  Description of Artificial Sequence: Synthetic oligonucleotide
cauggagacgacauaaucc

SEQ ID NO: 1022513 - RNA, 19 nt, Artificial Sequence
  Description of Artificial Sequence: Synthetic oligonucleotide
acaagaaugagccauccca

SEQ ID NO: 1022514 - RNA, 19 nt, Artificial Sequence
  Description of Artificial Sequence: Synthetic oligonucleotide
auuuaucgaguuuucacag

SEQ ID NO: 1022515 - RNA, 19 nt, Artificial Sequence
  Description of Artificial Sequence: Synthetic oligonucleotide
auugagguaagacaagugu

SEQ ID NO: 1022516 - RNA, 19 nt, Artificial Sequence
  Description of Artificial Sequence: Synthetic oligonucleotide
aagauaaauaguauuacau

SEQ ID NO: 1022517 - RNA, 19 nt, Artificial Sequence
  Description of Artificial Sequence: Synthetic oligonucleotide
aaaguacccuuuuauugag

SEQ ID NO: 1022518 - RNA, 19 nt, Artificial Sequence
  Description of Artificial Sequence: Synthetic oligonucleotide
acuacaaaccaguccuucc

SEQ ID NO: 1022519 - RNA, 19 nt, Artificial Sequence
  Description of Artificial Sequence: Synthetic oligonucleotide
cuuucauuaucccaugagc

SEQ ID NO: 1022520 - RNA, 19 nt, Artificial Sequence
  Description of Artificial Sequence: Synthetic oligonucleotide
aacauugcaggcauguuuc

SEQ ID NO: 1022521 - RNA, 19 nt, Artificial Sequence
  Description of Artificial Sequence: Synthetic oligonucleotide
aggaucauuccaaagaaac

SEQ ID NO: 1022522 - RNA, 19 nt, Artificial Sequence
  Description of Artificial Sequence: Synthetic oligonucleotide
accaaugaggaccacgaac

SEQ ID NO: 1022523 - RNA, 19 nt, Artificial Sequence
  Description of Artificial Sequence: Synthetic oligonucleotide
auagaauuugaccaugaga

SEQ ID NO: 1022524 - RNA, 19 nt, Artificial Sequence
  Description of Artificial Sequence: Synthetic oligonucleotide
auuaucagagacccagcac

SEQ ID NO: 1022525 - RNA, 19 nt, Artificial Sequence
  Description of Artificial Sequence: Synthetic oligonucleotide
uuuacaauacgccauuguu

SEQ ID NO: 1022526 - RNA, 19 nt, Artificial Sequence
  Description of Artificial Sequence: Synthetic oligonucleotide
ucuaaagccgcugaauucc

SEQ ID NO: 1022527 - RNA, 19 nt, Artificial Sequence
  Description of Artificial Sequence: Synthetic oligonucleotide
uugcuguuauaccauauug

SEQ ID NO: 1022528 - RNA, 19 nt, Artificial Sequence
  Description of Artificial Sequence: Synthetic oligonucleotide
aaaugaucuuauuccaggu

SEQ ID NO: 1022529 - RNA, 19 nt, Artificial Sequence
  Description of Artificial Sequence: Synthetic oligonucleotide
uuagaguauagaauuugac

SEQ ID NO: 1022530 - RNA, 19 nt, Artificial Sequence
  Description of Artificial Sequence: Synthetic oligonucleotide
uauagaauuugaccaugag

SEQ ID NO: 1022531 - RNA, 19 nt, Artificial Sequence
  Description of Artificial Sequence: Synthetic oligonucleotide
uacucaagagauuugugca

SEQ ID NO: 1022532 - RNA, 19 nt, Artificial Sequence
  Description of Artificial Sequence: Synthetic oligonucleotide
uuuaggagggauccaagga

SEQ ID NO: 1022533 - RNA, 19 nt, Artificial Sequence
  Description of Artificial Sequence: Synthetic oligonucleotide
aagugcuuugucaugaaag

SEQ ID NO: 1022534 - RNA, 19 nt, Artificial Sequence
  Description of Artificial Sequence: Synthetic oligonucleotide
aaugcucucugcuuggcgu

SEQ ID NO: 1022535 - RNA, 19 nt, Artificial Sequence
  Description of Artificial Sequence: Synthetic oligonucleotide
uguacgaacacacccggga

SEQ ID NO: 1022536 - RNA, 19 nt, Artificial Sequence
  Description of Artificial Sequence: Synthetic oligonucleotide
uaaauaguucaaucauuag

SEQ ID NO: 1022537 - RNA, 19 nt, Artificial Sequence
  Description of Artificial Sequence: Synthetic oligonucleotide
uugaccaugagacuucuaa

SEQ ID NO: 1022538 - RNA, 19 nt, Artificial Sequence
  Description of Artificial Sequence: Synthetic oligonucleotide
aaacacgacaguauuccac

SEQ ID NO: 1022539 - RNA, 19 nt, Artificial Sequence
  Description of Artificial Sequence: Synthetic oligonucleotide
uguuuuaaagacagugccu

SEQ ID NO: 1022540 - RNA, 19 nt, Artificial Sequence
  Description of Artificial Sequence: Synthetic oligonucleotide
gacgacauaauccaaucca

SEQ ID NO: 1022541 - RNA, 19 nt, Artificial Sequence
  Description of Artificial Sequence: Synthetic oligonucleotide
agaagacacuauuugaaca

SEQ ID NO: 1022542 - RNA, 19 nt, Artificial Sequence
  Description of Artificial Sequence: Synthetic oligonucleotide
augguaaugucucacagaa

SEQ ID NO: 1022543 - RNA, 19 nt, Artificial Sequence
  Description of Artificial Sequence: Synthetic oligonucleotide
gagauuugugcauccagag

SEQ ID NO: 1022544 - RNA, 19 nt, Artificial Sequence
  Description of Artificial Sequence: Synthetic oligonucleotide
agacgacauaauccaaucc

SEQ ID NO: 1022545 - RNA, 19 nt, Artificial Sequence
  Description of Artificial Sequence: Synthetic oligonucleotide
aaauugaacuuugugcuga

SEQ ID NO: 1022546 - RNA, 19 nt, Artificial Sequence
  Description of Artificial Sequence: Synthetic oligonucleotide
cacagguuacaccauaugc

SEQ ID NO: 1022547 - RNA, 19 nt, Artificial Sequence
  Description of Artificial Sequence: Synthetic oligonucleotide
uacaaaugccuacuggugu

SEQ ID NO: 1022548 - RNA, 19 nt, Artificial Sequence
  Description of Artificial Sequence: Synthetic oligonucleotide
uaugacugagaaguaacag

SEQ ID NO: 1022549 - RNA, 19 nt, Artificial Sequence
  Description of Artificial Sequence: Synthetic oligonucleotide
agaucaugccuaucaaagg

SEQ ID NO: 1022550 - RNA, 19 nt, Artificial Sequence
  Description of Artificial Sequence: Synthetic oligonucleotide
uguuagaguauagaauuug

SEQ ID NO: 1022551 - RNA, 19 nt, Artificial Sequence
  Description of Artificial Sequence: Synthetic oligonucleotide
ugauacauggagacgacau

SEQ ID NO: 1022552 - RNA, 19 nt, Artificial Sequence
  Description of Artificial Sequence: Synthetic oligonucleotide
auggagacgacauaaucca

SEQ ID NO: 1022553 - RNA, 19 nt, Artificial Sequence
  Description of Artificial Sequence: Synthetic oligonucleotide
uuacaauacgccauuguua

SEQ ID NO: 1022554 - RNA, 19 nt, Artificial Sequence
  Description of Artificial Sequence: Synthetic oligonucleotide
acauggagacgacauaauc

SEQ ID NO: 1022555 - RNA, 19 nt, Artificial Sequence
  Description of Artificial Sequence: Synthetic oligonucleotide
ugcuguuauaccauauugu

SEQ ID NO: 1022556 - RNA, 19 nt, Artificial Sequence
  Description of Artificial Sequence: Synthetic oligonucleotide
ugauucacacaugaaacug

SEQ ID NO: 1022557 - RNA, 19 nt, Artificial Sequence
  Description of Artificial Sequence: Synthetic oligonucleotide
ugauaaagccaacaaccac

SEQ ID NO: 1022558 - RNA, 19 nt, Artificial Sequence
  Description of Artificial Sequence: Synthetic oligonucleotide
uccaauccaauucaggcau

SEQ ID NO: 1022559 - RNA, 19 nt, Artificial Sequence
  Description of Artificial Sequence: Synthetic oligonucleotide
uauugagguaggauucucc

SEQ ID NO: 1022560 - RNA, 19 nt, Artificial Sequence
  Description of Artificial Sequence: Synthetic oligonucleotide
aucauuagugguaagauaa

SEQ ID NO: 1022561 - RNA, 19 nt, Artificial Sequence
  Description of Artificial Sequence: Synthetic oligonucleotide
caugaaagaggaucauucc

SEQ ID NO: 1022562 - RNA, 19 nt, Artificial Sequence
  Description of Artificial Sequence: Synthetic oligonucleotide
aguauuguagagucaagaa

SEQ ID NO: 1022563 - RNA, 19 nt, Artificial Sequence
  Description of Artificial Sequence: Synthetic oligonucleotide
agugguaagauaaauagua

SEQ ID NO: 1022564 - RNA, 19 nt, Artificial Sequence
  Description of Artificial Sequence: Synthetic oligonucleotide
ucuguuacagaagacacua

SEQ ID NO: 1022565 - RNA, 19 nt, Artificial Sequence
  Description of Artificial Sequence: Synthetic oligonucleotide
uuuucugcguguccgugag

SEQ ID NO: 1022566 - RNA, 19 nt, Artificial Sequence
  Description of Artificial Sequence: Synthetic oligonucleotide
caauacgccauuguuagag

SEQ ID NO: 1022567 - RNA, 19 nt, Artificial Sequence
  Description of Artificial Sequence: Synthetic oligonucleotide
aaauaguauuacaucugag

SEQ ID NO: 1022568 - RNA, 19 nt, Artificial Sequence
  Description of Artificial Sequence: Synthetic oligonucleotide
aaaauccaguggcuuucac

SEQ ID NO: 1022569 - RNA, 19 nt, Artificial Sequence
  Description of Artificial Sequence: Synthetic oligonucleotide
ugaauagaaaaguacccuu

SEQ ID NO: 1022570 - RNA, 19 nt, Artificial Sequence
  Description of Artificial Sequence: Synthetic oligonucleotide
aaucauuagugguaagaua

SEQ ID NO: 1022571 - RNA, 19 nt, Artificial Sequence
  Description of Artificial Sequence: Synthetic oligonucleotide
caucuguggggaauaaccg

SEQ ID NO: 1022572 - RNA, 19 nt, Artificial Sequence
  Description of Artificial Sequence: Synthetic oligonucleotide
acaugguaaugucucacag

SEQ ID NO: 1022573 - RNA, 19 nt, Artificial Sequence
  Description of Artificial Sequence: Synthetic oligonucleotide
aguacccuuuuauugaggu

SEQ ID NO: 1022574 - RNA, 19 nt, Artificial Sequence
  Description of Artificial Sequence: Synthetic oligonucleotide
gaggguguguguuuuaaac

SEQ ID NO: 1022575 - RNA, 19 nt, Artificial Sequence
  Description of Artificial Sequence: Synthetic oligonucleotide
acgacaguauuccacaaga

SEQ ID NO: 1022576 - RNA, 19 nt, Artificial Sequence
  Description of Artificial Sequence: Synthetic oligonucleotide
uaguucaaucauuaguggu

SEQ ID NO: 1022577 - RNA, 19 nt, Artificial Sequence
  Description of Artificial Sequence: Synthetic oligonucleotide
acuguacgaacacacccgg

SEQ ID NO: 1022578 - RNA, 19 nt, Artificial Sequence
  Description of Artificial Sequence: Synthetic oligonucleotide
gaacccuuaagaauagggc

SEQ ID NO: 1022579 - RNA, 19 nt, Artificial Sequence
  Description of Artificial Sequence: Synthetic oligonucleotide
uuuaaagacagugccucug

SEQ ID NO: 1022580 - RNA, 19 nt, Artificial Sequence
  Description of Artificial Sequence: Synthetic oligonucleotide
uucugcguguccgugaggg

SEQ ID NO: 1022581 - RNA, 19 nt, Artificial Sequence
  Description of Artificial Sequence: Synthetic oligonucleotide
gagugauucacacaugaaa

SEQ ID NO: 1022582 - RNA, 19 nt, Artificial Sequence
  Description of Artificial Sequence: Synthetic oligonucleotide
guaagauaaauaguauuac

SEQ ID NO: 1022583 - RNA, 19 nt, Artificial Sequence
  Description of Artificial Sequence: Synthetic oligonucleotide
auugagguaggauucucca

SEQ ID NO: 1022584 - RNA, 19 nt, Artificial Sequence
  Description of Artificial Sequence: Synthetic oligonucleotide
aauagucuucaaaggguuc

SEQ ID NO: 1022585 - RNA, 19 nt, Artificial Sequence
  Description of Artificial Sequence: Synthetic oligonucleotide
gacuguacgaacacacccg

SEQ ID NO: 1022586 - RNA, 19 nt, Artificial Sequence
  Description of Artificial Sequence: Synthetic oligonucleotide
agaccaauuacaaaagcca

SEQ ID NO: 1022587 - RNA, 19 nt, Artificial Sequence
  Description of Artificial Sequence: Synthetic oligonucleotide
uuacaccauaugcaagugc

SEQ ID NO: 1022588 - RNA, 19 nt, Artificial Sequence
  Description of Artificial Sequence: Synthetic oligonucleotide
uaguauuacaucugaggaa

SEQ ID NO: 1022589 - RNA, 19 nt, Artificial Sequence
  Description of Artificial Sequence: Synthetic oligonucleotide
agaggaucauuccaaagaa

SEQ ID NO: 1022590 - RNA, 19 nt, Artificial Sequence
  Description of Artificial Sequence: Synthetic oligonucleotide
cuguuaaagaccccaugcc

SEQ ID NO: 1022591 - RNA, 19 nt, Artificial Sequence
  Description of Artificial Sequence: Synthetic oligonucleotide
cuagaccaauuacaaaagc

SEQ ID NO: 1022592 - RNA, 19 nt, Artificial Sequence
  Description of Artificial Sequence: Synthetic oligonucleotide
ugguaagauaaauaguauu

SEQ ID NO: 1022593 - RNA, 19 nt, Artificial Sequence
  Description of Artificial Sequence: Synthetic oligonucleotide
aucaugccuaucaaaggcc

SEQ ID NO: 1022594 - RNA, 19 nt, Artificial Sequence
  Description of Artificial Sequence: Synthetic oligonucleotide
aguucccuugcuguuauac

SEQ ID NO: 1022595 - RNA, 19 nt, Artificial Sequence
  Description of Artificial Sequence: Synthetic oligonucleotide
uagugguaagauaaauagu

SEQ ID NO: 1022596 - RNA, 19 nt, Artificial Sequence
  Description of Artificial Sequence: Synthetic oligonucleotide
ugagguaggauucuccauu

SEQ ID NO: 1022597 - RNA, 19 nt, Artificial Sequence
  Description of Artificial Sequence: Synthetic oligonucleotide
ucaagagauuugugcaucc

SEQ ID NO: 1022598 - RNA, 19 nt, Artificial Sequence
  Description of Artificial Sequence: Synthetic oligonucleotide
ucccaugagcuauugaggu

SEQ ID NO: 1022599 - RNA, 19 nt, Artificial Sequence
  Description of Artificial Sequence: Synthetic oligonucleotide
aaugagccaucccacuaca

SEQ ID NO: 1022600 - RNA, 19 nt, Artificial Sequence
  Description of Artificial Sequence: Synthetic oligonucleotide
agaaaaguacccuuuuauu

SEQ ID NO: 1022601 - RNA, 19 nt, Artificial Sequence
  Description of Artificial Sequence: Synthetic oligonucleotide
auaaccgaggguuuguuuu

SEQ ID NO: 1022602 - RNA, 19 nt, Artificial Sequence
  Description of Artificial Sequence: Synthetic oligonucleotide
acuguaggggacaacauug

SEQ ID NO: 1022603 - RNA, 19 nt, Artificial Sequence
  Description of Artificial Sequence: Synthetic oligonucleotide
gaaggacuuuacaagcuag

SEQ ID NO: 1022604 - RNA, 19 nt, Artificial Sequence
  Description of Artificial Sequence: Synthetic oligonucleotide
ggaaagaagccccugaaca

SEQ ID NO: 1022605 - RNA, 19 nt, Artificial Sequence
  Description of Artificial Sequence: Synthetic oligonucleotide
caagaaugagccaucccac

SEQ ID NO: 1022606 - RNA, 19 nt, Artificial Sequence
  Description of Artificial Sequence: Synthetic oligonucleotide
ugaucuuauuccagguaga

SEQ ID NO: 1022607 - RNA, 19 nt, Artificial Sequence
  Description of Artificial Sequence: Synthetic oligonucleotide
aauacgccauuguuagagu

SEQ ID NO: 1022608 - RNA, 19 nt, Artificial Sequence
  Description of Artificial Sequence: Synthetic oligonucleotide
cagaagacacuauuugaac

SEQ ID NO: 1022609 - RNA, 19 nt, Artificial Sequence
  Description of Artificial Sequence: Synthetic oligonucleotide
aacuuuuccuccaucugug

SEQ ID NO: 1022610 - RNA, 19 nt, Artificial Sequence
  Description of Artificial Sequence: Synthetic oligonucleotide
cuguuggaacuuuggaggg

SEQ ID NO: 1022611 - RNA, 19 nt, Artificial Sequence
  Description of Artificial Sequence: Synthetic oligonucleotide
aaagaccccaugccgauuu

SEQ ID NO: 1022612 - RNA, 19 nt, Artificial Sequence
  Description of Artificial Sequence: Synthetic oligonucleotide
aaggguucauaaauaauaa

SEQ ID NO: 1022613 - RNA, 19 nt, Artificial Sequence
  Description of Artificial Sequence: Synthetic oligonucleotide
ucauuaucagagacccagc

SEQ ID NO: 1022614 - RNA, 19 nt, Artificial Sequence
  Description of Artificial Sequence: Synthetic oligonucleotide
uggggaauaaccgaggguu

SEQ ID NO: 1022615 - RNA, 19 nt, Artificial Sequence
  Description of Artificial Sequence: Synthetic oligonucleotide
uguaggggacaacauugca

SEQ ID NO: 1022616 - RNA, 19 nt, Artificial Sequence
  Description of Artificial Sequence: Synthetic oligonucleotide
aacuguaggggacaacauu

SEQ ID NO: 1022617 - RNA, 19 nt, Artificial Sequence
  Description of Artificial Sequence: Synthetic oligonucleotide
gucaagaaagcacuugguc

SEQ ID NO: 1022618 - RNA, 19 nt, Artificial Sequence
  Description of Artificial Sequence: Synthetic oligonucleotide
ugagccaucccacuacaaa

SEQ ID NO: 1022619 - RNA, 19 nt, Artificial Sequence
  Description of Artificial Sequence: Synthetic oligonucleotide
gaaugcucucugcuuggcg

SEQ ID NO: 1022620 - RNA, 19 nt, Artificial Sequence
  Description of Artificial Sequence: Synthetic oligonucleotide
agcagacuacuccaugguc

SEQ ID NO: 1022621 - RNA, 19 nt, Artificial Sequence
  Description of Artificial Sequence: Synthetic oligonucleotide
aacaugacagaaacuauuu

SEQ ID NO: 1022622 - RNA, 19 nt, Artificial Sequence
  Description of Artificial Sequence: Synthetic oligonucleotide
ggaacccuuaagaauaggg

SEQ ID NO: 1022623 - RNA, 19 nt, Artificial Sequence
  Description of Artificial Sequence: Synthetic oligonucleotide
gagacgacauaauccaauc

SEQ ID NO: 1022624 - RNA, 19 nt, Artificial Sequence
  Description of Artificial Sequence: Synthetic oligonucleotide
acagguuacaccauaugca

SEQ ID NO: 1022625 - RNA, 19 nt, Artificial Sequence
  Description of Artificial Sequence: Synthetic oligonucleotide
ucacagguuacaccauaug

SEQ ID NO: 1022626 - RNA, 19 nt, Artificial Sequence
  Description of Artificial Sequence: Synthetic oligonucleotide
ucauuaucccaugagcuau

SEQ ID NO: 1022627 - RNA, 19 nt, Artificial Sequence
  Description of Artificial Sequence: Synthetic oligonucleotide
uaucagagacccagcacac

SEQ ID NO: 1022628 - RNA, 19 nt, Artificial Sequence
  Description of Artificial Sequence: Synthetic oligonucleotide
aauaaccgaggguuuguuu

SEQ ID NO: 1022629 - RNA, 19 nt, Artificial Sequence
  Description of Artificial Sequence: Synthetic oligonucleotide
aggguguguguuuuaaacu

SEQ ID NO: 1022630 - RNA, 19 nt, Artificial Sequence
  Description of Artificial Sequence: Synthetic oligonucleotide
uacgaacacacccgggaca

SEQ ID NO: 1022631 - RNA, 19 nt, Artificial Sequence
  Description of Artificial Sequence: Synthetic oligonucleotide
agccaucccacuacaaacc

SEQ ID NO: 1022632 - RNA, 19 nt, Artificial Sequence
  Description of Artificial Sequence: Synthetic oligonucleotide
ccaucuguggggaauaacc

SEQ ID NO: 1022633 - RNA, 19 nt, Artificial Sequence
  Description of Artificial Sequence: Synthetic oligonucleotide
agaauagggcuuccagaag

SEQ ID NO: 1022634 - RNA, 19 nt, Artificial Sequence
  Description of Artificial Sequence: Synthetic oligonucleotide
uuccaauagccagaagugc

SEQ ID NO: 1022635 - RNA, 19 nt, Artificial Sequence
  Description of Artificial Sequence: Synthetic oligonucleotide
guaggggacaacauugcag

SEQ ID NO: 1022636 - RNA, 19 nt, Artificial Sequence
  Description of Artificial Sequence: Synthetic oligonucleotide
gaguauuguagagucaaga

SEQ ID NO: 1022637 - RNA, 19 nt, Artificial Sequence
  Description of Artificial Sequence: Synthetic oligonucleotide
aucaaaggccaaccaauga

SEQ ID NO: 1022638 - RNA, 19 nt, Artificial Sequence
  Description of Artificial Sequence: Synthetic oligonucleotide
gaauagggcuuccagaagu

SEQ ID NO: 1022639 - RNA, 19 nt, Artificial Sequence
  Description of Artificial Sequence: Synthetic oligonucleotide
uuucuagaccaauuacaaa

SEQ ID NO: 1022640 - RNA, 19 nt, Artificial Sequence
  Description of Artificial Sequence: Synthetic oligonucleotide
ccaugagacuucuaaagcc

SEQ ID NO: 1022641 - RNA, 19 nt, Artificial Sequence
  Description of Artificial Sequence: Synthetic oligonucleotide
ucauuagugguaagauaaa

SEQ ID NO: 1022642 - RNA, 19 nt, Artificial Sequence
  Description of Artificial Sequence: Synthetic oligonucleotide
aaaggccaaccaaugagga

SEQ ID NO: 1022643 - RNA, 19 nt, Artificial Sequence
  Description of Artificial Sequence: Synthetic oligonucleotide
aagccccugaacaagagaa

SEQ ID NO: 1022644 - RNA, 19 nt, Artificial Sequence
  Description of Artificial Sequence: Synthetic oligonucleotide
auacauggagacgacauaa

SEQ ID NO: 1022645 - RNA, 19 nt, Artificial Sequence
  Description of Artificial Sequence: Synthetic oligonucleotide
agauuugugcauccagagu

SEQ ID NO: 1022646 - RNA, 19 nt, Artificial Sequence
  Description of Artificial Sequence: Synthetic oligonucleotide
accaauuacaaaagccaag

SEQ ID NO: 1022647 - RNA, 19 nt, Artificial Sequence
  Description of Artificial Sequence: Synthetic oligonucleotide
agcauuggaaguguuaaaa

SEQ ID NO: 1022648 - RNA, 19 nt, Artificial Sequence
  Description of Artificial Sequence: Synthetic oligonucleotide
agacaaguguauuuacaau

SEQ ID NO: 1022649 - RNA, 19 nt, Artificial Sequence
  Description of Artificial Sequence: Synthetic oligonucleotide
agaauccauaaauuucgaa

SEQ ID NO: 1022650 - RNA, 19 nt, Artificial Sequence
  Description of Artificial Sequence: Synthetic oligonucleotide
uucacacaugaaacugggc

SEQ ID NO: 1022651 - RNA, 19 nt, Artificial Sequence
  Description of Artificial Sequence: Synthetic oligonucleotide
uuaaagaccccaugccgau

SEQ ID NO: 1022652 - RNA, 19 nt, Artificial Sequence
  Description of Artificial Sequence: Synthetic oligonucleotide
ugagacuucuaaagccgcu

SEQ ID NO: 1022653 - RNA, 19 nt, Artificial Sequence
  Description of Artificial Sequence: Synthetic oligonucleotide
ugaccucuguguauucuga

SEQ ID NO: 1022654 - RNA, 19 nt, Artificial Sequence
  Description of Artificial Sequence: Synthetic oligonucleotide
uuaaggcugaguacuggua

SEQ ID NO: 1022655 - RNA, 19 nt, Artificial Sequence
  Description of Artificial Sequence: Synthetic oligonucleotide
cuacuccauggucagaaug

SEQ ID NO: 1022656 - RNA, 19 nt, Artificial Sequence
  Description of Artificial Sequence: Synthetic oligonucleotide
guuaaagaccccaugccga

SEQ ID NO: 1022657 - RNA, 19 nt, Artificial Sequence
  Description of Artificial Sequence: Synthetic oligonucleotide
ugaccaugagacuucuaaa

SEQ ID NO: 1022658 - RNA, 19 nt, Artificial Sequence
  Description of Artificial Sequence: Synthetic oligonucleotide
uuguuagaguauagaauuu

SEQ ID NO: 1022659 - RNA, 19 nt, Artificial Sequence
  Description of Artificial Sequence: Synthetic oligonucleotide
agggagaucauggcggcgg

SEQ ID NO: 1022660 - RNA, 19 nt, Artificial Sequence
  Description of Artificial Sequence: Synthetic oligonucleotide
aguauuccacaagaaugag

SEQ ID NO: 1022661 - RNA, 19 nt, Artificial Sequence
  Description of Artificial Sequence: Synthetic oligonucleotide
auacaaaugccuacuggug

SEQ ID NO: 1022662 - RNA, 19 nt, Artificial Sequence
  Description of Artificial Sequence: Synthetic oligonucleotide
auuagugguaagauaaaua

SEQ ID NO: 1022663 - RNA, 19 nt, Artificial Sequence
  Description of Artificial Sequence: Synthetic oligonucleotide
ugagcuauugagguaggau

SEQ ID NO: 1022664 - RNA, 19 nt, Artificial Sequence
  Description of Artificial Sequence: Synthetic oligonucleotide
agagucaagaaagcacuug

SEQ ID NO: 1022665 - RNA, 19 nt, Artificial Sequence
  Description of Artificial Sequence: Synthetic oligonucleotide
aguucaaucauuaguggua

SEQ ID NO: 1022666 - RNA, 19 nt, Artificial Sequence
  Description of Artificial Sequence: Synthetic oligonucleotide
aucccaugagcuauugagg

SEQ ID NO: 1022667 - RNA, 19 nt, Artificial Sequence
  Description of Artificial Sequence: Synthetic oligonucleotide
cuguaggggacaacauugc

SEQ ID NO: 1022668 - RNA, 19 nt, Artificial Sequence
  Description of Artificial Sequence: Synthetic oligonucleotide
ugagggagaucauggcggc

SEQ ID NO: 1022669 - RNA, 19 nt, Artificial Sequence
  Description of Artificial Sequence: Synthetic oligonucleotide
gaacacacccgggacauac

SEQ ID NO: 1022670 - RNA, 19 nt, Artificial Sequence
  Description of Artificial Sequence: Synthetic oligonucleotide
aaugccuacugguguuccu

SEQ ID NO: 1022671 - RNA, 19 nt, Artificial Sequence
  Description of Artificial Sequence: Synthetic oligonucleotide
aaguacccuuuuauugagg

SEQ ID NO: 1022672 - RNA, 19 nt, Artificial Sequence
  Description of Artificial Sequence: Synthetic oligonucleotide
aggaccacgaacacaccac

SEQ ID NO: 1022673 - RNA, 19 nt, Artificial Sequence
  Description of Artificial Sequence: Synthetic oligonucleotide
agacccagcacaccuagaa

SEQ ID NO: 1022674 - RNA, 19 nt, Artificial Sequence
  Description of Artificial Sequence: Synthetic oligonucleotide
acgaacacaccacccagga

SEQ ID NO: 1022675 - RNA, 19 nt, Artificial Sequence
  Description of Artificial Sequence: Synthetic oligonucleotide
ccauuuaucgaguuuucac

SEQ ID NO: 1022676 - RNA, 19 nt, Artificial Sequence
  Description of Artificial Sequence: Synthetic oligonucleotide
auuuucugcguguccguga

SEQ ID NO: 1022677 - RNA, 19 nt, Artificial Sequence
  Description of Artificial Sequence: Synthetic oligonucleotide
uccauuuaucgaguuuuca

SEQ ID NO: 1022678 - RNA, 19 nt, Artificial Sequence
  Description of Artificial Sequence: Synthetic oligonucleotide
aucuggaaacaucaauaaa

SEQ ID NO: 1022679 - RNA, 19 nt, Artificial Sequence
  Description of Artificial Sequence: Synthetic oligonucleotide
ugaguacugguaacuuuuc

SEQ ID NO: 1022680 - RNA, 19 nt, Artificial Sequence
  Description of Artificial Sequence: Synthetic oligonucleotide
ggcaccaagaaauuuaacu

SEQ ID NO: 1022681 - RNA, 19 nt, Artificial Sequence
  Description of Artificial Sequence: Synthetic oligonucleotide
gagacuucuaaagccgcug

SEQ ID NO: 1022682 - RNA, 19 nt, Artificial Sequence
  Description of Artificial Sequence: Synthetic oligonucleotide
ggugagggaacccuuaaga

SEQ ID NO: 1022683 - RNA, 19 nt, Artificial Sequence
  Description of Artificial Sequence: Synthetic oligonucleotide
uccacaagaaugagccauc

SEQ ID NO: 1022684 - RNA, 19 nt, Artificial Sequence
  Description of Artificial Sequence: Synthetic oligonucleotide
cacgaacacaccacccagg

SEQ ID NO: 1022685 - RNA, 19 nt, Artificial Sequence
  Description of Artificial Sequence: Synthetic oligonucleotide
uaccauauuguugcuuucu

SEQ ID NO: 1022686 - RNA, 19 nt, Artificial Sequence
  Description of Artificial Sequence: Synthetic oligonucleotide
uuaucccaugagcuauuga

SEQ ID NO: 1022687 - RNA, 19 nt, Artificial Sequence
  Description of Artificial Sequence: Synthetic oligonucleotide
aagaauccauaaauuucga

SEQ ID NO: 1022688 - RNA, 19 nt, Artificial Sequence
  Description of Artificial Sequence: Synthetic oligonucleotide
aacacuccaaaacccuguu

SEQ ID NO: 1022689 - RNA, 19 nt, Artificial Sequence
  Description of Artificial Sequence: Synthetic oligonucleotide
aagcauuggaaguguuaaa

SEQ ID NO: 1022690 - RNA, 19 nt, Artificial Sequence
  Description of Artificial Sequence: Synthetic oligonucleotide
aaggacuuuacaagcuagu

SEQ ID NO: 1022691 - RNA, 19 nt, Artificial Sequence
  Description of Artificial Sequence: Synthetic oligonucleotide
agacuucuaaagccgcuga

SEQ ID NO: 1022692 - RNA, 19 nt, Artificial Sequence
  Description of Artificial Sequence: Synthetic oligonucleotide
cuauuugaacaugacagaa

SEQ ID NO: 1022693 - RNA, 19 nt, Artificial Sequence
  Description of Artificial Sequence: Synthetic oligonucleotide
agaaugcucucugcuuggc

SEQ ID NO: 1022694 - RNA, 19 nt, Artificial Sequence
  Description of Artificial Sequence: Synthetic oligonucleotide
aaacccuguuaaagacccc

SEQ ID NO: 1022695 - RNA, 19 nt, Artificial Sequence
  Description of Artificial Sequence: Synthetic oligonucleotide
aaauaucuggaaacaucaa

SEQ ID NO: 1022696 - RNA, 19 nt, Artificial Sequence
  Description of Artificial Sequence: Synthetic oligonucleotide
caugccgauuuucugcgug

SEQ ID NO: 1022697 - RNA, 19 nt, Artificial Sequence
  Description of Artificial Sequence: Synthetic oligonucleotide
cauuguuagaguauagaau

SEQ ID NO: 1022698 - RNA, 19 nt, Artificial Sequence
  Description of Artificial Sequence: Synthetic oligonucleotide
ugccggaacuguuggaacu

SEQ ID NO: 1022699 - RNA, 19 nt, Artificial Sequence
  Description of Artificial Sequence: Synthetic oligonucleotide
acccgggacauacucaaga

SEQ ID NO: 1022700 - RNA, 19 nt, Artificial Sequence
  Description of Artificial Sequence: Synthetic oligonucleotide
agugccaaacacgacagua

SEQ ID NO: 1022701 - RNA, 19 nt, Artificial Sequence
  Description of Artificial Sequence: Synthetic oligonucleotide
cacgacaguauuccacaag

SEQ ID NO: 1022702 - RNA, 19 nt, Artificial Sequence
  Description of Artificial Sequence: Synthetic oligonucleotide
augcaagugccaaacacga

SEQ ID NO: 1022703 - RNA, 19 nt, Artificial Sequence
  Description of Artificial Sequence: Synthetic oligonucleotide
cagguuacaccauaugcaa

SEQ ID NO: 1022704 - RNA, 19 nt, Artificial Sequence
  Description of Artificial Sequence: Synthetic oligonucleotide
gugcuuugucaugaaagag

SEQ ID NO: 1022705 - RNA, 19 nt, Artificial Sequence
  Description of Artificial Sequence: Synthetic oligonucleotide
caugguaaugucucacaga

SEQ ID NO: 1022706 - RNA, 19 nt, Artificial Sequence
  Description of Artificial Sequence: Synthetic oligonucleotide
aucagagacccagcacacc

SEQ ID NO: 1022707 - RNA, 19 nt, Artificial Sequence
  Description of Artificial Sequence: Synthetic oligonucleotide
uggucagcuaugacugaga

SEQ ID NO: 1022708 - RNA, 19 nt, Artificial Sequence
  Description of Artificial Sequence: Synthetic oligonucleotide
cacgguucucuguaacggc

SEQ ID NO: 1022709 - RNA, 19 nt, Artificial Sequence
  Description of Artificial Sequence: Synthetic oligonucleotide
aagaagccccugaacaaga

SEQ ID NO: 1022710 - RNA, 19 nt, Artificial Sequence
  Description of Artificial Sequence: Synthetic oligonucleotide
acaugacagaaacuauuua

SEQ ID NO: 1022711 - RNA, 19 nt, Artificial Sequence
  Description of Artificial Sequence: Synthetic oligonucleotide
cacaagaaugagccauccc

SEQ ID NO: 1022712 - RNA, 19 nt, Artificial Sequence
  Description of Artificial Sequence: Synthetic oligonucleotide
auagccagaagugcuuugu

SEQ ID NO: 1022713 - RNA, 19 nt, Artificial Sequence
  Description of Artificial Sequence: Synthetic oligonucleotide
gcaggcauguuucuguuac

SEQ ID NO: 1022714 - RNA, 19 nt, Artificial Sequence
  Description of Artificial Sequence: Synthetic oligonucleotide
gacuacuccauggucagaa

SEQ ID NO: 1022715 - RNA, 19 nt, Artificial Sequence
  Description of Artificial Sequence: Synthetic oligonucleotide
aaggcugguuuguuuuaaa

SEQ ID NO: 1022716 - RNA, 19 nt, Artificial Sequence
  Description of Artificial Sequence: Synthetic oligonucleotide
gcaccaagaaauuuaacua

SEQ ID NO: 1022717 - RNA, 19 nt, Artificial Sequence
  Description of Artificial Sequence: Synthetic oligonucleotide
gagcuauugagguaggauu

SEQ ID NO: 1022718 - RNA, 19 nt, Artificial Sequence
  Description of Artificial Sequence: Synthetic oligonucleotide
agugccucugaggaacauc

SEQ ID NO: 1022719 - RNA, 19 nt, Artificial Sequence
  Description of Artificial Sequence: Synthetic oligonucleotide
guuacaccauaugcaagug

SEQ ID NO: 1022720 - RNA, 19 nt, Artificial Sequence
  Description of Artificial Sequence: Synthetic oligonucleotide
ccaugagcuauugagguag

SEQ ID NO: 1022721 - RNA, 19 nt, Artificial Sequence
  Description of Artificial Sequence: Synthetic oligonucleotide
ggcugauuuuagaaguggg

SEQ ID NO: 1022722 - RNA, 19 nt, Artificial Sequence
  Description of Artificial Sequence: Synthetic oligonucleotide
agucaaaaggcugguuugu

SEQ ID NO: 1022723 - RNA, 19 nt, Artificial Sequence
  Description of Artificial Sequence: Synthetic oligonucleotide
guauagaauuugaccauga

SEQ ID NO: 1022724 - RNA, 19 nt, Artificial Sequence
  Description of Artificial Sequence: Synthetic oligonucleotide
cagaguauuguagagucaa

SEQ ID NO: 1022725 - RNA, 19 nt, Artificial Sequence
  Description of Artificial Sequence: Synthetic oligonucleotide
cuguacgaacacacccggg

SEQ ID NO: 1022726 - RNA, 19 nt, Artificial Sequence
  Description of Artificial Sequence: Synthetic oligonucleotide
acaagagaaagaauccaua

SEQ ID NO: 1022727 - RNA, 19 nt, Artificial Sequence
  Description of Artificial Sequence: Synthetic oligonucleotide
gguuacaccauaugcaagu

SEQ ID NO: 1022728 - RNA, 19 nt, Artificial Sequence
  Description of Artificial Sequence: Synthetic oligonucleotide
uuucugcguguccgugagg

SEQ ID NO: 1022729 - RNA, 19 nt, Artificial Sequence
  Description of Artificial Sequence: Synthetic oligonucleotide
gugauucacacaugaaacu

SEQ ID NO: 1022730 - RNA, 19 nt, Artificial Sequence
  Description of Artificial Sequence: Synthetic oligonucleotide
uggaacuuuggagggugug

SEQ ID NO: 1022731 - RNA, 19 nt, Artificial Sequence
  Description of Artificial Sequence: Synthetic oligonucleotide
ugcguguccgugagggaga

SEQ ID NO: 1022732 - RNA, 19 nt, Artificial Sequence
  Description of Artificial Sequence: Synthetic oligonucleotide
acuccaaaacccuguuaaa

SEQ ID NO: 1022733 - RNA, 19 nt, Artificial Sequence
  Description of Artificial Sequence: Synthetic oligonucleotide
uggagacgacauaauccaa

SEQ ID NO: 1022734 - RNA, 19 nt, Artificial Sequence
  Description of Artificial Sequence: Synthetic oligonucleotide
cugcguguccgugagggag

SEQ ID NO: 1022735 - RNA, 19 nt, Artificial Sequence
  Description of Artificial Sequence: Synthetic oligonucleotide
accauaugcaagugccaaa

SEQ ID NO: 1022736 - RNA, 19 nt, Artificial Sequence
  Description of Artificial Sequence: Synthetic oligonucleotide
uagccagaagugcuuuguc

SEQ ID NO: 1022737 - RNA, 19 nt, Artificial Sequence
  Description of Artificial Sequence: Synthetic oligonucleotide
uguuggaacuuuggagggu

SEQ ID NO: 1022738 - RNA, 19 nt, Artificial Sequence
  Description of Artificial Sequence: Synthetic oligonucleotide
ugccuacugguguuccuga

SEQ ID NO: 1022739 - RNA, 19 nt, Artificial Sequence
  Description of Artificial Sequence: Synthetic oligonucleotide
uuggaacuuuggagggugu

SEQ ID NO: 1022740 - RNA, 19 nt, Artificial Sequence
  Description of Artificial Sequence: Synthetic oligonucleotide
acgacauaauccaauccaa

SEQ ID NO: 1022741 - RNA, 19 nt, Artificial Sequence
  Description of Artificial Sequence: Synthetic oligonucleotide
augccgauuuucugcgugu

SEQ ID NO: 1022742 - RNA, 19 nt, Artificial Sequence
  Description of Artificial Sequence: Synthetic oligonucleotide
agguuacaccauaugcaag

SEQ ID NO: 1022743 - RNA, 19 nt, Artificial Sequence
  Description of Artificial Sequence: Synthetic oligonucleotide
ccauuguuagaguauagaa

SEQ ID NO: 1022744 - RNA, 19 nt, Artificial Sequence
  Description of Artificial Sequence: Synthetic oligonucleotide
caucccacuacaaaccagu

SEQ ID NO: 1022745 - RNA, 19 nt, Artificial Sequence
  Description of Artificial Sequence: Synthetic oligonucleotide
acaauacgccauuguuaga

SEQ ID NO: 1022746 - RNA, 19 nt, Artificial Sequence
  Description of Artificial Sequence: Synthetic oligonucleotide
aggacuuuacaagcuaguu

SEQ ID NO: 1022747 - RNA, 19 nt, Artificial Sequence
  Description of Artificial Sequence: Synthetic oligonucleotide
agccaacaaccacaggaaa

SEQ ID NO: 1022748 - RNA, 19 nt, Artificial Sequence
  Description of Artificial Sequence: Synthetic oligonucleotide
ugucaugaaagaggaucau

SEQ ID NO: 1022749 - RNA, 19 nt, Artificial Sequence
  Description of Artificial Sequence: Synthetic oligonucleotide
cacuacaaaccaguccuuc

SEQ ID NO: 1022750 - RNA, 19 nt, Artificial Sequence
  Description of Artificial Sequence: Synthetic oligonucleotide
aacagacaccacgguucuc

SEQ ID NO: 1022751 - RNA, 19 nt, Artificial Sequence
  Description of Artificial Sequence: Synthetic oligonucleotide
cuauugagguaggauucuc

SEQ ID NO: 1022752 - RNA, 19 nt, Artificial Sequence
  Description of Artificial Sequence: Synthetic oligonucleotide
augccuacugguguuccug

SEQ ID NO: 1022753 - RNA, 19 nt, Artificial Sequence
  Description of Artificial Sequence: Synthetic oligonucleotide
ggaccacgaacacaccacc

SEQ ID NO: 1022754 - RNA, 19 nt, Artificial Sequence
  Description of Artificial Sequence: Synthetic oligonucleotide
ccauaugcaagugccaaac

SEQ ID NO: 1022755 - RNA, 19 nt, Artificial Sequence
  Description of Artificial Sequence: Synthetic oligonucleotide
cuaaagccgcugaauucca

SEQ ID NO: 1022756 - RNA, 19 nt, Artificial Sequence
  Description of Artificial Sequence: Synthetic oligonucleotide
gaacuuugugcugaauagu

SEQ ID NO: 1022757 - RNA, 19 nt, Artificial Sequence
  Description of Artificial Sequence: Synthetic oligonucleotide
gccgcugaauuccagagaa

SEQ ID NO: 1022758 - RNA, 19 nt, Artificial Sequence
  Description of Artificial Sequence: Synthetic oligonucleotide
ccccaugccgauuuucugc

SEQ ID NO: 1022759 - RNA, 19 nt, Artificial Sequence
  Description of Artificial Sequence: Synthetic oligonucleotide
uggaggguguguguuuuaa

SEQ ID NO: 1022760 - RNA, 19 nt, Artificial Sequence
  Description of Artificial Sequence: Synthetic oligonucleotide
acccuuaagaauagggcuu

SEQ ID NO: 1022761 - RNA, 19 nt, Artificial Sequence
  Description of Artificial Sequence: Synthetic oligonucleotide
acgaacacacccgggacau

SEQ ID NO: 1022762 - RNA, 19 nt, Artificial Sequence
  Description of Artificial Sequence: Synthetic oligonucleotide
agaagccccugaacaagag

SEQ ID NO: 1022763 - RNA, 19 nt, Artificial Sequence
  Description of Artificial Sequence: Synthetic oligonucleotide
acuuuacaagcuaguuugu

SEQ ID NO: 1022764 - RNA, 19 nt, Artificial Sequence
  Description of Artificial Sequence: Synthetic oligonucleotide
cuuauuccagguagauuua

SEQ ID NO: 1022765 - RNA, 19 nt, Artificial Sequence
  Description of Artificial Sequence: Synthetic oligonucleotide
agacaccacgguucucugu

SEQ ID NO: 1022766 - RNA, 19 nt, Artificial Sequence
  Description of Artificial Sequence: Synthetic oligonucleotide
agggaacccuuaagaauag

SEQ ID NO: 1022767 - RNA, 19 nt, Artificial Sequence
  Description of Artificial Sequence: Synthetic oligonucleotide
gcuaguuugugaaauugaa

SEQ ID NO: 1022768 - RNA, 19 nt, Artificial Sequence
  Description of Artificial Sequence: Synthetic oligonucleotide
cacacaugguaaugucuca

SEQ ID NO: 1022769 - RNA, 19 nt, Artificial Sequence
  Description of Artificial Sequence: Synthetic oligonucleotide
acgguucucuguaacggcu

SEQ ID NO: 1022770 - RNA, 19 nt, Artificial Sequence
  Description of Artificial Sequence: Synthetic oligonucleotide
gcuguuauaccauauuguu

SEQ ID NO: 1022771 - RNA, 19 nt, Artificial Sequence
  Description of Artificial Sequence: Synthetic oligonucleotide
uucugccggaacuguugga

SEQ ID NO: 1022772 - RNA, 19 nt, Artificial Sequence
  Description of Artificial Sequence: Synthetic oligonucleotide
acccuuuuauugagguaag

SEQ ID NO: 1022773 - RNA, 19 nt, Artificial Sequence
  Description of Artificial Sequence: Synthetic oligonucleotide
uuugugcauccagaguauu

SEQ ID NO: 1022774 - RNA, 19 nt, Artificial Sequence
  Description of Artificial Sequence: Synthetic oligonucleotide
caaucauuagugguaagau

SEQ ID NO: 1022775 - RNA, 19 nt, Artificial Sequence
  Description of Artificial Sequence: Synthetic oligonucleotide
ucugcguguccgugaggga

SEQ ID NO: 1022776 - RNA, 19 nt, Artificial Sequence
  Description of Artificial Sequence: Synthetic oligonucleotide
caucugaggaagugcucca

SEQ ID NO: 1022777 - RNA, 19 nt, Artificial Sequence
  Description of Artificial Sequence: Synthetic oligonucleotide
guuauaccauauuguugcu

SEQ ID NO: 1022778 - RNA, 19 nt, Artificial Sequence
  Description of Artificial Sequence: Synthetic oligonucleotide
aacacacccgggacauacu

SEQ ID NO: 1022779 - RNA, 19 nt, Artificial Sequence
  Description of Artificial Sequence: Synthetic oligonucleotide
ggucagcuaugacugagaa

SEQ ID NO: 1022780 - RNA, 19 nt, Artificial Sequence
  Description of Artificial Sequence: Synthetic oligonucleotide
cacagcgccaggucuuuca

SEQ ID NO: 1022781 - RNA, 19 nt, Artificial Sequence
  Description of Artificial Sequence: Synthetic oligonucleotide
acaccauaugcaagugcca

SEQ ID NO: 1022782 - RNA, 19 nt, Artificial Sequence
  Description of Artificial Sequence: Synthetic oligonucleotide
ccacgaacacaccacccag

SEQ ID NO: 1022783 - RNA, 19 nt, Artificial Sequence
  Description of Artificial Sequence: Synthetic oligonucleotide
agagaacuguaggggacaa

SEQ ID NO: 1022784 - RNA, 19 nt, Artificial Sequence
  Description of Artificial Sequence: Synthetic oligonucleotide
cuguaacggcuguugcuca

SEQ ID NO: 1022785 - RNA, 19 nt, Artificial Sequence
  Description of Artificial Sequence: Synthetic oligonucleotide
gccauuguuagaguauaga

SEQ ID NO: 1022786 - RNA, 19 nt, Artificial Sequence
  Description of Artificial Sequence: Synthetic oligonucleotide
caagagauuugugcaucca

SEQ ID NO: 1022787 - RNA, 19 nt, Artificial Sequence
  Description of Artificial Sequence: Synthetic oligonucleotide
acgccauuguuagaguaua

SEQ ID NO: 1022788 - RNA, 19 nt, Artificial Sequence
  Description of Artificial Sequence: Synthetic oligonucleotide
cauuagugguaagauaaau

SEQ ID NO: 1022789 - RNA, 19 nt, Artificial Sequence
  Description of Artificial Sequence: Synthetic oligonucleotide
ggguguguguuuuaaacuu

SEQ ID NO: 1022790 - RNA, 19 nt, Artificial Sequence
  Description of Artificial Sequence: Synthetic oligonucleotide
ggagggauccaaggacagg

SEQ ID NO: 1022791 - RNA, 19 nt, Artificial Sequence
  Description of Artificial Sequence: Synthetic oligonucleotide
aagaccccaugccgauuuu

SEQ ID NO: 1022792 - RNA, 19 nt, Artificial Sequence
  Description of Artificial Sequence: Synthetic oligonucleotide
ugccgauuuucugcguguc

SEQ ID NO: 1022793 - RNA, 19 nt, Artificial Sequence
  Description of Artificial Sequence: Synthetic oligonucleotide
guacccuuuuauugaggua

SEQ ID NO: 1022794 - RNA, 19 nt, Artificial Sequence
  Description of Artificial Sequence: Synthetic oligonucleotide
ggacuuuacaagcuaguuu

SEQ ID NO: 1022795 - RNA, 19 nt, Artificial Sequence
  Description of Artificial Sequence: Synthetic oligonucleotide
caguggcuuucacuuugug

SEQ ID NO: 1022796 - RNA, 19 nt, Artificial Sequence
  Description of Artificial Sequence: Synthetic oligonucleotide
gccgauuuucugcgugucc

SEQ ID NO: 1022797 - RNA, 19 nt, Artificial Sequence
  Description of Artificial Sequence: Synthetic oligonucleotide
auccaguggcuuucacuuu

SEQ ID NO: 1022798 - RNA, 19 nt, Artificial Sequence
  Description of Artificial Sequence: Synthetic oligonucleotide
gggaacccuuaagaauagg

SEQ ID NO: 1022799 - RNA, 19 nt, Artificial Sequence
  Description of Artificial Sequence: Synthetic oligonucleotide
uuggaggguguguguuuua

SEQ ID NO: 1022800 - RNA, 19 nt, Artificial Sequence
  Description of Artificial Sequence: Synthetic oligonucleotide
gccaucccacuacaaacca

SEQ ID NO: 1022801 - RNA, 19 nt, Artificial Sequence
  Description of Artificial Sequence: Synthetic oligonucleotide
uaaagaccccaugccgauu

SEQ ID NO: 1022802 - RNA, 19 nt, Artificial Sequence
  Description of Artificial Sequence: Synthetic oligonucleotide
cuggaagaagaaucugaau

SEQ ID NO: 1022803 - RNA, 19 nt, Artificial Sequence
  Description of Artificial Sequence: Synthetic oligonucleotide
cccuguuaaagaccccaug

SEQ ID NO: 1022804 - RNA, 19 nt, Artificial Sequence
  Description of Artificial Sequence: Synthetic oligonucleotide
gccuaucaaaggccaacca

SEQ ID NO: 1022805 - RNA, 19 nt, Artificial Sequence
  Description of Artificial Sequence: Synthetic oligonucleotide
guggggaauaaccgagggu

SEQ ID NO: 1022806 - RNA, 19 nt, Artificial Sequence
  Description of Artificial Sequence: Synthetic oligonucleotide
cacaugaaacugggcuuuc

SEQ ID NO: 1022807 - RNA, 19 nt, Artificial Sequence
  Description of Artificial Sequence: Synthetic oligonucleotide
gcugauuuuagaagugggu

SEQ ID NO: 1022808 - RNA, 19 nt, Artificial Sequence
  Description of Artificial Sequence: Synthetic oligonucleotide
cccuuaagaauagggcuuc

SEQ ID NO: 1022809 - RNA, 19 nt, Artificial Sequence
  Description of Artificial Sequence: Synthetic oligonucleotide
caagcuaguuugugaaauu

SEQ ID NO: 1022810 - RNA, 19 nt, Artificial Sequence
  Description of Artificial Sequence: Synthetic oligonucleotide
gcugauacauggagacgac

SEQ ID NO: 1022811 - RNA, 19 nt, Artificial Sequence
  Description of Artificial Sequence: Synthetic oligonucleotide
gucaugaaagaggaucauu

SEQ ID NO: 1022812 - RNA, 19 nt, Artificial Sequence
  Description of Artificial Sequence: Synthetic oligonucleotide
gaauaaccgaggguuuguu

SEQ ID NO: 1022813 - RNA, 19 nt, Artificial Sequence
  Description of Artificial Sequence: Synthetic oligonucleotide
ggagacgacauaauccaau

SEQ ID NO: 1022814 - RNA, 19 nt, Artificial Sequence
  Description of Artificial Sequence: Synthetic oligonucleotide
guauuacaucugaggaagu

SEQ ID NO: 1022815 - RNA, 19 nt, Artificial Sequence
  Description of Artificial Sequence: Synthetic oligonucleotide
ccaauccaauucaggcauc

SEQ ID NO: 1022816 - RNA, 19 nt, Artificial Sequence
  Description of Artificial Sequence: Synthetic oligonucleotide
ggaauaaccgaggguuugu

SEQ ID NO: 1022817 - RNA, 19 nt, Artificial Sequence
  Description of Artificial Sequence: Synthetic oligonucleotide
caggcacucuucugauaaa

SEQ ID NO: 1022818 - RNA, 19 nt, Artificial Sequence
  Description of Artificial Sequence: Synthetic oligonucleotide
cgccauuguuagaguauag

SEQ ID NO: 1022819 - RNA, 19 nt, Artificial Sequence
  Description of Artificial Sequence: Synthetic oligonucleotide
ccgggacauacucaagaga

SEQ ID NO: 1022820 - RNA, 19 nt, Artificial Sequence
  Description of Artificial Sequence: Synthetic oligonucleotide
cuguuacagaagacacuau

SEQ ID NO: 1022821 - RNA, 19 nt, Artificial Sequence
  Description of Artificial Sequence: Synthetic oligonucleotide
cagguagauuuaggaggga

SEQ ID NO: 1022822 - RNA, 19 nt, Artificial Sequence
  Description of Artificial Sequence: Synthetic oligonucleotide
ccgcugaauuccagagaac

SEQ ID NO: 1022823 - RNA, 19 nt, Artificial Sequence
  Description of Artificial Sequence: Synthetic oligonucleotide
cccaugagcuauugaggua

SEQ ID NO: 1022824 - RNA, 19 nt, Artificial Sequence
  Description of Artificial Sequence: Synthetic oligonucleotide
gacacagcgccaggucuuu

SEQ ID NO: 1022825 - RNA, 19 nt, Artificial Sequence
  Description of Artificial Sequence: Synthetic oligonucleotide
cuccuggcaccaagaaauu

SEQ ID NO: 1022826 - RNA, 19 nt, Artificial Sequence
  Description of Artificial Sequence: Synthetic oligonucleotide
gcuuggcgucugugugcag

SEQ ID NO: 1022827 - RNA, 19 nt, Artificial Sequence
  Description of Artificial Sequence: Synthetic oligonucleotide
cgacauaauccaauccaau

SEQ ID NO: 1022828 - RNA, 19 nt, Artificial Sequence
  Description of Artificial Sequence: Synthetic oligonucleotide
ggcugaguacugguaacuu

SEQ ID NO: 1022829 - RNA, 19 nt, Artificial Sequence
  Description of Artificial Sequence: Synthetic oligonucleotide
gggacauacucaagagauu

SEQ ID NO: 1022830 - RNA, 19 nt, Artificial Sequence
  Description of Artificial Sequence: Synthetic oligonucleotide
ccagcacaccuagaaauau

SEQ ID NO: 1022831 - RNA, 19 nt, Artificial Sequence
  Description of Artificial Sequence: Synthetic oligonucleotide
ggggaauaaccgaggguuu

SEQ ID NO: 1022832 - RNA, 19 nt, Artificial Sequence
  Description of Artificial Sequence: Synthetic oligonucleotide
ccuccaucuguggggaaua

SEQ ID NO: 1022833 - RNA, 19 nt, Artificial Sequence
  Description of Artificial Sequence: Synthetic oligonucleotide
cagugccucugaggaacau

SEQ ID NO: 1022834 - RNA, 19 nt, Artificial Sequence
  Description of Artificial Sequence: Synthetic oligonucleotide
gcgccaggucuuucauuau

SEQ ID NO: 1022835 - RNA, 19 nt, Artificial Sequence
  Description of Artificial Sequence: Synthetic oligonucleotide
cgaacacacccgggacaua

SEQ ID NO: 1022836 - RNA, 19 nt, Artificial Sequence
  Description of Artificial Sequence: Synthetic oligonucleotide
aacaugaguguucugaagc

SEQ ID NO: 1022837 - RNA, 19 nt, Artificial Sequence
  Description of Artificial Sequence: Synthetic oligonucleotide
augaaucuaaaauucaugc

SEQ ID NO: 1022838 - RNA, 19 nt, Artificial Sequence
  Description of Artificial Sequence: Synthetic oligonucleotide
ugauuugcaaguuucaggg

SEQ ID NO: 1022839 - RNA, 19 nt, Artificial Sequence
  Description of Artificial Sequence: Synthetic oligonucleotide
auaucaauaccccggaucc

SEQ ID NO: 1022840 - RNA, 19 nt, Artificial Sequence
  Description of Artificial Sequence: Synthetic oligonucleotide
gauacugauaguuccaugg

SEQ ID NO: 1022841 - RNA, 19 nt, Artificial Sequence
  Description of Artificial Sequence: Synthetic oligonucleotide
cugaaguucaaacugaggg

SEQ ID NO: 1022842 - RNA, 19 nt, Artificial Sequence
  Description of Artificial Sequence: Synthetic oligonucleotide
auuagguaaacuugggucg

SEQ ID NO: 1022843 - RNA, 19 nt, Artificial Sequence
  Description of Artificial Sequence: Synthetic oligonucleotide
aaggguaccaccugaaggg

SEQ ID NO: 1022844 - RNA, 19 nt, Artificial Sequence
  Description of Artificial Sequence: Synthetic oligonucleotide
ugucuuaucucgaagguag

SEQ ID NO: 1022845 - RNA, 19 nt, Artificial Sequence
  Description of Artificial Sequence: Synthetic oligonucleotide
uagaauaagugauaaagac

SEQ ID NO: 1022846 - RNA, 19 nt, Artificial Sequence
  Description of Artificial Sequence: Synthetic oligonucleotide
aagugauaaagacuuuccg

SEQ ID NO: 1022847 - RNA, 19 nt, Artificial Sequence
  Description of Artificial Sequence: Synthetic oligonucleotide
uuguauuuggggcugauug

SEQ ID NO: 1022848 - RNA, 19 nt, Artificial Sequence
  Description of Artificial Sequence: Synthetic oligonucleotide
uucuccauaaaugaaaccc

SEQ ID NO: 1022849 - RNA, 19 nt, Artificial Sequence
  Description of Artificial Sequence: Synthetic oligonucleotide
ucacuaaaaguacuggaag

SEQ ID NO: 1022850 - RNA, 19 nt, Artificial Sequence
  Description of Artificial Sequence: Synthetic oligonucleotide
ucaauugcaguuuggaagc

SEQ ID NO: 1022851 - RNA, 19 nt, Artificial Sequence
  Description of Artificial Sequence: Synthetic oligonucleotide
auguaagccaugcucaucg

SEQ ID NO: 1022852 - RNA, 19 nt, Artificial Sequence
  Description of Artificial Sequence: Synthetic oligonucleotide
ucauaaaaguagcugaagu

SEQ ID NO: 1022853 - RNA, 19 nt, Artificial Sequence
  Description of Artificial Sequence: Synthetic oligonucleotide
auguacuuaguauguaagc

SEQ ID NO: 1022854 - RNA, 19 nt, Artificial Sequence
  Description of Artificial Sequence: Synthetic oligonucleotide
uaaccagugucuaucgugg

SEQ ID NO: 1022855 - RNA, 19 nt, Artificial Sequence
  Description of Artificial Sequence: Synthetic oligonucleotide
uaagugauaaagacuuucc

SEQ ID NO: 1022856 - RNA, 19 nt, Artificial Sequence
  Description of Artificial Sequence: Synthetic oligonucleotide
uauuauuuggacauuccuc

SEQ ID NO: 1022857 - RNA, 19 nt, Artificial Sequence
  Description of Artificial Sequence: Synthetic oligonucleotide
uaaugauaucaauaccccg

SEQ ID NO: 1022858 - RNA, 19 nt, Artificial Sequence
  Description of Artificial Sequence: Synthetic oligonucleotide
cauuagguaaacuuggguc

SEQ ID NO: 1022859 - RNA, 19 nt, Artificial Sequence
  Description of Artificial Sequence: Synthetic oligonucleotide
uuauuauuuggacauuccu

SEQ ID NO: 1022860 - RNA, 19 nt, Artificial Sequence
  Description of Artificial Sequence: Synthetic oligonucleotide
aauguacuuaguauguaag

SEQ ID NO: 1022861 - RNA, 19 nt, Artificial Sequence
  Description of Artificial Sequence: Synthetic oligonucleotide
agugauaaagacuuuccgu

SEQ ID NO: 1022862 - RNA, 19 nt, Artificial Sequence
  Description of Artificial Sequence: Synthetic oligonucleotide
uauccacucacuaaaagua

SEQ ID NO: 1022863 - RNA, 19 nt, Artificial Sequence
  Description of Artificial Sequence: Synthetic oligonucleotide
uaguauguaagccaugcuc

SEQ ID NO: 1022864 - RNA, 19 nt, Artificial Sequence
  Description of Artificial Sequence: Synthetic oligonucleotide
cuucagacgaacaugagca

SEQ ID NO: 1022865 - RNA, 19 nt, Artificial Sequence
  Description of Artificial Sequence: Synthetic oligonucleotide
aggacuuuagugcgcaagc

SEQ ID NO: 1022866 - RNA, 19 nt, Artificial Sequence
  Description of Artificial Sequence: Synthetic oligonucleotide
cucaguuuggucuaaggac

SEQ ID NO: 1022867 - RNA, 19 nt, Artificial Sequence
  Description of Artificial Sequence: Synthetic oligonucleotide
uccuguuuguauuuggggc

SEQ ID NO: 1022868 - RNA, 19 nt, Artificial Sequence
  Description of Artificial Sequence: Synthetic oligonucleotide
gauaucaauaccccggauc

SEQ ID NO: 1022869 - RNA, 19 nt, Artificial Sequence
  Description of Artificial Sequence: Synthetic oligonucleotide
caucauucgaugaauguac

SEQ ID NO: 1022870 - RNA, 19 nt, Artificial Sequence
  Description of Artificial Sequence: Synthetic oligonucleotide
auucgaugaauguacuuag

SEQ ID NO: 1022871 - RNA, 19 nt, Artificial Sequence
  Description of Artificial Sequence: Synthetic oligonucleotide
ugaaguucaaacugaggga

SEQ ID NO: 1022872 - RNA, 19 nt, Artificial Sequence
  Description of Artificial Sequence: Synthetic oligonucleotide
auuugcaaguuucagggga

SEQ ID NO: 1022873 - RNA, 19 nt, Artificial Sequence
  Description of Artificial Sequence: Synthetic oligonucleotide
cuuaguauguaagccaugc

SEQ ID NO: 1022874 - RNA, 19 nt, Artificial Sequence
  Description of Artificial Sequence: Synthetic oligonucleotide
accuguaguauccacucac

SEQ ID NO: 1022875 - RNA, 19 nt, Artificial Sequence
  Description of Artificial Sequence: Synthetic oligonucleotide
gaugaaucuaaaauucaug

SEQ ID NO: 1022876 - RNA, 19 nt, Artificial Sequence
  Description of Artificial Sequence: Synthetic oligonucleotide
cacuaaaaguacuggaagc

SEQ ID NO: 1022877 - RNA, 19 nt, Artificial Sequence
  Description of Artificial Sequence: Synthetic oligonucleotide
ucauaaccagugucuaucg

SEQ ID NO: 1022878 - RNA, 19 nt, Artificial Sequence
  Description of Artificial Sequence: Synthetic oligonucleotide
ucugaaguucaaacugagg

SEQ ID NO: 1022879 - RNA, 19 nt, Artificial Sequence
  Description of Artificial Sequence: Synthetic oligonucleotide
uacugauaguuccauggag

SEQ ID NO: 1022880 - RNA, 19 nt, Artificial Sequence
  Description of Artificial Sequence: Synthetic oligonucleotide
uccuccgggacaaugauac

SEQ ID NO: 1022881 - RNA, 19 nt, Artificial Sequence
  Description of Artificial Sequence: Synthetic oligonucleotide
uuugcaaguuucaggggag

SEQ ID NO: 1022882 - RNA, 19 nt, Artificial Sequence
  Description of Artificial Sequence: Synthetic oligonucleotide
aagccauucaccaacaaaa

SEQ ID NO: 1022883 - RNA, 19 nt, Artificial Sequence
  Description of Artificial Sequence: Synthetic oligonucleotide
cugggaaucauaaccagug

SEQ ID NO: 1022884 - RNA, 19 nt, Artificial Sequence
  Description of Artificial Sequence: Synthetic oligonucleotide
accaacuagccucaacugg

SEQ ID NO: 1022885 - RNA, 19 nt, Artificial Sequence
  Description of Artificial Sequence: Synthetic oligonucleotide
uaugucaauugcaguuugg

SEQ ID NO: 1022886 - RNA, 19 nt, Artificial Sequence
  Description of Artificial Sequence: Synthetic oligonucleotide
guagcugaagucauaagag

SEQ ID NO: 1022887 - RNA, 19 nt, Artificial Sequence
  Description of Artificial Sequence: Synthetic oligonucleotide
augaacucgaucugcauca

SEQ ID NO: 1022888 - RNA, 19 nt, Artificial Sequence
  Description of Artificial Sequence: Synthetic oligonucleotide
uaacacguggaggugaggg

SEQ ID NO: 1022889 - RNA, 19 nt, Artificial Sequence
  Description of Artificial Sequence: Synthetic oligonucleotide
ucuccauaaaugaaacccu

SEQ ID NO: 1022890 - RNA, 19 nt, Artificial Sequence
  Description of Artificial Sequence: Synthetic oligonucleotide
cuuuccguaauuccucugg

SEQ ID NO: 1022891 - RNA, 19 nt, Artificial Sequence
  Description of Artificial Sequence: Synthetic oligonucleotide
agagaagucucucugugca

SEQ ID NO: 1022892 - RNA, 19 nt, Artificial Sequence
  Description of Artificial Sequence: Synthetic oligonucleotide
ucaaacugagggaacuccc

SEQ ID NO: 1022893 - RNA, 19 nt, Artificial Sequence
  Description of Artificial Sequence: Synthetic oligonucleotide
gcuacaauuaucaucacug

SEQ ID NO: 1022894 - RNA, 19 nt, Artificial Sequence
  Description of Artificial Sequence: Synthetic oligonucleotide
uugauuuaugaacucgauc

SEQ ID NO: 1022895 - RNA, 19 nt, Artificial Sequence
  Description of Artificial Sequence: Synthetic oligonucleotide
uggacauuccucaguuugg

SEQ ID NO: 1022896 - RNA, 19 nt, Artificial Sequence
  Description of Artificial Sequence: Synthetic oligonucleotide
aguauccacucacuaaaag

SEQ ID NO: 1022897 - RNA, 19 nt, Artificial Sequence
  Description of Artificial Sequence: Synthetic oligonucleotide
uguauuuggggcugauugc

SEQ ID NO: 1022898 - RNA, 19 nt, Artificial Sequence
  Description of Artificial Sequence: Synthetic oligonucleotide
uccuugauuuaugaacucg

SEQ ID NO: 1022899 - RNA, 19 nt, Artificial Sequence
  Description of Artificial Sequence: Synthetic oligonucleotide
gacuuuagugcgcaagcag

SEQ ID NO: 1022900 - RNA, 19 nt, Artificial Sequence
  Description of Artificial Sequence: Synthetic oligonucleotide
ucuuaucucgaagguagcg

SEQ ID NO: 1022901 - RNA, 19 nt, Artificial Sequence
  Description of Artificial Sequence: Synthetic oligonucleotide
uccugcagguaacacgugg

SEQ ID NO: 1022902 - RNA, 19 nt, Artificial Sequence
  Description of Artificial Sequence: Synthetic oligonucleotide
aaguuggacaacucagacu

SEQ ID NO: 1022903 - RNA, 19 nt, Artificial Sequence
  Description of Artificial Sequence: Synthetic oligonucleotide
gaaucuaaaauucaugcuu

SEQ ID NO: 1022904 - RNA, 19 nt, Artificial Sequence
  Description of Artificial Sequence: Synthetic oligonucleotide
aguuuggaagccauucacc

SEQ ID NO: 1022905 - RNA, 19 nt, Artificial Sequence
  Description of Artificial Sequence: Synthetic oligonucleotide
uuagugcgcaagcagguga

SEQ ID NO: 1022906 - RNA, 19 nt, Artificial Sequence
  Description of Artificial Sequence: Synthetic oligonucleotide
uuuagaguuccucggacua

SEQ ID NO: 1022907 - RNA, 19 nt, Artificial Sequence
  Description of Artificial Sequence: Synthetic oligonucleotide
ucuaaagaaacuggcuuca

SEQ ID NO: 1022908 - RNA, 19 nt, Artificial Sequence
  Description of Artificial Sequence: Synthetic oligonucleotide
uacuuaguauguaagccau

SEQ ID NO: 1022909 - RNA, 19 nt, Artificial Sequence
  Description of Artificial Sequence: Synthetic oligonucleotide
cuaucgugggcacaucugg

SEQ ID NO: 1022910 - RNA, 19 nt, Artificial Sequence
  Description of Artificial Sequence: Synthetic oligonucleotide
uuuuagaguuccucggacu

SEQ ID NO: 1022911 - RNA, 19 nt, Artificial Sequence
  Description of Artificial Sequence: Synthetic oligonucleotide
ugucacaaggguaccaccu

SEQ ID NO: 1022912 - RNA, 19 nt, Artificial Sequence
  Description of Artificial Sequence: Synthetic oligonucleotide
cauccauuuaaugauauca

SEQ ID NO: 1022913 - RNA, 19 nt, Artificial Sequence
  Description of Artificial Sequence: Synthetic oligonucleotide
uccguaauuccucuggcaa

SEQ ID NO: 1022914 - RNA, 19 nt, Artificial Sequence
  Description of Artificial Sequence: Synthetic oligonucleotide
ucgaugaauguacuuagua

SEQ ID NO: 1022915 - RNA, 19 nt, Artificial Sequence
  Description of Artificial Sequence: Synthetic oligonucleotide
acuuuagugcgcaagcagg

SEQ ID NO: 1022916 - RNA, 19 nt, Artificial Sequence
  Description of Artificial Sequence: Synthetic oligonucleotide
guagccaugagcauauggc

SEQ ID NO: 1022917 - RNA, 19 nt, Artificial Sequence
  Description of Artificial Sequence: Synthetic oligonucleotide
aguauguaagccaugcuca

SEQ ID NO: 1022918 - RNA, 19 nt, Artificial Sequence
  Description of Artificial Sequence: Synthetic oligonucleotide
uggcuucagacgaacauga

SEQ ID NO: 1022919 - RNA, 19 nt, Artificial Sequence
  Description of Artificial Sequence: Synthetic oligonucleotide
acucacuaaaaguacugga

SEQ ID NO: 1022920 - RNA, 19 nt, Artificial Sequence
  Description of Artificial Sequence: Synthetic oligonucleotide
uaucgugggcacaucuggg

SEQ ID NO: 1022921 - RNA, 19 nt, Artificial Sequence
  Description of Artificial Sequence: Synthetic oligonucleotide
ugcuacaauuaucaucacu

SEQ ID NO: 1022922 - RNA, 19 nt, Artificial Sequence
  Description of Artificial Sequence: Synthetic oligonucleotide
aucagggugccuucuaaag

SEQ ID NO: 1022923 - RNA, 19 nt, Artificial Sequence
  Description of Artificial Sequence: Synthetic oligonucleotide
gagguaucgucucuuggcc

SEQ ID NO: 1022924 - RNA, 19 nt, Artificial Sequence
  Description of Artificial Sequence: Synthetic oligonucleotide
gaccuguugugacacaggc

SEQ ID NO: 1022925 - RNA, 19 nt, Artificial Sequence
  Description of Artificial Sequence: Synthetic oligonucleotide
ugauaaagacuuuccguaa

SEQ ID NO: 1022926 - RNA, 19 nt, Artificial Sequence
  Description of Artificial Sequence: Synthetic oligonucleotide
uuuccguaauuccucuggc

SEQ ID NO: 1022927 - RNA, 19 nt, Artificial Sequence
  Description of Artificial Sequence: Synthetic oligonucleotide
ucuaucgugggcacaucug

SEQ ID NO: 1022928 - RNA, 19 nt, Artificial Sequence
  Description of Artificial Sequence: Synthetic oligonucleotide
uccacucacuaaaaguacu

SEQ ID NO: 1022929 - RNA, 19 nt, Artificial Sequence
  Description of Artificial Sequence: Synthetic oligonucleotide
ucagggugccuucuaaaga

SEQ ID NO: 1022930 - RNA, 19 nt, Artificial Sequence
  Description of Artificial Sequence: Synthetic oligonucleotide
aaucauaaccagugucuau

SEQ ID NO: 1022931 - RNA, 19 nt, Artificial Sequence
  Description of Artificial Sequence: Synthetic oligonucleotide
gugauaaagacuuuccgua

SEQ ID NO: 1022932 - RNA, 19 nt, Artificial Sequence
  Description of Artificial Sequence: Synthetic oligonucleotide
uuuggucuaaggacacagc

SEQ ID NO: 1022933 - RNA, 19 nt, Artificial Sequence
  Description of Artificial Sequence: Synthetic oligonucleotide
agaagucucucugugcagg

SEQ ID NO: 1022934 - RNA, 19 nt, Artificial Sequence
  Description of Artificial Sequence: Synthetic oligonucleotide
ugugcauacgcggaauacc

SEQ ID NO: 1022935 - RNA, 19 nt, Artificial Sequence
  Description of Artificial Sequence: Synthetic oligonucleotide
acuagccucaacuggaaaa

SEQ ID NO: 1022936 - RNA, 19 nt, Artificial Sequence
  Description of Artificial Sequence: Synthetic oligonucleotide
gaucccagccaucuauugc

SEQ ID NO: 1022937 - RNA, 19 nt, Artificial Sequence
  Description of Artificial Sequence: Synthetic oligonucleotide
ucacugucuuaucucgaag

SEQ ID NO: 1022938 - RNA, 19 nt, Artificial Sequence
  Description of Artificial Sequence: Synthetic oligonucleotide
uuaguauguaagccaugcu

SEQ ID NO: 1022939 - RNA, 19 nt, Artificial Sequence
  Description of Artificial Sequence: Synthetic oligonucleotide
aggaugacuuucuguacag

SEQ ID NO: 1022940 - RNA, 19 nt, Artificial Sequence
  Description of Artificial Sequence: Synthetic oligonucleotide
gaaguucaaacugagggaa

SEQ ID NO: 1022941 - RNA, 19 nt, Artificial Sequence
  Description of Artificial Sequence: Synthetic oligonucleotide
gauccuguccucaaauaug

SEQ ID NO: 1022942 - RNA, 19 nt, Artificial Sequence
  Description of Artificial Sequence: Synthetic oligonucleotide
aucucgaagguagcgcucc

SEQ ID NO: 1022943 - RNA, 19 nt, Artificial Sequence
  Description of Artificial Sequence: Synthetic oligonucleotide
cagacgaacaugagcaaac

SEQ ID NO: 1022944 - RNA, 19 nt, Artificial Sequence
  Description of Artificial Sequence: Synthetic oligonucleotide
ucuaaaauucaugcuuccu

SEQ ID NO: 1022945 - RNA, 19 nt, Artificial Sequence
  Description of Artificial Sequence: Synthetic oligonucleotide
augauaucaauaccccgga

SEQ ID NO: 1022946 - RNA, 19 nt, Artificial Sequence
  Description of Artificial Sequence: Synthetic oligonucleotide
ucuaggcacagcagcuggg

SEQ ID NO: 1022947 - RNA, 19 nt, Artificial Sequence
  Description of Artificial Sequence: Synthetic oligonucleotide
aaccagugucuaucguggg

SEQ ID NO: 1022948 - RNA, 19 nt, Artificial Sequence
  Description of Artificial Sequence: Synthetic oligonucleotide
cuccauaaaugaaacccug

SEQ ID NO: 1022949 - RNA, 19 nt, Artificial Sequence
  Description of Artificial Sequence: Synthetic oligonucleotide
cucugaaguucaaacugag

SEQ ID NO: 1022950 - RNA, 19 nt, Artificial Sequence
  Description of Artificial Sequence: Synthetic oligonucleotide
ugucgggagaagcugcuga

SEQ ID NO: 1022951 - RNA, 19 nt, Artificial Sequence
  Description of Artificial Sequence: Synthetic oligonucleotide
aaguucaaacugagggaac

SEQ ID NO: 1022952 - RNA, 19 nt, Artificial Sequence
  Description of Artificial Sequence: Synthetic oligonucleotide
ucgaucugcaucauucgau

SEQ ID NO: 1022953 - RNA, 19 nt, Artificial Sequence
  Description of Artificial Sequence: Synthetic oligonucleotide
uaccucugaaguucaaacu

SEQ ID NO: 1022954 - RNA, 19 nt, Artificial Sequence
  Description of Artificial Sequence: Synthetic oligonucleotide
uaaagacuuuccguaauuc

SEQ ID NO: 1022955 - RNA, 19 nt, Artificial Sequence
  Description of Artificial Sequence: Synthetic oligonucleotide
auacugauaguuccaugga

SEQ ID NO: 1022956 - RNA, 19 nt, Artificial Sequence
  Description of Artificial Sequence: Synthetic oligonucleotide
ugauacugauaguuccaug

SEQ ID NO: 1022957 - RNA, 19 nt, Artificial Sequence
  Description of Artificial Sequence: Synthetic oligonucleotide
ucacaaggguaccaccuga

SEQ ID NO: 1022958 - RNA, 19 nt, Artificial Sequence
  Description of Artificial Sequence: Synthetic oligonucleotide
aagucucucugugcaggcc

SEQ ID NO: 1022959 - RNA, 19 nt, Artificial Sequence
  Description of Artificial Sequence: Synthetic oligonucleotide
cucacuaaaaguacuggaa

SEQ ID NO: 1022960 - RNA, 19 nt, Artificial Sequence
  Description of Artificial Sequence: Synthetic oligonucleotide
ugacuugcugguaggcugc

SEQ ID NO: 1022961 - RNA, 19 nt, Artificial Sequence
  Description of Artificial Sequence: Synthetic oligonucleotide
cuugggagccuucggaaag

SEQ ID NO: 1022962 - RNA, 19 nt, Artificial Sequence
  Description of Artificial Sequence: Synthetic oligonucleotide
gaguuccucggacuagggg

SEQ ID NO: 1022963 - RNA, 19 nt, Artificial Sequence
  Description of Artificial Sequence: Synthetic oligonucleotide
agguaucgucucuuggccg

SEQ ID NO: 1022964 - RNA, 19 nt, Artificial Sequence
  Description of Artificial Sequence: Synthetic oligonucleotide
ccaucuauugcguuucucc

SEQ ID NO: 1022965 - RNA, 19 nt, Artificial Sequence
  Description of Artificial Sequence: Synthetic oligonucleotide
ugcaaguuucaggggaggg

SEQ ID NO: 1022966 - RNA, 19 nt, Artificial Sequence
  Description of Artificial Sequence: Synthetic oligonucleotide
auaaagacuuuccguaauu

SEQ ID NO: 1022967 - RNA, 19 nt, Artificial Sequence
  Description of Artificial Sequence: Synthetic oligonucleotide
cucauaaaaguagcugaag

SEQ ID NO: 1022968 - RNA, 19 nt, Artificial Sequence
  Description of Artificial Sequence: Synthetic oligonucleotide
gguagccaugagcauaugg

SEQ ID NO: 1022969 - RNA, 19 nt, Artificial Sequence
  Description of Artificial Sequence: Synthetic oligonucleotide
gaagccauucaccaacaaa

SEQ ID NO: 1022970 - RNA, 19 nt, Artificial Sequence
  Description of Artificial Sequence: Synthetic oligonucleotide
gaaacccugugcucuggag

SEQ ID NO: 1022971 - RNA, 19 nt, Artificial Sequence
  Description of Artificial Sequence: Synthetic oligonucleotide
ugcaguuuggaagccauuc

SEQ ID NO: 1022972 - RNA, 19 nt, Artificial Sequence
  Description of Artificial Sequence: Synthetic oligonucleotide
cugcugaaagcugcgaucc

SEQ ID NO: 1022973 - RNA, 19 nt, Artificial Sequence
  Description of Artificial Sequence: Synthetic oligonucleotide
acgaaguguaaucauuuua

SEQ ID NO: 1022974 - RNA, 19 nt, Artificial Sequence
  Description of Artificial Sequence: Synthetic oligonucleotide
agacuuuccguaauuccuc

SEQ ID NO: 1022975 - RNA, 19 nt, Artificial Sequence
  Description of Artificial Sequence: Synthetic oligonucleotide
auccacucacuaaaaguac

SEQ ID NO: 1022976 - RNA, 19 nt, Artificial Sequence
  Description of Artificial Sequence: Synthetic oligonucleotide
ggucuaaggacacagcauc

SEQ ID NO: 1022977 - RNA, 19 nt, Artificial Sequence
  Description of Artificial Sequence: Synthetic oligonucleotide
uucgaugaauguacuuagu

SEQ ID NO: 1022978 - RNA, 19 nt, Artificial Sequence
  Description of Artificial Sequence: Synthetic oligonucleotide
cacucacuaaaaguacugg

SEQ ID NO: 1022979 - RNA, 19 nt, Artificial Sequence
  Description of Artificial Sequence: Synthetic oligonucleotide
gaagucauaagagaguuuu

SEQ ID NO: 1022980 - RNA, 19 nt, Artificial Sequence
  Description of Artificial Sequence: Synthetic oligonucleotide
guauccacucacuaaaagu

SEQ ID NO: 1022981 - RNA, 19 nt, Artificial Sequence
  Description of Artificial Sequence: Synthetic oligonucleotide
uuagaguuccucggacuag

SEQ ID NO: 1022982 - RNA, 19 nt, Artificial Sequence
  Description of Artificial Sequence: Synthetic oligonucleotide
ugggaaucauaaccagugu

SEQ ID NO: 1022983 - RNA, 19 nt, Artificial Sequence
  Description of Artificial Sequence: Synthetic oligonucleotide
uccacuagacgguggguga

SEQ ID NO: 1022984 - RNA, 19 nt, Artificial Sequence
  Description of Artificial Sequence: Synthetic oligonucleotide
uuagguaaacuugggucgu

SEQ ID NO: 1022985 - RNA, 19 nt, Artificial Sequence
  Description of Artificial Sequence: Synthetic oligonucleotide
uuccguaauuccucuggca

SEQ ID NO: 1022986 - RNA, 19 nt, Artificial Sequence
  Description of Artificial Sequence: Synthetic oligonucleotide
gcuucagacgaacaugagc

SEQ ID NO: 1022987 - RNA, 19 nt, Artificial Sequence
  Description of Artificial Sequence: Synthetic oligonucleotide
agcauuagguaaacuuggg

SEQ ID NO: 1022988 - RNA, 19 nt, Artificial Sequence
  Description of Artificial Sequence: Synthetic oligonucleotide
ucugcaucauucgaugaau

SEQ ID NO: 1022989 - RNA, 19 nt, Artificial Sequence
  Description of Artificial Sequence: Synthetic oligonucleotide
ugccagagcauuagguaaa

SEQ ID NO: 1022990 - RNA, 19 nt, Artificial Sequence
  Description of Artificial Sequence: Synthetic oligonucleotide
gauaggguccuccgggaca

SEQ ID NO: 1022991 - RNA, 19 nt, Artificial Sequence
  Description of Artificial Sequence: Synthetic oligonucleotide
uuaugaacucgaucugcau

SEQ ID NO: 1022992 - RNA, 19 nt, Artificial Sequence
  Description of Artificial Sequence: Synthetic oligonucleotide
uuuagugcgcaagcaggug

SEQ ID NO: 1022993 - RNA, 19 nt, Artificial Sequence
  Description of Artificial Sequence: Synthetic oligonucleotide
uaggcguuugcugccauca

SEQ ID NO: 1022994 - RNA, 19 nt, Artificial Sequence
  Description of Artificial Sequence: Synthetic oligonucleotide
ugauagagcuggucccuug

SEQ ID NO: 1022995 - RNA, 19 nt, Artificial Sequence
  Description of Artificial Sequence: Synthetic oligonucleotide
ucagacgaacaugagcaaa

SEQ ID NO: 1022996 - RNA, 19 nt, Artificial Sequence
  Description of Artificial Sequence: Synthetic oligonucleotide
acgcggaauaccucugaag

SEQ ID NO: 1022997 - RNA, 19 nt, Artificial Sequence
  Description of Artificial Sequence: Synthetic oligonucleotide
gacggugggugauagagcu

SEQ ID NO: 1022998 - RNA, 19 nt, Artificial Sequence
  Description of Artificial Sequence: Synthetic oligonucleotide
agucugccagagcauuagg

SEQ ID NO: 1022999 - RNA, 19 nt, Artificial Sequence
  Description of Artificial Sequence: Synthetic oligonucleotide
uugugacacaggccgguga

SEQ ID NO: 1023000 - RNA, 19 nt, Artificial Sequence
  Description of Artificial Sequence: Synthetic oligonucleotide
uagugcgcaagcaggugac

SEQ ID NO: 1023001 - RNA, 19 nt, Artificial Sequence
  Description of Artificial Sequence: Synthetic oligonucleotide
uugcaaguuucaggggagg

SEQ ID NO: 1023002 - RNA, 19 nt, Artificial Sequence
  Description of Artificial Sequence: Synthetic oligonucleotide
gguaucgucucuuggccgc

SEQ ID NO: 1023003 - RNA, 19 nt, Artificial Sequence
  Description of Artificial Sequence: Synthetic oligonucleotide
gauaaagacuuuccguaau

SEQ ID NO: 1023004 - RNA, 19 nt, Artificial Sequence
  Description of Artificial Sequence: Synthetic oligonucleotide
aggccggugauuugcaagu

SEQ ID NO: 1023005 - RNA, 19 nt, Artificial Sequence
  Description of Artificial Sequence: Synthetic oligonucleotide
cugcaucauucgaugaaug

SEQ ID NO: 1023006 - RNA, 19 nt, Artificial Sequence
  Description of Artificial Sequence: Synthetic oligonucleotide
acuagacggugggugauag

SEQ ID NO: 1023007 - RNA, 19 nt, Artificial Sequence
  Description of Artificial Sequence: Synthetic oligonucleotide
uccagcugcgacucagcgc

SEQ ID NO: 1023008 - RNA, 19 nt, Artificial Sequence
  Description of Artificial Sequence: Synthetic oligonucleotide
ucuuauucuugggccagcu

SEQ ID NO: 1023009 - RNA, 19 nt, Artificial Sequence
  Description of Artificial Sequence: Synthetic oligonucleotide
auaggcguuugcugccauc

SEQ ID NO: 1023010 - RNA, 19 nt, Artificial Sequence
  Description of Artificial Sequence: Synthetic oligonucleotide
gggaaucauaaccaguguc

SEQ ID NO: 1023011 - RNA, 19 nt, Artificial Sequence
  Description of Artificial Sequence: Synthetic oligonucleotide
gugaccuguugugacacag

SEQ ID NO: 1023012 - RNA, 19 nt, Artificial Sequence
  Description of Artificial Sequence: Synthetic oligonucleotide
ugaauguacuuaguaugua

SEQ ID NO: 1023013 - RNA, 19 nt, Artificial Sequence
  Description of Artificial Sequence: Synthetic oligonucleotide
cagugucgggagaagcugc

SEQ ID NO: 1023014 - RNA, 19 nt, Artificial Sequence
  Description of Artificial Sequence: Synthetic oligonucleotide
ugaagucauaagagaguuu

SEQ ID NO: 1023015 - RNA, 19 nt, Artificial Sequence
  Description of Artificial Sequence: Synthetic oligonucleotide
uacgaaguguaaucauuuu

SEQ ID NO: 1023016 - RNA, 19 nt, Artificial Sequence
  Description of Artificial Sequence: Synthetic oligonucleotide
ucugugcauacgcggaaua

SEQ ID NO: 1023017 - RNA, 19 nt, Artificial Sequence
  Description of Artificial Sequence: Synthetic oligonucleotide
uauggcgccuggugauagg

SEQ ID NO: 1023018 - RNA, 19 nt, Artificial Sequence
  Description of Artificial Sequence: Synthetic oligonucleotide
ggagccuucggaaagagaa

SEQ ID NO: 1023019 - RNA, 19 nt, Artificial Sequence
  Description of Artificial Sequence: Synthetic oligonucleotide
uguugugacacaggccggu

SEQ ID NO: 1023020 - RNA, 19 nt, Artificial Sequence
  Description of Artificial Sequence: Synthetic oligonucleotide
cauacgcggaauaccucug

SEQ ID NO: 1023021 - RNA, 19 nt, Artificial Sequence
  Description of Artificial Sequence: Synthetic oligonucleotide
uucagacgaacaugagcaa

SEQ ID NO: 1023022 - RNA, 19 nt, Artificial Sequence
  Description of Artificial Sequence: Synthetic oligonucleotide
auaccccggauccuguccu

SEQ ID NO: 1023023 - RNA, 19 nt, Artificial Sequence
  Description of Artificial Sequence: Synthetic oligonucleotide
agacggugggugauagagc

SEQ ID NO: 1023024 - RNA, 19 nt, Artificial Sequence
  Description of Artificial Sequence: Synthetic oligonucleotide
ugauaguuccauggagccu

SEQ ID NO: 1023025 - RNA, 19 nt, Artificial Sequence
  Description of Artificial Sequence: Synthetic oligonucleotide
aucaccuguaguauccacu

SEQ ID NO: 1023026 - RNA, 19 nt, Artificial Sequence
  Description of Artificial Sequence: Synthetic oligonucleotide
acuuuccguaauuccucug

SEQ ID NO: 1023027 - RNA, 19 nt, Artificial Sequence
  Description of Artificial Sequence: Synthetic oligonucleotide
ucgucguccagcugcgacu

SEQ ID NO: 1023028 - RNA, 19 nt, Artificial Sequence
  Description of Artificial Sequence: Synthetic oligonucleotide
uacgcggaauaccucugaa

SEQ ID NO: 1023029 - RNA, 19 nt, Artificial Sequence
  Description of Artificial Sequence: Synthetic oligonucleotide
cucuuggccgccacuggag

SEQ ID NO: 1023030 - RNA, 19 nt, Artificial Sequence
  Description of Artificial Sequence: Synthetic oligonucleotide
uauuuggggcugauugcua

SEQ ID NO: 1023031 - RNA, 19 nt, Artificial Sequence
  Description of Artificial Sequence: Synthetic oligonucleotide
gagaugguuggugucacaa

SEQ ID NO: 1023032 - RNA, 19 nt, Artificial Sequence
  Description of Artificial Sequence: Synthetic oligonucleotide
auugagaggcagccucugu

SEQ ID NO: 1023033 - RNA, 19 nt, Artificial Sequence
  Description of Artificial Sequence: Synthetic oligonucleotide
auggcgccuggugauaggg

SEQ ID NO: 1023034 - RNA, 19 nt, Artificial Sequence
  Description of Artificial Sequence: Synthetic oligonucleotide
ccauuuaaugauaucaaua

SEQ ID NO: 1023035 - RNA, 19 nt, Artificial Sequence
  Description of Artificial Sequence: Synthetic oligonucleotide
ugcauacgcggaauaccuc

SEQ ID NO: 1023036 - RNA, 19 nt, Artificial Sequence
  Description of Artificial Sequence: Synthetic oligonucleotide
uguaagccaugcucaucgu

SEQ ID NO: 1023037 - RNA, 19 nt, Artificial Sequence
  Description of Artificial Sequence: Synthetic oligonucleotide
auacgcggaauaccucuga

SEQ ID NO: 1023038 - RNA, 19 nt, Artificial Sequence
  Description of Artificial Sequence: Synthetic oligonucleotide
auauggcgccuggugauag

SEQ ID NO: 1023039 - RNA, 19 nt, Artificial Sequence
  Description of Artificial Sequence: Synthetic oligonucleotide
gaucagggugccuucuaaa

SEQ ID NO: 1023040 - RNA, 19 nt, Artificial Sequence
  Description of Artificial Sequence: Synthetic oligonucleotide
cugccagagcauuagguaa

SEQ ID NO: 1023041 - RNA, 19 nt, Artificial Sequence
  Description of Artificial Sequence: Synthetic oligonucleotide
gccaacucauaaaaguagc

SEQ ID NO: 1023042 - RNA, 19 nt, Artificial Sequence
  Description of Artificial Sequence: Synthetic oligonucleotide
aucgucucuuggccgccac

SEQ ID NO: 1023043 - RNA, 19 nt, Artificial Sequence
  Description of Artificial Sequence: Synthetic oligonucleotide
cagagcauuagguaaacuu

SEQ ID NO: 1023044 - RNA, 19 nt, Artificial Sequence
  Description of Artificial Sequence: Synthetic oligonucleotide
agugcgcaagcaggugacc

SEQ ID NO: 1023045 - RNA, 19 nt, Artificial Sequence
  Description of Artificial Sequence: Synthetic oligonucleotide
ugcgacucagcgccuucca

SEQ ID NO: 1023046 - RNA, 19 nt, Artificial Sequence
  Description of Artificial Sequence: Synthetic oligonucleotide
agacgaacaugagcaaaca

SEQ ID NO: 1023047 - RNA, 19 nt, Artificial Sequence
  Description of Artificial Sequence: Synthetic oligonucleotide
ggaaucauaaccagugucu

SEQ ID NO: 1023048 - RNA, 19 nt, Artificial Sequence
  Description of Artificial Sequence: Synthetic oligonucleotide
gucucuuggccgccacugg

SEQ ID NO: 1023049 - RNA, 19 nt, Artificial Sequence
  Description of Artificial Sequence: Synthetic oligonucleotide
aagcucagacucagggucu

SEQ ID NO: 1023050 - RNA, 19 nt, Artificial Sequence
  Description of Artificial Sequence: Synthetic oligonucleotide
uaucaauaccccggauccu

SEQ ID NO: 1023051 - RNA, 19 nt, Artificial Sequence
  Description of Artificial Sequence: Synthetic oligonucleotide
gccuucuaaagaaacuggc

SEQ ID NO: 1023052 - RNA, 19 nt, Artificial Sequence
  Description of Artificial Sequence: Synthetic oligonucleotide
acccuucgggagcuccagc

SEQ ID NO: 1023053 - RNA, 19 nt, Artificial Sequence
  Description of Artificial Sequence: Synthetic oligonucleotide
ggaugcaggccucucacuc

SEQ ID NO: 1023054 - RNA, 19 nt, Artificial Sequence
  Description of Artificial Sequence: Synthetic oligonucleotide
agguaacacguggagguga

SEQ ID NO: 1023055 - RNA, 19 nt, Artificial Sequence
  Description of Artificial Sequence: Synthetic oligonucleotide
aucauucgaugaauguacu

SEQ ID NO: 1023056 - RNA, 19 nt, Artificial Sequence
  Description of Artificial Sequence: Synthetic oligonucleotide
cgagguaucgucucuuggc

SEQ ID NO: 1023057 - RNA, 19 nt, Artificial Sequence
  Description of Artificial Sequence: Synthetic oligonucleotide
cugugcauacgcggaauac

SEQ ID NO: 1023058 - RNA, 19 nt, Artificial Sequence
  Description of Artificial Sequence: Synthetic oligonucleotide
uuuguauuuggggcugauu

SEQ ID NO: 1023059 - RNA, 19 nt, Artificial Sequence
  Description of Artificial Sequence: Synthetic oligonucleotide
ccuugauuuaugaacucga

SEQ ID NO: 1023060 - RNA, 19 nt, Artificial Sequence
  Description of Artificial Sequence: Synthetic oligonucleotide
ccacucacuaaaaguacug

SEQ ID NO: 1023061 - RNA, 19 nt, Artificial Sequence
  Description of Artificial Sequence: Synthetic oligonucleotide
uggaggagucugccagagc

SEQ ID NO: 1023062 - RNA, 19 nt, Artificial Sequence
  Description of Artificial Sequence: Synthetic oligonucleotide
uuggugucacaaggguacc

SEQ ID NO: 1023063 - RNA, 19 nt, Artificial Sequence
  Description of Artificial Sequence: Synthetic oligonucleotide
cuuuagugcgcaagcaggu

SEQ ID NO: 1023064 - RNA, 19 nt, Artificial Sequence
  Description of Artificial Sequence: Synthetic oligonucleotide
acuuaguauguaagccaug

SEQ ID NO: 1023065 - RNA, 19 nt, Artificial Sequence
  Description of Artificial Sequence: Synthetic oligonucleotide
ccaacuagccucaacugga

SEQ ID NO: 1023066 - RNA, 19 nt, Artificial Sequence
  Description of Artificial Sequence: Synthetic oligonucleotide
ugagcauauggcgccuggu

SEQ ID NO: 1023067 - RNA, 19 nt, Artificial Sequence
  Description of Artificial Sequence: Synthetic oligonucleotide
uuggggcugauugcuacaa

SEQ ID NO: 1023068 - RNA, 19 nt, Artificial Sequence
  Description of Artificial Sequence: Synthetic oligonucleotide
uugggagccuucggaaaga

SEQ ID NO: 1023069 - RNA, 19 nt, Artificial Sequence
  Description of Artificial Sequence: Synthetic oligonucleotide
gguaacacguggaggugag

SEQ ID NO: 1023070 - RNA, 19 nt, Artificial Sequence
  Description of Artificial Sequence: Synthetic oligonucleotide
guauuuggggcugauugcu

SEQ ID NO: 1023071 - RNA, 19 nt, Artificial Sequence
  Description of Artificial Sequence: Synthetic oligonucleotide
acuuucuguacaggaugca

SEQ ID NO: 1023072 - RNA, 19 nt, Artificial Sequence
  Description of Artificial Sequence: Synthetic oligonucleotide
ccggugauuugcaaguuuc

SEQ ID NO: 1023073 - RNA, 19 nt, Artificial Sequence
  Description of Artificial Sequence: Synthetic oligonucleotide
gcugauugcuacaauuauc

SEQ ID NO: 1023074 - RNA, 19 nt, Artificial Sequence
  Description of Artificial Sequence: Synthetic oligonucleotide
gcugcugaaagcugcgauc

SEQ ID NO: 1023075 - RNA, 19 nt, Artificial Sequence
  Description of Artificial Sequence: Synthetic oligonucleotide
acaccuuugccaggaucag

SEQ ID NO: 1023076 - RNA, 19 nt, Artificial Sequence
  Description of Artificial Sequence: Synthetic oligonucleotide
ugcugccaucaccuguagu

SEQ ID NO: 1023077 - RNA, 19 nt, Artificial Sequence
  Description of Artificial Sequence: Synthetic oligonucleotide
auaggguccuccgggacaa

SEQ ID NO: 1023078 - RNA, 19 nt, Artificial Sequence
  Description of Artificial Sequence: Synthetic oligonucleotide
gaugcaggccucucacucu

SEQ ID NO: 1023079 - RNA, 19 nt, Artificial Sequence
  Description of Artificial Sequence: Synthetic oligonucleotide
gcaaguuucaggggagggc

SEQ ID NO: 1023080 - RNA, 19 nt, Artificial Sequence
  Description of Artificial Sequence: Synthetic oligonucleotide
caucacugucuuaucucga

SEQ ID NO: 1023081 - RNA, 19 nt, Artificial Sequence
  Description of Artificial Sequence: Synthetic oligonucleotide
agcgccuuccacauccugu

SEQ ID NO: 1023082 - RNA, 19 nt, Artificial Sequence
  Description of Artificial Sequence: Synthetic oligonucleotide
cgaagguagcgcuccaucc

SEQ ID NO: 1023083 - RNA, 19 nt, Artificial Sequence
  Description of Artificial Sequence: Synthetic oligonucleotide
cuggcaaauugcuaguuuu

SEQ ID NO: 1023084 - RNA, 19 nt, Artificial Sequence
  Description of Artificial Sequence: Synthetic oligonucleotide
guaacacguggaggugagg

SEQ ID NO: 1023085 - RNA, 19 nt, Artificial Sequence
  Description of Artificial Sequence: Synthetic oligonucleotide
cagugucuaucgugggcac

SEQ ID NO: 1023086 - RNA, 19 nt, Artificial Sequence
  Description of Artificial Sequence: Synthetic oligonucleotide
cuguaguauccacucacua

SEQ ID NO: 1023087 - RNA, 19 nt, Artificial Sequence
  Description of Artificial Sequence: Synthetic oligonucleotide
caauaccccggauccuguc

SEQ ID NO: 1023088 - RNA, 19 nt, Artificial Sequence
  Description of Artificial Sequence: Synthetic oligonucleotide
caaacugagggaacucccu

SEQ ID NO: 1023089 - RNA, 19 nt, Artificial Sequence
  Description of Artificial Sequence: Synthetic oligonucleotide
guugugacacaggccggug

SEQ ID NO: 1023090 - RNA, 19 nt, Artificial Sequence
  Description of Artificial Sequence: Synthetic oligonucleotide
gacccuucgggagcuccag

SEQ ID NO: 1023091 - RNA, 19 nt, Artificial Sequence
  Description of Artificial Sequence: Synthetic oligonucleotide
gacucagcgccuuccacau

SEQ ID NO: 1023092 - RNA, 19 nt, Artificial Sequence
  Description of Artificial Sequence: Synthetic oligonucleotide
gucuaucgugggcacaucu

SEQ ID NO: 1023093 - RNA, 19 nt, Artificial Sequence
  Description of Artificial Sequence: Synthetic oligonucleotide
ccaaguuggacaacucaga

SEQ ID NO: 1023094 - RNA, 19 nt, Artificial Sequence
  Description of Artificial Sequence: Synthetic oligonucleotide
cacaaggguaccaccugaa

SEQ ID NO: 1023095 - RNA, 19 nt, Artificial Sequence
  Description of Artificial Sequence: Synthetic oligonucleotide
agugucgggagaagcugcu

SEQ ID NO: 1023096 - RNA, 19 nt, Artificial Sequence
  Description of Artificial Sequence: Synthetic oligonucleotide
gcaucauucgaugaaugua

SEQ ID NO: 1023097 - RNA, 19 nt, Artificial Sequence
  Description of Artificial Sequence: Synthetic oligonucleotide
ggaauaccucugaaguuca

SEQ ID NO: 1023098 - RNA, 19 nt, Artificial Sequence
  Description of Artificial Sequence: Synthetic oligonucleotide
cagguaacacguggaggug

SEQ ID NO: 1023099 - RNA, 19 nt, Artificial Sequence
  Description of Artificial Sequence: Synthetic oligonucleotide
uggggcugauugcuacaau

SEQ ID NO: 1023100 - RNA, 19 nt, Artificial Sequence
  Description of Artificial Sequence: Synthetic oligonucleotide
aggguaccaccugaagggu

SEQ ID NO: 1023101 - RNA, 19 nt, Artificial Sequence
  Description of Artificial Sequence: Synthetic oligonucleotide
gcauacgcggaauaccucu

SEQ ID NO: 1023102 - RNA, 19 nt, Artificial Sequence
  Description of Artificial Sequence: Synthetic oligonucleotide
ggaugaaucuaaaauucau

SEQ ID NO: 1023103 - RNA, 19 nt, Artificial Sequence
  Description of Artificial Sequence: Synthetic oligonucleotide
caacuagccucaacuggaa

SEQ ID NO: 1023104 - RNA, 19 nt, Artificial Sequence
  Description of Artificial Sequence: Synthetic oligonucleotide
ugaacucgaucugcaucau

SEQ ID NO: 1023105 - RNA, 19 nt, Artificial Sequence
  Description of Artificial Sequence: Synthetic oligonucleotide
gcauuagguaaacuugggu

SEQ ID NO: 1023106 - RNA, 19 nt, Artificial Sequence
  Description of Artificial Sequence: Synthetic oligonucleotide
aggagucugccagagcauu

SEQ ID NO: 1023107 - RNA, 19 nt, Artificial Sequence
  Description of Artificial Sequence: Synthetic oligonucleotide
agguaaacuugggucguuu

SEQ ID NO: 1023108 - RNA, 19 nt, Artificial Sequence
  Description of Artificial Sequence: Synthetic oligonucleotide
caugagcauauggcgccug

SEQ ID NO: 1023109 - RNA, 19 nt, Artificial Sequence
  Description of Artificial Sequence: Synthetic oligonucleotide
ccgagguaucgucucuugg

SEQ ID NO: 1023110 - RNA, 19 nt, Artificial Sequence
  Description of Artificial Sequence: Synthetic oligonucleotide
caggacguccuggggcugg

SEQ ID NO: 1023111 - RNA, 19 nt, Artificial Sequence
  Description of Artificial Sequence: Synthetic oligonucleotide
aggaucagggugccuucua

SEQ ID NO: 1023112 - RNA, 19 nt, Artificial Sequence
  Description of Artificial Sequence: Synthetic oligonucleotide
guaucgucucuuggccgcc

SEQ ID NO: 1023113 - RNA, 19 nt, Artificial Sequence
  Description of Artificial Sequence: Synthetic oligonucleotide
guggucauaggcguuugcu

SEQ ID NO: 1023114 - RNA, 19 nt, Artificial Sequence
  Description of Artificial Sequence: Synthetic oligonucleotide
uaucgucucuuggccgcca

SEQ ID NO: 1023115 - RNA, 19 nt, Artificial Sequence
  Description of Artificial Sequence: Synthetic oligonucleotide
gggcugggaaucauaacca

SEQ ID NO: 1023116 - RNA, 19 nt, Artificial Sequence
  Description of Artificial Sequence: Synthetic oligonucleotide
ccuucuaaagaaacuggcu

SEQ ID NO: 1023117 - RNA, 19 nt, Artificial Sequence
  Description of Artificial Sequence: Synthetic oligonucleotide
ggacuuuagugcgcaagca

SEQ ID NO: 1023118 - RNA, 19 nt, Artificial Sequence
  Description of Artificial Sequence: Synthetic oligonucleotide
agggaacucccuggaccuc

SEQ ID NO: 1023119 - RNA, 19 nt, Artificial Sequence
  Description of Artificial Sequence: Synthetic oligonucleotide
cacguggaggugaggggca

SEQ ID NO: 1023120 - RNA, 19 nt, Artificial Sequence
  Description of Artificial Sequence: Synthetic oligonucleotide
ccaccaacuagccucaacu

SEQ ID NO: 1023121 - RNA, 19 nt, Artificial Sequence
  Description of Artificial Sequence: Synthetic oligonucleotide
ccagugucuaucgugggca

SEQ ID NO: 1023122 - RNA, 19 nt, Artificial Sequence
  Description of Artificial Sequence: Synthetic oligonucleotide
gucuaaggacacagcaucu

SEQ ID NO: 1023123 - RNA, 19 nt, Artificial Sequence
  Description of Artificial Sequence: Synthetic oligonucleotide
uagguaaacuugggucguu

SEQ ID NO: 1023124 - RNA, 19 nt, Artificial Sequence
  Description of Artificial Sequence: Synthetic oligonucleotide
cuagacggugggugauaga

SEQ ID NO: 1023125 - RNA, 19 nt, Artificial Sequence
  Description of Artificial Sequence: Synthetic oligonucleotide
caccuguaguauccacuca

SEQ ID NO: 1023126 - RNA, 19 nt, Artificial Sequence
  Description of Artificial Sequence: Synthetic oligonucleotide
guuggacaacucagacuca

SEQ ID NO: 1023127 - RNA, 19 nt, Artificial Sequence
  Description of Artificial Sequence: Synthetic oligonucleotide
ggguaggcagaggaccgag

SEQ ID NO: 1023128 - RNA, 19 nt, Artificial Sequence
  Description of Artificial Sequence: Synthetic oligonucleotide
ggaagggccuguccaggca

SEQ ID NO: 1023129 - RNA, 19 nt, Artificial Sequence
  Description of Artificial Sequence: Synthetic oligonucleotide
gccagcuguaaacaugagu

SEQ ID NO: 1023130 - RNA, 19 nt, Artificial Sequence
  Description of Artificial Sequence: Synthetic oligonucleotide
aggacguccuggggcuggg

SEQ ID NO: 1023131 - RNA, 19 nt, Artificial Sequence
  Description of Artificial Sequence: Synthetic oligonucleotide
gccgagguaucgucucuug

SEQ ID NO: 1023132 - RNA, 19 nt, Artificial Sequence
  Description of Artificial Sequence: Synthetic oligonucleotide
agcgcuccauccauuuaau

SEQ ID NO: 1023133 - RNA, 19 nt, Artificial Sequence
  Description of Artificial Sequence: Synthetic oligonucleotide
aggguaggcagaggaccga

SEQ ID NO: 1023134 - RNA, 19 nt, Artificial Sequence
  Description of Artificial Sequence: Synthetic oligonucleotide
ggugauucaggaugacuuu

SEQ ID NO: 1023135 - RNA, 19 nt, Artificial Sequence
  Description of Artificial Sequence: Synthetic oligonucleotide
guagcgcuccauccauuua

SEQ ID NO: 1023136 - RNA, 19 nt, Artificial Sequence
  Description of Artificial Sequence: Synthetic oligonucleotide
cugcaggauguuccaggga

SEQ ID NO: 1023137 - RNA, 19 nt, Artificial Sequence
  Description of Artificial Sequence: Synthetic oligonucleotide
gggcugauugcuacaauua

SEQ ID NO: 1023138 - RNA, 19 nt, Artificial Sequence
  Description of Artificial Sequence: Synthetic oligonucleotide
gguuggugucacaagggua

SEQ ID NO: 1023139 - RNA, 19 nt, Artificial Sequence
  Description of Artificial Sequence: Synthetic oligonucleotide
gugucgggagaagcugcug

SEQ ID NO: 1023140 - RNA, 19 nt, Artificial Sequence
  Description of Artificial Sequence: Synthetic oligonucleotide
uaccccggauccuguccuc

SEQ ID NO: 1023141 - RNA, 19 nt, Artificial Sequence
  Description of Artificial Sequence: Synthetic oligonucleotide
ggggcugauugcuacaauu

SEQ ID NO: 1023142 - RNA, 19 nt, Artificial Sequence
  Description of Artificial Sequence: Synthetic oligonucleotide
ggggccgagguaucgucuc

SEQ ID NO: 1023143 - RNA, 19 nt, Artificial Sequence
  Description of Artificial Sequence: Synthetic oligonucleotide
gccaccaacuagccucaac

SEQ ID NO: 1023144 - RNA, 19 nt, Artificial Sequence
  Description of Artificial Sequence: Synthetic oligonucleotide
cgcggaauaccucugaagu

SEQ ID NO: 1023145 - RNA, 19 nt, Artificial Sequence
  Description of Artificial Sequence: Synthetic oligonucleotide
acggugggugauagagcug

SEQ ID NO: 1023146 - RNA, 19 nt, Artificial Sequence
  Description of Artificial Sequence: Synthetic oligonucleotide
gguaaacuugggucguuuu

SEQ ID NO: 1023147 - RNA, 19 nt, Artificial Sequence
  Description of Artificial Sequence: Synthetic oligonucleotide
gccagagcauuagguaaac

SEQ ID NO: 1023148 - RNA, 19 nt, Artificial Sequence
  Description of Artificial Sequence: Synthetic oligonucleotide
gcauauggcgccuggugau

SEQ ID NO: 1023149 - RNA, 19 nt, Artificial Sequence
  Description of Artificial Sequence: Synthetic oligonucleotide
ggacaaugauacugauagu

SEQ ID NO: 1023150 - RNA, 19 nt, Artificial Sequence
  Description of Artificial Sequence: Synthetic oligonucleotide
gcguuucuccauaaaugaa

SEQ ID NO: 1023151 - RNA, 19 nt, Artificial Sequence
  Description of Artificial Sequence: Synthetic oligonucleotide
ccguaauuccucuggcaaa

SEQ ID NO: 1023152 - RNA, 19 nt, Artificial Sequence
  Description of Artificial Sequence: Synthetic oligonucleotide
uggccgccacuggaggagu

SEQ ID NO: 1023153 - RNA, 19 nt, Artificial Sequence
  Description of Artificial Sequence: Synthetic oligonucleotide
agcaucuggccaacucaua

SEQ ID NO: 1023154 - RNA, 19 nt, Artificial Sequence
  Description of Artificial Sequence: Synthetic oligonucleotide
cauauggcgccuggugaua

SEQ ID NO: 1023155 - RNA, 19 nt, Artificial Sequence
  Description of Artificial Sequence: Synthetic oligonucleotide
cgucucuuggccgccacug

SEQ ID NO: 1023156 - RNA, 19 nt, Artificial Sequence
  Description of Artificial Sequence: Synthetic oligonucleotide
ccuguaguauccacucacu

SEQ ID NO: 1023157 - RNA, 19 nt, Artificial Sequence
  Description of Artificial Sequence: Synthetic oligonucleotide
gcggaauaccucugaaguu

SEQ ID NO: 1023158 - RNA, 19 nt, Artificial Sequence
  Description of Artificial Sequence: Synthetic oligonucleotide
guccuccgggacaaugaua

SEQ ID NO: 1023159 - RNA, 19 nt, Artificial Sequence
  Description of Artificial Sequence: Synthetic oligonucleotide
ugccaggaucagggugccu

SEQ ID NO: 1023160 - RNA, 19 nt, Artificial Sequence
  Description of Artificial Sequence: Synthetic oligonucleotide
ggagucugccagagcauua

SEQ ID NO: 1023161 - RNA, 19 nt, Artificial Sequence
  Description of Artificial Sequence: Synthetic oligonucleotide
gguccuccgggacaaugau

SEQ ID NO: 1023162 - RNA, 19 nt, Artificial Sequence
  Description of Artificial Sequence: Synthetic oligonucleotide
agguagcgcuccauccauu

SEQ ID NO: 1023163 - RNA, 19 nt, Artificial Sequence
  Description of Artificial Sequence: Synthetic oligonucleotide
cacuagacggugggugaua

SEQ ID NO: 1023164 - RNA, 19 nt, Artificial Sequence
  Description of Artificial Sequence: Synthetic oligonucleotide
gucguccagcugcgacuca

SEQ ID NO: 1023165 - RNA, 19 nt, Artificial Sequence
  Description of Artificial Sequence: Synthetic oligonucleotide
cucugugcauacgcggaau

SEQ ID NO: 1023166 - RNA, 19 nt, Artificial Sequence
  Description of Artificial Sequence: Synthetic oligonucleotide
ugccaccaacuagccucaa

SEQ ID NO: 1023167 - RNA, 19 nt, Artificial Sequence
  Description of Artificial Sequence: Synthetic oligonucleotide
ccggggccgagguaucguc

SEQ ID NO: 1023168 - RNA, 19 nt, Artificial Sequence
  Description of Artificial Sequence: Synthetic oligonucleotide
cucuggcaaauugcuaguu

SEQ ID NO: 1023169 - RNA, 19 nt, Artificial Sequence
  Description of Artificial Sequence: Synthetic oligonucleotide
ccucuggcaaauugcuagu

SEQ ID NO: 1023170 - RNA, 19 nt, Artificial Sequence
  Description of Artificial Sequence: Synthetic oligonucleotide
cauaggcguuugcugccau

SEQ ID NO: 1023171 - RNA, 19 nt, Artificial Sequence
  Description of Artificial Sequence: Synthetic oligonucleotide
ggguaccaccugaagggua

SEQ ID NO: 1023172 - RNA, 19 nt, Artificial Sequence
  Description of Artificial Sequence: Synthetic oligonucleotide
ccgccacuggaggagucug

SEQ ID NO: 1023173 - RNA, 19 nt, Artificial Sequence
  Description of Artificial Sequence: Synthetic oligonucleotide
gcgcaagcaggugaccugu

SEQ ID NO: 1023174 - RNA, 19 nt, Artificial Sequence
  Description of Artificial Sequence: Synthetic oligonucleotide
gccggugauuugcaaguuu

SEQ ID NO: 1023175 - RNA, 19 nt, Artificial Sequence
  Description of Artificial Sequence: Synthetic oligonucleotide
cggauccuguccucaaaua

SEQ ID NO: 1023176 - RNA, 19 nt, Artificial Sequence
  Description of Artificial Sequence: Synthetic oligonucleotide
cccggauccuguccucaaa

SEQ ID NO: 1023177 - RNA, 19 nt, Artificial Sequence
  Description of Artificial Sequence: Synthetic oligonucleotide
gccugaugcccaggacguc

SEQ ID NO: 1023178 - RNA, 19 nt, Artificial Sequence
  Description of Artificial Sequence: Synthetic oligonucleotide
ccaggacguccuggggcug

SEQ ID NO: 1023179 - RNA, 19 nt, Artificial Sequence
  Description of Artificial Sequence: Synthetic oligonucleotide
ccagagcauuagguaaacu

SEQ ID NO: 1023180 - RNA, 19 nt, Artificial Sequence
  Description of Artificial Sequence: Synthetic oligonucleotide
ccgggacaaugauacugau

SEQ ID NO: 1023181 - RNA, 19 nt, Artificial Sequence
  Description of Artificial Sequence: Synthetic oligonucleotide
ggacguccuggggcuggga

SEQ ID NO: 1023182 - RNA, 19 nt, Artificial Sequence
  Description of Artificial Sequence: Synthetic oligonucleotide
ggccgagguaucgucucuu

SEQ ID NO: 1023183 - RNA, 19 nt, Artificial Sequence
  Description of Artificial Sequence: Synthetic oligonucleotide
ccuccgggacaaugauacu

SEQ ID NO: 1023184 - RNA, 19 nt, Artificial Sequence
  Description of Artificial Sequence: Synthetic oligonucleotide
ccacuagacggugggugau

SEQ ID NO: 1023185 - RNA, 19 nt, Artificial Sequence
  Description of Artificial Sequence: Synthetic oligonucleotide
ggccggugauuugcaaguu

SEQ ID NO: 1023186 - RNA, 19 nt, Artificial Sequence
  Description of Artificial Sequence: Synthetic oligonucleotide
gccggggccgagguaucgu

SEQ ID NO: 1023187 - RNA, 19 nt, Artificial Sequence
  Description of Artificial Sequence: Synthetic oligonucleotide
cgcaagcaggugaccuguu

SEQ ID NO: 1023188 - RNA, 19 nt, Artificial Sequence
  Description of Artificial Sequence: Synthetic oligonucleotide
aaucggaauauucugaggc

SEQ ID NO: 1023189 - RNA, 19 nt, Artificial Sequence
  Description of Artificial Sequence: Synthetic oligonucleotide
aauauucugaggcugcugc

SEQ ID NO: 1023190 - RNA, 19 nt, Artificial Sequence
  Description of Artificial Sequence: Synthetic oligonucleotide
auuuucauaacucaagguc

SEQ ID NO: 1023191 - RNA, 19 nt, Artificial Sequence
  Description of Artificial Sequence: Synthetic oligonucleotide
ugauuguuuagcuucaugg

SEQ ID NO: 1023192 - RNA, 19 nt, Artificial Sequence
  Description of Artificial Sequence: Synthetic oligonucleotide
uguaaugugucaauguccg

SEQ ID NO: 1023193 - RNA, 19 nt, Artificial Sequence
  Description of Artificial Sequence: Synthetic oligonucleotide
ucuugaagaagcuugaugu

SEQ ID NO: 1023194 - RNA, 19 nt, Artificial Sequence
  Description of Artificial Sequence: Synthetic oligonucleotide
auuauguucuugaagaagc

SEQ ID NO: 1023195 - RNA, 19 nt, Artificial Sequence
  Description of Artificial Sequence: Synthetic oligonucleotide
uuuucauaacucaagguca

SEQ ID NO: 1023196 - RNA, 19 nt, Artificial Sequence
  Description of Artificial Sequence: Synthetic oligonucleotide
ucuucagccauccugaucu

SEQ ID NO: 1023197 - RNA, 19 nt, Artificial Sequence
  Description of Artificial Sequence: Synthetic oligonucleotide
uuucagugcacuauuaugu

SEQ ID NO: 1023198 - RNA, 19 nt, Artificial Sequence
  Description of Artificial Sequence: Synthetic oligonucleotide
cuugaaguuccuuauacag

SEQ ID NO: 1023199 - RNA, 19 nt, Artificial Sequence
  Description of Artificial Sequence: Synthetic oligonucleotide
uuuaaggcgcaucaccugg

SEQ ID NO: 1023200 - RNA, 19 nt, Artificial Sequence
  Description of Artificial Sequence: Synthetic oligonucleotide
auuuccaucaaggauugcc

SEQ ID NO: 1023201 - RNA, 19 nt, Artificial Sequence
  Description of Artificial Sequence: Synthetic oligonucleotide
ucuaagucuuccaugggag

SEQ ID NO: 1023202 - RNA, 19 nt, Artificial Sequence
  Description of Artificial Sequence: Synthetic oligonucleotide
ucucuuucagcaaaauugc

SEQ ID NO: 1023203 - RNA, 19 nt, Artificial Sequence
  Description of Artificial Sequence: Synthetic oligonucleotide
uuucaauguuuccacuucg

SEQ ID NO: 1023204 - RNA, 19 nt, Artificial Sequence
  Description of Artificial Sequence: Synthetic oligonucleotide
ugcacuauuauguucuuga

SEQ ID NO: 1023205 - RNA, 19 nt, Artificial Sequence
  Description of Artificial Sequence: Synthetic oligonucleotide
aagucuucgcaccuuuugg

SEQ ID NO: 1023206 - RNA, 19 nt, Artificial Sequence
  Description of Artificial Sequence: Synthetic oligonucleotide
gauuguuuagcuucauggc

SEQ ID NO: 1023207 - RNA, 19 nt, Artificial Sequence
  Description of Artificial Sequence: Synthetic oligonucleotide
auauggagccuucaauggc

SEQ ID NO: 1023208 - RNA, 19 nt, Artificial Sequence
  Description of Artificial Sequence: Synthetic oligonucleotide
uuuucagugcacuauuaug

SEQ ID NO: 1023209 - RNA, 19 nt, Artificial Sequence
  Description of Artificial Sequence: Synthetic oligonucleotide
ugaaucggaauauucugag

SEQ ID NO: 1023210 - RNA, 19 nt, Artificial Sequence
  Description of Artificial Sequence: Synthetic oligonucleotide
uccucuuugaagcagguaa

SEQ ID NO: 1023211 - RNA, 19 nt, Artificial Sequence
  Description of Artificial Sequence: Synthetic oligonucleotide
acauauggagccuucaaug

SEQ ID NO: 1023212 - RNA, 19 nt, Artificial Sequence
  Description of Artificial Sequence: Synthetic oligonucleotide
gaaagcuccucauaucucc

SEQ ID NO: 1023213 - RNA, 19 nt, Artificial Sequence
  Description of Artificial Sequence: Synthetic oligonucleotide
ucucagaacggucauuugc

SEQ ID NO: 1023214 - RNA, 19 nt, Artificial Sequence
  Description of Artificial Sequence: Synthetic oligonucleotide
cauauggagccuucaaugg

SEQ ID NO: 1023215 - RNA, 19 nt, Artificial Sequence
  Description of Artificial Sequence: Synthetic oligonucleotide
agaacggucauuugcuuuc

SEQ ID NO: 1023216 - RNA, 19 nt, Artificial Sequence
  Description of Artificial Sequence: Synthetic oligonucleotide
ucuuaggcaaagcaggagu

SEQ ID NO: 1023217 - RNA, 19 nt, Artificial Sequence
  Description of Artificial Sequence: Synthetic oligonucleotide
aggacugcucuucauuucc

SEQ ID NO: 1023218 - RNA, 19 nt, Artificial Sequence
  Description of Artificial Sequence: Synthetic oligonucleotide
agcucauguccucagcucc

SEQ ID NO: 1023219 - RNA, 19 nt, Artificial Sequence
  Description of Artificial Sequence: Synthetic oligonucleotide
acucaaggucaucaggagc

SEQ ID NO: 1023220 - RNA, 19 nt, Artificial Sequence
  Description of Artificial Sequence: Synthetic oligonucleotide
aucaaggauugccugcugc

SEQ ID NO: 1023221 - RNA, 19 nt, Artificial Sequence
  Description of Artificial Sequence: Synthetic oligonucleotide
uccaucugagcccugagga

SEQ ID NO: 1023222 - RNA, 19 nt, Artificial Sequence
  Description of Artificial Sequence: Synthetic oligonucleotide
ugaagaagcuugaugugug

SEQ ID NO: 1023223 - RNA, 19 nt, Artificial Sequence
  Description of Artificial Sequence: Synthetic oligonucleotide
aguauguccuccuagguau

SEQ ID NO: 1023224 - RNA, 19 nt, Artificial Sequence
  Description of Artificial Sequence: Synthetic oligonucleotide
uucuaagucuuccauggga

SEQ ID NO: 1023225 - RNA, 19 nt, Artificial Sequence
  Description of Artificial Sequence: Synthetic oligonucleotide
uguuccaucuugauuucag

SEQ ID NO: 1023226 - RNA, 19 nt, Artificial Sequence
  Description of Artificial Sequence: Synthetic oligonucleotide
uuggcucacaguuaauucc

SEQ ID NO: 1023227 - RNA, 19 nt, Artificial Sequence
  Description of Artificial Sequence: Synthetic oligonucleotide
ucuugcagcaucaucuugu

SEQ ID NO: 1023228 - RNA, 19 nt, Artificial Sequence
  Description of Artificial Sequence: Synthetic oligonucleotide
gucacuccaacuuucaaug

SEQ ID NO: 1023229 - RNA, 19 nt, Artificial Sequence
  Description of Artificial Sequence: Synthetic oligonucleotide
uaaugugucaauguccggc

SEQ ID NO: 1023230 - RNA, 19 nt, Artificial Sequence
  Description of Artificial Sequence: Synthetic oligonucleotide
uaguuuuccaagcuccacc

SEQ ID NO: 1023231 - RNA, 19 nt, Artificial Sequence
  Description of Artificial Sequence: Synthetic oligonucleotide
aauucaagucuucgcaccu

SEQ ID NO: 1023232 - RNA, 19 nt, Artificial Sequence
  Description of Artificial Sequence: Synthetic oligonucleotide
agucacugguucuugcccc

SEQ ID NO: 1023233 - RNA, 19 nt, Artificial Sequence
  Description of Artificial Sequence: Synthetic oligonucleotide
agagucacugguucuugcc

SEQ ID NO: 1023234 - RNA, 19 nt, Artificial Sequence
  Description of Artificial Sequence: Synthetic oligonucleotide
cuguaaugugucaaugucc

SEQ ID NO: 1023235 - RNA, 19 nt, Artificial Sequence
  Description of Artificial Sequence: Synthetic oligonucleotide
gaugggacaugguaacagg

SEQ ID NO: 1023236 - RNA, 19 nt, Artificial Sequence
  Description of Artificial Sequence: Synthetic oligonucleotide
caaaauugccaguugcaag

SEQ ID NO: 1023237 - RNA, 19 nt, Artificial Sequence
  Description of Artificial Sequence: Synthetic oligonucleotide
augacauggaucuguaaug

SEQ ID NO: 1023238 - RNA, 19 nt, Artificial Sequence
  Description of Artificial Sequence: Synthetic oligonucleotide
uuuccaucaaggauugccu

SEQ ID NO: 1023239 - RNA, 19 nt, Artificial Sequence
  Description of Artificial Sequence: Synthetic oligonucleotide
gaaaucugaacaguacacc

SEQ ID NO: 1023240 - RNA, 19 nt, Artificial Sequence
  Description of Artificial Sequence: Synthetic oligonucleotide
uuugguuaguuccucaauu

SEQ ID NO: 1023241 - RNA, 19 nt, Artificial Sequence
  Description of Artificial Sequence: Synthetic oligonucleotide
uggggugaaccuuauuagg

SEQ ID NO: 1023242 - RNA, 19 nt, Artificial Sequence
  Description of Artificial Sequence: Synthetic oligonucleotide
aacaguacaccuccaucug

SEQ ID NO: 1023243 - RNA, 19 nt, Artificial Sequence
  Description of Artificial Sequence: Synthetic oligonucleotide
uucagcauggaaaucugaa

SEQ ID NO: 1023244 - RNA, 19 nt, Artificial Sequence
  Description of Artificial Sequence: Synthetic oligonucleotide
cauccugaucucaacaaag

SEQ ID NO: 1023245 - RNA, 19 nt, Artificial Sequence
  Description of Artificial Sequence: Synthetic oligonucleotide
uuagcucagccucacugag

SEQ ID NO: 1023246 - RNA, 19 nt, Artificial Sequence
  Description of Artificial Sequence: Synthetic oligonucleotide
uucgcuuccaacacuuucu

SEQ ID NO: 1023247 - RNA, 19 nt, Artificial Sequence
  Description of Artificial Sequence: Synthetic oligonucleotide
uuauacagagcugucacuc

SEQ ID NO: 1023248 - RNA, 19 nt, Artificial Sequence
  Description of Artificial Sequence: Synthetic oligonucleotide
ucaauggccuuucugacuu

SEQ ID NO: 1023249 - RNA, 19 nt, Artificial Sequence
  Description of Artificial Sequence: Synthetic oligonucleotide
ugagugcgaauucaagucu

SEQ ID NO: 1023250 - RNA, 19 nt, Artificial Sequence
  Description of Artificial Sequence: Synthetic oligonucleotide
aaagcuccucauaucuccc

SEQ ID NO: 1023251 - RNA, 19 nt, Artificial Sequence
  Description of Artificial Sequence: Synthetic oligonucleotide
cacaguuaauuccucaaac

SEQ ID NO: 1023252 - RNA, 19 nt, Artificial Sequence
  Description of Artificial Sequence: Synthetic oligonucleotide
ucugacuucucucuaguuu

SEQ ID NO: 1023253 - RNA, 19 nt, Artificial Sequence
  Description of Artificial Sequence: Synthetic oligonucleotide
ugcgaauucaagucuucgc

SEQ ID NO: 1023254 - RNA, 19 nt, Artificial Sequence
  Description of Artificial Sequence: Synthetic oligonucleotide
uuauguucuugaagaagcu

SEQ ID NO: 1023255 - RNA, 19 nt, Artificial Sequence
  Description of Artificial Sequence: Synthetic oligonucleotide
cauuagcucagccucacug

SEQ ID NO: 1023256 - RNA, 19 nt, Artificial Sequence
  Description of Artificial Sequence: Synthetic oligonucleotide
ucucugcccaggcugaaag

SEQ ID NO: 1023257 - RNA, 19 nt, Artificial Sequence
  Description of Artificial Sequence: Synthetic oligonucleotide
cugagugcgaauucaaguc

SEQ ID NO: 1023258 - RNA, 19 nt, Artificial Sequence
  Description of Artificial Sequence: Synthetic oligonucleotide
uguugcuguaaacaagcuc

SEQ ID NO: 1023259 - RNA, 19 nt, Artificial Sequence
  Description of Artificial Sequence: Synthetic oligonucleotide
ucgugugugccucuugaag

SEQ ID NO: 1023260 - RNA, 19 nt, Artificial Sequence
  Description of Artificial Sequence: Synthetic oligonucleotide
aggcgcaucaccuggaucu

SEQ ID NO: 1023261 - RNA, 19 nt, Artificial Sequence
  Description of Artificial Sequence: Synthetic oligonucleotide
aucugaagcugcuuggaug

SEQ ID NO: 1023262 - RNA, 19 nt, Artificial Sequence
  Description of Artificial Sequence: Synthetic oligonucleotide
aguuuuccaagcuccaccu

SEQ ID NO: 1023263 - RNA, 19 nt, Artificial Sequence
  Description of Artificial Sequence: Synthetic oligonucleotide
ucuuugaagcagguaagcc

SEQ ID NO: 1023264 - RNA, 19 nt, Artificial Sequence
  Description of Artificial Sequence: Synthetic oligonucleotide
auguguguugacugcagag

SEQ ID NO: 1023265 - RNA, 19 nt, Artificial Sequence
  Description of Artificial Sequence: Synthetic oligonucleotide
uuucauaacucaaggucau

SEQ ID NO: 1023266 - RNA, 19 nt, Artificial Sequence
  Description of Artificial Sequence: Synthetic oligonucleotide
caacuuucaauguuuccac

SEQ ID NO: 1023267 - RNA, 19 nt, Artificial Sequence
  Description of Artificial Sequence: Synthetic oligonucleotide
ugaugggacaugguaacag

SEQ ID NO: 1023268 - RNA, 19 nt, Artificial Sequence
  Description of Artificial Sequence: Synthetic oligonucleotide
ugcagcaucuccucaggag

SEQ ID NO: 1023269 - RNA, 19 nt, Artificial Sequence
  Description of Artificial Sequence: Synthetic oligonucleotide
agagugaaucggaauauuc

SEQ ID NO: 1023270 - RNA, 19 nt, Artificial Sequence
  Description of Artificial Sequence: Synthetic oligonucleotide
ucucucuaguuuuccaagc

SEQ ID NO: 1023271 - RNA, 19 nt, Artificial Sequence
  Description of Artificial Sequence: Synthetic oligonucleotide
aucuguaaugugucaaugu

SEQ ID NO: 1023272 - RNA, 19 nt, Artificial Sequence
  Description of Artificial Sequence: Synthetic oligonucleotide
uuucgugugugccucuuga

SEQ ID NO: 1023273 - RNA, 19 nt, Artificial Sequence
  Description of Artificial Sequence: Synthetic oligonucleotide
cuugauuucagagcgcaug

SEQ ID NO: 1023274 - RNA, 19 nt, Artificial Sequence
  Description of Artificial Sequence: Synthetic oligonucleotide
ucuugcuucucacucaguu

SEQ ID NO: 1023275 - RNA, 19 nt, Artificial Sequence
  Description of Artificial Sequence: Synthetic oligonucleotide
uauacagagcugucacucc

SEQ ID NO: 1023276 - RNA, 19 nt, Artificial Sequence
  Description of Artificial Sequence: Synthetic oligonucleotide
aaucucagaacggucauuu

SEQ ID NO: 1023277 - RNA, 19 nt, Artificial Sequence
  Description of Artificial Sequence: Synthetic oligonucleotide
ucuaguuuuccaagcucca

SEQ ID NO: 1023278 - RNA, 19 nt, Artificial Sequence
  Description of Artificial Sequence: Synthetic oligonucleotide
uccacuuccuguucuaagu

SEQ ID NO: 1023279 - RNA, 19 nt, Artificial Sequence
  Description of Artificial Sequence: Synthetic oligonucleotide
aguacaccuccaucugagc

SEQ ID NO: 1023280 - RNA, 19 nt, Artificial Sequence
  Description of Artificial Sequence: Synthetic oligonucleotide
ugguuaguuccucaauugu

SEQ ID NO: 1023281 - RNA, 19 nt, Artificial Sequence
  Description of Artificial Sequence: Synthetic oligonucleotide
guugaugggacaugguaac

SEQ ID NO: 1023282 - RNA, 19 nt, Artificial Sequence
  Description of Artificial Sequence: Synthetic oligonucleotide
ugcuggugaaguauguccu

SEQ ID NO: 1023283 - RNA, 19 nt, Artificial Sequence
  Description of Artificial Sequence: Synthetic oligonucleotide
guugcuguaaacaagcucu

SEQ ID NO: 1023284 - RNA, 19 nt, Artificial Sequence
  Description of Artificial Sequence: Synthetic oligonucleotide
ugucacuccaacuuucaau

SEQ ID NO: 1023285 - RNA, 19 nt, Artificial Sequence
  Description of Artificial Sequence: Synthetic oligonucleotide
cuaagucuuccaugggagg

SEQ ID NO: 1023286 - RNA, 19 nt, Artificial Sequence
  Description of Artificial Sequence: Synthetic oligonucleotide
auuagcucagccucacuga

SEQ ID NO: 1023287 - RNA, 19 nt, Artificial Sequence
  Description of Artificial Sequence: Synthetic oligonucleotide
cuggggugaaccuuauuag

SEQ ID NO: 1023288 - RNA, 19 nt, Artificial Sequence
  Description of Artificial Sequence: Synthetic oligonucleotide
uucucacucaguucugaug

SEQ ID NO: 1023289 - RNA, 19 nt, Artificial Sequence
  Description of Artificial Sequence: Synthetic oligonucleotide
uccacuucgcuuccaacac

SEQ ID NO: 1023290 - RNA, 19 nt, Artificial Sequence
  Description of Artificial Sequence: Synthetic oligonucleotide
guacaccuccaucugagcc

SEQ ID NO: 1023291 - RNA, 19 nt, Artificial Sequence
  Description of Artificial Sequence: Synthetic oligonucleotide
cauaucucccuuucauggc

SEQ ID NO: 1023292 - RNA, 19 nt, Artificial Sequence
  Description of Artificial Sequence: Synthetic oligonucleotide
ugauguguguugacugcag

SEQ ID NO: 1023293 - RNA, 19 nt, Artificial Sequence
  Description of Artificial Sequence: Synthetic oligonucleotide
gaacaguacaccuccaucu

SEQ ID NO: 1023294 - RNA, 19 nt, Artificial Sequence
  Description of Artificial Sequence: Synthetic oligonucleotide
auggcuugauuguuuagcu

SEQ ID NO: 1023295 - RNA, 19 nt, Artificial Sequence
  Description of Artificial Sequence: Synthetic oligonucleotide
auaucucccuuucauggcu

SEQ ID NO: 1023296 - RNA, 19 nt, Artificial Sequence
  Description of Artificial Sequence: Synthetic oligonucleotide
ucucuaguuuuccaagcuc

SEQ ID NO: 1023297 - RNA, 19 nt, Artificial Sequence
  Description of Artificial Sequence: Synthetic oligonucleotide
aagcuugauguguguugac

SEQ ID NO: 1023298 - RNA, 19 nt, Artificial Sequence
  Description of Artificial Sequence: Synthetic oligonucleotide
ccugaucucaacaaaggag

SEQ ID NO: 1023299 - RNA, 19 nt, Artificial Sequence
  Description of Artificial Sequence: Synthetic oligonucleotide
uuuucagcuuuaaggcgca

SEQ ID NO: 1023300 - RNA, 19 nt, Artificial Sequence
  Description of Artificial Sequence: Synthetic oligonucleotide
agagcgcaugcucuccacc

SEQ ID NO: 1023301 - RNA, 19 nt, Artificial Sequence
  Description of Artificial Sequence: Synthetic oligonucleotide
ucacucaguucugaugggg

SEQ ID NO: 1023302 - RNA, 19 nt, Artificial Sequence
  Description of Artificial Sequence: Synthetic oligonucleotide
ucagucaggcagcucggag

SEQ ID NO: 1023303 - RNA, 19 nt, Artificial Sequence
  Description of Artificial Sequence: Synthetic oligonucleotide
ucggaauauucugaggcug

SEQ ID NO: 1023304 - RNA, 19 nt, Artificial Sequence
  Description of Artificial Sequence: Synthetic oligonucleotide
ugacauggaucuguaaugu

SEQ ID NO: 1023305 - RNA, 19 nt, Artificial Sequence
  Description of Artificial Sequence: Synthetic oligonucleotide
uccaacacuuucugggucu

SEQ ID NO: 1023306 - RNA, 19 nt, Artificial Sequence
  Description of Artificial Sequence: Synthetic oligonucleotide
agguauaggacugcucuuc

SEQ ID NO: 1023307 - RNA, 19 nt, Artificial Sequence
  Description of Artificial Sequence: Synthetic oligonucleotide
uucaauggccuuucugacu

SEQ ID NO: 1023308 - RNA, 19 nt, Artificial Sequence
  Description of Artificial Sequence: Synthetic oligonucleotide
cucauaucucccuuucaug

SEQ ID NO: 1023309 - RNA, 19 nt, Artificial Sequence
  Description of Artificial Sequence: Synthetic oligonucleotide
aaagcaggaguuggcucac

SEQ ID NO: 1023310 - RNA, 19 nt, Artificial Sequence
  Description of Artificial Sequence: Synthetic oligonucleotide
uguguguugacugcagagu

SEQ ID NO: 1023311 - RNA, 19 nt, Artificial Sequence
  Description of Artificial Sequence: Synthetic oligonucleotide
uggucagagucacugguuc

SEQ ID NO: 1023312 - RNA, 19 nt, Artificial Sequence
  Description of Artificial Sequence: Synthetic oligonucleotide
caguacaccuccaucugag

SEQ ID NO: 1023313 - RNA, 19 nt, Artificial Sequence
  Description of Artificial Sequence: Synthetic oligonucleotide
aaggcgcaucaccuggauc

SEQ ID NO: 1023314 - RNA, 19 nt, Artificial Sequence
  Description of Artificial Sequence: Synthetic oligonucleotide
caaaggaguccucugagga

SEQ ID NO: 1023315 - RNA, 19 nt, Artificial Sequence
  Description of Artificial Sequence: Synthetic oligonucleotide
cucuuucagcaaaauugcc

SEQ ID NO: 1023316 - RNA, 19 nt, Artificial Sequence
  Description of Artificial Sequence: Synthetic oligonucleotide
ucucagucaggcagcucgg

SEQ ID NO: 1023317 - RNA, 19 nt, Artificial Sequence
  Description of Artificial Sequence: Synthetic oligonucleotide
aucggaauauucugaggcu

SEQ ID NO: 1023318 - RNA, 19 nt, Artificial Sequence
  Description of Artificial Sequence: Synthetic oligonucleotide
cuaagcucuccucugucug

SEQ ID NO: 1023319 - RNA, 19 nt, Artificial Sequence
  Description of Artificial Sequence: Synthetic oligonucleotide
uccucugaggagccacugg

SEQ ID NO: 1023320 - RNA, 19 nt, Artificial Sequence
  Description of Artificial Sequence: Synthetic oligonucleotide
auacagagcugucacucca

SEQ ID NO: 1023321 - RNA, 19 nt, Artificial Sequence
  Description of Artificial Sequence: Synthetic oligonucleotide
ucuugccgcucuuucagca

SEQ ID NO: 1023322 - RNA, 19 nt, Artificial Sequence
  Description of Artificial Sequence: Synthetic oligonucleotide
guuggcucacaguuaauuc

SEQ ID NO: 1023323 - RNA, 19 nt, Artificial Sequence
  Description of Artificial Sequence: Synthetic oligonucleotide
auccugaucucaacaaagg

SEQ ID NO: 1023324 - RNA, 19 nt, Artificial Sequence
  Description of Artificial Sequence: Synthetic oligonucleotide
aacacucaaaugaugcaau

SEQ ID NO: 1023325 - RNA, 19 nt, Artificial Sequence
  Description of Artificial Sequence: Synthetic oligonucleotide
ugguucuugccccgugccg

SEQ ID NO: 1023326 - RNA, 19 nt, Artificial Sequence
  Description of Artificial Sequence: Synthetic oligonucleotide
gacauggaucuguaaugug

SEQ ID NO: 1023327 - RNA, 19 nt, Artificial Sequence
  Description of Artificial Sequence: Synthetic oligonucleotide
agucuucgcaccuuuuggu

SEQ ID NO: 1023328 - RNA, 19 nt, Artificial Sequence
  Description of Artificial Sequence: Synthetic oligonucleotide
uuaggcaaagcaggaguug

SEQ ID NO: 1023329 - RNA, 19 nt, Artificial Sequence
  Description of Artificial Sequence: Synthetic oligonucleotide
cuagguauaggacugcucu

SEQ ID NO: 1023330 - RNA, 19 nt, Artificial Sequence
  Description of Artificial Sequence: Synthetic oligonucleotide
agaguucuuccuuuccaga

SEQ ID NO: 1023331 - RNA, 19 nt, Artificial Sequence
  Description of Artificial Sequence: Synthetic oligonucleotide
uuggggcaagagugaaucg

SEQ ID NO: 1023332 - RNA, 19 nt, Artificial Sequence
  Description of Artificial Sequence: Synthetic oligonucleotide
uuaaggcgcaucaccugga

SEQ ID NO: 1023333 - RNA, 19 nt, Artificial Sequence
  Description of Artificial Sequence: Synthetic oligonucleotide
guaaugugucaauguccgg

SEQ ID NO: 1023334 - RNA, 19 nt, Artificial Sequence
  Description of Artificial Sequence: Synthetic oligonucleotide
ugucuuagcuuguuccauc

SEQ ID NO: 1023335 - RNA, 19 nt, Artificial Sequence
  Description of Artificial Sequence: Synthetic oligonucleotide
gggucccaaucucagaacg

SEQ ID NO: 1023336 - RNA, 19 nt, Artificial Sequence
  Description of Artificial Sequence: Synthetic oligonucleotide
uucauggcuugauuguuua

SEQ ID NO: 1023337 - RNA, 19 nt, Artificial Sequence
  Description of Artificial Sequence: Synthetic oligonucleotide
agguugaugggacauggua

SEQ ID NO: 1023338 - RNA, 19 nt, Artificial Sequence
  Description of Artificial Sequence: Synthetic oligonucleotide
ggggugaaccuuauuaggg

SEQ ID NO: 1023339 - RNA, 19 nt, Artificial Sequence
  Description of Artificial Sequence: Synthetic oligonucleotide
cuuugaagcagguaagccu

SEQ ID NO: 1023340 - RNA, 19 nt, Artificial Sequence
  Description of Artificial Sequence: Synthetic oligonucleotide
uuguugcuguaaacaagcu

SEQ ID NO: 1023341 - RNA, 19 nt, Artificial Sequence
  Description of Artificial Sequence: Synthetic oligonucleotide
ucuuucagcuggugguucu

SEQ ID NO: 1023342 - RNA, 19 nt, Artificial Sequence
  Description of Artificial Sequence: Synthetic oligonucleotide
auugccaguugcaaggcca

SEQ ID NO: 1023343 - RNA, 19 nt, Artificial Sequence
  Description of Artificial Sequence: Synthetic oligonucleotide
uauguccuccuagguauag

SEQ ID NO: 1023344 - RNA, 19 nt, Artificial Sequence
  Description of Artificial Sequence: Synthetic oligonucleotide
uggagcucuugcagcauca

SEQ ID NO: 1023345 - RNA, 19 nt, Artificial Sequence
  Description of Artificial Sequence: Synthetic oligonucleotide
ggaaaucugaacaguacac

SEQ ID NO: 1023346 - RNA, 19 nt, Artificial Sequence
  Description of Artificial Sequence: Synthetic oligonucleotide
ugaugcaauccaugacaug

SEQ ID NO: 1023347 - RNA, 19 nt, Artificial Sequence
  Description of Artificial Sequence: Synthetic oligonucleotide
uucagugcacuauuauguu

SEQ ID NO: 1023348 - RNA, 19 nt, Artificial Sequence
  Description of Artificial Sequence: Synthetic oligonucleotide
uggaucuguaaugugucaa

SEQ ID NO: 1023349 - RNA, 19 nt, Artificial Sequence
  Description of Artificial Sequence: Synthetic oligonucleotide
ugaguuucgugugugccuc

SEQ ID NO: 1023350 - RNA, 19 nt, Artificial Sequence
  Description of Artificial Sequence: Synthetic oligonucleotide
uagauuuggucaugcuggu

SEQ ID NO: 1023351 - RNA, 19 nt, Artificial Sequence
  Description of Artificial Sequence: Synthetic oligonucleotide
uugccgcucuuucagcaug

SEQ ID NO: 1023352 - RNA, 19 nt, Artificial Sequence
  Description of Artificial Sequence: Synthetic oligonucleotide
gauguguguugacugcaga

SEQ ID NO: 1023353 - RNA, 19 nt, Artificial Sequence
  Description of Artificial Sequence: Synthetic oligonucleotide
uucuaagcucuccucuguc

SEQ ID NO: 1023354 - RNA, 19 nt, Artificial Sequence
  Description of Artificial Sequence: Synthetic oligonucleotide
auauucugaggcugcugcu

SEQ ID NO: 1023355 - RNA, 19 nt, Artificial Sequence
  Description of Artificial Sequence: Synthetic oligonucleotide
aggagugaauguguccagg

SEQ ID NO: 1023356 - RNA, 19 nt, Artificial Sequence
  Description of Artificial Sequence: Synthetic oligonucleotide
ugaucugcuucaucugguc

SEQ ID NO: 1023357 - RNA, 19 nt, Artificial Sequence
  Description of Artificial Sequence: Synthetic oligonucleotide
ucuucgcaccuuuugguuu

SEQ ID NO: 1023358 - RNA, 19 nt, Artificial Sequence
  Description of Artificial Sequence: Synthetic oligonucleotide
uucugaugggguggcagag

SEQ ID NO: 1023359 - RNA, 19 nt, Artificial Sequence
  Description of Artificial Sequence: Synthetic oligonucleotide
uuguucucuuucagcaaaa

SEQ ID NO: 1023360 - RNA, 19 nt, Artificial Sequence
  Description of Artificial Sequence: Synthetic oligonucleotide
caucuugauuucagagcgc

SEQ ID NO: 1023361 - RNA, 19 nt, Artificial Sequence
  Description of Artificial Sequence: Synthetic oligonucleotide
uggcaucuucuguagauuu

SEQ ID NO: 1023362 - RNA, 19 nt, Artificial Sequence
  Description of Artificial Sequence: Synthetic oligonucleotide
caguugcaaggccagcugc

SEQ ID NO: 1023363 - RNA, 19 nt, Artificial Sequence
  Description of Artificial Sequence: Synthetic oligonucleotide
gucacugguucuugccccg

SEQ ID NO: 1023364 - RNA, 19 nt, Artificial Sequence
  Description of Artificial Sequence: Synthetic oligonucleotide
cuucgcaccuuuugguuuc

SEQ ID NO: 1023365 - RNA, 19 nt, Artificial Sequence
  Description of Artificial Sequence: Synthetic oligonucleotide
auccaugacauggaucugu

SEQ ID NO: 1023366 - RNA, 19 nt, Artificial Sequence
  Description of Artificial Sequence: Synthetic oligonucleotide
gugcgaauucaagucuucg

SEQ ID NO: 1023367 - RNA, 19 nt, Artificial Sequence
  Description of Artificial Sequence: Synthetic oligonucleotide
ggaguugagcuugagcugc

SEQ ID NO: 1023368 - RNA, 19 nt, Artificial Sequence
  Description of Artificial Sequence: Synthetic oligonucleotide
auggaucuguaauguguca

SEQ ID NO: 1023369 - RNA, 19 nt, Artificial Sequence
  Description of Artificial Sequence: Synthetic oligonucleotide
cucacucaguucugauggg

SEQ ID NO: 1023370 - RNA, 19 nt, Artificial Sequence
  Description of Artificial Sequence: Synthetic oligonucleotide
gcuuggaugccagagcccg

SEQ ID NO: 1023371 - RNA, 19 nt, Artificial Sequence
  Description of Artificial Sequence: Synthetic oligonucleotide
caacugucguucuuccuuc

SEQ ID NO: 1023372 - RNA, 19 nt, Artificial Sequence
  Description of Artificial Sequence: Synthetic oligonucleotide
uccaugacauggaucugua

SEQ ID NO: 1023373 - RNA, 19 nt, Artificial Sequence
  Description of Artificial Sequence: Synthetic oligonucleotide
gagugaaucggaauauucu

SEQ ID NO: 1023374 - RNA, 19 nt, Artificial Sequence
  Description of Artificial Sequence: Synthetic oligonucleotide
uccagcucauguccucagc

SEQ ID NO: 1023375 - RNA, 19 nt, Artificial Sequence
  Description of Artificial Sequence: Synthetic oligonucleotide
uggugaaguauguccuccu

SEQ ID NO: 1023376 - RNA, 19 nt, Artificial Sequence
  Description of Artificial Sequence: Synthetic oligonucleotide
ucacugaguuucgugugug

SEQ ID NO: 1023377 - RNA, 19 nt, Artificial Sequence
  Description of Artificial Sequence: Synthetic oligonucleotide
aagaagcuugauguguguu

SEQ ID NO: 1023378 - RNA, 19 nt, Artificial Sequence
  Description of Artificial Sequence: Synthetic oligonucleotide
gacuucucucuaguuuucc

SEQ ID NO: 1023379 - RNA, 19 nt, Artificial Sequence
  Description of Artificial Sequence: Synthetic oligonucleotide
gcaagagugaaucggaaua

SEQ ID NO: 1023380 - RNA, 19 nt, Artificial Sequence
  Description of Artificial Sequence: Synthetic oligonucleotide
cagugcacuauuauguucu

SEQ ID NO: 1023381 - RNA, 19 nt, Artificial Sequence
  Description of Artificial Sequence: Synthetic oligonucleotide
cugugugucaaacaacugu

SEQ ID NO: 1023382 - RNA, 19 nt, Artificial Sequence
  Description of Artificial Sequence: Synthetic oligonucleotide
aagagugaaucggaauauu

SEQ ID NO: 1023383 - RNA, 19 nt, Artificial Sequence
  Description of Artificial Sequence: Synthetic oligonucleotide
aguuggcucacaguuaauu

SEQ ID NO: 1023384 - RNA, 19 nt, Artificial Sequence
  Description of Artificial Sequence: Synthetic oligonucleotide
gaaguauguccuccuaggu

SEQ ID NO: 1023385 - RNA, 19 nt, Artificial Sequence
  Description of Artificial Sequence: Synthetic oligonucleotide
ucccaaucucagaacgguc

SEQ ID NO: 1023386 - RNA, 19 nt, Artificial Sequence
  Description of Artificial Sequence: Synthetic oligonucleotide
agccucacugaguuucgug

SEQ ID NO: 1023387 - RNA, 19 nt, Artificial Sequence
  Description of Artificial Sequence: Synthetic oligonucleotide
gguucuugccccgugccgg

SEQ ID NO: 1023388 - RNA, 19 nt, Artificial Sequence
  Description of Artificial Sequence: Synthetic oligonucleotide
aucucagaacggucauuug

SEQ ID NO: 1023389 - RNA, 19 nt, Artificial Sequence
  Description of Artificial Sequence: Synthetic oligonucleotide
uucagagcgcaugcucucc

SEQ ID NO: 1023390 - RNA, 19 nt, Artificial Sequence
  Description of Artificial Sequence: Synthetic oligonucleotide
aguuccuuauacagagcug

SEQ ID NO: 1023391 - RNA, 19 nt, Artificial Sequence
  Description of Artificial Sequence: Synthetic oligonucleotide
uucuguagauuuggucaug

SEQ ID NO: 1023392 - RNA, 19 nt, Artificial Sequence
  Description of Artificial Sequence: Synthetic oligonucleotide
guaagccugcuggucagag

SEQ ID NO: 1023393 - RNA, 19 nt, Artificial Sequence
  Description of Artificial Sequence: Synthetic oligonucleotide
augaugcaauccaugacau

SEQ ID NO: 1023394 - RNA, 19 nt, Artificial Sequence
  Description of Artificial Sequence: Synthetic oligonucleotide
ggacaugguaacagguccg

SEQ ID NO: 1023395 - RNA, 19 nt, Artificial Sequence
  Description of Artificial Sequence: Synthetic oligonucleotide
ucagaacggucauuugcuu

SEQ ID NO: 1023396 - RNA, 19 nt, Artificial Sequence
  Description of Artificial Sequence: Synthetic oligonucleotide
ucauuagcucagccucacu

SEQ ID NO: 1023397 - RNA, 19 nt, Artificial Sequence
  Description of Artificial Sequence: Synthetic oligonucleotide
cccuuucauggcuugauug

SEQ ID NO: 1023398 - RNA, 19 nt, Artificial Sequence
  Description of Artificial Sequence: Synthetic oligonucleotide
ucauguccucagcuccucu

SEQ ID NO: 1023399 - RNA, 19 nt, Artificial Sequence
  Description of Artificial Sequence: Synthetic oligonucleotide
gaugcccagcaggucagcc

SEQ ID NO: 1023400 - RNA, 19 nt, Artificial Sequence
  Description of Artificial Sequence: Synthetic oligonucleotide
uccuggggucucacagagg

SEQ ID NO: 1023401 - RNA, 19 nt, Artificial Sequence
  Description of Artificial Sequence: Synthetic oligonucleotide
ugccuccauccucaaaguc

SEQ ID NO: 1023402 - RNA, 19 nt, Artificial Sequence
  Description of Artificial Sequence: Synthetic oligonucleotide
ugggucccaaucucagaac

SEQ ID NO: 1023403 - RNA, 19 nt, Artificial Sequence
  Description of Artificial Sequence: Synthetic oligonucleotide
uguucucuuucagcaaaau

SEQ ID NO: 1023404 - RNA, 19 nt, Artificial Sequence
  Description of Artificial Sequence: Synthetic oligonucleotide
uccuagguauaggacugcu

SEQ ID NO: 1023405 - RNA, 19 nt, Artificial Sequence
  Description of Artificial Sequence: Synthetic oligonucleotide
uagguauaggacugcucuu

SEQ ID NO: 1023406 - RNA, 19 nt, Artificial Sequence
  Description of Artificial Sequence: Synthetic oligonucleotide
guugacugcagaguggcua

SEQ ID NO: 1023407 - RNA, 19 nt, Artificial Sequence
  Description of Artificial Sequence: Synthetic oligonucleotide
uucgugugugccucuugaa

SEQ ID NO: 1023408 - RNA, 19 nt, Artificial Sequence
  Description of Artificial Sequence: Synthetic oligonucleotide
augggacaugguaacaggu

SEQ ID NO: 1023409 - RNA, 19 nt, Artificial Sequence
  Description of Artificial Sequence: Synthetic oligonucleotide
aucucccuuucauggcuug

SEQ ID NO: 1023410 - RNA, 19 nt, Artificial Sequence
  Description of Artificial Sequence: Synthetic oligonucleotide
uagcuucuuuguucugugu

SEQ ID NO: 1023411 - RNA, 19 nt, Artificial Sequence
  Description of Artificial Sequence: Synthetic oligonucleotide
guucugagacgaugcccag

SEQ ID NO: 1023412 - RNA, 19 nt, Artificial Sequence
  Description of Artificial Sequence: Synthetic oligonucleotide
caauguccggcagaauuuc

SEQ ID NO: 1023413 - RNA, 19 nt, Artificial Sequence
  Description of Artificial Sequence: Synthetic oligonucleotide
uucagccauccugaucuca

SEQ ID NO: 1023414 - RNA, 19 nt, Artificial Sequence
  Description of Artificial Sequence: Synthetic oligonucleotide
caucugagcccugaggaca

SEQ ID NO: 1023415 - RNA, 19 nt, Artificial Sequence
  Description of Artificial Sequence: Synthetic oligonucleotide
gagugaauguguccaggcu

SEQ ID NO: 1023416 - RNA, 19 nt, Artificial Sequence
  Description of Artificial Sequence: Synthetic oligonucleotide
cucugcccaggcugaaagc

SEQ ID NO: 1023417 - RNA, 19 nt, Artificial Sequence
  Description of Artificial Sequence: Synthetic oligonucleotide
cuccacacaaguccuggca

SEQ ID NO: 1023418 - RNA, 19 nt, Artificial Sequence
  Description of Artificial Sequence: Synthetic oligonucleotide
cuuggaugccagagcccgc

SEQ ID NO: 1023419 - RNA, 19 nt, Artificial Sequence
  Description of Artificial Sequence: Synthetic oligonucleotide
uucugacuucucucuaguu

SEQ ID NO: 1023420 - RNA, 19 nt, Artificial Sequence
  Description of Artificial Sequence: Synthetic oligonucleotide
guuucgugugugccucuug

SEQ ID NO: 1023421 - RNA, 19 nt, Artificial Sequence
  Description of Artificial Sequence: Synthetic oligonucleotide
ucuuagcuuguuccaucuu

SEQ ID NO: 1023422 - RNA, 19 nt, Artificial Sequence
  Description of Artificial Sequence: Synthetic oligonucleotide
gaagaagcuugaugugugu

SEQ ID NO: 1023423 - RNA, 19 nt, Artificial Sequence
  Description of Artificial Sequence: Synthetic oligonucleotide
ucggagguugaugggacau

SEQ ID NO: 1023424 - RNA, 19 nt, Artificial Sequence
  Description of Artificial Sequence: Synthetic oligonucleotide
uggcuugauuguuuagcuu

SEQ ID NO: 1023425 - RNA, 19 nt, Artificial Sequence
  Description of Artificial Sequence: Synthetic oligonucleotide
agcgcaugcucuccaccug

SEQ ID NO: 1023426 - RNA, 19 nt, Artificial Sequence
  Description of Artificial Sequence: Synthetic oligonucleotide
guuaguuccucaauuguuu

SEQ ID NO: 1023427 - RNA, 19 nt, Artificial Sequence
  Description of Artificial Sequence: Synthetic oligonucleotide
gguauaggacugcucuuca

SEQ ID NO: 1023428 - RNA, 19 nt, Artificial Sequence
  Description of Artificial Sequence: Synthetic oligonucleotide
ucccuuucauggcuugauu

SEQ ID NO: 1023429 - RNA, 19 nt, Artificial Sequence
  Description of Artificial Sequence: Synthetic oligonucleotide
cuggcacuuuucuugaagu

SEQ ID NO: 1023430 - RNA, 19 nt, Artificial Sequence
  Description of Artificial Sequence: Synthetic oligonucleotide
caauguuuccacuucgcuu

SEQ ID NO: 1023431 - RNA, 19 nt, Artificial Sequence
  Description of Artificial Sequence: Synthetic oligonucleotide
gucuuagcuuguuccaucu

SEQ ID NO: 1023432 - RNA, 19 nt, Artificial Sequence
  Description of Artificial Sequence: Synthetic oligonucleotide
guccaggcuggggugaacc

SEQ ID NO: 1023433 - RNA, 19 nt, Artificial Sequence
  Description of Artificial Sequence: Synthetic oligonucleotide
agcuccucauaucucccuu

SEQ ID NO: 1023434 - RNA, 19 nt, Artificial Sequence
  Description of Artificial Sequence: Synthetic oligonucleotide
caucaggagcuucuuagcu

SEQ ID NO: 1023435 - RNA, 19 nt, Artificial Sequence
  Description of Artificial Sequence: Synthetic oligonucleotide
cucaaaugaugcaauccau

SEQ ID NO: 1023436 - RNA, 19 nt, Artificial Sequence
  Description of Artificial Sequence: Synthetic oligonucleotide
cccaaucucagaacgguca

SEQ ID NO: 1023437 - RNA, 19 nt, Artificial Sequence
  Description of Artificial Sequence: Synthetic oligonucleotide
aacggucauuugcuuucuu

SEQ ID NO: 1023438 - RNA, 19 nt, Artificial Sequence
  Description of Artificial Sequence: Synthetic oligonucleotide
agugcacuauuauguucuu

SEQ ID NO: 1023439 - RNA, 19 nt, Artificial Sequence
  Description of Artificial Sequence: Synthetic oligonucleotide
gugcacuauuauguucuug

SEQ ID NO: 1023440 - RNA, 19 nt, Artificial Sequence
  Description of Artificial Sequence: Synthetic oligonucleotide
cagcucggagguugauggg

SEQ ID NO: 1023441 - RNA, 19 nt, Artificial Sequence
  Description of Artificial Sequence: Synthetic oligonucleotide
gugucaauguccggcagaa

SEQ ID NO: 1023442 - RNA, 19 nt, Artificial Sequence
  Description of Artificial Sequence: Synthetic oligonucleotide
caucaaggauugccugcug

SEQ ID NO: 1023443 - RNA, 19 nt, Artificial Sequence
  Description of Artificial Sequence: Synthetic oligonucleotide
gagcgcaugcucuccaccu

SEQ ID NO: 1023444 - RNA, 19 nt, Artificial Sequence
  Description of Artificial Sequence: Synthetic oligonucleotide
cuucuguagauuuggucau

SEQ ID NO: 1023445 - RNA, 19 nt, Artificial Sequence
  Description of Artificial Sequence: Synthetic oligonucleotide
ucauuuccuggggucucac

SEQ ID NO: 1023446 - RNA, 19 nt, Artificial Sequence
  Description of Artificial Sequence: Synthetic oligonucleotide
cugcauuuccaucaaggau

SEQ ID NO: 1023447 - RNA, 19 nt, Artificial Sequence
  Description of Artificial Sequence: Synthetic oligonucleotide
cuuaggcaaagcaggaguu

SEQ ID NO: 1023448 - RNA, 19 nt, Artificial Sequence
  Description of Artificial Sequence: Synthetic oligonucleotide
gugucaaacaacugucguu

SEQ ID NO: 1023449 - RNA, 19 nt, Artificial Sequence
  Description of Artificial Sequence: Synthetic oligonucleotide
cacauauggagccuucaau

SEQ ID NO: 1023450 - RNA, 19 nt, Artificial Sequence
  Description of Artificial Sequence: Synthetic oligonucleotide
agcaucuccucaggaguga

SEQ ID NO: 1023451 - RNA, 19 nt, Artificial Sequence
  Description of Artificial Sequence: Synthetic oligonucleotide
guccuccuagguauaggac

SEQ ID NO: 1023452 - RNA, 19 nt, Artificial Sequence
  Description of Artificial Sequence: Synthetic oligonucleotide
cuucuaagcucuccucugu

SEQ ID NO: 1023453 - RNA, 19 nt, Artificial Sequence
  Description of Artificial Sequence: Synthetic oligonucleotide
cacucaguucugauggggu

SEQ ID NO: 1023454 - RNA, 19 nt, Artificial Sequence
  Description of Artificial Sequence: Synthetic oligonucleotide
cauuuggggcaagagugaa

SEQ ID NO: 1023455 - RNA, 19 nt, Artificial Sequence
  Description of Artificial Sequence: Synthetic oligonucleotide
auuuggggcaagagugaau

SEQ ID NO: 1023456 - RNA, 19 nt, Artificial Sequence
  Description of Artificial Sequence: Synthetic oligonucleotide
cauuuccuggggucucaca

SEQ ID NO: 1023457 - RNA, 19 nt, Artificial Sequence
  Description of Artificial Sequence: Synthetic oligonucleotide
gcaauccaugacauggauc

SEQ ID NO: 1023458 - RNA, 19 nt, Artificial Sequence
  Description of Artificial Sequence: Synthetic oligonucleotide
cagcuuuaaggcgcaucac

SEQ ID NO: 1023459 - RNA, 19 nt, Artificial Sequence
  Description of Artificial Sequence: Synthetic oligonucleotide
cuucagccauccugaucuc

SEQ ID NO: 1023460 - RNA, 19 nt, Artificial Sequence
  Description of Artificial Sequence: Synthetic oligonucleotide
caagagugaaucggaauau

SEQ ID NO: 1023461 - RNA, 19 nt, Artificial Sequence
  Description of Artificial Sequence: Synthetic oligonucleotide
cacugguucuugccccgug

SEQ ID NO: 1023462 - RNA, 19 nt, Artificial Sequence
  Description of Artificial Sequence: Synthetic oligonucleotide
gucccaaucucagaacggu

SEQ ID NO: 1023463 - RNA, 19 nt, Artificial Sequence
  Description of Artificial Sequence: Synthetic oligonucleotide
uccucugucuuagcuuguu

SEQ ID NO: 1023464 - RNA, 19 nt, Artificial Sequence
  Description of Artificial Sequence: Synthetic oligonucleotide
cauuuccaucaaggauugc

SEQ ID NO: 1023465 - RNA, 19 nt, Artificial Sequence
  Description of Artificial Sequence: Synthetic oligonucleotide
uucucugcccaggcugaaa

SEQ ID NO: 1023466 - RNA, 19 nt, Artificial Sequence
  Description of Artificial Sequence: Synthetic oligonucleotide
ugacugcagaguggcuaac

SEQ ID NO: 1023467 - RNA, 19 nt, Artificial Sequence
  Description of Artificial Sequence: Synthetic oligonucleotide
ggaucuguaaugugucaau

SEQ ID NO: 1023468 - RNA, 19 nt, Artificial Sequence
  Description of Artificial Sequence: Synthetic oligonucleotide
gccucacugaguuucgugu

SEQ ID NO: 1023469 - RNA, 19 nt, Artificial Sequence
  Description of Artificial Sequence: Synthetic oligonucleotide
ggugaaguauguccuccua

SEQ ID NO: 1023470 - RNA, 19 nt, Artificial Sequence
  Description of Artificial Sequence: Synthetic oligonucleotide
ccacacaaguccuggcauc

SEQ ID NO: 1023471 - RNA, 19 nt, Artificial Sequence
  Description of Artificial Sequence: Synthetic oligonucleotide
ucacugguucuugccccgu

SEQ ID NO: 1023472 - RNA, 19 nt, Artificial Sequence
  Description of Artificial Sequence: Synthetic oligonucleotide
cugucacuccaacuuucaa

SEQ ID NO: 1023473 - RNA, 19 nt, Artificial Sequence
  Description of Artificial Sequence: Synthetic oligonucleotide
caucuucuguagauuuggu

SEQ ID NO: 1023474 - RNA, 19 nt, Artificial Sequence
  Description of Artificial Sequence: Synthetic oligonucleotide
gaguugagcuugagcugca

SEQ ID NO: 1023475 - RNA, 19 nt, Artificial Sequence
  Description of Artificial Sequence: Synthetic oligonucleotide
aagcaggaguuggcucaca

SEQ ID NO: 1023476 - RNA, 19 nt, Artificial Sequence
  Description of Artificial Sequence: Synthetic oligonucleotide
aguggcuaaccuggauuuu

SEQ ID NO: 1023477 - RNA, 19 nt, Artificial Sequence
  Description of Artificial Sequence: Synthetic oligonucleotide
gucuucgcaccuuuugguu

SEQ ID NO: 1023478 - RNA, 19 nt, Artificial Sequence
  Description of Artificial Sequence: Synthetic oligonucleotide
aguuucgugugugccucuu

SEQ ID NO: 1023479 - RNA, 19 nt, Artificial Sequence
  Description of Artificial Sequence: Synthetic oligonucleotide
gagugcgaauucaagucuu

SEQ ID NO: 1023480 - RNA, 19 nt, Artificial Sequence
  Description of Artificial Sequence: Synthetic oligonucleotide
ggcaagagugaaucggaau

SEQ ID NO: 1023481 - RNA, 19 nt, Artificial Sequence
  Description of Artificial Sequence: Synthetic oligonucleotide
cagaacggucauuugcuuu

SEQ ID NO: 1023482 - RNA, 19 nt, Artificial Sequence
  Description of Artificial Sequence: Synthetic oligonucleotide
cagagcugucacuccaacu

SEQ ID NO: 1023483 - RNA, 19 nt, Artificial Sequence
  Description of Artificial Sequence: Synthetic oligonucleotide
cacuggaguugagcuugag

SEQ ID NO: 1023484 - RNA, 19 nt, Artificial Sequence
  Description of Artificial Sequence: Synthetic oligonucleotide
cuucucacucaguucugau

SEQ ID NO: 1023485 - RNA, 19 nt, Artificial Sequence
  Description of Artificial Sequence: Synthetic oligonucleotide
gaacggucauuugcuuucu

SEQ ID NO: 1023486 - RNA, 19 nt, Artificial Sequence
  Description of Artificial Sequence: Synthetic oligonucleotide
caucugaagcugcuuggau

SEQ ID NO: 1023487 - RNA, 19 nt, Artificial Sequence
  Description of Artificial Sequence: Synthetic oligonucleotide
caaggauugccugcugccu

SEQ ID NO: 1023488 - RNA, 19 nt, Artificial Sequence
  Description of Artificial Sequence: Synthetic oligonucleotide
caugggaggccuggagcca

SEQ ID NO: 1023489 - RNA, 19 nt, Artificial Sequence
  Description of Artificial Sequence: Synthetic oligonucleotide
gcagcucuaacuucuuguu

SEQ ID NO: 1023490 - RNA, 19 nt, Artificial Sequence
  Description of Artificial Sequence: Synthetic oligonucleotide
gaguuucgugugugccucu

SEQ ID NO: 1023491 - RNA, 19 nt, Artificial Sequence
  Description of Artificial Sequence: Synthetic oligonucleotide
cucagucaggcagcucgga

SEQ ID NO: 1023492 - RNA, 19 nt, Artificial Sequence
  Description of Artificial Sequence: Synthetic oligonucleotide
cuggucagagucacugguu

SEQ ID NO: 1023493 - RNA, 19 nt, Artificial Sequence
  Description of Artificial Sequence: Synthetic oligonucleotide
ggucucacagaggcugauc

SEQ ID NO: 1023494 - RNA, 19 nt, Artificial Sequence
  Description of Artificial Sequence: Synthetic oligonucleotide
cuugccgcucuuucagcau

SEQ ID NO: 1023495 - RNA, 19 nt, Artificial Sequence
  Description of Artificial Sequence: Synthetic oligonucleotide
cuuccaugggaggccugga

SEQ ID NO: 1023496 - RNA, 19 nt, Artificial Sequence
  Description of Artificial Sequence: Synthetic oligonucleotide
guauguccuccuagguaua

SEQ ID NO: 1023497 - RNA, 19 nt, Artificial Sequence
  Description of Artificial Sequence: Synthetic oligonucleotide
ccggcagaauuucuccaca

SEQ ID NO: 1023498 - RNA, 19 nt, Artificial Sequence
  Description of Artificial Sequence: Synthetic oligonucleotide
ggcucacaguuaauuccuc

SEQ ID NO: 1023499 - RNA, 19 nt, Artificial Sequence
  Description of Artificial Sequence: Synthetic oligonucleotide
ccagcucauguccucagcu

SEQ ID NO: 1023500 - RNA, 19 nt, Artificial Sequence
  Description of Artificial Sequence: Synthetic oligonucleotide
gccuggagccacauaugga

SEQ ID NO: 1023501 - RNA, 19 nt, Artificial Sequence
  Description of Artificial Sequence: Synthetic oligonucleotide
caaccaggaguuccuucau

SEQ ID NO: 1023502 - RNA, 19 nt, Artificial Sequence
  Description of Artificial Sequence: Synthetic oligonucleotide
gcagaguggcuaaccugga

SEQ ID NO: 1023503 - RNA, 19 nt, Artificial Sequence
  Description of Artificial Sequence: Synthetic oligonucleotide
ccaucaaggauugccugcu

SEQ ID NO: 1023504 - RNA, 19 nt, Artificial Sequence
  Description of Artificial Sequence: Synthetic oligonucleotide
cuugccccgugccggcucu

SEQ ID NO: 1023505 - RNA, 19 nt, Artificial Sequence
  Description of Artificial Sequence: Synthetic oligonucleotide
cuucucugcccaggcugaa

SEQ ID NO: 1023506 - RNA, 19 nt, Artificial Sequence
  Description of Artificial Sequence: Synthetic oligonucleotide
ccaaucucagaacggucau

SEQ ID NO: 1023507 - RNA, 19 nt, Artificial Sequence
  Description of Artificial Sequence: Synthetic oligonucleotide
caaucucagaacggucauu

SEQ ID NO: 1023508 - RNA, 19 nt, Artificial Sequence
  Description of Artificial Sequence: Synthetic oligonucleotide
ccagcaggucagccuuuuc

SEQ ID NO: 1023509 - RNA, 19 nt, Artificial Sequence
  Description of Artificial Sequence: Synthetic oligonucleotide
uugccccgugccggcucug

SEQ ID NO: 1023510 - RNA, 19 nt, Artificial Sequence
  Description of Artificial Sequence: Synthetic oligonucleotide
caccuccaucugagcccug

SEQ ID NO: 1023511 - RNA, 19 nt, Artificial Sequence
  Description of Artificial Sequence: Synthetic oligonucleotide
gaguuggcucacaguuaau

SEQ ID NO: 1023512 - RNA, 19 nt, Artificial Sequence
  Description of Artificial Sequence: Synthetic oligonucleotide
cauggagcucuugcagcau

SEQ ID NO: 1023513 - RNA, 19 nt, Artificial Sequence
  Description of Artificial Sequence: Synthetic oligonucleotide
cggagguugaugggacaug

SEQ ID NO: 1023514 - RNA, 19 nt, Artificial Sequence
  Description of Artificial Sequence: Synthetic oligonucleotide
ccgcucuuucagcauggaa

SEQ ID NO: 1023515 - RNA, 19 nt, Artificial Sequence
  Description of Artificial Sequence: Synthetic oligonucleotide
ggcuucucugagugcgaau

SEQ ID NO: 1023516 - RNA, 19 nt, Artificial Sequence
  Description of Artificial Sequence: Synthetic oligonucleotide
gcgcaucaccuggaucuuc

SEQ ID NO: 1023517 - RNA, 19 nt, Artificial Sequence
  Description of Artificial Sequence: Synthetic oligonucleotide
gccuggcacuuuucuugaa

SEQ ID NO: 1023518 - RNA, 19 nt, Artificial Sequence
  Description of Artificial Sequence: Synthetic oligonucleotide
ccacuggaguugagcuuga

SEQ ID NO: 1023519 - RNA, 19 nt, Artificial Sequence
  Description of Artificial Sequence: Synthetic oligonucleotide
gccccgugccggcucugca

SEQ ID NO: 1023520 - RNA, 19 nt, Artificial Sequence
  Description of Artificial Sequence: Synthetic oligonucleotide
cagccucacugaguuucgu

SEQ ID NO: 1023521 - RNA, 19 nt, Artificial Sequence
  Description of Artificial Sequence: Synthetic oligonucleotide
ccaccuuuucugccuguuu

SEQ ID NO: 1023522 - RNA, 19 nt, Artificial Sequence
  Description of Artificial Sequence: Synthetic oligonucleotide
ggcuggggugaaccuuauu

SEQ ID NO: 1023523 - RNA, 19 nt, Artificial Sequence
  Description of Artificial Sequence: Synthetic oligonucleotide
ggcgcaucaccuggaucuu

SEQ ID NO: 1023524 - RNA, 19 nt, Artificial Sequence
  Description of Artificial Sequence: Synthetic oligonucleotide
cgcaccuuuugguuuccuu

SEQ ID NO: 1023525 - RNA, 19 nt, Artificial Sequence
  Description of Artificial Sequence: Synthetic oligonucleotide
gucaggcagcucggagguu

SEQ ID NO: 1023526 - RNA, 19 nt, Artificial Sequence
  Description of Artificial Sequence: Synthetic oligonucleotide
ccucugucugggucccaau

SEQ ID NO: 1023527 - RNA, 19 nt, Artificial Sequence
  Description of Artificial Sequence: Synthetic oligonucleotide
ccccgugccggcucugcau

SEQ ID NO: 1023528 - RNA, 19 nt, Artificial Sequence
  Description of Artificial Sequence: Synthetic oligonucleotide
cccagcaggucagccuuuu

SEQ ID NO: 1023529 - RNA, 19 nt, Artificial Sequence
  Description of Artificial Sequence: Synthetic oligonucleotide
ccgugccggcucugcauuu

SEQ ID NO: 1023530 - RNA, 19 nt, Artificial Sequence
  Description of Artificial Sequence: Synthetic oligonucleotide
gcccagcaggucagccuuu

SEQ ID NO: 1023531 - RNA, 19 nt, Artificial Sequence
  Description of Artificial Sequence: Synthetic oligonucleotide
ugauauauaauauagaggu

SEQ ID NO: 1023532 - RNA, 19 nt, Artificial Sequence
  Description of Artificial Sequence: Synthetic oligonucleotide
aagaaugucaaacagauca

SEQ ID NO: 1023533 - RNA, 19 nt, Artificial Sequence
  Description of Artificial Sequence: Synthetic oligonucleotide
auaauauagagguauauac

SEQ ID NO: 1023534 - RNA, 19 nt, Artificial Sequence
  Description of Artificial Sequence: Synthetic oligonucleotide
guugauauauaauauagag

SEQ ID NO: 1023535 - RNA, 19 nt, Artificial Sequence
  Description of Artificial Sequence: Synthetic oligonucleotide
uugauauauaauauagagg

SEQ ID NO: 1023536 - RNA, 19 nt, Artificial Sequence
  Description of Artificial Sequence: Synthetic oligonucleotide
ucaucaaugagggagaggg

SEQ ID NO: 1023537 - RNA, 19 nt, Artificial Sequence
  Description of Artificial Sequence: Synthetic oligonucleotide
uauagagguauauacauca

SEQ ID NO: 1023538 - RNA, 19 nt, Artificial Sequence
  Description of Artificial Sequence: Synthetic oligonucleotide
uccacucugaauaagaaug

SEQ ID NO: 1023539 - RNA, 19 nt, Artificial Sequence
  Description of Artificial Sequence: Synthetic oligonucleotide
uguaaguugauauauaaua

SEQ ID NO: 1023540 - RNA, 19 nt, Artificial Sequence
  Description of Artificial Sequence: Synthetic oligonucleotide
uuuugcaugugaaagcagg

SEQ ID NO: 1023541 - RNA, 19 nt, Artificial Sequence
  Description of Artificial Sequence: Synthetic oligonucleotide
aauucagagguguccaugg

SEQ ID NO: 1023542 - RNA, 19 nt, Artificial Sequence
  Description of Artificial Sequence: Synthetic oligonucleotide
auugaaucaggacagaaca

SEQ ID NO: 1023543 - RNA, 19 nt, Artificial Sequence
  Description of Artificial Sequence: Synthetic oligonucleotide
ugcaugugaaagcaggugg

SEQ ID NO: 1023544 - RNA, 19 nt, Artificial Sequence
  Description of Artificial Sequence: Synthetic oligonucleotide
agaguuuguuucuugacgg

SEQ ID NO: 1023545 - RNA, 19 nt, Artificial Sequence
  Description of Artificial Sequence: Synthetic oligonucleotide
agaaaaggaggucaaauug

SEQ ID NO: 1023546 - RNA, 19 nt, Artificial Sequence
  Description of Artificial Sequence: Synthetic oligonucleotide
cuauauugaaucaggacag

SEQ ID NO: 1023547 - RNA, 19 nt, Artificial Sequence
  Description of Artificial Sequence: Synthetic oligonucleotide
aauguggguggguagagag

SEQ ID NO: 1023548 - RNA, 19 nt, Artificial Sequence
  Description of Artificial Sequence: Synthetic oligonucleotide
ugaauaagaaugucaaaca

SEQ ID NO: 1023549 - RNA, 19 nt, Artificial Sequence
  Description of Artificial Sequence: Synthetic oligonucleotide
gaagguaccuccuagcccc

SEQ ID NO: 1023550 - RNA, 19 nt, Artificial Sequence
  Description of Artificial Sequence: Synthetic oligonucleotide
agagguauauacaucaaac

SEQ ID NO: 1023551 - RNA, 19 nt, Artificial Sequence
  Description of Artificial Sequence: Synthetic oligonucleotide
uauguaaguugauauauaa

SEQ ID NO: 1023552 - RNA, 19 nt, Artificial Sequence
  Description of Artificial Sequence: Synthetic oligonucleotide
uuagcaucuggcuauggag

SEQ ID NO: 1023553 - RNA, 19 nt, Artificial Sequence
  Description of Artificial Sequence: Synthetic oligonucleotide
cugaauaagaaugucaaac

SEQ ID NO: 1023554 - RNA, 19 nt, Artificial Sequence
  Description of Artificial Sequence: Synthetic oligonucleotide
uugaaauaugcugaaaucu

SEQ ID NO: 1023555 - RNA, 19 nt, Artificial Sequence
  Description of Artificial Sequence: Synthetic oligonucleotide
guuuugauggcucuguccc

SEQ ID NO: 1023556 - RNA, 19 nt, Artificial Sequence
  Description of Artificial Sequence: Synthetic oligonucleotide
ugaaauaugcugaaaucuc

SEQ ID NO: 1023557 - RNA, 19 nt, Artificial Sequence
  Description of Artificial Sequence: Synthetic oligonucleotide
aacuucagcagaugugcac

SEQ ID NO: 1023558 - RNA, 19 nt, Artificial Sequence
  Description of Artificial Sequence: Synthetic oligonucleotide
aauaagaaugucaaacaga

SEQ ID NO: 1023559 - RNA, 19 nt, Artificial Sequence
  Description of Artificial Sequence: Synthetic oligonucleotide
uauauguaaguugauauau

SEQ ID NO: 1023560 - RNA, 19 nt, Artificial Sequence
  Description of Artificial Sequence: Synthetic oligonucleotide
aaguucacacagcuucccc

SEQ ID NO: 1023561 - RNA, 19 nt, Artificial Sequence
  Description of Artificial Sequence: Synthetic oligonucleotide
uauugaaucaggacagaac

SEQ ID NO: 1023562 - RNA, 19 nt, Artificial Sequence
  Description of Artificial Sequence: Synthetic oligonucleotide
uguggugucagcagggacc

SEQ ID NO: 1023563 - RNA, 19 nt, Artificial Sequence
  Description of Artificial Sequence: Synthetic oligonucleotide
agucacagguagcacacgc

SEQ ID NO: 1023564 - RNA, 19 nt, Artificial Sequence
  Description of Artificial Sequence: Synthetic oligonucleotide
cuguaugaagucaagcagc

SEQ ID NO: 1023565 - RNA, 19 nt, Artificial Sequence
  Description of Artificial Sequence: Synthetic oligonucleotide
ucaggacagaacaaggcug

SEQ ID NO: 1023566 - RNA, 19 nt, Artificial Sequence
  Description of Artificial Sequence: Synthetic oligonucleotide
ucaaacagaucauccaucu

SEQ ID NO: 1023567 - RNA, 19 nt, Artificial Sequence
  Description of Artificial Sequence: Synthetic oligonucleotide
agaucauccaucugcugac

SEQ ID NO: 1023568 - RNA, 19 nt, Artificial Sequence
  Description of Artificial Sequence: Synthetic oligonucleotide
aaauugaacugggucuggc

SEQ ID NO: 1023569 - RNA, 19 nt, Artificial Sequence
  Description of Artificial Sequence: Synthetic oligonucleotide
uguaugaagucaagcagcu

SEQ ID NO: 1023570 - RNA, 19 nt, Artificial Sequence
  Description of Artificial Sequence: Synthetic oligonucleotide
uaaguugauauauaauaua

SEQ ID NO: 1023571 - RNA, 19 nt, Artificial Sequence
  Description of Artificial Sequence: Synthetic oligonucleotide
cuggcuaugguucuguggc

SEQ ID NO: 1023572 - RNA, 19 nt, Artificial Sequence
  Description of Artificial Sequence: Synthetic oligonucleotide
auaagaaugucaaacagau

SEQ ID NO: 1023573 - RNA, 19 nt, Artificial Sequence
  Description of Artificial Sequence: Synthetic oligonucleotide
aauggcaggugucugucug

SEQ ID NO: 1023574 - RNA, 19 nt, Artificial Sequence
  Description of Artificial Sequence: Synthetic oligonucleotide
acagguagcacacgcuggc

SEQ ID NO: 1023575 - RNA, 19 nt, Artificial Sequence
  Description of Artificial Sequence: Synthetic oligonucleotide
acugugauugucaaggcuc

SEQ ID NO: 1023576 - RNA, 19 nt, Artificial Sequence
  Description of Artificial Sequence: Synthetic oligonucleotide
ugcaaaugagggcugaggu

SEQ ID NO: 1023577 - RNA, 19 nt, Artificial Sequence
  Description of Artificial Sequence: Synthetic oligonucleotide
agguauauacaucaaacuu

SEQ ID NO: 1023578 - RNA, 19 nt, Artificial Sequence
  Description of Artificial Sequence: Synthetic oligonucleotide
cagaguuuguuucuugacg

SEQ ID NO: 1023579 - RNA, 19 nt, Artificial Sequence
  Description of Artificial Sequence: Synthetic oligonucleotide
agaugugcaccucugaccu

SEQ ID NO: 1023580 - RNA, 19 nt, Artificial Sequence
  Description of Artificial Sequence: Synthetic oligonucleotide
uccuggagaaccuggaagc

SEQ ID NO: 1023581 - RNA, 19 nt, Artificial Sequence
  Description of Artificial Sequence: Synthetic oligonucleotide
ucaaauugaacugggucug

SEQ ID NO: 1023582 - RNA, 19 nt, Artificial Sequence
  Description of Artificial Sequence: Synthetic oligonucleotide
augaugacccuguaugaag

SEQ ID NO: 1023583 - RNA, 19 nt, Artificial Sequence
  Description of Artificial Sequence: Synthetic oligonucleotide
guucauucgaaggcgaagg

SEQ ID NO: 1023584 - RNA, 19 nt, Artificial Sequence
  Description of Artificial Sequence: Synthetic oligonucleotide
ucaaaugugugugggguag

SEQ ID NO: 1023585 - RNA, 19 nt, Artificial Sequence
  Description of Artificial Sequence: Synthetic oligonucleotide
aaguauagccaggacccac

SEQ ID NO: 1023586 - RNA, 19 nt, Artificial Sequence
  Description of Artificial Sequence: Synthetic oligonucleotide
uuugcaugugaaagcaggu

SEQ ID NO: 1023587 - RNA, 19 nt, Artificial Sequence
  Description of Artificial Sequence: Synthetic oligonucleotide
ugaugacccuguaugaagu

SEQ ID NO: 1023588 - RNA, 19 nt, Artificial Sequence
  Description of Artificial Sequence: Synthetic oligonucleotide
ugaggugagucccuguaga

SEQ ID NO: 1023589 - RNA, 19 nt, Artificial Sequence
  Description of Artificial Sequence: Synthetic oligonucleotide
uagagguauauacaucaaa

SEQ ID NO: 1023590 - RNA, 19 nt, Artificial Sequence
  Description of Artificial Sequence: Synthetic oligonucleotide
gaaaaggaggucaaauuga

SEQ ID NO: 1023591 - RNA, 19 nt, Artificial Sequence
  Description of Artificial Sequence: Synthetic oligonucleotide
ugucccuuuucuauauuga

SEQ ID NO: 1023592 - RNA, 19 nt, Artificial Sequence
  Description of Artificial Sequence: Synthetic oligonucleotide
ucccuguagagucagugac

SEQ ID NO: 1023593 - RNA, 19 nt, Artificial Sequence
  Description of Artificial Sequence: Synthetic oligonucleotide
cauucgaaggcgaagguga

SEQ ID NO: 1023594 - RNA, 19 nt, Artificial Sequence
  Description of Artificial Sequence: Synthetic oligonucleotide
uguggcacuaaggagccag

SEQ ID NO: 1023595 - RNA, 19 nt, Artificial Sequence
  Description of Artificial Sequence: Synthetic oligonucleotide
aggcugcugacucacacuc

SEQ ID NO: 1023596 - RNA, 19 nt, Artificial Sequence
  Description of Artificial Sequence: Synthetic oligonucleotide
uggagaaccuggaagcacu

SEQ ID NO: 1023597 - RNA, 19 nt, Artificial Sequence
  Description of Artificial Sequence: Synthetic oligonucleotide
cuucccacaaccaaccuca

SEQ ID NO: 1023598 - RNA, 19 nt, Artificial Sequence
  Description of Artificial Sequence: Synthetic oligonucleotide
acggcuuguauucccugcc

SEQ ID NO: 1023599 - RNA, 19 nt, Artificial Sequence
  Description of Artificial Sequence: Synthetic oligonucleotide
cuuguggcacuaaggagcc

SEQ ID NO: 1023600 - RNA, 19 nt, Artificial Sequence
  Description of Artificial Sequence: Synthetic oligonucleotide
ugaccucagaaaaggaggu

SEQ ID NO: 1023601 - RNA, 19 nt, Artificial Sequence
  Description of Artificial Sequence: Synthetic oligonucleotide
gguauauacaucaaacuuc

SEQ ID NO: 1023602 - RNA, 19 nt, Artificial Sequence
  Description of Artificial Sequence: Synthetic oligonucleotide
aggcccauaccacugcugg

SEQ ID NO: 1023603 - RNA, 19 nt, Artificial Sequence
  Description of Artificial Sequence: Synthetic oligonucleotide
cacuaaggagccaggaagc

SEQ ID NO: 1023604 - RNA, 19 nt, Artificial Sequence
  Description of Artificial Sequence: Synthetic oligonucleotide
aguauagccaggacccacc

SEQ ID NO: 1023605 - RNA, 19 nt, Artificial Sequence
  Description of Artificial Sequence: Synthetic oligonucleotide
uuaggcugcugacucacac

SEQ ID NO: 1023606 - RNA, 19 nt, Artificial Sequence
  Description of Artificial Sequence: Synthetic oligonucleotide
auauagagguauauacauc

SEQ ID NO: 1023607 - RNA, 19 nt, Artificial Sequence
  Description of Artificial Sequence: Synthetic oligonucleotide
gucaaauugaacugggucu

SEQ ID NO: 1023608 - RNA, 19 nt, Artificial Sequence
  Description of Artificial Sequence: Synthetic oligonucleotide
uguuggggcugcaaaugag

SEQ ID NO: 1023609 - RNA, 19 nt, Artificial Sequence
  Description of Artificial Sequence: Synthetic oligonucleotide
uguauauauguaaguugau

SEQ ID NO: 1023610 - RNA, 19 nt, Artificial Sequence
  Description of Artificial Sequence: Synthetic oligonucleotide
ugcccuuguggcacuaagg

SEQ ID NO: 1023611 - RNA, 19 nt, Artificial Sequence
  Description of Artificial Sequence: Synthetic oligonucleotide
agagucagagagcuacaag

SEQ ID NO: 1023612 - RNA, 19 nt, Artificial Sequence
  Description of Artificial Sequence: Synthetic oligonucleotide
uggcguguaggcaauggca

SEQ ID NO: 1023613 - RNA, 19 nt, Artificial Sequence
  Description of Artificial Sequence: Synthetic oligonucleotide
ugggacggaaugugggugg

SEQ ID NO: 1023614 - RNA, 19 nt, Artificial Sequence
  Description of Artificial Sequence: Synthetic oligonucleotide
gggaaguucauucgaaggc

SEQ ID NO: 1023615 - RNA, 19 nt, Artificial Sequence
  Description of Artificial Sequence: Synthetic oligonucleotide
gcacuaaggagccaggaag

SEQ ID NO: 1023616 - RNA, 19 nt, Artificial Sequence
  Description of Artificial Sequence: Synthetic oligonucleotide
aggagcaaagugcaauuca

SEQ ID NO: 1023617 - RNA, 19 nt, Artificial Sequence
  Description of Artificial Sequence: Synthetic oligonucleotide
ugcaauucagaggugucca

SEQ ID NO: 1023618 - RNA, 19 nt, Artificial Sequence
  Description of Artificial Sequence: Synthetic oligonucleotide
ggcuccuugaaauaugcug

SEQ ID NO: 1023619 - RNA, 19 nt, Artificial Sequence
  Description of Artificial Sequence: Synthetic oligonucleotide
ggaaguucauucgaaggcg

SEQ ID NO: 1023620 - RNA, 19 nt, Artificial Sequence
  Description of Artificial Sequence: Synthetic oligonucleotide
cuacaagcaggaaucccag

SEQ ID NO: 1023621 - RNA, 19 nt, Artificial Sequence
  Description of Artificial Sequence: Synthetic oligonucleotide
cugugauugucaaggcucc

SEQ ID NO: 1023622 - RNA, 19 nt, Artificial Sequence
  Description of Artificial Sequence: Synthetic oligonucleotide
cuugacggcuuguauuccc

SEQ ID NO: 1023623 - RNA, 19 nt, Artificial Sequence
  Description of Artificial Sequence: Synthetic oligonucleotide
aguggcagucccgugcugc

SEQ ID NO: 1023624 - RNA, 19 nt, Artificial Sequence
  Description of Artificial Sequence: Synthetic oligonucleotide
agguggcccagcuuccugc

SEQ ID NO: 1023625 - RNA, 19 nt, Artificial Sequence
  Description of Artificial Sequence: Synthetic oligonucleotide
gagguauauacaucaaacu

SEQ ID NO: 1023626 - RNA, 19 nt, Artificial Sequence
  Description of Artificial Sequence: Synthetic oligonucleotide
cuuguauucccugcccugg

SEQ ID NO: 1023627 - RNA, 19 nt, Artificial Sequence
  Description of Artificial Sequence: Synthetic oligonucleotide
guggguagagagcuccugg

SEQ ID NO: 1023628 - RNA, 19 nt, Artificial Sequence
  Description of Artificial Sequence: Synthetic oligonucleotide
auucagagguguccauggg

SEQ ID NO: 1023629 - RNA, 19 nt, Artificial Sequence
  Description of Artificial Sequence: Synthetic oligonucleotide
ucauucgaaggcgaaggug

SEQ ID NO: 1023630 - RNA, 19 nt, Artificial Sequence
  Description of Artificial Sequence: Synthetic oligonucleotide
uucagacccuucccuagcc

SEQ ID NO: 1023631 - RNA, 19 nt, Artificial Sequence
  Description of Artificial Sequence: Synthetic oligonucleotide
gguggagguagccacaccc

SEQ ID NO: 1023632 - RNA, 19 nt, Artificial Sequence
  Description of Artificial Sequence: Synthetic oligonucleotide
ggucaaauugaacuggguc

SEQ ID NO: 1023633 - RNA, 19 nt, Artificial Sequence
  Description of Artificial Sequence: Synthetic oligonucleotide
uuugucccagcacugguuu

SEQ ID NO: 1023634 - RNA, 19 nt, Artificial Sequence
  Description of Artificial Sequence: Synthetic oligonucleotide
acucugaauaagaauguca

SEQ ID NO: 1023635 - RNA, 19 nt, Artificial Sequence
  Description of Artificial Sequence: Synthetic oligonucleotide
uucccuagccuagagucag

SEQ ID NO: 1023636 - RNA, 19 nt, Artificial Sequence
  Description of Artificial Sequence: Synthetic oligonucleotide
acccuguaugaagucaagc

SEQ ID NO: 1023637 - RNA, 19 nt, Artificial Sequence
  Description of Artificial Sequence: Synthetic oligonucleotide
gauggcguguaggcaaugg

SEQ ID NO: 1023638 - RNA, 19 nt, Artificial Sequence
  Description of Artificial Sequence: Synthetic oligonucleotide
uagccuagagucagagagc

SEQ ID NO: 1023639 - RNA, 19 nt, Artificial Sequence
  Description of Artificial Sequence: Synthetic oligonucleotide
cccuggaugagccugagcc

SEQ ID NO: 1023640 - RNA, 19 nt, Artificial Sequence
  Description of Artificial Sequence: Synthetic oligonucleotide
gaggugagucccuguagag

SEQ ID NO: 1023641 - RNA, 19 nt, Artificial Sequence
  Description of Artificial Sequence: Synthetic oligonucleotide
gaugguggcuccuugaaau

SEQ ID NO: 1023642 - RNA, 19 nt, Artificial Sequence
  Description of Artificial Sequence: Synthetic oligonucleotide
ugggacaaggucugcugag

SEQ ID NO: 1023643 - RNA, 19 nt, Artificial Sequence
  Description of Artificial Sequence: Synthetic oligonucleotide
aucccaguggagcugcaag

SEQ ID NO: 1023644 - RNA, 19 nt, Artificial Sequence
  Description of Artificial Sequence: Synthetic oligonucleotide
cugaaaucucuccacucug

SEQ ID NO: 1023645 - RNA, 19 nt, Artificial Sequence
  Description of Artificial Sequence: Synthetic oligonucleotide
uucauucgaaggcgaaggu

SEQ ID NO: 1023646 - RNA, 19 nt, Artificial Sequence
  Description of Artificial Sequence: Synthetic oligonucleotide
cacacgcuggcuaugguuc

SEQ ID NO: 1023647 - RNA, 19 nt, Artificial Sequence
  Description of Artificial Sequence: Synthetic oligonucleotide
cacagguagcacacgcugg

SEQ ID NO: 1023648 - RNA, 19 nt, Artificial Sequence
  Description of Artificial Sequence: Synthetic oligonucleotide
aacuucagacccuucccua

SEQ ID NO: 1023649 - RNA, 19 nt, Artificial Sequence
  Description of Artificial Sequence: Synthetic oligonucleotide
ccuguaugaagucaagcag

SEQ ID NO: 1023650 - RNA, 19 nt, Artificial Sequence
  Description of Artificial Sequence: Synthetic oligonucleotide
ugucugcaugucaaaugug

SEQ ID NO: 1023651 - RNA, 19 nt, Artificial Sequence
  Description of Artificial Sequence: Synthetic oligonucleotide
aguucauucgaaggcgaag

SEQ ID NO: 1023652 - RNA, 19 nt, Artificial Sequence
  Description of Artificial Sequence: Synthetic oligonucleotide
aaggucugcugagggcucc

SEQ ID NO: 1023653 - RNA, 19 nt, Artificial Sequence
  Description of Artificial Sequence: Synthetic oligonucleotide
uauauugaaucaggacaga

SEQ ID NO: 1023654 - RNA, 19 nt, Artificial Sequence
  Description of Artificial Sequence: Synthetic oligonucleotide
gacggcuuguauucccugc

SEQ ID NO: 1023655 - RNA, 19 nt, Artificial Sequence
  Description of Artificial Sequence: Synthetic oligonucleotide
accagaggacagcuccagc

SEQ ID NO: 1023656 - RNA, 19 nt, Artificial Sequence
  Description of Artificial Sequence: Synthetic oligonucleotide
ggugagucccuguagaguc

SEQ ID NO: 1023657 - RNA, 19 nt, Artificial Sequence
  Description of Artificial Sequence: Synthetic oligonucleotide
cucauacccagguggcucc

SEQ ID NO: 1023658 - RNA, 19 nt, Artificial Sequence
  Description of Artificial Sequence: Synthetic oligonucleotide
guagagagcuccuggagaa

SEQ ID NO: 1023659 - RNA, 19 nt, Artificial Sequence
  Description of Artificial Sequence: Synthetic oligonucleotide
aucugcugacuggaggagc

SEQ ID NO: 1023660 - RNA, 19 nt, Artificial Sequence
  Description of Artificial Sequence: Synthetic oligonucleotide
agcaucuggcuauggaggu

SEQ ID NO: 1023661 - RNA, 19 nt, Artificial Sequence
  Description of Artificial Sequence: Synthetic oligonucleotide
guagagucagugaccacag

SEQ ID NO: 1023662 - RNA, 19 nt, Artificial Sequence
  Description of Artificial Sequence: Synthetic oligonucleotide
cuauggaggucaucaauga

SEQ ID NO: 1023663 - RNA, 19 nt, Artificial Sequence
  Description of Artificial Sequence: Synthetic oligonucleotide
uggguagagagcuccugga

SEQ ID NO: 1023664 - RNA, 19 nt, Artificial Sequence
  Description of Artificial Sequence: Synthetic oligonucleotide
caucaaugagggagagggg

SEQ ID NO: 1023665 - RNA, 19 nt, Artificial Sequence
  Description of Artificial Sequence: Synthetic oligonucleotide
auauugaaucaggacagaa

SEQ ID NO: 1023666 - RNA, 19 nt, Artificial Sequence
  Description of Artificial Sequence: Synthetic oligonucleotide
ccaucugcgcucuuguugg

SEQ ID NO: 1023667 - RNA, 19 nt, Artificial Sequence
  Description of Artificial Sequence: Synthetic oligonucleotide
uugacggcuuguauucccu

SEQ ID NO: 1023668 - RNA, 19 nt, Artificial Sequence
  Description of Artificial Sequence: Synthetic oligonucleotide
gggagugacccucuugagg

SEQ ID NO: 1023669 - RNA, 19 nt, Artificial Sequence
  Description of Artificial Sequence: Synthetic oligonucleotide
auacccagguggcuccuuc

SEQ ID NO: 1023670 - RNA, 19 nt, Artificial Sequence
  Description of Artificial Sequence: Synthetic oligonucleotide
agcugcuuagcaucuggcu

SEQ ID NO: 1023671 - RNA, 19 nt, Artificial Sequence
  Description of Artificial Sequence: Synthetic oligonucleotide
agugcaauucagagguguc

SEQ ID NO: 1023672 - RNA, 19 nt, Artificial Sequence
  Description of Artificial Sequence: Synthetic oligonucleotide
uggguggguagagagcucc

SEQ ID NO: 1023673 - RNA, 19 nt, Artificial Sequence
  Description of Artificial Sequence: Synthetic oligonucleotide
cuccucauacccagguggc

SEQ ID NO: 1023674 - RNA, 19 nt, Artificial Sequence
  Description of Artificial Sequence: Synthetic oligonucleotide
ugcugagggcucccagugg

SEQ ID NO: 1023675 - RNA, 19 nt, Artificial Sequence
  Description of Artificial Sequence: Synthetic oligonucleotide
uuuugauggcucugucccu

SEQ ID NO: 1023676 - RNA, 19 nt, Artificial Sequence
  Description of Artificial Sequence: Synthetic oligonucleotide
augaagucaagcagcucuc

SEQ ID NO: 1023677 - RNA, 19 nt, Artificial Sequence
  Description of Artificial Sequence: Synthetic oligonucleotide
cugcaaaugagggcugagg

SEQ ID NO: 1023678 - RNA, 19 nt, Artificial Sequence
  Description of Artificial Sequence: Synthetic oligonucleotide
ucuggcucgagguggccca

SEQ ID NO: 1023679 - RNA, 19 nt, Artificial Sequence
  Description of Artificial Sequence: Synthetic oligonucleotide
agucccuguagagucagug

SEQ ID NO: 1023680 - RNA, 19 nt, Artificial Sequence
  Description of Artificial Sequence: Synthetic oligonucleotide
ggacaaggucugcugaggg

SEQ ID NO: 1023681 - RNA, 19 nt, Artificial Sequence
  Description of Artificial Sequence: Synthetic oligonucleotide
cuucgugcccacucgucag

SEQ ID NO: 1023682 - RNA, 19 nt, Artificial Sequence
  Description of Artificial Sequence: Synthetic oligonucleotide
guaaguugauauauaauau

SEQ ID NO: 1023683 - RNA, 19 nt, Artificial Sequence
  Description of Artificial Sequence: Synthetic oligonucleotide
cacaaccaaccucagcaug

SEQ ID NO: 1023684 - RNA, 19 nt, Artificial Sequence
  Description of Artificial Sequence: Synthetic oligonucleotide
cuggccauccaggaagucc

SEQ ID NO: 1023685 - RNA, 19 nt, Artificial Sequence
  Description of Artificial Sequence: Synthetic oligonucleotide
gaugacccuguaugaaguc

SEQ ID NO: 1023686 - RNA, 19 nt, Artificial Sequence
  Description of Artificial Sequence: Synthetic oligonucleotide
cuucagacccuucccuagc

SEQ ID NO: 1023687 - RNA, 19 nt, Artificial Sequence
  Description of Artificial Sequence: Synthetic oligonucleotide
cuuagcaucuggcuaugga

SEQ ID NO: 1023688 - RNA, 19 nt, Artificial Sequence
  Description of Artificial Sequence: Synthetic oligonucleotide
gaugaggugagucccugua

SEQ ID NO: 1023689 - RNA, 19 nt, Artificial Sequence
  Description of Artificial Sequence: Synthetic oligonucleotide
ccuucccuagccuagaguc

SEQ ID NO: 1023690 - RNA, 19 nt, Artificial Sequence
  Description of Artificial Sequence: Synthetic oligonucleotide
uuguauucccugcccugga

SEQ ID NO: 1023691 - RNA, 19 nt, Artificial Sequence
  Description of Artificial Sequence: Synthetic oligonucleotide
acggaauguggguggguag

SEQ ID NO: 1023692 - RNA, 19 nt, Artificial Sequence
  Description of Artificial Sequence: Synthetic oligonucleotide
guauagccaggacccaccc

SEQ ID NO: 1023693 - RNA, 19 nt, Artificial Sequence
  Description of Artificial Sequence: Synthetic oligonucleotide
ugcugcuuuccagaaaguc

SEQ ID NO: 1023694 - RNA, 19 nt, Artificial Sequence
  Description of Artificial Sequence: Synthetic oligonucleotide
aaacuucagcagaugugca

SEQ ID NO: 1023695 - RNA, 19 nt, Artificial Sequence
  Description of Artificial Sequence: Synthetic oligonucleotide
gaaguucauucgaaggcga

SEQ ID NO: 1023696 - RNA, 19 nt, Artificial Sequence
  Description of Artificial Sequence: Synthetic oligonucleotide
ugugggcccaagagcagcu

SEQ ID NO: 1023697 - RNA, 19 nt, Artificial Sequence
  Description of Artificial Sequence: Synthetic oligonucleotide
caaauugaacugggucugg

SEQ ID NO: 1023698 - RNA, 19 nt, Artificial Sequence
  Description of Artificial Sequence: Synthetic oligonucleotide
ggggagaugggacggaaug

SEQ ID NO: 1023699 - RNA, 19 nt, Artificial Sequence
  Description of Artificial Sequence: Synthetic oligonucleotide
ggcaggauggcguguaggc

SEQ ID NO: 1023700 - RNA, 19 nt, Artificial Sequence
  Description of Artificial Sequence: Synthetic oligonucleotide
uguauucccugcccuggau

SEQ ID NO: 1023701 - RNA, 19 nt, Artificial Sequence
  Description of Artificial Sequence: Synthetic oligonucleotide
uucgugcccacucgucagc

SEQ ID NO: 1023702 - RNA, 19 nt, Artificial Sequence
  Description of Artificial Sequence: Synthetic oligonucleotide
ucagacccuucccuagccu

SEQ ID NO: 1023703 - RNA, 19 nt, Artificial Sequence
  Description of Artificial Sequence: Synthetic oligonucleotide
cacucgucagcaguggcag

SEQ ID NO: 1023704 - RNA, 19 nt, Artificial Sequence
  Description of Artificial Sequence: Synthetic oligonucleotide
uccucuaggcgcccuggga

SEQ ID NO: 1023705 - RNA, 19 nt, Artificial Sequence
  Description of Artificial Sequence: Synthetic oligonucleotide
auguggguggguagagagc

SEQ ID NO: 1023706 - RNA, 19 nt, Artificial Sequence
  Description of Artificial Sequence: Synthetic oligonucleotide
auguaaguugauauauaau

SEQ ID NO: 1023707 - RNA, 19 nt, Artificial Sequence
  Description of Artificial Sequence: Synthetic oligonucleotide
uggagguagccacacccau

SEQ ID NO: 1023708 - RNA, 19 nt, Artificial Sequence
  Description of Artificial Sequence: Synthetic oligonucleotide
ucccgugcugcuuuccaga

SEQ ID NO: 1023709 - RNA, 19 nt, Artificial Sequence
  Description of Artificial Sequence: Synthetic oligonucleotide
uguggcuccucaugaugac

SEQ ID NO: 1023710 - RNA, 19 nt, Artificial Sequence
  Description of Artificial Sequence: Synthetic oligonucleotide
agggccaccagaggacagc

SEQ ID NO: 1023711 - RNA, 19 nt, Artificial Sequence
  Description of Artificial Sequence: Synthetic oligonucleotide
gaggguuguggugucagca

SEQ ID NO: 1023712 - RNA, 19 nt, Artificial Sequence
  Description of Artificial Sequence: Synthetic oligonucleotide
ggcagagcugcuuagcauc

SEQ ID NO: 1023713 - RNA, 19 nt, Artificial Sequence
  Description of Artificial Sequence: Synthetic oligonucleotide
gcaugucaaaugugugugg

SEQ ID NO: 1023714 - RNA, 19 nt, Artificial Sequence
  Description of Artificial Sequence: Synthetic oligonucleotide
agggacugugauugucaag

SEQ ID NO: 1023715 - RNA, 19 nt, Artificial Sequence
  Description of Artificial Sequence: Synthetic oligonucleotide
augugcaccucugaccuca

SEQ ID NO: 1023716 - RNA, 19 nt, Artificial Sequence
  Description of Artificial Sequence: Synthetic oligonucleotide
ugaagucaagcagcucucu

SEQ ID NO: 1023717 - RNA, 19 nt, Artificial Sequence
  Description of Artificial Sequence: Synthetic oligonucleotide
agaaugucaaacagaucau

SEQ ID NO: 1023718 - RNA, 19 nt, Artificial Sequence
  Description of Artificial Sequence: Synthetic oligonucleotide
ucuugacggcuuguauucc

SEQ ID NO: 1023719 - RNA, 19 nt, Artificial Sequence
  Description of Artificial Sequence: Synthetic oligonucleotide
guagggucuuggcugcagc

SEQ ID NO: 1023720 - RNA, 19 nt, Artificial Sequence
  Description of Artificial Sequence: Synthetic oligonucleotide
gguguagggucuuggcugc

SEQ ID NO: 1023721 - RNA, 19 nt, Artificial Sequence
  Description of Artificial Sequence: Synthetic oligonucleotide
uacaagcaggaaucccagu

SEQ ID NO: 1023722 - RNA, 19 nt, Artificial Sequence
  Description of Artificial Sequence: Synthetic oligonucleotide
gguaggccuaggcagcugc

SEQ ID NO: 1023723 - RNA, 19 nt, Artificial Sequence
  Description of Artificial Sequence: Synthetic oligonucleotide
cauuuuccugcugcuuagg

SEQ ID NO: 1023724 - RNA, 19 nt, Artificial Sequence
  Description of Artificial Sequence: Synthetic oligonucleotide
ucuaggcgcccugggagag

SEQ ID NO: 1023725 - RNA, 19 nt, Artificial Sequence
  Description of Artificial Sequence: Synthetic oligonucleotide
aaagugcaauucagaggug

SEQ ID NO: 1023726 - RNA, 19 nt, Artificial Sequence
  Description of Artificial Sequence: Synthetic oligonucleotide
augggacggaaugugggug

SEQ ID NO: 1023727 - RNA, 19 nt, Artificial Sequence
  Description of Artificial Sequence: Synthetic oligonucleotide
ucgagguggcccagcuucc

SEQ ID NO: 1023728 - RNA, 19 nt, Artificial Sequence
  Description of Artificial Sequence: Synthetic oligonucleotide
cugucugcaugucaaaugu

SEQ ID NO: 1023729 - RNA, 19 nt, Artificial Sequence
  Description of Artificial Sequence: Synthetic oligonucleotide
gcuacaagcaggaauccca

SEQ ID NO: 1023730 - RNA, 19 nt, Artificial Sequence
  Description of Artificial Sequence: Synthetic oligonucleotide
accucugaccucagaaaag

SEQ ID NO: 1023731 - RNA, 19 nt, Artificial Sequence
  Description of Artificial Sequence: Synthetic oligonucleotide
caaaugugugugggguagg

SEQ ID NO: 1023732 - RNA, 19 nt, Artificial Sequence
  Description of Artificial Sequence: Synthetic oligonucleotide
ggagaugggacggaaugug

SEQ ID NO: 1023733 - RNA, 19 nt, Artificial Sequence
  Description of Artificial Sequence: Synthetic oligonucleotide
agcagggcaggauggcgug

SEQ ID NO: 1023734 - RNA, 19 nt, Artificial Sequence
  Description of Artificial Sequence: Synthetic oligonucleotide
ggcguguaggcaauggcag

SEQ ID NO: 1023735 - RNA, 19 nt, Artificial Sequence
  Description of Artificial Sequence: Synthetic oligonucleotide
gaugggacggaaugugggu

SEQ ID NO: 1023736 - RNA, 19 nt, Artificial Sequence
  Description of Artificial Sequence: Synthetic oligonucleotide
cugcugacucacacucucc

SEQ ID NO: 1023737 - RNA, 19 nt, Artificial Sequence
  Description of Artificial Sequence: Synthetic oligonucleotide
gguguccauggggugaugg

SEQ ID NO: 1023738 - RNA, 19 nt, Artificial Sequence
  Description of Artificial Sequence: Synthetic oligonucleotide
gcuccccaacuucagaccc

SEQ ID NO: 1023739 - RNA, 19 nt, Artificial Sequence
  Description of Artificial Sequence: Synthetic oligonucleotide
aggcugagcacagggccac

SEQ ID NO: 1023740 - RNA, 19 nt, Artificial Sequence
  Description of Artificial Sequence: Synthetic oligonucleotide
cauaccacugcugggcuca

SEQ ID NO: 1023741 - RNA, 19 nt, Artificial Sequence
  Description of Artificial Sequence: Synthetic oligonucleotide
ggguagagagcuccuggag

SEQ ID NO: 1023742 - RNA, 19 nt, Artificial Sequence
  Description of Artificial Sequence: Synthetic oligonucleotide
gagguagccacacccauuu

SEQ ID NO: 1023743 - RNA, 19 nt, Artificial Sequence
  Description of Artificial Sequence: Synthetic oligonucleotide
uucccacaaccaaccucag

SEQ ID NO: 1023744 - RNA, 19 nt, Artificial Sequence
  Description of Artificial Sequence: Synthetic oligonucleotide
cuggagaaccuggaagcac

SEQ ID NO: 1023745 - RNA, 19 nt, Artificial Sequence
  Description of Artificial Sequence: Synthetic oligonucleotide
cucgucagcaguggcaguc

SEQ ID NO: 1023746 - RNA, 19 nt, Artificial Sequence
  Description of Artificial Sequence: Synthetic oligonucleotide
gugaggguuguggugucag

SEQ ID NO: 1023747 - RNA, 19 nt, Artificial Sequence
  Description of Artificial Sequence: Synthetic oligonucleotide
caucuggcuauggagguca

SEQ ID NO: 1023748 - RNA, 19 nt, Artificial Sequence
  Description of Artificial Sequence: Synthetic oligonucleotide
ggccuaggcagcugcaugc

SEQ ID NO: 1023749 - RNA, 19 nt, Artificial Sequence
  Description of Artificial Sequence: Synthetic oligonucleotide
uccuugaaauaugcugaaa

SEQ ID NO: 1023750 - RNA, 19 nt, Artificial Sequence
  Description of Artificial Sequence: Synthetic oligonucleotide
aguccucuaggcgcccugg

SEQ ID NO: 1023751 - RNA, 19 nt, Artificial Sequence
  Description of Artificial Sequence: Synthetic oligonucleotide
gacccuguaugaagucaag

SEQ ID NO: 1023752 - RNA, 19 nt, Artificial Sequence
  Description of Artificial Sequence: Synthetic oligonucleotide
agucccgugcugcuuucca

SEQ ID NO: 1023753 - RNA, 19 nt, Artificial Sequence
  Description of Artificial Sequence: Synthetic oligonucleotide
cugcaugccagguugggua

SEQ ID NO: 1023754 - RNA, 19 nt, Artificial Sequence
  Description of Artificial Sequence: Synthetic oligonucleotide
aggugagucccuguagagu

SEQ ID NO: 1023755 - RNA, 19 nt, Artificial Sequence
  Description of Artificial Sequence: Synthetic oligonucleotide
gucccuguagagucaguga

SEQ ID NO: 1023756 - RNA, 19 nt, Artificial Sequence
  Description of Artificial Sequence: Synthetic oligonucleotide
ggcucccagucacagguag

SEQ ID NO: 1023757 - RNA, 19 nt, Artificial Sequence
  Description of Artificial Sequence: Synthetic oligonucleotide
ugggguugggcagaaggua

SEQ ID NO: 1023758 - RNA, 19 nt, Artificial Sequence
  Description of Artificial Sequence: Synthetic oligonucleotide
aucugcgcucuuguugguc

SEQ ID NO: 1023759 - RNA, 19 nt, Artificial Sequence
  Description of Artificial Sequence: Synthetic oligonucleotide
agguagcacacgcuggcua

SEQ ID NO: 1023760 - RNA, 19 nt, Artificial Sequence
  Description of Artificial Sequence: Synthetic oligonucleotide
auagagguauauacaucaa

SEQ ID NO: 1023761 - RNA, 19 nt, Artificial Sequence
  Description of Artificial Sequence: Synthetic oligonucleotide
aggacagaacaaggcuggg

SEQ ID NO: 1023762 - RNA, 19 nt, Artificial Sequence
  Description of Artificial Sequence: Synthetic oligonucleotide
gagcugcaaguccuggcca

SEQ ID NO: 1023763 - RNA, 19 nt, Artificial Sequence
  Description of Artificial Sequence: Synthetic oligonucleotide
uggcacuaaggagccagga

SEQ ID NO: 1023764 - RNA, 19 nt, Artificial Sequence
  Description of Artificial Sequence: Synthetic oligonucleotide
cuucccuagccuagaguca

SEQ ID NO: 1023765 - RNA, 19 nt, Artificial Sequence
  Description of Artificial Sequence: Synthetic oligonucleotide
ucccaguggacaggccagg

SEQ ID NO: 1023766 - RNA, 19 nt, Artificial Sequence
  Description of Artificial Sequence: Synthetic oligonucleotide
ccagaguuuguuucuugac

SEQ ID NO: 1023767 - RNA, 19 nt, Artificial Sequence
  Description of Artificial Sequence: Synthetic oligonucleotide
gccuggggaaguucauucg

SEQ ID NO: 1023768 - RNA, 19 nt, Artificial Sequence
  Description of Artificial Sequence: Synthetic oligonucleotide
cagcagaugugcaccucug

SEQ ID NO: 1023769 - RNA, 19 nt, Artificial Sequence
  Description of Artificial Sequence: Synthetic oligonucleotide
agcugcaugccagguuggg

SEQ ID NO: 1023770 - RNA, 19 nt, Artificial Sequence
  Description of Artificial Sequence: Synthetic oligonucleotide
ucgucagcaguggcagucc

SEQ ID NO: 1023771 - RNA, 19 nt, Artificial Sequence
  Description of Artificial Sequence: Synthetic oligonucleotide
aggaaucccaguggagcug

SEQ ID NO: 1023772 - RNA, 19 nt, Artificial Sequence
  Description of Artificial Sequence: Synthetic oligonucleotide
gucccgugcugcuuuccag

SEQ ID NO: 1023773 - RNA, 19 nt, Artificial Sequence
  Description of Artificial Sequence: Synthetic oligonucleotide
caggguggcugcagugggg

SEQ ID NO: 1023774 - RNA, 19 nt, Artificial Sequence
  Description of Artificial Sequence: Synthetic oligonucleotide
gcccuuguggcacuaagga

SEQ ID NO: 1023775 - RNA, 19 nt, Artificial Sequence
  Description of Artificial Sequence: Synthetic oligonucleotide
caugaugacccuguaugaa

SEQ ID NO: 1023776 - RNA, 19 nt, Artificial Sequence
  Description of Artificial Sequence: Synthetic oligonucleotide
agacccuucccuagccuag

SEQ ID NO: 1023777 - RNA, 19 nt, Artificial Sequence
  Description of Artificial Sequence: Synthetic oligonucleotide
uggcaggugucugucugca

SEQ ID NO: 1023778 - RNA, 19 nt, Artificial Sequence
  Description of Artificial Sequence: Synthetic oligonucleotide
gagguggcccagcuuccug

SEQ ID NO: 1023779 - RNA, 19 nt, Artificial Sequence
  Description of Artificial Sequence: Synthetic oligonucleotide
acacgcuggcuaugguucu

SEQ ID NO: 1023780 - RNA, 19 nt, Artificial Sequence
  Description of Artificial Sequence: Synthetic oligonucleotide
gcguguaggcaauggcagg

SEQ ID NO: 1023781 - RNA, 19 nt, Artificial Sequence
  Description of Artificial Sequence: Synthetic oligonucleotide
ugcuuagcaucuggcuaug

SEQ ID NO: 1023782 - RNA, 19 nt, Artificial Sequence
  Description of Artificial Sequence: Synthetic oligonucleotide
ccucuaggcgcccugggag

SEQ ID NO: 1023783 - RNA, 19 nt, Artificial Sequence
  Description of Artificial Sequence: Synthetic oligonucleotide
guccucuaggcgcccuggg

SEQ ID NO: 1023784 - RNA, 19 nt, Artificial Sequence
  Description of Artificial Sequence: Synthetic oligonucleotide
cuccuugaaauaugcugaa

SEQ ID NO: 1023785 - RNA, 19 nt, Artificial Sequence
  Description of Artificial Sequence: Synthetic oligonucleotide
gaauguggguggguagaga

SEQ ID NO: 1023786 - RNA, 19 nt, Artificial Sequence
  Description of Artificial Sequence: Synthetic oligonucleotide
gcugcuuagcaucuggcua

SEQ ID NO: 1023787 - RNA, 19 nt, Artificial Sequence
  Description of Artificial Sequence: Synthetic oligonucleotide
cagcugcaugccagguugg

SEQ ID NO: 1023788 - RNA, 19 nt, Artificial Sequence
  Description of Artificial Sequence: Synthetic oligonucleotide
cugggacaaggucugcuga

SEQ ID NO: 1023789 - RNA, 19 nt, Artificial Sequence
  Description of Artificial Sequence: Synthetic oligonucleotide
uccucauacccagguggcu

SEQ ID NO: 1023790 - RNA, 19 nt, Artificial Sequence
  Description of Artificial Sequence: Synthetic oligonucleotide
caaggucugcugagggcuc

SEQ ID NO: 1023791 - RNA, 19 nt, Artificial Sequence
  Description of Artificial Sequence: Synthetic oligonucleotide
ccaguggagcugcaagucc

SEQ ID NO: 1023792 - RNA, 19 nt, Artificial Sequence
  Description of Artificial Sequence: Synthetic oligonucleotide
aacugggucuggccagcuu

SEQ ID NO: 1023793 - RNA, 19 nt, Artificial Sequence
  Description of Artificial Sequence: Synthetic oligonucleotide
gcuucccacaaccaaccuc

SEQ ID NO: 1023794 - RNA, 19 nt, Artificial Sequence
  Description of Artificial Sequence: Synthetic oligonucleotide
cuaggccuuuugcauguga

SEQ ID NO: 1023795 - RNA, 19 nt, Artificial Sequence
  Description of Artificial Sequence: Synthetic oligonucleotide
ggccauguggcuccucaug

SEQ ID NO: 1023796 - RNA, 19 nt, Artificial Sequence
  Description of Artificial Sequence: Synthetic oligonucleotide
uagagagcuccuggagaac

SEQ ID NO: 1023797 - RNA, 19 nt, Artificial Sequence
  Description of Artificial Sequence: Synthetic oligonucleotide
ugacuggaggagccauuuu

SEQ ID NO: 1023798 - RNA, 19 nt, Artificial Sequence
  Description of Artificial Sequence: Synthetic oligonucleotide
ugacccucuugaggaagcu

SEQ ID NO: 1023799 - RNA, 19 nt, Artificial Sequence
  Description of Artificial Sequence: Synthetic oligonucleotide
cugcuuagcaucuggcuau

SEQ ID NO: 1023800 - RNA, 19 nt, Artificial Sequence
  Description of Artificial Sequence: Synthetic oligonucleotide
ugcugacuggaggagccau

SEQ ID NO: 1023801 - RNA, 19 nt, Artificial Sequence
  Description of Artificial Sequence: Synthetic oligonucleotide
cccacuuuugucccagcac

SEQ ID NO: 1023802 - RNA, 19 nt, Artificial Sequence
  Description of Artificial Sequence: Synthetic oligonucleotide
aguggacaggccagggcca

SEQ ID NO: 1023803 - RNA, 19 nt, Artificial Sequence
  Description of Artificial Sequence: Synthetic oligonucleotide
ucccuagccuagagucaga

SEQ ID NO: 1023804 - RNA, 19 nt, Artificial Sequence
  Description of Artificial Sequence: Synthetic oligonucleotide
ucgugcccacucgucagca

SEQ ID NO: 1023805 - RNA, 19 nt, Artificial Sequence
  Description of Artificial Sequence: Synthetic oligonucleotide
cucuaggcgcccugggaga

SEQ ID NO: 1023806 - RNA, 19 nt, Artificial Sequence
  Description of Artificial Sequence: Synthetic oligonucleotide
ucuaggccuuuugcaugug

SEQ ID NO: 1023807 - RNA, 19 nt, Artificial Sequence
  Description of Artificial Sequence: Synthetic oligonucleotide
auucccugcccuggaugag

SEQ ID NO: 1023808 - RNA, 19 nt, Artificial Sequence
  Description of Artificial Sequence: Synthetic oligonucleotide
caggaaucccaguggagcu

SEQ ID NO: 1023809 - RNA, 19 nt, Artificial Sequence
  Description of Artificial Sequence: Synthetic oligonucleotide
agcacacgcuggcuauggu

SEQ ID NO: 1023810 - RNA, 19 nt, Artificial Sequence
  Description of Artificial Sequence: Synthetic oligonucleotide
guaugaagucaagcagcuc

SEQ ID NO: 1023811 - RNA, 19 nt, Artificial Sequence
  Description of Artificial Sequence: Synthetic oligonucleotide
ggggcugcaaaugagggcu

SEQ ID NO: 1023812 - RNA, 19 nt, Artificial Sequence
  Description of Artificial Sequence: Synthetic oligonucleotide
cuggaagcacuucugcccu

SEQ ID NO: 1023813 - RNA, 19 nt, Artificial Sequence
  Description of Artificial Sequence: Synthetic oligonucleotide
ugcgcucuuguuggucaca

SEQ ID NO: 1023814 - RNA, 19 nt, Artificial Sequence
  Description of Artificial Sequence: Synthetic oligonucleotide
uugauggcucugucccuuu

SEQ ID NO: 1023815 - RNA, 19 nt, Artificial Sequence
  Description of Artificial Sequence: Synthetic oligonucleotide
guggagguagccacaccca

SEQ ID NO: 1023816 - RNA, 19 nt, Artificial Sequence
  Description of Artificial Sequence: Synthetic oligonucleotide
augccagguuggguacugg

SEQ ID NO: 1023817 - RNA, 19 nt, Artificial Sequence
  Description of Artificial Sequence: Synthetic oligonucleotide
uccccaacuucagacccuu

SEQ ID NO: 1023818 - RNA, 19 nt, Artificial Sequence
  Description of Artificial Sequence: Synthetic oligonucleotide
cugcgcucuuguuggucac

SEQ ID NO: 1023819 - RNA, 19 nt, Artificial Sequence
  Description of Artificial Sequence: Synthetic oligonucleotide
cuccacucugaauaagaau

SEQ ID NO: 1023820 - RNA, 19 nt, Artificial Sequence
  Description of Artificial Sequence: Synthetic oligonucleotide
cagacccuucccuagccua

SEQ ID NO: 1023821 - RNA, 19 nt, Artificial Sequence
  Description of Artificial Sequence: Synthetic oligonucleotide
cuuaggcugcugacucaca

SEQ ID NO: 1023822 - RNA, 19 nt, Artificial Sequence
  Description of Artificial Sequence: Synthetic oligonucleotide
cccagucacagguagcaca

SEQ ID NO: 1023823 - RNA, 19 nt, Artificial Sequence
  Description of Artificial Sequence: Synthetic oligonucleotide
gagugacccucuugaggaa

SEQ ID NO: 1023824 - RNA, 19 nt, Artificial Sequence
  Description of Artificial Sequence: Synthetic oligonucleotide
ucuggcuauggaggucauc

SEQ ID NO: 1023825 - RNA, 19 nt, Artificial Sequence
  Description of Artificial Sequence: Synthetic oligonucleotide
gaucuggcucgagguggcc

SEQ ID NO: 1023826 - RNA, 19 nt, Artificial Sequence
  Description of Artificial Sequence: Synthetic oligonucleotide
acucgucagcaguggcagu

SEQ ID NO: 1023827 - RNA, 19 nt, Artificial Sequence
  Description of Artificial Sequence: Synthetic oligonucleotide
ucauacccagguggcuccu

SEQ ID NO: 1023828 - RNA, 19 nt, Artificial Sequence
  Description of Artificial Sequence: Synthetic oligonucleotide
cccagaguuuguuucuuga

SEQ ID NO: 1023829 - RNA, 19 nt, Artificial Sequence
  Description of Artificial Sequence: Synthetic oligonucleotide
cuucagcagaugugcaccu

SEQ ID NO: 1023830 - RNA, 19 nt, Artificial Sequence
  Description of Artificial Sequence: Synthetic oligonucleotide
caaguauagccaggaccca

SEQ ID NO: 1023831 - RNA, 19 nt, Artificial Sequence
  Description of Artificial Sequence: Synthetic oligonucleotide
agagccaggcugggacaag

SEQ ID NO: 1023832 - RNA, 19 nt, Artificial Sequence
  Description of Artificial Sequence: Synthetic oligonucleotide
ggcuaugguucuguggcuc

SEQ ID NO: 1023833 - RNA, 19 nt, Artificial Sequence
  Description of Artificial Sequence: Synthetic oligonucleotide
gggacggaauguggguggg

SEQ ID NO: 1023834 - RNA, 19 nt, Artificial Sequence
  Description of Artificial Sequence: Synthetic oligonucleotide
uaggcgcccugggagaguu

SEQ ID NO: 1023835 - RNA, 19 nt, Artificial Sequence
  Description of Artificial Sequence: Synthetic oligonucleotide
ccucauacccagguggcuc

SEQ ID NO: 1023836 - RNA, 19 nt, Artificial Sequence
  Description of Artificial Sequence: Synthetic oligonucleotide
gcuuagcaucuggcuaugg

SEQ ID NO: 1023837 - RNA, 19 nt, Artificial Sequence
  Description of Artificial Sequence: Synthetic oligonucleotide
ccuggggaaguucauucga

SEQ ID NO: 1023838 - RNA, 19 nt, Artificial Sequence
  Description of Artificial Sequence: Synthetic oligonucleotide
acgcuggcuaugguucugu

SEQ ID NO: 1023839 - RNA, 19 nt, Artificial Sequence
  Description of Artificial Sequence: Synthetic oligonucleotide
gaagcacuucugcccuugu

SEQ ID NO: 1023840 - RNA, 19 nt, Artificial Sequence
  Description of Artificial Sequence: Synthetic oligonucleotide
ucugcccuuguggcacuaa

SEQ ID NO: 1023841 - RNA, 19 nt, Artificial Sequence
  Description of Artificial Sequence: Synthetic oligonucleotide
gugaaagcagguggaggua

SEQ ID NO: 1023842 - RNA, 19 nt, Artificial Sequence
  Description of Artificial Sequence: Synthetic oligonucleotide
gguagcacacgcuggcuau

SEQ ID NO: 1023843 - RNA, 19 nt, Artificial Sequence
  Description of Artificial Sequence: Synthetic oligonucleotide
ccugcccuggaugagccug

SEQ ID NO: 1023844 - RNA, 19 nt, Artificial Sequence
  Description of Artificial Sequence: Synthetic oligonucleotide
cagagcugcuuagcaucug

SEQ ID NO: 1023845 - RNA, 19 nt, Artificial Sequence
  Description of Artificial Sequence: Synthetic oligonucleotide
gucacagguagcacacgcu

SEQ ID NO: 1023846 - RNA, 19 nt, Artificial Sequence
  Description of Artificial Sequence: Synthetic oligonucleotide
cacgcuggcuaugguucug

SEQ ID NO: 1023847 - RNA, 19 nt, Artificial Sequence
  Description of Artificial Sequence: Synthetic oligonucleotide
gagagcuccuggagaaccu

SEQ ID NO: 1023848 - RNA, 19 nt, Artificial Sequence
  Description of Artificial Sequence: Synthetic oligonucleotide
aggauggcguguaggcaau

SEQ ID NO: 1023849 - RNA, 19 nt, Artificial Sequence
  Description of Artificial Sequence: Synthetic oligonucleotide
ccuucgugcccacucguca

SEQ ID NO: 1023850 - RNA, 19 nt, Artificial Sequence
  Description of Artificial Sequence: Synthetic oligonucleotide
cagcaguggcagucccgug

SEQ ID NO: 1023851 - RNA, 19 nt, Artificial Sequence
  Description of Artificial Sequence: Synthetic oligonucleotide
cccacucgucagcaguggc

SEQ ID NO: 1023852 - RNA, 19 nt, Artificial Sequence
  Description of Artificial Sequence: Synthetic oligonucleotide
ccacucgucagcaguggca

SEQ ID NO: 1023853 - RNA, 19 nt, Artificial Sequence
  Description of Artificial Sequence: Synthetic oligonucleotide
guuggguacugggccaugu

SEQ ID NO: 1023854 - RNA, 19 nt, Artificial Sequence
  Description of Artificial Sequence: Synthetic oligonucleotide
cagucccgugcugcuuucc

SEQ ID NO: 1023855 - RNA, 19 nt, Artificial Sequence
  Description of Artificial Sequence: Synthetic oligonucleotide
uggcucgagguggcccagc

SEQ ID NO: 1023856 - RNA, 19 nt, Artificial Sequence
  Description of Artificial Sequence: Synthetic oligonucleotide
gugcccugugggcccaaga

SEQ ID NO: 1023857 - RNA, 19 nt, Artificial Sequence
  Description of Artificial Sequence: Synthetic oligonucleotide
gcaggauggcguguaggca

SEQ ID NO: 1023858 - RNA, 19 nt, Artificial Sequence
  Description of Artificial Sequence: Synthetic oligonucleotide
gccuaggcagcugcaugcc

SEQ ID NO: 1023859 - RNA, 19 nt, Artificial Sequence
  Description of Artificial Sequence: Synthetic oligonucleotide
caauggcaggugucugucu

SEQ ID NO: 1023860 - RNA, 19 nt, Artificial Sequence
  Description of Artificial Sequence: Synthetic oligonucleotide
ccauaccacugcugggcuc

SEQ ID NO: 1023861 - RNA, 19 nt, Artificial Sequence
  Description of Artificial Sequence: Synthetic oligonucleotide
gggucuggccagcuuccca

SEQ ID NO: 1023862 - RNA, 19 nt, Artificial Sequence
  Description of Artificial Sequence: Synthetic oligonucleotide
cuggcucgagguggcccag

SEQ ID NO: 1023863 - RNA, 19 nt, Artificial Sequence
  Description of Artificial Sequence: Synthetic oligonucleotide
ccuagccuagagucagaga

SEQ ID NO: 1023864 - RNA, 19 nt, Artificial Sequence
  Description of Artificial Sequence: Synthetic oligonucleotide
cggcuuguauucccugccc

SEQ ID NO: 1023865 - RNA, 19 nt, Artificial Sequence
  Description of Artificial Sequence: Synthetic oligonucleotide
ccguggagaagaggcuggg

SEQ ID NO: 1023866 - RNA, 19 nt, Artificial Sequence
  Description of Artificial Sequence: Synthetic oligonucleotide
cugacuggaggagccauuu

SEQ ID NO: 1023867 - RNA, 19 nt, Artificial Sequence
  Description of Artificial Sequence: Synthetic oligonucleotide
gugcaccucugaccucaga

SEQ ID NO: 1023868 - RNA, 19 nt, Artificial Sequence
  Description of Artificial Sequence: Synthetic oligonucleotide
uucugcccuuguggcacua

SEQ ID NO: 1023869 - RNA, 19 nt, Artificial Sequence
  Description of Artificial Sequence: Synthetic oligonucleotide
ggcugcaaaugagggcuga

SEQ ID NO: 1023870 - RNA, 19 nt, Artificial Sequence
  Description of Artificial Sequence: Synthetic oligonucleotide
gcaucuggcuauggagguc

SEQ ID NO: 1023871 - RNA, 19 nt, Artificial Sequence
  Description of Artificial Sequence: Synthetic oligonucleotide
cgucagcaguggcaguccc

SEQ ID NO: 1023872 - RNA, 19 nt, Artificial Sequence
  Description of Artificial Sequence: Synthetic oligonucleotide
cccuucgugcccacucguc

SEQ ID NO: 1023873 - RNA, 19 nt, Artificial Sequence
  Description of Artificial Sequence: Synthetic oligonucleotide
ggaugaggugagucccugu

SEQ ID NO: 1023874 - RNA, 19 nt, Artificial Sequence
  Description of Artificial Sequence: Synthetic oligonucleotide
gguugggcagaagguaccu

SEQ ID NO: 1023875 - RNA, 19 nt, Artificial Sequence
  Description of Artificial Sequence: Synthetic oligonucleotide
ccccacuuuugucccagca

SEQ ID NO: 1023876 - RNA, 19 nt, Artificial Sequence
  Description of Artificial Sequence: Synthetic oligonucleotide
gcaauucagagguguccau

SEQ ID NO: 1023877 - RNA, 19 nt, Artificial Sequence
  Description of Artificial Sequence: Synthetic oligonucleotide
gaacugggucuggccagcu

SEQ ID NO: 1023878 - RNA, 19 nt, Artificial Sequence
  Description of Artificial Sequence: Synthetic oligonucleotide
gcacacgcuggcuaugguu

SEQ ID NO: 1023879 - RNA, 19 nt, Artificial Sequence
  Description of Artificial Sequence: Synthetic oligonucleotide
guguagggucuuggcugca

SEQ ID NO: 1023880 - RNA, 19 nt, Artificial Sequence
  Description of Artificial Sequence: Synthetic oligonucleotide
cuucugcccuuguggcacu

SEQ ID NO: 1023881 - RNA, 19 nt, Artificial Sequence
  Description of Artificial Sequence: Synthetic oligonucleotide
ggcagucccgugcugcuuu

SEQ ID NO: 1023882 - RNA, 19 nt, Artificial Sequence
  Description of Artificial Sequence: Synthetic oligonucleotide
cagguagcacacgcuggcu

SEQ ID NO: 1023883 - RNA, 19 nt, Artificial Sequence
  Description of Artificial Sequence: Synthetic oligonucleotide
gcugcaugccagguugggu

SEQ ID NO: 1023884 - RNA, 19 nt, Artificial Sequence
  Description of Artificial Sequence: Synthetic oligonucleotide
caugggcccagaguuuguu

SEQ ID NO: 1023885 - RNA, 19 nt, Artificial Sequence
  Description of Artificial Sequence: Synthetic oligonucleotide
cagcaugggcccagaguuu

SEQ ID NO: 1023886 - RNA, 19 nt, Artificial Sequence
  Description of Artificial Sequence: Synthetic oligonucleotide
gagucccuguagagucagu

SEQ ID NO: 1023887 - RNA, 19 nt, Artificial Sequence
  Description of Artificial Sequence: Synthetic oligonucleotide
gguagggaugguggcuccu

SEQ ID NO: 1023888 - RNA, 19 nt, Artificial Sequence
  Description of Artificial Sequence: Synthetic oligonucleotide
ggagguagccacacccauu

SEQ ID NO: 1023889 - RNA, 19 nt, Artificial Sequence
  Description of Artificial Sequence: Synthetic oligonucleotide
ggcccagaucuggcucgag

SEQ ID NO: 1023890 - RNA, 19 nt, Artificial Sequence
  Description of Artificial Sequence: Synthetic oligonucleotide
aggcgcccugggagaguug

SEQ ID NO: 1023891 - RNA, 19 nt, Artificial Sequence
  Description of Artificial Sequence: Synthetic oligonucleotide
gggguaggccuaggcagcu

SEQ ID NO: 1023892 - RNA, 19 nt, Artificial Sequence
  Description of Artificial Sequence: Synthetic oligonucleotide
gcccuucgugcccacucgu

SEQ ID NO: 1023893 - RNA, 19 nt, Artificial Sequence
  Description of Artificial Sequence: Synthetic oligonucleotide
ccgugcugcuuuccagaaa

SEQ ID NO: 1023894 - RNA, 19 nt, Artificial Sequence
  Description of Artificial Sequence: Synthetic oligonucleotide
cuaggcgcccugggagagu

SEQ ID NO: 1023895 - RNA, 19 nt, Artificial Sequence
  Description of Artificial Sequence: Synthetic oligonucleotide
ggacggaaugugggugggu

SEQ ID NO: 1023896 - RNA, 19 nt, Artificial Sequence
  Description of Artificial Sequence: Synthetic oligonucleotide
ccugagccagguguagggu

SEQ ID NO: 1023897 - RNA, 19 nt, Artificial Sequence
  Description of Artificial Sequence: Synthetic oligonucleotide
ggagcagccuggggaaguu

SEQ ID NO: 1023898 - RNA, 19 nt, Artificial Sequence
  Description of Artificial Sequence: Synthetic oligonucleotide
cauacccagguggcuccuu

SEQ ID NO: 1023899 - RNA, 19 nt, Artificial Sequence
  Description of Artificial Sequence: Synthetic oligonucleotide
gugggugcuccagguccau

SEQ ID NO: 1023900 - RNA, 19 nt, Artificial Sequence
  Description of Artificial Sequence: Synthetic oligonucleotide
gcaugggcccagaguuugu

SEQ ID NO: 1023901 - RNA, 19 nt, Artificial Sequence
  Description of Artificial Sequence: Synthetic oligonucleotide
cuggcccuucgugcccacu

SEQ ID NO: 1023902 - RNA, 19 nt, Artificial Sequence
  Description of Artificial Sequence: Synthetic oligonucleotide
cagguccaucugggcaggu

SEQ ID NO: 1023903 - RNA, 19 nt, Artificial Sequence
  Description of Artificial Sequence: Synthetic oligonucleotide
cgagguggcccagcuuccu

SEQ ID NO: 1023904 - RNA, 19 nt, Artificial Sequence
  Description of Artificial Sequence: Synthetic oligonucleotide
uguaacuggagacugaucc

SEQ ID NO: 1023905 - RNA, 19 nt, Artificial Sequence
  Description of Artificial Sequence: Synthetic oligonucleotide
aacucuaacacauccggcg

SEQ ID NO: 1023906 - RNA, 19 nt, Artificial Sequence
  Description of Artificial Sequence: Synthetic oligonucleotide
aaugaguugucacugccac

SEQ ID NO: 1023907 - RNA, 19 nt, Artificial Sequence
  Description of Artificial Sequence: Synthetic oligonucleotide
cugaauauugcucaggagg

SEQ ID NO: 1023908 - RNA, 19 nt, Artificial Sequence
  Description of Artificial Sequence: Synthetic oligonucleotide
ugaacucuaacacauccgg

SEQ ID NO: 1023909 - RNA, 19 nt, Artificial Sequence
  Description of Artificial Sequence: Synthetic oligonucleotide
uguagcuaggugcauagcg

SEQ ID NO: 1023910 - RNA, 19 nt, Artificial Sequence
  Description of Artificial Sequence: Synthetic oligonucleotide
agaguacugagccaguccc

SEQ ID NO: 1023911 - RNA, 19 nt, Artificial Sequence
  Description of Artificial Sequence: Synthetic oligonucleotide
cuguauacagagaaggucc

SEQ ID NO: 1023912 - RNA, 19 nt, Artificial Sequence
  Description of Artificial Sequence: Synthetic oligonucleotide
aggcuaaucuuaaugaugc

SEQ ID NO: 1023913 - RNA, 19 nt, Artificial Sequence
  Description of Artificial Sequence: Synthetic oligonucleotide
ugaauauugcucaggaggu

SEQ ID NO: 1023914 - RNA, 19 nt, Artificial Sequence
  Description of Artificial Sequence: Synthetic oligonucleotide
ucuaccacacgcuucauga

SEQ ID NO: 1023915 - RNA, 19 nt, Artificial Sequence
  Description of Artificial Sequence: Synthetic oligonucleotide
ugugauaugacgaggcccu

SEQ ID NO: 1023916 - RNA, 19 nt, Artificial Sequence
  Description of Artificial Sequence: Synthetic oligonucleotide
gaacacaucaauucguuca

SEQ ID NO: 1023917 - RNA, 19 nt, Artificial Sequence
  Description of Artificial Sequence: Synthetic oligonucleotide
uucaggcuaaucuuaauga

SEQ ID NO: 1023918 - RNA, 19 nt, Artificial Sequence
  Description of Artificial Sequence: Synthetic oligonucleotide
uaugacgaggcccugcacc

SEQ ID NO: 1023919 - RNA, 19 nt, Artificial Sequence
  Description of Artificial Sequence: Synthetic oligonucleotide
auagugagucagcagucgc

SEQ ID NO: 1023920 - RNA, 19 nt, Artificial Sequence
  Description of Artificial Sequence: Synthetic oligonucleotide
acauggagcggaugaaacc

SEQ ID NO: 1023921 - RNA, 19 nt, Artificial Sequence
  Description of Artificial Sequence: Synthetic oligonucleotide
cugucuggcacauggagcg

SEQ ID NO: 1023922 - RNA, 19 nt, Artificial Sequence
  Description of Artificial Sequence: Synthetic oligonucleotide
uguguagcuaggugcauag

SEQ ID NO: 1023923 - RNA, 19 nt, Artificial Sequence
  Description of Artificial Sequence: Synthetic oligonucleotide
cuugcugcagcccgaaucg

SEQ ID NO: 1023924 - RNA, 19 nt, Artificial Sequence
  Description of Artificial Sequence: Synthetic oligonucleotide
uacgcagucgcacacacuc

SEQ ID NO: 1023925 - RNA, 19 nt, Artificial Sequence
  Description of Artificial Sequence: Synthetic oligonucleotide
aguacaaaguagcgaccgc

SEQ ID NO: 1023926 - RNA, 19 nt, Artificial Sequence
  Description of Artificial Sequence: Synthetic oligonucleotide
uguccaucggagcacuggg

SEQ ID NO: 1023927 - RNA, 19 nt, Artificial Sequence
  Description of Artificial Sequence: Synthetic oligonucleotide
acggaaggagggcaggugc

SEQ ID NO: 1023928 - RNA, 19 nt, Artificial Sequence
  Description of Artificial Sequence: Synthetic oligonucleotide
accagcaaugaguugucac

SEQ ID NO: 1023929 - RNA, 19 nt, Artificial Sequence
  Description of Artificial Sequence: Synthetic oligonucleotide
cacgaugaggcccucacgg

SEQ ID NO: 1023930 - RNA, 19 nt, Artificial Sequence
  Description of Artificial Sequence: Synthetic oligonucleotide
caaagcgccacaaguagag

SEQ ID NO: 1023931 - RNA, 19 nt, Artificial Sequence
  Description of Artificial Sequence: Synthetic oligonucleotide
gaugaccucgacaacacug

SEQ ID NO: 1023932 - RNA, 19 nt, Artificial Sequence
  Description of Artificial Sequence: Synthetic oligonucleotide
agcgucuucaggcuaaucu

SEQ ID NO: 1023933 - RNA, 19 nt, Artificial Sequence
  Description of Artificial Sequence: Synthetic oligonucleotide
cuguucgucagucagggug

SEQ ID NO: 1023934 - RNA, 19 nt, Artificial Sequence
  Description of Artificial Sequence: Synthetic oligonucleotide
uggcuuaggauggagcugg

SEQ ID NO: 1023935 - RNA, 19 nt, Artificial Sequence
  Description of Artificial Sequence: Synthetic oligonucleotide
ugcagauggugacucaggc

SEQ ID NO: 1023936 - RNA, 19 nt, Artificial Sequence
  Description of Artificial Sequence: Synthetic oligonucleotide
acaucaauagcugucgugu

SEQ ID NO: 1023937 - RNA, 19 nt, Artificial Sequence
  Description of Artificial Sequence: Synthetic oligonucleotide
ucugugauaugacgaggcc

SEQ ID NO: 1023938 - RNA, 19 nt, Artificial Sequence
  Description of Artificial Sequence: Synthetic oligonucleotide
uguucgucagucaggguga

SEQ ID NO: 1023939 - RNA, 19 nt, Artificial Sequence
  Description of Artificial Sequence: Synthetic oligonucleotide
uacaucaauagcugucgug

SEQ ID NO: 1023940 - RNA, 19 nt, Artificial Sequence
  Description of Artificial Sequence: Synthetic oligonucleotide
caugacagcacgcacguuc

SEQ ID NO: 1023941 - RNA, 19 nt, Artificial Sequence
  Description of Artificial Sequence: Synthetic oligonucleotide
uguauacagagaagguccu

SEQ ID NO: 1023942 - RNA, 19 nt, Artificial Sequence
  Description of Artificial Sequence: Synthetic oligonucleotide
ucaauucguucagagaaca

SEQ ID NO: 1023943 - RNA, 19 nt, Artificial Sequence
  Description of Artificial Sequence: Synthetic oligonucleotide
cacgcuucaugacagcacg

SEQ ID NO: 1023944 - RNA, 19 nt, Artificial Sequence
  Description of Artificial Sequence: Synthetic oligonucleotide
caggcuaaucuuaaugaug

SEQ ID NO: 1023945 - RNA, 19 nt, Artificial Sequence
  Description of Artificial Sequence: Synthetic oligonucleotide
gaaacccacgaugaggccc

SEQ ID NO: 1023946 - RNA, 19 nt, Artificial Sequence
  Description of Artificial Sequence: Synthetic oligonucleotide
ucuugcguagcaucuguga

SEQ ID NO: 1023947 - RNA, 19 nt, Artificial Sequence
  Description of Artificial Sequence: Synthetic oligonucleotide
uuuugcuagagucgcugcu

SEQ ID NO: 1023948 - RNA, 19 nt, Artificial Sequence
  Description of Artificial Sequence: Synthetic oligonucleotide
guagcuaggugcauagcgg

SEQ ID NO: 1023949 - RNA, 19 nt, Artificial Sequence
  Description of Artificial Sequence: Synthetic oligonucleotide
agugagucagcagucgccg

SEQ ID NO: 1023950 - RNA, 19 nt, Artificial Sequence
  Description of Artificial Sequence: Synthetic oligonucleotide
aaagcgccacaaguagagc

SEQ ID NO: 1023951 - RNA, 19 nt, Artificial Sequence
  Description of Artificial Sequence: Synthetic oligonucleotide
cuuaggauggagcuggcca

SEQ ID NO: 1023952 - RNA, 19 nt, Artificial Sequence
  Description of Artificial Sequence: Synthetic oligonucleotide
augaguugucacugccacc

SEQ ID NO: 1023953 - RNA, 19 nt, Artificial Sequence
  Description of Artificial Sequence: Synthetic oligonucleotide
acacauccggcgcuggugg

SEQ ID NO: 1023954 - RNA, 19 nt, Artificial Sequence
  Description of Artificial Sequence: Synthetic oligonucleotide
cacagguguaacuggagac

SEQ ID NO: 1023955 - RNA, 19 nt, Artificial Sequence
  Description of Artificial Sequence: Synthetic oligonucleotide
ucaggcuaaucuuaaugau

SEQ ID NO: 1023956 - RNA, 19 nt, Artificial Sequence
  Description of Artificial Sequence: Synthetic oligonucleotide
acagaugaccucgacaaca

SEQ ID NO: 1023957 - RNA, 19 nt, Artificial Sequence
  Description of Artificial Sequence: Synthetic oligonucleotide
ucagcagucgccgugcugu

SEQ ID NO: 1023958 - RNA, 19 nt, Artificial Sequence
  Description of Artificial Sequence: Synthetic oligonucleotide
aguagcgaccgcccaacuc

SEQ ID NO: 1023959 - RNA, 19 nt, Artificial Sequence
  Description of Artificial Sequence: Synthetic oligonucleotide
gguggaagcgaucuagugc

SEQ ID NO: 1023960 - RNA, 19 nt, Artificial Sequence
  Description of Artificial Sequence: Synthetic oligonucleotide
cucgacaacacuggguucc

SEQ ID NO: 1023961 - RNA, 19 nt, Artificial Sequence
  Description of Artificial Sequence: Synthetic oligonucleotide
agagucgcugcucugggcu

SEQ ID NO: 1023962 - RNA, 19 nt, Artificial Sequence
  Description of Artificial Sequence: Synthetic oligonucleotide
gauaugacgaggcccugca

SEQ ID NO: 1023963 - RNA, 19 nt, Artificial Sequence
  Description of Artificial Sequence: Synthetic oligonucleotide
gcgaacaucugucaggcag

SEQ ID NO: 1023964 - RNA, 19 nt, Artificial Sequence
  Description of Artificial Sequence: Synthetic oligonucleotide
uugguagagccuagccgcg

SEQ ID NO: 1023965 - RNA, 19 nt, Artificial Sequence
  Description of Artificial Sequence: Synthetic oligonucleotide
auggguaccggguccggac

SEQ ID NO: 1023966 - RNA, 19 nt, Artificial Sequence
  Description of Artificial Sequence: Synthetic oligonucleotide
cacuagcuccucaucagcc

SEQ ID NO: 1023967 - RNA, 19 nt, Artificial Sequence
  Description of Artificial Sequence: Synthetic oligonucleotide
uaaugaugccagucaacac

SEQ ID NO: 1023968 - RNA, 19 nt, Artificial Sequence
  Description of Artificial Sequence: Synthetic oligonucleotide
ugaccucgacaacacuggg

SEQ ID NO: 1023969 - RNA, 19 nt, Artificial Sequence
  Description of Artificial Sequence: Synthetic oligonucleotide
cauagugagucagcagucg

SEQ ID NO: 1023970 - RNA, 19 nt, Artificial Sequence
  Description of Artificial Sequence: Synthetic oligonucleotide
cugugauaugacgaggccc

SEQ ID NO: 1023971 - RNA, 19 nt, Artificial Sequence
  Description of Artificial Sequence: Synthetic oligonucleotide
uugcucaggagguuugugu

SEQ ID NO: 1023972 - RNA, 19 nt, Artificial Sequence
  Description of Artificial Sequence: Synthetic oligonucleotide
accucgacaacacuggguu

SEQ ID NO: 1023973 - RNA, 19 nt, Artificial Sequence
  Description of Artificial Sequence: Synthetic oligonucleotide
gaugccagucaacaccgac

SEQ ID NO: 1023974 - RNA, 19 nt, Artificial Sequence
  Description of Artificial Sequence: Synthetic oligonucleotide
augcacuagcuccucauca

SEQ ID NO: 1023975 - RNA, 19 nt, Artificial Sequence
  Description of Artificial Sequence: Synthetic oligonucleotide
augaccucgacaacacugg

SEQ ID NO: 1023976 - RNA, 19 nt, Artificial Sequence
  Description of Artificial Sequence: Synthetic oligonucleotide
agcaguagaagcagggcag

SEQ ID NO: 1023977 - RNA, 19 nt, Artificial Sequence
  Description of Artificial Sequence: Synthetic oligonucleotide
guacucacagguguaacug

SEQ ID NO: 1023978 - RNA, 19 nt, Artificial Sequence
  Description of Artificial Sequence: Synthetic oligonucleotide
uagggcugccccgugacgg

SEQ ID NO: 1023979 - RNA, 19 nt, Artificial Sequence
  Description of Artificial Sequence: Synthetic oligonucleotide
gaacucaccccggaaguag

SEQ ID NO: 1023980 - RNA, 19 nt, Artificial Sequence
  Description of Artificial Sequence: Synthetic oligonucleotide
aaguagagcugcaggaagu

SEQ ID NO: 1023981 - RNA, 19 nt, Artificial Sequence
  Description of Artificial Sequence: Synthetic oligonucleotide
agcgaucuagugcccguac

SEQ ID NO: 1023982 - RNA, 19 nt, Artificial Sequence
  Description of Artificial Sequence: Synthetic oligonucleotide
accgacaccuuguugaauu

SEQ ID NO: 1023983 - RNA, 19 nt, Artificial Sequence
  Description of Artificial Sequence: Synthetic oligonucleotide
acugaacacaucaauucgu

SEQ ID NO: 1023984 - RNA, 19 nt, Artificial Sequence
  Description of Artificial Sequence: Synthetic oligonucleotide
agcugucguguccucuacc

SEQ ID NO: 1023985 - RNA, 19 nt, Artificial Sequence
  Description of Artificial Sequence: Synthetic oligonucleotide
gagcggaugaaacccacga

SEQ ID NO: 1023986 - RNA, 19 nt, Artificial Sequence
  Description of Artificial Sequence: Synthetic oligonucleotide
cuagagucgcugcucuggg

SEQ ID NO: 1023987 - RNA, 19 nt, Artificial Sequence
  Description of Artificial Sequence: Synthetic oligonucleotide
cuccagaguacugagccag

SEQ ID NO: 1023988 - RNA, 19 nt, Artificial Sequence
  Description of Artificial Sequence: Synthetic oligonucleotide
cacacucuugcguagcauc

SEQ ID NO: 1023989 - RNA, 19 nt, Artificial Sequence
  Description of Artificial Sequence: Synthetic oligonucleotide
ucuaacacauccggcgcug

SEQ ID NO: 1023990 - RNA, 19 nt, Artificial Sequence
  Description of Artificial Sequence: Synthetic oligonucleotide
agccuagccgcgcucacag

SEQ ID NO: 1023991 - RNA, 19 nt, Artificial Sequence
  Description of Artificial Sequence: Synthetic oligonucleotide
gaacucuaacacauccggc

SEQ ID NO: 1023992 - RNA, 19 nt, Artificial Sequence
  Description of Artificial Sequence: Synthetic oligonucleotide
cacauagugagucagcagu

SEQ ID NO: 1023993 - RNA, 19 nt, Artificial Sequence
  Description of Artificial Sequence: Synthetic oligonucleotide
auaugacgaggcccugcac

SEQ ID NO: 1023994 - RNA, 19 nt, Artificial Sequence
  Description of Artificial Sequence: Synthetic oligonucleotide
uggggagggccccagcuca

SEQ ID NO: 1023995 - RNA, 19 nt, Artificial Sequence
  Description of Artificial Sequence: Synthetic oligonucleotide
uuugcuagagucgcugcuc

SEQ ID NO: 1023996 - RNA, 19 nt, Artificial Sequence
  Description of Artificial Sequence: Synthetic oligonucleotide
gacagcgaagggcagcuga

SEQ ID NO: 1023997 - RNA, 19 nt, Artificial Sequence
  Description of Artificial Sequence: Synthetic oligonucleotide
ugacucaggcgcucucggg

SEQ ID NO: 1023998 - RNA, 19 nt, Artificial Sequence
  Description of Artificial Sequence: Synthetic oligonucleotide
uccagggcugucacagaag

SEQ ID NO: 1023999 - RNA, 19 nt, Artificial Sequence
  Description of Artificial Sequence: Synthetic oligonucleotide
cucacggacucccuggcug

SEQ ID NO: 1024000 - RNA, 19 nt, Artificial Sequence
  Description of Artificial Sequence: Synthetic oligonucleotide
cucacagguguaacuggag

SEQ ID NO: 1024001 - RNA, 19 nt, Artificial Sequence
  Description of Artificial Sequence: Synthetic oligonucleotide
ugauaugacgaggcccugc

SEQ ID NO: 1024002 - RNA, 19 nt, Artificial Sequence
  Description of Artificial Sequence: Synthetic oligonucleotide
aggcccugcaccuucacau

SEQ ID NO: 1024003 - RNA, 19 nt, Artificial Sequence
  Description of Artificial Sequence: Synthetic oligonucleotide
ucuccacacucuugcguag

SEQ ID NO: 1024004 - RNA, 19 nt, Artificial Sequence
  Description of Artificial Sequence: Synthetic oligonucleotide
aacucacgcgcgaaggcug

SEQ ID NO: 1024005 - RNA, 19 nt, Artificial Sequence
  Description of Artificial Sequence: Synthetic oligonucleotide
uccacacucuugcguagca

SEQ ID NO: 1024006 - RNA, 19 nt, Artificial Sequence
  Description of Artificial Sequence: Synthetic oligonucleotide
agcccgaaucgcccaaagg

SEQ ID NO: 1024007 - RNA, 19 nt, Artificial Sequence
  Description of Artificial Sequence: Synthetic oligonucleotide
ugaaacccacgaugaggcc

SEQ ID NO: 1024008 - RNA, 19 nt, Artificial Sequence
  Description of Artificial Sequence: Synthetic oligonucleotide
gugacucaggcgcucucgg

SEQ ID NO: 1024009 - RNA, 19 nt, Artificial Sequence
  Description of Artificial Sequence: Synthetic oligonucleotide
ugcccguaccagcaaugag

SEQ ID NO: 1024010 - RNA, 19 nt, Artificial Sequence
  Description of Artificial Sequence: Synthetic oligonucleotide
uugcguagcaucugugaua

SEQ ID NO: 1024011 - RNA, 19 nt, Artificial Sequence
  Description of Artificial Sequence: Synthetic oligonucleotide
gucgcacacacuccaggag

SEQ ID NO: 1024012 - RNA, 19 nt, Artificial Sequence
  Description of Artificial Sequence: Synthetic oligonucleotide
aagccauugccaccccggu

SEQ ID NO: 1024013 - RNA, 19 nt, Artificial Sequence
  Description of Artificial Sequence: Synthetic oligonucleotide
gaguacugagccagucccg

SEQ ID NO: 1024014 - RNA, 19 nt, Artificial Sequence
  Description of Artificial Sequence: Synthetic oligonucleotide
gaccgcccaacucacgcgc

SEQ ID NO: 1024015 - RNA, 19 nt, Artificial Sequence
  Description of Artificial Sequence: Synthetic oligonucleotide
ucacggacucccuggcugc

SEQ ID NO: 1024016 - RNA, 19 nt, Artificial Sequence
  Description of Artificial Sequence: Synthetic oligonucleotide
ugacggcguugguagagcc

SEQ ID NO: 1024017 - RNA, 19 nt, Artificial Sequence
  Description of Artificial Sequence: Synthetic oligonucleotide
agcuaggugcauagcggcc

SEQ ID NO: 1024018 - RNA, 19 nt, Artificial Sequence
  Description of Artificial Sequence: Synthetic oligonucleotide
gcuaaucuuaaugaugcca

SEQ ID NO: 1024019 - RNA, 19 nt, Artificial Sequence
  Description of Artificial Sequence: Synthetic oligonucleotide
aggugcauagcggcccugc

SEQ ID NO: 1024020 - RNA, 19 nt, Artificial Sequence
  Description of Artificial Sequence: Synthetic oligonucleotide
ucgcccaaagguacgcagu

SEQ ID NO: 1024021 - RNA, 19 nt, Artificial Sequence
  Description of Artificial Sequence: Synthetic oligonucleotide
caucaauagcugucguguc

SEQ ID NO: 1024022 - RNA, 19 nt, Artificial Sequence
  Description of Artificial Sequence: Synthetic oligonucleotide
aagguccuuuugcuagagu

SEQ ID NO: 1024023 - RNA, 19 nt, Artificial Sequence
  Description of Artificial Sequence: Synthetic oligonucleotide
uggcggacucugaaagccc

SEQ ID NO: 1024024 - RNA, 19 nt, Artificial Sequence
  Description of Artificial Sequence: Synthetic oligonucleotide
cagcaguagaagcagggca

SEQ ID NO: 1024025 - RNA, 19 nt, Artificial Sequence
  Description of Artificial Sequence: Synthetic oligonucleotide
ugcacccgagccaaccuuc

SEQ ID NO: 1024026 - RNA, 19 nt, Artificial Sequence
  Description of Artificial Sequence: Synthetic oligonucleotide
uggagcggaugaaacccac

SEQ ID NO: 1024027 - RNA, 19 nt, Artificial Sequence
  Description of Artificial Sequence: Synthetic oligonucleotide
auagcugucguguccucua

SEQ ID NO: 1024028 - RNA, 19 nt, Artificial Sequence
  Description of Artificial Sequence: Synthetic oligonucleotide
ggauaggacaauagggcug

SEQ ID NO: 1024029 - RNA, 19 nt, Artificial Sequence
  Description of Artificial Sequence: Synthetic oligonucleotide
uaggagaugguggcugucu

SEQ ID NO: 1024030 - RNA, 19 nt, Artificial Sequence
  Description of Artificial Sequence: Synthetic oligonucleotide
gcggacacccucuucauac

SEQ ID NO: 1024031 - RNA, 19 nt, Artificial Sequence
  Description of Artificial Sequence: Synthetic oligonucleotide
cagacuggggcccuccuuc

SEQ ID NO: 1024032 - RNA, 19 nt, Artificial Sequence
  Description of Artificial Sequence: Synthetic oligonucleotide
accacuucgucuagcagca

SEQ ID NO: 1024033 - RNA, 19 nt, Artificial Sequence
  Description of Artificial Sequence: Synthetic oligonucleotide
ggacaauagggcugccccg

SEQ ID NO: 1024034 - RNA, 19 nt, Artificial Sequence
  Description of Artificial Sequence: Synthetic oligonucleotide
cuuguuggagaaggacacc

SEQ ID NO: 1024035 - RNA, 19 nt, Artificial Sequence
  Description of Artificial Sequence: Synthetic oligonucleotide
cuaccacuucgucuagcag

SEQ ID NO: 1024036 - RNA, 19 nt, Artificial Sequence
  Description of Artificial Sequence: Synthetic oligonucleotide
gcuguauacagagaagguc

SEQ ID NO: 1024037 - RNA, 19 nt, Artificial Sequence
  Description of Artificial Sequence: Synthetic oligonucleotide
ugccccgugacggcguugg

SEQ ID NO: 1024038 - RNA, 19 nt, Artificial Sequence
  Description of Artificial Sequence: Synthetic oligonucleotide
gcuagagucgcugcucugg

SEQ ID NO: 1024039 - RNA, 19 nt, Artificial Sequence
  Description of Artificial Sequence: Synthetic oligonucleotide
uccuucccagccaggcgag

SEQ ID NO: 1024040 - RNA, 19 nt, Artificial Sequence
  Description of Artificial Sequence: Synthetic oligonucleotide
auugccaccccggucggug

SEQ ID NO: 1024041 - RNA, 19 nt, Artificial Sequence
  Description of Artificial Sequence: Synthetic oligonucleotide
ucucgggcuacucgcucca

SEQ ID NO: 1024042 - RNA, 19 nt, Artificial Sequence
  Description of Artificial Sequence: Synthetic oligonucleotide
cuucauacaggagccccac

SEQ ID NO: 1024043 - RNA, 19 nt, Artificial Sequence
  Description of Artificial Sequence: Synthetic oligonucleotide
auagcggcccugcugccga

SEQ ID NO: 1024044 - RNA, 19 nt, Artificial Sequence
  Description of Artificial Sequence: Synthetic oligonucleotide
gaugcacagaggccagaga

SEQ ID NO: 1024045 - RNA, 19 nt, Artificial Sequence
  Description of Artificial Sequence: Synthetic oligonucleotide
uagagucgcugcucugggc

SEQ ID NO: 1024046 - RNA, 19 nt, Artificial Sequence
  Description of Artificial Sequence: Synthetic oligonucleotide
gagucagcagucgccgugc

SEQ ID NO: 1024047 - RNA, 19 nt, Artificial Sequence
  Description of Artificial Sequence: Synthetic oligonucleotide
acaaucuccguggcggacu

SEQ ID NO: 1024048 - RNA, 19 nt, Artificial Sequence
  Description of Artificial Sequence: Synthetic oligonucleotide
agaugaccucgacaacacu

SEQ ID NO: 1024049 - RNA, 19 nt, Artificial Sequence
  Description of Artificial Sequence: Synthetic oligonucleotide
aaucgcccaaagguacgca

SEQ ID NO: 1024050 - RNA, 19 nt, Artificial Sequence
  Description of Artificial Sequence: Synthetic oligonucleotide
ucgggcuacucgcuccaca

SEQ ID NO: 1024051 - RNA, 19 nt, Artificial Sequence
  Description of Artificial Sequence: Synthetic oligonucleotide
uccagaguacugagccagu

SEQ ID NO: 1024052 - RNA, 19 nt, Artificial Sequence
  Description of Artificial Sequence: Synthetic oligonucleotide
acaaagcgccacaaguaga

SEQ ID NO: 1024053 - RNA, 19 nt, Artificial Sequence
  Description of Artificial Sequence: Synthetic oligonucleotide
agcggaugaaacccacgau

SEQ ID NO: 1024054 - RNA, 19 nt, Artificial Sequence
  Description of Artificial Sequence: Synthetic oligonucleotide
cccgugacggcguugguag

SEQ ID NO: 1024055 - RNA, 19 nt, Artificial Sequence
  Description of Artificial Sequence: Synthetic oligonucleotide
augccagucaacaccgaca

SEQ ID NO: 1024056 - RNA, 19 nt, Artificial Sequence
  Description of Artificial Sequence: Synthetic oligonucleotide
acaauagggcugccccgug

SEQ ID NO: 1024057 - RNA, 19 nt, Artificial Sequence
  Description of Artificial Sequence: Synthetic oligonucleotide
ggcgagacagcaguagaag

SEQ ID NO: 1024058 - RNA, 19 nt, Artificial Sequence
  Description of Artificial Sequence: Synthetic oligonucleotide
cacauuggccagcaacuca

SEQ ID NO: 1024059 - RNA, 19 nt, Artificial Sequence
  Description of Artificial Sequence: Synthetic oligonucleotide
caucggagcacugggugug

SEQ ID NO: 1024060 - RNA, 19 nt, Artificial Sequence
  Description of Artificial Sequence: Synthetic oligonucleotide
agccugcuccggugcaccc

SEQ ID NO: 1024061 - RNA, 19 nt, Artificial Sequence
  Description of Artificial Sequence: Synthetic oligonucleotide
guaccggguccggacagcg

SEQ ID NO: 1024062 - RNA, 19 nt, Artificial Sequence
  Description of Artificial Sequence: Synthetic oligonucleotide
ggaagcgaucuagugcccg

SEQ ID NO: 1024063 - RNA, 19 nt, Artificial Sequence
  Description of Artificial Sequence: Synthetic oligonucleotide
ccgagcaugugccaggaac

SEQ ID NO: 1024064 - RNA, 19 nt, Artificial Sequence
  Description of Artificial Sequence: Synthetic oligonucleotide
uagagccuagccgcgcuca

SEQ ID NO: 1024065 - RNA, 19 nt, Artificial Sequence
  Description of Artificial Sequence: Synthetic oligonucleotide
ugcuagagucgcugcucug

SEQ ID NO: 1024066 - RNA, 19 nt, Artificial Sequence
  Description of Artificial Sequence: Synthetic oligonucleotide
acgcuucaugacagcacgc

SEQ ID NO: 1024067 - RNA, 19 nt, Artificial Sequence
  Description of Artificial Sequence: Synthetic oligonucleotide
aucuccguggcggacucug

SEQ ID NO: 1024068 - RNA, 19 nt, Artificial Sequence
  Description of Artificial Sequence: Synthetic oligonucleotide
uagcugucguguccucuac

SEQ ID NO: 1024069 - RNA, 19 nt, Artificial Sequence
  Description of Artificial Sequence: Synthetic oligonucleotide
uccguggcggacucugaaa

SEQ ID NO: 1024070 - RNA, 19 nt, Artificial Sequence
  Description of Artificial Sequence: Synthetic oligonucleotide
gcuaccacuucgucuagca

SEQ ID NO: 1024071 - RNA, 19 nt, Artificial Sequence
  Description of Artificial Sequence: Synthetic oligonucleotide
cacuucgucuagcagcaga

SEQ ID NO: 1024072 - RNA, 19 nt, Artificial Sequence
  Description of Artificial Sequence: Synthetic oligonucleotide
ggugacucaggcgcucucg

SEQ ID NO: 1024073 - RNA, 19 nt, Artificial Sequence
  Description of Artificial Sequence: Synthetic oligonucleotide
acgcgcgaaggcugccagc

SEQ ID NO: 1024074 - RNA, 19 nt, Artificial Sequence
  Description of Artificial Sequence: Synthetic oligonucleotide
ggcuaaucuuaaugaugcc

SEQ ID NO: 1024075 - RNA, 19 nt, Artificial Sequence
  Description of Artificial Sequence: Synthetic oligonucleotide
ucgccgugcugucucucug

SEQ ID NO: 1024076 - RNA, 19 nt, Artificial Sequence
  Description of Artificial Sequence: Synthetic oligonucleotide
ccgaaucgcccaaagguac

SEQ ID NO: 1024077 - RNA, 19 nt, Artificial Sequence
  Description of Artificial Sequence: Synthetic oligonucleotide
gcugucguguccucuacca

SEQ ID NO: 1024078 - RNA, 19 nt, Artificial Sequence
  Description of Artificial Sequence: Synthetic oligonucleotide
ggcgcucucgggcuacucg

SEQ ID NO: 1024079 - RNA, 19 nt, Artificial Sequence
  Description of Artificial Sequence: Synthetic oligonucleotide
acucaccccggaaguaggg

SEQ ID NO: 1024080 - RNA, 19 nt, Artificial Sequence
  Description of Artificial Sequence: Synthetic oligonucleotide
acgcagucgcacacacucc

SEQ ID NO: 1024081 - RNA, 19 nt, Artificial Sequence
  Description of Artificial Sequence: Synthetic oligonucleotide
gguccggacagcgaagggc

SEQ ID NO: 1024082 - RNA, 19 nt, Artificial Sequence
  Description of Artificial Sequence: Synthetic oligonucleotide
gcgcucacagaugaccucg

SEQ ID NO: 1024083 - RNA, 19 nt, Artificial Sequence
  Description of Artificial Sequence: Synthetic oligonucleotide
guccggacagcgaagggca

SEQ ID NO: 1024084 - RNA, 19 nt, Artificial Sequence
  Description of Artificial Sequence: Synthetic oligonucleotide
gcuaggugcauagcggccc

SEQ ID NO: 1024085 - RNA, 19 nt, Artificial Sequence
  Description of Artificial Sequence: Synthetic oligonucleotide
cucaccccggaaguagggc

SEQ ID NO: 1024086 - RNA, 19 nt, Artificial Sequence
  Description of Artificial Sequence: Synthetic oligonucleotide
gcaguagaagcagggcagg

SEQ ID NO: 1024087 - RNA, 19 nt, Artificial Sequence
  Description of Artificial Sequence: Synthetic oligonucleotide
cucaggagguuugugucca

SEQ ID NO: 1024088 - RNA, 19 nt, Artificial Sequence
  Description of Artificial Sequence: Synthetic oligonucleotide
gaagcgaucuagugcccgu

SEQ ID NO: 1024089 - RNA, 19 nt, Artificial Sequence
  Description of Artificial Sequence: Synthetic oligonucleotide
ugguagagccuagccgcgc

SEQ ID NO: 1024090 - RNA, 19 nt, Artificial Sequence
  Description of Artificial Sequence: Synthetic oligonucleotide
ucgacaacacuggguucca

SEQ ID NO: 1024091 - RNA, 19 nt, Artificial Sequence
  Description of Artificial Sequence: Synthetic oligonucleotide
caaucuccguggcggacuc

SEQ ID NO: 1024092 - RNA, 19 nt, Artificial Sequence
  Description of Artificial Sequence: Synthetic oligonucleotide
guguacucacagguguaac

SEQ ID NO: 1024093 - RNA, 19 nt, Artificial Sequence
  Description of Artificial Sequence: Synthetic oligonucleotide
cuucgucuagcagcagaug

SEQ ID NO: 1024094 - RNA, 19 nt, Artificial Sequence
  Description of Artificial Sequence: Synthetic oligonucleotide
gcgaccgcccaacucacgc

SEQ ID NO: 1024095 - RNA, 19 nt, Artificial Sequence
  Description of Artificial Sequence: Synthetic oligonucleotide
cacauccggcgcugguggg

SEQ ID NO: 1024096 - RNA, 19 nt, Artificial Sequence
  Description of Artificial Sequence: Synthetic oligonucleotide
gacaauagggcugccccgu

SEQ ID NO: 1024097 - RNA, 19 nt, Artificial Sequence
  Description of Artificial Sequence: Synthetic oligonucleotide
ucuccguggcggacucuga

SEQ ID NO: 1024098 - RNA, 19 nt, Artificial Sequence
  Description of Artificial Sequence: Synthetic oligonucleotide
aggcgaggugcugccaggg

SEQ ID NO: 1024099 - RNA, 19 nt, Artificial Sequence
  Description of Artificial Sequence: Synthetic oligonucleotide
gcccgaaucgcccaaaggu

SEQ ID NO: 1024100 - RNA, 19 nt, Artificial Sequence
  Description of Artificial Sequence: Synthetic oligonucleotide
ugcagcccgaaucgcccaa

SEQ ID NO: 1024101 - RNA, 19 nt, Artificial Sequence
  Description of Artificial Sequence: Synthetic oligonucleotide
accccggucggugaacucu

SEQ ID NO: 1024102 - RNA, 19 nt, Artificial Sequence
  Description of Artificial Sequence: Synthetic oligonucleotide
gccgguggaagcgaucuag

SEQ ID NO: 1024103 - RNA, 19 nt, Artificial Sequence
  Description of Artificial Sequence: Synthetic oligonucleotide
acggcguugguagagccua

SEQ ID NO: 1024104 - RNA, 19 nt, Artificial Sequence
  Description of Artificial Sequence: Synthetic oligonucleotide
uccggggcuccagaguacu

SEQ ID NO: 1024105 - RNA, 19 nt, Artificial Sequence
  Description of Artificial Sequence: Synthetic oligonucleotide
gcccucacggacucccugg

SEQ ID NO: 1024106 - RNA, 19 nt, Artificial Sequence
  Description of Artificial Sequence: Synthetic oligonucleotide
cacgcgcgaaggcugccag

SEQ ID NO: 1024107 - RNA, 19 nt, Artificial Sequence
  Description of Artificial Sequence: Synthetic oligonucleotide
ccguggcggacucugaaag

SEQ ID NO: 1024108 - RNA, 19 nt, Artificial Sequence
  Description of Artificial Sequence: Synthetic oligonucleotide
ucgcaggcgccgguggaag

SEQ ID NO: 1024109 - RNA, 19 nt, Artificial Sequence
  Description of Artificial Sequence: Synthetic oligonucleotide
gcccugcaccuucacauag

SEQ ID NO: 1024110 - RNA, 19 nt, Artificial Sequence
  Description of Artificial Sequence: Synthetic oligonucleotide
ggagcggaugaaacccacg

SEQ ID NO: 1024111 - RNA, 19 nt, Artificial Sequence
  Description of Artificial Sequence: Synthetic oligonucleotide
cacucuugcguagcaucug

SEQ ID NO: 1024112 - RNA, 19 nt, Artificial Sequence
  Description of Artificial Sequence: Synthetic oligonucleotide
uagggcccugggcagcaaa

SEQ ID NO: 1024113 - RNA, 19 nt, Artificial Sequence
  Description of Artificial Sequence: Synthetic oligonucleotide
cgaaucgcccaaagguacg

SEQ ID NO: 1024114 - RNA, 19 nt, Artificial Sequence
  Description of Artificial Sequence: Synthetic oligonucleotide
gugacggcguugguagagc

SEQ ID NO: 1024115 - RNA, 19 nt, Artificial Sequence
  Description of Artificial Sequence: Synthetic oligonucleotide
gcgaucuagugcccguacc

SEQ ID NO: 1024116 - RNA, 19 nt, Artificial Sequence
  Description of Artificial Sequence: Synthetic oligonucleotide
agaacucaccccggaagua

SEQ ID NO: 1024117 - RNA, 19 nt, Artificial Sequence
  Description of Artificial Sequence: Synthetic oligonucleotide
cagcccgaaucgcccaaag

SEQ ID NO: 1024118 - RNA, 19 nt, Artificial Sequence
  Description of Artificial Sequence: Synthetic oligonucleotide
aggcuaccacuucgucuag

SEQ ID NO: 1024119 - RNA, 19 nt, Artificial Sequence
  Description of Artificial Sequence: Synthetic oligonucleotide
aagcgaucuagugcccgua

SEQ ID NO: 1024120 - RNA, 19 nt, Artificial Sequence
  Description of Artificial Sequence: Synthetic oligonucleotide
cacggaaggagggcaggug

SEQ ID NO: 1024121 - RNA, 19 nt, Artificial Sequence
  Description of Artificial Sequence: Synthetic oligonucleotide
uugccaccccggucgguga

SEQ ID NO: 1024122 - RNA, 19 nt, Artificial Sequence
  Description of Artificial Sequence: Synthetic oligonucleotide
acgcacguuccggggcucc

SEQ ID NO: 1024123 - RNA, 19 nt, Artificial Sequence
  Description of Artificial Sequence: Synthetic oligonucleotide
cacaaucuccguggcggac

SEQ ID NO: 1024124 - RNA, 19 nt, Artificial Sequence
  Description of Artificial Sequence: Synthetic oligonucleotide
cugcaccuucacauaguga

SEQ ID NO: 1024125 - RNA, 19 nt, Artificial Sequence
  Description of Artificial Sequence: Synthetic oligonucleotide
ucacgcgcgaaggcugcca

SEQ ID NO: 1024126 - RNA, 19 nt, Artificial Sequence
  Description of Artificial Sequence: Synthetic oligonucleotide
agauggugacucaggcgcu

SEQ ID NO: 1024127 - RNA, 19 nt, Artificial Sequence
  Description of Artificial Sequence: Synthetic oligonucleotide
cacccgagccaaccuuccc

SEQ ID NO: 1024128 - RNA, 19 nt, Artificial Sequence
  Description of Artificial Sequence: Synthetic oligonucleotide
aggcgagacagcaguagaa

SEQ ID NO: 1024129 - RNA, 19 nt, Artificial Sequence
  Description of Artificial Sequence: Synthetic oligonucleotide
uaccggguccggacagcga

SEQ ID NO: 1024130 - RNA, 19 nt, Artificial Sequence
  Description of Artificial Sequence: Synthetic oligonucleotide
guguagcuaggugcauagc

SEQ ID NO: 1024131 - RNA, 19 nt, Artificial Sequence
  Description of Artificial Sequence: Synthetic oligonucleotide
gccgcgcucacagaugacc

SEQ ID NO: 1024132 - RNA, 19 nt, Artificial Sequence
  Description of Artificial Sequence: Synthetic oligonucleotide
gcgcucucgggcuacucgc

SEQ ID NO: 1024133 - RNA, 19 nt, Artificial Sequence
  Description of Artificial Sequence: Synthetic oligonucleotide
ggguaccggguccggacag

SEQ ID NO: 1024134 - RNA, 19 nt, Artificial Sequence
  Description of Artificial Sequence: Synthetic oligonucleotide
aggagcgucuucaggcuaa

SEQ ID NO: 1024135 - RNA, 19 nt, Artificial Sequence
  Description of Artificial Sequence: Synthetic oligonucleotide
gcccaaagguacgcagucg

SEQ ID NO: 1024136 - RNA, 19 nt, Artificial Sequence
  Description of Artificial Sequence: Synthetic oligonucleotide
agucgccgugcugucucuc

SEQ ID NO: 1024137 - RNA, 19 nt, Artificial Sequence
  Description of Artificial Sequence: Synthetic oligonucleotide
gugauaugacgaggcccug

SEQ ID NO: 1024138 - RNA, 19 nt, Artificial Sequence
  Description of Artificial Sequence: Synthetic oligonucleotide
cucuaacacauccggcgcu

SEQ ID NO: 1024139 - RNA, 19 nt, Artificial Sequence
  Description of Artificial Sequence: Synthetic oligonucleotide
gcagucgccgugcugucuc

SEQ ID NO: 1024140 - RNA, 19 nt, Artificial Sequence
  Description of Artificial Sequence: Synthetic oligonucleotide
gaccucgacaacacugggu

SEQ ID NO: 1024141 - RNA, 19 nt, Artificial Sequence
  Description of Artificial Sequence: Synthetic oligonucleotide
accgcccaacucacgcgcg

SEQ ID NO: 1024142 - RNA, 19 nt, Artificial Sequence
  Description of Artificial Sequence: Synthetic oligonucleotide
gaauauugcucaggagguu

SEQ ID NO: 1024143 - RNA, 19 nt, Artificial Sequence
  Description of Artificial Sequence: Synthetic oligonucleotide
gcacaggcgagacagcagu

SEQ ID NO: 1024144 - RNA, 19 nt, Artificial Sequence
  Description of Artificial Sequence: Synthetic oligonucleotide
ggguccggacagcgaaggg

SEQ ID NO: 1024145 - RNA, 19 nt, Artificial Sequence
  Description of Artificial Sequence: Synthetic oligonucleotide
guguguagcuaggugcaua

SEQ ID NO: 1024146 - RNA, 19 nt, Artificial Sequence
  Description of Artificial Sequence: Synthetic oligonucleotide
aggugcucgcaggcgccgg

SEQ ID NO: 1024147 - RNA, 19 nt, Artificial Sequence
  Description of Artificial Sequence: Synthetic oligonucleotide
gccgcugccaccugacaga

SEQ ID NO: 1024148 - RNA, 19 nt, Artificial Sequence
  Description of Artificial Sequence: Synthetic oligonucleotide
gcuuaggauggagcuggcc

SEQ ID NO: 1024149 - RNA, 19 nt, Artificial Sequence
  Description of Artificial Sequence: Synthetic oligonucleotide
cggucggugaacucuaaca

SEQ ID NO: 1024150 - RNA, 19 nt, Artificial Sequence
  Description of Artificial Sequence: Synthetic oligonucleotide
gccgugcugucucucuggc

SEQ ID NO: 1024151 - RNA, 19 nt, Artificial Sequence
  Description of Artificial Sequence: Synthetic oligonucleotide
gcccaacucacgcgcgaag

SEQ ID NO: 1024152 - RNA, 19 nt, Artificial Sequence
  Description of Artificial Sequence: Synthetic oligonucleotide
gcuccagaguacugagcca

SEQ ID NO: 1024153 - RNA, 19 nt, Artificial Sequence
  Description of Artificial Sequence: Synthetic oligonucleotide
gcccguaccagcaaugagu

SEQ ID NO: 1024154 - RNA, 19 nt, Artificial Sequence
  Description of Artificial Sequence: Synthetic oligonucleotide
ggcguugguagagccuagc

SEQ ID NO: 1024155 - RNA, 19 nt, Artificial Sequence
  Description of Artificial Sequence: Synthetic oligonucleotide
agcagucgccgugcugucu

SEQ ID NO: 1024156 - RNA, 19 nt, Artificial Sequence
  Description of Artificial Sequence: Synthetic oligonucleotide
cguggcggacucugaaagc

SEQ ID NO: 1024157 - RNA, 19 nt, Artificial Sequence
  Description of Artificial Sequence: Synthetic oligonucleotide
caacucacgcgcgaaggcu

SEQ ID NO: 1024158 - RNA, 19 nt, Artificial Sequence
  Description of Artificial Sequence: Synthetic oligonucleotide
aucggagcacugggugugu

SEQ ID NO: 1024159 - RNA, 19 nt, Artificial Sequence
  Description of Artificial Sequence: Synthetic oligonucleotide
ggcggacucugaaagccca

SEQ ID NO: 1024160 - RNA, 19 nt, Artificial Sequence
  Description of Artificial Sequence: Synthetic oligonucleotide
cuccguggcggacucugaa

SEQ ID NO: 1024161 - RNA, 19 nt, Artificial Sequence
  Description of Artificial Sequence: Synthetic oligonucleotide
ccgacaccuuguugaauuc

SEQ ID NO: 1024162 - RNA, 19 nt, Artificial Sequence
  Description of Artificial Sequence: Synthetic oligonucleotide
cgguggaagcgaucuagug

SEQ ID NO: 1024163 - RNA, 19 nt, Artificial Sequence
  Description of Artificial Sequence: Synthetic oligonucleotide
cccgaaucgcccaaaggua

SEQ ID NO: 1024164 - RNA, 19 nt, Artificial Sequence
  Description of Artificial Sequence: Synthetic oligonucleotide
caccuccuuggcuguaaaa

SEQ ID NO: 1024165 - RNA, 19 nt, Artificial Sequence
  Description of Artificial Sequence: Synthetic oligonucleotide
cacguuccggggcuccaga

SEQ ID NO: 1024166 - RNA, 19 nt, Artificial Sequence
  Description of Artificial Sequence: Synthetic oligonucleotide
cgacaccuuguugaauucc

SEQ ID NO: 1024167 - RNA, 19 nt, Artificial Sequence
  Description of Artificial Sequence: Synthetic oligonucleotide
ccagaguacugagccaguc

SEQ ID NO: 1024168 - RNA, 19 nt, Artificial Sequence
  Description of Artificial Sequence: Synthetic oligonucleotide
auccggcgcugguggggag

SEQ ID NO: 1024169 - RNA, 19 nt, Artificial Sequence
  Description of Artificial Sequence: Synthetic oligonucleotide
cacagaagcucugggcugu

SEQ ID NO: 1024170 - RNA, 19 nt, Artificial Sequence
  Description of Artificial Sequence: Synthetic oligonucleotide
cauggguaccggguccgga

SEQ ID NO: 1024171 - RNA, 19 nt, Artificial Sequence
  Description of Artificial Sequence: Synthetic oligonucleotide
ggccuugauguggcuuagg

SEQ ID NO: 1024172 - RNA, 19 nt, Artificial Sequence
  Description of Artificial Sequence: Synthetic oligonucleotide
cagcagucgccgugcuguc

SEQ ID NO: 1024173 - RNA, 19 nt, Artificial Sequence
  Description of Artificial Sequence: Synthetic oligonucleotide
gagcgucuucaggcuaauc

SEQ ID NO: 1024174 - RNA, 19 nt, Artificial Sequence
  Description of Artificial Sequence: Synthetic oligonucleotide
aggcgcucucgggcuacuc

SEQ ID NO: 1024175 - RNA, 19 nt, Artificial Sequence
  Description of Artificial Sequence: Synthetic oligonucleotide
agccgcgcucacagaugac

SEQ ID NO: 1024176 - RNA, 19 nt, Artificial Sequence
  Description of Artificial Sequence: Synthetic oligonucleotide
cauccggcgcuggugggga

SEQ ID NO: 1024177 - RNA, 19 nt, Artificial Sequence
  Description of Artificial Sequence: Synthetic oligonucleotide
gguaccggguccggacagc

SEQ ID NO: 1024178 - RNA, 19 nt, Artificial Sequence
  Description of Artificial Sequence: Synthetic oligonucleotide
gacggcguugguagagccu

SEQ ID NO: 1024179 - RNA, 19 nt, Artificial Sequence
  Description of Artificial Sequence: Synthetic oligonucleotide
gcuacucgcuccacaaucu

SEQ ID NO: 1024180 - RNA, 19 nt, Artificial Sequence
  Description of Artificial Sequence: Synthetic oligonucleotide
ccauugccaccccggucgg

SEQ ID NO: 1024181 - RNA, 19 nt, Artificial Sequence
  Description of Artificial Sequence: Synthetic oligonucleotide
cgugacggcguugguagag

SEQ ID NO: 1024182 - RNA, 19 nt, Artificial Sequence
  Description of Artificial Sequence: Synthetic oligonucleotide
ucggagcacugggugugua

SEQ ID NO: 1024183 - RNA, 19 nt, Artificial Sequence
  Description of Artificial Sequence: Synthetic oligonucleotide
cgaccgcccaacucacgcg

SEQ ID NO: 1024184 - RNA, 19 nt, Artificial Sequence
  Description of Artificial Sequence: Synthetic oligonucleotide
ccucgacaacacuggguuc

SEQ ID NO: 1024185 - RNA, 19 nt, Artificial Sequence
  Description of Artificial Sequence: Synthetic oligonucleotide
gucgccgugcugucucucu

SEQ ID NO: 1024186 - RNA, 19 nt, Artificial Sequence
  Description of Artificial Sequence: Synthetic oligonucleotide
gugagucagcagucgccgu

SEQ ID NO: 1024187 - RNA, 19 nt, Artificial Sequence
  Description of Artificial Sequence: Synthetic oligonucleotide
gugcucgcaggcgccggug

SEQ ID NO: 1024188 - RNA, 19 nt, Artificial Sequence
  Description of Artificial Sequence: Synthetic oligonucleotide
ccgugcugucucucuggcc

SEQ ID NO: 1024189 - RNA, 19 nt, Artificial Sequence
  Description of Artificial Sequence: Synthetic oligonucleotide
cugcuccggugcacccgag

SEQ ID NO: 1024190 - RNA, 19 nt, Artificial Sequence
  Description of Artificial Sequence: Synthetic oligonucleotide
cgccgugcugucucucugg

SEQ ID NO: 1024191 - RNA, 19 nt, Artificial Sequence
  Description of Artificial Sequence: Synthetic oligonucleotide
ggugcacccgagccaaccu

SEQ ID NO: 1024192 - RNA, 19 nt, Artificial Sequence
  Description of Artificial Sequence: Synthetic oligonucleotide
guauacagagaagguccuu

SEQ ID NO: 1024193 - RNA, 19 nt, Artificial Sequence
  Description of Artificial Sequence: Synthetic oligonucleotide
gcggacucugaaagcccag

SEQ ID NO: 1024194 - RNA, 19 nt, Artificial Sequence
  Description of Artificial Sequence: Synthetic oligonucleotide
gcacccgagccaaccuucc

SEQ ID NO: 1024195 - RNA, 19 nt, Artificial Sequence
  Description of Artificial Sequence: Synthetic oligonucleotide
caccccggucggugaacuc

SEQ ID NO: 1024196 - RNA, 19 nt, Artificial Sequence
  Description of Artificial Sequence: Synthetic oligonucleotide
ccggucggugaacucuaac

SEQ ID NO: 1024197 - RNA, 19 nt, Artificial Sequence
  Description of Artificial Sequence: Synthetic oligonucleotide
gguggcguggcaccucccu

SEQ ID NO: 1024198 - RNA, 19 nt, Artificial Sequence
  Description of Artificial Sequence: Synthetic oligonucleotide
cggacucugaaagcccagc

SEQ ID NO: 1024199 - RNA, 19 nt, Artificial Sequence
  Description of Artificial Sequence: Synthetic oligonucleotide
ggcgaacaucugucaggca

SEQ ID NO: 1024200 - RNA, 19 nt, Artificial Sequence
  Description of Artificial Sequence: Synthetic oligonucleotide
cucgggcuacucgcuccac

SEQ ID NO: 1024201 - RNA, 19 nt, Artificial Sequence
  Description of Artificial Sequence: Synthetic oligonucleotide
ccguaccagcaaugaguug

SEQ ID NO: 1024202 - RNA, 19 nt, Artificial Sequence
  Description of Artificial Sequence: Synthetic oligonucleotide
ccaagcgggcugugaugac

SEQ ID NO: 1024203 - RNA, 19 nt, Artificial Sequence
  Description of Artificial Sequence: Synthetic oligonucleotide
ggcuuaggauggagcuggc

SEQ ID NO: 1024204 - RNA, 19 nt, Artificial Sequence
  Description of Artificial Sequence: Synthetic oligonucleotide
ccggguccggacagcgaag

SEQ ID NO: 1024205 - RNA, 19 nt, Artificial Sequence
  Description of Artificial Sequence: Synthetic oligonucleotide
ggcuuugcggacacccucu

SEQ ID NO: 1024206 - RNA, 19 nt, Artificial Sequence
  Description of Artificial Sequence: Synthetic oligonucleotide
guccaucggagcacugggu

SEQ ID NO: 1024207 - RNA, 19 nt, Artificial Sequence
  Description of Artificial Sequence: Synthetic oligonucleotide
ccgcugccaccugacagag

SEQ ID NO: 1024208 - RNA, 19 nt, Artificial Sequence
  Description of Artificial Sequence: Synthetic oligonucleotide
gugcacccgagccaaccuu

SEQ ID NO: 1024209 - RNA, 19 nt, Artificial Sequence
  Description of Artificial Sequence: Synthetic oligonucleotide
ccugcuccggugcacccga

SEQ ID NO: 1024210 - RNA, 19 nt, Artificial Sequence
  Description of Artificial Sequence: Synthetic oligonucleotide
ccuagccgcgcucacagau

SEQ ID NO: 1024211 - RNA, 19 nt, Artificial Sequence
  Description of Artificial Sequence: Synthetic oligonucleotide
cagucaacaccgacaccuu

SEQ ID NO: 1024212 - RNA, 19 nt, Artificial Sequence
  Description of Artificial Sequence: Synthetic oligonucleotide
cccguaccagcaaugaguu

SEQ ID NO: 1024213 - RNA, 19 nt, Artificial Sequence
  Description of Artificial Sequence: Synthetic oligonucleotide
ggcccugcaccuucacaua

SEQ ID NO: 1024214 - RNA, 19 nt, Artificial Sequence
  Description of Artificial Sequence: Synthetic oligonucleotide
cgcuucaugacagcacgca

SEQ ID NO: 1024215 - RNA, 19 nt, Artificial Sequence
  Description of Artificial Sequence: Synthetic oligonucleotide
cacgcacguuccggggcuc

SEQ ID NO: 1024216 - RNA, 19 nt, Artificial Sequence
  Description of Artificial Sequence: Synthetic oligonucleotide
ccaggagcgucuucaggcu

SEQ ID NO: 1024217 - RNA, 19 nt, Artificial Sequence
  Description of Artificial Sequence: Synthetic oligonucleotide
caccccggaaguagggcuu

SEQ ID NO: 1024218 - RNA, 19 nt, Artificial Sequence
  Description of Artificial Sequence: Synthetic oligonucleotide
guacgcagucgcacacacu

SEQ ID NO: 1024219 - RNA, 19 nt, Artificial Sequence
  Description of Artificial Sequence: Synthetic oligonucleotide
cggccaacagggccccagg

SEQ ID NO: 1024220 - RNA, 19 nt, Artificial Sequence
  Description of Artificial Sequence: Synthetic oligonucleotide
cggugcacccgagccaacc

SEQ ID NO: 1024221 - RNA, 19 nt, Artificial Sequence
  Description of Artificial Sequence: Synthetic oligonucleotide
cgggcuacucgcuccacaa

SEQ ID NO: 1024222 - RNA, 19 nt, Artificial Sequence
  Description of Artificial Sequence: Synthetic oligonucleotide
cugccgagagcugcuguau

SEQ ID NO: 1024223 - RNA, 19 nt, Artificial Sequence
  Description of Artificial Sequence: Synthetic oligonucleotide
gcgccgguggaagcgaucu

SEQ ID NO: 1024224 - RNA, 19 nt, Artificial Sequence
  Description of Artificial Sequence: Synthetic oligonucleotide
cgccgcuccaccaguacaa

SEQ ID NO: 1024225 - RNA, 19 nt, Artificial Sequence
  Description of Artificial Sequence: Synthetic oligonucleotide
cugccccgugacggcguug

SEQ ID NO: 1024226 - RNA, 19 nt, Artificial Sequence
  Description of Artificial Sequence: Synthetic oligonucleotide
ccgcgcucacagaugaccu

SEQ ID NO: 1024227 - RNA, 19 nt, Artificial Sequence
  Description of Artificial Sequence: Synthetic oligonucleotide
ccgccgcuccaccaguaca

SEQ ID NO: 1024228 - RNA, 19 nt, Artificial Sequence
  Description of Artificial Sequence: Synthetic oligonucleotide
ggugcucgcaggcgccggu

SEQ ID NO: 1024229 - RNA, 19 nt, Artificial Sequence
  Description of Artificial Sequence: Synthetic oligonucleotide
gccuagccgcgcucacaga

SEQ ID NO: 1024230 - RNA, 19 nt, Artificial Sequence
  Description of Artificial Sequence: Synthetic oligonucleotide
cggcguugguagagccuag

SEQ ID NO: 1024231 - RNA, 19 nt, Artificial Sequence
  Description of Artificial Sequence: Synthetic oligonucleotide
gcguggcaccucccuuuuc

SEQ ID NO: 1024232 - RNA, 19 nt, Artificial Sequence
  Description of Artificial Sequence: Synthetic oligonucleotide
gccaccccggucggugaac

SEQ ID NO: 1024233 - RNA, 19 nt, Artificial Sequence
  Description of Artificial Sequence: Synthetic oligonucleotide
ggcgccgguggaagcgauc

SEQ ID NO: 1024234 - RNA, 19 nt, Artificial Sequence
  Description of Artificial Sequence: Synthetic oligonucleotide
gcagcccgaaucgcccaaa

SEQ ID NO: 1024235 - RNA, 19 nt, Artificial Sequence
  Description of Artificial Sequence: Synthetic oligonucleotide
ggcguggcaccucccuuuu

SEQ ID NO: 1024236 - RNA, 19 nt, Artificial Sequence
  Description of Artificial Sequence: Synthetic oligonucleotide
ccgcccaacucacgcgcga

SEQ ID NO: 1024237 - RNA, 19 nt, Artificial Sequence
  Description of Artificial Sequence: Synthetic oligonucleotide
caccgacaccuuguugaau

SEQ ID NO: 1024238 - RNA, 19 nt, Artificial Sequence
  Description of Artificial Sequence: Synthetic oligonucleotide
ccccggucggugaacucua

SEQ ID NO: 1024239 - RNA, 19 nt, Artificial Sequence
  Description of Artificial Sequence: Synthetic oligonucleotide
cauugccaccccggucggu

SEQ ID NO: 1024240 - RNA, 19 nt, Artificial Sequence
  Description of Artificial Sequence: Synthetic oligonucleotide
ccgugacggcguugguaga

SEQ ID NO: 1024241 - RNA, 19 nt, Artificial Sequence
  Description of Artificial Sequence: Synthetic oligonucleotide
ccggugcacccgagccaac

SEQ ID NO: 1024242 - RNA, 19 nt, Artificial Sequence
  Description of Artificial Sequence: Synthetic oligonucleotide
ggagcgucuucaggcuaau

SEQ ID NO: 1024243 - RNA, 19 nt, Artificial Sequence
  Description of Artificial Sequence: Synthetic oligonucleotide
ccccgugacggcguuggua

SEQ ID NO: 1024244 - RNA, 19 nt, Artificial Sequence
  Description of Artificial Sequence: Synthetic oligonucleotide
ccucacggacucccuggcu

SEQ ID NO: 1024245 - RNA, 19 nt, Artificial Sequence
  Description of Artificial Sequence: Synthetic oligonucleotide
cccggucggugaacucuaa

SEQ ID NO: 1024246 - RNA, 19 nt, Artificial Sequence
  Description of Artificial Sequence: Synthetic oligonucleotide
ccacacucuugcguagcau

SEQ ID NO: 1024247 - RNA, 19 nt, Artificial Sequence
  Description of Artificial Sequence: Synthetic oligonucleotide
cccgagcaugugccaggaa

SEQ ID NO: 1024248 - RNA, 19 nt, Artificial Sequence
  Description of Artificial Sequence: Synthetic oligonucleotide
ccaccccggucggugaacu

SEQ ID NO: 1024249 - RNA, 19 nt, Artificial Sequence
  Description of Artificial Sequence: Synthetic oligonucleotide
cgcucucgggcuacucgcu

SEQ ID NO: 1024250 - RNA, 19 nt, Artificial Sequence
  Description of Artificial Sequence: Synthetic oligonucleotide
caggcgcucucgggcuacu

SEQ ID NO: 1024251 - RNA, 19 nt, Artificial Sequence
  Description of Artificial Sequence: Synthetic oligonucleotide
gcgcgaaggcugccagcuu

SEQ ID NO: 1024252 - RNA, 19 nt, Artificial Sequence
  Description of Artificial Sequence: Synthetic oligonucleotide
gccccgugacggcguuggu

SEQ ID NO: 1024253 - RNA, 19 nt, Artificial Sequence
  Description of Artificial Sequence: Synthetic oligonucleotide
cgccgguggaagcgaucua

SEQ ID NO: 1024254 - RNA, 19 nt, Artificial Sequence
  Description of Artificial Sequence: Synthetic oligonucleotide
agugucauaaaacuccagc

SEQ ID NO: 1024255 - RNA, 19 nt, Artificial Sequence
  Description of Artificial Sequence: Synthetic oligonucleotide
uauugucuaacucaggcag

SEQ ID NO: 1024256 - RNA, 19 nt, Artificial Sequence
  Description of Artificial Sequence: Synthetic oligonucleotide
guuuauauggaccauacac

SEQ ID NO: 1024257 - RNA, 19 nt, Artificial Sequence
  Description of Artificial Sequence: Synthetic oligonucleotide
uaauuuacaccacgcaugg

SEQ ID NO: 1024258 - RNA, 19 nt, Artificial Sequence
  Description of Artificial Sequence: Synthetic oligonucleotide
uuuauauggaccauacaca

SEQ ID NO: 1024259 - RNA, 19 nt, Artificial Sequence
  Description of Artificial Sequence: Synthetic oligonucleotide
uuauauggaccauacacag

SEQ ID NO: 1024260 - RNA, 19 nt, Artificial Sequence
  Description of Artificial Sequence: Synthetic oligonucleotide
aauauugcugauguacucg

SEQ ID NO: 1024261 - RNA, 19 nt, Artificial Sequence
  Description of Artificial Sequence: Synthetic oligonucleotide
agggacaugauguacugcc

SEQ ID NO: 1024262 - RNA, 19 nt, Artificial Sequence
  Description of Artificial Sequence: Synthetic oligonucleotide
aaugucuguagccagcugu

SEQ ID NO: 1024263 - RNA, 19 nt, Artificial Sequence
  Description of Artificial Sequence: Synthetic oligonucleotide
uucuugaaaaccugugugg

SEQ ID NO: 1024264 - RNA, 19 nt, Artificial Sequence
  Description of Artificial Sequence: Synthetic oligonucleotide
uguaugagaagguuguucu

SEQ ID NO: 1024265 - RNA, 19 nt, Artificial Sequence
  Description of Artificial Sequence: Synthetic oligonucleotide
agcuauccauccuagagac

SEQ ID NO: 1024266 - RNA, 19 nt, Artificial Sequence
  Description of Artificial Sequence: Synthetic oligonucleotide
uugaugcgcaggaagaccg

SEQ ID NO: 1024267 - RNA, 19 nt, Artificial Sequence
  Description of Artificial Sequence: Synthetic oligonucleotide
gagguaauuauacuccugc

SEQ ID NO: 1024268 - RNA, 19 nt, Artificial Sequence
  Description of Artificial Sequence: Synthetic oligonucleotide
ucaguaauuuacaccacgc

SEQ ID NO: 1024269 - RNA, 19 nt, Artificial Sequence
  Description of Artificial Sequence: Synthetic oligonucleotide
uuuacaccacgcaugguag

SEQ ID NO: 1024270 - RNA, 19 nt, Artificial Sequence
  Description of Artificial Sequence: Synthetic oligonucleotide
auaucauccagucugcacu

SEQ ID NO: 1024271 - RNA, 19 nt, Artificial Sequence
  Description of Artificial Sequence: Synthetic oligonucleotide
guaggagucggacagauac

SEQ ID NO: 1024272 - RNA, 19 nt, Artificial Sequence
  Description of Artificial Sequence: Synthetic oligonucleotide
ugaaucagcaguaccguca

SEQ ID NO: 1024273 - RNA, 19 nt, Artificial Sequence
  Description of Artificial Sequence: Synthetic oligonucleotide
gaaucuagcacaucuguca

SEQ ID NO: 1024274 - RNA, 19 nt, Artificial Sequence
  Description of Artificial Sequence: Synthetic oligonucleotide
aguaauuuacaccacgcau

SEQ ID NO: 1024275 - RNA, 19 nt, Artificial Sequence
  Description of Artificial Sequence: Synthetic oligonucleotide
uuucuggagguaauuauac

SEQ ID NO: 1024276 - RNA, 19 nt, Artificial Sequence
  Description of Artificial Sequence: Synthetic oligonucleotide
uggugaaucuagcacaucu

SEQ ID NO: 1024277 - RNA, 19 nt, Artificial Sequence
  Description of Artificial Sequence: Synthetic oligonucleotide
cuggagguaauuauacucc

SEQ ID NO: 1024278 - RNA, 19 nt, Artificial Sequence
  Description of Artificial Sequence: Synthetic oligonucleotide
aagaugcuguccugaaaac

SEQ ID NO: 1024279 - RNA, 19 nt, Artificial Sequence
  Description of Artificial Sequence: Synthetic oligonucleotide
agguaauuauacuccugcc

SEQ ID NO: 1024280 - RNA, 19 nt, Artificial Sequence
  Description of Artificial Sequence: Synthetic oligonucleotide
uguuugaugcgcaggaaga

SEQ ID NO: 1024281 - RNA, 19 nt, Artificial Sequence
  Description of Artificial Sequence: Synthetic oligonucleotide
ucuacaacuuucaccaggu

SEQ ID NO: 1024282 - RNA, 19 nt, Artificial Sequence
  Description of Artificial Sequence: Synthetic oligonucleotide
uggcucaagauucaagggc

SEQ ID NO: 1024283 - RNA, 19 nt, Artificial Sequence
  Description of Artificial Sequence: Synthetic oligonucleotide
agagacgagcagcagcugc

SEQ ID NO: 1024284 - RNA, 19 nt, Artificial Sequence
  Description of Artificial Sequence: Synthetic oligonucleotide
uggaccauacacagcaucc

SEQ ID NO: 1024285 - RNA, 19 nt, Artificial Sequence
  Description of Artificial Sequence: Synthetic oligonucleotide
uguacugcccaauauugcu

SEQ ID NO: 1024286 - RNA, 19 nt, Artificial Sequence
  Description of Artificial Sequence: Synthetic oligonucleotide
agcauuggugaaaugagac

SEQ ID NO: 1024287 - RNA, 19 nt, Artificial Sequence
  Description of Artificial Sequence: Synthetic oligonucleotide
uucaagagugucacaaugu

SEQ ID NO: 1024288 - RNA, 19 nt, Artificial Sequence
  Description of Artificial Sequence: Synthetic oligonucleotide
acacacacacaccaccagc

SEQ ID NO: 1024289 - RNA, 19 nt, Artificial Sequence
  Description of Artificial Sequence: Synthetic oligonucleotide
gucaccguacuucagcugg

SEQ ID NO: 1024290 - RNA, 19 nt, Artificial Sequence
  Description of Artificial Sequence: Synthetic oligonucleotide
ucuggaggguacgugaugg

SEQ ID NO: 1024291 - RNA, 19 nt, Artificial Sequence
  Description of Artificial Sequence: Synthetic oligonucleotide
gagucggacagauacuucc

SEQ ID NO: 1024292 - RNA, 19 nt, Artificial Sequence
  Description of Artificial Sequence: Synthetic oligonucleotide
ugaucagauagucaauguc

SEQ ID NO: 1024293 - RNA, 19 nt, Artificial Sequence
  Description of Artificial Sequence: Synthetic oligonucleotide
cauuggugaaaugagacac

SEQ ID NO: 1024294 - RNA, 19 nt, Artificial Sequence
  Description of Artificial Sequence: Synthetic oligonucleotide
ugugccagcccaagcaagg

SEQ ID NO: 1024295 - RNA, 19 nt, Artificial Sequence
  Description of Artificial Sequence: Synthetic oligonucleotide
ucuugaaaaccuguguggc

SEQ ID NO: 1024296 - RNA, 19 nt, Artificial Sequence
  Description of Artificial Sequence: Synthetic oligonucleotide
caaagagggauuucagggc

SEQ ID NO: 1024297 - RNA, 19 nt, Artificial Sequence
  Description of Artificial Sequence: Synthetic oligonucleotide
cucuacaacuuucaccagg

SEQ ID NO: 1024298 - RNA, 19 nt, Artificial Sequence
  Description of Artificial Sequence: Synthetic oligonucleotide
cucacacacacacacacac

SEQ ID NO: 1024299 - RNA, 19 nt, Artificial Sequence
  Description of Artificial Sequence: Synthetic oligonucleotide
uccacaccugcacugaggc

SEQ ID NO: 1024300 - RNA, 19 nt, Artificial Sequence
  Description of Artificial Sequence: Synthetic oligonucleotide
cacauacuuggcaaagagg

SEQ ID NO: 1024301 - RNA, 19 nt, Artificial Sequence
  Description of Artificial Sequence: Synthetic oligonucleotide
auggcucaagauucaaggg

SEQ ID NO: 1024302 - RNA, 19 nt, Artificial Sequence
  Description of Artificial Sequence: Synthetic oligonucleotide
cuucaagagugucacaaug

SEQ ID NO: 1024303 - RNA, 19 nt, Artificial Sequence
  Description of Artificial Sequence: Synthetic oligonucleotide
ucagaauuggucaguaauu

SEQ ID NO: 1024304 - RNA, 19 nt, Artificial Sequence
  Description of Artificial Sequence: Synthetic oligonucleotide
uuuccauuaaacuggcaua

SEQ ID NO: 1024305 - RNA, 19 nt, Artificial Sequence
  Description of Artificial Sequence: Synthetic oligonucleotide
uauauggaccauacacagc

SEQ ID NO: 1024306 - RNA, 19 nt, Artificial Sequence
  Description of Artificial Sequence: Synthetic oligonucleotide
cacacacacacacacacac

SEQ ID NO: 1024307 - RNA, 19 nt, Artificial Sequence
  Description of Artificial Sequence: Synthetic oligonucleotide
uacucgagaggugugaggc

SEQ ID NO: 1024308 - RNA, 19 nt, Artificial Sequence
  Description of Artificial Sequence: Synthetic oligonucleotide
cucucucacacacacacac

SEQ ID NO: 1024309 - RNA, 19 nt, Artificial Sequence
  Description of Artificial Sequence: Synthetic oligonucleotide
ucggacagauacuuccccg

SEQ ID NO: 1024310 - RNA, 19 nt, Artificial Sequence
  Description of Artificial Sequence: Synthetic oligonucleotide
auggaccauacacagcauc

SEQ ID NO: 1024311 - RNA, 19 nt, Artificial Sequence
  Description of Artificial Sequence: Synthetic oligonucleotide
aucguaggaggccagugag

SEQ ID NO: 1024312 - RNA, 19 nt, Artificial Sequence
  Description of Artificial Sequence: Synthetic oligonucleotide
uaauuauacuccugccaug

SEQ ID NO: 1024313 - RNA, 19 nt, Artificial Sequence
  Description of Artificial Sequence: Synthetic oligonucleotide
uccuugaggguauaaagua

SEQ ID NO: 1024314 - RNA, 19 nt, Artificial Sequence
  Description of Artificial Sequence: Synthetic oligonucleotide
caaggccagcucuaaagcg

SEQ ID NO: 1024315 - RNA, 19 nt, Artificial Sequence
  Description of Artificial Sequence: Synthetic oligonucleotide
ugaaucuagcacaucuguc

SEQ ID NO: 1024316 - RNA, 19 nt, Artificial Sequence
  Description of Artificial Sequence: Synthetic oligonucleotide
gaucuguaugagaagguug

SEQ ID NO: 1024317 - RNA, 19 nt, Artificial Sequence
  Description of Artificial Sequence: Synthetic oligonucleotide
ugacagaguucugaaaggc

SEQ ID NO: 1024318 - RNA, 19 nt, Artificial Sequence
  Description of Artificial Sequence: Synthetic oligonucleotide
cucucacacacacacacac

SEQ ID NO: 1024319 - RNA, 19 nt, Artificial Sequence
  Description of Artificial Sequence: Synthetic oligonucleotide
ugaaaggcgguccagucuu

SEQ ID NO: 1024320 - RNA, 19 nt, Artificial Sequence
  Description of Artificial Sequence: Synthetic oligonucleotide
ucaaucacuuccccgugcu

SEQ ID NO: 1024321 - RNA, 19 nt, Artificial Sequence
  Description of Artificial Sequence: Synthetic oligonucleotide
uccaucacauugaucagau

SEQ ID NO: 1024322 - RNA, 19 nt, Artificial Sequence
  Description of Artificial Sequence: Synthetic oligonucleotide
ucaagagugucacaauguu

SEQ ID NO: 1024323 - RNA, 19 nt, Artificial Sequence
  Description of Artificial Sequence: Synthetic oligonucleotide
ugauguacucgagaggugu

SEQ ID NO: 1024324 - RNA, 19 nt, Artificial Sequence
  Description of Artificial Sequence: Synthetic oligonucleotide
aaaggcgguccagucuucc

SEQ ID NO: 1024325 - RNA, 19 nt, Artificial Sequence
  Description of Artificial Sequence: Synthetic oligonucleotide
cacacacacacacaccacc

SEQ ID NO: 1024326 - RNA, 19 nt, Artificial Sequence
  Description of Artificial Sequence: Synthetic oligonucleotide
cuguuugaugcgcaggaag

SEQ ID NO: 1024327 - RNA, 19 nt, Artificial Sequence
  Description of Artificial Sequence: Synthetic oligonucleotide
uuguguacagaguggcuca

SEQ ID NO: 1024328 - RNA, 19 nt, Artificial Sequence
  Description of Artificial Sequence: Synthetic oligonucleotide
ggcaauggagccuagccag

SEQ ID NO: 1024329 - RNA, 19 nt, Artificial Sequence
  Description of Artificial Sequence: Synthetic oligonucleotide
accucugagaucugaagga

SEQ ID NO: 1024330 - RNA, 19 nt, Artificial Sequence
  Description of Artificial Sequence: Synthetic oligonucleotide
agccuagccaguugucagc

SEQ ID NO: 1024331 - RNA, 19 nt, Artificial Sequence
  Description of Artificial Sequence: Synthetic oligonucleotide
cuauccauccuagagacga

SEQ ID NO: 1024332 - RNA, 19 nt, Artificial Sequence
  Description of Artificial Sequence: Synthetic oligonucleotide
cucucucucucucacacac

SEQ ID NO: 1024333 - RNA, 19 nt, Artificial Sequence
  Description of Artificial Sequence: Synthetic oligonucleotide
uacugcccaauauugcuga

SEQ ID NO: 1024334 - RNA, 19 nt, Artificial Sequence
  Description of Artificial Sequence: Synthetic oligonucleotide
uccauccuagagacgagca

SEQ ID NO: 1024335 - RNA, 19 nt, Artificial Sequence
  Description of Artificial Sequence: Synthetic oligonucleotide
gguaauuauacuccugcca

SEQ ID NO: 1024336 - RNA, 19 nt, Artificial Sequence
  Description of Artificial Sequence: Synthetic oligonucleotide
gaagaccgagucgaaagcc

SEQ ID NO: 1024337 - RNA, 19 nt, Artificial Sequence
  Description of Artificial Sequence: Synthetic oligonucleotide
uggagguaauuauacuccu

SEQ ID NO: 1024338 - RNA, 19 nt, Artificial Sequence
  Description of Artificial Sequence: Synthetic oligonucleotide
cucuugagucacaaauggc

SEQ ID NO: 1024339 - RNA, 19 nt, Artificial Sequence
  Description of Artificial Sequence: Synthetic oligonucleotide
cucgaaguccccacacugg

SEQ ID NO: 1024340 - RNA, 19 nt, Artificial Sequence
  Description of Artificial Sequence: Synthetic oligonucleotide
caauauugcugauguacuc

SEQ ID NO: 1024341 - RNA, 19 nt, Artificial Sequence
  Description of Artificial Sequence: Synthetic oligonucleotide
uuccauuaaacuggcauau

SEQ ID NO: 1024342 - RNA, 19 nt, Artificial Sequence
  Description of Artificial Sequence: Synthetic oligonucleotide
guaauuauacuccugccau

SEQ ID NO: 1024343 - RNA, 19 nt, Artificial Sequence
  Description of Artificial Sequence: Synthetic oligonucleotide
uccugaacgcagucaauca

SEQ ID NO: 1024344 - RNA, 19 nt, Artificial Sequence
  Description of Artificial Sequence: Synthetic oligonucleotide
acagcgcugaucuguauga

SEQ ID NO: 1024345 - RNA, 19 nt, Artificial Sequence
  Description of Artificial Sequence: Synthetic oligonucleotide
augauccugacagaguucu

SEQ ID NO: 1024346 - RNA, 19 nt, Artificial Sequence
  Description of Artificial Sequence: Synthetic oligonucleotide
uuugcuagcugcugcucga

SEQ ID NO: 1024347 - RNA, 19 nt, Artificial Sequence
  Description of Artificial Sequence: Synthetic oligonucleotide
ugcgcaggaagaccgaguc

SEQ ID NO: 1024348 - RNA, 19 nt, Artificial Sequence
  Description of Artificial Sequence: Synthetic oligonucleotide
gauuacuggaccccuucuc

SEQ ID NO: 1024349 - RNA, 19 nt, Artificial Sequence
  Description of Artificial Sequence: Synthetic oligonucleotide
cacacacacacacacacca

SEQ ID NO: 1024350 - RNA, 19 nt, Artificial Sequence
  Description of Artificial Sequence: Synthetic oligonucleotide
ucgaacugacuggagagca

SEQ ID NO: 1024351 - RNA, 19 nt, Artificial Sequence
  Description of Artificial Sequence: Synthetic oligonucleotide
gaggguacgugauggcugc

SEQ ID NO: 1024352 - RNA, 19 nt, Artificial Sequence
  Description of Artificial Sequence: Synthetic oligonucleotide
ccucuugagucacaaaugg

SEQ ID NO: 1024353 - RNA, 19 nt, Artificial Sequence
  Description of Artificial Sequence: Synthetic oligonucleotide
ucuuucgaacugacuggag

SEQ ID NO: 1024354 - RNA, 19 nt, Artificial Sequence
  Description of Artificial Sequence: Synthetic oligonucleotide
ugauuacuggaccccuucu

SEQ ID NO: 1024355 - RNA, 19 nt, Artificial Sequence
  Description of Artificial Sequence: Synthetic oligonucleotide
cucucucucucucucacac

SEQ ID NO: 1024356 - RNA, 19 nt, Artificial Sequence
  Description of Artificial Sequence: Synthetic oligonucleotide
cugucuaucucuguguguc

SEQ ID NO: 1024357 - RNA, 19 nt, Artificial Sequence
  Description of Artificial Sequence: Synthetic oligonucleotide
uguacucgagaggugugag

SEQ ID NO: 1024358 - RNA, 19 nt, Artificial Sequence
  Description of Artificial Sequence: Synthetic oligonucleotide
uucuggagguaauuauacu

SEQ ID NO: 1024359 - RNA, 19 nt, Artificial Sequence
  Description of Artificial Sequence: Synthetic oligonucleotide
guugugauuacuggacccc

SEQ ID NO: 1024360 - RNA, 19 nt, Artificial Sequence
  Description of Artificial Sequence: Synthetic oligonucleotide
aggccaaagagcuugugua

SEQ ID NO: 1024361 - RNA, 19 nt, Artificial Sequence
  Description of Artificial Sequence: Synthetic oligonucleotide
cuuucgaacugacuggaga

SEQ ID NO: 1024362 - RNA, 19 nt, Artificial Sequence
  Description of Artificial Sequence: Synthetic oligonucleotide
uaccgucaccaccucgugg

SEQ ID NO: 1024363 - RNA, 19 nt, Artificial Sequence
  Description of Artificial Sequence: Synthetic oligonucleotide
ucucacacacacacacaca

SEQ ID NO: 1024364 - RNA, 19 nt, Artificial Sequence
  Description of Artificial Sequence: Synthetic oligonucleotide
agcugguaggguuuauaug

SEQ ID NO: 1024365 - RNA, 19 nt, Artificial Sequence
  Description of Artificial Sequence: Synthetic oligonucleotide
caguggaaggucacucugg

SEQ ID NO: 1024366 - RNA, 19 nt, Artificial Sequence
  Description of Artificial Sequence: Synthetic oligonucleotide
ugcaaggcggcguggcagg

SEQ ID NO: 1024367 - RNA, 19 nt, Artificial Sequence
  Description of Artificial Sequence: Synthetic oligonucleotide
gaccauacacagcauccac

SEQ ID NO: 1024368 - RNA, 19 nt, Artificial Sequence
  Description of Artificial Sequence: Synthetic oligonucleotide
aaggcaucguaggaggcca

SEQ ID NO: 1024369 - RNA, 19 nt, Artificial Sequence
  Description of Artificial Sequence: Synthetic oligonucleotide
gacagauacuuccccgcug

SEQ ID NO: 1024370 - RNA, 19 nt, Artificial Sequence
  Description of Artificial Sequence: Synthetic oligonucleotide
uacaccacgcaugguagcc

SEQ ID NO: 1024371 - RNA, 19 nt, Artificial Sequence
  Description of Artificial Sequence: Synthetic oligonucleotide
agggcuguaggagucggac

SEQ ID NO: 1024372 - RNA, 19 nt, Artificial Sequence
  Description of Artificial Sequence: Synthetic oligonucleotide
ucuccuacucucucucucu

SEQ ID NO: 1024373 - RNA, 19 nt, Artificial Sequence
  Description of Artificial Sequence: Synthetic oligonucleotide
ucaagaugcuguccugaaa

SEQ ID NO: 1024374 - RNA, 19 nt, Artificial Sequence
  Description of Artificial Sequence: Synthetic oligonucleotide
ucacacacacacacacaca

SEQ ID NO: 1024375 - RNA, 19 nt, Artificial Sequence
  Description of Artificial Sequence: Synthetic oligonucleotide
ugaacgcagucaaucacuu

SEQ ID NO: 1024376 - RNA, 19 nt, Artificial Sequence
  Description of Artificial Sequence: Synthetic oligonucleotide
acugacuggagagcauugg

SEQ ID NO: 1024377 - RNA, 19 nt, Artificial Sequence
  Description of Artificial Sequence: Synthetic oligonucleotide
gauccugacagaguucuga

SEQ ID NO: 1024378 - RNA, 19 nt, Artificial Sequence
  Description of Artificial Sequence: Synthetic oligonucleotide
cacugaggcacaugggcag

SEQ ID NO: 1024379 - RNA, 19 nt, Artificial Sequence
  Description of Artificial Sequence: Synthetic oligonucleotide
ucagggcugugcgugaugc

SEQ ID NO: 1024380 - RNA, 19 nt, Artificial Sequence
  Description of Artificial Sequence: Synthetic oligonucleotide
augauguacugcccaauau

SEQ ID NO: 1024381 - RNA, 19 nt, Artificial Sequence
  Description of Artificial Sequence: Synthetic oligonucleotide
ugaggguauaaaguauuuc

SEQ ID NO: 1024382 - RNA, 19 nt, Artificial Sequence
  Description of Artificial Sequence: Synthetic oligonucleotide
ucucucacacacacacaca

SEQ ID NO: 1024383 - RNA, 19 nt, Artificial Sequence
  Description of Artificial Sequence: Synthetic oligonucleotide
ggcaaugauccugacagag

SEQ ID NO: 1024384 - RNA, 19 nt, Artificial Sequence
  Description of Artificial Sequence: Synthetic oligonucleotide
guauuuccauuaaacuggc

SEQ ID NO: 1024385 - RNA, 19 nt, Artificial Sequence
  Description of Artificial Sequence: Synthetic oligonucleotide
ucugucuaucucugugugu

SEQ ID NO: 1024386 - RNA, 19 nt, Artificial Sequence
  Description of Artificial Sequence: Synthetic oligonucleotide
agcaguaccgucaccaccu

SEQ ID NO: 1024387 - RNA, 19 nt, Artificial Sequence
  Description of Artificial Sequence: Synthetic oligonucleotide
uuacaccacgcaugguagc

SEQ ID NO: 1024388 - RNA, 19 nt, Artificial Sequence
  Description of Artificial Sequence: Synthetic oligonucleotide
guacgugauggcugcaggc

SEQ ID NO: 1024389 - RNA, 19 nt, Artificial Sequence
  Description of Artificial Sequence: Synthetic oligonucleotide
ccagcuauccauccuagag

SEQ ID NO: 1024390 - RNA, 19 nt, Artificial Sequence
  Description of Artificial Sequence: Synthetic oligonucleotide
uucgaacugacuggagagc

SEQ ID NO: 1024391 - RNA, 19 nt, Artificial Sequence
  Description of Artificial Sequence: Synthetic oligonucleotide
ugaucuguaugagaagguu

SEQ ID NO: 1024392 - RNA, 19 nt, Artificial Sequence
  Description of Artificial Sequence: Synthetic oligonucleotide
uacucucucucucucucuc

SEQ ID NO: 1024393 - RNA, 19 nt, Artificial Sequence
  Description of Artificial Sequence: Synthetic oligonucleotide
acacacacacacacacacc

SEQ ID NO: 1024394 - RNA, 19 nt, Artificial Sequence
  Description of Artificial Sequence: Synthetic oligonucleotide
uccaguggaaggucacucu

SEQ ID NO: 1024395 - RNA, 19 nt, Artificial Sequence
  Description of Artificial Sequence: Synthetic oligonucleotide
accugccaggcuccgaggg

SEQ ID NO: 1024396 - RNA, 19 nt, Artificial Sequence
  Description of Artificial Sequence: Synthetic oligonucleotide
cuguaugagaagguuguuc

SEQ ID NO: 1024397 - RNA, 19 nt, Artificial Sequence
  Description of Artificial Sequence: Synthetic oligonucleotide
aagaccgagucgaaagcca

SEQ ID NO: 1024398 - RNA, 19 nt, Artificial Sequence
  Description of Artificial Sequence: Synthetic oligonucleotide
ucuccaauaccagcugugu

SEQ ID NO: 1024399 - RNA, 19 nt, Artificial Sequence
  Description of Artificial Sequence: Synthetic oligonucleotide
guuugcgugugccagccca

SEQ ID NO: 1024400 - RNA, 19 nt, Artificial Sequence
  Description of Artificial Sequence: Synthetic oligonucleotide
cuccaugucaccguacuuc

SEQ ID NO: 1024401 - RNA, 19 nt, Artificial Sequence
  Description of Artificial Sequence: Synthetic oligonucleotide
ccauuaaacuggcauauuc

SEQ ID NO: 1024402 - RNA, 19 nt, Artificial Sequence
  Description of Artificial Sequence: Synthetic oligonucleotide
uuggcaaagugggcgguag

SEQ ID NO: 1024403 - RNA, 19 nt, Artificial Sequence
  Description of Artificial Sequence: Synthetic oligonucleotide
accguacuucagcugguag

SEQ ID NO: 1024404 - RNA, 19 nt, Artificial Sequence
  Description of Artificial Sequence: Synthetic oligonucleotide
caaguggcaaugauccuga

SEQ ID NO: 1024405 - RNA, 19 nt, Artificial Sequence
  Description of Artificial Sequence: Synthetic oligonucleotide
gguacgugauggcugcagg

SEQ ID NO: 1024406 - RNA, 19 nt, Artificial Sequence
  Description of Artificial Sequence: Synthetic oligonucleotide
guuaucuuucuggagguaa

SEQ ID NO: 1024407 - RNA, 19 nt, Artificial Sequence
  Description of Artificial Sequence: Synthetic oligonucleotide
aguaccgucaccaccucgu

SEQ ID NO: 1024408 - RNA, 19 nt, Artificial Sequence
  Description of Artificial Sequence: Synthetic oligonucleotide
uaggagucggacagauacu

SEQ ID NO: 1024409 - RNA, 19 nt, Artificial Sequence
  Description of Artificial Sequence: Synthetic oligonucleotide
ucucucucacacacacaca

SEQ ID NO: 1024410 - RNA, 19 nt, Artificial Sequence
  Description of Artificial Sequence: Synthetic oligonucleotide
cuaaagcggaguccucuug

SEQ ID NO: 1024411 - RNA, 19 nt, Artificial Sequence
  Description of Artificial Sequence: Synthetic oligonucleotide
aaagugggcgguaguguca

SEQ ID NO: 1024412 - RNA, 19 nt, Artificial Sequence
  Description of Artificial Sequence: Synthetic oligonucleotide
ugugcgugaugcagacagc

SEQ ID NO: 1024413 - RNA, 19 nt, Artificial Sequence
  Description of Artificial Sequence: Synthetic oligonucleotide
cgagucgaaagccagcugg

SEQ ID NO: 1024414 - RNA, 19 nt, Artificial Sequence
  Description of Artificial Sequence: Synthetic oligonucleotide
caguaauuuacaccacgca

SEQ ID NO: 1024415 - RNA, 19 nt, Artificial Sequence
  Description of Artificial Sequence: Synthetic oligonucleotide
gauguacucgagaggugug

SEQ ID NO: 1024416 - RNA, 19 nt, Artificial Sequence
  Description of Artificial Sequence: Synthetic oligonucleotide
ucuaaagcggaguccucuu

SEQ ID NO: 1024417 - RNA, 19 nt, Artificial Sequence
  Description of Artificial Sequence: Synthetic oligonucleotide
aggccauuggugaaucuag

SEQ ID NO: 1024418 - RNA, 19 nt, Artificial Sequence
  Description of Artificial Sequence: Synthetic oligonucleotide
ccauuggugaaucuagcac

SEQ ID NO: 1024419 - RNA, 19 nt, Artificial Sequence
  Description of Artificial Sequence: Synthetic oligonucleotide
ccuagagacgagcagcagc

SEQ ID NO: 1024420 - RNA, 19 nt, Artificial Sequence
  Description of Artificial Sequence: Synthetic oligonucleotide
cucugugugucuuuucuaa

SEQ ID NO: 1024421 - RNA, 19 nt, Artificial Sequence
  Description of Artificial Sequence: Synthetic oligonucleotide
gugaaucuagcacaucugu

SEQ ID NO: 1024422 - RNA, 19 nt, Artificial Sequence
  Description of Artificial Sequence: Synthetic oligonucleotide
gagacacauacuuggcaaa

SEQ ID NO: 1024423 - RNA, 19 nt, Artificial Sequence
  Description of Artificial Sequence: Synthetic oligonucleotide
gugauuacuggaccccuuc

SEQ ID NO: 1024424 - RNA, 19 nt, Artificial Sequence
  Description of Artificial Sequence: Synthetic oligonucleotide
cugccgguccaguggaagg

SEQ ID NO: 1024425 - RNA, 19 nt, Artificial Sequence
  Description of Artificial Sequence: Synthetic oligonucleotide
ucucucucucucucucuca

SEQ ID NO: 1024426 - RNA, 19 nt, Artificial Sequence
  Description of Artificial Sequence: Synthetic oligonucleotide
cacacacacacaccaccag

SEQ ID NO: 1024427 - RNA, 19 nt, Artificial Sequence
  Description of Artificial Sequence: Synthetic oligonucleotide
ugcucgaaguccccacacu

SEQ ID NO: 1024428 - RNA, 19 nt, Artificial Sequence
  Description of Artificial Sequence: Synthetic oligonucleotide
uugugauuacuggaccccu

SEQ ID NO: 1024429 - RNA, 19 nt, Artificial Sequence
  Description of Artificial Sequence: Synthetic oligonucleotide
cucgagaggugugaggcug

SEQ ID NO: 1024430 - RNA, 19 nt, Artificial Sequence
  Description of Artificial Sequence: Synthetic oligonucleotide
cugaaucagcaguaccguc

SEQ ID NO: 1024431 - RNA, 19 nt, Artificial Sequence
  Description of Artificial Sequence: Synthetic oligonucleotide
cucucucucucucucucac

SEQ ID NO: 1024432 - RNA, 19 nt, Artificial Sequence
  Description of Artificial Sequence: Synthetic oligonucleotide
ccguacuucagcugguagg

SEQ ID NO: 1024433 - RNA, 19 nt, Artificial Sequence
  Description of Artificial Sequence: Synthetic oligonucleotide
uggaggguacgugauggcu

SEQ ID NO: 1024434 - RNA, 19 nt, Artificial Sequence
  Description of Artificial Sequence: Synthetic oligonucleotide
guaugagaagguuguucuc

SEQ ID NO: 1024435 - RNA, 19 nt, Artificial Sequence
  Description of Artificial Sequence: Synthetic oligonucleotide
aaggcgguccagucuuccu

SEQ ID NO: 1024436 - RNA, 19 nt, Artificial Sequence
  Description of Artificial Sequence: Synthetic oligonucleotide
cagcuauccauccuagaga

SEQ ID NO: 1024437 - RNA, 19 nt, Artificial Sequence
  Description of Artificial Sequence: Synthetic oligonucleotide
agccgagucagggcugugc

SEQ ID NO: 1024438 - RNA, 19 nt, Artificial Sequence
  Description of Artificial Sequence: Synthetic oligonucleotide
cagccauauugucuaacuc

SEQ ID NO: 1024439 - RNA, 19 nt, Artificial Sequence
  Description of Artificial Sequence: Synthetic oligonucleotide
ugugauuacuggaccccuu

SEQ ID NO: 1024440 - RNA, 19 nt, Artificial Sequence
  Description of Artificial Sequence: Synthetic oligonucleotide
guacugcccaauauugcug

SEQ ID NO: 1024441 - RNA, 19 nt, Artificial Sequence
  Description of Artificial Sequence: Synthetic oligonucleotide
aauuuacaccacgcauggu

SEQ ID NO: 1024442 - RNA, 19 nt, Artificial Sequence
  Description of Artificial Sequence: Synthetic oligonucleotide
uucagccgagucagggcug

SEQ ID NO: 1024443 - RNA, 19 nt, Artificial Sequence
  Description of Artificial Sequence: Synthetic oligonucleotide
ucucucucucucacacaca

SEQ ID NO: 1024444 - RNA, 19 nt, Artificial Sequence
  Description of Artificial Sequence: Synthetic oligonucleotide
aggcgguccagucuuccug

SEQ ID NO: 1024445 - RNA, 19 nt, Artificial Sequence
  Description of Artificial Sequence: Synthetic oligonucleotide
auccugacagaguucugaa

SEQ ID NO: 1024446 - RNA, 19 nt, Artificial Sequence
  Description of Artificial Sequence: Synthetic oligonucleotide
ucgggucccgcucucucca

SEQ ID NO: 1024447 - RNA, 19 nt, Artificial Sequence
  Description of Artificial Sequence: Synthetic oligonucleotide
ucucucucucucucucucu

SEQ ID NO: 1024448 - RNA, 19 nt, Artificial Sequence
  Description of Artificial Sequence: Synthetic oligonucleotide
uuugcgugugccagcccaa

SEQ ID NO: 1024449 - RNA, 19 nt, Artificial Sequence
  Description of Artificial Sequence: Synthetic oligonucleotide
ugcgugugccagcccaagc

SEQ ID NO: 1024450 - RNA, 19 nt, Artificial Sequence
  Description of Artificial Sequence: Synthetic oligonucleotide
uccuacucucucucucucu

SEQ ID NO: 1024451 - RNA, 19 nt, Artificial Sequence
  Description of Artificial Sequence: Synthetic oligonucleotide
ugaugcgcaggaagaccga

SEQ ID NO: 1024452 - RNA, 19 nt, Artificial Sequence
  Description of Artificial Sequence: Synthetic oligonucleotide
uucucagaauuggucagua

SEQ ID NO: 1024453 - RNA, 19 nt, Artificial Sequence
  Description of Artificial Sequence: Synthetic oligonucleotide
acacacacacacacaccac

SEQ ID NO: 1024454 - RNA, 19 nt, Artificial Sequence
  Description of Artificial Sequence: Synthetic oligonucleotide
gacagcagguugugauuac

SEQ ID NO: 1024455 - RNA, 19 nt, Artificial Sequence
  Description of Artificial Sequence: Synthetic oligonucleotide
uccugacagaguucugaaa

SEQ ID NO: 1024456 - RNA, 19 nt, Artificial Sequence
  Description of Artificial Sequence: Synthetic oligonucleotide
accgagucgaaagccagcu

SEQ ID NO: 1024457 - RNA, 19 nt, Artificial Sequence
  Description of Artificial Sequence: Synthetic oligonucleotide
ucucucucucucucucaca

SEQ ID NO: 1024458 - RNA, 19 nt, Artificial Sequence
  Description of Artificial Sequence: Synthetic oligonucleotide
ucucucucucucucacaca

SEQ ID NO: 1024459 - RNA, 19 nt, Artificial Sequence
  Description of Artificial Sequence: Synthetic oligonucleotide
ucgagaggugugaggcuga

SEQ ID NO: 1024460 - RNA, 19 nt, Artificial Sequence
  Description of Artificial Sequence: Synthetic oligonucleotide
uccagcuauccauccuaga

SEQ ID NO: 1024461 - RNA, 19 nt, Artificial Sequence
  Description of Artificial Sequence: Synthetic oligonucleotide
cugauguacucgagaggug

SEQ ID NO: 1024462 - RNA, 19 nt, Artificial Sequence
  Description of Artificial Sequence: Synthetic oligonucleotide
gcucgaaguccccacacug

SEQ ID NO: 1024463 - RNA, 19 nt, Artificial Sequence
  Description of Artificial Sequence: Synthetic oligonucleotide
guccccaggccauugguga

SEQ ID NO: 1024464 - RNA, 19 nt, Artificial Sequence
  Description of Artificial Sequence: Synthetic oligonucleotide
agcccugacccuguccugg

SEQ ID NO: 1024465 - RNA, 19 nt, Artificial Sequence
  Description of Artificial Sequence: Synthetic oligonucleotide
ggcgguagugucauaaaac

SEQ ID NO: 1024466 - RNA, 19 nt, Artificial Sequence
  Description of Artificial Sequence: Synthetic oligonucleotide
ggugaaucuagcacaucug

SEQ ID NO: 1024467 - RNA, 19 nt, Artificial Sequence
  Description of Artificial Sequence: Synthetic oligonucleotide
cucucucucucucucucuc

SEQ ID NO: 1024468 - RNA, 19 nt, Artificial Sequence
  Description of Artificial Sequence: Synthetic oligonucleotide
acacacacacacaccacca

SEQ ID NO: 1024469 - RNA, 19 nt, Artificial Sequence
  Description of Artificial Sequence: Synthetic oligonucleotide
ggguuuauauggaccauac

SEQ ID NO: 1024470 - RNA, 19 nt, Artificial Sequence
  Description of Artificial Sequence: Synthetic oligonucleotide
aagugggcgguagugucau

SEQ ID NO: 1024471 - RNA, 19 nt, Artificial Sequence
  Description of Artificial Sequence: Synthetic oligonucleotide
cuugaggguauaaaguauu

SEQ ID NO: 1024472 - RNA, 19 nt, Artificial Sequence
  Description of Artificial Sequence: Synthetic oligonucleotide
acucucucucucucucucu

SEQ ID NO: 1024473 - RNA, 19 nt, Artificial Sequence
  Description of Artificial Sequence: Synthetic oligonucleotide
uggaguguggggucaccuc

SEQ ID NO: 1024474 - RNA, 19 nt, Artificial Sequence
  Description of Artificial Sequence: Synthetic oligonucleotide
gguucagccgagucagggc

SEQ ID NO: 1024475 - RNA, 19 nt, Artificial Sequence
  Description of Artificial Sequence: Synthetic oligonucleotide
aggagucggacagauacuu

SEQ ID NO: 1024476 - RNA, 19 nt, Artificial Sequence
  Description of Artificial Sequence: Synthetic oligonucleotide
ggcucaagauucaagggca

SEQ ID NO: 1024477 - RNA, 19 nt, Artificial Sequence
  Description of Artificial Sequence: Synthetic oligonucleotide
guucagccgagucagggcu

SEQ ID NO: 1024478 - RNA, 19 nt, Artificial Sequence
  Description of Artificial Sequence: Synthetic oligonucleotide
ugucaggguuucuccaaua

SEQ ID NO: 1024479 - RNA, 19 nt, Artificial Sequence
  Description of Artificial Sequence: Synthetic oligonucleotide
gcaugguagccacuguggc

SEQ ID NO: 1024480 - RNA, 19 nt, Artificial Sequence
  Description of Artificial Sequence: Synthetic oligonucleotide
uggcaaugauccugacaga

SEQ ID NO: 1024481 - RNA, 19 nt, Artificial Sequence
  Description of Artificial Sequence: Synthetic oligonucleotide
cugaacgcagucaaucacu

SEQ ID NO: 1024482 - RNA, 19 nt, Artificial Sequence
  Description of Artificial Sequence: Synthetic oligonucleotide
caggauccuguuugcuagc

SEQ ID NO: 1024483 - RNA, 19 nt, Artificial Sequence
  Description of Artificial Sequence: Synthetic oligonucleotide
auguacucgagagguguga

SEQ ID NO: 1024484 - RNA, 19 nt, Artificial Sequence
  Description of Artificial Sequence: Synthetic oligonucleotide
cuggaggguacgugauggc

SEQ ID NO: 1024485 - RNA, 19 nt, Artificial Sequence
  Description of Artificial Sequence: Synthetic oligonucleotide
uguaggagucggacagaua

SEQ ID NO: 1024486 - RNA, 19 nt, Artificial Sequence
  Description of Artificial Sequence: Synthetic oligonucleotide
caguaccgucaccaccucg

SEQ ID NO: 1024487 - RNA, 19 nt, Artificial Sequence
  Description of Artificial Sequence: Synthetic oligonucleotide
cugguaggguuuauaugga

SEQ ID NO: 1024488 - RNA, 19 nt, Artificial Sequence
  Description of Artificial Sequence: Synthetic oligonucleotide
ucuccacaaguggcaauga

SEQ ID NO: 1024489 - RNA, 19 nt, Artificial Sequence
  Description of Artificial Sequence: Synthetic oligonucleotide
caucguaggaggccaguga

SEQ ID NO: 1024490 - RNA, 19 nt, Artificial Sequence
  Description of Artificial Sequence: Synthetic oligonucleotide
agagggauuucagggcugu

SEQ ID NO: 1024491 - RNA, 19 nt, Artificial Sequence
  Description of Artificial Sequence: Synthetic oligonucleotide
uccagcucgggucccgcuc

SEQ ID NO: 1024492 - RNA, 19 nt, Artificial Sequence
  Description of Artificial Sequence: Synthetic oligonucleotide
caccacgcaugguagccac

SEQ ID NO: 1024493 - RNA, 19 nt, Artificial Sequence
  Description of Artificial Sequence: Synthetic oligonucleotide
guggcugcaaggcggcgug

SEQ ID NO: 1024494 - RNA, 19 nt, Artificial Sequence
  Description of Artificial Sequence: Synthetic oligonucleotide
cuguguuccagcuauccau

SEQ ID NO: 1024495 - RNA, 19 nt, Artificial Sequence
  Description of Artificial Sequence: Synthetic oligonucleotide
aaaaccugccaggcuccga

SEQ ID NO: 1024496 - RNA, 19 nt, Artificial Sequence
  Description of Artificial Sequence: Synthetic oligonucleotide
acucgagaggugugaggcu

SEQ ID NO: 1024497 - RNA, 19 nt, Artificial Sequence
  Description of Artificial Sequence: Synthetic oligonucleotide
agucgaaagccagcuggug

SEQ ID NO: 1024498 - RNA, 19 nt, Artificial Sequence
  Description of Artificial Sequence: Synthetic oligonucleotide
uccuagagacgagcagcag

SEQ ID NO: 1024499 - RNA, 19 nt, Artificial Sequence
  Description of Artificial Sequence: Synthetic oligonucleotide
acagcagguugugauuacu

SEQ ID NO: 1024500 - RNA, 19 nt, Artificial Sequence
  Description of Artificial Sequence: Synthetic oligonucleotide
cagaucaucugucaggguu

SEQ ID NO: 1024501 - RNA, 19 nt, Artificial Sequence
  Description of Artificial Sequence: Synthetic oligonucleotide
cagcucuaaagcggagucc

SEQ ID NO: 1024502 - RNA, 19 nt, Artificial Sequence
  Description of Artificial Sequence: Synthetic oligonucleotide
acacuggcgcaagagcucu

SEQ ID NO: 1024503 - RNA, 19 nt, Artificial Sequence
  Description of Artificial Sequence: Synthetic oligonucleotide
gguuuauauggaccauaca

SEQ ID NO: 1024504 - RNA, 19 nt, Artificial Sequence
  Description of Artificial Sequence: Synthetic oligonucleotide
ggaggguacgugauggcug

SEQ ID NO: 1024505 - RNA, 19 nt, Artificial Sequence
  Description of Artificial Sequence: Synthetic oligonucleotide
ggcauauucagcaggguua

SEQ ID NO: 1024506 - RNA, 19 nt, Artificial Sequence
  Description of Artificial Sequence: Synthetic oligonucleotide
ccugaacgcagucaaucac

SEQ ID NO: 1024507 - RNA, 19 nt, Artificial Sequence
  Description of Artificial Sequence: Synthetic oligonucleotide
agucugcacuucuuucgaa

SEQ ID NO: 1024508 - RNA, 19 nt, Artificial Sequence
  Description of Artificial Sequence: Synthetic oligonucleotide
cauggguucuuggcagggc

SEQ ID NO: 1024509 - RNA, 19 nt, Artificial Sequence
  Description of Artificial Sequence: Synthetic oligonucleotide
ggcgcaagagcucuccaca

SEQ ID NO: 1024510 - RNA, 19 nt, Artificial Sequence
  Description of Artificial Sequence: Synthetic oligonucleotide
gaccgagucgaaagccagc

SEQ ID NO: 1024511 - RNA, 19 nt, Artificial Sequence
  Description of Artificial Sequence: Synthetic oligonucleotide
ggagguaauuauacuccug

SEQ ID NO: 1024512 - RNA, 19 nt, Artificial Sequence
  Description of Artificial Sequence: Synthetic oligonucleotide
ggguucuugaaaaccugug

SEQ ID NO: 1024513 - RNA, 19 nt, Artificial Sequence
  Description of Artificial Sequence: Synthetic oligonucleotide
cgcaugguagccacugugg

SEQ ID NO: 1024514 - RNA, 19 nt, Artificial Sequence
  Description of Artificial Sequence: Synthetic oligonucleotide
ugccgguccaguggaaggu

SEQ ID NO: 1024515 - RNA, 19 nt, Artificial Sequence
  Description of Artificial Sequence: Synthetic oligonucleotide
cuaacucaggcagcucauc

SEQ ID NO: 1024516 - RNA, 19 nt, Artificial Sequence
  Description of Artificial Sequence: Synthetic oligonucleotide
cuuggccuucaagaguguc

SEQ ID NO: 1024517 - RNA, 19 nt, Artificial Sequence
  Description of Artificial Sequence: Synthetic oligonucleotide
ucuguaugagaagguuguu

SEQ ID NO: 1024518 - RNA, 19 nt, Artificial Sequence
  Description of Artificial Sequence: Synthetic oligonucleotide
guaccgucaccaccucgug

SEQ ID NO: 1024519 - RNA, 19 nt, Artificial Sequence
  Description of Artificial Sequence: Synthetic oligonucleotide
cuccuacucucucucucuc

SEQ ID NO: 1024520 - RNA, 19 nt, Artificial Sequence
  Description of Artificial Sequence: Synthetic oligonucleotide
uaggguuuauauggaccau

SEQ ID NO: 1024521 - RNA, 19 nt, Artificial Sequence
  Description of Artificial Sequence: Synthetic oligonucleotide
ucagccgagucagggcugu

SEQ ID NO: 1024522 - RNA, 19 nt, Artificial Sequence
  Description of Artificial Sequence: Synthetic oligonucleotide
uccauuaaacuggcauauu

SEQ ID NO: 1024523 - RNA, 19 nt, Artificial Sequence
  Description of Artificial Sequence: Synthetic oligonucleotide
uagccaguugucagccaua

SEQ ID NO: 1024524 - RNA, 19 nt, Artificial Sequence
  Description of Artificial Sequence: Synthetic oligonucleotide
aggcuccgagggcuguagg

SEQ ID NO: 1024525 - RNA, 19 nt, Artificial Sequence
  Description of Artificial Sequence: Synthetic oligonucleotide
cccaagcaaggcaucguag

SEQ ID NO: 1024526 - RNA, 19 nt, Artificial Sequence
  Description of Artificial Sequence: Synthetic oligonucleotide
ggcccacuggguuugcgug

SEQ ID NO: 1024527 - RNA, 19 nt, Artificial Sequence
  Description of Artificial Sequence: Synthetic oligonucleotide
ccaguggaaggucacucug

SEQ ID NO: 1024528 - RNA, 19 nt, Artificial Sequence
  Description of Artificial Sequence: Synthetic oligonucleotide
ccuacucucucucucucuc

SEQ ID NO: 1024529 - RNA, 19 nt, Artificial Sequence
  Description of Artificial Sequence: Synthetic oligonucleotide
acacacacacacacacaca

SEQ ID NO: 1024530 - RNA, 19 nt, Artificial Sequence
  Description of Artificial Sequence: Synthetic oligonucleotide
caacuuucaccagguugug

SEQ ID NO: 1024531 - RNA, 19 nt, Artificial Sequence
  Description of Artificial Sequence: Synthetic oligonucleotide
ccauccuagagacgagcag

SEQ ID NO: 1024532 - RNA, 19 nt, Artificial Sequence
  Description of Artificial Sequence: Synthetic oligonucleotide
ggauccuguuugcuagcug

SEQ ID NO: 1024533 - RNA, 19 nt, Artificial Sequence
  Description of Artificial Sequence: Synthetic oligonucleotide
ugucuaacucaggcagcuc

SEQ ID NO: 1024534 - RNA, 19 nt, Artificial Sequence
  Description of Artificial Sequence: Synthetic oligonucleotide
acaucacaauaggucugca

SEQ ID NO: 1024535 - RNA, 19 nt, Artificial Sequence
  Description of Artificial Sequence: Synthetic oligonucleotide
gugggcgguagugucauaa

SEQ ID NO: 1024536 - RNA, 19 nt, Artificial Sequence
  Description of Artificial Sequence: Synthetic oligonucleotide
gagucagggcugugcguga

SEQ ID NO: 1024537 - RNA, 19 nt, Artificial Sequence
  Description of Artificial Sequence: Synthetic oligonucleotide
gcgugugccagcccaagca

SEQ ID NO: 1024538 - RNA, 19 nt, Artificial Sequence
  Description of Artificial Sequence: Synthetic oligonucleotide
gugaaaugagacacauacu

SEQ ID NO: 1024539 - RNA, 19 nt, Artificial Sequence
  Description of Artificial Sequence: Synthetic oligonucleotide
cugacuggagagcauuggu

SEQ ID NO: 1024540 - RNA, 19 nt, Artificial Sequence
  Description of Artificial Sequence: Synthetic oligonucleotide
gccagugagcugccggucc

SEQ ID NO: 1024541 - RNA, 19 nt, Artificial Sequence
  Description of Artificial Sequence: Synthetic oligonucleotide
cggacagauacuuccccgc

SEQ ID NO: 1024542 - RNA, 19 nt, Artificial Sequence
  Description of Artificial Sequence: Synthetic oligonucleotide
guggcaggccuuugcugac

SEQ ID NO: 1024543 - RNA, 19 nt, Artificial Sequence
  Description of Artificial Sequence: Synthetic oligonucleotide
augucuguagccagcuguu

SEQ ID NO: 1024544 - RNA, 19 nt, Artificial Sequence
  Description of Artificial Sequence: Synthetic oligonucleotide
cuagccaguugucagccau

SEQ ID NO: 1024545 - RNA, 19 nt, Artificial Sequence
  Description of Artificial Sequence: Synthetic oligonucleotide
cugaaaggcgguccagucu

SEQ ID NO: 1024546 - RNA, 19 nt, Artificial Sequence
  Description of Artificial Sequence: Synthetic oligonucleotide
caggccaaagagcuugugu

SEQ ID NO: 1024547 - RNA, 19 nt, Artificial Sequence
  Description of Artificial Sequence: Synthetic oligonucleotide
acaccacgcaugguagcca

SEQ ID NO: 1024548 - RNA, 19 nt, Artificial Sequence
  Description of Artificial Sequence: Synthetic oligonucleotide
gcgcaggaagaccgagucg

SEQ ID NO: 1024549 - RNA, 19 nt, Artificial Sequence
  Description of Artificial Sequence: Synthetic oligonucleotide
cucuaaagcggaguccucu

SEQ ID NO: 1024550 - RNA, 19 nt, Artificial Sequence
  Description of Artificial Sequence: Synthetic oligonucleotide
ggaguguggggucaccucu

SEQ ID NO: 1024551 - RNA, 19 nt, Artificial Sequence
  Description of Artificial Sequence: Synthetic oligonucleotide
gcuauccauccuagagacg

SEQ ID NO: 1024552 - RNA, 19 nt, Artificial Sequence
  Description of Artificial Sequence: Synthetic oligonucleotide
cagcgcugaucuguaugag

SEQ ID NO: 1024553 - RNA, 19 nt, Artificial Sequence
  Description of Artificial Sequence: Synthetic oligonucleotide
ggccauuggugaaucuagc

SEQ ID NO: 1024554 - RNA, 19 nt, Artificial Sequence
  Description of Artificial Sequence: Synthetic oligonucleotide
gccuagccaguugucagcc

SEQ ID NO: 1024555 - RNA, 19 nt, Artificial Sequence
  Description of Artificial Sequence: Synthetic oligonucleotide
gcucuacaacuuucaccag

SEQ ID NO: 1024556 - RNA, 19 nt, Artificial Sequence
  Description of Artificial Sequence: Synthetic oligonucleotide
ggguacgugauggcugcag

SEQ ID NO: 1024557 - RNA, 19 nt, Artificial Sequence
  Description of Artificial Sequence: Synthetic oligonucleotide
gagucgaaagccagcuggu

SEQ ID NO: 1024558 - RNA, 19 nt, Artificial Sequence
  Description of Artificial Sequence: Synthetic oligonucleotide
ggucaguaauuuacaccac

SEQ ID NO: 1024559 - RNA, 19 nt, Artificial Sequence
  Description of Artificial Sequence: Synthetic oligonucleotide
agcugcuguuugaugcgca

SEQ ID NO: 1024560 - RNA, 19 nt, Artificial Sequence
  Description of Artificial Sequence: Synthetic oligonucleotide
gaaaggcgguccagucuuc

SEQ ID NO: 1024561 - RNA, 19 nt, Artificial Sequence
  Description of Artificial Sequence: Synthetic oligonucleotide
caggcuccgagggcuguag

SEQ ID NO: 1024562 - RNA, 19 nt, Artificial Sequence
  Description of Artificial Sequence: Synthetic oligonucleotide
gcaucguaggaggccagug

SEQ ID NO: 1024563 - RNA, 19 nt, Artificial Sequence
  Description of Artificial Sequence: Synthetic oligonucleotide
uggcugcaaggcggcgugg

SEQ ID NO: 1024564 - RNA, 19 nt, Artificial Sequence
  Description of Artificial Sequence: Synthetic oligonucleotide
caaggcggcguggcaggcc

SEQ ID NO: 1024565 - RNA, 19 nt, Artificial Sequence
  Description of Artificial Sequence: Synthetic oligonucleotide
augcgcaggaagaccgagu

SEQ ID NO: 1024566 - RNA, 19 nt, Artificial Sequence
  Description of Artificial Sequence: Synthetic oligonucleotide
gcugccgguccaguggaag

SEQ ID NO: 1024567 - RNA, 19 nt, Artificial Sequence
  Description of Artificial Sequence: Synthetic oligonucleotide
ugguggaguguggggucac

SEQ ID NO: 1024568 - RNA, 19 nt, Artificial Sequence
  Description of Artificial Sequence: Synthetic oligonucleotide
cuacucucucucucucucu

SEQ ID NO: 1024569 - RNA, 19 nt, Artificial Sequence
  Description of Artificial Sequence: Synthetic oligonucleotide
ccaugucaccguacuucag

SEQ ID NO: 1024570 - RNA, 19 nt, Artificial Sequence
  Description of Artificial Sequence: Synthetic oligonucleotide
ggacagauacuuccccgcu

SEQ ID NO: 1024571 - RNA, 19 nt, Artificial Sequence
  Description of Artificial Sequence: Synthetic oligonucleotide
agucagggcugugcgugau

SEQ ID NO: 1024572 - RNA, 19 nt, Artificial Sequence
  Description of Artificial Sequence: Synthetic oligonucleotide
cgcaggaagaccgagucga

SEQ ID NO: 1024573 - RNA, 19 nt, Artificial Sequence
  Description of Artificial Sequence: Synthetic oligonucleotide
cacaaguggcaaugauccu

SEQ ID NO: 1024574 - RNA, 19 nt, Artificial Sequence
  Description of Artificial Sequence: Synthetic oligonucleotide
ggcugcaaggcggcguggc

SEQ ID NO: 1024575 - RNA, 19 nt, Artificial Sequence
  Description of Artificial Sequence: Synthetic oligonucleotide
ggagucggacagauacuuc

SEQ ID NO: 1024576 - RNA, 19 nt, Artificial Sequence
  Description of Artificial Sequence: Synthetic oligonucleotide
cuccgagggcuguaggagu

SEQ ID NO: 1024577 - RNA, 19 nt, Artificial Sequence
  Description of Artificial Sequence: Synthetic oligonucleotide
gguuugcgugugccagccc

SEQ ID NO: 1024578 - RNA, 19 nt, Artificial Sequence
  Description of Artificial Sequence: Synthetic oligonucleotide
cacuggcgcaagagcucuc

SEQ ID NO: 1024579 - RNA, 19 nt, Artificial Sequence
  Description of Artificial Sequence: Synthetic oligonucleotide
cacuuccccgugcuccaga

SEQ ID NO: 1024580 - RNA, 19 nt, Artificial Sequence
  Description of Artificial Sequence: Synthetic oligonucleotide
gguggaguguggggucacc

SEQ ID NO: 1024581 - RNA, 19 nt, Artificial Sequence
  Description of Artificial Sequence: Synthetic oligonucleotide
cuguaggagucggacagau

SEQ ID NO: 1024582 - RNA, 19 nt, Artificial Sequence
  Description of Artificial Sequence: Synthetic oligonucleotide
cuccaauaccagcuguguu

SEQ ID NO: 1024583 - RNA, 19 nt, Artificial Sequence
  Description of Artificial Sequence: Synthetic oligonucleotide
gcccaagcaaggcaucgua

SEQ ID NO: 1024584 - RNA, 19 nt, Artificial Sequence
  Description of Artificial Sequence: Synthetic oligonucleotide
gggguucuugaaaaccugu

SEQ ID NO: 1024585 - RNA, 19 nt, Artificial Sequence
  Description of Artificial Sequence: Synthetic oligonucleotide
gcaaagugggcgguagugu

SEQ ID NO: 1024586 - RNA, 19 nt, Artificial Sequence
  Description of Artificial Sequence: Synthetic oligonucleotide
cuguguggcccacuggguu

SEQ ID NO: 1024587 - RNA, 19 nt, Artificial Sequence
  Description of Artificial Sequence: Synthetic oligonucleotide
gcgcaagagcucuccacaa

SEQ ID NO: 1024588 - RNA, 19 nt, Artificial Sequence
  Description of Artificial Sequence: Synthetic oligonucleotide
cagggcugugcgugaugca

SEQ ID NO: 1024589 - RNA, 19 nt, Artificial Sequence
  Description of Artificial Sequence: Synthetic oligonucleotide
cugucaggguuucuccaau

SEQ ID NO: 1024590 - RNA, 19 nt, Artificial Sequence
  Description of Artificial Sequence: Synthetic oligonucleotide
cuucagcugguaggguuua

SEQ ID NO: 1024591 - RNA, 19 nt, Artificial Sequence
  Description of Artificial Sequence: Synthetic oligonucleotide
accacgcaugguagccacu

SEQ ID NO: 1024592 - RNA, 19 nt, Artificial Sequence
  Description of Artificial Sequence: Synthetic oligonucleotide
gcucuggcaauggagccua

SEQ ID NO: 1024593 - RNA, 19 nt, Artificial Sequence
  Description of Artificial Sequence: Synthetic oligonucleotide
aggguacgugauggcugca

SEQ ID NO: 1024594 - RNA, 19 nt, Artificial Sequence
  Description of Artificial Sequence: Synthetic oligonucleotide
agcucgggucccgcucucu

SEQ ID NO: 1024595 - RNA, 19 nt, Artificial Sequence
  Description of Artificial Sequence: Synthetic oligonucleotide
ccgagucgaaagccagcug

SEQ ID NO: 1024596 - RNA, 19 nt, Artificial Sequence
  Description of Artificial Sequence: Synthetic oligonucleotide
gguuaucuuucuggaggua

SEQ ID NO: 1024597 - RNA, 19 nt, Artificial Sequence
  Description of Artificial Sequence: Synthetic oligonucleotide
ccccgcuguggacaggauc

SEQ ID NO: 1024598 - RNA, 19 nt, Artificial Sequence
  Description of Artificial Sequence: Synthetic oligonucleotide
gggcugugcgugaugcaga

SEQ ID NO: 1024599 - RNA, 19 nt, Artificial Sequence
  Description of Artificial Sequence: Synthetic oligonucleotide
guacuucagcugguagggu

SEQ ID NO: 1024600 - RNA, 19 nt, Artificial Sequence
  Description of Artificial Sequence: Synthetic oligonucleotide
gcaguaccgucaccaccuc

SEQ ID NO: 1024601 - RNA, 19 nt, Artificial Sequence
  Description of Artificial Sequence: Synthetic oligonucleotide
agugggcgguagugucaua

SEQ ID NO: 1024602 - RNA, 19 nt, Artificial Sequence
  Description of Artificial Sequence: Synthetic oligonucleotide
ggccagcucuaaagcggag

SEQ ID NO: 1024603 - RNA, 19 nt, Artificial Sequence
  Description of Artificial Sequence: Synthetic oligonucleotide
cgaaagccagcuggugggc

SEQ ID NO: 1024604 - RNA, 19 nt, Artificial Sequence
  Description of Artificial Sequence: Synthetic oligonucleotide
gcucuaaagcggaguccuc

SEQ ID NO: 1024605 - RNA, 19 nt, Artificial Sequence
  Description of Artificial Sequence: Synthetic oligonucleotide
caccguacuucagcuggua

SEQ ID NO: 1024606 - RNA, 19 nt, Artificial Sequence
  Description of Artificial Sequence: Synthetic oligonucleotide
gccagcucuaaagcggagu

SEQ ID NO: 1024607 - RNA, 19 nt, Artificial Sequence
  Description of Artificial Sequence: Synthetic oligonucleotide
gcuuguguacagaguggcu

SEQ ID NO: 1024608 - RNA, 19 nt, Artificial Sequence
  Description of Artificial Sequence: Synthetic oligonucleotide
cagcuguuugguggagugu

SEQ ID NO: 1024609 - RNA, 19 nt, Artificial Sequence
  Description of Artificial Sequence: Synthetic oligonucleotide
gcccacuggguuugcgugu

SEQ ID NO: 1024610 - RNA, 19 nt, Artificial Sequence
  Description of Artificial Sequence: Synthetic oligonucleotide
gcaauggagccuagccagu

SEQ ID NO: 1024611 - RNA, 19 nt, Artificial Sequence
  Description of Artificial Sequence: Synthetic oligonucleotide
ggcaucguaggaggccagu

SEQ ID NO: 1024612 - RNA, 19 nt, Artificial Sequence
  Description of Artificial Sequence: Synthetic oligonucleotide
cgugcuccagaggcacagc

SEQ ID NO: 1024613 - RNA, 19 nt, Artificial Sequence
  Description of Artificial Sequence: Synthetic oligonucleotide
gcggcguggcaggccuuug

SEQ ID NO: 1024614 - RNA, 19 nt, Artificial Sequence
  Description of Artificial Sequence: Synthetic oligonucleotide
ccaggccauuggugaaucu

SEQ ID NO: 1024615 - RNA, 19 nt, Artificial Sequence
  Description of Artificial Sequence: Synthetic oligonucleotide
cgggucccgcucucuccac

SEQ ID NO: 1024616 - RNA, 19 nt, Artificial Sequence
  Description of Artificial Sequence: Synthetic oligonucleotide
cgguccagucuuccuggaa

SEQ ID NO: 1024617 - RNA, 19 nt, Artificial Sequence
  Description of Artificial Sequence: Synthetic oligonucleotide
cacagguccccaggccauu

SEQ ID NO: 1024618 - RNA, 19 nt, Artificial Sequence
  Description of Artificial Sequence: Synthetic oligonucleotide
aggcggcguggcaggccuu

SEQ ID NO: 1024619 - RNA, 19 nt, Artificial Sequence
  Description of Artificial Sequence: Synthetic oligonucleotide
gauauuaagauuuacuggc

SEQ ID NO: 1024620 - RNA, 19 nt, Artificial Sequence
  Description of Artificial Sequence: Synthetic oligonucleotide
aaacguuucauucuaacag

SEQ ID NO: 1024621 - RNA, 19 nt, Artificial Sequence
  Description of Artificial Sequence: Synthetic oligonucleotide
aaguaucuucauuaaagcc

SEQ ID NO: 1024622 - RNA, 19 nt, Artificial Sequence
  Description of Artificial Sequence: Synthetic oligonucleotide
uauaacaucuauuucuggg

SEQ ID NO: 1024623 - RNA, 19 nt, Artificial Sequence
  Description of Artificial Sequence: Synthetic oligonucleotide
uugauauuaagauuuacug

SEQ ID NO: 1024624 - RNA, 19 nt, Artificial Sequence
  Description of Artificial Sequence: Synthetic oligonucleotide
ugauauuaagauuuacugg

SEQ ID NO: 1024625 - RNA, 19 nt, Artificial Sequence
  Description of Artificial Sequence: Synthetic oligonucleotide
agacauaaaagguggagcc

SEQ ID NO: 1024626 - RNA, 19 nt, Artificial Sequence
  Description of Artificial Sequence: Synthetic oligonucleotide
ucuugaacaacgauggcgg

SEQ ID NO: 1024627 - RNA, 19 nt, Artificial Sequence
  Description of Artificial Sequence: Synthetic oligonucleotide
uuauccagaaaauaaggag

SEQ ID NO: 1024628 - RNA, 19 nt, Artificial Sequence
  Description of Artificial Sequence: Synthetic oligonucleotide
aauugcaccagguaaucuc

SEQ ID NO: 1024629 - RNA, 19 nt, Artificial Sequence
  Description of Artificial Sequence: Synthetic oligonucleotide
ugccauauggaaaugcucg

SEQ ID NO: 1024630 - RNA, 19 nt, Artificial Sequence
  Description of Artificial Sequence: Synthetic oligonucleotide
ugucauaaccagaagaaug

SEQ ID NO: 1024631 - RNA, 19 nt, Artificial Sequence
  Description of Artificial Sequence: Synthetic oligonucleotide
aaagguggagccuauucgg

SEQ ID NO: 1024632 - RNA, 19 nt, Artificial Sequence
  Description of Artificial Sequence: Synthetic oligonucleotide
uguuccauaacucccauac

SEQ ID NO: 1024633 - RNA, 19 nt, Artificial Sequence
  Description of Artificial Sequence: Synthetic oligonucleotide
gaaaugcucgugcagaacg

SEQ ID NO: 1024634 - RNA, 19 nt, Artificial Sequence
  Description of Artificial Sequence: Synthetic oligonucleotide
auuucugggacugacagac

SEQ ID NO: 1024635 - RNA, 19 nt, Artificial Sequence
  Description of Artificial Sequence: Synthetic oligonucleotide
cauuauccagaaaauaagg

SEQ ID NO: 1024636 - RNA, 19 nt, Artificial Sequence
  Description of Artificial Sequence: Synthetic oligonucleotide
uccuauagugacaugaaca

SEQ ID NO: 1024637 - RNA, 19 nt, Artificial Sequence
  Description of Artificial Sequence: Synthetic oligonucleotide
agauuuauaacaucuauuu

SEQ ID NO: 1024638 - RNA, 19 nt, Artificial Sequence
  Description of Artificial Sequence: Synthetic oligonucleotide
uuauuggaauaccuggagg

SEQ ID NO: 1024639 - RNA, 19 nt, Artificial Sequence
  Description of Artificial Sequence: Synthetic oligonucleotide
ugguauaacuucaaguccc

SEQ ID NO: 1024640 - RNA, 19 nt, Artificial Sequence
  Description of Artificial Sequence: Synthetic oligonucleotide
aucuacuuccaacaguggc

SEQ ID NO: 1024641 - RNA, 19 nt, Artificial Sequence
  Description of Artificial Sequence: Synthetic oligonucleotide
uauuguugguauaagagau

SEQ ID NO: 1024642 - RNA, 19 nt, Artificial Sequence
  Description of Artificial Sequence: Synthetic oligonucleotide
uugguauaagagauggagg

SEQ ID NO: 1024643 - RNA, 19 nt, Artificial Sequence
  Description of Artificial Sequence: Synthetic oligonucleotide
uuuccauacacucuucccc

SEQ ID NO: 1024644 - RNA, 19 nt, Artificial Sequence
  Description of Artificial Sequence: Synthetic oligonucleotide
uucuaacagaacaagauua

SEQ ID NO: 1024645 - RNA, 19 nt, Artificial Sequence
  Description of Artificial Sequence: Synthetic oligonucleotide
ugguauaagagauggagga

SEQ ID NO: 1024646 - RNA, 19 nt, Artificial Sequence
  Description of Artificial Sequence: Synthetic oligonucleotide
guaaucuccugcuuggugg

SEQ ID NO: 1024647 - RNA, 19 nt, Artificial Sequence
  Description of Artificial Sequence: Synthetic oligonucleotide
uauuaagauuuacuggcgc

SEQ ID NO: 1024648 - RNA, 19 nt, Artificial Sequence
  Description of Artificial Sequence: Synthetic oligonucleotide
agcucuauggcgcucauag

SEQ ID NO: 1024649 - RNA, 19 nt, Artificial Sequence
  Description of Artificial Sequence: Synthetic oligonucleotide
ucuguaucgcucuucauca

SEQ ID NO: 1024650 - RNA, 19 nt, Artificial Sequence
  Description of Artificial Sequence: Synthetic oligonucleotide
guugguauaagagauggag

SEQ ID NO: 1024651 - RNA, 19 nt, Artificial Sequence
  Description of Artificial Sequence: Synthetic oligonucleotide
ucuacuuccaacaguggca

SEQ ID NO: 1024652 - RNA, 19 nt, Artificial Sequence
  Description of Artificial Sequence: Synthetic oligonucleotide
gaugguuauuguuugacca

SEQ ID NO: 1024653 - RNA, 19 nt, Artificial Sequence
  Description of Artificial Sequence: Synthetic oligonucleotide
ugcaccguaauuuuauuug

SEQ ID NO: 1024654 - RNA, 19 nt, Artificial Sequence
  Description of Artificial Sequence: Synthetic oligonucleotide
aaggagauuuauaacaucu

SEQ ID NO: 1024655 - RNA, 19 nt, Artificial Sequence
  Description of Artificial Sequence: Synthetic oligonucleotide
agaaaggaccuguauauug

SEQ ID NO: 1024656 - RNA, 19 nt, Artificial Sequence
  Description of Artificial Sequence: Synthetic oligonucleotide
ucaagucccauucguaucc

SEQ ID NO: 1024657 - RNA, 19 nt, Artificial Sequence
  Description of Artificial Sequence: Synthetic oligonucleotide
ucaucuagauccuuuugcc

SEQ ID NO: 1024658 - RNA, 19 nt, Artificial Sequence
  Description of Artificial Sequence: Synthetic oligonucleotide
acaugcacgucccaugggc

SEQ ID NO: 1024659 - RNA, 19 nt, Artificial Sequence
  Description of Artificial Sequence: Synthetic oligonucleotide
gucauaaccagaagaaugg

SEQ ID NO: 1024660 - RNA, 19 nt, Artificial Sequence
  Description of Artificial Sequence: Synthetic oligonucleotide
aacguuucauucuaacaga

SEQ ID NO: 1024661 - RNA, 19 nt, Artificial Sequence
  Description of Artificial Sequence: Synthetic oligonucleotide
uaaacguuucauucuaaca

SEQ ID NO: 1024662 - RNA, 19 nt, Artificial Sequence
  Description of Artificial Sequence: Synthetic oligonucleotide
uucaugacgacgucuacug

SEQ ID NO: 1024663 - RNA, 19 nt, Artificial Sequence
  Description of Artificial Sequence: Synthetic oligonucleotide
aacucccauacuguggugc

SEQ ID NO: 1024664 - RNA, 19 nt, Artificial Sequence
  Description of Artificial Sequence: Synthetic oligonucleotide
aauggaggugguuugcuga

SEQ ID NO: 1024665 - RNA, 19 nt, Artificial Sequence
  Description of Artificial Sequence: Synthetic oligonucleotide
auaacaucuauuucuggga

SEQ ID NO: 1024666 - RNA, 19 nt, Artificial Sequence
  Description of Artificial Sequence: Synthetic oligonucleotide
agcggaacugguaagaugg

SEQ ID NO: 1024667 - RNA, 19 nt, Artificial Sequence
  Description of Artificial Sequence: Synthetic oligonucleotide
auggcggagaaguaaacuc

SEQ ID NO: 1024668 - RNA, 19 nt, Artificial Sequence
  Description of Artificial Sequence: Synthetic oligonucleotide
acagaacaagauuaaaggu

SEQ ID NO: 1024669 - RNA, 19 nt, Artificial Sequence
  Description of Artificial Sequence: Synthetic oligonucleotide
uucccgacuagcucuaugg

SEQ ID NO: 1024670 - RNA, 19 nt, Artificial Sequence
  Description of Artificial Sequence: Synthetic oligonucleotide
ucuucgugcguaauagucc

SEQ ID NO: 1024671 - RNA, 19 nt, Artificial Sequence
  Description of Artificial Sequence: Synthetic oligonucleotide
uauaagagauggaggagga

SEQ ID NO: 1024672 - RNA, 19 nt, Artificial Sequence
  Description of Artificial Sequence: Synthetic oligonucleotide
auaauugaaauaaaucaga

SEQ ID NO: 1024673 - RNA, 19 nt, Artificial Sequence
  Description of Artificial Sequence: Synthetic oligonucleotide
cuguauauugcuguuuucg

SEQ ID NO: 1024674 - RNA, 19 nt, Artificial Sequence
  Description of Artificial Sequence: Synthetic oligonucleotide
cauaaccagaagaauggcc

SEQ ID NO: 1024675 - RNA, 19 nt, Artificial Sequence
  Description of Artificial Sequence: Synthetic oligonucleotide
cauauggaaaugcucgugc

SEQ ID NO: 1024676 - RNA, 19 nt, Artificial Sequence
  Description of Artificial Sequence: Synthetic oligonucleotide
uauggaaaugcucgugcag

SEQ ID NO: 1024677 - RNA, 19 nt, Artificial Sequence
  Description of Artificial Sequence: Synthetic oligonucleotide
ucuaacagaacaagauuaa

SEQ ID NO: 1024678 - RNA, 19 nt, Artificial Sequence
  Description of Artificial Sequence: Synthetic oligonucleotide
agauccuuuugccaaauca

SEQ ID NO: 1024679 - RNA, 19 nt, Artificial Sequence
  Description of Artificial Sequence: Synthetic oligonucleotide
guuauuggaauaccuggag

SEQ ID NO: 1024680 - RNA, 19 nt, Artificial Sequence
  Description of Artificial Sequence: Synthetic oligonucleotide
gacgucuacuguuacugcg

SEQ ID NO: 1024681 - RNA, 19 nt, Artificial Sequence
  Description of Artificial Sequence: Synthetic oligonucleotide
uacaguuauuggaauaccu

SEQ ID NO: 1024682 - RNA, 19 nt, Artificial Sequence
  Description of Artificial Sequence: Synthetic oligonucleotide
auuaagauuuacuggcgcu

SEQ ID NO: 1024683 - RNA, 19 nt, Artificial Sequence
  Description of Artificial Sequence: Synthetic oligonucleotide
auaacucccauacuguggu

SEQ ID NO: 1024684 - RNA, 19 nt, Artificial Sequence
  Description of Artificial Sequence: Synthetic oligonucleotide
cauaacucccauacugugg

SEQ ID NO: 1024685 - RNA, 19 nt, Artificial Sequence
  Description of Artificial Sequence: Synthetic oligonucleotide
gucacuuucgguuuggaca

SEQ ID NO: 1024686 - RNA, 19 nt, Artificial Sequence
  Description of Artificial Sequence: Synthetic oligonucleotide
uaaaagguggagccuauuc

SEQ ID NO: 1024687 - RNA, 19 nt, Artificial Sequence
  Description of Artificial Sequence: Synthetic oligonucleotide
uguauauugcuguuuucgu

SEQ ID NO: 1024688 - RNA, 19 nt, Artificial Sequence
  Description of Artificial Sequence: Synthetic oligonucleotide
uaacaucuauuucugggac

SEQ ID NO: 1024689 - RNA, 19 nt, Artificial Sequence
  Description of Artificial Sequence: Synthetic oligonucleotide
acauuauccagaaaauaag

SEQ ID NO: 1024690 - RNA, 19 nt, Artificial Sequence
  Description of Artificial Sequence: Synthetic oligonucleotide
aaugcucgugcagaacggc

SEQ ID NO: 1024691 - RNA, 19 nt, Artificial Sequence
  Description of Artificial Sequence: Synthetic oligonucleotide
auaaccagaagaauggcca

SEQ ID NO: 1024692 - RNA, 19 nt, Artificial Sequence
  Description of Artificial Sequence: Synthetic oligonucleotide
uugaccaaugacaucaauu

SEQ ID NO: 1024693 - RNA, 19 nt, Artificial Sequence
  Description of Artificial Sequence: Synthetic oligonucleotide
cuuuuguagauggaagugc

SEQ ID NO: 1024694 - RNA, 19 nt, Artificial Sequence
  Description of Artificial Sequence: Synthetic oligonucleotide
ugaugguuauuguuugacc

SEQ ID NO: 1024695 - RNA, 19 nt, Artificial Sequence
  Description of Artificial Sequence: Synthetic oligonucleotide
aauuguugucuacuucagu

SEQ ID NO: 1024696 - RNA, 19 nt, Artificial Sequence
  Description of Artificial Sequence: Synthetic oligonucleotide
gaaaggaccuguauauugc

SEQ ID NO: 1024697 - RNA, 19 nt, Artificial Sequence
  Description of Artificial Sequence: Synthetic oligonucleotide
aaauggaggugguuugcug

SEQ ID NO: 1024698 - RNA, 19 nt, Artificial Sequence
  Description of Artificial Sequence: Synthetic oligonucleotide
cuucgugcguaauaguccc

SEQ ID NO: 1024699 - RNA, 19 nt, Artificial Sequence
  Description of Artificial Sequence: Synthetic oligonucleotide
uugacuuugguuccuguau

SEQ ID NO: 1024700 - RNA, 19 nt, Artificial Sequence
  Description of Artificial Sequence: Synthetic oligonucleotide
aacaucuauuucugggacu

SEQ ID NO: 1024701 - RNA, 19 nt, Artificial Sequence
  Description of Artificial Sequence: Synthetic oligonucleotide
aaguaaacucagcuuuugu

SEQ ID NO: 1024702 - RNA, 19 nt, Artificial Sequence
  Description of Artificial Sequence: Synthetic oligonucleotide
uaacugguauaacuucaag

SEQ ID NO: 1024703 - RNA, 19 nt, Artificial Sequence
  Description of Artificial Sequence: Synthetic oligonucleotide
uccauaacucccauacugu

SEQ ID NO: 1024704 - RNA, 19 nt, Artificial Sequence
  Description of Artificial Sequence: Synthetic oligonucleotide
aguucucccuugcugcacc

SEQ ID NO: 1024705 - RNA, 19 nt, Artificial Sequence
  Description of Artificial Sequence: Synthetic oligonucleotide
auauuaagauuuacuggcg

SEQ ID NO: 1024706 - RNA, 19 nt, Artificial Sequence
  Description of Artificial Sequence: Synthetic oligonucleotide
ucugaauuuccaguucucc

SEQ ID NO: 1024707 - RNA, 19 nt, Artificial Sequence
  Description of Artificial Sequence: Synthetic oligonucleotide
aguaaacucagcuuuugua

SEQ ID NO: 1024708 - RNA, 19 nt, Artificial Sequence
  Description of Artificial Sequence: Synthetic oligonucleotide
uccuguauuuccauacacu

SEQ ID NO: 1024709 - RNA, 19 nt, Artificial Sequence
  Description of Artificial Sequence: Synthetic oligonucleotide
uccgccaugguuuaucuuc

SEQ ID NO: 1024710 - RNA, 19 nt, Artificial Sequence
  Description of Artificial Sequence: Synthetic oligonucleotide
aacaguggcacuccauuaa

SEQ ID NO: 1024711 - RNA, 19 nt, Artificial Sequence
  Description of Artificial Sequence: Synthetic oligonucleotide
uggaggauuagcacuggca

SEQ ID NO: 1024712 - RNA, 19 nt, Artificial Sequence
  Description of Artificial Sequence: Synthetic oligonucleotide
aaauuguugucuacuucag

SEQ ID NO: 1024713 - RNA, 19 nt, Artificial Sequence
  Description of Artificial Sequence: Synthetic oligonucleotide
uuucgguuuggacacgcca

SEQ ID NO: 1024714 - RNA, 19 nt, Artificial Sequence
  Description of Artificial Sequence: Synthetic oligonucleotide
aggucuaccccuuugacuu

SEQ ID NO: 1024715 - RNA, 19 nt, Artificial Sequence
  Description of Artificial Sequence: Synthetic oligonucleotide
uaaagguauauuucuucaa

SEQ ID NO: 1024716 - RNA, 19 nt, Artificial Sequence
  Description of Artificial Sequence: Synthetic oligonucleotide
aaacucagcuuuuguagau

SEQ ID NO: 1024717 - RNA, 19 nt, Artificial Sequence
  Description of Artificial Sequence: Synthetic oligonucleotide
agaacaagauuaaagguau

SEQ ID NO: 1024718 - RNA, 19 nt, Artificial Sequence
  Description of Artificial Sequence: Synthetic oligonucleotide
aucuagauccuuuugccaa

SEQ ID NO: 1024719 - RNA, 19 nt, Artificial Sequence
  Description of Artificial Sequence: Synthetic oligonucleotide
guggaaggugaguaggagg

SEQ ID NO: 1024720 - RNA, 19 nt, Artificial Sequence
  Description of Artificial Sequence: Synthetic oligonucleotide
ugaacaacgauggcggaga

SEQ ID NO: 1024721 - RNA, 19 nt, Artificial Sequence
  Description of Artificial Sequence: Synthetic oligonucleotide
aguuaaacguuucauucua

SEQ ID NO: 1024722 - RNA, 19 nt, Artificial Sequence
  Description of Artificial Sequence: Synthetic oligonucleotide
uguaucgcucuucaucacu

SEQ ID NO: 1024723 - RNA, 19 nt, Artificial Sequence
  Description of Artificial Sequence: Synthetic oligonucleotide
cagacauaaaagguggagc

SEQ ID NO: 1024724 - RNA, 19 nt, Artificial Sequence
  Description of Artificial Sequence: Synthetic oligonucleotide
cuuaugucuccugugacug

SEQ ID NO: 1024725 - RNA, 19 nt, Artificial Sequence
  Description of Artificial Sequence: Synthetic oligonucleotide
guuauuguuugaccaauga

SEQ ID NO: 1024726 - RNA, 19 nt, Artificial Sequence
  Description of Artificial Sequence: Synthetic oligonucleotide
aggugcaucaaggucuacc

SEQ ID NO: 1024727 - RNA, 19 nt, Artificial Sequence
  Description of Artificial Sequence: Synthetic oligonucleotide
ugcguaauagucccacugu

SEQ ID NO: 1024728 - RNA, 19 nt, Artificial Sequence
  Description of Artificial Sequence: Synthetic oligonucleotide
cagguaaucuccugcuugg

SEQ ID NO: 1024729 - RNA, 19 nt, Artificial Sequence
  Description of Artificial Sequence: Synthetic oligonucleotide
uggcggagaaguaaacuca

SEQ ID NO: 1024730 - RNA, 19 nt, Artificial Sequence
  Description of Artificial Sequence: Synthetic oligonucleotide
acaucuauuucugggacug

SEQ ID NO: 1024731 - RNA, 19 nt, Artificial Sequence
  Description of Artificial Sequence: Synthetic oligonucleotide
aaaugcucgugcagaacgg

SEQ ID NO: 1024732 - RNA, 19 nt, Artificial Sequence
  Description of Artificial Sequence: Synthetic oligonucleotide
ugacaucaauugcaccagg

SEQ ID NO: 1024733 - RNA, 19 nt, Artificial Sequence
  Description of Artificial Sequence: Synthetic oligonucleotide
aguaagcuuuccaaguauc

SEQ ID NO: 1024734 - RNA, 19 nt, Artificial Sequence
  Description of Artificial Sequence: Synthetic oligonucleotide
cagaacaagauuaaaggua

SEQ ID NO: 1024735 - RNA, 19 nt, Artificial Sequence
  Description of Artificial Sequence: Synthetic oligonucleotide
uccauuaaugcugccaggu

SEQ ID NO: 1024736 - RNA, 19 nt, Artificial Sequence
  Description of Artificial Sequence: Synthetic oligonucleotide
ugcgagaggacuugugucu

SEQ ID NO: 1024737 - RNA, 19 nt, Artificial Sequence
  Description of Artificial Sequence: Synthetic oligonucleotide
ucugugacgucguucucug

SEQ ID NO: 1024738 - RNA, 19 nt, Artificial Sequence
  Description of Artificial Sequence: Synthetic oligonucleotide
gagccuauucggcaggggc

SEQ ID NO: 1024739 - RNA, 19 nt, Artificial Sequence
  Description of Artificial Sequence: Synthetic oligonucleotide
uucguauccucuuuuguuu

SEQ ID NO: 1024740 - RNA, 19 nt, Artificial Sequence
  Description of Artificial Sequence: Synthetic oligonucleotide
uaaggagauuuauaacauc

SEQ ID NO: 1024741 - RNA, 19 nt, Artificial Sequence
  Description of Artificial Sequence: Synthetic oligonucleotide
ugggccgccauacaagcca

SEQ ID NO: 1024742 - RNA, 19 nt, Artificial Sequence
  Description of Artificial Sequence: Synthetic oligonucleotide
caagauuaaagguauauuu

SEQ ID NO: 1024743 - RNA, 19 nt, Artificial Sequence
  Description of Artificial Sequence: Synthetic oligonucleotide
auucguauccucuuuuguu

SEQ ID NO: 1024744 - RNA, 19 nt, Artificial Sequence
  Description of Artificial Sequence: Synthetic oligonucleotide
uguuugguaguguccacaa

SEQ ID NO: 1024745 - RNA, 19 nt, Artificial Sequence
  Description of Artificial Sequence: Synthetic oligonucleotide
uauucccuguaucuguauc

SEQ ID NO: 1024746 - RNA, 19 nt, Artificial Sequence
  Description of Artificial Sequence: Synthetic oligonucleotide
agauuuacuggcgcuguuc

SEQ ID NO: 1024747 - RNA, 19 nt, Artificial Sequence
  Description of Artificial Sequence: Synthetic oligonucleotide
cauuaaagccauaauugaa

SEQ ID NO: 1024748 - RNA, 19 nt, Artificial Sequence
  Description of Artificial Sequence: Synthetic oligonucleotide
acugcgagaggacuugugu

SEQ ID NO: 1024749 - RNA, 19 nt, Artificial Sequence
  Description of Artificial Sequence: Synthetic oligonucleotide
ucuccuauagugacaugaa

SEQ ID NO: 1024750 - RNA, 19 nt, Artificial Sequence
  Description of Artificial Sequence: Synthetic oligonucleotide
ucuuuccgcauauucccug

SEQ ID NO: 1024751 - RNA, 19 nt, Artificial Sequence
  Description of Artificial Sequence: Synthetic oligonucleotide
uugugcuuaugucuccugu

SEQ ID NO: 1024752 - RNA, 19 nt, Artificial Sequence
  Description of Artificial Sequence: Synthetic oligonucleotide
auaaggagauuuauaacau

SEQ ID NO: 1024753 - RNA, 19 nt, Artificial Sequence
  Description of Artificial Sequence: Synthetic oligonucleotide
acuuucgguuuggacacgc

SEQ ID NO: 1024754 - RNA, 19 nt, Artificial Sequence
  Description of Artificial Sequence: Synthetic oligonucleotide
ucauaaccagaagaauggc

SEQ ID NO: 1024755 - RNA, 19 nt, Artificial Sequence
  Description of Artificial Sequence: Synthetic oligonucleotide
caucaauugcaccagguaa

SEQ ID NO: 1024756 - RNA, 19 nt, Artificial Sequence
  Description of Artificial Sequence: Synthetic oligonucleotide
uucgguuuggacacgccau

SEQ ID NO: 1024757 - RNA, 19 nt, Artificial Sequence
  Description of Artificial Sequence: Synthetic oligonucleotide
caaugacaucaauugcacc

SEQ ID NO: 1024758 - RNA, 19 nt, Artificial Sequence
  Description of Artificial Sequence: Synthetic oligonucleotide
uucaagucccauucguauc

SEQ ID NO: 1024759 - RNA, 19 nt, Artificial Sequence
  Description of Artificial Sequence: Synthetic oligonucleotide
ccuucuacucggcugaugg

SEQ ID NO: 1024760 - RNA, 19 nt, Artificial Sequence
  Description of Artificial Sequence: Synthetic oligonucleotide
caugggccgccauacaagc

SEQ ID NO: 1024761 - RNA, 19 nt, Artificial Sequence
  Description of Artificial Sequence: Synthetic oligonucleotide
uugccauauggaaaugcuc

SEQ ID NO: 1024762 - RNA, 19 nt, Artificial Sequence
  Description of Artificial Sequence: Synthetic oligonucleotide
uucucugaauuuccaguuc

SEQ ID NO: 1024763 - RNA, 19 nt, Artificial Sequence
  Description of Artificial Sequence: Synthetic oligonucleotide
gugcguaauagucccacug

SEQ ID NO: 1024764 - RNA, 19 nt, Artificial Sequence
  Description of Artificial Sequence: Synthetic oligonucleotide
uaagauuuacuggcgcugu

SEQ ID NO: 1024765 - RNA, 19 nt, Artificial Sequence
  Description of Artificial Sequence: Synthetic oligonucleotide
cauugccauauggaaaugc

SEQ ID NO: 1024766 - RNA, 19 nt, Artificial Sequence
  Description of Artificial Sequence: Synthetic oligonucleotide
aagucccauucguauccuc

SEQ ID NO: 1024767 - RNA, 19 nt, Artificial Sequence
  Description of Artificial Sequence: Synthetic oligonucleotide
ugucagaaaggaccuguau

SEQ ID NO: 1024768 - RNA, 19 nt, Artificial Sequence
  Description of Artificial Sequence: Synthetic oligonucleotide
uguugguauaagagaugga

SEQ ID NO: 1024769 - RNA, 19 nt, Artificial Sequence
  Description of Artificial Sequence: Synthetic oligonucleotide
uuuacuggcgcuguuccau

SEQ ID NO: 1024770 - RNA, 19 nt, Artificial Sequence
  Description of Artificial Sequence: Synthetic oligonucleotide
gguuccuguauuuccauac

SEQ ID NO: 1024771 - RNA, 19 nt, Artificial Sequence
  Description of Artificial Sequence: Synthetic oligonucleotide
guaucuguaucgcucuuca

SEQ ID NO: 1024772 - RNA, 19 nt, Artificial Sequence
  Description of Artificial Sequence: Synthetic oligonucleotide
aucaaggucuaccccuuug

SEQ ID NO: 1024773 - RNA, 19 nt, Artificial Sequence
  Description of Artificial Sequence: Synthetic oligonucleotide
uccgcauauucccuguauc

SEQ ID NO: 1024774 - RNA, 19 nt, Artificial Sequence
  Description of Artificial Sequence: Synthetic oligonucleotide
ucuagauccuuuugccaaa

SEQ ID NO: 1024775 - RNA, 19 nt, Artificial Sequence
  Description of Artificial Sequence: Synthetic oligonucleotide
gguacaguuauuggaauac

SEQ ID NO: 1024776 - RNA, 19 nt, Artificial Sequence
  Description of Artificial Sequence: Synthetic oligonucleotide
uguuacugcgagaggacuu

SEQ ID NO: 1024777 - RNA, 19 nt, Artificial Sequence
  Description of Artificial Sequence: Synthetic oligonucleotide
acuguuacugcgagaggac

SEQ ID NO: 1024778 - RNA, 19 nt, Artificial Sequence
  Description of Artificial Sequence: Synthetic oligonucleotide
auugccauauggaaaugcu

SEQ ID NO: 1024779 - RNA, 19 nt, Artificial Sequence
  Description of Artificial Sequence: Synthetic oligonucleotide
aaugucuccuauagugaca

SEQ ID NO: 1024780 - RNA, 19 nt, Artificial Sequence
  Description of Artificial Sequence: Synthetic oligonucleotide
ggacacgccauuuucagca

SEQ ID NO: 1024781 - RNA, 19 nt, Artificial Sequence
  Description of Artificial Sequence: Synthetic oligonucleotide
ccuguauuuccauacacuc

SEQ ID NO: 1024782 - RNA, 19 nt, Artificial Sequence
  Description of Artificial Sequence: Synthetic oligonucleotide
gucuccuauagugacauga

SEQ ID NO: 1024783 - RNA, 19 nt, Artificial Sequence
  Description of Artificial Sequence: Synthetic oligonucleotide
cugaugguuauuguuugac

SEQ ID NO: 1024784 - RNA, 19 nt, Artificial Sequence
  Description of Artificial Sequence: Synthetic oligonucleotide
uucggcgcuuuccuguuca

SEQ ID NO: 1024785 - RNA, 19 nt, Artificial Sequence
  Description of Artificial Sequence: Synthetic oligonucleotide
uuccaaguaucuucauuaa

SEQ ID NO: 1024786 - RNA, 19 nt, Artificial Sequence
  Description of Artificial Sequence: Synthetic oligonucleotide
uuuucguuugcccgccguc

SEQ ID NO: 1024787 - RNA, 19 nt, Artificial Sequence
  Description of Artificial Sequence: Synthetic oligonucleotide
accuguauauugcuguuuu

SEQ ID NO: 1024788 - RNA, 19 nt, Artificial Sequence
  Description of Artificial Sequence: Synthetic oligonucleotide
augcacgucccaugggccg

SEQ ID NO: 1024789 - RNA, 19 nt, Artificial Sequence
  Description of Artificial Sequence: Synthetic oligonucleotide
caugcacgucccaugggcc

SEQ ID NO: 1024790 - RNA, 19 nt, Artificial Sequence
  Description of Artificial Sequence: Synthetic oligonucleotide
cucggucuuucucucuucg

SEQ ID NO: 1024791 - RNA, 19 nt, Artificial Sequence
  Description of Artificial Sequence: Synthetic oligonucleotide
ugacuuugguuccuguauu

SEQ ID NO: 1024792 - RNA, 19 nt, Artificial Sequence
  Description of Artificial Sequence: Synthetic oligonucleotide
ucuacucggcugaugguua

SEQ ID NO: 1024793 - RNA, 19 nt, Artificial Sequence
  Description of Artificial Sequence: Synthetic oligonucleotide
acuggcgcuguuccauaac

SEQ ID NO: 1024794 - RNA, 19 nt, Artificial Sequence
  Description of Artificial Sequence: Synthetic oligonucleotide
ucaauugcaccagguaauc

SEQ ID NO: 1024795 - RNA, 19 nt, Artificial Sequence
  Description of Artificial Sequence: Synthetic oligonucleotide
auccagaaaauaaggagau

SEQ ID NO: 1024796 - RNA, 19 nt, Artificial Sequence
  Description of Artificial Sequence: Synthetic oligonucleotide
ccgacuagcucuauggcgc

SEQ ID NO: 1024797 - RNA, 19 nt, Artificial Sequence
  Description of Artificial Sequence: Synthetic oligonucleotide
cuccuauagugacaugaac

SEQ ID NO: 1024798 - RNA, 19 nt, Artificial Sequence
  Description of Artificial Sequence: Synthetic oligonucleotide
gagcggaacugguaagaug

SEQ ID NO: 1024799 - RNA, 19 nt, Artificial Sequence
  Description of Artificial Sequence: Synthetic oligonucleotide
aucaauugcaccagguaau

SEQ ID NO: 1024800 - RNA, 19 nt, Artificial Sequence
  Description of Artificial Sequence: Synthetic oligonucleotide
cuccauuaaugcugccagg

SEQ ID NO: 1024801 - RNA, 19 nt, Artificial Sequence
  Description of Artificial Sequence: Synthetic oligonucleotide
guuacugcgagaggacuug

SEQ ID NO: 1024802 - RNA, 19 nt, Artificial Sequence
  Description of Artificial Sequence: Synthetic oligonucleotide
ucccgacuagcucuauggc

SEQ ID NO: 1024803 - RNA, 19 nt, Artificial Sequence
  Description of Artificial Sequence: Synthetic oligonucleotide
caacauugccauauggaaa

SEQ ID NO: 1024804 - RNA, 19 nt, Artificial Sequence
  Description of Artificial Sequence: Synthetic oligonucleotide
acauaaaagguggagccua

SEQ ID NO: 1024805 - RNA, 19 nt, Artificial Sequence
  Description of Artificial Sequence: Synthetic oligonucleotide
cucauagccucuuuccgca

SEQ ID NO: 1024806 - RNA, 19 nt, Artificial Sequence
  Description of Artificial Sequence: Synthetic oligonucleotide
uguuuucguuugcccgccg

SEQ ID NO: 1024807 - RNA, 19 nt, Artificial Sequence
  Description of Artificial Sequence: Synthetic oligonucleotide
guaucgcucuucaucacug

SEQ ID NO: 1024808 - RNA, 19 nt, Artificial Sequence
  Description of Artificial Sequence: Synthetic oligonucleotide
ugcugaaauuguugucuac

SEQ ID NO: 1024809 - RNA, 19 nt, Artificial Sequence
  Description of Artificial Sequence: Synthetic oligonucleotide
ggcgcuguuccauaacucc

SEQ ID NO: 1024810 - RNA, 19 nt, Artificial Sequence
  Description of Artificial Sequence: Synthetic oligonucleotide
gcaacauugccauauggaa

SEQ ID NO: 1024811 - RNA, 19 nt, Artificial Sequence
  Description of Artificial Sequence: Synthetic oligonucleotide
uguaucuguaucgcucuuc

SEQ ID NO: 1024812 - RNA, 19 nt, Artificial Sequence
  Description of Artificial Sequence: Synthetic oligonucleotide
guacaguuauuggaauacc

SEQ ID NO: 1024813 - RNA, 19 nt, Artificial Sequence
  Description of Artificial Sequence: Synthetic oligonucleotide
gguauaagagauggaggag

SEQ ID NO: 1024814 - RNA, 19 nt, Artificial Sequence
  Description of Artificial Sequence: Synthetic oligonucleotide
gcuguuuucguuugcccgc

SEQ ID NO: 1024815 - RNA, 19 nt, Artificial Sequence
  Description of Artificial Sequence: Synthetic oligonucleotide
ugugaucccgcucccgcuc

SEQ ID NO: 1024816 - RNA, 19 nt, Artificial Sequence
  Description of Artificial Sequence: Synthetic oligonucleotide
uuucguuugcccgccgucu

SEQ ID NO: 1024817 - RNA, 19 nt, Artificial Sequence
  Description of Artificial Sequence: Synthetic oligonucleotide
uacugcgagaggacuugug

SEQ ID NO: 1024818 - RNA, 19 nt, Artificial Sequence
  Description of Artificial Sequence: Synthetic oligonucleotide
ucuacuucaguggcagauc

SEQ ID NO: 1024819 - RNA, 19 nt, Artificial Sequence
  Description of Artificial Sequence: Synthetic oligonucleotide
auagccucuuuccgcauau

SEQ ID NO: 1024820 - RNA, 19 nt, Artificial Sequence
  Description of Artificial Sequence: Synthetic oligonucleotide
uucuacucggcugaugguu

SEQ ID NO: 1024821 - RNA, 19 nt, Artificial Sequence
  Description of Artificial Sequence: Synthetic oligonucleotide
cccgucuugaacaacgaug

SEQ ID NO: 1024822 - RNA, 19 nt, Artificial Sequence
  Description of Artificial Sequence: Synthetic oligonucleotide
aggcccgucuugaacaacg

SEQ ID NO: 1024823 - RNA, 19 nt, Artificial Sequence
  Description of Artificial Sequence: Synthetic oligonucleotide
gugcuuaugucuccuguga

SEQ ID NO: 1024824 - RNA, 19 nt, Artificial Sequence
  Description of Artificial Sequence: Synthetic oligonucleotide
cugcgagaggacuuguguc

SEQ ID NO: 1024825 - RNA, 19 nt, Artificial Sequence
  Description of Artificial Sequence: Synthetic oligonucleotide
uuccgcauauucccuguau

SEQ ID NO: 1024826 - RNA, 19 nt, Artificial Sequence
  Description of Artificial Sequence: Synthetic oligonucleotide
auuuacuggcgcuguucca

SEQ ID NO: 1024827 - RNA, 19 nt, Artificial Sequence
  Description of Artificial Sequence: Synthetic oligonucleotide
agguggagccuauucggca

SEQ ID NO: 1024828 - RNA, 19 nt, Artificial Sequence
  Description of Artificial Sequence: Synthetic oligonucleotide
aagauuuacuggcgcuguu

SEQ ID NO: 1024829 - RNA, 19 nt, Artificial Sequence
  Description of Artificial Sequence: Synthetic oligonucleotide
ucucuucgugcguaauagu

SEQ ID NO: 1024830 - RNA, 19 nt, Artificial Sequence
  Description of Artificial Sequence: Synthetic oligonucleotide
gcacaugcacgucccaugg

SEQ ID NO: 1024831 - RNA, 19 nt, Artificial Sequence
  Description of Artificial Sequence: Synthetic oligonucleotide
cagucucagucacuuucgg

SEQ ID NO: 1024832 - RNA, 19 nt, Artificial Sequence
  Description of Artificial Sequence: Synthetic oligonucleotide
ggcugaugguuauuguuug

SEQ ID NO: 1024833 - RNA, 19 nt, Artificial Sequence
  Description of Artificial Sequence: Synthetic oligonucleotide
gcucauagccucuuuccgc

SEQ ID NO: 1024834 - RNA, 19 nt, Artificial Sequence
  Description of Artificial Sequence: Synthetic oligonucleotide
cuuucgguuuggacacgcc

SEQ ID NO: 1024835 - RNA, 19 nt, Artificial Sequence
  Description of Artificial Sequence: Synthetic oligonucleotide
gacgggcucacugccagcc

SEQ ID NO: 1024836 - RNA, 19 nt, Artificial Sequence
  Description of Artificial Sequence: Synthetic oligonucleotide
acuuucaugacgacgucua

SEQ ID NO: 1024837 - RNA, 19 nt, Artificial Sequence
  Description of Artificial Sequence: Synthetic oligonucleotide
ccaaaucuacuuccaacag

SEQ ID NO: 1024838 - RNA, 19 nt, Artificial Sequence
  Description of Artificial Sequence: Synthetic oligonucleotide
ucgugcguaauagucccac

SEQ ID NO: 1024839 - RNA, 19 nt, Artificial Sequence
  Description of Artificial Sequence: Synthetic oligonucleotide
ugcugccaggugcaucaag

SEQ ID NO: 1024840 - RNA, 19 nt, Artificial Sequence
  Description of Artificial Sequence: Synthetic oligonucleotide
ucguauccucuuuuguuuu

SEQ ID NO: 1024841 - RNA, 19 nt, Artificial Sequence
  Description of Artificial Sequence: Synthetic oligonucleotide
agggagcggaacugguaag

SEQ ID NO: 1024842 - RNA, 19 nt, Artificial Sequence
  Description of Artificial Sequence: Synthetic oligonucleotide
cccgacuagcucuauggcg

SEQ ID NO: 1024843 - RNA, 19 nt, Artificial Sequence
  Description of Artificial Sequence: Synthetic oligonucleotide
acuagcucuauggcgcuca

SEQ ID NO: 1024844 - RNA, 19 nt, Artificial Sequence
  Description of Artificial Sequence: Synthetic oligonucleotide
agucccauucguauccucu

SEQ ID NO: 1024845 - RNA, 19 nt, Artificial Sequence
  Description of Artificial Sequence: Synthetic oligonucleotide
cucggguccgcucucuuuc

SEQ ID NO: 1024846 - RNA, 19 nt, Artificial Sequence
  Description of Artificial Sequence: Synthetic oligonucleotide
cugacaguuggaggagggg

SEQ ID NO: 1024847 - RNA, 19 nt, Artificial Sequence
  Description of Artificial Sequence: Synthetic oligonucleotide
ugacgacgucuacuguuac

SEQ ID NO: 1024848 - RNA, 19 nt, Artificial Sequence
  Description of Artificial Sequence: Synthetic oligonucleotide
acuuucuauuguugguaua

SEQ ID NO: 1024849 - RNA, 19 nt, Artificial Sequence
  Description of Artificial Sequence: Synthetic oligonucleotide
cucagucacuuucgguuug

SEQ ID NO: 1024850 - RNA, 19 nt, Artificial Sequence
  Description of Artificial Sequence: Synthetic oligonucleotide
auauucccuguaucuguau

SEQ ID NO: 1024851 - RNA, 19 nt, Artificial Sequence
  Description of Artificial Sequence: Synthetic oligonucleotide
uggcgcuguuccauaacuc

SEQ ID NO: 1024852 - RNA, 19 nt, Artificial Sequence
  Description of Artificial Sequence: Synthetic oligonucleotide
auggaagugcugcuucuuu

SEQ ID NO: 1024853 - RNA, 19 nt, Artificial Sequence
  Description of Artificial Sequence: Synthetic oligonucleotide
uugcccgccgucuuccuuc

SEQ ID NO: 1024854 - RNA, 19 nt, Artificial Sequence
  Description of Artificial Sequence: Synthetic oligonucleotide
auggaggugguuugcugaa

SEQ ID NO: 1024855 - RNA, 19 nt, Artificial Sequence
  Description of Artificial Sequence: Synthetic oligonucleotide
accuggaggugguacaguu

SEQ ID NO: 1024856 - RNA, 19 nt, Artificial Sequence
  Description of Artificial Sequence: Synthetic oligonucleotide
uucgugcguaauaguccca

SEQ ID NO: 1024857 - RNA, 19 nt, Artificial Sequence
  Description of Artificial Sequence: Synthetic oligonucleotide
ucgguuuggacacgccauu

SEQ ID NO: 1024858 - RNA, 19 nt, Artificial Sequence
  Description of Artificial Sequence: Synthetic oligonucleotide
cacaugcacgucccauggg

SEQ ID NO: 1024859 - RNA, 19 nt, Artificial Sequence
  Description of Artificial Sequence: Synthetic oligonucleotide
gcaccagguaaucuccugc

SEQ ID NO: 1024860 - RNA, 19 nt, Artificial Sequence
  Description of Artificial Sequence: Synthetic oligonucleotide
ucggucuuucucucuucgu

SEQ ID NO: 1024861 - RNA, 19 nt, Artificial Sequence
  Description of Artificial Sequence: Synthetic oligonucleotide
caacauuauccagaaaaua

SEQ ID NO: 1024862 - RNA, 19 nt, Artificial Sequence
  Description of Artificial Sequence: Synthetic oligonucleotide
ccauaacucccauacugug

SEQ ID NO: 1024863 - RNA, 19 nt, Artificial Sequence
  Description of Artificial Sequence: Synthetic oligonucleotide
cuucaguggcagaucuguc

SEQ ID NO: 1024864 - RNA, 19 nt, Artificial Sequence
  Description of Artificial Sequence: Synthetic oligonucleotide
cuguauuuccauacacucu

SEQ ID NO: 1024865 - RNA, 19 nt, Artificial Sequence
  Description of Artificial Sequence: Synthetic oligonucleotide
caccagguuuccgccaugg

SEQ ID NO: 1024866 - RNA, 19 nt, Artificial Sequence
  Description of Artificial Sequence: Synthetic oligonucleotide
cauauucccuguaucugua

SEQ ID NO: 1024867 - RNA, 19 nt, Artificial Sequence
  Description of Artificial Sequence: Synthetic oligonucleotide
uuuccgcauauucccugua

SEQ ID NO: 1024868 - RNA, 19 nt, Artificial Sequence
  Description of Artificial Sequence: Synthetic oligonucleotide
ucccuugcugcaccguaau

SEQ ID NO: 1024869 - RNA, 19 nt, Artificial Sequence
  Description of Artificial Sequence: Synthetic oligonucleotide
cuguaucgcucuucaucac

SEQ ID NO: 1024870 - RNA, 19 nt, Artificial Sequence
  Description of Artificial Sequence: Synthetic oligonucleotide
ugucuacuucaguggcaga

SEQ ID NO: 1024871 - RNA, 19 nt, Artificial Sequence
  Description of Artificial Sequence: Synthetic oligonucleotide
acgucuacuguuacugcga

SEQ ID NO: 1024872 - RNA, 19 nt, Artificial Sequence
  Description of Artificial Sequence: Synthetic oligonucleotide
ggcggagaaguaaacucag

SEQ ID NO: 1024873 - RNA, 19 nt, Artificial Sequence
  Description of Artificial Sequence: Synthetic oligonucleotide
ugguuccuguauuuccaua

SEQ ID NO: 1024874 - RNA, 19 nt, Artificial Sequence
  Description of Artificial Sequence: Synthetic oligonucleotide
gcgcucauagccucuuucc

SEQ ID NO: 1024875 - RNA, 19 nt, Artificial Sequence
  Description of Artificial Sequence: Synthetic oligonucleotide
augggccgccauacaagcc

SEQ ID NO: 1024876 - RNA, 19 nt, Artificial Sequence
  Description of Artificial Sequence: Synthetic oligonucleotide
ggaggauuagcacuggcau

SEQ ID NO: 1024877 - RNA, 19 nt, Artificial Sequence
  Description of Artificial Sequence: Synthetic oligonucleotide
uugcugcaccguaauuuua

SEQ ID NO: 1024878 - RNA, 19 nt, Artificial Sequence
  Description of Artificial Sequence: Synthetic oligonucleotide
uucguuugcccgccgucuu

SEQ ID NO: 1024879 - RNA, 19 nt, Artificial Sequence
  Description of Artificial Sequence: Synthetic oligonucleotide
cuugaacaacgauggcgga

SEQ ID NO: 1024880 - RNA, 19 nt, Artificial Sequence
  Description of Artificial Sequence: Synthetic oligonucleotide
guuaaacguuucauucuaa

SEQ ID NO: 1024881 - RNA, 19 nt, Artificial Sequence
  Description of Artificial Sequence: Synthetic oligonucleotide
uuacuggcgcuguuccaua

SEQ ID NO: 1024882 - RNA, 19 nt, Artificial Sequence
  Description of Artificial Sequence: Synthetic oligonucleotide
agccuauucggcaggggca

SEQ ID NO: 1024883 - RNA, 19 nt, Artificial Sequence
  Description of Artificial Sequence: Synthetic oligonucleotide
acuucaagucccauucgua

SEQ ID NO: 1024884 - RNA, 19 nt, Artificial Sequence
  Description of Artificial Sequence: Synthetic oligonucleotide
uacuggcgcuguuccauaa

SEQ ID NO: 1024885 - RNA, 19 nt, Artificial Sequence
  Description of Artificial Sequence: Synthetic oligonucleotide
ucguuugcccgccgucuuc

SEQ ID NO: 1024886 - RNA, 19 nt, Artificial Sequence
  Description of Artificial Sequence: Synthetic oligonucleotide
auagucccacuguuuggua

SEQ ID NO: 1024887 - RNA, 19 nt, Artificial Sequence
  Description of Artificial Sequence: Synthetic oligonucleotide
ccacuguuugguagugucc

SEQ ID NO: 1024888 - RNA, 19 nt, Artificial Sequence
  Description of Artificial Sequence: Synthetic oligonucleotide
ccauucguauccucuuuug

SEQ ID NO: 1024889 - RNA, 19 nt, Artificial Sequence
  Description of Artificial Sequence: Synthetic oligonucleotide
acauugccauauggaaaug

SEQ ID NO: 1024890 - RNA, 19 nt, Artificial Sequence
  Description of Artificial Sequence: Synthetic oligonucleotide
acgauggcggagaaguaaa

SEQ ID NO: 1024891 - RNA, 19 nt, Artificial Sequence
  Description of Artificial Sequence: Synthetic oligonucleotide
ggcgguggaaggugaguag

SEQ ID NO: 1024892 - RNA, 19 nt, Artificial Sequence
  Description of Artificial Sequence: Synthetic oligonucleotide
caugacgacgucuacuguu

SEQ ID NO: 1024893 - RNA, 19 nt, Artificial Sequence
  Description of Artificial Sequence: Synthetic oligonucleotide
augacgacgucuacuguua

SEQ ID NO: 1024894 - RNA, 19 nt, Artificial Sequence
  Description of Artificial Sequence: Synthetic oligonucleotide
cauucguauccucuuuugu

SEQ ID NO: 1024895 - RNA, 19 nt, Artificial Sequence
  Description of Artificial Sequence: Synthetic oligonucleotide
cugaaauuguugucuacuu

SEQ ID NO: 1024896 - RNA, 19 nt, Artificial Sequence
  Description of Artificial Sequence: Synthetic oligonucleotide
uuacugcgagaggacuugu

SEQ ID NO: 1024897 - RNA, 19 nt, Artificial Sequence
  Description of Artificial Sequence: Synthetic oligonucleotide
gacgacgucuacuguuacu

SEQ ID NO: 1024898 - RNA, 19 nt, Artificial Sequence
  Description of Artificial Sequence: Synthetic oligonucleotide
uacuuccaacaguggcacu

SEQ ID NO: 1024899 - RNA, 19 nt, Artificial Sequence
  Description of Artificial Sequence: Synthetic oligonucleotide
ucggcgcuuuccuguucag

SEQ ID NO: 1024900 - RNA, 19 nt, Artificial Sequence
  Description of Artificial Sequence: Synthetic oligonucleotide
ccauuaaugcugccaggug

SEQ ID NO: 1024901 - RNA, 19 nt, Artificial Sequence
  Description of Artificial Sequence: Synthetic oligonucleotide
uuugcccgccgucuuccuu

SEQ ID NO: 1024902 - RNA, 19 nt, Artificial Sequence
  Description of Artificial Sequence: Synthetic oligonucleotide
accagguuuccgccauggu

SEQ ID NO: 1024903 - RNA, 19 nt, Artificial Sequence
  Description of Artificial Sequence: Synthetic oligonucleotide
ucggguccgcucucuuucu

SEQ ID NO: 1024904 - RNA, 19 nt, Artificial Sequence
  Description of Artificial Sequence: Synthetic oligonucleotide
gcugaaauuguugucuacu

SEQ ID NO: 1024905 - RNA, 19 nt, Artificial Sequence
  Description of Artificial Sequence: Synthetic oligonucleotide
gucuacuguuacugcgaga

SEQ ID NO: 1024906 - RNA, 19 nt, Artificial Sequence
  Description of Artificial Sequence: Synthetic oligonucleotide
gcuuaugucuccugugacu

SEQ ID NO: 1024907 - RNA, 19 nt, Artificial Sequence
  Description of Artificial Sequence: Synthetic oligonucleotide
uggaggugguacaguuauu

SEQ ID NO: 1024908 - RNA, 19 nt, Artificial Sequence
  Description of Artificial Sequence: Synthetic oligonucleotide
ccauauggaaaugcucgug

SEQ ID NO: 1024909 - RNA, 19 nt, Artificial Sequence
  Description of Artificial Sequence: Synthetic oligonucleotide
gcugaugguuauuguuuga

SEQ ID NO: 1024910 - RNA, 19 nt, Artificial Sequence
  Description of Artificial Sequence: Synthetic oligonucleotide
guuccauaacucccauacu

SEQ ID NO: 1024911 - RNA, 19 nt, Artificial Sequence
  Description of Artificial Sequence: Synthetic oligonucleotide
cuuuccgcauauucccugu

SEQ ID NO: 1024912 - RNA, 19 nt, Artificial Sequence
  Description of Artificial Sequence: Synthetic oligonucleotide
caguuuuaaugucuccuau

SEQ ID NO: 1024913 - RNA, 19 nt, Artificial Sequence
  Description of Artificial Sequence: Synthetic oligonucleotide
ggaaaugcucgugcagaac

SEQ ID NO: 1024914 - RNA, 19 nt, Artificial Sequence
  Description of Artificial Sequence: Synthetic oligonucleotide
ggcgcucauagccucuuuc

SEQ ID NO: 1024915 - RNA, 19 nt, Artificial Sequence
  Description of Artificial Sequence: Synthetic oligonucleotide
gccuauucggcaggggcag

SEQ ID NO: 1024916 - RNA, 19 nt, Artificial Sequence
  Description of Artificial Sequence: Synthetic oligonucleotide
ccuguauauugcuguuuuc

SEQ ID NO: 1024917 - RNA, 19 nt, Artificial Sequence
  Description of Artificial Sequence: Synthetic oligonucleotide
guuuucguuugcccgccgu

SEQ ID NO: 1024918 - RNA, 19 nt, Artificial Sequence
  Description of Artificial Sequence: Synthetic oligonucleotide
aggcgguggaaggugagua

SEQ ID NO: 1024919 - RNA, 19 nt, Artificial Sequence
  Description of Artificial Sequence: Synthetic oligonucleotide
augagggagcggaacuggu

SEQ ID NO: 1024920 - RNA, 19 nt, Artificial Sequence
  Description of Artificial Sequence: Synthetic oligonucleotide
cauaaaagguggagccuau

SEQ ID NO: 1024921 - RNA, 19 nt, Artificial Sequence
  Description of Artificial Sequence: Synthetic oligonucleotide
gcucuauggcgcucauagc

SEQ ID NO: 1024922 - RNA, 19 nt, Artificial Sequence
  Description of Artificial Sequence: Synthetic oligonucleotide
uggaggugguuugcugaaa

SEQ ID NO: 1024923 - RNA, 19 nt, Artificial Sequence
  Description of Artificial Sequence: Synthetic oligonucleotide
caguaagcuuuccaaguau

SEQ ID NO: 1024924 - RNA, 19 nt, Artificial Sequence
  Description of Artificial Sequence: Synthetic oligonucleotide
caccagguaaucuccugcu

SEQ ID NO: 1024925 - RNA, 19 nt, Artificial Sequence
  Description of Artificial Sequence: Synthetic oligonucleotide
ucccacuguuugguagugu

SEQ ID NO: 1024926 - RNA, 19 nt, Artificial Sequence
  Description of Artificial Sequence: Synthetic oligonucleotide
gcgcuguuccauaacuccc

SEQ ID NO: 1024927 - RNA, 19 nt, Artificial Sequence
  Description of Artificial Sequence: Synthetic oligonucleotide
ccaguuuuaaugucuccua

SEQ ID NO: 1024928 - RNA, 19 nt, Artificial Sequence
  Description of Artificial Sequence: Synthetic oligonucleotide
uccuucucucugugacguc

SEQ ID NO: 1024929 - RNA, 19 nt, Artificial Sequence
  Description of Artificial Sequence: Synthetic oligonucleotide
cacuuucgguuuggacacg

SEQ ID NO: 1024930 - RNA, 19 nt, Artificial Sequence
  Description of Artificial Sequence: Synthetic oligonucleotide
cauagccucuuuccgcaua

SEQ ID NO: 1024931 - RNA, 19 nt, Artificial Sequence
  Description of Artificial Sequence: Synthetic oligonucleotide
uuccgccaugguuuaucuu

SEQ ID NO: 1024932 - RNA, 19 nt, Artificial Sequence
  Description of Artificial Sequence: Synthetic oligonucleotide
guuugaccaaugacaucaa

SEQ ID NO: 1024933 - RNA, 19 nt, Artificial Sequence
  Description of Artificial Sequence: Synthetic oligonucleotide
ccuuuugccaaaucacugu

SEQ ID NO: 1024934 - RNA, 19 nt, Artificial Sequence
  Description of Artificial Sequence: Synthetic oligonucleotide
gaggugguuugcugaaauu

SEQ ID NO: 1024935 - RNA, 19 nt, Artificial Sequence
  Description of Artificial Sequence: Synthetic oligonucleotide
cugcaccguaauuuuauuu

SEQ ID NO: 1024936 - RNA, 19 nt, Artificial Sequence
  Description of Artificial Sequence: Synthetic oligonucleotide
ugcccgccgucuuccuucu

SEQ ID NO: 1024937 - RNA, 19 nt, Artificial Sequence
  Description of Artificial Sequence: Synthetic oligonucleotide
gugcagaacggcugucaua

SEQ ID NO: 1024938 - RNA, 19 nt, Artificial Sequence
  Description of Artificial Sequence: Synthetic oligonucleotide
cucccuugcugcaccguaa

SEQ ID NO: 1024939 - RNA, 19 nt, Artificial Sequence
  Description of Artificial Sequence: Synthetic oligonucleotide
cgucuacuguuacugcgag

SEQ ID NO: 1024940 - RNA, 19 nt, Artificial Sequence
  Description of Artificial Sequence: Synthetic oligonucleotide
uuuucccgacuagcucuau

SEQ ID NO: 1024941 - RNA, 19 nt, Artificial Sequence
  Description of Artificial Sequence: Synthetic oligonucleotide
cgcauauucccuguaucug

SEQ ID NO: 1024942 - RNA, 19 nt, Artificial Sequence
  Description of Artificial Sequence: Synthetic oligonucleotide
gacuagcucuauggcgcuc

SEQ ID NO: 1024943 - RNA, 19 nt, Artificial Sequence
  Description of Artificial Sequence: Synthetic oligonucleotide
gcggaacugguaagauggg

SEQ ID NO: 1024944 - RNA, 19 nt, Artificial Sequence
  Description of Artificial Sequence: Synthetic oligonucleotide
cuucggcgcuuuccuguuc

SEQ ID NO: 1024945 - RNA, 19 nt, Artificial Sequence
  Description of Artificial Sequence: Synthetic oligonucleotide
gggagcggaacugguaaga

SEQ ID NO: 1024946 - RNA, 19 nt, Artificial Sequence
  Description of Artificial Sequence: Synthetic oligonucleotide
gcggagaaguaaacucagc

SEQ ID NO: 1024947 - RNA, 19 nt, Artificial Sequence
  Description of Artificial Sequence: Synthetic oligonucleotide
cuucuacucggcugauggu

SEQ ID NO: 1024948 - RNA, 19 nt, Artificial Sequence
  Description of Artificial Sequence: Synthetic oligonucleotide
caucuauuucugggacuga

SEQ ID NO: 1024949 - RNA, 19 nt, Artificial Sequence
  Description of Artificial Sequence: Synthetic oligonucleotide
cuguuccauaacucccaua

SEQ ID NO: 1024950 - RNA, 19 nt, Artificial Sequence
  Description of Artificial Sequence: Synthetic oligonucleotide
cuguuacugcgagaggacu

SEQ ID NO: 1024951 - RNA, 19 nt, Artificial Sequence
  Description of Artificial Sequence: Synthetic oligonucleotide
caauugcaccagguaaucu

SEQ ID NO: 1024952 - RNA, 19 nt, Artificial Sequence
  Description of Artificial Sequence: Synthetic oligonucleotide
gaccuguauauugcuguuu

SEQ ID NO: 1024953 - RNA, 19 nt, Artificial Sequence
  Description of Artificial Sequence: Synthetic oligonucleotide
uggcgcucauagccucuuu

SEQ ID NO: 1024954 - RNA, 19 nt, Artificial Sequence
  Description of Artificial Sequence: Synthetic oligonucleotide
cucggcugaugguuauugu

SEQ ID NO: 1024955 - RNA, 19 nt, Artificial Sequence
  Description of Artificial Sequence: Synthetic oligonucleotide
uagcucuauggcgcucaua

SEQ ID NO: 1024956 - RNA, 19 nt, Artificial Sequence
  Description of Artificial Sequence: Synthetic oligonucleotide
ccgcauauucccuguaucu

SEQ ID NO: 1024957 - RNA, 19 nt, Artificial Sequence
  Description of Artificial Sequence: Synthetic oligonucleotide
cuauucggcaggggcagcu

SEQ ID NO: 1024958 - RNA, 19 nt, Artificial Sequence
  Description of Artificial Sequence: Synthetic oligonucleotide
ccuguucagggacgggcuc

SEQ ID NO: 1024959 - RNA, 19 nt, Artificial Sequence
  Description of Artificial Sequence: Synthetic oligonucleotide
gccgccauacaagccacuc

SEQ ID NO: 1024960 - RNA, 19 nt, Artificial Sequence
  Description of Artificial Sequence: Synthetic oligonucleotide
gguuuggacacgccauuuu

SEQ ID NO: 1024961 - RNA, 19 nt, Artificial Sequence
  Description of Artificial Sequence: Synthetic oligonucleotide
cugugaucccgcucccgcu

SEQ ID NO: 1024962 - RNA, 19 nt, Artificial Sequence
  Description of Artificial Sequence: Synthetic oligonucleotide
caggcccgucuugaacaac

SEQ ID NO: 1024963 - RNA, 19 nt, Artificial Sequence
  Description of Artificial Sequence: Synthetic oligonucleotide
ccgccaugguuuaucuuca

SEQ ID NO: 1024964 - RNA, 19 nt, Artificial Sequence
  Description of Artificial Sequence: Synthetic oligonucleotide
acgccauuuucagcagcuu

SEQ ID NO: 1024965 - RNA, 19 nt, Artificial Sequence
  Description of Artificial Sequence: Synthetic oligonucleotide
cuagauccuuuugccaaau

SEQ ID NO: 1024966 - RNA, 19 nt, Artificial Sequence
  Description of Artificial Sequence: Synthetic oligonucleotide
ggacgggcucacugccagc

SEQ ID NO: 1024967 - RNA, 19 nt, Artificial Sequence
  Description of Artificial Sequence: Synthetic oligonucleotide
cguuugcccgccgucuucc

SEQ ID NO: 1024968 - RNA, 19 nt, Artificial Sequence
  Description of Artificial Sequence: Synthetic oligonucleotide
cccaugggccgccauacaa

SEQ ID NO: 1024969 - RNA, 19 nt, Artificial Sequence
  Description of Artificial Sequence: Synthetic oligonucleotide
gcagaacggcugucauaac

SEQ ID NO: 1024970 - RNA, 19 nt, Artificial Sequence
  Description of Artificial Sequence: Synthetic oligonucleotide
cuacucggcugaugguuau

SEQ ID NO: 1024971 - RNA, 19 nt, Artificial Sequence
  Description of Artificial Sequence: Synthetic oligonucleotide
guccgcucucuuucucugu

SEQ ID NO: 1024972 - RNA, 19 nt, Artificial Sequence
  Description of Artificial Sequence: Synthetic oligonucleotide
ggaccuguauauugcuguu

SEQ ID NO: 1024973 - RNA, 19 nt, Artificial Sequence
  Description of Artificial Sequence: Synthetic oligonucleotide
cuaccccuuugacuuuggu

SEQ ID NO: 1024974 - RNA, 19 nt, Artificial Sequence
  Description of Artificial Sequence: Synthetic oligonucleotide
acgucccaugggccgccau

SEQ ID NO: 1024975 - RNA, 19 nt, Artificial Sequence
  Description of Artificial Sequence: Synthetic oligonucleotide
gcaccagguuuccgccaug

SEQ ID NO: 1024976 - RNA, 19 nt, Artificial Sequence
  Description of Artificial Sequence: Synthetic oligonucleotide
caagucccauucguauccu

SEQ ID NO: 1024977 - RNA, 19 nt, Artificial Sequence
  Description of Artificial Sequence: Synthetic oligonucleotide
caggugcaucaaggucuac

SEQ ID NO: 1024978 - RNA, 19 nt, Artificial Sequence
  Description of Artificial Sequence: Synthetic oligonucleotide
guuugcccgccgucuuccu

SEQ ID NO: 1024979 - RNA, 19 nt, Artificial Sequence
  Description of Artificial Sequence: Synthetic oligonucleotide
cguaauagucccacuguuu

SEQ ID NO: 1024980 - RNA, 19 nt, Artificial Sequence
  Description of Artificial Sequence: Synthetic oligonucleotide
ccuauucggcaggggcagc

SEQ ID NO: 1024981 - RNA, 19 nt, Artificial Sequence
  Description of Artificial Sequence: Synthetic oligonucleotide
ggagcggaacugguaagau

SEQ ID NO: 1024982 - RNA, 19 nt, Artificial Sequence
  Description of Artificial Sequence: Synthetic oligonucleotide
ggcccgucuugaacaacga

SEQ ID NO: 1024983 - RNA, 19 nt, Artificial Sequence
  Description of Artificial Sequence: Synthetic oligonucleotide
gcugcaccguaauuuuauu

SEQ ID NO: 1024984 - RNA, 19 nt, Artificial Sequence
  Description of Artificial Sequence: Synthetic oligonucleotide
cgggcucacugccagccuc

SEQ ID NO: 1024985 - RNA, 19 nt, Artificial Sequence
  Description of Artificial Sequence: Synthetic oligonucleotide
augcugccaggugcaucaa

SEQ ID NO: 1024986 - RNA, 19 nt, Artificial Sequence
  Description of Artificial Sequence: Synthetic oligonucleotide
cggcgcuuuccuguucagg

SEQ ID NO: 1024987 - RNA, 19 nt, Artificial Sequence
  Description of Artificial Sequence: Synthetic oligonucleotide
caucaaggucuaccccuuu

SEQ ID NO: 1024988 - RNA, 19 nt, Artificial Sequence
  Description of Artificial Sequence: Synthetic oligonucleotide
cuagcucuauggcgcucau

SEQ ID NO: 1024989 - RNA, 19 nt, Artificial Sequence
  Description of Artificial Sequence: Synthetic oligonucleotide
cugugacgucguucucugu

SEQ ID NO: 1024990 - RNA, 19 nt, Artificial Sequence
  Description of Artificial Sequence: Synthetic oligonucleotide
gcacgucccaugggccgcc

SEQ ID NO: 1024991 - RNA, 19 nt, Artificial Sequence
  Description of Artificial Sequence: Synthetic oligonucleotide
ccacaaggcuaggccauga

SEQ ID NO: 1024992 - RNA, 19 nt, Artificial Sequence
  Description of Artificial Sequence: Synthetic oligonucleotide
cgccauacaagccacucuu

SEQ ID NO: 1024993 - RNA, 19 nt, Artificial Sequence
  Description of Artificial Sequence: Synthetic oligonucleotide
cggcugaugguuauuguuu

SEQ ID NO: 1024994 - RNA, 19 nt, Artificial Sequence
  Description of Artificial Sequence: Synthetic oligonucleotide
cccauacuguggugcucca

SEQ ID NO: 1024995 - RNA, 19 nt, Artificial Sequence
  Description of Artificial Sequence: Synthetic oligonucleotide
gcccgucuugaacaacgau

SEQ ID NO: 1024996 - RNA, 19 nt, Artificial Sequence
  Description of Artificial Sequence: Synthetic oligonucleotide
cccauucguauccucuuuu

SEQ ID NO: 1024997 - RNA, 19 nt, Artificial Sequence
  Description of Artificial Sequence: Synthetic oligonucleotide
ggucuaccccuuugacuuu

SEQ ID NO: 1024998 - RNA, 19 nt, Artificial Sequence
  Description of Artificial Sequence: Synthetic oligonucleotide
ccgccauacaagccacucu

SEQ ID NO: 1024999 - RNA, 19 nt, Artificial Sequence
  Description of Artificial Sequence: Synthetic oligonucleotide
guucagggacgggcucacu

SEQ ID NO: 1025000 - RNA, 19 nt, Artificial Sequence
  Description of Artificial Sequence: Synthetic oligonucleotide
ggauuagcacuggcauuuu

SEQ ID NO: 1025001 - RNA, 19 nt, Artificial Sequence
  Description of Artificial Sequence: Synthetic oligonucleotide
cgugcguaauagucccacu

SEQ ID NO: 1025002 - RNA, 19 nt, Artificial Sequence
  Description of Artificial Sequence: Synthetic oligonucleotide
cacgucccaugggccgcca

SEQ ID NO: 1025003 - RNA, 19 nt, Artificial Sequence
  Description of Artificial Sequence: Synthetic oligonucleotide
cgucccaugggccgccaua

SEQ ID NO: 1025004 - RNA, 19 nt, Artificial Sequence
  Description of Artificial Sequence: Synthetic oligonucleotide
cgacuagcucuauggcgcu

SEQ ID NO: 1025005 - RNA, 19 nt, Artificial Sequence
  Description of Artificial Sequence: Synthetic oligonucleotide
cgccaugguuuaucuucaa

SEQ ID NO: 1025006 - RNA, 19 nt, Artificial Sequence
  Description of Artificial Sequence: Synthetic oligonucleotide
ggccgccauacaagccacu

SEQ ID NO: 1025007 - RNA, 19 nt, Artificial Sequence
  Description of Artificial Sequence: Synthetic oligonucleotide
gcccgccgucuuccuucua

SEQ ID NO: 1025008 - RNA, 19 nt, Artificial Sequence
  Description of Artificial Sequence: Synthetic oligonucleotide
aagaacaagcucuuuauag

SEQ ID NO: 1025009 - RNA, 19 nt, Artificial Sequence
  Description of Artificial Sequence: Synthetic oligonucleotide
ucaacuaggaagacaaacg

SEQ ID NO: 1025010 - RNA, 19 nt, Artificial Sequence
  Description of Artificial Sequence: Synthetic oligonucleotide
uuuuaugugcucaauagga

SEQ ID NO: 1025011 - RNA, 19 nt, Artificial Sequence
  Description of Artificial Sequence: Synthetic oligonucleotide
aggaguuucaacuaggaag

SEQ ID NO: 1025012 - RNA, 19 nt, Artificial Sequence
  Description of Artificial Sequence: Synthetic oligonucleotide
  modified_base (16)..(16): a, c, u, g, unknown or other
agauuaagaucucugnguc

SEQ ID NO: 1025013 - RNA, 19 nt, Artificial Sequence
  Description of Artificial Sequence: Synthetic oligonucleotide
ugugguauagagcagacac

SEQ ID NO: 1025014 - RNA, 19 nt, Artificial Sequence
  Description of Artificial Sequence: Synthetic oligonucleotide
caagcaagcagccugaucc

SEQ ID NO: 1025015 - RNA, 19 nt, Artificial Sequence
  Description of Artificial Sequence: Synthetic oligonucleotide
ucugagugaacuaaugacc

SEQ ID NO: 1025016 - RNA, 19 nt, Artificial Sequence
  Description of Artificial Sequence: Synthetic oligonucleotide
aaugagagggucugaagag

SEQ ID NO: 1025017 - RNA, 19 nt, Artificial Sequence
  Description of Artificial Sequence: Synthetic oligonucleotide
gaggucuacauccagaggc

SEQ ID NO: 1025018 - RNA, 19 nt, Artificial Sequence
  Description of Artificial Sequence: Synthetic oligonucleotide
uuugcuaaugcacagccac

SEQ ID NO: 1025019 - RNA, 19 nt, Artificial Sequence
  Description of Artificial Sequence: Synthetic oligonucleotide
uuaugugcucaauaggagg

SEQ ID NO: 1025020 - RNA, 19 nt, Artificial Sequence
  Description of Artificial Sequence: Synthetic oligonucleotide
ugaacuaaugaccuugcca

SEQ ID NO: 1025021 - RNA, 19 nt, Artificial Sequence
  Description of Artificial Sequence: Synthetic oligonucleotide
aagugcucaaaacaugaag

SEQ ID NO: 1025022 - RNA, 19 nt, Artificial Sequence
  Description of Artificial Sequence: Synthetic oligonucleotide
ucuacaguugauaacugca

SEQ ID NO: 1025023 - RNA, 19 nt, Artificial Sequence
  Description of Artificial Sequence: Synthetic oligonucleotide
uuuuaauugguuuccaaaa

SEQ ID NO: 1025024 - RNA, 19 nt, Artificial Sequence
  Description of Artificial Sequence: Synthetic oligonucleotide
ugcaaugugugguauagag

SEQ ID NO: 1025025 - RNA, 19 nt, Artificial Sequence
  Description of Artificial Sequence: Synthetic oligonucleotide
agagccuuagcugaggugc

SEQ ID NO: 1025026 - RNA, 19 nt, Artificial Sequence
  Description of Artificial Sequence: Synthetic oligonucleotide
uuuaugugcucaauaggag

SEQ ID NO: 1025027 - RNA, 19 nt, Artificial Sequence
  Description of Artificial Sequence: Synthetic oligonucleotide
gauaguacuuggcugacug

SEQ ID NO: 1025028 - RNA, 19 nt, Artificial Sequence
  Description of Artificial Sequence: Synthetic oligonucleotide
uacaauauggugcagggua

SEQ ID NO: 1025029 - RNA, 19 nt, Artificial Sequence
  Description of Artificial Sequence: Synthetic oligonucleotide
uauagagcagacacaagca

SEQ ID NO: 1025030 - RNA, 19 nt, Artificial Sequence
  Description of Artificial Sequence: Synthetic oligonucleotide
acaguuguugccuuuccac

SEQ ID NO: 1025031 - RNA, 19 nt, Artificial Sequence
  Description of Artificial Sequence: Synthetic oligonucleotide
uugucuacagugcacagac

SEQ ID NO: 1025032 - RNA, 19 nt, Artificial Sequence
  Description of Artificial Sequence: Synthetic oligonucleotide
aacuaggaagacaaacggc

SEQ ID NO: 1025033 - RNA, 19 nt, Artificial Sequence
  Description of Artificial Sequence: Synthetic oligonucleotide
caaugugugguauagagca

SEQ ID NO: 1025034 - RNA, 19 nt, Artificial Sequence
  Description of Artificial Sequence: Synthetic oligonucleotide
uuacaggaugcucaaaugu

SEQ ID NO: 1025035 - RNA, 19 nt, Artificial Sequence
  Description of Artificial Sequence: Synthetic oligonucleotide
cucaagaggccaaugaccc

SEQ ID NO: 1025036 - RNA, 19 nt, Artificial Sequence
  Description of Artificial Sequence: Synthetic oligonucleotide
acagguaucuccuaaggca

SEQ ID NO: 1025037 - RNA, 19 nt, Artificial Sequence
  Description of Artificial Sequence: Synthetic oligonucleotide
uguauucacaagcaaacua

SEQ ID NO: 1025038 - RNA, 19 nt, Artificial Sequence
  Description of Artificial Sequence: Synthetic oligonucleotide
caacuaggaagacaaacgg

SEQ ID NO: 1025039 - RNA, 19 nt, Artificial Sequence
  Description of Artificial Sequence: Synthetic oligonucleotide
gaagaauaccaccaccacc

SEQ ID NO: 1025040 - RNA, 19 nt, Artificial Sequence
  Description of Artificial Sequence: Synthetic oligonucleotide
caaagucccaaccuggagg

SEQ ID NO: 1025041 - RNA, 19 nt, Artificial Sequence
  Description of Artificial Sequence: Synthetic oligonucleotide
aaagucccaaccuggaggu

SEQ ID NO: 1025042 - RNA, 19 nt, Artificial Sequence
  Description of Artificial Sequence: Synthetic oligonucleotide
agacagagacaguuguugc

SEQ ID NO: 1025043 - RNA, 19 nt, Artificial Sequence
  Description of Artificial Sequence: Synthetic oligonucleotide
uuuauagacaggaguuuca

SEQ ID NO: 1025044 - RNA, 19 nt, Artificial Sequence
  Description of Artificial Sequence: Synthetic oligonucleotide
caaacagcagggaugggcg

SEQ ID NO: 1025045 - RNA, 19 nt, Artificial Sequence
  Description of Artificial Sequence: Synthetic oligonucleotide
gaccuugccauuaagagac

SEQ ID NO: 1025046 - RNA, 19 nt, Artificial Sequence
  Description of Artificial Sequence: Synthetic oligonucleotide
uuaugcuggcagaagacug

SEQ ID NO: 1025047 - RNA, 19 nt, Artificial Sequence
  Description of Artificial Sequence: Synthetic oligonucleotide
aaccucuccuaagacaccc

SEQ ID NO: 1025048 - RNA, 19 nt, Artificial Sequence
  Description of Artificial Sequence: Synthetic oligonucleotide
ucuccuaagacaccccugc

SEQ ID NO: 1025049 - RNA, 19 nt, Artificial Sequence
  Description of Artificial Sequence: Synthetic oligonucleotide
uucagaaccucuccuaaga

SEQ ID NO: 1025050 - RNA, 19 nt, Artificial Sequence
  Description of Artificial Sequence: Synthetic oligonucleotide
aguagcacaguuuuggcau

SEQ ID NO: 1025051 - RNA, 19 nt, Artificial Sequence
  Description of Artificial Sequence: Synthetic oligonucleotide
agaacaagcucuuuauaga

SEQ ID NO: 1025052 - RNA, 19 nt, Artificial Sequence
  Description of Artificial Sequence: Synthetic oligonucleotide
uauggugcaggguagcccc

SEQ ID NO: 1025053 - RNA, 19 nt, Artificial Sequence
  Description of Artificial Sequence: Synthetic oligonucleotide
ucuacuuuaugcuggcaga

SEQ ID NO: 1025054 - RNA, 19 nt, Artificial Sequence
  Description of Artificial Sequence: Synthetic oligonucleotide
ugcucaauaggagggaggg

SEQ ID NO: 1025055 - RNA, 19 nt, Artificial Sequence
  Description of Artificial Sequence: Synthetic oligonucleotide
acauagggaggccaaacag

SEQ ID NO: 1025056 - RNA, 19 nt, Artificial Sequence
  Description of Artificial Sequence: Synthetic oligonucleotide
uggucuacaguugauaacu

SEQ ID NO: 1025057 - RNA, 19 nt, Artificial Sequence
  Description of Artificial Sequence: Synthetic oligonucleotide
uguucugagugaacuaaug

SEQ ID NO: 1025058 - RNA, 19 nt, Artificial Sequence
  Description of Artificial Sequence: Synthetic oligonucleotide
  modified_base (19)..(19): a, c, u, g, unknown or other
uggagauuaagaucucugn

SEQ ID NO: 1025059 - RNA, 19 nt, Artificial Sequence
  Description of Artificial Sequence: Synthetic oligonucleotide
uaagagacagagacaguug

SEQ ID NO: 1025060 - RNA, 19 nt, Artificial Sequence
  Description of Artificial Sequence: Synthetic oligonucleotide
ugugggaaaccccauugug

SEQ ID NO: 1025061 - RNA, 19 nt, Artificial Sequence
  Description of Artificial Sequence: Synthetic oligonucleotide
ucugcaaugugugguauag

SEQ ID NO: 1025062 - RNA, 19 nt, Artificial Sequence
  Description of Artificial Sequence: Synthetic oligonucleotide
uucaguucagaaccucucc

SEQ ID NO: 1025063 - RNA, 19 nt, Artificial Sequence
  Description of Artificial Sequence: Synthetic oligonucleotide
accaccaccaccaccaccc

SEQ ID NO: 1025064 - RNA, 19 nt, Artificial Sequence
  Description of Artificial Sequence: Synthetic oligonucleotide
  modified_base (15)..(15): a, c, u, g, unknown or other
gauuaagaucucugngucc

SEQ ID NO: 1025065 - RNA, 19 nt, Artificial Sequence
  Description of Artificial Sequence: Synthetic oligonucleotide
acuuuaugcuggcagaaga

SEQ ID NO: 1025066 - RNA, 19 nt, Artificial Sequence
  Description of Artificial Sequence: Synthetic oligonucleotide
ugcuagagggacauggaga

SEQ ID NO: 1025067 - RNA, 19 nt, Artificial Sequence
  Description of Artificial Sequence: Synthetic oligonucleotide
agauacuuggcuucaaaau

SEQ ID NO: 1025068 - RNA, 19 nt, Artificial Sequence
  Description of Artificial Sequence: Synthetic oligonucleotide
cacaguagcacaguuuugg

SEQ ID NO: 1025069 - RNA, 19 nt, Artificial Sequence
  Description of Artificial Sequence: Synthetic oligonucleotide
cauagggaggccaaacagc

SEQ ID NO: 1025070 - RNA, 19 nt, Artificial Sequence
  Description of Artificial Sequence: Synthetic oligonucleotide
accuccuucacacauauuu

SEQ ID NO: 1025071 - RNA, 19 nt, Artificial Sequence
  Description of Artificial Sequence: Synthetic oligonucleotide
  modified_base (11)..(11): a, c, u, g, unknown or other
aagaucucugnguccagcu

SEQ ID NO: 1025072 - RNA, 19 nt, Artificial Sequence
  Description of Artificial Sequence: Synthetic oligonucleotide
guagggagaggcuugggag

SEQ ID NO: 1025073 - RNA, 19 nt, Artificial Sequence
  Description of Artificial Sequence: Synthetic oligonucleotide
ugagucaggugauaguacu

SEQ ID NO: 1025074 - RNA, 19 nt, Artificial Sequence
  Description of Artificial Sequence: Synthetic oligonucleotide
uacaguugauaacugcacu

SEQ ID NO: 1025075 - RNA, 19 nt, Artificial Sequence
  Description of Artificial Sequence: Synthetic oligonucleotide
cagacaagcccacuggucc

SEQ ID NO: 1025076 - RNA, 19 nt, Artificial Sequence
  Description of Artificial Sequence: Synthetic oligonucleotide
agugcucaaaacaugaaga

SEQ ID NO: 1025077 - RNA, 19 nt, Artificial Sequence
  Description of Artificial Sequence: Synthetic oligonucleotide
cuacagugcacagacaagc

SEQ ID NO: 1025078 - RNA, 19 nt, Artificial Sequence
  Description of Artificial Sequence: Synthetic oligonucleotide
gaugccaugggagaccugc

SEQ ID NO: 1025079 - RNA, 19 nt, Artificial Sequence
  Description of Artificial Sequence: Synthetic oligonucleotide
gauaacugcacugugggaa

SEQ ID NO: 1025080 - RNA, 19 nt, Artificial Sequence
  Description of Artificial Sequence: Synthetic oligonucleotide
gagugaacuaaugaccuug

SEQ ID NO: 1025081 - RNA, 19 nt, Artificial Sequence
  Description of Artificial Sequence: Synthetic oligonucleotide
ggguucaucuacuuuaugc

SEQ ID NO: 1025082 - RNA, 19 nt, Artificial Sequence
  Description of Artificial Sequence: Synthetic oligonucleotide
cucaaaugugggucaaggg

SEQ ID NO: 1025083 - RNA, 19 nt, Artificial Sequence
  Description of Artificial Sequence: Synthetic oligonucleotide
uggucagagccuuagcuga

SEQ ID NO: 1025084 - RNA, 19 nt, Artificial Sequence
  Description of Artificial Sequence: Synthetic oligonucleotide
agagcauacccuccugagg

SEQ ID NO: 1025085 - RNA, 19 nt, Artificial Sequence
  Description of Artificial Sequence: Synthetic oligonucleotide
uggucaagaaucugggaac

SEQ ID NO: 1025086 - RNA, 19 nt, Artificial Sequence
  Description of Artificial Sequence: Synthetic oligonucleotide
aaagccugguccaccuucc

SEQ ID NO: 1025087 - RNA, 19 nt, Artificial Sequence
  Description of Artificial Sequence: Synthetic oligonucleotide
cagguaucuccuaaggcag

SEQ ID NO: 1025088 - RNA, 19 nt, Artificial Sequence
  Description of Artificial Sequence: Synthetic oligonucleotide
  modified_base (17)..(17): a, c, u, g, unknown or other
gagauuaagaucucugngu

SEQ ID NO: 1025089 - RNA, 19 nt, Artificial Sequence
  Description of Artificial Sequence: Synthetic oligonucleotide
uuccucaagaggccaauga

SEQ ID NO: 1025090 - RNA, 19 nt, Artificial Sequence
  Description of Artificial Sequence: Synthetic oligonucleotide
cugaagaauaccaccacca

SEQ ID NO: 1025091 - RNA, 19 nt, Artificial Sequence
  Description of Artificial Sequence: Synthetic oligonucleotide
ccuaaguacagguaucucc

SEQ ID NO: 1025092 - RNA, 19 nt, Artificial Sequence
  Description of Artificial Sequence: Synthetic oligonucleotide
uuguccucacccaccaaag

SEQ ID NO: 1025093 - RNA, 19 nt, Artificial Sequence
  Description of Artificial Sequence: Synthetic oligonucleotide
agugaacuaaugaccuugc

SEQ ID NO: 1025094 - RNA, 19 nt, Artificial Sequence
  Description of Artificial Sequence: Synthetic oligonucleotide
  modified_base (5)..(5): a, c, u, g, unknown or other
ucugnguccagcucacgcu

SEQ ID NO: 1025095 - RNA, 19 nt, Artificial Sequence
  Description of Artificial Sequence: Synthetic oligonucleotide
cccaauguggucaagaauc

SEQ ID NO: 1025096 - RNA, 19 nt, Artificial Sequence
  Description of Artificial Sequence: Synthetic oligonucleotide
cauugugggguucaucuac

SEQ ID NO: 1025097 - RNA, 19 nt, Artificial Sequence
  Description of Artificial Sequence: Synthetic oligonucleotide
ucaucuacuuuaugcuggc

SEQ ID NO: 1025098 - RNA, 19 nt, Artificial Sequence
  Description of Artificial Sequence: Synthetic oligonucleotide
uacucuuagggcacaggca

SEQ ID NO: 1025099 - RNA, 19 nt, Artificial Sequence
  Description of Artificial Sequence: Synthetic oligonucleotide
aggugcuagagggacaugg

SEQ ID NO: 1025100 - RNA, 19 nt, Artificial Sequence
  Description of Artificial Sequence: Synthetic oligonucleotide
aguugauaacugcacugug

SEQ ID NO: 1025101 - RNA, 19 nt, Artificial Sequence
  Description of Artificial Sequence: Synthetic oligonucleotide
aagcaaacuagaagcuggg

SEQ ID NO: 1025102 - RNA, 19 nt, Artificial Sequence
  Description of Artificial Sequence: Synthetic oligonucleotide
gaagacuuagggguagcag

SEQ ID NO: 1025103 - RNA, 19 nt, Artificial Sequence
  Description of Artificial Sequence: Synthetic oligonucleotide
gaugcucaaauguggguca

SEQ ID NO: 1025104 - RNA, 19 nt, Artificial Sequence
  Description of Artificial Sequence: Synthetic oligonucleotide
uucguguccacaguugggc

SEQ ID NO: 1025105 - RNA, 19 nt, Artificial Sequence
  Description of Artificial Sequence: Synthetic oligonucleotide
aagaacagggcuggaacca

SEQ ID NO: 1025106 - RNA, 19 nt, Artificial Sequence
  Description of Artificial Sequence: Synthetic oligonucleotide
ucagaaccucuccuaagac

SEQ ID NO: 1025107 - RNA, 19 nt, Artificial Sequence
  Description of Artificial Sequence: Synthetic oligonucleotide
cagaggacuaccuagcaga

SEQ ID NO: 1025108 - RNA, 19 nt, Artificial Sequence
  Description of Artificial Sequence: Synthetic oligonucleotide
  modified_base (13)..(13): a, c, u, g, unknown or other
uuaagaucucugnguccag

SEQ ID NO: 1025109 - RNA, 19 nt, Artificial Sequence
  Description of Artificial Sequence: Synthetic oligonucleotide
uauagacaggaguuucaac

SEQ ID NO: 1025110 - RNA, 19 nt, Artificial Sequence
  Description of Artificial Sequence: Synthetic oligonucleotide
uaagacaccccugcccugg

SEQ ID NO: 1025111 - RNA, 19 nt, Artificial Sequence
  Description of Artificial Sequence: Synthetic oligonucleotide
acgcucacgcugcaggagc

SEQ ID NO: 1025112 - RNA, 19 nt, Artificial Sequence
  Description of Artificial Sequence: Synthetic oligonucleotide
cuggagguucucauguuag

SEQ ID NO: 1025113 - RNA, 19 nt, Artificial Sequence
  Description of Artificial Sequence: Synthetic oligonucleotide
cuucauaaagugcucaaaa

SEQ ID NO: 1025114 - RNA, 19 nt, Artificial Sequence
  Description of Artificial Sequence: Synthetic oligonucleotide
auagagcagacacaagcaa

SEQ ID NO: 1025115 - RNA, 19 nt, Artificial Sequence
  Description of Artificial Sequence: Synthetic oligonucleotide
auaaaacccagaggacuac

SEQ ID NO: 1025116 - RNA, 19 nt, Artificial Sequence
  Description of Artificial Sequence: Synthetic oligonucleotide
caaggaccccugcagaugc

SEQ ID NO: 1025117 - RNA, 19 nt, Artificial Sequence
  Description of Artificial Sequence: Synthetic oligonucleotide
acaaacggcagagcaguac

SEQ ID NO: 1025118 - RNA, 19 nt, Artificial Sequence
  Description of Artificial Sequence: Synthetic oligonucleotide
caagcaaaacccuggcuuc

SEQ ID NO: 1025119 - RNA, 19 nt, Artificial Sequence
  Description of Artificial Sequence: Synthetic oligonucleotide
ccuuucaggacccuaacag

SEQ ID NO: 1025120 - RNA, 19 nt, Artificial Sequence
  Description of Artificial Sequence: Synthetic oligonucleotide
ugugugguauagagcagac

SEQ ID NO: 1025121 - RNA, 19 nt, Artificial Sequence
  Description of Artificial Sequence: Synthetic oligonucleotide
gagguuggugagcaaggag

SEQ ID NO: 1025122 - RNA, 19 nt, Artificial Sequence
  Description of Artificial Sequence: Synthetic oligonucleotide
agacaaacggcagagcagu

SEQ ID NO: 1025123 - RNA, 19 nt, Artificial Sequence
  Description of Artificial Sequence: Synthetic oligonucleotide
guagcagcagguuggucag

SEQ ID NO: 1025124 - RNA, 19 nt, Artificial Sequence
  Description of Artificial Sequence: Synthetic oligonucleotide
aacagguggcuacuuuccu

SEQ ID NO: 1025125 - RNA, 19 nt, Artificial Sequence
  Description of Artificial Sequence: Synthetic oligonucleotide
uuauagacaggaguuucaa

SEQ ID NO: 1025126 - RNA, 19 nt, Artificial Sequence
  Description of Artificial Sequence: Synthetic oligonucleotide
agaggucuacauccagagg

SEQ ID NO: 1025127 - RNA, 19 nt, Artificial Sequence
  Description of Artificial Sequence: Synthetic oligonucleotide
uugcuaaugcacagccacc

SEQ ID NO: 1025128 - RNA, 19 nt, Artificial Sequence
  Description of Artificial Sequence: Synthetic oligonucleotide
guuggucuacaguugauaa

SEQ ID NO: 1025129 - RNA, 19 nt, Artificial Sequence
  Description of Artificial Sequence: Synthetic oligonucleotide
ucucaaucccagucaauuc

SEQ ID NO: 1025130 - RNA, 19 nt, Artificial Sequence
  Description of Artificial Sequence: Synthetic oligonucleotide
caaaaugcacuucagccaa

SEQ ID NO: 1025131 - RNA, 19 nt, Artificial Sequence
  Description of Artificial Sequence: Synthetic oligonucleotide
agcaucucaccuccuucac

SEQ ID NO: 1025132 - RNA, 19 nt, Artificial Sequence
  Description of Artificial Sequence: Synthetic oligonucleotide
aguucagaaccucuccuaa

SEQ ID NO: 1025133 - RNA, 19 nt, Artificial Sequence
  Description of Artificial Sequence: Synthetic oligonucleotide
agucaggugauaguacuug

SEQ ID NO: 1025134 - RNA, 19 nt, Artificial Sequence
  Description of Artificial Sequence: Synthetic oligonucleotide
gaacagguggcuacuuucc

SEQ ID NO: 1025135 - RNA, 19 nt, Artificial Sequence
  Description of Artificial Sequence: Synthetic oligonucleotide
aaugugugguauagagcag

SEQ ID NO: 1025136 - RNA, 19 nt, Artificial Sequence
  Description of Artificial Sequence: Synthetic oligonucleotide
auagggaggccaaacagca

SEQ ID NO: 1025137 - RNA, 19 nt, Artificial Sequence
  Description of Artificial Sequence: Synthetic oligonucleotide
ucaugagucaggugauagu

SEQ ID NO: 1025138 - RNA, 19 nt, Artificial Sequence
  Description of Artificial Sequence: Synthetic oligonucleotide
agaggcucuuguccucacc

SEQ ID NO: 1025139 - RNA, 19 nt, Artificial Sequence
  Description of Artificial Sequence: Synthetic oligonucleotide
ggaguuucaacuaggaaga

SEQ ID NO: 1025140 - RNA, 19 nt, Artificial Sequence
  Description of Artificial Sequence: Synthetic oligonucleotide
ugggcgaaagaugaagaac

SEQ ID NO: 1025141 - RNA, 19 nt, Artificial Sequence
  Description of Artificial Sequence: Synthetic oligonucleotide
cuucguguccacaguuggg

SEQ ID NO: 1025142 - RNA, 19 nt, Artificial Sequence
  Description of Artificial Sequence: Synthetic oligonucleotide
uacuuuaugcuggcagaag

SEQ ID NO: 1025143 - RNA, 19 nt, Artificial Sequence
  Description of Artificial Sequence: Synthetic oligonucleotide
ugguugucuacagugcaca

SEQ ID NO: 1025144 - RNA, 19 nt, Artificial Sequence
  Description of Artificial Sequence: Synthetic oligonucleotide
agcccaaagucccaaccug

SEQ ID NO: 1025145 - RNA, 19 nt, Artificial Sequence
  Description of Artificial Sequence: Synthetic oligonucleotide
acaauauggugcaggguag

SEQ ID NO: 1025146 - RNA, 19 nt, Artificial Sequence
  Description of Artificial Sequence: Synthetic oligonucleotide
gugcuagagggacauggag

SEQ ID NO: 1025147 - RNA, 19 nt, Artificial Sequence
  Description of Artificial Sequence: Synthetic oligonucleotide
ugauaacugcacuguggga

SEQ ID NO: 1025148 - RNA, 19 nt, Artificial Sequence
  Description of Artificial Sequence: Synthetic oligonucleotide
aggccugauccccaaaaca

SEQ ID NO: 1025149 - RNA, 19 nt, Artificial Sequence
  Description of Artificial Sequence: Synthetic oligonucleotide
ucuuuauagacaggaguuu

SEQ ID NO: 1025150 - RNA, 19 nt, Artificial Sequence
  Description of Artificial Sequence: Synthetic oligonucleotide
ucaccacugggacauggaa

SEQ ID NO: 1025151 - RNA, 19 nt, Artificial Sequence
  Description of Artificial Sequence: Synthetic oligonucleotide
gaugggcgaaagaugaaga

SEQ ID NO: 1025152 - RNA, 19 nt, Artificial Sequence
  Description of Artificial Sequence: Synthetic oligonucleotide
cuaccuagcagagggacuc

SEQ ID NO: 1025153 - RNA, 19 nt, Artificial Sequence
  Description of Artificial Sequence: Synthetic oligonucleotide
gacuaccuagcagagggac

SEQ ID NO: 1025154 - RNA, 19 nt, Artificial Sequence
  Description of Artificial Sequence: Synthetic oligonucleotide
caagcucuuuauagacagg

SEQ ID NO: 1025155 - RNA, 19 nt, Artificial Sequence
  Description of Artificial Sequence: Synthetic oligonucleotide
aacggcagagcaguacugu

SEQ ID NO: 1025156 - RNA, 19 nt, Artificial Sequence
  Description of Artificial Sequence: Synthetic oligonucleotide
accaccaccaccaccacca

SEQ ID NO: 1025157 - RNA, 19 nt, Artificial Sequence
  Description of Artificial Sequence: Synthetic oligonucleotide
ccucaagaggccaaugacc

SEQ ID NO: 1025158 - RNA, 19 nt, Artificial Sequence
  Description of Artificial Sequence: Synthetic oligonucleotide
acaaggcugagguguaggu

SEQ ID NO: 1025159 - RNA, 19 nt, Artificial Sequence
  Description of Artificial Sequence: Synthetic oligonucleotide
aacuaaugaccuugccauu

SEQ ID NO: 1025160 - RNA, 19 nt, Artificial Sequence
  Description of Artificial Sequence: Synthetic oligonucleotide
gaagaacaagcucuuuaua

SEQ ID NO: 1025161 - RNA, 19 nt, Artificial Sequence
  Description of Artificial Sequence: Synthetic oligonucleotide
gcucaaaugugggucaagg

SEQ ID NO: 1025162 - RNA, 19 nt, Artificial Sequence
  Description of Artificial Sequence: Synthetic oligonucleotide
agugggaggaagacuuagg

SEQ ID NO: 1025163 - RNA, 19 nt, Artificial Sequence
  Description of Artificial Sequence: Synthetic oligonucleotide
ugagcucgucaugagucag

SEQ ID NO: 1025164 - RNA, 19 nt, Artificial Sequence
  Description of Artificial Sequence: Synthetic oligonucleotide
  modified_base (3)..(3): a, c, u, g, unknown or other
ugnguccagcucacgcuca

SEQ ID NO: 1025165 - RNA, 19 nt, Artificial Sequence
  Description of Artificial Sequence: Synthetic oligonucleotide
uggagguucucauguuaga

SEQ ID NO: 1025166 - RNA, 19 nt, Artificial Sequence
  Description of Artificial Sequence: Synthetic oligonucleotide
cagagcaguacugugccug

SEQ ID NO: 1025167 - RNA, 19 nt, Artificial Sequence
  Description of Artificial Sequence: Synthetic oligonucleotide
aggaugcucaaaugugggu

SEQ ID NO: 1025168 - RNA, 19 nt, Artificial Sequence
  Description of Artificial Sequence: Synthetic oligonucleotide
uggaaugagagggucugaa

SEQ ID NO: 1025169 - RNA, 19 nt, Artificial Sequence
  Description of Artificial Sequence: Synthetic oligonucleotide
caaucccagucaauucaag

SEQ ID NO: 1025170 - RNA, 19 nt, Artificial Sequence
  Description of Artificial Sequence: Synthetic oligonucleotide
  modified_base (4)..(4): a, c, u, g, unknown or other
cugnguccagcucacgcuc

SEQ ID NO: 1025171 - RNA, 19 nt, Artificial Sequence
  Description of Artificial Sequence: Synthetic oligonucleotide
gugaacuaaugaccuugcc

SEQ ID NO: 1025172 - RNA, 19 nt, Artificial Sequence
  Description of Artificial Sequence: Synthetic oligonucleotide
uccccuuucaggacccuaa

SEQ ID NO: 1025173 - RNA, 19 nt, Artificial Sequence
  Description of Artificial Sequence: Synthetic oligonucleotide
augggcgaaagaugaagaa

SEQ ID NO: 1025174 - RNA, 19 nt, Artificial Sequence
  Description of Artificial Sequence: Synthetic oligonucleotide
ucguguccacaguugggcc

SEQ ID NO: 1025175 - RNA, 19 nt, Artificial Sequence
  Description of Artificial Sequence: Synthetic oligonucleotide
ggaaugagagggucugaag

SEQ ID NO: 1025176 - RNA, 19 nt, Artificial Sequence
  Description of Artificial Sequence: Synthetic oligonucleotide
aguacuuggcugacugguc

SEQ ID NO: 1025177 - RNA, 19 nt, Artificial Sequence
  Description of Artificial Sequence: Synthetic oligonucleotide
cacgggguagauacuuggc

SEQ ID NO: 1025178 - RNA, 19 nt, Artificial Sequence
  Description of Artificial Sequence: Synthetic oligonucleotide
cagggcuggaaccaaauaa

SEQ ID NO: 1025179 - RNA, 19 nt, Artificial Sequence
  Description of Artificial Sequence: Synthetic oligonucleotide
ugggguucaucuacuuuau

SEQ ID NO: 1025180 - RNA, 19 nt, Artificial Sequence
  Description of Artificial Sequence: Synthetic oligonucleotide
agacuuagggguagcagca

SEQ ID NO: 1025181 - RNA, 19 nt, Artificial Sequence
  Description of Artificial Sequence: Synthetic oligonucleotide
ccagauacaauauggugca

SEQ ID NO: 1025182 - RNA, 19 nt, Artificial Sequence
  Description of Artificial Sequence: Synthetic oligonucleotide
aaacggcagagcaguacug

SEQ ID NO: 1025183 - RNA, 19 nt, Artificial Sequence
  Description of Artificial Sequence: Synthetic oligonucleotide
ucgucaugagucaggugau

SEQ ID NO: 1025184 - RNA, 19 nt, Artificial Sequence
  Description of Artificial Sequence: Synthetic oligonucleotide
agacaagcccacuggucca

SEQ ID NO: 1025185 - RNA, 19 nt, Artificial Sequence
  Description of Artificial Sequence: Synthetic oligonucleotide
gaggacuaccuagcagagg

SEQ ID NO: 1025186 - RNA, 19 nt, Artificial Sequence
  Description of Artificial Sequence: Synthetic oligonucleotide
ggaugggcgaaagaugaag

SEQ ID NO: 1025187 - RNA, 19 nt, Artificial Sequence
  Description of Artificial Sequence: Synthetic oligonucleotide
aaggcacauuuuaauuggu

SEQ ID NO: 1025188 - RNA, 19 nt, Artificial Sequence
  Description of Artificial Sequence: Synthetic oligonucleotide
cucccuacucuuagggcac

SEQ ID NO: 1025189 - RNA, 19 nt, Artificial Sequence
  Description of Artificial Sequence: Synthetic oligonucleotide
uaccaccaccaccaccacc

SEQ ID NO: 1025190 - RNA, 19 nt, Artificial Sequence
  Description of Artificial Sequence: Synthetic oligonucleotide
uuguugccuuuccacugga

SEQ ID NO: 1025191 - RNA, 19 nt, Artificial Sequence
  Description of Artificial Sequence: Synthetic oligonucleotide
agcucuuuauagacaggag

SEQ ID NO: 1025192 - RNA, 19 nt, Artificial Sequence
  Description of Artificial Sequence: Synthetic oligonucleotide
agaggacuaccuagcagag

SEQ ID NO: 1025193 - RNA, 19 nt, Artificial Sequence
  Description of Artificial Sequence: Synthetic oligonucleotide
agggacucacuuccucaag

SEQ ID NO: 1025194 - RNA, 19 nt, Artificial Sequence
  Description of Artificial Sequence: Synthetic oligonucleotide
uguugccuuuccacuggac

SEQ ID NO: 1025195 - RNA, 19 nt, Artificial Sequence
  Description of Artificial Sequence: Synthetic oligonucleotide
cucuccuaagacaccccug

SEQ ID NO: 1025196 - RNA, 19 nt, Artificial Sequence
  Description of Artificial Sequence: Synthetic oligonucleotide
caucauccacagagcauac

SEQ ID NO: 1025197 - RNA, 19 nt, Artificial Sequence
  Description of Artificial Sequence: Synthetic oligonucleotide
acaggaguuucaacuagga

SEQ ID NO: 1025198 - RNA, 19 nt, Artificial Sequence
  Description of Artificial Sequence: Synthetic oligonucleotide
auaccaccaccaccaccac

SEQ ID NO: 1025199 - RNA, 19 nt, Artificial Sequence
  Description of Artificial Sequence: Synthetic oligonucleotide
caaaaguucugaccccaca

SEQ ID NO: 1025200 - RNA, 19 nt, Artificial Sequence
  Description of Artificial Sequence: Synthetic oligonucleotide
agggcuggaaccaaauaaa

SEQ ID NO: 1025201 - RNA, 19 nt, Artificial Sequence
  Description of Artificial Sequence: Synthetic oligonucleotide
uagcagagggacucacuuc

SEQ ID NO: 1025202 - RNA, 19 nt, Artificial Sequence
  Description of Artificial Sequence: Synthetic oligonucleotide
gcucccuacucuuagggca

SEQ ID NO: 1025203 - RNA, 19 nt, Artificial Sequence
  Description of Artificial Sequence: Synthetic oligonucleotide
agcauacccuccugaggug

SEQ ID NO: 1025204 - RNA, 19 nt, Artificial Sequence
  Description of Artificial Sequence: Synthetic oligonucleotide
cucccacucccagacaagc

SEQ ID NO: 1025205 - RNA, 19 nt, Artificial Sequence
  Description of Artificial Sequence: Synthetic oligonucleotide
agccacuuuuaugugcuca

SEQ ID NO: 1025206 - RNA, 19 nt, Artificial Sequence
  Description of Artificial Sequence: Synthetic oligonucleotide
uuuuggcaucuggacaagu

SEQ ID NO: 1025207 - RNA, 19 nt, Artificial Sequence
  Description of Artificial Sequence: Synthetic oligonucleotide
caggguagccccaguuuac

SEQ ID NO: 1025208 - RNA, 19 nt, Artificial Sequence
  Description of Artificial Sequence: Synthetic oligonucleotide
cuccuaagacaccccugcc

SEQ ID NO: 1025209 - RNA, 19 nt, Artificial Sequence
  Description of Artificial Sequence: Synthetic oligonucleotide
agcaaaacccuggcuucag

SEQ ID NO: 1025210 - RNA, 19 nt, Artificial Sequence
  Description of Artificial Sequence: Synthetic oligonucleotide
ugauaguacuuggcugacu

SEQ ID NO: 1025211 - RNA, 19 nt, Artificial Sequence
  Description of Artificial Sequence: Synthetic oligonucleotide
ugcucaaaugugggucaag

SEQ ID NO: 1025212 - RNA, 19 nt, Artificial Sequence
  Description of Artificial Sequence: Synthetic oligonucleotide
uggcuucaguucagaaccu

SEQ ID NO: 1025213 - RNA, 19 nt, Artificial Sequence
  Description of Artificial Sequence: Synthetic oligonucleotide
gaccccugcagaugccaug

SEQ ID NO: 1025214 - RNA, 19 nt, Artificial Sequence
  Description of Artificial Sequence: Synthetic oligonucleotide
gcaaugugugguauagagc

SEQ ID NO: 1025215 - RNA, 19 nt, Artificial Sequence
  Description of Artificial Sequence: Synthetic oligonucleotide
auugugggguucaucuacu

SEQ ID NO: 1025216 - RNA, 19 nt, Artificial Sequence
  Description of Artificial Sequence: Synthetic oligonucleotide
caauguggucaagaaucug

SEQ ID NO: 1025217 - RNA, 19 nt, Artificial Sequence
  Description of Artificial Sequence: Synthetic oligonucleotide
cagcaucucaccuccuuca

SEQ ID NO: 1025218 - RNA, 19 nt, Artificial Sequence
  Description of Artificial Sequence: Synthetic oligonucleotide
gggacauggagauuaagau

SEQ ID NO: 1025219 - RNA, 19 nt, Artificial Sequence
  Description of Artificial Sequence: Synthetic oligonucleotide
agcucgucaugagucaggu

SEQ ID NO: 1025220 - RNA, 19 nt, Artificial Sequence
  Description of Artificial Sequence: Synthetic oligonucleotide
gggguagauacuuggcuuc

SEQ ID NO: 1025221 - RNA, 19 nt, Artificial Sequence
  Description of Artificial Sequence: Synthetic oligonucleotide
uugugguacacggucuuuu

SEQ ID NO: 1025222 - RNA, 19 nt, Artificial Sequence
  Description of Artificial Sequence: Synthetic oligonucleotide
ggcuggaaccaaauaaaac

SEQ ID NO: 1025223 - RNA, 19 nt, Artificial Sequence
  Description of Artificial Sequence: Synthetic oligonucleotide
cagagccuuagcugaggug

SEQ ID NO: 1025224 - RNA, 19 nt, Artificial Sequence
  Description of Artificial Sequence: Synthetic oligonucleotide
acauggagauuaagaucuc

SEQ ID NO: 1025225 - RNA, 19 nt, Artificial Sequence
  Description of Artificial Sequence: Synthetic oligonucleotide
uugggagcaaagagucauu

SEQ ID NO: 1025226 - RNA, 19 nt, Artificial Sequence
  Description of Artificial Sequence: Synthetic oligonucleotide
accucuccuaagacacccc

SEQ ID NO: 1025227 - RNA, 19 nt, Artificial Sequence
  Description of Artificial Sequence: Synthetic oligonucleotide
ccacgggguagauacuugg

SEQ ID NO: 1025228 - RNA, 19 nt, Artificial Sequence
  Description of Artificial Sequence: Synthetic oligonucleotide
agagacaguuguugccuuu

SEQ ID NO: 1025229 - RNA, 19 nt, Artificial Sequence
  Description of Artificial Sequence: Synthetic oligonucleotide
caaacggcagagcaguacu

SEQ ID NO: 1025230 - RNA, 19 nt, Artificial Sequence
  Description of Artificial Sequence: Synthetic oligonucleotide
aggucuacauccagaggcu

SEQ ID NO: 1025231 - RNA, 19 nt, Artificial Sequence
  Description of Artificial Sequence: Synthetic oligonucleotide
  modified_base (2)..(2): a, c, u, g, unknown or other
gnguccagcucacgcucac

SEQ ID NO: 1025232 - RNA, 19 nt, Artificial Sequence
  Description of Artificial Sequence: Synthetic oligonucleotide
guggcuacuuuccucauuu

SEQ ID NO: 1025233 - RNA, 19 nt, Artificial Sequence
  Description of Artificial Sequence: Synthetic oligonucleotide
acuaccuagcagagggacu

SEQ ID NO: 1025234 - RNA, 19 nt, Artificial Sequence
  Description of Artificial Sequence: Synthetic oligonucleotide
augugggucaagggaggag

SEQ ID NO: 1025235 - RNA, 19 nt, Artificial Sequence
  Description of Artificial Sequence: Synthetic oligonucleotide
auacccuccugagguguuc

SEQ ID NO: 1025236 - RNA, 19 nt, Artificial Sequence
  Description of Artificial Sequence: Synthetic oligonucleotide
gcauuuccuaaguacaggu

SEQ ID NO: 1025237 - RNA, 19 nt, Artificial Sequence
  Description of Artificial Sequence: Synthetic oligonucleotide
uuagggguagcagcagguu

SEQ ID NO: 1025238 - RNA, 19 nt, Artificial Sequence
  Description of Artificial Sequence: Synthetic oligonucleotide
cugaagagggguggaagca

SEQ ID NO: 1025239 - RNA, 19 nt, Artificial Sequence
  Description of Artificial Sequence: Synthetic oligonucleotide
gggacucacuuccucaaga

SEQ ID NO: 1025240 - RNA, 19 nt, Artificial Sequence
  Description of Artificial Sequence: Synthetic oligonucleotide
augggagaccugcuguauu

SEQ ID NO: 1025241 - RNA, 19 nt, Artificial Sequence
  Description of Artificial Sequence: Synthetic oligonucleotide
uggccacauagggaggcca

SEQ ID NO: 1025242 - RNA, 19 nt, Artificial Sequence
  Description of Artificial Sequence: Synthetic oligonucleotide
cuuagcugaggugcuucuc

SEQ ID NO: 1025243 - RNA, 19 nt, Artificial Sequence
  Description of Artificial Sequence: Synthetic oligonucleotide
cuacuuuaugcuggcagaa

SEQ ID NO: 1025244 - RNA, 19 nt, Artificial Sequence
  Description of Artificial Sequence: Synthetic oligonucleotide
caucuggacaagugguaaa

SEQ ID NO: 1025245 - RNA, 19 nt, Artificial Sequence
  Description of Artificial Sequence: Synthetic oligonucleotide
cuugggagcaaagagucau

SEQ ID NO: 1025246 - RNA, 19 nt, Artificial Sequence
  Description of Artificial Sequence: Synthetic oligonucleotide
gugauaguacuuggcugac

SEQ ID NO: 1025247 - RNA, 19 nt, Artificial Sequence
  Description of Artificial Sequence: Synthetic oligonucleotide
gcuagagggacauggagau

SEQ ID NO: 1025248 - RNA, 19 nt, Artificial Sequence
  Description of Artificial Sequence: Synthetic oligonucleotide
cuuccucaagaggccaaug

SEQ ID NO: 1025249 - RNA, 19 nt, Artificial Sequence
  Description of Artificial Sequence: Synthetic oligonucleotide
ggguagccccaguuuacag

SEQ ID NO: 1025250 - RNA, 19 nt, Artificial Sequence
  Description of Artificial Sequence: Synthetic oligonucleotide
caccaccaccaccaccacc

SEQ ID NO: 1025251 - RNA, 19 nt, Artificial Sequence
  Description of Artificial Sequence: Synthetic oligonucleotide
ccaaagucccaaccuggag

SEQ ID NO: 1025252 - RNA, 19 nt, Artificial Sequence
  Description of Artificial Sequence: Synthetic oligonucleotide
ggagaccugcuguauucac

SEQ ID NO: 1025253 - RNA, 19 nt, Artificial Sequence
  Description of Artificial Sequence: Synthetic oligonucleotide
gguccagcacagcugggac

SEQ ID NO: 1025254 - RNA, 19 nt, Artificial Sequence
  Description of Artificial Sequence: Synthetic oligonucleotide
aggguagccccaguuuaca

SEQ ID NO: 1025255 - RNA, 19 nt, Artificial Sequence
  Description of Artificial Sequence: Synthetic oligonucleotide
cuagcagagggacucacuu

SEQ ID NO: 1025256 - RNA, 19 nt, Artificial Sequence
  Description of Artificial Sequence: Synthetic oligonucleotide
agaacagggcuggaaccaa

SEQ ID NO: 1025257 - RNA, 19 nt, Artificial Sequence
  Description of Artificial Sequence: Synthetic oligonucleotide
cagauacaauauggugcag

SEQ ID NO: 1025258 - RNA, 19 nt, Artificial Sequence
  Description of Artificial Sequence: Synthetic oligonucleotide
cagccugauccccaucuca

SEQ ID NO: 1025259 - RNA, 19 nt, Artificial Sequence
  Description of Artificial Sequence: Synthetic oligonucleotide
ccauuaagagacagagaca

SEQ ID NO: 1025260 - RNA, 19 nt, Artificial Sequence
  Description of Artificial Sequence: Synthetic oligonucleotide
cugaggugcuucucaggga

SEQ ID NO: 1025261 - RNA, 19 nt, Artificial Sequence
  Description of Artificial Sequence: Synthetic oligonucleotide
agccugauccccaucucaa

SEQ ID NO: 1025262 - RNA, 19 nt, Artificial Sequence
  Description of Artificial Sequence: Synthetic oligonucleotide
cacgcucacgcugcaggag

SEQ ID NO: 1025263 - RNA, 19 nt, Artificial Sequence
  Description of Artificial Sequence: Synthetic oligonucleotide
uaccuagcagagggacuca

SEQ ID NO: 1025264 - RNA, 19 nt, Artificial Sequence
  Description of Artificial Sequence: Synthetic oligonucleotide
cagagugaagccucccacu

SEQ ID NO: 1025265 - RNA, 19 nt, Artificial Sequence
  Description of Artificial Sequence: Synthetic oligonucleotide
ccagucaauucaaggagaa

SEQ ID NO: 1025266 - RNA, 19 nt, Artificial Sequence
  Description of Artificial Sequence: Synthetic oligonucleotide
gccugauccccaaaacaug

SEQ ID NO: 1025267 - RNA, 19 nt, Artificial Sequence
  Description of Artificial Sequence: Synthetic oligonucleotide
cccagucaauucaaggaga

SEQ ID NO: 1025268 - RNA, 19 nt, Artificial Sequence
  Description of Artificial Sequence: Synthetic oligonucleotide
ccucacccaccaaaggcac

SEQ ID NO: 1025269 - RNA, 19 nt, Artificial Sequence
  Description of Artificial Sequence: Synthetic oligonucleotide
ugggacccaaggccagaua

SEQ ID NO: 1025270 - RNA, 19 nt, Artificial Sequence
  Description of Artificial Sequence: Synthetic oligonucleotide
ccaccaaaggcacauuuua

SEQ ID NO: 1025271 - RNA, 19 nt, Artificial Sequence
  Description of Artificial Sequence: Synthetic oligonucleotide
cucaccuccuucacacaua

SEQ ID NO: 1025272 - RNA, 19 nt, Artificial Sequence
  Description of Artificial Sequence: Synthetic oligonucleotide
ucccuacucuuagggcaca

SEQ ID NO: 1025273 - RNA, 19 nt, Artificial Sequence
  Description of Artificial Sequence: Synthetic oligonucleotide
ccuaagacaccccugcccu

SEQ ID NO: 1025274 - RNA, 19 nt, Artificial Sequence
  Description of Artificial Sequence: Synthetic oligonucleotide
caccacugggacauggaau

SEQ ID NO: 1025275 - RNA, 19 nt, Artificial Sequence
  Description of Artificial Sequence: Synthetic oligonucleotide
cacaggcauuuccuaagua

SEQ ID NO: 1025276 - RNA, 19 nt, Artificial Sequence
  Description of Artificial Sequence: Synthetic oligonucleotide
ccacauagggaggccaaac

SEQ ID NO: 1025277 - RNA, 19 nt, Artificial Sequence
  Description of Artificial Sequence: Synthetic oligonucleotide
cugugggaaaccccauugu

SEQ ID NO: 1025278 - RNA, 19 nt, Artificial Sequence
  Description of Artificial Sequence: Synthetic oligonucleotide
guaggugcccugguugucu

SEQ ID NO: 1025279 - RNA, 19 nt, Artificial Sequence
  Description of Artificial Sequence: Synthetic oligonucleotide
gcaaagagucauucucccu

SEQ ID NO: 1025280 - RNA, 19 nt, Artificial Sequence
  Description of Artificial Sequence: Synthetic oligonucleotide
ggccugauccccaaaacau

SEQ ID NO: 1025281 - RNA, 19 nt, Artificial Sequence
  Description of Artificial Sequence: Synthetic oligonucleotide
cccaaagucccaaccugga

SEQ ID NO: 1025282 - RNA, 19 nt, Artificial Sequence
  Description of Artificial Sequence: Synthetic oligonucleotide
ggacccaaggccagauaca

SEQ ID NO: 1025283 - RNA, 19 nt, Artificial Sequence
  Description of Artificial Sequence: Synthetic oligonucleotide
cugcaaugugugguauaga

SEQ ID NO: 1025284 - RNA, 19 nt, Artificial Sequence
  Description of Artificial Sequence: Synthetic oligonucleotide
ggcuucaguucagaaccuc

SEQ ID NO: 1025285 - RNA, 19 nt, Artificial Sequence
  Description of Artificial Sequence: Synthetic oligonucleotide
aagucccaaccuggagguu

SEQ ID NO: 1025286 - RNA, 19 nt, Artificial Sequence
  Description of Artificial Sequence: Synthetic oligonucleotide
gcucgucaugagucaggug

SEQ ID NO: 1025287 - RNA, 19 nt, Artificial Sequence
  Description of Artificial Sequence: Synthetic oligonucleotide
gcacucugcaauguguggu

SEQ ID NO: 1025288 - RNA, 19 nt, Artificial Sequence
  Description of Artificial Sequence: Synthetic oligonucleotide
ggcaucuggacaaguggua

SEQ ID NO: 1025289 - RNA, 19 nt, Artificial Sequence
  Description of Artificial Sequence: Synthetic oligonucleotide
gguagauacuuggcuucaa

SEQ ID NO: 1025290 - RNA, 19 nt, Artificial Sequence
  Description of Artificial Sequence: Synthetic oligonucleotide
gccacgggguagauacuug

SEQ ID NO: 1025291 - RNA, 19 nt, Artificial Sequence
  Description of Artificial Sequence: Synthetic oligonucleotide
accuugccauuaagagaca

SEQ ID NO: 1025292 - RNA, 19 nt, Artificial Sequence
  Description of Artificial Sequence: Synthetic oligonucleotide
ggacuaccuagcagaggga

SEQ ID NO: 1025293 - RNA, 19 nt, Artificial Sequence
  Description of Artificial Sequence: Synthetic oligonucleotide
caggugcuagagggacaug

SEQ ID NO: 1025294 - RNA, 19 nt, Artificial Sequence
  Description of Artificial Sequence: Synthetic oligonucleotide
cauacccuccugagguguu

SEQ ID NO: 1025295 - RNA, 19 nt, Artificial Sequence
  Description of Artificial Sequence: Synthetic oligonucleotide
cccuacucuuagggcacag

SEQ ID NO: 1025296 - RNA, 19 nt, Artificial Sequence
  Description of Artificial Sequence: Synthetic oligonucleotide
ccauugugggguucaucua

SEQ ID NO: 1025297 - RNA, 19 nt, Artificial Sequence
  Description of Artificial Sequence: Synthetic oligonucleotide
ccaccaccaccaccacccc

SEQ ID NO: 1025298 - RNA, 19 nt, Artificial Sequence
  Description of Artificial Sequence: Synthetic oligonucleotide
ggugagcaaggaggcugca

SEQ ID NO: 1025299 - RNA, 19 nt, Artificial Sequence
  Description of Artificial Sequence: Synthetic oligonucleotide
cccacugguccagcacagc

SEQ ID NO: 1025300 - RNA, 19 nt, Artificial Sequence
  Description of Artificial Sequence: Synthetic oligonucleotide
gggaugggcgaaagaugaa

SEQ ID NO: 1025301 - RNA, 19 nt, Artificial Sequence
  Description of Artificial Sequence: Synthetic oligonucleotide
ccaccaccaccaccaccac

SEQ ID NO: 1025302 - RNA, 19 nt, Artificial Sequence
  Description of Artificial Sequence: Synthetic oligonucleotide
cgggguagauacuuggcuu

SEQ ID NO: 1025303 - RNA, 19 nt, Artificial Sequence
  Description of Artificial Sequence: Synthetic oligonucleotide
ggagaaccuccaggugcua

SEQ ID NO: 1025304 - RNA, 19 nt, Artificial Sequence
  Description of Artificial Sequence: Synthetic oligonucleotide
ccccaguuuacaggaugcu

SEQ ID NO: 1025305 - RNA, 19 nt, Artificial Sequence
  Description of Artificial Sequence: Synthetic oligonucleotide
aauaccaccaauuuuauag

SEQ ID NO: 1025306 - RNA, 19 nt, Artificial Sequence
  Description of Artificial Sequence: Synthetic oligonucleotide
auuucaagaauuuagggcc

SEQ ID NO: 1025307 - RNA, 19 nt, Artificial Sequence
  Description of Artificial Sequence: Synthetic oligonucleotide
cacuauuaaacuuaaaugg

SEQ ID NO: 1025308 - RNA, 19 nt, Artificial Sequence
  Description of Artificial Sequence: Synthetic oligonucleotide
acguucuuuacauugaagc

SEQ ID NO: 1025309 - RNA, 19 nt, Artificial Sequence
  Description of Artificial Sequence: Synthetic oligonucleotide
aauugagacaaacaguucu

SEQ ID NO: 1025310 - RNA, 19 nt, Artificial Sequence
  Description of Artificial Sequence: Synthetic oligonucleotide
aacaccugcguucugacgg

SEQ ID NO: 1025311 - RNA, 19 nt, Artificial Sequence
  Description of Artificial Sequence: Synthetic oligonucleotide
acuaauaacuuaaaacugc

SEQ ID NO: 1025312 - RNA, 19 nt, Artificial Sequence
  Description of Artificial Sequence: Synthetic oligonucleotide
uuggauuugaauuagcggu

SEQ ID NO: 1025313 - RNA, 19 nt, Artificial Sequence
  Description of Artificial Sequence: Synthetic oligonucleotide
aacgauguugauaugaguc

SEQ ID NO: 1025314 - RNA, 19 nt, Artificial Sequence
  Description of Artificial Sequence: Synthetic oligonucleotide
cauauuagcacuaggcucc

SEQ ID NO: 1025315 - RNA, 19 nt, Artificial Sequence
  Description of Artificial Sequence: Synthetic oligonucleotide
ugauuuugaaaacuaauaa

SEQ ID NO: 1025316 - RNA, 19 nt, Artificial Sequence
  Description of Artificial Sequence: Synthetic oligonucleotide
ugugugacaauccaguaca

SEQ ID NO: 1025317 - RNA, 19 nt, Artificial Sequence
  Description of Artificial Sequence: Synthetic oligonucleotide
uuaaauggccaauugagac

SEQ ID NO: 1025318 - RNA, 19 nt, Artificial Sequence
  Description of Artificial Sequence: Synthetic oligonucleotide
acuauuaaacuuaaauggc

SEQ ID NO: 1025319 - RNA, 19 nt, Artificial Sequence
  Description of Artificial Sequence: Synthetic oligonucleotide
cuauuaaacuuaaauggcc

SEQ ID NO: 1025320 - RNA, 19 nt, Artificial Sequence
  Description of Artificial Sequence: Synthetic oligonucleotide
ucauuuagccuucugagcu

SEQ ID NO: 1025321 - RNA, 19 nt, Artificial Sequence
  Description of Artificial Sequence: Synthetic oligonucleotide
acggcgaucaaucuucucc

SEQ ID NO: 1025322 - RNA, 19 nt, Artificial Sequence
  Description of Artificial Sequence: Synthetic oligonucleotide
caggguguaagccagaagg

SEQ ID NO: 1025323 - RNA, 19 nt, Artificial Sequence
  Description of Artificial Sequence: Synthetic oligonucleotide
aucuuugacagacacguuc

SEQ ID NO: 1025324 - RNA, 19 nt, Artificial Sequence
  Description of Artificial Sequence: Synthetic oligonucleotide
uacguguccaaugacaacg

SEQ ID NO: 1025325 - RNA, 19 nt, Artificial Sequence
  Description of Artificial Sequence: Synthetic oligonucleotide
auuccaaccagaaauuggc

SEQ ID NO: 1025326 - RNA, 19 nt, Artificial Sequence
  Description of Artificial Sequence: Synthetic oligonucleotide
uuuaaugggucucaaaauu

SEQ ID NO: 1025327 - RNA, 19 nt, Artificial Sequence
  Description of Artificial Sequence: Synthetic oligonucleotide
agggguaauauucauuuag

SEQ ID NO: 1025328 - RNA, 19 nt, Artificial Sequence
  Description of Artificial Sequence: Synthetic oligonucleotide
aggauaaucaccugagcag

SEQ ID NO: 1025329 - RNA, 19 nt, Artificial Sequence
  Description of Artificial Sequence: Synthetic oligonucleotide
uguaacguugacuggagca

SEQ ID NO: 1025330 - RNA, 19 nt, Artificial Sequence
  Description of Artificial Sequence: Synthetic oligonucleotide
agugggacgaguugguggc

SEQ ID NO: 1025331 - RNA, 19 nt, Artificial Sequence
  Description of Artificial Sequence: Synthetic oligonucleotide
acaauccaaagcuuccagc

SEQ ID NO: 1025332 - RNA, 19 nt, Artificial Sequence
  Description of Artificial Sequence: Synthetic oligonucleotide
aaaugcuacugugucaggg

SEQ ID NO: 1025333 - RNA, 19 nt, Artificial Sequence
  Description of Artificial Sequence: Synthetic oligonucleotide
aauuuucuuaauguaggug

SEQ ID NO: 1025334 - RNA, 19 nt, Artificial Sequence
  Description of Artificial Sequence: Synthetic oligonucleotide
aagguuuuccgaugcauug

SEQ ID NO: 1025335 - RNA, 19 nt, Artificial Sequence
  Description of Artificial Sequence: Synthetic oligonucleotide
aaaacgacccaguggagga

SEQ ID NO: 1025336 - RNA, 19 nt, Artificial Sequence
  Description of Artificial Sequence: Synthetic oligonucleotide
ugucacgaacagcaaaacg

SEQ ID NO: 1025337 - RNA, 19 nt, Artificial Sequence
  Description of Artificial Sequence: Synthetic oligonucleotide
uguuccacaaaacauucuc

SEQ ID NO: 1025338 - RNA, 19 nt, Artificial Sequence
  Description of Artificial Sequence: Synthetic oligonucleotide
aaauuggcacaaaugcuac

SEQ ID NO: 1025339 - RNA, 19 nt, Artificial Sequence
  Description of Artificial Sequence: Synthetic oligonucleotide
gaauuuagggccaucuucc

SEQ ID NO: 1025340 - RNA, 19 nt, Artificial Sequence
  Description of Artificial Sequence: Synthetic oligonucleotide
cugauuaagacuggggugg

SEQ ID NO: 1025341 - RNA, 19 nt, Artificial Sequence
  Description of Artificial Sequence: Synthetic oligonucleotide
aaaagaacguccaacgcga

SEQ ID NO: 1025342 - RNA, 19 nt, Artificial Sequence
  Description of Artificial Sequence: Synthetic oligonucleotide
acucaaagcuucauggugc

SEQ ID NO: 1025343 - RNA, 19 nt, Artificial Sequence
  Description of Artificial Sequence: Synthetic oligonucleotide
uuguccaagacccaggcau

SEQ ID NO: 1025344 - RNA, 19 nt, Artificial Sequence
  Description of Artificial Sequence: Synthetic oligonucleotide
gacaauccaguacaggagc

SEQ ID NO: 1025345 - RNA, 19 nt, Artificial Sequence
  Description of Artificial Sequence: Synthetic oligonucleotide
aaucuacguguccaaugac

SEQ ID NO: 1025346 - RNA, 19 nt, Artificial Sequence
  Description of Artificial Sequence: Synthetic oligonucleotide
uuagcggugguuuucacaa

SEQ ID NO: 1025347 - RNA, 19 nt, Artificial Sequence
  Description of Artificial Sequence: Synthetic oligonucleotide
aaggcauauuagcacuagg

SEQ ID NO: 1025348 - RNA, 19 nt, Artificial Sequence
  Description of Artificial Sequence: Synthetic oligonucleotide
uuuuggucaaguuguuucc

SEQ ID NO: 1025349 - RNA, 19 nt, Artificial Sequence
  Description of Artificial Sequence: Synthetic oligonucleotide
acugauuaagacuggggug

SEQ ID NO: 1025350 - RNA, 19 nt, Artificial Sequence
  Description of Artificial Sequence: Synthetic oligonucleotide
ucuuugacagacacguucu

SEQ ID NO: 1025351 - RNA, 19 nt, Artificial Sequence
  Description of Artificial Sequence: Synthetic oligonucleotide
uaaauggccaauugagaca

SEQ ID NO: 1025352 - RNA, 19 nt, Artificial Sequence
  Description of Artificial Sequence: Synthetic oligonucleotide
ugaaucuacguguccaaug

SEQ ID NO: 1025353 - RNA, 19 nt, Artificial Sequence
  Description of Artificial Sequence: Synthetic oligonucleotide
uucauuuagccuucugagc

SEQ ID NO: 1025354 - RNA, 19 nt, Artificial Sequence
  Description of Artificial Sequence: Synthetic oligonucleotide
uggauuugaauuagcggug

SEQ ID NO: 1025355 - RNA, 19 nt, Artificial Sequence
  Description of Artificial Sequence: Synthetic oligonucleotide
uuaucauuaaccagucuuu

SEQ ID NO: 1025356 - RNA, 19 nt, Artificial Sequence
  Description of Artificial Sequence: Synthetic oligonucleotide
ggaaccauaucaacgaugg

SEQ ID NO: 1025357 - RNA, 19 nt, Artificial Sequence
  Description of Artificial Sequence: Synthetic oligonucleotide
ucuacguguccaaugacaa

SEQ ID NO: 1025358 - RNA, 19 nt, Artificial Sequence
  Description of Artificial Sequence: Synthetic oligonucleotide
uacaauccaaagcuuccag

SEQ ID NO: 1025359 - RNA, 19 nt, Artificial Sequence
  Description of Artificial Sequence: Synthetic oligonucleotide
uuuucgaugguucguuugu

SEQ ID NO: 1025360 - RNA, 19 nt, Artificial Sequence
  Description of Artificial Sequence: Synthetic oligonucleotide
uguuguaacguugacugga

SEQ ID NO: 1025361 - RNA, 19 nt, Artificial Sequence
  Description of Artificial Sequence: Synthetic oligonucleotide
gaaucuacguguccaauga

SEQ ID NO: 1025362 - RNA, 19 nt, Artificial Sequence
  Description of Artificial Sequence: Synthetic oligonucleotide
ugguuuucacaacaccugc

SEQ ID NO: 1025363 - RNA, 19 nt, Artificial Sequence
  Description of Artificial Sequence: Synthetic oligonucleotide
ucguuugucgauuccacca

SEQ ID NO: 1025364 - RNA, 19 nt, Artificial Sequence
  Description of Artificial Sequence: Synthetic oligonucleotide
uguaagguggcucggugga

SEQ ID NO: 1025365 - RNA, 19 nt, Artificial Sequence
  Description of Artificial Sequence: Synthetic oligonucleotide
uuucacaacaccugcguuc

SEQ ID NO: 1025366 - RNA, 19 nt, Artificial Sequence
  Description of Artificial Sequence: Synthetic oligonucleotide
ugaaaacuaauaacuuaaa

SEQ ID NO: 1025367 - RNA, 19 nt, Artificial Sequence
  Description of Artificial Sequence: Synthetic oligonucleotide
aauuuggccuggaugguuc

SEQ ID NO: 1025368 - RNA, 19 nt, Artificial Sequence
  Description of Artificial Sequence: Synthetic oligonucleotide
aaauggccaauugagacaa

SEQ ID NO: 1025369 - RNA, 19 nt, Artificial Sequence
  Description of Artificial Sequence: Synthetic oligonucleotide
aucuuuacgggugacuuuc

SEQ ID NO: 1025370 - RNA, 19 nt, Artificial Sequence
  Description of Artificial Sequence: Synthetic oligonucleotide
ugucgauuccaccacauuu

SEQ ID NO: 1025371 - RNA, 19 nt, Artificial Sequence
  Description of Artificial Sequence: Synthetic oligonucleotide
uuucaagaauuuagggcca

SEQ ID NO: 1025372 - RNA, 19 nt, Artificial Sequence
  Description of Artificial Sequence: Synthetic oligonucleotide
auagugauaccacgcucac

SEQ ID NO: 1025373 - RNA, 19 nt, Artificial Sequence
  Description of Artificial Sequence: Synthetic oligonucleotide
ggccaauugagacaaacag

SEQ ID NO: 1025374 - RNA, 19 nt, Artificial Sequence
  Description of Artificial Sequence: Synthetic oligonucleotide
agcacuaggcuccagcaug

SEQ ID NO: 1025375 - RNA, 19 nt, Artificial Sequence
  Description of Artificial Sequence: Synthetic oligonucleotide
aauuagcggugguuuucac

SEQ ID NO: 1025376 - RNA, 19 nt, Artificial Sequence
  Description of Artificial Sequence: Synthetic oligonucleotide
acgucugacaucuuugaca

SEQ ID NO: 1025377 - RNA, 19 nt, Artificial Sequence
  Description of Artificial Sequence: Synthetic oligonucleotide
uuuguagaucagguggccg

SEQ ID NO: 1025378 - RNA, 19 nt, Artificial Sequence
  Description of Artificial Sequence: Synthetic oligonucleotide
uuugaauuagcggugguuu

SEQ ID NO: 1025379 - RNA, 19 nt, Artificial Sequence
  Description of Artificial Sequence: Synthetic oligonucleotide
uuagcacuaggcuccagca

SEQ ID NO: 1025380 - RNA, 19 nt, Artificial Sequence
  Description of Artificial Sequence: Synthetic oligonucleotide
uugcuggucucaaauuucc

SEQ ID NO: 1025381 - RNA, 19 nt, Artificial Sequence
  Description of Artificial Sequence: Synthetic oligonucleotide
uguuucacacccagggugu

SEQ ID NO: 1025382 - RNA, 19 nt, Artificial Sequence
  Description of Artificial Sequence: Synthetic oligonucleotide
gucacgaacagcaaaacga

SEQ ID NO: 1025383 - RNA, 19 nt, Artificial Sequence
  Description of Artificial Sequence: Synthetic oligonucleotide
auuaaacuuaaauggccaa

SEQ ID NO: 1025384 - RNA, 19 nt, Artificial Sequence
  Description of Artificial Sequence: Synthetic oligonucleotide
auuggcacaaaugcuacug

SEQ ID NO: 1025385 - RNA, 19 nt, Artificial Sequence
  Description of Artificial Sequence: Synthetic oligonucleotide
cuguuucacacccagggug

SEQ ID NO: 1025386 - RNA, 19 nt, Artificial Sequence
  Description of Artificial Sequence: Synthetic oligonucleotide
gaaauuggcacaaaugcua

SEQ ID NO: 1025387 - RNA, 19 nt, Artificial Sequence
  Description of Artificial Sequence: Synthetic oligonucleotide
augucaauagugauaccac

SEQ ID NO: 1025388 - RNA, 19 nt, Artificial Sequence
  Description of Artificial Sequence: Synthetic oligonucleotide
ugcauuucaacagacuuua

SEQ ID NO: 1025389 - RNA, 19 nt, Artificial Sequence
  Description of Artificial Sequence: Synthetic oligonucleotide
acgauguugauaugagucu

SEQ ID NO: 1025390 - RNA, 19 nt, Artificial Sequence
  Description of Artificial Sequence: Synthetic oligonucleotide
uugacagacacguucuuua

SEQ ID NO: 1025391 - RNA, 19 nt, Artificial Sequence
  Description of Artificial Sequence: Synthetic oligonucleotide
aacaaucaggacagcacag

SEQ ID NO: 1025392 - RNA, 19 nt, Artificial Sequence
  Description of Artificial Sequence: Synthetic oligonucleotide
ucaggauaaucaccugagc

SEQ ID NO: 1025393 - RNA, 19 nt, Artificial Sequence
  Description of Artificial Sequence: Synthetic oligonucleotide
acagcaaaacgacccagug

SEQ ID NO: 1025394 - RNA, 19 nt, Artificial Sequence
  Description of Artificial Sequence: Synthetic oligonucleotide
gacaacgauguugauauga

SEQ ID NO: 1025395 - RNA, 19 nt, Artificial Sequence
  Description of Artificial Sequence: Synthetic oligonucleotide
ucaugucacgaacagcaaa

SEQ ID NO: 1025396 - RNA, 19 nt, Artificial Sequence
  Description of Artificial Sequence: Synthetic oligonucleotide
uuuaaaacaccagucucua

SEQ ID NO: 1025397 - RNA, 19 nt, Artificial Sequence
  Description of Artificial Sequence: Synthetic oligonucleotide
caggauacaauccaaagcu

SEQ ID NO: 1025398 - RNA, 19 nt, Artificial Sequence
  Description of Artificial Sequence: Synthetic oligonucleotide
auggccaauugagacaaac

SEQ ID NO: 1025399 - RNA, 19 nt, Artificial Sequence
  Description of Artificial Sequence: Synthetic oligonucleotide
uaaacuuaaauggccaauu

SEQ ID NO: 1025400 - RNA, 19 nt, Artificial Sequence
  Description of Artificial Sequence: Synthetic oligonucleotide
ggguaauauucauuuagcc

SEQ ID NO: 1025401 - RNA, 19 nt, Artificial Sequence
  Description of Artificial Sequence: Synthetic oligonucleotide
agcuucuuaccagaacggc

SEQ ID NO: 1025402 - RNA, 19 nt, Artificial Sequence
  Description of Artificial Sequence: Synthetic oligonucleotide
aauuggcacaaaugcuacu

SEQ ID NO: 1025403 - RNA, 19 nt, Artificial Sequence
  Description of Artificial Sequence: Synthetic oligonucleotide
cuucuuaccagaacggcga

SEQ ID NO: 1025404 - RNA, 19 nt, Artificial Sequence
  Description of Artificial Sequence: Synthetic oligonucleotide
acauaguauuugcuggucu

SEQ ID NO: 1025405 - RNA, 19 nt, Artificial Sequence
  Description of Artificial Sequence: Synthetic oligonucleotide
caggauaaucaccugagca

SEQ ID NO: 1025406 - RNA, 19 nt, Artificial Sequence
  Description of Artificial Sequence: Synthetic oligonucleotide
gguguuagggguaauauuc

SEQ ID NO: 1025407 - RNA, 19 nt, Artificial Sequence
  Description of Artificial Sequence: Synthetic oligonucleotide
ugauaugagucuuuuccuu

SEQ ID NO: 1025408 - RNA, 19 nt, Artificial Sequence
  Description of Artificial Sequence: Synthetic oligonucleotide
uggccaauugagacaaaca

SEQ ID NO: 1025409 - RNA, 19 nt, Artificial Sequence
  Description of Artificial Sequence: Synthetic oligonucleotide
cuuuucgaugguucguuug

SEQ ID NO: 1025410 - RNA, 19 nt, Artificial Sequence
  Description of Artificial Sequence: Synthetic oligonucleotide
guuuguccaagacccaggc

SEQ ID NO: 1025411 - RNA, 19 nt, Artificial Sequence
  Description of Artificial Sequence: Synthetic oligonucleotide
aaucaggacagcacaguca

SEQ ID NO: 1025412 - RNA, 19 nt, Artificial Sequence
  Description of Artificial Sequence: Synthetic oligonucleotide
cagugggacgaguuggugg

SEQ ID NO: 1025413 - RNA, 19 nt, Artificial Sequence
  Description of Artificial Sequence: Synthetic oligonucleotide
uccaacgcgacuaccgcac

SEQ ID NO: 1025414 - RNA, 19 nt, Artificial Sequence
  Description of Artificial Sequence: Synthetic oligonucleotide
uucguuugucgauuccacc

SEQ ID NO: 1025415 - RNA, 19 nt, Artificial Sequence
  Description of Artificial Sequence: Synthetic oligonucleotide
cuucauggugcauuucaac

SEQ ID NO: 1025416 - RNA, 19 nt, Artificial Sequence
  Description of Artificial Sequence: Synthetic oligonucleotide
cauguuggauuugaauuag

SEQ ID NO: 1025417 - RNA, 19 nt, Artificial Sequence
  Description of Artificial Sequence: Synthetic oligonucleotide
auuagcggugguuuucaca

SEQ ID NO: 1025418 - RNA, 19 nt, Artificial Sequence
  Description of Artificial Sequence: Synthetic oligonucleotide
aagguggcucgguggaauc

SEQ ID NO: 1025419 - RNA, 19 nt, Artificial Sequence
  Description of Artificial Sequence: Synthetic oligonucleotide
aaugggucucaaaauucug

SEQ ID NO: 1025420 - RNA, 19 nt, Artificial Sequence
  Description of Artificial Sequence: Synthetic oligonucleotide
aagaacguccaacgcgacu

SEQ ID NO: 1025421 - RNA, 19 nt, Artificial Sequence
  Description of Artificial Sequence: Synthetic oligonucleotide
cugacggcaaacccguugc

SEQ ID NO: 1025422 - RNA, 19 nt, Artificial Sequence
  Description of Artificial Sequence: Synthetic oligonucleotide
uacgggugacuuuccaucc

SEQ ID NO: 1025423 - RNA, 19 nt, Artificial Sequence
  Description of Artificial Sequence: Synthetic oligonucleotide
ugauaccacgcucacgcuc

SEQ ID NO: 1025424 - RNA, 19 nt, Artificial Sequence
  Description of Artificial Sequence: Synthetic oligonucleotide
cuuaccagaacggcgauca

SEQ ID NO: 1025425 - RNA, 19 nt, Artificial Sequence
  Description of Artificial Sequence: Synthetic oligonucleotide
uucacaacaccugcguucu

SEQ ID NO: 1025426 - RNA, 19 nt, Artificial Sequence
  Description of Artificial Sequence: Synthetic oligonucleotide
uaaccagucuuucacuauu

SEQ ID NO: 1025427 - RNA, 19 nt, Artificial Sequence
  Description of Artificial Sequence: Synthetic oligonucleotide
acaacgauguugauaugag

SEQ ID NO: 1025428 - RNA, 19 nt, Artificial Sequence
  Description of Artificial Sequence: Synthetic oligonucleotide
gguaauauucauuuagccu

SEQ ID NO: 1025429 - RNA, 19 nt, Artificial Sequence
  Description of Artificial Sequence: Synthetic oligonucleotide
cugugugacaauccaguac

SEQ ID NO: 1025430 - RNA, 19 nt, Artificial Sequence
  Description of Artificial Sequence: Synthetic oligonucleotide
ucgauuccaccacauuugu

SEQ ID NO: 1025431 - RNA, 19 nt, Artificial Sequence
  Description of Artificial Sequence: Synthetic oligonucleotide
uuuacgggugacuuuccau

SEQ ID NO: 1025432 - RNA, 19 nt, Artificial Sequence
  Description of Artificial Sequence: Synthetic oligonucleotide
ggaggauagucagagaagc

SEQ ID NO: 1025433 - RNA, 19 nt, Artificial Sequence
  Description of Artificial Sequence: Synthetic oligonucleotide
gcauauuagcacuaggcuc

SEQ ID NO: 1025434 - RNA, 19 nt, Artificial Sequence
  Description of Artificial Sequence: Synthetic oligonucleotide
aacguccaacgcgacuacc

SEQ ID NO: 1025435 - RNA, 19 nt, Artificial Sequence
  Description of Artificial Sequence: Synthetic oligonucleotide
caugucacgaacagcaaaa

SEQ ID NO: 1025436 - RNA, 19 nt, Artificial Sequence
  Description of Artificial Sequence: Synthetic oligonucleotide
gucgauuccaccacauuug

SEQ ID NO: 1025437 - RNA, 19 nt, Artificial Sequence
  Description of Artificial Sequence: Synthetic oligonucleotide
uuguaacguugacuggagc

SEQ ID NO: 1025438 - RNA, 19 nt, Artificial Sequence
  Description of Artificial Sequence: Synthetic oligonucleotide
uguuagggguaauauucau

SEQ ID NO: 1025439 - RNA, 19 nt, Artificial Sequence
  Description of Artificial Sequence: Synthetic oligonucleotide
agaagggcaugcucacggg

SEQ ID NO: 1025440 - RNA, 19 nt, Artificial Sequence
  Description of Artificial Sequence: Synthetic oligonucleotide
caguggaggauagucagag

SEQ ID NO: 1025441 - RNA, 19 nt, Artificial Sequence
  Description of Artificial Sequence: Synthetic oligonucleotide
acaccugcguucugacggc

SEQ ID NO: 1025442 - RNA, 19 nt, Artificial Sequence
  Description of Artificial Sequence: Synthetic oligonucleotide
caacaaucaggacagcaca

SEQ ID NO: 1025443 - RNA, 19 nt, Artificial Sequence
  Description of Artificial Sequence: Synthetic oligonucleotide
aaagaacguccaacgcgac

SEQ ID NO: 1025444 - RNA, 19 nt, Artificial Sequence
  Description of Artificial Sequence: Synthetic oligonucleotide
gauaccacgcucacgcuca

SEQ ID NO: 1025445 - RNA, 19 nt, Artificial Sequence
  Description of Artificial Sequence: Synthetic oligonucleotide
ucaccugagcagugaagcc

SEQ ID NO: 1025446 - RNA, 19 nt, Artificial Sequence
  Description of Artificial Sequence: Synthetic oligonucleotide
uuuucacaacaccugcguu

SEQ ID NO: 1025447 - RNA, 19 nt, Artificial Sequence
  Description of Artificial Sequence: Synthetic oligonucleotide
gauaaucaccugagcagug

SEQ ID NO: 1025448 - RNA, 19 nt, Artificial Sequence
  Description of Artificial Sequence: Synthetic oligonucleotide
augguucguuugucgauuc

SEQ ID NO: 1025449 - RNA, 19 nt, Artificial Sequence
  Description of Artificial Sequence: Synthetic oligonucleotide
agaccguucuuccaccacu

SEQ ID NO: 1025450 - RNA, 19 nt, Artificial Sequence
  Description of Artificial Sequence: Synthetic oligonucleotide
uguugauaugagucuuuuc

SEQ ID NO: 1025451 - RNA, 19 nt, Artificial Sequence
  Description of Artificial Sequence: Synthetic oligonucleotide
caccugagcagugaagccg

SEQ ID NO: 1025452 - RNA, 19 nt, Artificial Sequence
  Description of Artificial Sequence: Synthetic oligonucleotide
ugaauuagcggugguuuuc

SEQ ID NO: 1025453 - RNA, 19 nt, Artificial Sequence
  Description of Artificial Sequence: Synthetic oligonucleotide
cuugccugaaucuacgugu

SEQ ID NO: 1025454 - RNA, 19 nt, Artificial Sequence
  Description of Artificial Sequence: Synthetic oligonucleotide
ugauggucacauaguauuu

SEQ ID NO: 1025455 - RNA, 19 nt, Artificial Sequence
  Description of Artificial Sequence: Synthetic oligonucleotide
augucacgaacagcaaaac

SEQ ID NO: 1025456 - RNA, 19 nt, Artificial Sequence
  Description of Artificial Sequence: Synthetic oligonucleotide
aacuuuucgaugguucguu

SEQ ID NO: 1025457 - RNA, 19 nt, Artificial Sequence
  Description of Artificial Sequence: Synthetic oligonucleotide
uccucguaucucuucuggc

SEQ ID NO: 1025458 - RNA, 19 nt, Artificial Sequence
  Description of Artificial Sequence: Synthetic oligonucleotide
cuguuguaacguugacugg

SEQ ID NO: 1025459 - RNA, 19 nt, Artificial Sequence
  Description of Artificial Sequence: Synthetic oligonucleotide
guguccaaugacaacgaug

SEQ ID NO: 1025460 - RNA, 19 nt, Artificial Sequence
  Description of Artificial Sequence: Synthetic oligonucleotide
agaacguccaacgcgacua

SEQ ID NO: 1025461 - RNA, 19 nt, Artificial Sequence
  Description of Artificial Sequence: Synthetic oligonucleotide
ugacggcaaacccguugcg

SEQ ID NO: 1025462 - RNA, 19 nt, Artificial Sequence
  Description of Artificial Sequence: Synthetic oligonucleotide
ucuuuacgggugacuuucc

SEQ ID NO: 1025463 - RNA, 19 nt, Artificial Sequence
  Description of Artificial Sequence: Synthetic oligonucleotide
uuugcccgcuccagcagcc

SEQ ID NO: 1025464 - RNA, 19 nt, Artificial Sequence
  Description of Artificial Sequence: Synthetic oligonucleotide
guuguaacguugacuggag

SEQ ID NO: 1025465 - RNA, 19 nt, Artificial Sequence
  Description of Artificial Sequence: Synthetic oligonucleotide
auguuggauuugaauuagc

SEQ ID NO: 1025466 - RNA, 19 nt, Artificial Sequence
  Description of Artificial Sequence: Synthetic oligonucleotide
aggguguaagccagaaggg

SEQ ID NO: 1025467 - RNA, 19 nt, Artificial Sequence
  Description of Artificial Sequence: Synthetic oligonucleotide
ugcguucugacggcaaacc

SEQ ID NO: 1025468 - RNA, 19 nt, Artificial Sequence
  Description of Artificial Sequence: Synthetic oligonucleotide
augcucacgggucugccca

SEQ ID NO: 1025469 - RNA, 19 nt, Artificial Sequence
  Description of Artificial Sequence: Synthetic oligonucleotide
ggaugguucaggauaauca

SEQ ID NO: 1025470 - RNA, 19 nt, Artificial Sequence
  Description of Artificial Sequence: Synthetic oligonucleotide
aucuacguguccaaugaca

SEQ ID NO: 1025471 - RNA, 19 nt, Artificial Sequence
  Description of Artificial Sequence: Synthetic oligonucleotide
caccauuccaaccagaaau

SEQ ID NO: 1025472 - RNA, 19 nt, Artificial Sequence
  Description of Artificial Sequence: Synthetic oligonucleotide
ggauuugaauuagcggugg

SEQ ID NO: 1025473 - RNA, 19 nt, Artificial Sequence
  Description of Artificial Sequence: Synthetic oligonucleotide
uuccaccacugauuaagac

SEQ ID NO: 1025474 - RNA, 19 nt, Artificial Sequence
  Description of Artificial Sequence: Synthetic oligonucleotide
aauccaguacaggagcaua

SEQ ID NO: 1025475 - RNA, 19 nt, Artificial Sequence
  Description of Artificial Sequence: Synthetic oligonucleotide
agcugugugacaauccagu

SEQ ID NO: 1025476 - RNA, 19 nt, Artificial Sequence
  Description of Artificial Sequence: Synthetic oligonucleotide
cacagcaacugucugccuc

SEQ ID NO: 1025477 - RNA, 19 nt, Artificial Sequence
  Description of Artificial Sequence: Synthetic oligonucleotide
uugaauuagcggugguuuu

SEQ ID NO: 1025478 - RNA, 19 nt, Artificial Sequence
  Description of Artificial Sequence: Synthetic oligonucleotide
ucaggguuguagccaauuu

SEQ ID NO: 1025479 - RNA, 19 nt, Artificial Sequence
  Description of Artificial Sequence: Synthetic oligonucleotide
uugccugaaucuacguguc

SEQ ID NO: 1025480 - RNA, 19 nt, Artificial Sequence
  Description of Artificial Sequence: Synthetic oligonucleotide
aaacaguucugagaccguu

SEQ ID NO: 1025481 - RNA, 19 nt, Artificial Sequence
  Description of Artificial Sequence: Synthetic oligonucleotide
gaauuagcggugguuuuca

SEQ ID NO: 1025482 - RNA, 19 nt, Artificial Sequence
  Description of Artificial Sequence: Synthetic oligonucleotide
acguccaacgcgacuaccg

SEQ ID NO: 1025483 - RNA, 19 nt, Artificial Sequence
  Description of Artificial Sequence: Synthetic oligonucleotide
gaaccauaucaacgauggc

SEQ ID NO: 1025484 - RNA, 19 nt, Artificial Sequence
  Description of Artificial Sequence: Synthetic oligonucleotide
ugccaggaaccauaucaac

SEQ ID NO: 1025485 - RNA, 19 nt, Artificial Sequence
  Description of Artificial Sequence: Synthetic oligonucleotide
cugagaccguucuuccacc

SEQ ID NO: 1025486 - RNA, 19 nt, Artificial Sequence
  Description of Artificial Sequence: Synthetic oligonucleotide
uuccaccacauuuguagau

SEQ ID NO: 1025487 - RNA, 19 nt, Artificial Sequence
  Description of Artificial Sequence: Synthetic oligonucleotide
ugguucguuugucgauucc

SEQ ID NO: 1025488 - RNA, 19 nt, Artificial Sequence
  Description of Artificial Sequence: Synthetic oligonucleotide
auuugaauuagcggugguu

SEQ ID NO: 1025489 - RNA, 19 nt, Artificial Sequence
  Description of Artificial Sequence: Synthetic oligonucleotide
cuuugcccgcuccagcagc

SEQ ID NO: 1025490 - RNA, 19 nt, Artificial Sequence
  Description of Artificial Sequence: Synthetic oligonucleotide
ugauuaagacugggguggc

SEQ ID NO: 1025491 - RNA, 19 nt, Artificial Sequence
  Description of Artificial Sequence: Synthetic oligonucleotide
ugagaccguucuuccacca

SEQ ID NO: 1025492 - RNA, 19 nt, Artificial Sequence
  Description of Artificial Sequence: Synthetic oligonucleotide
gguggcaggauacaaucca

SEQ ID NO: 1025493 - RNA, 19 nt, Artificial Sequence
  Description of Artificial Sequence: Synthetic oligonucleotide
ggauacaauccaaagcuuc

SEQ ID NO: 1025494 - RNA, 19 nt, Artificial Sequence
  Description of Artificial Sequence: Synthetic oligonucleotide
augacacccacagcaacug

SEQ ID NO: 1025495 - RNA, 19 nt, Artificial Sequence
  Description of Artificial Sequence: Synthetic oligonucleotide
auccaguacaggagcauag

SEQ ID NO: 1025496 - RNA, 19 nt, Artificial Sequence
  Description of Artificial Sequence: Synthetic oligonucleotide
caguuuguccaagacccag

SEQ ID NO: 1025497 - RNA, 19 nt, Artificial Sequence
  Description of Artificial Sequence: Synthetic oligonucleotide
gauaugagucuuuuccuuu

SEQ ID NO: 1025498 - RNA, 19 nt, Artificial Sequence
  Description of Artificial Sequence: Synthetic oligonucleotide
caaaugcuacugugucagg

SEQ ID NO: 1025499 - RNA, 19 nt, Artificial Sequence
  Description of Artificial Sequence: Synthetic oligonucleotide
augggucucaaaauucugu

SEQ ID NO: 1025500 - RNA, 19 nt, Artificial Sequence
  Description of Artificial Sequence: Synthetic oligonucleotide
accaccaauuuuauagaca

SEQ ID NO: 1025501 - RNA, 19 nt, Artificial Sequence
  Description of Artificial Sequence: Synthetic oligonucleotide
ugccugaaucuacgugucc

SEQ ID NO: 1025502 - RNA, 19 nt, Artificial Sequence
  Description of Artificial Sequence: Synthetic oligonucleotide
caaggcauauuagcacuag

SEQ ID NO: 1025503 - RNA, 19 nt, Artificial Sequence
  Description of Artificial Sequence: Synthetic oligonucleotide
guucuuccaccacugauua

SEQ ID NO: 1025504 - RNA, 19 nt, Artificial Sequence
  Description of Artificial Sequence: Synthetic oligonucleotide
ucaacacacaugggcuugc

SEQ ID NO: 1025505 - RNA, 19 nt, Artificial Sequence
  Description of Artificial Sequence: Synthetic oligonucleotide
caacaccugcguucugacg

SEQ ID NO: 1025506 - RNA, 19 nt, Artificial Sequence
  Description of Artificial Sequence: Synthetic oligonucleotide
uccgaugcauuguuaucau

SEQ ID NO: 1025507 - RNA, 19 nt, Artificial Sequence
  Description of Artificial Sequence: Synthetic oligonucleotide
caugcucacgggucugccc

SEQ ID NO: 1025508 - RNA, 19 nt, Artificial Sequence
  Description of Artificial Sequence: Synthetic oligonucleotide
auagucagagaagcucuca

SEQ ID NO: 1025509 - RNA, 19 nt, Artificial Sequence
  Description of Artificial Sequence: Synthetic oligonucleotide
agguguuagggguaauauu

SEQ ID NO: 1025510 - RNA, 19 nt, Artificial Sequence
  Description of Artificial Sequence: Synthetic oligonucleotide
cuacguguccaaugacaac

SEQ ID NO: 1025511 - RNA, 19 nt, Artificial Sequence
  Description of Artificial Sequence: Synthetic oligonucleotide
ucuacucggcccacaggaa

SEQ ID NO: 1025512 - RNA, 19 nt, Artificial Sequence
  Description of Artificial Sequence: Synthetic oligonucleotide
uguguccuggggcaucaau

SEQ ID NO: 1025513 - RNA, 19 nt, Artificial Sequence
  Description of Artificial Sequence: Synthetic oligonucleotide
agaucagguggccgguugu

SEQ ID NO: 1025514 - RNA, 19 nt, Artificial Sequence
  Description of Artificial Sequence: Synthetic oligonucleotide
ccugaagguuuuccgaugc

SEQ ID NO: 1025515 - RNA, 19 nt, Artificial Sequence
  Description of Artificial Sequence: Synthetic oligonucleotide
gauagucagagaagcucuc

SEQ ID NO: 1025516 - RNA, 19 nt, Artificial Sequence
  Description of Artificial Sequence: Synthetic oligonucleotide
uggugacuuugcccgcucc

SEQ ID NO: 1025517 - RNA, 19 nt, Artificial Sequence
  Description of Artificial Sequence: Synthetic oligonucleotide
guaacguugacuggagcaa

SEQ ID NO: 1025518 - RNA, 19 nt, Artificial Sequence
  Description of Artificial Sequence: Synthetic oligonucleotide
accagcaacguugccacgu

SEQ ID NO: 1025519 - RNA, 19 nt, Artificial Sequence
  Description of Artificial Sequence: Synthetic oligonucleotide
gcuuucugggccgacuugg

SEQ ID NO: 1025520 - RNA, 19 nt, Artificial Sequence
  Description of Artificial Sequence: Synthetic oligonucleotide
uggucaaguuguuuccauu

SEQ ID NO: 1025521 - RNA, 19 nt, Artificial Sequence
  Description of Artificial Sequence: Synthetic oligonucleotide
agcaacguugccacgucug

SEQ ID NO: 1025522 - RNA, 19 nt, Artificial Sequence
  Description of Artificial Sequence: Synthetic oligonucleotide
uaacguugacuggagcaaa

SEQ ID NO: 1025523 - RNA, 19 nt, Artificial Sequence
  Description of Artificial Sequence: Synthetic oligonucleotide
guaagccagaagggcaugc

SEQ ID NO: 1025524 - RNA, 19 nt, Artificial Sequence
  Description of Artificial Sequence: Synthetic oligonucleotide
uaccagaacggcgaucaau

SEQ ID NO: 1025525 - RNA, 19 nt, Artificial Sequence
  Description of Artificial Sequence: Synthetic oligonucleotide
guuugucgauuccaccaca

SEQ ID NO: 1025526 - RNA, 19 nt, Artificial Sequence
  Description of Artificial Sequence: Synthetic oligonucleotide
uagcacuaggcuccagcau

SEQ ID NO: 1025527 - RNA, 19 nt, Artificial Sequence
  Description of Artificial Sequence: Synthetic oligonucleotide
cacgucugacaucuuugac

SEQ ID NO: 1025528 - RNA, 19 nt, Artificial Sequence
  Description of Artificial Sequence: Synthetic oligonucleotide
gguguaagccagaagggca

SEQ ID NO: 1025529 - RNA, 19 nt, Artificial Sequence
  Description of Artificial Sequence: Synthetic oligonucleotide
gaccguucuuccaccacug

SEQ ID NO: 1025530 - RNA, 19 nt, Artificial Sequence
  Description of Artificial Sequence: Synthetic oligonucleotide
ugagcuuucugggccgacu

SEQ ID NO: 1025531 - RNA, 19 nt, Artificial Sequence
  Description of Artificial Sequence: Synthetic oligonucleotide
uucuuaccagaacggcgau

SEQ ID NO: 1025532 - RNA, 19 nt, Artificial Sequence
  Description of Artificial Sequence: Synthetic oligonucleotide
ucgcaguggcuugucagug

SEQ ID NO: 1025533 - RNA, 19 nt, Artificial Sequence
  Description of Artificial Sequence: Synthetic oligonucleotide
uuucgaugguucguuuguc

SEQ ID NO: 1025534 - RNA, 19 nt, Artificial Sequence
  Description of Artificial Sequence: Synthetic oligonucleotide
ucacgggucugcccauucu

SEQ ID NO: 1025535 - RNA, 19 nt, Artificial Sequence
  Description of Artificial Sequence: Synthetic oligonucleotide
gagaccguucuuccaccac

SEQ ID NO: 1025536 - RNA, 19 nt, Artificial Sequence
  Description of Artificial Sequence: Synthetic oligonucleotide
agguuuuccgaugcauugu

SEQ ID NO: 1025537 - RNA, 19 nt, Artificial Sequence
  Description of Artificial Sequence: Synthetic oligonucleotide
gaacguccaacgcgacuac

SEQ ID NO: 1025538 - RNA, 19 nt, Artificial Sequence
  Description of Artificial Sequence: Synthetic oligonucleotide
cuuaauguaggugcugacu

SEQ ID NO: 1025539 - RNA, 19 nt, Artificial Sequence
  Description of Artificial Sequence: Synthetic oligonucleotide
gcuaugugagcugugugac

SEQ ID NO: 1025540 - RNA, 19 nt, Artificial Sequence
  Description of Artificial Sequence: Synthetic oligonucleotide
caccaauuuuauagacauc

SEQ ID NO: 1025541 - RNA, 19 nt, Artificial Sequence
  Description of Artificial Sequence: Synthetic oligonucleotide
guguuagggguaauauuca

SEQ ID NO: 1025542 - RNA, 19 nt, Artificial Sequence
  Description of Artificial Sequence: Synthetic oligonucleotide
uggagauaccagccucaaa

SEQ ID NO: 1025543 - RNA, 19 nt, Artificial Sequence
  Description of Artificial Sequence: Synthetic oligonucleotide
caacugucugccucauguc

SEQ ID NO: 1025544 - RNA, 19 nt, Artificial Sequence
  Description of Artificial Sequence: Synthetic oligonucleotide
ugacaacgauguugauaug

SEQ ID NO: 1025545 - RNA, 19 nt, Artificial Sequence
  Description of Artificial Sequence: Synthetic oligonucleotide
ggguguaagccagaagggc

SEQ ID NO: 1025546 - RNA, 19 nt, Artificial Sequence
  Description of Artificial Sequence: Synthetic oligonucleotide
caagaauuuagggccaucu

SEQ ID NO: 1025547 - RNA, 19 nt, Artificial Sequence
  Description of Artificial Sequence: Synthetic oligonucleotide
gauuugaauuagcgguggu

SEQ ID NO: 1025548 - RNA, 19 nt, Artificial Sequence
  Description of Artificial Sequence: Synthetic oligonucleotide
uucccauguuggauuugaa

SEQ ID NO: 1025549 - RNA, 19 nt, Artificial Sequence
  Description of Artificial Sequence: Synthetic oligonucleotide
acguugccacgucugacau

SEQ ID NO: 1025550 - RNA, 19 nt, Artificial Sequence
  Description of Artificial Sequence: Synthetic oligonucleotide
cuuuacgggugacuuucca

SEQ ID NO: 1025551 - RNA, 19 nt, Artificial Sequence
  Description of Artificial Sequence: Synthetic oligonucleotide
uuggagauaccagccucaa

SEQ ID NO: 1025552 - RNA, 19 nt, Artificial Sequence
  Description of Artificial Sequence: Synthetic oligonucleotide
acagucagccugagaagug

SEQ ID NO: 1025553 - RNA, 19 nt, Artificial Sequence
  Description of Artificial Sequence: Synthetic oligonucleotide
gacggcaaacccguugcga

SEQ ID NO: 1025554 - RNA, 19 nt, Artificial Sequence
  Description of Artificial Sequence: Synthetic oligonucleotide
ccagcacuaauuuggccug

SEQ ID NO: 1025555 - RNA, 19 nt, Artificial Sequence
  Description of Artificial Sequence: Synthetic oligonucleotide
aacgacccaguggaggaua

SEQ ID NO: 1025556 - RNA, 19 nt, Artificial Sequence
  Description of Artificial Sequence: Synthetic oligonucleotide
ucuuaccagaacggcgauc

SEQ ID NO: 1025557 - RNA, 19 nt, Artificial Sequence
  Description of Artificial Sequence: Synthetic oligonucleotide
accauuccaaccagaaauu

SEQ ID NO: 1025558 - RNA, 19 nt, Artificial Sequence
  Description of Artificial Sequence: Synthetic oligonucleotide
gauuaagacugggguggca

SEQ ID NO: 1025559 - RNA, 19 nt, Artificial Sequence
  Description of Artificial Sequence: Synthetic oligonucleotide
gguucguuugucgauucca

SEQ ID NO: 1025560 - RNA, 19 nt, Artificial Sequence
  Description of Artificial Sequence: Synthetic oligonucleotide
cacaacaccugcguucuga

SEQ ID NO: 1025561 - RNA, 19 nt, Artificial Sequence
  Description of Artificial Sequence: Synthetic oligonucleotide
gugugacaauccaguacag

SEQ ID NO: 1025562 - RNA, 19 nt, Artificial Sequence
  Description of Artificial Sequence: Synthetic oligonucleotide
uauuagcacuaggcuccag

SEQ ID NO: 1025563 - RNA, 19 nt, Artificial Sequence
  Description of Artificial Sequence: Synthetic oligonucleotide
gagauaccagccucaaauu

SEQ ID NO: 1025564 - RNA, 19 nt, Artificial Sequence
  Description of Artificial Sequence: Synthetic oligonucleotide
gaagggcaugcucacgggu

SEQ ID NO: 1025565 - RNA, 19 nt, Artificial Sequence
  Description of Artificial Sequence: Synthetic oligonucleotide
auauuagcacuaggcucca

SEQ ID NO: 1025566 - RNA, 19 nt, Artificial Sequence
  Description of Artificial Sequence: Synthetic oligonucleotide
gagaagugccaguaaucau

SEQ ID NO: 1025567 - RNA, 19 nt, Artificial Sequence
  Description of Artificial Sequence: Synthetic oligonucleotide
gccuggaugguucaggaua

SEQ ID NO: 1025568 - RNA, 19 nt, Artificial Sequence
  Description of Artificial Sequence: Synthetic oligonucleotide
auguuccacaaaacauucu

SEQ ID NO: 1025569 - RNA, 19 nt, Artificial Sequence
  Description of Artificial Sequence: Synthetic oligonucleotide
guccaacgcgacuaccgca

SEQ ID NO: 1025570 - RNA, 19 nt, Artificial Sequence
  Description of Artificial Sequence: Synthetic oligonucleotide
uuaccagaacggcgaucaa

SEQ ID NO: 1025571 - RNA, 19 nt, Artificial Sequence
  Description of Artificial Sequence: Synthetic oligonucleotide
caacguugccacgucugac

SEQ ID NO: 1025572 - RNA, 19 nt, Artificial Sequence
  Description of Artificial Sequence: Synthetic oligonucleotide
agcucucaacacacauggg

SEQ ID NO: 1025573 - RNA, 19 nt, Artificial Sequence
  Description of Artificial Sequence: Synthetic oligonucleotide
ccauguuggauuugaauua

SEQ ID NO: 1025574 - RNA, 19 nt, Artificial Sequence
  Description of Artificial Sequence: Synthetic oligonucleotide
ucacaacaccugcguucug

SEQ ID NO: 1025575 - RNA, 19 nt, Artificial Sequence
  Description of Artificial Sequence: Synthetic oligonucleotide
guucugacggcaaacccgu

SEQ ID NO: 1025576 - RNA, 19 nt, Artificial Sequence
  Description of Artificial Sequence: Synthetic oligonucleotide
ccaccaauuuuauagacau

SEQ ID NO: 1025577 - RNA, 19 nt, Artificial Sequence
  Description of Artificial Sequence: Synthetic oligonucleotide
agcacuaauuuggccugga

SEQ ID NO: 1025578 - RNA, 19 nt, Artificial Sequence
  Description of Artificial Sequence: Synthetic oligonucleotide
auaccacgcucacgcucag

SEQ ID NO: 1025579 - RNA, 19 nt, Artificial Sequence
  Description of Artificial Sequence: Synthetic oligonucleotide
ggauaaucaccugagcagu

SEQ ID NO: 1025580 - RNA, 19 nt, Artificial Sequence
  Description of Artificial Sequence: Synthetic oligonucleotide
cgaugcauuguuaucauua

SEQ ID NO: 1025581 - RNA, 19 nt, Artificial Sequence
  Description of Artificial Sequence: Synthetic oligonucleotide
uagcggugguuuucacaac

SEQ ID NO: 1025582 - RNA, 19 nt, Artificial Sequence
  Description of Artificial Sequence: Synthetic oligonucleotide
cagcacuaauuuggccugg

SEQ ID NO: 1025583 - RNA, 19 nt, Artificial Sequence
  Description of Artificial Sequence: Synthetic oligonucleotide
gaugguucguuugucgauu

SEQ ID NO: 1025584 - RNA, 19 nt, Artificial Sequence
  Description of Artificial Sequence: Synthetic oligonucleotide
gugccaguaaucauguuuu

SEQ ID NO: 1025585 - RNA, 19 nt, Artificial Sequence
  Description of Artificial Sequence: Synthetic oligonucleotide
acgggucugcccauucuug

SEQ ID NO: 1025586 - RNA, 19 nt, Artificial Sequence
  Description of Artificial Sequence: Synthetic oligonucleotide
cugcguucugacggcaaac

SEQ ID NO: 1025587 - RNA, 19 nt, Artificial Sequence
  Description of Artificial Sequence: Synthetic oligonucleotide
cugaagguuuuccgaugca

SEQ ID NO: 1025588 - RNA, 19 nt, Artificial Sequence
  Description of Artificial Sequence: Synthetic oligonucleotide
acguguccaaugacaacga

SEQ ID NO: 1025589 - RNA, 19 nt, Artificial Sequence
  Description of Artificial Sequence: Synthetic oligonucleotide
ugggccgacuuggugacuu

SEQ ID NO: 1025590 - RNA, 19 nt, Artificial Sequence
  Description of Artificial Sequence: Synthetic oligonucleotide
gccacgucugacaucuuug

SEQ ID NO: 1025591 - RNA, 19 nt, Artificial Sequence
  Description of Artificial Sequence: Synthetic oligonucleotide
caacgauguugauaugagu

SEQ ID NO: 1025592 - RNA, 19 nt, Artificial Sequence
  Description of Artificial Sequence: Synthetic oligonucleotide
cucacgggucugcccauuc

SEQ ID NO: 1025593 - RNA, 19 nt, Artificial Sequence
  Description of Artificial Sequence: Synthetic oligonucleotide
acgacccaguggaggauag

SEQ ID NO: 1025594 - RNA, 19 nt, Artificial Sequence
  Description of Artificial Sequence: Synthetic oligonucleotide
gccugaaucuacgugucca

SEQ ID NO: 1025595 - RNA, 19 nt, Artificial Sequence
  Description of Artificial Sequence: Synthetic oligonucleotide
caccagcaacguugccacg

SEQ ID NO: 1025596 - RNA, 19 nt, Artificial Sequence
  Description of Artificial Sequence: Synthetic oligonucleotide
gguaaccaccauuccaggu

SEQ ID NO: 1025597 - RNA, 19 nt, Artificial Sequence
  Description of Artificial Sequence: Synthetic oligonucleotide
gcaacguugccacgucuga

SEQ ID NO: 1025598 - RNA, 19 nt, Artificial Sequence
  Description of Artificial Sequence: Synthetic oligonucleotide
cugccaucuuuacggguga

SEQ ID NO: 1025599 - RNA, 19 nt, Artificial Sequence
  Description of Artificial Sequence: Synthetic oligonucleotide
ccacauuuguagaucaggu

SEQ ID NO: 1025600 - RNA, 19 nt, Artificial Sequence
  Description of Artificial Sequence: Synthetic oligonucleotide
ugccaucuuuacgggugac

SEQ ID NO: 1025601 - RNA, 19 nt, Artificial Sequence
  Description of Artificial Sequence: Synthetic oligonucleotide
gcaaaacgacccaguggag

SEQ ID NO: 1025602 - RNA, 19 nt, Artificial Sequence
  Description of Artificial Sequence: Synthetic oligonucleotide
ggcaaacccguugcgaaaa

SEQ ID NO: 1025603 - RNA, 19 nt, Artificial Sequence
  Description of Artificial Sequence: Synthetic oligonucleotide
gcugugugacaauccagua

SEQ ID NO: 1025604 - RNA, 19 nt, Artificial Sequence
  Description of Artificial Sequence: Synthetic oligonucleotide
cacgcucacgcucagcuuu

SEQ ID NO: 1025605 - RNA, 19 nt, Artificial Sequence
  Description of Artificial Sequence: Synthetic oligonucleotide
cguccaacgcgacuaccgc

SEQ ID NO: 1025606 - RNA, 19 nt, Artificial Sequence
  Description of Artificial Sequence: Synthetic oligonucleotide
cuaauuuggccuggauggu

SEQ ID NO: 1025607 - RNA, 19 nt, Artificial Sequence
  Description of Artificial Sequence: Synthetic oligonucleotide
ccacaaaacauucuccuuu

SEQ ID NO: 1025608 - RNA, 19 nt, Artificial Sequence
  Description of Artificial Sequence: Synthetic oligonucleotide
uucugacggcaaacccguu

SEQ ID NO: 1025609 - RNA, 19 nt, Artificial Sequence
  Description of Artificial Sequence: Synthetic oligonucleotide
cagguguuagggguaauau

SEQ ID NO: 1025610 - RNA, 19 nt, Artificial Sequence
  Description of Artificial Sequence: Synthetic oligonucleotide
cauuuagccuucugagcuu

SEQ ID NO: 1025611 - RNA, 19 nt, Artificial Sequence
  Description of Artificial Sequence: Synthetic oligonucleotide
gccucaugucacgaacagc

SEQ ID NO: 1025612 - RNA, 19 nt, Artificial Sequence
  Description of Artificial Sequence: Synthetic oligonucleotide
ccacgucugacaucuuuga

SEQ ID NO: 1025613 - RNA, 19 nt, Artificial Sequence
  Description of Artificial Sequence: Synthetic oligonucleotide
cugagcuuucugggccgac

SEQ ID NO: 1025614 - RNA, 19 nt, Artificial Sequence
  Description of Artificial Sequence: Synthetic oligonucleotide
guaagguggcucgguggaa

SEQ ID NO: 1025615 - RNA, 19 nt, Artificial Sequence
  Description of Artificial Sequence: Synthetic oligonucleotide
gugauaccacgcucacgcu

SEQ ID NO: 1025616 - RNA, 19 nt, Artificial Sequence
  Description of Artificial Sequence: Synthetic oligonucleotide
caggaaccauaucaacgau

SEQ ID NO: 1025617 - RNA, 19 nt, Artificial Sequence
  Description of Artificial Sequence: Synthetic oligonucleotide
gaacggcgaucaaucuucu

SEQ ID NO: 1025618 - RNA, 19 nt, Artificial Sequence
  Description of Artificial Sequence: Synthetic oligonucleotide
gacgaguugguggcaggau

SEQ ID NO: 1025619 - RNA, 19 nt, Artificial Sequence
  Description of Artificial Sequence: Synthetic oligonucleotide
ccagcaacguugccacguc

SEQ ID NO: 1025620 - RNA, 19 nt, Artificial Sequence
  Description of Artificial Sequence: Synthetic oligonucleotide
ggagcauagccagcacuaa

SEQ ID NO: 1025621 - RNA, 19 nt, Artificial Sequence
  Description of Artificial Sequence: Synthetic oligonucleotide
uugcccgcuccagcagccu

SEQ ID NO: 1025622 - RNA, 19 nt, Artificial Sequence
  Description of Artificial Sequence: Synthetic oligonucleotide
guuucacacccagggugua

SEQ ID NO: 1025623 - RNA, 19 nt, Artificial Sequence
  Description of Artificial Sequence: Synthetic oligonucleotide
cuuugacagacacguucuu

SEQ ID NO: 1025624 - RNA, 19 nt, Artificial Sequence
  Description of Artificial Sequence: Synthetic oligonucleotide
ccaaggcauauuagcacua

SEQ ID NO: 1025625 - RNA, 19 nt, Artificial Sequence
  Description of Artificial Sequence: Synthetic oligonucleotide
cugaaucuacguguccaau

SEQ ID NO: 1025626 - RNA, 19 nt, Artificial Sequence
  Description of Artificial Sequence: Synthetic oligonucleotide
gucaggguuguagccaauu

SEQ ID NO: 1025627 - RNA, 19 nt, Artificial Sequence
  Description of Artificial Sequence: Synthetic oligonucleotide
accugcguucugacggcaa

SEQ ID NO: 1025628 - RNA, 19 nt, Artificial Sequence
  Description of Artificial Sequence: Synthetic oligonucleotide
gggcuugccaggaaccaua

SEQ ID NO: 1025629 - RNA, 19 nt, Artificial Sequence
  Description of Artificial Sequence: Synthetic oligonucleotide
cacgggucugcccauucuu

SEQ ID NO: 1025630 - RNA, 19 nt, Artificial Sequence
  Description of Artificial Sequence: Synthetic oligonucleotide
cagacacguucuuuacauu

SEQ ID NO: 1025631 - RNA, 19 nt, Artificial Sequence
  Description of Artificial Sequence: Synthetic oligonucleotide
caucuuugacagacacguu

SEQ ID NO: 1025632 - RNA, 19 nt, Artificial Sequence
  Description of Artificial Sequence: Synthetic oligonucleotide
gugggacgaguugguggca

SEQ ID NO: 1025633 - RNA, 19 nt, Artificial Sequence
  Description of Artificial Sequence: Synthetic oligonucleotide
cagcaacguugccacgucu

SEQ ID NO: 1025634 - RNA, 19 nt, Artificial Sequence
  Description of Artificial Sequence: Synthetic oligonucleotide
ccugcguucugacggcaaa

SEQ ID NO: 1025635 - RNA, 19 nt, Artificial Sequence
  Description of Artificial Sequence: Synthetic oligonucleotide
uugccacgucugacaucuu

SEQ ID NO: 1025636 - RNA, 19 nt, Artificial Sequence
  Description of Artificial Sequence: Synthetic oligonucleotide
gggcaugcucacgggucug

SEQ ID NO: 1025637 - RNA, 19 nt, Artificial Sequence
  Description of Artificial Sequence: Synthetic oligonucleotide
gcacuaauuuggccuggau

SEQ ID NO: 1025638 - RNA, 19 nt, Artificial Sequence
  Description of Artificial Sequence: Synthetic oligonucleotide
caccugcguucugacggca

SEQ ID NO: 1025639 - RNA, 19 nt, Artificial Sequence
  Description of Artificial Sequence: Synthetic oligonucleotide
gcacuaggcuccagcaugu

SEQ ID NO: 1025640 - RNA, 19 nt, Artificial Sequence
  Description of Artificial Sequence: Synthetic oligonucleotide
cugcccauucuuggagaua

SEQ ID NO: 1025641 - RNA, 19 nt, Artificial Sequence
  Description of Artificial Sequence: Synthetic oligonucleotide
guagaucagguggccgguu

SEQ ID NO: 1025642 - RNA, 19 nt, Artificial Sequence
  Description of Artificial Sequence: Synthetic oligonucleotide
cggcgaucaaucuucuccu

SEQ ID NO: 1025643 - RNA, 19 nt, Artificial Sequence
  Description of Artificial Sequence: Synthetic oligonucleotide
cguugccacgucugacauc

SEQ ID NO: 1025644 - RNA, 19 nt, Artificial Sequence
  Description of Artificial Sequence: Synthetic oligonucleotide
cuuccauuggugggucauu

SEQ ID NO: 1025645 - RNA, 19 nt, Artificial Sequence
  Description of Artificial Sequence: Synthetic oligonucleotide
ggccuggaugguucaggau

SEQ ID NO: 1025646 - RNA, 19 nt, Artificial Sequence
  Description of Artificial Sequence: Synthetic oligonucleotide
cggcaaacccguugcgaaa

SEQ ID NO: 1025647 - RNA, 19 nt, Artificial Sequence
  Description of Artificial Sequence: Synthetic oligonucleotide
cgggugacuuuccaucccu

SEQ ID NO: 1025648 - RNA, 19 nt, Artificial Sequence
  Description of Artificial Sequence: Synthetic oligonucleotide
ccgaugcauuguuaucauu

SEQ ID NO: 1025649 - RNA, 19 nt, Artificial Sequence
  Description of Artificial Sequence: Synthetic oligonucleotide
ccaacgcgacuaccgcacu

SEQ ID NO: 1025650 - RNA, 19 nt, Artificial Sequence
  Description of Artificial Sequence: Synthetic oligonucleotide
cguguccaaugacaacgau

SEQ ID NO: 1025651 - RNA, 19 nt, Artificial Sequence
  Description of Artificial Sequence: Synthetic oligonucleotide
gcucacgggucugcccauu

SEQ ID NO: 1025652 - RNA, 19 nt, Artificial Sequence
  Description of Artificial Sequence: Synthetic oligonucleotide
cgacccaguggaggauagu

SEQ ID NO: 1025653 - RNA, 19 nt, Artificial Sequence
  Description of Artificial Sequence: Synthetic oligonucleotide
aaagguucaaaauuuauag

SEQ ID NO: 1025654 - RNA, 19 nt, Artificial Sequence
  Description of Artificial Sequence: Synthetic oligonucleotide
ucuauuauggccauauagg

SEQ ID NO: 1025655 - RNA, 19 nt, Artificial Sequence
  Description of Artificial Sequence: Synthetic oligonucleotide
uuuaacacgacugugauca

SEQ ID NO: 1025656 - RNA, 19 nt, Artificial Sequence
  Description of Artificial Sequence: Synthetic oligonucleotide
ugagugaucacaaacagga

SEQ ID NO: 1025657 - RNA, 19 nt, Artificial Sequence
  Description of Artificial Sequence: Synthetic oligonucleotide
agauguaacuucuuugugc

SEQ ID NO: 1025658 - RNA, 19 nt, Artificial Sequence
  Description of Artificial Sequence: Synthetic oligonucleotide
aauacauuaggaauggcag

SEQ ID NO: 1025659 - RNA, 19 nt, Artificial Sequence
  Description of Artificial Sequence: Synthetic oligonucleotide
uauugugcacauuuaaccg

SEQ ID NO: 1025660 - RNA, 19 nt, Artificial Sequence
  Description of Artificial Sequence: Synthetic oligonucleotide
ucuaugaggauagucaugg

SEQ ID NO: 1025661 - RNA, 19 nt, Artificial Sequence
  Description of Artificial Sequence: Synthetic oligonucleotide
aauuuaggaaugaagcugg

SEQ ID NO: 1025662 - RNA, 19 nt, Artificial Sequence
  Description of Artificial Sequence: Synthetic oligonucleotide
aagauguaaguuuucaaca

SEQ ID NO: 1025663 - RNA, 19 nt, Artificial Sequence
  Description of Artificial Sequence: Synthetic oligonucleotide
uuccaucagaauaagacag

SEQ ID NO: 1025664 - RNA, 19 nt, Artificial Sequence
  Description of Artificial Sequence: Synthetic oligonucleotide
aauaagacaggugucuacg

SEQ ID NO: 1025665 - RNA, 19 nt, Artificial Sequence
  Description of Artificial Sequence: Synthetic oligonucleotide
aaguauaacggcugccagc

SEQ ID NO: 1025666 - RNA, 19 nt, Artificial Sequence
  Description of Artificial Sequence: Synthetic oligonucleotide
auuauggccauauaggaga

SEQ ID NO: 1025667 - RNA, 19 nt, Artificial Sequence
  Description of Artificial Sequence: Synthetic oligonucleotide
aucauaugggcuuacaucu

SEQ ID NO: 1025668 - RNA, 19 nt, Artificial Sequence
  Description of Artificial Sequence: Synthetic oligonucleotide
uguacuguauaauaugacu

SEQ ID NO: 1025669 - RNA, 19 nt, Artificial Sequence
  Description of Artificial Sequence: Synthetic oligonucleotide
guauugugcacauuuaacc

SEQ ID NO: 1025670 - RNA, 19 nt, Artificial Sequence
  Description of Artificial Sequence: Synthetic oligonucleotide
aucuuucuacauuucauac

SEQ ID NO: 1025671 - RNA, 19 nt, Artificial Sequence
  Description of Artificial Sequence: Synthetic oligonucleotide
ucuacgagggagaaggugc

SEQ ID NO: 1025672 - RNA, 19 nt, Artificial Sequence
  Description of Artificial Sequence: Synthetic oligonucleotide
cuugcuuugcacaucaaag

SEQ ID NO: 1025673 - RNA, 19 nt, Artificial Sequence
  Description of Artificial Sequence: Synthetic oligonucleotide
aauuuauagcugcagaaua

SEQ ID NO: 1025674 - RNA, 19 nt, Artificial Sequence
  Description of Artificial Sequence: Synthetic oligonucleotide
ucaaauuaaagaguaaguc

SEQ ID NO: 1025675 - RNA, 19 nt, Artificial Sequence
  Description of Artificial Sequence: Synthetic oligonucleotide
uacuauacaaaguagucuc

SEQ ID NO: 1025676 - RNA, 19 nt, Artificial Sequence
  Description of Artificial Sequence: Synthetic oligonucleotide
uauuauggccauauaggag

SEQ ID NO: 1025677 - RNA, 19 nt, Artificial Sequence
  Description of Artificial Sequence: Synthetic oligonucleotide
aaauuaaagaguaagucuu

SEQ ID NO: 1025678 - RNA, 19 nt, Artificial Sequence
  Description of Artificial Sequence: Synthetic oligonucleotide
aauacguuuccgcagaaua

SEQ ID NO: 1025679 - RNA, 19 nt, Artificial Sequence
  Description of Artificial Sequence: Synthetic oligonucleotide
aaauacauuaggaauggca

SEQ ID NO: 1025680 - RNA, 19 nt, Artificial Sequence
  Description of Artificial Sequence: Synthetic oligonucleotide
ugggguaugacgcauuugc

SEQ ID NO: 1025681 - RNA, 19 nt, Artificial Sequence
  Description of Artificial Sequence: Synthetic oligonucleotide
guucaaaauuuauagcugc

SEQ ID NO: 1025682 - RNA, 19 nt, Artificial Sequence
  Description of Artificial Sequence: Synthetic oligonucleotide
ucuguauacucgaaucucc

SEQ ID NO: 1025683 - RNA, 19 nt, Artificial Sequence
  Description of Artificial Sequence: Synthetic oligonucleotide
uuugcgccuucuauuaugg

SEQ ID NO: 1025684 - RNA, 19 nt, Artificial Sequence
  Description of Artificial Sequence: Synthetic oligonucleotide
ugcgauauaguucugguuu

SEQ ID NO: 1025685 - RNA, 19 nt, Artificial Sequence
  Description of Artificial Sequence: Synthetic oligonucleotide
aguauaacggcugccagcg

SEQ ID NO: 1025686 - RNA, 19 nt, Artificial Sequence
  Description of Artificial Sequence: Synthetic oligonucleotide
agauacaucuucuuuagaa

SEQ ID NO: 1025687 - RNA, 19 nt, Artificial Sequence
  Description of Artificial Sequence: Synthetic oligonucleotide
ugagucauugacaguuugg

SEQ ID NO: 1025688 - RNA, 19 nt, Artificial Sequence
  Description of Artificial Sequence: Synthetic oligonucleotide
gaaagugcgauauaguucu

SEQ ID NO: 1025689 - RNA, 19 nt, Artificial Sequence
  Description of Artificial Sequence: Synthetic oligonucleotide
ucaagucaugaauauuuag

SEQ ID NO: 1025690 - RNA, 19 nt, Artificial Sequence
  Description of Artificial Sequence: Synthetic oligonucleotide
uuuccaaguauaacggcug

SEQ ID NO: 1025691 - RNA, 19 nt, Artificial Sequence
  Description of Artificial Sequence: Synthetic oligonucleotide
gugucuacgagggagaagg

SEQ ID NO: 1025692 - RNA, 19 nt, Artificial Sequence
  Description of Artificial Sequence: Synthetic oligonucleotide
ugaaagugcgauauaguuc

SEQ ID NO: 1025693 - RNA, 19 nt, Artificial Sequence
  Description of Artificial Sequence: Synthetic oligonucleotide
gaucauaugggcuuacauc

SEQ ID NO: 1025694 - RNA, 19 nt, Artificial Sequence
  Description of Artificial Sequence: Synthetic oligonucleotide
uuucuguauacucgaaucu

SEQ ID NO: 1025695 - RNA, 19 nt, Artificial Sequence
  Description of Artificial Sequence: Synthetic oligonucleotide
cgaauuuccaaguauaacg

SEQ ID NO: 1025696 - RNA, 19 nt, Artificial Sequence
  Description of Artificial Sequence: Synthetic oligonucleotide
ucacacuaaauccuguuuc

SEQ ID NO: 1025697 - RNA, 19 nt, Artificial Sequence
  Description of Artificial Sequence: Synthetic oligonucleotide
agaauacucucauuguucu

SEQ ID NO: 1025698 - RNA, 19 nt, Artificial Sequence
  Description of Artificial Sequence: Synthetic oligonucleotide
ugaaucuuaggagaaaguc

SEQ ID NO: 1025699 - RNA, 19 nt, Artificial Sequence
  Description of Artificial Sequence: Synthetic oligonucleotide
uuucgaauuuccaaguaua

SEQ ID NO: 1025700 - RNA, 19 nt, Artificial Sequence
  Description of Artificial Sequence: Synthetic oligonucleotide
aguauugugcacauuuaac

SEQ ID NO: 1025701 - RNA, 19 nt, Artificial Sequence
  Description of Artificial Sequence: Synthetic oligonucleotide
uguaagauguaaguuuuca

SEQ ID NO: 1025702 - RNA, 19 nt, Artificial Sequence
  Description of Artificial Sequence: Synthetic oligonucleotide
auuuaggugucugucaauc

SEQ ID NO: 1025703 - RNA, 19 nt, Artificial Sequence
  Description of Artificial Sequence: Synthetic oligonucleotide
gaaccugcaauaaugaguc

SEQ ID NO: 1025704 - RNA, 19 nt, Artificial Sequence
  Description of Artificial Sequence: Synthetic oligonucleotide
ggauguaaagcuuacuuug

SEQ ID NO: 1025705 - RNA, 19 nt, Artificial Sequence
  Description of Artificial Sequence: Synthetic oligonucleotide
uaagacaggugucuacgag

SEQ ID NO: 1025706 - RNA, 19 nt, Artificial Sequence
  Description of Artificial Sequence: Synthetic oligonucleotide
cacgacugugaucauaugg

SEQ ID NO: 1025707 - RNA, 19 nt, Artificial Sequence
  Description of Artificial Sequence: Synthetic oligonucleotide
auagucucaagucaugaau

SEQ ID NO: 1025708 - RNA, 19 nt, Artificial Sequence
  Description of Artificial Sequence: Synthetic oligonucleotide
ugcgccuucuauuauggcc

SEQ ID NO: 1025709 - RNA, 19 nt, Artificial Sequence
  Description of Artificial Sequence: Synthetic oligonucleotide
uuuagaaaguucucuccac

SEQ ID NO: 1025710 - RNA, 19 nt, Artificial Sequence
  Description of Artificial Sequence: Synthetic oligonucleotide
ucuguaucuguuucgauuu

SEQ ID NO: 1025711 - RNA, 19 nt, Artificial Sequence
  Description of Artificial Sequence: Synthetic oligonucleotide
acugcaacguuucuggggu

SEQ ID NO: 1025712 - RNA, 19 nt, Artificial Sequence
  Description of Artificial Sequence: Synthetic oligonucleotide
uucguucaguuucauuuag

SEQ ID NO: 1025713 - RNA, 19 nt, Artificial Sequence
  Description of Artificial Sequence: Synthetic oligonucleotide
uguuuccuuaaacagcauc

SEQ ID NO: 1025714 - RNA, 19 nt, Artificial Sequence
  Description of Artificial Sequence: Synthetic oligonucleotide
gauguacuguauaauauga

SEQ ID NO: 1025715 - RNA, 19 nt, Artificial Sequence
  Description of Artificial Sequence: Synthetic oligonucleotide
ucaaagguucaaaauuuau

SEQ ID NO: 1025716 - RNA, 19 nt, Artificial Sequence
  Description of Artificial Sequence: Synthetic oligonucleotide
acucgaaucuccuuuuaug

SEQ ID NO: 1025717 - RNA, 19 nt, Artificial Sequence
  Description of Artificial Sequence: Synthetic oligonucleotide
cauauaggagaaucugagc

SEQ ID NO: 1025718 - RNA, 19 nt, Artificial Sequence
  Description of Artificial Sequence: Synthetic oligonucleotide
ugcacauuuaaccgauucu

SEQ ID NO: 1025719 - RNA, 19 nt, Artificial Sequence
  Description of Artificial Sequence: Synthetic oligonucleotide
cacacuaaauccuguuucc

SEQ ID NO: 1025720 - RNA, 19 nt, Artificial Sequence
  Description of Artificial Sequence: Synthetic oligonucleotide
cuauuauggccauauagga

SEQ ID NO: 1025721 - RNA, 19 nt, Artificial Sequence
  Description of Artificial Sequence: Synthetic oligonucleotide
uuaguuuccggagugggcu

SEQ ID NO: 1025722 - RNA, 19 nt, Artificial Sequence
  Description of Artificial Sequence: Synthetic oligonucleotide
ucgaauacguuuccgcaga

SEQ ID NO: 1025723 - RNA, 19 nt, Artificial Sequence
  Description of Artificial Sequence: Synthetic oligonucleotide
auuucgaauuuccaaguau

SEQ ID NO: 1025724 - RNA, 19 nt, Artificial Sequence
  Description of Artificial Sequence: Synthetic oligonucleotide
auauuuaggugucugucaa

SEQ ID NO: 1025725 - RNA, 19 nt, Artificial Sequence
  Description of Artificial Sequence: Synthetic oligonucleotide
aguacgguuuaacaugaca

SEQ ID NO: 1025726 - RNA, 19 nt, Artificial Sequence
  Description of Artificial Sequence: Synthetic oligonucleotide
gaauauuuaggugucuguc

SEQ ID NO: 1025727 - RNA, 19 nt, Artificial Sequence
  Description of Artificial Sequence: Synthetic oligonucleotide
uaggugucugucaaucuug

SEQ ID NO: 1025728 - RNA, 19 nt, Artificial Sequence
  Description of Artificial Sequence: Synthetic oligonucleotide
cagaauacucucauuguuc

SEQ ID NO: 1025729 - RNA, 19 nt, Artificial Sequence
  Description of Artificial Sequence: Synthetic oligonucleotide
aaguucucuccaccguuuc

SEQ ID NO: 1025730 - RNA, 19 nt, Artificial Sequence
  Description of Artificial Sequence: Synthetic oligonucleotide
aaugaaagugcgauauagu

SEQ ID NO: 1025731 - RNA, 19 nt, Artificial Sequence
  Description of Artificial Sequence: Synthetic oligonucleotide
uacgguuuaacaugacaac

SEQ ID NO: 1025732 - RNA, 19 nt, Artificial Sequence
  Description of Artificial Sequence: Synthetic oligonucleotide
agaggaaccugcaauaaug

SEQ ID NO: 1025733 - RNA, 19 nt, Artificial Sequence
  Description of Artificial Sequence: Synthetic oligonucleotide
gaauaagacaggugucuac

SEQ ID NO: 1025734 - RNA, 19 nt, Artificial Sequence
  Description of Artificial Sequence: Synthetic oligonucleotide
cacucuaugaggauaguca

SEQ ID NO: 1025735 - RNA, 19 nt, Artificial Sequence
  Description of Artificial Sequence: Synthetic oligonucleotide
uagucucaagucaugaaua

SEQ ID NO: 1025736 - RNA, 19 nt, Artificial Sequence
  Description of Artificial Sequence: Synthetic oligonucleotide
caagccucacuuuaguuuc

SEQ ID NO: 1025737 - RNA, 19 nt, Artificial Sequence
  Description of Artificial Sequence: Synthetic oligonucleotide
agcagagcggcucgggccc

SEQ ID NO: 1025738 - RNA, 19 nt, Artificial Sequence
  Description of Artificial Sequence: Synthetic oligonucleotide
uuaggagaaaguccuguua

SEQ ID NO: 1025739 - RNA, 19 nt, Artificial Sequence
  Description of Artificial Sequence: Synthetic oligonucleotide
caccguuucuguauacucg

SEQ ID NO: 1025740 - RNA, 19 nt, Artificial Sequence
  Description of Artificial Sequence: Synthetic oligonucleotide
guaaagcuuacuuuguaaa

SEQ ID NO: 1025741 - RNA, 19 nt, Artificial Sequence
  Description of Artificial Sequence: Synthetic oligonucleotide
cucucgaauacguuuccgc

SEQ ID NO: 1025742 - RNA, 19 nt, Artificial Sequence
  Description of Artificial Sequence: Synthetic oligonucleotide
uuaggaauggcaguacuau

SEQ ID NO: 1025743 - RNA, 19 nt, Artificial Sequence
  Description of Artificial Sequence: Synthetic oligonucleotide
ugguauaaugaaagugcga

SEQ ID NO: 1025744 - RNA, 19 nt, Artificial Sequence
  Description of Artificial Sequence: Synthetic oligonucleotide
aggagauacaucuucuuua

SEQ ID NO: 1025745 - RNA, 19 nt, Artificial Sequence
  Description of Artificial Sequence: Synthetic oligonucleotide
auacauuaggaauggcagu

SEQ ID NO: 1025746 - RNA, 19 nt, Artificial Sequence
  Description of Artificial Sequence: Synthetic oligonucleotide
cuuacuuuguaaacagaca

SEQ ID NO: 1025747 - RNA, 19 nt, Artificial Sequence
  Description of Artificial Sequence: Synthetic oligonucleotide
auucgauacuuucucauuu

SEQ ID NO: 1025748 - RNA, 19 nt, Artificial Sequence
  Description of Artificial Sequence: Synthetic oligonucleotide
uuaggugucugucaaucuu

SEQ ID NO: 1025749 - RNA, 19 nt, Artificial Sequence
  Description of Artificial Sequence: Synthetic oligonucleotide
auacguuuccgcagaauac

SEQ ID NO: 1025750 - RNA, 19 nt, Artificial Sequence
  Description of Artificial Sequence: Synthetic oligonucleotide
augucaacuaagcuggcau

SEQ ID NO: 1025751 - RNA, 19 nt, Artificial Sequence
  Description of Artificial Sequence: Synthetic oligonucleotide
aacacgacugugaucauau

SEQ ID NO: 1025752 - RNA, 19 nt, Artificial Sequence
  Description of Artificial Sequence: Synthetic oligonucleotide
auguacuguauaauaugac

SEQ ID NO: 1025753 - RNA, 19 nt, Artificial Sequence
  Description of Artificial Sequence: Synthetic oligonucleotide
acgcauuugcuaacaaacc

SEQ ID NO: 1025754 - RNA, 19 nt, Artificial Sequence
  Description of Artificial Sequence: Synthetic oligonucleotide
uacauuaggaauggcagua

SEQ ID NO: 1025755 - RNA, 19 nt, Artificial Sequence
  Description of Artificial Sequence: Synthetic oligonucleotide
aggugguauaaugaaagug

SEQ ID NO: 1025756 - RNA, 19 nt, Artificial Sequence
  Description of Artificial Sequence: Synthetic oligonucleotide
uuccaaguauaacggcugc

SEQ ID NO: 1025757 - RNA, 19 nt, Artificial Sequence
  Description of Artificial Sequence: Synthetic oligonucleotide
uuuaggugucugucaaucu

SEQ ID NO: 1025758 - RNA, 19 nt, Artificial Sequence
  Description of Artificial Sequence: Synthetic oligonucleotide
cuucgguuggccaguauug

SEQ ID NO: 1025759 - RNA, 19 nt, Artificial Sequence
  Description of Artificial Sequence: Synthetic oligonucleotide
auaaucauuuucaguaccu

SEQ ID NO: 1025760 - RNA, 19 nt, Artificial Sequence
  Description of Artificial Sequence: Synthetic oligonucleotide
ucccauucgauacuuucuc

SEQ ID NO: 1025761 - RNA, 19 nt, Artificial Sequence
  Description of Artificial Sequence: Synthetic oligonucleotide
ugggcuuacaucucuguau

SEQ ID NO: 1025762 - RNA, 19 nt, Artificial Sequence
  Description of Artificial Sequence: Synthetic oligonucleotide
uucacacuaaauccuguuu

SEQ ID NO: 1025763 - RNA, 19 nt, Artificial Sequence
  Description of Artificial Sequence: Synthetic oligonucleotide
ccauauaggagaaucugag

SEQ ID NO: 1025764 - RNA, 19 nt, Artificial Sequence
  Description of Artificial Sequence: Synthetic oligonucleotide
acucuaugaggauagucau

SEQ ID NO: 1025765 - RNA, 19 nt, Artificial Sequence
  Description of Artificial Sequence: Synthetic oligonucleotide
cauuauccugaaucuuagg

SEQ ID NO: 1025766 - RNA, 19 nt, Artificial Sequence
  Description of Artificial Sequence: Synthetic oligonucleotide
uugugacuguaaauauccc

SEQ ID NO: 1025767 - RNA, 19 nt, Artificial Sequence
  Description of Artificial Sequence: Synthetic oligonucleotide
ugaggcaaucuacaggguu

SEQ ID NO: 1025768 - RNA, 19 nt, Artificial Sequence
  Description of Artificial Sequence: Synthetic oligonucleotide
cuuugcgccuucuauuaug

SEQ ID NO: 1025769 - RNA, 19 nt, Artificial Sequence
  Description of Artificial Sequence: Synthetic oligonucleotide
ucuucgguuggccaguauu

SEQ ID NO: 1025770 - RNA, 19 nt, Artificial Sequence
  Description of Artificial Sequence: Synthetic oligonucleotide
ucgauacuuucucauuuuc

SEQ ID NO: 1025771 - RNA, 19 nt, Artificial Sequence
  Description of Artificial Sequence: Synthetic oligonucleotide
uuaucugguugaugucuag

SEQ ID NO: 1025772 - RNA, 19 nt, Artificial Sequence
  Description of Artificial Sequence: Synthetic oligonucleotide
accguuucuguauacucga

SEQ ID NO: 1025773 - RNA, 19 nt, Artificial Sequence
  Description of Artificial Sequence: Synthetic oligonucleotide
auaucccuuaucugguuga

SEQ ID NO: 1025774 - RNA, 19 nt, Artificial Sequence
  Description of Artificial Sequence: Synthetic oligonucleotide
uacguuuccgcagaauacu

SEQ ID NO: 1025775 - RNA, 19 nt, Artificial Sequence
  Description of Artificial Sequence: Synthetic oligonucleotide
uccggguucaaggagccag

SEQ ID NO: 1025776 - RNA, 19 nt, Artificial Sequence
  Description of Artificial Sequence: Synthetic oligonucleotide
uugugccucuucuauguca

SEQ ID NO: 1025777 - RNA, 19 nt, Artificial Sequence
  Description of Artificial Sequence: Synthetic oligonucleotide
uuaaccgauucuuucucua

SEQ ID NO: 1025778 - RNA, 19 nt, Artificial Sequence
  Description of Artificial Sequence: Synthetic oligonucleotide
ucuacaggguuagcaagcc

SEQ ID NO: 1025779 - RNA, 19 nt, Artificial Sequence
  Description of Artificial Sequence: Synthetic oligonucleotide
uucuguauacucgaaucuc

SEQ ID NO: 1025780 - RNA, 19 nt, Artificial Sequence
  Description of Artificial Sequence: Synthetic oligonucleotide
uacuuugcgccuucuauua

SEQ ID NO: 1025781 - RNA, 19 nt, Artificial Sequence
  Description of Artificial Sequence: Synthetic oligonucleotide
cauguguuaggaaguggac

SEQ ID NO: 1025782 - RNA, 19 nt, Artificial Sequence
  Description of Artificial Sequence: Synthetic oligonucleotide
uaaccgauucuuucucuac

SEQ ID NO: 1025783 - RNA, 19 nt, Artificial Sequence
  Description of Artificial Sequence: Synthetic oligonucleotide
uguccucucgaauacguuu

SEQ ID NO: 1025784 - RNA, 19 nt, Artificial Sequence
  Description of Artificial Sequence: Synthetic oligonucleotide
uauacucgaaucuccuuuu

SEQ ID NO: 1025785 - RNA, 19 nt, Artificial Sequence
  Description of Artificial Sequence: Synthetic oligonucleotide
acauuaggaauggcaguac

SEQ ID NO: 1025786 - RNA, 19 nt, Artificial Sequence
  Description of Artificial Sequence: Synthetic oligonucleotide
uggacccuguguuaagaug

SEQ ID NO: 1025787 - RNA, 19 nt, Artificial Sequence
  Description of Artificial Sequence: Synthetic oligonucleotide
auaagacaggugucuacga

SEQ ID NO: 1025788 - RNA, 19 nt, Artificial Sequence
  Description of Artificial Sequence: Synthetic oligonucleotide
ucggucuucgguuggccag

SEQ ID NO: 1025789 - RNA, 19 nt, Artificial Sequence
  Description of Artificial Sequence: Synthetic oligonucleotide
agucucaagucaugaauau

SEQ ID NO: 1025790 - RNA, 19 nt, Artificial Sequence
  Description of Artificial Sequence: Synthetic oligonucleotide
guuuccgcagaauacucuc

SEQ ID NO: 1025791 - RNA, 19 nt, Artificial Sequence
  Description of Artificial Sequence: Synthetic oligonucleotide
ugacgcauuugcuaacaaa

SEQ ID NO: 1025792 - RNA, 19 nt, Artificial Sequence
  Description of Artificial Sequence: Synthetic oligonucleotide
uggccauauaggagaaucu

SEQ ID NO: 1025793 - RNA, 19 nt, Artificial Sequence
  Description of Artificial Sequence: Synthetic oligonucleotide
guuagcaagccucacuuua

SEQ ID NO: 1025794 - RNA, 19 nt, Artificial Sequence
  Description of Artificial Sequence: Synthetic oligonucleotide
uuauggccauauaggagaa

SEQ ID NO: 1025795 - RNA, 19 nt, Artificial Sequence
  Description of Artificial Sequence: Synthetic oligonucleotide
aguagauguacuguauaau

SEQ ID NO: 1025796 - RNA, 19 nt, Artificial Sequence
  Description of Artificial Sequence: Synthetic oligonucleotide
aaguggacccuguguuaag

SEQ ID NO: 1025797 - RNA, 19 nt, Artificial Sequence
  Description of Artificial Sequence: Synthetic oligonucleotide
uacucgaaucuccuuuuau

SEQ ID NO: 1025798 - RNA, 19 nt, Artificial Sequence
  Description of Artificial Sequence: Synthetic oligonucleotide
ugacuguaaauaucccuua

SEQ ID NO: 1025799 - RNA, 19 nt, Artificial Sequence
  Description of Artificial Sequence: Synthetic oligonucleotide
gguaugacgcauuugcuaa

SEQ ID NO: 1025800 - RNA, 19 nt, Artificial Sequence
  Description of Artificial Sequence: Synthetic oligonucleotide
cuacgagggagaaggugcc

SEQ ID NO: 1025801 - RNA, 19 nt, Artificial Sequence
  Description of Artificial Sequence: Synthetic oligonucleotide
uuauugagucauugacagu

SEQ ID NO: 1025802 - RNA, 19 nt, Artificial Sequence
  Description of Artificial Sequence: Synthetic oligonucleotide
caaucuacaggguuagcaa

SEQ ID NO: 1025803 - RNA, 19 nt, Artificial Sequence
  Description of Artificial Sequence: Synthetic oligonucleotide
auuuagccucuguuucauc

SEQ ID NO: 1025804 - RNA, 19 nt, Artificial Sequence
  Description of Artificial Sequence: Synthetic oligonucleotide
uguuaagauguaacuucuu

SEQ ID NO: 1025805 - RNA, 19 nt, Artificial Sequence
  Description of Artificial Sequence: Synthetic oligonucleotide
uucgauacuuucucauuuu

SEQ ID NO: 1025806 - RNA, 19 nt, Artificial Sequence
  Description of Artificial Sequence: Synthetic oligonucleotide
cuaugaggauagucauggg

SEQ ID NO: 1025807 - RNA, 19 nt, Artificial Sequence
  Description of Artificial Sequence: Synthetic oligonucleotide
gugcacauuuaaccgauuc

SEQ ID NO: 1025808 - RNA, 19 nt, Artificial Sequence
  Description of Artificial Sequence: Synthetic oligonucleotide
ucauaugggcuuacaucuc

SEQ ID NO: 1025809 - RNA, 19 nt, Artificial Sequence
  Description of Artificial Sequence: Synthetic oligonucleotide
ugcuaacaaacccuuccuu

SEQ ID NO: 1025810 - RNA, 19 nt, Artificial Sequence
  Description of Artificial Sequence: Synthetic oligonucleotide
ucgguuggccaguauugug

SEQ ID NO: 1025811 - RNA, 19 nt, Artificial Sequence
  Description of Artificial Sequence: Synthetic oligonucleotide
uguauacucgaaucuccuu

SEQ ID NO: 1025812 - RNA, 19 nt, Artificial Sequence
  Description of Artificial Sequence: Synthetic oligonucleotide
ucuagucuacugcaacguu

SEQ ID NO: 1025813 - RNA, 19 nt, Artificial Sequence
  Description of Artificial Sequence: Synthetic oligonucleotide
aggguuagcaagccucacu

SEQ ID NO: 1025814 - RNA, 19 nt, Artificial Sequence
  Description of Artificial Sequence: Synthetic oligonucleotide
auuugcuaacaaacccuuc

SEQ ID NO: 1025815 - RNA, 19 nt, Artificial Sequence
  Description of Artificial Sequence: Synthetic oligonucleotide
ugcaccuucugagcuguag

SEQ ID NO: 1025816 - RNA, 19 nt, Artificial Sequence
  Description of Artificial Sequence: Synthetic oligonucleotide
acaguacgguuuaacauga

SEQ ID NO: 1025817 - RNA, 19 nt, Artificial Sequence
  Description of Artificial Sequence: Synthetic oligonucleotide
caguacuauacaaaguagu

SEQ ID NO: 1025818 - RNA, 19 nt, Artificial Sequence
  Description of Artificial Sequence: Synthetic oligonucleotide
ugggcuugugacuguaaau

SEQ ID NO: 1025819 - RNA, 19 nt, Artificial Sequence
  Description of Artificial Sequence: Synthetic oligonucleotide
caucaaagguucaaaauuu

SEQ ID NO: 1025820 - RNA, 19 nt, Artificial Sequence
  Description of Artificial Sequence: Synthetic oligonucleotide
ucugggguaugacgcauuu

SEQ ID NO: 1025821 - RNA, 19 nt, Artificial Sequence
  Description of Artificial Sequence: Synthetic oligonucleotide
cuuugugccucuucuaugu

SEQ ID NO: 1025822 - RNA, 19 nt, Artificial Sequence
  Description of Artificial Sequence: Synthetic oligonucleotide
guacuauacaaaguagucu

SEQ ID NO: 1025823 - RNA, 19 nt, Artificial Sequence
  Description of Artificial Sequence: Synthetic oligonucleotide
ccaugcuccggguucaagg

SEQ ID NO: 1025824 - RNA, 19 nt, Artificial Sequence
  Description of Artificial Sequence: Synthetic oligonucleotide
ccgcagaauacucucauug

SEQ ID NO: 1025825 - RNA, 19 nt, Artificial Sequence
  Description of Artificial Sequence: Synthetic oligonucleotide
gcaguacuauacaaaguag

SEQ ID NO: 1025826 - RNA, 19 nt, Artificial Sequence
  Description of Artificial Sequence: Synthetic oligonucleotide
aggcaaucuacaggguuag

SEQ ID NO: 1025827 - RNA, 19 nt, Artificial Sequence
  Description of Artificial Sequence: Synthetic oligonucleotide
aaaguucucuccaccguuu

SEQ ID NO: 1025828 - RNA, 19 nt, Artificial Sequence
  Description of Artificial Sequence: Synthetic oligonucleotide
cuaugucaacuaagcuggc

SEQ ID NO: 1025829 - RNA, 19 nt, Artificial Sequence
  Description of Artificial Sequence: Synthetic oligonucleotide
gacaacuugugaggcaauc

SEQ ID NO: 1025830 - RNA, 19 nt, Artificial Sequence
  Description of Artificial Sequence: Synthetic oligonucleotide
aaucuuggccucacauaca

SEQ ID NO: 1025831 - RNA, 19 nt, Artificial Sequence
  Description of Artificial Sequence: Synthetic oligonucleotide
acacuaaauccuguuuccu

SEQ ID NO: 1025832 - RNA, 19 nt, Artificial Sequence
  Description of Artificial Sequence: Synthetic oligonucleotide
guauacucgaaucuccuuu

SEQ ID NO: 1025833 - RNA, 19 nt, Artificial Sequence
  Description of Artificial Sequence: Synthetic oligonucleotide
guaugacgcauuugcuaac

SEQ ID NO: 1025834 - RNA, 19 nt, Artificial Sequence
  Description of Artificial Sequence: Synthetic oligonucleotide
auuaggaauggcaguacua

SEQ ID NO: 1025835 - RNA, 19 nt, Artificial Sequence
  Description of Artificial Sequence: Synthetic oligonucleotide
uccaccguuucuguauacu

SEQ ID NO: 1025836 - RNA, 19 nt, Artificial Sequence
  Description of Artificial Sequence: Synthetic oligonucleotide
caugcuccggguucaagga

SEQ ID NO: 1025837 - RNA, 19 nt, Artificial Sequence
  Description of Artificial Sequence: Synthetic oligonucleotide
ggacucauuucgaauuucc

SEQ ID NO: 1025838 - RNA, 19 nt, Artificial Sequence
  Description of Artificial Sequence: Synthetic oligonucleotide
guuucugggguaugacgca

SEQ ID NO: 1025839 - RNA, 19 nt, Artificial Sequence
  Description of Artificial Sequence: Synthetic oligonucleotide
ucugucaaucuuggccuca

SEQ ID NO: 1025840 - RNA, 19 nt, Artificial Sequence
  Description of Artificial Sequence: Synthetic oligonucleotide
acguuuccgcagaauacuc

SEQ ID NO: 1025841 - RNA, 19 nt, Artificial Sequence
  Description of Artificial Sequence: Synthetic oligonucleotide
augcuccggguucaaggag

SEQ ID NO: 1025842 - RNA, 19 nt, Artificial Sequence
  Description of Artificial Sequence: Synthetic oligonucleotide
uucgguuggccaguauugu

SEQ ID NO: 1025843 - RNA, 19 nt, Artificial Sequence
  Description of Artificial Sequence: Synthetic oligonucleotide
ggaauggcaguacuauaca

SEQ ID NO: 1025844 - RNA, 19 nt, Artificial Sequence
  Description of Artificial Sequence: Synthetic oligonucleotide
guaauauuuguuucacauu

SEQ ID NO: 1025845 - RNA, 19 nt, Artificial Sequence
  Description of Artificial Sequence: Synthetic oligonucleotide
ggucuugcuuugcacauca

SEQ ID NO: 1025846 - RNA, 19 nt, Artificial Sequence
  Description of Artificial Sequence: Synthetic oligonucleotide
gcaaucuacaggguuagca

SEQ ID NO: 1025847 - RNA, 19 nt, Artificial Sequence
  Description of Artificial Sequence: Synthetic oligonucleotide
gaggcaaucuacaggguua

SEQ ID NO: 1025848 - RNA, 19 nt, Artificial Sequence
  Description of Artificial Sequence: Synthetic oligonucleotide
ggccauauaggagaaucug

SEQ ID NO: 1025849 - RNA, 19 nt, Artificial Sequence
  Description of Artificial Sequence: Synthetic oligonucleotide
aggauagucaugggacuca

SEQ ID NO: 1025850 - RNA, 19 nt, Artificial Sequence
  Description of Artificial Sequence: Synthetic oligonucleotide
agccucacuuuaguuuccg

SEQ ID NO: 1025851 - RNA, 19 nt, Artificial Sequence
  Description of Artificial Sequence: Synthetic oligonucleotide
ucucuguaucuguuucgau

SEQ ID NO: 1025852 - RNA, 19 nt, Artificial Sequence
  Description of Artificial Sequence: Synthetic oligonucleotide
aguggacccuguguuaaga

SEQ ID NO: 1025853 - RNA, 19 nt, Artificial Sequence
  Description of Artificial Sequence: Synthetic oligonucleotide
caacuugugaggcaaucua

SEQ ID NO: 1025854 - RNA, 19 nt, Artificial Sequence
  Description of Artificial Sequence: Synthetic oligonucleotide
augggcuuacaucucugua

SEQ ID NO: 1025855 - RNA, 19 nt, Artificial Sequence
  Description of Artificial Sequence: Synthetic oligonucleotide
gcaauggaucacugcaggc

SEQ ID NO: 1025856 - RNA, 19 nt, Artificial Sequence
  Description of Artificial Sequence: Synthetic oligonucleotide
ugcaacguuucugggguau

SEQ ID NO: 1025857 - RNA, 19 nt, Artificial Sequence
  Description of Artificial Sequence: Synthetic oligonucleotide
gcaguuuaacacgacugug

SEQ ID NO: 1025858 - RNA, 19 nt, Artificial Sequence
  Description of Artificial Sequence: Synthetic oligonucleotide
uaacacgacugugaucaua

SEQ ID NO: 1025859 - RNA, 19 nt, Artificial Sequence
  Description of Artificial Sequence: Synthetic oligonucleotide
cuaacaaacccuuccuuuu

SEQ ID NO: 1025860 - RNA, 19 nt, Artificial Sequence
  Description of Artificial Sequence: Synthetic oligonucleotide
cagacaacuugugaggcaa

SEQ ID NO: 1025861 - RNA, 19 nt, Artificial Sequence
  Description of Artificial Sequence: Synthetic oligonucleotide
guuucaccacuauugguau

SEQ ID NO: 1025862 - RNA, 19 nt, Artificial Sequence
  Description of Artificial Sequence: Synthetic oligonucleotide
uugcgccuucuauuauggc

SEQ ID NO: 1025863 - RNA, 19 nt, Artificial Sequence
  Description of Artificial Sequence: Synthetic oligonucleotide
gacuguaaauaucccuuau

SEQ ID NO: 1025864 - RNA, 19 nt, Artificial Sequence
  Description of Artificial Sequence: Synthetic oligonucleotide
uauguacuuugcgccuucu

SEQ ID NO: 1025865 - RNA, 19 nt, Artificial Sequence
  Description of Artificial Sequence: Synthetic oligonucleotide
cauuucgaauuuccaagua

SEQ ID NO: 1025866 - RNA, 19 nt, Artificial Sequence
  Description of Artificial Sequence: Synthetic oligonucleotide
auacucgaaucuccuuuua

SEQ ID NO: 1025867 - RNA, 19 nt, Artificial Sequence
  Description of Artificial Sequence: Synthetic oligonucleotide
augacgcauuugcuaacaa

SEQ ID NO: 1025868 - RNA, 19 nt, Artificial Sequence
  Description of Artificial Sequence: Synthetic oligonucleotide
acuuugcgccuucuauuau

SEQ ID NO: 1025869 - RNA, 19 nt, Artificial Sequence
  Description of Artificial Sequence: Synthetic oligonucleotide
aggucuugcuuugcacauc

SEQ ID NO: 1025870 - RNA, 19 nt, Artificial Sequence
  Description of Artificial Sequence: Synthetic oligonucleotide
agcgagagcggaaccacca

SEQ ID NO: 1025871 - RNA, 19 nt, Artificial Sequence
  Description of Artificial Sequence: Synthetic oligonucleotide
gucaacuaagcuggcauua

SEQ ID NO: 1025872 - RNA, 19 nt, Artificial Sequence
  Description of Artificial Sequence: Synthetic oligonucleotide
cauaugggcuuacaucucu

SEQ ID NO: 1025873 - RNA, 19 nt, Artificial Sequence
  Description of Artificial Sequence: Synthetic oligonucleotide
accuugcaguuuaacacga

SEQ ID NO: 1025874 - RNA, 19 nt, Artificial Sequence
  Description of Artificial Sequence: Synthetic oligonucleotide
aaagugcgauauaguucug

SEQ ID NO: 1025875 - RNA, 19 nt, Artificial Sequence
  Description of Artificial Sequence: Synthetic oligonucleotide
ucaguaccuugcaguuuaa

SEQ ID NO: 1025876 - RNA, 19 nt, Artificial Sequence
  Description of Artificial Sequence: Synthetic oligonucleotide
guggccgacauggcggcgg

SEQ ID NO: 1025877 - RNA, 19 nt, Artificial Sequence
  Description of Artificial Sequence: Synthetic oligonucleotide
ccagcgacacugagcaucc

SEQ ID NO: 1025878 - RNA, 19 nt, Artificial Sequence
  Description of Artificial Sequence: Synthetic oligonucleotide
cuagucuacugcaacguuu

SEQ ID NO: 1025879 - RNA, 19 nt, Artificial Sequence
  Description of Artificial Sequence: Synthetic oligonucleotide
cuguauacucgaaucuccu

SEQ ID NO: 1025880 - RNA, 19 nt, Artificial Sequence
  Description of Artificial Sequence: Synthetic oligonucleotide
auuuaggaaugaagcuggu

SEQ ID NO: 1025881 - RNA, 19 nt, Artificial Sequence
  Description of Artificial Sequence: Synthetic oligonucleotide
uaucccuuaucugguugau

SEQ ID NO: 1025882 - RNA, 19 nt, Artificial Sequence
  Description of Artificial Sequence: Synthetic oligonucleotide
ggguaugacgcauuugcua

SEQ ID NO: 1025883 - RNA, 19 nt, Artificial Sequence
  Description of Artificial Sequence: Synthetic oligonucleotide
cauuugcuaacaaacccuu

SEQ ID NO: 1025884 - RNA, 19 nt, Artificial Sequence
  Description of Artificial Sequence: Synthetic oligonucleotide
cauuaggaauggcaguacu

SEQ ID NO: 1025885 - RNA, 19 nt, Artificial Sequence
  Description of Artificial Sequence: Synthetic oligonucleotide
uuaacacgacugugaucau

SEQ ID NO: 1025886 - RNA, 19 nt, Artificial Sequence
  Description of Artificial Sequence: Synthetic oligonucleotide
aacggcugccagcgacacu

SEQ ID NO: 1025887 - RNA, 19 nt, Artificial Sequence
  Description of Artificial Sequence: Synthetic oligonucleotide
ccaccguuucuguauacuc

SEQ ID NO: 1025888 - RNA, 19 nt, Artificial Sequence
  Description of Artificial Sequence: Synthetic oligonucleotide
cagacucucuaacuuuaaa

SEQ ID NO: 1025889 - RNA, 19 nt, Artificial Sequence
  Description of Artificial Sequence: Synthetic oligonucleotide
aguggccuuucuguccucu

SEQ ID NO: 1025890 - RNA, 19 nt, Artificial Sequence
  Description of Artificial Sequence: Synthetic oligonucleotide
caguacgguuuaacaugac

SEQ ID NO: 1025891 - RNA, 19 nt, Artificial Sequence
  Description of Artificial Sequence: Synthetic oligonucleotide
ggacccuguguuaagaugu

SEQ ID NO: 1025892 - RNA, 19 nt, Artificial Sequence
  Description of Artificial Sequence: Synthetic oligonucleotide
caguaccuugcaguuuaac

SEQ ID NO: 1025893 - RNA, 19 nt, Artificial Sequence
  Description of Artificial Sequence: Synthetic oligonucleotide
gcuaacaaacccuuccuuu

SEQ ID NO: 1025894 - RNA, 19 nt, Artificial Sequence
  Description of Artificial Sequence: Synthetic oligonucleotide
gucuagucuacugcaacgu

SEQ ID NO: 1025895 - RNA, 19 nt, Artificial Sequence
  Description of Artificial Sequence: Synthetic oligonucleotide
gcgccuucuauuauggcca

SEQ ID NO: 1025896 - RNA, 19 nt, Artificial Sequence
  Description of Artificial Sequence: Synthetic oligonucleotide
gccagcgacacugagcauc

SEQ ID NO: 1025897 - RNA, 19 nt, Artificial Sequence
  Description of Artificial Sequence: Synthetic oligonucleotide
cucggucuucgguuggcca

SEQ ID NO: 1025898 - RNA, 19 nt, Artificial Sequence
  Description of Artificial Sequence: Synthetic oligonucleotide
gacaggugucuacgaggga

SEQ ID NO: 1025899 - RNA, 19 nt, Artificial Sequence
  Description of Artificial Sequence: Synthetic oligonucleotide
gccucacuuuaguuuccgg

SEQ ID NO: 1025900 - RNA, 19 nt, Artificial Sequence
  Description of Artificial Sequence: Synthetic oligonucleotide
cacauuuaaccgauucuuu

SEQ ID NO: 1025901 - RNA, 19 nt, Artificial Sequence
  Description of Artificial Sequence: Synthetic oligonucleotide
cuuaggagaaaguccuguu

SEQ ID NO: 1025902 - RNA, 19 nt, Artificial Sequence
  Description of Artificial Sequence: Synthetic oligonucleotide
uauggccauauaggagaau

SEQ ID NO: 1025903 - RNA, 19 nt, Artificial Sequence
  Description of Artificial Sequence: Synthetic oligonucleotide
caacaagcacauuugucuu

SEQ ID NO: 1025904 - RNA, 19 nt, Artificial Sequence
  Description of Artificial Sequence: Synthetic oligonucleotide
cuuucucuacaguacgguu

SEQ ID NO: 1025905 - RNA, 19 nt, Artificial Sequence
  Description of Artificial Sequence: Synthetic oligonucleotide
cauucgauacuuucucauu

SEQ ID NO: 1025906 - RNA, 19 nt, Artificial Sequence
  Description of Artificial Sequence: Synthetic oligonucleotide
guuucacacuaaauccugu

SEQ ID NO: 1025907 - RNA, 19 nt, Artificial Sequence
  Description of Artificial Sequence: Synthetic oligonucleotide
gggagagcgcgagcgagag

SEQ ID NO: 1025908 - RNA, 19 nt, Artificial Sequence
  Description of Artificial Sequence: Synthetic oligonucleotide
gcaagccucacuuuaguuu

SEQ ID NO: 1025909 - RNA, 19 nt, Artificial Sequence
  Description of Artificial Sequence: Synthetic oligonucleotide
caggugguauaaugaaagu

SEQ ID NO: 1025910 - RNA, 19 nt, Artificial Sequence
  Description of Artificial Sequence: Synthetic oligonucleotide
ggugucuacgagggagaag

SEQ ID NO: 1025911 - RNA, 19 nt, Artificial Sequence
  Description of Artificial Sequence: Synthetic oligonucleotide
cugggguaugacgcauuug

SEQ ID NO: 1025912 - RNA, 19 nt, Artificial Sequence
  Description of Artificial Sequence: Synthetic oligonucleotide
aggugucuacgagggagaa

SEQ ID NO: 1025913 - RNA, 19 nt, Artificial Sequence
  Description of Artificial Sequence: Synthetic oligonucleotide
ccucucgaauacguuuccg

SEQ ID NO: 1025914 - RNA, 19 nt, Artificial Sequence
  Description of Artificial Sequence: Synthetic oligonucleotide
gaauacguuuccgcagaau

SEQ ID NO: 1025915 - RNA, 19 nt, Artificial Sequence
  Description of Artificial Sequence: Synthetic oligonucleotide
ccuugcaguuuaacacgac

SEQ ID NO: 1025916 - RNA, 19 nt, Artificial Sequence
  Description of Artificial Sequence: Synthetic oligonucleotide
aagucccauucgauacuuu

SEQ ID NO: 1025917 - RNA, 19 nt, Artificial Sequence
  Description of Artificial Sequence: Synthetic oligonucleotide
caacuaagcuggcauuaau

SEQ ID NO: 1025918 - RNA, 19 nt, Artificial Sequence
  Description of Artificial Sequence: Synthetic oligonucleotide
gugcgauauaguucugguu

SEQ ID NO: 1025919 - RNA, 19 nt, Artificial Sequence
  Description of Artificial Sequence: Synthetic oligonucleotide
cccauucgauacuuucuca

SEQ ID NO: 1025920 - RNA, 19 nt, Artificial Sequence
  Description of Artificial Sequence: Synthetic oligonucleotide
gcggaaccaccacagcaga

SEQ ID NO: 1025921 - RNA, 19 nt, Artificial Sequence
  Description of Artificial Sequence: Synthetic oligonucleotide
gacccuguguuaagaugua

SEQ ID NO: 1025922 - RNA, 19 nt, Artificial Sequence
  Description of Artificial Sequence: Synthetic oligonucleotide
agacaacuugugaggcaau

SEQ ID NO: 1025923 - RNA, 19 nt, Artificial Sequence
  Description of Artificial Sequence: Synthetic oligonucleotide
gcgggagagcgcgagcgag

SEQ ID NO: 1025924 - RNA, 19 nt, Artificial Sequence
  Description of Artificial Sequence: Synthetic oligonucleotide
gcaacguuucugggguaug

SEQ ID NO: 1025925 - RNA, 19 nt, Artificial Sequence
  Description of Artificial Sequence: Synthetic oligonucleotide
gcgagagcggaaccaccac

SEQ ID NO: 1025926 - RNA, 19 nt, Artificial Sequence
  Description of Artificial Sequence: Synthetic oligonucleotide
ccauucgauacuuucucau

SEQ ID NO: 1025927 - RNA, 19 nt, Artificial Sequence
  Description of Artificial Sequence: Synthetic oligonucleotide
cuguuucgauuucuguuuu

SEQ ID NO: 1025928 - RNA, 19 nt, Artificial Sequence
  Description of Artificial Sequence: Synthetic oligonucleotide
ccggagugggcuucagguc

SEQ ID NO: 1025929 - RNA, 19 nt, Artificial Sequence
  Description of Artificial Sequence: Synthetic oligonucleotide
cuggaaacuuggccacucu

SEQ ID NO: 1025930 - RNA, 19 nt, Artificial Sequence
  Description of Artificial Sequence: Synthetic oligonucleotide
ggcaaucuacaggguuagc

SEQ ID NO: 1025931 - RNA, 19 nt, Artificial Sequence
  Description of Artificial Sequence: Synthetic oligonucleotide
gccagagcggccaaugccu

SEQ ID NO: 1025932 - RNA, 19 nt, Artificial Sequence
  Description of Artificial Sequence: Synthetic oligonucleotide
ggcuuacaucucuguaucu

SEQ ID NO: 1025933 - RNA, 19 nt, Artificial Sequence
  Description of Artificial Sequence: Synthetic oligonucleotide
ugccagcgacacugagcau

SEQ ID NO: 1025934 - RNA, 19 nt, Artificial Sequence
  Description of Artificial Sequence: Synthetic oligonucleotide
gcgagcgagagcggaacca

SEQ ID NO: 1025935 - RNA, 19 nt, Artificial Sequence
  Description of Artificial Sequence: Synthetic oligonucleotide
ggguucaaggagccagacu

SEQ ID NO: 1025936 - RNA, 19 nt, Artificial Sequence
  Description of Artificial Sequence: Synthetic oligonucleotide
ccagacucucuaacuuuaa

SEQ ID NO: 1025937 - RNA, 19 nt, Artificial Sequence
  Description of Artificial Sequence: Synthetic oligonucleotide
gcgacacugagcauccagu

SEQ ID NO: 1025938 - RNA, 19 nt, Artificial Sequence
  Description of Artificial Sequence: Synthetic oligonucleotide
cgagagcggaaccaccaca

SEQ ID NO: 1025939 - RNA, 19 nt, Artificial Sequence
  Description of Artificial Sequence: Synthetic oligonucleotide
gggguaugacgcauuugcu

SEQ ID NO: 1025940 - RNA, 19 nt, Artificial Sequence
  Description of Artificial Sequence: Synthetic oligonucleotide
cugcaacguuucuggggua

SEQ ID NO: 1025941 - RNA, 19 nt, Artificial Sequence
  Description of Artificial Sequence: Synthetic oligonucleotide
cuguuuccuuaaacagcau

SEQ ID NO: 1025942 - RNA, 19 nt, Artificial Sequence
  Description of Artificial Sequence: Synthetic oligonucleotide
ggcgggagagcgcgagcga

SEQ ID NO: 1025943 - RNA, 19 nt, Artificial Sequence
  Description of Artificial Sequence: Synthetic oligonucleotide
ccggguucaaggagccaga

SEQ ID NO: 1025944 - RNA, 19 nt, Artificial Sequence
  Description of Artificial Sequence: Synthetic oligonucleotide
ccguuucuguauacucgaa

SEQ ID NO: 1025945 - RNA, 19 nt, Artificial Sequence
  Description of Artificial Sequence: Synthetic oligonucleotide
ccgauucuuucucuacagu

SEQ ID NO: 1025946 - RNA, 19 nt, Artificial Sequence
  Description of Artificial Sequence: Synthetic oligonucleotide
cguuuccgcagaauacucu

SEQ ID NO: 1025947 - RNA, 19 nt, Artificial Sequence
  Description of Artificial Sequence: Synthetic oligonucleotide
cuccggguucaaggagcca

SEQ ID NO: 1025948 - RNA, 19 nt, Artificial Sequence
  Description of Artificial Sequence: Synthetic oligonucleotide
cggguucaaggagccagac

SEQ ID NO: 1025949 - RNA, 19 nt, Artificial Sequence
  Description of Artificial Sequence: Synthetic oligonucleotide
cugagcuguaguggccuuu

SEQ ID NO: 1025950 - RNA, 19 nt, Artificial Sequence
  Description of Artificial Sequence: Synthetic oligonucleotide
cgaauacguuuccgcagaa

SEQ ID NO: 1025951 - RNA, 19 nt, Artificial Sequence
  Description of Artificial Sequence: Synthetic oligonucleotide
gcagagcggcucgggcccc

SEQ ID NO: 1025952 - RNA, 19 nt, Artificial Sequence
  Description of Artificial Sequence: Synthetic oligonucleotide
cgggagagcgcgagcgaga

SEQ ID NO: 1025953 - RNA, 19 nt, Artificial Sequence
  Description of Artificial Sequence: Synthetic oligonucleotide
gccuucuauuauggccaua

SEQ ID NO: 1025954 - RNA, 19 nt, Artificial Sequence
  Description of Artificial Sequence: Synthetic oligonucleotide
gccacucuaugaggauagu

SEQ ID NO: 1025955 - RNA, 19 nt, Artificial Sequence
  Description of Artificial Sequence: Synthetic oligonucleotide
aauaaaguacaauugaacc

SEQ ID NO: 1025956 - RNA, 19 nt, Artificial Sequence
  Description of Artificial Sequence: Synthetic oligonucleotide
ucuuacaccauuauaaggg

SEQ ID NO: 1025957 - RNA, 19 nt, Artificial Sequence
  Description of Artificial Sequence: Synthetic oligonucleotide
ugaugcaagauuaauacag

SEQ ID NO: 1025958 - RNA, 19 nt, Artificial Sequence
  Description of Artificial Sequence: Synthetic oligonucleotide
aauuagauacugcuagggc

SEQ ID NO: 1025959 - RNA, 19 nt, Artificial Sequence
  Description of Artificial Sequence: Synthetic oligonucleotide
uucaauuagauacugcuag

SEQ ID NO: 1025960 - RNA, 19 nt, Artificial Sequence
  Description of Artificial Sequence: Synthetic oligonucleotide
uuuucuuacaccauuauaa

SEQ ID NO: 1025961 - RNA, 19 nt, Artificial Sequence
  Description of Artificial Sequence: Synthetic oligonucleotide
ucuaauaaaguacaauuga

SEQ ID NO: 1025962 - RNA, 19 nt, Artificial Sequence
  Description of Artificial Sequence: Synthetic oligonucleotide
agcuguauguuccagaucg

SEQ ID NO: 1025963 - RNA, 19 nt, Artificial Sequence
  Description of Artificial Sequence: Synthetic oligonucleotide
uuguaaauacauuacaaug

SEQ ID NO: 1025964 - RNA, 19 nt, Artificial Sequence
  Description of Artificial Sequence: Synthetic oligonucleotide
aagacauugguucgaagac

SEQ ID NO: 1025965 - RNA, 19 nt, Artificial Sequence
  Description of Artificial Sequence: Synthetic oligonucleotide
auggcaacaaucucgaaac

SEQ ID NO: 1025966 - RNA, 19 nt, Artificial Sequence
  Description of Artificial Sequence: Synthetic oligonucleotide
aguacaauugaaccugacc

SEQ ID NO: 1025967 - RNA, 19 nt, Artificial Sequence
  Description of Artificial Sequence: Synthetic oligonucleotide
aaagucaacgccuaugccu

SEQ ID NO: 1025968 - RNA, 19 nt, Artificial Sequence
  Description of Artificial Sequence: Synthetic oligonucleotide
uuucuagagaccuagacaa

SEQ ID NO: 1025969 - RNA, 19 nt, Artificial Sequence
  Description of Artificial Sequence: Synthetic oligonucleotide
aagagcuggaguuccaucg

SEQ ID NO: 1025970 - RNA, 19 nt, Artificial Sequence
  Description of Artificial Sequence: Synthetic oligonucleotide
caaaccaguguuaagaaag

SEQ ID NO: 1025971 - RNA, 19 nt, Artificial Sequence
  Description of Artificial Sequence: Synthetic oligonucleotide
gauuaugaugucuucgagg

SEQ ID NO: 1025972 - RNA, 19 nt, Artificial Sequence
  Description of Artificial Sequence: Synthetic oligonucleotide
auaaacaauacacaacucu

SEQ ID NO: 1025973 - RNA, 19 nt, Artificial Sequence
  Description of Artificial Sequence: Synthetic oligonucleotide
ucuuaacuggcgaaggugg

SEQ ID NO: 1025974 - RNA, 19 nt, Artificial Sequence
  Description of Artificial Sequence: Synthetic oligonucleotide
aaugaucuuauggggaugc

SEQ ID NO: 1025975 - RNA, 19 nt, Artificial Sequence
  Description of Artificial Sequence: Synthetic oligonucleotide
uguuaagaaaguauucacc

SEQ ID NO: 1025976 - RNA, 19 nt, Artificial Sequence
  Description of Artificial Sequence: Synthetic oligonucleotide
ugacaugaacacaaaaucc

SEQ ID NO: 1025977 - RNA, 19 nt, Artificial Sequence
  Description of Artificial Sequence: Synthetic oligonucleotide
ucaauuccuaaucaguuug

SEQ ID NO: 1025978 - RNA, 19 nt, Artificial Sequence
  Description of Artificial Sequence: Synthetic oligonucleotide
uguaaugucuucuuggggu

SEQ ID NO: 1025979 - RNA, 19 nt, Artificial Sequence
  Description of Artificial Sequence: Synthetic oligonucleotide
uaaaucaauuccuaaucag

SEQ ID NO: 1025980 - RNA, 19 nt, Artificial Sequence
  Description of Artificial Sequence: Synthetic oligonucleotide
guuacguucacauucuaag

SEQ ID NO: 1025981 - RNA, 19 nt, Artificial Sequence
  Description of Artificial Sequence: Synthetic oligonucleotide
aaucccaacuccuuuagca

SEQ ID NO: 1025982 - RNA, 19 nt, Artificial Sequence
  Description of Artificial Sequence: Synthetic oligonucleotide
uaaaguacaauugaaccug

SEQ ID NO: 1025983 - RNA, 19 nt, Artificial Sequence
  Description of Artificial Sequence: Synthetic oligonucleotide
aagcacaugcuauagucuc

SEQ ID NO: 1025984 - RNA, 19 nt, Artificial Sequence
  Description of Artificial Sequence: Synthetic oligonucleotide
aauuccaggcaguuugaac

SEQ ID NO: 1025985 - RNA, 19 nt, Artificial Sequence
  Description of Artificial Sequence: Synthetic oligonucleotide
ucuacuagcacuucugcug

SEQ ID NO: 1025986 - RNA, 19 nt, Artificial Sequence
  Description of Artificial Sequence: Synthetic oligonucleotide
cugguauaaagucuaaggg

SEQ ID NO: 1025987 - RNA, 19 nt, Artificial Sequence
  Description of Artificial Sequence: Synthetic oligonucleotide
uugaccuugaucuacuagc

SEQ ID NO: 1025988 - RNA, 19 nt, Artificial Sequence
  Description of Artificial Sequence: Synthetic oligonucleotide
auuagauacugcuagggca

SEQ ID NO: 1025989 - RNA, 19 nt, Artificial Sequence
  Description of Artificial Sequence: Synthetic oligonucleotide
gggugugugaucuagagcg

SEQ ID NO: 1025990 - RNA, 19 nt, Artificial Sequence
  Description of Artificial Sequence: Synthetic oligonucleotide
augcaagauuaauacaggc

SEQ ID NO: 1025991 - RNA, 19 nt, Artificial Sequence
  Description of Artificial Sequence: Synthetic oligonucleotide
uucuuacaccauuauaagg

SEQ ID NO: 1025992 - RNA, 19 nt, Artificial Sequence
  Description of Artificial Sequence: Synthetic oligonucleotide
guacaauugaaccugacca

SEQ ID NO: 1025993 - RNA, 19 nt, Artificial Sequence
  Description of Artificial Sequence: Synthetic oligonucleotide
ucgacuucgccuauuauug

SEQ ID NO: 1025994 - RNA, 19 nt, Artificial Sequence
  Description of Artificial Sequence: Synthetic oligonucleotide
uuucuuacaccauuauaag

SEQ ID NO: 1025995 - RNA, 19 nt, Artificial Sequence
  Description of Artificial Sequence: Synthetic oligonucleotide
uuccuaaucaguuugcuuc

SEQ ID NO: 1025996 - RNA, 19 nt, Artificial Sequence
  Description of Artificial Sequence: Synthetic oligonucleotide
uaaacaauacacaacucua

SEQ ID NO: 1025997 - RNA, 19 nt, Artificial Sequence
  Description of Artificial Sequence: Synthetic oligonucleotide
ugguauaaagucuaagggu

SEQ ID NO: 1025998 - RNA, 19 nt, Artificial Sequence
  Description of Artificial Sequence: Synthetic oligonucleotide
auaaaucaauuccuaauca

SEQ ID NO: 1025999 - RNA, 19 nt, Artificial Sequence
  Description of Artificial Sequence: Synthetic oligonucleotide
ugauugaguccauacauca

SEQ ID NO: 1026000 - RNA, 19 nt, Artificial Sequence
  Description of Artificial Sequence: Synthetic oligonucleotide
acucuaauaaaguacaauu

SEQ ID NO: 1026001 - RNA, 19 nt, Artificial Sequence
  Description of Artificial Sequence: Synthetic oligonucleotide
cucuaauaaaguacaauug

SEQ ID NO: 1026002 - RNA, 19 nt, Artificial Sequence
  Description of Artificial Sequence: Synthetic oligonucleotide
uuuugauugaguccauaca

SEQ ID NO: 1026003 - RNA, 19 nt, Artificial Sequence
  Description of Artificial Sequence: Synthetic oligonucleotide
ucuuuacacaugcagacaa

SEQ ID NO: 1026004 - RNA, 19 nt, Artificial Sequence
  Description of Artificial Sequence: Synthetic oligonucleotide
uugacgaaagacuuggagu

SEQ ID NO: 1026005 - RNA, 19 nt, Artificial Sequence
  Description of Artificial Sequence: Synthetic oligonucleotide
aaaucccaacuccuuuagc

SEQ ID NO: 1026006 - RNA, 19 nt, Artificial Sequence
  Description of Artificial Sequence: Synthetic oligonucleotide
acuguguuugacgaaagac

SEQ ID NO: 1026007 - RNA, 19 nt, Artificial Sequence
  Description of Artificial Sequence: Synthetic oligonucleotide
auuauaagggcuuuucgaa

SEQ ID NO: 1026008 - RNA, 19 nt, Artificial Sequence
  Description of Artificial Sequence: Synthetic oligonucleotide
uucuaagacuuguaaauac

SEQ ID NO: 1026009 - RNA, 19 nt, Artificial Sequence
  Description of Artificial Sequence: Synthetic oligonucleotide
uuauaagggcuuuucgaag

SEQ ID NO: 1026010 - RNA, 19 nt, Artificial Sequence
  Description of Artificial Sequence: Synthetic oligonucleotide
aaucucgaaacuguguuug

SEQ ID NO: 1026011 - RNA, 19 nt, Artificial Sequence
  Description of Artificial Sequence: Synthetic oligonucleotide
uacguucacauucuaagac

SEQ ID NO: 1026012 - RNA, 19 nt, Artificial Sequence
  Description of Artificial Sequence: Synthetic oligonucleotide
aaaucaauuccuaaucagu

SEQ ID NO: 1026013 - RNA, 19 nt, Artificial Sequence
  Description of Artificial Sequence: Synthetic oligonucleotide
uuuagcacccuucuuucug

SEQ ID NO: 1026014 - RNA, 19 nt, Artificial Sequence
  Description of Artificial Sequence: Synthetic oligonucleotide
gguauguuuggccuuaagg

SEQ ID NO: 1026015 - RNA, 19 nt, Artificial Sequence
  Description of Artificial Sequence: Synthetic oligonucleotide
uuaauacaggccauggcaa

SEQ ID NO: 1026016 - RNA, 19 nt, Artificial Sequence
  Description of Artificial Sequence: Synthetic oligonucleotide
agggcuuucacugugacug

SEQ ID NO: 1026017 - RNA, 19 nt, Artificial Sequence
  Description of Artificial Sequence: Synthetic oligonucleotide
acauuaauggagauuggcg

SEQ ID NO: 1026018 - RNA, 19 nt, Artificial Sequence
  Description of Artificial Sequence: Synthetic oligonucleotide
aaaaccgauggaacaacac

SEQ ID NO: 1026019 - RNA, 19 nt, Artificial Sequence
  Description of Artificial Sequence: Synthetic oligonucleotide
ugaaagcgaacgaagacau

SEQ ID NO: 1026020 - RNA, 19 nt, Artificial Sequence
  Description of Artificial Sequence: Synthetic oligonucleotide
uguguuugacgaaagacuu

SEQ ID NO: 1026021 - RNA, 19 nt, Artificial Sequence
  Description of Artificial Sequence: Synthetic oligonucleotide
aaaggagcgagaucuuuca

SEQ ID NO: 1026022 - RNA, 19 nt, Artificial Sequence
  Description of Artificial Sequence: Synthetic oligonucleotide
cuugcucugagaucgagac

SEQ ID NO: 1026023 - RNA, 19 nt, Artificial Sequence
  Description of Artificial Sequence: Synthetic oligonucleotide
gaugcaagauuaauacagg

SEQ ID NO: 1026024 - RNA, 19 nt, Artificial Sequence
  Description of Artificial Sequence: Synthetic oligonucleotide
ugguugaaagcgaacgaag

SEQ ID NO: 1026025 - RNA, 19 nt, Artificial Sequence
  Description of Artificial Sequence: Synthetic oligonucleotide
ugauuaugaugucuucgag

SEQ ID NO: 1026026 - RNA, 19 nt, Artificial Sequence
  Description of Artificial Sequence: Synthetic oligonucleotide
aauguggccgaguaggcaa

SEQ ID NO: 1026027 - RNA, 19 nt, Artificial Sequence
  Description of Artificial Sequence: Synthetic oligonucleotide
aguguuaagaaaguauuca

SEQ ID NO: 1026028 - RNA, 19 nt, Artificial Sequence
  Description of Artificial Sequence: Synthetic oligonucleotide
ucgaaacuguguuugacga

SEQ ID NO: 1026029 - RNA, 19 nt, Artificial Sequence
  Description of Artificial Sequence: Synthetic oligonucleotide
gaucuuauggggaugcuug

SEQ ID NO: 1026030 - RNA, 19 nt, Artificial Sequence
  Description of Artificial Sequence: Synthetic oligonucleotide
ugacgaaagacuuggagua

SEQ ID NO: 1026031 - RNA, 19 nt, Artificial Sequence
  Description of Artificial Sequence: Synthetic oligonucleotide
cucgaaacuguguuugacg

SEQ ID NO: 1026032 - RNA, 19 nt, Artificial Sequence
  Description of Artificial Sequence: Synthetic oligonucleotide
uugaaagcgaacgaagaca

SEQ ID NO: 1026033 - RNA, 19 nt, Artificial Sequence
  Description of Artificial Sequence: Synthetic oligonucleotide
cuuacaccauuauaagggc

SEQ ID NO: 1026034 - RNA, 19 nt, Artificial Sequence
  Description of Artificial Sequence: Synthetic oligonucleotide
aggagcgagaucuuucacg

SEQ ID NO: 1026035 - RNA, 19 nt, Artificial Sequence
  Description of Artificial Sequence: Synthetic oligonucleotide
ugggaucucucaaaggagc

SEQ ID NO: 1026036 - RNA, 19 nt, Artificial Sequence
  Description of Artificial Sequence: Synthetic oligonucleotide
gugauguccccuuucaugc

SEQ ID NO: 1026037 - RNA, 19 nt, Artificial Sequence
  Description of Artificial Sequence: Synthetic oligonucleotide
uguauguuccagaucgacu

SEQ ID NO: 1026038 - RNA, 19 nt, Artificial Sequence
  Description of Artificial Sequence: Synthetic oligonucleotide
ucgccuauuauuguaaugu

SEQ ID NO: 1026039 - RNA, 19 nt, Artificial Sequence
  Description of Artificial Sequence: Synthetic oligonucleotide
caauugaaccugaccaugg

SEQ ID NO: 1026040 - RNA, 19 nt, Artificial Sequence
  Description of Artificial Sequence: Synthetic oligonucleotide
uuaugggaucucucaaagg

SEQ ID NO: 1026041 - RNA, 19 nt, Artificial Sequence
  Description of Artificial Sequence: Synthetic oligonucleotide
uuuuccucuuaacuggcga

SEQ ID NO: 1026042 - RNA, 19 nt, Artificial Sequence
  Description of Artificial Sequence: Synthetic oligonucleotide
agaucuuucacgccugucu

SEQ ID NO: 1026043 - RNA, 19 nt, Artificial Sequence
  Description of Artificial Sequence: Synthetic oligonucleotide
cauuaauggagauuggcga

SEQ ID NO: 1026044 - RNA, 19 nt, Artificial Sequence
  Description of Artificial Sequence: Synthetic oligonucleotide
agauuaauacaggccaugg

SEQ ID NO: 1026045 - RNA, 19 nt, Artificial Sequence
  Description of Artificial Sequence: Synthetic oligonucleotide
cugcaagguagauacaagc

SEQ ID NO: 1026046 - RNA, 19 nt, Artificial Sequence
  Description of Artificial Sequence: Synthetic oligonucleotide
agaauucacgcuccaguuc

SEQ ID NO: 1026047 - RNA, 19 nt, Artificial Sequence
  Description of Artificial Sequence: Synthetic oligonucleotide
uguaaggcuacuuuucuuu

SEQ ID NO: 1026048 - RNA, 19 nt, Artificial Sequence
  Description of Artificial Sequence: Synthetic oligonucleotide
aguguuucuagagaccuag

SEQ ID NO: 1026049 - RNA, 19 nt, Artificial Sequence
  Description of Artificial Sequence: Synthetic oligonucleotide
aauggaaucugaagugcuc

SEQ ID NO: 1026050 - RNA, 19 nt, Artificial Sequence
  Description of Artificial Sequence: Synthetic oligonucleotide
uugaaccugaccaugguuu

SEQ ID NO: 1026051 - RNA, 19 nt, Artificial Sequence
  Description of Artificial Sequence: Synthetic oligonucleotide
cuuguagcaauaaacaaua

SEQ ID NO: 1026052 - RNA, 19 nt, Artificial Sequence
  Description of Artificial Sequence: Synthetic oligonucleotide
ucugaucaaggaucagagg

SEQ ID NO: 1026053 - RNA, 19 nt, Artificial Sequence
  Description of Artificial Sequence: Synthetic oligonucleotide
cagcaauucauaguuaggc

SEQ ID NO: 1026054 - RNA, 19 nt, Artificial Sequence
  Description of Artificial Sequence: Synthetic oligonucleotide
aucccaacuccuuuagcac

SEQ ID NO: 1026055 - RNA, 19 nt, Artificial Sequence
  Description of Artificial Sequence: Synthetic oligonucleotide
gacuuguaaauacauuaca

SEQ ID NO: 1026056 - RNA, 19 nt, Artificial Sequence
  Description of Artificial Sequence: Synthetic oligonucleotide
gaaucugaagugcucuagc

SEQ ID NO: 1026057 - RNA, 19 nt, Artificial Sequence
  Description of Artificial Sequence: Synthetic oligonucleotide
aauaaccacuuaaauagaa

SEQ ID NO: 1026058 - RNA, 19 nt, Artificial Sequence
  Description of Artificial Sequence: Synthetic oligonucleotide
aagauuaauacaggccaug

SEQ ID NO: 1026059 - RNA, 19 nt, Artificial Sequence
  Description of Artificial Sequence: Synthetic oligonucleotide
uuacguucacauucuaaga

SEQ ID NO: 1026060 - RNA, 19 nt, Artificial Sequence
  Description of Artificial Sequence: Synthetic oligonucleotide
cauuauaagggcuuuucga

SEQ ID NO: 1026061 - RNA, 19 nt, Artificial Sequence
  Description of Artificial Sequence: Synthetic oligonucleotide
cagugucagaggaagaaag

SEQ ID NO: 1026062 - RNA, 19 nt, Artificial Sequence
  Description of Artificial Sequence: Synthetic oligonucleotide
aauugaaccugaccauggu

SEQ ID NO: 1026063 - RNA, 19 nt, Artificial Sequence
  Description of Artificial Sequence: Synthetic oligonucleotide
ugaaccaggguuugguuac

SEQ ID NO: 1026064 - RNA, 19 nt, Artificial Sequence
  Description of Artificial Sequence: Synthetic oligonucleotide
ucgggauucaaucccuuug

SEQ ID NO: 1026065 - RNA, 19 nt, Artificial Sequence
  Description of Artificial Sequence: Synthetic oligonucleotide
ucaguguuucuagagaccu

SEQ ID NO: 1026066 - RNA, 19 nt, Artificial Sequence
  Description of Artificial Sequence: Synthetic oligonucleotide
uaaaucuucucugguaugu

SEQ ID NO: 1026067 - RNA, 19 nt, Artificial Sequence
  Description of Artificial Sequence: Synthetic oligonucleotide
guuucuagagaccuagaca

SEQ ID NO: 1026068 - RNA, 19 nt, Artificial Sequence
  Description of Artificial Sequence: Synthetic oligonucleotide
uaacuggcgaagguggugg

SEQ ID NO: 1026069 - RNA, 19 nt, Artificial Sequence
  Description of Artificial Sequence: Synthetic oligonucleotide
uucacugugacugcgggac

SEQ ID NO: 1026070 - RNA, 19 nt, Artificial Sequence
  Description of Artificial Sequence: Synthetic oligonucleotide
guauguuuggccuuaaggu

SEQ ID NO: 1026071 - RNA, 19 nt, Artificial Sequence
  Description of Artificial Sequence: Synthetic oligonucleotide
auuaauggagauuggcgau

SEQ ID NO: 1026072 - RNA, 19 nt, Artificial Sequence
  Description of Artificial Sequence: Synthetic oligonucleotide
guugaaagcgaacgaagac

SEQ ID NO: 1026073 - RNA, 19 nt, Artificial Sequence
  Description of Artificial Sequence: Synthetic oligonucleotide
aacucuaauaaaguacaau

SEQ ID NO: 1026074 - RNA, 19 nt, Artificial Sequence
  Description of Artificial Sequence: Synthetic oligonucleotide
aaggagcgagaucuuucac

SEQ ID NO: 1026075 - RNA, 19 nt, Artificial Sequence
  Description of Artificial Sequence: Synthetic oligonucleotide
acaaucucgaaacuguguu

SEQ ID NO: 1026076 - RNA, 19 nt, Artificial Sequence
  Description of Artificial Sequence: Synthetic oligonucleotide
aaaccaauguggccgagua

SEQ ID NO: 1026077 - RNA, 19 nt, Artificial Sequence
  Description of Artificial Sequence: Synthetic oligonucleotide
aggagaaccaugauuauga

SEQ ID NO: 1026078 - RNA, 19 nt, Artificial Sequence
  Description of Artificial Sequence: Synthetic oligonucleotide
uaguucugaucaaggauca

SEQ ID NO: 1026079 - RNA, 19 nt, Artificial Sequence
  Description of Artificial Sequence: Synthetic oligonucleotide
agcaauucauaguuaggcu

SEQ ID NO: 1026080 - RNA, 19 nt, Artificial Sequence
  Description of Artificial Sequence: Synthetic oligonucleotide
gaugguuuagaagcuggag

SEQ ID NO: 1026081 - RNA, 19 nt, Artificial Sequence
  Description of Artificial Sequence: Synthetic oligonucleotide
aagucaacgccuaugccug

SEQ ID NO: 1026082 - RNA, 19 nt, Artificial Sequence
  Description of Artificial Sequence: Synthetic oligonucleotide
uuagaagcuggagaaaauc

SEQ ID NO: 1026083 - RNA, 19 nt, Artificial Sequence
  Description of Artificial Sequence: Synthetic oligonucleotide
uaaauagaacagugucugc

SEQ ID NO: 1026084 - RNA, 19 nt, Artificial Sequence
  Description of Artificial Sequence: Synthetic oligonucleotide
agcgagaucuuucacgccu

SEQ ID NO: 1026085 - RNA, 19 nt, Artificial Sequence
  Description of Artificial Sequence: Synthetic oligonucleotide
gguauaaagucuaaggguc

SEQ ID NO: 1026086 - RNA, 19 nt, Artificial Sequence
  Description of Artificial Sequence: Synthetic oligonucleotide
aauuccuaaucaguuugcu

SEQ ID NO: 1026087 - RNA, 19 nt, Artificial Sequence
  Description of Artificial Sequence: Synthetic oligonucleotide
acugcuagggcauuuuaau

SEQ ID NO: 1026088 - RNA, 19 nt, Artificial Sequence
  Description of Artificial Sequence: Synthetic oligonucleotide
uuacaccauuauaagggcu

SEQ ID NO: 1026089 - RNA, 19 nt, Artificial Sequence
  Description of Artificial Sequence: Synthetic oligonucleotide
ugagcuguauguuccagau

SEQ ID NO: 1026090 - RNA, 19 nt, Artificial Sequence
  Description of Artificial Sequence: Synthetic oligonucleotide
ucauguaauuccaggcagu

SEQ ID NO: 1026091 - RNA, 19 nt, Artificial Sequence
  Description of Artificial Sequence: Synthetic oligonucleotide
aacuccuuuagcacccuuc

SEQ ID NO: 1026092 - RNA, 19 nt, Artificial Sequence
  Description of Artificial Sequence: Synthetic oligonucleotide
uugguuacguucacauucu

SEQ ID NO: 1026093 - RNA, 19 nt, Artificial Sequence
  Description of Artificial Sequence: Synthetic oligonucleotide
cuuucacugugacugcggg

SEQ ID NO: 1026094 - RNA, 19 nt, Artificial Sequence
  Description of Artificial Sequence: Synthetic oligonucleotide
uacaauugaaccugaccau

SEQ ID NO: 1026095 - RNA, 19 nt, Artificial Sequence
  Description of Artificial Sequence: Synthetic oligonucleotide
gaaagucaacgccuaugcc

SEQ ID NO: 1026096 - RNA, 19 nt, Artificial Sequence
  Description of Artificial Sequence: Synthetic oligonucleotide
augaccaugucuauuugag

SEQ ID NO: 1026097 - RNA, 19 nt, Artificial Sequence
  Description of Artificial Sequence: Synthetic oligonucleotide
acuuguaaauacauuacaa

SEQ ID NO: 1026098 - RNA, 19 nt, Artificial Sequence
  Description of Artificial Sequence: Synthetic oligonucleotide
cuuaaggugaggagaacca

SEQ ID NO: 1026099 - RNA, 19 nt, Artificial Sequence
  Description of Artificial Sequence: Synthetic oligonucleotide
caacaucugagugaucccg

SEQ ID NO: 1026100 - RNA, 19 nt, Artificial Sequence
  Description of Artificial Sequence: Synthetic oligonucleotide
uccuaaucaguuugcuuca

SEQ ID NO: 1026101 - RNA, 19 nt, Artificial Sequence
  Description of Artificial Sequence: Synthetic oligonucleotide
uuuggccuuaaggugagga

SEQ ID NO: 1026102 - RNA, 19 nt, Artificial Sequence
  Description of Artificial Sequence: Synthetic oligonucleotide
aauacaggccauggcaaca

SEQ ID NO: 1026103 - RNA, 19 nt, Artificial Sequence
  Description of Artificial Sequence: Synthetic oligonucleotide
aagcgaacgaagacauugg

SEQ ID NO: 1026104 - RNA, 19 nt, Artificial Sequence
  Description of Artificial Sequence: Synthetic oligonucleotide
cuauuauuguaaugucuuc

SEQ ID NO: 1026105 - RNA, 19 nt, Artificial Sequence
  Description of Artificial Sequence: Synthetic oligonucleotide
ucccaacuccuuuagcacc

SEQ ID NO: 1026106 - RNA, 19 nt, Artificial Sequence
  Description of Artificial Sequence: Synthetic oligonucleotide
agcucgcagcccaagaugc

SEQ ID NO: 1026107 - RNA, 19 nt, Artificial Sequence
  Description of Artificial Sequence: Synthetic oligonucleotide
agagcuggaguuccaucgg

SEQ ID NO: 1026108 - RNA, 19 nt, Artificial Sequence
  Description of Artificial Sequence: Synthetic oligonucleotide
uuccaucgggauucaaucc

SEQ ID NO: 1026109 - RNA, 19 nt, Artificial Sequence
  Description of Artificial Sequence: Synthetic oligonucleotide
ucuaagggucucuaugcaa

SEQ ID NO: 1026110 - RNA, 19 nt, Artificial Sequence
  Description of Artificial Sequence: Synthetic oligonucleotide
aucgacuucgccuauuauu

SEQ ID NO: 1026111 - RNA, 19 nt, Artificial Sequence
  Description of Artificial Sequence: Synthetic oligonucleotide
acaauugaaccugaccaug

SEQ ID NO: 1026112 - RNA, 19 nt, Artificial Sequence
  Description of Artificial Sequence: Synthetic oligonucleotide
ggagcgagaucuuucacgc

SEQ ID NO: 1026113 - RNA, 19 nt, Artificial Sequence
  Description of Artificial Sequence: Synthetic oligonucleotide
caucaugcagugucagagg

SEQ ID NO: 1026114 - RNA, 19 nt, Artificial Sequence
  Description of Artificial Sequence: Synthetic oligonucleotide
acaugcuauagucucuggu

SEQ ID NO: 1026115 - RNA, 19 nt, Artificial Sequence
  Description of Artificial Sequence: Synthetic oligonucleotide
aaccaauguggccgaguag

SEQ ID NO: 1026116 - RNA, 19 nt, Artificial Sequence
  Description of Artificial Sequence: Synthetic oligonucleotide
uucgccuauuauuguaaug

SEQ ID NO: 1026117 - RNA, 19 nt, Artificial Sequence
  Description of Artificial Sequence: Synthetic oligonucleotide
uucugccuugauaacuuga

SEQ ID NO: 1026118 - RNA, 19 nt, Artificial Sequence
  Description of Artificial Sequence: Synthetic oligonucleotide
ugaccaugucuauuugagc

SEQ ID NO: 1026119 - RNA, 19 nt, Artificial Sequence
  Description of Artificial Sequence: Synthetic oligonucleotide
aaguacaauugaaccugac

SEQ ID NO: 1026120 - RNA, 19 nt, Artificial Sequence
  Description of Artificial Sequence: Synthetic oligonucleotide
aggaagaaagucaacgccu

SEQ ID NO: 1026121 - RNA, 19 nt, Artificial Sequence
  Description of Artificial Sequence: Synthetic oligonucleotide
uagauacaagcacaugcua

SEQ ID NO: 1026122 - RNA, 19 nt, Artificial Sequence
  Description of Artificial Sequence: Synthetic oligonucleotide
ugcuauagucucugguuga

SEQ ID NO: 1026123 - RNA, 19 nt, Artificial Sequence
  Description of Artificial Sequence: Synthetic oligonucleotide
uagagcgcgaucugguucu

SEQ ID NO: 1026124 - RNA, 19 nt, Artificial Sequence
  Description of Artificial Sequence: Synthetic oligonucleotide
aggaucagagggcuuggag

SEQ ID NO: 1026125 - RNA, 19 nt, Artificial Sequence
  Description of Artificial Sequence: Synthetic oligonucleotide
caaccggaggagaaugccg

SEQ ID NO: 1026126 - RNA, 19 nt, Artificial Sequence
  Description of Artificial Sequence: Synthetic oligonucleotide
ucuaugcaaauuuccugaa

SEQ ID NO: 1026127 - RNA, 19 nt, Artificial Sequence
  Description of Artificial Sequence: Synthetic oligonucleotide
uccagaucgacuucgccua

SEQ ID NO: 1026128 - RNA, 19 nt, Artificial Sequence
  Description of Artificial Sequence: Synthetic oligonucleotide
uugaaccaggguuugguua

SEQ ID NO: 1026129 - RNA, 19 nt, Artificial Sequence
  Description of Artificial Sequence: Synthetic oligonucleotide
ugugugaucuagagcgcga

SEQ ID NO: 1026130 - RNA, 19 nt, Artificial Sequence
  Description of Artificial Sequence: Synthetic oligonucleotide
uacaagcacaugcuauagu

SEQ ID NO: 1026131 - RNA, 19 nt, Artificial Sequence
  Description of Artificial Sequence: Synthetic oligonucleotide
aggaugguuuagaagcugg

SEQ ID NO: 1026132 - RNA, 19 nt, Artificial Sequence
  Description of Artificial Sequence: Synthetic oligonucleotide
auacaagcacaugcuauag

SEQ ID NO: 1026133 - RNA, 19 nt, Artificial Sequence
  Description of Artificial Sequence: Synthetic oligonucleotide
uacugcuagggcauuuuaa

SEQ ID NO: 1026134 - RNA, 19 nt, Artificial Sequence
  Description of Artificial Sequence: Synthetic oligonucleotide
ucuagagaccuagacaauu

SEQ ID NO: 1026135 - RNA, 19 nt, Artificial Sequence
  Description of Artificial Sequence: Synthetic oligonucleotide
uuuccucuuaacuggcgaa

SEQ ID NO: 1026136 - RNA, 19 nt, Artificial Sequence
  Description of Artificial Sequence: Synthetic oligonucleotide
cgaacgaagacauugguuc

SEQ ID NO: 1026137 - RNA, 19 nt, Artificial Sequence
  Description of Artificial Sequence: Synthetic oligonucleotide
ggaugcuugacaugaacac

SEQ ID NO: 1026138 - RNA, 19 nt, Artificial Sequence
  Description of Artificial Sequence: Synthetic oligonucleotide
uuguagcaauaaacaauac

SEQ ID NO: 1026139 - RNA, 19 nt, Artificial Sequence
  Description of Artificial Sequence: Synthetic oligonucleotide
ugaucccgagacuugcucu

SEQ ID NO: 1026140 - RNA, 19 nt, Artificial Sequence
  Description of Artificial Sequence: Synthetic oligonucleotide
gaucccgagacuugcucug

SEQ ID NO: 1026141 - RNA, 19 nt, Artificial Sequence
  Description of Artificial Sequence: Synthetic oligonucleotide
aaacuguguuugacgaaag

SEQ ID NO: 1026142 - RNA, 19 nt, Artificial Sequence
  Description of Artificial Sequence: Synthetic oligonucleotide
gcuuuuacuucucuuggug

SEQ ID NO: 1026143 - RNA, 19 nt, Artificial Sequence
  Description of Artificial Sequence: Synthetic oligonucleotide
agggucucuaugcaaauuu

SEQ ID NO: 1026144 - RNA, 19 nt, Artificial Sequence
  Description of Artificial Sequence: Synthetic oligonucleotide
uguccugagcgacugccac

SEQ ID NO: 1026145 - RNA, 19 nt, Artificial Sequence
  Description of Artificial Sequence: Synthetic oligonucleotide
aacgccuaugccugccaug

SEQ ID NO: 1026146 - RNA, 19 nt, Artificial Sequence
  Description of Artificial Sequence: Synthetic oligonucleotide
guugccaucgccaccugag

SEQ ID NO: 1026147 - RNA, 19 nt, Artificial Sequence
  Description of Artificial Sequence: Synthetic oligonucleotide
ccauacaucaugcaguguc

SEQ ID NO: 1026148 - RNA, 19 nt, Artificial Sequence
  Description of Artificial Sequence: Synthetic oligonucleotide
uugccaucgccaccugagg

SEQ ID NO: 1026149 - RNA, 19 nt, Artificial Sequence
  Description of Artificial Sequence: Synthetic oligonucleotide
cuaagggucucuaugcaaa

SEQ ID NO: 1026150 - RNA, 19 nt, Artificial Sequence
  Description of Artificial Sequence: Synthetic oligonucleotide
cugcuagggcauuuuaaug

SEQ ID NO: 1026151 - RNA, 19 nt, Artificial Sequence
  Description of Artificial Sequence: Synthetic oligonucleotide
ugaccaugguuuucaauua

SEQ ID NO: 1026152 - RNA, 19 nt, Artificial Sequence
  Description of Artificial Sequence: Synthetic oligonucleotide
agauacaagcacaugcuau

SEQ ID NO: 1026153 - RNA, 19 nt, Artificial Sequence
  Description of Artificial Sequence: Synthetic oligonucleotide
ugaggcaaccggaggagaa

SEQ ID NO: 1026154 - RNA, 19 nt, Artificial Sequence
  Description of Artificial Sequence: Synthetic oligonucleotide
uuuuaugaccaugucuauu

SEQ ID NO: 1026155 - RNA, 19 nt, Artificial Sequence
  Description of Artificial Sequence: Synthetic oligonucleotide
ugcuuuuaugggaucucuc

SEQ ID NO: 1026156 - RNA, 19 nt, Artificial Sequence
  Description of Artificial Sequence: Synthetic oligonucleotide
aagggcuuuucgaagccug

SEQ ID NO: 1026157 - RNA, 19 nt, Artificial Sequence
  Description of Artificial Sequence: Synthetic oligonucleotide
cauguccugagcgacugcc

SEQ ID NO: 1026158 - RNA, 19 nt, Artificial Sequence
  Description of Artificial Sequence: Synthetic oligonucleotide
cucuuaacuggcgaaggug

SEQ ID NO: 1026159 - RNA, 19 nt, Artificial Sequence
  Description of Artificial Sequence: Synthetic oligonucleotide
agcuuuuacuucucuuggu

SEQ ID NO: 1026160 - RNA, 19 nt, Artificial Sequence
  Description of Artificial Sequence: Synthetic oligonucleotide
auugaaccugaccaugguu

SEQ ID NO: 1026161 - RNA, 19 nt, Artificial Sequence
  Description of Artificial Sequence: Synthetic oligonucleotide
aucgccaccugaggcaacc

SEQ ID NO: 1026162 - RNA, 19 nt, Artificial Sequence
  Description of Artificial Sequence: Synthetic oligonucleotide
accaguguuaagaaaguau

SEQ ID NO: 1026163 - RNA, 19 nt, Artificial Sequence
  Description of Artificial Sequence: Synthetic oligonucleotide
uagagaccuagacaauuuu

SEQ ID NO: 1026164 - RNA, 19 nt, Artificial Sequence
  Description of Artificial Sequence: Synthetic oligonucleotide
ugguguuaauguaguucug

SEQ ID NO: 1026165 - RNA, 19 nt, Artificial Sequence
  Description of Artificial Sequence: Synthetic oligonucleotide
ugcgggaccugcuucuuga

SEQ ID NO: 1026166 - RNA, 19 nt, Artificial Sequence
  Description of Artificial Sequence: Synthetic oligonucleotide
gagaucgagaccgagauuu

SEQ ID NO: 1026167 - RNA, 19 nt, Artificial Sequence
  Description of Artificial Sequence: Synthetic oligonucleotide
gacgaaagacuuggaguag

SEQ ID NO: 1026168 - RNA, 19 nt, Artificial Sequence
  Description of Artificial Sequence: Synthetic oligonucleotide
cuguguuugacgaaagacu

SEQ ID NO: 1026169 - RNA, 19 nt, Artificial Sequence
  Description of Artificial Sequence: Synthetic oligonucleotide
uuccuguaaggcuacuuuu

SEQ ID NO: 1026170 - RNA, 19 nt, Artificial Sequence
  Description of Artificial Sequence: Synthetic oligonucleotide
acgccugucucugugaugu

SEQ ID NO: 1026171 - RNA, 19 nt, Artificial Sequence
  Description of Artificial Sequence: Synthetic oligonucleotide
caggguuugguuacguuca

SEQ ID NO: 1026172 - RNA, 19 nt, Artificial Sequence
  Description of Artificial Sequence: Synthetic oligonucleotide
ggcauuuuaaugugcaaaa

SEQ ID NO: 1026173 - RNA, 19 nt, Artificial Sequence
  Description of Artificial Sequence: Synthetic oligonucleotide
cuagagcgcgaucugguuc

SEQ ID NO: 1026174 - RNA, 19 nt, Artificial Sequence
  Description of Artificial Sequence: Synthetic oligonucleotide
gugugugaucuagagcgcg

SEQ ID NO: 1026175 - RNA, 19 nt, Artificial Sequence
  Description of Artificial Sequence: Synthetic oligonucleotide
ucucgaaacuguguuugac

SEQ ID NO: 1026176 - RNA, 19 nt, Artificial Sequence
  Description of Artificial Sequence: Synthetic oligonucleotide
agcgaacgaagacauuggu

SEQ ID NO: 1026177 - RNA, 19 nt, Artificial Sequence
  Description of Artificial Sequence: Synthetic oligonucleotide
gaguaggcaauggaaucug

SEQ ID NO: 1026178 - RNA, 19 nt, Artificial Sequence
  Description of Artificial Sequence: Synthetic oligonucleotide
agucaacgccuaugccugc

SEQ ID NO: 1026179 - RNA, 19 nt, Artificial Sequence
  Description of Artificial Sequence: Synthetic oligonucleotide
ccauuauaagggcuuuucg

SEQ ID NO: 1026180 - RNA, 19 nt, Artificial Sequence
  Description of Artificial Sequence: Synthetic oligonucleotide
gcuuuuaugggaucucuca

SEQ ID NO: 1026181 - RNA, 19 nt, Artificial Sequence
  Description of Artificial Sequence: Synthetic oligonucleotide
uguugucuauccucggguu

SEQ ID NO: 1026182 - RNA, 19 nt, Artificial Sequence
  Description of Artificial Sequence: Synthetic oligonucleotide
aggguuugguuacguucac

SEQ ID NO: 1026183 - RNA, 19 nt, Artificial Sequence
  Description of Artificial Sequence: Synthetic oligonucleotide
uuaaggugaggagaaccau

SEQ ID NO: 1026184 - RNA, 19 nt, Artificial Sequence
  Description of Artificial Sequence: Synthetic oligonucleotide
agacauugguucgaagacu

SEQ ID NO: 1026185 - RNA, 19 nt, Artificial Sequence
  Description of Artificial Sequence: Synthetic oligonucleotide
uaugccugccauguccuga

SEQ ID NO: 1026186 - RNA, 19 nt, Artificial Sequence
  Description of Artificial Sequence: Synthetic oligonucleotide
augccugccauguccugag

SEQ ID NO: 1026187 - RNA, 19 nt, Artificial Sequence
  Description of Artificial Sequence: Synthetic oligonucleotide
ucuauccucggguucuuuu

SEQ ID NO: 1026188 - RNA, 19 nt, Artificial Sequence
  Description of Artificial Sequence: Synthetic oligonucleotide
gagugaucccgagacuugc

SEQ ID NO: 1026189 - RNA, 19 nt, Artificial Sequence
  Description of Artificial Sequence: Synthetic oligonucleotide
ugccccguugccaucgcca

SEQ ID NO: 1026190 - RNA, 19 nt, Artificial Sequence
  Description of Artificial Sequence: Synthetic oligonucleotide
agcugcaagguagauacaa

SEQ ID NO: 1026191 - RNA, 19 nt, Artificial Sequence
  Description of Artificial Sequence: Synthetic oligonucleotide
aucuuauggggaugcuuga

SEQ ID NO: 1026192 - RNA, 19 nt, Artificial Sequence
  Description of Artificial Sequence: Synthetic oligonucleotide
uuaauggagauuggcgauu

SEQ ID NO: 1026193 - RNA, 19 nt, Artificial Sequence
  Description of Artificial Sequence: Synthetic oligonucleotide
uggccgaguaggcaaugga

SEQ ID NO: 1026194 - RNA, 19 nt, Artificial Sequence
  Description of Artificial Sequence: Synthetic oligonucleotide
caccaaggguugaaagagc

SEQ ID NO: 1026195 - RNA, 19 nt, Artificial Sequence
  Description of Artificial Sequence: Synthetic oligonucleotide
gguuuucaauuagauacug

SEQ ID NO: 1026196 - RNA, 19 nt, Artificial Sequence
  Description of Artificial Sequence: Synthetic oligonucleotide
aggguugaaagagcuggag

SEQ ID NO: 1026197 - RNA, 19 nt, Artificial Sequence
  Description of Artificial Sequence: Synthetic oligonucleotide
uaagggucucuaugcaaau

SEQ ID NO: 1026198 - RNA, 19 nt, Artificial Sequence
  Description of Artificial Sequence: Synthetic oligonucleotide
aucuuucacgccugucucu

SEQ ID NO: 1026199 - RNA, 19 nt, Artificial Sequence
  Description of Artificial Sequence: Synthetic oligonucleotide
agaacagugucugcaaguu

SEQ ID NO: 1026200 - RNA, 19 nt, Artificial Sequence
  Description of Artificial Sequence: Synthetic oligonucleotide
guuccagaucgacuucgcc

SEQ ID NO: 1026201 - RNA, 19 nt, Artificial Sequence
  Description of Artificial Sequence: Synthetic oligonucleotide
uucuagagaccuagacaau

SEQ ID NO: 1026202 - RNA, 19 nt, Artificial Sequence
  Description of Artificial Sequence: Synthetic oligonucleotide
cacaugcuauagucucugg

SEQ ID NO: 1026203 - RNA, 19 nt, Artificial Sequence
  Description of Artificial Sequence: Synthetic oligonucleotide
caaucccuuugcuuuuaac

SEQ ID NO: 1026204 - RNA, 19 nt, Artificial Sequence
  Description of Artificial Sequence: Synthetic oligonucleotide
gacuucgccuauuauugua

SEQ ID NO: 1026205 - RNA, 19 nt, Artificial Sequence
  Description of Artificial Sequence: Synthetic oligonucleotide
ccuuaaggugaggagaacc

SEQ ID NO: 1026206 - RNA, 19 nt, Artificial Sequence
  Description of Artificial Sequence: Synthetic oligonucleotide
acgaaagacuuggaguaga

SEQ ID NO: 1026207 - RNA, 19 nt, Artificial Sequence
  Description of Artificial Sequence: Synthetic oligonucleotide
uucacgccugucucuguga

SEQ ID NO: 1026208 - RNA, 19 nt, Artificial Sequence
  Description of Artificial Sequence: Synthetic oligonucleotide
ugaucuuauggggaugcuu

SEQ ID NO: 1026209 - RNA, 19 nt, Artificial Sequence
  Description of Artificial Sequence: Synthetic oligonucleotide
ccagcaauucauaguuagg

SEQ ID NO: 1026210 - RNA, 19 nt, Artificial Sequence
  Description of Artificial Sequence: Synthetic oligonucleotide
ucugguauguuuggccuua

SEQ ID NO: 1026211 - RNA, 19 nt, Artificial Sequence
  Description of Artificial Sequence: Synthetic oligonucleotide
uggcaacaaucucgaaacu

SEQ ID NO: 1026212 - RNA, 19 nt, Artificial Sequence
  Description of Artificial Sequence: Synthetic oligonucleotide
ggaaucugaagugcucuag

SEQ ID NO: 1026213 - RNA, 19 nt, Artificial Sequence
  Description of Artificial Sequence: Synthetic oligonucleotide
aguuccaucgggauucaau

SEQ ID NO: 1026214 - RNA, 19 nt, Artificial Sequence
  Description of Artificial Sequence: Synthetic oligonucleotide
aucucgaaacuguguuuga

SEQ ID NO: 1026215 - RNA, 19 nt, Artificial Sequence
  Description of Artificial Sequence: Synthetic oligonucleotide
ucgagggcuuucacuguga

SEQ ID NO: 1026216 - RNA, 19 nt, Artificial Sequence
  Description of Artificial Sequence: Synthetic oligonucleotide
ucuagagcgcgaucugguu

SEQ ID NO: 1026217 - RNA, 19 nt, Artificial Sequence
  Description of Artificial Sequence: Synthetic oligonucleotide
gggaucucucaaaggagcg

SEQ ID NO: 1026218 - RNA, 19 nt, Artificial Sequence
  Description of Artificial Sequence: Synthetic oligonucleotide
accaugguuuucaauuaga

SEQ ID NO: 1026219 - RNA, 19 nt, Artificial Sequence
  Description of Artificial Sequence: Synthetic oligonucleotide
cugagcgacugccaccaug

SEQ ID NO: 1026220 - RNA, 19 nt, Artificial Sequence
  Description of Artificial Sequence: Synthetic oligonucleotide
gguugaaagagcuggaguu

SEQ ID NO: 1026221 - RNA, 19 nt, Artificial Sequence
  Description of Artificial Sequence: Synthetic oligonucleotide
gguugaaagcgaacgaaga

SEQ ID NO: 1026222 - RNA, 19 nt, Artificial Sequence
  Description of Artificial Sequence: Synthetic oligonucleotide
aacuggcgaagguggugga

SEQ ID NO: 1026223 - RNA, 19 nt, Artificial Sequence
  Description of Artificial Sequence: Synthetic oligonucleotide
ccaggguuugguuacguuc

SEQ ID NO: 1026224 - RNA, 19 nt, Artificial Sequence
  Description of Artificial Sequence: Synthetic oligonucleotide
aauggagauuggcgauuuu

SEQ ID NO: 1026225 - RNA, 19 nt, Artificial Sequence
  Description of Artificial Sequence: Synthetic oligonucleotide
caaggaucagagggcuugg

SEQ ID NO: 1026226 - RNA, 19 nt, Artificial Sequence
  Description of Artificial Sequence: Synthetic oligonucleotide
guguuugacgaaagacuug

SEQ ID NO: 1026227 - RNA, 19 nt, Artificial Sequence
  Description of Artificial Sequence: Synthetic oligonucleotide
caugcuauagucucugguu

SEQ ID NO: 1026228 - RNA, 19 nt, Artificial Sequence
  Description of Artificial Sequence: Synthetic oligonucleotide
caaugaucuuauggggaug

SEQ ID NO: 1026229 - RNA, 19 nt, Artificial Sequence
  Description of Artificial Sequence: Synthetic oligonucleotide
agagaccuagacaauuuua

SEQ ID NO: 1026230 - RNA, 19 nt, Artificial Sequence
  Description of Artificial Sequence: Synthetic oligonucleotide
gagcgagaucuuucacgcc

SEQ ID NO: 1026231 - RNA, 19 nt, Artificial Sequence
  Description of Artificial Sequence: Synthetic oligonucleotide
gaugucuucgagggcuuuc

SEQ ID NO: 1026232 - RNA, 19 nt, Artificial Sequence
  Description of Artificial Sequence: Synthetic oligonucleotide
gugaucccgagacuugcuc

SEQ ID NO: 1026233 - RNA, 19 nt, Artificial Sequence
  Description of Artificial Sequence: Synthetic oligonucleotide
aucuagagcgcgaucuggu

SEQ ID NO: 1026234 - RNA, 19 nt, Artificial Sequence
  Description of Artificial Sequence: Synthetic oligonucleotide
cauuaaucacaucucuuau

SEQ ID NO: 1026235 - RNA, 19 nt, Artificial Sequence
  Description of Artificial Sequence: Synthetic oligonucleotide
cccaacuccuuuagcaccc

SEQ ID NO: 1026236 - RNA, 19 nt, Artificial Sequence
  Description of Artificial Sequence: Synthetic oligonucleotide
aguucugaucaaggaucag

SEQ ID NO: 1026237 - RNA, 19 nt, Artificial Sequence
  Description of Artificial Sequence: Synthetic oligonucleotide
caauggaaucugaagugcu

SEQ ID NO: 1026238 - RNA, 19 nt, Artificial Sequence
  Description of Artificial Sequence: Synthetic oligonucleotide
auacugcuagggcauuuua

SEQ ID NO: 1026239 - RNA, 19 nt, Artificial Sequence
  Description of Artificial Sequence: Synthetic oligonucleotide
ccuuuagcacccuucuuuc

SEQ ID NO: 1026240 - RNA, 19 nt, Artificial Sequence
  Description of Artificial Sequence: Synthetic oligonucleotide
cugagaucgagaccgagau

SEQ ID NO: 1026241 - RNA, 19 nt, Artificial Sequence
  Description of Artificial Sequence: Synthetic oligonucleotide
aagggucucuaugcaaauu

SEQ ID NO: 1026242 - RNA, 19 nt, Artificial Sequence
  Description of Artificial Sequence: Synthetic oligonucleotide
ggaucagagggcuuggagu

SEQ ID NO: 1026243 - RNA, 19 nt, Artificial Sequence
  Description of Artificial Sequence: Synthetic oligonucleotide
gagcuguauguuccagauc

SEQ ID NO: 1026244 - RNA, 19 nt, Artificial Sequence
  Description of Artificial Sequence: Synthetic oligonucleotide
guuugaaccaggguuuggu

SEQ ID NO: 1026245 - RNA, 19 nt, Artificial Sequence
  Description of Artificial Sequence: Synthetic oligonucleotide
aggagaaugccggcggccu

SEQ ID NO: 1026246 - RNA, 19 nt, Artificial Sequence
  Description of Artificial Sequence: Synthetic oligonucleotide
aucgggauucaaucccuuu

SEQ ID NO: 1026247 - RNA, 19 nt, Artificial Sequence
  Description of Artificial Sequence: Synthetic oligonucleotide
guauaaagucuaagggucu

SEQ ID NO: 1026248 - RNA, 19 nt, Artificial Sequence
  Description of Artificial Sequence: Synthetic oligonucleotide
acuugcucugagaucgaga

SEQ ID NO: 1026249 - RNA, 19 nt, Artificial Sequence
  Description of Artificial Sequence: Synthetic oligonucleotide
auacaggccauggcaacaa

SEQ ID NO: 1026250 - RNA, 19 nt, Artificial Sequence
  Description of Artificial Sequence: Synthetic oligonucleotide
ggggaugcuugacaugaac

SEQ ID NO: 1026251 - RNA, 19 nt, Artificial Sequence
  Description of Artificial Sequence: Synthetic oligonucleotide
caguuugaaccaggguuug

SEQ ID NO: 1026252 - RNA, 19 nt, Artificial Sequence
  Description of Artificial Sequence: Synthetic oligonucleotide
accugccccguugccaucg

SEQ ID NO: 1026253 - RNA, 19 nt, Artificial Sequence
  Description of Artificial Sequence: Synthetic oligonucleotide
agcacaugcuauagucucu

SEQ ID NO: 1026254 - RNA, 19 nt, Artificial Sequence
  Description of Artificial Sequence: Synthetic oligonucleotide
guggccgaguaggcaaugg

SEQ ID NO: 1026255 - RNA, 19 nt, Artificial Sequence
  Description of Artificial Sequence: Synthetic oligonucleotide
cucugagaucgagaccgag

SEQ ID NO: 1026256 - RNA, 19 nt, Artificial Sequence
  Description of Artificial Sequence: Synthetic oligonucleotide
gcugcaagguagauacaag

SEQ ID NO: 1026257 - RNA, 19 nt, Artificial Sequence
  Description of Artificial Sequence: Synthetic oligonucleotide
ugcuugcuuuuaugggauc

SEQ ID NO: 1026258 - RNA, 19 nt, Artificial Sequence
  Description of Artificial Sequence: Synthetic oligonucleotide
ugguuacguucacauucua

SEQ ID NO: 1026259 - RNA, 19 nt, Artificial Sequence
  Description of Artificial Sequence: Synthetic oligonucleotide
ccgaguaggcaauggaauc

SEQ ID NO: 1026260 - RNA, 19 nt, Artificial Sequence
  Description of Artificial Sequence: Synthetic oligonucleotide
aguaggcaauggaaucuga

SEQ ID NO: 1026261 - RNA, 19 nt, Artificial Sequence
  Description of Artificial Sequence: Synthetic oligonucleotide
caagauuaauacaggccau

SEQ ID NO: 1026262 - RNA, 19 nt, Artificial Sequence
  Description of Artificial Sequence: Synthetic oligonucleotide
uucaaucccuuugcuuuua

SEQ ID NO: 1026263 - RNA, 19 nt, Artificial Sequence
  Description of Artificial Sequence: Synthetic oligonucleotide
gggcauuuuaaugugcaaa

SEQ ID NO: 1026264 - RNA, 19 nt, Artificial Sequence
  Description of Artificial Sequence: Synthetic oligonucleotide
cuaaucaguuugcuucaua

SEQ ID NO: 1026265 - RNA, 19 nt, Artificial Sequence
  Description of Artificial Sequence: Synthetic oligonucleotide
gucaacgccuaugccugcc

SEQ ID NO: 1026266 - RNA, 19 nt, Artificial Sequence
  Description of Artificial Sequence: Synthetic oligonucleotide
cuaugccugccauguccug

SEQ ID NO: 1026267 - RNA, 19 nt, Artificial Sequence
  Description of Artificial Sequence: Synthetic oligonucleotide
caucugagugaucccgaga

SEQ ID NO: 1026268 - RNA, 19 nt, Artificial Sequence
  Description of Artificial Sequence: Synthetic oligonucleotide
cuagagaccuagacaauuu

SEQ ID NO: 1026269 - RNA, 19 nt, Artificial Sequence
  Description of Artificial Sequence: Synthetic oligonucleotide
uguggccgaguaggcaaug

SEQ ID NO: 1026270 - RNA, 19 nt, Artificial Sequence
  Description of Artificial Sequence: Synthetic oligonucleotide
cgggauucaaucccuuugc

SEQ ID NO: 1026271 - RNA, 19 nt, Artificial Sequence
  Description of Artificial Sequence: Synthetic oligonucleotide
uggggaugcuugacaugaa

SEQ ID NO: 1026272 - RNA, 19 nt, Artificial Sequence
  Description of Artificial Sequence: Synthetic oligonucleotide
gcaaccggaggagaaugcc

SEQ ID NO: 1026273 - RNA, 19 nt, Artificial Sequence
  Description of Artificial Sequence: Synthetic oligonucleotide
cuuaacuggcgaagguggu

SEQ ID NO: 1026274 - RNA, 19 nt, Artificial Sequence
  Description of Artificial Sequence: Synthetic oligonucleotide
gcuuuucgaagccuguugu

SEQ ID NO: 1026275 - RNA, 19 nt, Artificial Sequence
  Description of Artificial Sequence: Synthetic oligonucleotide
agugaucccgagacuugcu

SEQ ID NO: 1026276 - RNA, 19 nt, Artificial Sequence
  Description of Artificial Sequence: Synthetic oligonucleotide
acaccauuauaagggcuuu

SEQ ID NO: 1026277 - RNA, 19 nt, Artificial Sequence
  Description of Artificial Sequence: Synthetic oligonucleotide
accaggguuugguuacguu

SEQ ID NO: 1026278 - RNA, 19 nt, Artificial Sequence
  Description of Artificial Sequence: Synthetic oligonucleotide
ucgaagccuguugucuauc

SEQ ID NO: 1026279 - RNA, 19 nt, Artificial Sequence
  Description of Artificial Sequence: Synthetic oligonucleotide
augaucuuauggggaugcu

SEQ ID NO: 1026280 - RNA, 19 nt, Artificial Sequence
  Description of Artificial Sequence: Synthetic oligonucleotide
gguuacguucacauucuaa

SEQ ID NO: 1026281 - RNA, 19 nt, Artificial Sequence
  Description of Artificial Sequence: Synthetic oligonucleotide
aggugguggaauacauuaa

SEQ ID NO: 1026282 - RNA, 19 nt, Artificial Sequence
  Description of Artificial Sequence: Synthetic oligonucleotide
cacgccugucucugugaug

SEQ ID NO: 1026283 - RNA, 19 nt, Artificial Sequence
  Description of Artificial Sequence: Synthetic oligonucleotide
guuugacgaaagacuugga

SEQ ID NO: 1026284 - RNA, 19 nt, Artificial Sequence
  Description of Artificial Sequence: Synthetic oligonucleotide
ggguugaaagagcuggagu

SEQ ID NO: 1026285 - RNA, 19 nt, Artificial Sequence
  Description of Artificial Sequence: Synthetic oligonucleotide
agauacugcuagggcauuu

SEQ ID NO: 1026286 - RNA, 19 nt, Artificial Sequence
  Description of Artificial Sequence: Synthetic oligonucleotide
acauugguucgaagacugu

SEQ ID NO: 1026287 - RNA, 19 nt, Artificial Sequence
  Description of Artificial Sequence: Synthetic oligonucleotide
cuuuagcacccuucuuucu

SEQ ID NO: 1026288 - RNA, 19 nt, Artificial Sequence
  Description of Artificial Sequence: Synthetic oligonucleotide
cgaagccuguugucuaucc

SEQ ID NO: 1026289 - RNA, 19 nt, Artificial Sequence
  Description of Artificial Sequence: Synthetic oligonucleotide
gccauggcaacaaucucga

SEQ ID NO: 1026290 - RNA, 19 nt, Artificial Sequence
  Description of Artificial Sequence: Synthetic oligonucleotide
ccuagacaauuuuaauaaa

SEQ ID NO: 1026291 - RNA, 19 nt, Artificial Sequence
  Description of Artificial Sequence: Synthetic oligonucleotide
gauacugcuagggcauuuu

SEQ ID NO: 1026292 - RNA, 19 nt, Artificial Sequence
  Description of Artificial Sequence: Synthetic oligonucleotide
gccuauuauuguaaugucu

SEQ ID NO: 1026293 - RNA, 19 nt, Artificial Sequence
  Description of Artificial Sequence: Synthetic oligonucleotide
ggaugguuuagaagcugga

SEQ ID NO: 1026294 - RNA, 19 nt, Artificial Sequence
  Description of Artificial Sequence: Synthetic oligonucleotide
uagauacugcuagggcauu

SEQ ID NO: 1026295 - RNA, 19 nt, Artificial Sequence
  Description of Artificial Sequence: Synthetic oligonucleotide
cuauagucucugguugaaa

SEQ ID NO: 1026296 - RNA, 19 nt, Artificial Sequence
  Description of Artificial Sequence: Synthetic oligonucleotide
ggagaaugccggcggccug

SEQ ID NO: 1026297 - RNA, 19 nt, Artificial Sequence
  Description of Artificial Sequence: Synthetic oligonucleotide
ggcaaccggaggagaaugc

SEQ ID NO: 1026298 - RNA, 19 nt, Artificial Sequence
  Description of Artificial Sequence: Synthetic oligonucleotide
ggaucucucaaaggagcga

SEQ ID NO: 1026299 - RNA, 19 nt, Artificial Sequence
  Description of Artificial Sequence: Synthetic oligonucleotide
auguccugagcgacugcca

SEQ ID NO: 1026300 - RNA, 19 nt, Artificial Sequence
  Description of Artificial Sequence: Synthetic oligonucleotide
gaucgacuucgccuauuau

SEQ ID NO: 1026301 - RNA, 19 nt, Artificial Sequence
  Description of Artificial Sequence: Synthetic oligonucleotide
caaucucgaaacuguguuu

SEQ ID NO: 1026302 - RNA, 19 nt, Artificial Sequence
  Description of Artificial Sequence: Synthetic oligonucleotide
gguuuagaagcuggagaaa

SEQ ID NO: 1026303 - RNA, 19 nt, Artificial Sequence
  Description of Artificial Sequence: Synthetic oligonucleotide
cuucgccuauuauuguaau

SEQ ID NO: 1026304 - RNA, 19 nt, Artificial Sequence
  Description of Artificial Sequence: Synthetic oligonucleotide
cauguaauuccaggcaguu

SEQ ID NO: 1026305 - RNA, 19 nt, Artificial Sequence
  Description of Artificial Sequence: Synthetic oligonucleotide
ggcgaaggugguggaauac

SEQ ID NO: 1026306 - RNA, 19 nt, Artificial Sequence
  Description of Artificial Sequence: Synthetic oligonucleotide
cgccuauuauuguaauguc

SEQ ID NO: 1026307 - RNA, 19 nt, Artificial Sequence
  Description of Artificial Sequence: Synthetic oligonucleotide
cugccccguugccaucgcc

SEQ ID NO: 1026308 - RNA, 19 nt, Artificial Sequence
  Description of Artificial Sequence: Synthetic oligonucleotide
gcgaaggugguggaauaca

SEQ ID NO: 1026309 - RNA, 19 nt, Artificial Sequence
  Description of Artificial Sequence: Synthetic oligonucleotide
gagcgcgaucugguucuug

SEQ ID NO: 1026310 - RNA, 19 nt, Artificial Sequence
  Description of Artificial Sequence: Synthetic oligonucleotide
gcuauagucucugguugaa

SEQ ID NO: 1026311 - RNA, 19 nt, Artificial Sequence
  Description of Artificial Sequence: Synthetic oligonucleotide
ggccgaguaggcaauggaa

SEQ ID NO: 1026312 - RNA, 19 nt, Artificial Sequence
  Description of Artificial Sequence: Synthetic oligonucleotide
ugucuauccucggguucuu

SEQ ID NO: 1026313 - RNA, 19 nt, Artificial Sequence
  Description of Artificial Sequence: Synthetic oligonucleotide
gcgagaucuuucacgccug

SEQ ID NO: 1026314 - RNA, 19 nt, Artificial Sequence
  Description of Artificial Sequence: Synthetic oligonucleotide
agaucgagaccgagauuuu

SEQ ID NO: 1026315 - RNA, 19 nt, Artificial Sequence
  Description of Artificial Sequence: Synthetic oligonucleotide
aucaaggaucagagggcuu

SEQ ID NO: 1026316 - RNA, 19 nt, Artificial Sequence
  Description of Artificial Sequence: Synthetic oligonucleotide
ggagaaccaugauuaugau

SEQ ID NO: 1026317 - RNA, 19 nt, Artificial Sequence
  Description of Artificial Sequence: Synthetic oligonucleotide
ccuugaucuacuagcacuu

SEQ ID NO: 1026318 - RNA, 19 nt, Artificial Sequence
  Description of Artificial Sequence: Synthetic oligonucleotide
gccccguugccaucgccac

SEQ ID NO: 1026319 - RNA, 19 nt, Artificial Sequence
  Description of Artificial Sequence: Synthetic oligonucleotide
gugacugcgggaccugcuu

SEQ ID NO: 1026320 - RNA, 19 nt, Artificial Sequence
  Description of Artificial Sequence: Synthetic oligonucleotide
ggguuugguuacguucaca

SEQ ID NO: 1026321 - RNA, 19 nt, Artificial Sequence
  Description of Artificial Sequence: Synthetic oligonucleotide
cuggcgaaggugguggaau

SEQ ID NO: 1026322 - RNA, 19 nt, Artificial Sequence
  Description of Artificial Sequence: Synthetic oligonucleotide
cacugugacugcgggaccu

SEQ ID NO: 1026323 - RNA, 19 nt, Artificial Sequence
  Description of Artificial Sequence: Synthetic oligonucleotide
gccgaguaggcaauggaau

SEQ ID NO: 1026324 - RNA, 19 nt, Artificial Sequence
  Description of Artificial Sequence: Synthetic oligonucleotide
cgagggcuuucacugugac

SEQ ID NO: 1026325 - RNA, 19 nt, Artificial Sequence
  Description of Artificial Sequence: Synthetic oligonucleotide
cugugauguccccuuucau

SEQ ID NO: 1026326 - RNA, 19 nt, Artificial Sequence
  Description of Artificial Sequence: Synthetic oligonucleotide
ccgagacuugcucugagau

SEQ ID NO: 1026327 - RNA, 19 nt, Artificial Sequence
  Description of Artificial Sequence: Synthetic oligonucleotide
gaguuccaucgggauucaa

SEQ ID NO: 1026328 - RNA, 19 nt, Artificial Sequence
  Description of Artificial Sequence: Synthetic oligonucleotide
ccaucgggauucaaucccu

SEQ ID NO: 1026329 - RNA, 19 nt, Artificial Sequence
  Description of Artificial Sequence: Synthetic oligonucleotide
gcgaacgaagacauugguu

SEQ ID NO: 1026330 - RNA, 19 nt, Artificial Sequence
  Description of Artificial Sequence: Synthetic oligonucleotide
caacgccuaugccugccau

SEQ ID NO: 1026331 - RNA, 19 nt, Artificial Sequence
  Description of Artificial Sequence: Synthetic oligonucleotide
ccccguugccaucgccacc

SEQ ID NO: 1026332 - RNA, 19 nt, Artificial Sequence
  Description of Artificial Sequence: Synthetic oligonucleotide
cgaguaggcaauggaaucu

SEQ ID NO: 1026333 - RNA, 19 nt, Artificial Sequence
  Description of Artificial Sequence: Synthetic oligonucleotide
cagugucugcaaguuuuau

SEQ ID NO: 1026334 - RNA, 19 nt, Artificial Sequence
  Description of Artificial Sequence: Synthetic oligonucleotide
caccauuauaagggcuuuu

SEQ ID NO: 1026335 - RNA, 19 nt, Artificial Sequence
  Description of Artificial Sequence: Synthetic oligonucleotide
gcucugagaucgagaccga

SEQ ID NO: 1026336 - RNA, 19 nt, Artificial Sequence
  Description of Artificial Sequence: Synthetic oligonucleotide
caacuccuuuagcacccuu

SEQ ID NO: 1026337 - RNA, 19 nt, Artificial Sequence
  Description of Artificial Sequence: Synthetic oligonucleotide
gucuauccucggguucuuu

SEQ ID NO: 1026338 - RNA, 19 nt, Artificial Sequence
  Description of Artificial Sequence: Synthetic oligonucleotide
gggcuuuucgaagccuguu

SEQ ID NO: 1026339 - RNA, 19 nt, Artificial Sequence
  Description of Artificial Sequence: Synthetic oligonucleotide
ccccuuucaugccuguguu

SEQ ID NO: 1026340 - RNA, 19 nt, Artificial Sequence
  Description of Artificial Sequence: Synthetic oligonucleotide
cgacuucgccuauuauugu

SEQ ID NO: 1026341 - RNA, 19 nt, Artificial Sequence
  Description of Artificial Sequence: Synthetic oligonucleotide
cgccuaugccugccauguc

SEQ ID NO: 1026342 - RNA, 19 nt, Artificial Sequence
  Description of Artificial Sequence: Synthetic oligonucleotide
ccugagcgacugccaccau

SEQ ID NO: 1026343 - RNA, 19 nt, Artificial Sequence
  Description of Artificial Sequence: Synthetic oligonucleotide
uucaagauaacccagagga

SEQ ID NO: 1026344 - RNA, 19 nt, Artificial Sequence
  Description of Artificial Sequence: Synthetic oligonucleotide
aucuuuaugacucacuagc

SEQ ID NO: 1026345 - RNA, 19 nt, Artificial Sequence
  Description of Artificial Sequence: Synthetic oligonucleotide
aagguuucaacauaacugg

SEQ ID NO: 1026346 - RNA, 19 nt, Artificial Sequence
  Description of Artificial Sequence: Synthetic oligonucleotide
ucuaaucucaaucuuacag

SEQ ID NO: 1026347 - RNA, 19 nt, Artificial Sequence
  Description of Artificial Sequence: Synthetic oligonucleotide
ucugaaauaaguauucuca

SEQ ID NO: 1026348 - RNA, 19 nt, Artificial Sequence
  Description of Artificial Sequence: Synthetic oligonucleotide
aauaguguaugauucacug

SEQ ID NO: 1026349 - RNA, 19 nt, Artificial Sequence
  Description of Artificial Sequence: Synthetic oligonucleotide
uuuacucaaauaaauacca

SEQ ID NO: 1026350 - RNA, 19 nt, Artificial Sequence
  Description of Artificial Sequence: Synthetic oligonucleotide
cuuauaauacacuuguggc

SEQ ID NO: 1026351 - RNA, 19 nt, Artificial Sequence
  Description of Artificial Sequence: Synthetic oligonucleotide
ucauuagacacugugaggg

SEQ ID NO: 1026352 - RNA, 19 nt, Artificial Sequence
  Description of Artificial Sequence: Synthetic oligonucleotide
auagcaacagaccuuggcc

SEQ ID NO: 1026353 - RNA, 19 nt, Artificial Sequence
  Description of Artificial Sequence: Synthetic oligonucleotide
agcauauauggcuaagucc

SEQ ID NO: 1026354 - RNA, 19 nt, Artificial Sequence
  Description of Artificial Sequence: Synthetic oligonucleotide
aguauuuuaaaauagugua

SEQ ID NO: 1026355 - RNA, 19 nt, Artificial Sequence
  Description of Artificial Sequence: Synthetic oligonucleotide
agaaucucagaauagcaac

SEQ ID NO: 1026356 - RNA, 19 nt, Artificial Sequence
  Description of Artificial Sequence: Synthetic oligonucleotide
gaaugaugaauuuugcugc

SEQ ID NO: 1026357 - RNA, 19 nt, Artificial Sequence
  Description of Artificial Sequence: Synthetic oligonucleotide
aguagauauauuuuaaagu

SEQ ID NO: 1026358 - RNA, 19 nt, Artificial Sequence
  Description of Artificial Sequence: Synthetic oligonucleotide
acgucaaagacacuaaaac

SEQ ID NO: 1026359 - RNA, 19 nt, Artificial Sequence
  Description of Artificial Sequence: Synthetic oligonucleotide
uucaguuagacacuaagcu

SEQ ID NO: 1026360 - RNA, 19 nt, Artificial Sequence
  Description of Artificial Sequence: Synthetic oligonucleotide
ucaaccaccuuaauuagag

SEQ ID NO: 1026361 - RNA, 19 nt, Artificial Sequence
  Description of Artificial Sequence: Synthetic oligonucleotide
uuauuaagcaauaaucgaa

SEQ ID NO: 1026362 - RNA, 19 nt, Artificial Sequence
  Description of Artificial Sequence: Synthetic oligonucleotide
uuaagaaggacacuauaca

SEQ ID NO: 1026363 - RNA, 19 nt, Artificial Sequence
  Description of Artificial Sequence: Synthetic oligonucleotide
gaagguuucaacauaacug

SEQ ID NO: 1026364 - RNA, 19 nt, Artificial Sequence
  Description of Artificial Sequence: Synthetic oligonucleotide
aaccaccuuaauuagagug

SEQ ID NO: 1026365 - RNA, 19 nt, Artificial Sequence
  Description of Artificial Sequence: Synthetic oligonucleotide
ugaaccugaauuuucaaga

SEQ ID NO: 1026366 - RNA, 19 nt, Artificial Sequence
  Description of Artificial Sequence: Synthetic oligonucleotide
ucuaugcaugcaauaaugg

SEQ ID NO: 1026367 - RNA, 19 nt, Artificial Sequence
  Description of Artificial Sequence: Synthetic oligonucleotide
aagguagugucugacaucg

SEQ ID NO: 1026368 - RNA, 19 nt, Artificial Sequence
  Description of Artificial Sequence: Synthetic oligonucleotide
uucaauagcauucucugcu

SEQ ID NO: 1026369 - RNA, 19 nt, Artificial Sequence
  Description of Artificial Sequence: Synthetic oligonucleotide
auuacaaucugccuuauaa

SEQ ID NO: 1026370 - RNA, 19 nt, Artificial Sequence
  Description of Artificial Sequence: Synthetic oligonucleotide
uauuaagcaauaaucgaac

SEQ ID NO: 1026371 - RNA, 19 nt, Artificial Sequence
  Description of Artificial Sequence: Synthetic oligonucleotide
uucucauuuaauuucagaa

SEQ ID NO: 1026372 - RNA, 19 nt, Artificial Sequence
  Description of Artificial Sequence: Synthetic oligonucleotide
ucaguuuucaauccaagaa

SEQ ID NO: 1026373 - RNA, 19 nt, Artificial Sequence
  Description of Artificial Sequence: Synthetic oligonucleotide
ucuuaguacguguaacugg

SEQ ID NO: 1026374 - RNA, 19 nt, Artificial Sequence
  Description of Artificial Sequence: Synthetic oligonucleotide
uuuuacauaagcucgcagu

SEQ ID NO: 1026375 - RNA, 19 nt, Artificial Sequence
  Description of Artificial Sequence: Synthetic oligonucleotide
aauucaagcuaauuugcgu

SEQ ID NO: 1026376 - RNA, 19 nt, Artificial Sequence
  Description of Artificial Sequence: Synthetic oligonucleotide
uaagcuagcuaaauaaccu

SEQ ID NO: 1026377 - RNA, 19 nt, Artificial Sequence
  Description of Artificial Sequence: Synthetic oligonucleotide
cuaagcuagcuaaauaacc

SEQ ID NO: 1026378 - RNA, 19 nt, Artificial Sequence
  Description of Artificial Sequence: Synthetic oligonucleotide
uucuaugcaugcaauaaug

SEQ ID NO: 1026379 - RNA, 19 nt, Artificial Sequence
  Description of Artificial Sequence: Synthetic oligonucleotide
cuuaguacguguaacuggc

SEQ ID NO: 1026380 - RNA, 19 nt, Artificial Sequence
  Description of Artificial Sequence: Synthetic oligonucleotide
uuuuacggguguaaacugg

SEQ ID NO: 1026381 - RNA, 19 nt, Artificial Sequence
  Description of Artificial Sequence: Synthetic oligonucleotide
ucuuguauaucuuuaugac

SEQ ID NO: 1026382 - RNA, 19 nt, Artificial Sequence
  Description of Artificial Sequence: Synthetic oligonucleotide
caguuagacacuaagcuag

SEQ ID NO: 1026383 - RNA, 19 nt, Artificial Sequence
  Description of Artificial Sequence: Synthetic oligonucleotide
ucugguauucauuuucugc

SEQ ID NO: 1026384 - RNA, 19 nt, Artificial Sequence
  Description of Artificial Sequence: Synthetic oligonucleotide
ugccuuauaauacacuugu

SEQ ID NO: 1026385 - RNA, 19 nt, Artificial Sequence
  Description of Artificial Sequence: Synthetic oligonucleotide
uguuaucaacaccugaucu

SEQ ID NO: 1026386 - RNA, 19 nt, Artificial Sequence
  Description of Artificial Sequence: Synthetic oligonucleotide
caguagauauauuuuaaag

SEQ ID NO: 1026387 - RNA, 19 nt, Artificial Sequence
  Description of Artificial Sequence: Synthetic oligonucleotide
guagauauauuuuaaagua

SEQ ID NO: 1026388 - RNA, 19 nt, Artificial Sequence
  Description of Artificial Sequence: Synthetic oligonucleotide
augaauuuugcugcuauac

SEQ ID NO: 1026389 - RNA, 19 nt, Artificial Sequence
  Description of Artificial Sequence: Synthetic oligonucleotide
aacaccugaucuucauagc

SEQ ID NO: 1026390 - RNA, 19 nt, Artificial Sequence
  Description of Artificial Sequence: Synthetic oligonucleotide
augcuuaugaugcauagga

SEQ ID NO: 1026391 - RNA, 19 nt, Artificial Sequence
  Description of Artificial Sequence: Synthetic oligonucleotide
ugaagguuucaacauaacu

SEQ ID NO: 1026392 - RNA, 19 nt, Artificial Sequence
  Description of Artificial Sequence: Synthetic oligonucleotide
uuuaacgucaaagacacua

SEQ ID NO: 1026393 - RNA, 19 nt, Artificial Sequence
  Description of Artificial Sequence: Synthetic oligonucleotide
agauuaucauuauuaagca

SEQ ID NO: 1026394 - RNA, 19 nt, Artificial Sequence
  Description of Artificial Sequence: Synthetic oligonucleotide
aagcauuagaugcauuucu

SEQ ID NO: 1026395 - RNA, 19 nt, Artificial Sequence
  Description of Artificial Sequence: Synthetic oligonucleotide
auggcuaaguccaucaacc

SEQ ID NO: 1026396 - RNA, 19 nt, Artificial Sequence
  Description of Artificial Sequence: Synthetic oligonucleotide
uauauuacaaucugccuua

SEQ ID NO: 1026397 - RNA, 19 nt, Artificial Sequence
  Description of Artificial Sequence: Synthetic oligonucleotide
ucaaucuuacagaagcgga

SEQ ID NO: 1026398 - RNA, 19 nt, Artificial Sequence
  Description of Artificial Sequence: Synthetic oligonucleotide
auuuugcugcuauacguac

SEQ ID NO: 1026399 - RNA, 19 nt, Artificial Sequence
  Description of Artificial Sequence: Synthetic oligonucleotide
ucuguuaucaacaccugau

SEQ ID NO: 1026400 - RNA, 19 nt, Artificial Sequence
  Description of Artificial Sequence: Synthetic oligonucleotide
gaugcaguugcauaccaug

SEQ ID NO: 1026401 - RNA, 19 nt, Artificial Sequence
  Description of Artificial Sequence: Synthetic oligonucleotide
ggacauauggaauucaagc

SEQ ID NO: 1026402 - RNA, 19 nt, Artificial Sequence
  Description of Artificial Sequence: Synthetic oligonucleotide
agcuaaauaaccuuacaau

SEQ ID NO: 1026403 - RNA, 19 nt, Artificial Sequence
  Description of Artificial Sequence: Synthetic oligonucleotide
uaauuagagugucuguuac

SEQ ID NO: 1026404 - RNA, 19 nt, Artificial Sequence
  Description of Artificial Sequence: Synthetic oligonucleotide
uguaugauucacuggugag

SEQ ID NO: 1026405 - RNA, 19 nt, Artificial Sequence
  Description of Artificial Sequence: Synthetic oligonucleotide
cuucguauggccuuggauc

SEQ ID NO: 1026406 - RNA, 19 nt, Artificial Sequence
  Description of Artificial Sequence: Synthetic oligonucleotide
aguacguguaacuggcaac

SEQ ID NO: 1026407 - RNA, 19 nt, Artificial Sequence
  Description of Artificial Sequence: Synthetic oligonucleotide
ucugauaauucucacugau

SEQ ID NO: 1026408 - RNA, 19 nt, Artificial Sequence
  Description of Artificial Sequence: Synthetic oligonucleotide
uacauaagcucgcagugca

SEQ ID NO: 1026409 - RNA, 19 nt, Artificial Sequence
  Description of Artificial Sequence: Synthetic oligonucleotide
uaauucucacugauggcag

SEQ ID NO: 1026410 - RNA, 19 nt, Artificial Sequence
  Description of Artificial Sequence: Synthetic oligonucleotide
uaagaaggacacuauacaa

SEQ ID NO: 1026411 - RNA, 19 nt, Artificial Sequence
  Description of Artificial Sequence: Synthetic oligonucleotide
auaaugcucuuuuacauaa

SEQ ID NO: 1026412 - RNA, 19 nt, Artificial Sequence
  Description of Artificial Sequence: Synthetic oligonucleotide
uagacacuaagcuagcuaa

SEQ ID NO: 1026413 - RNA, 19 nt, Artificial Sequence
  Description of Artificial Sequence: Synthetic oligonucleotide
aaugaugaauuuugcugcu

SEQ ID NO: 1026414 - RNA, 19 nt, Artificial Sequence
  Description of Artificial Sequence: Synthetic oligonucleotide
gaggaauaccucuucacug

SEQ ID NO: 1026415 - RNA, 19 nt, Artificial Sequence
  Description of Artificial Sequence: Synthetic oligonucleotide
aagguagacaauuucuuua

SEQ ID NO: 1026416 - RNA, 19 nt, Artificial Sequence
  Description of Artificial Sequence: Synthetic oligonucleotide
gaauucaagcuaauuugcg

SEQ ID NO: 1026417 - RNA, 19 nt, Artificial Sequence
  Description of Artificial Sequence: Synthetic oligonucleotide
aguauuacaaacaugcuua

SEQ ID NO: 1026418 - RNA, 19 nt, Artificial Sequence
  Description of Artificial Sequence: Synthetic oligonucleotide
uuugcugcuauacguaccu

SEQ ID NO: 1026419 - RNA, 19 nt, Artificial Sequence
  Description of Artificial Sequence: Synthetic oligonucleotide
augaucaaauuugaaacag

SEQ ID NO: 1026420 - RNA, 19 nt, Artificial Sequence
  Description of Artificial Sequence: Synthetic oligonucleotide
ucggauaaugcucuuuuac

SEQ ID NO: 1026421 - RNA, 19 nt, Artificial Sequence
  Description of Artificial Sequence: Synthetic oligonucleotide
aagcggaagaggugaaagg

SEQ ID NO: 1026422 - RNA, 19 nt, Artificial Sequence
  Description of Artificial Sequence: Synthetic oligonucleotide
uguaaacugguccaaguua

SEQ ID NO: 1026423 - RNA, 19 nt, Artificial Sequence
  Description of Artificial Sequence: Synthetic oligonucleotide
auaguguaugauucacugg

SEQ ID NO: 1026424 - RNA, 19 nt, Artificial Sequence
  Description of Artificial Sequence: Synthetic oligonucleotide
gaugcauaggaagauggag

SEQ ID NO: 1026425 - RNA, 19 nt, Artificial Sequence
  Description of Artificial Sequence: Synthetic oligonucleotide
acucuuucaagauaaccca

SEQ ID NO: 1026426 - RNA, 19 nt, Artificial Sequence
  Description of Artificial Sequence: Synthetic oligonucleotide
uaauuugcguaacugucac

SEQ ID NO: 1026427 - RNA, 19 nt, Artificial Sequence
  Description of Artificial Sequence: Synthetic oligonucleotide
acuguaaacuuccacucug

SEQ ID NO: 1026428 - RNA, 19 nt, Artificial Sequence
  Description of Artificial Sequence: Synthetic oligonucleotide
aauuucagggugcuggcaa

SEQ ID NO: 1026429 - RNA, 19 nt, Artificial Sequence
  Description of Artificial Sequence: Synthetic oligonucleotide
uacggguguaaacuggucc

SEQ ID NO: 1026430 - RNA, 19 nt, Artificial Sequence
  Description of Artificial Sequence: Synthetic oligonucleotide
ugaagguagugucugacau

SEQ ID NO: 1026431 - RNA, 19 nt, Artificial Sequence
  Description of Artificial Sequence: Synthetic oligonucleotide
cauuuaugcauucugcauc

SEQ ID NO: 1026432 - RNA, 19 nt, Artificial Sequence
  Description of Artificial Sequence: Synthetic oligonucleotide
gauaauucucacugauggc

SEQ ID NO: 1026433 - RNA, 19 nt, Artificial Sequence
  Description of Artificial Sequence: Synthetic oligonucleotide
acugauggcagucugguau

SEQ ID NO: 1026434 - RNA, 19 nt, Artificial Sequence
  Description of Artificial Sequence: Synthetic oligonucleotide
aguugcauaccauguggac

SEQ ID NO: 1026435 - RNA, 19 nt, Artificial Sequence
  Description of Artificial Sequence: Synthetic oligonucleotide
caauaaucgaacaucauua

SEQ ID NO: 1026436 - RNA, 19 nt, Artificial Sequence
  Description of Artificial Sequence: Synthetic oligonucleotide
guagcuaaggaucuuguuc

SEQ ID NO: 1026437 - RNA, 19 nt, Artificial Sequence
  Description of Artificial Sequence: Synthetic oligonucleotide
uacaacuuguuaagaagga

SEQ ID NO: 1026438 - RNA, 19 nt, Artificial Sequence
  Description of Artificial Sequence: Synthetic oligonucleotide
guuaagaaggacacuauac

SEQ ID NO: 1026439 - RNA, 19 nt, Artificial Sequence
  Description of Artificial Sequence: Synthetic oligonucleotide
gaugccaaccaccugugug

SEQ ID NO: 1026440 - RNA, 19 nt, Artificial Sequence
  Description of Artificial Sequence: Synthetic oligonucleotide
augccaaccaccugugugg

SEQ ID NO: 1026441 - RNA, 19 nt, Artificial Sequence
  Description of Artificial Sequence: Synthetic oligonucleotide
auaaccuuacaaugaaggu

SEQ ID NO: 1026442 - RNA, 19 nt, Artificial Sequence
  Description of Artificial Sequence: Synthetic oligonucleotide
uuugccauacaccgugcag

SEQ ID NO: 1026443 - RNA, 19 nt, Artificial Sequence
  Description of Artificial Sequence: Synthetic oligonucleotide
ucugccuuauaauacacuu

SEQ ID NO: 1026444 - RNA, 19 nt, Artificial Sequence
  Description of Artificial Sequence: Synthetic oligonucleotide
acuaagcuagcuaaauaac

SEQ ID NO: 1026445 - RNA, 19 nt, Artificial Sequence
  Description of Artificial Sequence: Synthetic oligonucleotide
uaauagugaaccugaauuu

SEQ ID NO: 1026446 - RNA, 19 nt, Artificial Sequence
  Description of Artificial Sequence: Synthetic oligonucleotide
gcuuaugaugcauaggaag

SEQ ID NO: 1026447 - RNA, 19 nt, Artificial Sequence
  Description of Artificial Sequence: Synthetic oligonucleotide
aguucaggguuauauauau

SEQ ID NO: 1026448 - RNA, 19 nt, Artificial Sequence
  Description of Artificial Sequence: Synthetic oligonucleotide
ucgacguaaggcuuugaag

SEQ ID NO: 1026449 - RNA, 19 nt, Artificial Sequence
  Description of Artificial Sequence: Synthetic oligonucleotide
uagagugucuguuacugac

SEQ ID NO: 1026450 - RNA, 19 nt, Artificial Sequence
  Description of Artificial Sequence: Synthetic oligonucleotide
uuaauuagagugucuguua

SEQ ID NO: 1026451 - RNA, 19 nt, Artificial Sequence
  Description of Artificial Sequence: Synthetic oligonucleotide
cucaaucuuacagaagcgg

SEQ ID NO: 1026452 - RNA, 19 nt, Artificial Sequence
  Description of Artificial Sequence: Synthetic oligonucleotide
cuaaucucaaucuuacaga

SEQ ID NO: 1026453 - RNA, 19 nt, Artificial Sequence
  Description of Artificial Sequence: Synthetic oligonucleotide
uucguauggccuuggauca

SEQ ID NO: 1026454 - RNA, 19 nt, Artificial Sequence
  Description of Artificial Sequence: Synthetic oligonucleotide
ggacacuauacaaagaaag

SEQ ID NO: 1026455 - RNA, 19 nt, Artificial Sequence
  Description of Artificial Sequence: Synthetic oligonucleotide
cauaggaagauggagaaca

SEQ ID NO: 1026456 - RNA, 19 nt, Artificial Sequence
  Description of Artificial Sequence: Synthetic oligonucleotide
uuuacggguguaaacuggu

SEQ ID NO: 1026457 - RNA, 19 nt, Artificial Sequence
  Description of Artificial Sequence: Synthetic oligonucleotide
aaccuuacaaugaagguuu

SEQ ID NO: 1026458 - RNA, 19 nt, Artificial Sequence
  Description of Artificial Sequence: Synthetic oligonucleotide
uuagacacuaagcuagcua

SEQ ID NO: 1026459 - RNA, 19 nt, Artificial Sequence
  Description of Artificial Sequence: Synthetic oligonucleotide
acaacuuguuaagaaggac

SEQ ID NO: 1026460 - RNA, 19 nt, Artificial Sequence
  Description of Artificial Sequence: Synthetic oligonucleotide
acauauggaauucaagcua

SEQ ID NO: 1026461 - RNA, 19 nt, Artificial Sequence
  Description of Artificial Sequence: Synthetic oligonucleotide
ucaguuagacacuaagcua

SEQ ID NO: 1026462 - RNA, 19 nt, Artificial Sequence
  Description of Artificial Sequence: Synthetic oligonucleotide
uuaacgucaaagacacuaa

SEQ ID NO: 1026463 - RNA, 19 nt, Artificial Sequence
  Description of Artificial Sequence: Synthetic oligonucleotide
ucauuuaugcauucugcau

SEQ ID NO: 1026464 - RNA, 19 nt, Artificial Sequence
  Description of Artificial Sequence: Synthetic oligonucleotide
uguuaagaaggacacuaua

SEQ ID NO: 1026465 - RNA, 19 nt, Artificial Sequence
  Description of Artificial Sequence: Synthetic oligonucleotide
uuucuaugcaugcaauaau

SEQ ID NO: 1026466 - RNA, 19 nt, Artificial Sequence
  Description of Artificial Sequence: Synthetic oligonucleotide
gaauuuugcugcuauacgu

SEQ ID NO: 1026467 - RNA, 19 nt, Artificial Sequence
  Description of Artificial Sequence: Synthetic oligonucleotide
aagcuaauuugcguaacug

SEQ ID NO: 1026468 - RNA, 19 nt, Artificial Sequence
  Description of Artificial Sequence: Synthetic oligonucleotide
auucaagcuaauuugcgua

SEQ ID NO: 1026469 - RNA, 19 nt, Artificial Sequence
  Description of Artificial Sequence: Synthetic oligonucleotide
uucccucuaaucucaaucu

SEQ ID NO: 1026470 - RNA, 19 nt, Artificial Sequence
  Description of Artificial Sequence: Synthetic oligonucleotide
ugugagggaaucuuguaua

SEQ ID NO: 1026471 - RNA, 19 nt, Artificial Sequence
  Description of Artificial Sequence: Synthetic oligonucleotide
ugguauucauuuucugcag

SEQ ID NO: 1026472 - RNA, 19 nt, Artificial Sequence
  Description of Artificial Sequence: Synthetic oligonucleotide
uaacucagggacauaugga

SEQ ID NO: 1026473 - RNA, 19 nt, Artificial Sequence
  Description of Artificial Sequence: Synthetic oligonucleotide
gaagcggaagaggugaaag

SEQ ID NO: 1026474 - RNA, 19 nt, Artificial Sequence
  Description of Artificial Sequence: Synthetic oligonucleotide
ugcuguuugcaccucauua

SEQ ID NO: 1026475 - RNA, 19 nt, Artificial Sequence
  Description of Artificial Sequence: Synthetic oligonucleotide
cucuuuuacauaagcucgc

SEQ ID NO: 1026476 - RNA, 19 nt, Artificial Sequence
  Description of Artificial Sequence: Synthetic oligonucleotide
uguauaucuuuaugacuca

SEQ ID NO: 1026477 - RNA, 19 nt, Artificial Sequence
  Description of Artificial Sequence: Synthetic oligonucleotide
gacauauggaauucaagcu

SEQ ID NO: 1026478 - RNA, 19 nt, Artificial Sequence
  Description of Artificial Sequence: Synthetic oligonucleotide
aagcucgcagugcagucuc

SEQ ID NO: 1026479 - RNA, 19 nt, Artificial Sequence
  Description of Artificial Sequence: Synthetic oligonucleotide
ugguauagaaaauguuuuc

SEQ ID NO: 1026480 - RNA, 19 nt, Artificial Sequence
  Description of Artificial Sequence: Synthetic oligonucleotide
auucucauuuaauuucaga

SEQ ID NO: 1026481 - RNA, 19 nt, Artificial Sequence
  Description of Artificial Sequence: Synthetic oligonucleotide
aaaacucuuucaagauaac

SEQ ID NO: 1026482 - RNA, 19 nt, Artificial Sequence
  Description of Artificial Sequence: Synthetic oligonucleotide
aaaagguagacaauuucuu

SEQ ID NO: 1026483 - RNA, 19 nt, Artificial Sequence
  Description of Artificial Sequence: Synthetic oligonucleotide
uccaucaaccaccuuaauu

SEQ ID NO: 1026484 - RNA, 19 nt, Artificial Sequence
  Description of Artificial Sequence: Synthetic oligonucleotide
uguuugcaccucauuagac

SEQ ID NO: 1026485 - RNA, 19 nt, Artificial Sequence
  Description of Artificial Sequence: Synthetic oligonucleotide
cauucucugcuucguaugg

SEQ ID NO: 1026486 - RNA, 19 nt, Artificial Sequence
  Description of Artificial Sequence: Synthetic oligonucleotide
auuugcguaacugucacaa

SEQ ID NO: 1026487 - RNA, 19 nt, Artificial Sequence
  Description of Artificial Sequence: Synthetic oligonucleotide
aagaaggacacuauacaaa

SEQ ID NO: 1026488 - RNA, 19 nt, Artificial Sequence
  Description of Artificial Sequence: Synthetic oligonucleotide
uuacaaucugccuuauaau

SEQ ID NO: 1026489 - RNA, 19 nt, Artificial Sequence
  Description of Artificial Sequence: Synthetic oligonucleotide
uaugaugcauaggaagaug

SEQ ID NO: 1026490 - RNA, 19 nt, Artificial Sequence
  Description of Artificial Sequence: Synthetic oligonucleotide
cuucuggcgacaaacugug

SEQ ID NO: 1026491 - RNA, 19 nt, Artificial Sequence
  Description of Artificial Sequence: Synthetic oligonucleotide
auaagcucgcagugcaguc

SEQ ID NO: 1026492 - RNA, 19 nt, Artificial Sequence
  Description of Artificial Sequence: Synthetic oligonucleotide
accuuaauuagagugucug

SEQ ID NO: 1026493 - RNA, 19 nt, Artificial Sequence
  Description of Artificial Sequence: Synthetic oligonucleotide
uaaccuuacaaugaagguu

SEQ ID NO: 1026494 - RNA, 19 nt, Artificial Sequence
  Description of Artificial Sequence: Synthetic oligonucleotide
agauaacccagaggaauac

SEQ ID NO: 1026495 - RNA, 19 nt, Artificial Sequence
  Description of Artificial Sequence: Synthetic oligonucleotide
cgacguaaggcuuugaagg

SEQ ID NO: 1026496 - RNA, 19 nt, Artificial Sequence
  Description of Artificial Sequence: Synthetic oligonucleotide
ugaugcauaggaagaugga

SEQ ID NO: 1026497 - RNA, 19 nt, Artificial Sequence
  Description of Artificial Sequence: Synthetic oligonucleotide
cuaauuugcguaacuguca

SEQ ID NO: 1026498 - RNA, 19 nt, Artificial Sequence
  Description of Artificial Sequence: Synthetic oligonucleotide
agauauauuuuaaaguauu

SEQ ID NO: 1026499 - RNA, 19 nt, Artificial Sequence
  Description of Artificial Sequence: Synthetic oligonucleotide
gaaaagguagacaauuucu

SEQ ID NO: 1026500 - RNA, 19 nt, Artificial Sequence
  Description of Artificial Sequence: Synthetic oligonucleotide
aagcuagcuaaauaaccuu

SEQ ID NO: 1026501 - RNA, 19 nt, Artificial Sequence
  Description of Artificial Sequence: Synthetic oligonucleotide
guucaguuagacacuaagc

SEQ ID NO: 1026502 - RNA, 19 nt, Artificial Sequence
  Description of Artificial Sequence: Synthetic oligonucleotide
uaaugcucuuuuacauaag

SEQ ID NO: 1026503 - RNA, 19 nt, Artificial Sequence
  Description of Artificial Sequence: Synthetic oligonucleotide
caggguuauauauauauua

SEQ ID NO: 1026504 - RNA, 19 nt, Artificial Sequence
  Description of Artificial Sequence: Synthetic oligonucleotide
aauucucacugauggcagu

SEQ ID NO: 1026505 - RNA, 19 nt, Artificial Sequence
  Description of Artificial Sequence: Synthetic oligonucleotide
uucaagcuaauuugcguaa

SEQ ID NO: 1026506 - RNA, 19 nt, Artificial Sequence
  Description of Artificial Sequence: Synthetic oligonucleotide
uaugauucacuggugaguu

SEQ ID NO: 1026507 - RNA, 19 nt, Artificial Sequence
  Description of Artificial Sequence: Synthetic oligonucleotide
uaguacguguaacuggcaa

SEQ ID NO: 1026508 - RNA, 19 nt, Artificial Sequence
  Description of Artificial Sequence: Synthetic oligonucleotide
augacucacuagcugaaca

SEQ ID NO: 1026509 - RNA, 19 nt, Artificial Sequence
  Description of Artificial Sequence: Synthetic oligonucleotide
uuacauaagcucgcagugc

SEQ ID NO: 1026510 - RNA, 19 nt, Artificial Sequence
  Description of Artificial Sequence: Synthetic oligonucleotide
gcauauauggcuaagucca

SEQ ID NO: 1026511 - RNA, 19 nt, Artificial Sequence
  Description of Artificial Sequence: Synthetic oligonucleotide
cauguucuguuaucaacac

SEQ ID NO: 1026512 - RNA, 19 nt, Artificial Sequence
  Description of Artificial Sequence: Synthetic oligonucleotide
uugaagguagugucugaca

SEQ ID NO: 1026513 - RNA, 19 nt, Artificial Sequence
  Description of Artificial Sequence: Synthetic oligonucleotide
ugcaccucauuagacacug

SEQ ID NO: 1026514 - RNA, 19 nt, Artificial Sequence
  Description of Artificial Sequence: Synthetic oligonucleotide
uaacgucaaagacacuaaa

SEQ ID NO: 1026515 - RNA, 19 nt, Artificial Sequence
  Description of Artificial Sequence: Synthetic oligonucleotide
augcauuucugaaauaagu

SEQ ID NO: 1026516 - RNA, 19 nt, Artificial Sequence
  Description of Artificial Sequence: Synthetic oligonucleotide
agagugucuguuacugacc

SEQ ID NO: 1026517 - RNA, 19 nt, Artificial Sequence
  Description of Artificial Sequence: Synthetic oligonucleotide
uuguagcuaaggaucuugu

SEQ ID NO: 1026518 - RNA, 19 nt, Artificial Sequence
  Description of Artificial Sequence: Synthetic oligonucleotide
aacgucaaagacacuaaaa

SEQ ID NO: 1026519 - RNA, 19 nt, Artificial Sequence
  Description of Artificial Sequence: Synthetic oligonucleotide
uccaggauucaauagcauu

SEQ ID NO: 1026520 - RNA, 19 nt, Artificial Sequence
  Description of Artificial Sequence: Synthetic oligonucleotide
aucuuaguacguguaacug

SEQ ID NO: 1026521 - RNA, 19 nt, Artificial Sequence
  Description of Artificial Sequence: Synthetic oligonucleotide
aauuugcguaacugucaca

SEQ ID NO: 1026522 - RNA, 19 nt, Artificial Sequence
  Description of Artificial Sequence: Synthetic oligonucleotide
auauauggcuaaguccauc

SEQ ID NO: 1026523 - RNA, 19 nt, Artificial Sequence
  Description of Artificial Sequence: Synthetic oligonucleotide
aguuagacacuaagcuagc

SEQ ID NO: 1026524 - RNA, 19 nt, Artificial Sequence
  Description of Artificial Sequence: Synthetic oligonucleotide
uuugcguaacugucacaag

SEQ ID NO: 1026525 - RNA, 19 nt, Artificial Sequence
  Description of Artificial Sequence: Synthetic oligonucleotide
uuagagugucuguuacuga

SEQ ID NO: 1026526 - RNA, 19 nt, Artificial Sequence
  Description of Artificial Sequence: Synthetic oligonucleotide
cauuagaugcauuucugaa

SEQ ID NO: 1026527 - RNA, 19 nt, Artificial Sequence
  Description of Artificial Sequence: Synthetic oligonucleotide
gcuguuugcaccucauuag

SEQ ID NO: 1026528 - RNA, 19 nt, Artificial Sequence
  Description of Artificial Sequence: Synthetic oligonucleotide
ggaauucaagcuaauuugc

SEQ ID NO: 1026529 - RNA, 19 nt, Artificial Sequence
  Description of Artificial Sequence: Synthetic oligonucleotide
ucgucugauaauucucacu

SEQ ID NO: 1026530 - RNA, 19 nt, Artificial Sequence
  Description of Artificial Sequence: Synthetic oligonucleotide
acaaugaaauucaguuuuc

SEQ ID NO: 1026531 - RNA, 19 nt, Artificial Sequence
  Description of Artificial Sequence: Synthetic oligonucleotide
aggagugacuguaaacuuc

SEQ ID NO: 1026532 - RNA, 19 nt, Artificial Sequence
  Description of Artificial Sequence: Synthetic oligonucleotide
ccucauuagacacugugag

SEQ ID NO: 1026533 - RNA, 19 nt, Artificial Sequence
  Description of Artificial Sequence: Synthetic oligonucleotide
aucaacugaggugugguca

SEQ ID NO: 1026534 - RNA, 19 nt, Artificial Sequence
  Description of Artificial Sequence: Synthetic oligonucleotide
ucgaucuuaguacguguaa

SEQ ID NO: 1026535 - RNA, 19 nt, Artificial Sequence
  Description of Artificial Sequence: Synthetic oligonucleotide
uggucaugcaauuuucauu

SEQ ID NO: 1026536 - RNA, 19 nt, Artificial Sequence
  Description of Artificial Sequence: Synthetic oligonucleotide
gugacuguaaacuuccacu

SEQ ID NO: 1026537 - RNA, 19 nt, Artificial Sequence
  Description of Artificial Sequence: Synthetic oligonucleotide
aaacaugcuuaugaugcau

SEQ ID NO: 1026538 - RNA, 19 nt, Artificial Sequence
  Description of Artificial Sequence: Synthetic oligonucleotide
gaucuuaguacguguaacu

SEQ ID NO: 1026539 - RNA, 19 nt, Artificial Sequence
  Description of Artificial Sequence: Synthetic oligonucleotide
gcaacugucgacguaaggc

SEQ ID NO: 1026540 - RNA, 19 nt, Artificial Sequence
  Description of Artificial Sequence: Synthetic oligonucleotide
cagaggaauaccucuucac

SEQ ID NO: 1026541 - RNA, 19 nt, Artificial Sequence
  Description of Artificial Sequence: Synthetic oligonucleotide
ugcuuaugaugcauaggaa

SEQ ID NO: 1026542 - RNA, 19 nt, Artificial Sequence
  Description of Artificial Sequence: Synthetic oligonucleotide
gauaacccagaggaauacc

SEQ ID NO: 1026543 - RNA, 19 nt, Artificial Sequence
  Description of Artificial Sequence: Synthetic oligonucleotide
cugccuuauaauacacuug

SEQ ID NO: 1026544 - RNA, 19 nt, Artificial Sequence
  Description of Artificial Sequence: Synthetic oligonucleotide
caugcuuaugaugcauagg

SEQ ID NO: 1026545 - RNA, 19 nt, Artificial Sequence
  Description of Artificial Sequence: Synthetic oligonucleotide
guguaugauucacugguga

SEQ ID NO: 1026546 - RNA, 19 nt, Artificial Sequence
  Description of Artificial Sequence: Synthetic oligonucleotide
agucgaucuuaguacgugu

SEQ ID NO: 1026547 - RNA, 19 nt, Artificial Sequence
  Description of Artificial Sequence: Synthetic oligonucleotide
acuauacaaagaaaguauu

SEQ ID NO: 1026548 - RNA, 19 nt, Artificial Sequence
  Description of Artificial Sequence: Synthetic oligonucleotide
ugugguggaaggagugacu

SEQ ID NO: 1026549 - RNA, 19 nt, Artificial Sequence
  Description of Artificial Sequence: Synthetic oligonucleotide
gacaucgucugauaauucu

SEQ ID NO: 1026550 - RNA, 19 nt, Artificial Sequence
  Description of Artificial Sequence: Synthetic oligonucleotide
aagauaacccagaggaaua

SEQ ID NO: 1026551 - RNA, 19 nt, Artificial Sequence
  Description of Artificial Sequence: Synthetic oligonucleotide
auacacuuguggcuuucug

SEQ ID NO: 1026552 - RNA, 19 nt, Artificial Sequence
  Description of Artificial Sequence: Synthetic oligonucleotide
accgugcagaccccguucg

SEQ ID NO: 1026553 - RNA, 19 nt, Artificial Sequence
  Description of Artificial Sequence: Synthetic oligonucleotide
uuaguacguguaacuggca

SEQ ID NO: 1026554 - RNA, 19 nt, Artificial Sequence
  Description of Artificial Sequence: Synthetic oligonucleotide
gaagguagugucugacauc

SEQ ID NO: 1026555 - RNA, 19 nt, Artificial Sequence
  Description of Artificial Sequence: Synthetic oligonucleotide
cuuucuaugcaugcaauaa

SEQ ID NO: 1026556 - RNA, 19 nt, Artificial Sequence
  Description of Artificial Sequence: Synthetic oligonucleotide
uuccuguggcgucaguaga

SEQ ID NO: 1026557 - RNA, 19 nt, Artificial Sequence
  Description of Artificial Sequence: Synthetic oligonucleotide
caucgucugauaauucuca

SEQ ID NO: 1026558 - RNA, 19 nt, Artificial Sequence
  Description of Artificial Sequence: Synthetic oligonucleotide
uuugcuguuugcaccucau

SEQ ID NO: 1026559 - RNA, 19 nt, Artificial Sequence
  Description of Artificial Sequence: Synthetic oligonucleotide
ccaucaaccaccuuaauua

SEQ ID NO: 1026560 - RNA, 19 nt, Artificial Sequence
  Description of Artificial Sequence: Synthetic oligonucleotide
cuucacuguaaggaaggag

SEQ ID NO: 1026561 - RNA, 19 nt, Artificial Sequence
  Description of Artificial Sequence: Synthetic oligonucleotide
ucaauagcauucucugcuu

SEQ ID NO: 1026562 - RNA, 19 nt, Artificial Sequence
  Description of Artificial Sequence: Synthetic oligonucleotide
uguggcgucaguagauaua

SEQ ID NO: 1026563 - RNA, 19 nt, Artificial Sequence
  Description of Artificial Sequence: Synthetic oligonucleotide
ucaacaccugaucuucaua

SEQ ID NO: 1026564 - RNA, 19 nt, Artificial Sequence
  Description of Artificial Sequence: Synthetic oligonucleotide
ggagugacuguaaacuucc

SEQ ID NO: 1026565 - RNA, 19 nt, Artificial Sequence
  Description of Artificial Sequence: Synthetic oligonucleotide
uggcuaaguccaucaacca

SEQ ID NO: 1026566 - RNA, 19 nt, Artificial Sequence
  Description of Artificial Sequence: Synthetic oligonucleotide
accccguucggauaaugcu

SEQ ID NO: 1026567 - RNA, 19 nt, Artificial Sequence
  Description of Artificial Sequence: Synthetic oligonucleotide
accaccuuaauuagagugu

SEQ ID NO: 1026568 - RNA, 19 nt, Artificial Sequence
  Description of Artificial Sequence: Synthetic oligonucleotide
ucucugcuucguauggccu

SEQ ID NO: 1026569 - RNA, 19 nt, Artificial Sequence
  Description of Artificial Sequence: Synthetic oligonucleotide
ucaagcuaauuugcguaac

SEQ ID NO: 1026570 - RNA, 19 nt, Artificial Sequence
  Description of Artificial Sequence: Synthetic oligonucleotide
ccucuaaucucaaucuuac

SEQ ID NO: 1026571 - RNA, 19 nt, Artificial Sequence
  Description of Artificial Sequence: Synthetic oligonucleotide
uguagcuaaggaucuuguu

SEQ ID NO: 1026572 - RNA, 19 nt, Artificial Sequence
  Description of Artificial Sequence: Synthetic oligonucleotide
acaaaagaugcaguugcau

SEQ ID NO: 1026573 - RNA, 19 nt, Artificial Sequence
  Description of Artificial Sequence: Synthetic oligonucleotide
ugacaucgucugauaauuc

SEQ ID NO: 1026574 - RNA, 19 nt, Artificial Sequence
  Description of Artificial Sequence: Synthetic oligonucleotide
augaguucaggguuauaua

SEQ ID NO: 1026575 - RNA, 19 nt, Artificial Sequence
  Description of Artificial Sequence: Synthetic oligonucleotide
augcaugcaauaaugguuu

SEQ ID NO: 1026576 - RNA, 19 nt, Artificial Sequence
  Description of Artificial Sequence: Synthetic oligonucleotide
auuagacacugugagggaa

SEQ ID NO: 1026577 - RNA, 19 nt, Artificial Sequence
  Description of Artificial Sequence: Synthetic oligonucleotide
gguagugucugacaucguc

SEQ ID NO: 1026578 - RNA, 19 nt, Artificial Sequence
  Description of Artificial Sequence: Synthetic oligonucleotide
gugucuguuacugacccca

SEQ ID NO: 1026579 - RNA, 19 nt, Artificial Sequence
  Description of Artificial Sequence: Synthetic oligonucleotide
guuacugaccccacuaaaa

SEQ ID NO: 1026580 - RNA, 19 nt, Artificial Sequence
  Description of Artificial Sequence: Synthetic oligonucleotide
guauaucuuuaugacucac

SEQ ID NO: 1026581 - RNA, 19 nt, Artificial Sequence
  Description of Artificial Sequence: Synthetic oligonucleotide
cuaugcaugcaauaauggu

SEQ ID NO: 1026582 - RNA, 19 nt, Artificial Sequence
  Description of Artificial Sequence: Synthetic oligonucleotide
caauagcauucucugcuuc

SEQ ID NO: 1026583 - RNA, 19 nt, Artificial Sequence
  Description of Artificial Sequence: Synthetic oligonucleotide
ucugcuucguauggccuug

SEQ ID NO: 1026584 - RNA, 19 nt, Artificial Sequence
  Description of Artificial Sequence: Synthetic oligonucleotide
uccuguggcgucaguagau

SEQ ID NO: 1026585 - RNA, 19 nt, Artificial Sequence
  Description of Artificial Sequence: Synthetic oligonucleotide
uucuggcgacaaacugugg

SEQ ID NO: 1026586 - RNA, 19 nt, Artificial Sequence
  Description of Artificial Sequence: Synthetic oligonucleotide
aacaugcuuaugaugcaua

SEQ ID NO: 1026587 - RNA, 19 nt, Artificial Sequence
  Description of Artificial Sequence: Synthetic oligonucleotide
ggucaugcaauuuucauuu

SEQ ID NO: 1026588 - RNA, 19 nt, Artificial Sequence
  Description of Artificial Sequence: Synthetic oligonucleotide
auagcauucucugcuucgu

SEQ ID NO: 1026589 - RNA, 19 nt, Artificial Sequence
  Description of Artificial Sequence: Synthetic oligonucleotide
uuacggguguaaacugguc

SEQ ID NO: 1026590 - RNA, 19 nt, Artificial Sequence
  Description of Artificial Sequence: Synthetic oligonucleotide
uuuuaacgucaaagacacu

SEQ ID NO: 1026591 - RNA, 19 nt, Artificial Sequence
  Description of Artificial Sequence: Synthetic oligonucleotide
aguguaugauucacuggug

SEQ ID NO: 1026592 - RNA, 19 nt, Artificial Sequence
  Description of Artificial Sequence: Synthetic oligonucleotide
gaaccugaauuuucaagau

SEQ ID NO: 1026593 - RNA, 19 nt, Artificial Sequence
  Description of Artificial Sequence: Synthetic oligonucleotide
uucggauaaugcucuuuua

SEQ ID NO: 1026594 - RNA, 19 nt, Artificial Sequence
  Description of Artificial Sequence: Synthetic oligonucleotide
gacguaaggcuuugaaggu

SEQ ID NO: 1026595 - RNA, 19 nt, Artificial Sequence
  Description of Artificial Sequence: Synthetic oligonucleotide
auauggcuaaguccaucaa

SEQ ID NO: 1026596 - RNA, 19 nt, Artificial Sequence
  Description of Artificial Sequence: Synthetic oligonucleotide
ugucuguuacugaccccac

SEQ ID NO: 1026597 - RNA, 19 nt, Artificial Sequence
  Description of Artificial Sequence: Synthetic oligonucleotide
ucccucuaaucucaaucuu

SEQ ID NO: 1026598 - RNA, 19 nt, Artificial Sequence
  Description of Artificial Sequence: Synthetic oligonucleotide
uggcaacugucgacguaag

SEQ ID NO: 1026599 - RNA, 19 nt, Artificial Sequence
  Description of Artificial Sequence: Synthetic oligonucleotide
cauacaccgugcagacccc

SEQ ID NO: 1026600 - RNA, 19 nt, Artificial Sequence
  Description of Artificial Sequence: Synthetic oligonucleotide
gaccccguucggauaaugc

SEQ ID NO: 1026601 - RNA, 19 nt, Artificial Sequence
  Description of Artificial Sequence: Synthetic oligonucleotide
gucugauaauucucacuga

SEQ ID NO: 1026602 - RNA, 19 nt, Artificial Sequence
  Description of Artificial Sequence: Synthetic oligonucleotide
gacuguaaacuuccacucu

SEQ ID NO: 1026603 - RNA, 19 nt, Artificial Sequence
  Description of Artificial Sequence: Synthetic oligonucleotide
auaccauguggacucccaa

SEQ ID NO: 1026604 - RNA, 19 nt, Artificial Sequence
  Description of Artificial Sequence: Synthetic oligonucleotide
cuuaauuagagugucuguu

SEQ ID NO: 1026605 - RNA, 19 nt, Artificial Sequence
  Description of Artificial Sequence: Synthetic oligonucleotide
caaugaagguuucaacaua

SEQ ID NO: 1026606 - RNA, 19 nt, Artificial Sequence
  Description of Artificial Sequence: Synthetic oligonucleotide
gggacauauggaauucaag

SEQ ID NO: 1026607 - RNA, 19 nt, Artificial Sequence
  Description of Artificial Sequence: Synthetic oligonucleotide
cagucgaucuuaguacgug

SEQ ID NO: 1026608 - RNA, 19 nt, Artificial Sequence
  Description of Artificial Sequence: Synthetic oligonucleotide
agcuagcuaaauaaccuua

SEQ ID NO: 1026609 - RNA, 19 nt, Artificial Sequence
  Description of Artificial Sequence: Synthetic oligonucleotide
caagauaacccagaggaau

SEQ ID NO: 1026610 - RNA, 19 nt, Artificial Sequence
  Description of Artificial Sequence: Synthetic oligonucleotide
caacugucgacguaaggcu

SEQ ID NO: 1026611 - RNA, 19 nt, Artificial Sequence
  Description of Artificial Sequence: Synthetic oligonucleotide
cauuagacacugugaggga

SEQ ID NO: 1026612 - RNA, 19 nt, Artificial Sequence
  Description of Artificial Sequence: Synthetic oligonucleotide
gucgacguaaggcuuugaa

SEQ ID NO: 1026613 - RNA, 19 nt, Artificial Sequence
  Description of Artificial Sequence: Synthetic oligonucleotide
gcaauaaucgaacaucauu

SEQ ID NO: 1026614 - RNA, 19 nt, Artificial Sequence
  Description of Artificial Sequence: Synthetic oligonucleotide
gcuagcuaaauaaccuuac

SEQ ID NO: 1026615 - RNA, 19 nt, Artificial Sequence
  Description of Artificial Sequence: Synthetic oligonucleotide
ggcaacugucgacguaagg

SEQ ID NO: 1026616 - RNA, 19 nt, Artificial Sequence
  Description of Artificial Sequence: Synthetic oligonucleotide
auacaccgugcagaccccg

SEQ ID NO: 1026617 - RNA, 19 nt, Artificial Sequence
  Description of Artificial Sequence: Synthetic oligonucleotide
cucuaaucucaaucuuaca

SEQ ID NO: 1026618 - RNA, 19 nt, Artificial Sequence
  Description of Artificial Sequence: Synthetic oligonucleotide
guaugauucacuggugagu

SEQ ID NO: 1026619 - RNA, 19 nt, Artificial Sequence
  Description of Artificial Sequence: Synthetic oligonucleotide
ugcuucguauggccuugga

SEQ ID NO: 1026620 - RNA, 19 nt, Artificial Sequence
  Description of Artificial Sequence: Synthetic oligonucleotide
gaguucaggguuauauaua

SEQ ID NO: 1026621 - RNA, 19 nt, Artificial Sequence
  Description of Artificial Sequence: Synthetic oligonucleotide
aacugucgacguaaggcuu

SEQ ID NO: 1026622 - RNA, 19 nt, Artificial Sequence
  Description of Artificial Sequence: Synthetic oligonucleotide
cauguggacucccaaauuu

SEQ ID NO: 1026623 - RNA, 19 nt, Artificial Sequence
  Description of Artificial Sequence: Synthetic oligonucleotide
gacacuaagcuagcuaaau

SEQ ID NO: 1026624 - RNA, 19 nt, Artificial Sequence
  Description of Artificial Sequence: Synthetic oligonucleotide
guucggauaaugcucuuuu

SEQ ID NO: 1026625 - RNA, 19 nt, Artificial Sequence
  Description of Artificial Sequence: Synthetic oligonucleotide
guagugucugacaucgucu

SEQ ID NO: 1026626 - RNA, 19 nt, Artificial Sequence
  Description of Artificial Sequence: Synthetic oligonucleotide
agggacauauggaauucaa

SEQ ID NO: 1026627 - RNA, 19 nt, Artificial Sequence
  Description of Artificial Sequence: Synthetic oligonucleotide
ggauucaauagcauucucu

SEQ ID NO: 1026628 - RNA, 19 nt, Artificial Sequence
  Description of Artificial Sequence: Synthetic oligonucleotide
uuucagggugcuggcaaau

SEQ ID NO: 1026629 - RNA, 19 nt, Artificial Sequence
  Description of Artificial Sequence: Synthetic oligonucleotide
cugcuauacguaccuucuc

SEQ ID NO: 1026630 - RNA, 19 nt, Artificial Sequence
  Description of Artificial Sequence: Synthetic oligonucleotide
ucguauggccuuggaucag

SEQ ID NO: 1026631 - RNA, 19 nt, Artificial Sequence
  Description of Artificial Sequence: Synthetic oligonucleotide
agcaauaaucgaacaucau

SEQ ID NO: 1026632 - RNA, 19 nt, Artificial Sequence
  Description of Artificial Sequence: Synthetic oligonucleotide
guauuacaaacaugcuuau

SEQ ID NO: 1026633 - RNA, 19 nt, Artificial Sequence
  Description of Artificial Sequence: Synthetic oligonucleotide
ggcgucaguagauauauuu

SEQ ID NO: 1026634 - RNA, 19 nt, Artificial Sequence
  Description of Artificial Sequence: Synthetic oligonucleotide
ugcauaccauguggacucc

SEQ ID NO: 1026635 - RNA, 19 nt, Artificial Sequence
  Description of Artificial Sequence: Synthetic oligonucleotide
gguuucaacauaacuggua

SEQ ID NO: 1026636 - RNA, 19 nt, Artificial Sequence
  Description of Artificial Sequence: Synthetic oligonucleotide
cucagggacauauggaauu

SEQ ID NO: 1026637 - RNA, 19 nt, Artificial Sequence
  Description of Artificial Sequence: Synthetic oligonucleotide
accuuacaaugaagguuuc

SEQ ID NO: 1026638 - RNA, 19 nt, Artificial Sequence
  Description of Artificial Sequence: Synthetic oligonucleotide
auaacugggcuaacaucaa

SEQ ID NO: 1026639 - RNA, 19 nt, Artificial Sequence
  Description of Artificial Sequence: Synthetic oligonucleotide
caagcuaauuugcguaacu

SEQ ID NO: 1026640 - RNA, 19 nt, Artificial Sequence
  Description of Artificial Sequence: Synthetic oligonucleotide
ugcagaccccguucggaua

SEQ ID NO: 1026641 - RNA, 19 nt, Artificial Sequence
  Description of Artificial Sequence: Synthetic oligonucleotide
guguaaacugguccaaguu

SEQ ID NO: 1026642 - RNA, 19 nt, Artificial Sequence
  Description of Artificial Sequence: Synthetic oligonucleotide
auauuacaaucugccuuau

SEQ ID NO: 1026643 - RNA, 19 nt, Artificial Sequence
  Description of Artificial Sequence: Synthetic oligonucleotide
cuguuacugaccccacuaa

SEQ ID NO: 1026644 - RNA, 19 nt, Artificial Sequence
  Description of Artificial Sequence: Synthetic oligonucleotide
aaguucaguuagacacuaa

SEQ ID NO: 1026645 - RNA, 19 nt, Artificial Sequence
  Description of Artificial Sequence: Synthetic oligonucleotide
cucccaaauuuucuaauuu

SEQ ID NO: 1026646 - RNA, 19 nt, Artificial Sequence
  Description of Artificial Sequence: Synthetic oligonucleotide
acguaaggcuuugaaggua

SEQ ID NO: 1026647 - RNA, 19 nt, Artificial Sequence
  Description of Artificial Sequence: Synthetic oligonucleotide
cugugagggaaucuuguau

SEQ ID NO: 1026648 - RNA, 19 nt, Artificial Sequence
  Description of Artificial Sequence: Synthetic oligonucleotide
agacacuaagcuagcuaaa

SEQ ID NO: 1026649 - RNA, 19 nt, Artificial Sequence
  Description of Artificial Sequence: Synthetic oligonucleotide
cggauaaugcucuuuuaca

SEQ ID NO: 1026650 - RNA, 19 nt, Artificial Sequence
  Description of Artificial Sequence: Synthetic oligonucleotide
guggcgucaguagauauau

SEQ ID NO: 1026651 - RNA, 19 nt, Artificial Sequence
  Description of Artificial Sequence: Synthetic oligonucleotide
agaugcaguugcauaccau

SEQ ID NO: 1026652 - RNA, 19 nt, Artificial Sequence
  Description of Artificial Sequence: Synthetic oligonucleotide
caccgugcagaccccguuc

SEQ ID NO: 1026653 - RNA, 19 nt, Artificial Sequence
  Description of Artificial Sequence: Synthetic oligonucleotide
cugacaucgucugauaauu

SEQ ID NO: 1026654 - RNA, 19 nt, Artificial Sequence
  Description of Artificial Sequence: Synthetic oligonucleotide
gucgaucuuaguacgugua

SEQ ID NO: 1026655 - RNA, 19 nt, Artificial Sequence
  Description of Artificial Sequence: Synthetic oligonucleotide
ccccguucggauaaugcuc

SEQ ID NO: 1026656 - RNA, 19 nt, Artificial Sequence
  Description of Artificial Sequence: Synthetic oligonucleotide
ccaccuuaauuagaguguc

SEQ ID NO: 1026657 - RNA, 19 nt, Artificial Sequence
  Description of Artificial Sequence: Synthetic oligonucleotide
agggaaucuuguauaucuu

SEQ ID NO: 1026658 - RNA, 19 nt, Artificial Sequence
  Description of Artificial Sequence: Synthetic oligonucleotide
guuagacacuaagcuagcu

SEQ ID NO: 1026659 - RNA, 19 nt, Artificial Sequence
  Description of Artificial Sequence: Synthetic oligonucleotide
cugucgacguaaggcuuug

SEQ ID NO: 1026660 - RNA, 19 nt, Artificial Sequence
  Description of Artificial Sequence: Synthetic oligonucleotide
cgaucuuaguacguguaac

SEQ ID NO: 1026661 - RNA, 19 nt, Artificial Sequence
  Description of Artificial Sequence: Synthetic oligonucleotide
caggauucaauagcauucu

SEQ ID NO: 1026662 - RNA, 19 nt, Artificial Sequence
  Description of Artificial Sequence: Synthetic oligonucleotide
acaccgugcagaccccguu

SEQ ID NO: 1026663 - RNA, 19 nt, Artificial Sequence
  Description of Artificial Sequence: Synthetic oligonucleotide
gucaugcaauuuucauuua

SEQ ID NO: 1026664 - RNA, 19 nt, Artificial Sequence
  Description of Artificial Sequence: Synthetic oligonucleotide
aacagaccuuggccuuguu

SEQ ID NO: 1026665 - RNA, 19 nt, Artificial Sequence
  Description of Artificial Sequence: Synthetic oligonucleotide
agaccccguucggauaaug

SEQ ID NO: 1026666 - RNA, 19 nt, Artificial Sequence
  Description of Artificial Sequence: Synthetic oligonucleotide
ggaauaccucuucacugua

SEQ ID NO: 1026667 - RNA, 19 nt, Artificial Sequence
  Description of Artificial Sequence: Synthetic oligonucleotide
ugucgacguaaggcuuuga

SEQ ID NO: 1026668 - RNA, 19 nt, Artificial Sequence
  Description of Artificial Sequence: Synthetic oligonucleotide
cgucaguagauauauuuua

SEQ ID NO: 1026669 - RNA, 19 nt, Artificial Sequence
  Description of Artificial Sequence: Synthetic oligonucleotide
gcagaccccguucggauaa

SEQ ID NO: 1026670 - RNA, 19 nt, Artificial Sequence
  Description of Artificial Sequence: Synthetic oligonucleotide
cugcuucguauggccuugg

SEQ ID NO: 1026671 - RNA, 19 nt, Artificial Sequence
  Description of Artificial Sequence: Synthetic oligonucleotide
gacucacuagcugaacauu

SEQ ID NO: 1026672 - RNA, 19 nt, Artificial Sequence
  Description of Artificial Sequence: Synthetic oligonucleotide
uggcgucaguagauauauu

SEQ ID NO: 1026673 - RNA, 19 nt, Artificial Sequence
  Description of Artificial Sequence: Synthetic oligonucleotide
gcugcuauacguaccuucu

SEQ ID NO: 1026674 - RNA, 19 nt, Artificial Sequence
  Description of Artificial Sequence: Synthetic oligonucleotide
ccugaucuucauagccuuc

SEQ ID NO: 1026675 - RNA, 19 nt, Artificial Sequence
  Description of Artificial Sequence: Synthetic oligonucleotide
caaccaccuuaauuagagu

SEQ ID NO: 1026676 - RNA, 19 nt, Artificial Sequence
  Description of Artificial Sequence: Synthetic oligonucleotide
caaccaccuguguggugga

SEQ ID NO: 1026677 - RNA, 19 nt, Artificial Sequence
  Description of Artificial Sequence: Synthetic oligonucleotide
gcauaccauguggacuccc

SEQ ID NO: 1026678 - RNA, 19 nt, Artificial Sequence
  Description of Artificial Sequence: Synthetic oligonucleotide
uugcugcuauacguaccuu

SEQ ID NO: 1026679 - RNA, 19 nt, Artificial Sequence
  Description of Artificial Sequence: Synthetic oligonucleotide
gcagcauauauggcuaagu

SEQ ID NO: 1026680 - RNA, 19 nt, Artificial Sequence
  Description of Artificial Sequence: Synthetic oligonucleotide
gcuucguauggccuuggau

SEQ ID NO: 1026681 - RNA, 19 nt, Artificial Sequence
  Description of Artificial Sequence: Synthetic oligonucleotide
cuguggcgucaguagauau

SEQ ID NO: 1026682 - RNA, 19 nt, Artificial Sequence
  Description of Artificial Sequence: Synthetic oligonucleotide
cuccaggauucaauagcau

SEQ ID NO: 1026683 - RNA, 19 nt, Artificial Sequence
  Description of Artificial Sequence: Synthetic oligonucleotide
caucaaaaguugccccuuu

SEQ ID NO: 1026684 - RNA, 19 nt, Artificial Sequence
  Description of Artificial Sequence: Synthetic oligonucleotide
cacugauggcagucuggua

SEQ ID NO: 1026685 - RNA, 19 nt, Artificial Sequence
  Description of Artificial Sequence: Synthetic oligonucleotide
cccguucggauaaugcucu

SEQ ID NO: 1026686 - RNA, 19 nt, Artificial Sequence
  Description of Artificial Sequence: Synthetic oligonucleotide
agguagugucugacaucgu

SEQ ID NO: 1026687 - RNA, 19 nt, Artificial Sequence
  Description of Artificial Sequence: Synthetic oligonucleotide
caccugugugguggaagga

SEQ ID NO: 1026688 - RNA, 19 nt, Artificial Sequence
  Description of Artificial Sequence: Synthetic oligonucleotide
gccauacaccgugcagacc

SEQ ID NO: 1026689 - RNA, 19 nt, Artificial Sequence
  Description of Artificial Sequence: Synthetic oligonucleotide
ccgugcagaccccguucgg

SEQ ID NO: 1026690 - RNA, 19 nt, Artificial Sequence
  Description of Artificial Sequence: Synthetic oligonucleotide
gggcaugaaugaugaauuu

SEQ ID NO: 1026691 - RNA, 19 nt, Artificial Sequence
  Description of Artificial Sequence: Synthetic oligonucleotide
gcgucaguagauauauuuu

SEQ ID NO: 1026692 - RNA, 19 nt, Artificial Sequence
  Description of Artificial Sequence: Synthetic oligonucleotide
agcucgcagugcagucucu

SEQ ID NO: 1026693 - RNA, 19 nt, Artificial Sequence
  Description of Artificial Sequence: Synthetic oligonucleotide
ccagucgaucuuaguacgu

SEQ ID NO: 1026694 - RNA, 19 nt, Artificial Sequence
  Description of Artificial Sequence: Synthetic oligonucleotide
guauggccuuggaucaguu

SEQ ID NO: 1026695 - RNA, 19 nt, Artificial Sequence
  Description of Artificial Sequence: Synthetic oligonucleotide
caggaggggcaugaaugau

SEQ ID NO: 1026696 - RNA, 19 nt, Artificial Sequence
  Description of Artificial Sequence: Synthetic oligonucleotide
cgugcagaccccguucgga

SEQ ID NO: 1026697 - RNA, 19 nt, Artificial Sequence
  Description of Artificial Sequence: Synthetic oligonucleotide
gcucgcagugcagucucua

SEQ ID NO: 1026698 - RNA, 19 nt, Artificial Sequence
  Description of Artificial Sequence: Synthetic oligonucleotide
cguauggccuuggaucagu

SEQ ID NO: 1026699 - RNA, 19 nt, Artificial Sequence
  Description of Artificial Sequence: Synthetic oligonucleotide
gcaccucauuagacacugu

SEQ ID NO: 1026700 - RNA, 19 nt, Artificial Sequence
  Description of Artificial Sequence: Synthetic oligonucleotide
cguucggauaaugcucuuu

SEQ ID NO: 1026701 - RNA, 19 nt, Artificial Sequence
  Description of Artificial Sequence: Synthetic oligonucleotide
cagaccccguucggauaau

SEQ ID NO: 1026702 - RNA, 19 nt, Artificial Sequence
  Description of Artificial Sequence: Synthetic oligonucleotide
ccguucggauaaugcucuu

SEQ ID NO: 1026703 - RNA, 19 nt, Artificial Sequence
  Description of Artificial Sequence: Synthetic oligonucleotide
aauuaaauguauuggauac

SEQ ID NO: 1026704 - RNA, 19 nt, Artificial Sequence
  Description of Artificial Sequence: Synthetic oligonucleotide
aauuuuaagggaaagaagc

SEQ ID NO: 1026705 - RNA, 19 nt, Artificial Sequence
  Description of Artificial Sequence: Synthetic oligonucleotide
uuaacguacaauaagguag

SEQ ID NO: 1026706 - RNA, 19 nt, Artificial Sequence
  Description of Artificial Sequence: Synthetic oligonucleotide
aaucuuacaagaguaaugc

SEQ ID NO: 1026707 - RNA, 19 nt, Artificial Sequence
  Description of Artificial Sequence: Synthetic oligonucleotide
  modified_base (5)..(5): a, c, u, g, unknown or other
aaaunuuguacaguuaacc

SEQ ID NO: 1026708 - RNA, 19 nt, Artificial Sequence
  Description of Artificial Sequence: Synthetic oligonucleotide
augacuaauauccauaugg

SEQ ID NO: 1026709 - RNA, 19 nt, Artificial Sequence
  Description of Artificial Sequence: Synthetic oligonucleotide
uuuauuaacuaccacacug

SEQ ID NO: 1026710 - RNA, 19 nt, Artificial Sequence
  Description of Artificial Sequence: Synthetic oligonucleotide
ucauguauaaccaaguuac

SEQ ID NO: 1026711 - RNA, 19 nt, Artificial Sequence
  Description of Artificial Sequence: Synthetic oligonucleotide
aaauugauaagauacuaug

SEQ ID NO: 1026712 - RNA, 19 nt, Artificial Sequence
  Description of Artificial Sequence: Synthetic oligonucleotide
uuuguaauucaucacuucg

SEQ ID NO: 1026713 - RNA, 19 nt, Artificial Sequence
  Description of Artificial Sequence: Synthetic oligonucleotide
  modified_base (3)..(3): a, c, u, g, unknown or other
aanaauuagcccuacaaaa

SEQ ID NO: 1026714 - RNA, 19 nt, Artificial Sequence
  Description of Artificial Sequence: Synthetic oligonucleotide
  modified_base (7)..(7): a, c, u, g, unknown or other
uaaaaunuuguacaguuaa

SEQ ID NO: 1026715 - RNA, 19 nt, Artificial Sequence
  Description of Artificial Sequence: Synthetic oligonucleotide
aacaagacauuauuuuggc

SEQ ID NO: 1026716 - RNA, 19 nt, Artificial Sequence
  Description of Artificial Sequence: Synthetic oligonucleotide
gauauuuaagugcagacug

SEQ ID NO: 1026717 - RNA, 19 nt, Artificial Sequence
  Description of Artificial Sequence: Synthetic oligonucleotide
aaaugguugauauuuaagu

SEQ ID NO: 1026718 - RNA, 19 nt, Artificial Sequence
  Description of Artificial Sequence: Synthetic oligonucleotide
aaucuuuugccacagaaca

SEQ ID NO: 1026719 - RNA, 19 nt, Artificial Sequence
  Description of Artificial Sequence: Synthetic oligonucleotide
  modified_base (5)..(5): a, c, u, g, unknown or other
aaaanaauuagcccuacaa

SEQ ID NO: 1026720 - RNA, 19 nt, Artificial Sequence
  Description of Artificial Sequence: Synthetic oligonucleotide
  modified_base (4)..(4): a, c, u, g, unknown or other
aaunuuguacaguuaaccu

SEQ ID NO: 1026721 - RNA, 19 nt, Artificial Sequence
  Description of Artificial Sequence: Synthetic oligonucleotide
cuuuuaacguacaauaagg

SEQ ID NO: 1026722 - RNA, 19 nt, Artificial Sequence
  Description of Artificial Sequence: Synthetic oligonucleotide
augguugauauuuaagugc

SEQ ID NO: 1026723 - RNA, 19 nt, Artificial Sequence
  Description of Artificial Sequence: Synthetic oligonucleotide
aaaacaucgguuauauugc

SEQ ID NO: 1026724 - RNA, 19 nt, Artificial Sequence
  Description of Artificial Sequence: Synthetic oligonucleotide
uggaauaucauacaaagua

SEQ ID NO: 1026725 - RNA, 19 nt, Artificial Sequence
  Description of Artificial Sequence: Synthetic oligonucleotide
aaugaauaaguauuugugu

SEQ ID NO: 1026726 - RNA, 19 nt, Artificial Sequence
  Description of Artificial Sequence: Synthetic oligonucleotide
agaaucaccacugagcugc

SEQ ID NO: 1026727 - RNA, 19 nt, Artificial Sequence
  Description of Artificial Sequence: Synthetic oligonucleotide
uuaacuaccacacuguuau

SEQ ID NO: 1026728 - RNA, 19 nt, Artificial Sequence
  Description of Artificial Sequence: Synthetic oligonucleotide
uaaaccacaaugaauaagu

SEQ ID NO: 1026729 - RNA, 19 nt, Artificial Sequence
  Description of Artificial Sequence: Synthetic oligonucleotide
uguaguuucaaaaucuuac

SEQ ID NO: 1026730 - RNA, 19 nt, Artificial Sequence
  Description of Artificial Sequence: Synthetic oligonucleotide
uaucauaaaagcuucuaag

SEQ ID NO: 1026731 - RNA, 19 nt, Artificial Sequence
  Description of Artificial Sequence: Synthetic oligonucleotide
aaugccucaaccuacacau

SEQ ID NO: 1026732 - RNA, 19 nt, Artificial Sequence
  Description of Artificial Sequence: Synthetic oligonucleotide
  modified_base (4)..(4): a, c, u, g, unknown or other
aaanaauuagcccuacaaa

SEQ ID NO: 1026733 - RNA, 19 nt, Artificial Sequence
  Description of Artificial Sequence: Synthetic oligonucleotide
uaucauacaaaguaaggca

SEQ ID NO: 1026734 - RNA, 19 nt, Artificial Sequence
  Description of Artificial Sequence: Synthetic oligonucleotide
uuaaaucuuaaacauggcu

SEQ ID NO: 1026735 - RNA, 19 nt, Artificial Sequence
  Description of Artificial Sequence: Synthetic oligonucleotide
uuaacaagacauuauuuug

SEQ ID NO: 1026736 - RNA, 19 nt, Artificial Sequence
  Description of Artificial Sequence: Synthetic oligonucleotide
aaagguauuucaguguugg

SEQ ID NO: 1026737 - RNA, 19 nt, Artificial Sequence
  Description of Artificial Sequence: Synthetic oligonucleotide
uuaaacauggcuuuucaac

SEQ ID NO: 1026738 - RNA, 19 nt, Artificial Sequence
  Description of Artificial Sequence: Synthetic oligonucleotide
ucuuaaguguguuagguca

SEQ ID NO: 1026739 - RNA, 19 nt, Artificial Sequence
  Description of Artificial Sequence: Synthetic oligonucleotide
gaugcaauaaaccuuauua

SEQ ID NO: 1026740 - RNA, 19 nt, Artificial Sequence
  Description of Artificial Sequence: Synthetic oligonucleotide
aguuucaaaaucuuacaag

SEQ ID NO: 1026741 - RNA, 19 nt, Artificial Sequence
  Description of Artificial Sequence: Synthetic oligonucleotide
uaguguuuuauuaacuacc

SEQ ID NO: 1026742 - RNA, 19 nt, Artificial Sequence
  Description of Artificial Sequence: Synthetic oligonucleotide
auaagguagccuuuaaauc

SEQ ID NO: 1026743 - RNA, 19 nt, Artificial Sequence
  Description of Artificial Sequence: Synthetic oligonucleotide
ucucaauuaaauguauugg

SEQ ID NO: 1026744 - RNA, 19 nt, Artificial Sequence
  Description of Artificial Sequence: Synthetic oligonucleotide
uguauaaccaaguuacugu

SEQ ID NO: 1026745 - RNA, 19 nt, Artificial Sequence
  Description of Artificial Sequence: Synthetic oligonucleotide
uuuauugguaauuuacaca

SEQ ID NO: 1026746 - RNA, 19 nt, Artificial Sequence
  Description of Artificial Sequence: Synthetic oligonucleotide
auugauaagauacuaugga

SEQ ID NO: 1026747 - RNA, 19 nt, Artificial Sequence
  Description of Artificial Sequence: Synthetic oligonucleotide
auuggauacauauaaauuu

SEQ ID NO: 1026748 - RNA, 19 nt, Artificial Sequence
  Description of Artificial Sequence: Synthetic oligonucleotide
acuuuuaacguacaauaag

SEQ ID NO: 1026749 - RNA, 19 nt, Artificial Sequence
  Description of Artificial Sequence: Synthetic oligonucleotide
  modified_base (2)..(2): a, c, u, g, unknown or other
unuuguacaguuaaccuaa

SEQ ID NO: 1026750 - RNA, 19 nt, Artificial Sequence
  Description of Artificial Sequence: Synthetic oligonucleotide
ucaaaaucuuacaagagua

SEQ ID NO: 1026751 - RNA, 19 nt, Artificial Sequence
  Description of Artificial Sequence: Synthetic oligonucleotide
aaaauucacugcuaagaug

SEQ ID NO: 1026752 - RNA, 19 nt, Artificial Sequence
  Description of Artificial Sequence: Synthetic oligonucleotide
aaacaucgguuauauugcc

SEQ ID NO: 1026753 - RNA, 19 nt, Artificial Sequence
  Description of Artificial Sequence: Synthetic oligonucleotide
ugaauauuugcaaggauaa

SEQ ID NO: 1026754 - RNA, 19 nt, Artificial Sequence
  Description of Artificial Sequence: Synthetic oligonucleotide
aacaauauucuucucacua

SEQ ID NO: 1026755 - RNA, 19 nt, Artificial Sequence
  Description of Artificial Sequence: Synthetic oligonucleotide
aauauguuuggcaagguga

SEQ ID NO: 1026756 - RNA, 19 nt, Artificial Sequence
  Description of Artificial Sequence: Synthetic oligonucleotide
uuacaguugggacaggugc

SEQ ID NO: 1026757 - RNA, 19 nt, Artificial Sequence
  Description of Artificial Sequence: Synthetic oligonucleotide
uggaguaucgucacugugg

SEQ ID NO: 1026758 - RNA, 19 nt, Artificial Sequence
  Description of Artificial Sequence: Synthetic oligonucleotide
ugauucuaauaucugcagg

SEQ ID NO: 1026759 - RNA, 19 nt, Artificial Sequence
  Description of Artificial Sequence: Synthetic oligonucleotide
acuaauauccauaugguug

SEQ ID NO: 1026760 - RNA, 19 nt, Artificial Sequence
  Description of Artificial Sequence: Synthetic oligonucleotide
auugguaauuuacacaaug

SEQ ID NO: 1026761 - RNA, 19 nt, Artificial Sequence
  Description of Artificial Sequence: Synthetic oligonucleotide
auaucuaagaacuuaggaa

SEQ ID NO: 1026762 - RNA, 19 nt, Artificial Sequence
  Description of Artificial Sequence: Synthetic oligonucleotide
aaagggguaauucacuaga

SEQ ID NO: 1026763 - RNA, 19 nt, Artificial Sequence
  Description of Artificial Sequence: Synthetic oligonucleotide
auacuauggaauaucauac

SEQ ID NO: 1026764 - RNA, 19 nt, Artificial Sequence
  Description of Artificial Sequence: Synthetic oligonucleotide
ucuggaaacaagauuagau

SEQ ID NO: 1026765 - RNA, 19 nt, Artificial Sequence
  Description of Artificial Sequence: Synthetic oligonucleotide
gaacuuaggaacaauauuc

SEQ ID NO: 1026766 - RNA, 19 nt, Artificial Sequence
  Description of Artificial Sequence: Synthetic oligonucleotide
aaggugacuaucccuaaag

SEQ ID NO: 1026767 - RNA, 19 nt, Artificial Sequence
  Description of Artificial Sequence: Synthetic oligonucleotide
uaauacacuuuuaacguac

SEQ ID NO: 1026768 - RNA, 19 nt, Artificial Sequence
  Description of Artificial Sequence: Synthetic oligonucleotide
gauaucuaagaacuuagga

SEQ ID NO: 1026769 - RNA, 19 nt, Artificial Sequence
  Description of Artificial Sequence: Synthetic oligonucleotide
gauucuaauaucugcagga

SEQ ID NO: 1026770 - RNA, 19 nt, Artificial Sequence
  Description of Artificial Sequence: Synthetic oligonucleotide
uuuguguaauauuuacucc

SEQ ID NO: 1026771 - RNA, 19 nt, Artificial Sequence
  Description of Artificial Sequence: Synthetic oligonucleotide
aguaaggcauuucaguguc

SEQ ID NO: 1026772 - RNA, 19 nt, Artificial Sequence
  Description of Artificial Sequence: Synthetic oligonucleotide
aucauaaaagcuucuaagu

SEQ ID NO: 1026773 - RNA, 19 nt, Artificial Sequence
  Description of Artificial Sequence: Synthetic oligonucleotide
gauacuauggaauaucaua

SEQ ID NO: 1026774 - RNA, 19 nt, Artificial Sequence
  Description of Artificial Sequence: Synthetic oligonucleotide
uuuuaacguacaauaaggu

SEQ ID NO: 1026775 - RNA, 19 nt, Artificial Sequence
  Description of Artificial Sequence: Synthetic oligonucleotide
  modified_base (6)..(6): a, c, u, g, unknown or other
aaaaunuuguacaguuaac

SEQ ID NO: 1026776 - RNA, 19 nt, Artificial Sequence
  Description of Artificial Sequence: Synthetic oligonucleotide
ucaauuaaauguauuggau

SEQ ID NO: 1026777 - RNA, 19 nt, Artificial Sequence
  Description of Artificial Sequence: Synthetic oligonucleotide
agaaugccaacguagauga

SEQ ID NO: 1026778 - RNA, 19 nt, Artificial Sequence
  Description of Artificial Sequence: Synthetic oligonucleotide
accaaguuacugucaaucc

SEQ ID NO: 1026779 - RNA, 19 nt, Artificial Sequence
  Description of Artificial Sequence: Synthetic oligonucleotide
ugcuaagaugcaauaaacc

SEQ ID NO: 1026780 - RNA, 19 nt, Artificial Sequence
  Description of Artificial Sequence: Synthetic oligonucleotide
aaaagggguaauucacuag

SEQ ID NO: 1026781 - RNA, 19 nt, Artificial Sequence
  Description of Artificial Sequence: Synthetic oligonucleotide
uuauuaacuaccacacugu

SEQ ID NO: 1026782 - RNA, 19 nt, Artificial Sequence
  Description of Artificial Sequence: Synthetic oligonucleotide
uuauguuugcauauguuau

SEQ ID NO: 1026783 - RNA, 19 nt, Artificial Sequence
  Description of Artificial Sequence: Synthetic oligonucleotide
  modified_base (12)..(12): a, c, u, g, unknown or other
augcuuaaaaunuuguaca

SEQ ID NO: 1026784 - RNA, 19 nt, Artificial Sequence
  Description of Artificial Sequence: Synthetic oligonucleotide
ucaucuaccacuuguacuc

SEQ ID NO: 1026785 - RNA, 19 nt, Artificial Sequence
  Description of Artificial Sequence: Synthetic oligonucleotide
auguauuggauacauauaa

SEQ ID NO: 1026786 - RNA, 19 nt, Artificial Sequence
  Description of Artificial Sequence: Synthetic oligonucleotide
aaccuacacauuuuaaacu

SEQ ID NO: 1026787 - RNA, 19 nt, Artificial Sequence
  Description of Artificial Sequence: Synthetic oligonucleotide
ugguugauauuuaagugca

SEQ ID NO: 1026788 - RNA, 19 nt, Artificial Sequence
  Description of Artificial Sequence: Synthetic oligonucleotide
aguaucgucacuguggaag

SEQ ID NO: 1026789 - RNA, 19 nt, Artificial Sequence
  Description of Artificial Sequence: Synthetic oligonucleotide
ucuuacaagaguaaugcuu

SEQ ID NO: 1026790 - RNA, 19 nt, Artificial Sequence
  Description of Artificial Sequence: Synthetic oligonucleotide
aagauaucuaagaacuuag

SEQ ID NO: 1026791 - RNA, 19 nt, Artificial Sequence
  Description of Artificial Sequence: Synthetic oligonucleotide
uaaucaagguaucaucucu

SEQ ID NO: 1026792 - RNA, 19 nt, Artificial Sequence
  Description of Artificial Sequence: Synthetic oligonucleotide
caagguaucaucucucccc

SEQ ID NO: 1026793 - RNA, 19 nt, Artificial Sequence
  Description of Artificial Sequence: Synthetic oligonucleotide
agacugacuaucuagacaa

SEQ ID NO: 1026794 - RNA, 19 nt, Artificial Sequence
  Description of Artificial Sequence: Synthetic oligonucleotide
ugguauucaguguagaauc

SEQ ID NO: 1026795 - RNA, 19 nt, Artificial Sequence
  Description of Artificial Sequence: Synthetic oligonucleotide
  modified_base (11)..(11): a, c, u, g, unknown or other
ugcuuaaaaunuuguacag

SEQ ID NO: 1026796 - RNA, 19 nt, Artificial Sequence
  Description of Artificial Sequence: Synthetic oligonucleotide
  modified_base (18)..(18): a, c, u, g, unknown or other
aguuaaccuaauuaaaana

SEQ ID NO: 1026797 - RNA, 19 nt, Artificial Sequence
  Description of Artificial Sequence: Synthetic oligonucleotide
uauuggauacauauaaauu

SEQ ID NO: 1026798 - RNA, 19 nt, Artificial Sequence
  Description of Artificial Sequence: Synthetic oligonucleotide
  modified_base (16)..(16): a, c, u, g, unknown or other
aguaaugcuuaaaaunuug

SEQ ID NO: 1026799 - RNA, 19 nt, Artificial Sequence
  Description of Artificial Sequence: Synthetic oligonucleotide
uaauauguuuggcaaggug

SEQ ID NO: 1026800 - RNA, 19 nt, Artificial Sequence
  Description of Artificial Sequence: Synthetic oligonucleotide
aauauuaacaagacauuau

SEQ ID NO: 1026801 - RNA, 19 nt, Artificial Sequence
  Description of Artificial Sequence: Synthetic oligonucleotide
cacuagaacauuuucuuac

SEQ ID NO: 1026802 - RNA, 19 nt, Artificial Sequence
  Description of Artificial Sequence: Synthetic oligonucleotide
caaggauaaguguuguucc

SEQ ID NO: 1026803 - RNA, 19 nt, Artificial Sequence
  Description of Artificial Sequence: Synthetic oligonucleotide
ucuaugacuaauauccaua

SEQ ID NO: 1026804 - RNA, 19 nt, Artificial Sequence
  Description of Artificial Sequence: Synthetic oligonucleotide
ucaaccuacacauuuuaaa

SEQ ID NO: 1026805 - RNA, 19 nt, Artificial Sequence
  Description of Artificial Sequence: Synthetic oligonucleotide
ugaauaaguauuuguguaa

SEQ ID NO: 1026806 - RNA, 19 nt, Artificial Sequence
  Description of Artificial Sequence: Synthetic oligonucleotide
caaccuacacauuuuaaac

SEQ ID NO: 1026807 - RNA, 19 nt, Artificial Sequence
  Description of Artificial Sequence: Synthetic oligonucleotide
uuuaacguacaauaaggua

SEQ ID NO: 1026808 - RNA, 19 nt, Artificial Sequence
  Description of Artificial Sequence: Synthetic oligonucleotide
accacuuguacucuuaagu

SEQ ID NO: 1026809 - RNA, 19 nt, Artificial Sequence
  Description of Artificial Sequence: Synthetic oligonucleotide
uaaguguuguuccuccugc

SEQ ID NO: 1026810 - RNA, 19 nt, Artificial Sequence
  Description of Artificial Sequence: Synthetic oligonucleotide
auaucugcaggacugucag

SEQ ID NO: 1026811 - RNA, 19 nt, Artificial Sequence
  Description of Artificial Sequence: Synthetic oligonucleotide
gguaaggaugucuugauug

SEQ ID NO: 1026812 - RNA, 19 nt, Artificial Sequence
  Description of Artificial Sequence: Synthetic oligonucleotide
ugacuaauauccauauggu

SEQ ID NO: 1026813 - RNA, 19 nt, Artificial Sequence
  Description of Artificial Sequence: Synthetic oligonucleotide
uaucccuaaaguuccaugu

SEQ ID NO: 1026814 - RNA, 19 nt, Artificial Sequence
  Description of Artificial Sequence: Synthetic oligonucleotide
uucuuuccaagauugguac

SEQ ID NO: 1026815 - RNA, 19 nt, Artificial Sequence
  Description of Artificial Sequence: Synthetic oligonucleotide
cuguaaagguauuucagug

SEQ ID NO: 1026816 - RNA, 19 nt, Artificial Sequence
  Description of Artificial Sequence: Synthetic oligonucleotide
aguugggacaggugcaagc

SEQ ID NO: 1026817 - RNA, 19 nt, Artificial Sequence
  Description of Artificial Sequence: Synthetic oligonucleotide
guuacaaauaaaagggcgc

SEQ ID NO: 1026818 - RNA, 19 nt, Artificial Sequence
  Description of Artificial Sequence: Synthetic oligonucleotide
uguagcuguauaccaguag

SEQ ID NO: 1026819 - RNA, 19 nt, Artificial Sequence
  Description of Artificial Sequence: Synthetic oligonucleotide
  modified_base (18)..(18): a, c, u, g, unknown or other
agaguaaugcuuaaaaunu

SEQ ID NO: 1026820 - RNA, 19 nt, Artificial Sequence
  Description of Artificial Sequence: Synthetic oligonucleotide
augaauaaguauuugugua

SEQ ID NO: 1026821 - RNA, 19 nt, Artificial Sequence
  Description of Artificial Sequence: Synthetic oligonucleotide
aagcuguaaagguauuuca

SEQ ID NO: 1026822 - RNA, 19 nt, Artificial Sequence
  Description of Artificial Sequence: Synthetic oligonucleotide
cauuauugaaagaauauua

SEQ ID NO: 1026823 - RNA, 19 nt, Artificial Sequence
  Description of Artificial Sequence: Synthetic oligonucleotide
cuugauucuaauaucugca

SEQ ID NO: 1026824 - RNA, 19 nt, Artificial Sequence
  Description of Artificial Sequence: Synthetic oligonucleotide
uacaguuaaccuaauuaaa

SEQ ID NO: 1026825 - RNA, 19 nt, Artificial Sequence
  Description of Artificial Sequence: Synthetic oligonucleotide
guauaugacagauguguug

SEQ ID NO: 1026826 - RNA, 19 nt, Artificial Sequence
  Description of Artificial Sequence: Synthetic oligonucleotide
auauccauaugguuggagu

SEQ ID NO: 1026827 - RNA, 19 nt, Artificial Sequence
  Description of Artificial Sequence: Synthetic oligonucleotide
aaucaagguaucaucucuc

SEQ ID NO: 1026828 - RNA, 19 nt, Artificial Sequence
  Description of Artificial Sequence: Synthetic oligonucleotide
ugcaauaaaccuuauuauu

SEQ ID NO: 1026829 - RNA, 19 nt, Artificial Sequence
  Description of Artificial Sequence: Synthetic oligonucleotide
gacaggugcaagcuaaccc

SEQ ID NO: 1026830 - RNA, 19 nt, Artificial Sequence
  Description of Artificial Sequence: Synthetic oligonucleotide
aacaucgguuauauugccc

SEQ ID NO: 1026831 - RNA, 19 nt, Artificial Sequence
  Description of Artificial Sequence: Synthetic oligonucleotide
aagcuaacccuccgaaguc

SEQ ID NO: 1026832 - RNA, 19 nt, Artificial Sequence
  Description of Artificial Sequence: Synthetic oligonucleotide
  modified_base (3)..(3): a, c, u, g, unknown or other
aunuuguacaguuaaccua

SEQ ID NO: 1026833 - RNA, 19 nt, Artificial Sequence
  Description of Artificial Sequence: Synthetic oligonucleotide
  modified_base (6)..(6): a, c, u, g, unknown or other
uaaaanaauuagcccuaca

SEQ ID NO: 1026834 - RNA, 19 nt, Artificial Sequence
  Description of Artificial Sequence: Synthetic oligonucleotide
uugaaauaggugaacugaa

SEQ ID NO: 1026835 - RNA, 19 nt, Artificial Sequence
  Description of Artificial Sequence: Synthetic oligonucleotide
ugauauuuaagugcagacu

SEQ ID NO: 1026836 - RNA, 19 nt, Artificial Sequence
  Description of Artificial Sequence: Synthetic oligonucleotide
acuauggaauaucauacaa

SEQ ID NO: 1026837 - RNA, 19 nt, Artificial Sequence
  Description of Artificial Sequence: Synthetic oligonucleotide
aacugugacaagcuguaaa

SEQ ID NO: 1026838 - RNA, 19 nt, Artificial Sequence
  Description of Artificial Sequence: Synthetic oligonucleotide
aaguuucuaugacuaauau

SEQ ID NO: 1026839 - RNA, 19 nt, Artificial Sequence
  Description of Artificial Sequence: Synthetic oligonucleotide
aagauugguaccucuccca

SEQ ID NO: 1026840 - RNA, 19 nt, Artificial Sequence
  Description of Artificial Sequence: Synthetic oligonucleotide
aaaccuuauuauuauuauu

SEQ ID NO: 1026841 - RNA, 19 nt, Artificial Sequence
  Description of Artificial Sequence: Synthetic oligonucleotide
acaucgguuauauugccca

SEQ ID NO: 1026842 - RNA, 19 nt, Artificial Sequence
  Description of Artificial Sequence: Synthetic oligonucleotide
agauugguaccucucccac

SEQ ID NO: 1026843 - RNA, 19 nt, Artificial Sequence
  Description of Artificial Sequence: Synthetic oligonucleotide
  modified_base (8)..(8): a, c, u, g, unknown or other
uuaaaaunuuguacaguua

SEQ ID NO: 1026844 - RNA, 19 nt, Artificial Sequence
  Description of Artificial Sequence: Synthetic oligonucleotide
uucuaauaucugcaggacu

SEQ ID NO: 1026845 - RNA, 19 nt, Artificial Sequence
  Description of Artificial Sequence: Synthetic oligonucleotide
aguguguuaggucauuggu

SEQ ID NO: 1026846 - RNA, 19 nt, Artificial Sequence
  Description of Artificial Sequence: Synthetic oligonucleotide
agggguaauucacuagaac

SEQ ID NO: 1026847 - RNA, 19 nt, Artificial Sequence
  Description of Artificial Sequence: Synthetic oligonucleotide
uguauuggauacauauaaa

SEQ ID NO: 1026848 - RNA, 19 nt, Artificial Sequence
  Description of Artificial Sequence: Synthetic oligonucleotide
ugacaagcuguaaagguau

SEQ ID NO: 1026849 - RNA, 19 nt, Artificial Sequence
  Description of Artificial Sequence: Synthetic oligonucleotide
uguugaauauuugcaagga

SEQ ID NO: 1026850 - RNA, 19 nt, Artificial Sequence
  Description of Artificial Sequence: Synthetic oligonucleotide
gauuuaaaaggugacuauc

SEQ ID NO: 1026851 - RNA, 19 nt, Artificial Sequence
  Description of Artificial Sequence: Synthetic oligonucleotide
guacaguuaaccuaauuaa

SEQ ID NO: 1026852 - RNA, 19 nt, Artificial Sequence
  Description of Artificial Sequence: Synthetic oligonucleotide
uuguuauguuugcauaugu

SEQ ID NO: 1026853 - RNA, 19 nt, Artificial Sequence
  Description of Artificial Sequence: Synthetic oligonucleotide
uaagauacuauggaauauc

SEQ ID NO: 1026854 - RNA, 19 nt, Artificial Sequence
  Description of Artificial Sequence: Synthetic oligonucleotide
  modified_base (7)..(7): a, c, u, g, unknown or other
uuaaaanaauuagcccuac

SEQ ID NO: 1026855 - RNA, 19 nt, Artificial Sequence
  Description of Artificial Sequence: Synthetic oligonucleotide
aauauccauaugguuggag

SEQ ID NO: 1026856 - RNA, 19 nt, Artificial Sequence
  Description of Artificial Sequence: Synthetic oligonucleotide
guuauguuugcauauguua

SEQ ID NO: 1026857 - RNA, 19 nt, Artificial Sequence
  Description of Artificial Sequence: Synthetic oligonucleotide
auugacaguuccuaucccu

SEQ ID NO: 1026858 - RNA, 19 nt, Artificial Sequence
  Description of Artificial Sequence: Synthetic oligonucleotide
gaacauuuucuuaccaccc

SEQ ID NO: 1026859 - RNA, 19 nt, Artificial Sequence
  Description of Artificial Sequence: Synthetic oligonucleotide
uaugacuaauauccauaug

SEQ ID NO: 1026860 - RNA, 19 nt, Artificial Sequence
  Description of Artificial Sequence: Synthetic oligonucleotide
agaacuuaggaacaauauu

SEQ ID NO: 1026861 - RNA, 19 nt, Artificial Sequence
  Description of Artificial Sequence: Synthetic oligonucleotide
gguuauauugcccaacuuc

SEQ ID NO: 1026862 - RNA, 19 nt, Artificial Sequence
  Description of Artificial Sequence: Synthetic oligonucleotide
agugucauguauaaccaag

SEQ ID NO: 1026863 - RNA, 19 nt, Artificial Sequence
  Description of Artificial Sequence: Synthetic oligonucleotide
aagauacuauggaauauca

SEQ ID NO: 1026864 - RNA, 19 nt, Artificial Sequence
  Description of Artificial Sequence: Synthetic oligonucleotide
uuucuaugacuaauaucca

SEQ ID NO: 1026865 - RNA, 19 nt, Artificial Sequence
  Description of Artificial Sequence: Synthetic oligonucleotide
uguguaauauuuacuccau

SEQ ID NO: 1026866 - RNA, 19 nt, Artificial Sequence
  Description of Artificial Sequence: Synthetic oligonucleotide
cagaaguauugacaguucc

SEQ ID NO: 1026867 - RNA, 19 nt, Artificial Sequence
  Description of Artificial Sequence: Synthetic oligonucleotide
guagaugagcucucaaaug

SEQ ID NO: 1026868 - RNA, 19 nt, Artificial Sequence
  Description of Artificial Sequence: Synthetic oligonucleotide
auguauaaccaaguuacug

SEQ ID NO: 1026869 - RNA, 19 nt, Artificial Sequence
  Description of Artificial Sequence: Synthetic oligonucleotide
uauuuaagugcagacugac

SEQ ID NO: 1026870 - RNA, 19 nt, Artificial Sequence
  Description of Artificial Sequence: Synthetic oligonucleotide
auuuuguuauguuugcaua

SEQ ID NO: 1026871 - RNA, 19 nt, Artificial Sequence
  Description of Artificial Sequence: Synthetic oligonucleotide
accacaaugaauaaguauu

SEQ ID NO: 1026872 - RNA, 19 nt, Artificial Sequence
  Description of Artificial Sequence: Synthetic oligonucleotide
uacuauggaauaucauaca

SEQ ID NO: 1026873 - RNA, 19 nt, Artificial Sequence
  Description of Artificial Sequence: Synthetic oligonucleotide
uacucuuaaguguguuagg

SEQ ID NO: 1026874 - RNA, 19 nt, Artificial Sequence
  Description of Artificial Sequence: Synthetic oligonucleotide
auauugcccaacuucauua

SEQ ID NO: 1026875 - RNA, 19 nt, Artificial Sequence
  Description of Artificial Sequence: Synthetic oligonucleotide
gugacuaucccuaaaguuc

SEQ ID NO: 1026876 - RNA, 19 nt, Artificial Sequence
  Description of Artificial Sequence: Synthetic oligonucleotide
  modified_base (9)..(9): a, c, u, g, unknown or other
cuuaaaaunuuguacaguu

SEQ ID NO: 1026877 - RNA, 19 nt, Artificial Sequence
  Description of Artificial Sequence: Synthetic oligonucleotide
auaaguguuguuccuccug

SEQ ID NO: 1026878 - RNA, 19 nt, Artificial Sequence
  Description of Artificial Sequence: Synthetic oligonucleotide
acugcuagagugaauaacu

SEQ ID NO: 1026879 - RNA, 19 nt, Artificial Sequence
  Description of Artificial Sequence: Synthetic oligonucleotide
guaguuucaaaaucuuaca

SEQ ID NO: 1026880 - RNA, 19 nt, Artificial Sequence
  Description of Artificial Sequence: Synthetic oligonucleotide
ggaacaauauucuucucac

SEQ ID NO: 1026881 - RNA, 19 nt, Artificial Sequence
  Description of Artificial Sequence: Synthetic oligonucleotide
aucugagguggucuuaaag

SEQ ID NO: 1026882 - RNA, 19 nt, Artificial Sequence
  Description of Artificial Sequence: Synthetic oligonucleotide
aacguacaauaagguagcc

SEQ ID NO: 1026883 - RNA, 19 nt, Artificial Sequence
  Description of Artificial Sequence: Synthetic oligonucleotide
ucgguuauauugcccaacu

SEQ ID NO: 1026884 - RNA, 19 nt, Artificial Sequence
  Description of Artificial Sequence: Synthetic oligonucleotide
guauaaccaaguuacuguc

SEQ ID NO: 1026885 - RNA, 19 nt, Artificial Sequence
  Description of Artificial Sequence: Synthetic oligonucleotide
uccuugauucuaauaucug

SEQ ID NO: 1026886 - RNA, 19 nt, Artificial Sequence
  Description of Artificial Sequence: Synthetic oligonucleotide
aacuaccacacuguuauaa

SEQ ID NO: 1026887 - RNA, 19 nt, Artificial Sequence
  Description of Artificial Sequence: Synthetic oligonucleotide
agcuauucucuccuggaug

SEQ ID NO: 1026888 - RNA, 19 nt, Artificial Sequence
  Description of Artificial Sequence: Synthetic oligonucleotide
ucccauagacuuuaccaca

SEQ ID NO: 1026889 - RNA, 19 nt, Artificial Sequence
  Description of Artificial Sequence: Synthetic oligonucleotide
aaguauugacaguuccuau

SEQ ID NO: 1026890 - RNA, 19 nt, Artificial Sequence
  Description of Artificial Sequence: Synthetic oligonucleotide
gggguaauucacuagaaca

SEQ ID NO: 1026891 - RNA, 19 nt, Artificial Sequence
  Description of Artificial Sequence: Synthetic oligonucleotide
caagauugguaccucuccc

SEQ ID NO: 1026892 - RNA, 19 nt, Artificial Sequence
  Description of Artificial Sequence: Synthetic oligonucleotide
ucuugauugcugguggcag

SEQ ID NO: 1026893 - RNA, 19 nt, Artificial Sequence
  Description of Artificial Sequence: Synthetic oligonucleotide
uucuaugccuuuguaauuc

SEQ ID NO: 1026894 - RNA, 19 nt, Artificial Sequence
  Description of Artificial Sequence: Synthetic oligonucleotide
uguuauguuugcauauguu

SEQ ID NO: 1026895 - RNA, 19 nt, Artificial Sequence
  Description of Artificial Sequence: Synthetic oligonucleotide
uuuaccacauccugguaua

SEQ ID NO: 1026896 - RNA, 19 nt, Artificial Sequence
  Description of Artificial Sequence: Synthetic oligonucleotide
auuuucuuaccacccaaau

SEQ ID NO: 1026897 - RNA, 19 nt, Artificial Sequence
  Description of Artificial Sequence: Synthetic oligonucleotide
uauccauaugguuggagua

SEQ ID NO: 1026898 - RNA, 19 nt, Artificial Sequence
  Description of Artificial Sequence: Synthetic oligonucleotide
caauuaaauguauuggaua

SEQ ID NO: 1026899 - RNA, 19 nt, Artificial Sequence
  Description of Artificial Sequence: Synthetic oligonucleotide
agauaucuaagaacuuagg

SEQ ID NO: 1026900 - RNA, 19 nt, Artificial Sequence
  Description of Artificial Sequence: Synthetic oligonucleotide
uugguauucaguguagaau

SEQ ID NO: 1026901 - RNA, 19 nt, Artificial Sequence
  Description of Artificial Sequence: Synthetic oligonucleotide
  modified_base (8)..(8): a, c, u, g, unknown or other
auuaaaanaauuagcccua

SEQ ID NO: 1026902 - RNA, 19 nt, Artificial Sequence
  Description of Artificial Sequence: Synthetic oligonucleotide
uuaagugcagacugacuau

SEQ ID NO: 1026903 - RNA, 19 nt, Artificial Sequence
  Description of Artificial Sequence: Synthetic oligonucleotide
uauuaacuaccacacuguu

SEQ ID NO: 1026904 - RNA, 19 nt, Artificial Sequence
  Description of Artificial Sequence: Synthetic oligonucleotide
acaguuaaccuaauuaaaa

SEQ ID NO: 1026905 - RNA, 19 nt, Artificial Sequence
  Description of Artificial Sequence: Synthetic oligonucleotide
uuggaguaucgucacugug

SEQ ID NO: 1026906 - RNA, 19 nt, Artificial Sequence
  Description of Artificial Sequence: Synthetic oligonucleotide
guugauauuuaagugcaga

SEQ ID NO: 1026907 - RNA, 19 nt, Artificial Sequence
  Description of Artificial Sequence: Synthetic oligonucleotide
gaaaagggguaauucacua

SEQ ID NO: 1026908 - RNA, 19 nt, Artificial Sequence
  Description of Artificial Sequence: Synthetic oligonucleotide
ucuuuccaagauugguacc

SEQ ID NO: 1026909 - RNA, 19 nt, Artificial Sequence
  Description of Artificial Sequence: Synthetic oligonucleotide
ugcaagcuaacccuccgaa

SEQ ID NO: 1026910 - RNA, 19 nt, Artificial Sequence
  Description of Artificial Sequence: Synthetic oligonucleotide
aaaaggugacuaucccuaa

SEQ ID NO: 1026911 - RNA, 19 nt, Artificial Sequence
  Description of Artificial Sequence: Synthetic oligonucleotide
guauuggauacauauaaau

SEQ ID NO: 1026912 - RNA, 19 nt, Artificial Sequence
  Description of Artificial Sequence: Synthetic oligonucleotide
aacagaccccuguugaaua

SEQ ID NO: 1026913 - RNA, 19 nt, Artificial Sequence
  Description of Artificial Sequence: Synthetic oligonucleotide
guaaucaagguaucaucuc

SEQ ID NO: 1026914 - RNA, 19 nt, Artificial Sequence
  Description of Artificial Sequence: Synthetic oligonucleotide
guguagaaucaccacugag

SEQ ID NO: 1026915 - RNA, 19 nt, Artificial Sequence
  Description of Artificial Sequence: Synthetic oligonucleotide
aaaggugacuaucccuaaa

SEQ ID NO: 1026916 - RNA, 19 nt, Artificial Sequence
  Description of Artificial Sequence: Synthetic oligonucleotide
agcuguaaagguauuucag

SEQ ID NO: 1026917 - RNA, 19 nt, Artificial Sequence
  Description of Artificial Sequence: Synthetic oligonucleotide
  modified_base (19)..(19): a, c, u, g, unknown or other
caguuaaccuaauuaaaan

SEQ ID NO: 1026918 - RNA, 19 nt, Artificial Sequence
  Description of Artificial Sequence: Synthetic oligonucleotide
aauacacuuuuaacguaca

SEQ ID NO: 1026919 - RNA, 19 nt, Artificial Sequence
  Description of Artificial Sequence: Synthetic oligonucleotide
gauugguaccucucccacc

SEQ ID NO: 1026920 - RNA, 19 nt, Artificial Sequence
  Description of Artificial Sequence: Synthetic oligonucleotide
auggcuuuucaacaggauu

SEQ ID NO: 1026921 - RNA, 19 nt, Artificial Sequence
  Description of Artificial Sequence: Synthetic oligonucleotide
aguuccuaucccugaaaca

SEQ ID NO: 1026922 - RNA, 19 nt, Artificial Sequence
  Description of Artificial Sequence: Synthetic oligonucleotide
guuccauguuaaaauguag

SEQ ID NO: 1026923 - RNA, 19 nt, Artificial Sequence
  Description of Artificial Sequence: Synthetic oligonucleotide
uccaagauugguaccucuc

SEQ ID NO: 1026924 - RNA, 19 nt, Artificial Sequence
  Description of Artificial Sequence: Synthetic oligonucleotide
ugccucaaccuacacauuu

SEQ ID NO: 1026925 - RNA, 19 nt, Artificial Sequence
  Description of Artificial Sequence: Synthetic oligonucleotide
aggauaaguguuguuccuc

SEQ ID NO: 1026926 - RNA, 19 nt, Artificial Sequence
  Description of Artificial Sequence: Synthetic oligonucleotide
gucauguauaaccaaguua

SEQ ID NO: 1026927 - RNA, 19 nt, Artificial Sequence
  Description of Artificial Sequence: Synthetic oligonucleotide
aaaucugagguggucuuaa

SEQ ID NO: 1026928 - RNA, 19 nt, Artificial Sequence
  Description of Artificial Sequence: Synthetic oligonucleotide
ggauaaguguuguuccucc

SEQ ID NO: 1026929 - RNA, 19 nt, Artificial Sequence
  Description of Artificial Sequence: Synthetic oligonucleotide
ugcaguaaucaagguauca

SEQ ID NO: 1026930 - RNA, 19 nt, Artificial Sequence
  Description of Artificial Sequence: Synthetic oligonucleotide
caagcuguaaagguauuuc

SEQ ID NO: 1026931 - RNA, 19 nt, Artificial Sequence
  Description of Artificial Sequence: Synthetic oligonucleotide
uggcuuuuaaggcccuggc

SEQ ID NO: 1026932 - RNA, 19 nt, Artificial Sequence
  Description of Artificial Sequence: Synthetic oligonucleotide
uacugcuagagugaauaac

SEQ ID NO: 1026933 - RNA, 19 nt, Artificial Sequence
  Description of Artificial Sequence: Synthetic oligonucleotide
uaccacuuguacucuuaag

SEQ ID NO: 1026934 - RNA, 19 nt, Artificial Sequence
  Description of Artificial Sequence: Synthetic oligonucleotide
caaaugugagguuuuccca

SEQ ID NO: 1026935 - RNA, 19 nt, Artificial Sequence
  Description of Artificial Sequence: Synthetic oligonucleotide
gaugagcucucaaauguga

SEQ ID NO: 1026936 - RNA, 19 nt, Artificial Sequence
  Description of Artificial Sequence: Synthetic oligonucleotide
ugagguggucuuaaagaua

SEQ ID NO: 1026937 - RNA, 19 nt, Artificial Sequence
  Description of Artificial Sequence: Synthetic oligonucleotide
agcacuguacugcuagagu

SEQ ID NO: 1026938 - RNA, 19 nt, Artificial Sequence
  Description of Artificial Sequence: Synthetic oligonucleotide
gcacuguacugcuagagug

SEQ ID NO: 1026939 - RNA, 19 nt, Artificial Sequence
  Description of Artificial Sequence: Synthetic oligonucleotide
gauguagcuguauaccagu

SEQ ID NO: 1026940 - RNA, 19 nt, Artificial Sequence
  Description of Artificial Sequence: Synthetic oligonucleotide
caguuccuaucccugaaac

SEQ ID NO: 1026941 - RNA, 19 nt, Artificial Sequence
  Description of Artificial Sequence: Synthetic oligonucleotide
uuaauauguuuggcaaggu

SEQ ID NO: 1026942 - RNA, 19 nt, Artificial Sequence
  Description of Artificial Sequence: Synthetic oligonucleotide
ucuaccacuuguacucuua

SEQ ID NO: 1026943 - RNA, 19 nt, Artificial Sequence
  Description of Artificial Sequence: Synthetic oligonucleotide
aaaagauaucuaagaacuu

SEQ ID NO: 1026944 - RNA, 19 nt, Artificial Sequence
  Description of Artificial Sequence: Synthetic oligonucleotide
uauugguaauuuacacaau

SEQ ID NO: 1026945 - RNA, 19 nt, Artificial Sequence
  Description of Artificial Sequence: Synthetic oligonucleotide
ugacaguuccuaucccuga

SEQ ID NO: 1026946 - RNA, 19 nt, Artificial Sequence
  Description of Artificial Sequence: Synthetic oligonucleotide
gguaucaucucuccccagc

SEQ ID NO: 1026947 - RNA, 19 nt, Artificial Sequence
  Description of Artificial Sequence: Synthetic oligonucleotide
aacguagaugagcucucaa

SEQ ID NO: 1026948 - RNA, 19 nt, Artificial Sequence
  Description of Artificial Sequence: Synthetic oligonucleotide
uacaauaagguagccuuua

SEQ ID NO: 1026949 - RNA, 19 nt, Artificial Sequence
  Description of Artificial Sequence: Synthetic oligonucleotide
aggugacuaucccuaaagu

SEQ ID NO: 1026950 - RNA, 19 nt, Artificial Sequence
  Description of Artificial Sequence: Synthetic oligonucleotide
uugguaaggaugucuugau

SEQ ID NO: 1026951 - RNA, 19 nt, Artificial Sequence
  Description of Artificial Sequence: Synthetic oligonucleotide
uauugcccaacuucauuau

SEQ ID NO: 1026952 - RNA, 19 nt, Artificial Sequence
  Description of Artificial Sequence: Synthetic oligonucleotide
ugccacagaacauccaguu

SEQ ID NO: 1026953 - RNA, 19 nt, Artificial Sequence
  Description of Artificial Sequence: Synthetic oligonucleotide
uccugguauaugacagaug

SEQ ID NO: 1026954 - RNA, 19 nt, Artificial Sequence
  Description of Artificial Sequence: Synthetic oligonucleotide
ugccuuuguaauucaucac

SEQ ID NO: 1026955 - RNA, 19 nt, Artificial Sequence
  Description of Artificial Sequence: Synthetic oligonucleotide
cuagaacauuuucuuacca

SEQ ID NO: 1026956 - RNA, 19 nt, Artificial Sequence
  Description of Artificial Sequence: Synthetic oligonucleotide
cagaaacugugacaagcug

SEQ ID NO: 1026957 - RNA, 19 nt, Artificial Sequence
  Description of Artificial Sequence: Synthetic oligonucleotide
uaagugcagacugacuauc

SEQ ID NO: 1026958 - RNA, 19 nt, Artificial Sequence
  Description of Artificial Sequence: Synthetic oligonucleotide
uuccaagauugguaccucu

SEQ ID NO: 1026959 - RNA, 19 nt, Artificial Sequence
  Description of Artificial Sequence: Synthetic oligonucleotide
ugcauauguuauacuuuau

SEQ ID NO: 1026960 - RNA, 19 nt, Artificial Sequence
  Description of Artificial Sequence: Synthetic oligonucleotide
acuucauuauugaaagaau

SEQ ID NO: 1026961 - RNA, 19 nt, Artificial Sequence
  Description of Artificial Sequence: Synthetic oligonucleotide
guguuuuauuaacuaccac

SEQ ID NO: 1026962 - RNA, 19 nt, Artificial Sequence
  Description of Artificial Sequence: Synthetic oligonucleotide
aguauuuguguaauauuua

SEQ ID NO: 1026963 - RNA, 19 nt, Artificial Sequence
  Description of Artificial Sequence: Synthetic oligonucleotide
auauuuaagugcagacuga

SEQ ID NO: 1026964 - RNA, 19 nt, Artificial Sequence
  Description of Artificial Sequence: Synthetic oligonucleotide
auacacuuuuaacguacaa

SEQ ID NO: 1026965 - RNA, 19 nt, Artificial Sequence
  Description of Artificial Sequence: Synthetic oligonucleotide
gacaaauugauaagauacu

SEQ ID NO: 1026966 - RNA, 19 nt, Artificial Sequence
  Description of Artificial Sequence: Synthetic oligonucleotide
ccacuuguacucuuaagug

SEQ ID NO: 1026967 - RNA, 19 nt, Artificial Sequence
  Description of Artificial Sequence: Synthetic oligonucleotide
guggucuuaaagauaacaa

SEQ ID NO: 1026968 - RNA, 19 nt, Artificial Sequence
  Description of Artificial Sequence: Synthetic oligonucleotide
acugacuaucuagacaaaa

SEQ ID NO: 1026969 - RNA, 19 nt, Artificial Sequence
  Description of Artificial Sequence: Synthetic oligonucleotide
uuguacaguuaaccuaauu

SEQ ID NO: 1026970 - RNA, 19 nt, Artificial Sequence
  Description of Artificial Sequence: Synthetic oligonucleotide
gauugcugguggcagaagu

SEQ ID NO: 1026971 - RNA, 19 nt, Artificial Sequence
  Description of Artificial Sequence: Synthetic oligonucleotide
guaaagguauuucaguguu

SEQ ID NO: 1026972 - RNA, 19 nt, Artificial Sequence
  Description of Artificial Sequence: Synthetic oligonucleotide
gguuggaguaucgucacug

SEQ ID NO: 1026973 - RNA, 19 nt, Artificial Sequence
  Description of Artificial Sequence: Synthetic oligonucleotide
aguuccauguuaaaaugua

SEQ ID NO: 1026974 - RNA, 19 nt, Artificial Sequence
  Description of Artificial Sequence: Synthetic oligonucleotide
cagacugacuaucuagaca

SEQ ID NO: 1026975 - RNA, 19 nt, Artificial Sequence
  Description of Artificial Sequence: Synthetic oligonucleotide
ggaauaucauacaaaguaa

SEQ ID NO: 1026976 - RNA, 19 nt, Artificial Sequence
  Description of Artificial Sequence: Synthetic oligonucleotide
caagcuaacccuccgaagu

SEQ ID NO: 1026977 - RNA, 19 nt, Artificial Sequence
  Description of Artificial Sequence: Synthetic oligonucleotide
caaauugauaagauacuau

SEQ ID NO: 1026978 - RNA, 19 nt, Artificial Sequence
  Description of Artificial Sequence: Synthetic oligonucleotide
gguggucuuaaagauaaca

SEQ ID NO: 1026979 - RNA, 19 nt, Artificial Sequence
  Description of Artificial Sequence: Synthetic oligonucleotide
ggugcaagcuaacccuccg

SEQ ID NO: 1026980 - RNA, 19 nt, Artificial Sequence
  Description of Artificial Sequence: Synthetic oligonucleotide
ugguggcagaaguauugac

SEQ ID NO: 1026981 - RNA, 19 nt, Artificial Sequence
  Description of Artificial Sequence: Synthetic oligonucleotide
uuggcaaggugaucacuuc

SEQ ID NO: 1026982 - RNA, 19 nt, Artificial Sequence
  Description of Artificial Sequence: Synthetic oligonucleotide
acguacaauaagguagccu

SEQ ID NO: 1026983 - RNA, 19 nt, Artificial Sequence
  Description of Artificial Sequence: Synthetic oligonucleotide
ccaagauugguaccucucc

SEQ ID NO: 1026984 - RNA, 19 nt, Artificial Sequence
  Description of Artificial Sequence: Synthetic oligonucleotide
aggugcaagcuaacccucc

SEQ ID NO: 1026985 - RNA, 19 nt, Artificial Sequence
  Description of Artificial Sequence: Synthetic oligonucleotide
ugguaaggaugucuugauu

SEQ ID NO: 1026986 - RNA, 19 nt, Artificial Sequence
  Description of Artificial Sequence: Synthetic oligonucleotide
gacuaauauccauaugguu

SEQ ID NO: 1026987 - RNA, 19 nt, Artificial Sequence
  Description of Artificial Sequence: Synthetic oligonucleotide
ucacuucguguaaaucuuu

SEQ ID NO: 1026988 - RNA, 19 nt, Artificial Sequence
  Description of Artificial Sequence: Synthetic oligonucleotide
auuaacuaccacacuguua

SEQ ID NO: 1026989 - RNA, 19 nt, Artificial Sequence
  Description of Artificial Sequence: Synthetic oligonucleotide
acuucaggaaaagggguaa

SEQ ID NO: 1026990 - RNA, 19 nt, Artificial Sequence
  Description of Artificial Sequence: Synthetic oligonucleotide
cacuguacugcuagaguga

SEQ ID NO: 1026991 - RNA, 19 nt, Artificial Sequence
  Description of Artificial Sequence: Synthetic oligonucleotide
uuguuccuccugcaguaau

SEQ ID NO: 1026992 - RNA, 19 nt, Artificial Sequence
  Description of Artificial Sequence: Synthetic oligonucleotide
aagggguaauucacuagaa

SEQ ID NO: 1026993 - RNA, 19 nt, Artificial Sequence
  Description of Artificial Sequence: Synthetic oligonucleotide
agugcagacugacuaucua

SEQ ID NO: 1026994 - RNA, 19 nt, Artificial Sequence
  Description of Artificial Sequence: Synthetic oligonucleotide
uuuaaggcccuggcagaca

SEQ ID NO: 1026995 - RNA, 19 nt, Artificial Sequence
  Description of Artificial Sequence: Synthetic oligonucleotide
ugucagcuauucucuccug

SEQ ID NO: 1026996 - RNA, 19 nt, Artificial Sequence
  Description of Artificial Sequence: Synthetic oligonucleotide
ucgucacuguggaagugau

SEQ ID NO: 1026997 - RNA, 19 nt, Artificial Sequence
  Description of Artificial Sequence: Synthetic oligonucleotide
cauuuucuuaccacccaaa

SEQ ID NO: 1026998 - RNA, 19 nt, Artificial Sequence
  Description of Artificial Sequence: Synthetic oligonucleotide
gaacaauauucuucucacu

SEQ ID NO: 1026999 - RNA, 19 nt, Artificial Sequence
  Description of Artificial Sequence: Synthetic oligonucleotide
auccugguauaugacagau

SEQ ID NO: 1027000 - RNA, 19 nt, Artificial Sequence
  Description of Artificial Sequence: Synthetic oligonucleotide
auccauaugguuggaguau

SEQ ID NO: 1027001 - RNA, 19 nt, Artificial Sequence
  Description of Artificial Sequence: Synthetic oligonucleotide
uaucaucucuccccagcuu

SEQ ID NO: 1027002 - RNA, 19 nt, Artificial Sequence
  Description of Artificial Sequence: Synthetic oligonucleotide
acaguuccuaucccugaaa

SEQ ID NO: 1027003 - RNA, 19 nt, Artificial Sequence
  Description of Artificial Sequence: Synthetic oligonucleotide
uguuguugguccccuucuu

SEQ ID NO: 1027004 - RNA, 19 nt, Artificial Sequence
  Description of Artificial Sequence: Synthetic oligonucleotide
aucacuucguguaaaucuu

SEQ ID NO: 1027005 - RNA, 19 nt, Artificial Sequence
  Description of Artificial Sequence: Synthetic oligonucleotide
  modified_base (15)..(15): a, c, u, g, unknown or other
guaaugcuuaaaaunuugu

SEQ ID NO: 1027006 - RNA, 19 nt, Artificial Sequence
  Description of Artificial Sequence: Synthetic oligonucleotide
uaauauccauaugguugga

SEQ ID NO: 1027007 - RNA, 19 nt, Artificial Sequence
  Description of Artificial Sequence: Synthetic oligonucleotide
cuuuaccacauccugguau

SEQ ID NO: 1027008 - RNA, 19 nt, Artificial Sequence
  Description of Artificial Sequence: Synthetic oligonucleotide
cccaacuucauuauugaaa

SEQ ID NO: 1027009 - RNA, 19 nt, Artificial Sequence
  Description of Artificial Sequence: Synthetic oligonucleotide
ccccagaaugccaacguag

SEQ ID NO: 1027010 - RNA, 19 nt, Artificial Sequence
  Description of Artificial Sequence: Synthetic oligonucleotide
gaagugauuuuguuauguu

SEQ ID NO: 1027011 - RNA, 19 nt, Artificial Sequence
  Description of Artificial Sequence: Synthetic oligonucleotide
gcaagcuaacccuccgaag

SEQ ID NO: 1027012 - RNA, 19 nt, Artificial Sequence
  Description of Artificial Sequence: Synthetic oligonucleotide
uauguuuggcaaggugauc

SEQ ID NO: 1027013 - RNA, 19 nt, Artificial Sequence
  Description of Artificial Sequence: Synthetic oligonucleotide
acagaccccuguugaauau

SEQ ID NO: 1027014 - RNA, 19 nt, Artificial Sequence
  Description of Artificial Sequence: Synthetic oligonucleotide
guugaauauuugcaaggau

SEQ ID NO: 1027015 - RNA, 19 nt, Artificial Sequence
  Description of Artificial Sequence: Synthetic oligonucleotide
ccauaugguuggaguaucg

SEQ ID NO: 1027016 - RNA, 19 nt, Artificial Sequence
  Description of Artificial Sequence: Synthetic oligonucleotide
gugacaagcuguaaaggua

SEQ ID NO: 1027017 - RNA, 19 nt, Artificial Sequence
  Description of Artificial Sequence: Synthetic oligonucleotide
uaucgucacuguggaagug

SEQ ID NO: 1027018 - RNA, 19 nt, Artificial Sequence
  Description of Artificial Sequence: Synthetic oligonucleotide
uuaaguguguuaggucauu

SEQ ID NO: 1027019 - RNA, 19 nt, Artificial Sequence
  Description of Artificial Sequence: Synthetic oligonucleotide
gccuuuguaauucaucacu

SEQ ID NO: 1027020 - RNA, 19 nt, Artificial Sequence
  Description of Artificial Sequence: Synthetic oligonucleotide
uccccagaaugccaacgua

SEQ ID NO: 1027021 - RNA, 19 nt, Artificial Sequence
  Description of Artificial Sequence: Synthetic oligonucleotide
cucaaccuacacauuuuaa

SEQ ID NO: 1027022 - RNA, 19 nt, Artificial Sequence
  Description of Artificial Sequence: Synthetic oligonucleotide
ugguuggaguaucgucacu

SEQ ID NO: 1027023 - RNA, 19 nt, Artificial Sequence
  Description of Artificial Sequence: Synthetic oligonucleotide
gcagacugacuaucuagac

SEQ ID NO: 1027024 - RNA, 19 nt, Artificial Sequence
  Description of Artificial Sequence: Synthetic oligonucleotide
gcuauucucuccuggaugu

SEQ ID NO: 1027025 - RNA, 19 nt, Artificial Sequence
  Description of Artificial Sequence: Synthetic oligonucleotide
uaacccuccgaagucuuuu

SEQ ID NO: 1027026 - RNA, 19 nt, Artificial Sequence
  Description of Artificial Sequence: Synthetic oligonucleotide
ucccugaaacagaccccug

SEQ ID NO: 1027027 - RNA, 19 nt, Artificial Sequence
  Description of Artificial Sequence: Synthetic oligonucleotide
cauccugguauaugacaga

SEQ ID NO: 1027028 - RNA, 19 nt, Artificial Sequence
  Description of Artificial Sequence: Synthetic oligonucleotide
  modified_base (10)..(10): a, c, u, g, unknown or other
gcuuaaaaunuuguacagu

SEQ ID NO: 1027029 - RNA, 19 nt, Artificial Sequence
  Description of Artificial Sequence: Synthetic oligonucleotide
guaucgucacuguggaagu

SEQ ID NO: 1027030 - RNA, 19 nt, Artificial Sequence
  Description of Artificial Sequence: Synthetic oligonucleotide
guaauucacuagaacauuu

SEQ ID NO: 1027031 - RNA, 19 nt, Artificial Sequence
  Description of Artificial Sequence: Synthetic oligonucleotide
acuaucccuaaaguuccau

SEQ ID NO: 1027032 - RNA, 19 nt, Artificial Sequence
  Description of Artificial Sequence: Synthetic oligonucleotide
aucuuuugccacagaacau

SEQ ID NO: 1027033 - RNA, 19 nt, Artificial Sequence
  Description of Artificial Sequence: Synthetic oligonucleotide
ccaaguuacugucaaucca

SEQ ID NO: 1027034 - RNA, 19 nt, Artificial Sequence
  Description of Artificial Sequence: Synthetic oligonucleotide
aaagggcgcuccccagaau

SEQ ID NO: 1027035 - RNA, 19 nt, Artificial Sequence
  Description of Artificial Sequence: Synthetic oligonucleotide
gguugauauuuaagugcag

SEQ ID NO: 1027036 - RNA, 19 nt, Artificial Sequence
  Description of Artificial Sequence: Synthetic oligonucleotide
gaccccuguugaauauuug

SEQ ID NO: 1027037 - RNA, 19 nt, Artificial Sequence
  Description of Artificial Sequence: Synthetic oligonucleotide
uuccuccugcaguaaucaa

SEQ ID NO: 1027038 - RNA, 19 nt, Artificial Sequence
  Description of Artificial Sequence: Synthetic oligonucleotide
acuuuaccacauccuggua

SEQ ID NO: 1027039 - RNA, 19 nt, Artificial Sequence
  Description of Artificial Sequence: Synthetic oligonucleotide
cauguauaaccaaguuacu

SEQ ID NO: 1027040 - RNA, 19 nt, Artificial Sequence
  Description of Artificial Sequence: Synthetic oligonucleotide
ggcuuuuaaggcccuggca

SEQ ID NO: 1027041 - RNA, 19 nt, Artificial Sequence
  Description of Artificial Sequence: Synthetic oligonucleotide
gcuagagugaauaacuuuu

SEQ ID NO: 1027042 - RNA, 19 nt, Artificial Sequence
  Description of Artificial Sequence: Synthetic oligonucleotide
cacccaaaugccucaaccu

SEQ ID NO: 1027043 - RNA, 19 nt, Artificial Sequence
  Description of Artificial Sequence: Synthetic oligonucleotide
gcaaggugaucacuucuca

SEQ ID NO: 1027044 - RNA, 19 nt, Artificial Sequence
  Description of Artificial Sequence: Synthetic oligonucleotide
agcucucaaaugugagguu

SEQ ID NO: 1027045 - RNA, 19 nt, Artificial Sequence
  Description of Artificial Sequence: Synthetic oligonucleotide
guuggaguaucgucacugu

SEQ ID NO: 1027046 - RNA, 19 nt, Artificial Sequence
  Description of Artificial Sequence: Synthetic oligonucleotide
cuuaaguguguuaggucau

SEQ ID NO: 1027047 - RNA, 19 nt, Artificial Sequence
  Description of Artificial Sequence: Synthetic oligonucleotide
cuaccacuuguacucuuaa

SEQ ID NO: 1027048 - RNA, 19 nt, Artificial Sequence
  Description of Artificial Sequence: Synthetic oligonucleotide
uaacuaccacacuguuaua

SEQ ID NO: 1027049 - RNA, 19 nt, Artificial Sequence
  Description of Artificial Sequence: Synthetic oligonucleotide
  modified_base (17)..(17): a, c, u, g, unknown or other
gaguaaugcuuaaaaunuu

SEQ ID NO: 1027050 - RNA, 19 nt, Artificial Sequence
  Description of Artificial Sequence: Synthetic oligonucleotide
cagugucauguauaaccaa

SEQ ID NO: 1027051 - RNA, 19 nt, Artificial Sequence
  Description of Artificial Sequence: Synthetic oligonucleotide
ggacaggugcaagcuaacc

SEQ ID NO: 1027052 - RNA, 19 nt, Artificial Sequence
  Description of Artificial Sequence: Synthetic oligonucleotide
ggguaauucacuagaacau

SEQ ID NO: 1027053 - RNA, 19 nt, Artificial Sequence
  Description of Artificial Sequence: Synthetic oligonucleotide
ccuaucccugaaacagacc

SEQ ID NO: 1027054 - RNA, 19 nt, Artificial Sequence
  Description of Artificial Sequence: Synthetic oligonucleotide
cguacaauaagguagccuu

SEQ ID NO: 1027055 - RNA, 19 nt, Artificial Sequence
  Description of Artificial Sequence: Synthetic oligonucleotide
caucgguuauauugcccaa

SEQ ID NO: 1027056 - RNA, 19 nt, Artificial Sequence
  Description of Artificial Sequence: Synthetic oligonucleotide
agguagccuuuaaaucuga

SEQ ID NO: 1027057 - RNA, 19 nt, Artificial Sequence
  Description of Artificial Sequence: Synthetic oligonucleotide
cauaugguuggaguaucgu

SEQ ID NO: 1027058 - RNA, 19 nt, Artificial Sequence
  Description of Artificial Sequence: Synthetic oligonucleotide
ccacauccugguauaugac

SEQ ID NO: 1027059 - RNA, 19 nt, Artificial Sequence
  Description of Artificial Sequence: Synthetic oligonucleotide
gaguaucgucacuguggaa

SEQ ID NO: 1027060 - RNA, 19 nt, Artificial Sequence
  Description of Artificial Sequence: Synthetic oligonucleotide
auguagcuguauaccagua

SEQ ID NO: 1027061 - RNA, 19 nt, Artificial Sequence
  Description of Artificial Sequence: Synthetic oligonucleotide
guaaggcauuucaguguca

SEQ ID NO: 1027062 - RNA, 19 nt, Artificial Sequence
  Description of Artificial Sequence: Synthetic oligonucleotide
gguaauucacuagaacauu

SEQ ID NO: 1027063 - RNA, 19 nt, Artificial Sequence
  Description of Artificial Sequence: Synthetic oligonucleotide
gcaguaaucaagguaucau

SEQ ID NO: 1027064 - RNA, 19 nt, Artificial Sequence
  Description of Artificial Sequence: Synthetic oligonucleotide
uaccacccaaaugccucaa

SEQ ID NO: 1027065 - RNA, 19 nt, Artificial Sequence
  Description of Artificial Sequence: Synthetic oligonucleotide
gacugacuaucuagacaaa

SEQ ID NO: 1027066 - RNA, 19 nt, Artificial Sequence
  Description of Artificial Sequence: Synthetic oligonucleotide
cugcuagagugaauaacuu

SEQ ID NO: 1027067 - RNA, 19 nt, Artificial Sequence
  Description of Artificial Sequence: Synthetic oligonucleotide
cuaugccuuuguaauucau

SEQ ID NO: 1027068 - RNA, 19 nt, Artificial Sequence
  Description of Artificial Sequence: Synthetic oligonucleotide
cuguggaagugauuuuguu

SEQ ID NO: 1027069 - RNA, 19 nt, Artificial Sequence
  Description of Artificial Sequence: Synthetic oligonucleotide
guacaauaagguagccuuu

SEQ ID NO: 1027070 - RNA, 19 nt, Artificial Sequence
  Description of Artificial Sequence: Synthetic oligonucleotide
gguauaugacagauguguu

SEQ ID NO: 1027071 - RNA, 19 nt, Artificial Sequence
  Description of Artificial Sequence: Synthetic oligonucleotide
ccuuuguaauucaucacuu

SEQ ID NO: 1027072 - RNA, 19 nt, Artificial Sequence
  Description of Artificial Sequence: Synthetic oligonucleotide
gcaggacugucagcuauuc

SEQ ID NO: 1027073 - RNA, 19 nt, Artificial Sequence
  Description of Artificial Sequence: Synthetic oligonucleotide
gcucucaaaugugagguuu

SEQ ID NO: 1027074 - RNA, 19 nt, Artificial Sequence
  Description of Artificial Sequence: Synthetic oligonucleotide
caucuaccacuuguacucu

SEQ ID NO: 1027075 - RNA, 19 nt, Artificial Sequence
  Description of Artificial Sequence: Synthetic oligonucleotide
cccauagacuuuaccacau

SEQ ID NO: 1027076 - RNA, 19 nt, Artificial Sequence
  Description of Artificial Sequence: Synthetic oligonucleotide
cuaacccuccgaagucuuu

SEQ ID NO: 1027077 - RNA, 19 nt, Artificial Sequence
  Description of Artificial Sequence: Synthetic oligonucleotide
aggcccuggcagacauguu

SEQ ID NO: 1027078 - RNA, 19 nt, Artificial Sequence
  Description of Artificial Sequence: Synthetic oligonucleotide
cgguuauauugcccaacuu

SEQ ID NO: 1027079 - RNA, 19 nt, Artificial Sequence
  Description of Artificial Sequence: Synthetic oligonucleotide
  modified_base (1)..(1): a, c, u, g, unknown or other
nuuguacaguuaaccuaau

SEQ ID NO: 1027080 - RNA, 19 nt, Artificial Sequence
  Description of Artificial Sequence: Synthetic oligonucleotide
aauuauacaucccaaaagc

SEQ ID NO: 1027081 - RNA, 19 nt, Artificial Sequence
  Description of Artificial Sequence: Synthetic oligonucleotide
ugaauuauaauaaauggau

SEQ ID NO: 1027082 - RNA, 19 nt, Artificial Sequence
  Description of Artificial Sequence: Synthetic oligonucleotide
uaaccuagggcauugaagg

SEQ ID NO: 1027083 - RNA, 19 nt, Artificial Sequence
  Description of Artificial Sequence: Synthetic oligonucleotide
aacauugaugcucucuggc

SEQ ID NO: 1027084 - RNA, 19 nt, Artificial Sequence
  Description of Artificial Sequence: Synthetic oligonucleotide
gauacugugaauuauaaua

SEQ ID NO: 1027085 - RNA, 19 nt, Artificial Sequence
  Description of Artificial Sequence: Synthetic oligonucleotide
uaucccuuaaaauaaaacu

SEQ ID NO: 1027086 - RNA, 19 nt, Artificial Sequence
  Description of Artificial Sequence: Synthetic oligonucleotide
ucgaauauccuccuuagca

SEQ ID NO: 1027087 - RNA, 19 nt, Artificial Sequence
  Description of Artificial Sequence: Synthetic oligonucleotide
uucuauucgaagaagcagc

SEQ ID NO: 1027088 - RNA, 19 nt, Artificial Sequence
  Description of Artificial Sequence: Synthetic oligonucleotide
aaacuuaacaaguuacagu

SEQ ID NO: 1027089 - RNA, 19 nt, Artificial Sequence
  Description of Artificial Sequence: Synthetic oligonucleotide
ugaucaauggaaacagccg

SEQ ID NO: 1027090 - RNA, 19 nt, Artificial Sequence
  Description of Artificial Sequence: Synthetic oligonucleotide
ugucaaaucaucaucaguu

SEQ ID NO: 1027091 - RNA, 19 nt, Artificial Sequence
  Description of Artificial Sequence: Synthetic oligonucleotide
uugccaguaauacagagga

SEQ ID NO: 1027092 - RNA, 19 nt, Artificial Sequence
  Description of Artificial Sequence: Synthetic oligonucleotide
auuaauucucuguauucac

SEQ ID NO: 1027093 - RNA, 19 nt, Artificial Sequence
  Description of Artificial Sequence: Synthetic oligonucleotide
aucaaaucugcauaaacug

SEQ ID NO: 1027094 - RNA, 19 nt, Artificial Sequence
  Description of Artificial Sequence: Synthetic oligonucleotide
gaagccuagaauaggaucg

SEQ ID NO: 1027095 - RNA, 19 nt, Artificial Sequence
  Description of Artificial Sequence: Synthetic oligonucleotide
uauucgaagaagcagcaca

SEQ ID NO: 1027096 - RNA, 19 nt, Artificial Sequence
  Description of Artificial Sequence: Synthetic oligonucleotide
aauacagaggaucuuuggu

SEQ ID NO: 1027097 - RNA, 19 nt, Artificial Sequence
  Description of Artificial Sequence: Synthetic oligonucleotide
uacugaaugcucuucagag

SEQ ID NO: 1027098 - RNA, 19 nt, Artificial Sequence
  Description of Artificial Sequence: Synthetic oligonucleotide
uauaauaaauggauuccca

SEQ ID NO: 1027099 - RNA, 19 nt, Artificial Sequence
  Description of Artificial Sequence: Synthetic oligonucleotide
gagguuaucaauguaguag

SEQ ID NO: 1027100 - RNA, 19 nt, Artificial Sequence
  Description of Artificial Sequence: Synthetic oligonucleotide
uacgcugucacaucugugg

SEQ ID NO: 1027101 - RNA, 19 nt, Artificial Sequence
  Description of Artificial Sequence: Synthetic oligonucleotide
augugaaauggauggacgc

SEQ ID NO: 1027102 - RNA, 19 nt, Artificial Sequence
  Description of Artificial Sequence: Synthetic oligonucleotide
guuccaaugacguauaauc

SEQ ID NO: 1027103 - RNA, 19 nt, Artificial Sequence
  Description of Artificial Sequence: Synthetic oligonucleotide
uuuccacuaggcucgaucg

SEQ ID NO: 1027104 - RNA, 19 nt, Artificial Sequence
  Description of Artificial Sequence: Synthetic oligonucleotide
auacagaggaucuuugguc

SEQ ID NO: 1027105 - RNA, 19 nt, Artificial Sequence
  Description of Artificial Sequence: Synthetic oligonucleotide
cuuaaucaaggaaaucucc

SEQ ID NO: 1027106 - RNA, 19 nt, Artificial Sequence
  Description of Artificial Sequence: Synthetic oligonucleotide
gauagaugaacacgcgacg

SEQ ID NO: 1027107 - RNA, 19 nt, Artificial Sequence
  Description of Artificial Sequence: Synthetic oligonucleotide
gacaagguagcccaggcag

SEQ ID NO: 1027108 - RNA, 19 nt, Artificial Sequence
  Description of Artificial Sequence: Synthetic oligonucleotide
uccacgacgacugagaaca

SEQ ID NO: 1027109 - RNA, 19 nt, Artificial Sequence
  Description of Artificial Sequence: Synthetic oligonucleotide
agugcagauaauuauacau

SEQ ID NO: 1027110 - RNA, 19 nt, Artificial Sequence
  Description of Artificial Sequence: Synthetic oligonucleotide
gacaucguggcgcagacag

SEQ ID NO: 1027111 - RNA, 19 nt, Artificial Sequence
  Description of Artificial Sequence: Synthetic oligonucleotide
uguauucacuuuuauuaag

SEQ ID NO: 1027112 - RNA, 19 nt, Artificial Sequence
  Description of Artificial Sequence: Synthetic oligonucleotide
acaaguuacaguccaacug

SEQ ID NO: 1027113 - RNA, 19 nt, Artificial Sequence
  Description of Artificial Sequence: Synthetic oligonucleotide
auaauuauacaucccaaaa

SEQ ID NO: 1027114 - RNA, 19 nt, Artificial Sequence
  Description of Artificial Sequence: Synthetic oligonucleotide
uucauaauucucccgaggu

SEQ ID NO: 1027115 - RNA, 19 nt, Artificial Sequence
  Description of Artificial Sequence: Synthetic oligonucleotide
aacuguucaggccuccagg

SEQ ID NO: 1027116 - RNA, 19 nt, Artificial Sequence
  Description of Artificial Sequence: Synthetic oligonucleotide
ugugcuccaacguauacug

SEQ ID NO: 1027117 - RNA, 19 nt, Artificial Sequence
  Description of Artificial Sequence: Synthetic oligonucleotide
agcaaccugccccacaugc

SEQ ID NO: 1027118 - RNA, 19 nt, Artificial Sequence
  Description of Artificial Sequence: Synthetic oligonucleotide
uggauggacgcacagagac

SEQ ID NO: 1027119 - RNA, 19 nt, Artificial Sequence
  Description of Artificial Sequence: Synthetic oligonucleotide
ucuuaaucaaggaaaucuc

SEQ ID NO: 1027120 - RNA, 19 nt, Artificial Sequence
  Description of Artificial Sequence: Synthetic oligonucleotide
acagagacgauugucguac

SEQ ID NO: 1027121 - RNA, 19 nt, Artificial Sequence
  Description of Artificial Sequence: Synthetic oligonucleotide
aguuuguugccaguaauac

SEQ ID NO: 1027122 - RNA, 19 nt, Artificial Sequence
  Description of Artificial Sequence: Synthetic oligonucleotide
uuucguggucaacagauga

SEQ ID NO: 1027123 - RNA, 19 nt, Artificial Sequence
  Description of Artificial Sequence: Synthetic oligonucleotide
aacguauacuggucauccc

SEQ ID NO: 1027124 - RNA, 19 nt, Artificial Sequence
  Description of Artificial Sequence: Synthetic oligonucleotide
acguauacuggucaucccg

SEQ ID NO: 1027125 - RNA, 19 nt, Artificial Sequence
  Description of Artificial Sequence: Synthetic oligonucleotide
uugauaccaggcaucacag

SEQ ID NO: 1027126 - RNA, 19 nt, Artificial Sequence
  Description of Artificial Sequence: Synthetic oligonucleotide
uuaauucucuguauucacu

SEQ ID NO: 1027127 - RNA, 19 nt, Artificial Sequence
  Description of Artificial Sequence: Synthetic oligonucleotide
cuguacucgaauauccucc

SEQ ID NO: 1027128 - RNA, 19 nt, Artificial Sequence
  Description of Artificial Sequence: Synthetic oligonucleotide
ugccgauagaugaacacgc

SEQ ID NO: 1027129 - RNA, 19 nt, Artificial Sequence
  Description of Artificial Sequence: Synthetic oligonucleotide
gacuuaauaggacacgauc

SEQ ID NO: 1027130 - RNA, 19 nt, Artificial Sequence
  Description of Artificial Sequence: Synthetic oligonucleotide
acuguacucgaauauccuc

SEQ ID NO: 1027131 - RNA, 19 nt, Artificial Sequence
  Description of Artificial Sequence: Synthetic oligonucleotide
uuuauccggauuuggauuc

SEQ ID NO: 1027132 - RNA, 19 nt, Artificial Sequence
  Description of Artificial Sequence: Synthetic oligonucleotide
ugacguauaaucucccugu

SEQ ID NO: 1027133 - RNA, 19 nt, Artificial Sequence
  Description of Artificial Sequence: Synthetic oligonucleotide
ucuauucgaagaagcagca

SEQ ID NO: 1027134 - RNA, 19 nt, Artificial Sequence
  Description of Artificial Sequence: Synthetic oligonucleotide
acguauaaucucccugugc

SEQ ID NO: 1027135 - RNA, 19 nt, Artificial Sequence
  Description of Artificial Sequence: Synthetic oligonucleotide
ucguuuguugccuggaagc

SEQ ID NO: 1027136 - RNA, 19 nt, Artificial Sequence
  Description of Artificial Sequence: Synthetic oligonucleotide
aguccaacuguucaggccu

SEQ ID NO: 1027137 - RNA, 19 nt, Artificial Sequence
  Description of Artificial Sequence: Synthetic oligonucleotide
ucgaagaagcagcacagcu

SEQ ID NO: 1027138 - RNA, 19 nt, Artificial Sequence
  Description of Artificial Sequence: Synthetic oligonucleotide
ucucccgagguuaucaaug

SEQ ID NO: 1027139 - RNA, 19 nt, Artificial Sequence
  Description of Artificial Sequence: Synthetic oligonucleotide
uuccaaugacguauaaucu

SEQ ID NO: 1027140 - RNA, 19 nt, Artificial Sequence
  Description of Artificial Sequence: Synthetic oligonucleotide
acgaauaaccucucguuug

SEQ ID NO: 1027141 - RNA, 19 nt, Artificial Sequence
  Description of Artificial Sequence: Synthetic oligonucleotide
aauguaguagacacugucu

SEQ ID NO: 1027142 - RNA, 19 nt, Artificial Sequence
  Description of Artificial Sequence: Synthetic oligonucleotide
gaagucggaacaccucucg

SEQ ID NO: 1027143 - RNA, 19 nt, Artificial Sequence
  Description of Artificial Sequence: Synthetic oligonucleotide
uaacauugaugcucucugg

SEQ ID NO: 1027144 - RNA, 19 nt, Artificial Sequence
  Description of Artificial Sequence: Synthetic oligonucleotide
agcguaauguggcacugac

SEQ ID NO: 1027145 - RNA, 19 nt, Artificial Sequence
  Description of Artificial Sequence: Synthetic oligonucleotide
uccaaugacguauaaucuc

SEQ ID NO: 1027146 - RNA, 19 nt, Artificial Sequence
  Description of Artificial Sequence: Synthetic oligonucleotide
gagggcaucgacaucgugg

SEQ ID NO: 1027147 - RNA, 19 nt, Artificial Sequence
  Description of Artificial Sequence: Synthetic oligonucleotide
ucuuuaggguccacgacga

SEQ ID NO: 1027148 - RNA, 19 nt, Artificial Sequence
  Description of Artificial Sequence: Synthetic oligonucleotide
acagugcagauaauuauac

SEQ ID NO: 1027149 - RNA, 19 nt, Artificial Sequence
  Description of Artificial Sequence: Synthetic oligonucleotide
cuuaacaaguuacagucca

SEQ ID NO: 1027150 - RNA, 19 nt, Artificial Sequence
  Description of Artificial Sequence: Synthetic oligonucleotide
acuuaauaggacacgauca

SEQ ID NO: 1027151 - RNA, 19 nt, Artificial Sequence
  Description of Artificial Sequence: Synthetic oligonucleotide
aggaucguugguuucuagg

SEQ ID NO: 1027152 - RNA, 19 nt, Artificial Sequence
  Description of Artificial Sequence: Synthetic oligonucleotide
gacgacugagaacagguac

SEQ ID NO: 1027153 - RNA, 19 nt, Artificial Sequence
  Description of Artificial Sequence: Synthetic oligonucleotide
aagguggcgaugugcuccc

SEQ ID NO: 1027154 - RNA, 19 nt, Artificial Sequence
  Description of Artificial Sequence: Synthetic oligonucleotide
aacgaauaaccucucguuu

SEQ ID NO: 1027155 - RNA, 19 nt, Artificial Sequence
  Description of Artificial Sequence: Synthetic oligonucleotide
acgaucauuaggccguuuc

SEQ ID NO: 1027156 - RNA, 19 nt, Artificial Sequence
  Description of Artificial Sequence: Synthetic oligonucleotide
gcuauuucggcacacuggg

SEQ ID NO: 1027157 - RNA, 19 nt, Artificial Sequence
  Description of Artificial Sequence: Synthetic oligonucleotide
cagauaauuauacauccca

SEQ ID NO: 1027158 - RNA, 19 nt, Artificial Sequence
  Description of Artificial Sequence: Synthetic oligonucleotide
agagacgauugucguacgc

SEQ ID NO: 1027159 - RNA, 19 nt, Artificial Sequence
  Description of Artificial Sequence: Synthetic oligonucleotide
ucucuucaaagaaaagauc

SEQ ID NO: 1027160 - RNA, 19 nt, Artificial Sequence
  Description of Artificial Sequence: Synthetic oligonucleotide
uucguggucaacagaugag

SEQ ID NO: 1027161 - RNA, 19 nt, Artificial Sequence
  Description of Artificial Sequence: Synthetic oligonucleotide
cuugauaccaggcaucaca

SEQ ID NO: 1027162 - RNA, 19 nt, Artificial Sequence
  Description of Artificial Sequence: Synthetic oligonucleotide
acucgaauauccuccuuag

SEQ ID NO: 1027163 - RNA, 19 nt, Artificial Sequence
  Description of Artificial Sequence: Synthetic oligonucleotide
gaaauggauggacgcacag

SEQ ID NO: 1027164 - RNA, 19 nt, Artificial Sequence
  Description of Artificial Sequence: Synthetic oligonucleotide
cuucuauucgaagaagcag

SEQ ID NO: 1027165 - RNA, 19 nt, Artificial Sequence
  Description of Artificial Sequence: Synthetic oligonucleotide
cacaugaguuguuuuaaug

SEQ ID NO: 1027166 - RNA, 19 nt, Artificial Sequence
  Description of Artificial Sequence: Synthetic oligonucleotide
acauucaaacuuaacaagu

SEQ ID NO: 1027167 - RNA, 19 nt, Artificial Sequence
  Description of Artificial Sequence: Synthetic oligonucleotide
acuuaacaaguuacagucc

SEQ ID NO: 1027168 - RNA, 19 nt, Artificial Sequence
  Description of Artificial Sequence: Synthetic oligonucleotide
ucucuaaguccacagcuuc

SEQ ID NO: 1027169 - RNA, 19 nt, Artificial Sequence
  Description of Artificial Sequence: Synthetic oligonucleotide
acuaggcucgaucgcagcg

SEQ ID NO: 1027170 - RNA, 19 nt, Artificial Sequence
  Description of Artificial Sequence: Synthetic oligonucleotide
acccaauggucucuaaguc

SEQ ID NO: 1027171 - RNA, 19 nt, Artificial Sequence
  Description of Artificial Sequence: Synthetic oligonucleotide
acagauucauaaucucuug

SEQ ID NO: 1027172 - RNA, 19 nt, Artificial Sequence
  Description of Artificial Sequence: Synthetic oligonucleotide
uguaacauugaugcucucu

SEQ ID NO: 1027173 - RNA, 19 nt, Artificial Sequence
  Description of Artificial Sequence: Synthetic oligonucleotide
ucacagugcagauaauuau

SEQ ID NO: 1027174 - RNA, 19 nt, Artificial Sequence
  Description of Artificial Sequence: Synthetic oligonucleotide
cagcuucuaucccauagcg

SEQ ID NO: 1027175 - RNA, 19 nt, Artificial Sequence
  Description of Artificial Sequence: Synthetic oligonucleotide
uccuccuuagcacaguuuu

SEQ ID NO: 1027176 - RNA, 19 nt, Artificial Sequence
  Description of Artificial Sequence: Synthetic oligonucleotide
uucaguucgucggagguca

SEQ ID NO: 1027177 - RNA, 19 nt, Artificial Sequence
  Description of Artificial Sequence: Synthetic oligonucleotide
guaaccuagggcauugaag

SEQ ID NO: 1027178 - RNA, 19 nt, Artificial Sequence
  Description of Artificial Sequence: Synthetic oligonucleotide
agcguucacagauucauaa

SEQ ID NO: 1027179 - RNA, 19 nt, Artificial Sequence
  Description of Artificial Sequence: Synthetic oligonucleotide
ugguuucuaggcuugcuac

SEQ ID NO: 1027180 - RNA, 19 nt, Artificial Sequence
  Description of Artificial Sequence: Synthetic oligonucleotide
uauuuccacggucaccugu

SEQ ID NO: 1027181 - RNA, 19 nt, Artificial Sequence
  Description of Artificial Sequence: Synthetic oligonucleotide
ucguggcgcagacagaagc

SEQ ID NO: 1027182 - RNA, 19 nt, Artificial Sequence
  Description of Artificial Sequence: Synthetic oligonucleotide
guggucaacagaugaguag

SEQ ID NO: 1027183 - RNA, 19 nt, Artificial Sequence
  Description of Artificial Sequence: Synthetic oligonucleotide
gucggaacaccucucgggg

SEQ ID NO: 1027184 - RNA, 19 nt, Artificial Sequence
  Description of Artificial Sequence: Synthetic oligonucleotide
agcgcucugcuauuucggc

SEQ ID NO: 1027185 - RNA, 19 nt, Artificial Sequence
  Description of Artificial Sequence: Synthetic oligonucleotide
uagaauaggaucguugguu

SEQ ID NO: 1027186 - RNA, 19 nt, Artificial Sequence
  Description of Artificial Sequence: Synthetic oligonucleotide
gaucaauggaaacagccgu

SEQ ID NO: 1027187 - RNA, 19 nt, Artificial Sequence
  Description of Artificial Sequence: Synthetic oligonucleotide
ugaaauggauggacgcaca

SEQ ID NO: 1027188 - RNA, 19 nt, Artificial Sequence
  Description of Artificial Sequence: Synthetic oligonucleotide
gaugcuuggacguaaccua

SEQ ID NO: 1027189 - RNA, 19 nt, Artificial Sequence
  Description of Artificial Sequence: Synthetic oligonucleotide
gagccuuacagucacuguc

SEQ ID NO: 1027190 - RNA, 19 nt, Artificial Sequence
  Description of Artificial Sequence: Synthetic oligonucleotide
agacgauugucguacgcug

SEQ ID NO: 1027191 - RNA, 19 nt, Artificial Sequence
  Description of Artificial Sequence: Synthetic oligonucleotide
uccuuagcacaguuuucgg

SEQ ID NO: 1027192 - RNA, 19 nt, Artificial Sequence
  Description of Artificial Sequence: Synthetic oligonucleotide
gccgugaaggacuuaauag

SEQ ID NO: 1027193 - RNA, 19 nt, Artificial Sequence
  Description of Artificial Sequence: Synthetic oligonucleotide
ccaaugacguauaaucucc

SEQ ID NO: 1027194 - RNA, 19 nt, Artificial Sequence
  Description of Artificial Sequence: Synthetic oligonucleotide
cauuucuuuaggguccacg

SEQ ID NO: 1027195 - RNA, 19 nt, Artificial Sequence
  Description of Artificial Sequence: Synthetic oligonucleotide
auaaauggauucccaaguu

SEQ ID NO: 1027196 - RNA, 19 nt, Artificial Sequence
  Description of Artificial Sequence: Synthetic oligonucleotide
uuuaggguccacgacgacu

SEQ ID NO: 1027197 - RNA, 19 nt, Artificial Sequence
  Description of Artificial Sequence: Synthetic oligonucleotide
ggaucguugguuucuaggc

SEQ ID NO: 1027198 - RNA, 19 nt, Artificial Sequence
  Description of Artificial Sequence: Synthetic oligonucleotide
uacugugaauuauaauaaa

SEQ ID NO: 1027199 - RNA, 19 nt, Artificial Sequence
  Description of Artificial Sequence: Synthetic oligonucleotide
ugucuugauaccaggcauc

SEQ ID NO: 1027200 - RNA, 19 nt, Artificial Sequence
  Description of Artificial Sequence: Synthetic oligonucleotide
gauggacgcacagagacga

SEQ ID NO: 1027201 - RNA, 19 nt, Artificial Sequence
  Description of Artificial Sequence: Synthetic oligonucleotide
ucaauggaaacagccguga

SEQ ID NO: 1027202 - RNA, 19 nt, Artificial Sequence
  Description of Artificial Sequence: Synthetic oligonucleotide
ucgaucgcagcguaaugug

SEQ ID NO: 1027203 - RNA, 19 nt, Artificial Sequence
  Description of Artificial Sequence: Synthetic oligonucleotide
gaucgcagcguaauguggc

SEQ ID NO: 1027204 - RNA, 19 nt, Artificial Sequence
  Description of Artificial Sequence: Synthetic oligonucleotide
acgauugucguacgcuguc

SEQ ID NO: 1027205 - RNA, 19 nt, Artificial Sequence
  Description of Artificial Sequence: Synthetic oligonucleotide
gaacacgcgacgaaggcac

SEQ ID NO: 1027206 - RNA, 19 nt, Artificial Sequence
  Description of Artificial Sequence: Synthetic oligonucleotide
uuucuaggcuugcuacuug

SEQ ID NO: 1027207 - RNA, 19 nt, Artificial Sequence
  Description of Artificial Sequence: Synthetic oligonucleotide
ugcuuggacguaaccuagg

SEQ ID NO: 1027208 - RNA, 19 nt, Artificial Sequence
  Description of Artificial Sequence: Synthetic oligonucleotide
caucaaaucugcauaaacu

SEQ ID NO: 1027209 - RNA, 19 nt, Artificial Sequence
  Description of Artificial Sequence: Synthetic oligonucleotide
uucggggagccuuacaguc

SEQ ID NO: 1027210 - RNA, 19 nt, Artificial Sequence
  Description of Artificial Sequence: Synthetic oligonucleotide
uuugaugcuuggacguaac

SEQ ID NO: 1027211 - RNA, 19 nt, Artificial Sequence
  Description of Artificial Sequence: Synthetic oligonucleotide
ucgggguuuuccuaaggca

SEQ ID NO: 1027212 - RNA, 19 nt, Artificial Sequence
  Description of Artificial Sequence: Synthetic oligonucleotide
ggacacgaucauuaggccg

SEQ ID NO: 1027213 - RNA, 19 nt, Artificial Sequence
  Description of Artificial Sequence: Synthetic oligonucleotide
auagcguucacagauucau

SEQ ID NO: 1027214 - RNA, 19 nt, Artificial Sequence
  Description of Artificial Sequence: Synthetic oligonucleotide
ucucucagaaguucucccu

SEQ ID NO: 1027215 - RNA, 19 nt, Artificial Sequence
  Description of Artificial Sequence: Synthetic oligonucleotide
uccggauuuggauucaguu

SEQ ID NO: 1027216 - RNA, 19 nt, Artificial Sequence
  Description of Artificial Sequence: Synthetic oligonucleotide
ccgugaaggacuuaauagg

SEQ ID NO: 1027217 - RNA, 19 nt, Artificial Sequence
  Description of Artificial Sequence: Synthetic oligonucleotide
auagaugaacacgcgacga

SEQ ID NO: 1027218 - RNA, 19 nt, Artificial Sequence
  Description of Artificial Sequence: Synthetic oligonucleotide
acuguucaggccuccaggu

SEQ ID NO: 1027219 - RNA, 19 nt, Artificial Sequence
  Description of Artificial Sequence: Synthetic oligonucleotide
gauugucguacgcugucac

SEQ ID NO: 1027220 - RNA, 19 nt, Artificial Sequence
  Description of Artificial Sequence: Synthetic oligonucleotide
uaaccucucguuuguugcc

SEQ ID NO: 1027221 - RNA, 19 nt, Artificial Sequence
  Description of Artificial Sequence: Synthetic oligonucleotide
cugccgauagaugaacacg

SEQ ID NO: 1027222 - RNA, 19 nt, Artificial Sequence
  Description of Artificial Sequence: Synthetic oligonucleotide
guuuuccuaaggcaguguc

SEQ ID NO: 1027223 - RNA, 19 nt, Artificial Sequence
  Description of Artificial Sequence: Synthetic oligonucleotide
cuuggacguaaccuagggc

SEQ ID NO: 1027224 - RNA, 19 nt, Artificial Sequence
  Description of Artificial Sequence: Synthetic oligonucleotide
uuaggccguuuccacuagg

SEQ ID NO: 1027225 - RNA, 19 nt, Artificial Sequence
  Description of Artificial Sequence: Synthetic oligonucleotide
ucuccaagccgucauucuc

SEQ ID NO: 1027226 - RNA, 19 nt, Artificial Sequence
  Description of Artificial Sequence: Synthetic oligonucleotide
guaguagacacugucuuga

SEQ ID NO: 1027227 - RNA, 19 nt, Artificial Sequence
  Description of Artificial Sequence: Synthetic oligonucleotide
ggugagaacgaauaaccuc

SEQ ID NO: 1027228 - RNA, 19 nt, Artificial Sequence
  Description of Artificial Sequence: Synthetic oligonucleotide
ucucgggguuuuccuaagg

SEQ ID NO: 1027229 - RNA, 19 nt, Artificial Sequence
  Description of Artificial Sequence: Synthetic oligonucleotide
aaccuagggcauugaaggu

SEQ ID NO: 1027230 - RNA, 19 nt, Artificial Sequence
  Description of Artificial Sequence: Synthetic oligonucleotide
cauaaucucccacuuuuca

SEQ ID NO: 1027231 - RNA, 19 nt, Artificial Sequence
  Description of Artificial Sequence: Synthetic oligonucleotide
cucguuuguugccuggaag

SEQ ID NO: 1027232 - RNA, 19 nt, Artificial Sequence
  Description of Artificial Sequence: Synthetic oligonucleotide
gacguauaaucucccugug

SEQ ID NO: 1027233 - RNA, 19 nt, Artificial Sequence
  Description of Artificial Sequence: Synthetic oligonucleotide
aggacuauuuccacgguca

SEQ ID NO: 1027234 - RNA, 19 nt, Artificial Sequence
  Description of Artificial Sequence: Synthetic oligonucleotide
agauacugugaauuauaau

SEQ ID NO: 1027235 - RNA, 19 nt, Artificial Sequence
  Description of Artificial Sequence: Synthetic oligonucleotide
gaucauuaggccguuucca

SEQ ID NO: 1027236 - RNA, 19 nt, Artificial Sequence
  Description of Artificial Sequence: Synthetic oligonucleotide
cucgggguuuuccuaaggc

SEQ ID NO: 1027237 - RNA, 19 nt, Artificial Sequence
  Description of Artificial Sequence: Synthetic oligonucleotide
acgcugucacaucuguggg

SEQ ID NO: 1027238 - RNA, 19 nt, Artificial Sequence
  Description of Artificial Sequence: Synthetic oligonucleotide
aggacuuaauaggacacga

SEQ ID NO: 1027239 - RNA, 19 nt, Artificial Sequence
  Description of Artificial Sequence: Synthetic oligonucleotide
guuuccacuaggcucgauc

SEQ ID NO: 1027240 - RNA, 19 nt, Artificial Sequence
  Description of Artificial Sequence: Synthetic oligonucleotide
guuuguugccaguaauaca

SEQ ID NO: 1027241 - RNA, 19 nt, Artificial Sequence
  Description of Artificial Sequence: Synthetic oligonucleotide
auuucggcacacugggcug

SEQ ID NO: 1027242 - RNA, 19 nt, Artificial Sequence
  Description of Artificial Sequence: Synthetic oligonucleotide
acggucaccuguuccaaug

SEQ ID NO: 1027243 - RNA, 19 nt, Artificial Sequence
  Description of Artificial Sequence: Synthetic oligonucleotide
uucuaucccauagcguuca

SEQ ID NO: 1027244 - RNA, 19 nt, Artificial Sequence
  Description of Artificial Sequence: Synthetic oligonucleotide
caugaguuguuuuaaugua

SEQ ID NO: 1027245 - RNA, 19 nt, Artificial Sequence
  Description of Artificial Sequence: Synthetic oligonucleotide
ccgucauucucuuucauug

SEQ ID NO: 1027246 - RNA, 19 nt, Artificial Sequence
  Description of Artificial Sequence: Synthetic oligonucleotide
gugagaacgaauaaccucu

SEQ ID NO: 1027247 - RNA, 19 nt, Artificial Sequence
  Description of Artificial Sequence: Synthetic oligonucleotide
uccggcaaugagauacugu

SEQ ID NO: 1027248 - RNA, 19 nt, Artificial Sequence
  Description of Artificial Sequence: Synthetic oligonucleotide
uugucguacgcugucacau

SEQ ID NO: 1027249 - RNA, 19 nt, Artificial Sequence
  Description of Artificial Sequence: Synthetic oligonucleotide
aguuacaguccaacuguuc

SEQ ID NO: 1027250 - RNA, 19 nt, Artificial Sequence
  Description of Artificial Sequence: Synthetic oligonucleotide
uuucggggagccuuacagu

SEQ ID NO: 1027251 - RNA, 19 nt, Artificial Sequence
  Description of Artificial Sequence: Synthetic oligonucleotide
cccgagguuaucaauguag

SEQ ID NO: 1027252 - RNA, 19 nt, Artificial Sequence
  Description of Artificial Sequence: Synthetic oligonucleotide
ucucccugugccaucugac

SEQ ID NO: 1027253 - RNA, 19 nt, Artificial Sequence
  Description of Artificial Sequence: Synthetic oligonucleotide
gcggcauaggaguaauugg

SEQ ID NO: 1027254 - RNA, 19 nt, Artificial Sequence
  Description of Artificial Sequence: Synthetic oligonucleotide
uguuccaaugacguauaau

SEQ ID NO: 1027255 - RNA, 19 nt, Artificial Sequence
  Description of Artificial Sequence: Synthetic oligonucleotide
uuccacuaggcucgaucgc

SEQ ID NO: 1027256 - RNA, 19 nt, Artificial Sequence
  Description of Artificial Sequence: Synthetic oligonucleotide
uuaauaggacacgaucauu

SEQ ID NO: 1027257 - RNA, 19 nt, Artificial Sequence
  Description of Artificial Sequence: Synthetic oligonucleotide
gcuuggacguaaccuaggg

SEQ ID NO: 1027258 - RNA, 19 nt, Artificial Sequence
  Description of Artificial Sequence: Synthetic oligonucleotide
auuaggccguuuccacuag

SEQ ID NO: 1027259 - RNA, 19 nt, Artificial Sequence
  Description of Artificial Sequence: Synthetic oligonucleotide
cuucuaucccauagcguuc

SEQ ID NO: 1027260 - RNA, 19 nt, Artificial Sequence
  Description of Artificial Sequence: Synthetic oligonucleotide
cucgaauauccuccuuagc

SEQ ID NO: 1027261 - RNA, 19 nt, Artificial Sequence
  Description of Artificial Sequence: Synthetic oligonucleotide
cuuucguggucaacagaug

SEQ ID NO: 1027262 - RNA, 19 nt, Artificial Sequence
  Description of Artificial Sequence: Synthetic oligonucleotide
uccaacguauacuggucau

SEQ ID NO: 1027263 - RNA, 19 nt, Artificial Sequence
  Description of Artificial Sequence: Synthetic oligonucleotide
uggauucaguucgucggag

SEQ ID NO: 1027264 - RNA, 19 nt, Artificial Sequence
  Description of Artificial Sequence: Synthetic oligonucleotide
ccuuagcacaguuuucggg

SEQ ID NO: 1027265 - RNA, 19 nt, Artificial Sequence
  Description of Artificial Sequence: Synthetic oligonucleotide
acgacgacugagaacaggu

SEQ ID NO: 1027266 - RNA, 19 nt, Artificial Sequence
  Description of Artificial Sequence: Synthetic oligonucleotide
gacguaaccuagggcauug

SEQ ID NO: 1027267 - RNA, 19 nt, Artificial Sequence
  Description of Artificial Sequence: Synthetic oligonucleotide
ggauucaguucgucggagg

SEQ ID NO: 1027268 - RNA, 19 nt, Artificial Sequence
  Description of Artificial Sequence: Synthetic oligonucleotide
cuauuucggcacacugggc

SEQ ID NO: 1027269 - RNA, 19 nt, Artificial Sequence
  Description of Artificial Sequence: Synthetic oligonucleotide
uggacguaaccuagggcau

SEQ ID NO: 1027270 - RNA, 19 nt, Artificial Sequence
  Description of Artificial Sequence: Synthetic oligonucleotide
gccguuuccacuaggcucg

SEQ ID NO: 1027271 - RNA, 19 nt, Artificial Sequence
  Description of Artificial Sequence: Synthetic oligonucleotide
gaacgaauaaccucucguu

SEQ ID NO: 1027272 - RNA, 19 nt, Artificial Sequence
  Description of Artificial Sequence: Synthetic oligonucleotide
aguucgucggaggucaggu

SEQ ID NO: 1027273 - RNA, 19 nt, Artificial Sequence
  Description of Artificial Sequence: Synthetic oligonucleotide
aagccuagaauaggaucgu

SEQ ID NO: 1027274 - RNA, 19 nt, Artificial Sequence
  Description of Artificial Sequence: Synthetic oligonucleotide
augagauacugugaauuau

SEQ ID NO: 1027275 - RNA, 19 nt, Artificial Sequence
  Description of Artificial Sequence: Synthetic oligonucleotide
ucgacaucguggcgcagac

SEQ ID NO: 1027276 - RNA, 19 nt, Artificial Sequence
  Description of Artificial Sequence: Synthetic oligonucleotide
uaggaucguugguuucuag

SEQ ID NO: 1027277 - RNA, 19 nt, Artificial Sequence
  Description of Artificial Sequence: Synthetic oligonucleotide
aggugcaucaagcgcucug

SEQ ID NO: 1027278 - RNA, 19 nt, Artificial Sequence
  Description of Artificial Sequence: Synthetic oligonucleotide
cgauagaugaacacgcgac

SEQ ID NO: 1027279 - RNA, 19 nt, Artificial Sequence
  Description of Artificial Sequence: Synthetic oligonucleotide
ucggggagccuuacaguca

SEQ ID NO: 1027280 - RNA, 19 nt, Artificial Sequence
  Description of Artificial Sequence: Synthetic oligonucleotide
caugugcuccaacguauac

SEQ ID NO: 1027281 - RNA, 19 nt, Artificial Sequence
  Description of Artificial Sequence: Synthetic oligonucleotide
cacagugcagauaauuaua

SEQ ID NO: 1027282 - RNA, 19 nt, Artificial Sequence
  Description of Artificial Sequence: Synthetic oligonucleotide
acgacugagaacagguacu

SEQ ID NO: 1027283 - RNA, 19 nt, Artificial Sequence
  Description of Artificial Sequence: Synthetic oligonucleotide
aucuccaagccgucauucu

SEQ ID NO: 1027284 - RNA, 19 nt, Artificial Sequence
  Description of Artificial Sequence: Synthetic oligonucleotide
ugauaccaggcaucacagu

SEQ ID NO: 1027285 - RNA, 19 nt, Artificial Sequence
  Description of Artificial Sequence: Synthetic oligonucleotide
acgcacagagacgauuguc

SEQ ID NO: 1027286 - RNA, 19 nt, Artificial Sequence
  Description of Artificial Sequence: Synthetic oligonucleotide
gcuacugaaugcucuucag

SEQ ID NO: 1027287 - RNA, 19 nt, Artificial Sequence
  Description of Artificial Sequence: Synthetic oligonucleotide
aaccucucguuuguugccu

SEQ ID NO: 1027288 - RNA, 19 nt, Artificial Sequence
  Description of Artificial Sequence: Synthetic oligonucleotide
augugcuccaacguauacu

SEQ ID NO: 1027289 - RNA, 19 nt, Artificial Sequence
  Description of Artificial Sequence: Synthetic oligonucleotide
cagaugaguagagccuucc

SEQ ID NO: 1027290 - RNA, 19 nt, Artificial Sequence
  Description of Artificial Sequence: Synthetic oligonucleotide
ggaugugaaauggauggac

SEQ ID NO: 1027291 - RNA, 19 nt, Artificial Sequence
  Description of Artificial Sequence: Synthetic oligonucleotide
aagguagcccaggcagggg

SEQ ID NO: 1027292 - RNA, 19 nt, Artificial Sequence
  Description of Artificial Sequence: Synthetic oligonucleotide
ucguacgcugucacaucug

SEQ ID NO: 1027293 - RNA, 19 nt, Artificial Sequence
  Description of Artificial Sequence: Synthetic oligonucleotide
ggcggcauaggaguaauug

SEQ ID NO: 1027294 - RNA, 19 nt, Artificial Sequence
  Description of Artificial Sequence: Synthetic oligonucleotide
acgcgacgaaggcacucgc

SEQ ID NO: 1027295 - RNA, 19 nt, Artificial Sequence
  Description of Artificial Sequence: Synthetic oligonucleotide
agccgugaaggacuuaaua

SEQ ID NO: 1027296 - RNA, 19 nt, Artificial Sequence
  Description of Artificial Sequence: Synthetic oligonucleotide
caggacuauuuccacgguc

SEQ ID NO: 1027297 - RNA, 19 nt, Artificial Sequence
  Description of Artificial Sequence: Synthetic oligonucleotide
aauguggcacugacaguga

SEQ ID NO: 1027298 - RNA, 19 nt, Artificial Sequence
  Description of Artificial Sequence: Synthetic oligonucleotide
agaacagguacugguugcu

SEQ ID NO: 1027299 - RNA, 19 nt, Artificial Sequence
  Description of Artificial Sequence: Synthetic oligonucleotide
acagccgugaaggacuuaa

SEQ ID NO: 1027300 - RNA, 19 nt, Artificial Sequence
  Description of Artificial Sequence: Synthetic oligonucleotide
guugccuggaagccuagaa

SEQ ID NO: 1027301 - RNA, 19 nt, Artificial Sequence
  Description of Artificial Sequence: Synthetic oligonucleotide
cuuaauaggacacgaucau

SEQ ID NO: 1027302 - RNA, 19 nt, Artificial Sequence
  Description of Artificial Sequence: Synthetic oligonucleotide
ugcaucaagcgcucugcua

SEQ ID NO: 1027303 - RNA, 19 nt, Artificial Sequence
  Description of Artificial Sequence: Synthetic oligonucleotide
cauuaggccguuuccacua

SEQ ID NO: 1027304 - RNA, 19 nt, Artificial Sequence
  Description of Artificial Sequence: Synthetic oligonucleotide
ccaugucagacccucauuc

SEQ ID NO: 1027305 - RNA, 19 nt, Artificial Sequence
  Description of Artificial Sequence: Synthetic oligonucleotide
uauccggauuuggauucag

SEQ ID NO: 1027306 - RNA, 19 nt, Artificial Sequence
  Description of Artificial Sequence: Synthetic oligonucleotide
gaggauuaauucucuguau

SEQ ID NO: 1027307 - RNA, 19 nt, Artificial Sequence
  Description of Artificial Sequence: Synthetic oligonucleotide
aucgcagcguaauguggca

SEQ ID NO: 1027308 - RNA, 19 nt, Artificial Sequence
  Description of Artificial Sequence: Synthetic oligonucleotide
agccuuacagucacuguca

SEQ ID NO: 1027309 - RNA, 19 nt, Artificial Sequence
  Description of Artificial Sequence: Synthetic oligonucleotide
cacgacgacugagaacagg

SEQ ID NO: 1027310 - RNA, 19 nt, Artificial Sequence
  Description of Artificial Sequence: Synthetic oligonucleotide
ggccguuuccacuaggcuc

SEQ ID NO: 1027311 - RNA, 19 nt, Artificial Sequence
  Description of Artificial Sequence: Synthetic oligonucleotide
cuauucgaagaagcagcac

SEQ ID NO: 1027312 - RNA, 19 nt, Artificial Sequence
  Description of Artificial Sequence: Synthetic oligonucleotide
cacgcgacgaaggcacucg

SEQ ID NO: 1027313 - RNA, 19 nt, Artificial Sequence
  Description of Artificial Sequence: Synthetic oligonucleotide
cagagacgauugucguacg

SEQ ID NO: 1027314 - RNA, 19 nt, Artificial Sequence
  Description of Artificial Sequence: Synthetic oligonucleotide
caacagaugaguagagccu

SEQ ID NO: 1027315 - RNA, 19 nt, Artificial Sequence
  Description of Artificial Sequence: Synthetic oligonucleotide
ugucguacgcugucacauc

SEQ ID NO: 1027316 - RNA, 19 nt, Artificial Sequence
  Description of Artificial Sequence: Synthetic oligonucleotide
cauucaaacuuaacaaguu

SEQ ID NO: 1027317 - RNA, 19 nt, Artificial Sequence
  Description of Artificial Sequence: Synthetic oligonucleotide
ucggaacaccucucggggu

SEQ ID NO: 1027318 - RNA, 19 nt, Artificial Sequence
  Description of Artificial Sequence: Synthetic oligonucleotide
cuuuauccggauuuggauu

SEQ ID NO: 1027319 - RNA, 19 nt, Artificial Sequence
  Description of Artificial Sequence: Synthetic oligonucleotide
cacagauucauaaucucuu

SEQ ID NO: 1027320 - RNA, 19 nt, Artificial Sequence
  Description of Artificial Sequence: Synthetic oligonucleotide
uuauccggauuuggauuca

SEQ ID NO: 1027321 - RNA, 19 nt, Artificial Sequence
  Description of Artificial Sequence: Synthetic oligonucleotide
cauagcguucacagauuca

SEQ ID NO: 1027322 - RNA, 19 nt, Artificial Sequence
  Description of Artificial Sequence: Synthetic oligonucleotide
cucgcagagggcggcauag

SEQ ID NO: 1027323 - RNA, 19 nt, Artificial Sequence
  Description of Artificial Sequence: Synthetic oligonucleotide
cacuaggcucgaucgcagc

SEQ ID NO: 1027324 - RNA, 19 nt, Artificial Sequence
  Description of Artificial Sequence: Synthetic oligonucleotide
aucgacaucguggcgcaga

SEQ ID NO: 1027325 - RNA, 19 nt, Artificial Sequence
  Description of Artificial Sequence: Synthetic oligonucleotide
aggaaaucuccaagccguc

SEQ ID NO: 1027326 - RNA, 19 nt, Artificial Sequence
  Description of Artificial Sequence: Synthetic oligonucleotide
ucaguucgucggaggucag

SEQ ID NO: 1027327 - RNA, 19 nt, Artificial Sequence
  Description of Artificial Sequence: Synthetic oligonucleotide
aucccauagcguucacaga

SEQ ID NO: 1027328 - RNA, 19 nt, Artificial Sequence
  Description of Artificial Sequence: Synthetic oligonucleotide
ccggauuuggauucaguuc

SEQ ID NO: 1027329 - RNA, 19 nt, Artificial Sequence
  Description of Artificial Sequence: Synthetic oligonucleotide
ucuuugaugcuuggacgua

SEQ ID NO: 1027330 - RNA, 19 nt, Artificial Sequence
  Description of Artificial Sequence: Synthetic oligonucleotide
uagcguucacagauucaua

SEQ ID NO: 1027331 - RNA, 19 nt, Artificial Sequence
  Description of Artificial Sequence: Synthetic oligonucleotide
gagacgauugucguacgcu

SEQ ID NO: 1027332 - RNA, 19 nt, Artificial Sequence
  Description of Artificial Sequence: Synthetic oligonucleotide
ccaucugacaagguagccc

SEQ ID NO: 1027333 - RNA, 19 nt, Artificial Sequence
  Description of Artificial Sequence: Synthetic oligonucleotide
uggcgaugugcucccacau

SEQ ID NO: 1027334 - RNA, 19 nt, Artificial Sequence
  Description of Artificial Sequence: Synthetic oligonucleotide
ggacgcacagagacgauug

SEQ ID NO: 1027335 - RNA, 19 nt, Artificial Sequence
  Description of Artificial Sequence: Synthetic oligonucleotide
agccaaaugcuggaggauu

SEQ ID NO: 1027336 - RNA, 19 nt, Artificial Sequence
  Description of Artificial Sequence: Synthetic oligonucleotide
auaauucucccgagguuau

SEQ ID NO: 1027337 - RNA, 19 nt, Artificial Sequence
  Description of Artificial Sequence: Synthetic oligonucleotide
gccuagaauaggaucguug

SEQ ID NO: 1027338 - RNA, 19 nt, Artificial Sequence
  Description of Artificial Sequence: Synthetic oligonucleotide
ucuaucccauagcguucac

SEQ ID NO: 1027339 - RNA, 19 nt, Artificial Sequence
  Description of Artificial Sequence: Synthetic oligonucleotide
acgaaggcacucgcagagg

SEQ ID NO: 1027340 - RNA, 19 nt, Artificial Sequence
  Description of Artificial Sequence: Synthetic oligonucleotide
cuuuggucuucucuggccu

SEQ ID NO: 1027341 - RNA, 19 nt, Artificial Sequence
  Description of Artificial Sequence: Synthetic oligonucleotide
accucucguuuguugccug

SEQ ID NO: 1027342 - RNA, 19 nt, Artificial Sequence
  Description of Artificial Sequence: Synthetic oligonucleotide
acacgcgacgaaggcacuc

SEQ ID NO: 1027343 - RNA, 19 nt, Artificial Sequence
  Description of Artificial Sequence: Synthetic oligonucleotide
cuagggcauugaagguggc

SEQ ID NO: 1027344 - RNA, 19 nt, Artificial Sequence
  Description of Artificial Sequence: Synthetic oligonucleotide
cagagggcggcauaggagu

SEQ ID NO: 1027345 - RNA, 19 nt, Artificial Sequence
  Description of Artificial Sequence: Synthetic oligonucleotide
ggauggacgcacagagacg

SEQ ID NO: 1027346 - RNA, 19 nt, Artificial Sequence
  Description of Artificial Sequence: Synthetic oligonucleotide
guucgucggaggucaggug

SEQ ID NO: 1027347 - RNA, 19 nt, Artificial Sequence
  Description of Artificial Sequence: Synthetic oligonucleotide
caucguggcgcagacagaa

SEQ ID NO: 1027348 - RNA, 19 nt, Artificial Sequence
  Description of Artificial Sequence: Synthetic oligonucleotide
cuagaauaggaucguuggu

SEQ ID NO: 1027349 - RNA, 19 nt, Artificial Sequence
  Description of Artificial Sequence: Synthetic oligonucleotide
cagaguccggcaaugagau

SEQ ID NO: 1027350 - RNA, 19 nt, Artificial Sequence
  Description of Artificial Sequence: Synthetic oligonucleotide
auuuccacggucaccuguu

SEQ ID NO: 1027351 - RNA, 19 nt, Artificial Sequence
  Description of Artificial Sequence: Synthetic oligonucleotide
gucguacgcugucacaucu

SEQ ID NO: 1027352 - RNA, 19 nt, Artificial Sequence
  Description of Artificial Sequence: Synthetic oligonucleotide
cuuuaggguccacgacgac

SEQ ID NO: 1027353 - RNA, 19 nt, Artificial Sequence
  Description of Artificial Sequence: Synthetic oligonucleotide
uugcuacuugcugcuuagc

SEQ ID NO: 1027354 - RNA, 19 nt, Artificial Sequence
  Description of Artificial Sequence: Synthetic oligonucleotide
gggagccuuacagucacug

SEQ ID NO: 1027355 - RNA, 19 nt, Artificial Sequence
  Description of Artificial Sequence: Synthetic oligonucleotide
cuuugaugcuuggacguaa

SEQ ID NO: 1027356 - RNA, 19 nt, Artificial Sequence
  Description of Artificial Sequence: Synthetic oligonucleotide
aggguccacgacgacugag

SEQ ID NO: 1027357 - RNA, 19 nt, Artificial Sequence
  Description of Artificial Sequence: Synthetic oligonucleotide
cgaucauuaggccguuucc

SEQ ID NO: 1027358 - RNA, 19 nt, Artificial Sequence
  Description of Artificial Sequence: Synthetic oligonucleotide
ggacuauuuccacggucac

SEQ ID NO: 1027359 - RNA, 19 nt, Artificial Sequence
  Description of Artificial Sequence: Synthetic oligonucleotide
caugucagacccucauucu

SEQ ID NO: 1027360 - RNA, 19 nt, Artificial Sequence
  Description of Artificial Sequence: Synthetic oligonucleotide
gcaucaagcgcucugcuau

SEQ ID NO: 1027361 - RNA, 19 nt, Artificial Sequence
  Description of Artificial Sequence: Synthetic oligonucleotide
gccgauagaugaacacgcg

SEQ ID NO: 1027362 - RNA, 19 nt, Artificial Sequence
  Description of Artificial Sequence: Synthetic oligonucleotide
gugcuccaacguauacugg

SEQ ID NO: 1027363 - RNA, 19 nt, Artificial Sequence
  Description of Artificial Sequence: Synthetic oligonucleotide
caguucgucggaggucagg

SEQ ID NO: 1027364 - RNA, 19 nt, Artificial Sequence
  Description of Artificial Sequence: Synthetic oligonucleotide
agaacccaauggucucuaa

SEQ ID NO: 1027365 - RNA, 19 nt, Artificial Sequence
  Description of Artificial Sequence: Synthetic oligonucleotide
aaacagccgugaaggacuu

SEQ ID NO: 1027366 - RNA, 19 nt, Artificial Sequence
  Description of Artificial Sequence: Synthetic oligonucleotide
ggcgaugugcucccacaug

SEQ ID NO: 1027367 - RNA, 19 nt, Artificial Sequence
  Description of Artificial Sequence: Synthetic oligonucleotide
guacgcugucacaucugug

SEQ ID NO: 1027368 - RNA, 19 nt, Artificial Sequence
  Description of Artificial Sequence: Synthetic oligonucleotide
cgaucgcagcguaaugugg

SEQ ID NO: 1027369 - RNA, 19 nt, Artificial Sequence
  Description of Artificial Sequence: Synthetic oligonucleotide
auaggaucguugguuucua

SEQ ID NO: 1027370 - RNA, 19 nt, Artificial Sequence
  Description of Artificial Sequence: Synthetic oligonucleotide
accucucgggguuuuccua

SEQ ID NO: 1027371 - RNA, 19 nt, Artificial Sequence
  Description of Artificial Sequence: Synthetic oligonucleotide
cacagagacgauugucgua

SEQ ID NO: 1027372 - RNA, 19 nt, Artificial Sequence
  Description of Artificial Sequence: Synthetic oligonucleotide
cuaucccauagcguucaca

SEQ ID NO: 1027373 - RNA, 19 nt, Artificial Sequence
  Description of Artificial Sequence: Synthetic oligonucleotide
cucgaucgcagcguaaugu

SEQ ID NO: 1027374 - RNA, 19 nt, Artificial Sequence
  Description of Artificial Sequence: Synthetic oligonucleotide
gacgauugucguacgcugu

SEQ ID NO: 1027375 - RNA, 19 nt, Artificial Sequence
  Description of Artificial Sequence: Synthetic oligonucleotide
uacugcuuucguggucaac

SEQ ID NO: 1027376 - RNA, 19 nt, Artificial Sequence
  Description of Artificial Sequence: Synthetic oligonucleotide
uucaggccuccagguacca

SEQ ID NO: 1027377 - RNA, 19 nt, Artificial Sequence
  Description of Artificial Sequence: Synthetic oligonucleotide
gguuucuaggcuugcuacu

SEQ ID NO: 1027378 - RNA, 19 nt, Artificial Sequence
  Description of Artificial Sequence: Synthetic oligonucleotide
aguccggcaaugagauacu

SEQ ID NO: 1027379 - RNA, 19 nt, Artificial Sequence
  Description of Artificial Sequence: Synthetic oligonucleotide
aacacgcgacgaaggcacu

SEQ ID NO: 1027380 - RNA, 19 nt, Artificial Sequence
  Description of Artificial Sequence: Synthetic oligonucleotide
auccggauuuggauucagu

SEQ ID NO: 1027381 - RNA, 19 nt, Artificial Sequence
  Description of Artificial Sequence: Synthetic oligonucleotide
gacgcacagagacgauugu

SEQ ID NO: 1027382 - RNA, 19 nt, Artificial Sequence
  Description of Artificial Sequence: Synthetic oligonucleotide
aucaagcgcucugcuauuu

SEQ ID NO: 1027383 - RNA, 19 nt, Artificial Sequence
  Description of Artificial Sequence: Synthetic oligonucleotide
guccggcaaugagauacug

SEQ ID NO: 1027384 - RNA, 19 nt, Artificial Sequence
  Description of Artificial Sequence: Synthetic oligonucleotide
ccgauagaugaacacgcga

SEQ ID NO: 1027385 - RNA, 19 nt, Artificial Sequence
  Description of Artificial Sequence: Synthetic oligonucleotide
cucccgagguuaucaaugu

SEQ ID NO: 1027386 - RNA, 19 nt, Artificial Sequence
  Description of Artificial Sequence: Synthetic oligonucleotide
gcaucgacaucguggcgca

SEQ ID NO: 1027387 - RNA, 19 nt, Artificial Sequence
  Description of Artificial Sequence: Synthetic oligonucleotide
aucguggcgcagacagaag

SEQ ID NO: 1027388 - RNA, 19 nt, Artificial Sequence
  Description of Artificial Sequence: Synthetic oligonucleotide
gguaccacuggguacuguu

SEQ ID NO: 1027389 - RNA, 19 nt, Artificial Sequence
  Description of Artificial Sequence: Synthetic oligonucleotide
gugggaagucggaacaccu

SEQ ID NO: 1027390 - RNA, 19 nt, Artificial Sequence
  Description of Artificial Sequence: Synthetic oligonucleotide
gcaaccugccccacaugcc

SEQ ID NO: 1027391 - RNA, 19 nt, Artificial Sequence
  Description of Artificial Sequence: Synthetic oligonucleotide
ccuccuuagcacaguuuuc

SEQ ID NO: 1027392 - RNA, 19 nt, Artificial Sequence
  Description of Artificial Sequence: Synthetic oligonucleotide
agggcggcauaggaguaau

SEQ ID NO: 1027393 - RNA, 19 nt, Artificial Sequence
  Description of Artificial Sequence: Synthetic oligonucleotide
gcagcguaauguggcacug

SEQ ID NO: 1027394 - RNA, 19 nt, Artificial Sequence
  Description of Artificial Sequence: Synthetic oligonucleotide
gcuugcuacuugcugcuua

SEQ ID NO: 1027395 - RNA, 19 nt, Artificial Sequence
  Description of Artificial Sequence: Synthetic oligonucleotide
acucgcagagggcggcaua

SEQ ID NO: 1027396 - RNA, 19 nt, Artificial Sequence
  Description of Artificial Sequence: Synthetic oligonucleotide
ccaacguauacuggucauc

SEQ ID NO: 1027397 - RNA, 19 nt, Artificial Sequence
  Description of Artificial Sequence: Synthetic oligonucleotide
agaguccggcaaugagaua

SEQ ID NO: 1027398 - RNA, 19 nt, Artificial Sequence
  Description of Artificial Sequence: Synthetic oligonucleotide
agccuagaauaggaucguu

SEQ ID NO: 1027399 - RNA, 19 nt, Artificial Sequence
  Description of Artificial Sequence: Synthetic oligonucleotide
acguaaccuagggcauuga

SEQ ID NO: 1027400 - RNA, 19 nt, Artificial Sequence
  Description of Artificial Sequence: Synthetic oligonucleotide
cuaaguccacagcuucuau

SEQ ID NO: 1027401 - RNA, 19 nt, Artificial Sequence
  Description of Artificial Sequence: Synthetic oligonucleotide
ggguccacgacgacugaga

SEQ ID NO: 1027402 - RNA, 19 nt, Artificial Sequence
  Description of Artificial Sequence: Synthetic oligonucleotide
gcgcucugcuauuucggca

SEQ ID NO: 1027403 - RNA, 19 nt, Artificial Sequence
  Description of Artificial Sequence: Synthetic oligonucleotide
acaucguggcgcagacaga

SEQ ID NO: 1027404 - RNA, 19 nt, Artificial Sequence
  Description of Artificial Sequence: Synthetic oligonucleotide
cuaggcucgaucgcagcgu

SEQ ID NO: 1027405 - RNA, 19 nt, Artificial Sequence
  Description of Artificial Sequence: Synthetic oligonucleotide
gugcaucaagcgcucugcu

SEQ ID NO: 1027406 - RNA, 19 nt, Artificial Sequence
  Description of Artificial Sequence: Synthetic oligonucleotide
cgacugagaacagguacug

SEQ ID NO: 1027407 - RNA, 19 nt, Artificial Sequence
  Description of Artificial Sequence: Synthetic oligonucleotide
ggagccuuacagucacugu

SEQ ID NO: 1027408 - RNA, 19 nt, Artificial Sequence
  Description of Artificial Sequence: Synthetic oligonucleotide
gacccacuccaaagacaca

SEQ ID NO: 1027409 - RNA, 19 nt, Artificial Sequence
  Description of Artificial Sequence: Synthetic oligonucleotide
ccgagguuaucaauguagu

SEQ ID NO: 1027410 - RNA, 19 nt, Artificial Sequence
  Description of Artificial Sequence: Synthetic oligonucleotide
guacugcuuucguggucaa

SEQ ID NO: 1027411 - RNA, 19 nt, Artificial Sequence
  Description of Artificial Sequence: Synthetic oligonucleotide
gaauaaccucucguuuguu

SEQ ID NO: 1027412 - RNA, 19 nt, Artificial Sequence
  Description of Artificial Sequence: Synthetic oligonucleotide
aacagccgugaaggacuua

SEQ ID NO: 1027413 - RNA, 19 nt, Artificial Sequence
  Description of Artificial Sequence: Synthetic oligonucleotide
caaaugcuggaggauuaau

SEQ ID NO: 1027414 - RNA, 19 nt, Artificial Sequence
  Description of Artificial Sequence: Synthetic oligonucleotide
caccucucgggguuuuccu

SEQ ID NO: 1027415 - RNA, 19 nt, Artificial Sequence
  Description of Artificial Sequence: Synthetic oligonucleotide
caucgacaucguggcgcag

SEQ ID NO: 1027416 - RNA, 19 nt, Artificial Sequence
  Description of Artificial Sequence: Synthetic oligonucleotide
cagcguaauguggcacuga

SEQ ID NO: 1027417 - RNA, 19 nt, Artificial Sequence
  Description of Artificial Sequence: Synthetic oligonucleotide
gacccucauucuucuuaau

SEQ ID NO: 1027418 - RNA, 19 nt, Artificial Sequence
  Description of Artificial Sequence: Synthetic oligonucleotide
gcguaauguggcacugaca

SEQ ID NO: 1027419 - RNA, 19 nt, Artificial Sequence
  Description of Artificial Sequence: Synthetic oligonucleotide
gcguucacagauucauaau

SEQ ID NO: 1027420 - RNA, 19 nt, Artificial Sequence
  Description of Artificial Sequence: Synthetic oligonucleotide
ggacuuaauaggacacgau

SEQ ID NO: 1027421 - RNA, 19 nt, Artificial Sequence
  Description of Artificial Sequence: Synthetic oligonucleotide
gcacagcuacugaaugcuc

SEQ ID NO: 1027422 - RNA, 19 nt, Artificial Sequence
  Description of Artificial Sequence: Synthetic oligonucleotide
cguggucaacagaugagua

SEQ ID NO: 1027423 - RNA, 19 nt, Artificial Sequence
  Description of Artificial Sequence: Synthetic oligonucleotide
cgagguuaucaauguagua

SEQ ID NO: 1027424 - RNA, 19 nt, Artificial Sequence
  Description of Artificial Sequence: Synthetic oligonucleotide
cguaaccuagggcauugaa

SEQ ID NO: 1027425 - RNA, 19 nt, Artificial Sequence
  Description of Artificial Sequence: Synthetic oligonucleotide
gguuuuccuaaggcagugu

SEQ ID NO: 1027426 - RNA, 19 nt, Artificial Sequence
  Description of Artificial Sequence: Synthetic oligonucleotide
auggacgcacagagacgau

SEQ ID NO: 1027427 - RNA, 19 nt, Artificial Sequence
  Description of Artificial Sequence: Synthetic oligonucleotide
caucaagcgcucugcuauu

SEQ ID NO: 1027428 - RNA, 19 nt, Artificial Sequence
  Description of Artificial Sequence: Synthetic oligonucleotide
ccacgacgacugagaacag

SEQ ID NO: 1027429 - RNA, 19 nt, Artificial Sequence
  Description of Artificial Sequence: Synthetic oligonucleotide
gggguaggcugccgauaga

SEQ ID NO: 1027430 - RNA, 19 nt, Artificial Sequence
  Description of Artificial Sequence: Synthetic oligonucleotide
gcgcaggcaaagaacuucu

SEQ ID NO: 1027431 - RNA, 19 nt, Artificial Sequence
  Description of Artificial Sequence: Synthetic oligonucleotide
gcaugugcuccaacguaua

SEQ ID NO: 1027432 - RNA, 19 nt, Artificial Sequence
  Description of Artificial Sequence: Synthetic oligonucleotide
ccaaaugcuggaggauuaa

SEQ ID NO: 1027433 - RNA, 19 nt, Artificial Sequence
  Description of Artificial Sequence: Synthetic oligonucleotide
cacggucaccuguuccaau

SEQ ID NO: 1027434 - RNA, 19 nt, Artificial Sequence
  Description of Artificial Sequence: Synthetic oligonucleotide
ccacaugaguuguuuuaau

SEQ ID NO: 1027435 - RNA, 19 nt, Artificial Sequence
  Description of Artificial Sequence: Synthetic oligonucleotide
cguacgcugucacaucugu

SEQ ID NO: 1027436 - RNA, 19 nt, Artificial Sequence
  Description of Artificial Sequence: Synthetic oligonucleotide
ccaacuguucaggccucca

SEQ ID NO: 1027437 - RNA, 19 nt, Artificial Sequence
  Description of Artificial Sequence: Synthetic oligonucleotide
cagccgugaaggacuuaau

SEQ ID NO: 1027438 - RNA, 19 nt, Artificial Sequence
  Description of Artificial Sequence: Synthetic oligonucleotide
agguggcgaugugcuccca

SEQ ID NO: 1027439 - RNA, 19 nt, Artificial Sequence
  Description of Artificial Sequence: Synthetic oligonucleotide
cgauugucguacgcuguca

SEQ ID NO: 1027440 - RNA, 19 nt, Artificial Sequence
  Description of Artificial Sequence: Synthetic oligonucleotide
cgcgacgaaggcacucgca

SEQ ID NO: 1027441 - RNA, 19 nt, Artificial Sequence
  Description of Artificial Sequence: Synthetic oligonucleotide
ggacguaaccuagggcauu

SEQ ID NO: 1027442 - RNA, 19 nt, Artificial Sequence
  Description of Artificial Sequence: Synthetic oligonucleotide
cgacgacugagaacaggua

SEQ ID NO: 1027443 - RNA, 19 nt, Artificial Sequence
  Description of Artificial Sequence: Synthetic oligonucleotide
gcacucgcagagggcggca

SEQ ID NO: 1027444 - RNA, 19 nt, Artificial Sequence
  Description of Artificial Sequence: Synthetic oligonucleotide
ccacggucaccuguuccaa

SEQ ID NO: 1027445 - RNA, 19 nt, Artificial Sequence
  Description of Artificial Sequence: Synthetic oligonucleotide
cacucgcagagggcggcau

SEQ ID NO: 1027446 - RNA, 19 nt, Artificial Sequence
  Description of Artificial Sequence: Synthetic oligonucleotide
cacgaucauuaggccguuu

SEQ ID NO: 1027447 - RNA, 19 nt, Artificial Sequence
  Description of Artificial Sequence: Synthetic oligonucleotide
ccguuuccacuaggcucga

SEQ ID NO: 1027448 - RNA, 19 nt, Artificial Sequence
  Description of Artificial Sequence: Synthetic oligonucleotide
gggcggcauaggaguaauu

SEQ ID NO: 1027449 - RNA, 19 nt, Artificial Sequence
  Description of Artificial Sequence: Synthetic oligonucleotide
auaaauauaaccaauagac

SEQ ID NO: 1027450 - RNA, 19 nt, Artificial Sequence
  Description of Artificial Sequence: Synthetic oligonucleotide
aauaagguaaguuuuaacu

SEQ ID NO: 1027451 - RNA, 19 nt, Artificial Sequence
  Description of Artificial Sequence: Synthetic oligonucleotide
aacuaauuaacaaagcacc

SEQ ID NO: 1027452 - RNA, 19 nt, Artificial Sequence
  Description of Artificial Sequence: Synthetic oligonucleotide
cuaaaagacauaauuaucc

SEQ ID NO: 1027453 - RNA, 19 nt, Artificial Sequence
  Description of Artificial Sequence: Synthetic oligonucleotide
uauugaggagaacagaugg

SEQ ID NO: 1027454 - RNA, 19 nt, Artificial Sequence
  Description of Artificial Sequence: Synthetic oligonucleotide
uuuauguuuacuacuauug

SEQ ID NO: 1027455 - RNA, 19 nt, Artificial Sequence
  Description of Artificial Sequence: Synthetic oligonucleotide
aauucaguaauauacagua

SEQ ID NO: 1027456 - RNA, 19 nt, Artificial Sequence
  Description of Artificial Sequence: Synthetic oligonucleotide
aauucagagagguaaucac

SEQ ID NO: 1027457 - RNA, 19 nt, Artificial Sequence
  Description of Artificial Sequence: Synthetic oligonucleotide
uuuaaaguuguacuccugg

SEQ ID NO: 1027458 - RNA, 19 nt, Artificial Sequence
  Description of Artificial Sequence: Synthetic oligonucleotide
uuuaaacuucucaauauag

SEQ ID NO: 1027459 - RNA, 19 nt, Artificial Sequence
  Description of Artificial Sequence: Synthetic oligonucleotide
aacacuuguaggcuuaaac

SEQ ID NO: 1027460 - RNA, 19 nt, Artificial Sequence
  Description of Artificial Sequence: Synthetic oligonucleotide
uaaccuaguaaucauaaug

SEQ ID NO: 1027461 - RNA, 19 nt, Artificial Sequence
  Description of Artificial Sequence: Synthetic oligonucleotide
uuuauaacaauaaugucua

SEQ ID NO: 1027462 - RNA, 19 nt, Artificial Sequence
  Description of Artificial Sequence: Synthetic oligonucleotide
uaugauagcugauuuauug

SEQ ID NO: 1027463 - RNA, 19 nt, Artificial Sequence
  Description of Artificial Sequence: Synthetic oligonucleotide
aacgaauagcaucuggacg

SEQ ID NO: 1027464 - RNA, 19 nt, Artificial Sequence
  Description of Artificial Sequence: Synthetic oligonucleotide
aucauaauguaauuucuac

SEQ ID NO: 1027465 - RNA, 19 nt, Artificial Sequence
  Description of Artificial Sequence: Synthetic oligonucleotide
aauaaugucuaaaagacau

SEQ ID NO: 1027466 - RNA, 19 nt, Artificial Sequence
  Description of Artificial Sequence: Synthetic oligonucleotide
uguagaauuaucuucagua

SEQ ID NO: 1027467 - RNA, 19 nt, Artificial Sequence
  Description of Artificial Sequence: Synthetic oligonucleotide
uucgguauaaauauuaaau

SEQ ID NO: 1027468 - RNA, 19 nt, Artificial Sequence
  Description of Artificial Sequence: Synthetic oligonucleotide
auaaccaauagacuucuac

SEQ ID NO: 1027469 - RNA, 19 nt, Artificial Sequence
  Description of Artificial Sequence: Synthetic oligonucleotide
aauauaaccaauagacuuc

SEQ ID NO: 1027470 - RNA, 19 nt, Artificial Sequence
  Description of Artificial Sequence: Synthetic oligonucleotide
ugauucaacaaacugggug

SEQ ID NO: 1027471 - RNA, 19 nt, Artificial Sequence
  Description of Artificial Sequence: Synthetic oligonucleotide
uaacuaauuaacaaagcac

SEQ ID NO: 1027472 - RNA, 19 nt, Artificial Sequence
  Description of Artificial Sequence: Synthetic oligonucleotide
ugaaugauucaacaaacug

SEQ ID NO: 1027473 - RNA, 19 nt, Artificial Sequence
  Description of Artificial Sequence: Synthetic oligonucleotide
uuugcgauacucauugagg

SEQ ID NO: 1027474 - RNA, 19 nt, Artificial Sequence
  Description of Artificial Sequence: Synthetic oligonucleotide
aaccaauagacuucuacag

SEQ ID NO: 1027475 - RNA, 19 nt, Artificial Sequence
  Description of Artificial Sequence: Synthetic oligonucleotide
acgaauagcaucuggacgg

SEQ ID NO: 1027476 - RNA, 19 nt, Artificial Sequence
  Description of Artificial Sequence: Synthetic oligonucleotide
auagucuucuaucacaauc

SEQ ID NO: 1027477 - RNA, 19 nt, Artificial Sequence
  Description of Artificial Sequence: Synthetic oligonucleotide
aaaggugucggguagcaag

SEQ ID NO: 1027478 - RNA, 19 nt, Artificial Sequence
  Description of Artificial Sequence: Synthetic oligonucleotide
auacccaaaguacaaacac

SEQ ID NO: 1027479 - RNA, 19 nt, Artificial Sequence
  Description of Artificial Sequence: Synthetic oligonucleotide
uuuauguuuaugauagcug

SEQ ID NO: 1027480 - RNA, 19 nt, Artificial Sequence
  Description of Artificial Sequence: Synthetic oligonucleotide
aauuccaucuuuaaacuuc

SEQ ID NO: 1027481 - RNA, 19 nt, Artificial Sequence
  Description of Artificial Sequence: Synthetic oligonucleotide
auuaacaaagcaccuacag

SEQ ID NO: 1027482 - RNA, 19 nt, Artificial Sequence
  Description of Artificial Sequence: Synthetic oligonucleotide
aaagacauaauuauccuca

SEQ ID NO: 1027483 - RNA, 19 nt, Artificial Sequence
  Description of Artificial Sequence: Synthetic oligonucleotide
uguaaaagagugaaagcug

SEQ ID NO: 1027484 - RNA, 19 nt, Artificial Sequence
  Description of Artificial Sequence: Synthetic oligonucleotide
uguaagaaagccaugcuuc

SEQ ID NO: 1027485 - RNA, 19 nt, Artificial Sequence
  Description of Artificial Sequence: Synthetic oligonucleotide
acaaaucuaacauugcuca

SEQ ID NO: 1027486 - RNA, 19 nt, Artificial Sequence
  Description of Artificial Sequence: Synthetic oligonucleotide
uagagauuuauguuuauga

SEQ ID NO: 1027487 - RNA, 19 nt, Artificial Sequence
  Description of Artificial Sequence: Synthetic oligonucleotide
ugauuuauugguauggguc

SEQ ID NO: 1027488 - RNA, 19 nt, Artificial Sequence
  Description of Artificial Sequence: Synthetic oligonucleotide
aagcucucaauuuagaaau

SEQ ID NO: 1027489 - RNA, 19 nt, Artificial Sequence
  Description of Artificial Sequence: Synthetic oligonucleotide
aagugaaaagagcauucgg

SEQ ID NO: 1027490 - RNA, 19 nt, Artificial Sequence
  Description of Artificial Sequence: Synthetic oligonucleotide
uugagggcaacacauaccc

SEQ ID NO: 1027491 - RNA, 19 nt, Artificial Sequence
  Description of Artificial Sequence: Synthetic oligonucleotide
uggaauuacccauaagucc

SEQ ID NO: 1027492 - RNA, 19 nt, Artificial Sequence
  Description of Artificial Sequence: Synthetic oligonucleotide
auguuuacuacuauugccc

SEQ ID NO: 1027493 - RNA, 19 nt, Artificial Sequence
  Description of Artificial Sequence: Synthetic oligonucleotide
uuuaaccuaguaaucauaa

SEQ ID NO: 1027494 - RNA, 19 nt, Artificial Sequence
  Description of Artificial Sequence: Synthetic oligonucleotide
uugcgauacucauugaggg

SEQ ID NO: 1027495 - RNA, 19 nt, Artificial Sequence
  Description of Artificial Sequence: Synthetic oligonucleotide
acauacccaaaguacaaac

SEQ ID NO: 1027496 - RNA, 19 nt, Artificial Sequence
  Description of Artificial Sequence: Synthetic oligonucleotide
gauucaacaaacuggguga

SEQ ID NO: 1027497 - RNA, 19 nt, Artificial Sequence
  Description of Artificial Sequence: Synthetic oligonucleotide
guugaauucagcugcaaug

SEQ ID NO: 1027498 - RNA, 19 nt, Artificial Sequence
  Description of Artificial Sequence: Synthetic oligonucleotide
ucuaaaagacauaauuauc

SEQ ID NO: 1027499 - RNA, 19 nt, Artificial Sequence
  Description of Artificial Sequence: Synthetic oligonucleotide
gauggaauuacccauaagu

SEQ ID NO: 1027500 - RNA, 19 nt, Artificial Sequence
  Description of Artificial Sequence: Synthetic oligonucleotide
aaucuaacauugcucagga

SEQ ID NO: 1027501 - RNA, 19 nt, Artificial Sequence
  Description of Artificial Sequence: Synthetic oligonucleotide
cuuguaggcuuaaacauag

SEQ ID NO: 1027502 - RNA, 19 nt, Artificial Sequence
  Description of Artificial Sequence: Synthetic oligonucleotide
gauaaugagauguagaauu

SEQ ID NO: 1027503 - RNA, 19 nt, Artificial Sequence
  Description of Artificial Sequence: Synthetic oligonucleotide
cauaaguccuuucagggag

SEQ ID NO: 1027504 - RNA, 19 nt, Artificial Sequence
  Description of Artificial Sequence: Synthetic oligonucleotide
uucucaauauagcagacua

SEQ ID NO: 1027505 - RNA, 19 nt, Artificial Sequence
  Description of Artificial Sequence: Synthetic oligonucleotide
gagauguagaauuaucuuc

SEQ ID NO: 1027506 - RNA, 19 nt, Artificial Sequence
  Description of Artificial Sequence: Synthetic oligonucleotide
uaagguaaguuuuaacuaa

SEQ ID NO: 1027507 - RNA, 19 nt, Artificial Sequence
  Description of Artificial Sequence: Synthetic oligonucleotide
ugaagugguagccacucag

SEQ ID NO: 1027508 - RNA, 19 nt, Artificial Sequence
  Description of Artificial Sequence: Synthetic oligonucleotide
ucauaauguaauuucuacu

SEQ ID NO: 1027509 - RNA, 19 nt, Artificial Sequence
  Description of Artificial Sequence: Synthetic oligonucleotide
aguucuaccauggucuccc

SEQ ID NO: 1027510 - RNA, 19 nt, Artificial Sequence
  Description of Artificial Sequence: Synthetic oligonucleotide
aaccuaguaaucauaaugu

SEQ ID NO: 1027511 - RNA, 19 nt, Artificial Sequence
  Description of Artificial Sequence: Synthetic oligonucleotide
uucuacuaguuuuagagau

SEQ ID NO: 1027512 - RNA, 19 nt, Artificial Sequence
  Description of Artificial Sequence: Synthetic oligonucleotide
uuagaggaacuguuuaaag

SEQ ID NO: 1027513 - RNA, 19 nt, Artificial Sequence
  Description of Artificial Sequence: Synthetic oligonucleotide
ucacaaaucuaacauugcu

SEQ ID NO: 1027514 - RNA, 19 nt, Artificial Sequence
  Description of Artificial Sequence: Synthetic oligonucleotide
agaacuacucacuaacuga

SEQ ID NO: 1027515 - RNA, 19 nt, Artificial Sequence
  Description of Artificial Sequence: Synthetic oligonucleotide
aaacuucucaauauagcag

SEQ ID NO: 1027516 - RNA, 19 nt, Artificial Sequence
  Description of Artificial Sequence: Synthetic oligonucleotide
aucgaugucacuguagagg

SEQ ID NO: 1027517 - RNA, 19 nt, Artificial Sequence
  Description of Artificial Sequence: Synthetic oligonucleotide
uuuuagagauuuauguuua

SEQ ID NO: 1027518 - RNA, 19 nt, Artificial Sequence
  Description of Artificial Sequence: Synthetic oligonucleotide
cuaacauugcucaggacac

SEQ ID NO: 1027519 - RNA, 19 nt, Artificial Sequence
  Description of Artificial Sequence: Synthetic oligonucleotide
cuacaguucaguugaacgc

SEQ ID NO: 1027520 - RNA, 19 nt, Artificial Sequence
  Description of Artificial Sequence: Synthetic oligonucleotide
ucuagucuggaaugggagg

SEQ ID NO: 1027521 - RNA, 19 nt, Artificial Sequence
  Description of Artificial Sequence: Synthetic oligonucleotide
auuuauguuuaugauagcu

SEQ ID NO: 1027522 - RNA, 19 nt, Artificial Sequence
  Description of Artificial Sequence: Synthetic oligonucleotide
uugaauucagcugcaaugc

SEQ ID NO: 1027523 - RNA, 19 nt, Artificial Sequence
  Description of Artificial Sequence: Synthetic oligonucleotide
ucuuuaaacuucucaauau

SEQ ID NO: 1027524 - RNA, 19 nt, Artificial Sequence
  Description of Artificial Sequence: Synthetic oligonucleotide
uagcauuccacuccuacug

SEQ ID NO: 1027525 - RNA, 19 nt, Artificial Sequence
  Description of Artificial Sequence: Synthetic oligonucleotide
uaauuauccucaauaaauu

SEQ ID NO: 1027526 - RNA, 19 nt, Artificial Sequence
  Description of Artificial Sequence: Synthetic oligonucleotide
ugguccucgauuugaaagg

SEQ ID NO: 1027527 - RNA, 19 nt, Artificial Sequence
  Description of Artificial Sequence: Synthetic oligonucleotide
aauuucuacuaguuuuaga

SEQ ID NO: 1027528 - RNA, 19 nt, Artificial Sequence
  Description of Artificial Sequence: Synthetic oligonucleotide
ucgguauaaauauuaaaua

SEQ ID NO: 1027529 - RNA, 19 nt, Artificial Sequence
  Description of Artificial Sequence: Synthetic oligonucleotide
ucuguuauagaagauguua

SEQ ID NO: 1027530 - RNA, 19 nt, Artificial Sequence
  Description of Artificial Sequence: Synthetic oligonucleotide
ugauagcugauuuauuggu

SEQ ID NO: 1027531 - RNA, 19 nt, Artificial Sequence
  Description of Artificial Sequence: Synthetic oligonucleotide
uagaggaacuguuuaaagu

SEQ ID NO: 1027532 - RNA, 19 nt, Artificial Sequence
  Description of Artificial Sequence: Synthetic oligonucleotide
uguuuaaaguuguacuccu

SEQ ID NO: 1027533 - RNA, 19 nt, Artificial Sequence
  Description of Artificial Sequence: Synthetic oligonucleotide
aguaccucagcugauaaug

SEQ ID NO: 1027534 - RNA, 19 nt, Artificial Sequence
  Description of Artificial Sequence: Synthetic oligonucleotide
ugguauuucuaucucucug

SEQ ID NO: 1027535 - RNA, 19 nt, Artificial Sequence
  Description of Artificial Sequence: Synthetic oligonucleotide
uucuaaguagcauuccacu

SEQ ID NO: 1027536 - RNA, 19 nt, Artificial Sequence
  Description of Artificial Sequence: Synthetic oligonucleotide
ucgauuugaaaggugucgg

SEQ ID NO: 1027537 - RNA, 19 nt, Artificial Sequence
  Description of Artificial Sequence: Synthetic oligonucleotide
auggaauuacccauaaguc

SEQ ID NO: 1027538 - RNA, 19 nt, Artificial Sequence
  Description of Artificial Sequence: Synthetic oligonucleotide
ucucaauauagcagacuag

SEQ ID NO: 1027539 - RNA, 19 nt, Artificial Sequence
  Description of Artificial Sequence: Synthetic oligonucleotide
ucugucuggugaaugauuc

SEQ ID NO: 1027540 - RNA, 19 nt, Artificial Sequence
  Description of Artificial Sequence: Synthetic oligonucleotide
aacugacuuuguuuguaag

SEQ ID NO: 1027541 - RNA, 19 nt, Artificial Sequence
  Description of Artificial Sequence: Synthetic oligonucleotide
guuugcgauacucauugag

SEQ ID NO: 1027542 - RNA, 19 nt, Artificial Sequence
  Description of Artificial Sequence: Synthetic oligonucleotide
uccucgauuugaaaggugu

SEQ ID NO: 1027543 - RNA, 19 nt, Artificial Sequence
  Description of Artificial Sequence: Synthetic oligonucleotide
uuuacuacuauugcccaga

SEQ ID NO: 1027544 - RNA, 19 nt, Artificial Sequence
  Description of Artificial Sequence: Synthetic oligonucleotide
uuucuacuaguuuuagaga

SEQ ID NO: 1027545 - RNA, 19 nt, Artificial Sequence
  Description of Artificial Sequence: Synthetic oligonucleotide
acccauaaguccuuucagg

SEQ ID NO: 1027546 - RNA, 19 nt, Artificial Sequence
  Description of Artificial Sequence: Synthetic oligonucleotide
agagauuuauguuuaugau

SEQ ID NO: 1027547 - RNA, 19 nt, Artificial Sequence
  Description of Artificial Sequence: Synthetic oligonucleotide
uguuaagugaaaagagcau

SEQ ID NO: 1027548 - RNA, 19 nt, Artificial Sequence
  Description of Artificial Sequence: Synthetic oligonucleotide
aguucuucaaaugauguau

SEQ ID NO: 1027549 - RNA, 19 nt, Artificial Sequence
  Description of Artificial Sequence: Synthetic oligonucleotide
auguuaagugaaaagagca

SEQ ID NO: 1027550 - RNA, 19 nt, Artificial Sequence
  Description of Artificial Sequence: Synthetic oligonucleotide
auguauaaggcuucaggga

SEQ ID NO: 1027551 - RNA, 19 nt, Artificial Sequence
  Description of Artificial Sequence: Synthetic oligonucleotide
guaauauacaguaccucag

SEQ ID NO: 1027552 - RNA, 19 nt, Artificial Sequence
  Description of Artificial Sequence: Synthetic oligonucleotide
ugaaaagagcauucgguau

SEQ ID NO: 1027553 - RNA, 19 nt, Artificial Sequence
  Description of Artificial Sequence: Synthetic oligonucleotide
uuuuaaccuaguaaucaua

SEQ ID NO: 1027554 - RNA, 19 nt, Artificial Sequence
  Description of Artificial Sequence: Synthetic oligonucleotide
uguuuacuacuauugccca

SEQ ID NO: 1027555 - RNA, 19 nt, Artificial Sequence
  Description of Artificial Sequence: Synthetic oligonucleotide
ucuccccaaacgaauagca

SEQ ID NO: 1027556 - RNA, 19 nt, Artificial Sequence
  Description of Artificial Sequence: Synthetic oligonucleotide
ucuaaguagcauuccacuc

SEQ ID NO: 1027557 - RNA, 19 nt, Artificial Sequence
  Description of Artificial Sequence: Synthetic oligonucleotide
gauagucucuccuaucaga

SEQ ID NO: 1027558 - RNA, 19 nt, Artificial Sequence
  Description of Artificial Sequence: Synthetic oligonucleotide
acugcuuuuacugcaacug

SEQ ID NO: 1027559 - RNA, 19 nt, Artificial Sequence
  Description of Artificial Sequence: Synthetic oligonucleotide
agcugauuuauugguaugg

SEQ ID NO: 1027560 - RNA, 19 nt, Artificial Sequence
  Description of Artificial Sequence: Synthetic oligonucleotide
auagcugauuuauugguau

SEQ ID NO: 1027561 - RNA, 19 nt, Artificial Sequence
  Description of Artificial Sequence: Synthetic oligonucleotide
ucaguaaauuccaucuuua

SEQ ID NO: 1027562 - RNA, 19 nt, Artificial Sequence
  Description of Artificial Sequence: Synthetic oligonucleotide
uaggcuguggaucuugcac

SEQ ID NO: 1027563 - RNA, 19 nt, Artificial Sequence
  Description of Artificial Sequence: Synthetic oligonucleotide
ugagauguagaauuaucuu

SEQ ID NO: 1027564 - RNA, 19 nt, Artificial Sequence
  Description of Artificial Sequence: Synthetic oligonucleotide
aaauuccaucuuuaaacuu

SEQ ID NO: 1027565 - RNA, 19 nt, Artificial Sequence
  Description of Artificial Sequence: Synthetic oligonucleotide
accauggucuccccaaacg

SEQ ID NO: 1027566 - RNA, 19 nt, Artificial Sequence
  Description of Artificial Sequence: Synthetic oligonucleotide
aagaaagugagagcauuca

SEQ ID NO: 1027567 - RNA, 19 nt, Artificial Sequence
  Description of Artificial Sequence: Synthetic oligonucleotide
uacccauaaguccuuucag

SEQ ID NO: 1027568 - RNA, 19 nt, Artificial Sequence
  Description of Artificial Sequence: Synthetic oligonucleotide
ucaagcucucaauuuagaa

SEQ ID NO: 1027569 - RNA, 19 nt, Artificial Sequence
  Description of Artificial Sequence: Synthetic oligonucleotide
cucgauuugaaaggugucg

SEQ ID NO: 1027570 - RNA, 19 nt, Artificial Sequence
  Description of Artificial Sequence: Synthetic oligonucleotide
aacgcccuuugauuagcac

SEQ ID NO: 1027571 - RNA, 19 nt, Artificial Sequence
  Description of Artificial Sequence: Synthetic oligonucleotide
aaaaugguacauugauuuu

SEQ ID NO: 1027572 - RNA, 19 nt, Artificial Sequence
  Description of Artificial Sequence: Synthetic oligonucleotide
agguaauucagagagguaa

SEQ ID NO: 1027573 - RNA, 19 nt, Artificial Sequence
  Description of Artificial Sequence: Synthetic oligonucleotide
aagaugucaguaaauucca

SEQ ID NO: 1027574 - RNA, 19 nt, Artificial Sequence
  Description of Artificial Sequence: Synthetic oligonucleotide
aaaagagugaaagcuguuu

SEQ ID NO: 1027575 - RNA, 19 nt, Artificial Sequence
  Description of Artificial Sequence: Synthetic oligonucleotide
ugucgucuagucuggaaug

SEQ ID NO: 1027576 - RNA, 19 nt, Artificial Sequence
  Description of Artificial Sequence: Synthetic oligonucleotide
ucuugauagucucuccuau

SEQ ID NO: 1027577 - RNA, 19 nt, Artificial Sequence
  Description of Artificial Sequence: Synthetic oligonucleotide
gaacuacucacuaacugac

SEQ ID NO: 1027578 - RNA, 19 nt, Artificial Sequence
  Description of Artificial Sequence: Synthetic oligonucleotide
augagauguagaauuaucu

SEQ ID NO: 1027579 - RNA, 19 nt, Artificial Sequence
  Description of Artificial Sequence: Synthetic oligonucleotide
aguaaucauaauguaauuu

SEQ ID NO: 1027580 - RNA, 19 nt, Artificial Sequence
  Description of Artificial Sequence: Synthetic oligonucleotide
agaagcguuugcgauacuc

SEQ ID NO: 1027581 - RNA, 19 nt, Artificial Sequence
  Description of Artificial Sequence: Synthetic oligonucleotide
caaacgaauagcaucugga

SEQ ID NO: 1027582 - RNA, 19 nt, Artificial Sequence
  Description of Artificial Sequence: Synthetic oligonucleotide
aguauugaggagaacagau

SEQ ID NO: 1027583 - RNA, 19 nt, Artificial Sequence
  Description of Artificial Sequence: Synthetic oligonucleotide
uguuuguaagaaagccaug

SEQ ID NO: 1027584 - RNA, 19 nt, Artificial Sequence
  Description of Artificial Sequence: Synthetic oligonucleotide
uccgggucgaacuugaguu

SEQ ID NO: 1027585 - RNA, 19 nt, Artificial Sequence
  Description of Artificial Sequence: Synthetic oligonucleotide
agacuaguuuucuuaaaau

SEQ ID NO: 1027586 - RNA, 19 nt, Artificial Sequence
  Description of Artificial Sequence: Synthetic oligonucleotide
auucgguauaaauauuaaa

SEQ ID NO: 1027587 - RNA, 19 nt, Artificial Sequence
  Description of Artificial Sequence: Synthetic oligonucleotide
accaauagacuucuacagu

SEQ ID NO: 1027588 - RNA, 19 nt, Artificial Sequence
  Description of Artificial Sequence: Synthetic oligonucleotide
auuacccauaaguccuuuc

SEQ ID NO: 1027589 - RNA, 19 nt, Artificial Sequence
  Description of Artificial Sequence: Synthetic oligonucleotide
cucaauuuagaaauuucaa

SEQ ID NO: 1027590 - RNA, 19 nt, Artificial Sequence
  Description of Artificial Sequence: Synthetic oligonucleotide
agaauggugcuccgaguuc

SEQ ID NO: 1027591 - RNA, 19 nt, Artificial Sequence
  Description of Artificial Sequence: Synthetic oligonucleotide
uauguuuaugauagcugau

SEQ ID NO: 1027592 - RNA, 19 nt, Artificial Sequence
  Description of Artificial Sequence: Synthetic oligonucleotide
uuaagaaagugagagcauu

SEQ ID NO: 1027593 - RNA, 19 nt, Artificial Sequence
  Description of Artificial Sequence: Synthetic oligonucleotide
aggauggaguuguuguuag

SEQ ID NO: 1027594 - RNA, 19 nt, Artificial Sequence
  Description of Artificial Sequence: Synthetic oligonucleotide
uucaagcucucaauuuaga

SEQ ID NO: 1027595 - RNA, 19 nt, Artificial Sequence
  Description of Artificial Sequence: Synthetic oligonucleotide
aagacauaauuauccucaa

SEQ ID NO: 1027596 - RNA, 19 nt, Artificial Sequence
  Description of Artificial Sequence: Synthetic oligonucleotide
gaagugguagccacucagg

SEQ ID NO: 1027597 - RNA, 19 nt, Artificial Sequence
  Description of Artificial Sequence: Synthetic oligonucleotide
auauaaccaauagacuucu

SEQ ID NO: 1027598 - RNA, 19 nt, Artificial Sequence
  Description of Artificial Sequence: Synthetic oligonucleotide
aacugggugaguccaugcu

SEQ ID NO: 1027599 - RNA, 19 nt, Artificial Sequence
  Description of Artificial Sequence: Synthetic oligonucleotide
acuacucacuaacugacuu

SEQ ID NO: 1027600 - RNA, 19 nt, Artificial Sequence
  Description of Artificial Sequence: Synthetic oligonucleotide
uccgaguucuaccaugguc

SEQ ID NO: 1027601 - RNA, 19 nt, Artificial Sequence
  Description of Artificial Sequence: Synthetic oligonucleotide
cugcuuuuacugcaacugg

SEQ ID NO: 1027602 - RNA, 19 nt, Artificial Sequence
  Description of Artificial Sequence: Synthetic oligonucleotide
aaggugucggguagcaagg

SEQ ID NO: 1027603 - RNA, 19 nt, Artificial Sequence
  Description of Artificial Sequence: Synthetic oligonucleotide
gcuuaagaaagugagagca

SEQ ID NO: 1027604 - RNA, 19 nt, Artificial Sequence
  Description of Artificial Sequence: Synthetic oligonucleotide
cacugguuuauguaaaaga

SEQ ID NO: 1027605 - RNA, 19 nt, Artificial Sequence
  Description of Artificial Sequence: Synthetic oligonucleotide
aauuaacaaagcaccuaca

SEQ ID NO: 1027606 - RNA, 19 nt, Artificial Sequence
  Description of Artificial Sequence: Synthetic oligonucleotide
ucgaugaggauggaguugu

SEQ ID NO: 1027607 - RNA, 19 nt, Artificial Sequence
  Description of Artificial Sequence: Synthetic oligonucleotide
ugguauggguccaaauuaa

SEQ ID NO: 1027608 - RNA, 19 nt, Artificial Sequence
  Description of Artificial Sequence: Synthetic oligonucleotide
gaaagugagagcauucaaa

SEQ ID NO: 1027609 - RNA, 19 nt, Artificial Sequence
  Description of Artificial Sequence: Synthetic oligonucleotide
acuaauuaacaaagcaccu

SEQ ID NO: 1027610 - RNA, 19 nt, Artificial Sequence
  Description of Artificial Sequence: Synthetic oligonucleotide
agaaugagccugcucgucu

SEQ ID NO: 1027611 - RNA, 19 nt, Artificial Sequence
  Description of Artificial Sequence: Synthetic oligonucleotide
aagcguuugcgauacucau

SEQ ID NO: 1027612 - RNA, 19 nt, Artificial Sequence
  Description of Artificial Sequence: Synthetic oligonucleotide
uauugcccagaacuacuca

SEQ ID NO: 1027613 - RNA, 19 nt, Artificial Sequence
  Description of Artificial Sequence: Synthetic oligonucleotide
auuugaaaggugucgggua

SEQ ID NO: 1027614 - RNA, 19 nt, Artificial Sequence
  Description of Artificial Sequence: Synthetic oligonucleotide
uugaacgcccuuugauuag

SEQ ID NO: 1027615 - RNA, 19 nt, Artificial Sequence
  Description of Artificial Sequence: Synthetic oligonucleotide
uauagcagacuaguuuucu

SEQ ID NO: 1027616 - RNA, 19 nt, Artificial Sequence
  Description of Artificial Sequence: Synthetic oligonucleotide
acggaggcuuuuccuaccc

SEQ ID NO: 1027617 - RNA, 19 nt, Artificial Sequence
  Description of Artificial Sequence: Synthetic oligonucleotide
gaggaacuguuuaaaguug

SEQ ID NO: 1027618 - RNA, 19 nt, Artificial Sequence
  Description of Artificial Sequence: Synthetic oligonucleotide
aguugaacgcccuuugauu

SEQ ID NO: 1027619 - RNA, 19 nt, Artificial Sequence
  Description of Artificial Sequence: Synthetic oligonucleotide
auuccacuccuacugagaa

SEQ ID NO: 1027620 - RNA, 19 nt, Artificial Sequence
  Description of Artificial Sequence: Synthetic oligonucleotide
gaauagcugcucaucgucc

SEQ ID NO: 1027621 - RNA, 19 nt, Artificial Sequence
  Description of Artificial Sequence: Synthetic oligonucleotide
ugauaaugagauguagaau

SEQ ID NO: 1027622 - RNA, 19 nt, Artificial Sequence
  Description of Artificial Sequence: Synthetic oligonucleotide
cccauaaguccuuucaggg

SEQ ID NO: 1027623 - RNA, 19 nt, Artificial Sequence
  Description of Artificial Sequence: Synthetic oligonucleotide
gagcauucgguauaaauau

SEQ ID NO: 1027624 - RNA, 19 nt, Artificial Sequence
  Description of Artificial Sequence: Synthetic oligonucleotide
gaaugagccugcucgucug

SEQ ID NO: 1027625 - RNA, 19 nt, Artificial Sequence
  Description of Artificial Sequence: Synthetic oligonucleotide
uagcagacuaguuuucuua

SEQ ID NO: 1027626 - RNA, 19 nt, Artificial Sequence
  Description of Artificial Sequence: Synthetic oligonucleotide
augucgucuagucuggaau

SEQ ID NO: 1027627 - RNA, 19 nt, Artificial Sequence
  Description of Artificial Sequence: Synthetic oligonucleotide
ucaguugaacgcccuuuga

SEQ ID NO: 1027628 - RNA, 19 nt, Artificial Sequence
  Description of Artificial Sequence: Synthetic oligonucleotide
agaaagugagagcauucaa

SEQ ID NO: 1027629 - RNA, 19 nt, Artificial Sequence
  Description of Artificial Sequence: Synthetic oligonucleotide
ucuacuaguuuuagagauu

SEQ ID NO: 1027630 - RNA, 19 nt, Artificial Sequence
  Description of Artificial Sequence: Synthetic oligonucleotide
ugucggguagcaaggggug

SEQ ID NO: 1027631 - RNA, 19 nt, Artificial Sequence
  Description of Artificial Sequence: Synthetic oligonucleotide
uuaaccuaguaaucauaau

SEQ ID NO: 1027632 - RNA, 19 nt, Artificial Sequence
  Description of Artificial Sequence: Synthetic oligonucleotide
acgcccuuugauuagcacu

SEQ ID NO: 1027633 - RNA, 19 nt, Artificial Sequence
  Description of Artificial Sequence: Synthetic oligonucleotide
aacauugcucaggacacau

SEQ ID NO: 1027634 - RNA, 19 nt, Artificial Sequence
  Description of Artificial Sequence: Synthetic oligonucleotide
acaguucaguugaacgccc

SEQ ID NO: 1027635 - RNA, 19 nt, Artificial Sequence
  Description of Artificial Sequence: Synthetic oligonucleotide
ugcgauacucauugaggga

SEQ ID NO: 1027636 - RNA, 19 nt, Artificial Sequence
  Description of Artificial Sequence: Synthetic oligonucleotide
agaaugcaacuuucuuguc

SEQ ID NO: 1027637 - RNA, 19 nt, Artificial Sequence
  Description of Artificial Sequence: Synthetic oligonucleotide
gcguuugcgauacucauug

SEQ ID NO: 1027638 - RNA, 19 nt, Artificial Sequence
  Description of Artificial Sequence: Synthetic oligonucleotide
ugcaacuuucuugucacaa

SEQ ID NO: 1027639 - RNA, 19 nt, Artificial Sequence
  Description of Artificial Sequence: Synthetic oligonucleotide
gugaaaagagcauucggua

SEQ ID NO: 1027640 - RNA, 19 nt, Artificial Sequence
  Description of Artificial Sequence: Synthetic oligonucleotide
uacuauugcccagaacuac

SEQ ID NO: 1027641 - RNA, 19 nt, Artificial Sequence
  Description of Artificial Sequence: Synthetic oligonucleotide
ggugaaugauucaacaaac

SEQ ID NO: 1027642 - RNA, 19 nt, Artificial Sequence
  Description of Artificial Sequence: Synthetic oligonucleotide
uggaauagcugcucaucgu

SEQ ID NO: 1027643 - RNA, 19 nt, Artificial Sequence
  Description of Artificial Sequence: Synthetic oligonucleotide
ucagaaugagccugcucgu

SEQ ID NO: 1027644 - RNA, 19 nt, Artificial Sequence
  Description of Artificial Sequence: Synthetic oligonucleotide
ucacaacaagaaugcaacu

SEQ ID NO: 1027645 - RNA, 19 nt, Artificial Sequence
  Description of Artificial Sequence: Synthetic oligonucleotide
acuucucaauauagcagac

SEQ ID NO: 1027646 - RNA, 19 nt, Artificial Sequence
  Description of Artificial Sequence: Synthetic oligonucleotide
  modified_base (14)..(14): a, c, u, g, unknown or other
aaaaucccugacanaguuu

SEQ ID NO: 1027647 - RNA, 19 nt, Artificial Sequence
  Description of Artificial Sequence: Synthetic oligonucleotide
aaugucuaaaagacauaau

SEQ ID NO: 1027648 - RNA, 19 nt, Artificial Sequence
  Description of Artificial Sequence: Synthetic oligonucleotide
guugaacgcccuuugauua

SEQ ID NO: 1027649 - RNA, 19 nt, Artificial Sequence
  Description of Artificial Sequence: Synthetic oligonucleotide
agauggaauuacccauaag

SEQ ID NO: 1027650 - RNA, 19 nt, Artificial Sequence
  Description of Artificial Sequence: Synthetic oligonucleotide
cccuacauuucuaaguagc

SEQ ID NO: 1027651 - RNA, 19 nt, Artificial Sequence
  Description of Artificial Sequence: Synthetic oligonucleotide
uaguaaucauaauguaauu

SEQ ID NO: 1027652 - RNA, 19 nt, Artificial Sequence
  Description of Artificial Sequence: Synthetic oligonucleotide
cuugauagucucuccuauc

SEQ ID NO: 1027653 - RNA, 19 nt, Artificial Sequence
  Description of Artificial Sequence: Synthetic oligonucleotide
ugacuuuguuuguaagaaa

SEQ ID NO: 1027654 - RNA, 19 nt, Artificial Sequence
  Description of Artificial Sequence: Synthetic oligonucleotide
auucagagagguaaucaca

SEQ ID NO: 1027655 - RNA, 19 nt, Artificial Sequence
  Description of Artificial Sequence: Synthetic oligonucleotide
uaaugagauguagaauuau

SEQ ID NO: 1027656 - RNA, 19 nt, Artificial Sequence
  Description of Artificial Sequence: Synthetic oligonucleotide
aucuaacauugcucaggac

SEQ ID NO: 1027657 - RNA, 19 nt, Artificial Sequence
  Description of Artificial Sequence: Synthetic oligonucleotide
gucgaacuugaguuugaag

SEQ ID NO: 1027658 - RNA, 19 nt, Artificial Sequence
  Description of Artificial Sequence: Synthetic oligonucleotide
aagguaaguuuuaacuaau

SEQ ID NO: 1027659 - RNA, 19 nt, Artificial Sequence
  Description of Artificial Sequence: Synthetic oligonucleotide
auauagcagacuaguuuuc

SEQ ID NO: 1027660 - RNA, 19 nt, Artificial Sequence
  Description of Artificial Sequence: Synthetic oligonucleotide
uauuucuaucucucugcuc

SEQ ID NO: 1027661 - RNA, 19 nt, Artificial Sequence
  Description of Artificial Sequence: Synthetic oligonucleotide
gucuagucuggaaugggag

SEQ ID NO: 1027662 - RNA, 19 nt, Artificial Sequence
  Description of Artificial Sequence: Synthetic oligonucleotide
  modified_base (16)..(16): a, c, u, g, unknown or other
agaaaaucccugacanagu

SEQ ID NO: 1027663 - RNA, 19 nt, Artificial Sequence
  Description of Artificial Sequence: Synthetic oligonucleotide
aaauucauuuccacugguu

SEQ ID NO: 1027664 - RNA, 19 nt, Artificial Sequence
  Description of Artificial Sequence: Synthetic oligonucleotide
cuauugcccagaacuacuc

SEQ ID NO: 1027665 - RNA, 19 nt, Artificial Sequence
  Description of Artificial Sequence: Synthetic oligonucleotide
auggcaucgaugucacugu

SEQ ID NO: 1027666 - RNA, 19 nt, Artificial Sequence
  Description of Artificial Sequence: Synthetic oligonucleotide
ucgucuagucuggaauggg

SEQ ID NO: 1027667 - RNA, 19 nt, Artificial Sequence
  Description of Artificial Sequence: Synthetic oligonucleotide
ggcacuugcauugauggug

SEQ ID NO: 1027668 - RNA, 19 nt, Artificial Sequence
  Description of Artificial Sequence: Synthetic oligonucleotide
gaagcguuugcgauacuca

SEQ ID NO: 1027669 - RNA, 19 nt, Artificial Sequence
  Description of Artificial Sequence: Synthetic oligonucleotide
guuuaugauagcugauuua

SEQ ID NO: 1027670 - RNA, 19 nt, Artificial Sequence
  Description of Artificial Sequence: Synthetic oligonucleotide
caucgaugucacuguagag

SEQ ID NO: 1027671 - RNA, 19 nt, Artificial Sequence
  Description of Artificial Sequence: Synthetic oligonucleotide
uacgagcuccauggcaucg

SEQ ID NO: 1027672 - RNA, 19 nt, Artificial Sequence
  Description of Artificial Sequence: Synthetic oligonucleotide
ggaggcuuuuccuacccag

SEQ ID NO: 1027673 - RNA, 19 nt, Artificial Sequence
  Description of Artificial Sequence: Synthetic oligonucleotide
aacccggccagcaaucugu

SEQ ID NO: 1027674 - RNA, 19 nt, Artificial Sequence
  Description of Artificial Sequence: Synthetic oligonucleotide
caaucugucuggugaauga

SEQ ID NO: 1027675 - RNA, 19 nt, Artificial Sequence
  Description of Artificial Sequence: Synthetic oligonucleotide
aggggauucaagcucucaa

SEQ ID NO: 1027676 - RNA, 19 nt, Artificial Sequence
  Description of Artificial Sequence: Synthetic oligonucleotide
uucuguuauagaagauguu

SEQ ID NO: 1027677 - RNA, 19 nt, Artificial Sequence
  Description of Artificial Sequence: Synthetic oligonucleotide
acuauugcccagaacuacu

SEQ ID NO: 1027678 - RNA, 19 nt, Artificial Sequence
  Description of Artificial Sequence: Synthetic oligonucleotide
ggaauagcugcucaucguc

SEQ ID NO: 1027679 - RNA, 19 nt, Artificial Sequence
  Description of Artificial Sequence: Synthetic oligonucleotide
auuuauugguaugggucca

SEQ ID NO: 1027680 - RNA, 19 nt, Artificial Sequence
  Description of Artificial Sequence: Synthetic oligonucleotide
gucgucuagucuggaaugg

SEQ ID NO: 1027681 - RNA, 19 nt, Artificial Sequence
  Description of Artificial Sequence: Synthetic oligonucleotide
uuacuacuauugcccagaa

SEQ ID NO: 1027682 - RNA, 19 nt, Artificial Sequence
  Description of Artificial Sequence: Synthetic oligonucleotide
ugcgguucugauacuggaa

SEQ ID NO: 1027683 - RNA, 19 nt, Artificial Sequence
  Description of Artificial Sequence: Synthetic oligonucleotide
guggaucuugcacauuuuc

SEQ ID NO: 1027684 - RNA, 19 nt, Artificial Sequence
  Description of Artificial Sequence: Synthetic oligonucleotide
gggagaauggugcuccgag

SEQ ID NO: 1027685 - RNA, 19 nt, Artificial Sequence
  Description of Artificial Sequence: Synthetic oligonucleotide
aggguacgagcuccauggc

SEQ ID NO: 1027686 - RNA, 19 nt, Artificial Sequence
  Description of Artificial Sequence: Synthetic oligonucleotide
ugaacgcccuuugauuagc

SEQ ID NO: 1027687 - RNA, 19 nt, Artificial Sequence
  Description of Artificial Sequence: Synthetic oligonucleotide
cauucgguauaaauauuaa

SEQ ID NO: 1027688 - RNA, 19 nt, Artificial Sequence
  Description of Artificial Sequence: Synthetic oligonucleotide
ugggguugaugucgucuag

SEQ ID NO: 1027689 - RNA, 19 nt, Artificial Sequence
  Description of Artificial Sequence: Synthetic oligonucleotide
cucaauauagcagacuagu

SEQ ID NO: 1027690 - RNA, 19 nt, Artificial Sequence
  Description of Artificial Sequence: Synthetic oligonucleotide
gcugauuuauugguauggg

SEQ ID NO: 1027691 - RNA, 19 nt, Artificial Sequence
  Description of Artificial Sequence: Synthetic oligonucleotide
gcucgucuggaauagcugc

SEQ ID NO: 1027692 - RNA, 19 nt, Artificial Sequence
  Description of Artificial Sequence: Synthetic oligonucleotide
caguaauauacaguaccuc

SEQ ID NO: 1027693 - RNA, 19 nt, Artificial Sequence
  Description of Artificial Sequence: Synthetic oligonucleotide
gauuugaaaggugucgggu

SEQ ID NO: 1027694 - RNA, 19 nt, Artificial Sequence
  Description of Artificial Sequence: Synthetic oligonucleotide
uggacggaggcuuuuccua

SEQ ID NO: 1027695 - RNA, 19 nt, Artificial Sequence
  Description of Artificial Sequence: Synthetic oligonucleotide
auagcagacuaguuuucuu

SEQ ID NO: 1027696 - RNA, 19 nt, Artificial Sequence
  Description of Artificial Sequence: Synthetic oligonucleotide
agcauuccacuccuacuga

SEQ ID NO: 1027697 - RNA, 19 nt, Artificial Sequence
  Description of Artificial Sequence: Synthetic oligonucleotide
auugagggacugguauuuc

SEQ ID NO: 1027698 - RNA, 19 nt, Artificial Sequence
  Description of Artificial Sequence: Synthetic oligonucleotide
uuccuacccagcagggcga

SEQ ID NO: 1027699 - RNA, 19 nt, Artificial Sequence
  Description of Artificial Sequence: Synthetic oligonucleotide
ggaauuacccauaaguccu

SEQ ID NO: 1027700 - RNA, 19 nt, Artificial Sequence
  Description of Artificial Sequence: Synthetic oligonucleotide
gacggaggcuuuuccuacc

SEQ ID NO: 1027701 - RNA, 19 nt, Artificial Sequence
  Description of Artificial Sequence: Synthetic oligonucleotide
ugagggcaacacauaccca

SEQ ID NO: 1027702 - RNA, 19 nt, Artificial Sequence
  Description of Artificial Sequence: Synthetic oligonucleotide
gauagcugauuuauuggua

SEQ ID NO: 1027703 - RNA, 19 nt, Artificial Sequence
  Description of Artificial Sequence: Synthetic oligonucleotide
auugaggagaacagaugga

SEQ ID NO: 1027704 - RNA, 19 nt, Artificial Sequence
  Description of Artificial Sequence: Synthetic oligonucleotide
gaggcuuuuccuacccagc

SEQ ID NO: 1027705 - RNA, 19 nt, Artificial Sequence
  Description of Artificial Sequence: Synthetic oligonucleotide
caaugcgguucugauacug

SEQ ID NO: 1027706 - RNA, 19 nt, Artificial Sequence
  Description of Artificial Sequence: Synthetic oligonucleotide
ccuaguaaucauaauguaa

SEQ ID NO: 1027707 - RNA, 19 nt, Artificial Sequence
  Description of Artificial Sequence: Synthetic oligonucleotide
aaaggggauucaagcucuc

SEQ ID NO: 1027708 - RNA, 19 nt, Artificial Sequence
  Description of Artificial Sequence: Synthetic oligonucleotide
ccuaucagaaugagccugc

SEQ ID NO: 1027709 - RNA, 19 nt, Artificial Sequence
  Description of Artificial Sequence: Synthetic oligonucleotide
ucaucgucccacucaggau

SEQ ID NO: 1027710 - RNA, 19 nt, Artificial Sequence
  Description of Artificial Sequence: Synthetic oligonucleotide
ucggguagcaaggggugcc

SEQ ID NO: 1027711 - RNA, 19 nt, Artificial Sequence
  Description of Artificial Sequence: Synthetic oligonucleotide
gaugucgucuagucuggaa

SEQ ID NO: 1027712 - RNA, 19 nt, Artificial Sequence
  Description of Artificial Sequence: Synthetic oligonucleotide
gacacauggccuucuguua

SEQ ID NO: 1027713 - RNA, 19 nt, Artificial Sequence
  Description of Artificial Sequence: Synthetic oligonucleotide
uguggaucuugcacauuuu

SEQ ID NO: 1027714 - RNA, 19 nt, Artificial Sequence
  Description of Artificial Sequence: Synthetic oligonucleotide
uuguaggcuuaaacauagu

SEQ ID NO: 1027715 - RNA, 19 nt, Artificial Sequence
  Description of Artificial Sequence: Synthetic oligonucleotide
ggugcuccgaguucuacca

SEQ ID NO: 1027716 - RNA, 19 nt, Artificial Sequence
  Description of Artificial Sequence: Synthetic oligonucleotide
ggugucggguagcaagggg

SEQ ID NO: 1027717 - RNA, 19 nt, Artificial Sequence
  Description of Artificial Sequence: Synthetic oligonucleotide
uggucuccccaaacgaaua

SEQ ID NO: 1027718 - RNA, 19 nt, Artificial Sequence
  Description of Artificial Sequence: Synthetic oligonucleotide
gcgauacucauugagggac

SEQ ID NO: 1027719 - RNA, 19 nt, Artificial Sequence
  Description of Artificial Sequence: Synthetic oligonucleotide
cucagcugauaaugagaug

SEQ ID NO: 1027720 - RNA, 19 nt, Artificial Sequence
  Description of Artificial Sequence: Synthetic oligonucleotide
aaggggauucaagcucuca

SEQ ID NO: 1027721 - RNA, 19 nt, Artificial Sequence
  Description of Artificial Sequence: Synthetic oligonucleotide
ugauuagcacugugggguu

SEQ ID NO: 1027722 - RNA, 19 nt, Artificial Sequence
  Description of Artificial Sequence: Synthetic oligonucleotide
cuccuacugagaaaagaaa

SEQ ID NO: 1027723 - RNA, 19 nt, Artificial Sequence
  Description of Artificial Sequence: Synthetic oligonucleotide
uauaaccaauagacuucua

SEQ ID NO: 1027724 - RNA, 19 nt, Artificial Sequence
  Description of Artificial Sequence: Synthetic oligonucleotide
aauuacccauaaguccuuu

SEQ ID NO: 1027725 - RNA, 19 nt, Artificial Sequence
  Description of Artificial Sequence: Synthetic oligonucleotide
uuauugguauggguccaaa

SEQ ID NO: 1027726 - RNA, 19 nt, Artificial Sequence
  Description of Artificial Sequence: Synthetic oligonucleotide
gcgguucugauacuggaac

SEQ ID NO: 1027727 - RNA, 19 nt, Artificial Sequence
  Description of Artificial Sequence: Synthetic oligonucleotide
uacuaguuuuagagauuua

SEQ ID NO: 1027728 - RNA, 19 nt, Artificial Sequence
  Description of Artificial Sequence: Synthetic oligonucleotide
ggucuccccaaacgaauag

SEQ ID NO: 1027729 - RNA, 19 nt, Artificial Sequence
  Description of Artificial Sequence: Synthetic oligonucleotide
cauggucuccccaaacgaa

SEQ ID NO: 1027730 - RNA, 19 nt, Artificial Sequence
  Description of Artificial Sequence: Synthetic oligonucleotide
guacaguguguugaauuca

SEQ ID NO: 1027731 - RNA, 19 nt, Artificial Sequence
  Description of Artificial Sequence: Synthetic oligonucleotide
uaaguccuuucagggagaa

SEQ ID NO: 1027732 - RNA, 19 nt, Artificial Sequence
  Description of Artificial Sequence: Synthetic oligonucleotide
ugguaggcuguggaucuug

SEQ ID NO: 1027733 - RNA, 19 nt, Artificial Sequence
  Description of Artificial Sequence: Synthetic oligonucleotide
gucuccccaaacgaauagc

SEQ ID NO: 1027734 - RNA, 19 nt, Artificial Sequence
  Description of Artificial Sequence: Synthetic oligonucleotide
gcauuccacuccuacugag

SEQ ID NO: 1027735 - RNA, 19 nt, Artificial Sequence
  Description of Artificial Sequence: Synthetic oligonucleotide
guagcauuccacuccuacu

SEQ ID NO: 1027736 - RNA, 19 nt, Artificial Sequence
  Description of Artificial Sequence: Synthetic oligonucleotide
guagagggcuuucaacucu

SEQ ID NO: 1027737 - RNA, 19 nt, Artificial Sequence
  Description of Artificial Sequence: Synthetic oligonucleotide
guccaaauuaacagcuuaa

SEQ ID NO: 1027738 - RNA, 19 nt, Artificial Sequence
  Description of Artificial Sequence: Synthetic oligonucleotide
aguucaguugaacgcccuu

SEQ ID NO: 1027739 - RNA, 19 nt, Artificial Sequence
  Description of Artificial Sequence: Synthetic oligonucleotide
agcaacccggccagcaauc

SEQ ID NO: 1027740 - RNA, 19 nt, Artificial Sequence
  Description of Artificial Sequence: Synthetic oligonucleotide
aaacacuuguaggcuuaaa

SEQ ID NO: 1027741 - RNA, 19 nt, Artificial Sequence
  Description of Artificial Sequence: Synthetic oligonucleotide
acagauggaauuacccaua

SEQ ID NO: 1027742 - RNA, 19 nt, Artificial Sequence
  Description of Artificial Sequence: Synthetic oligonucleotide
cacuccuacugagaaaaga

SEQ ID NO: 1027743 - RNA, 19 nt, Artificial Sequence
  Description of Artificial Sequence: Synthetic oligonucleotide
caugcuucacaacaagaau

SEQ ID NO: 1027744 - RNA, 19 nt, Artificial Sequence
  Description of Artificial Sequence: Synthetic oligonucleotide
ggguugaugucgucuaguc

SEQ ID NO: 1027745 - RNA, 19 nt, Artificial Sequence
  Description of Artificial Sequence: Synthetic oligonucleotide
agcagggcgaggguacgag

SEQ ID NO: 1027746 - RNA, 19 nt, Artificial Sequence
  Description of Artificial Sequence: Synthetic oligonucleotide
caguauugaggagaacaga

SEQ ID NO: 1027747 - RNA, 19 nt, Artificial Sequence
  Description of Artificial Sequence: Synthetic oligonucleotide
uuucaacucugcagccauu

SEQ ID NO: 1027748 - RNA, 19 nt, Artificial Sequence
  Description of Artificial Sequence: Synthetic oligonucleotide
ccaugcuucacaacaagaa

SEQ ID NO: 1027749 - RNA, 19 nt, Artificial Sequence
  Description of Artificial Sequence: Synthetic oligonucleotide
cucugcucuggucaaugga

SEQ ID NO: 1027750 - RNA, 19 nt, Artificial Sequence
  Description of Artificial Sequence: Synthetic oligonucleotide
aggugucggguagcaaggg

SEQ ID NO: 1027751 - RNA, 19 nt, Artificial Sequence
  Description of Artificial Sequence: Synthetic oligonucleotide
cgauuugaaaggugucggg

SEQ ID NO: 1027752 - RNA, 19 nt, Artificial Sequence
  Description of Artificial Sequence: Synthetic oligonucleotide
guaccucagcugauaauga

SEQ ID NO: 1027753 - RNA, 19 nt, Artificial Sequence
  Description of Artificial Sequence: Synthetic oligonucleotide
cagauggaauuacccauaa

SEQ ID NO: 1027754 - RNA, 19 nt, Artificial Sequence
  Description of Artificial Sequence: Synthetic oligonucleotide
gcauucgguauaaauauua

SEQ ID NO: 1027755 - RNA, 19 nt, Artificial Sequence
  Description of Artificial Sequence: Synthetic oligonucleotide
auggucuccccaaacgaau

SEQ ID NO: 1027756 - RNA, 19 nt, Artificial Sequence
  Description of Artificial Sequence: Synthetic oligonucleotide
aaagagcauucgguauaaa

SEQ ID NO: 1027757 - RNA, 19 nt, Artificial Sequence
  Description of Artificial Sequence: Synthetic oligonucleotide
cugcucaucgucccacuca

SEQ ID NO: 1027758 - RNA, 19 nt, Artificial Sequence
  Description of Artificial Sequence: Synthetic oligonucleotide
gguauggguccaaauuaac

SEQ ID NO: 1027759 - RNA, 19 nt, Artificial Sequence
  Description of Artificial Sequence: Synthetic oligonucleotide
ggacggaggcuuuuccuac

SEQ ID NO: 1027760 - RNA, 19 nt, Artificial Sequence
  Description of Artificial Sequence: Synthetic oligonucleotide
guaggcuguggaucuugca

SEQ ID NO: 1027761 - RNA, 19 nt, Artificial Sequence
  Description of Artificial Sequence: Synthetic oligonucleotide
agguaaguuuuaacuaauu

SEQ ID NO: 1027762 - RNA, 19 nt, Artificial Sequence
  Description of Artificial Sequence: Synthetic oligonucleotide
augauucaacaaacugggu

SEQ ID NO: 1027763 - RNA, 19 nt, Artificial Sequence
  Description of Artificial Sequence: Synthetic oligonucleotide
ggccuucaaaauguuuaag

SEQ ID NO: 1027764 - RNA, 19 nt, Artificial Sequence
  Description of Artificial Sequence: Synthetic oligonucleotide
gagggacugguauuucuau

SEQ ID NO: 1027765 - RNA, 19 nt, Artificial Sequence
  Description of Artificial Sequence: Synthetic oligonucleotide
cacuugcauugaugguggc

SEQ ID NO: 1027766 - RNA, 19 nt, Artificial Sequence
  Description of Artificial Sequence: Synthetic oligonucleotide
ggcuuaaacauaguuuaua

SEQ ID NO: 1027767 - RNA, 19 nt, Artificial Sequence
  Description of Artificial Sequence: Synthetic oligonucleotide
cgcccuuugauuagcacug

SEQ ID NO: 1027768 - RNA, 19 nt, Artificial Sequence
  Description of Artificial Sequence: Synthetic oligonucleotide
ugaugucgucuagucugga

SEQ ID NO: 1027769 - RNA, 19 nt, Artificial Sequence
  Description of Artificial Sequence: Synthetic oligonucleotide
cuccuguaaguucuucaaa

SEQ ID NO: 1027770 - RNA, 19 nt, Artificial Sequence
  Description of Artificial Sequence: Synthetic oligonucleotide
cagaaugagccugcucguc

SEQ ID NO: 1027771 - RNA, 19 nt, Artificial Sequence
  Description of Artificial Sequence: Synthetic oligonucleotide
uccuacccagcagggcgag

SEQ ID NO: 1027772 - RNA, 19 nt, Artificial Sequence
  Description of Artificial Sequence: Synthetic oligonucleotide
agaugucaguaaauuccau

SEQ ID NO: 1027773 - RNA, 19 nt, Artificial Sequence
  Description of Artificial Sequence: Synthetic oligonucleotide
guacgagcuccauggcauc

SEQ ID NO: 1027774 - RNA, 19 nt, Artificial Sequence
  Description of Artificial Sequence: Synthetic oligonucleotide
caacccggccagcaaucug

SEQ ID NO: 1027775 - RNA, 19 nt, Artificial Sequence
  Description of Artificial Sequence: Synthetic oligonucleotide
guccucgauuugaaaggug

SEQ ID NO: 1027776 - RNA, 19 nt, Artificial Sequence
  Description of Artificial Sequence: Synthetic oligonucleotide
agcauucgguauaaauauu

SEQ ID NO: 1027777 - RNA, 19 nt, Artificial Sequence
  Description of Artificial Sequence: Synthetic oligonucleotide
gaacgcccuuugauuagca

SEQ ID NO: 1027778 - RNA, 19 nt, Artificial Sequence
  Description of Artificial Sequence: Synthetic oligonucleotide
ccaauagacuucuacaguu

SEQ ID NO: 1027779 - RNA, 19 nt, Artificial Sequence
  Description of Artificial Sequence: Synthetic oligonucleotide
gucggguagcaaggggugc

SEQ ID NO: 1027780 - RNA, 19 nt, Artificial Sequence
  Description of Artificial Sequence: Synthetic oligonucleotide
ccucgauuugaaagguguc

SEQ ID NO: 1027781 - RNA, 19 nt, Artificial Sequence
  Description of Artificial Sequence: Synthetic oligonucleotide
aaguccuuucagggagaau

SEQ ID NO: 1027782 - RNA, 19 nt, Artificial Sequence
  Description of Artificial Sequence: Synthetic oligonucleotide
agggagaauggugcuccga

SEQ ID NO: 1027783 - RNA, 19 nt, Artificial Sequence
  Description of Artificial Sequence: Synthetic oligonucleotide
gugucggguagcaaggggu

SEQ ID NO: 1027784 - RNA, 19 nt, Artificial Sequence
  Description of Artificial Sequence: Synthetic oligonucleotide
gguugaugucgucuagucu

SEQ ID NO: 1027785 - RNA, 19 nt, Artificial Sequence
  Description of Artificial Sequence: Synthetic oligonucleotide
caguugaacgcccuuugau

SEQ ID NO: 1027786 - RNA, 19 nt, Artificial Sequence
  Description of Artificial Sequence: Synthetic oligonucleotide
ggaguuguuguuagaggaa

SEQ ID NO: 1027787 - RNA, 19 nt, Artificial Sequence
  Description of Artificial Sequence: Synthetic oligonucleotide
aauggugcuccgaguucua

SEQ ID NO: 1027788 - RNA, 19 nt, Artificial Sequence
  Description of Artificial Sequence: Synthetic oligonucleotide
cuucucaauauagcagacu

SEQ ID NO: 1027789 - RNA, 19 nt, Artificial Sequence
  Description of Artificial Sequence: Synthetic oligonucleotide
agcguuugcgauacucauu

SEQ ID NO: 1027790 - RNA, 19 nt, Artificial Sequence
  Description of Artificial Sequence: Synthetic oligonucleotide
acgagcuccauggcaucga

SEQ ID NO: 1027791 - RNA, 19 nt, Artificial Sequence
  Description of Artificial Sequence: Synthetic oligonucleotide
gcagacuaguuuucuuaaa

SEQ ID NO: 1027792 - RNA, 19 nt, Artificial Sequence
  Description of Artificial Sequence: Synthetic oligonucleotide
ccauggucuccccaaacga

SEQ ID NO: 1027793 - RNA, 19 nt, Artificial Sequence
  Description of Artificial Sequence: Synthetic oligonucleotide
cagguaauucagagaggua

SEQ ID NO: 1027794 - RNA, 19 nt, Artificial Sequence
  Description of Artificial Sequence: Synthetic oligonucleotide
cacuugagggcaacacaua

SEQ ID NO: 1027795 - RNA, 19 nt, Artificial Sequence
  Description of Artificial Sequence: Synthetic oligonucleotide
cuccuaucagaaugagccu

SEQ ID NO: 1027796 - RNA, 19 nt, Artificial Sequence
  Description of Artificial Sequence: Synthetic oligonucleotide
agcucucaauuuagaaauu

SEQ ID NO: 1027797 - RNA, 19 nt, Artificial Sequence
  Description of Artificial Sequence: Synthetic oligonucleotide
ccucagcugauaaugagau

SEQ ID NO: 1027798 - RNA, 19 nt, Artificial Sequence
  Description of Artificial Sequence: Synthetic oligonucleotide
gguaauucagagagguaau

SEQ ID NO: 1027799 - RNA, 19 nt, Artificial Sequence
  Description of Artificial Sequence: Synthetic oligonucleotide
cuaccauggucuccccaaa

SEQ ID NO: 1027800 - RNA, 19 nt, Artificial Sequence
  Description of Artificial Sequence: Synthetic oligonucleotide
acccggccagcaaucuguc

SEQ ID NO: 1027801 - RNA, 19 nt, Artificial Sequence
  Description of Artificial Sequence: Synthetic oligonucleotide
gggcgaggguacgagcucc

SEQ ID NO: 1027802 - RNA, 19 nt, Artificial Sequence
  Description of Artificial Sequence: Synthetic oligonucleotide
cacauggccuucuguuaua

SEQ ID NO: 1027803 - RNA, 19 nt, Artificial Sequence
  Description of Artificial Sequence: Synthetic oligonucleotide
ggaacuguuuaaaguugua

SEQ ID NO: 1027804 - RNA, 19 nt, Artificial Sequence
  Description of Artificial Sequence: Synthetic oligonucleotide
cuccgggucgaacuugagu

SEQ ID NO: 1027805 - RNA, 19 nt, Artificial Sequence
  Description of Artificial Sequence: Synthetic oligonucleotide
guacuccugguccucgauu

SEQ ID NO: 1027806 - RNA, 19 nt, Artificial Sequence
  Description of Artificial Sequence: Synthetic oligonucleotide
uugguaggcuguggaucuu

SEQ ID NO: 1027807 - RNA, 19 nt, Artificial Sequence
  Description of Artificial Sequence: Synthetic oligonucleotide
caccuacagggccuucaaa

SEQ ID NO: 1027808 - RNA, 19 nt, Artificial Sequence
  Description of Artificial Sequence: Synthetic oligonucleotide
ggucgaacuugaguuugaa

SEQ ID NO: 1027809 - RNA, 19 nt, Artificial Sequence
  Description of Artificial Sequence: Synthetic oligonucleotide
ccagaacuacucacuaacu

SEQ ID NO: 1027810 - RNA, 19 nt, Artificial Sequence
  Description of Artificial Sequence: Synthetic oligonucleotide
gguccucgauuugaaaggu

SEQ ID NO: 1027811 - RNA, 19 nt, Artificial Sequence
  Description of Artificial Sequence: Synthetic oligonucleotide
cgaggguacgagcuccaug

SEQ ID NO: 1027812 - RNA, 19 nt, Artificial Sequence
  Description of Artificial Sequence: Synthetic oligonucleotide
cgggucgaacuugaguuug

SEQ ID NO: 1027813 - RNA, 19 nt, Artificial Sequence
  Description of Artificial Sequence: Synthetic oligonucleotide
gguagccacucaggugcug

SEQ ID NO: 1027814 - RNA, 19 nt, Artificial Sequence
  Description of Artificial Sequence: Synthetic oligonucleotide
gggucgaacuugaguuuga

SEQ ID NO: 1027815 - RNA, 19 nt, Artificial Sequence
  Description of Artificial Sequence: Synthetic oligonucleotide
cagcaacccggccagcaau

SEQ ID NO: 1027816 - RNA, 19 nt, Artificial Sequence
  Description of Artificial Sequence: Synthetic oligonucleotide
gcuccuguuuaagcacauc

SEQ ID NO: 1027817 - RNA, 19 nt, Artificial Sequence
  Description of Artificial Sequence: Synthetic oligonucleotide
guccaugcucgaugaggau

SEQ ID NO: 1027818 - RNA, 19 nt, Artificial Sequence
  Description of Artificial Sequence: Synthetic oligonucleotide
gggguugaugucgucuagu

SEQ ID NO: 1027819 - RNA, 19 nt, Artificial Sequence
  Description of Artificial Sequence: Synthetic oligonucleotide
cuccgaguucuaccauggu

SEQ ID NO: 1027820 - RNA, 19 nt, Artificial Sequence
  Description of Artificial Sequence: Synthetic oligonucleotide
cagcagggcgaggguacga

SEQ ID NO: 1027821 - RNA, 19 nt, Artificial Sequence
  Description of Artificial Sequence: Synthetic oligonucleotide
gcuccgggucgaacuugag

SEQ ID NO: 1027822 - RNA, 19 nt, Artificial Sequence
  Description of Artificial Sequence: Synthetic oligonucleotide
ggcgaggguacgagcucca

SEQ ID NO: 1027823 - RNA, 19 nt, Artificial Sequence
  Description of Artificial Sequence: Synthetic oligonucleotide
ccuacccagcagggcgagg

SEQ ID NO: 1027824 - RNA, 19 nt, Artificial Sequence
  Description of Artificial Sequence: Synthetic oligonucleotide
cguuugcgauacucauuga

SEQ ID NO: 1027825 - RNA, 19 nt, Artificial Sequence
  Description of Artificial Sequence: Synthetic oligonucleotide
gggaggcacuugcauugau

SEQ ID NO: 1027826 - RNA, 19 nt, Artificial Sequence
  Description of Artificial Sequence: Synthetic oligonucleotide
gcaacccggccagcaaucu

SEQ ID NO: 1027827 - RNA, 19 nt, Artificial Sequence
  Description of Artificial Sequence: Synthetic oligonucleotide
gccuucuguuauagaagau

SEQ ID NO: 1027828 - RNA, 19 nt, Artificial Sequence
  Description of Artificial Sequence: Synthetic oligonucleotide
gggugaguccaugcucgau

SEQ ID NO: 1027829 - RNA, 19 nt, Artificial Sequence
  Description of Artificial Sequence: Synthetic oligonucleotide
ccgggucgaacuugaguuu

SEQ ID NO: 1027830 - RNA, 19 nt, Artificial Sequence
  Description of Artificial Sequence: Synthetic oligonucleotide
cggguagcaaggggugcca

SEQ ID NO: 1027831 - RNA, 19 nt, Artificial Sequence
  Description of Artificial Sequence: Synthetic oligonucleotide
cccggccagcaaucugucu

SEQ ID NO: 1027832 - RNA, 19 nt, Artificial Sequence
  Description of Artificial Sequence: Synthetic oligonucleotide
gcgaggguacgagcuccau

SEQ ID NO: 1027833 - RNA, 19 nt, Artificial Sequence
  Description of Artificial Sequence: Synthetic oligonucleotide
aaagcagguauuuaucucc

SEQ ID NO: 1027834 - RNA, 19 nt, Artificial Sequence
  Description of Artificial Sequence: Synthetic oligonucleotide
aauucuaagauuuauuacu

SEQ ID NO: 1027835 - RNA, 19 nt, Artificial Sequence
  Description of Artificial Sequence: Synthetic oligonucleotide
agauuuauuacuuacugac

SEQ ID NO: 1027836 - RNA, 19 nt, Artificial Sequence
  Description of Artificial Sequence: Synthetic oligonucleotide
uguagaauugguuagaagc

SEQ ID NO: 1027837 - RNA, 19 nt, Artificial Sequence
  Description of Artificial Sequence: Synthetic oligonucleotide
aaaaccuaacacaacaucc

SEQ ID NO: 1027838 - RNA, 19 nt, Artificial Sequence
  Description of Artificial Sequence: Synthetic oligonucleotide
aagaacuuguuauacuacc

SEQ ID NO: 1027839 - RNA, 19 nt, Artificial Sequence
  Description of Artificial Sequence: Synthetic oligonucleotide
auaagaaagguuuagagga

SEQ ID NO: 1027840 - RNA, 19 nt, Artificial Sequence
  Description of Artificial Sequence: Synthetic oligonucleotide
uauaagaaagguuuagagg

SEQ ID NO: 1027841 - RNA, 19 nt, Artificial Sequence
  Description of Artificial Sequence: Synthetic oligonucleotide
aauuuuacuagguaaacaa

SEQ ID NO: 1027842 - RNA, 19 nt, Artificial Sequence
  Description of Artificial Sequence: Synthetic oligonucleotide
uauacacuauguauuaugg

SEQ ID NO: 1027843 - RNA, 19 nt, Artificial Sequence
  Description of Artificial Sequence: Synthetic oligonucleotide
auuaagaugaacaaagcac

SEQ ID NO: 1027844 - RNA, 19 nt, Artificial Sequence
  Description of Artificial Sequence: Synthetic oligonucleotide
aaaacauugcaaauuaggg

SEQ ID NO: 1027845 - RNA, 19 nt, Artificial Sequence
  Description of Artificial Sequence: Synthetic oligonucleotide
uuuuauggggaaaacauug

SEQ ID NO: 1027846 - RNA, 19 nt, Artificial Sequence
  Description of Artificial Sequence: Synthetic oligonucleotide
accugaauuaaauacuugc

SEQ ID NO: 1027847 - RNA, 19 nt, Artificial Sequence
  Description of Artificial Sequence: Synthetic oligonucleotide
aaguaguuaagcuucagcu

SEQ ID NO: 1027848 - RNA, 19 nt, Artificial Sequence
  Description of Artificial Sequence: Synthetic oligonucleotide
uuuaugaugagucuggcau

SEQ ID NO: 1027849 - RNA, 19 nt, Artificial Sequence
  Description of Artificial Sequence: Synthetic oligonucleotide
uucuaaugaacucaaagac

SEQ ID NO: 1027850 - RNA, 19 nt, Artificial Sequence
  Description of Artificial Sequence: Synthetic oligonucleotide
auauuuacuaaaugcuacc

SEQ ID NO: 1027851 - RNA, 19 nt, Artificial Sequence
  Description of Artificial Sequence: Synthetic oligonucleotide
ugaauuaaauacuugcucu

SEQ ID NO: 1027852 - RNA, 19 nt, Artificial Sequence
  Description of Artificial Sequence: Synthetic oligonucleotide
aacauaucuaguaaacuac

SEQ ID NO: 1027853 - RNA, 19 nt, Artificial Sequence
  Description of Artificial Sequence: Synthetic oligonucleotide
aauaucgcugcuaacuugc

SEQ ID NO: 1027854 - RNA, 19 nt, Artificial Sequence
  Description of Artificial Sequence: Synthetic oligonucleotide
uucugaaacaauuauacuc

SEQ ID NO: 1027855 - RNA, 19 nt, Artificial Sequence
  Description of Artificial Sequence: Synthetic oligonucleotide
aguuaaauuaaagucagag

SEQ ID NO: 1027856 - RNA, 19 nt, Artificial Sequence
  Description of Artificial Sequence: Synthetic oligonucleotide
uuaacuacgagccaauaaa

SEQ ID NO: 1027857 - RNA, 19 nt, Artificial Sequence
  Description of Artificial Sequence: Synthetic oligonucleotide
uuaacuuucagguaagauc

SEQ ID NO: 1027858 - RNA, 19 nt, Artificial Sequence
  Description of Artificial Sequence: Synthetic oligonucleotide
aaacauaucuaguaaacua

SEQ ID NO: 1027859 - RNA, 19 nt, Artificial Sequence
  Description of Artificial Sequence: Synthetic oligonucleotide
aaaccuaacacaacauccc

SEQ ID NO: 1027860 - RNA, 19 nt, Artificial Sequence
  Description of Artificial Sequence: Synthetic oligonucleotide
aaauuaugagcacuauuug

SEQ ID NO: 1027861 - RNA, 19 nt, Artificial Sequence
  Description of Artificial Sequence: Synthetic oligonucleotide
uaaacuacaguucuuucac

SEQ ID NO: 1027862 - RNA, 19 nt, Artificial Sequence
  Description of Artificial Sequence: Synthetic oligonucleotide
aagcugaacagcauuauac

SEQ ID NO: 1027863 - RNA, 19 nt, Artificial Sequence
  Description of Artificial Sequence: Synthetic oligonucleotide
uucuuuaugaugagucugg

SEQ ID NO: 1027864 - RNA, 19 nt, Artificial Sequence
  Description of Artificial Sequence: Synthetic oligonucleotide
uuuacuaaaugcuacccac

SEQ ID NO: 1027865 - RNA, 19 nt, Artificial Sequence
  Description of Artificial Sequence: Synthetic oligonucleotide
aacaacaacaacaacaaaa

SEQ ID NO: 1027866 - RNA, 19 nt, Artificial Sequence
  Description of Artificial Sequence: Synthetic oligonucleotide
uuaaauacuugcucuaaca

SEQ ID NO: 1027867 - RNA, 19 nt, Artificial Sequence
  Description of Artificial Sequence: Synthetic oligonucleotide
uauacggcuguaaauuggg

SEQ ID NO: 1027868 - RNA, 19 nt, Artificial Sequence
  Description of Artificial Sequence: Synthetic oligonucleotide
ugaaucgucagcaaguaaa

SEQ ID NO: 1027869 - RNA, 19 nt, Artificial Sequence
  Description of Artificial Sequence: Synthetic oligonucleotide
ugaauucuaagauuuauua

SEQ ID NO: 1027870 - RNA, 19 nt, Artificial Sequence
  Description of Artificial Sequence: Synthetic oligonucleotide
auuauguuuagcuugggau

SEQ ID NO: 1027871 - RNA, 19 nt, Artificial Sequence
  Description of Artificial Sequence: Synthetic oligonucleotide
uaucuaguaaacuacaguu

SEQ ID NO: 1027872 - RNA, 19 nt, Artificial Sequence
  Description of Artificial Sequence: Synthetic oligonucleotide
acaaacaacaacaacaaca

SEQ ID NO: 1027873 - RNA, 19 nt, Artificial Sequence
  Description of Artificial Sequence: Synthetic oligonucleotide
ugaguauuauuccuucuag

SEQ ID NO: 1027874 - RNA, 19 nt, Artificial Sequence
  Description of Artificial Sequence: Synthetic oligonucleotide
uaagcagucaacauuuaac

SEQ ID NO: 1027875 - RNA, 19 nt, Artificial Sequence
  Description of Artificial Sequence: Synthetic oligonucleotide
ugaacaaagcacaucuacc

SEQ ID NO: 1027876 - RNA, 19 nt, Artificial Sequence
  Description of Artificial Sequence: Synthetic oligonucleotide
uguuauacuaccccauccc

SEQ ID NO: 1027877 - RNA, 19 nt, Artificial Sequence
  Description of Artificial Sequence: Synthetic oligonucleotide
acaucuacccucuguauac

SEQ ID NO: 1027878 - RNA, 19 nt, Artificial Sequence
  Description of Artificial Sequence: Synthetic oligonucleotide
aacaaacaacaacaacaac

SEQ ID NO: 1027879 - RNA, 19 nt, Artificial Sequence
  Description of Artificial Sequence: Synthetic oligonucleotide
aguccuagaaaucaaguca

SEQ ID NO: 1027880 - RNA, 19 nt, Artificial Sequence
  Description of Artificial Sequence: Synthetic oligonucleotide
cuauuugaacuacauaggc

SEQ ID NO: 1027881 - RNA, 19 nt, Artificial Sequence
  Description of Artificial Sequence: Synthetic oligonucleotide
acaauuauacucuuuugga

SEQ ID NO: 1027882 - RNA, 19 nt, Artificial Sequence
  Description of Artificial Sequence: Synthetic oligonucleotide
aacuuaugaauucccaaga

SEQ ID NO: 1027883 - RNA, 19 nt, Artificial Sequence
  Description of Artificial Sequence: Synthetic oligonucleotide
auuccuucuagauauuaag

SEQ ID NO: 1027884 - RNA, 19 nt, Artificial Sequence
  Description of Artificial Sequence: Synthetic oligonucleotide
uaaagaacuuguuauacua

SEQ ID NO: 1027885 - RNA, 19 nt, Artificial Sequence
  Description of Artificial Sequence: Synthetic oligonucleotide
aguaaauaaaauaucugug

SEQ ID NO: 1027886 - RNA, 19 nt, Artificial Sequence
  Description of Artificial Sequence: Synthetic oligonucleotide
aaagaacuuguuauacuac

SEQ ID NO: 1027887 - RNA, 19 nt, Artificial Sequence
  Description of Artificial Sequence: Synthetic oligonucleotide
aauuauguuuagcuuggga

SEQ ID NO: 1027888 - RNA, 19 nt, Artificial Sequence
  Description of Artificial Sequence: Synthetic oligonucleotide
uauuugaacuacauaggcu

SEQ ID NO: 1027889 - RNA, 19 nt, Artificial Sequence
  Description of Artificial Sequence: Synthetic oligonucleotide
uuagacaacaauggcauug

SEQ ID NO: 1027890 - RNA, 19 nt, Artificial Sequence
  Description of Artificial Sequence: Synthetic oligonucleotide
uuaaaagaguuagauuuag

SEQ ID NO: 1027891 - RNA, 19 nt, Artificial Sequence
  Description of Artificial Sequence: Synthetic oligonucleotide
cucagaauucccugaaucg

SEQ ID NO: 1027892 - RNA, 19 nt, Artificial Sequence
  Description of Artificial Sequence: Synthetic oligonucleotide
uuacauggguuaaagagaa

SEQ ID NO: 1027893 - RNA, 19 nt, Artificial Sequence
  Description of Artificial Sequence: Synthetic oligonucleotide
uacuaaaugcuacccaccc

SEQ ID NO: 1027894 - RNA, 19 nt, Artificial Sequence
  Description of Artificial Sequence: Synthetic oligonucleotide
agguaacuaacuuuuaacu

SEQ ID NO: 1027895 - RNA, 19 nt, Artificial Sequence
  Description of Artificial Sequence: Synthetic oligonucleotide
uacgagccaauaaagaacu

SEQ ID NO: 1027896 - RNA, 19 nt, Artificial Sequence
  Description of Artificial Sequence: Synthetic oligonucleotide
aaagacuacuuuguggcag

SEQ ID NO: 1027897 - RNA, 19 nt, Artificial Sequence
  Description of Artificial Sequence: Synthetic oligonucleotide
uuuauggggaaaacauugc

SEQ ID NO: 1027898 - RNA, 19 nt, Artificial Sequence
  Description of Artificial Sequence: Synthetic oligonucleotide
aaauaucgcugcuaacuug

SEQ ID NO: 1027899 - RNA, 19 nt, Artificial Sequence
  Description of Artificial Sequence: Synthetic oligonucleotide
uguuaguacagacagcuuu

SEQ ID NO: 1027900 - RNA, 19 nt, Artificial Sequence
  Description of Artificial Sequence: Synthetic oligonucleotide
aaacuauaccuaauuuuac

SEQ ID NO: 1027901 - RNA, 19 nt, Artificial Sequence
  Description of Artificial Sequence: Synthetic oligonucleotide
uacuagguaaacaaguuuu

SEQ ID NO: 1027902 - RNA, 19 nt, Artificial Sequence
  Description of Artificial Sequence: Synthetic oligonucleotide
agcuuugcaauuaagauga

SEQ ID NO: 1027903 - RNA, 19 nt, Artificial Sequence
  Description of Artificial Sequence: Synthetic oligonucleotide
uacacuauguauuaugguu

SEQ ID NO: 1027904 - RNA, 19 nt, Artificial Sequence
  Description of Artificial Sequence: Synthetic oligonucleotide
gauuuagacaacaauggca

SEQ ID NO: 1027905 - RNA, 19 nt, Artificial Sequence
  Description of Artificial Sequence: Synthetic oligonucleotide
uuuaacuacgagccaauaa

SEQ ID NO: 1027906 - RNA, 19 nt, Artificial Sequence
  Description of Artificial Sequence: Synthetic oligonucleotide
ucugacuguagccuugugc

SEQ ID NO: 1027907 - RNA, 19 nt, Artificial Sequence
  Description of Artificial Sequence: Synthetic oligonucleotide
cuuauguucugacuguagc

SEQ ID NO: 1027908 - RNA, 19 nt, Artificial Sequence
  Description of Artificial Sequence: Synthetic oligonucleotide
agucaaguaguuaagcuuc

SEQ ID NO: 1027909 - RNA, 19 nt, Artificial Sequence
  Description of Artificial Sequence: Synthetic oligonucleotide
acuacuuuguggcaguaug

SEQ ID NO: 1027910 - RNA, 19 nt, Artificial Sequence
  Description of Artificial Sequence: Synthetic oligonucleotide
uuguuauacuaccccaucc

SEQ ID NO: 1027911 - RNA, 19 nt, Artificial Sequence
  Description of Artificial Sequence: Synthetic oligonucleotide
ucuaucuugcaccaaacuu

SEQ ID NO: 1027912 - RNA, 19 nt, Artificial Sequence
  Description of Artificial Sequence: Synthetic oligonucleotide
ugaugagucuggcaugggg

SEQ ID NO: 1027913 - RNA, 19 nt, Artificial Sequence
  Description of Artificial Sequence: Synthetic oligonucleotide
uaugagcacuauuugaacu

SEQ ID NO: 1027914 - RNA, 19 nt, Artificial Sequence
  Description of Artificial Sequence: Synthetic oligonucleotide
auaucuaguaaacuacagu

SEQ ID NO: 1027915 - RNA, 19 nt, Artificial Sequence
  Description of Artificial Sequence: Synthetic oligonucleotide
aaaauaucgcugcuaacuu

SEQ ID NO: 1027916 - RNA, 19 nt, Artificial Sequence
  Description of Artificial Sequence: Synthetic oligonucleotide
uaucuaacacuguaaagaa

SEQ ID NO: 1027917 - RNA, 19 nt, Artificial Sequence
  Description of Artificial Sequence: Synthetic oligonucleotide
uuauggggaaaacauugca

SEQ ID NO: 1027918 - RNA, 19 nt, Artificial Sequence
  Description of Artificial Sequence: Synthetic oligonucleotide
aaagucucagaggagcauc

SEQ ID NO: 1027919 - RNA, 19 nt, Artificial Sequence
  Description of Artificial Sequence: Synthetic oligonucleotide
aggauuugguuuucaauag

SEQ ID NO: 1027920 - RNA, 19 nt, Artificial Sequence
  Description of Artificial Sequence: Synthetic oligonucleotide
cugaauuaaauacuugcuc

SEQ ID NO: 1027921 - RNA, 19 nt, Artificial Sequence
  Description of Artificial Sequence: Synthetic oligonucleotide
auauaaggcuucuguaauc

SEQ ID NO: 1027922 - RNA, 19 nt, Artificial Sequence
  Description of Artificial Sequence: Synthetic oligonucleotide
acuauuugaacuacauagg

SEQ ID NO: 1027923 - RNA, 19 nt, Artificial Sequence
  Description of Artificial Sequence: Synthetic oligonucleotide
uuuacuagguaaacaaguu

SEQ ID NO: 1027924 - RNA, 19 nt, Artificial Sequence
  Description of Artificial Sequence: Synthetic oligonucleotide
aucgucagcaaguaaauaa

SEQ ID NO: 1027925 - RNA, 19 nt, Artificial Sequence
  Description of Artificial Sequence: Synthetic oligonucleotide
uaucuugcaccaaacuuca

SEQ ID NO: 1027926 - RNA, 19 nt, Artificial Sequence
  Description of Artificial Sequence: Synthetic oligonucleotide
auaaagaacuuguuauacu

SEQ ID NO: 1027927 - RNA, 19 nt, Artificial Sequence
  Description of Artificial Sequence: Synthetic oligonucleotide
uuacuaaaugcuacccacc

SEQ ID NO: 1027928 - RNA, 19 nt, Artificial Sequence
  Description of Artificial Sequence: Synthetic oligonucleotide
uuuaacugagguagaccag

SEQ ID NO: 1027929 - RNA, 19 nt, Artificial Sequence
  Description of Artificial Sequence: Synthetic oligonucleotide
acuacgagccaauaaagaa

SEQ ID NO: 1027930 - RNA, 19 nt, Artificial Sequence
  Description of Artificial Sequence: Synthetic oligonucleotide
uuuagaggaugguaauuug

SEQ ID NO: 1027931 - RNA, 19 nt, Artificial Sequence
  Description of Artificial Sequence: Synthetic oligonucleotide
auuuacuaaaugcuaccca

SEQ ID NO: 1027932 - RNA, 19 nt, Artificial Sequence
  Description of Artificial Sequence: Synthetic oligonucleotide
acauauaaggcuucuguaa

SEQ ID NO: 1027933 - RNA, 19 nt, Artificial Sequence
  Description of Artificial Sequence: Synthetic oligonucleotide
uaaaauuaugagcacuauu

SEQ ID NO: 1027934 - RNA, 19 nt, Artificial Sequence
  Description of Artificial Sequence: Synthetic oligonucleotide
cuacgagccaauaaagaac

SEQ ID NO: 1027935 - RNA, 19 nt, Artificial Sequence
  Description of Artificial Sequence: Synthetic oligonucleotide
acaauuuuauggcuguggu

SEQ ID NO: 1027936 - RNA, 19 nt, Artificial Sequence
  Description of Artificial Sequence: Synthetic oligonucleotide
aggaugguaauuugaaacu

SEQ ID NO: 1027937 - RNA, 19 nt, Artificial Sequence
  Description of Artificial Sequence: Synthetic oligonucleotide
gucaugugauccuucaugc

SEQ ID NO: 1027938 - RNA, 19 nt, Artificial Sequence
  Description of Artificial Sequence: Synthetic oligonucleotide
aacaaaugcuggcugugcu

SEQ ID NO: 1027939 - RNA, 19 nt, Artificial Sequence
  Description of Artificial Sequence: Synthetic oligonucleotide
accuaauuuuacuagguaa

SEQ ID NO: 1027940 - RNA, 19 nt, Artificial Sequence
  Description of Artificial Sequence: Synthetic oligonucleotide
caaacaacaacaacaacaa

SEQ ID NO: 1027941 - RNA, 19 nt, Artificial Sequence
  Description of Artificial Sequence: Synthetic oligonucleotide
auuuagacaacaauggcau

SEQ ID NO: 1027942 - RNA, 19 nt, Artificial Sequence
  Description of Artificial Sequence: Synthetic oligonucleotide
aacuugaaaauaccugaau

SEQ ID NO: 1027943 - RNA, 19 nt, Artificial Sequence
  Description of Artificial Sequence: Synthetic oligonucleotide
uucacaugcagagagacua

SEQ ID NO: 1027944 - RNA, 19 nt, Artificial Sequence
  Description of Artificial Sequence: Synthetic oligonucleotide
uuauguuuagcuugggauu

SEQ ID NO: 1027945 - RNA, 19 nt, Artificial Sequence
  Description of Artificial Sequence: Synthetic oligonucleotide
acacuauguauuaugguuc

SEQ ID NO: 1027946 - RNA, 19 nt, Artificial Sequence
  Description of Artificial Sequence: Synthetic oligonucleotide
uuacuuacugacccaauua

SEQ ID NO: 1027947 - RNA, 19 nt, Artificial Sequence
  Description of Artificial Sequence: Synthetic oligonucleotide
uuauacuaccccauccccu

SEQ ID NO: 1027948 - RNA, 19 nt, Artificial Sequence
  Description of Artificial Sequence: Synthetic oligonucleotide
uugcuaacuuaaaagaguu

SEQ ID NO: 1027949 - RNA, 19 nt, Artificial Sequence
  Description of Artificial Sequence: Synthetic oligonucleotide
cagguaacuaacuuuuaac

SEQ ID NO: 1027950 - RNA, 19 nt, Artificial Sequence
  Description of Artificial Sequence: Synthetic oligonucleotide
uggugaucauuucagcucu

SEQ ID NO: 1027951 - RNA, 19 nt, Artificial Sequence
  Description of Artificial Sequence: Synthetic oligonucleotide
uuaacugagguagaccaga

SEQ ID NO: 1027952 - RNA, 19 nt, Artificial Sequence
  Description of Artificial Sequence: Synthetic oligonucleotide
cagucaacauuuaacugag

SEQ ID NO: 1027953 - RNA, 19 nt, Artificial Sequence
  Description of Artificial Sequence: Synthetic oligonucleotide
uggaagcuuauuacauggg

SEQ ID NO: 1027954 - RNA, 19 nt, Artificial Sequence
  Description of Artificial Sequence: Synthetic oligonucleotide
caaguaguuaagcuucagc

SEQ ID NO: 1027955 - RNA, 19 nt, Artificial Sequence
  Description of Artificial Sequence: Synthetic oligonucleotide
uuugaacuacauaggcuga

SEQ ID NO: 1027956 - RNA, 19 nt, Artificial Sequence
  Description of Artificial Sequence: Synthetic oligonucleotide
auuacauggguuaaagaga

SEQ ID NO: 1027957 - RNA, 19 nt, Artificial Sequence
  Description of Artificial Sequence: Synthetic oligonucleotide
acuugcuaacuuaaaagag

SEQ ID NO: 1027958 - RNA, 19 nt, Artificial Sequence
  Description of Artificial Sequence: Synthetic oligonucleotide
uuccuagugugucauguga

SEQ ID NO: 1027959 - RNA, 19 nt, Artificial Sequence
  Description of Artificial Sequence: Synthetic oligonucleotide
aagguuuagaggaugguaa

SEQ ID NO: 1027960 - RNA, 19 nt, Artificial Sequence
  Description of Artificial Sequence: Synthetic oligonucleotide
uuaugaugagucuggcaug

SEQ ID NO: 1027961 - RNA, 19 nt, Artificial Sequence
  Description of Artificial Sequence: Synthetic oligonucleotide
uauguauuaugguucuauc

SEQ ID NO: 1027962 - RNA, 19 nt, Artificial Sequence
  Description of Artificial Sequence: Synthetic oligonucleotide
auugguuagaagcuguguu

SEQ ID NO: 1027963 - RNA, 19 nt, Artificial Sequence
  Description of Artificial Sequence: Synthetic oligonucleotide
acuuaaauuuuauggggaa

SEQ ID NO: 1027964 - RNA, 19 nt, Artificial Sequence
  Description of Artificial Sequence: Synthetic oligonucleotide
uuacuagguaaacaaguuu

SEQ ID NO: 1027965 - RNA, 19 nt, Artificial Sequence
  Description of Artificial Sequence: Synthetic oligonucleotide
ucgucagcaaguaaauaaa

SEQ ID NO: 1027966 - RNA, 19 nt, Artificial Sequence
  Description of Artificial Sequence: Synthetic oligonucleotide
auuaugagcacuauuugaa

SEQ ID NO: 1027967 - RNA, 19 nt, Artificial Sequence
  Description of Artificial Sequence: Synthetic oligonucleotide
caaguggcaguaaacuggc

SEQ ID NO: 1027968 - RNA, 19 nt, Artificial Sequence
  Description of Artificial Sequence: Synthetic oligonucleotide
cugacuguagccuugugca

SEQ ID NO: 1027969 - RNA, 19 nt, Artificial Sequence
  Description of Artificial Sequence: Synthetic oligonucleotide
uacauauaaggcuucugua

SEQ ID NO: 1027970 - RNA, 19 nt, Artificial Sequence
  Description of Artificial Sequence: Synthetic oligonucleotide
uacggcuguaaauugggcu

SEQ ID NO: 1027971 - RNA, 19 nt, Artificial Sequence
  Description of Artificial Sequence: Synthetic oligonucleotide
cuagugugucaugugaucc

SEQ ID NO: 1027972 - RNA, 19 nt, Artificial Sequence
  Description of Artificial Sequence: Synthetic oligonucleotide
agcagucaacauuuaacug

SEQ ID NO: 1027973 - RNA, 19 nt, Artificial Sequence
  Description of Artificial Sequence: Synthetic oligonucleotide
uacuucuaagcagucaaca

SEQ ID NO: 1027974 - RNA, 19 nt, Artificial Sequence
  Description of Artificial Sequence: Synthetic oligonucleotide
ugucagguuuaacuacgag

SEQ ID NO: 1027975 - RNA, 19 nt, Artificial Sequence
  Description of Artificial Sequence: Synthetic oligonucleotide
ucagaauucccugaaucgu

SEQ ID NO: 1027976 - RNA, 19 nt, Artificial Sequence
  Description of Artificial Sequence: Synthetic oligonucleotide
uggcaguaugucaaauaag

SEQ ID NO: 1027977 - RNA, 19 nt, Artificial Sequence
  Description of Artificial Sequence: Synthetic oligonucleotide
ucaauacauauaaggcuuc

SEQ ID NO: 1027978 - RNA, 19 nt, Artificial Sequence
  Description of Artificial Sequence: Synthetic oligonucleotide
aucaauacauauaaggcuu

SEQ ID NO: 1027979 - RNA, 19 nt, Artificial Sequence
  Description of Artificial Sequence: Synthetic oligonucleotide
aaagguuuagaggauggua

SEQ ID NO: 1027980 - RNA, 19 nt, Artificial Sequence
  Description of Artificial Sequence: Synthetic oligonucleotide
uuuaacuuucagguaagau

SEQ ID NO: 1027981 - RNA, 19 nt, Artificial Sequence
  Description of Artificial Sequence: Synthetic oligonucleotide
uguagccuugugcauaaaa

SEQ ID NO: 1027982 - RNA, 19 nt, Artificial Sequence
  Description of Artificial Sequence: Synthetic oligonucleotide
auauacggcuguaaauugg

SEQ ID NO: 1027983 - RNA, 19 nt, Artificial Sequence
  Description of Artificial Sequence: Synthetic oligonucleotide
auuacuuacugacccaauu

SEQ ID NO: 1027984 - RNA, 19 nt, Artificial Sequence
  Description of Artificial Sequence: Synthetic oligonucleotide
aacuuuuaacuuucaggua

SEQ ID NO: 1027985 - RNA, 19 nt, Artificial Sequence
  Description of Artificial Sequence: Synthetic oligonucleotide
aguaguuaagcuucagcua

SEQ ID NO: 1027986 - RNA, 19 nt, Artificial Sequence
  Description of Artificial Sequence: Synthetic oligonucleotide
auguagaauugguuagaag

SEQ ID NO: 1027987 - RNA, 19 nt, Artificial Sequence
  Description of Artificial Sequence: Synthetic oligonucleotide
acagguaacuaacuuuuaa

SEQ ID NO: 1027988 - RNA, 19 nt, Artificial Sequence
  Description of Artificial Sequence: Synthetic oligonucleotide
ucccugaaucgucagcaag

SEQ ID NO: 1027989 - RNA, 19 nt, Artificial Sequence
  Description of Artificial Sequence: Synthetic oligonucleotide
aacuacauaggcugagcuu

SEQ ID NO: 1027990 - RNA, 19 nt, Artificial Sequence
  Description of Artificial Sequence: Synthetic oligonucleotide
uccccuagugaauucuaag

SEQ ID NO: 1027991 - RNA, 19 nt, Artificial Sequence
  Description of Artificial Sequence: Synthetic oligonucleotide
uaagaaagguuuagaggau

SEQ ID NO: 1027992 - RNA, 19 nt, Artificial Sequence
  Description of Artificial Sequence: Synthetic oligonucleotide
auacacuauguauuauggu

SEQ ID NO: 1027993 - RNA, 19 nt, Artificial Sequence
  Description of Artificial Sequence: Synthetic oligonucleotide
acuuaugaauucccaagaa

SEQ ID NO: 1027994 - RNA, 19 nt, Artificial Sequence
  Description of Artificial Sequence: Synthetic oligonucleotide
cuuacugacccaauuaugu

SEQ ID NO: 1027995 - RNA, 19 nt, Artificial Sequence
  Description of Artificial Sequence: Synthetic oligonucleotide
aacuacgagccaauaaaga

SEQ ID NO: 1027996 - RNA, 19 nt, Artificial Sequence
  Description of Artificial Sequence: Synthetic oligonucleotide
gcaaguggcaguaaacugg

SEQ ID NO: 1027997 - RNA, 19 nt, Artificial Sequence
  Description of Artificial Sequence: Synthetic oligonucleotide
gaucauuucagcucuacuu

SEQ ID NO: 1027998 - RNA, 19 nt, Artificial Sequence
  Description of Artificial Sequence: Synthetic oligonucleotide
ccuugugcauaaaacaacc

SEQ ID NO: 1027999 - RNA, 19 nt, Artificial Sequence
  Description of Artificial Sequence: Synthetic oligonucleotide
gcucaucuaaaccuuaaug

SEQ ID NO: 1028000 - RNA, 19 nt, Artificial Sequence
  Description of Artificial Sequence: Synthetic oligonucleotide
uacugacccaauuauguuu

SEQ ID NO: 1028001 - RNA, 19 nt, Artificial Sequence
  Description of Artificial Sequence: Synthetic oligonucleotide
aaacaacaacaacaacaaa

SEQ ID NO: 1028002 - RNA, 19 nt, Artificial Sequence
  Description of Artificial Sequence: Synthetic oligonucleotide
uugaacuacauaggcugag

SEQ ID NO: 1028003 - RNA, 19 nt, Artificial Sequence
  Description of Artificial Sequence: Synthetic oligonucleotide
guaacuaacuuuuaacuuu

SEQ ID NO: 1028004 - RNA, 19 nt, Artificial Sequence
  Description of Artificial Sequence: Synthetic oligonucleotide
uaacagcgccuccuagugg

SEQ ID NO: 1028005 - RNA, 19 nt, Artificial Sequence
  Description of Artificial Sequence: Synthetic oligonucleotide
cuuguuauacuaccccauc

SEQ ID NO: 1028006 - RNA, 19 nt, Artificial Sequence
  Description of Artificial Sequence: Synthetic oligonucleotide
ccuaacacaacaucccacc

SEQ ID NO: 1028007 - RNA, 19 nt, Artificial Sequence
  Description of Artificial Sequence: Synthetic oligonucleotide
ugaacuacauaggcugagc

SEQ ID NO: 1028008 - RNA, 19 nt, Artificial Sequence
  Description of Artificial Sequence: Synthetic oligonucleotide
uuccuuauguucugacugu

SEQ ID NO: 1028009 - RNA, 19 nt, Artificial Sequence
  Description of Artificial Sequence: Synthetic oligonucleotide
uuuccuagugugucaugug

SEQ ID NO: 1028010 - RNA, 19 nt, Artificial Sequence
  Description of Artificial Sequence: Synthetic oligonucleotide
uaccuaauuuuacuaggua

SEQ ID NO: 1028011 - RNA, 19 nt, Artificial Sequence
  Description of Artificial Sequence: Synthetic oligonucleotide
agaguuagauuuagacaac

SEQ ID NO: 1028012 - RNA, 19 nt, Artificial Sequence
  Description of Artificial Sequence: Synthetic oligonucleotide
cuugcuaacuuaaaagagu

SEQ ID NO: 1028013 - RNA, 19 nt, Artificial Sequence
  Description of Artificial Sequence: Synthetic oligonucleotide
aaauuagggaauacauuuu

SEQ ID NO: 1028014 - RNA, 19 nt, Artificial Sequence
  Description of Artificial Sequence: Synthetic oligonucleotide
guuagauuuagacaacaau

SEQ ID NO: 1028015 - RNA, 19 nt, Artificial Sequence
  Description of Artificial Sequence: Synthetic oligonucleotide
guaguuaagcuucagcuau

SEQ ID NO: 1028016 - RNA, 19 nt, Artificial Sequence
  Description of Artificial Sequence: Synthetic oligonucleotide
uucuaagauuuauuacuua

SEQ ID NO: 1028017 - RNA, 19 nt, Artificial Sequence
  Description of Artificial Sequence: Synthetic oligonucleotide
acuggccuuuccuagugug

SEQ ID NO: 1028018 - RNA, 19 nt, Artificial Sequence
  Description of Artificial Sequence: Synthetic oligonucleotide
aguaguguuacagcaccug

SEQ ID NO: 1028019 - RNA, 19 nt, Artificial Sequence
  Description of Artificial Sequence: Synthetic oligonucleotide
uagugugucaugugauccu

SEQ ID NO: 1028020 - RNA, 19 nt, Artificial Sequence
  Description of Artificial Sequence: Synthetic oligonucleotide
accuaacacaacaucccac

SEQ ID NO: 1028021 - RNA, 19 nt, Artificial Sequence
  Description of Artificial Sequence: Synthetic oligonucleotide
ggugucagguuuaacuacg

SEQ ID NO: 1028022 - RNA, 19 nt, Artificial Sequence
  Description of Artificial Sequence: Synthetic oligonucleotide
augguucuaucuugcacca

SEQ ID NO: 1028023 - RNA, 19 nt, Artificial Sequence
  Description of Artificial Sequence: Synthetic oligonucleotide
agcucuacuucuaagcagu

SEQ ID NO: 1028024 - RNA, 19 nt, Artificial Sequence
  Description of Artificial Sequence: Synthetic oligonucleotide
uccuagugugucaugugau

SEQ ID NO: 1028025 - RNA, 19 nt, Artificial Sequence
  Description of Artificial Sequence: Synthetic oligonucleotide
ugagcacuauuugaacuac

SEQ ID NO: 1028026 - RNA, 19 nt, Artificial Sequence
  Description of Artificial Sequence: Synthetic oligonucleotide
auucuaagauuuauuacuu

SEQ ID NO: 1028027 - RNA, 19 nt, Artificial Sequence
  Description of Artificial Sequence: Synthetic oligonucleotide
acggcuguaaauugggcuu

SEQ ID NO: 1028028 - RNA, 19 nt, Artificial Sequence
  Description of Artificial Sequence: Synthetic oligonucleotide
agaaaauauacggcuguaa

SEQ ID NO: 1028029 - RNA, 19 nt, Artificial Sequence
  Description of Artificial Sequence: Synthetic oligonucleotide
agaacaaaugcuggcugug

SEQ ID NO: 1028030 - RNA, 19 nt, Artificial Sequence
  Description of Artificial Sequence: Synthetic oligonucleotide
gguuuguuaacauuauaua

SEQ ID NO: 1028031 - RNA, 19 nt, Artificial Sequence
  Description of Artificial Sequence: Synthetic oligonucleotide
uaguguuacagcaccuguu

SEQ ID NO: 1028032 - RNA, 19 nt, Artificial Sequence
  Description of Artificial Sequence: Synthetic oligonucleotide
ugaaggguaacagcgccuc

SEQ ID NO: 1028033 - RNA, 19 nt, Artificial Sequence
  Description of Artificial Sequence: Synthetic oligonucleotide
cuacuucuaagcagucaac

SEQ ID NO: 1028034 - RNA, 19 nt, Artificial Sequence
  Description of Artificial Sequence: Synthetic oligonucleotide
acuuacugacccaauuaug

SEQ ID NO: 1028035 - RNA, 19 nt, Artificial Sequence
  Description of Artificial Sequence: Synthetic oligonucleotide
ugacccaauuauguuuagc

SEQ ID NO: 1028036 - RNA, 19 nt, Artificial Sequence
  Description of Artificial Sequence: Synthetic oligonucleotide
auacccauuuuggugucag

SEQ ID NO: 1028037 - RNA, 19 nt, Artificial Sequence
  Description of Artificial Sequence: Synthetic oligonucleotide
agguuuaacuacgagccaa

SEQ ID NO: 1028038 - RNA, 19 nt, Artificial Sequence
  Description of Artificial Sequence: Synthetic oligonucleotide
agacaacaauggcauugag

SEQ ID NO: 1028039 - RNA, 19 nt, Artificial Sequence
  Description of Artificial Sequence: Synthetic oligonucleotide
auacggcuguaaauugggc

SEQ ID NO: 1028040 - RNA, 19 nt, Artificial Sequence
  Description of Artificial Sequence: Synthetic oligonucleotide
cuugugcauaaaacaacca

SEQ ID NO: 1028041 - RNA, 19 nt, Artificial Sequence
  Description of Artificial Sequence: Synthetic oligonucleotide
guaagauccacacuugauu

SEQ ID NO: 1028042 - RNA, 19 nt, Artificial Sequence
  Description of Artificial Sequence: Synthetic oligonucleotide
agguuuagaggaugguaau

SEQ ID NO: 1028043 - RNA, 19 nt, Artificial Sequence
  Description of Artificial Sequence: Synthetic oligonucleotide
gagccaauaaagaacuugu

SEQ ID NO: 1028044 - RNA, 19 nt, Artificial Sequence
  Description of Artificial Sequence: Synthetic oligonucleotide
aaacaaccaguuggaauau

SEQ ID NO: 1028045 - RNA, 19 nt, Artificial Sequence
  Description of Artificial Sequence: Synthetic oligonucleotide
augguaauuugaaacuuau

SEQ ID NO: 1028046 - RNA, 19 nt, Artificial Sequence
  Description of Artificial Sequence: Synthetic oligonucleotide
aagcagguauuuaucuccu

SEQ ID NO: 1028047 - RNA, 19 nt, Artificial Sequence
  Description of Artificial Sequence: Synthetic oligonucleotide
acccaauuauguuuagcuu

SEQ ID NO: 1028048 - RNA, 19 nt, Artificial Sequence
  Description of Artificial Sequence: Synthetic oligonucleotide
uacccauuuuggugucagg

SEQ ID NO: 1028049 - RNA, 19 nt, Artificial Sequence
  Description of Artificial Sequence: Synthetic oligonucleotide
agcacuauuugaacuacau

SEQ ID NO: 1028050 - RNA, 19 nt, Artificial Sequence
  Description of Artificial Sequence: Synthetic oligonucleotide
uucaugccauuaaguuuug

SEQ ID NO: 1028051 - RNA, 19 nt, Artificial Sequence
  Description of Artificial Sequence: Synthetic oligonucleotide
ugaagcugaacagcauuau

SEQ ID NO: 1028052 - RNA, 19 nt, Artificial Sequence
  Description of Artificial Sequence: Synthetic oligonucleotide
cuaacagguaacuaacuuu

SEQ ID NO: 1028053 - RNA, 19 nt, Artificial Sequence
  Description of Artificial Sequence: Synthetic oligonucleotide
ucuaagcagucaacauuua

SEQ ID NO: 1028054 - RNA, 19 nt, Artificial Sequence
  Description of Artificial Sequence: Synthetic oligonucleotide
gcuucuguaaucaaagucu

SEQ ID NO: 1028055 - RNA, 19 nt, Artificial Sequence
  Description of Artificial Sequence: Synthetic oligonucleotide
cugaguauuauuccuucua

SEQ ID NO: 1028056 - RNA, 19 nt, Artificial Sequence
  Description of Artificial Sequence: Synthetic oligonucleotide
aguuagauuuagacaacaa

SEQ ID NO: 1028057 - RNA, 19 nt, Artificial Sequence
  Description of Artificial Sequence: Synthetic oligonucleotide
aauacccauuuugguguca

SEQ ID NO: 1028058 - RNA, 19 nt, Artificial Sequence
  Description of Artificial Sequence: Synthetic oligonucleotide
cuacccucuguauacacua

SEQ ID NO: 1028059 - RNA, 19 nt, Artificial Sequence
  Description of Artificial Sequence: Synthetic oligonucleotide
cuaagcagucaacauuuaa

SEQ ID NO: 1028060 - RNA, 19 nt, Artificial Sequence
  Description of Artificial Sequence: Synthetic oligonucleotide
cuccuaguggccaaaggaa

SEQ ID NO: 1028061 - RNA, 19 nt, Artificial Sequence
  Description of Artificial Sequence: Synthetic oligonucleotide
gguucuaucuugcaccaaa

SEQ ID NO: 1028062 - RNA, 19 nt, Artificial Sequence
  Description of Artificial Sequence: Synthetic oligonucleotide
uaucgcugcuaacuugcua

SEQ ID NO: 1028063 - RNA, 19 nt, Artificial Sequence
  Description of Artificial Sequence: Synthetic oligonucleotide
cauauaaggcuucuguaau

SEQ ID NO: 1028064 - RNA, 19 nt, Artificial Sequence
  Description of Artificial Sequence: Synthetic oligonucleotide
acugacccaauuauguuua

SEQ ID NO: 1028065 - RNA, 19 nt, Artificial Sequence
  Description of Artificial Sequence: Synthetic oligonucleotide
ccuucuagauauuaaguaa

SEQ ID NO: 1028066 - RNA, 19 nt, Artificial Sequence
  Description of Artificial Sequence: Synthetic oligonucleotide
auacaauguuucauucaca

SEQ ID NO: 1028067 - RNA, 19 nt, Artificial Sequence
  Description of Artificial Sequence: Synthetic oligonucleotide
uuuuauggcuguggugauc

SEQ ID NO: 1028068 - RNA, 19 nt, Artificial Sequence
  Description of Artificial Sequence: Synthetic oligonucleotide
uaggcucaucuaaaccuua

SEQ ID NO: 1028069 - RNA, 19 nt, Artificial Sequence
  Description of Artificial Sequence: Synthetic oligonucleotide
gguaacuaacuuuuaacuu

SEQ ID NO: 1028070 - RNA, 19 nt, Artificial Sequence
  Description of Artificial Sequence: Synthetic oligonucleotide
uaguuaagcuucagcuauu

SEQ ID NO: 1028071 - RNA, 19 nt, Artificial Sequence
  Description of Artificial Sequence: Synthetic oligonucleotide
caaagacuacuuuguggca

SEQ ID NO: 1028072 - RNA, 19 nt, Artificial Sequence
  Description of Artificial Sequence: Synthetic oligonucleotide
guuuagaggaugguaauuu

SEQ ID NO: 1028073 - RNA, 19 nt, Artificial Sequence
  Description of Artificial Sequence: Synthetic oligonucleotide
gaaaucaagucaaguaguu

SEQ ID NO: 1028074 - RNA, 19 nt, Artificial Sequence
  Description of Artificial Sequence: Synthetic oligonucleotide
aguuaagcuucagcuauuu

SEQ ID NO: 1028075 - RNA, 19 nt, Artificial Sequence
  Description of Artificial Sequence: Synthetic oligonucleotide
uacauggguuaaagagaaa

SEQ ID NO: 1028076 - RNA, 19 nt, Artificial Sequence
  Description of Artificial Sequence: Synthetic oligonucleotide
guaguguuacagcaccugu

SEQ ID NO: 1028077 - RNA, 19 nt, Artificial Sequence
  Description of Artificial Sequence: Synthetic oligonucleotide
cugacccaauuauguuuag

SEQ ID NO: 1028078 - RNA, 19 nt, Artificial Sequence
  Description of Artificial Sequence: Synthetic oligonucleotide
ccuuauguucugacuguag

SEQ ID NO: 1028079 - RNA, 19 nt, Artificial Sequence
  Description of Artificial Sequence: Synthetic oligonucleotide
cucuaaaauuaugagcacu

SEQ ID NO: 1028080 - RNA, 19 nt, Artificial Sequence
  Description of Artificial Sequence: Synthetic oligonucleotide
agcuuauuacauggguuaa

SEQ ID NO: 1028081 - RNA, 19 nt, Artificial Sequence
  Description of Artificial Sequence: Synthetic oligonucleotide
ucgcugcuaacuugcuaac

SEQ ID NO: 1028082 - RNA, 19 nt, Artificial Sequence
  Description of Artificial Sequence: Synthetic oligonucleotide
caaccaguuggaauauuua

SEQ ID NO: 1028083 - RNA, 19 nt, Artificial Sequence
  Description of Artificial Sequence: Synthetic oligonucleotide
cacuauguauuaugguucu

SEQ ID NO: 1028084 - RNA, 19 nt, Artificial Sequence
  Description of Artificial Sequence: Synthetic oligonucleotide
acacuugauuccagguuug

SEQ ID NO: 1028085 - RNA, 19 nt, Artificial Sequence
  Description of Artificial Sequence: Synthetic oligonucleotide
cacaucuacccucuguaua

SEQ ID NO: 1028086 - RNA, 19 nt, Artificial Sequence
  Description of Artificial Sequence: Synthetic oligonucleotide
uuuuggugucagguuuaac

SEQ ID NO: 1028087 - RNA, 19 nt, Artificial Sequence
  Description of Artificial Sequence: Synthetic oligonucleotide
aucuaacacuguaaagaaa

SEQ ID NO: 1028088 - RNA, 19 nt, Artificial Sequence
  Description of Artificial Sequence: Synthetic oligonucleotide
aaaugcuggcugugcuaua

SEQ ID NO: 1028089 - RNA, 19 nt, Artificial Sequence
  Description of Artificial Sequence: Synthetic oligonucleotide
gguuagaagcuguguucug

SEQ ID NO: 1028090 - RNA, 19 nt, Artificial Sequence
  Description of Artificial Sequence: Synthetic oligonucleotide
acauugcaaauuagggaau

SEQ ID NO: 1028091 - RNA, 19 nt, Artificial Sequence
  Description of Artificial Sequence: Synthetic oligonucleotide
acaugcagagagacuaaaa

SEQ ID NO: 1028092 - RNA, 19 nt, Artificial Sequence
  Description of Artificial Sequence: Synthetic oligonucleotide
ucagcuauuuuggcagcuu

SEQ ID NO: 1028093 - RNA, 19 nt, Artificial Sequence
  Description of Artificial Sequence: Synthetic oligonucleotide
augaugagucuggcauggg

SEQ ID NO: 1028094 - RNA, 19 nt, Artificial Sequence
  Description of Artificial Sequence: Synthetic oligonucleotide
cacacuugauuccagguuu

SEQ ID NO: 1028095 - RNA, 19 nt, Artificial Sequence
  Description of Artificial Sequence: Synthetic oligonucleotide
ccuagugugucaugugauc

SEQ ID NO: 1028096 - RNA, 19 nt, Artificial Sequence
  Description of Artificial Sequence: Synthetic oligonucleotide
ccucuaaaauuaugagcac

SEQ ID NO: 1028097 - RNA, 19 nt, Artificial Sequence
  Description of Artificial Sequence: Synthetic oligonucleotide
ccugaauuaaauacuugcu

SEQ ID NO: 1028098 - RNA, 19 nt, Artificial Sequence
  Description of Artificial Sequence: Synthetic oligonucleotide
acuugauuccagguuuguu

SEQ ID NO: 1028099 - RNA, 19 nt, Artificial Sequence
  Description of Artificial Sequence: Synthetic oligonucleotide
aacaaccaguuggaauauu

SEQ ID NO: 1028100 - RNA, 19 nt, Artificial Sequence
  Description of Artificial Sequence: Synthetic oligonucleotide
ccuccuaguggccaaagga

SEQ ID NO: 1028101 - RNA, 19 nt, Artificial Sequence
  Description of Artificial Sequence: Synthetic oligonucleotide
cacaacaucccaccccaaa

SEQ ID NO: 1028102 - RNA, 19 nt, Artificial Sequence
  Description of Artificial Sequence: Synthetic oligonucleotide
cauugcaaauuagggaaua

SEQ ID NO: 1028103 - RNA, 19 nt, Artificial Sequence
  Description of Artificial Sequence: Synthetic oligonucleotide
cucuacuucuaagcaguca

SEQ ID NO: 1028104 - RNA, 19 nt, Artificial Sequence
  Description of Artificial Sequence: Synthetic oligonucleotide
ccccuagugaauucuaaga

SEQ ID NO: 1028105 - RNA, 19 nt, Artificial Sequence
  Description of Artificial Sequence: Synthetic oligonucleotide
cucuaacagguaacuaacu

SEQ ID NO: 1028106 - RNA, 19 nt, Artificial Sequence
  Description of Artificial Sequence: Synthetic oligonucleotide
cgagccaauaaagaacuug

SEQ ID NO: 1028107 - RNA, 19 nt, Artificial Sequence
  Description of Artificial Sequence: Synthetic oligonucleotide
aucuugcaccaaacuucac

SEQ ID NO: 1028108 - RNA, 19 nt, Artificial Sequence
  Description of Artificial Sequence: Synthetic oligonucleotide
gccuccuaguggccaaagg

SEQ ID NO: 1028109 - RNA, 19 nt, Artificial Sequence
  Description of Artificial Sequence: Synthetic oligonucleotide
cagggucucagaauucccu

SEQ ID NO: 1028110 - RNA, 19 nt, Artificial Sequence
  Description of Artificial Sequence: Synthetic oligonucleotide
guuuaacuacgagccaaua

SEQ ID NO: 1028111 - RNA, 19 nt, Artificial Sequence
  Description of Artificial Sequence: Synthetic oligonucleotide
cagaggagcaucuguuccu

SEQ ID NO: 1028112 - RNA, 19 nt, Artificial Sequence
  Description of Artificial Sequence: Synthetic oligonucleotide
auaucgcugcuaacuugcu

SEQ ID NO: 1028113 - RNA, 19 nt, Artificial Sequence
  Description of Artificial Sequence: Synthetic oligonucleotide
gcugcuaacuugcuaacuu

SEQ ID NO: 1028114 - RNA, 19 nt, Artificial Sequence
  Description of Artificial Sequence: Synthetic oligonucleotide
gcaugggguuuggugagag

SEQ ID NO: 1028115 - RNA, 19 nt, Artificial Sequence
  Description of Artificial Sequence: Synthetic oligonucleotide
cuaccccauccccuaguga

SEQ ID NO: 1028116 - RNA, 19 nt, Artificial Sequence
  Description of Artificial Sequence: Synthetic oligonucleotide
caucuacccucuguauaca

SEQ ID NO: 1028117 - RNA, 19 nt, Artificial Sequence
  Description of Artificial Sequence: Synthetic oligonucleotide
gcuaacuugcuaacuuaaa

SEQ ID NO: 1028118 - RNA, 19 nt, Artificial Sequence
  Description of Artificial Sequence: Synthetic oligonucleotide
gugugucaugugauccuuc

SEQ ID NO: 1028119 - RNA, 19 nt, Artificial Sequence
  Description of Artificial Sequence: Synthetic oligonucleotide
gguaagauccacacuugau

SEQ ID NO: 1028120 - RNA, 19 nt, Artificial Sequence
  Description of Artificial Sequence: Synthetic oligonucleotide
ggccuuuccuaguguguca

SEQ ID NO: 1028121 - RNA, 19 nt, Artificial Sequence
  Description of Artificial Sequence: Synthetic oligonucleotide
ggaugguaauuugaaacuu

SEQ ID NO: 1028122 - RNA, 19 nt, Artificial Sequence
  Description of Artificial Sequence: Synthetic oligonucleotide
cccuagugaauucuaagau

SEQ ID NO: 1028123 - RNA, 19 nt, Artificial Sequence
  Description of Artificial Sequence: Synthetic oligonucleotide
gcauuauaccuucuuucuu

SEQ ID NO: 1028124 - RNA, 19 nt, Artificial Sequence
  Description of Artificial Sequence: Synthetic oligonucleotide
cccucuguauacacuaugu

SEQ ID NO: 1028125 - RNA, 19 nt, Artificial Sequence
  Description of Artificial Sequence: Synthetic oligonucleotide
ccuucaugccauuaaguuu

SEQ ID NO: 1028126 - RNA, 19 nt, Artificial Sequence
  Description of Artificial Sequence: Synthetic oligonucleotide
ccuuuccuagugugucaug

SEQ ID NO: 1028127 - RNA, 19 nt, Artificial Sequence
  Description of Artificial Sequence: Synthetic oligonucleotide
gguuuaacuacgagccaau

SEQ ID NO: 1028128 - RNA, 19 nt, Artificial Sequence
  Description of Artificial Sequence: Synthetic oligonucleotide
caaagucucagaggagcau

SEQ ID NO: 1028129 - RNA, 19 nt, Artificial Sequence
  Description of Artificial Sequence: Synthetic oligonucleotide
gguuuagaggaugguaauu

SEQ ID NO: 1028130 - RNA, 19 nt, Artificial Sequence
  Description of Artificial Sequence: Synthetic oligonucleotide
acgagccaauaaagaacuu

SEQ ID NO: 1028131 - RNA, 19 nt, Artificial Sequence
  Description of Artificial Sequence: Synthetic oligonucleotide
cuguuaguacagacagcuu

SEQ ID NO: 1028132 - RNA, 19 nt, Artificial Sequence
  Description of Artificial Sequence: Synthetic oligonucleotide
ccugaaucgucagcaagua

SEQ ID NO: 1028133 - RNA, 19 nt, Artificial Sequence
  Description of Artificial Sequence: Synthetic oligonucleotide
gcacaucuacccucuguau

SEQ ID NO: 1028134 - RNA, 19 nt, Artificial Sequence
  Description of Artificial Sequence: Synthetic oligonucleotide
ggugaucauuucagcucua

SEQ ID NO: 1028135 - RNA, 19 nt, Artificial Sequence
  Description of Artificial Sequence: Synthetic oligonucleotide
aagaacaacggcuucaagc

SEQ ID NO: 1028136 - RNA, 19 nt, Artificial Sequence
  Description of Artificial Sequence: Synthetic oligonucleotide
aaugucaggagcuagggug

SEQ ID NO: 1028137 - RNA, 19 nt, Artificial Sequence
  Description of Artificial Sequence: Synthetic oligonucleotide
auugagauaaugucugucc

SEQ ID NO: 1028138 - RNA, 19 nt, Artificial Sequence
  Description of Artificial Sequence: Synthetic oligonucleotide
agucuuuucacacuauugc

SEQ ID NO: 1028139 - RNA, 19 nt, Artificial Sequence
  Description of Artificial Sequence: Synthetic oligonucleotide
aucaagcagaguuugagcc

SEQ ID NO: 1028140 - RNA, 19 nt, Artificial Sequence
  Description of Artificial Sequence: Synthetic oligonucleotide
aaucaagcagaguuugagc

SEQ ID NO: 1028141 - RNA, 19 nt, Artificial Sequence
  Description of Artificial Sequence: Synthetic oligonucleotide
agaguauugagauaauguc

SEQ ID NO: 1028142 - RNA, 19 nt, Artificial Sequence
  Description of Artificial Sequence: Synthetic oligonucleotide
agaaauuccaaccuuguug

SEQ ID NO: 1028143 - RNA, 19 nt, Artificial Sequence
  Description of Artificial Sequence: Synthetic oligonucleotide
uuaauggagaaucucaggu

SEQ ID NO: 1028144 - RNA, 19 nt, Artificial Sequence
  Description of Artificial Sequence: Synthetic oligonucleotide
aaucuuuagucacacaaca

SEQ ID NO: 1028145 - RNA, 19 nt, Artificial Sequence
  Description of Artificial Sequence: Synthetic oligonucleotide
uuuuaauggagaaucucag

SEQ ID NO: 1028146 - RNA, 19 nt, Artificial Sequence
  Description of Artificial Sequence: Synthetic oligonucleotide
auaucagugggacagguuc

SEQ ID NO: 1028147 - RNA, 19 nt, Artificial Sequence
  Description of Artificial Sequence: Synthetic oligonucleotide
cuuuagucacacaacaucc

SEQ ID NO: 1028148 - RNA, 19 nt, Artificial Sequence
  Description of Artificial Sequence: Synthetic oligonucleotide
uguaacagaguauugagau

SEQ ID NO: 1028149 - RNA, 19 nt, Artificial Sequence
  Description of Artificial Sequence: Synthetic oligonucleotide
uguagaaauuccaaccuug

SEQ ID NO: 1028150 - RNA, 19 nt, Artificial Sequence
  Description of Artificial Sequence: Synthetic oligonucleotide
ugugauagaccuaccagag

SEQ ID NO: 1028151 - RNA, 19 nt, Artificial Sequence
  Description of Artificial Sequence: Synthetic oligonucleotide
uuaauucuaggacagugcu

SEQ ID NO: 1028152 - RNA, 19 nt, Artificial Sequence
  Description of Artificial Sequence: Synthetic oligonucleotide
aaggguuaauucuaggaca

SEQ ID NO: 1028153 - RNA, 19 nt, Artificial Sequence
  Description of Artificial Sequence: Synthetic oligonucleotide
cacacaacaugguagaacc

SEQ ID NO: 1028154 - RNA, 19 nt, Artificial Sequence
  Description of Artificial Sequence: Synthetic oligonucleotide
gaugugauagaccuaccag

SEQ ID NO: 1028155 - RNA, 19 nt, Artificial Sequence
  Description of Artificial Sequence: Synthetic oligonucleotide
aguuagguuaaaauguuac

SEQ ID NO: 1028156 - RNA, 19 nt, Artificial Sequence
  Description of Artificial Sequence: Synthetic oligonucleotide
agaacaacggcuucaagca

SEQ ID NO: 1028157 - RNA, 19 nt, Artificial Sequence
  Description of Artificial Sequence: Synthetic oligonucleotide
agguuaaaauguuacaugu

SEQ ID NO: 1028158 - RNA, 19 nt, Artificial Sequence
  Description of Artificial Sequence: Synthetic oligonucleotide
auaauggauagucuguucu

SEQ ID NO: 1028159 - RNA, 19 nt, Artificial Sequence
  Description of Artificial Sequence: Synthetic oligonucleotide
uagguuaaaauguuacaug

SEQ ID NO: 1028160 - RNA, 19 nt, Artificial Sequence
  Description of Artificial Sequence: Synthetic oligonucleotide
gaagagacuaucuucccug

SEQ ID NO: 1028161 - RNA, 19 nt, Artificial Sequence
  Description of Artificial Sequence: Synthetic oligonucleotide
ugugguaaugucaggagcu

SEQ ID NO: 1028162 - RNA, 19 nt, Artificial Sequence
  Description of Artificial Sequence: Synthetic oligonucleotide
ucgucuaaaccucuuacca

SEQ ID NO: 1028163 - RNA, 19 nt, Artificial Sequence
  Description of Artificial Sequence: Synthetic oligonucleotide
gaaggguuaauucuaggac

SEQ ID NO: 1028164 - RNA, 19 nt, Artificial Sequence
  Description of Artificial Sequence: Synthetic oligonucleotide
guugagauuacuucuguac

SEQ ID NO: 1028165 - RNA, 19 nt, Artificial Sequence
  Description of Artificial Sequence: Synthetic oligonucleotide
gacgagguuaccaucaucc

SEQ ID NO: 1028166 - RNA, 19 nt, Artificial Sequence
  Description of Artificial Sequence: Synthetic oligonucleotide
ugguuugcaaucuuuaguc

SEQ ID NO: 1028167 - RNA, 19 nt, Artificial Sequence
  Description of Artificial Sequence: Synthetic oligonucleotide
cagauuuuaauggagaauc

SEQ ID NO: 1028168 - RNA, 19 nt, Artificial Sequence
  Description of Artificial Sequence: Synthetic oligonucleotide
gagacuaucuucccuguag

SEQ ID NO: 1028169 - RNA, 19 nt, Artificial Sequence
  Description of Artificial Sequence: Synthetic oligonucleotide
agacuaucuucccuguagc

SEQ ID NO: 1028170 - RNA, 19 nt, Artificial Sequence
  Description of Artificial Sequence: Synthetic oligonucleotide
uugaauuugaacugcuccu

SEQ ID NO: 1028171 - RNA, 19 nt, Artificial Sequence
  Description of Artificial Sequence: Synthetic oligonucleotide
aacaagguccagugaacuc

SEQ ID NO: 1028172 - RNA, 19 nt, Artificial Sequence
  Description of Artificial Sequence: Synthetic oligonucleotide
agacaucuaacccucuggg

SEQ ID NO: 1028173 - RNA, 19 nt, Artificial Sequence
  Description of Artificial Sequence: Synthetic oligonucleotide
uaugguuugcaaucuuuag

SEQ ID NO: 1028174 - RNA, 19 nt, Artificial Sequence
  Description of Artificial Sequence: Synthetic oligonucleotide
agaaaccucaucaaggaag

SEQ ID NO: 1028175 - RNA, 19 nt, Artificial Sequence
  Description of Artificial Sequence: Synthetic oligonucleotide
uuugcaaucuuuagucaca

SEQ ID NO: 1028176 - RNA, 19 nt, Artificial Sequence
  Description of Artificial Sequence: Synthetic oligonucleotide
aauguuacaugugcacagg

SEQ ID NO: 1028177 - RNA, 19 nt, Artificial Sequence
  Description of Artificial Sequence: Synthetic oligonucleotide
acauuucugaguuagguua

SEQ ID NO: 1028178 - RNA, 19 nt, Artificial Sequence
  Description of Artificial Sequence: Synthetic oligonucleotide
acaucuaacccucugggga

SEQ ID NO: 1028179 - RNA, 19 nt, Artificial Sequence
  Description of Artificial Sequence: Synthetic oligonucleotide
ucuaagucaaaccgccgcc

SEQ ID NO: 1028180 - RNA, 19 nt, Artificial Sequence
  Description of Artificial Sequence: Synthetic oligonucleotide
uucggaagauggaagagac

SEQ ID NO: 1028181 - RNA, 19 nt, Artificial Sequence
  Description of Artificial Sequence: Synthetic oligonucleotide
cuaguucugccucagacac

SEQ ID NO: 1028182 - RNA, 19 nt, Artificial Sequence
  Description of Artificial Sequence: Synthetic oligonucleotide
ugguuuucggacuuucucc

SEQ ID NO: 1028183 - RNA, 19 nt, Artificial Sequence
  Description of Artificial Sequence: Synthetic oligonucleotide
caagagucaugcaggaugg

SEQ ID NO: 1028184 - RNA, 19 nt, Artificial Sequence
  Description of Artificial Sequence: Synthetic oligonucleotide
aagucaaaccgccgccgcc

SEQ ID NO: 1028185 - RNA, 19 nt, Artificial Sequence
  Description of Artificial Sequence: Synthetic oligonucleotide
agggaugugauagaccuac

SEQ ID NO: 1028186 - RNA, 19 nt, Artificial Sequence
  Description of Artificial Sequence: Synthetic oligonucleotide
uuuagucacacaacaucca

SEQ ID NO: 1028187 - RNA, 19 nt, Artificial Sequence
  Description of Artificial Sequence: Synthetic oligonucleotide
gguagaaccaagcagcccc

SEQ ID NO: 1028188 - RNA, 19 nt, Artificial Sequence
  Description of Artificial Sequence: Synthetic oligonucleotide
aggacagacaucuaacccu

SEQ ID NO: 1028189 - RNA, 19 nt, Artificial Sequence
  Description of Artificial Sequence: Synthetic oligonucleotide
augugauagaccuaccaga

SEQ ID NO: 1028190 - RNA, 19 nt, Artificial Sequence
  Description of Artificial Sequence: Synthetic oligonucleotide
uugagauaaugucuguccu

SEQ ID NO: 1028191 - RNA, 19 nt, Artificial Sequence
  Description of Artificial Sequence: Synthetic oligonucleotide
gucuaaaccucuuaccaug

SEQ ID NO: 1028192 - RNA, 19 nt, Artificial Sequence
  Description of Artificial Sequence: Synthetic oligonucleotide
uucgucuaaaccucuuacc

SEQ ID NO: 1028193 - RNA, 19 nt, Artificial Sequence
  Description of Artificial Sequence: Synthetic oligonucleotide
acggacaauggauggaggg

SEQ ID NO: 1028194 - RNA, 19 nt, Artificial Sequence
  Description of Artificial Sequence: Synthetic oligonucleotide
ucuaguucugccucagaca

SEQ ID NO: 1028195 - RNA, 19 nt, Artificial Sequence
  Description of Artificial Sequence: Synthetic oligonucleotide
uggacauucuuguggaucu

SEQ ID NO: 1028196 - RNA, 19 nt, Artificial Sequence
  Description of Artificial Sequence: Synthetic oligonucleotide
auuccuuuugacccuucgg

SEQ ID NO: 1028197 - RNA, 19 nt, Artificial Sequence
  Description of Artificial Sequence: Synthetic oligonucleotide
uaaccccucauaucagugg

SEQ ID NO: 1028198 - RNA, 19 nt, Artificial Sequence
  Description of Artificial Sequence: Synthetic oligonucleotide
gacaucuaacccucugggg

SEQ ID NO: 1028199 - RNA, 19 nt, Artificial Sequence
  Description of Artificial Sequence: Synthetic oligonucleotide
augaugucgaggcaggaca

SEQ ID NO: 1028200 - RNA, 19 nt, Artificial Sequence
  Description of Artificial Sequence: Synthetic oligonucleotide
guuugcaaucuuuagucac

SEQ ID NO: 1028201 - RNA, 19 nt, Artificial Sequence
  Description of Artificial Sequence: Synthetic oligonucleotide
uguagccguucauacagag

SEQ ID NO: 1028202 - RNA, 19 nt, Artificial Sequence
  Description of Artificial Sequence: Synthetic oligonucleotide
ugagauuacuucuguacuc

SEQ ID NO: 1028203 - RNA, 19 nt, Artificial Sequence
  Description of Artificial Sequence: Synthetic oligonucleotide
uggaucuucugguuuucgg

SEQ ID NO: 1028204 - RNA, 19 nt, Artificial Sequence
  Description of Artificial Sequence: Synthetic oligonucleotide
uucugaguuagguuaaaau

SEQ ID NO: 1028205 - RNA, 19 nt, Artificial Sequence
  Description of Artificial Sequence: Synthetic oligonucleotide
aggaugccgaugcagacag

SEQ ID NO: 1028206 - RNA, 19 nt, Artificial Sequence
  Description of Artificial Sequence: Synthetic oligonucleotide
agcaacaagguccagugaa

SEQ ID NO: 1028207 - RNA, 19 nt, Artificial Sequence
  Description of Artificial Sequence: Synthetic oligonucleotide
gagauuacuucuguacucc

SEQ ID NO: 1028208 - RNA, 19 nt, Artificial Sequence
  Description of Artificial Sequence: Synthetic oligonucleotide
caaucuuuagucacacaac

SEQ ID NO: 1028209 - RNA, 19 nt, Artificial Sequence
  Description of Artificial Sequence: Synthetic oligonucleotide
guuaauucuaggacagugc

SEQ ID NO: 1028210 - RNA, 19 nt, Artificial Sequence
  Description of Artificial Sequence: Synthetic oligonucleotide
caacaugguagaaccaagc

SEQ ID NO: 1028211 - RNA, 19 nt, Artificial Sequence
  Description of Artificial Sequence: Synthetic oligonucleotide
ugaguuagguuaaaauguu

SEQ ID NO: 1028212 - RNA, 19 nt, Artificial Sequence
  Description of Artificial Sequence: Synthetic oligonucleotide
aauuugaacugcuccucau

SEQ ID NO: 1028213 - RNA, 19 nt, Artificial Sequence
  Description of Artificial Sequence: Synthetic oligonucleotide
ucuaaaccucuuaccaugu

SEQ ID NO: 1028214 - RNA, 19 nt, Artificial Sequence
  Description of Artificial Sequence: Synthetic oligonucleotide
acacacaacaugguagaac

SEQ ID NO: 1028215 - RNA, 19 nt, Artificial Sequence
  Description of Artificial Sequence: Synthetic oligonucleotide
acgagguuaccaucauccc

SEQ ID NO: 1028216 - RNA, 19 nt, Artificial Sequence
  Description of Artificial Sequence: Synthetic oligonucleotide
uguuacaugugcacaggaa

SEQ ID NO: 1028217 - RNA, 19 nt, Artificial Sequence
  Description of Artificial Sequence: Synthetic oligonucleotide
gaggagaacauggaagggc

SEQ ID NO: 1028218 - RNA, 19 nt, Artificial Sequence
  Description of Artificial Sequence: Synthetic oligonucleotide
guaaugucaggagcuaggg

SEQ ID NO: 1028219 - RNA, 19 nt, Artificial Sequence
  Description of Artificial Sequence: Synthetic oligonucleotide
gguucagucaucugcacug

SEQ ID NO: 1028220 - RNA, 19 nt, Artificial Sequence
  Description of Artificial Sequence: Synthetic oligonucleotide
cagucuuuucacacuauug

SEQ ID NO: 1028221 - RNA, 19 nt, Artificial Sequence
  Description of Artificial Sequence: Synthetic oligonucleotide
uaucagugggacagguuca

SEQ ID NO: 1028222 - RNA, 19 nt, Artificial Sequence
  Description of Artificial Sequence: Synthetic oligonucleotide
cuucgucuaaaccucuuac

SEQ ID NO: 1028223 - RNA, 19 nt, Artificial Sequence
  Description of Artificial Sequence: Synthetic oligonucleotide
uccugugcuacugggaaag

SEQ ID NO: 1028224 - RNA, 19 nt, Artificial Sequence
  Description of Artificial Sequence: Synthetic oligonucleotide
caucuaacccucuggggag

SEQ ID NO: 1028225 - RNA, 19 nt, Artificial Sequence
  Description of Artificial Sequence: Synthetic oligonucleotide
aagagacuaucuucccugu

SEQ ID NO: 1028226 - RNA, 19 nt, Artificial Sequence
  Description of Artificial Sequence: Synthetic oligonucleotide
agcagauuuuaauggagaa

SEQ ID NO: 1028227 - RNA, 19 nt, Artificial Sequence
  Description of Artificial Sequence: Synthetic oligonucleotide
uugcaagccagcugguacc

SEQ ID NO: 1028228 - RNA, 19 nt, Artificial Sequence
  Description of Artificial Sequence: Synthetic oligonucleotide
ugguucggaagauggaaga

SEQ ID NO: 1028229 - RNA, 19 nt, Artificial Sequence
  Description of Artificial Sequence: Synthetic oligonucleotide
uauugagauaaugucuguc

SEQ ID NO: 1028230 - RNA, 19 nt, Artificial Sequence
  Description of Artificial Sequence: Synthetic oligonucleotide
aguuggucucaucuucguc

SEQ ID NO: 1028231 - RNA, 19 nt, Artificial Sequence
  Description of Artificial Sequence: Synthetic oligonucleotide
uaucuucccuguagcauug

SEQ ID NO: 1028232 - RNA, 19 nt, Artificial Sequence
  Description of Artificial Sequence: Synthetic oligonucleotide
gucuuagucaaguccaguc

SEQ ID NO: 1028233 - RNA, 19 nt, Artificial Sequence
  Description of Artificial Sequence: Synthetic oligonucleotide
guggguaugguuugcaauc

SEQ ID NO: 1028234 - RNA, 19 nt, Artificial Sequence
  Description of Artificial Sequence: Synthetic oligonucleotide
uuaugcuucacagcuccug

SEQ ID NO: 1028235 - RNA, 19 nt, Artificial Sequence
  Description of Artificial Sequence: Synthetic oligonucleotide
agaccuaccagagcgcggg

SEQ ID NO: 1028236 - RNA, 19 nt, Artificial Sequence
  Description of Artificial Sequence: Synthetic oligonucleotide
gagaaucucagguacucaa

SEQ ID NO: 1028237 - RNA, 19 nt, Artificial Sequence
  Description of Artificial Sequence: Synthetic oligonucleotide
gaauuugaacugcuccuca

SEQ ID NO: 1028238 - RNA, 19 nt, Artificial Sequence
  Description of Artificial Sequence: Synthetic oligonucleotide
ugaauuugaacugcuccuc

SEQ ID NO: 1028239 - RNA, 19 nt, Artificial Sequence
  Description of Artificial Sequence: Synthetic oligonucleotide
aagauggaagagacuaucu

SEQ ID NO: 1028240 - RNA, 19 nt, Artificial Sequence
  Description of Artificial Sequence: Synthetic oligonucleotide
aggguuaauucuaggacag

SEQ ID NO: 1028241 - RNA, 19 nt, Artificial Sequence
  Description of Artificial Sequence: Synthetic oligonucleotide
agaaccaagcagccccuuc

SEQ ID NO: 1028242 - RNA, 19 nt, Artificial Sequence
  Description of Artificial Sequence: Synthetic oligonucleotide
uguugguucggaagaugga

SEQ ID NO: 1028243 - RNA, 19 nt, Artificial Sequence
  Description of Artificial Sequence: Synthetic oligonucleotide
aauggauggaggguccgcu

SEQ ID NO: 1028244 - RNA, 19 nt, Artificial Sequence
  Description of Artificial Sequence: Synthetic oligonucleotide
acagacaucuaacccucug

SEQ ID NO: 1028245 - RNA, 19 nt, Artificial Sequence
  Description of Artificial Sequence: Synthetic oligonucleotide
uaaugucaggagcuagggu

SEQ ID NO: 1028246 - RNA, 19 nt, Artificial Sequence
  Description of Artificial Sequence: Synthetic oligonucleotide
ucagucuuuucacacuauu

SEQ ID NO: 1028247 - RNA, 19 nt, Artificial Sequence
  Description of Artificial Sequence: Synthetic oligonucleotide
cuaagucaaaccgccgccg

SEQ ID NO: 1028248 - RNA, 19 nt, Artificial Sequence
  Description of Artificial Sequence: Synthetic oligonucleotide
cucgucgcugcuuuucuag

SEQ ID NO: 1028249 - RNA, 19 nt, Artificial Sequence
  Description of Artificial Sequence: Synthetic oligonucleotide
ucuaggaguuccugcugcc

SEQ ID NO: 1028250 - RNA, 19 nt, Artificial Sequence
  Description of Artificial Sequence: Synthetic oligonucleotide
ccaagagucaugcaggaug

SEQ ID NO: 1028251 - RNA, 19 nt, Artificial Sequence
  Description of Artificial Sequence: Synthetic oligonucleotide
ggaaggguuaauucuagga

SEQ ID NO: 1028252 - RNA, 19 nt, Artificial Sequence
  Description of Artificial Sequence: Synthetic oligonucleotide
gagcuagggugcuucgagg

SEQ ID NO: 1028253 - RNA, 19 nt, Artificial Sequence
  Description of Artificial Sequence: Synthetic oligonucleotide
cagaguauugagauaaugu

SEQ ID NO: 1028254 - RNA, 19 nt, Artificial Sequence
  Description of Artificial Sequence: Synthetic oligonucleotide
agacggacaauggauggag

SEQ ID NO: 1028255 - RNA, 19 nt, Artificial Sequence
  Description of Artificial Sequence: Synthetic oligonucleotide
gcaucagcuagucagcccc

SEQ ID NO: 1028256 - RNA, 19 nt, Artificial Sequence
  Description of Artificial Sequence: Synthetic oligonucleotide
cugagacuugccugcaccc

SEQ ID NO: 1028257 - RNA, 19 nt, Artificial Sequence
  Description of Artificial Sequence: Synthetic oligonucleotide
cugguuuucggacuuucuc

SEQ ID NO: 1028258 - RNA, 19 nt, Artificial Sequence
  Description of Artificial Sequence: Synthetic oligonucleotide
cuccauccauaauggauag

SEQ ID NO: 1028259 - RNA, 19 nt, Artificial Sequence
  Description of Artificial Sequence: Synthetic oligonucleotide
uguagcauugauggugccu

SEQ ID NO: 1028260 - RNA, 19 nt, Artificial Sequence
  Description of Artificial Sequence: Synthetic oligonucleotide
uaauggauagucuguucuu

SEQ ID NO: 1028261 - RNA, 19 nt, Artificial Sequence
  Description of Artificial Sequence: Synthetic oligonucleotide
aacaacggcuucaagcaaa

SEQ ID NO: 1028262 - RNA, 19 nt, Artificial Sequence
  Description of Artificial Sequence: Synthetic oligonucleotide
uagaaauuccaaccuuguu

SEQ ID NO: 1028263 - RNA, 19 nt, Artificial Sequence
  Description of Artificial Sequence: Synthetic oligonucleotide
ucuauggguuucacagcca

SEQ ID NO: 1028264 - RNA, 19 nt, Artificial Sequence
  Description of Artificial Sequence: Synthetic oligonucleotide
auggaagggcaucaccuca

SEQ ID NO: 1028265 - RNA, 19 nt, Artificial Sequence
  Description of Artificial Sequence: Synthetic oligonucleotide
agcuagggugcuucgagga

SEQ ID NO: 1028266 - RNA, 19 nt, Artificial Sequence
  Description of Artificial Sequence: Synthetic oligonucleotide
uguugagauuacuucugua

SEQ ID NO: 1028267 - RNA, 19 nt, Artificial Sequence
  Description of Artificial Sequence: Synthetic oligonucleotide
uuccuaccuccucaggcug

SEQ ID NO: 1028268 - RNA, 19 nt, Artificial Sequence
  Description of Artificial Sequence: Synthetic oligonucleotide
gauagaccuaccagagcgc

SEQ ID NO: 1028269 - RNA, 19 nt, Artificial Sequence
  Description of Artificial Sequence: Synthetic oligonucleotide
cugccgagaaaccucauca

SEQ ID NO: 1028270 - RNA, 19 nt, Artificial Sequence
  Description of Artificial Sequence: Synthetic oligonucleotide
ccucauaucagugggacag

SEQ ID NO: 1028271 - RNA, 19 nt, Artificial Sequence
  Description of Artificial Sequence: Synthetic oligonucleotide
accagguccuuccuaccuc

SEQ ID NO: 1028272 - RNA, 19 nt, Artificial Sequence
  Description of Artificial Sequence: Synthetic oligonucleotide
ugguaaugucaggagcuag

SEQ ID NO: 1028273 - RNA, 19 nt, Artificial Sequence
  Description of Artificial Sequence: Synthetic oligonucleotide
uaccagguccuuccuaccu

SEQ ID NO: 1028274 - RNA, 19 nt, Artificial Sequence
  Description of Artificial Sequence: Synthetic oligonucleotide
gaugaugucgaggcaggac

SEQ ID NO: 1028275 - RNA, 19 nt, Artificial Sequence
  Description of Artificial Sequence: Synthetic oligonucleotide
ugccuucgcugucugaacu

SEQ ID NO: 1028276 - RNA, 19 nt, Artificial Sequence
  Description of Artificial Sequence: Synthetic oligonucleotide
agaaucucagguacucaag

SEQ ID NO: 1028277 - RNA, 19 nt, Artificial Sequence
  Description of Artificial Sequence: Synthetic oligonucleotide
gccguucauacagagaccg

SEQ ID NO: 1028278 - RNA, 19 nt, Artificial Sequence
  Description of Artificial Sequence: Synthetic oligonucleotide
cuguaacagaguauugaga

SEQ ID NO: 1028279 - RNA, 19 nt, Artificial Sequence
  Description of Artificial Sequence: Synthetic oligonucleotide
gcagacggacaauggaugg

SEQ ID NO: 1028280 - RNA, 19 nt, Artificial Sequence
  Description of Artificial Sequence: Synthetic oligonucleotide
ucacacuauugccacucuc

SEQ ID NO: 1028281 - RNA, 19 nt, Artificial Sequence
  Description of Artificial Sequence: Synthetic oligonucleotide
uccccuguaacagaguauu

SEQ ID NO: 1028282 - RNA, 19 nt, Artificial Sequence
  Description of Artificial Sequence: Synthetic oligonucleotide
agguucagucaucugcacu

SEQ ID NO: 1028283 - RNA, 19 nt, Artificial Sequence
  Description of Artificial Sequence: Synthetic oligonucleotide
uugcaaucuuuagucacac

SEQ ID NO: 1028284 - RNA, 19 nt, Artificial Sequence
  Description of Artificial Sequence: Synthetic oligonucleotide
auggauggaggguccgcuc

SEQ ID NO: 1028285 - RNA, 19 nt, Artificial Sequence
  Description of Artificial Sequence: Synthetic oligonucleotide
caggauggagccucuugag

SEQ ID NO: 1028286 - RNA, 19 nt, Artificial Sequence
  Description of Artificial Sequence: Synthetic oligonucleotide
uccuguagccguucauaca

SEQ ID NO: 1028287 - RNA, 19 nt, Artificial Sequence
  Description of Artificial Sequence: Synthetic oligonucleotide
ugagccacaaguggacugu

SEQ ID NO: 1028288 - RNA, 19 nt, Artificial Sequence
  Description of Artificial Sequence: Synthetic oligonucleotide
uuugcgccguucaucuagu

SEQ ID NO: 1028289 - RNA, 19 nt, Artificial Sequence
  Description of Artificial Sequence: Synthetic oligonucleotide
ugucgaggcaggacagaca

SEQ ID NO: 1028290 - RNA, 19 nt, Artificial Sequence
  Description of Artificial Sequence: Synthetic oligonucleotide
ggaggguccgcucagagaa

SEQ ID NO: 1028291 - RNA, 19 nt, Artificial Sequence
  Description of Artificial Sequence: Synthetic oligonucleotide
gugauagaccuaccagagc

SEQ ID NO: 1028292 - RNA, 19 nt, Artificial Sequence
  Description of Artificial Sequence: Synthetic oligonucleotide
gagaacauggaagggcauc

SEQ ID NO: 1028293 - RNA, 19 nt, Artificial Sequence
  Description of Artificial Sequence: Synthetic oligonucleotide
ggagucuuagucaagucca

SEQ ID NO: 1028294 - RNA, 19 nt, Artificial Sequence
  Description of Artificial Sequence: Synthetic oligonucleotide
gcaggacagacaucuaacc

SEQ ID NO: 1028295 - RNA, 19 nt, Artificial Sequence
  Description of Artificial Sequence: Synthetic oligonucleotide
cuggacauucuuguggauc

SEQ ID NO: 1028296 - RNA, 19 nt, Artificial Sequence
  Description of Artificial Sequence: Synthetic oligonucleotide
agcagacggacaauggaug

SEQ ID NO: 1028297 - RNA, 19 nt, Artificial Sequence
  Description of Artificial Sequence: Synthetic oligonucleotide
caugugcacaggaagcaga

SEQ ID NO: 1028298 - RNA, 19 nt, Artificial Sequence
  Description of Artificial Sequence: Synthetic oligonucleotide
ccuuuugacccuucggggc

SEQ ID NO: 1028299 - RNA, 19 nt, Artificial Sequence
  Description of Artificial Sequence: Synthetic oligonucleotide
uggguaugguuugcaaucu

SEQ ID NO: 1028300 - RNA, 19 nt, Artificial Sequence
  Description of Artificial Sequence: Synthetic oligonucleotide
gaaagcaacaagguccagu

SEQ ID NO: 1028301 - RNA, 19 nt, Artificial Sequence
  Description of Artificial Sequence: Synthetic oligonucleotide
aggaaguuggucucaucuu

SEQ ID NO: 1028302 - RNA, 19 nt, Artificial Sequence
  Description of Artificial Sequence: Synthetic oligonucleotide
ucggacuuucucccacucu

SEQ ID NO: 1028303 - RNA, 19 nt, Artificial Sequence
  Description of Artificial Sequence: Synthetic oligonucleotide
gccgagaaaccucaucaag

SEQ ID NO: 1028304 - RNA, 19 nt, Artificial Sequence
  Description of Artificial Sequence: Synthetic oligonucleotide
uucagucuuuucacacuau

SEQ ID NO: 1028305 - RNA, 19 nt, Artificial Sequence
  Description of Artificial Sequence: Synthetic oligonucleotide
ugacgagguuaccaucauc

SEQ ID NO: 1028306 - RNA, 19 nt, Artificial Sequence
  Description of Artificial Sequence: Synthetic oligonucleotide
guucggaagauggaagaga

SEQ ID NO: 1028307 - RNA, 19 nt, Artificial Sequence
  Description of Artificial Sequence: Synthetic oligonucleotide
cauuucugaguuagguuaa

SEQ ID NO: 1028308 - RNA, 19 nt, Artificial Sequence
  Description of Artificial Sequence: Synthetic oligonucleotide
uucggacuuucucccacuc

SEQ ID NO: 1028309 - RNA, 19 nt, Artificial Sequence
  Description of Artificial Sequence: Synthetic oligonucleotide
cauagccuuguggguaugg

SEQ ID NO: 1028310 - RNA, 19 nt, Artificial Sequence
  Description of Artificial Sequence: Synthetic oligonucleotide
ucccagaguaggcacccaa

SEQ ID NO: 1028311 - RNA, 19 nt, Artificial Sequence
  Description of Artificial Sequence: Synthetic oligonucleotide
acaacggcuucaagcaaag

SEQ ID NO: 1028312 - RNA, 19 nt, Artificial Sequence
  Description of Artificial Sequence: Synthetic oligonucleotide
cacacuauugccacucucu

SEQ ID NO: 1028313 - RNA, 19 nt, Artificial Sequence
  Description of Artificial Sequence: Synthetic oligonucleotide
gcacagguacauuucugag

SEQ ID NO: 1028314 - RNA, 19 nt, Artificial Sequence
  Description of Artificial Sequence: Synthetic oligonucleotide
ugguagaaccaagcagccc

SEQ ID NO: 1028315 - RNA, 19 nt, Artificial Sequence
  Description of Artificial Sequence: Synthetic oligonucleotide
agggaggaugccgaugcag

SEQ ID NO: 1028316 - RNA, 19 nt, Artificial Sequence
  Description of Artificial Sequence: Synthetic oligonucleotide
uccuuuugcgccguucauc

SEQ ID NO: 1028317 - RNA, 19 nt, Artificial Sequence
  Description of Artificial Sequence: Synthetic oligonucleotide
uggaggguccgcucagaga

SEQ ID NO: 1028318 - RNA, 19 nt, Artificial Sequence
  Description of Artificial Sequence: Synthetic oligonucleotide
gguacucaaggagucuuag

SEQ ID NO: 1028319 - RNA, 19 nt, Artificial Sequence
  Description of Artificial Sequence: Synthetic oligonucleotide
uuccccuguaacagaguau

SEQ ID NO: 1028320 - RNA, 19 nt, Artificial Sequence
  Description of Artificial Sequence: Synthetic oligonucleotide
ugcacccuaaccccucaua

SEQ ID NO: 1028321 - RNA, 19 nt, Artificial Sequence
  Description of Artificial Sequence: Synthetic oligonucleotide
guccagugaacucuugcaa

SEQ ID NO: 1028322 - RNA, 19 nt, Artificial Sequence
  Description of Artificial Sequence: Synthetic oligonucleotide
cuuugccugggagaacuug

SEQ ID NO: 1028323 - RNA, 19 nt, Artificial Sequence
  Description of Artificial Sequence: Synthetic oligonucleotide
gguuugcaaucuuuaguca

SEQ ID NO: 1028324 - RNA, 19 nt, Artificial Sequence
  Description of Artificial Sequence: Synthetic oligonucleotide
gaacuggacucggagucac

SEQ ID NO: 1028325 - RNA, 19 nt, Artificial Sequence
  Description of Artificial Sequence: Synthetic oligonucleotide
cguucauacagagaccggg

SEQ ID NO: 1028326 - RNA, 19 nt, Artificial Sequence
  Description of Artificial Sequence: Synthetic oligonucleotide
aucuuuagucacacaacau

SEQ ID NO: 1028327 - RNA, 19 nt, Artificial Sequence
  Description of Artificial Sequence: Synthetic oligonucleotide
cuaccagagcgcgggaggc

SEQ ID NO: 1028328 - RNA, 19 nt, Artificial Sequence
  Description of Artificial Sequence: Synthetic oligonucleotide
uguauuccuuuugacccuu

SEQ ID NO: 1028329 - RNA, 19 nt, Artificial Sequence
  Description of Artificial Sequence: Synthetic oligonucleotide
gcgucuaagucaaaccgcc

SEQ ID NO: 1028330 - RNA, 19 nt, Artificial Sequence
  Description of Artificial Sequence: Synthetic oligonucleotide
gaacaacggcuucaagcaa

SEQ ID NO: 1028331 - RNA, 19 nt, Artificial Sequence
  Description of Artificial Sequence: Synthetic oligonucleotide
ggugcuucgaggaaggugu

SEQ ID NO: 1028332 - RNA, 19 nt, Artificial Sequence
  Description of Artificial Sequence: Synthetic oligonucleotide
guaugguuugcaaucuuua

SEQ ID NO: 1028333 - RNA, 19 nt, Artificial Sequence
  Description of Artificial Sequence: Synthetic oligonucleotide
cuuccccuguaacagagua

SEQ ID NO: 1028334 - RNA, 19 nt, Artificial Sequence
  Description of Artificial Sequence: Synthetic oligonucleotide
gaggaugccgaugcagaca

SEQ ID NO: 1028335 - RNA, 19 nt, Artificial Sequence
  Description of Artificial Sequence: Synthetic oligonucleotide
gagaugcucccugugguaa

SEQ ID NO: 1028336 - RNA, 19 nt, Artificial Sequence
  Description of Artificial Sequence: Synthetic oligonucleotide
uaccagagcgcgggaggcg

SEQ ID NO: 1028337 - RNA, 19 nt, Artificial Sequence
  Description of Artificial Sequence: Synthetic oligonucleotide
ccguucaucuaguucugcc

SEQ ID NO: 1028338 - RNA, 19 nt, Artificial Sequence
  Description of Artificial Sequence: Synthetic oligonucleotide
ggcgucuaagucaaaccgc

SEQ ID NO: 1028339 - RNA, 19 nt, Artificial Sequence
  Description of Artificial Sequence: Synthetic oligonucleotide
ugcaagccagcugguaccu

SEQ ID NO: 1028340 - RNA, 19 nt, Artificial Sequence
  Description of Artificial Sequence: Synthetic oligonucleotide
ugggacagguucagucauc

SEQ ID NO: 1028341 - RNA, 19 nt, Artificial Sequence
  Description of Artificial Sequence: Synthetic oligonucleotide
gagacuugccugcacccua

SEQ ID NO: 1028342 - RNA, 19 nt, Artificial Sequence
  Description of Artificial Sequence: Synthetic oligonucleotide
cggcgucuaagucaaaccg

SEQ ID NO: 1028343 - RNA, 19 nt, Artificial Sequence
  Description of Artificial Sequence: Synthetic oligonucleotide
augacgagguuaccaucau

SEQ ID NO: 1028344 - RNA, 19 nt, Artificial Sequence
  Description of Artificial Sequence: Synthetic oligonucleotide
ucuggacauucuuguggau

SEQ ID NO: 1028345 - RNA, 19 nt, Artificial Sequence
  Description of Artificial Sequence: Synthetic oligonucleotide
cuguagcauugauggugcc

SEQ ID NO: 1028346 - RNA, 19 nt, Artificial Sequence
  Description of Artificial Sequence: Synthetic oligonucleotide
cgagguuaccaucaucccc

SEQ ID NO: 1028347 - RNA, 19 nt, Artificial Sequence
  Description of Artificial Sequence: Synthetic oligonucleotide
ugggucggggucugguuuc

SEQ ID NO: 1028348 - RNA, 19 nt, Artificial Sequence
  Description of Artificial Sequence: Synthetic oligonucleotide
gcggcgucuaagucaaacc

SEQ ID NO: 1028349 - RNA, 19 nt, Artificial Sequence
  Description of Artificial Sequence: Synthetic oligonucleotide
agagacuaucuucccugua

SEQ ID NO: 1028350 - RNA, 19 nt, Artificial Sequence
  Description of Artificial Sequence: Synthetic oligonucleotide
ucaaaccgccgccgccgcc

SEQ ID NO: 1028351 - RNA, 19 nt, Artificial Sequence
  Description of Artificial Sequence: Synthetic oligonucleotide
ggcuucaagcaaagcaacc

SEQ ID NO: 1028352 - RNA, 19 nt, Artificial Sequence
  Description of Artificial Sequence: Synthetic oligonucleotide
uagucaaguccagucugua

SEQ ID NO: 1028353 - RNA, 19 nt, Artificial Sequence
  Description of Artificial Sequence: Synthetic oligonucleotide
ggcaucagcuagucagccc

SEQ ID NO: 1028354 - RNA, 19 nt, Artificial Sequence
  Description of Artificial Sequence: Synthetic oligonucleotide
ucccuguagcauugauggu

SEQ ID NO: 1028355 - RNA, 19 nt, Artificial Sequence
  Description of Artificial Sequence: Synthetic oligonucleotide
accuaccagagcgcgggag

SEQ ID NO: 1028356 - RNA, 19 nt, Artificial Sequence
  Description of Artificial Sequence: Synthetic oligonucleotide
cuuuugacccuucggggcu

SEQ ID NO: 1028357 - RNA, 19 nt, Artificial Sequence
  Description of Artificial Sequence: Synthetic oligonucleotide
gaagagcuuccaagaguca

SEQ ID NO: 1028358 - RNA, 19 nt, Artificial Sequence
  Description of Artificial Sequence: Synthetic oligonucleotide
gcgccguucaucuaguucu

SEQ ID NO: 1028359 - RNA, 19 nt, Artificial Sequence
  Description of Artificial Sequence: Synthetic oligonucleotide
aggguccgcucagagaaga

SEQ ID NO: 1028360 - RNA, 19 nt, Artificial Sequence
  Description of Artificial Sequence: Synthetic oligonucleotide
guagcauugauggugccuu

SEQ ID NO: 1028361 - RNA, 19 nt, Artificial Sequence
  Description of Artificial Sequence: Synthetic oligonucleotide
ccuccauccauaauggaua

SEQ ID NO: 1028362 - RNA, 19 nt, Artificial Sequence
  Description of Artificial Sequence: Synthetic oligonucleotide
gguccgcucagagaagagc

SEQ ID NO: 1028363 - RNA, 19 nt, Artificial Sequence
  Description of Artificial Sequence: Synthetic oligonucleotide
uccaagagucaugcaggau

SEQ ID NO: 1028364 - RNA, 19 nt, Artificial Sequence
  Description of Artificial Sequence: Synthetic oligonucleotide
cugcugccgagaaaccuca

SEQ ID NO: 1028365 - RNA, 19 nt, Artificial Sequence
  Description of Artificial Sequence: Synthetic oligonucleotide
gaugucgaggcaggacaga

SEQ ID NO: 1028366 - RNA, 19 nt, Artificial Sequence
  Description of Artificial Sequence: Synthetic oligonucleotide
ggauggaggguccgcucag

SEQ ID NO: 1028367 - RNA, 19 nt, Artificial Sequence
  Description of Artificial Sequence: Synthetic oligonucleotide
agaugaugucgaggcagga

SEQ ID NO: 1028368 - RNA, 19 nt, Artificial Sequence
  Description of Artificial Sequence: Synthetic oligonucleotide
ucucgucgcugcuuuucua

SEQ ID NO: 1028369 - RNA, 19 nt, Artificial Sequence
  Description of Artificial Sequence: Synthetic oligonucleotide
ggaagagacuaucuucccu

SEQ ID NO: 1028370 - RNA, 19 nt, Artificial Sequence
  Description of Artificial Sequence: Synthetic oligonucleotide
ugucaggagcuagggugcu

SEQ ID NO: 1028371 - RNA, 19 nt, Artificial Sequence
  Description of Artificial Sequence: Synthetic oligonucleotide
guagccguucauacagaga

SEQ ID NO: 1028372 - RNA, 19 nt, Artificial Sequence
  Description of Artificial Sequence: Synthetic oligonucleotide
agcagaguuugagccacaa

SEQ ID NO: 1028373 - RNA, 19 nt, Artificial Sequence
  Description of Artificial Sequence: Synthetic oligonucleotide
gccccuuccccuguaacag

SEQ ID NO: 1028374 - RNA, 19 nt, Artificial Sequence
  Description of Artificial Sequence: Synthetic oligonucleotide
gcaacaagguccagugaac

SEQ ID NO: 1028375 - RNA, 19 nt, Artificial Sequence
  Description of Artificial Sequence: Synthetic oligonucleotide
aaccgccgccgccgccgcc

SEQ ID NO: 1028376 - RNA, 19 nt, Artificial Sequence
  Description of Artificial Sequence: Synthetic oligonucleotide
gugccuucgcugucugaac

SEQ ID NO: 1028377 - RNA, 19 nt, Artificial Sequence
  Description of Artificial Sequence: Synthetic oligonucleotide
ccuucgcugucugaacugg

SEQ ID NO: 1028378 - RNA, 19 nt, Artificial Sequence
  Description of Artificial Sequence: Synthetic oligonucleotide
aucuaacccucuggggaga

SEQ ID NO: 1028379 - RNA, 19 nt, Artificial Sequence
  Description of Artificial Sequence: Synthetic oligonucleotide
augccgaugcagacagcag

SEQ ID NO: 1028380 - RNA, 19 nt, Artificial Sequence
  Description of Artificial Sequence: Synthetic oligonucleotide
gacuugccugcacccuaac

SEQ ID NO: 1028381 - RNA, 19 nt, Artificial Sequence
  Description of Artificial Sequence: Synthetic oligonucleotide
gguuaccaucauccccucc

SEQ ID NO: 1028382 - RNA, 19 nt, Artificial Sequence
  Description of Artificial Sequence: Synthetic oligonucleotide
cagcagacggacaauggau

SEQ ID NO: 1028383 - RNA, 19 nt, Artificial Sequence
  Description of Artificial Sequence: Synthetic oligonucleotide
gggugcuucgaggaaggug

SEQ ID NO: 1028384 - RNA, 19 nt, Artificial Sequence
  Description of Artificial Sequence: Synthetic oligonucleotide
gauuacuucuguacuccuu

SEQ ID NO: 1028385 - RNA, 19 nt, Artificial Sequence
  Description of Artificial Sequence: Synthetic oligonucleotide
caacauccaggaaggguua

SEQ ID NO: 1028386 - RNA, 19 nt, Artificial Sequence
  Description of Artificial Sequence: Synthetic oligonucleotide
gaggguccgcucagagaag

SEQ ID NO: 1028387 - RNA, 19 nt, Artificial Sequence
  Description of Artificial Sequence: Synthetic oligonucleotide
cuguagccguucauacaga

SEQ ID NO: 1028388 - RNA, 19 nt, Artificial Sequence
  Description of Artificial Sequence: Synthetic oligonucleotide
gucacacaacauccaggaa

SEQ ID NO: 1028389 - RNA, 19 nt, Artificial Sequence
  Description of Artificial Sequence: Synthetic oligonucleotide
uaagccuccucuggacauu

SEQ ID NO: 1028390 - RNA, 19 nt, Artificial Sequence
  Description of Artificial Sequence: Synthetic oligonucleotide
caacaagguccagugaacu

SEQ ID NO: 1028391 - RNA, 19 nt, Artificial Sequence
  Description of Artificial Sequence: Synthetic oligonucleotide
caacggcuucaagcaaagc

SEQ ID NO: 1028392 - RNA, 19 nt, Artificial Sequence
  Description of Artificial Sequence: Synthetic oligonucleotide
gcugccgagaaaccucauc

SEQ ID NO: 1028393 - RNA, 19 nt, Artificial Sequence
  Description of Artificial Sequence: Synthetic oligonucleotide
agguguugguucggaagau

SEQ ID NO: 1028394 - RNA, 19 nt, Artificial Sequence
  Description of Artificial Sequence: Synthetic oligonucleotide
cgucuaagucaaaccgccg

SEQ ID NO: 1028395 - RNA, 19 nt, Artificial Sequence
  Description of Artificial Sequence: Synthetic oligonucleotide
ccguucauacagagaccgg

SEQ ID NO: 1028396 - RNA, 19 nt, Artificial Sequence
  Description of Artificial Sequence: Synthetic oligonucleotide
cagacggacaauggaugga

SEQ ID NO: 1028397 - RNA, 19 nt, Artificial Sequence
  Description of Artificial Sequence: Synthetic oligonucleotide
ccuuuugcgccguucaucu

SEQ ID NO: 1028398 - RNA, 19 nt, Artificial Sequence
  Description of Artificial Sequence: Synthetic oligonucleotide
aaguggacuguggcacauu

SEQ ID NO: 1028399 - RNA, 19 nt, Artificial Sequence
  Description of Artificial Sequence: Synthetic oligonucleotide
gcucccugugguaauguca

SEQ ID NO: 1028400 - RNA, 19 nt, Artificial Sequence
  Description of Artificial Sequence: Synthetic oligonucleotide
cccuaaccccucauaucag

SEQ ID NO: 1028401 - RNA, 19 nt, Artificial Sequence
  Description of Artificial Sequence: Synthetic oligonucleotide
ggacagguucagucaucug

SEQ ID NO: 1028402 - RNA, 19 nt, Artificial Sequence
  Description of Artificial Sequence: Synthetic oligonucleotide
uuugacccuucggggcuuc

SEQ ID NO: 1028403 - RNA, 19 nt, Artificial Sequence
  Description of Artificial Sequence: Synthetic oligonucleotide
acauagccuuguggguaug

SEQ ID NO: 1028404 - RNA, 19 nt, Artificial Sequence
  Description of Artificial Sequence: Synthetic oligonucleotide
guggacuguggcacauuuc

SEQ ID NO: 1028405 - RNA, 19 nt, Artificial Sequence
  Description of Artificial Sequence: Synthetic oligonucleotide
cacauagccuuguggguau

SEQ ID NO: 1028406 - RNA, 19 nt, Artificial Sequence
  Description of Artificial Sequence: Synthetic oligonucleotide
agguacucaaggagucuua

SEQ ID NO: 1028407 - RNA, 19 nt, Artificial Sequence
  Description of Artificial Sequence: Synthetic oligonucleotide
gcacauagccuugugggua

SEQ ID NO: 1028408 - RNA, 19 nt, Artificial Sequence
  Description of Artificial Sequence: Synthetic oligonucleotide
gguuucacagccagcuucu

SEQ ID NO: 1028409 - RNA, 19 nt, Artificial Sequence
  Description of Artificial Sequence: Synthetic oligonucleotide
cauaucagugggacagguu

SEQ ID NO: 1028410 - RNA, 19 nt, Artificial Sequence
  Description of Artificial Sequence: Synthetic oligonucleotide
cuguggcacauuucugagu

SEQ ID NO: 1028411 - RNA, 19 nt, Artificial Sequence
  Description of Artificial Sequence: Synthetic oligonucleotide
gaccuaccagagcgcggga

SEQ ID NO: 1028412 - RNA, 19 nt, Artificial Sequence
  Description of Artificial Sequence: Synthetic oligonucleotide
gggaugugauagaccuacc

SEQ ID NO: 1028413 - RNA, 19 nt, Artificial Sequence
  Description of Artificial Sequence: Synthetic oligonucleotide
gcuagggugcuucgaggaa

SEQ ID NO: 1028414 - RNA, 19 nt, Artificial Sequence
  Description of Artificial Sequence: Synthetic oligonucleotide
aucagcuagucagccccuu

SEQ ID NO: 1028415 - RNA, 19 nt, Artificial Sequence
  Description of Artificial Sequence: Synthetic oligonucleotide
ccccuguaacagaguauug

SEQ ID NO: 1028416 - RNA, 19 nt, Artificial Sequence
  Description of Artificial Sequence: Synthetic oligonucleotide
caaccuuguugagauuacu

SEQ ID NO: 1028417 - RNA, 19 nt, Artificial Sequence
  Description of Artificial Sequence: Synthetic oligonucleotide
caccucaagggcugugggu

SEQ ID NO: 1028418 - RNA, 19 nt, Artificial Sequence
  Description of Artificial Sequence: Synthetic oligonucleotide
caagguccagugaacucuu

SEQ ID NO: 1028419 - RNA, 19 nt, Artificial Sequence
  Description of Artificial Sequence: Synthetic oligonucleotide
cagggaugugauagaccua

SEQ ID NO: 1028420 - RNA, 19 nt, Artificial Sequence
  Description of Artificial Sequence: Synthetic oligonucleotide
cuuuugcgccguucaucua

SEQ ID NO: 1028421 - RNA, 19 nt, Artificial Sequence
  Description of Artificial Sequence: Synthetic oligonucleotide
caucagcuagucagccccu

SEQ ID NO: 1028422 - RNA, 19 nt, Artificial Sequence
  Description of Artificial Sequence: Synthetic oligonucleotide
ggcagaagauggacauguc

SEQ ID NO: 1028423 - RNA, 19 nt, Artificial Sequence
  Description of Artificial Sequence: Synthetic oligonucleotide
accgccgccgccgccgcca

SEQ ID NO: 1028424 - RNA, 19 nt, Artificial Sequence
  Description of Artificial Sequence: Synthetic oligonucleotide
cccgcggcgucuaagucaa

SEQ ID NO: 1028425 - RNA, 19 nt, Artificial Sequence
  Description of Artificial Sequence: Synthetic oligonucleotide
cgcggcgucuaagucaaac

SEQ ID NO: 1028426 - RNA, 19 nt, Artificial Sequence
  Description of Artificial Sequence: Synthetic oligonucleotide
ccgccaaggccacucgcuc

SEQ ID NO: 1028427 - RNA, 19 nt, Artificial Sequence
  Description of Artificial Sequence: Synthetic oligonucleotide
cgucuaaaccucuuaccau

SEQ ID NO: 1028428 - RNA, 19 nt, Artificial Sequence
  Description of Artificial Sequence: Synthetic oligonucleotide
ugccuccuuuugcgccguu

SEQ ID NO: 1028429 - RNA, 19 nt, Artificial Sequence
  Description of Artificial Sequence: Synthetic oligonucleotide
cagguccuuccuaccuccu

SEQ ID NO: 1028430 - RNA, 19 nt, Artificial Sequence
  Description of Artificial Sequence: Synthetic oligonucleotide
ggguaugguuugcaaucuu

SEQ ID NO: 1028431 - RNA, 19 nt, Artificial Sequence
  Description of Artificial Sequence: Synthetic oligonucleotide
gccaaggccacucgcucuu

SEQ ID NO: 1028432 - RNA, 19 nt, Artificial Sequence
  Description of Artificial Sequence: Synthetic oligonucleotide
ggagaacauggaagggcau

SEQ ID NO: 1028433 - RNA, 19 nt, Artificial Sequence
  Description of Artificial Sequence: Synthetic oligonucleotide
gccgccaaggccacucgcu

SEQ ID NO: 1028434 - RNA, 19 nt, Artificial Sequence
  Description of Artificial Sequence: Synthetic oligonucleotide
gggucggggucugguuuca

SEQ ID NO: 1028435 - RNA, 19 nt, Artificial Sequence
  Description of Artificial Sequence: Synthetic oligonucleotide
guccuugcacagguacauu

SEQ ID NO: 1028436 - RNA, 19 nt, Artificial Sequence
  Description of Artificial Sequence: Synthetic oligonucleotide
gcgcgggaggcgagccucc

SEQ ID NO: 1028437 - RNA, 19 nt, Artificial Sequence
  Description of Artificial Sequence: Synthetic oligonucleotide
ccuuccccuguaacagagu

SEQ ID NO: 1028438 - RNA, 19 nt, Artificial Sequence
  Description of Artificial Sequence: Synthetic oligonucleotide
gugcuucgaggaagguguu

SEQ ID NO: 1028439 - RNA, 19 nt, Artificial Sequence
  Description of Artificial Sequence: Synthetic oligonucleotide
ccgcggcgucuaagucaaa

SEQ ID NO: 1028440 - RNA, 19 nt, Artificial Sequence
  Description of Artificial Sequence: Synthetic oligonucleotide
ccgccgccgccgccgccaa

SEQ ID NO: 1028441 - RNA, 19 nt, Artificial Sequence
  Description of Artificial Sequence: Synthetic oligonucleotide
uuuaaaagcacugaggcug

SEQ ID NO: 1028442 - RNA, 19 nt, Artificial Sequence
  Description of Artificial Sequence: Synthetic oligonucleotide
aacgaauccucaaauaggc

SEQ ID NO: 1028443 - RNA, 19 nt, Artificial Sequence
  Description of Artificial Sequence: Synthetic oligonucleotide
cuaacgaauccucaaauag

SEQ ID NO: 1028444 - RNA, 19 nt, Artificial Sequence
  Description of Artificial Sequence: Synthetic oligonucleotide
uccauaggagccaugaccc

SEQ ID NO: 1028445 - RNA, 19 nt, Artificial Sequence
  Description of Artificial Sequence: Synthetic oligonucleotide
aggaaagaggguuagaggu

SEQ ID NO: 1028446 - RNA, 19 nt, Artificial Sequence
  Description of Artificial Sequence: Synthetic oligonucleotide
aggguuagagguuuaaaag

SEQ ID NO: 1028447 - RNA, 19 nt, Artificial Sequence
  Description of Artificial Sequence: Synthetic oligonucleotide
agccauauaccacagaaca

SEQ ID NO: 1028448 - RNA, 19 nt, Artificial Sequence
  Description of Artificial Sequence: Synthetic oligonucleotide
ugaaagaaggacucuggcc

SEQ ID NO: 1028449 - RNA, 19 nt, Artificial Sequence
  Description of Artificial Sequence: Synthetic oligonucleotide
aucgaggugaacuaggccu

SEQ ID NO: 1028450 - RNA, 19 nt, Artificial Sequence
  Description of Artificial Sequence: Synthetic oligonucleotide
uuagagguuuaaaagcacu

SEQ ID NO: 1028451 - RNA, 19 nt, Artificial Sequence
  Description of Artificial Sequence: Synthetic oligonucleotide
ucaaagguagggcagggac

SEQ ID NO: 1028452 - RNA, 19 nt, Artificial Sequence
  Description of Artificial Sequence: Synthetic oligonucleotide
ugugcacuuagacaguucu

SEQ ID NO: 1028453 - RNA, 19 nt, Artificial Sequence
  Description of Artificial Sequence: Synthetic oligonucleotide
uccacaugaagccugugug

SEQ ID NO: 1028454 - RNA, 19 nt, Artificial Sequence
  Description of Artificial Sequence: Synthetic oligonucleotide
gaacauuccagggacgugg

SEQ ID NO: 1028455 - RNA, 19 nt, Artificial Sequence
  Description of Artificial Sequence: Synthetic oligonucleotide
uugacuauguagguggucc

SEQ ID NO: 1028456 - RNA, 19 nt, Artificial Sequence
  Description of Artificial Sequence: Synthetic oligonucleotide
ugcuagaggaucaaagcac

SEQ ID NO: 1028457 - RNA, 19 nt, Artificial Sequence
  Description of Artificial Sequence: Synthetic oligonucleotide
cuuuuaagggagaaaccag

SEQ ID NO: 1028458 - RNA, 19 nt, Artificial Sequence
  Description of Artificial Sequence: Synthetic oligonucleotide
uguguaccugccucgaggg

SEQ ID NO: 1028459 - RNA, 19 nt, Artificial Sequence
  Description of Artificial Sequence: Synthetic oligonucleotide
uugauucuguggcacacag

SEQ ID NO: 1028460 - RNA, 19 nt, Artificial Sequence
  Description of Artificial Sequence: Synthetic oligonucleotide
caaugcuagaggaucaaag

SEQ ID NO: 1028461 - RNA, 19 nt, Artificial Sequence
  Description of Artificial Sequence: Synthetic oligonucleotide
uucgaguccggucuuuggg

SEQ ID NO: 1028462 - RNA, 19 nt, Artificial Sequence
  Description of Artificial Sequence: Synthetic oligonucleotide
accagcgccaguugaaccc

SEQ ID NO: 1028463 - RNA, 19 nt, Artificial Sequence
  Description of Artificial Sequence: Synthetic oligonucleotide
ggaauggcgacauggagcg

SEQ ID NO: 1028464 - RNA, 19 nt, Artificial Sequence
  Description of Artificial Sequence: Synthetic oligonucleotide
agagugaucagugccugcc

SEQ ID NO: 1028465 - RNA, 19 nt, Artificial Sequence
  Description of Artificial Sequence: Synthetic oligonucleotide
cauguugcaggccacuucc

SEQ ID NO: 1028466 - RNA, 19 nt, Artificial Sequence
  Description of Artificial Sequence: Synthetic oligonucleotide
gacauggucaaugcuagag

SEQ ID NO: 1028467 - RNA, 19 nt, Artificial Sequence
  Description of Artificial Sequence: Synthetic oligonucleotide
accacagaacauuccaggg

SEQ ID NO: 1028468 - RNA, 19 nt, Artificial Sequence
  Description of Artificial Sequence: Synthetic oligonucleotide
guaggaaagaggguuagag

SEQ ID NO: 1028469 - RNA, 19 nt, Artificial Sequence
  Description of Artificial Sequence: Synthetic oligonucleotide
agcgcuuaacagcauagag

SEQ ID NO: 1028470 - RNA, 19 nt, Artificial Sequence
  Description of Artificial Sequence: Synthetic oligonucleotide
aaauuuccaggggagaggu

SEQ ID NO: 1028471 - RNA, 19 nt, Artificial Sequence
  Description of Artificial Sequence: Synthetic oligonucleotide
uuggagcgcaccuugaaga

SEQ ID NO: 1028472 - RNA, 19 nt, Artificial Sequence
  Description of Artificial Sequence: Synthetic oligonucleotide
uuaagggagaaaccaggcu

SEQ ID NO: 1028473 - RNA, 19 nt, Artificial Sequence
  Description of Artificial Sequence: Synthetic oligonucleotide
uuugccacacacacguucu

SEQ ID NO: 1028474 - RNA, 19 nt, Artificial Sequence
  Description of Artificial Sequence: Synthetic oligonucleotide
aaagguagggcagggaccu

SEQ ID NO: 1028475 - RNA, 19 nt, Artificial Sequence
  Description of Artificial Sequence: Synthetic oligonucleotide
ugggguaguuccauguugc

SEQ ID NO: 1028476 - RNA, 19 nt, Artificial Sequence
  Description of Artificial Sequence: Synthetic oligonucleotide
agugaucagugccugccac

SEQ ID NO: 1028477 - RNA, 19 nt, Artificial Sequence
  Description of Artificial Sequence: Synthetic oligonucleotide
gagagugagggaccuaugc

SEQ ID NO: 1028478 - RNA, 19 nt, Artificial Sequence
  Description of Artificial Sequence: Synthetic oligonucleotide
ugaagaccucuccauagga

SEQ ID NO: 1028479 - RNA, 19 nt, Artificial Sequence
  Description of Artificial Sequence: Synthetic oligonucleotide
ucggaaguaggcuggaacu

SEQ ID NO: 1028480 - RNA, 19 nt, Artificial Sequence
  Description of Artificial Sequence: Synthetic oligonucleotide
agagugucccgcaaguagc

SEQ ID NO: 1028481 - RNA, 19 nt, Artificial Sequence
  Description of Artificial Sequence: Synthetic oligonucleotide
acucuggccgguuuggguc

SEQ ID NO: 1028482 - RNA, 19 nt, Artificial Sequence
  Description of Artificial Sequence: Synthetic oligonucleotide
aacgcagcucagaagacag

SEQ ID NO: 1028483 - RNA, 19 nt, Artificial Sequence
  Description of Artificial Sequence: Synthetic oligonucleotide
aauggcgacauggagcgcu

SEQ ID NO: 1028484 - RNA, 19 nt, Artificial Sequence
  Description of Artificial Sequence: Synthetic oligonucleotide
ggguuagagguuuaaaagc

SEQ ID NO: 1028485 - RNA, 19 nt, Artificial Sequence
  Description of Artificial Sequence: Synthetic oligonucleotide
aacaaccuugggugcuccc

SEQ ID NO: 1028486 - RNA, 19 nt, Artificial Sequence
  Description of Artificial Sequence: Synthetic oligonucleotide
acacguucuacuuuccaca

SEQ ID NO: 1028487 - RNA, 19 nt, Artificial Sequence
  Description of Artificial Sequence: Synthetic oligonucleotide
ucgaguccggucuuugggg

SEQ ID NO: 1028488 - RNA, 19 nt, Artificial Sequence
  Description of Artificial Sequence: Synthetic oligonucleotide
ucuaacgaauccucaaaua

SEQ ID NO: 1028489 - RNA, 19 nt, Artificial Sequence
  Description of Artificial Sequence: Synthetic oligonucleotide
gagucggccaucuuccuug

SEQ ID NO: 1028490 - RNA, 19 nt, Artificial Sequence
  Description of Artificial Sequence: Synthetic oligonucleotide
auauaccacagaacauucc

SEQ ID NO: 1028491 - RNA, 19 nt, Artificial Sequence
  Description of Artificial Sequence: Synthetic oligonucleotide
cuauguaggugguccagag

SEQ ID NO: 1028492 - RNA, 19 nt, Artificial Sequence
  Description of Artificial Sequence: Synthetic oligonucleotide
cagaacgcagcucagaaga

SEQ ID NO: 1028493 - RNA, 19 nt, Artificial Sequence
  Description of Artificial Sequence: Synthetic oligonucleotide
uaccacuuagggguggugg

SEQ ID NO: 1028494 - RNA, 19 nt, Artificial Sequence
  Description of Artificial Sequence: Synthetic oligonucleotide
guguguaccugccucgagg

SEQ ID NO: 1028495 - RNA, 19 nt, Artificial Sequence
  Description of Artificial Sequence: Synthetic oligonucleotide
ugauucuguggcacacagg

SEQ ID NO: 1028496 - RNA, 19 nt, Artificial Sequence
  Description of Artificial Sequence: Synthetic oligonucleotide
gacaucgaggugaacuagg

SEQ ID NO: 1028497 - RNA, 19 nt, Artificial Sequence
  Description of Artificial Sequence: Synthetic oligonucleotide
accacuuaggggugguggg

SEQ ID NO: 1028498 - RNA, 19 nt, Artificial Sequence
  Description of Artificial Sequence: Synthetic oligonucleotide
gaagaggcggcugauagga

SEQ ID NO: 1028499 - RNA, 19 nt, Artificial Sequence
  Description of Artificial Sequence: Synthetic oligonucleotide
guagccccaaaccugggcc

SEQ ID NO: 1028500 - RNA, 19 nt, Artificial Sequence
  Description of Artificial Sequence: Synthetic oligonucleotide
ucuaggaggcuccgagucc

SEQ ID NO: 1028501 - RNA, 19 nt, Artificial Sequence
  Description of Artificial Sequence: Synthetic oligonucleotide
cauggucaaugcuagagga

SEQ ID NO: 1028502 - RNA, 19 nt, Artificial Sequence
  Description of Artificial Sequence: Synthetic oligonucleotide
agucacccagcuugcagcg

SEQ ID NO: 1028503 - RNA, 19 nt, Artificial Sequence
  Description of Artificial Sequence: Synthetic oligonucleotide
agagugagggaccuaugcu

SEQ ID NO: 1028504 - RNA, 19 nt, Artificial Sequence
  Description of Artificial Sequence: Synthetic oligonucleotide
cugcaugucggaaguaggc

SEQ ID NO: 1028505 - RNA, 19 nt, Artificial Sequence
  Description of Artificial Sequence: Synthetic oligonucleotide
acaucgaggugaacuaggc

SEQ ID NO: 1028506 - RNA, 19 nt, Artificial Sequence
  Description of Artificial Sequence: Synthetic oligonucleotide
accucuaggaggcuccgag

SEQ ID NO: 1028507 - RNA, 19 nt, Artificial Sequence
  Description of Artificial Sequence: Synthetic oligonucleotide
ugaacuaggccuugacuau

SEQ ID NO: 1028508 - RNA, 19 nt, Artificial Sequence
  Description of Artificial Sequence: Synthetic oligonucleotide
cacacguucuacuuuccac

SEQ ID NO: 1028509 - RNA, 19 nt, Artificial Sequence
  Description of Artificial Sequence: Synthetic oligonucleotide
uugacaucgaggugaacua

SEQ ID NO: 1028510 - RNA, 19 nt, Artificial Sequence
  Description of Artificial Sequence: Synthetic oligonucleotide
acagaacgcagcucagaag

SEQ ID NO: 1028511 - RNA, 19 nt, Artificial Sequence
  Description of Artificial Sequence: Synthetic oligonucleotide
caaugugugcacuuagaca

SEQ ID NO: 1028512 - RNA, 19 nt, Artificial Sequence
  Description of Artificial Sequence: Synthetic oligonucleotide
uguaccugccucgaggggu

SEQ ID NO: 1028513 - RNA, 19 nt, Artificial Sequence
  Description of Artificial Sequence: Synthetic oligonucleotide
aguccaugucaguuagguc

SEQ ID NO: 1028514 - RNA, 19 nt, Artificial Sequence
  Description of Artificial Sequence: Synthetic oligonucleotide
gccgguuugggucauaccc

SEQ ID NO: 1028515 - RNA, 19 nt, Artificial Sequence
  Description of Artificial Sequence: Synthetic oligonucleotide
uuugggucauacccaggac

SEQ ID NO: 1028516 - RNA, 19 nt, Artificial Sequence
  Description of Artificial Sequence: Synthetic oligonucleotide
uguagcgagggucucccuc

SEQ ID NO: 1028517 - RNA, 19 nt, Artificial Sequence
  Description of Artificial Sequence: Synthetic oligonucleotide
ggucucugagguuucaccc

SEQ ID NO: 1028518 - RNA, 19 nt, Artificial Sequence
  Description of Artificial Sequence: Synthetic oligonucleotide
ggacaggauggucucaggg

SEQ ID NO: 1028519 - RNA, 19 nt, Artificial Sequence
  Description of Artificial Sequence: Synthetic oligonucleotide
ucuugauucuguggcacac

SEQ ID NO: 1028520 - RNA, 19 nt, Artificial Sequence
  Description of Artificial Sequence: Synthetic oligonucleotide
gguuagagguuuaaaagca

SEQ ID NO: 1028521 - RNA, 19 nt, Artificial Sequence
  Description of Artificial Sequence: Synthetic oligonucleotide
ucgacucagggcuucugca

SEQ ID NO: 1028522 - RNA, 19 nt, Artificial Sequence
  Description of Artificial Sequence: Synthetic oligonucleotide
gucggaaguaggcuggaac

SEQ ID NO: 1028523 - RNA, 19 nt, Artificial Sequence
  Description of Artificial Sequence: Synthetic oligonucleotide
gggaagaggcggcugauag

SEQ ID NO: 1028524 - RNA, 19 nt, Artificial Sequence
  Description of Artificial Sequence: Synthetic oligonucleotide
ugacaucgaggugaacuag

SEQ ID NO: 1028525 - RNA, 19 nt, Artificial Sequence
  Description of Artificial Sequence: Synthetic oligonucleotide
uuagguccagggcaucccu

SEQ ID NO: 1028526 - RNA, 19 nt, Artificial Sequence
  Description of Artificial Sequence: Synthetic oligonucleotide
cgcuuaacagcauagaguc

SEQ ID NO: 1028527 - RNA, 19 nt, Artificial Sequence
  Description of Artificial Sequence: Synthetic oligonucleotide
cucuaggaggcuccgaguc

SEQ ID NO: 1028528 - RNA, 19 nt, Artificial Sequence
  Description of Artificial Sequence: Synthetic oligonucleotide
ugacuauguagguggucca

SEQ ID NO: 1028529 - RNA, 19 nt, Artificial Sequence
  Description of Artificial Sequence: Synthetic oligonucleotide
cauaggagccaugacccag

SEQ ID NO: 1028530 - RNA, 19 nt, Artificial Sequence
  Description of Artificial Sequence: Synthetic oligonucleotide
uaccugcggaggcugggcg

SEQ ID NO: 1028531 - RNA, 19 nt, Artificial Sequence
  Description of Artificial Sequence: Synthetic oligonucleotide
guuagagguuuaaaagcac

SEQ ID NO: 1028532 - RNA, 19 nt, Artificial Sequence
  Description of Artificial Sequence: Synthetic oligonucleotide
aaccuugggugcucccaag

SEQ ID NO: 1028533 - RNA, 19 nt, Artificial Sequence
  Description of Artificial Sequence: Synthetic oligonucleotide
gagguuccguggcucaaag

SEQ ID NO: 1028534 - RNA, 19 nt, Artificial Sequence
  Description of Artificial Sequence: Synthetic oligonucleotide
caucgaggugaacuaggcc

SEQ ID NO: 1028535 - RNA, 19 nt, Artificial Sequence
  Description of Artificial Sequence: Synthetic oligonucleotide
gaggaucaaagcacagagc

SEQ ID NO: 1028536 - RNA, 19 nt, Artificial Sequence
  Description of Artificial Sequence: Synthetic oligonucleotide
cauguagcgagggucuccc

SEQ ID NO: 1028537 - RNA, 19 nt, Artificial Sequence
  Description of Artificial Sequence: Synthetic oligonucleotide
cugggucuaacgaauccuc

SEQ ID NO: 1028538 - RNA, 19 nt, Artificial Sequence
  Description of Artificial Sequence: Synthetic oligonucleotide
uucucauggccgccuaccu

SEQ ID NO: 1028539 - RNA, 19 nt, Artificial Sequence
  Description of Artificial Sequence: Synthetic oligonucleotide
uccuagugauccgggacag

SEQ ID NO: 1028540 - RNA, 19 nt, Artificial Sequence
  Description of Artificial Sequence: Synthetic oligonucleotide
aggcucugcaugucggaag

SEQ ID NO: 1028541 - RNA, 19 nt, Artificial Sequence
  Description of Artificial Sequence: Synthetic oligonucleotide
uggagcgcaccuugaagac

SEQ ID NO: 1028542 - RNA, 19 nt, Artificial Sequence
  Description of Artificial Sequence: Synthetic oligonucleotide
cuucucauggccgccuacc

SEQ ID NO: 1028543 - RNA, 19 nt, Artificial Sequence
  Description of Artificial Sequence: Synthetic oligonucleotide
aaguaucccuggcgcagcu

SEQ ID NO: 1028544 - RNA, 19 nt, Artificial Sequence
  Description of Artificial Sequence: Synthetic oligonucleotide
gcugaaagaaggacucugg

SEQ ID NO: 1028545 - RNA, 19 nt, Artificial Sequence
  Description of Artificial Sequence: Synthetic oligonucleotide
ggggcaaguaucccuggcg

SEQ ID NO: 1028546 - RNA, 19 nt, Artificial Sequence
  Description of Artificial Sequence: Synthetic oligonucleotide
gaacuaggccuugacuaug

SEQ ID NO: 1028547 - RNA, 19 nt, Artificial Sequence
  Description of Artificial Sequence: Synthetic oligonucleotide
ggccccaagaagauguugg

SEQ ID NO: 1028548 - RNA, 19 nt, Artificial Sequence
  Description of Artificial Sequence: Synthetic oligonucleotide
cagacugaacacaucugca

SEQ ID NO: 1028549 - RNA, 19 nt, Artificial Sequence
  Description of Artificial Sequence: Synthetic oligonucleotide
gagccagaagagugucccg

SEQ ID NO: 1028550 - RNA, 19 nt, Artificial Sequence
  Description of Artificial Sequence: Synthetic oligonucleotide
agugucccgcaaguagccc

SEQ ID NO: 1028551 - RNA, 19 nt, Artificial Sequence
  Description of Artificial Sequence: Synthetic oligonucleotide
cuagugauccgggacagga

SEQ ID NO: 1028552 - RNA, 19 nt, Artificial Sequence
  Description of Artificial Sequence: Synthetic oligonucleotide
acagggcccaaccucgacu

SEQ ID NO: 1028553 - RNA, 19 nt, Artificial Sequence
  Description of Artificial Sequence: Synthetic oligonucleotide
uggggccucggaauggcga

SEQ ID NO: 1028554 - RNA, 19 nt, Artificial Sequence
  Description of Artificial Sequence: Synthetic oligonucleotide
ccaagaagauguuggcggg

SEQ ID NO: 1028555 - RNA, 19 nt, Artificial Sequence
  Description of Artificial Sequence: Synthetic oligonucleotide
gaccuaugcugucaucauc

SEQ ID NO: 1028556 - RNA, 19 nt, Artificial Sequence
  Description of Artificial Sequence: Synthetic oligonucleotide
agugagggaccuaugcugu

SEQ ID NO: 1028557 - RNA, 19 nt, Artificial Sequence
  Description of Artificial Sequence: Synthetic oligonucleotide
agaacgcagcucagaagac

SEQ ID NO: 1028558 - RNA, 19 nt, Artificial Sequence
  Description of Artificial Sequence: Synthetic oligonucleotide
agguaggaaagaggguuag

SEQ ID NO: 1028559 - RNA, 19 nt, Artificial Sequence
  Description of Artificial Sequence: Synthetic oligonucleotide
ucgaggugaacuaggccuu

SEQ ID NO: 1028560 - RNA, 19 nt, Artificial Sequence
  Description of Artificial Sequence: Synthetic oligonucleotide
guuucacccaggaaugaca

SEQ ID NO: 1028561 - RNA, 19 nt, Artificial Sequence
  Description of Artificial Sequence: Synthetic oligonucleotide
uggagcgcuuaacagcaua

SEQ ID NO: 1028562 - RNA, 19 nt, Artificial Sequence
  Description of Artificial Sequence: Synthetic oligonucleotide
agguuccguggcucaaagg

SEQ ID NO: 1028563 - RNA, 19 nt, Artificial Sequence
  Description of Artificial Sequence: Synthetic oligonucleotide
agguucuccuagugauccg

SEQ ID NO: 1028564 - RNA, 19 nt, Artificial Sequence
  Description of Artificial Sequence: Synthetic oligonucleotide
ugggguccgaggagggaag

SEQ ID NO: 1028565 - RNA, 19 nt, Artificial Sequence
  Description of Artificial Sequence: Synthetic oligonucleotide
uaaaagcacugaggcuggg

SEQ ID NO: 1028566 - RNA, 19 nt, Artificial Sequence
  Description of Artificial Sequence: Synthetic oligonucleotide
gcaugucggaaguaggcug

SEQ ID NO: 1028567 - RNA, 19 nt, Artificial Sequence
  Description of Artificial Sequence: Synthetic oligonucleotide
caagaagauguuggcgggc

SEQ ID NO: 1028568 - RNA, 19 nt, Artificial Sequence
  Description of Artificial Sequence: Synthetic oligonucleotide
ucaaugcuagaggaucaaa

SEQ ID NO: 1028569 - RNA, 19 nt, Artificial Sequence
  Description of Artificial Sequence: Synthetic oligonucleotide
gguuccguggcucaaaggu

SEQ ID NO: 1028570 - RNA, 19 nt, Artificial Sequence
  Description of Artificial Sequence: Synthetic oligonucleotide
augacccaggcggcuaagc

SEQ ID NO: 1028571 - RNA, 19 nt, Artificial Sequence
  Description of Artificial Sequence: Synthetic oligonucleotide
uuggggccucggaauggcg

SEQ ID NO: 1028572 - RNA, 19 nt, Artificial Sequence
  Description of Artificial Sequence: Synthetic oligonucleotide
ccaccaguaguccaaaguc

SEQ ID NO: 1028573 - RNA, 19 nt, Artificial Sequence
  Description of Artificial Sequence: Synthetic oligonucleotide
gagugucccgcaaguagcc

SEQ ID NO: 1028574 - RNA, 19 nt, Artificial Sequence
  Description of Artificial Sequence: Synthetic oligonucleotide
uccggcugaggccccuggg

SEQ ID NO: 1028575 - RNA, 19 nt, Artificial Sequence
  Description of Artificial Sequence: Synthetic oligonucleotide
gggcaaguaucccuggcgc

SEQ ID NO: 1028576 - RNA, 19 nt, Artificial Sequence
  Description of Artificial Sequence: Synthetic oligonucleotide
gaguccggucuuuggggcc

SEQ ID NO: 1028577 - RNA, 19 nt, Artificial Sequence
  Description of Artificial Sequence: Synthetic oligonucleotide
gcagccaacuggcaggaug

SEQ ID NO: 1028578 - RNA, 19 nt, Artificial Sequence
  Description of Artificial Sequence: Synthetic oligonucleotide
gaacgcagcucagaagaca

SEQ ID NO: 1028579 - RNA, 19 nt, Artificial Sequence
  Description of Artificial Sequence: Synthetic oligonucleotide
cacacacguucuacuuucc

SEQ ID NO: 1028580 - RNA, 19 nt, Artificial Sequence
  Description of Artificial Sequence: Synthetic oligonucleotide
guucuccuagugauccggg

SEQ ID NO: 1028581 - RNA, 19 nt, Artificial Sequence
  Description of Artificial Sequence: Synthetic oligonucleotide
acguggcugccucagcaug

SEQ ID NO: 1028582 - RNA, 19 nt, Artificial Sequence
  Description of Artificial Sequence: Synthetic oligonucleotide
cuccuagugauccgggaca

SEQ ID NO: 1028583 - RNA, 19 nt, Artificial Sequence
  Description of Artificial Sequence: Synthetic oligonucleotide
cagggcccaaccucgacuc

SEQ ID NO: 1028584 - RNA, 19 nt, Artificial Sequence
  Description of Artificial Sequence: Synthetic oligonucleotide
aggacucuggccgguuugg

SEQ ID NO: 1028585 - RNA, 19 nt, Artificial Sequence
  Description of Artificial Sequence: Synthetic oligonucleotide
acuuaggggugguggggug

SEQ ID NO: 1028586 - RNA, 19 nt, Artificial Sequence
  Description of Artificial Sequence: Synthetic oligonucleotide
ucccaagauucauuacuuu

SEQ ID NO: 1028587 - RNA, 19 nt, Artificial Sequence
  Description of Artificial Sequence: Synthetic oligonucleotide
gggucucugagguuucacc

SEQ ID NO: 1028588 - RNA, 19 nt, Artificial Sequence
  Description of Artificial Sequence: Synthetic oligonucleotide
ugaacaaccuugggugcuc

SEQ ID NO: 1028589 - RNA, 19 nt, Artificial Sequence
  Description of Artificial Sequence: Synthetic oligonucleotide
agaacauuccagggacgug

SEQ ID NO: 1028590 - RNA, 19 nt, Artificial Sequence
  Description of Artificial Sequence: Synthetic oligonucleotide
aagaaggacucuggccggu

SEQ ID NO: 1028591 - RNA, 19 nt, Artificial Sequence
  Description of Artificial Sequence: Synthetic oligonucleotide
ccucggaauggcgacaugg

SEQ ID NO: 1028592 - RNA, 19 nt, Artificial Sequence
  Description of Artificial Sequence: Synthetic oligonucleotide
ggagcgcuuaacagcauag

SEQ ID NO: 1028593 - RNA, 19 nt, Artificial Sequence
  Description of Artificial Sequence: Synthetic oligonucleotide
gagugaucagugccugcca

SEQ ID NO: 1028594 - RNA, 19 nt, Artificial Sequence
  Description of Artificial Sequence: Synthetic oligonucleotide
cagccagcuuucgaguccg

SEQ ID NO: 1028595 - RNA, 19 nt, Artificial Sequence
  Description of Artificial Sequence: Synthetic oligonucleotide
cucggaauggcgacaugga

SEQ ID NO: 1028596 - RNA, 19 nt, Artificial Sequence
  Description of Artificial Sequence: Synthetic oligonucleotide
cuaugcugucaucauccca

SEQ ID NO: 1028597 - RNA, 19 nt, Artificial Sequence
  Description of Artificial Sequence: Synthetic oligonucleotide
ucaccagcgccaguugaac

SEQ ID NO: 1028598 - RNA, 19 nt, Artificial Sequence
  Description of Artificial Sequence: Synthetic oligonucleotide
caaguaucccuggcgcagc

SEQ ID NO: 1028599 - RNA, 19 nt, Artificial Sequence
  Description of Artificial Sequence: Synthetic oligonucleotide
gaacaaccuugggugcucc

SEQ ID NO: 1028600 - RNA, 19 nt, Artificial Sequence
  Description of Artificial Sequence: Synthetic oligonucleotide
guguaccugccucgagggg

SEQ ID NO: 1028601 - RNA, 19 nt, Artificial Sequence
  Description of Artificial Sequence: Synthetic oligonucleotide
gucuaacgaauccucaaau

SEQ ID NO: 1028602 - RNA, 19 nt, Artificial Sequence
  Description of Artificial Sequence: Synthetic oligonucleotide
auccgggacaggauggucu

SEQ ID NO: 1028603 - RNA, 19 nt, Artificial Sequence
  Description of Artificial Sequence: Synthetic oligonucleotide
agggaccuaugcugucauc

SEQ ID NO: 1028604 - RNA, 19 nt, Artificial Sequence
  Description of Artificial Sequence: Synthetic oligonucleotide
gggaccuaugcugucauca

SEQ ID NO: 1028605 - RNA, 19 nt, Artificial Sequence
  Description of Artificial Sequence: Synthetic oligonucleotide
agagcaaugugugcacuua

SEQ ID NO: 1028606 - RNA, 19 nt, Artificial Sequence
  Description of Artificial Sequence: Synthetic oligonucleotide
cuugacuauguaggugguc

SEQ ID NO: 1028607 - RNA, 19 nt, Artificial Sequence
  Description of Artificial Sequence: Synthetic oligonucleotide
ggcugggucuaacgaaucc

SEQ ID NO: 1028608 - RNA, 19 nt, Artificial Sequence
  Description of Artificial Sequence: Synthetic oligonucleotide
gcucaggcugggucuaacg

SEQ ID NO: 1028609 - RNA, 19 nt, Artificial Sequence
  Description of Artificial Sequence: Synthetic oligonucleotide
ggcugauaggaaugcugcc

SEQ ID NO: 1028610 - RNA, 19 nt, Artificial Sequence
  Description of Artificial Sequence: Synthetic oligonucleotide
gcuagaggaucaaagcaca

SEQ ID NO: 1028611 - RNA, 19 nt, Artificial Sequence
  Description of Artificial Sequence: Synthetic oligonucleotide
cuaagccucuggaaguucu

SEQ ID NO: 1028612 - RNA, 19 nt, Artificial Sequence
  Description of Artificial Sequence: Synthetic oligonucleotide
agggguagagguucuccua

SEQ ID NO: 1028613 - RNA, 19 nt, Artificial Sequence
  Description of Artificial Sequence: Synthetic oligonucleotide
guuccauaggagcccugca

SEQ ID NO: 1028614 - RNA, 19 nt, Artificial Sequence
  Description of Artificial Sequence: Synthetic oligonucleotide
gcuuaacagcauagagucg

SEQ ID NO: 1028615 - RNA, 19 nt, Artificial Sequence
  Description of Artificial Sequence: Synthetic oligonucleotide
agagucggccaucuuccuu

SEQ ID NO: 1028616 - RNA, 19 nt, Artificial Sequence
  Description of Artificial Sequence: Synthetic oligonucleotide
ccgcaaguagccccaaacc

SEQ ID NO: 1028617 - RNA, 19 nt, Artificial Sequence
  Description of Artificial Sequence: Synthetic oligonucleotide
gagcgcaccuugaagaccu

SEQ ID NO: 1028618 - RNA, 19 nt, Artificial Sequence
  Description of Artificial Sequence: Synthetic oligonucleotide
ugguguguaccugccucga

SEQ ID NO: 1028619 - RNA, 19 nt, Artificial Sequence
  Description of Artificial Sequence: Synthetic oligonucleotide
acgaauccucaaauaggcu

SEQ ID NO: 1028620 - RNA, 19 nt, Artificial Sequence
  Description of Artificial Sequence: Synthetic oligonucleotide
caucaucccagcugcugga

SEQ ID NO: 1028621 - RNA, 19 nt, Artificial Sequence
  Description of Artificial Sequence: Synthetic oligonucleotide
agcgccaguugaacccagc

SEQ ID NO: 1028622 - RNA, 19 nt, Artificial Sequence
  Description of Artificial Sequence: Synthetic oligonucleotide
cuaccucagccagcuuucg

SEQ ID NO: 1028623 - RNA, 19 nt, Artificial Sequence
  Description of Artificial Sequence: Synthetic oligonucleotide
agggacguggcugccucag

SEQ ID NO: 1028624 - RNA, 19 nt, Artificial Sequence
  Description of Artificial Sequence: Synthetic oligonucleotide
aggauggucucaggggaga

SEQ ID NO: 1028625 - RNA, 19 nt, Artificial Sequence
  Description of Artificial Sequence: Synthetic oligonucleotide
gccuuuuaagggagaaacc

SEQ ID NO: 1028626 - RNA, 19 nt, Artificial Sequence
  Description of Artificial Sequence: Synthetic oligonucleotide
gagguaggaaagaggguua

SEQ ID NO: 1028627 - RNA, 19 nt, Artificial Sequence
  Description of Artificial Sequence: Synthetic oligonucleotide
gagcgcuuaacagcauaga

SEQ ID NO: 1028628 - RNA, 19 nt, Artificial Sequence
  Description of Artificial Sequence: Synthetic oligonucleotide
gguuucacccaggaaugac

SEQ ID NO: 1028629 - RNA, 19 nt, Artificial Sequence
  Description of Artificial Sequence: Synthetic oligonucleotide
ccagcuuucgaguccgguc

SEQ ID NO: 1028630 - RNA, 19 nt, Artificial Sequence
  Description of Artificial Sequence: Synthetic oligonucleotide
auggucaaugcuagaggau

SEQ ID NO: 1028631 - RNA, 19 nt, Artificial Sequence
  Description of Artificial Sequence: Synthetic oligonucleotide
gagccaugacccaggcggc

SEQ ID NO: 1028632 - RNA, 19 nt, Artificial Sequence
  Description of Artificial Sequence: Synthetic oligonucleotide
aagguagggcagggaccuc

SEQ ID NO: 1028633 - RNA, 19 nt, Artificial Sequence
  Description of Artificial Sequence: Synthetic oligonucleotide
cagcuuucgaguccggucu

SEQ ID NO: 1028634 - RNA, 19 nt, Artificial Sequence
  Description of Artificial Sequence: Synthetic oligonucleotide
aaagaggguuagagguuua

SEQ ID NO: 1028635 - RNA, 19 nt, Artificial Sequence
  Description of Artificial Sequence: Synthetic oligonucleotide
cccgcaaguagccccaaac

SEQ ID NO: 1028636 - RNA, 19 nt, Artificial Sequence
  Description of Artificial Sequence: Synthetic oligonucleotide
gggucuaacgaauccucaa

SEQ ID NO: 1028637 - RNA, 19 nt, Artificial Sequence
  Description of Artificial Sequence: Synthetic oligonucleotide
aggacagaacgcagcucag

SEQ ID NO: 1028638 - RNA, 19 nt, Artificial Sequence
  Description of Artificial Sequence: Synthetic oligonucleotide
ccuaccucagccagcuuuc

SEQ ID NO: 1028639 - RNA, 19 nt, Artificial Sequence
  Description of Artificial Sequence: Synthetic oligonucleotide
uuggcgggcuugacaucga

SEQ ID NO: 1028640 - RNA, 19 nt, Artificial Sequence
  Description of Artificial Sequence: Synthetic oligonucleotide
gguguguaccugccucgag

SEQ ID NO: 1028641 - RNA, 19 nt, Artificial Sequence
  Description of Artificial Sequence: Synthetic oligonucleotide
uagcgagggucucccuccu

SEQ ID NO: 1028642 - RNA, 19 nt, Artificial Sequence
  Description of Artificial Sequence: Synthetic oligonucleotide
gaagagugucccgcaagua

SEQ ID NO: 1028643 - RNA, 19 nt, Artificial Sequence
  Description of Artificial Sequence: Synthetic oligonucleotide
uggccgccuaccucagcca

SEQ ID NO: 1028644 - RNA, 19 nt, Artificial Sequence
  Description of Artificial Sequence: Synthetic oligonucleotide
gacucuggccgguuugggu

SEQ ID NO: 1028645 - RNA, 19 nt, Artificial Sequence
  Description of Artificial Sequence: Synthetic oligonucleotide
cuggugccagccugggguc

SEQ ID NO: 1028646 - RNA, 19 nt, Artificial Sequence
  Description of Artificial Sequence: Synthetic oligonucleotide
caucccuugguguguaccu

SEQ ID NO: 1028647 - RNA, 19 nt, Artificial Sequence
  Description of Artificial Sequence: Synthetic oligonucleotide
gcggcugauaggaaugcug

SEQ ID NO: 1028648 - RNA, 19 nt, Artificial Sequence
  Description of Artificial Sequence: Synthetic oligonucleotide
gagcuccgucugcagguac

SEQ ID NO: 1028649 - RNA, 19 nt, Artificial Sequence
  Description of Artificial Sequence: Synthetic oligonucleotide
caacuggcaggaugagcca

SEQ ID NO: 1028650 - RNA, 19 nt, Artificial Sequence
  Description of Artificial Sequence: Synthetic oligonucleotide
gauccgggacaggaugguc

SEQ ID NO: 1028651 - RNA, 19 nt, Artificial Sequence
  Description of Artificial Sequence: Synthetic oligonucleotide
cccaaccucgacucagggc

SEQ ID NO: 1028652 - RNA, 19 nt, Artificial Sequence
  Description of Artificial Sequence: Synthetic oligonucleotide
acuaggccuugacuaugua

SEQ ID NO: 1028653 - RNA, 19 nt, Artificial Sequence
  Description of Artificial Sequence: Synthetic oligonucleotide
aguaucccuggcgcagcug

SEQ ID NO: 1028654 - RNA, 19 nt, Artificial Sequence
  Description of Artificial Sequence: Synthetic oligonucleotide
gucaaugcuagaggaucaa

SEQ ID NO: 1028655 - RNA, 19 nt, Artificial Sequence
  Description of Artificial Sequence: Synthetic oligonucleotide
cagagcuccgucugcaggu

SEQ ID NO: 1028656 - RNA, 19 nt, Artificial Sequence
  Description of Artificial Sequence: Synthetic oligonucleotide
gaggugaacuaggccuuga

SEQ ID NO: 1028657 - RNA, 19 nt, Artificial Sequence
  Description of Artificial Sequence: Synthetic oligonucleotide
cucuggccgguuuggguca

SEQ ID NO: 1028658 - RNA, 19 nt, Artificial Sequence
  Description of Artificial Sequence: Synthetic oligonucleotide
ugucggaaguaggcuggaa

SEQ ID NO: 1028659 - RNA, 19 nt, Artificial Sequence
  Description of Artificial Sequence: Synthetic oligonucleotide
cagaacauuccagggacgu

SEQ ID NO: 1028660 - RNA, 19 nt, Artificial Sequence
  Description of Artificial Sequence: Synthetic oligonucleotide
ggagcgcaccuugaagacc

SEQ ID NO: 1028661 - RNA, 19 nt, Artificial Sequence
  Description of Artificial Sequence: Synthetic oligonucleotide
ggugagacccagacugaac

SEQ ID NO: 1028662 - RNA, 19 nt, Artificial Sequence
  Description of Artificial Sequence: Synthetic oligonucleotide
ucggggccccaagaagaug

SEQ ID NO: 1028663 - RNA, 19 nt, Artificial Sequence
  Description of Artificial Sequence: Synthetic oligonucleotide
agcuccgucugcagguaca

SEQ ID NO: 1028664 - RNA, 19 nt, Artificial Sequence
  Description of Artificial Sequence: Synthetic oligonucleotide
agcuuucgaguccggucuu

SEQ ID NO: 1028665 - RNA, 19 nt, Artificial Sequence
  Description of Artificial Sequence: Synthetic oligonucleotide
ggauggucucaggggagag

SEQ ID NO: 1028666 - RNA, 19 nt, Artificial Sequence
  Description of Artificial Sequence: Synthetic oligonucleotide
ucccgcaaguagccccaaa

SEQ ID NO: 1028667 - RNA, 19 nt, Artificial Sequence
  Description of Artificial Sequence: Synthetic oligonucleotide
gaauggcgacauggagcgc

SEQ ID NO: 1028668 - RNA, 19 nt, Artificial Sequence
  Description of Artificial Sequence: Synthetic oligonucleotide
guaccacuuagggguggug

SEQ ID NO: 1028669 - RNA, 19 nt, Artificial Sequence
  Description of Artificial Sequence: Synthetic oligonucleotide
auguagcgagggucucccu

SEQ ID NO: 1028670 - RNA, 19 nt, Artificial Sequence
  Description of Artificial Sequence: Synthetic oligonucleotide
ugacacccuccggggcugg

SEQ ID NO: 1028671 - RNA, 19 nt, Artificial Sequence
  Description of Artificial Sequence: Synthetic oligonucleotide
caugacccaggcggcuaag

SEQ ID NO: 1028672 - RNA, 19 nt, Artificial Sequence
  Description of Artificial Sequence: Synthetic oligonucleotide
uccggucuuuggggccucg

SEQ ID NO: 1028673 - RNA, 19 nt, Artificial Sequence
  Description of Artificial Sequence: Synthetic oligonucleotide
cgaguccggucuuuggggc

SEQ ID NO: 1028674 - RNA, 19 nt, Artificial Sequence
  Description of Artificial Sequence: Synthetic oligonucleotide
ccucggggccccaagaaga

SEQ ID NO: 1028675 - RNA, 19 nt, Artificial Sequence
  Description of Artificial Sequence: Synthetic oligonucleotide
cugccucgagggguagagg

SEQ ID NO: 1028676 - RNA, 19 nt, Artificial Sequence
  Description of Artificial Sequence: Synthetic oligonucleotide
ggggccucggaauggcgac

SEQ ID NO: 1028677 - RNA, 19 nt, Artificial Sequence
  Description of Artificial Sequence: Synthetic oligonucleotide
ggaggcuccgaguccaugu

SEQ ID NO: 1028678 - RNA, 19 nt, Artificial Sequence
  Description of Artificial Sequence: Synthetic oligonucleotide
ccacuuagggguggugggg

SEQ ID NO: 1028679 - RNA, 19 nt, Artificial Sequence
  Description of Artificial Sequence: Synthetic oligonucleotide
gagggaccuaugcugucau

SEQ ID NO: 1028680 - RNA, 19 nt, Artificial Sequence
  Description of Artificial Sequence: Synthetic oligonucleotide
cacguucuacuuuccacau

SEQ ID NO: 1028681 - RNA, 19 nt, Artificial Sequence
  Description of Artificial Sequence: Synthetic oligonucleotide
gauggucucaggggagagu

SEQ ID NO: 1028682 - RNA, 19 nt, Artificial Sequence
  Description of Artificial Sequence: Synthetic oligonucleotide
ccccuucuuugccacacac

SEQ ID NO: 1028683 - RNA, 19 nt, Artificial Sequence
  Description of Artificial Sequence: Synthetic oligonucleotide
cuugggugcucccaagauu

SEQ ID NO: 1028684 - RNA, 19 nt, Artificial Sequence
  Description of Artificial Sequence: Synthetic oligonucleotide
gggcccaaccucgacucag

SEQ ID NO: 1028685 - RNA, 19 nt, Artificial Sequence
  Description of Artificial Sequence: Synthetic oligonucleotide
agggcccaaccucgacuca

SEQ ID NO: 1028686 - RNA, 19 nt, Artificial Sequence
  Description of Artificial Sequence: Synthetic oligonucleotide
gugugcacuuagacaguuc

SEQ ID NO: 1028687 - RNA, 19 nt, Artificial Sequence
  Description of Artificial Sequence: Synthetic oligonucleotide
gacacccuccggggcuggg

SEQ ID NO: 1028688 - RNA, 19 nt, Artificial Sequence
  Description of Artificial Sequence: Synthetic oligonucleotide
ggacucuggccgguuuggg

SEQ ID NO: 1028689 - RNA, 19 nt, Artificial Sequence
  Description of Artificial Sequence: Synthetic oligonucleotide
gguaggaaagaggguuaga

SEQ ID NO: 1028690 - RNA, 19 nt, Artificial Sequence
  Description of Artificial Sequence: Synthetic oligonucleotide
ggaccucuaggaggcuccg

SEQ ID NO: 1028691 - RNA, 19 nt, Artificial Sequence
  Description of Artificial Sequence: Synthetic oligonucleotide
ggguaccacuuaggggugg

SEQ ID NO: 1028692 - RNA, 19 nt, Artificial Sequence
  Description of Artificial Sequence: Synthetic oligonucleotide
gaaggacucuggccgguuu

SEQ ID NO: 1028693 - RNA, 19 nt, Artificial Sequence
  Description of Artificial Sequence: Synthetic oligonucleotide
gccccaccuucucauggcc

SEQ ID NO: 1028694 - RNA, 19 nt, Artificial Sequence
  Description of Artificial Sequence: Synthetic oligonucleotide
ggcggcuaagccucuggaa

SEQ ID NO: 1028695 - RNA, 19 nt, Artificial Sequence
  Description of Artificial Sequence: Synthetic oligonucleotide
ggcgacauggagcgcuuaa

SEQ ID NO: 1028696 - RNA, 19 nt, Artificial Sequence
  Description of Artificial Sequence: Synthetic oligonucleotide
ucgagggguagagguucuc

SEQ ID NO: 1028697 - RNA, 19 nt, Artificial Sequence
  Description of Artificial Sequence: Synthetic oligonucleotide
ggacagaacgcagcucaga

SEQ ID NO: 1028698 - RNA, 19 nt, Artificial Sequence
  Description of Artificial Sequence: Synthetic oligonucleotide
cgacauggagcgcuuaaca

SEQ ID NO: 1028699 - RNA, 19 nt, Artificial Sequence
  Description of Artificial Sequence: Synthetic oligonucleotide
agaaggacucuggccgguu

SEQ ID NO: 1028700 - RNA, 19 nt, Artificial Sequence
  Description of Artificial Sequence: Synthetic oligonucleotide
ggccgguuugggucauacc

SEQ ID NO: 1028701 - RNA, 19 nt, Artificial Sequence
  Description of Artificial Sequence: Synthetic oligonucleotide
gcgacauggagcgcuuaac

SEQ ID NO: 1028702 - RNA, 19 nt, Artificial Sequence
  Description of Artificial Sequence: Synthetic oligonucleotide
ccguggcucaaagguaggg

SEQ ID NO: 1028703 - RNA, 19 nt, Artificial Sequence
  Description of Artificial Sequence: Synthetic oligonucleotide
ggacauggucaaugcuaga

SEQ ID NO: 1028704 - RNA, 19 nt, Artificial Sequence
  Description of Artificial Sequence: Synthetic oligonucleotide
agagcuccgucugcaggua

SEQ ID NO: 1028705 - RNA, 19 nt, Artificial Sequence
  Description of Artificial Sequence: Synthetic oligonucleotide
cugcagccaacuggcagga

SEQ ID NO: 1028706 - RNA, 19 nt, Artificial Sequence
  Description of Artificial Sequence: Synthetic oligonucleotide
gcugggucuaacgaauccu

SEQ ID NO: 1028707 - RNA, 19 nt, Artificial Sequence
  Description of Artificial Sequence: Synthetic oligonucleotide
gggccccaagaagauguug

SEQ ID NO: 1028708 - RNA, 19 nt, Artificial Sequence
  Description of Artificial Sequence: Synthetic oligonucleotide
caggcucugcaugucggaa

SEQ ID NO: 1028709 - RNA, 19 nt, Artificial Sequence
  Description of Artificial Sequence: Synthetic oligonucleotide
cccuucuuugccacacaca

SEQ ID NO: 1028710 - RNA, 19 nt, Artificial Sequence
  Description of Artificial Sequence: Synthetic oligonucleotide
guaccugccucgaggggua

SEQ ID NO: 1028711 - RNA, 19 nt, Artificial Sequence
  Description of Artificial Sequence: Synthetic oligonucleotide
acgcagcucagaagacaga

SEQ ID NO: 1028712 - RNA, 19 nt, Artificial Sequence
  Description of Artificial Sequence: Synthetic oligonucleotide
cuccagucucacacagugu

SEQ ID NO: 1028713 - RNA, 19 nt, Artificial Sequence
  Description of Artificial Sequence: Synthetic oligonucleotide
agcgcaccuugaagaccuc

SEQ ID NO: 1028714 - RNA, 19 nt, Artificial Sequence
  Description of Artificial Sequence: Synthetic oligonucleotide
gggguaccacuuaggggug

SEQ ID NO: 1028715 - RNA, 19 nt, Artificial Sequence
  Description of Artificial Sequence: Synthetic oligonucleotide
gcuaagccucuggaaguuc

SEQ ID NO: 1028716 - RNA, 19 nt, Artificial Sequence
  Description of Artificial Sequence: Synthetic oligonucleotide
gggacguggcugccucagc

SEQ ID NO: 1028717 - RNA, 19 nt, Artificial Sequence
  Description of Artificial Sequence: Synthetic oligonucleotide
ggaccuaugcugucaucau

SEQ ID NO: 1028718 - RNA, 19 nt, Artificial Sequence
  Description of Artificial Sequence: Synthetic oligonucleotide
cgccaguugaacccagcuc

SEQ ID NO: 1028719 - RNA, 19 nt, Artificial Sequence
  Description of Artificial Sequence: Synthetic oligonucleotide
ggccauguagcgagggucu

SEQ ID NO: 1028720 - RNA, 19 nt, Artificial Sequence
  Description of Artificial Sequence: Synthetic oligonucleotide
gccauauaccacagaacau

SEQ ID NO: 1028721 - RNA, 19 nt, Artificial Sequence
  Description of Artificial Sequence: Synthetic oligonucleotide
gccagcagagcagagugau

SEQ ID NO: 1028722 - RNA, 19 nt, Artificial Sequence
  Description of Artificial Sequence: Synthetic oligonucleotide
ggcaucccuugguguguac

SEQ ID NO: 1028723 - RNA, 19 nt, Artificial Sequence
  Description of Artificial Sequence: Synthetic oligonucleotide
cagggacguggcugccuca

SEQ ID NO: 1028724 - RNA, 19 nt, Artificial Sequence
  Description of Artificial Sequence: Synthetic oligonucleotide
cucggggccccaagaagau

SEQ ID NO: 1028725 - RNA, 19 nt, Artificial Sequence
  Description of Artificial Sequence: Synthetic oligonucleotide
auggcgacauggagcgcuu

SEQ ID NO: 1028726 - RNA, 19 nt, Artificial Sequence
  Description of Artificial Sequence: Synthetic oligonucleotide
ccgagguggaaggcuccgg

SEQ ID NO: 1028727 - RNA, 19 nt, Artificial Sequence
  Description of Artificial Sequence: Synthetic oligonucleotide
ugcagccaacuggcaggau

SEQ ID NO: 1028728 - RNA, 19 nt, Artificial Sequence
  Description of Artificial Sequence: Synthetic oligonucleotide
ggagguuccguggcucaaa

SEQ ID NO: 1028729 - RNA, 19 nt, Artificial Sequence
  Description of Artificial Sequence: Synthetic oligonucleotide
gcgccaguugaacccagcu

SEQ ID NO: 1028730 - RNA, 19 nt, Artificial Sequence
  Description of Artificial Sequence: Synthetic oligonucleotide
uggcgacauggagcgcuua

SEQ ID NO: 1028731 - RNA, 19 nt, Artificial Sequence
  Description of Artificial Sequence: Synthetic oligonucleotide
gggccuuuuaagggagaaa

SEQ ID NO: 1028732 - RNA, 19 nt, Artificial Sequence
  Description of Artificial Sequence: Synthetic oligonucleotide
ggugcucccaagauucauu

SEQ ID NO: 1028733 - RNA, 19 nt, Artificial Sequence
  Description of Artificial Sequence: Synthetic oligonucleotide
gguaccacuuagggguggu

SEQ ID NO: 1028734 - RNA, 19 nt, Artificial Sequence
  Description of Artificial Sequence: Synthetic oligonucleotide
cuccccaccaugggguagu

SEQ ID NO: 1028735 - RNA, 19 nt, Artificial Sequence
  Description of Artificial Sequence: Synthetic oligonucleotide
gugcacuuagacaguucuu

SEQ ID NO: 1028736 - RNA, 19 nt, Artificial Sequence
  Description of Artificial Sequence: Synthetic oligonucleotide
gccucggaauggcgacaug

SEQ ID NO: 1028737 - RNA, 19 nt, Artificial Sequence
  Description of Artificial Sequence: Synthetic oligonucleotide
cggggccccaagaagaugu

SEQ ID NO: 1028738 - RNA, 19 nt, Artificial Sequence
  Description of Artificial Sequence: Synthetic oligonucleotide
ccggucuuuggggccucgg

SEQ ID NO: 1028739 - RNA, 19 nt, Artificial Sequence
  Description of Artificial Sequence: Synthetic oligonucleotide
uccccaccaugggguaguu

SEQ ID NO: 1028740 - RNA, 19 nt, Artificial Sequence
  Description of Artificial Sequence: Synthetic oligonucleotide
ccagcgccaguugaaccca

SEQ ID NO: 1028741 - RNA, 19 nt, Artificial Sequence
  Description of Artificial Sequence: Synthetic oligonucleotide
cgaggugaacuaggccuug

SEQ ID NO: 1028742 - RNA, 19 nt, Artificial Sequence
  Description of Artificial Sequence: Synthetic oligonucleotide
gggguccgaggagggaaga

SEQ ID NO: 1028743 - RNA, 19 nt, Artificial Sequence
  Description of Artificial Sequence: Synthetic oligonucleotide
caaccucgacucagggcuu

SEQ ID NO: 1028744 - RNA, 19 nt, Artificial Sequence
  Description of Artificial Sequence: Synthetic oligonucleotide
ccuugggugcucccaagau

SEQ ID NO: 1028745 - RNA, 19 nt, Artificial Sequence
  Description of Artificial Sequence: Synthetic oligonucleotide
cagugggcauggacauggu

SEQ ID NO: 1028746 - RNA, 19 nt, Artificial Sequence
  Description of Artificial Sequence: Synthetic oligonucleotide
gggcugcaagguggagagc

SEQ ID NO: 1028747 - RNA, 19 nt, Artificial Sequence
  Description of Artificial Sequence: Synthetic oligonucleotide
ggcggcugauaggaaugcu

SEQ ID NO: 1028748 - RNA, 19 nt, Artificial Sequence
  Description of Artificial Sequence: Synthetic oligonucleotide
gccagcuuucgaguccggu

SEQ ID NO: 1028749 - RNA, 19 nt, Artificial Sequence
  Description of Artificial Sequence: Synthetic oligonucleotide
gggugcucccaagauucau

SEQ ID NO: 1028750 - RNA, 19 nt, Artificial Sequence
  Description of Artificial Sequence: Synthetic oligonucleotide
ggccucggaauggcgacau

SEQ ID NO: 1028751 - RNA, 19 nt, Artificial Sequence
  Description of Artificial Sequence: Synthetic oligonucleotide
gucccgcaaguagccccaa

SEQ ID NO: 1028752 - RNA, 19 nt, Artificial Sequence
  Description of Artificial Sequence: Synthetic oligonucleotide
gcgcaccuugaagaccucu

SEQ ID NO: 1028753 - RNA, 19 nt, Artificial Sequence
  Description of Artificial Sequence: Synthetic oligonucleotide
cagggaccucuaggaggcu

SEQ ID NO: 1028754 - RNA, 19 nt, Artificial Sequence
  Description of Artificial Sequence: Synthetic oligonucleotide
cccaggcggcuaagccucu

SEQ ID NO: 1028755 - RNA, 19 nt, Artificial Sequence
  Description of Artificial Sequence: Synthetic oligonucleotide
cgccuaccucagccagcuu

SEQ ID NO: 1028756 - RNA, 19 nt, Artificial Sequence
  Description of Artificial Sequence: Synthetic oligonucleotide
aauacuuaagacuuccugg

SEQ ID NO: 1028757 - RNA, 19 nt, Artificial Sequence
  Description of Artificial Sequence: Synthetic oligonucleotide
uaauguugaauaaagcugg

SEQ ID NO: 1028758 - RNA, 19 nt, Artificial Sequence
  Description of Artificial Sequence: Synthetic oligonucleotide
ugaaaugagagacaauugg

SEQ ID NO: 1028759 - RNA, 19 nt, Artificial Sequence
  Description of Artificial Sequence: Synthetic oligonucleotide
uuauacucuauacucagcg

SEQ ID NO: 1028760 - RNA, 19 nt, Artificial Sequence
  Description of Artificial Sequence: Synthetic oligonucleotide
uaauagaaacaucuggugg

SEQ ID NO: 1028761 - RNA, 19 nt, Artificial Sequence
  Description of Artificial Sequence: Synthetic oligonucleotide
guaaauugcgccuaguugg

SEQ ID NO: 1028762 - RNA, 19 nt, Artificial Sequence
  Description of Artificial Sequence: Synthetic oligonucleotide
uuuaauagaaacaucuggu

SEQ ID NO: 1028763 - RNA, 19 nt, Artificial Sequence
  Description of Artificial Sequence: Synthetic oligonucleotide
gucguuaucaaauaacugg

SEQ ID NO: 1028764 - RNA, 19 nt, Artificial Sequence
  Description of Artificial Sequence: Synthetic oligonucleotide
auuuguacuaggcaaggcc

SEQ ID NO: 1028765 - RNA, 19 nt, Artificial Sequence
  Description of Artificial Sequence: Synthetic oligonucleotide
ugaacaaaucaauaucugg

SEQ ID NO: 1028766 - RNA, 19 nt, Artificial Sequence
  Description of Artificial Sequence: Synthetic oligonucleotide
aauaucugggcggugaggc

SEQ ID NO: 1028767 - RNA, 19 nt, Artificial Sequence
  Description of Artificial Sequence: Synthetic oligonucleotide
aacaucaugcacaacaccg

SEQ ID NO: 1028768 - RNA, 19 nt, Artificial Sequence
  Description of Artificial Sequence: Synthetic oligonucleotide
guugaauaaagcuggaucc

SEQ ID NO: 1028769 - RNA, 19 nt, Artificial Sequence
  Description of Artificial Sequence: Synthetic oligonucleotide
uggaguaugaggaaaagcu

SEQ ID NO: 1028770 - RNA, 19 nt, Artificial Sequence
  Description of Artificial Sequence: Synthetic oligonucleotide
aaucuaaacaugggaaacc

SEQ ID NO: 1028771 - RNA, 19 nt, Artificial Sequence
  Description of Artificial Sequence: Synthetic oligonucleotide
agaggggagaacuagacuc

SEQ ID NO: 1028772 - RNA, 19 nt, Artificial Sequence
  Description of Artificial Sequence: Synthetic oligonucleotide
uauugcagauuuuauacag

SEQ ID NO: 1028773 - RNA, 19 nt, Artificial Sequence
  Description of Artificial Sequence: Synthetic oligonucleotide
uaucaugaggcauugaaac

SEQ ID NO: 1028774 - RNA, 19 nt, Artificial Sequence
  Description of Artificial Sequence: Synthetic oligonucleotide
uguaaauugcgccuaguug

SEQ ID NO: 1028775 - RNA, 19 nt, Artificial Sequence
  Description of Artificial Sequence: Synthetic oligonucleotide
aucugaacaaaucaauauc

SEQ ID NO: 1028776 - RNA, 19 nt, Artificial Sequence
  Description of Artificial Sequence: Synthetic oligonucleotide
ucuucaucggccuugagcu

SEQ ID NO: 1028777 - RNA, 19 nt, Artificial Sequence
  Description of Artificial Sequence: Synthetic oligonucleotide
uugcagauuuuauacaggg

SEQ ID NO: 1028778 - RNA, 19 nt, Artificial Sequence
  Description of Artificial Sequence: Synthetic oligonucleotide
auacucuauacucagcggg

SEQ ID NO: 1028779 - RNA, 19 nt, Artificial Sequence
  Description of Artificial Sequence: Synthetic oligonucleotide
uaauacuuaagacuuccug

SEQ ID NO: 1028780 - RNA, 19 nt, Artificial Sequence
  Description of Artificial Sequence: Synthetic oligonucleotide
auuuauacucuauacucag

SEQ ID NO: 1028781 - RNA, 19 nt, Artificial Sequence
  Description of Artificial Sequence: Synthetic oligonucleotide
uugaagagcgcauagggug

SEQ ID NO: 1028782 - RNA, 19 nt, Artificial Sequence
  Description of Artificial Sequence: Synthetic oligonucleotide
gauaguauugggaagagga

SEQ ID NO: 1028783 - RNA, 19 nt, Artificial Sequence
  Description of Artificial Sequence: Synthetic oligonucleotide
agaauuuauacucuauacu

SEQ ID NO: 1028784 - RNA, 19 nt, Artificial Sequence
  Description of Artificial Sequence: Synthetic oligonucleotide
uuacuuaagucuuuccaag

SEQ ID NO: 1028785 - RNA, 19 nt, Artificial Sequence
  Description of Artificial Sequence: Synthetic oligonucleotide
uagucuagcauccaaacau

SEQ ID NO: 1028786 - RNA, 19 nt, Artificial Sequence
  Description of Artificial Sequence: Synthetic oligonucleotide
agaacuagacuccuuuacg

SEQ ID NO: 1028787 - RNA, 19 nt, Artificial Sequence
  Description of Artificial Sequence: Synthetic oligonucleotide
acagcuaucugguguaggc

SEQ ID NO: 1028788 - RNA, 19 nt, Artificial Sequence
  Description of Artificial Sequence: Synthetic oligonucleotide
ugugaccauacuaaggagc

SEQ ID NO: 1028789 - RNA, 19 nt, Artificial Sequence
  Description of Artificial Sequence: Synthetic oligonucleotide
uauugcagacauuucaggc

SEQ ID NO: 1028790 - RNA, 19 nt, Artificial Sequence
  Description of Artificial Sequence: Synthetic oligonucleotide
uguaucaugaggcauugaa

SEQ ID NO: 1028791 - RNA, 19 nt, Artificial Sequence
  Description of Artificial Sequence: Synthetic oligonucleotide
uucaguacaagaacuucag

SEQ ID NO: 1028792 - RNA, 19 nt, Artificial Sequence
  Description of Artificial Sequence: Synthetic oligonucleotide
ugcgucaauguaaauugcg

SEQ ID NO: 1028793 - RNA, 19 nt, Artificial Sequence
  Description of Artificial Sequence: Synthetic oligonucleotide
uuauugcagacauuucagg

SEQ ID NO: 1028794 - RNA, 19 nt, Artificial Sequence
  Description of Artificial Sequence: Synthetic oligonucleotide
uauuguuaacaugaggcag

SEQ ID NO: 1028795 - RNA, 19 nt, Artificial Sequence
  Description of Artificial Sequence: Synthetic oligonucleotide
uuuguacuaggcaaggccu

SEQ ID NO: 1028796 - RNA, 19 nt, Artificial Sequence
  Description of Artificial Sequence: Synthetic oligonucleotide
guaguaauguugaauaaag

SEQ ID NO: 1028797 - RNA, 19 nt, Artificial Sequence
  Description of Artificial Sequence: Synthetic oligonucleotide
agugagauaguauugggaa

SEQ ID NO: 1028798 - RNA, 19 nt, Artificial Sequence
  Description of Artificial Sequence: Synthetic oligonucleotide
uuuuauacaggguggauua

SEQ ID NO: 1028799 - RNA, 19 nt, Artificial Sequence
  Description of Artificial Sequence: Synthetic oligonucleotide
uauacucuauacucagcgg

SEQ ID NO: 1028800 - RNA, 19 nt, Artificial Sequence
  Description of Artificial Sequence: Synthetic oligonucleotide
cagauuuuauacagggugg

SEQ ID NO: 1028801 - RNA, 19 nt, Artificial Sequence
  Description of Artificial Sequence: Synthetic oligonucleotide
acuucuuuggguuacuaga

SEQ ID NO: 1028802 - RNA, 19 nt, Artificial Sequence
  Description of Artificial Sequence: Synthetic oligonucleotide
uaaauugcgccuaguuggg

SEQ ID NO: 1028803 - RNA, 19 nt, Artificial Sequence
  Description of Artificial Sequence: Synthetic oligonucleotide
uacuuaagucuuuccaagg

SEQ ID NO: 1028804 - RNA, 19 nt, Artificial Sequence
  Description of Artificial Sequence: Synthetic oligonucleotide
acaccguggugacagaagc

SEQ ID NO: 1028805 - RNA, 19 nt, Artificial Sequence
  Description of Artificial Sequence: Synthetic oligonucleotide
uggucgauaucccaagcag

SEQ ID NO: 1028806 - RNA, 19 nt, Artificial Sequence
  Description of Artificial Sequence: Synthetic oligonucleotide
uaguaauguugaauaaagc

SEQ ID NO: 1028807 - RNA, 19 nt, Artificial Sequence
  Description of Artificial Sequence: Synthetic oligonucleotide
gacagaagcgcacugcacc

SEQ ID NO: 1028808 - RNA, 19 nt, Artificial Sequence
  Description of Artificial Sequence: Synthetic oligonucleotide
ugucguuaucaaauaacug

SEQ ID NO: 1028809 - RNA, 19 nt, Artificial Sequence
  Description of Artificial Sequence: Synthetic oligonucleotide
auuggugcaaacccaagca

SEQ ID NO: 1028810 - RNA, 19 nt, Artificial Sequence
  Description of Artificial Sequence: Synthetic oligonucleotide
ugcaacuagucuagcaucc

SEQ ID NO: 1028811 - RNA, 19 nt, Artificial Sequence
  Description of Artificial Sequence: Synthetic oligonucleotide
aggcugaugguccugcgcc

SEQ ID NO: 1028812 - RNA, 19 nt, Artificial Sequence
  Description of Artificial Sequence: Synthetic oligonucleotide
auaacugguaguaauguug

SEQ ID NO: 1028813 - RNA, 19 nt, Artificial Sequence
  Description of Artificial Sequence: Synthetic oligonucleotide
ucaaggucuuucuagcagc

SEQ ID NO: 1028814 - RNA, 19 nt, Artificial Sequence
  Description of Artificial Sequence: Synthetic oligonucleotide
aaccaugcugaugauacag

SEQ ID NO: 1028815 - RNA, 19 nt, Artificial Sequence
  Description of Artificial Sequence: Synthetic oligonucleotide
uuuagagucuucaguacaa

SEQ ID NO: 1028816 - RNA, 19 nt, Artificial Sequence
  Description of Artificial Sequence: Synthetic oligonucleotide
gaggcauugaaacaucuga

SEQ ID NO: 1028817 - RNA, 19 nt, Artificial Sequence
  Description of Artificial Sequence: Synthetic oligonucleotide
cuauccugcuacuagacuc

SEQ ID NO: 1028818 - RNA, 19 nt, Artificial Sequence
  Description of Artificial Sequence: Synthetic oligonucleotide
ugucagaugcaacuagucu

SEQ ID NO: 1028819 - RNA, 19 nt, Artificial Sequence
  Description of Artificial Sequence: Synthetic oligonucleotide
gaccauacuaaggagcagg

SEQ ID NO: 1028820 - RNA, 19 nt, Artificial Sequence
  Description of Artificial Sequence: Synthetic oligonucleotide
uaaccaggcaaccugugga

SEQ ID NO: 1028821 - RNA, 19 nt, Artificial Sequence
  Description of Artificial Sequence: Synthetic oligonucleotide
uauuguaucaugaggcauu

SEQ ID NO: 1028822 - RNA, 19 nt, Artificial Sequence
  Description of Artificial Sequence: Synthetic oligonucleotide
uaucaaauaacugguagua

SEQ ID NO: 1028823 - RNA, 19 nt, Artificial Sequence
  Description of Artificial Sequence: Synthetic oligonucleotide
cuucuuuggguuacuagag

SEQ ID NO: 1028824 - RNA, 19 nt, Artificial Sequence
  Description of Artificial Sequence: Synthetic oligonucleotide
agaaucuaaacaugggaaa

SEQ ID NO: 1028825 - RNA, 19 nt, Artificial Sequence
  Description of Artificial Sequence: Synthetic oligonucleotide
gaaucuaaacaugggaaac

SEQ ID NO: 1028826 - RNA, 19 nt, Artificial Sequence
  Description of Artificial Sequence: Synthetic oligonucleotide
aaaucaauaucugggcggu

SEQ ID NO: 1028827 - RNA, 19 nt, Artificial Sequence
  Description of Artificial Sequence: Synthetic oligonucleotide
acuagacuccuuuacgaug

SEQ ID NO: 1028828 - RNA, 19 nt, Artificial Sequence
  Description of Artificial Sequence: Synthetic oligonucleotide
augcugaugauacagcuau

SEQ ID NO: 1028829 - RNA, 19 nt, Artificial Sequence
  Description of Artificial Sequence: Synthetic oligonucleotide
gaacuagacuccuuuacga

SEQ ID NO: 1028830 - RNA, 19 nt, Artificial Sequence
  Description of Artificial Sequence: Synthetic oligonucleotide
gagaacuagacuccuuuac

SEQ ID NO: 1028831 - RNA, 19 nt, Artificial Sequence
  Description of Artificial Sequence: Synthetic oligonucleotide
uuauacaggguggauuaag

SEQ ID NO: 1028832 - RNA, 19 nt, Artificial Sequence
  Description of Artificial Sequence: Synthetic oligonucleotide
aguacaacaucucuugcuu

SEQ ID NO: 1028833 - RNA, 19 nt, Artificial Sequence
  Description of Artificial Sequence: Synthetic oligonucleotide
uauccugcuacuagacuca

SEQ ID NO: 1028834 - RNA, 19 nt, Artificial Sequence
  Description of Artificial Sequence: Synthetic oligonucleotide
aucuaccucuccccaaccc

SEQ ID NO: 1028835 - RNA, 19 nt, Artificial Sequence
  Description of Artificial Sequence: Synthetic oligonucleotide
ugucagacagaacucacuu

SEQ ID NO: 1028836 - RNA, 19 nt, Artificial Sequence
  Description of Artificial Sequence: Synthetic oligonucleotide
cauuacuuaagucuuucca

SEQ ID NO: 1028837 - RNA, 19 nt, Artificial Sequence
  Description of Artificial Sequence: Synthetic oligonucleotide
accuacucccaccucggcc

SEQ ID NO: 1028838 - RNA, 19 nt, Artificial Sequence
  Description of Artificial Sequence: Synthetic oligonucleotide
caauuggucagaacuguug

SEQ ID NO: 1028839 - RNA, 19 nt, Artificial Sequence
  Description of Artificial Sequence: Synthetic oligonucleotide
uuuugugguuuuauuguau

SEQ ID NO: 1028840 - RNA, 19 nt, Artificial Sequence
  Description of Artificial Sequence: Synthetic oligonucleotide
uauaucauccagaggucuc

SEQ ID NO: 1028841 - RNA, 19 nt, Artificial Sequence
  Description of Artificial Sequence: Synthetic oligonucleotide
auuucaggcacagauacau

SEQ ID NO: 1028842 - RNA, 19 nt, Artificial Sequence
  Description of Artificial Sequence: Synthetic oligonucleotide
aacccaagcaucguugaug

SEQ ID NO: 1028843 - RNA, 19 nt, Artificial Sequence
  Description of Artificial Sequence: Synthetic oligonucleotide
ucagccgaaguugugcagg

SEQ ID NO: 1028844 - RNA, 19 nt, Artificial Sequence
  Description of Artificial Sequence: Synthetic oligonucleotide
guauuguuaacaugaggca

SEQ ID NO: 1028845 - RNA, 19 nt, Artificial Sequence
  Description of Artificial Sequence: Synthetic oligonucleotide
uuaagaggcagaugguauc

SEQ ID NO: 1028846 - RNA, 19 nt, Artificial Sequence
  Description of Artificial Sequence: Synthetic oligonucleotide
aagguaaggaggugacgug

SEQ ID NO: 1028847 - RNA, 19 nt, Artificial Sequence
  Description of Artificial Sequence: Synthetic oligonucleotide
cuaugcugguguaaccagg

SEQ ID NO: 1028848 - RNA, 19 nt, Artificial Sequence
  Description of Artificial Sequence: Synthetic oligonucleotide
uuauaucauccagaggucu

SEQ ID NO: 1028849 - RNA, 19 nt, Artificial Sequence
  Description of Artificial Sequence: Synthetic oligonucleotide
uggagcaucuggaggagug

SEQ ID NO: 1028850 - RNA, 19 nt, Artificial Sequence
  Description of Artificial Sequence: Synthetic oligonucleotide
guaaccaggcaaccugugg

SEQ ID NO: 1028851 - RNA, 19 nt, Artificial Sequence
  Description of Artificial Sequence: Synthetic oligonucleotide
auugcgccuaguuggguuc

SEQ ID NO: 1028852 - RNA, 19 nt, Artificial Sequence
  Description of Artificial Sequence: Synthetic oligonucleotide
acccuuuugggaauagagc

SEQ ID NO: 1028853 - RNA, 19 nt, Artificial Sequence
  Description of Artificial Sequence: Synthetic oligonucleotide
agaugguaucuaccucucc

SEQ ID NO: 1028854 - RNA, 19 nt, Artificial Sequence
  Description of Artificial Sequence: Synthetic oligonucleotide
uugaauaaagcuggaucca

SEQ ID NO: 1028855 - RNA, 19 nt, Artificial Sequence
  Description of Artificial Sequence: Synthetic oligonucleotide
cacaacaccguggugacag

SEQ ID NO: 1028856 - RNA, 19 nt, Artificial Sequence
  Description of Artificial Sequence: Synthetic oligonucleotide
uguccuucccacguaaggc

SEQ ID NO: 1028857 - RNA, 19 nt, Artificial Sequence
  Description of Artificial Sequence: Synthetic oligonucleotide
ucccacguaaggcaugaug

SEQ ID NO: 1028858 - RNA, 19 nt, Artificial Sequence
  Description of Artificial Sequence: Synthetic oligonucleotide
agccugaacaugucauugg

SEQ ID NO: 1028859 - RNA, 19 nt, Artificial Sequence
  Description of Artificial Sequence: Synthetic oligonucleotide
cuaaacaugggaaaccaua

SEQ ID NO: 1028860 - RNA, 19 nt, Artificial Sequence
  Description of Artificial Sequence: Synthetic oligonucleotide
uucuagcagcuacagaauc

SEQ ID NO: 1028861 - RNA, 19 nt, Artificial Sequence
  Description of Artificial Sequence: Synthetic oligonucleotide
auugcagauuuuauacagg

SEQ ID NO: 1028862 - RNA, 19 nt, Artificial Sequence
  Description of Artificial Sequence: Synthetic oligonucleotide
uccuuuacgaugauuucuu

SEQ ID NO: 1028863 - RNA, 19 nt, Artificial Sequence
  Description of Artificial Sequence: Synthetic oligonucleotide
cuaggcaaggccugugacc

SEQ ID NO: 1028864 - RNA, 19 nt, Artificial Sequence
  Description of Artificial Sequence: Synthetic oligonucleotide
ugcgccgugauacuaugcu

SEQ ID NO: 1028865 - RNA, 19 nt, Artificial Sequence
  Description of Artificial Sequence: Synthetic oligonucleotide
gauccugacccuuuuggga

SEQ ID NO: 1028866 - RNA, 19 nt, Artificial Sequence
  Description of Artificial Sequence: Synthetic oligonucleotide
ucuauccugcuacuagacu

SEQ ID NO: 1028867 - RNA, 19 nt, Artificial Sequence
  Description of Artificial Sequence: Synthetic oligonucleotide
agcgcacugcaccuacucc

SEQ ID NO: 1028868 - RNA, 19 nt, Artificial Sequence
  Description of Artificial Sequence: Synthetic oligonucleotide
aauugcgccuaguuggguu

SEQ ID NO: 1028869 - RNA, 19 nt, Artificial Sequence
  Description of Artificial Sequence: Synthetic oligonucleotide
gaugauacagcuaucuggu

SEQ ID NO: 1028870 - RNA, 19 nt, Artificial Sequence
  Description of Artificial Sequence: Synthetic oligonucleotide
cuggccuacaaccaugcug

SEQ ID NO: 1028871 - RNA, 19 nt, Artificial Sequence
  Description of Artificial Sequence: Synthetic oligonucleotide
uacuuaagacuuccuggga

SEQ ID NO: 1028872 - RNA, 19 nt, Artificial Sequence
  Description of Artificial Sequence: Synthetic oligonucleotide
agaugcaacuagucuagca

SEQ ID NO: 1028873 - RNA, 19 nt, Artificial Sequence
  Description of Artificial Sequence: Synthetic oligonucleotide
acagauacauggaagcugu

SEQ ID NO: 1028874 - RNA, 19 nt, Artificial Sequence
  Description of Artificial Sequence: Synthetic oligonucleotide
augcacaacaccgugguga

SEQ ID NO: 1028875 - RNA, 19 nt, Artificial Sequence
  Description of Artificial Sequence: Synthetic oligonucleotide
gucgauaucccaagcaggc

SEQ ID NO: 1028876 - RNA, 19 nt, Artificial Sequence
  Description of Artificial Sequence: Synthetic oligonucleotide
cuuaagucuuuccaaggca

SEQ ID NO: 1028877 - RNA, 19 nt, Artificial Sequence
  Description of Artificial Sequence: Synthetic oligonucleotide
gguguaaccaggcaaccug

SEQ ID NO: 1028878 - RNA, 19 nt, Artificial Sequence
  Description of Artificial Sequence: Synthetic oligonucleotide
uuguuaacaugaggcagag

SEQ ID NO: 1028879 - RNA, 19 nt, Artificial Sequence
  Description of Artificial Sequence: Synthetic oligonucleotide
agacccguggggcuggcac

SEQ ID NO: 1028880 - RNA, 19 nt, Artificial Sequence
  Description of Artificial Sequence: Synthetic oligonucleotide
cuuuccaaggcaugcgcug

SEQ ID NO: 1028881 - RNA, 19 nt, Artificial Sequence
  Description of Artificial Sequence: Synthetic oligonucleotide
agcagguauuguuaacaug

SEQ ID NO: 1028882 - RNA, 19 nt, Artificial Sequence
  Description of Artificial Sequence: Synthetic oligonucleotide
ugcucauuuguguaugaua

SEQ ID NO: 1028883 - RNA, 19 nt, Artificial Sequence
  Description of Artificial Sequence: Synthetic oligonucleotide
auacuaaggagcagggcag

SEQ ID NO: 1028884 - RNA, 19 nt, Artificial Sequence
  Description of Artificial Sequence: Synthetic oligonucleotide
auuuuauacaggguggauu

SEQ ID NO: 1028885 - RNA, 19 nt, Artificial Sequence
  Description of Artificial Sequence: Synthetic oligonucleotide
agacagaacucacuuuaga

SEQ ID NO: 1028886 - RNA, 19 nt, Artificial Sequence
  Description of Artificial Sequence: Synthetic oligonucleotide
gaggugacguguaaaugcc

SEQ ID NO: 1028887 - RNA, 19 nt, Artificial Sequence
  Description of Artificial Sequence: Synthetic oligonucleotide
ugaauaaagcuggauccaa

SEQ ID NO: 1028888 - RNA, 19 nt, Artificial Sequence
  Description of Artificial Sequence: Synthetic oligonucleotide
gcauugaaacaucugaaca

SEQ ID NO: 1028889 - RNA, 19 nt, Artificial Sequence
  Description of Artificial Sequence: Synthetic oligonucleotide
ucuugcuuugcucgggaau

SEQ ID NO: 1028890 - RNA, 19 nt, Artificial Sequence
  Description of Artificial Sequence: Synthetic oligonucleotide
uggacuaugcugguguaac

SEQ ID NO: 1028891 - RNA, 19 nt, Artificial Sequence
  Description of Artificial Sequence: Synthetic oligonucleotide
uggaggucagccgaaguug

SEQ ID NO: 1028892 - RNA, 19 nt, Artificial Sequence
  Description of Artificial Sequence: Synthetic oligonucleotide
auguaaauugcgccuaguu

SEQ ID NO: 1028893 - RNA, 19 nt, Artificial Sequence
  Description of Artificial Sequence: Synthetic oligonucleotide
cacuuuagagucuucagua

SEQ ID NO: 1028894 - RNA, 19 nt, Artificial Sequence
  Description of Artificial Sequence: Synthetic oligonucleotide
cuaugcuggauuuucugga

SEQ ID NO: 1028895 - RNA, 19 nt, Artificial Sequence
  Description of Artificial Sequence: Synthetic oligonucleotide
ugguaguaauguugaauaa

SEQ ID NO: 1028896 - RNA, 19 nt, Artificial Sequence
  Description of Artificial Sequence: Synthetic oligonucleotide
aauguaaauugcgccuagu

SEQ ID NO: 1028897 - RNA, 19 nt, Artificial Sequence
  Description of Artificial Sequence: Synthetic oligonucleotide
aaauuggcuugucucccau

SEQ ID NO: 1028898 - RNA, 19 nt, Artificial Sequence
  Description of Artificial Sequence: Synthetic oligonucleotide
ugguaucuaccucucccca

SEQ ID NO: 1028899 - RNA, 19 nt, Artificial Sequence
  Description of Artificial Sequence: Synthetic oligonucleotide
aucuauccugcuacuagac

SEQ ID NO: 1028900 - RNA, 19 nt, Artificial Sequence
  Description of Artificial Sequence: Synthetic oligonucleotide
auuguaucaugaggcauug

SEQ ID NO: 1028901 - RNA, 19 nt, Artificial Sequence
  Description of Artificial Sequence: Synthetic oligonucleotide
ucaauguaaauugcgccua

SEQ ID NO: 1028902 - RNA, 19 nt, Artificial Sequence
  Description of Artificial Sequence: Synthetic oligonucleotide
agacaauuggucagaacug

SEQ ID NO: 1028903 - RNA, 19 nt, Artificial Sequence
  Description of Artificial Sequence: Synthetic oligonucleotide
ugggauuugaagagcgcau

SEQ ID NO: 1028904 - RNA, 19 nt, Artificial Sequence
  Description of Artificial Sequence: Synthetic oligonucleotide
cuguccuucccacguaagg

SEQ ID NO: 1028905 - RNA, 19 nt, Artificial Sequence
  Description of Artificial Sequence: Synthetic oligonucleotide
auuaagaggcagaugguau

SEQ ID NO: 1028906 - RNA, 19 nt, Artificial Sequence
  Description of Artificial Sequence: Synthetic oligonucleotide
guaucuaccucuccccaac

SEQ ID NO: 1028907 - RNA, 19 nt, Artificial Sequence
  Description of Artificial Sequence: Synthetic oligonucleotide
agucuagcauccaaacauc

SEQ ID NO: 1028908 - RNA, 19 nt, Artificial Sequence
  Description of Artificial Sequence: Synthetic oligonucleotide
gaagguaaggaggugacgu

SEQ ID NO: 1028909 - RNA, 19 nt, Artificial Sequence
  Description of Artificial Sequence: Synthetic oligonucleotide
ggauuugaagagcgcauag

SEQ ID NO: 1028910 - RNA, 19 nt, Artificial Sequence
  Description of Artificial Sequence: Synthetic oligonucleotide
uacuaggcaaggccuguga

SEQ ID NO: 1028911 - RNA, 19 nt, Artificial Sequence
  Description of Artificial Sequence: Synthetic oligonucleotide
cugaugauacagcuaucug

SEQ ID NO: 1028912 - RNA, 19 nt, Artificial Sequence
  Description of Artificial Sequence: Synthetic oligonucleotide
acagaagcgcacugcaccu

SEQ ID NO: 1028913 - RNA, 19 nt, Artificial Sequence
  Description of Artificial Sequence: Synthetic oligonucleotide
gucaauguaaauugcgccu

SEQ ID NO: 1028914 - RNA, 19 nt, Artificial Sequence
  Description of Artificial Sequence: Synthetic oligonucleotide
gacuaugcugguguaacca

SEQ ID NO: 1028915 - RNA, 19 nt, Artificial Sequence
  Description of Artificial Sequence: Synthetic oligonucleotide
caucaugcacaacaccgug

SEQ ID NO: 1028916 - RNA, 19 nt, Artificial Sequence
  Description of Artificial Sequence: Synthetic oligonucleotide
gaucagucccacugauacc

SEQ ID NO: 1028917 - RNA, 19 nt, Artificial Sequence
  Description of Artificial Sequence: Synthetic oligonucleotide
uacaagaacuucagucaau

SEQ ID NO: 1028918 - RNA, 19 nt, Artificial Sequence
  Description of Artificial Sequence: Synthetic oligonucleotide
uaucuaccucuccccaacc

SEQ ID NO: 1028919 - RNA, 19 nt, Artificial Sequence
  Description of Artificial Sequence: Synthetic oligonucleotide
gucuuuccaaggcaugcgc

SEQ ID NO: 1028920 - RNA, 19 nt, Artificial Sequence
  Description of Artificial Sequence: Synthetic oligonucleotide
caauguaaauugcgccuag

SEQ ID NO: 1028921 - RNA, 19 nt, Artificial Sequence
  Description of Artificial Sequence: Synthetic oligonucleotide
uuacgaugauuucuuccau

SEQ ID NO: 1028922 - RNA, 19 nt, Artificial Sequence
  Description of Artificial Sequence: Synthetic oligonucleotide
cuagacaacuucuccacaa

SEQ ID NO: 1028923 - RNA, 19 nt, Artificial Sequence
  Description of Artificial Sequence: Synthetic oligonucleotide
ugcacaacaccguggugac

SEQ ID NO: 1028924 - RNA, 19 nt, Artificial Sequence
  Description of Artificial Sequence: Synthetic oligonucleotide
aggaaacagcgugaggauc

SEQ ID NO: 1028925 - RNA, 19 nt, Artificial Sequence
  Description of Artificial Sequence: Synthetic oligonucleotide
ucugcgaccgacugucccu

SEQ ID NO: 1028926 - RNA, 19 nt, Artificial Sequence
  Description of Artificial Sequence: Synthetic oligonucleotide
accauacuaaggagcaggg

SEQ ID NO: 1028927 - RNA, 19 nt, Artificial Sequence
  Description of Artificial Sequence: Synthetic oligonucleotide
ccaauacacagcaucuuag

SEQ ID NO: 1028928 - RNA, 19 nt, Artificial Sequence
  Description of Artificial Sequence: Synthetic oligonucleotide
gguggaaacccaugauggg

SEQ ID NO: 1028929 - RNA, 19 nt, Artificial Sequence
  Description of Artificial Sequence: Synthetic oligonucleotide
ucuuagagaucagucccac

SEQ ID NO: 1028930 - RNA, 19 nt, Artificial Sequence
  Description of Artificial Sequence: Synthetic oligonucleotide
guacaagaacuucagucaa

SEQ ID NO: 1028931 - RNA, 19 nt, Artificial Sequence
  Description of Artificial Sequence: Synthetic oligonucleotide
uuuggagcaucuggaggag

SEQ ID NO: 1028932 - RNA, 19 nt, Artificial Sequence
  Description of Artificial Sequence: Synthetic oligonucleotide
gaggggagaacuagacucc

SEQ ID NO: 1028933 - RNA, 19 nt, Artificial Sequence
  Description of Artificial Sequence: Synthetic oligonucleotide
aaacccaagcaucguugau

SEQ ID NO: 1028934 - RNA, 19 nt, Artificial Sequence
  Description of Artificial Sequence: Synthetic oligonucleotide
guggaguaugaggaaaagc

SEQ ID NO: 1028935 - RNA, 19 nt, Artificial Sequence
  Description of Artificial Sequence: Synthetic oligonucleotide
ugacagaagcgcacugcac

SEQ ID NO: 1028936 - RNA, 19 nt, Artificial Sequence
  Description of Artificial Sequence: Synthetic oligonucleotide
gugaccauacuaaggagca

SEQ ID NO: 1028937 - RNA, 19 nt, Artificial Sequence
  Description of Artificial Sequence: Synthetic oligonucleotide
uccuggagagucacccacc

SEQ ID NO: 1028938 - RNA, 19 nt, Artificial Sequence
  Description of Artificial Sequence: Synthetic oligonucleotide
cuugcagcagguauuguua

SEQ ID NO: 1028939 - RNA, 19 nt, Artificial Sequence
  Description of Artificial Sequence: Synthetic oligonucleotide
caucuauccugcuacuaga

SEQ ID NO: 1028940 - RNA, 19 nt, Artificial Sequence
  Description of Artificial Sequence: Synthetic oligonucleotide
aaccgacaaucuuuugcau

SEQ ID NO: 1028941 - RNA, 19 nt, Artificial Sequence
  Description of Artificial Sequence: Synthetic oligonucleotide
cuagucuagcauccaaaca

SEQ ID NO: 1028942 - RNA, 19 nt, Artificial Sequence
  Description of Artificial Sequence: Synthetic oligonucleotide
gugacagaagcgcacugca

SEQ ID NO: 1028943 - RNA, 19 nt, Artificial Sequence
  Description of Artificial Sequence: Synthetic oligonucleotide
ggucgauaucccaagcagg

SEQ ID NO: 1028944 - RNA, 19 nt, Artificial Sequence
  Description of Artificial Sequence: Synthetic oligonucleotide
augauacagcuaucuggug

SEQ ID NO: 1028945 - RNA, 19 nt, Artificial Sequence
  Description of Artificial Sequence: Synthetic oligonucleotide
caccguggugacagaagcg

SEQ ID NO: 1028946 - RNA, 19 nt, Artificial Sequence
  Description of Artificial Sequence: Synthetic oligonucleotide
uuaagacuuccugggauuu

SEQ ID NO: 1028947 - RNA, 19 nt, Artificial Sequence
  Description of Artificial Sequence: Synthetic oligonucleotide
ggcuagacaacuucuccac

SEQ ID NO: 1028948 - RNA, 19 nt, Artificial Sequence
  Description of Artificial Sequence: Synthetic oligonucleotide
ugcgcugguacaacacaaa

SEQ ID NO: 1028949 - RNA, 19 nt, Artificial Sequence
  Description of Artificial Sequence: Synthetic oligonucleotide
ccauccgggacuucaaccc

SEQ ID NO: 1028950 - RNA, 19 nt, Artificial Sequence
  Description of Artificial Sequence: Synthetic oligonucleotide
uaagacuuccugggauuug

SEQ ID NO: 1028951 - RNA, 19 nt, Artificial Sequence
  Description of Artificial Sequence: Synthetic oligonucleotide
agguaaggaggugacgugu

SEQ ID NO: 1028952 - RNA, 19 nt, Artificial Sequence
  Description of Artificial Sequence: Synthetic oligonucleotide
gacccguggggcuggcacg

SEQ ID NO: 1028953 - RNA, 19 nt, Artificial Sequence
  Description of Artificial Sequence: Synthetic oligonucleotide
uuuauacaggguggauuaa

SEQ ID NO: 1028954 - RNA, 19 nt, Artificial Sequence
  Description of Artificial Sequence: Synthetic oligonucleotide
ugaccauacuaaggagcag

SEQ ID NO: 1028955 - RNA, 19 nt, Artificial Sequence
  Description of Artificial Sequence: Synthetic oligonucleotide
caaacccaagcaucguuga

SEQ ID NO: 1028956 - RNA, 19 nt, Artificial Sequence
  Description of Artificial Sequence: Synthetic oligonucleotide
gugacguguaaaugcccug

SEQ ID NO: 1028957 - RNA, 19 nt, Artificial Sequence
  Description of Artificial Sequence: Synthetic oligonucleotide
gauaccuccugugugcugu

SEQ ID NO: 1028958 - RNA, 19 nt, Artificial Sequence
  Description of Artificial Sequence: Synthetic oligonucleotide
guaucaugaggcauugaaa

SEQ ID NO: 1028959 - RNA, 19 nt, Artificial Sequence
  Description of Artificial Sequence: Synthetic oligonucleotide
aggugucagacagaacuca

SEQ ID NO: 1028960 - RNA, 19 nt, Artificial Sequence
  Description of Artificial Sequence: Synthetic oligonucleotide
cugguguaggcugaugguc

SEQ ID NO: 1028961 - RNA, 19 nt, Artificial Sequence
  Description of Artificial Sequence: Synthetic oligonucleotide
ucgauaucccaagcaggca

SEQ ID NO: 1028962 - RNA, 19 nt, Artificial Sequence
  Description of Artificial Sequence: Synthetic oligonucleotide
guaugauauuuggagcauc

SEQ ID NO: 1028963 - RNA, 19 nt, Artificial Sequence
  Description of Artificial Sequence: Synthetic oligonucleotide
aaauugcgccuaguugggu

SEQ ID NO: 1028964 - RNA, 19 nt, Artificial Sequence
  Description of Artificial Sequence: Synthetic oligonucleotide
ugugggcacucugaaugug

SEQ ID NO: 1028965 - RNA, 19 nt, Artificial Sequence
  Description of Artificial Sequence: Synthetic oligonucleotide
ugguguaaccaggcaaccu

SEQ ID NO: 1028966 - RNA, 19 nt, Artificial Sequence
  Description of Artificial Sequence: Synthetic oligonucleotide
cuggucgauaucccaagca

SEQ ID NO: 1028967 - RNA, 19 nt, Artificial Sequence
  Description of Artificial Sequence: Synthetic oligonucleotide
cugggauuugaagagcgca

SEQ ID NO: 1028968 - RNA, 19 nt, Artificial Sequence
  Description of Artificial Sequence: Synthetic oligonucleotide
aggccugugaccauacuaa

SEQ ID NO: 1028969 - RNA, 19 nt, Artificial Sequence
  Description of Artificial Sequence: Synthetic oligonucleotide
caaggcaugcgcugguaca

SEQ ID NO: 1028970 - RNA, 19 nt, Artificial Sequence
  Description of Artificial Sequence: Synthetic oligonucleotide
agcgcggucugcgaccgac

SEQ ID NO: 1028971 - RNA, 19 nt, Artificial Sequence
  Description of Artificial Sequence: Synthetic oligonucleotide
ggucagaacuguugaugcc

SEQ ID NO: 1028972 - RNA, 19 nt, Artificial Sequence
  Description of Artificial Sequence: Synthetic oligonucleotide
aucuuagagaucaguccca

SEQ ID NO: 1028973 - RNA, 19 nt, Artificial Sequence
  Description of Artificial Sequence: Synthetic oligonucleotide
auaucugggcggugaggca

SEQ ID NO: 1028974 - RNA, 19 nt, Artificial Sequence
  Description of Artificial Sequence: Synthetic oligonucleotide
gaccgacugucccuucccc

SEQ ID NO: 1028975 - RNA, 19 nt, Artificial Sequence
  Description of Artificial Sequence: Synthetic oligonucleotide
gucagccgaaguugugcag

SEQ ID NO: 1028976 - RNA, 19 nt, Artificial Sequence
  Description of Artificial Sequence: Synthetic oligonucleotide
gaaacagcgugaggaucug

SEQ ID NO: 1028977 - RNA, 19 nt, Artificial Sequence
  Description of Artificial Sequence: Synthetic oligonucleotide
aguuggguucugucguuau

SEQ ID NO: 1028978 - RNA, 19 nt, Artificial Sequence
  Description of Artificial Sequence: Synthetic oligonucleotide
gcgucaauguaaauugcgc

SEQ ID NO: 1028979 - RNA, 19 nt, Artificial Sequence
  Description of Artificial Sequence: Synthetic oligonucleotide
aacucacuuuagagucuuc

SEQ ID NO: 1028980 - RNA, 19 nt, Artificial Sequence
  Description of Artificial Sequence: Synthetic oligonucleotide
gaagagcgcauagggugug

SEQ ID NO: 1028981 - RNA, 19 nt, Artificial Sequence
  Description of Artificial Sequence: Synthetic oligonucleotide
cuacuagacucagagcaga

SEQ ID NO: 1028982 - RNA, 19 nt, Artificial Sequence
  Description of Artificial Sequence: Synthetic oligonucleotide
auacuaugcuggauuuucu

SEQ ID NO: 1028983 - RNA, 19 nt, Artificial Sequence
  Description of Artificial Sequence: Synthetic oligonucleotide
acguguaaaugcccugcaa

SEQ ID NO: 1028984 - RNA, 19 nt, Artificial Sequence
  Description of Artificial Sequence: Synthetic oligonucleotide
cugguguaaccaggcaacc

SEQ ID NO: 1028985 - RNA, 19 nt, Artificial Sequence
  Description of Artificial Sequence: Synthetic oligonucleotide
uccugcgccgugauacuau

SEQ ID NO: 1028986 - RNA, 19 nt, Artificial Sequence
  Description of Artificial Sequence: Synthetic oligonucleotide
gcgcacugcaccuacuccc

SEQ ID NO: 1028987 - RNA, 19 nt, Artificial Sequence
  Description of Artificial Sequence: Synthetic oligonucleotide
gguuacuagagcaacuugu

SEQ ID NO: 1028988 - RNA, 19 nt, Artificial Sequence
  Description of Artificial Sequence: Synthetic oligonucleotide
gcuacuagacucagagcag

SEQ ID NO: 1028989 - RNA, 19 nt, Artificial Sequence
  Description of Artificial Sequence: Synthetic oligonucleotide
gguucugucguuaucaaau

SEQ ID NO: 1028990 - RNA, 19 nt, Artificial Sequence
  Description of Artificial Sequence: Synthetic oligonucleotide
ggguuacuagagcaacuug

SEQ ID NO: 1028991 - RNA, 19 nt, Artificial Sequence
  Description of Artificial Sequence: Synthetic oligonucleotide
guuggguucugucguuauc

SEQ ID NO: 1028992 - RNA, 19 nt, Artificial Sequence
  Description of Artificial Sequence: Synthetic oligonucleotide
uccugcuacuagacucaga

SEQ ID NO: 1028993 - RNA, 19 nt, Artificial Sequence
  Description of Artificial Sequence: Synthetic oligonucleotide
auacagcuaucugguguag

SEQ ID NO: 1028994 - RNA, 19 nt, Artificial Sequence
  Description of Artificial Sequence: Synthetic oligonucleotide
cagcgugaggaucuggcca

SEQ ID NO: 1028995 - RNA, 19 nt, Artificial Sequence
  Description of Artificial Sequence: Synthetic oligonucleotide
uggcacgauggcggcagcg

SEQ ID NO: 1028996 - RNA, 19 nt, Artificial Sequence
  Description of Artificial Sequence: Synthetic oligonucleotide
ggcuggucgauaucccaag

SEQ ID NO: 1028997 - RNA, 19 nt, Artificial Sequence
  Description of Artificial Sequence: Synthetic oligonucleotide
uaucccaagcaggcaguac

SEQ ID NO: 1028998 - RNA, 19 nt, Artificial Sequence
  Description of Artificial Sequence: Synthetic oligonucleotide
ccaaauuggcuugucuccc

SEQ ID NO: 1028999 - RNA, 19 nt, Artificial Sequence
  Description of Artificial Sequence: Synthetic oligonucleotide
cuucaucggccuugagcug

SEQ ID NO: 1029000 - RNA, 19 nt, Artificial Sequence
  Description of Artificial Sequence: Synthetic oligonucleotide
gccugugaccauacuaagg

SEQ ID NO: 1029001 - RNA, 19 nt, Artificial Sequence
  Description of Artificial Sequence: Synthetic oligonucleotide
cacuucuuuauugcagaca

SEQ ID NO: 1029002 - RNA, 19 nt, Artificial Sequence
  Description of Artificial Sequence: Synthetic oligonucleotide
cuuaagacuuccugggauu

SEQ ID NO: 1029003 - RNA, 19 nt, Artificial Sequence
  Description of Artificial Sequence: Synthetic oligonucleotide
acaucugguggaaacccau

SEQ ID NO: 1029004 - RNA, 19 nt, Artificial Sequence
  Description of Artificial Sequence: Synthetic oligonucleotide
ggccugugaccauacuaag

SEQ ID NO: 1029005 - RNA, 19 nt, Artificial Sequence
  Description of Artificial Sequence: Synthetic oligonucleotide
caugcacaacaccguggug

SEQ ID NO: 1029006 - RNA, 19 nt, Artificial Sequence
  Description of Artificial Sequence: Synthetic oligonucleotide
cugcgccgugauacuaugc

SEQ ID NO: 1029007 - RNA, 19 nt, Artificial Sequence
  Description of Artificial Sequence: Synthetic oligonucleotide
ggcaugaugcgucaaugua

SEQ ID NO: 1029008 - RNA, 19 nt, Artificial Sequence
  Description of Artificial Sequence: Synthetic oligonucleotide
aucaucuauccugcuacua

SEQ ID NO: 1029009 - RNA, 19 nt, Artificial Sequence
  Description of Artificial Sequence: Synthetic oligonucleotide
gauaucccaagcaggcagu

SEQ ID NO: 1029010 - RNA, 19 nt, Artificial Sequence
  Description of Artificial Sequence: Synthetic oligonucleotide
uuguaucaugaggcauuga

SEQ ID NO: 1029011 - RNA, 19 nt, Artificial Sequence
  Description of Artificial Sequence: Synthetic oligonucleotide
caucguugauguucuuuaa

SEQ ID NO: 1029012 - RNA, 19 nt, Artificial Sequence
  Description of Artificial Sequence: Synthetic oligonucleotide
aagagcgcauagggugugu

SEQ ID NO: 1029013 - RNA, 19 nt, Artificial Sequence
  Description of Artificial Sequence: Synthetic oligonucleotide
ggucagccgaaguugugca

SEQ ID NO: 1029014 - RNA, 19 nt, Artificial Sequence
  Description of Artificial Sequence: Synthetic oligonucleotide
aggggagaacuagacuccu

SEQ ID NO: 1029015 - RNA, 19 nt, Artificial Sequence
  Description of Artificial Sequence: Synthetic oligonucleotide
gugauacuaugcuggauuu

SEQ ID NO: 1029016 - RNA, 19 nt, Artificial Sequence
  Description of Artificial Sequence: Synthetic oligonucleotide
ucgggaaugugggcacucu

SEQ ID NO: 1029017 - RNA, 19 nt, Artificial Sequence
  Description of Artificial Sequence: Synthetic oligonucleotide
ggcacgauggcggcagcgg

SEQ ID NO: 1029018 - RNA, 19 nt, Artificial Sequence
  Description of Artificial Sequence: Synthetic oligonucleotide
cagaugcaacuagucuagc

SEQ ID NO: 1029019 - RNA, 19 nt, Artificial Sequence
  Description of Artificial Sequence: Synthetic oligonucleotide
uuggagcaucuggaggagu

SEQ ID NO: 1029020 - RNA, 19 nt, Artificial Sequence
  Description of Artificial Sequence: Synthetic oligonucleotide
auccugcuacuagacucag

SEQ ID NO: 1029021 - RNA, 19 nt, Artificial Sequence
  Description of Artificial Sequence: Synthetic oligonucleotide
guacuaggcaaggccugug

SEQ ID NO: 1029022 - RNA, 19 nt, Artificial Sequence
  Description of Artificial Sequence: Synthetic oligonucleotide
gcugaugauacagcuaucu

SEQ ID NO: 1029023 - RNA, 19 nt, Artificial Sequence
  Description of Artificial Sequence: Synthetic oligonucleotide
gcuggucgauaucccaagc

SEQ ID NO: 1029024 - RNA, 19 nt, Artificial Sequence
  Description of Artificial Sequence: Synthetic oligonucleotide
ccugggauuugaagagcgc

SEQ ID NO: 1029025 - RNA, 19 nt, Artificial Sequence
  Description of Artificial Sequence: Synthetic oligonucleotide
gcccaaagagcuauuuaac

SEQ ID NO: 1029026 - RNA, 19 nt, Artificial Sequence
  Description of Artificial Sequence: Synthetic oligonucleotide
gaacuucagucaauuugcu

SEQ ID NO: 1029027 - RNA, 19 nt, Artificial Sequence
  Description of Artificial Sequence: Synthetic oligonucleotide
gugcuguccuggacuaugc

SEQ ID NO: 1029028 - RNA, 19 nt, Artificial Sequence
  Description of Artificial Sequence: Synthetic oligonucleotide
gcuggcacgauggcggcag

SEQ ID NO: 1029029 - RNA, 19 nt, Artificial Sequence
  Description of Artificial Sequence: Synthetic oligonucleotide
auaggguguguggaaggua

SEQ ID NO: 1029030 - RNA, 19 nt, Artificial Sequence
  Description of Artificial Sequence: Synthetic oligonucleotide
aggguguguggaagguaag

SEQ ID NO: 1029031 - RNA, 19 nt, Artificial Sequence
  Description of Artificial Sequence: Synthetic oligonucleotide
caaggaugaaaagcuagau

SEQ ID NO: 1029032 - RNA, 19 nt, Artificial Sequence
  Description of Artificial Sequence: Synthetic oligonucleotide
caccuacucccaccucggc

SEQ ID NO: 1029033 - RNA, 19 nt, Artificial Sequence
  Description of Artificial Sequence: Synthetic oligonucleotide
aggcaaccuguggaguaug

SEQ ID NO: 1029034 - RNA, 19 nt, Artificial Sequence
  Description of Artificial Sequence: Synthetic oligonucleotide
ccuuuacgaugauuucuuc

SEQ ID NO: 1029035 - RNA, 19 nt, Artificial Sequence
  Description of Artificial Sequence: Synthetic oligonucleotide
uugcgccuaguuggguucu

SEQ ID NO: 1029036 - RNA, 19 nt, Artificial Sequence
  Description of Artificial Sequence: Synthetic oligonucleotide
cucgggaaugugggcacuc

SEQ ID NO: 1029037 - RNA, 19 nt, Artificial Sequence
  Description of Artificial Sequence: Synthetic oligonucleotide
gguggauuaagaggcagau

SEQ ID NO: 1029038 - RNA, 19 nt, Artificial Sequence
  Description of Artificial Sequence: Synthetic oligonucleotide
cacguaaggcaugaugcgu

SEQ ID NO: 1029039 - RNA, 19 nt, Artificial Sequence
  Description of Artificial Sequence: Synthetic oligonucleotide
guaugaggaaaagcuuuau

SEQ ID NO: 1029040 - RNA, 19 nt, Artificial Sequence
  Description of Artificial Sequence: Synthetic oligonucleotide
gcgaccgacugucccuucc

SEQ ID NO: 1029041 - RNA, 19 nt, Artificial Sequence
  Description of Artificial Sequence: Synthetic oligonucleotide
cagggcagaaacugcccua

SEQ ID NO: 1029042 - RNA, 19 nt, Artificial Sequence
  Description of Artificial Sequence: Synthetic oligonucleotide
ggggcuggucgauauccca

SEQ ID NO: 1029043 - RNA, 19 nt, Artificial Sequence
  Description of Artificial Sequence: Synthetic oligonucleotide
ggguggauuaagaggcaga

SEQ ID NO: 1029044 - RNA, 19 nt, Artificial Sequence
  Description of Artificial Sequence: Synthetic oligonucleotide
gccuacaaccaugcugaug

SEQ ID NO: 1029045 - RNA, 19 nt, Artificial Sequence
  Description of Artificial Sequence: Synthetic oligonucleotide
ugcgccuaguuggguucug

SEQ ID NO: 1029046 - RNA, 19 nt, Artificial Sequence
  Description of Artificial Sequence: Synthetic oligonucleotide
gggauuugaagagcgcaua

SEQ ID NO: 1029047 - RNA, 19 nt, Artificial Sequence
  Description of Artificial Sequence: Synthetic oligonucleotide
caacaccguggugacagaa

SEQ ID NO: 1029048 - RNA, 19 nt, Artificial Sequence
  Description of Artificial Sequence: Synthetic oligonucleotide
ccugcgccgugauacuaug

SEQ ID NO: 1029049 - RNA, 19 nt, Artificial Sequence
  Description of Artificial Sequence: Synthetic oligonucleotide
gcuguccuucccacguaag

SEQ ID NO: 1029050 - RNA, 19 nt, Artificial Sequence
  Description of Artificial Sequence: Synthetic oligonucleotide
cuggacuaugcugguguaa

SEQ ID NO: 1029051 - RNA, 19 nt, Artificial Sequence
  Description of Artificial Sequence: Synthetic oligonucleotide
aagacccguggggcuggca

SEQ ID NO: 1029052 - RNA, 19 nt, Artificial Sequence
  Description of Artificial Sequence: Synthetic oligonucleotide
gguaaggaggugacgugua

SEQ ID NO: 1029053 - RNA, 19 nt, Artificial Sequence
  Description of Artificial Sequence: Synthetic oligonucleotide
gcaacuagucuagcaucca

SEQ ID NO: 1029054 - RNA, 19 nt, Artificial Sequence
  Description of Artificial Sequence: Synthetic oligonucleotide
ggagcaucuggaggaguga

SEQ ID NO: 1029055 - RNA, 19 nt, Artificial Sequence
  Description of Artificial Sequence: Synthetic oligonucleotide
cuggcacgauggcggcagc

SEQ ID NO: 1029056 - RNA, 19 nt, Artificial Sequence
  Description of Artificial Sequence: Synthetic oligonucleotide
ugcgaccgacugucccuuc

SEQ ID NO: 1029057 - RNA, 19 nt, Artificial Sequence
  Description of Artificial Sequence: Synthetic oligonucleotide
cuccugucagaugcaacua

SEQ ID NO: 1029058 - RNA, 19 nt, Artificial Sequence
  Description of Artificial Sequence: Synthetic oligonucleotide
ccgggacuucaacccauag

SEQ ID NO: 1029059 - RNA, 19 nt, Artificial Sequence
  Description of Artificial Sequence: Synthetic oligonucleotide
cagauacauggaagcugua

SEQ ID NO: 1029060 - RNA, 19 nt, Artificial Sequence
  Description of Artificial Sequence: Synthetic oligonucleotide
ccagcgcggucugcgaccg

SEQ ID NO: 1029061 - RNA, 19 nt, Artificial Sequence
  Description of Artificial Sequence: Synthetic oligonucleotide
ccccaaccccuacaucccc

SEQ ID NO: 1029062 - RNA, 19 nt, Artificial Sequence
  Description of Artificial Sequence: Synthetic oligonucleotide
ccaagacccguggggcugg

SEQ ID NO: 1029063 - RNA, 19 nt, Artificial Sequence
  Description of Artificial Sequence: Synthetic oligonucleotide
ccgaaguugugcagggcaa

SEQ ID NO: 1029064 - RNA, 19 nt, Artificial Sequence
  Description of Artificial Sequence: Synthetic oligonucleotide
ggcaaccuguggaguauga

SEQ ID NO: 1029065 - RNA, 19 nt, Artificial Sequence
  Description of Artificial Sequence: Synthetic oligonucleotide
cagcuaucugguguaggcu

SEQ ID NO: 1029066 - RNA, 19 nt, Artificial Sequence
  Description of Artificial Sequence: Synthetic oligonucleotide
uucccacguaaggcaugau

SEQ ID NO: 1029067 - RNA, 19 nt, Artificial Sequence
  Description of Artificial Sequence: Synthetic oligonucleotide
cgggacuucaacccauaga

SEQ ID NO: 1029068 - RNA, 19 nt, Artificial Sequence
  Description of Artificial Sequence: Synthetic oligonucleotide
gcgcauaggguguguggaa

SEQ ID NO: 1029069 - RNA, 19 nt, Artificial Sequence
  Description of Artificial Sequence: Synthetic oligonucleotide
gugcaaacccaagcaucgu

SEQ ID NO: 1029070 - RNA, 19 nt, Artificial Sequence
  Description of Artificial Sequence: Synthetic oligonucleotide
cgccuaguuggguucuguc

SEQ ID NO: 1029071 - RNA, 19 nt, Artificial Sequence
  Description of Artificial Sequence: Synthetic oligonucleotide
cugggcggugaggcagcug

SEQ ID NO: 1029072 - RNA, 19 nt, Artificial Sequence
  Description of Artificial Sequence: Synthetic oligonucleotide
cagaagcgcacugcaccua

SEQ ID NO: 1029073 - RNA, 19 nt, Artificial Sequence
  Description of Artificial Sequence: Synthetic oligonucleotide
guccugcgccgugauacua

SEQ ID NO: 1029074 - RNA, 19 nt, Artificial Sequence
  Description of Artificial Sequence: Synthetic oligonucleotide
cgcggucugcgaccgacug

SEQ ID NO: 1029075 - RNA, 19 nt, Artificial Sequence
  Description of Artificial Sequence: Synthetic oligonucleotide
cuaucugguguaggcugau

SEQ ID NO: 1029076 - RNA, 19 nt, Artificial Sequence
  Description of Artificial Sequence: Synthetic oligonucleotide
gguccugcgccgugauacu

SEQ ID NO: 1029077 - RNA, 19 nt, Artificial Sequence
  Description of Artificial Sequence: Synthetic oligonucleotide
gcagggcaagccugaacau

SEQ ID NO: 1029078 - RNA, 19 nt, Artificial Sequence
  Description of Artificial Sequence: Synthetic oligonucleotide
gcuggccuacaaccaugcu

SEQ ID NO: 1029079 - RNA, 19 nt, Artificial Sequence
  Description of Artificial Sequence: Synthetic oligonucleotide
gcggucugcgaccgacugu

SEQ ID NO: 1029080 - RNA, 19 nt, Artificial Sequence
  Description of Artificial Sequence: Synthetic oligonucleotide
ggcuggcacgauggcggca

SEQ ID NO: 1029081 - RNA, 19 nt, Artificial Sequence
  Description of Artificial Sequence: Synthetic oligonucleotide
ggggagaacuagacuccuu

SEQ ID NO: 1029082 - RNA, 19 nt, Artificial Sequence
  Description of Artificial Sequence: Synthetic oligonucleotide
ggccuacaaccaugcugau

SEQ ID NO: 1029083 - RNA, 19 nt, Artificial Sequence
  Description of Artificial Sequence: Synthetic oligonucleotide
gcgccuaguuggguucugu

SEQ ID NO: 1029084 - RNA, 19 nt, Artificial Sequence
  Description of Artificial Sequence: Synthetic oligonucleotide
gcucgggaaugugggcacu

SEQ ID NO: 1029085 - RNA, 19 nt, Artificial Sequence
  Description of Artificial Sequence: Synthetic oligonucleotide
cagcgcggucugcgaccga

SEQ ID NO: 1029086 - RNA, 19 nt, Artificial Sequence
  Description of Artificial Sequence: Synthetic oligonucleotide
ccccaauacacagcaucuu

SEQ ID NO: 1029087 - RNA, 19 nt, Artificial Sequence
  Description of Artificial Sequence: Synthetic oligonucleotide
ccgugauacuaugcuggau

SEQ ID NO: 1029088 - RNA, 19 nt, Artificial Sequence
  Description of Artificial Sequence: Synthetic oligonucleotide
gcgcggucugcgaccgacu

SEQ ID NO: 1029089 - RNA, 19 nt, Artificial Sequence
  Description of Artificial Sequence: Synthetic oligonucleotide
caccucggcccugcucauu

SEQ ID NO: 1029090 - RNA, 19 nt, Artificial Sequence
  Description of Artificial Sequence: Synthetic oligonucleotide
cccguggggcuggcacgau

SEQ ID NO: 1029091 - RNA, 19 nt, Artificial Sequence
  Description of Artificial Sequence: Synthetic oligonucleotide
aaauacauuaucuuagggg

SEQ ID NO: 1029092 - RNA, 19 nt, Artificial Sequence
  Description of Artificial Sequence: Synthetic oligonucleotide
aauacauuaucuuagggga

SEQ ID NO: 1029093 - RNA, 19 nt, Artificial Sequence
  Description of Artificial Sequence: Synthetic oligonucleotide
agguucauuauuuacaaac

SEQ ID NO: 1029094 - RNA, 19 nt, Artificial Sequence
  Description of Artificial Sequence: Synthetic oligonucleotide
aaaacugcugaacagguca

SEQ ID NO: 1029095 - RNA, 19 nt, Artificial Sequence
  Description of Artificial Sequence: Synthetic oligonucleotide
aucaucauagaacaguagg

SEQ ID NO: 1029096 - RNA, 19 nt, Artificial Sequence
  Description of Artificial Sequence: Synthetic oligonucleotide
gaugggguaacccucagcg

SEQ ID NO: 1029097 - RNA, 19 nt, Artificial Sequence
  Description of Artificial Sequence: Synthetic oligonucleotide
aauaagggagaggugaugg

SEQ ID NO: 1029098 - RNA, 19 nt, Artificial Sequence
  Description of Artificial Sequence: Synthetic oligonucleotide
auaaauggagcacaguuug

SEQ ID NO: 1029099 - RNA, 19 nt, Artificial Sequence
  Description of Artificial Sequence: Synthetic oligonucleotide
aauaggaucuuccuucaca

SEQ ID NO: 1029100 - RNA, 19 nt, Artificial Sequence
  Description of Artificial Sequence: Synthetic oligonucleotide
ugauguauaugucuccacc

SEQ ID NO: 1029101 - RNA, 19 nt, Artificial Sequence
  Description of Artificial Sequence: Synthetic oligonucleotide
aggaucuuccuucacaguc

SEQ ID NO: 1029102 - RNA, 19 nt, Artificial Sequence
  Description of Artificial Sequence: Synthetic oligonucleotide
aucucuguacaguaggagg

SEQ ID NO: 1029103 - RNA, 19 nt, Artificial Sequence
  Description of Artificial Sequence: Synthetic oligonucleotide
uguucuuaauuuuccugcg

SEQ ID NO: 1029104 - RNA, 19 nt, Artificial Sequence
  Description of Artificial Sequence: Synthetic oligonucleotide
aacaguaggcuucgggagg

SEQ ID NO: 1029105 - RNA, 19 nt, Artificial Sequence
  Description of Artificial Sequence: Synthetic oligonucleotide
ugcaauaggaucuuccuuc

SEQ ID NO: 1029106 - RNA, 19 nt, Artificial Sequence
  Description of Artificial Sequence: Synthetic oligonucleotide
uccacguuccacaucuugg

SEQ ID NO: 1029107 - RNA, 19 nt, Artificial Sequence
  Description of Artificial Sequence: Synthetic oligonucleotide
ugucguuagcaucuucugg

SEQ ID NO: 1029108 - RNA, 19 nt, Artificial Sequence
  Description of Artificial Sequence: Synthetic oligonucleotide
ucauagaacaguaggcuuc

SEQ ID NO: 1029109 - RNA, 19 nt, Artificial Sequence
  Description of Artificial Sequence: Synthetic oligonucleotide
ucugucaagagcaguggcc

SEQ ID NO: 1029110 - RNA, 19 nt, Artificial Sequence
  Description of Artificial Sequence: Synthetic oligonucleotide
agaacaguaggcuucggga

SEQ ID NO: 1029111 - RNA, 19 nt, Artificial Sequence
  Description of Artificial Sequence: Synthetic oligonucleotide
agagaaugccucuucuggg

SEQ ID NO: 1029112 - RNA, 19 nt, Artificial Sequence
  Description of Artificial Sequence: Synthetic oligonucleotide
guccauauagucaugucgg

SEQ ID NO: 1029113 - RNA, 19 nt, Artificial Sequence
  Description of Artificial Sequence: Synthetic oligonucleotide
gucguuagcaucuucuggc

SEQ ID NO: 1029114 - RNA, 19 nt, Artificial Sequence
  Description of Artificial Sequence: Synthetic oligonucleotide
uuuuguaugcugaaucuuu

SEQ ID NO: 1029115 - RNA, 19 nt, Artificial Sequence
  Description of Artificial Sequence: Synthetic oligonucleotide
aacgcaggaaggcagggca

SEQ ID NO: 1029116 - RNA, 19 nt, Artificial Sequence
  Description of Artificial Sequence: Synthetic oligonucleotide
aaauggagcacaguuugug

SEQ ID NO: 1029117 - RNA, 19 nt, Artificial Sequence
  Description of Artificial Sequence: Synthetic oligonucleotide
gaacaguaggcuucgggag

SEQ ID NO: 1029118 - RNA, 19 nt, Artificial Sequence
  Description of Artificial Sequence: Synthetic oligonucleotide
caaaauaagggagagguga

SEQ ID NO: 1029119 - RNA, 19 nt, Artificial Sequence
  Description of Artificial Sequence: Synthetic oligonucleotide
gucucacucaaguacuugg

SEQ ID NO: 1029120 - RNA, 19 nt, Artificial Sequence
  Description of Artificial Sequence: Synthetic oligonucleotide
uuauuggagaggacggaug

SEQ ID NO: 1029121 - RNA, 19 nt, Artificial Sequence
  Description of Artificial Sequence: Synthetic oligonucleotide
ucucugauguauaugucuc

SEQ ID NO: 1029122 - RNA, 19 nt, Artificial Sequence
  Description of Artificial Sequence: Synthetic oligonucleotide
cuuaauuuuccugcguacc

SEQ ID NO: 1029123 - RNA, 19 nt, Artificial Sequence
  Description of Artificial Sequence: Synthetic oligonucleotide
cugcguacccucuucaagg

SEQ ID NO: 1029124 - RNA, 19 nt, Artificial Sequence
  Description of Artificial Sequence: Synthetic oligonucleotide
gcaagugccagucugagug

SEQ ID NO: 1029125 - RNA, 19 nt, Artificial Sequence
  Description of Artificial Sequence: Synthetic oligonucleotide
ucuuaauuuuccugcguac

SEQ ID NO: 1029126 - RNA, 19 nt, Artificial Sequence
  Description of Artificial Sequence: Synthetic oligonucleotide
uguagacgcugucagcugc

SEQ ID NO: 1029127 - RNA, 19 nt, Artificial Sequence
  Description of Artificial Sequence: Synthetic oligonucleotide
uguauaugucuccaccuuc

SEQ ID NO: 1029128 - RNA, 19 nt, Artificial Sequence
  Description of Artificial Sequence: Synthetic oligonucleotide
uucuuaauuuuccugcgua

SEQ ID NO: 1029129 - RNA, 19 nt, Artificial Sequence
  Description of Artificial Sequence: Synthetic oligonucleotide
ugacuggcuguguagacgc

SEQ ID NO: 1029130 - RNA, 19 nt, Artificial Sequence
  Description of Artificial Sequence: Synthetic oligonucleotide
cauagcggcagccagcagc

SEQ ID NO: 1029131 - RNA, 19 nt, Artificial Sequence
  Description of Artificial Sequence: Synthetic oligonucleotide
ggagauguggaaauggccg

SEQ ID NO: 1029132 - RNA, 19 nt, Artificial Sequence
  Description of Artificial Sequence: Synthetic oligonucleotide
agugguuuauuggagagga

SEQ ID NO: 1029133 - RNA, 19 nt, Artificial Sequence
  Description of Artificial Sequence: Synthetic oligonucleotide
gaacaagagugguuggccc

SEQ ID NO: 1029134 - RNA, 19 nt, Artificial Sequence
  Description of Artificial Sequence: Synthetic oligonucleotide
ucggugagcaagagaaugc

SEQ ID NO: 1029135 - RNA, 19 nt, Artificial Sequence
  Description of Artificial Sequence: Synthetic oligonucleotide
uguaguuuaugaggggcag

SEQ ID NO: 1029136 - RNA, 19 nt, Artificial Sequence
  Description of Artificial Sequence: Synthetic oligonucleotide
agaacgaagcacaaggcug

SEQ ID NO: 1029137 - RNA, 19 nt, Artificial Sequence
  Description of Artificial Sequence: Synthetic oligonucleotide
uaguuuaugaggggcagug

SEQ ID NO: 1029138 - RNA, 19 nt, Artificial Sequence
  Description of Artificial Sequence: Synthetic oligonucleotide
uggggugucccucuguccc

SEQ ID NO: 1029139 - RNA, 19 nt, Artificial Sequence
  Description of Artificial Sequence: Synthetic oligonucleotide
uguguccugggucucggag

SEQ ID NO: 1029140 - RNA, 19 nt, Artificial Sequence
  Description of Artificial Sequence: Synthetic oligonucleotide
ucugauguauaugucucca

SEQ ID NO: 1029141 - RNA, 19 nt, Artificial Sequence
  Description of Artificial Sequence: Synthetic oligonucleotide
uggagcacaguuugugucc

SEQ ID NO: 1029142 - RNA, 19 nt, Artificial Sequence
  Description of Artificial Sequence: Synthetic oligonucleotide
ucaccauaaauggagcaca

SEQ ID NO: 1029143 - RNA, 19 nt, Artificial Sequence
  Description of Artificial Sequence: Synthetic oligonucleotide
aagagugguuggcccaggg

SEQ ID NO: 1029144 - RNA, 19 nt, Artificial Sequence
  Description of Artificial Sequence: Synthetic oligonucleotide
ugugcauauguucgugugu

SEQ ID NO: 1029145 - RNA, 19 nt, Artificial Sequence
  Description of Artificial Sequence: Synthetic oligonucleotide
ugaucucuguacaguagga

SEQ ID NO: 1029146 - RNA, 19 nt, Artificial Sequence
  Description of Artificial Sequence: Synthetic oligonucleotide
aggacucugagggaugggc

SEQ ID NO: 1029147 - RNA, 19 nt, Artificial Sequence
  Description of Artificial Sequence: Synthetic oligonucleotide
aagugccagucugaguggc

SEQ ID NO: 1029148 - RNA, 19 nt, Artificial Sequence
  Description of Artificial Sequence: Synthetic oligonucleotide
ugauuccauguccaguaga

SEQ ID NO: 1029149 - RNA, 19 nt, Artificial Sequence
  Description of Artificial Sequence: Synthetic oligonucleotide
uucaccauaaauggagcac

SEQ ID NO: 1029150 - RNA, 19 nt, Artificial Sequence
  Description of Artificial Sequence: Synthetic oligonucleotide
ugaggagcggagaugugga

SEQ ID NO: 1029151 - RNA, 19 nt, Artificial Sequence
  Description of Artificial Sequence: Synthetic oligonucleotide
cauagaacaguaggcuucg

SEQ ID NO: 1029152 - RNA, 19 nt, Artificial Sequence
  Description of Artificial Sequence: Synthetic oligonucleotide
gaacgaagcacaaggcugc

SEQ ID NO: 1029153 - RNA, 19 nt, Artificial Sequence
  Description of Artificial Sequence: Synthetic oligonucleotide
aaauaagggagaggugaug

SEQ ID NO: 1029154 - RNA, 19 nt, Artificial Sequence
  Description of Artificial Sequence: Synthetic oligonucleotide
ugaguggccgccaucuugu

SEQ ID NO: 1029155 - RNA, 19 nt, Artificial Sequence
  Description of Artificial Sequence: Synthetic oligonucleotide
agcugcaauaggaucuucc

SEQ ID NO: 1029156 - RNA, 19 nt, Artificial Sequence
  Description of Artificial Sequence: Synthetic oligonucleotide
gguuuauuggagaggacgg

SEQ ID NO: 1029157 - RNA, 19 nt, Artificial Sequence
  Description of Artificial Sequence: Synthetic oligonucleotide
auggaagggagauuuguaa

SEQ ID NO: 1029158 - RNA, 19 nt, Artificial Sequence
  Description of Artificial Sequence: Synthetic oligonucleotide
uugauuccauguccaguag

SEQ ID NO: 1029159 - RNA, 19 nt, Artificial Sequence
  Description of Artificial Sequence: Synthetic oligonucleotide
gacucugagggaugggcag

SEQ ID NO: 1029160 - RNA, 19 nt, Artificial Sequence
  Description of Artificial Sequence: Synthetic oligonucleotide
ucauuguucucugauguau

SEQ ID NO: 1029161 - RNA, 19 nt, Artificial Sequence
  Description of Artificial Sequence: Synthetic oligonucleotide
uggaagggagauuuguaaa

SEQ ID NO: 1029162 - RNA, 19 nt, Artificial Sequence
  Description of Artificial Sequence: Synthetic oligonucleotide
auacaaaauaagggagagg

SEQ ID NO: 1029163 - RNA, 19 nt, Artificial Sequence
  Description of Artificial Sequence: Synthetic oligonucleotide
agcaguuuggcaauuaaaa

SEQ ID NO: 1029164 - RNA, 19 nt, Artificial Sequence
  Description of Artificial Sequence: Synthetic oligonucleotide
gugggaacaagagugguug

SEQ ID NO: 1029165 - RNA, 19 nt, Artificial Sequence
  Description of Artificial Sequence: Synthetic oligonucleotide
acaaacccgucccaucauc

SEQ ID NO: 1029166 - RNA, 19 nt, Artificial Sequence
  Description of Artificial Sequence: Synthetic oligonucleotide
ucagcgaucaagguucgcu

SEQ ID NO: 1029167 - RNA, 19 nt, Artificial Sequence
  Description of Artificial Sequence: Synthetic oligonucleotide
auuaucuuaggggauuggu

SEQ ID NO: 1029168 - RNA, 19 nt, Artificial Sequence
  Description of Artificial Sequence: Synthetic oligonucleotide
uugucguuagcaucuucug

SEQ ID NO: 1029169 - RNA, 19 nt, Artificial Sequence
  Description of Artificial Sequence: Synthetic oligonucleotide
agcgaucaagguucgcuuc

SEQ ID NO: 1029170 - RNA, 19 nt, Artificial Sequence
  Description of Artificial Sequence: Synthetic oligonucleotide
uuuauuggagaggacggau

SEQ ID NO: 1029171 - RNA, 19 nt, Artificial Sequence
  Description of Artificial Sequence: Synthetic oligonucleotide
acguuccacaucuugggug

SEQ ID NO: 1029172 - RNA, 19 nt, Artificial Sequence
  Description of Artificial Sequence: Synthetic oligonucleotide
aaaauaagggagaggugau

SEQ ID NO: 1029173 - RNA, 19 nt, Artificial Sequence
  Description of Artificial Sequence: Synthetic oligonucleotide
uaaauggagcacaguuugu

SEQ ID NO: 1029174 - RNA, 19 nt, Artificial Sequence
  Description of Artificial Sequence: Synthetic oligonucleotide
auuguucucugauguauau

SEQ ID NO: 1029175 - RNA, 19 nt, Artificial Sequence
  Description of Artificial Sequence: Synthetic oligonucleotide
aacgaagcacaaggcugcc

SEQ ID NO: 1029176 - RNA, 19 nt, Artificial Sequence
  Description of Artificial Sequence: Synthetic oligonucleotide
cuugauuccauguccagua

SEQ ID NO: 1029177 - RNA, 19 nt, Artificial Sequence
  Description of Artificial Sequence: Synthetic oligonucleotide
ucuaggguuuccaccuucu

SEQ ID NO: 1029178 - RNA, 19 nt, Artificial Sequence
  Description of Artificial Sequence: Synthetic oligonucleotide
agagugguuggcccagggg

SEQ ID NO: 1029179 - RNA, 19 nt, Artificial Sequence
  Description of Artificial Sequence: Synthetic oligonucleotide
agcggagauguggaaaugg

SEQ ID NO: 1029180 - RNA, 19 nt, Artificial Sequence
  Description of Artificial Sequence: Synthetic oligonucleotide
uuggcauucucuaggguuu

SEQ ID NO: 1029181 - RNA, 19 nt, Artificial Sequence
  Description of Artificial Sequence: Synthetic oligonucleotide
ucguuagcaucuucuggcc

SEQ ID NO: 1029182 - RNA, 19 nt, Artificial Sequence
  Description of Artificial Sequence: Synthetic oligonucleotide
ugugugugugugcccagug

SEQ ID NO: 1029183 - RNA, 19 nt, Artificial Sequence
  Description of Artificial Sequence: Synthetic oligonucleotide
uguccccuguaguuuauga

SEQ ID NO: 1029184 - RNA, 19 nt, Artificial Sequence
  Description of Artificial Sequence: Synthetic oligonucleotide
ugucagcugcaauaggauc

SEQ ID NO: 1029185 - RNA, 19 nt, Artificial Sequence
  Description of Artificial Sequence: Synthetic oligonucleotide
uccauauagucaugucgga

SEQ ID NO: 1029186 - RNA, 19 nt, Artificial Sequence
  Description of Artificial Sequence: Synthetic oligonucleotide
aagcacaaggcugccacca

SEQ ID NO: 1029187 - RNA, 19 nt, Artificial Sequence
  Description of Artificial Sequence: Synthetic oligonucleotide
gucggugagcaagagaaug

SEQ ID NO: 1029188 - RNA, 19 nt, Artificial Sequence
  Description of Artificial Sequence: Synthetic oligonucleotide
ucugggucggugagcaaga

SEQ ID NO: 1029189 - RNA, 19 nt, Artificial Sequence
  Description of Artificial Sequence: Synthetic oligonucleotide
ugcguacccucuucaaggc

SEQ ID NO: 1029190 - RNA, 19 nt, Artificial Sequence
  Description of Artificial Sequence: Synthetic oligonucleotide
acaguaggcuucgggaggg

SEQ ID NO: 1029191 - RNA, 19 nt, Artificial Sequence
  Description of Artificial Sequence: Synthetic oligonucleotide
ucgugugugugugugugcc

SEQ ID NO: 1029192 - RNA, 19 nt, Artificial Sequence
  Description of Artificial Sequence: Synthetic oligonucleotide
aggggauugguaauaauaa

SEQ ID NO: 1029193 - RNA, 19 nt, Artificial Sequence
  Description of Artificial Sequence: Synthetic oligonucleotide
caccauaaauggagcacag

SEQ ID NO: 1029194 - RNA, 19 nt, Artificial Sequence
  Description of Artificial Sequence: Synthetic oligonucleotide
ugugugcccagugaguggu

SEQ ID NO: 1029195 - RNA, 19 nt, Artificial Sequence
  Description of Artificial Sequence: Synthetic oligonucleotide
ggacggauggaagaagugg

SEQ ID NO: 1029196 - RNA, 19 nt, Artificial Sequence
  Description of Artificial Sequence: Synthetic oligonucleotide
cauggggaagccaggugag

SEQ ID NO: 1029197 - RNA, 19 nt, Artificial Sequence
  Description of Artificial Sequence: Synthetic oligonucleotide
uacauuaucuuaggggauu

SEQ ID NO: 1029198 - RNA, 19 nt, Artificial Sequence
  Description of Artificial Sequence: Synthetic oligonucleotide
gaguuugauggugguauug

SEQ ID NO: 1029199 - RNA, 19 nt, Artificial Sequence
  Description of Artificial Sequence: Synthetic oligonucleotide
cagugagugguuuauugga

SEQ ID NO: 1029200 - RNA, 19 nt, Artificial Sequence
  Description of Artificial Sequence: Synthetic oligonucleotide
auuccauguccaguagagg

SEQ ID NO: 1029201 - RNA, 19 nt, Artificial Sequence
  Description of Artificial Sequence: Synthetic oligonucleotide
ucaaguacuugguggucuc

SEQ ID NO: 1029202 - RNA, 19 nt, Artificial Sequence
  Description of Artificial Sequence: Synthetic oligonucleotide
ugccauugucguuagcauc

SEQ ID NO: 1029203 - RNA, 19 nt, Artificial Sequence
  Description of Artificial Sequence: Synthetic oligonucleotide
guccccuguaguuuaugag

SEQ ID NO: 1029204 - RNA, 19 nt, Artificial Sequence
  Description of Artificial Sequence: Synthetic oligonucleotide
auguauaugucuccaccuu

SEQ ID NO: 1029205 - RNA, 19 nt, Artificial Sequence
  Description of Artificial Sequence: Synthetic oligonucleotide
ugucauggaaccacuccuu

SEQ ID NO: 1029206 - RNA, 19 nt, Artificial Sequence
  Description of Artificial Sequence: Synthetic oligonucleotide
cugauguauaugucuccac

SEQ ID NO: 1029207 - RNA, 19 nt, Artificial Sequence
  Description of Artificial Sequence: Synthetic oligonucleotide
caucuugauuccaugucca

SEQ ID NO: 1029208 - RNA, 19 nt, Artificial Sequence
  Description of Artificial Sequence: Synthetic oligonucleotide
caagugccagucugagugg

SEQ ID NO: 1029209 - RNA, 19 nt, Artificial Sequence
  Description of Artificial Sequence: Synthetic oligonucleotide
cagccagagggucaacagg

SEQ ID NO: 1029210 - RNA, 19 nt, Artificial Sequence
  Description of Artificial Sequence: Synthetic oligonucleotide
ggggccuuggcucuacugg

SEQ ID NO: 1029211 - RNA, 19 nt, Artificial Sequence
  Description of Artificial Sequence: Synthetic oligonucleotide
aguagagggcucuucucau

SEQ ID NO: 1029212 - RNA, 19 nt, Artificial Sequence
  Description of Artificial Sequence: Synthetic oligonucleotide
cuucaccauaaauggagca

SEQ ID NO: 1029213 - RNA, 19 nt, Artificial Sequence
  Description of Artificial Sequence: Synthetic oligonucleotide
acauuaucuuaggggauug

SEQ ID NO: 1029214 - RNA, 19 nt, Artificial Sequence
  Description of Artificial Sequence: Synthetic oligonucleotide
aaacccgucccaucaucau

SEQ ID NO: 1029215 - RNA, 19 nt, Artificial Sequence
  Description of Artificial Sequence: Synthetic oligonucleotide
uucgggagggcaucugacu

SEQ ID NO: 1029216 - RNA, 19 nt, Artificial Sequence
  Description of Artificial Sequence: Synthetic oligonucleotide
cauuaucuuaggggauugg

SEQ ID NO: 1029217 - RNA, 19 nt, Artificial Sequence
  Description of Artificial Sequence: Synthetic oligonucleotide
ugugucccagugcccacgc

SEQ ID NO: 1029218 - RNA, 19 nt, Artificial Sequence
  Description of Artificial Sequence: Synthetic oligonucleotide
agucaugucggaggugguc

SEQ ID NO: 1029219 - RNA, 19 nt, Artificial Sequence
  Description of Artificial Sequence: Synthetic oligonucleotide
gguucauuauuuacaaaca

SEQ ID NO: 1029220 - RNA, 19 nt, Artificial Sequence
  Description of Artificial Sequence: Synthetic oligonucleotide
acccgucccaucaucauag

SEQ ID NO: 1029221 - RNA, 19 nt, Artificial Sequence
  Description of Artificial Sequence: Synthetic oligonucleotide
ucaugggugcuguccauau

SEQ ID NO: 1029222 - RNA, 19 nt, Artificial Sequence
  Description of Artificial Sequence: Synthetic oligonucleotide
guucgugugugugugugug

SEQ ID NO: 1029223 - RNA, 19 nt, Artificial Sequence
  Description of Artificial Sequence: Synthetic oligonucleotide
ucuuaggggauugguaaua

SEQ ID NO: 1029224 - RNA, 19 nt, Artificial Sequence
  Description of Artificial Sequence: Synthetic oligonucleotide
cuguaguuuaugaggggca

SEQ ID NO: 1029225 - RNA, 19 nt, Artificial Sequence
  Description of Artificial Sequence: Synthetic oligonucleotide
cugaguggccgccaucuug

SEQ ID NO: 1029226 - RNA, 19 nt, Artificial Sequence
  Description of Artificial Sequence: Synthetic oligonucleotide
acaaacaauuucuguucuu

SEQ ID NO: 1029227 - RNA, 19 nt, Artificial Sequence
  Description of Artificial Sequence: Synthetic oligonucleotide
agcggcauggggaagccag

SEQ ID NO: 1029228 - RNA, 19 nt, Artificial Sequence
  Description of Artificial Sequence: Synthetic oligonucleotide
uauaugucuccaccuucuu

SEQ ID NO: 1029229 - RNA, 19 nt, Artificial Sequence
  Description of Artificial Sequence: Synthetic oligonucleotide
agaacgcaggaaggcaggg

SEQ ID NO: 1029230 - RNA, 19 nt, Artificial Sequence
  Description of Artificial Sequence: Synthetic oligonucleotide
aacccgucccaucaucaua

SEQ ID NO: 1029231 - RNA, 19 nt, Artificial Sequence
  Description of Artificial Sequence: Synthetic oligonucleotide
agaggccuaggagaguuug

SEQ ID NO: 1029232 - RNA, 19 nt, Artificial Sequence
  Description of Artificial Sequence: Synthetic oligonucleotide
uucgugugugugugugugc

SEQ ID NO: 1029233 - RNA, 19 nt, Artificial Sequence
  Description of Artificial Sequence: Synthetic oligonucleotide
aucuuaggggauugguaau

SEQ ID NO: 1029234 - RNA, 19 nt, Artificial Sequence
  Description of Artificial Sequence: Synthetic oligonucleotide
cuucuugcgacggcucucc

SEQ ID NO: 1029235 - RNA, 19 nt, Artificial Sequence
  Description of Artificial Sequence: Synthetic oligonucleotide
uguucgugugugugugugu

SEQ ID NO: 1029236 - RNA, 19 nt, Artificial Sequence
  Description of Artificial Sequence: Synthetic oligonucleotide
cuucgggagggcaucugac

SEQ ID NO: 1029237 - RNA, 19 nt, Artificial Sequence
  Description of Artificial Sequence: Synthetic oligonucleotide
ugugugugugugugcccag

SEQ ID NO: 1029238 - RNA, 19 nt, Artificial Sequence
  Description of Artificial Sequence: Synthetic oligonucleotide
agcacaguuugugucccag

SEQ ID NO: 1029239 - RNA, 19 nt, Artificial Sequence
  Description of Artificial Sequence: Synthetic oligonucleotide
auguucgugugugugugug

SEQ ID NO: 1029240 - RNA, 19 nt, Artificial Sequence
  Description of Artificial Sequence: Synthetic oligonucleotide
ggaagaagugggaacaaga

SEQ ID NO: 1029241 - RNA, 19 nt, Artificial Sequence
  Description of Artificial Sequence: Synthetic oligonucleotide
gagaaugccucuucugggu

SEQ ID NO: 1029242 - RNA, 19 nt, Artificial Sequence
  Description of Artificial Sequence: Synthetic oligonucleotide
guuggcauucucuaggguu

SEQ ID NO: 1029243 - RNA, 19 nt, Artificial Sequence
  Description of Artificial Sequence: Synthetic oligonucleotide
agcaggguccuguuggcau

SEQ ID NO: 1029244 - RNA, 19 nt, Artificial Sequence
  Description of Artificial Sequence: Synthetic oligonucleotide
uauguucgugugugugugu

SEQ ID NO: 1029245 - RNA, 19 nt, Artificial Sequence
  Description of Artificial Sequence: Synthetic oligonucleotide
gcccagaucccugucaugg

SEQ ID NO: 1029246 - RNA, 19 nt, Artificial Sequence
  Description of Artificial Sequence: Synthetic oligonucleotide
caaacccgucccaucauca

SEQ ID NO: 1029247 - RNA, 19 nt, Artificial Sequence
  Description of Artificial Sequence: Synthetic oligonucleotide
gugugugcccagugagugg

SEQ ID NO: 1029248 - RNA, 19 nt, Artificial Sequence
  Description of Artificial Sequence: Synthetic oligonucleotide
uuuuccugcguacccucuu

SEQ ID NO: 1029249 - RNA, 19 nt, Artificial Sequence
  Description of Artificial Sequence: Synthetic oligonucleotide
ccacguuccacaucuuggg

SEQ ID NO: 1029250 - RNA, 19 nt, Artificial Sequence
  Description of Artificial Sequence: Synthetic oligonucleotide
ucuaggcauuccacauacu

SEQ ID NO: 1029251 - RNA, 19 nt, Artificial Sequence
  Description of Artificial Sequence: Synthetic oligonucleotide
caaagcccgcgcuaacuuc

SEQ ID NO: 1029252 - RNA, 19 nt, Artificial Sequence
  Description of Artificial Sequence: Synthetic oligonucleotide
uggccgccaucuuguaagg

SEQ ID NO: 1029253 - RNA, 19 nt, Artificial Sequence
  Description of Artificial Sequence: Synthetic oligonucleotide
ugcgacggcucuccugggc

SEQ ID NO: 1029254 - RNA, 19 nt, Artificial Sequence
  Description of Artificial Sequence: Synthetic oligonucleotide
ggagaggacggauggaaga

SEQ ID NO: 1029255 - RNA, 19 nt, Artificial Sequence
  Description of Artificial Sequence: Synthetic oligonucleotide
ccagaacgaagcacaaggc

SEQ ID NO: 1029256 - RNA, 19 nt, Artificial Sequence
  Description of Artificial Sequence: Synthetic oligonucleotide
uguaaggucuggagaucuu

SEQ ID NO: 1029257 - RNA, 19 nt, Artificial Sequence
  Description of Artificial Sequence: Synthetic oligonucleotide
agugccagucugaguggcc

SEQ ID NO: 1029258 - RNA, 19 nt, Artificial Sequence
  Description of Artificial Sequence: Synthetic oligonucleotide
aucugacuggcuguguaga

SEQ ID NO: 1029259 - RNA, 19 nt, Artificial Sequence
  Description of Artificial Sequence: Synthetic oligonucleotide
acgcugucagcugcaauag

SEQ ID NO: 1029260 - RNA, 19 nt, Artificial Sequence
  Description of Artificial Sequence: Synthetic oligonucleotide
guuuauuggagaggacgga

SEQ ID NO: 1029261 - RNA, 19 nt, Artificial Sequence
  Description of Artificial Sequence: Synthetic oligonucleotide
auacauuaucuuaggggau

SEQ ID NO: 1029262 - RNA, 19 nt, Artificial Sequence
  Description of Artificial Sequence: Synthetic oligonucleotide
gaacgcaggaaggcagggc

SEQ ID NO: 1029263 - RNA, 19 nt, Artificial Sequence
  Description of Artificial Sequence: Synthetic oligonucleotide
guguagacgcugucagcug

SEQ ID NO: 1029264 - RNA, 19 nt, Artificial Sequence
  Description of Artificial Sequence: Synthetic oligonucleotide
uggggccuuggcucuacug

SEQ ID NO: 1029265 - RNA, 19 nt, Artificial Sequence
  Description of Artificial Sequence: Synthetic oligonucleotide
augggguaacccucagcga

SEQ ID NO: 1029266 - RNA, 19 nt, Artificial Sequence
  Description of Artificial Sequence: Synthetic oligonucleotide
agcaaagcccgcgcuaacu

SEQ ID NO: 1029267 - RNA, 19 nt, Artificial Sequence
  Description of Artificial Sequence: Synthetic oligonucleotide
agaguuugauggugguauu

SEQ ID NO: 1029268 - RNA, 19 nt, Artificial Sequence
  Description of Artificial Sequence: Synthetic oligonucleotide
cucuaggguuuccaccuuc

SEQ ID NO: 1029269 - RNA, 19 nt, Artificial Sequence
  Description of Artificial Sequence: Synthetic oligonucleotide
agcgaggacucugagggau

SEQ ID NO: 1029270 - RNA, 19 nt, Artificial Sequence
  Description of Artificial Sequence: Synthetic oligonucleotide
gcugaacaggucauuggag

SEQ ID NO: 1029271 - RNA, 19 nt, Artificial Sequence
  Description of Artificial Sequence: Synthetic oligonucleotide
aggcaagugccagucugag

SEQ ID NO: 1029272 - RNA, 19 nt, Artificial Sequence
  Description of Artificial Sequence: Synthetic oligonucleotide
uuugagcucccagccuucu

SEQ ID NO: 1029273 - RNA, 19 nt, Artificial Sequence
  Description of Artificial Sequence: Synthetic oligonucleotide
auagaacaguaggcuucgg

SEQ ID NO: 1029274 - RNA, 19 nt, Artificial Sequence
  Description of Artificial Sequence: Synthetic oligonucleotide
guauaugucuccaccuucu

SEQ ID NO: 1029275 - RNA, 19 nt, Artificial Sequence
  Description of Artificial Sequence: Synthetic oligonucleotide
uggggcuggugccauuguc

SEQ ID NO: 1029276 - RNA, 19 nt, Artificial Sequence
  Description of Artificial Sequence: Synthetic oligonucleotide
ugcccacgcuccacguucc

SEQ ID NO: 1029277 - RNA, 19 nt, Artificial Sequence
  Description of Artificial Sequence: Synthetic oligonucleotide
guucuuaauuuuccugcgu

SEQ ID NO: 1029278 - RNA, 19 nt, Artificial Sequence
  Description of Artificial Sequence: Synthetic oligonucleotide
uagucaugucggagguggu

SEQ ID NO: 1029279 - RNA, 19 nt, Artificial Sequence
  Description of Artificial Sequence: Synthetic oligonucleotide
ugccagucugaguggccgc

SEQ ID NO: 1029280 - RNA, 19 nt, Artificial Sequence
  Description of Artificial Sequence: Synthetic oligonucleotide
gcaauaggaucuuccuuca

SEQ ID NO: 1029281 - RNA, 19 nt, Artificial Sequence
  Description of Artificial Sequence: Synthetic oligonucleotide
gggaacaagagugguuggc

SEQ ID NO: 1029282 - RNA, 19 nt, Artificial Sequence
  Description of Artificial Sequence: Synthetic oligonucleotide
guagcaaagcccgcgcuaa

SEQ ID NO: 1029283 - RNA, 19 nt, Artificial Sequence
  Description of Artificial Sequence: Synthetic oligonucleotide
uagcaaagcccgcgcuaac

SEQ ID NO: 1029284 - RNA, 19 nt, Artificial Sequence
  Description of Artificial Sequence: Synthetic oligonucleotide
aauggccguggaggagcgg

SEQ ID NO: 1029285 - RNA, 19 nt, Artificial Sequence
  Description of Artificial Sequence: Synthetic oligonucleotide
gugguagggguggccauag

SEQ ID NO: 1029286 - RNA, 19 nt, Artificial Sequence
  Description of Artificial Sequence: Synthetic oligonucleotide
aggacggauggaagaagug

SEQ ID NO: 1029287 - RNA, 19 nt, Artificial Sequence
  Description of Artificial Sequence: Synthetic oligonucleotide
gugugugugugugugccca

SEQ ID NO: 1029288 - RNA, 19 nt, Artificial Sequence
  Description of Artificial Sequence: Synthetic oligonucleotide
aguaggcuucgggagggca

SEQ ID NO: 1029289 - RNA, 19 nt, Artificial Sequence
  Description of Artificial Sequence: Synthetic oligonucleotide
guggggugucccucugucc

SEQ ID NO: 1029290 - RNA, 19 nt, Artificial Sequence
  Description of Artificial Sequence: Synthetic oligonucleotide
gaggcaagugccagucuga

SEQ ID NO: 1029291 - RNA, 19 nt, Artificial Sequence
  Description of Artificial Sequence: Synthetic oligonucleotide
gcugccaccaugaggcaag

SEQ ID NO: 1029292 - RNA, 19 nt, Artificial Sequence
  Description of Artificial Sequence: Synthetic oligonucleotide
guccuguuggcauucucua

SEQ ID NO: 1029293 - RNA, 19 nt, Artificial Sequence
  Description of Artificial Sequence: Synthetic oligonucleotide
caugggccggacagggcug

SEQ ID NO: 1029294 - RNA, 19 nt, Artificial Sequence
  Description of Artificial Sequence: Synthetic oligonucleotide
cuuaggggauugguaauaa

SEQ ID NO: 1029295 - RNA, 19 nt, Artificial Sequence
  Description of Artificial Sequence: Synthetic oligonucleotide
ggggcugacacccagcagu

SEQ ID NO: 1029296 - RNA, 19 nt, Artificial Sequence
  Description of Artificial Sequence: Synthetic oligonucleotide
gaggacggauggaagaagu

SEQ ID NO: 1029297 - RNA, 19 nt, Artificial Sequence
  Description of Artificial Sequence: Synthetic oligonucleotide
ccugcguacccucuucaag

SEQ ID NO: 1029298 - RNA, 19 nt, Artificial Sequence
  Description of Artificial Sequence: Synthetic oligonucleotide
caccagaacgaagcacaag

SEQ ID NO: 1029299 - RNA, 19 nt, Artificial Sequence
  Description of Artificial Sequence: Synthetic oligonucleotide
gccgccaucuuguaagguc

SEQ ID NO: 1029300 - RNA, 19 nt, Artificial Sequence
  Description of Artificial Sequence: Synthetic oligonucleotide
agugggaacaagagugguu

SEQ ID NO: 1029301 - RNA, 19 nt, Artificial Sequence
  Description of Artificial Sequence: Synthetic oligonucleotide
caguagggcgccucggcca

SEQ ID NO: 1029302 - RNA, 19 nt, Artificial Sequence
  Description of Artificial Sequence: Synthetic oligonucleotide
gcgcuaacuucauaaaaua

SEQ ID NO: 1029303 - RNA, 19 nt, Artificial Sequence
  Description of Artificial Sequence: Synthetic oligonucleotide
ucccucugucccagccaag

SEQ ID NO: 1029304 - RNA, 19 nt, Artificial Sequence
  Description of Artificial Sequence: Synthetic oligonucleotide
ggaugggguaacccucagc

SEQ ID NO: 1029305 - RNA, 19 nt, Artificial Sequence
  Description of Artificial Sequence: Synthetic oligonucleotide
ggaaauggccguggaggag

SEQ ID NO: 1029306 - RNA, 19 nt, Artificial Sequence
  Description of Artificial Sequence: Synthetic oligonucleotide
gcaguagggcgccucggcc

SEQ ID NO: 1029307 - RNA, 19 nt, Artificial Sequence
  Description of Artificial Sequence: Synthetic oligonucleotide
gcugcaauaggaucuuccu

SEQ ID NO: 1029308 - RNA, 19 nt, Artificial Sequence
  Description of Artificial Sequence: Synthetic oligonucleotide
ugggucucggagaggccua

SEQ ID NO: 1029309 - RNA, 19 nt, Artificial Sequence
  Description of Artificial Sequence: Synthetic oligonucleotide
gccucggccaucuucccac

SEQ ID NO: 1029310 - RNA, 19 nt, Artificial Sequence
  Description of Artificial Sequence: Synthetic oligonucleotide
cccuguaguuuaugagggg

SEQ ID NO: 1029311 - RNA, 19 nt, Artificial Sequence
  Description of Artificial Sequence: Synthetic oligonucleotide
gaucccugucauggaacca

SEQ ID NO: 1029312 - RNA, 19 nt, Artificial Sequence
  Description of Artificial Sequence: Synthetic oligonucleotide
uggcauucucuaggguuuc

SEQ ID NO: 1029313 - RNA, 19 nt, Artificial Sequence
  Description of Artificial Sequence: Synthetic oligonucleotide
guaggagcuggaucugggu

SEQ ID NO: 1029314 - RNA, 19 nt, Artificial Sequence
  Description of Artificial Sequence: Synthetic oligonucleotide
gguagcaaagcccgcgcua

SEQ ID NO: 1029315 - RNA, 19 nt, Artificial Sequence
  Description of Artificial Sequence: Synthetic oligonucleotide
gccccgauguccccuguag

SEQ ID NO: 1029316 - RNA, 19 nt, Artificial Sequence
  Description of Artificial Sequence: Synthetic oligonucleotide
gaggagcggagauguggaa

SEQ ID NO: 1029317 - RNA, 19 nt, Artificial Sequence
  Description of Artificial Sequence: Synthetic oligonucleotide
guagacgcugucagcugca

SEQ ID NO: 1029318 - RNA, 19 nt, Artificial Sequence
  Description of Artificial Sequence: Synthetic oligonucleotide
gaggccuaggagaguuuga

SEQ ID NO: 1029319 - RNA, 19 nt, Artificial Sequence
  Description of Artificial Sequence: Synthetic oligonucleotide
cagugaggagcggagaugu

SEQ ID NO: 1029320 - RNA, 19 nt, Artificial Sequence
  Description of Artificial Sequence: Synthetic oligonucleotide
gcccgcgcuaacuucauaa

SEQ ID NO: 1029321 - RNA, 19 nt, Artificial Sequence
  Description of Artificial Sequence: Synthetic oligonucleotide
gcugacacccagcaguggu

SEQ ID NO: 1029322 - RNA, 19 nt, Artificial Sequence
  Description of Artificial Sequence: Synthetic oligonucleotide
agugguagggguggccaua

SEQ ID NO: 1029323 - RNA, 19 nt, Artificial Sequence
  Description of Artificial Sequence: Synthetic oligonucleotide
ggucauuggagaaguccuc

SEQ ID NO: 1029324 - RNA, 19 nt, Artificial Sequence
  Description of Artificial Sequence: Synthetic oligonucleotide
gagcacaguuuguguccca

SEQ ID NO: 1029325 - RNA, 19 nt, Artificial Sequence
  Description of Artificial Sequence: Synthetic oligonucleotide
gguuugagcucccagccuu

SEQ ID NO: 1029326 - RNA, 19 nt, Artificial Sequence
  Description of Artificial Sequence: Synthetic oligonucleotide
caugucggaggugguccug

SEQ ID NO: 1029327 - RNA, 19 nt, Artificial Sequence
  Description of Artificial Sequence: Synthetic oligonucleotide
gugccauugucguuagcau

SEQ ID NO: 1029328 - RNA, 19 nt, Artificial Sequence
  Description of Artificial Sequence: Synthetic oligonucleotide
ucccagccaagggguagca

SEQ ID NO: 1029329 - RNA, 19 nt, Artificial Sequence
  Description of Artificial Sequence: Synthetic oligonucleotide
cuggcuguguagacgcugu

SEQ ID NO: 1029330 - RNA, 19 nt, Artificial Sequence
  Description of Artificial Sequence: Synthetic oligonucleotide
gcguacccucuucaaggcc

SEQ ID NO: 1029331 - RNA, 19 nt, Artificial Sequence
  Description of Artificial Sequence: Synthetic oligonucleotide
gcuucgggagggcaucuga

SEQ ID NO: 1029332 - RNA, 19 nt, Artificial Sequence
  Description of Artificial Sequence: Synthetic oligonucleotide
cucagcgaucaagguucgc

SEQ ID NO: 1029333 - RNA, 19 nt, Artificial Sequence
  Description of Artificial Sequence: Synthetic oligonucleotide
ggacucugagggaugggca

SEQ ID NO: 1029334 - RNA, 19 nt, Artificial Sequence
  Description of Artificial Sequence: Synthetic oligonucleotide
guaguuuaugaggggcagu

SEQ ID NO: 1029335 - RNA, 19 nt, Artificial Sequence
  Description of Artificial Sequence: Synthetic oligonucleotide
cugggucggugagcaagag

SEQ ID NO: 1029336 - RNA, 19 nt, Artificial Sequence
  Description of Artificial Sequence: Synthetic oligonucleotide
ccucagcgaucaagguucg

SEQ ID NO: 1029337 - RNA, 19 nt, Artificial Sequence
  Description of Artificial Sequence: Synthetic oligonucleotide
uggucucaugggugcuguc

SEQ ID NO: 1029338 - RNA, 19 nt, Artificial Sequence
  Description of Artificial Sequence: Synthetic oligonucleotide
gacggcucuccugggcuga

SEQ ID NO: 1029339 - RNA, 19 nt, Artificial Sequence
  Description of Artificial Sequence: Synthetic oligonucleotide
cgggagggcaucugacugg

SEQ ID NO: 1029340 - RNA, 19 nt, Artificial Sequence
  Description of Artificial Sequence: Synthetic oligonucleotide
gccauagcggcagccagca

SEQ ID NO: 1029341 - RNA, 19 nt, Artificial Sequence
  Description of Artificial Sequence: Synthetic oligonucleotide
ggguaacccucagcgauca

SEQ ID NO: 1029342 - RNA, 19 nt, Artificial Sequence
  Description of Artificial Sequence: Synthetic oligonucleotide
cugcaauaggaucuuccuu

SEQ ID NO: 1029343 - RNA, 19 nt, Artificial Sequence
  Description of Artificial Sequence: Synthetic oligonucleotide
ggcauucucuaggguuucc

SEQ ID NO: 1029344 - RNA, 19 nt, Artificial Sequence
  Description of Artificial Sequence: Synthetic oligonucleotide
cacguuccacaucuugggu

SEQ ID NO: 1029345 - RNA, 19 nt, Artificial Sequence
  Description of Artificial Sequence: Synthetic oligonucleotide
ccguccuguguccuggguc

SEQ ID NO: 1029346 - RNA, 19 nt, Artificial Sequence
  Description of Artificial Sequence: Synthetic oligonucleotide
gcgaucaagguucgcuucu

SEQ ID NO: 1029347 - RNA, 19 nt, Artificial Sequence
  Description of Artificial Sequence: Synthetic oligonucleotide
aagcccgcgcuaacuucau

SEQ ID NO: 1029348 - RNA, 19 nt, Artificial Sequence
  Description of Artificial Sequence: Synthetic oligonucleotide
ggcagugaggagcggagau

SEQ ID NO: 1029349 - RNA, 19 nt, Artificial Sequence
  Description of Artificial Sequence: Synthetic oligonucleotide
caguaggcuucgggagggc

SEQ ID NO: 1029350 - RNA, 19 nt, Artificial Sequence
  Description of Artificial Sequence: Synthetic oligonucleotide
ggggcccagaucccuguca

SEQ ID NO: 1029351 - RNA, 19 nt, Artificial Sequence
  Description of Artificial Sequence: Synthetic oligonucleotide
ccagaucccugucauggaa

SEQ ID NO: 1029352 - RNA, 19 nt, Artificial Sequence
  Description of Artificial Sequence: Synthetic oligonucleotide
gugcccagugagugguuua

SEQ ID NO: 1029353 - RNA, 19 nt, Artificial Sequence
  Description of Artificial Sequence: Synthetic oligonucleotide
cucaugggugcuguccaua

SEQ ID NO: 1029354 - RNA, 19 nt, Artificial Sequence
  Description of Artificial Sequence: Synthetic oligonucleotide
cgugugugugugugugccc

SEQ ID NO: 1029355 - RNA, 19 nt, Artificial Sequence
  Description of Artificial Sequence: Synthetic oligonucleotide
cagcgaucaagguucgcuu

SEQ ID NO: 1029356 - RNA, 19 nt, Artificial Sequence
  Description of Artificial Sequence: Synthetic oligonucleotide
gcggcauggggaagccagg

SEQ ID NO: 1029357 - RNA, 19 nt, Artificial Sequence
  Description of Artificial Sequence: Synthetic oligonucleotide
guaggcuucgggagggcau

SEQ ID NO: 1029358 - RNA, 19 nt, Artificial Sequence
  Description of Artificial Sequence: Synthetic oligonucleotide
cgcgcuaacuucauaaaau

SEQ ID NO: 1029359 - RNA, 19 nt, Artificial Sequence
  Description of Artificial Sequence: Synthetic oligonucleotide
acggcucuccugggcugag

SEQ ID NO: 1029360 - RNA, 19 nt, Artificial Sequence
  Description of Artificial Sequence: Synthetic oligonucleotide
ccgcgcuaacuucauaaaa

SEQ ID NO: 1029361 - RNA, 19 nt, Artificial Sequence
  Description of Artificial Sequence: Synthetic oligonucleotide
ccgccaucuuguaaggucu

SEQ ID NO: 1029362 - RNA, 19 nt, Artificial Sequence
  Description of Artificial Sequence: Synthetic oligonucleotide
gauguccccuguaguuuau

SEQ ID NO: 1029363 - RNA, 19 nt, Artificial Sequence
  Description of Artificial Sequence: Synthetic oligonucleotide
agggagcaguuuggcaauu

SEQ ID NO: 1029364 - RNA, 19 nt, Artificial Sequence
  Description of Artificial Sequence: Synthetic oligonucleotide
gcgaggacucugagggaug

SEQ ID NO: 1029365 - RNA, 19 nt, Artificial Sequence
  Description of Artificial Sequence: Synthetic oligonucleotide
gcaaagcccgcgcuaacuu

SEQ ID NO: 1029366 - RNA, 19 nt, Artificial Sequence
  Description of Artificial Sequence: Synthetic oligonucleotide
cgcuccacguuccacaucu

SEQ ID NO: 1029367 - RNA, 19 nt, Artificial Sequence
  Description of Artificial Sequence: Synthetic oligonucleotide
gguuggcccaggggagcag

SEQ ID NO: 1029368 - RNA, 19 nt, Artificial Sequence
  Description of Artificial Sequence: Synthetic oligonucleotide
ggguuugagcucccagccu

SEQ ID NO: 1029369 - RNA, 19 nt, Artificial Sequence
  Description of Artificial Sequence: Synthetic oligonucleotide
agcccgcgcuaacuucaua

SEQ ID NO: 1029370 - RNA, 19 nt, Artificial Sequence
  Description of Artificial Sequence: Synthetic oligonucleotide
ccaugggccggacagggcu

SEQ ID NO: 1029371 - RNA, 19 nt, Artificial Sequence
  Description of Artificial Sequence: Synthetic oligonucleotide
ggcaagugccagucugagu

SEQ ID NO: 1029372 - RNA, 19 nt, Artificial Sequence
  Description of Artificial Sequence: Synthetic oligonucleotide
cuaggguuuccaccuucuu

SEQ ID NO: 1029373 - RNA, 19 nt, Artificial Sequence
  Description of Artificial Sequence: Synthetic oligonucleotide
gugugugugugugcccagu

SEQ ID NO: 1029374 - RNA, 19 nt, Artificial Sequence
  Description of Artificial Sequence: Synthetic oligonucleotide
cccagaucccugucaugga

SEQ ID NO: 1029375 - RNA, 19 nt, Artificial Sequence
  Description of Artificial Sequence: Synthetic oligonucleotide
cccgcgcuaacuucauaaa

SEQ ID NO: 1029376 - RNA, 19 nt, Artificial Sequence
  Description of Artificial Sequence: Synthetic oligonucleotide
ggcuucgggagggcaucug

SEQ ID NO: 1029377 - RNA, 19 nt, Artificial Sequence
  Description of Artificial Sequence: Synthetic oligonucleotide
gagcgggccaugggccgga

SEQ ID NO: 1029378 - RNA, 19 nt, Artificial Sequence
  Description of Artificial Sequence: Synthetic oligonucleotide
ccgucccaucaucauagaa

SEQ ID NO: 1029379 - RNA, 19 nt, Artificial Sequence
  Description of Artificial Sequence: Synthetic oligonucleotide
cgauguccccuguaguuua

SEQ ID NO: 1029380 - RNA, 19 nt, Artificial Sequence
  Description of Artificial Sequence: Synthetic oligonucleotide
gggagcaguuuggcaauua

SEQ ID NO: 1029381 - RNA, 19 nt, Artificial Sequence
  Description of Artificial Sequence: Synthetic oligonucleotide
cccgauguccccuguaguu

SEQ ID NO: 1029382 - RNA, 19 nt, Artificial Sequence
  Description of Artificial Sequence: Synthetic oligonucleotide
cccacgcuccacguuccac

SEQ ID NO: 1029383 - RNA, 19 nt, Artificial Sequence
  Description of Artificial Sequence: Synthetic oligonucleotide
gguaacccucagcgaucaa

SEQ ID NO: 1029384 - RNA, 19 nt, Artificial Sequence
  Description of Artificial Sequence: Synthetic oligonucleotide
ccacagcucauuguucucu

SEQ ID NO: 1029385 - RNA, 19 nt, Artificial Sequence
  Description of Artificial Sequence: Synthetic oligonucleotide
gagaggccuaggagaguuu

SEQ ID NO: 1029386 - RNA, 19 nt, Artificial Sequence
  Description of Artificial Sequence: Synthetic oligonucleotide
guagggcgccucggccauc

SEQ ID NO: 1029387 - RNA, 19 nt, Artificial Sequence
  Description of Artificial Sequence: Synthetic oligonucleotide
ggucggugagcaagagaau

SEQ ID NO: 1029388 - RNA, 19 nt, Artificial Sequence
  Description of Artificial Sequence: Synthetic oligonucleotide
cccgucccaucaucauaga

SEQ ID NO: 1029389 - RNA, 19 nt, Artificial Sequence
  Description of Artificial Sequence: Synthetic oligonucleotide
ggccccgauguccccugua

SEQ ID NO: 1029390 - RNA, 19 nt, Artificial Sequence
  Description of Artificial Sequence: Synthetic oligonucleotide
gcccacgcuccacguucca

SEQ ID NO: 1029391 - RNA, 19 nt, Artificial Sequence
  Description of Artificial Sequence: Synthetic oligonucleotide
agggcgccucggccaucuu

SEQ ID NO: 1029392 - RNA, 19 nt, Artificial Sequence
  Description of Artificial Sequence: Synthetic oligonucleotide
gggccggacagggcuggaa

SEQ ID NO: 1029393 - RNA, 19 nt, Artificial Sequence
  Description of Artificial Sequence: Synthetic oligonucleotide
ggccgccaucuuguaaggu

SEQ ID NO: 1029394 - RNA, 19 nt, Artificial Sequence
  Description of Artificial Sequence: Synthetic oligonucleotide
gugugcccagugagugguu

SEQ ID NO: 1029395 - RNA, 19 nt, Artificial Sequence
  Description of Artificial Sequence: Synthetic oligonucleotide
ccauugucguuagcaucuu

SEQ ID NO: 1029396 - RNA, 19 nt, Artificial Sequence
  Description of Artificial Sequence: Synthetic oligonucleotide
ccccggguuugagcuccca

SEQ ID NO: 1029397 - RNA, 19 nt, Artificial Sequence
  Description of Artificial Sequence: Synthetic oligonucleotide
aaaucagugaccaugaggc

SEQ ID NO: 1029398 - RNA, 19 nt, Artificial Sequence
  Description of Artificial Sequence: Synthetic oligonucleotide
aauggaaugaaguaagguc

SEQ ID NO: 1029399 - RNA, 19 nt, Artificial Sequence
  Description of Artificial Sequence: Synthetic oligonucleotide
agaguuaauaugcagacac

SEQ ID NO: 1029400 - RNA, 19 nt, Artificial Sequence
  Description of Artificial Sequence: Synthetic oligonucleotide
aaaucuacgucuuuggcuc

SEQ ID NO: 1029401 - RNA, 19 nt, Artificial Sequence
  Description of Artificial Sequence: Synthetic oligonucleotide
acuuaaauuaacaagauag

SEQ ID NO: 1029402 - RNA, 19 nt, Artificial Sequence
  Description of Artificial Sequence: Synthetic oligonucleotide
aaaaguuuucuccuucggc

SEQ ID NO: 1029403 - RNA, 19 nt, Artificial Sequence
  Description of Artificial Sequence: Synthetic oligonucleotide
uguacauucgguuuaaaca

SEQ ID NO: 1029404 - RNA, 19 nt, Artificial Sequence
  Description of Artificial Sequence: Synthetic oligonucleotide
aggucaauaacauaaacug

SEQ ID NO: 1029405 - RNA, 19 nt, Artificial Sequence
  Description of Artificial Sequence: Synthetic oligonucleotide
ugagucaauagcuugaggc

SEQ ID NO: 1029406 - RNA, 19 nt, Artificial Sequence
  Description of Artificial Sequence: Synthetic oligonucleotide
ugaccaaugucccauaacc

SEQ ID NO: 1029407 - RNA, 19 nt, Artificial Sequence
  Description of Artificial Sequence: Synthetic oligonucleotide
aaaguaugucuccauguuc

SEQ ID NO: 1029408 - RNA, 19 nt, Artificial Sequence
  Description of Artificial Sequence: Synthetic oligonucleotide
ugcuaguugaaaaucagug

SEQ ID NO: 1029409 - RNA, 19 nt, Artificial Sequence
  Description of Artificial Sequence: Synthetic oligonucleotide
aauaccugaugcuaguuga

SEQ ID NO: 1029410 - RNA, 19 nt, Artificial Sequence
  Description of Artificial Sequence: Synthetic oligonucleotide
guaaaguugaaagagcccg

SEQ ID NO: 1029411 - RNA, 19 nt, Artificial Sequence
  Description of Artificial Sequence: Synthetic oligonucleotide
gauauuucuaguuagcaaa

SEQ ID NO: 1029412 - RNA, 19 nt, Artificial Sequence
  Description of Artificial Sequence: Synthetic oligonucleotide
aacaagaguuaauaugcag

SEQ ID NO: 1029413 - RNA, 19 nt, Artificial Sequence
  Description of Artificial Sequence: Synthetic oligonucleotide
uguaaaucagaguugagau

SEQ ID NO: 1029414 - RNA, 19 nt, Artificial Sequence
  Description of Artificial Sequence: Synthetic oligonucleotide
aauauuguacauucgguuu

SEQ ID NO: 1029415 - RNA, 19 nt, Artificial Sequence
  Description of Artificial Sequence: Synthetic oligonucleotide
uaaaucagaguugagauaa

SEQ ID NO: 1029416 - RNA, 19 nt, Artificial Sequence
  Description of Artificial Sequence: Synthetic oligonucleotide
cuaguugaaaaucagugac

SEQ ID NO: 1029417 - RNA, 19 nt, Artificial Sequence
  Description of Artificial Sequence: Synthetic oligonucleotide
aaauauuguacauucgguu

SEQ ID NO: 1029418 - RNA, 19 nt, Artificial Sequence
  Description of Artificial Sequence: Synthetic oligonucleotide
aguaaggucgccauggagc

SEQ ID NO: 1029419 - RNA, 19 nt, Artificial Sequence
  Description of Artificial Sequence: Synthetic oligonucleotide
agaaguuggaccacaaacc

SEQ ID NO: 1029420 - RNA, 19 nt, Artificial Sequence
  Description of Artificial Sequence: Synthetic oligonucleotide
aaugauggguguaauccgc

SEQ ID NO: 1029421 - RNA, 19 nt, Artificial Sequence
  Description of Artificial Sequence: Synthetic oligonucleotide
uuaauauuagugcccgugc

SEQ ID NO: 1029422 - RNA, 19 nt, Artificial Sequence
  Description of Artificial Sequence: Synthetic oligonucleotide
caacugaucggaaucagcg

SEQ ID NO: 1029423 - RNA, 19 nt, Artificial Sequence
  Description of Artificial Sequence: Synthetic oligonucleotide
auggaaugaaguaaggucg

SEQ ID NO: 1029424 - RNA, 19 nt, Artificial Sequence
  Description of Artificial Sequence: Synthetic oligonucleotide
auaggcaaagcuccuauuc

SEQ ID NO: 1029425 - RNA, 19 nt, Artificial Sequence
  Description of Artificial Sequence: Synthetic oligonucleotide
aguugaaagagcccguggg

SEQ ID NO: 1029426 - RNA, 19 nt, Artificial Sequence
  Description of Artificial Sequence: Synthetic oligonucleotide
gagucaauagcuugaggcg

SEQ ID NO: 1029427 - RNA, 19 nt, Artificial Sequence
  Description of Artificial Sequence: Synthetic oligonucleotide
uuuaauauuagugcccgug

SEQ ID NO: 1029428 - RNA, 19 nt, Artificial Sequence
  Description of Artificial Sequence: Synthetic oligonucleotide
ucaauaacauaaacugacc

SEQ ID NO: 1029429 - RNA, 19 nt, Artificial Sequence
  Description of Artificial Sequence: Synthetic oligonucleotide
gauaacaccugcucccucg

SEQ ID NO: 1029430 - RNA, 19 nt, Artificial Sequence
  Description of Artificial Sequence: Synthetic oligonucleotide
uacuggauccuccauaggc

SEQ ID NO: 1029431 - RNA, 19 nt, Artificial Sequence
  Description of Artificial Sequence: Synthetic oligonucleotide
aagcuauccacugaggaag

SEQ ID NO: 1029432 - RNA, 19 nt, Artificial Sequence
  Description of Artificial Sequence: Synthetic oligonucleotide
aaaaguguacaaaguugcc

SEQ ID NO: 1029433 - RNA, 19 nt, Artificial Sequence
  Description of Artificial Sequence: Synthetic oligonucleotide
augaacgcaaaacagaaau

SEQ ID NO: 1029434 - RNA, 19 nt, Artificial Sequence
  Description of Artificial Sequence: Synthetic oligonucleotide
aucgguacacaggagaugc

SEQ ID NO: 1029435 - RNA, 19 nt, Artificial Sequence
  Description of Artificial Sequence: Synthetic oligonucleotide
uuguaaaucugaaaacacu

SEQ ID NO: 1029436 - RNA, 19 nt, Artificial Sequence
  Description of Artificial Sequence: Synthetic oligonucleotide
uccauguucccacauuggg

SEQ ID NO: 1029437 - RNA, 19 nt, Artificial Sequence
  Description of Artificial Sequence: Synthetic oligonucleotide
uacaaaguugccaauuccu

SEQ ID NO: 1029438 - RNA, 19 nt, Artificial Sequence
  Description of Artificial Sequence: Synthetic oligonucleotide
caguaaaucucauagcuuc

SEQ ID NO: 1029439 - RNA, 19 nt, Artificial Sequence
  Description of Artificial Sequence: Synthetic oligonucleotide
ugaugcuaguugaaaauca

SEQ ID NO: 1029440 - RNA, 19 nt, Artificial Sequence
  Description of Artificial Sequence: Synthetic oligonucleotide
gucaauaacauaaacugac

SEQ ID NO: 1029441 - RNA, 19 nt, Artificial Sequence
  Description of Artificial Sequence: Synthetic oligonucleotide
aaggcuccccagaagaugc

SEQ ID NO: 1029442 - RNA, 19 nt, Artificial Sequence
  Description of Artificial Sequence: Synthetic oligonucleotide
aaaguguacaaaguugcca

SEQ ID NO: 1029443 - RNA, 19 nt, Artificial Sequence
  Description of Artificial Sequence: Synthetic oligonucleotide
ucuccauguucccacauug

SEQ ID NO: 1029444 - RNA, 19 nt, Artificial Sequence
  Description of Artificial Sequence: Synthetic oligonucleotide
agaaucgguacacaggaga

SEQ ID NO: 1029445 - RNA, 19 nt, Artificial Sequence
  Description of Artificial Sequence: Synthetic oligonucleotide
aggauggcugguuuucucc

SEQ ID NO: 1029446 - RNA, 19 nt, Artificial Sequence
  Description of Artificial Sequence: Synthetic oligonucleotide
ucagugagucaauagcuug

SEQ ID NO: 1029447 - RNA, 19 nt, Artificial Sequence
  Description of Artificial Sequence: Synthetic oligonucleotide
agccaucaaccuuaguccc

SEQ ID NO: 1029448 - RNA, 19 nt, Artificial Sequence
  Description of Artificial Sequence: Synthetic oligonucleotide
acaaaaguguacaaaguug

SEQ ID NO: 1029449 - RNA, 19 nt, Artificial Sequence
  Description of Artificial Sequence: Synthetic oligonucleotide
guggguagaacauugguuc

SEQ ID NO: 1029450 - RNA, 19 nt, Artificial Sequence
  Description of Artificial Sequence: Synthetic oligonucleotide
uaauauuagugcccgugcu

SEQ ID NO: 1029451 - RNA, 19 nt, Artificial Sequence
  Description of Artificial Sequence: Synthetic oligonucleotide
auucgguuuaaacaagagu

SEQ ID NO: 1029452 - RNA, 19 nt, Artificial Sequence
  Description of Artificial Sequence: Synthetic oligonucleotide
ucaaccuuagucccugcug

SEQ ID NO: 1029453 - RNA, 19 nt, Artificial Sequence
  Description of Artificial Sequence: Synthetic oligonucleotide
gagacucugaacccuuacg

SEQ ID NO: 1029454 - RNA, 19 nt, Artificial Sequence
  Description of Artificial Sequence: Synthetic oligonucleotide
guacauucgguuuaaacaa

SEQ ID NO: 1029455 - RNA, 19 nt, Artificial Sequence
  Description of Artificial Sequence: Synthetic oligonucleotide
gguaaaucuacgucuuugg

SEQ ID NO: 1029456 - RNA, 19 nt, Artificial Sequence
  Description of Artificial Sequence: Synthetic oligonucleotide
caaugauggguguaauccg

SEQ ID NO: 1029457 - RNA, 19 nt, Artificial Sequence
  Description of Artificial Sequence: Synthetic oligonucleotide
aaguaaggucgccauggag

SEQ ID NO: 1029458 - RNA, 19 nt, Artificial Sequence
  Description of Artificial Sequence: Synthetic oligonucleotide
uagaacauugguucccacc

SEQ ID NO: 1029459 - RNA, 19 nt, Artificial Sequence
  Description of Artificial Sequence: Synthetic oligonucleotide
ugugacuaagaguaagaaa

SEQ ID NO: 1029460 - RNA, 19 nt, Artificial Sequence
  Description of Artificial Sequence: Synthetic oligonucleotide
uggaaugaaguaaggucgc

SEQ ID NO: 1029461 - RNA, 19 nt, Artificial Sequence
  Description of Artificial Sequence: Synthetic oligonucleotide
ucgaggucuggcaaauggg

SEQ ID NO: 1029462 - RNA, 19 nt, Artificial Sequence
  Description of Artificial Sequence: Synthetic oligonucleotide
gaugcuaguugaaaaucag

SEQ ID NO: 1029463 - RNA, 19 nt, Artificial Sequence
  Description of Artificial Sequence: Synthetic oligonucleotide
uacauucgguuuaaacaag

SEQ ID NO: 1029464 - RNA, 19 nt, Artificial Sequence
  Description of Artificial Sequence: Synthetic oligonucleotide
uucaauuacaugugacuaa

SEQ ID NO: 1029465 - RNA, 19 nt, Artificial Sequence
  Description of Artificial Sequence: Synthetic oligonucleotide
ucuagauuagaugcccucc

SEQ ID NO: 1029466 - RNA, 19 nt, Artificial Sequence
  Description of Artificial Sequence: Synthetic oligonucleotide
aggaacagcaguauacaac

SEQ ID NO: 1029467 - RNA, 19 nt, Artificial Sequence
  Description of Artificial Sequence: Synthetic oligonucleotide
accaaugucccauaacccu

SEQ ID NO: 1029468 - RNA, 19 nt, Artificial Sequence
  Description of Artificial Sequence: Synthetic oligonucleotide
ugaucggaaucagcgaugg

SEQ ID NO: 1029469 - RNA, 19 nt, Artificial Sequence
  Description of Artificial Sequence: Synthetic oligonucleotide
agauauuucuaguuagcaa

SEQ ID NO: 1029470 - RNA, 19 nt, Artificial Sequence
  Description of Artificial Sequence: Synthetic oligonucleotide
aaucagaguugagauaaca

SEQ ID NO: 1029471 - RNA, 19 nt, Artificial Sequence
  Description of Artificial Sequence: Synthetic oligonucleotide
gaaguaccggcauagggca

SEQ ID NO: 1029472 - RNA, 19 nt, Artificial Sequence
  Description of Artificial Sequence: Synthetic oligonucleotide
aaucagcgaugguaaaucu

SEQ ID NO: 1029473 - RNA, 19 nt, Artificial Sequence
  Description of Artificial Sequence: Synthetic oligonucleotide
aacagcaguauacaaccuu

SEQ ID NO: 1029474 - RNA, 19 nt, Artificial Sequence
  Description of Artificial Sequence: Synthetic oligonucleotide
aagcuccuauucucguccc

SEQ ID NO: 1029475 - RNA, 19 nt, Artificial Sequence
  Description of Artificial Sequence: Synthetic oligonucleotide
uuugccauaggaugguguc

SEQ ID NO: 1029476 - RNA, 19 nt, Artificial Sequence
  Description of Artificial Sequence: Synthetic oligonucleotide
cuaagauccucuagauuag

SEQ ID NO: 1029477 - RNA, 19 nt, Artificial Sequence
  Description of Artificial Sequence: Synthetic oligonucleotide
auuacugaaguaccggcau

SEQ ID NO: 1029478 - RNA, 19 nt, Artificial Sequence
  Description of Artificial Sequence: Synthetic oligonucleotide
ucggaaucagcgaugguaa

SEQ ID NO: 1029479 - RNA, 19 nt, Artificial Sequence
  Description of Artificial Sequence: Synthetic oligonucleotide
aggcaaagcuccuauucuc

SEQ ID NO: 1029480 - RNA, 19 nt, Artificial Sequence
  Description of Artificial Sequence: Synthetic oligonucleotide
gucugaagaagcuauccac

SEQ ID NO: 1029481 - RNA, 19 nt, Artificial Sequence
  Description of Artificial Sequence: Synthetic oligonucleotide
aacccuaaaucuuguugcu

SEQ ID NO: 1029482 - RNA, 19 nt, Artificial Sequence
  Description of Artificial Sequence: Synthetic oligonucleotide
aacugaucggaaucagcga

SEQ ID NO: 1029483 - RNA, 19 nt, Artificial Sequence
  Description of Artificial Sequence: Synthetic oligonucleotide
cauucgguuuaaacaagag

SEQ ID NO: 1029484 - RNA, 19 nt, Artificial Sequence
  Description of Artificial Sequence: Synthetic oligonucleotide
agcaaaauguguacaacug

SEQ ID NO: 1029485 - RNA, 19 nt, Artificial Sequence
  Description of Artificial Sequence: Synthetic oligonucleotide
acugaucggaaucagcgau

SEQ ID NO: 1029486 - RNA, 19 nt, Artificial Sequence
  Description of Artificial Sequence: Synthetic oligonucleotide
agcuaaccagcagugaagg

SEQ ID NO: 1029487 - RNA, 19 nt, Artificial Sequence
  Description of Artificial Sequence: Synthetic oligonucleotide
guugaaagagcccgugggc

SEQ ID NO: 1029488 - RNA, 19 nt, Artificial Sequence
  Description of Artificial Sequence: Synthetic oligonucleotide
auauuguacauucgguuua

SEQ ID NO: 1029489 - RNA, 19 nt, Artificial Sequence
  Description of Artificial Sequence: Synthetic oligonucleotide
gaaucagcgaugguaaauc

SEQ ID NO: 1029490 - RNA, 19 nt, Artificial Sequence
  Description of Artificial Sequence: Synthetic oligonucleotide
agcgaugguaaaucuacgu

SEQ ID NO: 1029491 - RNA, 19 nt, Artificial Sequence
  Description of Artificial Sequence: Synthetic oligonucleotide
uccuauucucgucccgggg

SEQ ID NO: 1029492 - RNA, 19 nt, Artificial Sequence
  Description of Artificial Sequence: Synthetic oligonucleotide
uaugaacgcaaaacagaaa

SEQ ID NO: 1029493 - RNA, 19 nt, Artificial Sequence
  Description of Artificial Sequence: Synthetic oligonucleotide
acguaugaacgcaaaacag

SEQ ID NO: 1029494 - RNA, 19 nt, Artificial Sequence
  Description of Artificial Sequence: Synthetic oligonucleotide
aaacaagaguuaauaugca

SEQ ID NO: 1029495 - RNA, 19 nt, Artificial Sequence
  Description of Artificial Sequence: Synthetic oligonucleotide
ugaacgcaaaacagaaaua

SEQ ID NO: 1029496 - RNA, 19 nt, Artificial Sequence
  Description of Artificial Sequence: Synthetic oligonucleotide
uguuuacccuuacuggauc

SEQ ID NO: 1029497 - RNA, 19 nt, Artificial Sequence
  Description of Artificial Sequence: Synthetic oligonucleotide
cacguaugaacgcaaaaca

SEQ ID NO: 1029498 - RNA, 19 nt, Artificial Sequence
  Description of Artificial Sequence: Synthetic oligonucleotide
aauccgcucauuacugaag

SEQ ID NO: 1029499 - RNA, 19 nt, Artificial Sequence
  Description of Artificial Sequence: Synthetic oligonucleotide
aguagggaacagcgggugg

SEQ ID NO: 1029500 - RNA, 19 nt, Artificial Sequence
  Description of Artificial Sequence: Synthetic oligonucleotide
aaaucagaguugagauaac

SEQ ID NO: 1029501 - RNA, 19 nt, Artificial Sequence
  Description of Artificial Sequence: Synthetic oligonucleotide
auaugugacaaaagccauc

SEQ ID NO: 1029502 - RNA, 19 nt, Artificial Sequence
  Description of Artificial Sequence: Synthetic oligonucleotide
auugguucccaccgaauaa

SEQ ID NO: 1029503 - RNA, 19 nt, Artificial Sequence
  Description of Artificial Sequence: Synthetic oligonucleotide
aagaguuaauaugcagaca

SEQ ID NO: 1029504 - RNA, 19 nt, Artificial Sequence
  Description of Artificial Sequence: Synthetic oligonucleotide
acgcaaaacagaaauauuu

SEQ ID NO: 1029505 - RNA, 19 nt, Artificial Sequence
  Description of Artificial Sequence: Synthetic oligonucleotide
ccuaagauccucuagauua

SEQ ID NO: 1029506 - RNA, 19 nt, Artificial Sequence
  Description of Artificial Sequence: Synthetic oligonucleotide
ucccauaacccuaaaucuu

SEQ ID NO: 1029507 - RNA, 19 nt, Artificial Sequence
  Description of Artificial Sequence: Synthetic oligonucleotide
aagaagcuauccacugagg

SEQ ID NO: 1029508 - RNA, 19 nt, Artificial Sequence
  Description of Artificial Sequence: Synthetic oligonucleotide
uacccuuacuggauccucc

SEQ ID NO: 1029509 - RNA, 19 nt, Artificial Sequence
  Description of Artificial Sequence: Synthetic oligonucleotide
uuacuggauccuccauagg

SEQ ID NO: 1029510 - RNA, 19 nt, Artificial Sequence
  Description of Artificial Sequence: Synthetic oligonucleotide
accggcauagggcaucguc

SEQ ID NO: 1029511 - RNA, 19 nt, Artificial Sequence
  Description of Artificial Sequence: Synthetic oligonucleotide
caccgaauaagcuggcaac

SEQ ID NO: 1029512 - RNA, 19 nt, Artificial Sequence
  Description of Artificial Sequence: Synthetic oligonucleotide
caccgcagguucuucaggg

SEQ ID NO: 1029513 - RNA, 19 nt, Artificial Sequence
  Description of Artificial Sequence: Synthetic oligonucleotide
aaacucuauuuaaaacacu

SEQ ID NO: 1029514 - RNA, 19 nt, Artificial Sequence
  Description of Artificial Sequence: Synthetic oligonucleotide
guaugaacgcaaaacagaa

SEQ ID NO: 1029515 - RNA, 19 nt, Artificial Sequence
  Description of Artificial Sequence: Synthetic oligonucleotide
gggagaguagggaacagcg

SEQ ID NO: 1029516 - RNA, 19 nt, Artificial Sequence
  Description of Artificial Sequence: Synthetic oligonucleotide
aaggucgccauggagcacu

SEQ ID NO: 1029517 - RNA, 19 nt, Artificial Sequence
  Description of Artificial Sequence: Synthetic oligonucleotide
aaucgguacacaggagaug

SEQ ID NO: 1029518 - RNA, 19 nt, Artificial Sequence
  Description of Artificial Sequence: Synthetic oligonucleotide
guaaggucgccauggagca

SEQ ID NO: 1029519 - RNA, 19 nt, Artificial Sequence
  Description of Artificial Sequence: Synthetic oligonucleotide
agugagucaauagcuugag

SEQ ID NO: 1029520 - RNA, 19 nt, Artificial Sequence
  Description of Artificial Sequence: Synthetic oligonucleotide
uuucacguaugaacgcaaa

SEQ ID NO: 1029521 - RNA, 19 nt, Artificial Sequence
  Description of Artificial Sequence: Synthetic oligonucleotide
auccgcucauuacugaagu

SEQ ID NO: 1029522 - RNA, 19 nt, Artificial Sequence
  Description of Artificial Sequence: Synthetic oligonucleotide
cauuggggaggcaaaacca

SEQ ID NO: 1029523 - RNA, 19 nt, Artificial Sequence
  Description of Artificial Sequence: Synthetic oligonucleotide
agcaguauacaaccuuuaa

SEQ ID NO: 1029524 - RNA, 19 nt, Artificial Sequence
  Description of Artificial Sequence: Synthetic oligonucleotide
cagcuaaccagcagugaag

SEQ ID NO: 1029525 - RNA, 19 nt, Artificial Sequence
  Description of Artificial Sequence: Synthetic oligonucleotide
guaguccgcgccucgaacc

SEQ ID NO: 1029526 - RNA, 19 nt, Artificial Sequence
  Description of Artificial Sequence: Synthetic oligonucleotide
gucaauagcuugaggcgcg

SEQ ID NO: 1029527 - RNA, 19 nt, Artificial Sequence
  Description of Artificial Sequence: Synthetic oligonucleotide
ugguucccaccgaauaagc

SEQ ID NO: 1029528 - RNA, 19 nt, Artificial Sequence
  Description of Artificial Sequence: Synthetic oligonucleotide
agauuagaugcccuccaau

SEQ ID NO: 1029529 - RNA, 19 nt, Artificial Sequence
  Description of Artificial Sequence: Synthetic oligonucleotide
cuccauguucccacauugg

SEQ ID NO: 1029530 - RNA, 19 nt, Artificial Sequence
  Description of Artificial Sequence: Synthetic oligonucleotide
aucggaaucagcgauggua

SEQ ID NO: 1029531 - RNA, 19 nt, Artificial Sequence
  Description of Artificial Sequence: Synthetic oligonucleotide
cauuacugaaguaccggca

SEQ ID NO: 1029532 - RNA, 19 nt, Artificial Sequence
  Description of Artificial Sequence: Synthetic oligonucleotide
gaaugaaguaaggucgcca

SEQ ID NO: 1029533 - RNA, 19 nt, Artificial Sequence
  Description of Artificial Sequence: Synthetic oligonucleotide
uguaguccgcgccucgaac

SEQ ID NO: 1029534 - RNA, 19 nt, Artificial Sequence
  Description of Artificial Sequence: Synthetic oligonucleotide
cuauucucgucccggggag

SEQ ID NO: 1029535 - RNA, 19 nt, Artificial Sequence
  Description of Artificial Sequence: Synthetic oligonucleotide
ucggauguaguccgcgccu

SEQ ID NO: 1029536 - RNA, 19 nt, Artificial Sequence
  Description of Artificial Sequence: Synthetic oligonucleotide
cucuagauuagaugcccuc

SEQ ID NO: 1029537 - RNA, 19 nt, Artificial Sequence
  Description of Artificial Sequence: Synthetic oligonucleotide
ucgccauggagcacugcag

SEQ ID NO: 1029538 - RNA, 19 nt, Artificial Sequence
  Description of Artificial Sequence: Synthetic oligonucleotide
agccucagugagucaauag

SEQ ID NO: 1029539 - RNA, 19 nt, Artificial Sequence
  Description of Artificial Sequence: Synthetic oligonucleotide
cacuuugaauguccuuucc

SEQ ID NO: 1029540 - RNA, 19 nt, Artificial Sequence
  Description of Artificial Sequence: Synthetic oligonucleotide
agauaacaccugcucccuc

SEQ ID NO: 1029541 - RNA, 19 nt, Artificial Sequence
  Description of Artificial Sequence: Synthetic oligonucleotide
caacacauauaugugacaa

SEQ ID NO: 1029542 - RNA, 19 nt, Artificial Sequence
  Description of Artificial Sequence: Synthetic oligonucleotide
gcuaguugaaaaucaguga

SEQ ID NO: 1029543 - RNA, 19 nt, Artificial Sequence
  Description of Artificial Sequence: Synthetic oligonucleotide
aguaccggcauagggcauc

SEQ ID NO: 1029544 - RNA, 19 nt, Artificial Sequence
  Description of Artificial Sequence: Synthetic oligonucleotide
gccucagugagucaauagc

SEQ ID NO: 1029545 - RNA, 19 nt, Artificial Sequence
  Description of Artificial Sequence: Synthetic oligonucleotide
uuuuggcucucaguaaauc

SEQ ID NO: 1029546 - RNA, 19 nt, Artificial Sequence
  Description of Artificial Sequence: Synthetic oligonucleotide
uagggcaucguccccuuuc

SEQ ID NO: 1029547 - RNA, 19 nt, Artificial Sequence
  Description of Artificial Sequence: Synthetic oligonucleotide
ugaacccuuacgcccggac

SEQ ID NO: 1029548 - RNA, 19 nt, Artificial Sequence
  Description of Artificial Sequence: Synthetic oligonucleotide
cucggauguaguccgcgcc

SEQ ID NO: 1029549 - RNA, 19 nt, Artificial Sequence
  Description of Artificial Sequence: Synthetic oligonucleotide
cuagauuagaugcccucca

SEQ ID NO: 1029550 - RNA, 19 nt, Artificial Sequence
  Description of Artificial Sequence: Synthetic oligonucleotide
gccaauuccugacaucaag

SEQ ID NO: 1029551 - RNA, 19 nt, Artificial Sequence
  Description of Artificial Sequence: Synthetic oligonucleotide
cugaucggaaucagcgaug

SEQ ID NO: 1029552 - RNA, 19 nt, Artificial Sequence
  Description of Artificial Sequence: Synthetic oligonucleotide
aacgcaaaacagaaauauu

SEQ ID NO: 1029553 - RNA, 19 nt, Artificial Sequence
  Description of Artificial Sequence: Synthetic oligonucleotide
gcuguuuacccuuacugga

SEQ ID NO: 1029554 - RNA, 19 nt, Artificial Sequence
  Description of Artificial Sequence: Synthetic oligonucleotide
acaacugggaaagacugua

SEQ ID NO: 1029555 - RNA, 19 nt, Artificial Sequence
  Description of Artificial Sequence: Synthetic oligonucleotide
guaaaucagaguugagaua

SEQ ID NO: 1029556 - RNA, 19 nt, Artificial Sequence
  Description of Artificial Sequence: Synthetic oligonucleotide
aucaaccuuagucccugcu

SEQ ID NO: 1029557 - RNA, 19 nt, Artificial Sequence
  Description of Artificial Sequence: Synthetic oligonucleotide
ggcaaagcuccuauucucg

SEQ ID NO: 1029558 - RNA, 19 nt, Artificial Sequence
  Description of Artificial Sequence: Synthetic oligonucleotide
agaaggcacuugcuagcag

SEQ ID NO: 1029559 - RNA, 19 nt, Artificial Sequence
  Description of Artificial Sequence: Synthetic oligonucleotide
cccauaacccuaaaucuug

SEQ ID NO: 1029560 - RNA, 19 nt, Artificial Sequence
  Description of Artificial Sequence: Synthetic oligonucleotide
aggcgcgucagccagcuaa

SEQ ID NO: 1029561 - RNA, 19 nt, Artificial Sequence
  Description of Artificial Sequence: Synthetic oligonucleotide
acacuuaaauuaacaagau

SEQ ID NO: 1029562 - RNA, 19 nt, Artificial Sequence
  Description of Artificial Sequence: Synthetic oligonucleotide
guguaauccgcucauuacu

SEQ ID NO: 1029563 - RNA, 19 nt, Artificial Sequence
  Description of Artificial Sequence: Synthetic oligonucleotide
acauucgguuuaaacaaga

SEQ ID NO: 1029564 - RNA, 19 nt, Artificial Sequence
  Description of Artificial Sequence: Synthetic oligonucleotide
accgaauaagcuggcaacu

SEQ ID NO: 1029565 - RNA, 19 nt, Artificial Sequence
  Description of Artificial Sequence: Synthetic oligonucleotide
uaguccgcgccucgaacca

SEQ ID NO: 1029566 - RNA, 19 nt, Artificial Sequence
  Description of Artificial Sequence: Synthetic oligonucleotide
gaacccuuacgcccggaca

SEQ ID NO: 1029567 - RNA, 19 nt, Artificial Sequence
  Description of Artificial Sequence: Synthetic oligonucleotide
ucaaguugucuggccaaca

SEQ ID NO: 1029568 - RNA, 19 nt, Artificial Sequence
  Description of Artificial Sequence: Synthetic oligonucleotide
agcuccuauucucgucccg

SEQ ID NO: 1029569 - RNA, 19 nt, Artificial Sequence
  Description of Artificial Sequence: Synthetic oligonucleotide
cagugagucaauagcuuga

SEQ ID NO: 1029570 - RNA, 19 nt, Artificial Sequence
  Description of Artificial Sequence: Synthetic oligonucleotide
auggguguaauccgcucau

SEQ ID NO: 1029571 - RNA, 19 nt, Artificial Sequence
  Description of Artificial Sequence: Synthetic oligonucleotide
cuaaccagcagugaaggcu

SEQ ID NO: 1029572 - RNA, 19 nt, Artificial Sequence
  Description of Artificial Sequence: Synthetic oligonucleotide
cuugggcccuuccuccugg

SEQ ID NO: 1029573 - RNA, 19 nt, Artificial Sequence
  Description of Artificial Sequence: Synthetic oligonucleotide
aucagugaccaugaggcuu

SEQ ID NO: 1029574 - RNA, 19 nt, Artificial Sequence
  Description of Artificial Sequence: Synthetic oligonucleotide
gaguuaauaugcagacaca

SEQ ID NO: 1029575 - RNA, 19 nt, Artificial Sequence
  Description of Artificial Sequence: Synthetic oligonucleotide
ggcgcugcuguguaaauca

SEQ ID NO: 1029576 - RNA, 19 nt, Artificial Sequence
  Description of Artificial Sequence: Synthetic oligonucleotide
guaauccgcucauuacuga

SEQ ID NO: 1029577 - RNA, 19 nt, Artificial Sequence
  Description of Artificial Sequence: Synthetic oligonucleotide
cccuaaaucuuguugcuuc

SEQ ID NO: 1029578 - RNA, 19 nt, Artificial Sequence
  Description of Artificial Sequence: Synthetic oligonucleotide
auucucgucccggggagag

SEQ ID NO: 1029579 - RNA, 19 nt, Artificial Sequence
  Description of Artificial Sequence: Synthetic oligonucleotide
auacagaaguuggaccaca

SEQ ID NO: 1029580 - RNA, 19 nt, Artificial Sequence
  Description of Artificial Sequence: Synthetic oligonucleotide
acagcaguauacaaccuuu

SEQ ID NO: 1029581 - RNA, 19 nt, Artificial Sequence
  Description of Artificial Sequence: Synthetic oligonucleotide
gagaaucgguacacaggag

SEQ ID NO: 1029582 - RNA, 19 nt, Artificial Sequence
  Description of Artificial Sequence: Synthetic oligonucleotide
ggugccgcucaguuguggg

SEQ ID NO: 1029583 - RNA, 19 nt, Artificial Sequence
  Description of Artificial Sequence: Synthetic oligonucleotide
augcuaguugaaaaucagu

SEQ ID NO: 1029584 - RNA, 19 nt, Artificial Sequence
  Description of Artificial Sequence: Synthetic oligonucleotide
ggucaauaacauaaacuga

SEQ ID NO: 1029585 - RNA, 19 nt, Artificial Sequence
  Description of Artificial Sequence: Synthetic oligonucleotide
auuagugcccgugcuggca

SEQ ID NO: 1029586 - RNA, 19 nt, Artificial Sequence
  Description of Artificial Sequence: Synthetic oligonucleotide
ucuacgucuuuggcucucc

SEQ ID NO: 1029587 - RNA, 19 nt, Artificial Sequence
  Description of Artificial Sequence: Synthetic oligonucleotide
ugccauaggauggugucuu

SEQ ID NO: 1029588 - RNA, 19 nt, Artificial Sequence
  Description of Artificial Sequence: Synthetic oligonucleotide
cauugguucccaccgaaua

SEQ ID NO: 1029589 - RNA, 19 nt, Artificial Sequence
  Description of Artificial Sequence: Synthetic oligonucleotide
acccuuacuggauccucca

SEQ ID NO: 1029590 - RNA, 19 nt, Artificial Sequence
  Description of Artificial Sequence: Synthetic oligonucleotide
acucuauuuaaaacacuua

SEQ ID NO: 1029591 - RNA, 19 nt, Artificial Sequence
  Description of Artificial Sequence: Synthetic oligonucleotide
caauuacaugugacuaaga

SEQ ID NO: 1029592 - RNA, 19 nt, Artificial Sequence
  Description of Artificial Sequence: Synthetic oligonucleotide
uuacccuuacuggauccuc

SEQ ID NO: 1029593 - RNA, 19 nt, Artificial Sequence
  Description of Artificial Sequence: Synthetic oligonucleotide
uugccauaggauggugucu

SEQ ID NO: 1029594 - RNA, 19 nt, Artificial Sequence
  Description of Artificial Sequence: Synthetic oligonucleotide
ucgguacacaggagaugca

SEQ ID NO: 1029595 - RNA, 19 nt, Artificial Sequence
  Description of Artificial Sequence: Synthetic oligonucleotide
ccggcauagggcaucgucc

SEQ ID NO: 1029596 - RNA, 19 nt, Artificial Sequence
  Description of Artificial Sequence: Synthetic oligonucleotide
guagaacauugguucccac

SEQ ID NO: 1029597 - RNA, 19 nt, Artificial Sequence
  Description of Artificial Sequence: Synthetic oligonucleotide
ucgucccggggagaguagg

SEQ ID NO: 1029598 - RNA, 19 nt, Artificial Sequence
  Description of Artificial Sequence: Synthetic oligonucleotide
uaacaccugcucccucgga

SEQ ID NO: 1029599 - RNA, 19 nt, Artificial Sequence
  Description of Artificial Sequence: Synthetic oligonucleotide
ggguuucacguaugaacgc

SEQ ID NO: 1029600 - RNA, 19 nt, Artificial Sequence
  Description of Artificial Sequence: Synthetic oligonucleotide
aucuacgucuuuggcucuc

SEQ ID NO: 1029601 - RNA, 19 nt, Artificial Sequence
  Description of Artificial Sequence: Synthetic oligonucleotide
caucaaguugucuggccaa

SEQ ID NO: 1029602 - RNA, 19 nt, Artificial Sequence
  Description of Artificial Sequence: Synthetic oligonucleotide
cguaugaacgcaaaacaga

SEQ ID NO: 1029603 - RNA, 19 nt, Artificial Sequence
  Description of Artificial Sequence: Synthetic oligonucleotide
ucccggggagaguagggaa

SEQ ID NO: 1029604 - RNA, 19 nt, Artificial Sequence
  Description of Artificial Sequence: Synthetic oligonucleotide
gguuucacguaugaacgca

SEQ ID NO: 1029605 - RNA, 19 nt, Artificial Sequence
  Description of Artificial Sequence: Synthetic oligonucleotide
ucucgucccggggagagua

SEQ ID NO: 1029606 - RNA, 19 nt, Artificial Sequence
  Description of Artificial Sequence: Synthetic oligonucleotide
gaaucgguacacaggagau

SEQ ID NO: 1029607 - RNA, 19 nt, Artificial Sequence
  Description of Artificial Sequence: Synthetic oligonucleotide
cagaguggucacuuguaaa

SEQ ID NO: 1029608 - RNA, 19 nt, Artificial Sequence
  Description of Artificial Sequence: Synthetic oligonucleotide
ucaauagcuugaggcgcgu

SEQ ID NO: 1029609 - RNA, 19 nt, Artificial Sequence
  Description of Artificial Sequence: Synthetic oligonucleotide
guaccggcauagggcaucg

SEQ ID NO: 1029610 - RNA, 19 nt, Artificial Sequence
  Description of Artificial Sequence: Synthetic oligonucleotide
ugaggcgcgucagccagcu

SEQ ID NO: 1029611 - RNA, 19 nt, Artificial Sequence
  Description of Artificial Sequence: Synthetic oligonucleotide
cgggguuugccauaggaug

SEQ ID NO: 1029612 - RNA, 19 nt, Artificial Sequence
  Description of Artificial Sequence: Synthetic oligonucleotide
ggguagaacauugguuccc

SEQ ID NO: 1029613 - RNA, 19 nt, Artificial Sequence
  Description of Artificial Sequence: Synthetic oligonucleotide
gauguaguccgcgccucga

SEQ ID NO: 1029614 - RNA, 19 nt, Artificial Sequence
  Description of Artificial Sequence: Synthetic oligonucleotide
uccauaggcaaagcuccua

SEQ ID NO: 1029615 - RNA, 19 nt, Artificial Sequence
  Description of Artificial Sequence: Synthetic oligonucleotide
cugcacgagagguggcuuc

SEQ ID NO: 1029616 - RNA, 19 nt, Artificial Sequence
  Description of Artificial Sequence: Synthetic oligonucleotide
ccgcucauuacugaaguac

SEQ ID NO: 1029617 - RNA, 19 nt, Artificial Sequence
  Description of Artificial Sequence: Synthetic oligonucleotide
uccgcucauuacugaagua

SEQ ID NO: 1029618 - RNA, 19 nt, Artificial Sequence
  Description of Artificial Sequence: Synthetic oligonucleotide
ggaaugaaguaaggucgcc

SEQ ID NO: 1029619 - RNA, 19 nt, Artificial Sequence
  Description of Artificial Sequence: Synthetic oligonucleotide
gcagauggagucugaagaa

SEQ ID NO: 1029620 - RNA, 19 nt, Artificial Sequence
  Description of Artificial Sequence: Synthetic oligonucleotide
uauucucgucccggggaga

SEQ ID NO: 1029621 - RNA, 19 nt, Artificial Sequence
  Description of Artificial Sequence: Synthetic oligonucleotide
ggcuuuccaagauauuucu

SEQ ID NO: 1029622 - RNA, 19 nt, Artificial Sequence
  Description of Artificial Sequence: Synthetic oligonucleotide
guuucacguaugaacgcaa

SEQ ID NO: 1029623 - RNA, 19 nt, Artificial Sequence
  Description of Artificial Sequence: Synthetic oligonucleotide
ugcccgugcuggcaaugac

SEQ ID NO: 1029624 - RNA, 19 nt, Artificial Sequence
  Description of Artificial Sequence: Synthetic oligonucleotide
caauuccugacaucaaguu

SEQ ID NO: 1029625 - RNA, 19 nt, Artificial Sequence
  Description of Artificial Sequence: Synthetic oligonucleotide
ccaacacacaauuuacaaa

SEQ ID NO: 1029626 - RNA, 19 nt, Artificial Sequence
  Description of Artificial Sequence: Synthetic oligonucleotide
gguagaacauugguuccca

SEQ ID NO: 1029627 - RNA, 19 nt, Artificial Sequence
  Description of Artificial Sequence: Synthetic oligonucleotide
gcuaaccagcagugaaggc

SEQ ID NO: 1029628 - RNA, 19 nt, Artificial Sequence
  Description of Artificial Sequence: Synthetic oligonucleotide
aucagcgaugguaaaucua

SEQ ID NO: 1029629 - RNA, 19 nt, Artificial Sequence
  Description of Artificial Sequence: Synthetic oligonucleotide
uccugacaucaaguugucu

SEQ ID NO: 1029630 - RNA, 19 nt, Artificial Sequence
  Description of Artificial Sequence: Synthetic oligonucleotide
gagauaacaccugcucccu

SEQ ID NO: 1029631 - RNA, 19 nt, Artificial Sequence
  Description of Artificial Sequence: Synthetic oligonucleotide
ggcaacugaucggaaucag

SEQ ID NO: 1029632 - RNA, 19 nt, Artificial Sequence
  Description of Artificial Sequence: Synthetic oligonucleotide
auaccugaugcuaguugaa

SEQ ID NO: 1029633 - RNA, 19 nt, Artificial Sequence
  Description of Artificial Sequence: Synthetic oligonucleotide
ccggaguaaaguugaaaga

SEQ ID NO: 1029634 - RNA, 19 nt, Artificial Sequence
  Description of Artificial Sequence: Synthetic oligonucleotide
ucccucggauguaguccgc

SEQ ID NO: 1029635 - RNA, 19 nt, Artificial Sequence
  Description of Artificial Sequence: Synthetic oligonucleotide
ucugcacgagagguggcuu

SEQ ID NO: 1029636 - RNA, 19 nt, Artificial Sequence
  Description of Artificial Sequence: Synthetic oligonucleotide
agcuauccacugaggaaga

SEQ ID NO: 1029637 - RNA, 19 nt, Artificial Sequence
  Description of Artificial Sequence: Synthetic oligonucleotide
cuguuuacccuuacuggau

SEQ ID NO: 1029638 - RNA, 19 nt, Artificial Sequence
  Description of Artificial Sequence: Synthetic oligonucleotide
augguggcgcugcugugua

SEQ ID NO: 1029639 - RNA, 19 nt, Artificial Sequence
  Description of Artificial Sequence: Synthetic oligonucleotide
ggggagaguagggaacagc

SEQ ID NO: 1029640 - RNA, 19 nt, Artificial Sequence
  Description of Artificial Sequence: Synthetic oligonucleotide
guuugccauaggauggugu

SEQ ID NO: 1029641 - RNA, 19 nt, Artificial Sequence
  Description of Artificial Sequence: Synthetic oligonucleotide
guccgcgccucgaaccagg

SEQ ID NO: 1029642 - RNA, 19 nt, Artificial Sequence
  Description of Artificial Sequence: Synthetic oligonucleotide
cagccagcuaaccagcagu

SEQ ID NO: 1029643 - RNA, 19 nt, Artificial Sequence
  Description of Artificial Sequence: Synthetic oligonucleotide
agagcccgugggccucuuc

SEQ ID NO: 1029644 - RNA, 19 nt, Artificial Sequence
  Description of Artificial Sequence: Synthetic oligonucleotide
gagcccgugggccucuucu

SEQ ID NO: 1029645 - RNA, 19 nt, Artificial Sequence
  Description of Artificial Sequence: Synthetic oligonucleotide
ccagcuaaccagcagugaa

SEQ ID NO: 1029646 - RNA, 19 nt, Artificial Sequence
  Description of Artificial Sequence: Synthetic oligonucleotide
ccuauucucgucccgggga

SEQ ID NO: 1029647 - RNA, 19 nt, Artificial Sequence
  Description of Artificial Sequence: Synthetic oligonucleotide
cagcaguauacaaccuuua

SEQ ID NO: 1029648 - RNA, 19 nt, Artificial Sequence
  Description of Artificial Sequence: Synthetic oligonucleotide
aguugugggucuggagaau

SEQ ID NO: 1029649 - RNA, 19 nt, Artificial Sequence
  Description of Artificial Sequence: Synthetic oligonucleotide
cauaggauggugucuucuu

SEQ ID NO: 1029650 - RNA, 19 nt, Artificial Sequence
  Description of Artificial Sequence: Synthetic oligonucleotide
uaaggucgccauggagcac

SEQ ID NO: 1029651 - RNA, 19 nt, Artificial Sequence
  Description of Artificial Sequence: Synthetic oligonucleotide
cucgucccggggagaguag

SEQ ID NO: 1029652 - RNA, 19 nt, Artificial Sequence
  Description of Artificial Sequence: Synthetic oligonucleotide
cccgugcuggcaaugacca

SEQ ID NO: 1029653 - RNA, 19 nt, Artificial Sequence
  Description of Artificial Sequence: Synthetic oligonucleotide
gccgggguuugccauagga

SEQ ID NO: 1029654 - RNA, 19 nt, Artificial Sequence
  Description of Artificial Sequence: Synthetic oligonucleotide
ccgaauaagcuggcaacug

SEQ ID NO: 1029655 - RNA, 19 nt, Artificial Sequence
  Description of Artificial Sequence: Synthetic oligonucleotide
ccucggauguaguccgcgc

SEQ ID NO: 1029656 - RNA, 19 nt, Artificial Sequence
  Description of Artificial Sequence: Synthetic oligonucleotide
ggggccggaguaaaguuga

SEQ ID NO: 1029657 - RNA, 19 nt, Artificial Sequence
  Description of Artificial Sequence: Synthetic oligonucleotide
acgcccggacagcugcugu

SEQ ID NO: 1029658 - RNA, 19 nt, Artificial Sequence
  Description of Artificial Sequence: Synthetic oligonucleotide
caauagcuugaggcgcguc

SEQ ID NO: 1029659 - RNA, 19 nt, Artificial Sequence
  Description of Artificial Sequence: Synthetic oligonucleotide
cgaauaagcuggcaacuga

SEQ ID NO: 1029660 - RNA, 19 nt, Artificial Sequence
  Description of Artificial Sequence: Synthetic oligonucleotide
gaccacaaaccaacacaua

SEQ ID NO: 1029661 - RNA, 19 nt, Artificial Sequence
  Description of Artificial Sequence: Synthetic oligonucleotide
aguccgcgccucgaaccag

SEQ ID NO: 1029662 - RNA, 19 nt, Artificial Sequence
  Description of Artificial Sequence: Synthetic oligonucleotide
cccggggagaguagggaac

SEQ ID NO: 1029663 - RNA, 19 nt, Artificial Sequence
  Description of Artificial Sequence: Synthetic oligonucleotide
cagaggccgggguuugcca

SEQ ID NO: 1029664 - RNA, 19 nt, Artificial Sequence
  Description of Artificial Sequence: Synthetic oligonucleotide
ggucuggcaaaugggucca

SEQ ID NO: 1029665 - RNA, 19 nt, Artificial Sequence
  Description of Artificial Sequence: Synthetic oligonucleotide
cugggucgugguggguggg

SEQ ID NO: 1029666 - RNA, 19 nt, Artificial Sequence
  Description of Artificial Sequence: Synthetic oligonucleotide
ggaaucagcgaugguaaau

SEQ ID NO: 1029667 - RNA, 19 nt, Artificial Sequence
  Description of Artificial Sequence: Synthetic oligonucleotide
uucucgucccggggagagu

SEQ ID NO: 1029668 - RNA, 19 nt, Artificial Sequence
  Description of Artificial Sequence: Synthetic oligonucleotide
gaucggaaucagcgauggu

SEQ ID NO: 1029669 - RNA, 19 nt, Artificial Sequence
  Description of Artificial Sequence: Synthetic oligonucleotide
cauaggcaaagcuccuauu

SEQ ID NO: 1029670 - RNA, 19 nt, Artificial Sequence
  Description of Artificial Sequence: Synthetic oligonucleotide
gccucgaaccaggugccgc

SEQ ID NO: 1029671 - RNA, 19 nt, Artificial Sequence
  Description of Artificial Sequence: Synthetic oligonucleotide
ccagaguggucacuuguaa

SEQ ID NO: 1029672 - RNA, 19 nt, Artificial Sequence
  Description of Artificial Sequence: Synthetic oligonucleotide
ggcaaugaccagagugguc

SEQ ID NO: 1029673 - RNA, 19 nt, Artificial Sequence
  Description of Artificial Sequence: Synthetic oligonucleotide
gugggucuggagaaucggu

SEQ ID NO: 1029674 - RNA, 19 nt, Artificial Sequence
  Description of Artificial Sequence: Synthetic oligonucleotide
gcuggcaacugaucggaau

SEQ ID NO: 1029675 - RNA, 19 nt, Artificial Sequence
  Description of Artificial Sequence: Synthetic oligonucleotide
ccuuacgcccggacagcug

SEQ ID NO: 1029676 - RNA, 19 nt, Artificial Sequence
  Description of Artificial Sequence: Synthetic oligonucleotide
cgucccggggagaguaggg

SEQ ID NO: 1029677 - RNA, 19 nt, Artificial Sequence
  Description of Artificial Sequence: Synthetic oligonucleotide
gggugaggucugcacgaga

SEQ ID NO: 1029678 - RNA, 19 nt, Artificial Sequence
  Description of Artificial Sequence: Synthetic oligonucleotide
gugccgcucaguugugggu

SEQ ID NO: 1029679 - RNA, 19 nt, Artificial Sequence
  Description of Artificial Sequence: Synthetic oligonucleotide
ggcgcgucagccagcuaac

SEQ ID NO: 1029680 - RNA, 19 nt, Artificial Sequence
  Description of Artificial Sequence: Synthetic oligonucleotide
ccauaacccuaaaucuugu

SEQ ID NO: 1029681 - RNA, 19 nt, Artificial Sequence
  Description of Artificial Sequence: Synthetic oligonucleotide
gcgccucgaaccaggugcc

SEQ ID NO: 1029682 - RNA, 19 nt, Artificial Sequence
  Description of Artificial Sequence: Synthetic oligonucleotide
uaccggcauagggcaucgu

SEQ ID NO: 1029683 - RNA, 19 nt, Artificial Sequence
  Description of Artificial Sequence: Synthetic oligonucleotide
ggccgggguuugccauagg

SEQ ID NO: 1029684 - RNA, 19 nt, Artificial Sequence
  Description of Artificial Sequence: Synthetic oligonucleotide
ccacaauccccauccaguu

SEQ ID NO: 1029685 - RNA, 19 nt, Artificial Sequence
  Description of Artificial Sequence: Synthetic oligonucleotide
cccauccaguucccaucug

SEQ ID NO: 1029686 - RNA, 19 nt, Artificial Sequence
  Description of Artificial Sequence: Synthetic oligonucleotide
gccaucaaccuuagucccu

SEQ ID NO: 1029687 - RNA, 19 nt, Artificial Sequence
  Description of Artificial Sequence: Synthetic oligonucleotide
gcgcgucagccagcuaacc

SEQ ID NO: 1029688 - RNA, 19 nt, Artificial Sequence
  Description of Artificial Sequence: Synthetic oligonucleotide
ccauaggauggugucuucu

SEQ ID NO: 1029689 - RNA, 19 nt, Artificial Sequence
  Description of Artificial Sequence: Synthetic oligonucleotide
ccgggguuugccauaggau

SEQ ID NO: 1029690 - RNA, 19 nt, Artificial Sequence
  Description of Artificial Sequence: Synthetic oligonucleotide
gccgcucaguugugggucu

SEQ ID NO: 1029691 - RNA, 19 nt, Artificial Sequence
  Description of Artificial Sequence: Synthetic oligonucleotide
gcacgagagguggcuucca

SEQ ID NO: 1029692 - RNA, 19 nt, Artificial Sequence
  Description of Artificial Sequence: Synthetic oligonucleotide
gaggcgcgucagccagcua

SEQ ID NO: 1029693 - RNA, 19 nt, Artificial Sequence
  Description of Artificial Sequence: Synthetic oligonucleotide
ccgcucaguugugggucug

SEQ ID NO: 1029694 - RNA, 19 nt, Artificial Sequence
  Description of Artificial Sequence: Synthetic oligonucleotide
ccaggauggcugguuuucu

SEQ ID NO: 1029695 - RNA, 19 nt, Artificial Sequence
  Description of Artificial Sequence: Synthetic oligonucleotide
cgccucgaaccaggugccg

SEQ ID NO: 1029696 - RNA, 19 nt, Artificial Sequence
  Description of Artificial Sequence: Synthetic oligonucleotide
gggccggaguaaaguugaa

SEQ ID NO: 1029697 - RNA, 19 nt, Artificial Sequence
  Description of Artificial Sequence: Synthetic oligonucleotide
cccuuacuggauccuccau

SEQ ID NO: 1029698 - RNA, 19 nt, Artificial Sequence
  Description of Artificial Sequence: Synthetic oligonucleotide
gcccggacagcugcuguuu

SEQ ID NO: 1029699 - RNA, 19 nt, Artificial Sequence
  Description of Artificial Sequence: Synthetic oligonucleotide
ggacugggucguggugggu

SEQ ID NO: 1029700 - RNA, 19 nt, Artificial Sequence
  Description of Artificial Sequence: Synthetic oligonucleotide
cgcccggacagcugcuguu

SEQ ID NO: 1029701 - RNA, 19 nt, Artificial Sequence
  Description of Artificial Sequence: Synthetic oligonucleotide
aaugagaagaguucuaccc

SEQ ID NO: 1029702 - RNA, 19 nt, Artificial Sequence
  Description of Artificial Sequence: Synthetic oligonucleotide
uucgguaugacucuguucc

SEQ ID NO: 1029703 - RNA, 19 nt, Artificial Sequence
  Description of Artificial Sequence: Synthetic oligonucleotide
aguaaaaguguguuguccc

SEQ ID NO: 1029704 - RNA, 19 nt, Artificial Sequence
  Description of Artificial Sequence: Synthetic oligonucleotide
uacaagaacgaacugcugg

SEQ ID NO: 1029705 - RNA, 19 nt, Artificial Sequence
  Description of Artificial Sequence: Synthetic oligonucleotide
aaagauaggugcucucucg

SEQ ID NO: 1029706 - RNA, 19 nt, Artificial Sequence
  Description of Artificial Sequence: Synthetic oligonucleotide
aauaaucuacuguacacaa

SEQ ID NO: 1029707 - RNA, 19 nt, Artificial Sequence
  Description of Artificial Sequence: Synthetic oligonucleotide
ucuacuguacacaaucuga

SEQ ID NO: 1029708 - RNA, 19 nt, Artificial Sequence
  Description of Artificial Sequence: Synthetic oligonucleotide
auugcuugaagccccauag

SEQ ID NO: 1029709 - RNA, 19 nt, Artificial Sequence
  Description of Artificial Sequence: Synthetic oligonucleotide
aacugcuagaccuucucag

SEQ ID NO: 1029710 - RNA, 19 nt, Artificial Sequence
  Description of Artificial Sequence: Synthetic oligonucleotide
auuggagagagagagagag

SEQ ID NO: 1029711 - RNA, 19 nt, Artificial Sequence
  Description of Artificial Sequence: Synthetic oligonucleotide
uuuauuccaaaauaacaaa

SEQ ID NO: 1029712 - RNA, 19 nt, Artificial Sequence
  Description of Artificial Sequence: Synthetic oligonucleotide
acaagaacgaacugcuggg

SEQ ID NO: 1029713 - RNA, 19 nt, Artificial Sequence
  Description of Artificial Sequence: Synthetic oligonucleotide
aagauaggugcucucucgg

SEQ ID NO: 1029714 - RNA, 19 nt, Artificial Sequence
  Description of Artificial Sequence: Synthetic oligonucleotide
ucuugggacuaaaacuucg

SEQ ID NO: 1029715 - RNA, 19 nt, Artificial Sequence
  Description of Artificial Sequence: Synthetic oligonucleotide
cuaagaguuugacaggugc

SEQ ID NO: 1029716 - RNA, 19 nt, Artificial Sequence
  Description of Artificial Sequence: Synthetic oligonucleotide
aguucaaggggacucuugg

SEQ ID NO: 1029717 - RNA, 19 nt, Artificial Sequence
  Description of Artificial Sequence: Synthetic oligonucleotide
agaaagacacucuaagagu

SEQ ID NO: 1029718 - RNA, 19 nt, Artificial Sequence
  Description of Artificial Sequence: Synthetic oligonucleotide
cuguucauaccacuggugg

SEQ ID NO: 1029719 - RNA, 19 nt, Artificial Sequence
  Description of Artificial Sequence: Synthetic oligonucleotide
aagaacgaacugcugggag

SEQ ID NO: 1029720 - RNA, 19 nt, Artificial Sequence
  Description of Artificial Sequence: Synthetic oligonucleotide
ugacuagaguucaaggaug

SEQ ID NO: 1029721 - RNA, 19 nt, Artificial Sequence
  Description of Artificial Sequence: Synthetic oligonucleotide
uacccuucgaaguaaaagu

SEQ ID NO: 1029722 - RNA, 19 nt, Artificial Sequence
  Description of Artificial Sequence: Synthetic oligonucleotide
uggagagagagagagagug

SEQ ID NO: 1029723 - RNA, 19 nt, Artificial Sequence
  Description of Artificial Sequence: Synthetic oligonucleotide
ugggacuaaaacuucgggc

SEQ ID NO: 1029724 - RNA, 19 nt, Artificial Sequence
  Description of Artificial Sequence: Synthetic oligonucleotide
acaaugagaagaguucuac

SEQ ID NO: 1029725 - RNA, 19 nt, Artificial Sequence
  Description of Artificial Sequence: Synthetic oligonucleotide
uucaaggggacucuuggga

SEQ ID NO: 1029726 - RNA, 19 nt, Artificial Sequence
  Description of Artificial Sequence: Synthetic oligonucleotide
augacucuguuccccaacc

SEQ ID NO: 1029727 - RNA, 19 nt, Artificial Sequence
  Description of Artificial Sequence: Synthetic oligonucleotide
uguagggagagccccagca

SEQ ID NO: 1029728 - RNA, 19 nt, Artificial Sequence
  Description of Artificial Sequence: Synthetic oligonucleotide
acagacuagaagcacaaaa

SEQ ID NO: 1029729 - RNA, 19 nt, Artificial Sequence
  Description of Artificial Sequence: Synthetic oligonucleotide
agaaacagacuagaagcac

SEQ ID NO: 1029730 - RNA, 19 nt, Artificial Sequence
  Description of Artificial Sequence: Synthetic oligonucleotide
cucgaauuccugcaagugg

SEQ ID NO: 1029731 - RNA, 19 nt, Artificial Sequence
  Description of Artificial Sequence: Synthetic oligonucleotide
acgacccuccaccagagcg

SEQ ID NO: 1029732 - RNA, 19 nt, Artificial Sequence
  Description of Artificial Sequence: Synthetic oligonucleotide
acuuucacacugcuccuac

SEQ ID NO: 1029733 - RNA, 19 nt, Artificial Sequence
  Description of Artificial Sequence: Synthetic oligonucleotide
auagaugaugcuguacuuc

SEQ ID NO: 1029734 - RNA, 19 nt, Artificial Sequence
  Description of Artificial Sequence: Synthetic oligonucleotide
ugagacauccccacucuca

SEQ ID NO: 1029735 - RNA, 19 nt, Artificial Sequence
  Description of Artificial Sequence: Synthetic oligonucleotide
uaagaguuugacaggugcu

SEQ ID NO: 1029736 - RNA, 19 nt, Artificial Sequence
  Description of Artificial Sequence: Synthetic oligonucleotide
agaguucuacccuucgaag

SEQ ID NO: 1029737 - RNA, 19 nt, Artificial Sequence
  Description of Artificial Sequence: Synthetic oligonucleotide
ugcccauugcucaugcucc

SEQ ID NO: 1029738 - RNA, 19 nt, Artificial Sequence
  Description of Artificial Sequence: Synthetic oligonucleotide
gacuagaguucaaggaugg

SEQ ID NO: 1029739 - RNA, 19 nt, Artificial Sequence
  Description of Artificial Sequence: Synthetic oligonucleotide
cuccuaacucuucagagug

SEQ ID NO: 1029740 - RNA, 19 nt, Artificial Sequence
  Description of Artificial Sequence: Synthetic oligonucleotide
agaagaguucuacccuucg

SEQ ID NO: 1029741 - RNA, 19 nt, Artificial Sequence
  Description of Artificial Sequence: Synthetic oligonucleotide
ucgaaguaaaaguguguug

SEQ ID NO: 1029742 - RNA, 19 nt, Artificial Sequence
  Description of Artificial Sequence: Synthetic oligonucleotide
agaguuugacaggugcugc

SEQ ID NO: 1029743 - RNA, 19 nt, Artificial Sequence
  Description of Artificial Sequence: Synthetic oligonucleotide
caguacaagaacgaacugc

SEQ ID NO: 1029744 - RNA, 19 nt, Artificial Sequence
  Description of Artificial Sequence: Synthetic oligonucleotide
ucuaacccaggccucuaag

SEQ ID NO: 1029745 - RNA, 19 nt, Artificial Sequence
  Description of Artificial Sequence: Synthetic oligonucleotide
gagagagagagagagugug

SEQ ID NO: 1029746 - RNA, 19 nt, Artificial Sequence
  Description of Artificial Sequence: Synthetic oligonucleotide
ucccucaugcagaacuggg

SEQ ID NO: 1029747 - RNA, 19 nt, Artificial Sequence
  Description of Artificial Sequence: Synthetic oligonucleotide
aaaacuucgggcacugccu

SEQ ID NO: 1029748 - RNA, 19 nt, Artificial Sequence
  Description of Artificial Sequence: Synthetic oligonucleotide
aacuucgggcacugccugc

SEQ ID NO: 1029749 - RNA, 19 nt, Artificial Sequence
  Description of Artificial Sequence: Synthetic oligonucleotide
uacuuggcgggacaaugag

SEQ ID NO: 1029750 - RNA, 19 nt, Artificial Sequence
  Description of Artificial Sequence: Synthetic oligonucleotide
cugcaaguggccaucuagg

SEQ ID NO: 1029751 - RNA, 19 nt, Artificial Sequence
  Description of Artificial Sequence: Synthetic oligonucleotide
gaucccagccuguucauac

SEQ ID NO: 1029752 - RNA, 19 nt, Artificial Sequence
  Description of Artificial Sequence: Synthetic oligonucleotide
aauuccugcaaguggccau

SEQ ID NO: 1029753 - RNA, 19 nt, Artificial Sequence
  Description of Artificial Sequence: Synthetic oligonucleotide
gccucuaagaggcuggugg

SEQ ID NO: 1029754 - RNA, 19 nt, Artificial Sequence
  Description of Artificial Sequence: Synthetic oligonucleotide
aagauguggcccacacucc

SEQ ID NO: 1029755 - RNA, 19 nt, Artificial Sequence
  Description of Artificial Sequence: Synthetic oligonucleotide
aacgucagauucuggagua

SEQ ID NO: 1029756 - RNA, 19 nt, Artificial Sequence
  Description of Artificial Sequence: Synthetic oligonucleotide
ucuaagaguuugacaggug

SEQ ID NO: 1029757 - RNA, 19 nt, Artificial Sequence
  Description of Artificial Sequence: Synthetic oligonucleotide
cuacccuucgaaguaaaag

SEQ ID NO: 1029758 - RNA, 19 nt, Artificial Sequence
  Description of Artificial Sequence: Synthetic oligonucleotide
gagagagagagagugugug

SEQ ID NO: 1029759 - RNA, 19 nt, Artificial Sequence
  Description of Artificial Sequence: Synthetic oligonucleotide
ucucucgggcuacuuggcg

SEQ ID NO: 1029760 - RNA, 19 nt, Artificial Sequence
  Description of Artificial Sequence: Synthetic oligonucleotide
agauccggggauccccugc

SEQ ID NO: 1029761 - RNA, 19 nt, Artificial Sequence
  Description of Artificial Sequence: Synthetic oligonucleotide
cuuggcgggacaaugagaa

SEQ ID NO: 1029762 - RNA, 19 nt, Artificial Sequence
  Description of Artificial Sequence: Synthetic oligonucleotide
uggcgggacaaugagaaga

SEQ ID NO: 1029763 - RNA, 19 nt, Artificial Sequence
  Description of Artificial Sequence: Synthetic oligonucleotide
uuuucaacugcuagaccuu

SEQ ID NO: 1029764 - RNA, 19 nt, Artificial Sequence
  Description of Artificial Sequence: Synthetic oligonucleotide
guucaaggggacucuuggg

SEQ ID NO: 1029765 - RNA, 19 nt, Artificial Sequence
  Description of Artificial Sequence: Synthetic oligonucleotide
aacuguggggagcccucac

SEQ ID NO: 1029766 - RNA, 19 nt, Artificial Sequence
  Description of Artificial Sequence: Synthetic oligonucleotide
aguucuacccuucgaagua

SEQ ID NO: 1029767 - RNA, 19 nt, Artificial Sequence
  Description of Artificial Sequence: Synthetic oligonucleotide
gagagugugugugugugug

SEQ ID NO: 1029768 - RNA, 19 nt, Artificial Sequence
  Description of Artificial Sequence: Synthetic oligonucleotide
ugagaagaguucuacccuu

SEQ ID NO: 1029769 - RNA, 19 nt, Artificial Sequence
  Description of Artificial Sequence: Synthetic oligonucleotide
aggaaagauaggugcucuc

SEQ ID NO: 1029770 - RNA, 19 nt, Artificial Sequence
  Description of Artificial Sequence: Synthetic oligonucleotide
cuugcacccuccuaguguc

SEQ ID NO: 1029771 - RNA, 19 nt, Artificial Sequence
  Description of Artificial Sequence: Synthetic oligonucleotide
ggugacuagaguucaagga

SEQ ID NO: 1029772 - RNA, 19 nt, Artificial Sequence
  Description of Artificial Sequence: Synthetic oligonucleotide
uucaaggauggagaauaug

SEQ ID NO: 1029773 - RNA, 19 nt, Artificial Sequence
  Description of Artificial Sequence: Synthetic oligonucleotide
cauuuccgguuccaggcgg

SEQ ID NO: 1029774 - RNA, 19 nt, Artificial Sequence
  Description of Artificial Sequence: Synthetic oligonucleotide
gugugugugugucugugug

SEQ ID NO: 1029775 - RNA, 19 nt, Artificial Sequence
  Description of Artificial Sequence: Synthetic oligonucleotide
ugugucuguguguguguag

SEQ ID NO: 1029776 - RNA, 19 nt, Artificial Sequence
  Description of Artificial Sequence: Synthetic oligonucleotide
gccgauuggagagagagag

SEQ ID NO: 1029777 - RNA, 19 nt, Artificial Sequence
  Description of Artificial Sequence: Synthetic oligonucleotide
gagagagugugugugugug

SEQ ID NO: 1029778 - RNA, 19 nt, Artificial Sequence
  Description of Artificial Sequence: Synthetic oligonucleotide
ggugcauaggacucggggc

SEQ ID NO: 1029779 - RNA, 19 nt, Artificial Sequence
  Description of Artificial Sequence: Synthetic oligonucleotide
aaaccgcagcacuuguuaa

SEQ ID NO: 1029780 - RNA, 19 nt, Artificial Sequence
  Description of Artificial Sequence: Synthetic oligonucleotide
gauccuucuagggugguga

SEQ ID NO: 1029781 - RNA, 19 nt, Artificial Sequence
  Description of Artificial Sequence: Synthetic oligonucleotide
acaguacaagaacgaacug

SEQ ID NO: 1029782 - RNA, 19 nt, Artificial Sequence
  Description of Artificial Sequence: Synthetic oligonucleotide
acuucgggcacugccugcc

SEQ ID NO: 1029783 - RNA, 19 nt, Artificial Sequence
  Description of Artificial Sequence: Synthetic oligonucleotide
uauugcuugaagccccaua

SEQ ID NO: 1029784 - RNA, 19 nt, Artificial Sequence
  Description of Artificial Sequence: Synthetic oligonucleotide
guggccgccgauuggagag

SEQ ID NO: 1029785 - RNA, 19 nt, Artificial Sequence
  Description of Artificial Sequence: Synthetic oligonucleotide
agagagagagagugugugu

SEQ ID NO: 1029786 - RNA, 19 nt, Artificial Sequence
  Description of Artificial Sequence: Synthetic oligonucleotide
gagugagccagaagucugg

SEQ ID NO: 1029787 - RNA, 19 nt, Artificial Sequence
  Description of Artificial Sequence: Synthetic oligonucleotide
gacucuguuccccaaccuc

SEQ ID NO: 1029788 - RNA, 19 nt, Artificial Sequence
  Description of Artificial Sequence: Synthetic oligonucleotide
aguggugggccuccuaacu

SEQ ID NO: 1029789 - RNA, 19 nt, Artificial Sequence
  Description of Artificial Sequence: Synthetic oligonucleotide
gcuccuacgacccuccacc

SEQ ID NO: 1029790 - RNA, 19 nt, Artificial Sequence
  Description of Artificial Sequence: Synthetic oligonucleotide
acauccccacucucacugc

SEQ ID NO: 1029791 - RNA, 19 nt, Artificial Sequence
  Description of Artificial Sequence: Synthetic oligonucleotide
ucagcucaugcaagcugag

SEQ ID NO: 1029792 - RNA, 19 nt, Artificial Sequence
  Description of Artificial Sequence: Synthetic oligonucleotide
ugugugugugucugugugu

SEQ ID NO: 1029793 - RNA, 19 nt, Artificial Sequence
  Description of Artificial Sequence: Synthetic oligonucleotide
ugggccuccuaacucuuca

SEQ ID NO: 1029794 - RNA, 19 nt, Artificial Sequence
  Description of Artificial Sequence: Synthetic oligonucleotide
gagugugugugugugugug

SEQ ID NO: 1029795 - RNA, 19 nt, Artificial Sequence
  Description of Artificial Sequence: Synthetic oligonucleotide
ugaugcuguacuuccggau

SEQ ID NO: 1029796 - RNA, 19 nt, Artificial Sequence
  Description of Artificial Sequence: Synthetic oligonucleotide
uuucgguaugacucuguuc

SEQ ID NO: 1029797 - RNA, 19 nt, Artificial Sequence
  Description of Artificial Sequence: Synthetic oligonucleotide
gcagaaggauccuucuagg

SEQ ID NO: 1029798 - RNA, 19 nt, Artificial Sequence
  Description of Artificial Sequence: Synthetic oligonucleotide
uucaacugcuagaccuucu

SEQ ID NO: 1029799 - RNA, 19 nt, Artificial Sequence
  Description of Artificial Sequence: Synthetic oligonucleotide
gggugcauaggacucgggg

SEQ ID NO: 1029800 - RNA, 19 nt, Artificial Sequence
  Description of Artificial Sequence: Synthetic oligonucleotide
uggccaucuaggcucuccc

SEQ ID NO: 1029801 - RNA, 19 nt, Artificial Sequence
  Description of Artificial Sequence: Synthetic oligonucleotide
ggacucuugggacuaaaac

SEQ ID NO: 1029802 - RNA, 19 nt, Artificial Sequence
  Description of Artificial Sequence: Synthetic oligonucleotide
accagagcgggaugagguc

SEQ ID NO: 1029803 - RNA, 19 nt, Artificial Sequence
  Description of Artificial Sequence: Synthetic oligonucleotide
auccguaccauuuccgguu

SEQ ID NO: 1029804 - RNA, 19 nt, Artificial Sequence
  Description of Artificial Sequence: Synthetic oligonucleotide
auccuucuaggguggugac

SEQ ID NO: 1029805 - RNA, 19 nt, Artificial Sequence
  Description of Artificial Sequence: Synthetic oligonucleotide
uccgguuccaggcggucug

SEQ ID NO: 1029806 - RNA, 19 nt, Artificial Sequence
  Description of Artificial Sequence: Synthetic oligonucleotide
aggcucuccccagacagac

SEQ ID NO: 1029807 - RNA, 19 nt, Artificial Sequence
  Description of Artificial Sequence: Synthetic oligonucleotide
acucucuaccaccauccgu

SEQ ID NO: 1029808 - RNA, 19 nt, Artificial Sequence
  Description of Artificial Sequence: Synthetic oligonucleotide
uggugggccuccuaacucu

SEQ ID NO: 1029809 - RNA, 19 nt, Artificial Sequence
  Description of Artificial Sequence: Synthetic oligonucleotide
ugugugucugugugugugu

SEQ ID NO: 1029810 - RNA, 19 nt, Artificial Sequence
  Description of Artificial Sequence: Synthetic oligonucleotide
agagagagugugugugugu

SEQ ID NO: 1029811 - RNA, 19 nt, Artificial Sequence
  Description of Artificial Sequence: Synthetic oligonucleotide
gcaccuugcacccuccuag

SEQ ID NO: 1029812 - RNA, 19 nt, Artificial Sequence
  Description of Artificial Sequence: Synthetic oligonucleotide
ugugugugugugucugugu

SEQ ID NO: 1029813 - RNA, 19 nt, Artificial Sequence
  Description of Artificial Sequence: Synthetic oligonucleotide
gaguucuacccuucgaagu

SEQ ID NO: 1029814 - RNA, 19 nt, Artificial Sequence
  Description of Artificial Sequence: Synthetic oligonucleotide
cagacuggcgcuguccucc

SEQ ID NO: 1029815 - RNA, 19 nt, Artificial Sequence
  Description of Artificial Sequence: Synthetic oligonucleotide
uuggagagagagagagagu

SEQ ID NO: 1029816 - RNA, 19 nt, Artificial Sequence
  Description of Artificial Sequence: Synthetic oligonucleotide
gaaacuccggaagauccuc

SEQ ID NO: 1029817 - RNA, 19 nt, Artificial Sequence
  Description of Artificial Sequence: Synthetic oligonucleotide
gaaagacacucuaagaguu

SEQ ID NO: 1029818 - RNA, 19 nt, Artificial Sequence
  Description of Artificial Sequence: Synthetic oligonucleotide
auuccugcaaguggccauc

SEQ ID NO: 1029819 - RNA, 19 nt, Artificial Sequence
  Description of Artificial Sequence: Synthetic oligonucleotide
auuucgguaugacucuguu

SEQ ID NO: 1029820 - RNA, 19 nt, Artificial Sequence
  Description of Artificial Sequence: Synthetic oligonucleotide
aaguucaaggggacucuug

SEQ ID NO: 1029821 - RNA, 19 nt, Artificial Sequence
  Description of Artificial Sequence: Synthetic oligonucleotide
gcuagaccuucucaggaag

SEQ ID NO: 1029822 - RNA, 19 nt, Artificial Sequence
  Description of Artificial Sequence: Synthetic oligonucleotide
uuuccgaguacccgccguc

SEQ ID NO: 1029823 - RNA, 19 nt, Artificial Sequence
  Description of Artificial Sequence: Synthetic oligonucleotide
guggugacuagaguucaag

SEQ ID NO: 1029824 - RNA, 19 nt, Artificial Sequence
  Description of Artificial Sequence: Synthetic oligonucleotide
ucccgaugcagguggggag

SEQ ID NO: 1029825 - RNA, 19 nt, Artificial Sequence
  Description of Artificial Sequence: Synthetic oligonucleotide
ugugugugugugugugucu

SEQ ID NO: 1029826 - RNA, 19 nt, Artificial Sequence
  Description of Artificial Sequence: Synthetic oligonucleotide
gccuccuaacucuucagag

SEQ ID NO: 1029827 - RNA, 19 nt, Artificial Sequence
  Description of Artificial Sequence: Synthetic oligonucleotide
gugugugugucugugugug

SEQ ID NO: 1029828 - RNA, 19 nt, Artificial Sequence
  Description of Artificial Sequence: Synthetic oligonucleotide
cuaacccaggccucuaaga

SEQ ID NO: 1029829 - RNA, 19 nt, Artificial Sequence
  Description of Artificial Sequence: Synthetic oligonucleotide
agcacuuguuaaauuaaaa

SEQ ID NO: 1029830 - RNA, 19 nt, Artificial Sequence
  Description of Artificial Sequence: Synthetic oligonucleotide
agaugaugcuguacuuccg

SEQ ID NO: 1029831 - RNA, 19 nt, Artificial Sequence
  Description of Artificial Sequence: Synthetic oligonucleotide
ucguugauggucagcucau

SEQ ID NO: 1029832 - RNA, 19 nt, Artificial Sequence
  Description of Artificial Sequence: Synthetic oligonucleotide
ucuggcccggccagauccg

SEQ ID NO: 1029833 - RNA, 19 nt, Artificial Sequence
  Description of Artificial Sequence: Synthetic oligonucleotide
ugugucugugugugugugu

SEQ ID NO: 1029834 - RNA, 19 nt, Artificial Sequence
  Description of Artificial Sequence: Synthetic oligonucleotide
ugugugugugugugugugu

SEQ ID NO: 1029835 - RNA, 19 nt, Artificial Sequence
  Description of Artificial Sequence: Synthetic oligonucleotide
ucgguaugacucuguuccc

SEQ ID NO: 1029836 - RNA, 19 nt, Artificial Sequence
  Description of Artificial Sequence: Synthetic oligonucleotide
uucuacccuucgaaguaaa

SEQ ID NO: 1029837 - RNA, 19 nt, Artificial Sequence
  Description of Artificial Sequence: Synthetic oligonucleotide
gugugugucugugugugug

SEQ ID NO: 1029838 - RNA, 19 nt, Artificial Sequence
  Description of Artificial Sequence: Synthetic oligonucleotide
cuacgacccuccaccagag

SEQ ID NO: 1029839 - RNA, 19 nt, Artificial Sequence
  Description of Artificial Sequence: Synthetic oligonucleotide
agagagugugugugugugu

SEQ ID NO: 1029840 - RNA, 19 nt, Artificial Sequence
  Description of Artificial Sequence: Synthetic oligonucleotide
gugugugugugugugugug

SEQ ID NO: 1029841 - RNA, 19 nt, Artificial Sequence
  Description of Artificial Sequence: Synthetic oligonucleotide
gucugugugugugugucug

SEQ ID NO: 1029842 - RNA, 19 nt, Artificial Sequence
  Description of Artificial Sequence: Synthetic oligonucleotide
gcuugaagccccauagucc

SEQ ID NO: 1029843 - RNA, 19 nt, Artificial Sequence
  Description of Artificial Sequence: Synthetic oligonucleotide
acagacuggcgcuguccuc

SEQ ID NO: 1029844 - RNA, 19 nt, Artificial Sequence
  Description of Artificial Sequence: Synthetic oligonucleotide
ugcuccuacgacccuccac

SEQ ID NO: 1029845 - RNA, 19 nt, Artificial Sequence
  Description of Artificial Sequence: Synthetic oligonucleotide
agugugugugugugugugu

SEQ ID NO: 1029846 - RNA, 19 nt, Artificial Sequence
  Description of Artificial Sequence: Synthetic oligonucleotide
ccugcaaguggccaucuag

SEQ ID NO: 1029847 - RNA, 19 nt, Artificial Sequence
  Description of Artificial Sequence: Synthetic oligonucleotide
ccaacgucagauucuggag

SEQ ID NO: 1029848 - RNA, 19 nt, Artificial Sequence
  Description of Artificial Sequence: Synthetic oligonucleotide
uucuaggguggugacuaga

SEQ ID NO: 1029849 - RNA, 19 nt, Artificial Sequence
  Description of Artificial Sequence: Synthetic oligonucleotide
gugugugugugugugucug

SEQ ID NO: 1029850 - RNA, 19 nt, Artificial Sequence
  Description of Artificial Sequence: Synthetic oligonucleotide
gaagcggugacagcuucuc

SEQ ID NO: 1029851 - RNA, 19 nt, Artificial Sequence
  Description of Artificial Sequence: Synthetic oligonucleotide
ugugugugugugugucugu

SEQ ID NO: 1029852 - RNA, 19 nt, Artificial Sequence
  Description of Artificial Sequence: Synthetic oligonucleotide
cgauuggagagagagagag

SEQ ID NO: 1029853 - RNA, 19 nt, Artificial Sequence
  Description of Artificial Sequence: Synthetic oligonucleotide
guaaaaguguguugucccu

SEQ ID NO: 1029854 - RNA, 19 nt, Artificial Sequence
  Description of Artificial Sequence: Synthetic oligonucleotide
ccauccguaccauuuccgg

SEQ ID NO: 1029855 - RNA, 19 nt, Artificial Sequence
  Description of Artificial Sequence: Synthetic oligonucleotide
gacccuccaccagagcggg

SEQ ID NO: 1029856 - RNA, 19 nt, Artificial Sequence
  Description of Artificial Sequence: Synthetic oligonucleotide
agagugugugugugugugu

SEQ ID NO: 1029857 - RNA, 19 nt, Artificial Sequence
  Description of Artificial Sequence: Synthetic oligonucleotide
uccguaccauuuccgguuc

SEQ ID NO: 1029858 - RNA, 19 nt, Artificial Sequence
  Description of Artificial Sequence: Synthetic oligonucleotide
ucugugugugugugucugu

SEQ ID NO: 1029859 - RNA, 19 nt, Artificial Sequence
  Description of Artificial Sequence: Synthetic oligonucleotide
ucucuaccaccauccguac

SEQ ID NO: 1029860 - RNA, 19 nt, Artificial Sequence
  Description of Artificial Sequence: Synthetic oligonucleotide
cuacuuggcgggacaauga

SEQ ID NO: 1029861 - RNA, 19 nt, Artificial Sequence
  Description of Artificial Sequence: Synthetic oligonucleotide
gggacaaugagaagaguuc

SEQ ID NO: 1029862 - RNA, 19 nt, Artificial Sequence
  Description of Artificial Sequence: Synthetic oligonucleotide
ugucugugugugugugucu

SEQ ID NO: 1029863 - RNA, 19 nt, Artificial Sequence
  Description of Artificial Sequence: Synthetic oligonucleotide
aggcggccauagaugaugc

SEQ ID NO: 1029864 - RNA, 19 nt, Artificial Sequence
  Description of Artificial Sequence: Synthetic oligonucleotide
uugcccucccgccgcuugg

SEQ ID NO: 1029865 - RNA, 19 nt, Artificial Sequence
  Description of Artificial Sequence: Synthetic oligonucleotide
gagaagaguucuacccuuc

SEQ ID NO: 1029866 - RNA, 19 nt, Artificial Sequence
  Description of Artificial Sequence: Synthetic oligonucleotide
ugugugugucugugugugu

SEQ ID NO: 1029867 - RNA, 19 nt, Artificial Sequence
  Description of Artificial Sequence: Synthetic oligonucleotide
gauguggcccacacuccgc

SEQ ID NO: 1029868 - RNA, 19 nt, Artificial Sequence
  Description of Artificial Sequence: Synthetic oligonucleotide
cauccaucucaaagaugug

SEQ ID NO: 1029869 - RNA, 19 nt, Artificial Sequence
  Description of Artificial Sequence: Synthetic oligonucleotide
auaaucuacuguacacaau

SEQ ID NO: 1029870 - RNA, 19 nt, Artificial Sequence
  Description of Artificial Sequence: Synthetic oligonucleotide
acgucagauucuggaguac

SEQ ID NO: 1029871 - RNA, 19 nt, Artificial Sequence
  Description of Artificial Sequence: Synthetic oligonucleotide
ugucguugucauccaucuc

SEQ ID NO: 1029872 - RNA, 19 nt, Artificial Sequence
  Description of Artificial Sequence: Synthetic oligonucleotide
gugucuguguguguguguc

SEQ ID NO: 1029873 - RNA, 19 nt, Artificial Sequence
  Description of Artificial Sequence: Synthetic oligonucleotide
cugccggcuggcuucggcc

SEQ ID NO: 1029874 - RNA, 19 nt, Artificial Sequence
  Description of Artificial Sequence: Synthetic oligonucleotide
gguaugacucuguucccca

SEQ ID NO: 1029875 - RNA, 19 nt, Artificial Sequence
  Description of Artificial Sequence: Synthetic oligonucleotide
cugugugugugugucugug

SEQ ID NO: 1029876 - RNA, 19 nt, Artificial Sequence
  Description of Artificial Sequence: Synthetic oligonucleotide
gauuggagagagagagaga

SEQ ID NO: 1029877 - RNA, 19 nt, Artificial Sequence
  Description of Artificial Sequence: Synthetic oligonucleotide
gugugugugugugucugug

SEQ ID NO: 1029878 - RNA, 19 nt, Artificial Sequence
  Description of Artificial Sequence: Synthetic oligonucleotide
agagagagagagagugugu

SEQ ID NO: 1029879 - RNA, 19 nt, Artificial Sequence
  Description of Artificial Sequence: Synthetic oligonucleotide
uggggaaacuccggaagau

SEQ ID NO: 1029880 - RNA, 19 nt, Artificial Sequence
  Description of Artificial Sequence: Synthetic oligonucleotide
gaggaugggugggcaaacc

SEQ ID NO: 1029881 - RNA, 19 nt, Artificial Sequence
  Description of Artificial Sequence: Synthetic oligonucleotide
ugcuggauuucgguaugac

SEQ ID NO: 1029882 - RNA, 19 nt, Artificial Sequence
  Description of Artificial Sequence: Synthetic oligonucleotide
ggcgaacagagccauuuuc

SEQ ID NO: 1029883 - RNA, 19 nt, Artificial Sequence
  Description of Artificial Sequence: Synthetic oligonucleotide
uccucccgaugcagguggg

SEQ ID NO: 1029884 - RNA, 19 nt, Artificial Sequence
  Description of Artificial Sequence: Synthetic oligonucleotide
cagggucuaacccaggccu

SEQ ID NO: 1029885 - RNA, 19 nt, Artificial Sequence
  Description of Artificial Sequence: Synthetic oligonucleotide
gacaaugagaagaguucua

SEQ ID NO: 1029886 - RNA, 19 nt, Artificial Sequence
  Description of Artificial Sequence: Synthetic oligonucleotide
aggcggucuggaccacccc

SEQ ID NO: 1029887 - RNA, 19 nt, Artificial Sequence
  Description of Artificial Sequence: Synthetic oligonucleotide
guguguguguguguguguc

SEQ ID NO: 1029888 - RNA, 19 nt, Artificial Sequence
  Description of Artificial Sequence: Synthetic oligonucleotide
cagcacuuguuaaauuaaa

SEQ ID NO: 1029889 - RNA, 19 nt, Artificial Sequence
  Description of Artificial Sequence: Synthetic oligonucleotide
accgcagcacuuguuaaau

SEQ ID NO: 1029890 - RNA, 19 nt, Artificial Sequence
  Description of Artificial Sequence: Synthetic oligonucleotide
guggugggccuccuaacuc

SEQ ID NO: 1029891 - RNA, 19 nt, Artificial Sequence
  Description of Artificial Sequence: Synthetic oligonucleotide
ugcacccuccuaguguccu

SEQ ID NO: 1029892 - RNA, 19 nt, Artificial Sequence
  Description of Artificial Sequence: Synthetic oligonucleotide
caacugcuagaccuucuca

SEQ ID NO: 1029893 - RNA, 19 nt, Artificial Sequence
  Description of Artificial Sequence: Synthetic oligonucleotide
guaucagggcgaacagagc

SEQ ID NO: 1029894 - RNA, 19 nt, Artificial Sequence
  Description of Artificial Sequence: Synthetic oligonucleotide
ggcgggacaaugagaagag

SEQ ID NO: 1029895 - RNA, 19 nt, Artificial Sequence
  Description of Artificial Sequence: Synthetic oligonucleotide
gaggaaagauaggugcucu

SEQ ID NO: 1029896 - RNA, 19 nt, Artificial Sequence
  Description of Artificial Sequence: Synthetic oligonucleotide
cacugguggccgccgauug

SEQ ID NO: 1029897 - RNA, 19 nt, Artificial Sequence
  Description of Artificial Sequence: Synthetic oligonucleotide
ccuccuaguguccucuggc

SEQ ID NO: 1029898 - RNA, 19 nt, Artificial Sequence
  Description of Artificial Sequence: Synthetic oligonucleotide
gugugucugugugugugug

SEQ ID NO: 1029899 - RNA, 19 nt, Artificial Sequence
  Description of Artificial Sequence: Synthetic oligonucleotide
uccgaguacccgccgucuc

SEQ ID NO: 1029900 - RNA, 19 nt, Artificial Sequence
  Description of Artificial Sequence: Synthetic oligonucleotide
ugcauaggacucggggccu

SEQ ID NO: 1029901 - RNA, 19 nt, Artificial Sequence
  Description of Artificial Sequence: Synthetic oligonucleotide
augccccugagccggguga

SEQ ID NO: 1029902 - RNA, 19 nt, Artificial Sequence
  Description of Artificial Sequence: Synthetic oligonucleotide
ggagacccagggucuaacc

SEQ ID NO: 1029903 - RNA, 19 nt, Artificial Sequence
  Description of Artificial Sequence: Synthetic oligonucleotide
auaggacucggggccuggg

SEQ ID NO: 1029904 - RNA, 19 nt, Artificial Sequence
  Description of Artificial Sequence: Synthetic oligonucleotide
uccuucuaggguggugacu

SEQ ID NO: 1029905 - RNA, 19 nt, Artificial Sequence
  Description of Artificial Sequence: Synthetic oligonucleotide
ggggaugaggauggguggg

SEQ ID NO: 1029906 - RNA, 19 nt, Artificial Sequence
  Description of Artificial Sequence: Synthetic oligonucleotide
gaccccaguaucagggcga

SEQ ID NO: 1029907 - RNA, 19 nt, Artificial Sequence
  Description of Artificial Sequence: Synthetic oligonucleotide
caguggugggccuccuaac

SEQ ID NO: 1029908 - RNA, 19 nt, Artificial Sequence
  Description of Artificial Sequence: Synthetic oligonucleotide
ucacugccggcuggcuucg

SEQ ID NO: 1029909 - RNA, 19 nt, Artificial Sequence
  Description of Artificial Sequence: Synthetic oligonucleotide
uggcgcuguccuccucuag

SEQ ID NO: 1029910 - RNA, 19 nt, Artificial Sequence
  Description of Artificial Sequence: Synthetic oligonucleotide
cauaggacucggggccugg

SEQ ID NO: 1029911 - RNA, 19 nt, Artificial Sequence
  Description of Artificial Sequence: Synthetic oligonucleotide
cugccgugcccauugcuca

SEQ ID NO: 1029912 - RNA, 19 nt, Artificial Sequence
  Description of Artificial Sequence: Synthetic oligonucleotide
uuccgaguacccgccgucu

SEQ ID NO: 1029913 - RNA, 19 nt, Artificial Sequence
  Description of Artificial Sequence: Synthetic oligonucleotide
agacacucuaagaguuuga

SEQ ID NO: 1029914 - RNA, 19 nt, Artificial Sequence
  Description of Artificial Sequence: Synthetic oligonucleotide
ugccggcuggcuucggccu

SEQ ID NO: 1029915 - RNA, 19 nt, Artificial Sequence
  Description of Artificial Sequence: Synthetic oligonucleotide
ccaguaucagggcgaacag

SEQ ID NO: 1029916 - RNA, 19 nt, Artificial Sequence
  Description of Artificial Sequence: Synthetic oligonucleotide
ccauuuccgguuccaggcg

SEQ ID NO: 1029917 - RNA, 19 nt, Artificial Sequence
  Description of Artificial Sequence: Synthetic oligonucleotide
agcaucaccccuggggaaa

SEQ ID NO: 1029918 - RNA, 19 nt, Artificial Sequence
  Description of Artificial Sequence: Synthetic oligonucleotide
acuuggcgggacaaugaga

SEQ ID NO: 1029919 - RNA, 19 nt, Artificial Sequence
  Description of Artificial Sequence: Synthetic oligonucleotide
ccgccgauuggagagagag

SEQ ID NO: 1029920 - RNA, 19 nt, Artificial Sequence
  Description of Artificial Sequence: Synthetic oligonucleotide
ccuucaaggaggaaagaua

SEQ ID NO: 1029921 - RNA, 19 nt, Artificial Sequence
  Description of Artificial Sequence: Synthetic oligonucleotide
aggccccugcuuguuauug

SEQ ID NO: 1029922 - RNA, 19 nt, Artificial Sequence
  Description of Artificial Sequence: Synthetic oligonucleotide
auccggggauccccugcuc

SEQ ID NO: 1029923 - RNA, 19 nt, Artificial Sequence
  Description of Artificial Sequence: Synthetic oligonucleotide
aucgguccagcaagccuuc

SEQ ID NO: 1029924 - RNA, 19 nt, Artificial Sequence
  Description of Artificial Sequence: Synthetic oligonucleotide
cccaguaucagggcgaaca

SEQ ID NO: 1029925 - RNA, 19 nt, Artificial Sequence
  Description of Artificial Sequence: Synthetic oligonucleotide
caagaacgaacugcuggga

SEQ ID NO: 1029926 - RNA, 19 nt, Artificial Sequence
  Description of Artificial Sequence: Synthetic oligonucleotide
ucccuucaaggaggaaaga

SEQ ID NO: 1029927 - RNA, 19 nt, Artificial Sequence
  Description of Artificial Sequence: Synthetic oligonucleotide
guaugacucuguuccccaa

SEQ ID NO: 1029928 - RNA, 19 nt, Artificial Sequence
  Description of Artificial Sequence: Synthetic oligonucleotide
cuagaccuucucaggaagu

SEQ ID NO: 1029929 - RNA, 19 nt, Artificial Sequence
  Description of Artificial Sequence: Synthetic oligonucleotide
ggacaaugagaagaguucu

SEQ ID NO: 1029930 - RNA, 19 nt, Artificial Sequence
  Description of Artificial Sequence: Synthetic oligonucleotide
ggaaagauaggugcucucu

SEQ ID NO: 1029931 - RNA, 19 nt, Artificial Sequence
  Description of Artificial Sequence: Synthetic oligonucleotide
ugccccugagccgggugag

SEQ ID NO: 1029932 - RNA, 19 nt, Artificial Sequence
  Description of Artificial Sequence: Synthetic oligonucleotide
ccagagcgggaugaggucc

SEQ ID NO: 1029933 - RNA, 19 nt, Artificial Sequence
  Description of Artificial Sequence: Synthetic oligonucleotide
uuauugcuugaagccccau

SEQ ID NO: 1029934 - RNA, 19 nt, Artificial Sequence
  Description of Artificial Sequence: Synthetic oligonucleotide
gauuucgguaugacucugu

SEQ ID NO: 1029935 - RNA, 19 nt, Artificial Sequence
  Description of Artificial Sequence: Synthetic oligonucleotide
guguagggagagccccagc

SEQ ID NO: 1029936 - RNA, 19 nt, Artificial Sequence
  Description of Artificial Sequence: Synthetic oligonucleotide
guucuacccuucgaaguaa

SEQ ID NO: 1029937 - RNA, 19 nt, Artificial Sequence
  Description of Artificial Sequence: Synthetic oligonucleotide
ggauuucgguaugacucug

SEQ ID NO: 1029938 - RNA, 19 nt, Artificial Sequence
  Description of Artificial Sequence: Synthetic oligonucleotide
uucgggcacugccugccuu

SEQ ID NO: 1029939 - RNA, 19 nt, Artificial Sequence
  Description of Artificial Sequence: Synthetic oligonucleotide
cauccguaccauuuccggu

SEQ ID NO: 1029940 - RNA, 19 nt, Artificial Sequence
  Description of Artificial Sequence: Synthetic oligonucleotide
ccuacgacccuccaccaga

SEQ ID NO: 1029941 - RNA, 19 nt, Artificial Sequence
  Description of Artificial Sequence: Synthetic oligonucleotide
caccgccccaguccccucg

SEQ ID NO: 1029942 - RNA, 19 nt, Artificial Sequence
  Description of Artificial Sequence: Synthetic oligonucleotide
gauccggggauccccugcu

SEQ ID NO: 1029943 - RNA, 19 nt, Artificial Sequence
  Description of Artificial Sequence: Synthetic oligonucleotide
ggacuccucccgaugcagg

SEQ ID NO: 1029944 - RNA, 19 nt, Artificial Sequence
  Description of Artificial Sequence: Synthetic oligonucleotide
ggccaucuaggcucucccc

SEQ ID NO: 1029945 - RNA, 19 nt, Artificial Sequence
  Description of Artificial Sequence: Synthetic oligonucleotide
agacuggcgcuguccuccu

SEQ ID NO: 1029946 - RNA, 19 nt, Artificial Sequence
  Description of Artificial Sequence: Synthetic oligonucleotide
ccucgaauuccugcaagug

SEQ ID NO: 1029947 - RNA, 19 nt, Artificial Sequence
  Description of Artificial Sequence: Synthetic oligonucleotide
cgaauuccugcaaguggcc

SEQ ID NO: 1029948 - RNA, 19 nt, Artificial Sequence
  Description of Artificial Sequence: Synthetic oligonucleotide
ggccuccuaacucuucaga

SEQ ID NO: 1029949 - RNA, 19 nt, Artificial Sequence
  Description of Artificial Sequence: Synthetic oligonucleotide
cuucggccuccacuuucac

SEQ ID NO: 1029950 - RNA, 19 nt, Artificial Sequence
  Description of Artificial Sequence: Synthetic oligonucleotide
uuuccgguuccaggcgguc

SEQ ID NO: 1029951 - RNA, 19 nt, Artificial Sequence
  Description of Artificial Sequence: Synthetic oligonucleotide
ggaguacucuggcccggcc

SEQ ID NO: 1029952 - RNA, 19 nt, Artificial Sequence
  Description of Artificial Sequence: Synthetic oligonucleotide
cugguggccgccgauugga

SEQ ID NO: 1029953 - RNA, 19 nt, Artificial Sequence
  Description of Artificial Sequence: Synthetic oligonucleotide
ggccccugcuuguuauugc

SEQ ID NO: 1029954 - RNA, 19 nt, Artificial Sequence
  Description of Artificial Sequence: Synthetic oligonucleotide
gucuaacccaggccucuaa

SEQ ID NO: 1029955 - RNA, 19 nt, Artificial Sequence
  Description of Artificial Sequence: Synthetic oligonucleotide
gggaugaggaugggugggc

SEQ ID NO: 1029956 - RNA, 19 nt, Artificial Sequence
  Description of Artificial Sequence: Synthetic oligonucleotide
ucgggcuacuuggcgggac

SEQ ID NO: 1029957 - RNA, 19 nt, Artificial Sequence
  Description of Artificial Sequence: Synthetic oligonucleotide
cagauccggggauccccug

SEQ ID NO: 1029958 - RNA, 19 nt, Artificial Sequence
  Description of Artificial Sequence: Synthetic oligonucleotide
cuccuacgacccuccacca

SEQ ID NO: 1029959 - RNA, 19 nt, Artificial Sequence
  Description of Artificial Sequence: Synthetic oligonucleotide
acacugcuccuacgacccu

SEQ ID NO: 1029960 - RNA, 19 nt, Artificial Sequence
  Description of Artificial Sequence: Synthetic oligonucleotide
uccgcgccagcuucuuauu

SEQ ID NO: 1029961 - RNA, 19 nt, Artificial Sequence
  Description of Artificial Sequence: Synthetic oligonucleotide
cauccccaccgccccaguc

SEQ ID NO: 1029962 - RNA, 19 nt, Artificial Sequence
  Description of Artificial Sequence: Synthetic oligonucleotide
ccuucuaggguggugacua

SEQ ID NO: 1029963 - RNA, 19 nt, Artificial Sequence
  Description of Artificial Sequence: Synthetic oligonucleotide
caagcugaucccagccugu

SEQ ID NO: 1029964 - RNA, 19 nt, Artificial Sequence
  Description of Artificial Sequence: Synthetic oligonucleotide
ggauccuucuaggguggug

SEQ ID NO: 1029965 - RNA, 19 nt, Artificial Sequence
  Description of Artificial Sequence: Synthetic oligonucleotide
cuuuccgaguacccgccgu

SEQ ID NO: 1029966 - RNA, 19 nt, Artificial Sequence
  Description of Artificial Sequence: Synthetic oligonucleotide
cuggcccggccagauccgg

SEQ ID NO: 1029967 - RNA, 19 nt, Artificial Sequence
  Description of Artificial Sequence: Synthetic oligonucleotide
ggcaucgguccagcaagcc

SEQ ID NO: 1029968 - RNA, 19 nt, Artificial Sequence
  Description of Artificial Sequence: Synthetic oligonucleotide
ccuuuccgaguacccgccg

SEQ ID NO: 1029969 - RNA, 19 nt, Artificial Sequence
  Description of Artificial Sequence: Synthetic oligonucleotide
ggguggugacuagaguuca

SEQ ID NO: 1029970 - RNA, 19 nt, Artificial Sequence
  Description of Artificial Sequence: Synthetic oligonucleotide
ccugcuuguuauugcuuga

SEQ ID NO: 1029971 - RNA, 19 nt, Artificial Sequence
  Description of Artificial Sequence: Synthetic oligonucleotide
gugugucugugugugugua

SEQ ID NO: 1029972 - RNA, 19 nt, Artificial Sequence
  Description of Artificial Sequence: Synthetic oligonucleotide
cgguaugacucuguucccc

SEQ ID NO: 1029973 - RNA, 19 nt, Artificial Sequence
  Description of Artificial Sequence: Synthetic oligonucleotide
uggccgccgauuggagaga

SEQ ID NO: 1029974 - RNA, 19 nt, Artificial Sequence
  Description of Artificial Sequence: Synthetic oligonucleotide
ugcccucccgccgcuugga

SEQ ID NO: 1029975 - RNA, 19 nt, Artificial Sequence
  Description of Artificial Sequence: Synthetic oligonucleotide
guucaaggauggagaauau

SEQ ID NO: 1029976 - RNA, 19 nt, Artificial Sequence
  Description of Artificial Sequence: Synthetic oligonucleotide
ccgugcccauugcucaugc

SEQ ID NO: 1029977 - RNA, 19 nt, Artificial Sequence
  Description of Artificial Sequence: Synthetic oligonucleotide
cacuuucacacugcuccua

SEQ ID NO: 1029978 - RNA, 19 nt, Artificial Sequence
  Description of Artificial Sequence: Synthetic oligonucleotide
ucccaccggcagccauccc

SEQ ID NO: 1029979 - RNA, 19 nt, Artificial Sequence
  Description of Artificial Sequence: Synthetic oligonucleotide
cauugcucaugcucccuuu

SEQ ID NO: 1029980 - RNA, 19 nt, Artificial Sequence
  Description of Artificial Sequence: Synthetic oligonucleotide
gcuucggccuccacuuuca

SEQ ID NO: 1029981 - RNA, 19 nt, Artificial Sequence
  Description of Artificial Sequence: Synthetic oligonucleotide
ggggacuccucccgaugca

SEQ ID NO: 1029982 - RNA, 19 nt, Artificial Sequence
  Description of Artificial Sequence: Synthetic oligonucleotide
gacuggcgcuguccuccuc

SEQ ID NO: 1029983 - RNA, 19 nt, Artificial Sequence
  Description of Artificial Sequence: Synthetic oligonucleotide
ggagagagagagagagugu

SEQ ID NO: 1029984 - RNA, 19 nt, Artificial Sequence
  Description of Artificial Sequence: Synthetic oligonucleotide
ggcaaaccgcagcacuugu

SEQ ID NO: 1029985 - RNA, 19 nt, Artificial Sequence
  Description of Artificial Sequence: Synthetic oligonucleotide
cagcaagccuuccucgaau

SEQ ID NO: 1029986 - RNA, 19 nt, Artificial Sequence
  Description of Artificial Sequence: Synthetic oligonucleotide
acacuccgcgccagcuucu

SEQ ID NO: 1029987 - RNA, 19 nt, Artificial Sequence
  Description of Artificial Sequence: Synthetic oligonucleotide
ggccauagaugaugcugua

SEQ ID NO: 1029988 - RNA, 19 nt, Artificial Sequence
  Description of Artificial Sequence: Synthetic oligonucleotide
cgcgccagcuucuuauuca

SEQ ID NO: 1029989 - RNA, 19 nt, Artificial Sequence
  Description of Artificial Sequence: Synthetic oligonucleotide
gggcgcaccuugcacccuc

SEQ ID NO: 1029990 - RNA, 19 nt, Artificial Sequence
  Description of Artificial Sequence: Synthetic oligonucleotide
ccguaccauuuccgguucc

SEQ ID NO: 1029991 - RNA, 19 nt, Artificial Sequence
  Description of Artificial Sequence: Synthetic oligonucleotide
ccgauuggagagagagaga

SEQ ID NO: 1029992 - RNA, 19 nt, Artificial Sequence
  Description of Artificial Sequence: Synthetic oligonucleotide
ccauaguccugugcccaug

SEQ ID NO: 1029993 - RNA, 19 nt, Artificial Sequence
  Description of Artificial Sequence: Synthetic oligonucleotide
caccggcagccauccccac

SEQ ID NO: 1029994 - RNA, 19 nt, Artificial Sequence
  Description of Artificial Sequence: Synthetic oligonucleotide
cgaguacccgccgucucag

SEQ ID NO: 1029995 - RNA, 19 nt, Artificial Sequence
  Description of Artificial Sequence: Synthetic oligonucleotide
cgggacaaugagaagaguu

SEQ ID NO: 1029996 - RNA, 19 nt, Artificial Sequence
  Description of Artificial Sequence: Synthetic oligonucleotide
ccgaguacccgccgucuca

SEQ ID NO: 1029997 - RNA, 19 nt, Artificial Sequence
  Description of Artificial Sequence: Synthetic oligonucleotide
gguggugacuagaguucaa

SEQ ID NO: 1029998 - RNA, 19 nt, Artificial Sequence
  Description of Artificial Sequence: Synthetic oligonucleotide
ggggugacccagccuccuc

SEQ ID NO: 1029999 - RNA, 19 nt, Artificial Sequence
  Description of Artificial Sequence: Synthetic oligonucleotide
cuggcgcuguccuccucua

SEQ ID NO: 1030000 - RNA, 19 nt, Artificial Sequence
  Description of Artificial Sequence: Synthetic oligonucleotide
ccccacucucacugccggc

SEQ ID NO: 1030001 - RNA, 19 nt, Artificial Sequence
  Description of Artificial Sequence: Synthetic oligonucleotide
ccccauaguccugugccca

SEQ ID NO: 1030002 - RNA, 19 nt, Artificial Sequence
  Description of Artificial Sequence: Synthetic oligonucleotide
ccgcgccagcuucuuauuc

SEQ ID NO: 1030003 - RNA, 19 nt, Artificial Sequence
  Description of Artificial Sequence: Synthetic oligonucleotide
cacccuccuaguguccucu

SEQ ID NO: 1030004 - RNA, 19 nt, Artificial Sequence
  Description of Artificial Sequence: Synthetic oligonucleotide
ggccagauccggggauccc

SEQ ID NO: 1030005 - RNA, 19 nt, Artificial Sequence
  Description of Artificial Sequence: Synthetic oligonucleotide
caaguucaaggggacucuu

SEQ ID NO: 1030006 - RNA, 19 nt, Artificial Sequence
  Description of Artificial Sequence: Synthetic oligonucleotide
gccgugcccauugcucaug

SEQ ID NO: 1030007 - RNA, 19 nt, Artificial Sequence
  Description of Artificial Sequence: Synthetic oligonucleotide
cugcuccuacgacccucca

SEQ ID NO: 1030008 - RNA, 19 nt, Artificial Sequence
  Description of Artificial Sequence: Synthetic oligonucleotide
agggcgcaccuugcacccu

SEQ ID NO: 1030009 - RNA, 19 nt, Artificial Sequence
  Description of Artificial Sequence: Synthetic oligonucleotide
gcacccuccuaguguccuc

SEQ ID NO: 1030010 - RNA, 19 nt, Artificial Sequence
  Description of Artificial Sequence: Synthetic oligonucleotide
ggcgcaccuugcacccucc

SEQ ID NO: 1030011 - RNA, 19 nt, Artificial Sequence
  Description of Artificial Sequence: Synthetic oligonucleotide
gggucuaacccaggccucu

SEQ ID NO: 1030012 - RNA, 19 nt, Artificial Sequence
  Description of Artificial Sequence: Synthetic oligonucleotide
cccuucaaggaggaaagau

SEQ ID NO: 1030013 - RNA, 19 nt, Artificial Sequence
  Description of Artificial Sequence: Synthetic oligonucleotide
ccaggcggucuggaccacc

SEQ ID NO: 1030014 - RNA, 19 nt, Artificial Sequence
  Description of Artificial Sequence: Synthetic oligonucleotide
gggcacugccugccuuuuc

SEQ ID NO: 1030015 - RNA, 19 nt, Artificial Sequence
  Description of Artificial Sequence: Synthetic oligonucleotide
gcccacacuccgcgccagc

SEQ ID NO: 1030016 - RNA, 19 nt, Artificial Sequence
  Description of Artificial Sequence: Synthetic oligonucleotide
gggcugccgugcccauugc

SEQ ID NO: 1030017 - RNA, 19 nt, Artificial Sequence
  Description of Artificial Sequence: Synthetic oligonucleotide
cacugccggcuggcuucgg

SEQ ID NO: 1030018 - RNA, 19 nt, Artificial Sequence
  Description of Artificial Sequence: Synthetic oligonucleotide
cucgggcuacuuggcggga

SEQ ID NO: 1030019 - RNA, 19 nt, Artificial Sequence
  Description of Artificial Sequence: Synthetic oligonucleotide
cuaccaccauccguaccau

SEQ ID NO: 1030020 - RNA, 19 nt, Artificial Sequence
  Description of Artificial Sequence: Synthetic oligonucleotide
ccagauccggggauccccu

SEQ ID NO: 1030021 - RNA, 19 nt, Artificial Sequence
  Description of Artificial Sequence: Synthetic oligonucleotide
cccaaccucuuguuucagu

SEQ ID NO: 1030022 - RNA, 19 nt, Artificial Sequence
  Description of Artificial Sequence: Synthetic oligonucleotide
cucuaggcuggggcgguau

SEQ ID NO: 1030023 - RNA, 19 nt, Artificial Sequence
  Description of Artificial Sequence: Synthetic oligonucleotide
ggcggccauagaugaugcu

SEQ ID NO: 1030024 - RNA, 19 nt, Artificial Sequence
  Description of Artificial Sequence: Synthetic oligonucleotide
cggccagauccggggaucc

SEQ ID NO: 1030025 - RNA, 19 nt, Artificial Sequence
  Description of Artificial Sequence: Synthetic oligonucleotide
acccuccaccagagcggga

SEQ ID NO: 1030026 - RNA, 19 nt, Artificial Sequence
  Description of Artificial Sequence: Synthetic oligonucleotide
cgggcuacuuggcgggaca

SEQ ID NO: 1030027 - RNA, 19 nt, Artificial Sequence
  Description of Artificial Sequence: Synthetic oligonucleotide
ggugcucucucgggcuacu

SEQ ID NO: 1030028 - RNA, 19 nt, Artificial Sequence
  Description of Artificial Sequence: Synthetic oligonucleotide
ccgccccaguccccucggg

SEQ ID NO: 1030029 - RNA, 19 nt, Artificial Sequence
  Description of Artificial Sequence: Synthetic oligonucleotide
gcgggacaaugagaagagu

SEQ ID NO: 1030030 - RNA, 19 nt, Artificial Sequence
  Description of Artificial Sequence: Synthetic oligonucleotide
cccauaguccugugcccau

SEQ ID NO: 1030031 - RNA, 19 nt, Artificial Sequence
  Description of Artificial Sequence: Synthetic oligonucleotide
cgcaccuugcacccuccua

SEQ ID NO: 1030032 - RNA, 19 nt, Artificial Sequence
  Description of Artificial Sequence: Synthetic oligonucleotide
gccgccgauuggagagaga

SEQ ID NO: 1030033 - RNA, 19 nt, Artificial Sequence
  Description of Artificial Sequence: Synthetic oligonucleotide
gcgcaccuugcacccuccu

SEQ ID NO: 1030034 - RNA, 19 nt, Artificial Sequence
  Description of Artificial Sequence: Synthetic oligonucleotide
ccccugcuuguuauugcuu

SEQ ID NO: 1030035 - RNA, 19 nt, Artificial Sequence
  Description of Artificial Sequence: Synthetic oligonucleotide
ccgcagcacuuguuaaauu

SEQ ID NO: 1030036 - RNA, 19 nt, Artificial Sequence
  Description of Artificial Sequence: Synthetic oligonucleotide
cacuccgcgccagcuucuu

SEQ ID NO: 1030037 - RNA, 19 nt, Artificial Sequence
  Description of Artificial Sequence: Synthetic oligonucleotide
agcgcucucacauacaacc

SEQ ID NO: 1030038 - RNA, 19 nt, Artificial Sequence
  Description of Artificial Sequence: Synthetic oligonucleotide
uauacauccaugaugagua

SEQ ID NO: 1030039 - RNA, 19 nt, Artificial Sequence
  Description of Artificial Sequence: Synthetic oligonucleotide
ucaaaugccugucugcugg

SEQ ID NO: 1030040 - RNA, 19 nt, Artificial Sequence
  Description of Artificial Sequence: Synthetic oligonucleotide
uuauccuugaauucgaacu

SEQ ID NO: 1030041 - RNA, 19 nt, Artificial Sequence
  Description of Artificial Sequence: Synthetic oligonucleotide
uuugcagauccacagaggc

SEQ ID NO: 1030042 - RNA, 19 nt, Artificial Sequence
  Description of Artificial Sequence: Synthetic oligonucleotide
guagauguaacguagcaug

SEQ ID NO: 1030043 - RNA, 19 nt, Artificial Sequence
  Description of Artificial Sequence: Synthetic oligonucleotide
uguacauagaugacagcgg

SEQ ID NO: 1030044 - RNA, 19 nt, Artificial Sequence
  Description of Artificial Sequence: Synthetic oligonucleotide
cuugaauucgaacuggaag

SEQ ID NO: 1030045 - RNA, 19 nt, Artificial Sequence
  Description of Artificial Sequence: Synthetic oligonucleotide
cugagguuaggauugaugc

SEQ ID NO: 1030046 - RNA, 19 nt, Artificial Sequence
  Description of Artificial Sequence: Synthetic oligonucleotide
aauagcuagaacgggcagc

SEQ ID NO: 1030047 - RNA, 19 nt, Artificial Sequence
  Description of Artificial Sequence: Synthetic oligonucleotide
cauaguagauguaacguag

SEQ ID NO: 1030048 - RNA, 19 nt, Artificial Sequence
  Description of Artificial Sequence: Synthetic oligonucleotide
gaaugaacggaacauggcc

SEQ ID NO: 1030049 - RNA, 19 nt, Artificial Sequence
  Description of Artificial Sequence: Synthetic oligonucleotide
ccucaaaauagcuagaacg

SEQ ID NO: 1030050 - RNA, 19 nt, Artificial Sequence
  Description of Artificial Sequence: Synthetic oligonucleotide
auagucuucaugcagugug

SEQ ID NO: 1030051 - RNA, 19 nt, Artificial Sequence
  Description of Artificial Sequence: Synthetic oligonucleotide
aaacacauagagaugucgg

SEQ ID NO: 1030052 - RNA, 19 nt, Artificial Sequence
  Description of Artificial Sequence: Synthetic oligonucleotide
auggccucaaaauagcuag

SEQ ID NO: 1030053 - RNA, 19 nt, Artificial Sequence
  Description of Artificial Sequence: Synthetic oligonucleotide
ugcaccguuacauucaucu

SEQ ID NO: 1030054 - RNA, 19 nt, Artificial Sequence
  Description of Artificial Sequence: Synthetic oligonucleotide
caaagucuaagccaaacac

SEQ ID NO: 1030055 - RNA, 19 nt, Artificial Sequence
  Description of Artificial Sequence: Synthetic oligonucleotide
aauucgaacuggaagaggu

SEQ ID NO: 1030056 - RNA, 19 nt, Artificial Sequence
  Description of Artificial Sequence: Synthetic oligonucleotide
agaacgggcagcuaggaug

SEQ ID NO: 1030057 - RNA, 19 nt, Artificial Sequence
  Description of Artificial Sequence: Synthetic oligonucleotide
uagauguaacguagcaugg

SEQ ID NO: 1030058 - RNA, 19 nt, Artificial Sequence
  Description of Artificial Sequence: Synthetic oligonucleotide
uccuucacuaugaaguuca

SEQ ID NO: 1030059 - RNA, 19 nt, Artificial Sequence
  Description of Artificial Sequence: Synthetic oligonucleotide
ucuacaaucagaggggaug

SEQ ID NO: 1030060 - RNA, 19 nt, Artificial Sequence
  Description of Artificial Sequence: Synthetic oligonucleotide
aacauggccucaaaauagc

SEQ ID NO: 1030061 - RNA, 19 nt, Artificial Sequence
  Description of Artificial Sequence: Synthetic oligonucleotide
aauggcaacauggcccugc

SEQ ID NO: 1030062 - RNA, 19 nt, Artificial Sequence
  Description of Artificial Sequence: Synthetic oligonucleotide
aucauagcaaugcagcuca

SEQ ID NO: 1030063 - RNA, 19 nt, Artificial Sequence
  Description of Artificial Sequence: Synthetic oligonucleotide
aaucagaggggaugagagg

SEQ ID NO: 1030064 - RNA, 19 nt, Artificial Sequence
  Description of Artificial Sequence: Synthetic oligonucleotide
aagauguacauagaugaca

SEQ ID NO: 1030065 - RNA, 19 nt, Artificial Sequence
  Description of Artificial Sequence: Synthetic oligonucleotide
aacuggugcacaaugaugu

SEQ ID NO: 1030066 - RNA, 19 nt, Artificial Sequence
  Description of Artificial Sequence: Synthetic oligonucleotide
gcuaggauggcuuuguggg

SEQ ID NO: 1030067 - RNA, 19 nt, Artificial Sequence
  Description of Artificial Sequence: Synthetic oligonucleotide
acugcgaauguuguugucc

SEQ ID NO: 1030068 - RNA, 19 nt, Artificial Sequence
  Description of Artificial Sequence: Synthetic oligonucleotide
aaauagcuagaacgggcag

SEQ ID NO: 1030069 - RNA, 19 nt, Artificial Sequence
  Description of Artificial Sequence: Synthetic oligonucleotide
ucugagguuaggauugaug

SEQ ID NO: 1030070 - RNA, 19 nt, Artificial Sequence
  Description of Artificial Sequence: Synthetic oligonucleotide
ugaaugaacggaacauggc

SEQ ID NO: 1030071 - RNA, 19 nt, Artificial Sequence
  Description of Artificial Sequence: Synthetic oligonucleotide
uucaauguacugccgacac

SEQ ID NO: 1030072 - RNA, 19 nt, Artificial Sequence
  Description of Artificial Sequence: Synthetic oligonucleotide
aaaauagcuagaacgggca

SEQ ID NO: 1030073 - RNA, 19 nt, Artificial Sequence
  Description of Artificial Sequence: Synthetic oligonucleotide
acgaacgaucucuacaauc

SEQ ID NO: 1030074 - RNA, 19 nt, Artificial Sequence
  Description of Artificial Sequence: Synthetic oligonucleotide
augaaugaacggaacaugg

SEQ ID NO: 1030075 - RNA, 19 nt, Artificial Sequence
  Description of Artificial Sequence: Synthetic oligonucleotide
cuuaaagcugcuccgcucc

SEQ ID NO: 1030076 - RNA, 19 nt, Artificial Sequence
  Description of Artificial Sequence: Synthetic oligonucleotide
uggacgaccucccaggucu

SEQ ID NO: 1030077 - RNA, 19 nt, Artificial Sequence
  Description of Artificial Sequence: Synthetic oligonucleotide
auggcuacacguaacaggg

SEQ ID NO: 1030078 - RNA, 19 nt, Artificial Sequence
  Description of Artificial Sequence: Synthetic oligonucleotide
uccuggaucaaagaugugc

SEQ ID NO: 1030079 - RNA, 19 nt, Artificial Sequence
  Description of Artificial Sequence: Synthetic oligonucleotide
gauguaacguagcauggac

SEQ ID NO: 1030080 - RNA, 19 nt, Artificial Sequence
  Description of Artificial Sequence: Synthetic oligonucleotide
gaagccagcggcuucgugc

SEQ ID NO: 1030081 - RNA, 19 nt, Artificial Sequence
  Description of Artificial Sequence: Synthetic oligonucleotide
caaagauccucagaugucg

SEQ ID NO: 1030082 - RNA, 19 nt, Artificial Sequence
  Description of Artificial Sequence: Synthetic oligonucleotide
aaagucuaagccaaacaca

SEQ ID NO: 1030083 - RNA, 19 nt, Artificial Sequence
  Description of Artificial Sequence: Synthetic oligonucleotide
uguugguuaucuuggcucc

SEQ ID NO: 1030084 - RNA, 19 nt, Artificial Sequence
  Description of Artificial Sequence: Synthetic oligonucleotide
gaugucacagaaauccgag

SEQ ID NO: 1030085 - RNA, 19 nt, Artificial Sequence
  Description of Artificial Sequence: Synthetic oligonucleotide
aaugaacggaacauggccu

SEQ ID NO: 1030086 - RNA, 19 nt, Artificial Sequence
  Description of Artificial Sequence: Synthetic oligonucleotide
aaggcgacacagcuggaag

SEQ ID NO: 1030087 - RNA, 19 nt, Artificial Sequence
  Description of Artificial Sequence: Synthetic oligonucleotide
guagagugaguccucaggc

SEQ ID NO: 1030088 - RNA, 19 nt, Artificial Sequence
  Description of Artificial Sequence: Synthetic oligonucleotide
uucaucaugaucaccugau

SEQ ID NO: 1030089 - RNA, 19 nt, Artificial Sequence
  Description of Artificial Sequence: Synthetic oligonucleotide
uuguugguuaucuuggcuc

SEQ ID NO: 1030090 - RNA, 19 nt, Artificial Sequence
  Description of Artificial Sequence: Synthetic oligonucleotide
ugcacuuaggguagcaaga

SEQ ID NO: 1030091 - RNA, 19 nt, Artificial Sequence
  Description of Artificial Sequence: Synthetic oligonucleotide
ugacaauggcaacauggcc

SEQ ID NO: 1030092 - RNA, 19 nt, Artificial Sequence
  Description of Artificial Sequence: Synthetic oligonucleotide
caugaugaguagcacgucc

SEQ ID NO: 1030093 - RNA, 19 nt, Artificial Sequence
  Description of Artificial Sequence: Synthetic oligonucleotide
ugaugucacagaaauccga

SEQ ID NO: 1030094 - RNA, 19 nt, Artificial Sequence
  Description of Artificial Sequence: Synthetic oligonucleotide
caugguguguccauagcgc

SEQ ID NO: 1030095 - RNA, 19 nt, Artificial Sequence
  Description of Artificial Sequence: Synthetic oligonucleotide
ugagguggugccaaagucu

SEQ ID NO: 1030096 - RNA, 19 nt, Artificial Sequence
  Description of Artificial Sequence: Synthetic oligonucleotide
aagucuaagccaaacacau

SEQ ID NO: 1030097 - RNA, 19 nt, Artificial Sequence
  Description of Artificial Sequence: Synthetic oligonucleotide
uuagagaccuuggugaacu

SEQ ID NO: 1030098 - RNA, 19 nt, Artificial Sequence
  Description of Artificial Sequence: Synthetic oligonucleotide
ucaggcggcauguugaccu

SEQ ID NO: 1030099 - RNA, 19 nt, Artificial Sequence
  Description of Artificial Sequence: Synthetic oligonucleotide
uugaccucgccauaguaga

SEQ ID NO: 1030100 - RNA, 19 nt, Artificial Sequence
  Description of Artificial Sequence: Synthetic oligonucleotide
acaguaugccugcagucgg

SEQ ID NO: 1030101 - RNA, 19 nt, Artificial Sequence
  Description of Artificial Sequence: Synthetic oligonucleotide
ucuuccuacgaagccagcg

SEQ ID NO: 1030102 - RNA, 19 nt, Artificial Sequence
  Description of Artificial Sequence: Synthetic oligonucleotide
acguccucuacauuugauc

SEQ ID NO: 1030103 - RNA, 19 nt, Artificial Sequence
  Description of Artificial Sequence: Synthetic oligonucleotide
ugaauucgaacuggaagag

SEQ ID NO: 1030104 - RNA, 19 nt, Artificial Sequence
  Description of Artificial Sequence: Synthetic oligonucleotide
agcuaggauggcuuugugg

SEQ ID NO: 1030105 - RNA, 19 nt, Artificial Sequence
  Description of Artificial Sequence: Synthetic oligonucleotide
gaagccguaguaguagggg

SEQ ID NO: 1030106 - RNA, 19 nt, Artificial Sequence
  Description of Artificial Sequence: Synthetic oligonucleotide
acgucuuauccuugaauuc

SEQ ID NO: 1030107 - RNA, 19 nt, Artificial Sequence
  Description of Artificial Sequence: Synthetic oligonucleotide
augaacggaacauggccuc

SEQ ID NO: 1030108 - RNA, 19 nt, Artificial Sequence
  Description of Artificial Sequence: Synthetic oligonucleotide
agcggcuucgugcagugac

SEQ ID NO: 1030109 - RNA, 19 nt, Artificial Sequence
  Description of Artificial Sequence: Synthetic oligonucleotide
uacauuucuccacugcgaa

SEQ ID NO: 1030110 - RNA, 19 nt, Artificial Sequence
  Description of Artificial Sequence: Synthetic oligonucleotide
acgaucucuacaaucagag

SEQ ID NO: 1030111 - RNA, 19 nt, Artificial Sequence
  Description of Artificial Sequence: Synthetic oligonucleotide
uagaagccguaguaguagg

SEQ ID NO: 1030112 - RNA, 19 nt, Artificial Sequence
  Description of Artificial Sequence: Synthetic oligonucleotide
gauugaugccucuucagaa

SEQ ID NO: 1030113 - RNA, 19 nt, Artificial Sequence
  Description of Artificial Sequence: Synthetic oligonucleotide
aagcagugccgcuucaugu

SEQ ID NO: 1030114 - RNA, 19 nt, Artificial Sequence
  Description of Artificial Sequence: Synthetic oligonucleotide
cuuauccuugaauucgaac

SEQ ID NO: 1030115 - RNA, 19 nt, Artificial Sequence
  Description of Artificial Sequence: Synthetic oligonucleotide
uaugccugcagucgguugu

SEQ ID NO: 1030116 - RNA, 19 nt, Artificial Sequence
  Description of Artificial Sequence: Synthetic oligonucleotide
uucgaacuggaagagguug

SEQ ID NO: 1030117 - RNA, 19 nt, Artificial Sequence
  Description of Artificial Sequence: Synthetic oligonucleotide
gacucaaaugccugucugc

SEQ ID NO: 1030118 - RNA, 19 nt, Artificial Sequence
  Description of Artificial Sequence: Synthetic oligonucleotide
uaggauugaugccucuuca

SEQ ID NO: 1030119 - RNA, 19 nt, Artificial Sequence
  Description of Artificial Sequence: Synthetic oligonucleotide
cuuccuacgaagccagcgg

SEQ ID NO: 1030120 - RNA, 19 nt, Artificial Sequence
  Description of Artificial Sequence: Synthetic oligonucleotide
aggguagcaagaaaacugg

SEQ ID NO: 1030121 - RNA, 19 nt, Artificial Sequence
  Description of Artificial Sequence: Synthetic oligonucleotide
ucucacauacaaccaguac

SEQ ID NO: 1030122 - RNA, 19 nt, Artificial Sequence
  Description of Artificial Sequence: Synthetic oligonucleotide
gaacgggcagcuaggaugg

SEQ ID NO: 1030123 - RNA, 19 nt, Artificial Sequence
  Description of Artificial Sequence: Synthetic oligonucleotide
accaaccucacugucagag

SEQ ID NO: 1030124 - RNA, 19 nt, Artificial Sequence
  Description of Artificial Sequence: Synthetic oligonucleotide
acagaaauccgagccugcc

SEQ ID NO: 1030125 - RNA, 19 nt, Artificial Sequence
  Description of Artificial Sequence: Synthetic oligonucleotide
aggcgacacagcuggaagc

SEQ ID NO: 1030126 - RNA, 19 nt, Artificial Sequence
  Description of Artificial Sequence: Synthetic oligonucleotide
gagccagccacucuugagc

SEQ ID NO: 1030127 - RNA, 19 nt, Artificial Sequence
  Description of Artificial Sequence: Synthetic oligonucleotide
ugaucuugucuguguagag

SEQ ID NO: 1030128 - RNA, 19 nt, Artificial Sequence
  Description of Artificial Sequence: Synthetic oligonucleotide
aaaugugggaggccaggga

SEQ ID NO: 1030129 - RNA, 19 nt, Artificial Sequence
  Description of Artificial Sequence: Synthetic oligonucleotide
ucagcgccaacuuguauac

SEQ ID NO: 1030130 - RNA, 19 nt, Artificial Sequence
  Description of Artificial Sequence: Synthetic oligonucleotide
aucaaagaugugccaaugu

SEQ ID NO: 1030131 - RNA, 19 nt, Artificial Sequence
  Description of Artificial Sequence: Synthetic oligonucleotide
acaucauagcaaugcagcu

SEQ ID NO: 1030132 - RNA, 19 nt, Artificial Sequence
  Description of Artificial Sequence: Synthetic oligonucleotide
cagguaugccuucaugucc

SEQ ID NO: 1030133 - RNA, 19 nt, Artificial Sequence
  Description of Artificial Sequence: Synthetic oligonucleotide
uuccuacgaagccagcggc

SEQ ID NO: 1030134 - RNA, 19 nt, Artificial Sequence
  Description of Artificial Sequence: Synthetic oligonucleotide
gaaaugugggaggccaggg

SEQ ID NO: 1030135 - RNA, 19 nt, Artificial Sequence
  Description of Artificial Sequence: Synthetic oligonucleotide
cuacacguaacaggggugg

SEQ ID NO: 1030136 - RNA, 19 nt, Artificial Sequence
  Description of Artificial Sequence: Synthetic oligonucleotide
ucgugcagugacaauggca

SEQ ID NO: 1030137 - RNA, 19 nt, Artificial Sequence
  Description of Artificial Sequence: Synthetic oligonucleotide
aguagcacguccucuacau

SEQ ID NO: 1030138 - RNA, 19 nt, Artificial Sequence
  Description of Artificial Sequence: Synthetic oligonucleotide
ucacagaaauccgagccug

SEQ ID NO: 1030139 - RNA, 19 nt, Artificial Sequence
  Description of Artificial Sequence: Synthetic oligonucleotide
gaauucgaacuggaagagg

SEQ ID NO: 1030140 - RNA, 19 nt, Artificial Sequence
  Description of Artificial Sequence: Synthetic oligonucleotide
guugauccgagggugcucg

SEQ ID NO: 1030141 - RNA, 19 nt, Artificial Sequence
  Description of Artificial Sequence: Synthetic oligonucleotide
ucaguagggaugcgcgucc

SEQ ID NO: 1030142 - RNA, 19 nt, Artificial Sequence
  Description of Artificial Sequence: Synthetic oligonucleotide
accaugguguguccauagc

SEQ ID NO: 1030143 - RNA, 19 nt, Artificial Sequence
  Description of Artificial Sequence: Synthetic oligonucleotide
acuuaggguagcaagaaaa

SEQ ID NO: 1030144 - RNA, 19 nt, Artificial Sequence
  Description of Artificial Sequence: Synthetic oligonucleotide
gaugucggcacccagcucu

SEQ ID NO: 1030145 - RNA, 19 nt, Artificial Sequence
  Description of Artificial Sequence: Synthetic oligonucleotide
aggauugaugccucuucag

SEQ ID NO: 1030146 - RNA, 19 nt, Artificial Sequence
  Description of Artificial Sequence: Synthetic oligonucleotide
gugcacuuaggguagcaag

SEQ ID NO: 1030147 - RNA, 19 nt, Artificial Sequence
  Description of Artificial Sequence: Synthetic oligonucleotide
ugaguuggcccaguuguag

SEQ ID NO: 1030148 - RNA, 19 nt, Artificial Sequence
  Description of Artificial Sequence: Synthetic oligonucleotide
ggagcaggugcucaguagg

SEQ ID NO: 1030149 - RNA, 19 nt, Artificial Sequence
  Description of Artificial Sequence: Synthetic oligonucleotide
guugaccucgccauaguag

SEQ ID NO: 1030150 - RNA, 19 nt, Artificial Sequence
  Description of Artificial Sequence: Synthetic oligonucleotide
acuuguauacauccaugau

SEQ ID NO: 1030151 - RNA, 19 nt, Artificial Sequence
  Description of Artificial Sequence: Synthetic oligonucleotide
auagcuagaacgggcagcu

SEQ ID NO: 1030152 - RNA, 19 nt, Artificial Sequence
  Description of Artificial Sequence: Synthetic oligonucleotide
uggaucaaagaugugccaa

SEQ ID NO: 1030153 - RNA, 19 nt, Artificial Sequence
  Description of Artificial Sequence: Synthetic oligonucleotide
ucguggguggccaucuagc

SEQ ID NO: 1030154 - RNA, 19 nt, Artificial Sequence
  Description of Artificial Sequence: Synthetic oligonucleotide
aacgaucucuacaaucaga

SEQ ID NO: 1030155 - RNA, 19 nt, Artificial Sequence
  Description of Artificial Sequence: Synthetic oligonucleotide
uacgaagccagcggcuucg

SEQ ID NO: 1030156 - RNA, 19 nt, Artificial Sequence
  Description of Artificial Sequence: Synthetic oligonucleotide
acacguaacagggguggcc

SEQ ID NO: 1030157 - RNA, 19 nt, Artificial Sequence
  Description of Artificial Sequence: Synthetic oligonucleotide
cacauagagaugucgguca

SEQ ID NO: 1030158 - RNA, 19 nt, Artificial Sequence
  Description of Artificial Sequence: Synthetic oligonucleotide
ucaauguacugccgacaca

SEQ ID NO: 1030159 - RNA, 19 nt, Artificial Sequence
  Description of Artificial Sequence: Synthetic oligonucleotide
ucacgaauggcuacacgua

SEQ ID NO: 1030160 - RNA, 19 nt, Artificial Sequence
  Description of Artificial Sequence: Synthetic oligonucleotide
uucuggcaugaaugaacgg

SEQ ID NO: 1030161 - RNA, 19 nt, Artificial Sequence
  Description of Artificial Sequence: Synthetic oligonucleotide
cacguaacagggguggccg

SEQ ID NO: 1030162 - RNA, 19 nt, Artificial Sequence
  Description of Artificial Sequence: Synthetic oligonucleotide
cauguugaccucgccauag

SEQ ID NO: 1030163 - RNA, 19 nt, Artificial Sequence
  Description of Artificial Sequence: Synthetic oligonucleotide
ucauguccuggaucaaaga

SEQ ID NO: 1030164 - RNA, 19 nt, Artificial Sequence
  Description of Artificial Sequence: Synthetic oligonucleotide
uaacguagcauggacucaa

SEQ ID NO: 1030165 - RNA, 19 nt, Artificial Sequence
  Description of Artificial Sequence: Synthetic oligonucleotide
uccacagguugauccgagg

SEQ ID NO: 1030166 - RNA, 19 nt, Artificial Sequence
  Description of Artificial Sequence: Synthetic oligonucleotide
acagcggcugcauggaaga

SEQ ID NO: 1030167 - RNA, 19 nt, Artificial Sequence
  Description of Artificial Sequence: Synthetic oligonucleotide
caauagagauguucaccug

SEQ ID NO: 1030168 - RNA, 19 nt, Artificial Sequence
  Description of Artificial Sequence: Synthetic oligonucleotide
ugaguagcacguccucuac

SEQ ID NO: 1030169 - RNA, 19 nt, Artificial Sequence
  Description of Artificial Sequence: Synthetic oligonucleotide
cagcuuagagaccuuggug

SEQ ID NO: 1030170 - RNA, 19 nt, Artificial Sequence
  Description of Artificial Sequence: Synthetic oligonucleotide
gcgcccauagucuucaugc

SEQ ID NO: 1030171 - RNA, 19 nt, Artificial Sequence
  Description of Artificial Sequence: Synthetic oligonucleotide
ucuuauccuugaauucgaa

SEQ ID NO: 1030172 - RNA, 19 nt, Artificial Sequence
  Description of Artificial Sequence: Synthetic oligonucleotide
cucauugggcaguguauug

SEQ ID NO: 1030173 - RNA, 19 nt, Artificial Sequence
  Description of Artificial Sequence: Synthetic oligonucleotide
acugagcaccucgaauggc

SEQ ID NO: 1030174 - RNA, 19 nt, Artificial Sequence
  Description of Artificial Sequence: Synthetic oligonucleotide
cagaaauccgagccugccc

SEQ ID NO: 1030175 - RNA, 19 nt, Artificial Sequence
  Description of Artificial Sequence: Synthetic oligonucleotide
uugcagauccacagaggcu

SEQ ID NO: 1030176 - RNA, 19 nt, Artificial Sequence
  Description of Artificial Sequence: Synthetic oligonucleotide
aguuguagccuggcagcgc

SEQ ID NO: 1030177 - RNA, 19 nt, Artificial Sequence
  Description of Artificial Sequence: Synthetic oligonucleotide
guagggaugcgcguccacg

SEQ ID NO: 1030178 - RNA, 19 nt, Artificial Sequence
  Description of Artificial Sequence: Synthetic oligonucleotide
cauugggcaguguauuguc

SEQ ID NO: 1030179 - RNA, 19 nt, Artificial Sequence
  Description of Artificial Sequence: Synthetic oligonucleotide
gagguuaggauugaugccu

SEQ ID NO: 1030180 - RNA, 19 nt, Artificial Sequence
  Description of Artificial Sequence: Synthetic oligonucleotide
cagugugcacuuaggguag

SEQ ID NO: 1030181 - RNA, 19 nt, Artificial Sequence
  Description of Artificial Sequence: Synthetic oligonucleotide
ucgccauaguagauguaac

SEQ ID NO: 1030182 - RNA, 19 nt, Artificial Sequence
  Description of Artificial Sequence: Synthetic oligonucleotide
caucauagcaaugcagcuc

SEQ ID NO: 1030183 - RNA, 19 nt, Artificial Sequence
  Description of Artificial Sequence: Synthetic oligonucleotide
acugccgacacaacugcuc

SEQ ID NO: 1030184 - RNA, 19 nt, Artificial Sequence
  Description of Artificial Sequence: Synthetic oligonucleotide
gaugugcaagcagugccgc

SEQ ID NO: 1030185 - RNA, 19 nt, Artificial Sequence
  Description of Artificial Sequence: Synthetic oligonucleotide
agcugaaccaggggccucc

SEQ ID NO: 1030186 - RNA, 19 nt, Artificial Sequence
  Description of Artificial Sequence: Synthetic oligonucleotide
uggcaugaaugaacggaac

SEQ ID NO: 1030187 - RNA, 19 nt, Artificial Sequence
  Description of Artificial Sequence: Synthetic oligonucleotide
cucacgaauggcuacacgu

SEQ ID NO: 1030188 - RNA, 19 nt, Artificial Sequence
  Description of Artificial Sequence: Synthetic oligonucleotide
uucgugcagugacaauggc

SEQ ID NO: 1030189 - RNA, 19 nt, Artificial Sequence
  Description of Artificial Sequence: Synthetic oligonucleotide
agauccucagaugucggca

SEQ ID NO: 1030190 - RNA, 19 nt, Artificial Sequence
  Description of Artificial Sequence: Synthetic oligonucleotide
ccaugguguguccauagcg

SEQ ID NO: 1030191 - RNA, 19 nt, Artificial Sequence
  Description of Artificial Sequence: Synthetic oligonucleotide
auagaugacagcggcugca

SEQ ID NO: 1030192 - RNA, 19 nt, Artificial Sequence
  Description of Artificial Sequence: Synthetic oligonucleotide
uuaaagcugcuccgcuccu

SEQ ID NO: 1030193 - RNA, 19 nt, Artificial Sequence
  Description of Artificial Sequence: Synthetic oligonucleotide
caucuucuggcaugaauga

SEQ ID NO: 1030194 - RNA, 19 nt, Artificial Sequence
  Description of Artificial Sequence: Synthetic oligonucleotide
ugauugaagugggacuccu

SEQ ID NO: 1030195 - RNA, 19 nt, Artificial Sequence
  Description of Artificial Sequence: Synthetic oligonucleotide
augaguagcacguccucua

SEQ ID NO: 1030196 - RNA, 19 nt, Artificial Sequence
  Description of Artificial Sequence: Synthetic oligonucleotide
agaagccguaguaguaggg

SEQ ID NO: 1030197 - RNA, 19 nt, Artificial Sequence
  Description of Artificial Sequence: Synthetic oligonucleotide
auuucuccacugcgaaugu

SEQ ID NO: 1030198 - RNA, 19 nt, Artificial Sequence
  Description of Artificial Sequence: Synthetic oligonucleotide
aauggccgggccucagccu

SEQ ID NO: 1030199 - RNA, 19 nt, Artificial Sequence
  Description of Artificial Sequence: Synthetic oligonucleotide
gcuucgugcagugacaaug

SEQ ID NO: 1030200 - RNA, 19 nt, Artificial Sequence
  Description of Artificial Sequence: Synthetic oligonucleotide
uagggaugcgcguccacgu

SEQ ID NO: 1030201 - RNA, 19 nt, Artificial Sequence
  Description of Artificial Sequence: Synthetic oligonucleotide
agauguaacguagcaugga

SEQ ID NO: 1030202 - RNA, 19 nt, Artificial Sequence
  Description of Artificial Sequence: Synthetic oligonucleotide
uggcagcgcucucacauac

SEQ ID NO: 1030203 - RNA, 19 nt, Artificial Sequence
  Description of Artificial Sequence: Synthetic oligonucleotide
uccuacgaagccagcggcu

SEQ ID NO: 1030204 - RNA, 19 nt, Artificial Sequence
  Description of Artificial Sequence: Synthetic oligonucleotide
cucuacauuugaucuuguc

SEQ ID NO: 1030205 - RNA, 19 nt, Artificial Sequence
  Description of Artificial Sequence: Synthetic oligonucleotide
gaaacugagcaccucgaau

SEQ ID NO: 1030206 - RNA, 19 nt, Artificial Sequence
  Description of Artificial Sequence: Synthetic oligonucleotide
guccauagcgccgcugugg

SEQ ID NO: 1030207 - RNA, 19 nt, Artificial Sequence
  Description of Artificial Sequence: Synthetic oligonucleotide
cacagaaauccgagccugc

SEQ ID NO: 1030208 - RNA, 19 nt, Artificial Sequence
  Description of Artificial Sequence: Synthetic oligonucleotide
caccucagccccaccaacc

SEQ ID NO: 1030209 - RNA, 19 nt, Artificial Sequence
  Description of Artificial Sequence: Synthetic oligonucleotide
acuaugaaguucaggcagu

SEQ ID NO: 1030210 - RNA, 19 nt, Artificial Sequence
  Description of Artificial Sequence: Synthetic oligonucleotide
ucaucaugaucaccugauu

SEQ ID NO: 1030211 - RNA, 19 nt, Artificial Sequence
  Description of Artificial Sequence: Synthetic oligonucleotide
cauacaaccaguacauuuu

SEQ ID NO: 1030212 - RNA, 19 nt, Artificial Sequence
  Description of Artificial Sequence: Synthetic oligonucleotide
ccaguuguagccuggcagc

SEQ ID NO: 1030213 - RNA, 19 nt, Artificial Sequence
  Description of Artificial Sequence: Synthetic oligonucleotide
ggauugaugccucuucaga

SEQ ID NO: 1030214 - RNA, 19 nt, Artificial Sequence
  Description of Artificial Sequence: Synthetic oligonucleotide
cucagcgccaacuuguaua

SEQ ID NO: 1030215 - RNA, 19 nt, Artificial Sequence
  Description of Artificial Sequence: Synthetic oligonucleotide
cacaacugcucaaggcgac

SEQ ID NO: 1030216 - RNA, 19 nt, Artificial Sequence
  Description of Artificial Sequence: Synthetic oligonucleotide
aaguucaggcagugcuccu

SEQ ID NO: 1030217 - RNA, 19 nt, Artificial Sequence
  Description of Artificial Sequence: Synthetic oligonucleotide
gucguggguggccaucuag

SEQ ID NO: 1030218 - RNA, 19 nt, Artificial Sequence
  Description of Artificial Sequence: Synthetic oligonucleotide
gaccucgccauaguagaug

SEQ ID NO: 1030219 - RNA, 19 nt, Artificial Sequence
  Description of Artificial Sequence: Synthetic oligonucleotide
ugcagucgguuguuguaga

SEQ ID NO: 1030220 - RNA, 19 nt, Artificial Sequence
  Description of Artificial Sequence: Synthetic oligonucleotide
ugucggucaaaggccacca

SEQ ID NO: 1030221 - RNA, 19 nt, Artificial Sequence
  Description of Artificial Sequence: Synthetic oligonucleotide
ggcaugaaugaacggaaca

SEQ ID NO: 1030222 - RNA, 19 nt, Artificial Sequence
  Description of Artificial Sequence: Synthetic oligonucleotide
uguccauagcgccgcugug

SEQ ID NO: 1030223 - RNA, 19 nt, Artificial Sequence
  Description of Artificial Sequence: Synthetic oligonucleotide
ggacucaaaugccugucug

SEQ ID NO: 1030224 - RNA, 19 nt, Artificial Sequence
  Description of Artificial Sequence: Synthetic oligonucleotide
cuaugaaguucaggcagug

SEQ ID NO: 1030225 - RNA, 19 nt, Artificial Sequence
  Description of Artificial Sequence: Synthetic oligonucleotide
cagguugauccgagggugc

SEQ ID NO: 1030226 - RNA, 19 nt, Artificial Sequence
  Description of Artificial Sequence: Synthetic oligonucleotide
auguaacguagcauggacu

SEQ ID NO: 1030227 - RNA, 19 nt, Artificial Sequence
  Description of Artificial Sequence: Synthetic oligonucleotide
acauagagaugucggucaa

SEQ ID NO: 1030228 - RNA, 19 nt, Artificial Sequence
  Description of Artificial Sequence: Synthetic oligonucleotide
ugcuuccgacgaacgaucu

SEQ ID NO: 1030229 - RNA, 19 nt, Artificial Sequence
  Description of Artificial Sequence: Synthetic oligonucleotide
cgucuuauccuugaauucg

SEQ ID NO: 1030230 - RNA, 19 nt, Artificial Sequence
  Description of Artificial Sequence: Synthetic oligonucleotide
cugcagucgguuguuguag

SEQ ID NO: 1030231 - RNA, 19 nt, Artificial Sequence
  Description of Artificial Sequence: Synthetic oligonucleotide
ugugcaagcagugccgcuu

SEQ ID NO: 1030232 - RNA, 19 nt, Artificial Sequence
  Description of Artificial Sequence: Synthetic oligonucleotide
uccucagaugucggcaccc

SEQ ID NO: 1030233 - RNA, 19 nt, Artificial Sequence
  Description of Artificial Sequence: Synthetic oligonucleotide
guacauuucuccacugcga

SEQ ID NO: 1030234 - RNA, 19 nt, Artificial Sequence
  Description of Artificial Sequence: Synthetic oligonucleotide
agggaugcgcguccacguc

SEQ ID NO: 1030235 - RNA, 19 nt, Artificial Sequence
  Description of Artificial Sequence: Synthetic oligonucleotide
acugcuugucagaaaugug

SEQ ID NO: 1030236 - RNA, 19 nt, Artificial Sequence
  Description of Artificial Sequence: Synthetic oligonucleotide
cugcuuccgacgaacgauc

SEQ ID NO: 1030237 - RNA, 19 nt, Artificial Sequence
  Description of Artificial Sequence: Synthetic oligonucleotide
caguuguagccuggcagcg

SEQ ID NO: 1030238 - RNA, 19 nt, Artificial Sequence
  Description of Artificial Sequence: Synthetic oligonucleotide
caucuccccaauagagaug

SEQ ID NO: 1030239 - RNA, 19 nt, Artificial Sequence
  Description of Artificial Sequence: Synthetic oligonucleotide
cuuagagaccuuggugaac

SEQ ID NO: 1030240 - RNA, 19 nt, Artificial Sequence
  Description of Artificial Sequence: Synthetic oligonucleotide
cucuugagccugcaagauc

SEQ ID NO: 1030241 - RNA, 19 nt, Artificial Sequence
  Description of Artificial Sequence: Synthetic oligonucleotide
ugauccgagggugcucgag

SEQ ID NO: 1030242 - RNA, 19 nt, Artificial Sequence
  Description of Artificial Sequence: Synthetic oligonucleotide
agaugucggucaaaggcca

SEQ ID NO: 1030243 - RNA, 19 nt, Artificial Sequence
  Description of Artificial Sequence: Synthetic oligonucleotide
uagaacgggcagcuaggau

SEQ ID NO: 1030244 - RNA, 19 nt, Artificial Sequence
  Description of Artificial Sequence: Synthetic oligonucleotide
ugugcacuuaggguagcaa

SEQ ID NO: 1030245 - RNA, 19 nt, Artificial Sequence
  Description of Artificial Sequence: Synthetic oligonucleotide
cucgccauaguagauguaa

SEQ ID NO: 1030246 - RNA, 19 nt, Artificial Sequence
  Description of Artificial Sequence: Synthetic oligonucleotide
cugauugaagugggacucc

SEQ ID NO: 1030247 - RNA, 19 nt, Artificial Sequence
  Description of Artificial Sequence: Synthetic oligonucleotide
uugaguuggcccaguugua

SEQ ID NO: 1030248 - RNA, 19 nt, Artificial Sequence
  Description of Artificial Sequence: Synthetic oligonucleotide
uaacagggguggccgugcc

SEQ ID NO: 1030249 - RNA, 19 nt, Artificial Sequence
  Description of Artificial Sequence: Synthetic oligonucleotide
ugaacggaacauggccuca

SEQ ID NO: 1030250 - RNA, 19 nt, Artificial Sequence
  Description of Artificial Sequence: Synthetic oligonucleotide
cucaguagggaugcgcguc

SEQ ID NO: 1030251 - RNA, 19 nt, Artificial Sequence
  Description of Artificial Sequence: Synthetic oligonucleotide
caguguauugucugccgca

SEQ ID NO: 1030252 - RNA, 19 nt, Artificial Sequence
  Description of Artificial Sequence: Synthetic oligonucleotide
agguuaggauugaugccuc

SEQ ID NO: 1030253 - RNA, 19 nt, Artificial Sequence
  Description of Artificial Sequence: Synthetic oligonucleotide
guuguugguuaucuuggcu

SEQ ID NO: 1030254 - RNA, 19 nt, Artificial Sequence
  Description of Artificial Sequence: Synthetic oligonucleotide
guaugccugcagucgguug

SEQ ID NO: 1030255 - RNA, 19 nt, Artificial Sequence
  Description of Artificial Sequence: Synthetic oligonucleotide
gaguagcacguccucuaca

SEQ ID NO: 1030256 - RNA, 19 nt, Artificial Sequence
  Description of Artificial Sequence: Synthetic oligonucleotide
ugcgcguccacgucuuauc

SEQ ID NO: 1030257 - RNA, 19 nt, Artificial Sequence
  Description of Artificial Sequence: Synthetic oligonucleotide
acagguagagugaguccuc

SEQ ID NO: 1030258 - RNA, 19 nt, Artificial Sequence
  Description of Artificial Sequence: Synthetic oligonucleotide
accucgaauggccgggccu

SEQ ID NO: 1030259 - RNA, 19 nt, Artificial Sequence
  Description of Artificial Sequence: Synthetic oligonucleotide
cacgucuuauccuugaauu

SEQ ID NO: 1030260 - RNA, 19 nt, Artificial Sequence
  Description of Artificial Sequence: Synthetic oligonucleotide
gcuagaacgggcagcuagg

SEQ ID NO: 1030261 - RNA, 19 nt, Artificial Sequence
  Description of Artificial Sequence: Synthetic oligonucleotide
guguauugucugccgcacc

SEQ ID NO: 1030262 - RNA, 19 nt, Artificial Sequence
  Description of Artificial Sequence: Synthetic oligonucleotide
uacugccgacacaacugcu

SEQ ID NO: 1030263 - RNA, 19 nt, Artificial Sequence
  Description of Artificial Sequence: Synthetic oligonucleotide
uccgacgaacgaucucuac

SEQ ID NO: 1030264 - RNA, 19 nt, Artificial Sequence
  Description of Artificial Sequence: Synthetic oligonucleotide
cauggccucaaaauagcua

SEQ ID NO: 1030265 - RNA, 19 nt, Artificial Sequence
  Description of Artificial Sequence: Synthetic oligonucleotide
gcccauagucuucaugcag

SEQ ID NO: 1030266 - RNA, 19 nt, Artificial Sequence
  Description of Artificial Sequence: Synthetic oligonucleotide
gcaguguauugucugccgc

SEQ ID NO: 1030267 - RNA, 19 nt, Artificial Sequence
  Description of Artificial Sequence: Synthetic oligonucleotide
ugcgaauguuguuguccac

SEQ ID NO: 1030268 - RNA, 19 nt, Artificial Sequence
  Description of Artificial Sequence: Synthetic oligonucleotide
uaggcgcccauagucuuca

SEQ ID NO: 1030269 - RNA, 19 nt, Artificial Sequence
  Description of Artificial Sequence: Synthetic oligonucleotide
gucgguuguuguagaagcc

SEQ ID NO: 1030270 - RNA, 19 nt, Artificial Sequence
  Description of Artificial Sequence: Synthetic oligonucleotide
ucccauaggcgcccauagu

SEQ ID NO: 1030271 - RNA, 19 nt, Artificial Sequence
  Description of Artificial Sequence: Synthetic oligonucleotide
cugugucuugucagccgcc

SEQ ID NO: 1030272 - RNA, 19 nt, Artificial Sequence
  Description of Artificial Sequence: Synthetic oligonucleotide
cccauaggcgcccauaguc

SEQ ID NO: 1030273 - RNA, 19 nt, Artificial Sequence
  Description of Artificial Sequence: Synthetic oligonucleotide
cacacugcuugucagaaau

SEQ ID NO: 1030274 - RNA, 19 nt, Artificial Sequence
  Description of Artificial Sequence: Synthetic oligonucleotide
gaagagguuguugguuauc

SEQ ID NO: 1030275 - RNA, 19 nt, Artificial Sequence
  Description of Artificial Sequence: Synthetic oligonucleotide
cuggaucaaagaugugcca

SEQ ID NO: 1030276 - RNA, 19 nt, Artificial Sequence
  Description of Artificial Sequence: Synthetic oligonucleotide
uacacguaacagggguggc

SEQ ID NO: 1030277 - RNA, 19 nt, Artificial Sequence
  Description of Artificial Sequence: Synthetic oligonucleotide
ugaccucgccauaguagau

SEQ ID NO: 1030278 - RNA, 19 nt, Artificial Sequence
  Description of Artificial Sequence: Synthetic oligonucleotide
auguugaccucgccauagu

SEQ ID NO: 1030279 - RNA, 19 nt, Artificial Sequence
  Description of Artificial Sequence: Synthetic oligonucleotide
guaacagggguggccgugc

SEQ ID NO: 1030280 - RNA, 19 nt, Artificial Sequence
  Description of Artificial Sequence: Synthetic oligonucleotide
ccaauagagauguucaccu

SEQ ID NO: 1030281 - RNA, 19 nt, Artificial Sequence
  Description of Artificial Sequence: Synthetic oligonucleotide
ccugauugaagugggacuc

SEQ ID NO: 1030282 - RNA, 19 nt, Artificial Sequence
  Description of Artificial Sequence: Synthetic oligonucleotide
acguagcauggacucaaau

SEQ ID NO: 1030283 - RNA, 19 nt, Artificial Sequence
  Description of Artificial Sequence: Synthetic oligonucleotide
cacgaauggcuacacguaa

SEQ ID NO: 1030284 - RNA, 19 nt, Artificial Sequence
  Description of Artificial Sequence: Synthetic oligonucleotide
auaggcgcccauagucuuc

SEQ ID NO: 1030285 - RNA, 19 nt, Artificial Sequence
  Description of Artificial Sequence: Synthetic oligonucleotide
gguguguccauagcgccgc

SEQ ID NO: 1030286 - RNA, 19 nt, Artificial Sequence
  Description of Artificial Sequence: Synthetic oligonucleotide
cuuccgacgaacgaucucu

SEQ ID NO: 1030287 - RNA, 19 nt, Artificial Sequence
  Description of Artificial Sequence: Synthetic oligonucleotide
ggcagcuuagagaccuugg

SEQ ID NO: 1030288 - RNA, 19 nt, Artificial Sequence
  Description of Artificial Sequence: Synthetic oligonucleotide
acucuugagccugcaagau

SEQ ID NO: 1030289 - RNA, 19 nt, Artificial Sequence
  Description of Artificial Sequence: Synthetic oligonucleotide
gagguggugccaaagucua

SEQ ID NO: 1030290 - RNA, 19 nt, Artificial Sequence
  Description of Artificial Sequence: Synthetic oligonucleotide
gccucaaaauagcuagaac

SEQ ID NO: 1030291 - RNA, 19 nt, Artificial Sequence
  Description of Artificial Sequence: Synthetic oligonucleotide
uguguccauagcgccgcug

SEQ ID NO: 1030292 - RNA, 19 nt, Artificial Sequence
  Description of Artificial Sequence: Synthetic oligonucleotide
cucgcucaggcaccucagc

SEQ ID NO: 1030293 - RNA, 19 nt, Artificial Sequence
  Description of Artificial Sequence: Synthetic oligonucleotide
gugcucaguagggaugcgc

SEQ ID NO: 1030294 - RNA, 19 nt, Artificial Sequence
  Description of Artificial Sequence: Synthetic oligonucleotide
aacgggcagcuaggauggc

SEQ ID NO: 1030295 - RNA, 19 nt, Artificial Sequence
  Description of Artificial Sequence: Synthetic oligonucleotide
cucucacauacaaccagua

SEQ ID NO: 1030296 - RNA, 19 nt, Artificial Sequence
  Description of Artificial Sequence: Synthetic oligonucleotide
gccugugucuugucagccg

SEQ ID NO: 1030297 - RNA, 19 nt, Artificial Sequence
  Description of Artificial Sequence: Synthetic oligonucleotide
cgacacaacugcucaaggc

SEQ ID NO: 1030298 - RNA, 19 nt, Artificial Sequence
  Description of Artificial Sequence: Synthetic oligonucleotide
gcagugccgcuucaugucc

SEQ ID NO: 1030299 - RNA, 19 nt, Artificial Sequence
  Description of Artificial Sequence: Synthetic oligonucleotide
uuccgacgaacgaucucua

SEQ ID NO: 1030300 - RNA, 19 nt, Artificial Sequence
  Description of Artificial Sequence: Synthetic oligonucleotide
augugcaagcagugccgcu

SEQ ID NO: 1030301 - RNA, 19 nt, Artificial Sequence
  Description of Artificial Sequence: Synthetic oligonucleotide
cauggaagagccucccacu

SEQ ID NO: 1030302 - RNA, 19 nt, Artificial Sequence
  Description of Artificial Sequence: Synthetic oligonucleotide
agcucauugggcaguguau

SEQ ID NO: 1030303 - RNA, 19 nt, Artificial Sequence
  Description of Artificial Sequence: Synthetic oligonucleotide
guaacguagcauggacuca

SEQ ID NO: 1030304 - RNA, 19 nt, Artificial Sequence
  Description of Artificial Sequence: Synthetic oligonucleotide
ugggcuggacgaccuccca

SEQ ID NO: 1030305 - RNA, 19 nt, Artificial Sequence
  Description of Artificial Sequence: Synthetic oligonucleotide
ccaaagucuaagccaaaca

SEQ ID NO: 1030306 - RNA, 19 nt, Artificial Sequence
  Description of Artificial Sequence: Synthetic oligonucleotide
agugaguccucaggcggca

SEQ ID NO: 1030307 - RNA, 19 nt, Artificial Sequence
  Description of Artificial Sequence: Synthetic oligonucleotide
gacgaccucccaggucugg

SEQ ID NO: 1030308 - RNA, 19 nt, Artificial Sequence
  Description of Artificial Sequence: Synthetic oligonucleotide
cuacgaagccagcggcuuc

SEQ ID NO: 1030309 - RNA, 19 nt, Artificial Sequence
  Description of Artificial Sequence: Synthetic oligonucleotide
ucauagcaaugcagcucau

SEQ ID NO: 1030310 - RNA, 19 nt, Artificial Sequence
  Description of Artificial Sequence: Synthetic oligonucleotide
acaacugcucaaggcgaca

SEQ ID NO: 1030311 - RNA, 19 nt, Artificial Sequence
  Description of Artificial Sequence: Synthetic oligonucleotide
guccacgucuuauccuuga

SEQ ID NO: 1030312 - RNA, 19 nt, Artificial Sequence
  Description of Artificial Sequence: Synthetic oligonucleotide
uccuugaguuggcccaguu

SEQ ID NO: 1030313 - RNA, 19 nt, Artificial Sequence
  Description of Artificial Sequence: Synthetic oligonucleotide
agcucugaugccaggugga

SEQ ID NO: 1030314 - RNA, 19 nt, Artificial Sequence
  Description of Artificial Sequence: Synthetic oligonucleotide
ggcuacacguaacaggggu

SEQ ID NO: 1030315 - RNA, 19 nt, Artificial Sequence
  Description of Artificial Sequence: Synthetic oligonucleotide
gccgacacaacugcucaag

SEQ ID NO: 1030316 - RNA, 19 nt, Artificial Sequence
  Description of Artificial Sequence: Synthetic oligonucleotide
aaccgcagugugggcagcu

SEQ ID NO: 1030317 - RNA, 19 nt, Artificial Sequence
  Description of Artificial Sequence: Synthetic oligonucleotide
agccucacgaauggcuaca

SEQ ID NO: 1030318 - RNA, 19 nt, Artificial Sequence
  Description of Artificial Sequence: Synthetic oligonucleotide
ccaaccucacugucagagc

SEQ ID NO: 1030319 - RNA, 19 nt, Artificial Sequence
  Description of Artificial Sequence: Synthetic oligonucleotide
cacaucucuggacuucuua

SEQ ID NO: 1030320 - RNA, 19 nt, Artificial Sequence
  Description of Artificial Sequence: Synthetic oligonucleotide
ccgacacaacugcucaagg

SEQ ID NO: 1030321 - RNA, 19 nt, Artificial Sequence
  Description of Artificial Sequence: Synthetic oligonucleotide
ccauaguagauguaacgua

SEQ ID NO: 1030322 - RNA, 19 nt, Artificial Sequence
  Description of Artificial Sequence: Synthetic oligonucleotide
aggcggcauguugaccucg

SEQ ID NO: 1030323 - RNA, 19 nt, Artificial Sequence
  Description of Artificial Sequence: Synthetic oligonucleotide
cgaucucuacaaucagagg

SEQ ID NO: 1030324 - RNA, 19 nt, Artificial Sequence
  Description of Artificial Sequence: Synthetic oligonucleotide
gugcaagcagugccgcuuc

SEQ ID NO: 1030325 - RNA, 19 nt, Artificial Sequence
  Description of Artificial Sequence: Synthetic oligonucleotide
ugccgacacaacugcucaa

SEQ ID NO: 1030326 - RNA, 19 nt, Artificial Sequence
  Description of Artificial Sequence: Synthetic oligonucleotide
gcuacacguaacaggggug

SEQ ID NO: 1030327 - RNA, 19 nt, Artificial Sequence
  Description of Artificial Sequence: Synthetic oligonucleotide
gccauaguagauguaacgu

SEQ ID NO: 1030328 - RNA, 19 nt, Artificial Sequence
  Description of Artificial Sequence: Synthetic oligonucleotide
gcuuagagaccuuggugaa

SEQ ID NO: 1030329 - RNA, 19 nt, Artificial Sequence
  Description of Artificial Sequence: Synthetic oligonucleotide
cuagaacgggcagcuagga

SEQ ID NO: 1030330 - RNA, 19 nt, Artificial Sequence
  Description of Artificial Sequence: Synthetic oligonucleotide
cacugcgaauguuguuguc

SEQ ID NO: 1030331 - RNA, 19 nt, Artificial Sequence
  Description of Artificial Sequence: Synthetic oligonucleotide
gucggcacccagcucugca

SEQ ID NO: 1030332 - RNA, 19 nt, Artificial Sequence
  Description of Artificial Sequence: Synthetic oligonucleotide
gcgaauguuguuguccaca

SEQ ID NO: 1030333 - RNA, 19 nt, Artificial Sequence
  Description of Artificial Sequence: Synthetic oligonucleotide
aacguagcauggacucaaa

SEQ ID NO: 1030334 - RNA, 19 nt, Artificial Sequence
  Description of Artificial Sequence: Synthetic oligonucleotide
cucaggcggcauguugacc

SEQ ID NO: 1030335 - RNA, 19 nt, Artificial Sequence
  Description of Artificial Sequence: Synthetic oligonucleotide
acguaacagggguggccgu

SEQ ID NO: 1030336 - RNA, 19 nt, Artificial Sequence
  Description of Artificial Sequence: Synthetic oligonucleotide
cuggacgaccucccagguc

SEQ ID NO: 1030337 - RNA, 19 nt, Artificial Sequence
  Description of Artificial Sequence: Synthetic oligonucleotide
caccucgaauggccgggcc

SEQ ID NO: 1030338 - RNA, 19 nt, Artificial Sequence
  Description of Artificial Sequence: Synthetic oligonucleotide
gcggcccucccauaggcgc

SEQ ID NO: 1030339 - RNA, 19 nt, Artificial Sequence
  Description of Artificial Sequence: Synthetic oligonucleotide
aguaugccugcagucgguu

SEQ ID NO: 1030340 - RNA, 19 nt, Artificial Sequence
  Description of Artificial Sequence: Synthetic oligonucleotide
cacuuaggguagcaagaaa

SEQ ID NO: 1030341 - RNA, 19 nt, Artificial Sequence
  Description of Artificial Sequence: Synthetic oligonucleotide
uugauccgagggugcucga

SEQ ID NO: 1030342 - RNA, 19 nt, Artificial Sequence
  Description of Artificial Sequence: Synthetic oligonucleotide
uuguagccuggcagcgcuc

SEQ ID NO: 1030343 - RNA, 19 nt, Artificial Sequence
  Description of Artificial Sequence: Synthetic oligonucleotide
auucgaacuggaagagguu

SEQ ID NO: 1030344 - RNA, 19 nt, Artificial Sequence
  Description of Artificial Sequence: Synthetic oligonucleotide
cagcucauugggcagugua

SEQ ID NO: 1030345 - RNA, 19 nt, Artificial Sequence
  Description of Artificial Sequence: Synthetic oligonucleotide
gccaauguccacagguuga

SEQ ID NO: 1030346 - RNA, 19 nt, Artificial Sequence
  Description of Artificial Sequence: Synthetic oligonucleotide
cgcucucacauacaaccag

SEQ ID NO: 1030347 - RNA, 19 nt, Artificial Sequence
  Description of Artificial Sequence: Synthetic oligonucleotide
ggcgcccauagucuucaug

SEQ ID NO: 1030348 - RNA, 19 nt, Artificial Sequence
  Description of Artificial Sequence: Synthetic oligonucleotide
gggcaguguauugucugcc

SEQ ID NO: 1030349 - RNA, 19 nt, Artificial Sequence
  Description of Artificial Sequence: Synthetic oligonucleotide
ccgacgaacgaucucuaca

SEQ ID NO: 1030350 - RNA, 19 nt, Artificial Sequence
  Description of Artificial Sequence: Synthetic oligonucleotide
gcgcguccacgucuuaucc

SEQ ID NO: 1030351 - RNA, 19 nt, Artificial Sequence
  Description of Artificial Sequence: Synthetic oligonucleotide
gaacuggcggcccucccau

SEQ ID NO: 1030352 - RNA, 19 nt, Artificial Sequence
  Description of Artificial Sequence: Synthetic oligonucleotide
ggccucaaaauagcuagaa

SEQ ID NO: 1030353 - RNA, 19 nt, Artificial Sequence
  Description of Artificial Sequence: Synthetic oligonucleotide
ccuucacuaugaaguucag

SEQ ID NO: 1030354 - RNA, 19 nt, Artificial Sequence
  Description of Artificial Sequence: Synthetic oligonucleotide
gacgaacgaucucuacaau

SEQ ID NO: 1030355 - RNA, 19 nt, Artificial Sequence
  Description of Artificial Sequence: Synthetic oligonucleotide
cuucaugcagugugcacuu

SEQ ID NO: 1030356 - RNA, 19 nt, Artificial Sequence
  Description of Artificial Sequence: Synthetic oligonucleotide
caaggcgacacagcuggaa

SEQ ID NO: 1030357 - RNA, 19 nt, Artificial Sequence
  Description of Artificial Sequence: Synthetic oligonucleotide
acgaccucccaggucugga

SEQ ID NO: 1030358 - RNA, 19 nt, Artificial Sequence
  Description of Artificial Sequence: Synthetic oligonucleotide
cgacgaacgaucucuacaa

SEQ ID NO: 1030359 - RNA, 19 nt, Artificial Sequence
  Description of Artificial Sequence: Synthetic oligonucleotide
cauagagaugucggucaaa

SEQ ID NO: 1030360 - RNA, 19 nt, Artificial Sequence
  Description of Artificial Sequence: Synthetic oligonucleotide
ggagcuagggccccauccu

SEQ ID NO: 1030361 - RNA, 19 nt, Artificial Sequence
  Description of Artificial Sequence: Synthetic oligonucleotide
caggcggcauguugaccuc

SEQ ID NO: 1030362 - RNA, 19 nt, Artificial Sequence
  Description of Artificial Sequence: Synthetic oligonucleotide
guuaggauugaugccucuu

SEQ ID NO: 1030363 - RNA, 19 nt, Artificial Sequence
  Description of Artificial Sequence: Synthetic oligonucleotide
uucaugcagugugcacuua

SEQ ID NO: 1030364 - RNA, 19 nt, Artificial Sequence
  Description of Artificial Sequence: Synthetic oligonucleotide
cccaaagauguacauagau

SEQ ID NO: 1030365 - RNA, 19 nt, Artificial Sequence
  Description of Artificial Sequence: Synthetic oligonucleotide
gcucaaggcgacacagcug

SEQ ID NO: 1030366 - RNA, 19 nt, Artificial Sequence
  Description of Artificial Sequence: Synthetic oligonucleotide
aacuggcggcccucccaua

SEQ ID NO: 1030367 - RNA, 19 nt, Artificial Sequence
  Description of Artificial Sequence: Synthetic oligonucleotide
ugucggcacccagcucugc

SEQ ID NO: 1030368 - RNA, 19 nt, Artificial Sequence
  Description of Artificial Sequence: Synthetic oligonucleotide
augcgcguccacgucuuau

SEQ ID NO: 1030369 - RNA, 19 nt, Artificial Sequence
  Description of Artificial Sequence: Synthetic oligonucleotide
cguccucuacauuugaucu

SEQ ID NO: 1030370 - RNA, 19 nt, Artificial Sequence
  Description of Artificial Sequence: Synthetic oligonucleotide
cauaggcgcccauagucuu

SEQ ID NO: 1030371 - RNA, 19 nt, Artificial Sequence
  Description of Artificial Sequence: Synthetic oligonucleotide
augucggcacccagcucug

SEQ ID NO: 1030372 - RNA, 19 nt, Artificial Sequence
  Description of Artificial Sequence: Synthetic oligonucleotide
guccucuacauuugaucuu

SEQ ID NO: 1030373 - RNA, 19 nt, Artificial Sequence
  Description of Artificial Sequence: Synthetic oligonucleotide
cuagggccccauccuccuc

SEQ ID NO: 1030374 - RNA, 19 nt, Artificial Sequence
  Description of Artificial Sequence: Synthetic oligonucleotide
gcuuccgacgaacgaucuc

SEQ ID NO: 1030375 - RNA, 19 nt, Artificial Sequence
  Description of Artificial Sequence: Synthetic oligonucleotide
ugggcagcuuagagaccuu

SEQ ID NO: 1030376 - RNA, 19 nt, Artificial Sequence
  Description of Artificial Sequence: Synthetic oligonucleotide
cucuacaaucagaggggau

SEQ ID NO: 1030377 - RNA, 19 nt, Artificial Sequence
  Description of Artificial Sequence: Synthetic oligonucleotide
guagccuggcagcgcucuc

SEQ ID NO: 1030378 - RNA, 19 nt, Artificial Sequence
  Description of Artificial Sequence: Synthetic oligonucleotide
gcagucgguuguuguagaa

SEQ ID NO: 1030379 - RNA, 19 nt, Artificial Sequence
  Description of Artificial Sequence: Synthetic oligonucleotide
ccgccuccagaaucuguag

SEQ ID NO: 1030380 - RNA, 19 nt, Artificial Sequence
  Description of Artificial Sequence: Synthetic oligonucleotide
cuggcagcgcucucacaua

SEQ ID NO: 1030381 - RNA, 19 nt, Artificial Sequence
  Description of Artificial Sequence: Synthetic oligonucleotide
gguuaggauugaugccucu

SEQ ID NO: 1030382 - RNA, 19 nt, Artificial Sequence
  Description of Artificial Sequence: Synthetic oligonucleotide
cagguucugcuuacaguau

SEQ ID NO: 1030383 - RNA, 19 nt, Artificial Sequence
  Description of Artificial Sequence: Synthetic oligonucleotide
caguaugccugcagucggu

SEQ ID NO: 1030384 - RNA, 19 nt, Artificial Sequence
  Description of Artificial Sequence: Synthetic oligonucleotide
gguugauccgagggugcuc

SEQ ID NO: 1030385 - RNA, 19 nt, Artificial Sequence
  Description of Artificial Sequence: Synthetic oligonucleotide
gcugcuuccgacgaacgau

SEQ ID NO: 1030386 - RNA, 19 nt, Artificial Sequence
  Description of Artificial Sequence: Synthetic oligonucleotide
ccauaggcgcccauagucu

SEQ ID NO: 1030387 - RNA, 19 nt, Artificial Sequence
  Description of Artificial Sequence: Synthetic oligonucleotide
ccucgaauggccgggccuc

SEQ ID NO: 1030388 - RNA, 19 nt, Artificial Sequence
  Description of Artificial Sequence: Synthetic oligonucleotide
gggaugcgcguccacgucu

SEQ ID NO: 1030389 - RNA, 19 nt, Artificial Sequence
  Description of Artificial Sequence: Synthetic oligonucleotide
uggccgugcccugcccaca

SEQ ID NO: 1030390 - RNA, 19 nt, Artificial Sequence
  Description of Artificial Sequence: Synthetic oligonucleotide
cacguccucuacauuugau

SEQ ID NO: 1030391 - RNA, 19 nt, Artificial Sequence
  Description of Artificial Sequence: Synthetic oligonucleotide
ccguuacauucaucuccag

SEQ ID NO: 1030392 - RNA, 19 nt, Artificial Sequence
  Description of Artificial Sequence: Synthetic oligonucleotide
gaugcgcguccacgucuua

SEQ ID NO: 1030393 - RNA, 19 nt, Artificial Sequence
  Description of Artificial Sequence: Synthetic oligonucleotide
guagcacguccucuacauu

SEQ ID NO: 1030394 - RNA, 19 nt, Artificial Sequence
  Description of Artificial Sequence: Synthetic oligonucleotide
agguggugccaaagucuaa

SEQ ID NO: 1030395 - RNA, 19 nt, Artificial Sequence
  Description of Artificial Sequence: Synthetic oligonucleotide
caguagggaugcgcgucca

SEQ ID NO: 1030396 - RNA, 19 nt, Artificial Sequence
  Description of Artificial Sequence: Synthetic oligonucleotide
gcguccacgucuuauccuu

SEQ ID NO: 1030397 - RNA, 19 nt, Artificial Sequence
  Description of Artificial Sequence: Synthetic oligonucleotide
cagcugaaccaggggccuc

SEQ ID NO: 1030398 - RNA, 19 nt, Artificial Sequence
  Description of Artificial Sequence: Synthetic oligonucleotide
gcgcucucacauacaacca

SEQ ID NO: 1030399 - RNA, 19 nt, Artificial Sequence
  Description of Artificial Sequence: Synthetic oligonucleotide
cucgaauggccgggccuca

SEQ ID NO: 1030400 - RNA, 19 nt, Artificial Sequence
  Description of Artificial Sequence: Synthetic oligonucleotide
gcauguugaccucgccaua

SEQ ID NO: 1030401 - RNA, 19 nt, Artificial Sequence
  Description of Artificial Sequence: Synthetic oligonucleotide
gccgccuccagaaucugua

SEQ ID NO: 1030402 - RNA, 19 nt, Artificial Sequence
  Description of Artificial Sequence: Synthetic oligonucleotide
cguaacagggguggccgug

SEQ ID NO: 1030403 - RNA, 19 nt, Artificial Sequence
  Description of Artificial Sequence: Synthetic oligonucleotide
gcccaguuguagccuggca

SEQ ID NO: 1030404 - RNA, 19 nt, Artificial Sequence
  Description of Artificial Sequence: Synthetic oligonucleotide
gcucauugggcaguguauu

SEQ ID NO: 1030405 - RNA, 19 nt, Artificial Sequence
  Description of Artificial Sequence: Synthetic oligonucleotide
ggcgcucaaauuccuucau

SEQ ID NO: 1030406 - RNA, 19 nt, Artificial Sequence
  Description of Artificial Sequence: Synthetic oligonucleotide
cguccacgucuuauccuug

SEQ ID NO: 1030407 - RNA, 19 nt, Artificial Sequence
  Description of Artificial Sequence: Synthetic oligonucleotide
ggcccucccauaggcgccc

SEQ ID NO: 1030408 - RNA, 19 nt, Artificial Sequence
  Description of Artificial Sequence: Synthetic oligonucleotide
gcugaaccaggggccuccc

SEQ ID NO: 1030409 - RNA, 19 nt, Artificial Sequence
  Description of Artificial Sequence: Synthetic oligonucleotide
gcggcuucgugcagugaca

SEQ ID NO: 1030410 - RNA, 19 nt, Artificial Sequence
  Description of Artificial Sequence: Synthetic oligonucleotide
guagcacauucugcaccgu

SEQ ID NO: 1030411 - RNA, 19 nt, Artificial Sequence
  Description of Artificial Sequence: Synthetic oligonucleotide
gccaccaugguguguccau

SEQ ID NO: 1030412 - RNA, 19 nt, Artificial Sequence
  Description of Artificial Sequence: Synthetic oligonucleotide
ccccaccaaccucacuguc

SEQ ID NO: 1030413 - RNA, 19 nt, Artificial Sequence
  Description of Artificial Sequence: Synthetic oligonucleotide
ccacugcgaauguuguugu

SEQ ID NO: 1030414 - RNA, 19 nt, Artificial Sequence
  Description of Artificial Sequence: Synthetic oligonucleotide
ggacgaccucccaggucug

SEQ ID NO: 1030415 - RNA, 19 nt, Artificial Sequence
  Description of Artificial Sequence: Synthetic oligonucleotide
ggcagcgcucucacauaca

SEQ ID NO: 1030416 - RNA, 19 nt, Artificial Sequence
  Description of Artificial Sequence: Synthetic oligonucleotide
gcgacacagcuggaagcuc

SEQ ID NO: 1030417 - RNA, 19 nt, Artificial Sequence
  Description of Artificial Sequence: Synthetic oligonucleotide
cggcccucccauaggcgcc

SEQ ID NO: 1030418 - RNA, 19 nt, Artificial Sequence
  Description of Artificial Sequence: Synthetic oligonucleotide
ccacgucuuauccuugaau

SEQ ID NO: 1030419 - RNA, 19 nt, Artificial Sequence
  Description of Artificial Sequence: Synthetic oligonucleotide
cacauacaaccaguacauu

SEQ ID NO: 1030420 - RNA, 19 nt, Artificial Sequence
  Description of Artificial Sequence: Synthetic oligonucleotide
gccccaccaaccucacugu

SEQ ID NO: 1030421 - RNA, 19 nt, Artificial Sequence
  Description of Artificial Sequence: Synthetic oligonucleotide
cugaaccaggggccucccu

SEQ ID NO: 1030422 - RNA, 19 nt, Artificial Sequence
  Description of Artificial Sequence: Synthetic oligonucleotide
guguguccauagcgccgcu

SEQ ID NO: 1030423 - RNA, 19 nt, Artificial Sequence
  Description of Artificial Sequence: Synthetic oligonucleotide
ccucagaugucggcaccca

SEQ ID NO: 1030424 - RNA, 19 nt, Artificial Sequence
  Description of Artificial Sequence: Synthetic oligonucleotide
gcucagcgccaacuuguau

SEQ ID NO: 1030425 - RNA, 19 nt, Artificial Sequence
  Description of Artificial Sequence: Synthetic oligonucleotide
ccucuacauuugaucuugu

SEQ ID NO: 1030426 - RNA, 19 nt, Artificial Sequence
  Description of Artificial Sequence: Synthetic oligonucleotide
ggcuucgugcagugacaau

SEQ ID NO: 1030427 - RNA, 19 nt, Artificial Sequence
  Description of Artificial Sequence: Synthetic oligonucleotide
ggucguggguggccaucua

SEQ ID NO: 1030428 - RNA, 19 nt, Artificial Sequence
  Description of Artificial Sequence: Synthetic oligonucleotide
ggaugcgcguccacgucuu

SEQ ID NO: 1030429 - RNA, 19 nt, Artificial Sequence
  Description of Artificial Sequence: Synthetic oligonucleotide
cagcggcuucgugcaguga

SEQ ID NO: 1030430 - RNA, 19 nt, Artificial Sequence
  Description of Artificial Sequence: Synthetic oligonucleotide
ccuacgaagccagcggcuu

SEQ ID NO: 1030431 - RNA, 19 nt, Artificial Sequence
  Description of Artificial Sequence: Synthetic oligonucleotide
gggcagcuaggauggcuuu

SEQ ID NO: 1030432 - RNA, 19 nt, Artificial Sequence
  Description of Artificial Sequence: Synthetic oligonucleotide
ccucgccauaguagaugua

SEQ ID NO: 1030433 - RNA, 19 nt, Artificial Sequence
  Description of Artificial Sequence: Synthetic oligonucleotide
cgcguccacgucuuauccu

SEQ ID NO: 1030434 - RNA, 19 nt, Artificial Sequence
  Description of Artificial Sequence: Synthetic oligonucleotide
aagaacguaaaguaguauc

SEQ ID NO: 1030435 - RNA, 19 nt, Artificial Sequence
  Description of Artificial Sequence: Synthetic oligonucleotide
aaaguaugaagacaaagcu

SEQ ID NO: 1030436 - RNA, 19 nt, Artificial Sequence
  Description of Artificial Sequence: Synthetic oligonucleotide
aacagaaaugcccauccgc

SEQ ID NO: 1030437 - RNA, 19 nt, Artificial Sequence
  Description of Artificial Sequence: Synthetic oligonucleotide
gacuuguauaaacugaugg

SEQ ID NO: 1030438 - RNA, 19 nt, Artificial Sequence
  Description of Artificial Sequence: Synthetic oligonucleotide
acucauaaaguugagaugg

SEQ ID NO: 1030439 - RNA, 19 nt, Artificial Sequence
  Description of Artificial Sequence: Synthetic oligonucleotide
uacacuguaucacugaaag

SEQ ID NO: 1030440 - RNA, 19 nt, Artificial Sequence
  Description of Artificial Sequence: Synthetic oligonucleotide
uaugauacucauaaaguug

SEQ ID NO: 1030441 - RNA, 19 nt, Artificial Sequence
  Description of Artificial Sequence: Synthetic oligonucleotide
ugaauauuggauauacuug

SEQ ID NO: 1030442 - RNA, 19 nt, Artificial Sequence
  Description of Artificial Sequence: Synthetic oligonucleotide
aagguugugaucuucugag

SEQ ID NO: 1030443 - RNA, 19 nt, Artificial Sequence
  Description of Artificial Sequence: Synthetic oligonucleotide
agaaaucuaggacaagucg

SEQ ID NO: 1030444 - RNA, 19 nt, Artificial Sequence
  Description of Artificial Sequence: Synthetic oligonucleotide
agcuaugauacucauaaag

SEQ ID NO: 1030445 - RNA, 19 nt, Artificial Sequence
  Description of Artificial Sequence: Synthetic oligonucleotide
ugcaugacgacauauaagu

SEQ ID NO: 1030446 - RNA, 19 nt, Artificial Sequence
  Description of Artificial Sequence: Synthetic oligonucleotide
uaaaguaguauccagggua

SEQ ID NO: 1030447 - RNA, 19 nt, Artificial Sequence
  Description of Artificial Sequence: Synthetic oligonucleotide
cuugcagugaccaugacuc

SEQ ID NO: 1030448 - RNA, 19 nt, Artificial Sequence
  Description of Artificial Sequence: Synthetic oligonucleotide
auuaucagcagacuuacga

SEQ ID NO: 1030449 - RNA, 19 nt, Artificial Sequence
  Description of Artificial Sequence: Synthetic oligonucleotide
cauauaaguaccagagucg

SEQ ID NO: 1030450 - RNA, 19 nt, Artificial Sequence
  Description of Artificial Sequence: Synthetic oligonucleotide
aacuacgucauaagcaacc

SEQ ID NO: 1030451 - RNA, 19 nt, Artificial Sequence
  Description of Artificial Sequence: Synthetic oligonucleotide
guaaauucggcugaugugg

SEQ ID NO: 1030452 - RNA, 19 nt, Artificial Sequence
  Description of Artificial Sequence: Synthetic oligonucleotide
cuuaaguauuccaaaagug

SEQ ID NO: 1030453 - RNA, 19 nt, Artificial Sequence
  Description of Artificial Sequence: Synthetic oligonucleotide
agaacguaaaguaguaucc

SEQ ID NO: 1030454 - RNA, 19 nt, Artificial Sequence
  Description of Artificial Sequence: Synthetic oligonucleotide
acucguagcagucucaauc

SEQ ID NO: 1030455 - RNA, 19 nt, Artificial Sequence
  Description of Artificial Sequence: Synthetic oligonucleotide
aauaccugugaauauugga

SEQ ID NO: 1030456 - RNA, 19 nt, Artificial Sequence
  Description of Artificial Sequence: Synthetic oligonucleotide
ugacaaucaucaaaggccc

SEQ ID NO: 1030457 - RNA, 19 nt, Artificial Sequence
  Description of Artificial Sequence: Synthetic oligonucleotide
aacguaaaguaguauccag

SEQ ID NO: 1030458 - RNA, 19 nt, Artificial Sequence
  Description of Artificial Sequence: Synthetic oligonucleotide
aaaagugagggcuucacuu

SEQ ID NO: 1030459 - RNA, 19 nt, Artificial Sequence
  Description of Artificial Sequence: Synthetic oligonucleotide
uauaugucucccuucaaug

SEQ ID NO: 1030460 - RNA, 19 nt, Artificial Sequence
  Description of Artificial Sequence: Synthetic oligonucleotide
aaagauuaucagcagacuu

SEQ ID NO: 1030461 - RNA, 19 nt, Artificial Sequence
  Description of Artificial Sequence: Synthetic oligonucleotide
uaagauagcccauugcuac

SEQ ID NO: 1030462 - RNA, 19 nt, Artificial Sequence
  Description of Artificial Sequence: Synthetic oligonucleotide
uagaaaguuggccuuaugu

SEQ ID NO: 1030463 - RNA, 19 nt, Artificial Sequence
  Description of Artificial Sequence: Synthetic oligonucleotide
aaaaucaugccugggaaug

SEQ ID NO: 1030464 - RNA, 19 nt, Artificial Sequence
  Description of Artificial Sequence: Synthetic oligonucleotide
aacacgguaggguaccagg

SEQ ID NO: 1030465 - RNA, 19 nt, Artificial Sequence
  Description of Artificial Sequence: Synthetic oligonucleotide
uugaaguuguuacaagggc

SEQ ID NO: 1030466 - RNA, 19 nt, Artificial Sequence
  Description of Artificial Sequence: Synthetic oligonucleotide
auuggauauacuugcagug

SEQ ID NO: 1030467 - RNA, 19 nt, Artificial Sequence
  Description of Artificial Sequence: Synthetic oligonucleotide
uauuggauauacuugcagu

SEQ ID NO: 1030468 - RNA, 19 nt, Artificial Sequence
  Description of Artificial Sequence: Synthetic oligonucleotide
gacuccauaacacaucaac

SEQ ID NO: 1030469 - RNA, 19 nt, Artificial Sequence
  Description of Artificial Sequence: Synthetic oligonucleotide
uguaaauucggcugaugug

SEQ ID NO: 1030470 - RNA, 19 nt, Artificial Sequence
  Description of Artificial Sequence: Synthetic oligonucleotide
accucauaaguacuggagg

SEQ ID NO: 1030471 - RNA, 19 nt, Artificial Sequence
  Description of Artificial Sequence: Synthetic oligonucleotide
aaaucuaggacaagucguc

SEQ ID NO: 1030472 - RNA, 19 nt, Artificial Sequence
  Description of Artificial Sequence: Synthetic oligonucleotide
uggaagauguaaauucggc

SEQ ID NO: 1030473 - RNA, 19 nt, Artificial Sequence
  Description of Artificial Sequence: Synthetic oligonucleotide
cacaacuucuguaucacag

SEQ ID NO: 1030474 - RNA, 19 nt, Artificial Sequence
  Description of Artificial Sequence: Synthetic oligonucleotide
auauuggauauacuugcag

SEQ ID NO: 1030475 - RNA, 19 nt, Artificial Sequence
  Description of Artificial Sequence: Synthetic oligonucleotide
aagagaugcacagcauacc

SEQ ID NO: 1030476 - RNA, 19 nt, Artificial Sequence
  Description of Artificial Sequence: Synthetic oligonucleotide
ucgaccuaauccaucauga

SEQ ID NO: 1030477 - RNA, 19 nt, Artificial Sequence
  Description of Artificial Sequence: Synthetic oligonucleotide
auguaaauucggcugaugu

SEQ ID NO: 1030478 - RNA, 19 nt, Artificial Sequence
  Description of Artificial Sequence: Synthetic oligonucleotide
aagauagcccauugcuacg

SEQ ID NO: 1030479 - RNA, 19 nt, Artificial Sequence
  Description of Artificial Sequence: Synthetic oligonucleotide
ccagagucgacuuagaaag

SEQ ID NO: 1030480 - RNA, 19 nt, Artificial Sequence
  Description of Artificial Sequence: Synthetic oligonucleotide
ucuguaaucacuucccuuu

SEQ ID NO: 1030481 - RNA, 19 nt, Artificial Sequence
  Description of Artificial Sequence: Synthetic oligonucleotide
ugauguggcauaucguaag

SEQ ID NO: 1030482 - RNA, 19 nt, Artificial Sequence
  Description of Artificial Sequence: Synthetic oligonucleotide
ucaugaauuuggaaagcca

SEQ ID NO: 1030483 - RNA, 19 nt, Artificial Sequence
  Description of Artificial Sequence: Synthetic oligonucleotide
cacuuucacagcaagucgg

SEQ ID NO: 1030484 - RNA, 19 nt, Artificial Sequence
  Description of Artificial Sequence: Synthetic oligonucleotide
uaaacugaugguuggcuca

SEQ ID NO: 1030485 - RNA, 19 nt, Artificial Sequence
  Description of Artificial Sequence: Synthetic oligonucleotide
uaucagcagacuuacgaug

SEQ ID NO: 1030486 - RNA, 19 nt, Artificial Sequence
  Description of Artificial Sequence: Synthetic oligonucleotide
uucauauguauaugucucc

SEQ ID NO: 1030487 - RNA, 19 nt, Artificial Sequence
  Description of Artificial Sequence: Synthetic oligonucleotide
aagucacacauccaagggu

SEQ ID NO: 1030488 - RNA, 19 nt, Artificial Sequence
  Description of Artificial Sequence: Synthetic oligonucleotide
ucuguaaaguaugaagaca

SEQ ID NO: 1030489 - RNA, 19 nt, Artificial Sequence
  Description of Artificial Sequence: Synthetic oligonucleotide
gaauguucuaauuccagaa

SEQ ID NO: 1030490 - RNA, 19 nt, Artificial Sequence
  Description of Artificial Sequence: Synthetic oligonucleotide
ucgacuuagaaaguuggcc

SEQ ID NO: 1030491 - RNA, 19 nt, Artificial Sequence
  Description of Artificial Sequence: Synthetic oligonucleotide
ucuguagugagaauuccau

SEQ ID NO: 1030492 - RNA, 19 nt, Artificial Sequence
  Description of Artificial Sequence: Synthetic oligonucleotide
accgcauccgcuaaugucc

SEQ ID NO: 1030493 - RNA, 19 nt, Artificial Sequence
  Description of Artificial Sequence: Synthetic oligonucleotide
auaaguaccagagucgacu

SEQ ID NO: 1030494 - RNA, 19 nt, Artificial Sequence
  Description of Artificial Sequence: Synthetic oligonucleotide
uuugcggcuugcaugacga

SEQ ID NO: 1030495 - RNA, 19 nt, Artificial Sequence
  Description of Artificial Sequence: Synthetic oligonucleotide
uagacuuguauaaacugau

SEQ ID NO: 1030496 - RNA, 19 nt, Artificial Sequence
  Description of Artificial Sequence: Synthetic oligonucleotide
uugcaugacgacauauaag

SEQ ID NO: 1030497 - RNA, 19 nt, Artificial Sequence
  Description of Artificial Sequence: Synthetic oligonucleotide
auagauggaaaugauuuca

SEQ ID NO: 1030498 - RNA, 19 nt, Artificial Sequence
  Description of Artificial Sequence: Synthetic oligonucleotide
uuaagaacguaaaguagua

SEQ ID NO: 1030499 - RNA, 19 nt, Artificial Sequence
  Description of Artificial Sequence: Synthetic oligonucleotide
gaaaugcccauccgcaucc

SEQ ID NO: 1030500 - RNA, 19 nt, Artificial Sequence
  Description of Artificial Sequence: Synthetic oligonucleotide
ucgagcuuuggaagaaagg

SEQ ID NO: 1030501 - RNA, 19 nt, Artificial Sequence
  Description of Artificial Sequence: Synthetic oligonucleotide
acgagaaaggaauaccugu

SEQ ID NO: 1030502 - RNA, 19 nt, Artificial Sequence
  Description of Artificial Sequence: Synthetic oligonucleotide
uucgaccuaauccaucaug

SEQ ID NO: 1030503 - RNA, 19 nt, Artificial Sequence
  Description of Artificial Sequence: Synthetic oligonucleotide
uacgagaaaggaauaccug

SEQ ID NO: 1030504 - RNA, 19 nt, Artificial Sequence
  Description of Artificial Sequence: Synthetic oligonucleotide
uggccuuauguacaaacca

SEQ ID NO: 1030505 - RNA, 19 nt, Artificial Sequence
  Description of Artificial Sequence: Synthetic oligonucleotide
uuggccuuauguacaaacc

SEQ ID NO: 1030506 - RNA, 19 nt, Artificial Sequence
  Description of Artificial Sequence: Synthetic oligonucleotide
guaacuacgucauaagcaa

SEQ ID NO: 1030507 - RNA, 19 nt, Artificial Sequence
  Description of Artificial Sequence: Synthetic oligonucleotide
uggauauacuugcagugac

SEQ ID NO: 1030508 - RNA, 19 nt, Artificial Sequence
  Description of Artificial Sequence: Synthetic oligonucleotide
uucuaaguacauuuugaaa

SEQ ID NO: 1030509 - RNA, 19 nt, Artificial Sequence
  Description of Artificial Sequence: Synthetic oligonucleotide
guaaucacuucccuuugag

SEQ ID NO: 1030510 - RNA, 19 nt, Artificial Sequence
  Description of Artificial Sequence: Synthetic oligonucleotide
agagaugcacagcauacca

SEQ ID NO: 1030511 - RNA, 19 nt, Artificial Sequence
  Description of Artificial Sequence: Synthetic oligonucleotide
cucuguaaaguaugaagac

SEQ ID NO: 1030512 - RNA, 19 nt, Artificial Sequence
  Description of Artificial Sequence: Synthetic oligonucleotide
agacuuacgauguguaaga

SEQ ID NO: 1030513 - RNA, 19 nt, Artificial Sequence
  Description of Artificial Sequence: Synthetic oligonucleotide
aaaagauuaucagcagacu

SEQ ID NO: 1030514 - RNA, 19 nt, Artificial Sequence
  Description of Artificial Sequence: Synthetic oligonucleotide
uauaaacugaugguuggcu

SEQ ID NO: 1030515 - RNA, 19 nt, Artificial Sequence
  Description of Artificial Sequence: Synthetic oligonucleotide
ugaguggcggcccagguaa

SEQ ID NO: 1030516 - RNA, 19 nt, Artificial Sequence
  Description of Artificial Sequence: Synthetic oligonucleotide
cuguaaaguaugaagacaa

SEQ ID NO: 1030517 - RNA, 19 nt, Artificial Sequence
  Description of Artificial Sequence: Synthetic oligonucleotide
agaaaguuggccuuaugua

SEQ ID NO: 1030518 - RNA, 19 nt, Artificial Sequence
  Description of Artificial Sequence: Synthetic oligonucleotide
agucacacauccaaggguc

SEQ ID NO: 1030519 - RNA, 19 nt, Artificial Sequence
  Description of Artificial Sequence: Synthetic oligonucleotide
ugcguuguguaccgcaucc

SEQ ID NO: 1030520 - RNA, 19 nt, Artificial Sequence
  Description of Artificial Sequence: Synthetic oligonucleotide
cauauguaaacaucuccuc

SEQ ID NO: 1030521 - RNA, 19 nt, Artificial Sequence
  Description of Artificial Sequence: Synthetic oligonucleotide
uaggguaccagggaacccg

SEQ ID NO: 1030522 - RNA, 19 nt, Artificial Sequence
  Description of Artificial Sequence: Synthetic oligonucleotide
uggaggacccucaagccug

SEQ ID NO: 1030523 - RNA, 19 nt, Artificial Sequence
  Description of Artificial Sequence: Synthetic oligonucleotide
aggagagacaucaagguca

SEQ ID NO: 1030524 - RNA, 19 nt, Artificial Sequence
  Description of Artificial Sequence: Synthetic oligonucleotide
uaaauucggcugauguggc

SEQ ID NO: 1030525 - RNA, 19 nt, Artificial Sequence
  Description of Artificial Sequence: Synthetic oligonucleotide
augauacucauaaaguuga

SEQ ID NO: 1030526 - RNA, 19 nt, Artificial Sequence
  Description of Artificial Sequence: Synthetic oligonucleotide
uccgcuaauguccaugcaa

SEQ ID NO: 1030527 - RNA, 19 nt, Artificial Sequence
  Description of Artificial Sequence: Synthetic oligonucleotide
cauaagcaaccuuucgagc

SEQ ID NO: 1030528 - RNA, 19 nt, Artificial Sequence
  Description of Artificial Sequence: Synthetic oligonucleotide
uuaucagcagacuuacgau

SEQ ID NO: 1030529 - RNA, 19 nt, Artificial Sequence
  Description of Artificial Sequence: Synthetic oligonucleotide
ucuagcaacuucauaugua

SEQ ID NO: 1030530 - RNA, 19 nt, Artificial Sequence
  Description of Artificial Sequence: Synthetic oligonucleotide
acgacauauaaguaccaga

SEQ ID NO: 1030531 - RNA, 19 nt, Artificial Sequence
  Description of Artificial Sequence: Synthetic oligonucleotide
aucuaggacaagucgucuc

SEQ ID NO: 1030532 - RNA, 19 nt, Artificial Sequence
  Description of Artificial Sequence: Synthetic oligonucleotide
gacgugguuugauuggcag

SEQ ID NO: 1030533 - RNA, 19 nt, Artificial Sequence
  Description of Artificial Sequence: Synthetic oligonucleotide
guaauacuugggcuuugcg

SEQ ID NO: 1030534 - RNA, 19 nt, Artificial Sequence
  Description of Artificial Sequence: Synthetic oligonucleotide
uggcauaucguaagauagc

SEQ ID NO: 1030535 - RNA, 19 nt, Artificial Sequence
  Description of Artificial Sequence: Synthetic oligonucleotide
auauaaguaccagagucga

SEQ ID NO: 1030536 - RNA, 19 nt, Artificial Sequence
  Description of Artificial Sequence: Synthetic oligonucleotide
ugugaauauuggauauacu

SEQ ID NO: 1030537 - RNA, 19 nt, Artificial Sequence
  Description of Artificial Sequence: Synthetic oligonucleotide
ugauacucauaaaguugag

SEQ ID NO: 1030538 - RNA, 19 nt, Artificial Sequence
  Description of Artificial Sequence: Synthetic oligonucleotide
agucgacuuagaaaguugg

SEQ ID NO: 1030539 - RNA, 19 nt, Artificial Sequence
  Description of Artificial Sequence: Synthetic oligonucleotide
uccgcauccacaccgcuga

SEQ ID NO: 1030540 - RNA, 19 nt, Artificial Sequence
  Description of Artificial Sequence: Synthetic oligonucleotide
cugugaauauuggauauac

SEQ ID NO: 1030541 - RNA, 19 nt, Artificial Sequence
  Description of Artificial Sequence: Synthetic oligonucleotide
auagacuuguauaaacuga

SEQ ID NO: 1030542 - RNA, 19 nt, Artificial Sequence
  Description of Artificial Sequence: Synthetic oligonucleotide
cagacuuacgauguguaag

SEQ ID NO: 1030543 - RNA, 19 nt, Artificial Sequence
  Description of Artificial Sequence: Synthetic oligonucleotide
uguugcucggcagaaaggu

SEQ ID NO: 1030544 - RNA, 19 nt, Artificial Sequence
  Description of Artificial Sequence: Synthetic oligonucleotide
auauguauaugucucccuu

SEQ ID NO: 1030545 - RNA, 19 nt, Artificial Sequence
  Description of Artificial Sequence: Synthetic oligonucleotide
ucguaagauagcccauugc

SEQ ID NO: 1030546 - RNA, 19 nt, Artificial Sequence
  Description of Artificial Sequence: Synthetic oligonucleotide
agggcuucuggacauagga

SEQ ID NO: 1030547 - RNA, 19 nt, Artificial Sequence
  Description of Artificial Sequence: Synthetic oligonucleotide
acguaaaguaguauccagg

SEQ ID NO: 1030548 - RNA, 19 nt, Artificial Sequence
  Description of Artificial Sequence: Synthetic oligonucleotide
gacaucaaggucaugcaca

SEQ ID NO: 1030549 - RNA, 19 nt, Artificial Sequence
  Description of Artificial Sequence: Synthetic oligonucleotide
cagaucccaacagaaaugc

SEQ ID NO: 1030550 - RNA, 19 nt, Artificial Sequence
  Description of Artificial Sequence: Synthetic oligonucleotide
caccucauaaguacuggag

SEQ ID NO: 1030551 - RNA, 19 nt, Artificial Sequence
  Description of Artificial Sequence: Synthetic oligonucleotide
aaguugagaugguagcuua

SEQ ID NO: 1030552 - RNA, 19 nt, Artificial Sequence
  Description of Artificial Sequence: Synthetic oligonucleotide
gugaauauuggauauacuu

SEQ ID NO: 1030553 - RNA, 19 nt, Artificial Sequence
  Description of Artificial Sequence: Synthetic oligonucleotide
uuggauauacuugcaguga

SEQ ID NO: 1030554 - RNA, 19 nt, Artificial Sequence
  Description of Artificial Sequence: Synthetic oligonucleotide
guagcagucucaaucuucc

SEQ ID NO: 1030555 - RNA, 19 nt, Artificial Sequence
  Description of Artificial Sequence: Synthetic oligonucleotide
agauggaaaugauuucaga

SEQ ID NO: 1030556 - RNA, 19 nt, Artificial Sequence
  Description of Artificial Sequence: Synthetic oligonucleotide
acgaaggugaacacgguag

SEQ ID NO: 1030557 - RNA, 19 nt, Artificial Sequence
  Description of Artificial Sequence: Synthetic oligonucleotide
aaguaugaagacaaagcua

SEQ ID NO: 1030558 - RNA, 19 nt, Artificial Sequence
  Description of Artificial Sequence: Synthetic oligonucleotide
cguaaaguaguauccaggg

SEQ ID NO: 1030559 - RNA, 19 nt, Artificial Sequence
  Description of Artificial Sequence: Synthetic oligonucleotide
aaaguugagaugguagcuu

SEQ ID NO: 1030560 - RNA, 19 nt, Artificial Sequence
  Description of Artificial Sequence: Synthetic oligonucleotide
gacgacauauaaguaccag

SEQ ID NO: 1030561 - RNA, 19 nt, Artificial Sequence
  Description of Artificial Sequence: Synthetic oligonucleotide
cugccaaugugacagggac

SEQ ID NO: 1030562 - RNA, 19 nt, Artificial Sequence
  Description of Artificial Sequence: Synthetic oligonucleotide
aucguaagauagcccauug

SEQ ID NO: 1030563 - RNA, 19 nt, Artificial Sequence
  Description of Artificial Sequence: Synthetic oligonucleotide
ugccguguaagagauggcc

SEQ ID NO: 1030564 - RNA, 19 nt, Artificial Sequence
  Description of Artificial Sequence: Synthetic oligonucleotide
uggcucaacugccaacaag

SEQ ID NO: 1030565 - RNA, 19 nt, Artificial Sequence
  Description of Artificial Sequence: Synthetic oligonucleotide
gauacucauaaaguugaga

SEQ ID NO: 1030566 - RNA, 19 nt, Artificial Sequence
  Description of Artificial Sequence: Synthetic oligonucleotide
ggacauaggaguugugucc

SEQ ID NO: 1030567 - RNA, 19 nt, Artificial Sequence
  Description of Artificial Sequence: Synthetic oligonucleotide
ugacccaguggccuguucu

SEQ ID NO: 1030568 - RNA, 19 nt, Artificial Sequence
  Description of Artificial Sequence: Synthetic oligonucleotide
gaugguagcuuaaguauuc

SEQ ID NO: 1030569 - RNA, 19 nt, Artificial Sequence
  Description of Artificial Sequence: Synthetic oligonucleotide
caucaauaaggaaggugac

SEQ ID NO: 1030570 - RNA, 19 nt, Artificial Sequence
  Description of Artificial Sequence: Synthetic oligonucleotide
cauccgcuaauguccaugc

SEQ ID NO: 1030571 - RNA, 19 nt, Artificial Sequence
  Description of Artificial Sequence: Synthetic oligonucleotide
auaccugugaauauuggau

SEQ ID NO: 1030572 - RNA, 19 nt, Artificial Sequence
  Description of Artificial Sequence: Synthetic oligonucleotide
augguagcuuaaguauucc

SEQ ID NO: 1030573 - RNA, 19 nt, Artificial Sequence
  Description of Artificial Sequence: Synthetic oligonucleotide
uauaaguaccagagucgac

SEQ ID NO: 1030574 - RNA, 19 nt, Artificial Sequence
  Description of Artificial Sequence: Synthetic oligonucleotide
guaagagauggccaacuga

SEQ ID NO: 1030575 - RNA, 19 nt, Artificial Sequence
  Description of Artificial Sequence: Synthetic oligonucleotide
uaccugugaauauuggaua

SEQ ID NO: 1030576 - RNA, 19 nt, Artificial Sequence
  Description of Artificial Sequence: Synthetic oligonucleotide
uguuccucaccgcucuagc

SEQ ID NO: 1030577 - RNA, 19 nt, Artificial Sequence
  Description of Artificial Sequence: Synthetic oligonucleotide
gaaaucuaggacaagucgu

SEQ ID NO: 1030578 - RNA, 19 nt, Artificial Sequence
  Description of Artificial Sequence: Synthetic oligonucleotide
uguagguaucagucuaccu

SEQ ID NO: 1030579 - RNA, 19 nt, Artificial Sequence
  Description of Artificial Sequence: Synthetic oligonucleotide
gguaacuacgucauaagca

SEQ ID NO: 1030580 - RNA, 19 nt, Artificial Sequence
  Description of Artificial Sequence: Synthetic oligonucleotide
acgugguuugauuggcagg

SEQ ID NO: 1030581 - RNA, 19 nt, Artificial Sequence
  Description of Artificial Sequence: Synthetic oligonucleotide
gcugccguguaagagaugg

SEQ ID NO: 1030582 - RNA, 19 nt, Artificial Sequence
  Description of Artificial Sequence: Synthetic oligonucleotide
acaaucaucaaaggcccug

SEQ ID NO: 1030583 - RNA, 19 nt, Artificial Sequence
  Description of Artificial Sequence: Synthetic oligonucleotide
acagaaaugcccauccgca

SEQ ID NO: 1030584 - RNA, 19 nt, Artificial Sequence
  Description of Artificial Sequence: Synthetic oligonucleotide
ugacgacauauaaguacca

SEQ ID NO: 1030585 - RNA, 19 nt, Artificial Sequence
  Description of Artificial Sequence: Synthetic oligonucleotide
aaucuaggacaagucgucu

SEQ ID NO: 1030586 - RNA, 19 nt, Artificial Sequence
  Description of Artificial Sequence: Synthetic oligonucleotide
agacaaagggugcugccgu

SEQ ID NO: 1030587 - RNA, 19 nt, Artificial Sequence
  Description of Artificial Sequence: Synthetic oligonucleotide
guugccagggaaaaucaug

SEQ ID NO: 1030588 - RNA, 19 nt, Artificial Sequence
  Description of Artificial Sequence: Synthetic oligonucleotide
agggccagcuaugauacuc

SEQ ID NO: 1030589 - RNA, 19 nt, Artificial Sequence
  Description of Artificial Sequence: Synthetic oligonucleotide
acuuacgauguguaagaaa

SEQ ID NO: 1030590 - RNA, 19 nt, Artificial Sequence
  Description of Artificial Sequence: Synthetic oligonucleotide
guugagaugguagcuuaag

SEQ ID NO: 1030591 - RNA, 19 nt, Artificial Sequence
  Description of Artificial Sequence: Synthetic oligonucleotide
uccucaccgcucuagcugc

SEQ ID NO: 1030592 - RNA, 19 nt, Artificial Sequence
  Description of Artificial Sequence: Synthetic oligonucleotide
aggacaagucgucucagaa

SEQ ID NO: 1030593 - RNA, 19 nt, Artificial Sequence
  Description of Artificial Sequence: Synthetic oligonucleotide
cuugcaugacgacauauaa

SEQ ID NO: 1030594 - RNA, 19 nt, Artificial Sequence
  Description of Artificial Sequence: Synthetic oligonucleotide
cuuugcggcuugcaugacg

SEQ ID NO: 1030595 - RNA, 19 nt, Artificial Sequence
  Description of Artificial Sequence: Synthetic oligonucleotide
ugacagggacuccaguuaa

SEQ ID NO: 1030596 - RNA, 19 nt, Artificial Sequence
  Description of Artificial Sequence: Synthetic oligonucleotide
aucaauaaggaaggugaca

SEQ ID NO: 1030597 - RNA, 19 nt, Artificial Sequence
  Description of Artificial Sequence: Synthetic oligonucleotide
uguaccgcauccgcuaaug

SEQ ID NO: 1030598 - RNA, 19 nt, Artificial Sequence
  Description of Artificial Sequence: Synthetic oligonucleotide
gaacguaaaguaguaucca

SEQ ID NO: 1030599 - RNA, 19 nt, Artificial Sequence
  Description of Artificial Sequence: Synthetic oligonucleotide
ccagcuaugauacucauaa

SEQ ID NO: 1030600 - RNA, 19 nt, Artificial Sequence
  Description of Artificial Sequence: Synthetic oligonucleotide
aaaucaugccugggaaugu

SEQ ID NO: 1030601 - RNA, 19 nt, Artificial Sequence
  Description of Artificial Sequence: Synthetic oligonucleotide
aaguuguuacaagggccag

SEQ ID NO: 1030602 - RNA, 19 nt, Artificial Sequence
  Description of Artificial Sequence: Synthetic oligonucleotide
ucggcagaaaggucuucag

SEQ ID NO: 1030603 - RNA, 19 nt, Artificial Sequence
  Description of Artificial Sequence: Synthetic oligonucleotide
uaagcaaccuuucgagcuu

SEQ ID NO: 1030604 - RNA, 19 nt, Artificial Sequence
  Description of Artificial Sequence: Synthetic oligonucleotide
ugcuacgagaaaggaauac

SEQ ID NO: 1030605 - RNA, 19 nt, Artificial Sequence
  Description of Artificial Sequence: Synthetic oligonucleotide
gauuaucagcagacuuacg

SEQ ID NO: 1030606 - RNA, 19 nt, Artificial Sequence
  Description of Artificial Sequence: Synthetic oligonucleotide
guauaaacugaugguuggc

SEQ ID NO: 1030607 - RNA, 19 nt, Artificial Sequence
  Description of Artificial Sequence: Synthetic oligonucleotide
gagucgacuuagaaaguug

SEQ ID NO: 1030608 - RNA, 19 nt, Artificial Sequence
  Description of Artificial Sequence: Synthetic oligonucleotide
uuguguaccgcauccgcua

SEQ ID NO: 1030609 - RNA, 19 nt, Artificial Sequence
  Description of Artificial Sequence: Synthetic oligonucleotide
ucauaaaguugagauggua

SEQ ID NO: 1030610 - RNA, 19 nt, Artificial Sequence
  Description of Artificial Sequence: Synthetic oligonucleotide
gauagcccauugcuacgag

SEQ ID NO: 1030611 - RNA, 19 nt, Artificial Sequence
  Description of Artificial Sequence: Synthetic oligonucleotide
gauguaaauucggcugaug

SEQ ID NO: 1030612 - RNA, 19 nt, Artificial Sequence
  Description of Artificial Sequence: Synthetic oligonucleotide
gcugacgugguuugauugg

SEQ ID NO: 1030613 - RNA, 19 nt, Artificial Sequence
  Description of Artificial Sequence: Synthetic oligonucleotide
uaagaacguaaaguaguau

SEQ ID NO: 1030614 - RNA, 19 nt, Artificial Sequence
  Description of Artificial Sequence: Synthetic oligonucleotide
uaccgcauccgcuaauguc

SEQ ID NO: 1030615 - RNA, 19 nt, Artificial Sequence
  Description of Artificial Sequence: Synthetic oligonucleotide
aaacucguagcagucucaa

SEQ ID NO: 1030616 - RNA, 19 nt, Artificial Sequence
  Description of Artificial Sequence: Synthetic oligonucleotide
cuaugauacucauaaaguu

SEQ ID NO: 1030617 - RNA, 19 nt, Artificial Sequence
  Description of Artificial Sequence: Synthetic oligonucleotide
ggaauaccugugaauauug

SEQ ID NO: 1030618 - RNA, 19 nt, Artificial Sequence
  Description of Artificial Sequence: Synthetic oligonucleotide
uuacaagggccagcuauga

SEQ ID NO: 1030619 - RNA, 19 nt, Artificial Sequence
  Description of Artificial Sequence: Synthetic oligonucleotide
cuacgagaaaggaauaccu

SEQ ID NO: 1030620 - RNA, 19 nt, Artificial Sequence
  Description of Artificial Sequence: Synthetic oligonucleotide
ccauaacacaucaacacca

SEQ ID NO: 1030621 - RNA, 19 nt, Artificial Sequence
  Description of Artificial Sequence: Synthetic oligonucleotide
ugacgugguuugauuggca

SEQ ID NO: 1030622 - RNA, 19 nt, Artificial Sequence
  Description of Artificial Sequence: Synthetic oligonucleotide
ugccaaugugacagggacu

SEQ ID NO: 1030623 - RNA, 19 nt, Artificial Sequence
  Description of Artificial Sequence: Synthetic oligonucleotide
caugcacaacuucuguauc

SEQ ID NO: 1030624 - RNA, 19 nt, Artificial Sequence
  Description of Artificial Sequence: Synthetic oligonucleotide
gggaaaaucaugccuggga

SEQ ID NO: 1030625 - RNA, 19 nt, Artificial Sequence
  Description of Artificial Sequence: Synthetic oligonucleotide
auagcccauugcuacgaga

SEQ ID NO: 1030626 - RNA, 19 nt, Artificial Sequence
  Description of Artificial Sequence: Synthetic oligonucleotide
acuacgucauaagcaaccu

SEQ ID NO: 1030627 - RNA, 19 nt, Artificial Sequence
  Description of Artificial Sequence: Synthetic oligonucleotide
cuagcaacuucauauguau

SEQ ID NO: 1030628 - RNA, 19 nt, Artificial Sequence
  Description of Artificial Sequence: Synthetic oligonucleotide
cuguaaucacuucccuuug

SEQ ID NO: 1030629 - RNA, 19 nt, Artificial Sequence
  Description of Artificial Sequence: Synthetic oligonucleotide
gcuacgagaaaggaauacc

SEQ ID NO: 1030630 - RNA, 19 nt, Artificial Sequence
  Description of Artificial Sequence: Synthetic oligonucleotide
gaccuaauccaucaugaau

SEQ ID NO: 1030631 - RNA, 19 nt, Artificial Sequence
  Description of Artificial Sequence: Synthetic oligonucleotide
aacccguucauagcacaca

SEQ ID NO: 1030632 - RNA, 19 nt, Artificial Sequence
  Description of Artificial Sequence: Synthetic oligonucleotide
caacuucauauguauaugu

SEQ ID NO: 1030633 - RNA, 19 nt, Artificial Sequence
  Description of Artificial Sequence: Synthetic oligonucleotide
acgucauaagcaaccuuuc

SEQ ID NO: 1030634 - RNA, 19 nt, Artificial Sequence
  Description of Artificial Sequence: Synthetic oligonucleotide
cccauugcuacgagaaagg

SEQ ID NO: 1030635 - RNA, 19 nt, Artificial Sequence
  Description of Artificial Sequence: Synthetic oligonucleotide
acacgguaggguaccaggg

SEQ ID NO: 1030636 - RNA, 19 nt, Artificial Sequence
  Description of Artificial Sequence: Synthetic oligonucleotide
aggaauaccugugaauauu

SEQ ID NO: 1030637 - RNA, 19 nt, Artificial Sequence
  Description of Artificial Sequence: Synthetic oligonucleotide
uguguaccgcauccgcuaa

SEQ ID NO: 1030638 - RNA, 19 nt, Artificial Sequence
  Description of Artificial Sequence: Synthetic oligonucleotide
aaacugaugguuggcucaa

SEQ ID NO: 1030639 - RNA, 19 nt, Artificial Sequence
  Description of Artificial Sequence: Synthetic oligonucleotide
gacaaagggugcugccgug

SEQ ID NO: 1030640 - RNA, 19 nt, Artificial Sequence
  Description of Artificial Sequence: Synthetic oligonucleotide
gaauuugcacuuugaggcu

SEQ ID NO: 1030641 - RNA, 19 nt, Artificial Sequence
  Description of Artificial Sequence: Synthetic oligonucleotide
gccuuugaggcugacgugg

SEQ ID NO: 1030642 - RNA, 19 nt, Artificial Sequence
  Description of Artificial Sequence: Synthetic oligonucleotide
ggccuuauguacaaaccag

SEQ ID NO: 1030643 - RNA, 19 nt, Artificial Sequence
  Description of Artificial Sequence: Synthetic oligonucleotide
ccuuauguacaaaccaguc

SEQ ID NO: 1030644 - RNA, 19 nt, Artificial Sequence
  Description of Artificial Sequence: Synthetic oligonucleotide
cugacgugguuugauuggc

SEQ ID NO: 1030645 - RNA, 19 nt, Artificial Sequence
  Description of Artificial Sequence: Synthetic oligonucleotide
ucuggacauaggaguugug

SEQ ID NO: 1030646 - RNA, 19 nt, Artificial Sequence
  Description of Artificial Sequence: Synthetic oligonucleotide
uagcaacuucauauguaua

SEQ ID NO: 1030647 - RNA, 19 nt, Artificial Sequence
  Description of Artificial Sequence: Synthetic oligonucleotide
augucucccuucaaugaag

SEQ ID NO: 1030648 - RNA, 19 nt, Artificial Sequence
  Description of Artificial Sequence: Synthetic oligonucleotide
agcugcguuguguaccgca

SEQ ID NO: 1030649 - RNA, 19 nt, Artificial Sequence
  Description of Artificial Sequence: Synthetic oligonucleotide
uaucguaagauagcccauu

SEQ ID NO: 1030650 - RNA, 19 nt, Artificial Sequence
  Description of Artificial Sequence: Synthetic oligonucleotide
acgcauccagauuucaaua

SEQ ID NO: 1030651 - RNA, 19 nt, Artificial Sequence
  Description of Artificial Sequence: Synthetic oligonucleotide
aauauucccugcagugaaa

SEQ ID NO: 1030652 - RNA, 19 nt, Artificial Sequence
  Description of Artificial Sequence: Synthetic oligonucleotide
agagucgacuuagaaaguu

SEQ ID NO: 1030653 - RNA, 19 nt, Artificial Sequence
  Description of Artificial Sequence: Synthetic oligonucleotide
gagcuuuggaagaaaggaa

SEQ ID NO: 1030654 - RNA, 19 nt, Artificial Sequence
  Description of Artificial Sequence: Synthetic oligonucleotide
guauaugucucccuucaau

SEQ ID NO: 1030655 - RNA, 19 nt, Artificial Sequence
  Description of Artificial Sequence: Synthetic oligonucleotide
ggcugacgugguuugauug

SEQ ID NO: 1030656 - RNA, 19 nt, Artificial Sequence
  Description of Artificial Sequence: Synthetic oligonucleotide
acaagucgucucagaagac

SEQ ID NO: 1030657 - RNA, 19 nt, Artificial Sequence
  Description of Artificial Sequence: Synthetic oligonucleotide
cuuguauaaacugaugguu

SEQ ID NO: 1030658 - RNA, 19 nt, Artificial Sequence
  Description of Artificial Sequence: Synthetic oligonucleotide
gcugauguggcauaucgua

SEQ ID NO: 1030659 - RNA, 19 nt, Artificial Sequence
  Description of Artificial Sequence: Synthetic oligonucleotide
gucgacuuagaaaguuggc

SEQ ID NO: 1030660 - RNA, 19 nt, Artificial Sequence
  Description of Artificial Sequence: Synthetic oligonucleotide
gcaaaguaauacuugggcu

SEQ ID NO: 1030661 - RNA, 19 nt, Artificial Sequence
  Description of Artificial Sequence: Synthetic oligonucleotide
uccugcaauucuguuguuc

SEQ ID NO: 1030662 - RNA, 19 nt, Artificial Sequence
  Description of Artificial Sequence: Synthetic oligonucleotide
uggccaacugaguggcggc

SEQ ID NO: 1030663 - RNA, 19 nt, Artificial Sequence
  Description of Artificial Sequence: Synthetic oligonucleotide
aacucguagcagucucaau

SEQ ID NO: 1030664 - RNA, 19 nt, Artificial Sequence
  Description of Artificial Sequence: Synthetic oligonucleotide
uuucgaccuaauccaucau

SEQ ID NO: 1030665 - RNA, 19 nt, Artificial Sequence
  Description of Artificial Sequence: Synthetic oligonucleotide
gcaacuucauauguauaug

SEQ ID NO: 1030666 - RNA, 19 nt, Artificial Sequence
  Description of Artificial Sequence: Synthetic oligonucleotide
gaaacucguagcagucuca

SEQ ID NO: 1030667 - RNA, 19 nt, Artificial Sequence
  Description of Artificial Sequence: Synthetic oligonucleotide
guaagauagcccauugcua

SEQ ID NO: 1030668 - RNA, 19 nt, Artificial Sequence
  Description of Artificial Sequence: Synthetic oligonucleotide
uacaagggccagcuaugau

SEQ ID NO: 1030669 - RNA, 19 nt, Artificial Sequence
  Description of Artificial Sequence: Synthetic oligonucleotide
uuccauaguggaagaugua

SEQ ID NO: 1030670 - RNA, 19 nt, Artificial Sequence
  Description of Artificial Sequence: Synthetic oligonucleotide
gguaggguaccagggaacc

SEQ ID NO: 1030671 - RNA, 19 nt, Artificial Sequence
  Description of Artificial Sequence: Synthetic oligonucleotide
gaacacgguaggguaccag

SEQ ID NO: 1030672 - RNA, 19 nt, Artificial Sequence
  Description of Artificial Sequence: Synthetic oligonucleotide
ugguuggcucaacugccaa

SEQ ID NO: 1030673 - RNA, 19 nt, Artificial Sequence
  Description of Artificial Sequence: Synthetic oligonucleotide
cugauguggcauaucguaa

SEQ ID NO: 1030674 - RNA, 19 nt, Artificial Sequence
  Description of Artificial Sequence: Synthetic oligonucleotide
uugcuacgagaaaggaaua

SEQ ID NO: 1030675 - RNA, 19 nt, Artificial Sequence
  Description of Artificial Sequence: Synthetic oligonucleotide
guaaaguaguauccagggu

SEQ ID NO: 1030676 - RNA, 19 nt, Artificial Sequence
  Description of Artificial Sequence: Synthetic oligonucleotide
caagucgucucagaagaca

SEQ ID NO: 1030677 - RNA, 19 nt, Artificial Sequence
  Description of Artificial Sequence: Synthetic oligonucleotide
gaacccguucauagcacac

SEQ ID NO: 1030678 - RNA, 19 nt, Artificial Sequence
  Description of Artificial Sequence: Synthetic oligonucleotide
caaugugacagggacucca

SEQ ID NO: 1030679 - RNA, 19 nt, Artificial Sequence
  Description of Artificial Sequence: Synthetic oligonucleotide
accgcugaacccaaagcca

SEQ ID NO: 1030680 - RNA, 19 nt, Artificial Sequence
  Description of Artificial Sequence: Synthetic oligonucleotide
acuuucacagcaagucggu

SEQ ID NO: 1030681 - RNA, 19 nt, Artificial Sequence
  Description of Artificial Sequence: Synthetic oligonucleotide
cucguagcagucucaaucu

SEQ ID NO: 1030682 - RNA, 19 nt, Artificial Sequence
  Description of Artificial Sequence: Synthetic oligonucleotide
agauuucaauagauggaaa

SEQ ID NO: 1030683 - RNA, 19 nt, Artificial Sequence
  Description of Artificial Sequence: Synthetic oligonucleotide
accgcucuagcugccaaug

SEQ ID NO: 1030684 - RNA, 19 nt, Artificial Sequence
  Description of Artificial Sequence: Synthetic oligonucleotide
gguaccagggaacccguuc

SEQ ID NO: 1030685 - RNA, 19 nt, Artificial Sequence
  Description of Artificial Sequence: Synthetic oligonucleotide
cauauguauaugucucccu

SEQ ID NO: 1030686 - RNA, 19 nt, Artificial Sequence
  Description of Artificial Sequence: Synthetic oligonucleotide
gacuuagaaaguuggccuu

SEQ ID NO: 1030687 - RNA, 19 nt, Artificial Sequence
  Description of Artificial Sequence: Synthetic oligonucleotide
ugccugggaauguucuaau

SEQ ID NO: 1030688 - RNA, 19 nt, Artificial Sequence
  Description of Artificial Sequence: Synthetic oligonucleotide
ggcccagguaacuacguca

SEQ ID NO: 1030689 - RNA, 19 nt, Artificial Sequence
  Description of Artificial Sequence: Synthetic oligonucleotide
acuuagaaaguuggccuua

SEQ ID NO: 1030690 - RNA, 19 nt, Artificial Sequence
  Description of Artificial Sequence: Synthetic oligonucleotide
ucguagcagucucaaucuu

SEQ ID NO: 1030691 - RNA, 19 nt, Artificial Sequence
  Description of Artificial Sequence: Synthetic oligonucleotide
aaguaguauccaggguaaa

SEQ ID NO: 1030692 - RNA, 19 nt, Artificial Sequence
  Description of Artificial Sequence: Synthetic oligonucleotide
uccacgcauccagauuuca

SEQ ID NO: 1030693 - RNA, 19 nt, Artificial Sequence
  Description of Artificial Sequence: Synthetic oligonucleotide
gucacacauccaagggucc

SEQ ID NO: 1030694 - RNA, 19 nt, Artificial Sequence
  Description of Artificial Sequence: Synthetic oligonucleotide
cgucauaagcaaccuuucg

SEQ ID NO: 1030695 - RNA, 19 nt, Artificial Sequence
  Description of Artificial Sequence: Synthetic oligonucleotide
auaucguaagauagcccau

SEQ ID NO: 1030696 - RNA, 19 nt, Artificial Sequence
  Description of Artificial Sequence: Synthetic oligonucleotide
gucgucucagaagacaccu

SEQ ID NO: 1030697 - RNA, 19 nt, Artificial Sequence
  Description of Artificial Sequence: Synthetic oligonucleotide
aagcaaccuuucgagcuuu

SEQ ID NO: 1030698 - RNA, 19 nt, Artificial Sequence
  Description of Artificial Sequence: Synthetic oligonucleotide
guaggguaccagggaaccc

SEQ ID NO: 1030699 - RNA, 19 nt, Artificial Sequence
  Description of Artificial Sequence: Synthetic oligonucleotide
guccacaaccagguaaguc

SEQ ID NO: 1030700 - RNA, 19 nt, Artificial Sequence
  Description of Artificial Sequence: Synthetic oligonucleotide
ccgcugaacccaaagccag

SEQ ID NO: 1030701 - RNA, 19 nt, Artificial Sequence
  Description of Artificial Sequence: Synthetic oligonucleotide
cacgcauccagauuucaau

SEQ ID NO: 1030702 - RNA, 19 nt, Artificial Sequence
  Description of Artificial Sequence: Synthetic oligonucleotide
cauaggaguuguguccaca

SEQ ID NO: 1030703 - RNA, 19 nt, Artificial Sequence
  Description of Artificial Sequence: Synthetic oligonucleotide
auccgcuaauguccaugca

SEQ ID NO: 1030704 - RNA, 19 nt, Artificial Sequence
  Description of Artificial Sequence: Synthetic oligonucleotide
cuuucgagcuuuggaagaa

SEQ ID NO: 1030705 - RNA, 19 nt, Artificial Sequence
  Description of Artificial Sequence: Synthetic oligonucleotide
auucggcugauguggcaua

SEQ ID NO: 1030706 - RNA, 19 nt, Artificial Sequence
  Description of Artificial Sequence: Synthetic oligonucleotide
caaccagguaagucacaca

SEQ ID NO: 1030707 - RNA, 19 nt, Artificial Sequence
  Description of Artificial Sequence: Synthetic oligonucleotide
uuguuacaagggccagcua

SEQ ID NO: 1030708 - RNA, 19 nt, Artificial Sequence
  Description of Artificial Sequence: Synthetic oligonucleotide
auccacgcauccagauuuc

SEQ ID NO: 1030709 - RNA, 19 nt, Artificial Sequence
  Description of Artificial Sequence: Synthetic oligonucleotide
caaaagugagggcuucacu

SEQ ID NO: 1030710 - RNA, 19 nt, Artificial Sequence
  Description of Artificial Sequence: Synthetic oligonucleotide
aguugagaugguagcuuaa

SEQ ID NO: 1030711 - RNA, 19 nt, Artificial Sequence
  Description of Artificial Sequence: Synthetic oligonucleotide
uugggcuuugcggcuugca

SEQ ID NO: 1030712 - RNA, 19 nt, Artificial Sequence
  Description of Artificial Sequence: Synthetic oligonucleotide
gcucuagcugccaauguga

SEQ ID NO: 1030713 - RNA, 19 nt, Artificial Sequence
  Description of Artificial Sequence: Synthetic oligonucleotide
ccuguucuacacuguauca

SEQ ID NO: 1030714 - RNA, 19 nt, Artificial Sequence
  Description of Artificial Sequence: Synthetic oligonucleotide
uucggcugauguggcauau

SEQ ID NO: 1030715 - RNA, 19 nt, Artificial Sequence
  Description of Artificial Sequence: Synthetic oligonucleotide
ccauaguggaagauguaaa

SEQ ID NO: 1030716 - RNA, 19 nt, Artificial Sequence
  Description of Artificial Sequence: Synthetic oligonucleotide
augguuggcucaacugcca

SEQ ID NO: 1030717 - RNA, 19 nt, Artificial Sequence
  Description of Artificial Sequence: Synthetic oligonucleotide
gccagggaaaaucaugccu

SEQ ID NO: 1030718 - RNA, 19 nt, Artificial Sequence
  Description of Artificial Sequence: Synthetic oligonucleotide
cguuguguaccgcauccgc

SEQ ID NO: 1030719 - RNA, 19 nt, Artificial Sequence
  Description of Artificial Sequence: Synthetic oligonucleotide
cguagcagucucaaucuuc

SEQ ID NO: 1030720 - RNA, 19 nt, Artificial Sequence
  Description of Artificial Sequence: Synthetic oligonucleotide
aggcugacgugguuugauu

SEQ ID NO: 1030721 - RNA, 19 nt, Artificial Sequence
  Description of Artificial Sequence: Synthetic oligonucleotide
gcauccgcuaauguccaug

SEQ ID NO: 1030722 - RNA, 19 nt, Artificial Sequence
  Description of Artificial Sequence: Synthetic oligonucleotide
cuggauccacgcauccaga

SEQ ID NO: 1030723 - RNA, 19 nt, Artificial Sequence
  Description of Artificial Sequence: Synthetic oligonucleotide
auccgcauccacaccgcug

SEQ ID NO: 1030724 - RNA, 19 nt, Artificial Sequence
  Description of Artificial Sequence: Synthetic oligonucleotide
cugcguuguguaccgcauc

SEQ ID NO: 1030725 - RNA, 19 nt, Artificial Sequence
  Description of Artificial Sequence: Synthetic oligonucleotide
ccagguaacuacgucauaa

SEQ ID NO: 1030726 - RNA, 19 nt, Artificial Sequence
  Description of Artificial Sequence: Synthetic oligonucleotide
gacuccaguuaagaacgua

SEQ ID NO: 1030727 - RNA, 19 nt, Artificial Sequence
  Description of Artificial Sequence: Synthetic oligonucleotide
guuguguaccgcauccgcu

SEQ ID NO: 1030728 - RNA, 19 nt, Artificial Sequence
  Description of Artificial Sequence: Synthetic oligonucleotide
aguggcggcccagguaacu

SEQ ID NO: 1030729 - RNA, 19 nt, Artificial Sequence
  Description of Artificial Sequence: Synthetic oligonucleotide
gcagacuuacgauguguaa

SEQ ID NO: 1030730 - RNA, 19 nt, Artificial Sequence
  Description of Artificial Sequence: Synthetic oligonucleotide
ggaaagccaagguugugau

SEQ ID NO: 1030731 - RNA, 19 nt, Artificial Sequence
  Description of Artificial Sequence: Synthetic oligonucleotide
aggcucuguaaaguaugaa

SEQ ID NO: 1030732 - RNA, 19 nt, Artificial Sequence
  Description of Artificial Sequence: Synthetic oligonucleotide
ggucaugcacaacuucugu

SEQ ID NO: 1030733 - RNA, 19 nt, Artificial Sequence
  Description of Artificial Sequence: Synthetic oligonucleotide
ggcggcccagguaacuacg

SEQ ID NO: 1030734 - RNA, 19 nt, Artificial Sequence
  Description of Artificial Sequence: Synthetic oligonucleotide
cauaaguacuggaggcaau

SEQ ID NO: 1030735 - RNA, 19 nt, Artificial Sequence
  Description of Artificial Sequence: Synthetic oligonucleotide
uugcggcuugcaugacgac

SEQ ID NO: 1030736 - RNA, 19 nt, Artificial Sequence
  Description of Artificial Sequence: Synthetic oligonucleotide
cacuucuagcaacuucaua

SEQ ID NO: 1030737 - RNA, 19 nt, Artificial Sequence
  Description of Artificial Sequence: Synthetic oligonucleotide
ccaaggguccagaguugcc

SEQ ID NO: 1030738 - RNA, 19 nt, Artificial Sequence
  Description of Artificial Sequence: Synthetic oligonucleotide
caugccugggaauguucua

SEQ ID NO: 1030739 - RNA, 19 nt, Artificial Sequence
  Description of Artificial Sequence: Synthetic oligonucleotide
ccgcuaauguccaugcaaa

SEQ ID NO: 1030740 - RNA, 19 nt, Artificial Sequence
  Description of Artificial Sequence: Synthetic oligonucleotide
gcucaacugccaacaagac

SEQ ID NO: 1030741 - RNA, 19 nt, Artificial Sequence
  Description of Artificial Sequence: Synthetic oligonucleotide
cgacuuagaaaguuggccu

SEQ ID NO: 1030742 - RNA, 19 nt, Artificial Sequence
  Description of Artificial Sequence: Synthetic oligonucleotide
cgcucuagcugccaaugug

SEQ ID NO: 1030743 - RNA, 19 nt, Artificial Sequence
  Description of Artificial Sequence: Synthetic oligonucleotide
gcguuguguaccgcauccg

SEQ ID NO: 1030744 - RNA, 19 nt, Artificial Sequence
  Description of Artificial Sequence: Synthetic oligonucleotide
ccguucauagcacacacau

SEQ ID NO: 1030745 - RNA, 19 nt, Artificial Sequence
  Description of Artificial Sequence: Synthetic oligonucleotide
ucggcugauguggcauauc

SEQ ID NO: 1030746 - RNA, 19 nt, Artificial Sequence
  Description of Artificial Sequence: Synthetic oligonucleotide
aggguaccagggaacccgu

SEQ ID NO: 1030747 - RNA, 19 nt, Artificial Sequence
  Description of Artificial Sequence: Synthetic oligonucleotide
cuucagcuuuucgaccuaa

SEQ ID NO: 1030748 - RNA, 19 nt, Artificial Sequence
  Description of Artificial Sequence: Synthetic oligonucleotide
cagaaaugcccauccgcau

SEQ ID NO: 1030749 - RNA, 19 nt, Artificial Sequence
  Description of Artificial Sequence: Synthetic oligonucleotide
agcaaccuuucgagcuuug

SEQ ID NO: 1030750 - RNA, 19 nt, Artificial Sequence
  Description of Artificial Sequence: Synthetic oligonucleotide
guaccgcauccgcuaaugu

SEQ ID NO: 1030751 - RNA, 19 nt, Artificial Sequence
  Description of Artificial Sequence: Synthetic oligonucleotide
gcuugcaugacgacauaua

SEQ ID NO: 1030752 - RNA, 19 nt, Artificial Sequence
  Description of Artificial Sequence: Synthetic oligonucleotide
cagagucgacuuagaaagu

SEQ ID NO: 1030753 - RNA, 19 nt, Artificial Sequence
  Description of Artificial Sequence: Synthetic oligonucleotide
gggaacccguucauagcac

SEQ ID NO: 1030754 - RNA, 19 nt, Artificial Sequence
  Description of Artificial Sequence: Synthetic oligonucleotide
gaggcugacgugguuugau

SEQ ID NO: 1030755 - RNA, 19 nt, Artificial Sequence
  Description of Artificial Sequence: Synthetic oligonucleotide
ccauugcuacgagaaagga

SEQ ID NO: 1030756 - RNA, 19 nt, Artificial Sequence
  Description of Artificial Sequence: Synthetic oligonucleotide
gcaugacgacauauaagua

SEQ ID NO: 1030757 - RNA, 19 nt, Artificial Sequence
  Description of Artificial Sequence: Synthetic oligonucleotide
cuacgucauaagcaaccuu

SEQ ID NO: 1030758 - RNA, 19 nt, Artificial Sequence
  Description of Artificial Sequence: Synthetic oligonucleotide
ccaaugugacagggacucc

SEQ ID NO: 1030759 - RNA, 19 nt, Artificial Sequence
  Description of Artificial Sequence: Synthetic oligonucleotide
ggaagccucuuugcuucca

SEQ ID NO: 1030760 - RNA, 19 nt, Artificial Sequence
  Description of Artificial Sequence: Synthetic oligonucleotide
ccacgcauccagauuucaa

SEQ ID NO: 1030761 - RNA, 19 nt, Artificial Sequence
  Description of Artificial Sequence: Synthetic oligonucleotide
guggcggcccagguaacua

SEQ ID NO: 1030762 - RNA, 19 nt, Artificial Sequence
  Description of Artificial Sequence: Synthetic oligonucleotide
ggauccacgcauccagauu

SEQ ID NO: 1030763 - RNA, 19 nt, Artificial Sequence
  Description of Artificial Sequence: Synthetic oligonucleotide
ccucaccgcucuagcugcc

SEQ ID NO: 1030764 - RNA, 19 nt, Artificial Sequence
  Description of Artificial Sequence: Synthetic oligonucleotide
gcccauccgcauccacacc

SEQ ID NO: 1030765 - RNA, 19 nt, Artificial Sequence
  Description of Artificial Sequence: Synthetic oligonucleotide
cagcugcguuguguaccgc

SEQ ID NO: 1030766 - RNA, 19 nt, Artificial Sequence
  Description of Artificial Sequence: Synthetic oligonucleotide
ccugugaauauuggauaua

SEQ ID NO: 1030767 - RNA, 19 nt, Artificial Sequence
  Description of Artificial Sequence: Synthetic oligonucleotide
ccgcauccgcuaaugucca

SEQ ID NO: 1030768 - RNA, 19 nt, Artificial Sequence
  Description of Artificial Sequence: Synthetic oligonucleotide
ggcugauguggcauaucgu

SEQ ID NO: 1030769 - RNA, 19 nt, Artificial Sequence
  Description of Artificial Sequence: Synthetic oligonucleotide
guguaccgcauccgcuaau

SEQ ID NO: 1030770 - RNA, 19 nt, Artificial Sequence
  Description of Artificial Sequence: Synthetic oligonucleotide
cgaccuaauccaucaugaa

SEQ ID NO: 1030771 - RNA, 19 nt, Artificial Sequence
  Description of Artificial Sequence: Synthetic oligonucleotide
gccuggauccacgcaucca

SEQ ID NO: 1030772 - RNA, 19 nt, Artificial Sequence
  Description of Artificial Sequence: Synthetic oligonucleotide
gcacuuugaggcugccuuu

SEQ ID NO: 1030773 - RNA, 19 nt, Artificial Sequence
  Description of Artificial Sequence: Synthetic oligonucleotide
ggccagcuaugauacucau

SEQ ID NO: 1030774 - RNA, 19 nt, Artificial Sequence
  Description of Artificial Sequence: Synthetic oligonucleotide
gcugcguuguguaccgcau

SEQ ID NO: 1030775 - RNA, 19 nt, Artificial Sequence
  Description of Artificial Sequence: Synthetic oligonucleotide
gcuuugcggcuugcaugac

SEQ ID NO: 1030776 - RNA, 19 nt, Artificial Sequence
  Description of Artificial Sequence: Synthetic oligonucleotide
cggcccagguaacuacguc

SEQ ID NO: 1030777 - RNA, 19 nt, Artificial Sequence
  Description of Artificial Sequence: Synthetic oligonucleotide
guccugcaauucuguuguu

SEQ ID NO: 1030778 - RNA, 19 nt, Artificial Sequence
  Description of Artificial Sequence: Synthetic oligonucleotide
cguucauagcacacacauu

SEQ ID NO: 1030779 - RNA, 19 nt, Artificial Sequence
  Description of Artificial Sequence: Synthetic oligonucleotide
cccagguaacuacgucaua

SEQ ID NO: 1030780 - RNA, 19 nt, Artificial Sequence
  Description of Artificial Sequence: Synthetic oligonucleotide
gcggcccagguaacuacgu

SEQ ID NO: 1030781 - RNA, 19 nt, Artificial Sequence
  Description of Artificial Sequence: Synthetic oligonucleotide
ccgcucuagcugccaaugu

SEQ ID NO: 1030782 - RNA, 19 nt, Artificial Sequence
  Description of Artificial Sequence: Synthetic oligonucleotide
ccgcauccacaccgcugaa

SEQ ID NO: 1030783 - RNA, 19 nt, Artificial Sequence
  Description of Artificial Sequence: Synthetic oligonucleotide
cgcauccgcuaauguccau

SEQ ID NO: 1030784 - RNA, 19 nt, Artificial Sequence
  Description of Artificial Sequence: Synthetic oligonucleotide
ucuaguaugacaaaguagc

SEQ ID NO: 1030785 - RNA, 19 nt, Artificial Sequence
  Description of Artificial Sequence: Synthetic oligonucleotide
uuuuguaggguaaagagac

SEQ ID NO: 1030786 - RNA, 19 nt, Artificial Sequence
  Description of Artificial Sequence: Synthetic oligonucleotide
ucaaauauagacugaaagc

SEQ ID NO: 1030787 - RNA, 19 nt, Artificial Sequence
  Description of Artificial Sequence: Synthetic oligonucleotide
ucuauuaaauacuagugca

SEQ ID NO: 1030788 - RNA, 19 nt, Artificial Sequence
  Description of Artificial Sequence: Synthetic oligonucleotide
uuaagaacacacagcaugg

SEQ ID NO: 1030789 - RNA, 19 nt, Artificial Sequence
  Description of Artificial Sequence: Synthetic oligonucleotide
auuuucaucagcucgagca

SEQ ID NO: 1030790 - RNA, 19 nt, Artificial Sequence
  Description of Artificial Sequence: Synthetic oligonucleotide
guuaagaacacacagcaug

SEQ ID NO: 1030791 - RNA, 19 nt, Artificial Sequence
  Description of Artificial Sequence: Synthetic oligonucleotide
agaguaggugaccagacgc

SEQ ID NO: 1030792 - RNA, 19 nt, Artificial Sequence
  Description of Artificial Sequence: Synthetic oligonucleotide
aguaugacaaaguagcaug

SEQ ID NO: 1030793 - RNA, 19 nt, Artificial Sequence
  Description of Artificial Sequence: Synthetic oligonucleotide
cucaaauauagacugaaag

SEQ ID NO: 1030794 - RNA, 19 nt, Artificial Sequence
  Description of Artificial Sequence: Synthetic oligonucleotide
aagacgacucaccugcgcc

SEQ ID NO: 1030795 - RNA, 19 nt, Artificial Sequence
  Description of Artificial Sequence: Synthetic oligonucleotide
uugauaaggaaguaagggc

SEQ ID NO: 1030796 - RNA, 19 nt, Artificial Sequence
  Description of Artificial Sequence: Synthetic oligonucleotide
auuaaauacuagugcaccg

SEQ ID NO: 1030797 - RNA, 19 nt, Artificial Sequence
  Description of Artificial Sequence: Synthetic oligonucleotide
ugggaaauaggaagaaccg

SEQ ID NO: 1030798 - RNA, 19 nt, Artificial Sequence
  Description of Artificial Sequence: Synthetic oligonucleotide
aauccaguaagauccaagu

SEQ ID NO: 1030799 - RNA, 19 nt, Artificial Sequence
  Description of Artificial Sequence: Synthetic oligonucleotide
ugugccuuuaguugggugg

SEQ ID NO: 1030800 - RNA, 19 nt, Artificial Sequence
  Description of Artificial Sequence: Synthetic oligonucleotide
ucaucuaauggcagguugg

SEQ ID NO: 1030801 - RNA, 19 nt, Artificial Sequence
  Description of Artificial Sequence: Synthetic oligonucleotide
acuaguuuccauaucacac

SEQ ID NO: 1030802 - RNA, 19 nt, Artificial Sequence
  Description of Artificial Sequence: Synthetic oligonucleotide
ugaacugcgggcuucauga

SEQ ID NO: 1030803 - RNA, 19 nt, Artificial Sequence
  Description of Artificial Sequence: Synthetic oligonucleotide
uauuaaauacuagugcacc

SEQ ID NO: 1030804 - RNA, 19 nt, Artificial Sequence
  Description of Artificial Sequence: Synthetic oligonucleotide
uaggacgccauccauaagc

SEQ ID NO: 1030805 - RNA, 19 nt, Artificial Sequence
  Description of Artificial Sequence: Synthetic oligonucleotide
gauagagaugguuucuugc

SEQ ID NO: 1030806 - RNA, 19 nt, Artificial Sequence
  Description of Artificial Sequence: Synthetic oligonucleotide
agcuguaucaaaguguaac

SEQ ID NO: 1030807 - RNA, 19 nt, Artificial Sequence
  Description of Artificial Sequence: Synthetic oligonucleotide
aguauccuuucccacauuc

SEQ ID NO: 1030808 - RNA, 19 nt, Artificial Sequence
  Description of Artificial Sequence: Synthetic oligonucleotide
aagaugggguuccuacugc

SEQ ID NO: 1030809 - RNA, 19 nt, Artificial Sequence
  Description of Artificial Sequence: Synthetic oligonucleotide
cuaaggcugcuuuuaaugg

SEQ ID NO: 1030810 - RNA, 19 nt, Artificial Sequence
  Description of Artificial Sequence: Synthetic oligonucleotide
guuaucaucagccgccgcg

SEQ ID NO: 1030811 - RNA, 19 nt, Artificial Sequence
  Description of Artificial Sequence: Synthetic oligonucleotide
cauguuuuguuuugguagg

SEQ ID NO: 1030812 - RNA, 19 nt, Artificial Sequence
  Description of Artificial Sequence: Synthetic oligonucleotide
aguaagauccaaguuuugg

SEQ ID NO: 1030813 - RNA, 19 nt, Artificial Sequence
  Description of Artificial Sequence: Synthetic oligonucleotide
guaagauccaaguuuuggc

SEQ ID NO: 1030814 - RNA, 19 nt, Artificial Sequence
  Description of Artificial Sequence: Synthetic oligonucleotide
gaccguuaagaacacacag

SEQ ID NO: 1030815 - RNA, 19 nt, Artificial Sequence
  Description of Artificial Sequence: Synthetic oligonucleotide
aauacuagugcaccguuuu

SEQ ID NO: 1030816 - RNA, 19 nt, Artificial Sequence
  Description of Artificial Sequence: Synthetic oligonucleotide
ucuaauggcagguuggcuc

SEQ ID NO: 1030817 - RNA, 19 nt, Artificial Sequence
  Description of Artificial Sequence: Synthetic oligonucleotide
ugacaaaguagcauggaaa

SEQ ID NO: 1030818 - RNA, 19 nt, Artificial Sequence
  Description of Artificial Sequence: Synthetic oligonucleotide
cuauuaaauacuagugcac

SEQ ID NO: 1030819 - RNA, 19 nt, Artificial Sequence
  Description of Artificial Sequence: Synthetic oligonucleotide
gauugauaaggaaguaagg

SEQ ID NO: 1030820 - RNA, 19 nt, Artificial Sequence
  Description of Artificial Sequence: Synthetic oligonucleotide
aaacuuucuuucugaacug

SEQ ID NO: 1030821 - RNA, 19 nt, Artificial Sequence
  Description of Artificial Sequence: Synthetic oligonucleotide
uaguuuccauaucacacag

SEQ ID NO: 1030822 - RNA, 19 nt, Artificial Sequence
  Description of Artificial Sequence: Synthetic oligonucleotide
auuuggucaaugcacuaag

SEQ ID NO: 1030823 - RNA, 19 nt, Artificial Sequence
  Description of Artificial Sequence: Synthetic oligonucleotide
ggcgcaacagaauacaagg

SEQ ID NO: 1030824 - RNA, 19 nt, Artificial Sequence
  Description of Artificial Sequence: Synthetic oligonucleotide
uuuggucaaugcacuaagg

SEQ ID NO: 1030825 - RNA, 19 nt, Artificial Sequence
  Description of Artificial Sequence: Synthetic oligonucleotide
uauuaauacauguuuuguu

SEQ ID NO: 1030826 - RNA, 19 nt, Artificial Sequence
  Description of Artificial Sequence: Synthetic oligonucleotide
uguuacacagaauuccagu

SEQ ID NO: 1030827 - RNA, 19 nt, Artificial Sequence
  Description of Artificial Sequence: Synthetic oligonucleotide
aaauauagacugaaagcca

SEQ ID NO: 1030828 - RNA, 19 nt, Artificial Sequence
  Description of Artificial Sequence: Synthetic oligonucleotide
cauggaaacaaugucccgg

SEQ ID NO: 1030829 - RNA, 19 nt, Artificial Sequence
  Description of Artificial Sequence: Synthetic oligonucleotide
ucaaaguguaacccgcucu

SEQ ID NO: 1030830 - RNA, 19 nt, Artificial Sequence
  Description of Artificial Sequence: Synthetic oligonucleotide
ugacgcuuaaggcacuucc

SEQ ID NO: 1030831 - RNA, 19 nt, Artificial Sequence
  Description of Artificial Sequence: Synthetic oligonucleotide
cucuaguaugacaaaguag

SEQ ID NO: 1030832 - RNA, 19 nt, Artificial Sequence
  Description of Artificial Sequence: Synthetic oligonucleotide
agugggaugccguggaggg

SEQ ID NO: 1030833 - RNA, 19 nt, Artificial Sequence
  Description of Artificial Sequence: Synthetic oligonucleotide
aucagcucgagcaaauagc

SEQ ID NO: 1030834 - RNA, 19 nt, Artificial Sequence
  Description of Artificial Sequence: Synthetic oligonucleotide
gugggaaauaggaagaacc

SEQ ID NO: 1030835 - RNA, 19 nt, Artificial Sequence
  Description of Artificial Sequence: Synthetic oligonucleotide
uuuaauggcggcgcaacag

SEQ ID NO: 1030836 - RNA, 19 nt, Artificial Sequence
  Description of Artificial Sequence: Synthetic oligonucleotide
auagagaugguuucuugca

SEQ ID NO: 1030837 - RNA, 19 nt, Artificial Sequence
  Description of Artificial Sequence: Synthetic oligonucleotide
agaaagauuuucaucagcu

SEQ ID NO: 1030838 - RNA, 19 nt, Artificial Sequence
  Description of Artificial Sequence: Synthetic oligonucleotide
cagcaugggauagagaugg

SEQ ID NO: 1030839 - RNA, 19 nt, Artificial Sequence
  Description of Artificial Sequence: Synthetic oligonucleotide
ugagcauuguuuuauuaau

SEQ ID NO: 1030840 - RNA, 19 nt, Artificial Sequence
  Description of Artificial Sequence: Synthetic oligonucleotide
gggacucaaauauagacug

SEQ ID NO: 1030841 - RNA, 19 nt, Artificial Sequence
  Description of Artificial Sequence: Synthetic oligonucleotide
uuguaggguaaagagacug

SEQ ID NO: 1030842 - RNA, 19 nt, Artificial Sequence
  Description of Artificial Sequence: Synthetic oligonucleotide
uuaaagcagaaagggaccc

SEQ ID NO: 1030843 - RNA, 19 nt, Artificial Sequence
  Description of Artificial Sequence: Synthetic oligonucleotide
uuaaauacuagugcaccgu

SEQ ID NO: 1030844 - RNA, 19 nt, Artificial Sequence
  Description of Artificial Sequence: Synthetic oligonucleotide
uagugcaccguuuugacua

SEQ ID NO: 1030845 - RNA, 19 nt, Artificial Sequence
  Description of Artificial Sequence: Synthetic oligonucleotide
ucucuaguaugacaaagua

SEQ ID NO: 1030846 - RNA, 19 nt, Artificial Sequence
  Description of Artificial Sequence: Synthetic oligonucleotide
agaauuccagucaaguauc

SEQ ID NO: 1030847 - RNA, 19 nt, Artificial Sequence
  Description of Artificial Sequence: Synthetic oligonucleotide
uuaauggcggcgcaacaga

SEQ ID NO: 1030848 - RNA, 19 nt, Artificial Sequence
  Description of Artificial Sequence: Synthetic oligonucleotide
aaucugcacagugcugucc

SEQ ID NO: 1030849 - RNA, 19 nt, Artificial Sequence
  Description of Artificial Sequence: Synthetic oligonucleotide
uuugguaggacgccaucca

SEQ ID NO: 1030850 - RNA, 19 nt, Artificial Sequence
  Description of Artificial Sequence: Synthetic oligonucleotide
aguguaacccgcucugguc

SEQ ID NO: 1030851 - RNA, 19 nt, Artificial Sequence
  Description of Artificial Sequence: Synthetic oligonucleotide
aagauuuucaucagcucga

SEQ ID NO: 1030852 - RNA, 19 nt, Artificial Sequence
  Description of Artificial Sequence: Synthetic oligonucleotide
uauagacugaaagccaaca

SEQ ID NO: 1030853 - RNA, 19 nt, Artificial Sequence
  Description of Artificial Sequence: Synthetic oligonucleotide
accguuaagaacacacagc

SEQ ID NO: 1030854 - RNA, 19 nt, Artificial Sequence
  Description of Artificial Sequence: Synthetic oligonucleotide
ugccggagcaucaugucag

SEQ ID NO: 1030855 - RNA, 19 nt, Artificial Sequence
  Description of Artificial Sequence: Synthetic oligonucleotide
aaggaaguaagggccuugg

SEQ ID NO: 1030856 - RNA, 19 nt, Artificial Sequence
  Description of Artificial Sequence: Synthetic oligonucleotide
ugagggugacgcuuaaggc

SEQ ID NO: 1030857 - RNA, 19 nt, Artificial Sequence
  Description of Artificial Sequence: Synthetic oligonucleotide
uggaagaugggguuccuac

SEQ ID NO: 1030858 - RNA, 19 nt, Artificial Sequence
  Description of Artificial Sequence: Synthetic oligonucleotide
uaggguaaagagacuguug

SEQ ID NO: 1030859 - RNA, 19 nt, Artificial Sequence
  Description of Artificial Sequence: Synthetic oligonucleotide
uuacuagucaucccugcuc

SEQ ID NO: 1030860 - RNA, 19 nt, Artificial Sequence
  Description of Artificial Sequence: Synthetic oligonucleotide
uuuugguaggacgccaucc

SEQ ID NO: 1030861 - RNA, 19 nt, Artificial Sequence
  Description of Artificial Sequence: Synthetic oligonucleotide
uggcucucuaguaugacaa

SEQ ID NO: 1030862 - RNA, 19 nt, Artificial Sequence
  Description of Artificial Sequence: Synthetic oligonucleotide
aguagcauggaaacaaugu

SEQ ID NO: 1030863 - RNA, 19 nt, Artificial Sequence
  Description of Artificial Sequence: Synthetic oligonucleotide
aucugauuuuaaaaucugg

SEQ ID NO: 1030864 - RNA, 19 nt, Artificial Sequence
  Description of Artificial Sequence: Synthetic oligonucleotide
cagcauggggagaagaccc

SEQ ID NO: 1030865 - RNA, 19 nt, Artificial Sequence
  Description of Artificial Sequence: Synthetic oligonucleotide
ucuuacuagucaucccugc

SEQ ID NO: 1030866 - RNA, 19 nt, Artificial Sequence
  Description of Artificial Sequence: Synthetic oligonucleotide
uucuuacuagucaucccug

SEQ ID NO: 1030867 - RNA, 19 nt, Artificial Sequence
  Description of Artificial Sequence: Synthetic oligonucleotide
ugaaagugggccuccuuca

SEQ ID NO: 1030868 - RNA, 19 nt, Artificial Sequence
  Description of Artificial Sequence: Synthetic oligonucleotide
gagcuuauaagaaagauuu

SEQ ID NO: 1030869 - RNA, 19 nt, Artificial Sequence
  Description of Artificial Sequence: Synthetic oligonucleotide
aaguguaacccgcucuggu

SEQ ID NO: 1030870 - RNA, 19 nt, Artificial Sequence
  Description of Artificial Sequence: Synthetic oligonucleotide
uguaggguaaagagacugu

SEQ ID NO: 1030871 - RNA, 19 nt, Artificial Sequence
  Description of Artificial Sequence: Synthetic oligonucleotide
gacgccauccauaagccug

SEQ ID NO: 1030872 - RNA, 19 nt, Artificial Sequence
  Description of Artificial Sequence: Synthetic oligonucleotide
acgcuuaaggcacuuccuc

SEQ ID NO: 1030873 - RNA, 19 nt, Artificial Sequence
  Description of Artificial Sequence: Synthetic oligonucleotide
uuuuaauggcggcgcaaca

SEQ ID NO: 1030874 - RNA, 19 nt, Artificial Sequence
  Description of Artificial Sequence: Synthetic oligonucleotide
cauuaaguugaaauaucca

SEQ ID NO: 1030875 - RNA, 19 nt, Artificial Sequence
  Description of Artificial Sequence: Synthetic oligonucleotide
ccuuauucaagcuugccug

SEQ ID NO: 1030876 - RNA, 19 nt, Artificial Sequence
  Description of Artificial Sequence: Synthetic oligonucleotide
ggucugauugauaaggaag

SEQ ID NO: 1030877 - RNA, 19 nt, Artificial Sequence
  Description of Artificial Sequence: Synthetic oligonucleotide
ucaugucagaggccgaccu

SEQ ID NO: 1030878 - RNA, 19 nt, Artificial Sequence
  Description of Artificial Sequence: Synthetic oligonucleotide
uuaaggcacuuccucuuca

SEQ ID NO: 1030879 - RNA, 19 nt, Artificial Sequence
  Description of Artificial Sequence: Synthetic oligonucleotide
uaucaaaguguaacccgcu

SEQ ID NO: 1030880 - RNA, 19 nt, Artificial Sequence
  Description of Artificial Sequence: Synthetic oligonucleotide
cuaguuuccauaucacaca

SEQ ID NO: 1030881 - RNA, 19 nt, Artificial Sequence
  Description of Artificial Sequence: Synthetic oligonucleotide
ggucaaugcacuaaggcug

SEQ ID NO: 1030882 - RNA, 19 nt, Artificial Sequence
  Description of Artificial Sequence: Synthetic oligonucleotide
acugcgggcuucaugacac

SEQ ID NO: 1030883 - RNA, 19 nt, Artificial Sequence
  Description of Artificial Sequence: Synthetic oligonucleotide
uaaauacuagugcaccguu

SEQ ID NO: 1030884 - RNA, 19 nt, Artificial Sequence
  Description of Artificial Sequence: Synthetic oligonucleotide
ugcaccguuuugacuagag

SEQ ID NO: 1030885 - RNA, 19 nt, Artificial Sequence
  Description of Artificial Sequence: Synthetic oligonucleotide
ccauccauaagccugccgg

SEQ ID NO: 1030886 - RNA, 19 nt, Artificial Sequence
  Description of Artificial Sequence: Synthetic oligonucleotide
ugcauuuuguaggguaaag

SEQ ID NO: 1030887 - RNA, 19 nt, Artificial Sequence
  Description of Artificial Sequence: Synthetic oligonucleotide
accugcgccuuccuuauuc

SEQ ID NO: 1030888 - RNA, 19 nt, Artificial Sequence
  Description of Artificial Sequence: Synthetic oligonucleotide
guguaacccgcucuggucc

SEQ ID NO: 1030889 - RNA, 19 nt, Artificial Sequence
  Description of Artificial Sequence: Synthetic oligonucleotide
uauucaagcuugccuggcu

SEQ ID NO: 1030890 - RNA, 19 nt, Artificial Sequence
  Description of Artificial Sequence: Synthetic oligonucleotide
augucagaggccgaccucg

SEQ ID NO: 1030891 - RNA, 19 nt, Artificial Sequence
  Description of Artificial Sequence: Synthetic oligonucleotide
cucucuauuaaauacuagu

SEQ ID NO: 1030892 - RNA, 19 nt, Artificial Sequence
  Description of Artificial Sequence: Synthetic oligonucleotide
acccagaccguuaagaaca

SEQ ID NO: 1030893 - RNA, 19 nt, Artificial Sequence
  Description of Artificial Sequence: Synthetic oligonucleotide
uccuacaccaccagucuuc

SEQ ID NO: 1030894 - RNA, 19 nt, Artificial Sequence
  Description of Artificial Sequence: Synthetic oligonucleotide
cuggcauuucagcacuugg

SEQ ID NO: 1030895 - RNA, 19 nt, Artificial Sequence
  Description of Artificial Sequence: Synthetic oligonucleotide
uacuagugcaccguuuuga

SEQ ID NO: 1030896 - RNA, 19 nt, Artificial Sequence
  Description of Artificial Sequence: Synthetic oligonucleotide
aguugggugggaaauagga

SEQ ID NO: 1030897 - RNA, 19 nt, Artificial Sequence
  Description of Artificial Sequence: Synthetic oligonucleotide
guauuucuggguuguguug

SEQ ID NO: 1030898 - RNA, 19 nt, Artificial Sequence
  Description of Artificial Sequence: Synthetic oligonucleotide
aaguagcauggaaacaaug

SEQ ID NO: 1030899 - RNA, 19 nt, Artificial Sequence
  Description of Artificial Sequence: Synthetic oligonucleotide
uauuuggucaaugcacuaa

SEQ ID NO: 1030900 - RNA, 19 nt, Artificial Sequence
  Description of Artificial Sequence: Synthetic oligonucleotide
cuguuacacagaauuccag

SEQ ID NO: 1030901 - RNA, 19 nt, Artificial Sequence
  Description of Artificial Sequence: Synthetic oligonucleotide
uaguaugacaaaguagcau

SEQ ID NO: 1030902 - RNA, 19 nt, Artificial Sequence
  Description of Artificial Sequence: Synthetic oligonucleotide
aacugcgggcuucaugaca

SEQ ID NO: 1030903 - RNA, 19 nt, Artificial Sequence
  Description of Artificial Sequence: Synthetic oligonucleotide
guuccuacugcuccuuuug

SEQ ID NO: 1030904 - RNA, 19 nt, Artificial Sequence
  Description of Artificial Sequence: Synthetic oligonucleotide
uuuguaggguaaagagacu

SEQ ID NO: 1030905 - RNA, 19 nt, Artificial Sequence
  Description of Artificial Sequence: Synthetic oligonucleotide
auauagacugaaagccaac

SEQ ID NO: 1030906 - RNA, 19 nt, Artificial Sequence
  Description of Artificial Sequence: Synthetic oligonucleotide
uuaucaucagccgccgcgc

SEQ ID NO: 1030907 - RNA, 19 nt, Artificial Sequence
  Description of Artificial Sequence: Synthetic oligonucleotide
gauuuucaucagcucgagc

SEQ ID NO: 1030908 - RNA, 19 nt, Artificial Sequence
  Description of Artificial Sequence: Synthetic oligonucleotide
cagcaaauccaguaagauc

SEQ ID NO: 1030909 - RNA, 19 nt, Artificial Sequence
  Description of Artificial Sequence: Synthetic oligonucleotide
agugcugucccuucacaga

SEQ ID NO: 1030910 - RNA, 19 nt, Artificial Sequence
  Description of Artificial Sequence: Synthetic oligonucleotide
aagcugugaaagugggccu

SEQ ID NO: 1030911 - RNA, 19 nt, Artificial Sequence
  Description of Artificial Sequence: Synthetic oligonucleotide
aggacgccauccauaagcc

SEQ ID NO: 1030912 - RNA, 19 nt, Artificial Sequence
  Description of Artificial Sequence: Synthetic oligonucleotide
uaucaucagccgccgcgcg

SEQ ID NO: 1030913 - RNA, 19 nt, Artificial Sequence
  Description of Artificial Sequence: Synthetic oligonucleotide
ugucccaggaauccuggaa

SEQ ID NO: 1030914 - RNA, 19 nt, Artificial Sequence
  Description of Artificial Sequence: Synthetic oligonucleotide
gcuugagcuuauaagaaag

SEQ ID NO: 1030915 - RNA, 19 nt, Artificial Sequence
  Description of Artificial Sequence: Synthetic oligonucleotide
agugcagacugcucgggca

SEQ ID NO: 1030916 - RNA, 19 nt, Artificial Sequence
  Description of Artificial Sequence: Synthetic oligonucleotide
gaagacgacucaccugcgc

SEQ ID NO: 1030917 - RNA, 19 nt, Artificial Sequence
  Description of Artificial Sequence: Synthetic oligonucleotide
uccagaguaggugaccaga

SEQ ID NO: 1030918 - RNA, 19 nt, Artificial Sequence
  Description of Artificial Sequence: Synthetic oligonucleotide
caacaagucccuccagacc

SEQ ID NO: 1030919 - RNA, 19 nt, Artificial Sequence
  Description of Artificial Sequence: Synthetic oligonucleotide
uagucaucccugcuccuca

SEQ ID NO: 1030920 - RNA, 19 nt, Artificial Sequence
  Description of Artificial Sequence: Synthetic oligonucleotide
gacccagaccguuaagaac

SEQ ID NO: 1030921 - RNA, 19 nt, Artificial Sequence
  Description of Artificial Sequence: Synthetic oligonucleotide
agcuugagcuuauaagaaa

SEQ ID NO: 1030922 - RNA, 19 nt, Artificial Sequence
  Description of Artificial Sequence: Synthetic oligonucleotide
acuuccggcgucuccuccg

SEQ ID NO: 1030923 - RNA, 19 nt, Artificial Sequence
  Description of Artificial Sequence: Synthetic oligonucleotide
uguuuugguaggacgccau

SEQ ID NO: 1030924 - RNA, 19 nt, Artificial Sequence
  Description of Artificial Sequence: Synthetic oligonucleotide
aagaaccgggcuuccuuga

SEQ ID NO: 1030925 - RNA, 19 nt, Artificial Sequence
  Description of Artificial Sequence: Synthetic oligonucleotide
aucaugucagaggccgacc

SEQ ID NO: 1030926 - RNA, 19 nt, Artificial Sequence
  Description of Artificial Sequence: Synthetic oligonucleotide
aguuuccauaucacacagc

SEQ ID NO: 1030927 - RNA, 19 nt, Artificial Sequence
  Description of Artificial Sequence: Synthetic oligonucleotide
uuauuuggucaaugcacua

SEQ ID NO: 1030928 - RNA, 19 nt, Artificial Sequence
  Description of Artificial Sequence: Synthetic oligonucleotide
caugacacuaguuuccaua

SEQ ID NO: 1030929 - RNA, 19 nt, Artificial Sequence
  Description of Artificial Sequence: Synthetic oligonucleotide
ugguccacuggcccugucc

SEQ ID NO: 1030930 - RNA, 19 nt, Artificial Sequence
  Description of Artificial Sequence: Synthetic oligonucleotide
aaugucccggcucucuauu

SEQ ID NO: 1030931 - RNA, 19 nt, Artificial Sequence
  Description of Artificial Sequence: Synthetic oligonucleotide
uccuacugcuccuuuuggu

SEQ ID NO: 1030932 - RNA, 19 nt, Artificial Sequence
  Description of Artificial Sequence: Synthetic oligonucleotide
auacuagugcaccguuuug

SEQ ID NO: 1030933 - RNA, 19 nt, Artificial Sequence
  Description of Artificial Sequence: Synthetic oligonucleotide
ugucagaggccgaccucgg

SEQ ID NO: 1030934 - RNA, 19 nt, Artificial Sequence
  Description of Artificial Sequence: Synthetic oligonucleotide
cucuguuguguuccuacac

SEQ ID NO: 1030935 - RNA, 19 nt, Artificial Sequence
  Description of Artificial Sequence: Synthetic oligonucleotide
caccguuuugacuagaggu

SEQ ID NO: 1030936 - RNA, 19 nt, Artificial Sequence
  Description of Artificial Sequence: Synthetic oligonucleotide
caucuaauggcagguuggc

SEQ ID NO: 1030937 - RNA, 19 nt, Artificial Sequence
  Description of Artificial Sequence: Synthetic oligonucleotide
cuucuuacuagucaucccu

SEQ ID NO: 1030938 - RNA, 19 nt, Artificial Sequence
  Description of Artificial Sequence: Synthetic oligonucleotide
ggcagggacucaaauauag

SEQ ID NO: 1030939 - RNA, 19 nt, Artificial Sequence
  Description of Artificial Sequence: Synthetic oligonucleotide
agauuuucaucagcucgag

SEQ ID NO: 1030940 - RNA, 19 nt, Artificial Sequence
  Description of Artificial Sequence: Synthetic oligonucleotide
guagcuguaucaaagugua

SEQ ID NO: 1030941 - RNA, 19 nt, Artificial Sequence
  Description of Artificial Sequence: Synthetic oligonucleotide
uggcuggcauuucagcacu

SEQ ID NO: 1030942 - RNA, 19 nt, Artificial Sequence
  Description of Artificial Sequence: Synthetic oligonucleotide
guucagacagcucgccggc

SEQ ID NO: 1030943 - RNA, 19 nt, Artificial Sequence
  Description of Artificial Sequence: Synthetic oligonucleotide
agaugggguuccuacugcu

SEQ ID NO: 1030944 - RNA, 19 nt, Artificial Sequence
  Description of Artificial Sequence: Synthetic oligonucleotide
gcugcuuuuaauggcggcg

SEQ ID NO: 1030945 - RNA, 19 nt, Artificial Sequence
  Description of Artificial Sequence: Synthetic oligonucleotide
uuguuuugguaggacgcca

SEQ ID NO: 1030946 - RNA, 19 nt, Artificial Sequence
  Description of Artificial Sequence: Synthetic oligonucleotide
gacucugugucccaggaau

SEQ ID NO: 1030947 - RNA, 19 nt, Artificial Sequence
  Description of Artificial Sequence: Synthetic oligonucleotide
gacgcauccuggcuccuug

SEQ ID NO: 1030948 - RNA, 19 nt, Artificial Sequence
  Description of Artificial Sequence: Synthetic oligonucleotide
agugcaccguuuugacuag

SEQ ID NO: 1030949 - RNA, 19 nt, Artificial Sequence
  Description of Artificial Sequence: Synthetic oligonucleotide
gguucugauggaauguggc

SEQ ID NO: 1030950 - RNA, 19 nt, Artificial Sequence
  Description of Artificial Sequence: Synthetic oligonucleotide
ugcacuaaggcugcuuuua

SEQ ID NO: 1030951 - RNA, 19 nt, Artificial Sequence
  Description of Artificial Sequence: Synthetic oligonucleotide
uuuaguugggugggaaaua

SEQ ID NO: 1030952 - RNA, 19 nt, Artificial Sequence
  Description of Artificial Sequence: Synthetic oligonucleotide
uugccuggcucucuaguau

SEQ ID NO: 1030953 - RNA, 19 nt, Artificial Sequence
  Description of Artificial Sequence: Synthetic oligonucleotide
cuugcggaugguuucaucu

SEQ ID NO: 1030954 - RNA, 19 nt, Artificial Sequence
  Description of Artificial Sequence: Synthetic oligonucleotide
gguuguguuguguacaugu

SEQ ID NO: 1030955 - RNA, 19 nt, Artificial Sequence
  Description of Artificial Sequence: Synthetic oligonucleotide
uguaacccgcucuggucca

SEQ ID NO: 1030956 - RNA, 19 nt, Artificial Sequence
  Description of Artificial Sequence: Synthetic oligonucleotide
auggcggcgcaacagaaua

SEQ ID NO: 1030957 - RNA, 19 nt, Artificial Sequence
  Description of Artificial Sequence: Synthetic oligonucleotide
gaagacccuuugucuugcg

SEQ ID NO: 1030958 - RNA, 19 nt, Artificial Sequence
  Description of Artificial Sequence: Synthetic oligonucleotide
accucggugcuguaagcug

SEQ ID NO: 1030959 - RNA, 19 nt, Artificial Sequence
  Description of Artificial Sequence: Synthetic oligonucleotide
agaaccgggcuuccuugag

SEQ ID NO: 1030960 - RNA, 19 nt, Artificial Sequence
  Description of Artificial Sequence: Synthetic oligonucleotide
ucugauugauaaggaagua

SEQ ID NO: 1030961 - RNA, 19 nt, Artificial Sequence
  Description of Artificial Sequence: Synthetic oligonucleotide
uucuggguuguguugugua

SEQ ID NO: 1030962 - RNA, 19 nt, Artificial Sequence
  Description of Artificial Sequence: Synthetic oligonucleotide
ugguaggacgccauccaua

SEQ ID NO: 1030963 - RNA, 19 nt, Artificial Sequence
  Description of Artificial Sequence: Synthetic oligonucleotide
acgccauccauaagccugc

SEQ ID NO: 1030964 - RNA, 19 nt, Artificial Sequence
  Description of Artificial Sequence: Synthetic oligonucleotide
ggauagagaugguuucuug

SEQ ID NO: 1030965 - RNA, 19 nt, Artificial Sequence
  Description of Artificial Sequence: Synthetic oligonucleotide
aaauacuagugcaccguuu

SEQ ID NO: 1030966 - RNA, 19 nt, Artificial Sequence
  Description of Artificial Sequence: Synthetic oligonucleotide
agaggugccucuguugugu

SEQ ID NO: 1030967 - RNA, 19 nt, Artificial Sequence
  Description of Artificial Sequence: Synthetic oligonucleotide
uuuugacuagaggugccuc

SEQ ID NO: 1030968 - RNA, 19 nt, Artificial Sequence
  Description of Artificial Sequence: Synthetic oligonucleotide
ugggauagagaugguuucu

SEQ ID NO: 1030969 - RNA, 19 nt, Artificial Sequence
  Description of Artificial Sequence: Synthetic oligonucleotide
ugucccggcucucuauuaa

SEQ ID NO: 1030970 - RNA, 19 nt, Artificial Sequence
  Description of Artificial Sequence: Synthetic oligonucleotide
guuugccuguuacacagaa

SEQ ID NO: 1030971 - RNA, 19 nt, Artificial Sequence
  Description of Artificial Sequence: Synthetic oligonucleotide
ccguuaagaacacacagca

SEQ ID NO: 1030972 - RNA, 19 nt, Artificial Sequence
  Description of Artificial Sequence: Synthetic oligonucleotide
gguuucacuuagcuugagc

SEQ ID NO: 1030973 - RNA, 19 nt, Artificial Sequence
  Description of Artificial Sequence: Synthetic oligonucleotide
ugacuagaggugccucugu

SEQ ID NO: 1030974 - RNA, 19 nt, Artificial Sequence
  Description of Artificial Sequence: Synthetic oligonucleotide
guuguguuguguacaugug

SEQ ID NO: 1030975 - RNA, 19 nt, Artificial Sequence
  Description of Artificial Sequence: Synthetic oligonucleotide
uaaggcacuuccucuucau

SEQ ID NO: 1030976 - RNA, 19 nt, Artificial Sequence
  Description of Artificial Sequence: Synthetic oligonucleotide
uggguuguguuguguacau

SEQ ID NO: 1030977 - RNA, 19 nt, Artificial Sequence
  Description of Artificial Sequence: Synthetic oligonucleotide
agacgacucaccugcgccu

SEQ ID NO: 1030978 - RNA, 19 nt, Artificial Sequence
  Description of Artificial Sequence: Synthetic oligonucleotide
uugguaggacgccauccau

SEQ ID NO: 1030979 - RNA, 19 nt, Artificial Sequence
  Description of Artificial Sequence: Synthetic oligonucleotide
auccauaagccugccggag

SEQ ID NO: 1030980 - RNA, 19 nt, Artificial Sequence
  Description of Artificial Sequence: Synthetic oligonucleotide
agaaggcaagaaacugccg

SEQ ID NO: 1030981 - RNA, 19 nt, Artificial Sequence
  Description of Artificial Sequence: Synthetic oligonucleotide
ccggcucucuauuaaauac

SEQ ID NO: 1030982 - RNA, 19 nt, Artificial Sequence
  Description of Artificial Sequence: Synthetic oligonucleotide
cacagcuggccuuuccgug

SEQ ID NO: 1030983 - RNA, 19 nt, Artificial Sequence
  Description of Artificial Sequence: Synthetic oligonucleotide
uccagucaaguauccuuuc

SEQ ID NO: 1030984 - RNA, 19 nt, Artificial Sequence
  Description of Artificial Sequence: Synthetic oligonucleotide
ugucuugcggaugguuuca

SEQ ID NO: 1030985 - RNA, 19 nt, Artificial Sequence
  Description of Artificial Sequence: Synthetic oligonucleotide
cugguucugauggaaugug

SEQ ID NO: 1030986 - RNA, 19 nt, Artificial Sequence
  Description of Artificial Sequence: Synthetic oligonucleotide
aggcacucuccagaguagg

SEQ ID NO: 1030987 - RNA, 19 nt, Artificial Sequence
  Description of Artificial Sequence: Synthetic oligonucleotide
auuucagcacuuggaucag

SEQ ID NO: 1030988 - RNA, 19 nt, Artificial Sequence
  Description of Artificial Sequence: Synthetic oligonucleotide
caucaugucagaggccgac

SEQ ID NO: 1030989 - RNA, 19 nt, Artificial Sequence
  Description of Artificial Sequence: Synthetic oligonucleotide
gguaccgucuucccgcggc

SEQ ID NO: 1030990 - RNA, 19 nt, Artificial Sequence
  Description of Artificial Sequence: Synthetic oligonucleotide
agucaucccugcuccucag

SEQ ID NO: 1030991 - RNA, 19 nt, Artificial Sequence
  Description of Artificial Sequence: Synthetic oligonucleotide
ggugcuguaagcugugaaa

SEQ ID NO: 1030992 - RNA, 19 nt, Artificial Sequence
  Description of Artificial Sequence: Synthetic oligonucleotide
gguaggacgccauccauaa

SEQ ID NO: 1030993 - RNA, 19 nt, Artificial Sequence
  Description of Artificial Sequence: Synthetic oligonucleotide
gacugaaagccaacaggca

SEQ ID NO: 1030994 - RNA, 19 nt, Artificial Sequence
  Description of Artificial Sequence: Synthetic oligonucleotide
uaccccucgggccgacccg

SEQ ID NO: 1030995 - RNA, 19 nt, Artificial Sequence
  Description of Artificial Sequence: Synthetic oligonucleotide
guaagcugugaaagugggc

SEQ ID NO: 1030996 - RNA, 19 nt, Artificial Sequence
  Description of Artificial Sequence: Synthetic oligonucleotide
caugucgcaggcgccgugg

SEQ ID NO: 1030997 - RNA, 19 nt, Artificial Sequence
  Description of Artificial Sequence: Synthetic oligonucleotide
uuucugaacugcgggcuuc

SEQ ID NO: 1030998 - RNA, 19 nt, Artificial Sequence
  Description of Artificial Sequence: Synthetic oligonucleotide
agaccguuaagaacacaca

SEQ ID NO: 1030999 - RNA, 19 nt, Artificial Sequence
  Description of Artificial Sequence: Synthetic oligonucleotide
ucaccugcgccuuccuuau

SEQ ID NO: 1031000 - RNA, 19 nt, Artificial Sequence
  Description of Artificial Sequence: Synthetic oligonucleotide
cgugguaccgucuucccgc

SEQ ID NO: 1031001 - RNA, 19 nt, Artificial Sequence
  Description of Artificial Sequence: Synthetic oligonucleotide
cucucuaguaugacaaagu

SEQ ID NO: 1031002 - RNA, 19 nt, Artificial Sequence
  Description of Artificial Sequence: Synthetic oligonucleotide
cccuuugucuugcggaugg

SEQ ID NO: 1031003 - RNA, 19 nt, Artificial Sequence
  Description of Artificial Sequence: Synthetic oligonucleotide
ccuacugcuccuuuugguc

SEQ ID NO: 1031004 - RNA, 19 nt, Artificial Sequence
  Description of Artificial Sequence: Synthetic oligonucleotide
uccggcgucuccuccgcgc

SEQ ID NO: 1031005 - RNA, 19 nt, Artificial Sequence
  Description of Artificial Sequence: Synthetic oligonucleotide
gugguaccgucuucccgcg

SEQ ID NO: 1031006 - RNA, 19 nt, Artificial Sequence
  Description of Artificial Sequence: Synthetic oligonucleotide
ggcaagaaacugccggagc

SEQ ID NO: 1031007 - RNA, 19 nt, Artificial Sequence
  Description of Artificial Sequence: Synthetic oligonucleotide
gcaccguuuugacuagagg

SEQ ID NO: 1031008 - RNA, 19 nt, Artificial Sequence
  Description of Artificial Sequence: Synthetic oligonucleotide
caggcacucuccagaguag

SEQ ID NO: 1031009 - RNA, 19 nt, Artificial Sequence
  Description of Artificial Sequence: Synthetic oligonucleotide
aggugccucuguuguguuc

SEQ ID NO: 1031010 - RNA, 19 nt, Artificial Sequence
  Description of Artificial Sequence: Synthetic oligonucleotide
cuggcucucuaguaugaca

SEQ ID NO: 1031011 - RNA, 19 nt, Artificial Sequence
  Description of Artificial Sequence: Synthetic oligonucleotide
guuuugguaggacgccauc

SEQ ID NO: 1031012 - RNA, 19 nt, Artificial Sequence
  Description of Artificial Sequence: Synthetic oligonucleotide
ggugaccagacgcauccug

SEQ ID NO: 1031013 - RNA, 19 nt, Artificial Sequence
  Description of Artificial Sequence: Synthetic oligonucleotide
uaccaccgcgacuuccggc

SEQ ID NO: 1031014 - RNA, 19 nt, Artificial Sequence
  Description of Artificial Sequence: Synthetic oligonucleotide
aauggcggcgcaacagaau

SEQ ID NO: 1031015 - RNA, 19 nt, Artificial Sequence
  Description of Artificial Sequence: Synthetic oligonucleotide
cagacccuucuuacuaguc

SEQ ID NO: 1031016 - RNA, 19 nt, Artificial Sequence
  Description of Artificial Sequence: Synthetic oligonucleotide
guaccaccgcgacuuccgg

SEQ ID NO: 1031017 - RNA, 19 nt, Artificial Sequence
  Description of Artificial Sequence: Synthetic oligonucleotide
cauccauaagccugccgga

SEQ ID NO: 1031018 - RNA, 19 nt, Artificial Sequence
  Description of Artificial Sequence: Synthetic oligonucleotide
guaccccucgggccgaccc

SEQ ID NO: 1031019 - RNA, 19 nt, Artificial Sequence
  Description of Artificial Sequence: Synthetic oligonucleotide
ccagucaaguauccuuucc

SEQ ID NO: 1031020 - RNA, 19 nt, Artificial Sequence
  Description of Artificial Sequence: Synthetic oligonucleotide
acccguaccaccgcgacuu

SEQ ID NO: 1031021 - RNA, 19 nt, Artificial Sequence
  Description of Artificial Sequence: Synthetic oligonucleotide
gauggaauguggccccaua

SEQ ID NO: 1031022 - RNA, 19 nt, Artificial Sequence
  Description of Artificial Sequence: Synthetic oligonucleotide
auaagccugccggagcccu

SEQ ID NO: 1031023 - RNA, 19 nt, Artificial Sequence
  Description of Artificial Sequence: Synthetic oligonucleotide
guuccuacaccaccagucu

SEQ ID NO: 1031024 - RNA, 19 nt, Artificial Sequence
  Description of Artificial Sequence: Synthetic oligonucleotide
caaucugcacagugcuguc

SEQ ID NO: 1031025 - RNA, 19 nt, Artificial Sequence
  Description of Artificial Sequence: Synthetic oligonucleotide
aauggcagguuggcuccca

SEQ ID NO: 1031026 - RNA, 19 nt, Artificial Sequence
  Description of Artificial Sequence: Synthetic oligonucleotide
cucgccggcgaggaagacg

SEQ ID NO: 1031027 - RNA, 19 nt, Artificial Sequence
  Description of Artificial Sequence: Synthetic oligonucleotide
caugucagaggccgaccuc

SEQ ID NO: 1031028 - RNA, 19 nt, Artificial Sequence
  Description of Artificial Sequence: Synthetic oligonucleotide
gaugggguuccuacugcuc

SEQ ID NO: 1031029 - RNA, 19 nt, Artificial Sequence
  Description of Artificial Sequence: Synthetic oligonucleotide
gcauuuuguaggguaaaga

SEQ ID NO: 1031030 - RNA, 19 nt, Artificial Sequence
  Description of Artificial Sequence: Synthetic oligonucleotide
cagacccagaccguuaaga

SEQ ID NO: 1031031 - RNA, 19 nt, Artificial Sequence
  Description of Artificial Sequence: Synthetic oligonucleotide
gaacugcgggcuucaugac

SEQ ID NO: 1031032 - RNA, 19 nt, Artificial Sequence
  Description of Artificial Sequence: Synthetic oligonucleotide
ugguaccgucuucccgcgg

SEQ ID NO: 1031033 - RNA, 19 nt, Artificial Sequence
  Description of Artificial Sequence: Synthetic oligonucleotide
aaguauccuuucccacauu

SEQ ID NO: 1031034 - RNA, 19 nt, Artificial Sequence
  Description of Artificial Sequence: Synthetic oligonucleotide
gugcuguguggccucugag

SEQ ID NO: 1031035 - RNA, 19 nt, Artificial Sequence
  Description of Artificial Sequence: Synthetic oligonucleotide
ccagaguaggugaccagac

SEQ ID NO: 1031036 - RNA, 19 nt, Artificial Sequence
  Description of Artificial Sequence: Synthetic oligonucleotide
guaggacgccauccauaag

SEQ ID NO: 1031037 - RNA, 19 nt, Artificial Sequence
  Description of Artificial Sequence: Synthetic oligonucleotide
aggcugcuuuuaauggcgg

SEQ ID NO: 1031038 - RNA, 19 nt, Artificial Sequence
  Description of Artificial Sequence: Synthetic oligonucleotide
ccguuuugacuagaggugc

SEQ ID NO: 1031039 - RNA, 19 nt, Artificial Sequence
  Description of Artificial Sequence: Synthetic oligonucleotide
cuuacuagucaucccugcu

SEQ ID NO: 1031040 - RNA, 19 nt, Artificial Sequence
  Description of Artificial Sequence: Synthetic oligonucleotide
cagcucgccggcgaggaag

SEQ ID NO: 1031041 - RNA, 19 nt, Artificial Sequence
  Description of Artificial Sequence: Synthetic oligonucleotide
gccucuguuguguuccuac

SEQ ID NO: 1031042 - RNA, 19 nt, Artificial Sequence
  Description of Artificial Sequence: Synthetic oligonucleotide
cuuccggcgucuccuccgc

SEQ ID NO: 1031043 - RNA, 19 nt, Artificial Sequence
  Description of Artificial Sequence: Synthetic oligonucleotide
ggugggaaauaggaagaac

SEQ ID NO: 1031044 - RNA, 19 nt, Artificial Sequence
  Description of Artificial Sequence: Synthetic oligonucleotide
ccaccagucuuccugguuc

SEQ ID NO: 1031045 - RNA, 19 nt, Artificial Sequence
  Description of Artificial Sequence: Synthetic oligonucleotide
ccagacgcauccuggcucc

SEQ ID NO: 1031046 - RNA, 19 nt, Artificial Sequence
  Description of Artificial Sequence: Synthetic oligonucleotide
cuuuaguugggugggaaau

SEQ ID NO: 1031047 - RNA, 19 nt, Artificial Sequence
  Description of Artificial Sequence: Synthetic oligonucleotide
acgacucaccugcgccuuc

SEQ ID NO: 1031048 - RNA, 19 nt, Artificial Sequence
  Description of Artificial Sequence: Synthetic oligonucleotide
gcucucuauuaaauacuag

SEQ ID NO: 1031049 - RNA, 19 nt, Artificial Sequence
  Description of Artificial Sequence: Synthetic oligonucleotide
uuccggcgucuccuccgcg

SEQ ID NO: 1031050 - RNA, 19 nt, Artificial Sequence
  Description of Artificial Sequence: Synthetic oligonucleotide
cguaccaccgcgacuuccg

SEQ ID NO: 1031051 - RNA, 19 nt, Artificial Sequence
  Description of Artificial Sequence: Synthetic oligonucleotide
agacagcucgccggcgagg

SEQ ID NO: 1031052 - RNA, 19 nt, Artificial Sequence
  Description of Artificial Sequence: Synthetic oligonucleotide
caaguauccuuucccacau

SEQ ID NO: 1031053 - RNA, 19 nt, Artificial Sequence
  Description of Artificial Sequence: Synthetic oligonucleotide
gggucugauugauaaggaa

SEQ ID NO: 1031054 - RNA, 19 nt, Artificial Sequence
  Description of Artificial Sequence: Synthetic oligonucleotide
gcugcgggcgcagaguacc

SEQ ID NO: 1031055 - RNA, 19 nt, Artificial Sequence
  Description of Artificial Sequence: Synthetic oligonucleotide
cguuuugacuagaggugcc

SEQ ID NO: 1031056 - RNA, 19 nt, Artificial Sequence
  Description of Artificial Sequence: Synthetic oligonucleotide
ccuggguauuucuggguug

SEQ ID NO: 1031057 - RNA, 19 nt, Artificial Sequence
  Description of Artificial Sequence: Synthetic oligonucleotide
aguaccccucgggccgacc

SEQ ID NO: 1031058 - RNA, 19 nt, Artificial Sequence
  Description of Artificial Sequence: Synthetic oligonucleotide
gacgcuuaaggcacuuccu

SEQ ID NO: 1031059 - RNA, 19 nt, Artificial Sequence
  Description of Artificial Sequence: Synthetic oligonucleotide
guuuugacuagaggugccu

SEQ ID NO: 1031060 - RNA, 19 nt, Artificial Sequence
  Description of Artificial Sequence: Synthetic oligonucleotide
agguuucacuuagcuugag

SEQ ID NO: 1031061 - RNA, 19 nt, Artificial Sequence
  Description of Artificial Sequence: Synthetic oligonucleotide
gguuaucaucagccgccgc

SEQ ID NO: 1031062 - RNA, 19 nt, Artificial Sequence
  Description of Artificial Sequence: Synthetic oligonucleotide
ugcgggcuucaugacacua

SEQ ID NO: 1031063 - RNA, 19 nt, Artificial Sequence
  Description of Artificial Sequence: Synthetic oligonucleotide
gggugggagaugguuauca

SEQ ID NO: 1031064 - RNA, 19 nt, Artificial Sequence
  Description of Artificial Sequence: Synthetic oligonucleotide
ccggcgaggaagacgacuc

SEQ ID NO: 1031065 - RNA, 19 nt, Artificial Sequence
  Description of Artificial Sequence: Synthetic oligonucleotide
cuagugcaccguuuugacu

SEQ ID NO: 1031066 - RNA, 19 nt, Artificial Sequence
  Description of Artificial Sequence: Synthetic oligonucleotide
cccgcucugguccaacaag

SEQ ID NO: 1031067 - RNA, 19 nt, Artificial Sequence
  Description of Artificial Sequence: Synthetic oligonucleotide
ugcgggcgcagaguacccc

SEQ ID NO: 1031068 - RNA, 19 nt, Artificial Sequence
  Description of Artificial Sequence: Synthetic oligonucleotide
ugauggaauguggccccau

SEQ ID NO: 1031069 - RNA, 19 nt, Artificial Sequence
  Description of Artificial Sequence: Synthetic oligonucleotide
gaccagacgcauccuggcu

SEQ ID NO: 1031070 - RNA, 19 nt, Artificial Sequence
  Description of Artificial Sequence: Synthetic oligonucleotide
gcgaggaagacgacucacc

SEQ ID NO: 1031071 - RNA, 19 nt, Artificial Sequence
  Description of Artificial Sequence: Synthetic oligonucleotide
augucccggcucucuauua

SEQ ID NO: 1031072 - RNA, 19 nt, Artificial Sequence
  Description of Artificial Sequence: Synthetic oligonucleotide
ugccuuuaguuggguggga

SEQ ID NO: 1031073 - RNA, 19 nt, Artificial Sequence
  Description of Artificial Sequence: Synthetic oligonucleotide
agaggccgaccucggugcu

SEQ ID NO: 1031074 - RNA, 19 nt, Artificial Sequence
  Description of Artificial Sequence: Synthetic oligonucleotide
ccuacaccaccagucuucc

SEQ ID NO: 1031075 - RNA, 19 nt, Artificial Sequence
  Description of Artificial Sequence: Synthetic oligonucleotide
aggccgaccucggugcugu

SEQ ID NO: 1031076 - RNA, 19 nt, Artificial Sequence
  Description of Artificial Sequence: Synthetic oligonucleotide
uaccgucuucccgcggcug

SEQ ID NO: 1031077 - RNA, 19 nt, Artificial Sequence
  Description of Artificial Sequence: Synthetic oligonucleotide
cccgcauguucacuccucc

SEQ ID NO: 1031078 - RNA, 19 nt, Artificial Sequence
  Description of Artificial Sequence: Synthetic oligonucleotide
ggcgaggaagacgacucac

SEQ ID NO: 1031079 - RNA, 19 nt, Artificial Sequence
  Description of Artificial Sequence: Synthetic oligonucleotide
gccgacccguaccaccgcg

SEQ ID NO: 1031080 - RNA, 19 nt, Artificial Sequence
  Description of Artificial Sequence: Synthetic oligonucleotide
gaccucggugcuguaagcu

SEQ ID NO: 1031081 - RNA, 19 nt, Artificial Sequence
  Description of Artificial Sequence: Synthetic oligonucleotide
gucccggcucucuauuaaa

SEQ ID NO: 1031082 - RNA, 19 nt, Artificial Sequence
  Description of Artificial Sequence: Synthetic oligonucleotide
gcagacugcucgggcaccg

SEQ ID NO: 1031083 - RNA, 19 nt, Artificial Sequence
  Description of Artificial Sequence: Synthetic oligonucleotide
ccgugguaccgucuucccg

SEQ ID NO: 1031084 - RNA, 19 nt, Artificial Sequence
  Description of Artificial Sequence: Synthetic oligonucleotide
cucgggccgacccguacca

SEQ ID NO: 1031085 - RNA, 19 nt, Artificial Sequence
  Description of Artificial Sequence: Synthetic oligonucleotide
cacuaaggcugcuuuuaau

SEQ ID NO: 1031086 - RNA, 19 nt, Artificial Sequence
  Description of Artificial Sequence: Synthetic oligonucleotide
guguuccuacaccaccagu

SEQ ID NO: 1031087 - RNA, 19 nt, Artificial Sequence
  Description of Artificial Sequence: Synthetic oligonucleotide
gaggccgaccucggugcug

SEQ ID NO: 1031088 - RNA, 19 nt, Artificial Sequence
  Description of Artificial Sequence: Synthetic oligonucleotide
cuggguauuucuggguugu

SEQ ID NO: 1031089 - RNA, 19 nt, Artificial Sequence
  Description of Artificial Sequence: Synthetic oligonucleotide
accgcgacuuccggcgucu

SEQ ID NO: 1031090 - RNA, 19 nt, Artificial Sequence
  Description of Artificial Sequence: Synthetic oligonucleotide
acacagcaugggauagaga

SEQ ID NO: 1031091 - RNA, 19 nt, Artificial Sequence
  Description of Artificial Sequence: Synthetic oligonucleotide
agaguaccccucgggccga

SEQ ID NO: 1031092 - RNA, 19 nt, Artificial Sequence
  Description of Artificial Sequence: Synthetic oligonucleotide
gcuucucuuauaguucugu

SEQ ID NO: 1031093 - RNA, 19 nt, Artificial Sequence
  Description of Artificial Sequence: Synthetic oligonucleotide
ggaagaaccgggcuuccuu

SEQ ID NO: 1031094 - RNA, 19 nt, Artificial Sequence
  Description of Artificial Sequence: Synthetic oligonucleotide
gugacgcuuaaggcacuuc

SEQ ID NO: 1031095 - RNA, 19 nt, Artificial Sequence
  Description of Artificial Sequence: Synthetic oligonucleotide
ccaaucugcacagugcugu

SEQ ID NO: 1031096 - RNA, 19 nt, Artificial Sequence
  Description of Artificial Sequence: Synthetic oligonucleotide
ccuuuaguugggugggaaa

SEQ ID NO: 1031097 - RNA, 19 nt, Artificial Sequence
  Description of Artificial Sequence: Synthetic oligonucleotide
agcucgccggcgaggaaga

SEQ ID NO: 1031098 - RNA, 19 nt, Artificial Sequence
  Description of Artificial Sequence: Synthetic oligonucleotide
cccagaccguuaagaacac

SEQ ID NO: 1031099 - RNA, 19 nt, Artificial Sequence
  Description of Artificial Sequence: Synthetic oligonucleotide
gucuucccgcggcugcgca

SEQ ID NO: 1031100 - RNA, 19 nt, Artificial Sequence
  Description of Artificial Sequence: Synthetic oligonucleotide
cugcgccuuccuuauucaa

SEQ ID NO: 1031101 - RNA, 19 nt, Artificial Sequence
  Description of Artificial Sequence: Synthetic oligonucleotide
ggcucucuaguaugacaaa

SEQ ID NO: 1031102 - RNA, 19 nt, Artificial Sequence
  Description of Artificial Sequence: Synthetic oligonucleotide
agcaugggauagagauggu

SEQ ID NO: 1031103 - RNA, 19 nt, Artificial Sequence
  Description of Artificial Sequence: Synthetic oligonucleotide
uggcggggcgcaggccgcg

SEQ ID NO: 1031104 - RNA, 19 nt, Artificial Sequence
  Description of Artificial Sequence: Synthetic oligonucleotide
ggguuguguuguguacaug

SEQ ID NO: 1031105 - RNA, 19 nt, Artificial Sequence
  Description of Artificial Sequence: Synthetic oligonucleotide
caccagucuuccugguucu

SEQ ID NO: 1031106 - RNA, 19 nt, Artificial Sequence
  Description of Artificial Sequence: Synthetic oligonucleotide
aggugaccagacgcauccu

SEQ ID NO: 1031107 - RNA, 19 nt, Artificial Sequence
  Description of Artificial Sequence: Synthetic oligonucleotide
cauggggagaagacccuuu

SEQ ID NO: 1031108 - RNA, 19 nt, Artificial Sequence
  Description of Artificial Sequence: Synthetic oligonucleotide
caaugucccggcucucuau

SEQ ID NO: 1031109 - RNA, 19 nt, Artificial Sequence
  Description of Artificial Sequence: Synthetic oligonucleotide
ccccaugucgcaggcgccg

SEQ ID NO: 1031110 - RNA, 19 nt, Artificial Sequence
  Description of Artificial Sequence: Synthetic oligonucleotide
gacccguaccaccgcgacu

SEQ ID NO: 1031111 - RNA, 19 nt, Artificial Sequence
  Description of Artificial Sequence: Synthetic oligonucleotide
caccgcgacuuccggcguc

SEQ ID NO: 1031112 - RNA, 19 nt, Artificial Sequence
  Description of Artificial Sequence: Synthetic oligonucleotide
gcccuguccgggcuguuga

SEQ ID NO: 1031113 - RNA, 19 nt, Artificial Sequence
  Description of Artificial Sequence: Synthetic oligonucleotide
aucagccgccgcgcgggug

SEQ ID NO: 1031114 - RNA, 19 nt, Artificial Sequence
  Description of Artificial Sequence: Synthetic oligonucleotide
gaaggcccgcauguucacu

SEQ ID NO: 1031115 - RNA, 19 nt, Artificial Sequence
  Description of Artificial Sequence: Synthetic oligonucleotide
ccuuuuggucugggguggg

SEQ ID NO: 1031116 - RNA, 19 nt, Artificial Sequence
  Description of Artificial Sequence: Synthetic oligonucleotide
guaccgucuucccgcggcu

SEQ ID NO: 1031117 - RNA, 19 nt, Artificial Sequence
  Description of Artificial Sequence: Synthetic oligonucleotide
ggugggagaugguuaucau

SEQ ID NO: 1031118 - RNA, 19 nt, Artificial Sequence
  Description of Artificial Sequence: Synthetic oligonucleotide
ccugcgccuuccuuauuca

SEQ ID NO: 1031119 - RNA, 19 nt, Artificial Sequence
  Description of Artificial Sequence: Synthetic oligonucleotide
aggcugagggugacgcuua

SEQ ID NO: 1031120 - RNA, 19 nt, Artificial Sequence
  Description of Artificial Sequence: Synthetic oligonucleotide
agacgcauccuggcuccuu

SEQ ID NO: 1031121 - RNA, 19 nt, Artificial Sequence
  Description of Artificial Sequence: Synthetic oligonucleotide
cgcucugguccaacaaguc

SEQ ID NO: 1031122 - RNA, 19 nt, Artificial Sequence
  Description of Artificial Sequence: Synthetic oligonucleotide
cgggccgacccguaccacc

SEQ ID NO: 1031123 - RNA, 19 nt, Artificial Sequence
  Description of Artificial Sequence: Synthetic oligonucleotide
ucgggccgacccguaccac

SEQ ID NO: 1031124 - RNA, 19 nt, Artificial Sequence
  Description of Artificial Sequence: Synthetic oligonucleotide
gccuuccuuauucaagcuu

SEQ ID NO: 1031125 - RNA, 19 nt, Artificial Sequence
  Description of Artificial Sequence: Synthetic oligonucleotide
gccggagcccuccugggua

SEQ ID NO: 1031126 - RNA, 19 nt, Artificial Sequence
  Description of Artificial Sequence: Synthetic oligonucleotide
ccuuuccgugcugcggccc

SEQ ID NO: 1031127 - RNA, 19 nt, Artificial Sequence
  Description of Artificial Sequence: Synthetic oligonucleotide
cgcaacagaauacaagguu

SEQ ID NO: 1031128 - RNA, 19 nt, Artificial Sequence
  Description of Artificial Sequence: Synthetic oligonucleotide
cuucaucuaauggcagguu

SEQ ID NO: 1031129 - RNA, 19 nt, Artificial Sequence
  Description of Artificial Sequence: Synthetic oligonucleotide
gccggagcaucaugucaga

SEQ ID NO: 1031130 - RNA, 19 nt, Artificial Sequence
  Description of Artificial Sequence: Synthetic oligonucleotide
cgccgugguaccgucuucc

SEQ ID NO: 1031131 - RNA, 19 nt, Artificial Sequence
  Description of Artificial Sequence: Synthetic oligonucleotide
gcuugacagcuucucuuau

SEQ ID NO: 1031132 - RNA, 19 nt, Artificial Sequence
  Description of Artificial Sequence: Synthetic oligonucleotide
gugcaccguuuugacuaga

SEQ ID NO: 1031133 - RNA, 19 nt, Artificial Sequence
  Description of Artificial Sequence: Synthetic oligonucleotide
ggacgccauccauaagccu

SEQ ID NO: 1031134 - RNA, 19 nt, Artificial Sequence
  Description of Artificial Sequence: Synthetic oligonucleotide
gggauagagaugguuucuu

SEQ ID NO: 1031135 - RNA, 19 nt, Artificial Sequence
  Description of Artificial Sequence: Synthetic oligonucleotide
ccugguucugauggaaugu

SEQ ID NO: 1031136 - RNA, 19 nt, Artificial Sequence
  Description of Artificial Sequence: Synthetic oligonucleotide
gaguaccccucgggccgac

SEQ ID NO: 1031137 - RNA, 19 nt, Artificial Sequence
  Description of Artificial Sequence: Synthetic oligonucleotide
caccgcugucacugcugga

SEQ ID NO: 1031138 - RNA, 19 nt, Artificial Sequence
  Description of Artificial Sequence: Synthetic oligonucleotide
ggcccuguccgggcuguug

SEQ ID NO: 1031139 - RNA, 19 nt, Artificial Sequence
  Description of Artificial Sequence: Synthetic oligonucleotide
cgacccguaccaccgcgac

SEQ ID NO: 1031140 - RNA, 19 nt, Artificial Sequence
  Description of Artificial Sequence: Synthetic oligonucleotide
gcaucaugucagaggccga

SEQ ID NO: 1031141 - RNA, 19 nt, Artificial Sequence
  Description of Artificial Sequence: Synthetic oligonucleotide
cgcuuaaggcacuuccucu

SEQ ID NO: 1031142 - RNA, 19 nt, Artificial Sequence
  Description of Artificial Sequence: Synthetic oligonucleotide
ccgcucugguccaacaagu

SEQ ID NO: 1031143 - RNA, 19 nt, Artificial Sequence
  Description of Artificial Sequence: Synthetic oligonucleotide
cgacucaccugcgccuucc

SEQ ID NO: 1031144 - RNA, 19 nt, Artificial Sequence
  Description of Artificial Sequence: Synthetic oligonucleotide
ccagacccuucuuacuagu

SEQ ID NO: 1031145 - RNA, 19 nt, Artificial Sequence
  Description of Artificial Sequence: Synthetic oligonucleotide
gcggcgcaacagaauacaa

SEQ ID NO: 1031146 - RNA, 19 nt, Artificial Sequence
  Description of Artificial Sequence: Synthetic oligonucleotide
gcgggcgcagaguaccccu

SEQ ID NO: 1031147 - RNA, 19 nt, Artificial Sequence
  Description of Artificial Sequence: Synthetic oligonucleotide
gcccgcauguucacuccuc

SEQ ID NO: 1031148 - RNA, 19 nt, Artificial Sequence
  Description of Artificial Sequence: Synthetic oligonucleotide
aggcgccgugguaccgucu

SEQ ID NO: 1031149 - RNA, 19 nt, Artificial Sequence
  Description of Artificial Sequence: Synthetic oligonucleotide
gccgcgcggguggaggcug

SEQ ID NO: 1031150 - RNA, 19 nt, Artificial Sequence
  Description of Artificial Sequence: Synthetic oligonucleotide
ccgacccguaccaccgcga

SEQ ID NO: 1031151 - RNA, 19 nt, Artificial Sequence
  Description of Artificial Sequence: Synthetic oligonucleotide
ggcgccgugguaccgucuu

SEQ ID NO: 1031152 - RNA, 19 nt, Artificial Sequence
  Description of Artificial Sequence: Synthetic oligonucleotide
ccgccgcgcggguggaggc

SEQ ID NO: 1031153 - RNA, 19 nt, Artificial Sequence
  Description of Artificial Sequence: Synthetic oligonucleotide
cggugcuguaagcugugaa

SEQ ID NO: 1031154 - RNA, 19 nt, Artificial Sequence
  Description of Artificial Sequence: Synthetic oligonucleotide
cugcgggcuucaugacacu

SEQ ID NO: 1031155 - RNA, 19 nt, Artificial Sequence
  Description of Artificial Sequence: Synthetic oligonucleotide
gccgaccucggugcuguaa

SEQ ID NO: 1031156 - RNA, 19 nt, Artificial Sequence
  Description of Artificial Sequence: Synthetic oligonucleotide
cgggcgcagaguaccccuc

SEQ ID NO: 1031157 - RNA, 19 nt, Artificial Sequence
  Description of Artificial Sequence: Synthetic oligonucleotide
gcauggggagaagacccuu

SEQ ID NO: 1031158 - RNA, 19 nt, Artificial Sequence
  Description of Artificial Sequence: Synthetic oligonucleotide
gggcuucaugacacuaguu

SEQ ID NO: 1031159 - RNA, 19 nt, Artificial Sequence
  Description of Artificial Sequence: Synthetic oligonucleotide
cccguaccaccgcgacuuc

SEQ ID NO: 1031160 - RNA, 19 nt, Artificial Sequence
  Description of Artificial Sequence: Synthetic oligonucleotide
cgcaggcgccgugguaccg

SEQ ID NO: 1031161 - RNA, 19 nt, Artificial Sequence
  Description of Artificial Sequence: Synthetic oligonucleotide
cggcgaggaagacgacuca

SEQ ID NO: 1031162 - RNA, 19 nt, Artificial Sequence
  Description of Artificial Sequence: Synthetic oligonucleotide
gcucgccggcgaggaagac

SEQ ID NO: 1031163 - RNA, 19 nt, Artificial Sequence
  Description of Artificial Sequence: Synthetic oligonucleotide
cagacgcauccuggcuccu

SEQ ID NO: 1031164 - RNA, 19 nt, Artificial Sequence
  Description of Artificial Sequence: Synthetic oligonucleotide
ccuuugucuugcggauggu

SEQ ID NO: 1031165 - RNA, 19 nt, Artificial Sequence
  Description of Artificial Sequence: Synthetic oligonucleotide
ggcuggcauuucagcacuu

SEQ ID NO: 1031166 - RNA, 19 nt, Artificial Sequence
  Description of Artificial Sequence: Synthetic oligonucleotide
caccugcgccuuccuuauu

SEQ ID NO: 1031167 - RNA, 19 nt, Artificial Sequence
  Description of Artificial Sequence: Synthetic oligonucleotide
cccuguccgggcuguugau

SEQ ID NO: 1031168 - RNA, 19 nt, Artificial Sequence
  Description of Artificial Sequence: Synthetic oligonucleotide
cccaugucgcaggcgccgu

SEQ ID NO: 1031169 - RNA, 19 nt, Artificial Sequence
  Description of Artificial Sequence: Synthetic oligonucleotide
ccaccgcgacuuccggcgu

SEQ ID NO: 1031170 - RNA, 19 nt, Artificial Sequence
  Description of Artificial Sequence: Synthetic oligonucleotide
ccgcgacuuccggcgucuc

SEQ ID NO: 1031171 - RNA, 19 nt, Artificial Sequence
  Description of Artificial Sequence: Synthetic oligonucleotide
ggccgaccucggugcugua

SEQ ID NO: 1031172 - RNA, 19 nt, Artificial Sequence
  Description of Artificial Sequence: Synthetic oligonucleotide
cgccgcgcggguggaggcu

SEQ ID NO: 1031173 - RNA, 19 nt, Artificial Sequence
  Description of Artificial Sequence: Synthetic oligonucleotide
aaguuaauguaccagaucc

SEQ ID NO: 1031174 - RNA, 19 nt, Artificial Sequence
  Description of Artificial Sequence: Synthetic oligonucleotide
aagcugaaauuguugaagc

SEQ ID NO: 1031175 - RNA, 19 nt, Artificial Sequence
  Description of Artificial Sequence: Synthetic oligonucleotide
aaaaccgaugugcagagca

SEQ ID NO: 1031176 - RNA, 19 nt, Artificial Sequence
  Description of Artificial Sequence: Synthetic oligonucleotide
aaacagggaagacucgggc

SEQ ID NO: 1031177 - RNA, 19 nt, Artificial Sequence
  Description of Artificial Sequence: Synthetic oligonucleotide
gaagcguagggcuugagag

SEQ ID NO: 1031178 - RNA, 19 nt, Artificial Sequence
  Description of Artificial Sequence: Synthetic oligonucleotide
cucgaaguugucaaaaccg

SEQ ID NO: 1031179 - RNA, 19 nt, Artificial Sequence
  Description of Artificial Sequence: Synthetic oligonucleotide
gaugucggcacuguuaucg

SEQ ID NO: 1031180 - RNA, 19 nt, Artificial Sequence
  Description of Artificial Sequence: Synthetic oligonucleotide
ucaggcucgauauucuucg

SEQ ID NO: 1031181 - RNA, 19 nt, Artificial Sequence
  Description of Artificial Sequence: Synthetic oligonucleotide
uuggaggcgacuauaaaca

SEQ ID NO: 1031182 - RNA, 19 nt, Artificial Sequence
  Description of Artificial Sequence: Synthetic oligonucleotide
cugaucauaggguagcagg

SEQ ID NO: 1031183 - RNA, 19 nt, Artificial Sequence
  Description of Artificial Sequence: Synthetic oligonucleotide
uuggaguuccuucuuagcc

SEQ ID NO: 1031184 - RNA, 19 nt, Artificial Sequence
  Description of Artificial Sequence: Synthetic oligonucleotide
gaggcgacuauaaacaggg

SEQ ID NO: 1031185 - RNA, 19 nt, Artificial Sequence
  Description of Artificial Sequence: Synthetic oligonucleotide
caaugggugaguuggaccg

SEQ ID NO: 1031186 - RNA, 19 nt, Artificial Sequence
  Description of Artificial Sequence: Synthetic oligonucleotide
uguaguuuaucuucacacc

SEQ ID NO: 1031187 - RNA, 19 nt, Artificial Sequence
  Description of Artificial Sequence: Synthetic oligonucleotide
uguacugaucauaggguag

SEQ ID NO: 1031188 - RNA, 19 nt, Artificial Sequence
  Description of Artificial Sequence: Synthetic oligonucleotide
uguguggugguccacccgg

SEQ ID NO: 1031189 - RNA, 19 nt, Artificial Sequence
  Description of Artificial Sequence: Synthetic oligonucleotide
cucgaacauguuuugaggg

SEQ ID NO: 1031190 - RNA, 19 nt, Artificial Sequence
  Description of Artificial Sequence: Synthetic oligonucleotide
uaaacagggaagacucggg

SEQ ID NO: 1031191 - RNA, 19 nt, Artificial Sequence
  Description of Artificial Sequence: Synthetic oligonucleotide
uauaaacagggaagacucg

SEQ ID NO: 1031192 - RNA, 19 nt, Artificial Sequence
  Description of Artificial Sequence: Synthetic oligonucleotide
ucuuguguucauacaaggc

SEQ ID NO: 1031193 - RNA, 19 nt, Artificial Sequence
  Description of Artificial Sequence: Synthetic oligonucleotide
ugcuuugcaacuguagacg

SEQ ID NO: 1031194 - RNA, 19 nt, Artificial Sequence
  Description of Artificial Sequence: Synthetic oligonucleotide
cuuggaggcgacuauaaac

SEQ ID NO: 1031195 - RNA, 19 nt, Artificial Sequence
  Description of Artificial Sequence: Synthetic oligonucleotide
agaauauguccaugggugg

SEQ ID NO: 1031196 - RNA, 19 nt, Artificial Sequence
  Description of Artificial Sequence: Synthetic oligonucleotide
gacguguucguagacaggg

SEQ ID NO: 1031197 - RNA, 19 nt, Artificial Sequence
  Description of Artificial Sequence: Synthetic oligonucleotide
ugggcgauuuccuucaaag

SEQ ID NO: 1031198 - RNA, 19 nt, Artificial Sequence
  Description of Artificial Sequence: Synthetic oligonucleotide
acucgaacauguuuugagg

SEQ ID NO: 1031199 - RNA, 19 nt, Artificial Sequence
  Description of Artificial Sequence: Synthetic oligonucleotide
auaaacagggaagacucgg

SEQ ID NO: 1031200 - RNA, 19 nt, Artificial Sequence
  Description of Artificial Sequence: Synthetic oligonucleotide
ugugcagagcaauggaaag

SEQ ID NO: 1031201 - RNA, 19 nt, Artificial Sequence
  Description of Artificial Sequence: Synthetic oligonucleotide
aauguugacgauguccgug

SEQ ID NO: 1031202 - RNA, 19 nt, Artificial Sequence
  Description of Artificial Sequence: Synthetic oligonucleotide
aauuguugaagcgcuccgg

SEQ ID NO: 1031203 - RNA, 19 nt, Artificial Sequence
  Description of Artificial Sequence: Synthetic oligonucleotide
auagaaguuaauguaccag

SEQ ID NO: 1031204 - RNA, 19 nt, Artificial Sequence
  Description of Artificial Sequence: Synthetic oligonucleotide
uagacagggcgauaaagug

SEQ ID NO: 1031205 - RNA, 19 nt, Artificial Sequence
  Description of Artificial Sequence: Synthetic oligonucleotide
caaggaaccacuccuuugc

SEQ ID NO: 1031206 - RNA, 19 nt, Artificial Sequence
  Description of Artificial Sequence: Synthetic oligonucleotide
uggacguguucguagacag

SEQ ID NO: 1031207 - RNA, 19 nt, Artificial Sequence
  Description of Artificial Sequence: Synthetic oligonucleotide
ucgauguuggagacaaacc

SEQ ID NO: 1031208 - RNA, 19 nt, Artificial Sequence
  Description of Artificial Sequence: Synthetic oligonucleotide
ucgaaguugucaaaaccga

SEQ ID NO: 1031209 - RNA, 19 nt, Artificial Sequence
  Description of Artificial Sequence: Synthetic oligonucleotide
guagaaugcauguuggcca

SEQ ID NO: 1031210 - RNA, 19 nt, Artificial Sequence
  Description of Artificial Sequence: Synthetic oligonucleotide
cugguagaaugcauguugg

SEQ ID NO: 1031211 - RNA, 19 nt, Artificial Sequence
  Description of Artificial Sequence: Synthetic oligonucleotide
aaguccaauggcugaccac

SEQ ID NO: 1031212 - RNA, 19 nt, Artificial Sequence
  Description of Artificial Sequence: Synthetic oligonucleotide
aaugcauguuggccauugg

SEQ ID NO: 1031213 - RNA, 19 nt, Artificial Sequence
  Description of Artificial Sequence: Synthetic oligonucleotide
guagacggaucccuggacg

SEQ ID NO: 1031214 - RNA, 19 nt, Artificial Sequence
  Description of Artificial Sequence: Synthetic oligonucleotide
gaaguaccgguucugggug

SEQ ID NO: 1031215 - RNA, 19 nt, Artificial Sequence
  Description of Artificial Sequence: Synthetic oligonucleotide
uugaugucggcacuguuau

SEQ ID NO: 1031216 - RNA, 19 nt, Artificial Sequence
  Description of Artificial Sequence: Synthetic oligonucleotide
uaccagauccccagcagag

SEQ ID NO: 1031217 - RNA, 19 nt, Artificial Sequence
  Description of Artificial Sequence: Synthetic oligonucleotide
uggucgaagcuguugaugu

SEQ ID NO: 1031218 - RNA, 19 nt, Artificial Sequence
  Description of Artificial Sequence: Synthetic oligonucleotide
aggcucgauauucuucgcc

SEQ ID NO: 1031219 - RNA, 19 nt, Artificial Sequence
  Description of Artificial Sequence: Synthetic oligonucleotide
agacagggcgauaaagugc

SEQ ID NO: 1031220 - RNA, 19 nt, Artificial Sequence
  Description of Artificial Sequence: Synthetic oligonucleotide
auggguuugcccgaguaac

SEQ ID NO: 1031221 - RNA, 19 nt, Artificial Sequence
  Description of Artificial Sequence: Synthetic oligonucleotide
uucuuagccucuucguuug

SEQ ID NO: 1031222 - RNA, 19 nt, Artificial Sequence
  Description of Artificial Sequence: Synthetic oligonucleotide
ggagcggagagccacacgg

SEQ ID NO: 1031223 - RNA, 19 nt, Artificial Sequence
  Description of Artificial Sequence: Synthetic oligonucleotide
gagguucaagcugaaauug

SEQ ID NO: 1031224 - RNA, 19 nt, Artificial Sequence
  Description of Artificial Sequence: Synthetic oligonucleotide
ugaagcguagggcuugaga

SEQ ID NO: 1031225 - RNA, 19 nt, Artificial Sequence
  Description of Artificial Sequence: Synthetic oligonucleotide
ugagguucaagcugaaauu

SEQ ID NO: 1031226 - RNA, 19 nt, Artificial Sequence
  Description of Artificial Sequence: Synthetic oligonucleotide
cagaccuuuccguaugggg

SEQ ID NO: 1031227 - RNA, 19 nt, Artificial Sequence
  Description of Artificial Sequence: Synthetic oligonucleotide
uggaguuccuucuuagccu

SEQ ID NO: 1031228 - RNA, 19 nt, Artificial Sequence
  Description of Artificial Sequence: Synthetic oligonucleotide
guuaucgcggugccaaucc

SEQ ID NO: 1031229 - RNA, 19 nt, Artificial Sequence
  Description of Artificial Sequence: Synthetic oligonucleotide
ggcgauuuccuucaaagac

SEQ ID NO: 1031230 - RNA, 19 nt, Artificial Sequence
  Description of Artificial Sequence: Synthetic oligonucleotide
uuugcaacuguagacggau

SEQ ID NO: 1031231 - RNA, 19 nt, Artificial Sequence
  Description of Artificial Sequence: Synthetic oligonucleotide
aacgaagaucuuguguuca

SEQ ID NO: 1031232 - RNA, 19 nt, Artificial Sequence
  Description of Artificial Sequence: Synthetic oligonucleotide
guuggagacaaaccagaug

SEQ ID NO: 1031233 - RNA, 19 nt, Artificial Sequence
  Description of Artificial Sequence: Synthetic oligonucleotide
ucgaacauguuuugagggu

SEQ ID NO: 1031234 - RNA, 19 nt, Artificial Sequence
  Description of Artificial Sequence: Synthetic oligonucleotide
ggaguaauccaccagaaua

SEQ ID NO: 1031235 - RNA, 19 nt, Artificial Sequence
  Description of Artificial Sequence: Synthetic oligonucleotide
uucuauucugaugucccgc

SEQ ID NO: 1031236 - RNA, 19 nt, Artificial Sequence
  Description of Artificial Sequence: Synthetic oligonucleotide
agcgcugccguccagcuca

SEQ ID NO: 1031237 - RNA, 19 nt, Artificial Sequence
  Description of Artificial Sequence: Synthetic oligonucleotide
ucaagcugaaauuguugaa

SEQ ID NO: 1031238 - RNA, 19 nt, Artificial Sequence
  Description of Artificial Sequence: Synthetic oligonucleotide
ucccgcauagucuccacgc

SEQ ID NO: 1031239 - RNA, 19 nt, Artificial Sequence
  Description of Artificial Sequence: Synthetic oligonucleotide
ucgaaaaggcuccgcaggu

SEQ ID NO: 1031240 - RNA, 19 nt, Artificial Sequence
  Description of Artificial Sequence: Synthetic oligonucleotide
uuggaguaauccaccagaa

SEQ ID NO: 1031241 - RNA, 19 nt, Artificial Sequence
  Description of Artificial Sequence: Synthetic oligonucleotide
ugaggaaaucacaggguau

SEQ ID NO: 1031242 - RNA, 19 nt, Artificial Sequence
  Description of Artificial Sequence: Synthetic oligonucleotide
cuuggaguuccuucuuagc

SEQ ID NO: 1031243 - RNA, 19 nt, Artificial Sequence
  Description of Artificial Sequence: Synthetic oligonucleotide
uagacggaucccuggacgc

SEQ ID NO: 1031244 - RNA, 19 nt, Artificial Sequence
  Description of Artificial Sequence: Synthetic oligonucleotide
caucgaaaaggcuccgcag

SEQ ID NO: 1031245 - RNA, 19 nt, Artificial Sequence
  Description of Artificial Sequence: Synthetic oligonucleotide
gaccuuuccguauggggug

SEQ ID NO: 1031246 - RNA, 19 nt, Artificial Sequence
  Description of Artificial Sequence: Synthetic oligonucleotide
uuuccguauggggugcugg

SEQ ID NO: 1031247 - RNA, 19 nt, Artificial Sequence
  Description of Artificial Sequence: Synthetic oligonucleotide
augucggcacuguuaucgc

SEQ ID NO: 1031248 - RNA, 19 nt, Artificial Sequence
  Description of Artificial Sequence: Synthetic oligonucleotide
uggaggcgacuauaaacag

SEQ ID NO: 1031249 - RNA, 19 nt, Artificial Sequence
  Description of Artificial Sequence: Synthetic oligonucleotide
aaagcggugcauguacuga

SEQ ID NO: 1031250 - RNA, 19 nt, Artificial Sequence
  Description of Artificial Sequence: Synthetic oligonucleotide
auaccaauguugacgaugu

SEQ ID NO: 1031251 - RNA, 19 nt, Artificial Sequence
  Description of Artificial Sequence: Synthetic oligonucleotide
uaccgguucugggugagcg

SEQ ID NO: 1031252 - RNA, 19 nt, Artificial Sequence
  Description of Artificial Sequence: Synthetic oligonucleotide
ugucggcacuguuaucgcg

SEQ ID NO: 1031253 - RNA, 19 nt, Artificial Sequence
  Description of Artificial Sequence: Synthetic oligonucleotide
gaugacgcccugaacgaag

SEQ ID NO: 1031254 - RNA, 19 nt, Artificial Sequence
  Description of Artificial Sequence: Synthetic oligonucleotide
agggcgauaaagugcuuug

SEQ ID NO: 1031255 - RNA, 19 nt, Artificial Sequence
  Description of Artificial Sequence: Synthetic oligonucleotide
gcgacuauaaacagggaag

SEQ ID NO: 1031256 - RNA, 19 nt, Artificial Sequence
  Description of Artificial Sequence: Synthetic oligonucleotide
uguagacggaucccuggac

SEQ ID NO: 1031257 - RNA, 19 nt, Artificial Sequence
  Description of Artificial Sequence: Synthetic oligonucleotide
uguguucauacaaggcaau

SEQ ID NO: 1031258 - RNA, 19 nt, Artificial Sequence
  Description of Artificial Sequence: Synthetic oligonucleotide
agggcgugggucucgcagc

SEQ ID NO: 1031259 - RNA, 19 nt, Artificial Sequence
  Description of Artificial Sequence: Synthetic oligonucleotide
guugaccucuggcaucacg

SEQ ID NO: 1031260 - RNA, 19 nt, Artificial Sequence
  Description of Artificial Sequence: Synthetic oligonucleotide
gguuccaucgauguuggag

SEQ ID NO: 1031261 - RNA, 19 nt, Artificial Sequence
  Description of Artificial Sequence: Synthetic oligonucleotide
auuaguggaggagucgugu

SEQ ID NO: 1031262 - RNA, 19 nt, Artificial Sequence
  Description of Artificial Sequence: Synthetic oligonucleotide
ugaaauuguugaagcgcuc

SEQ ID NO: 1031263 - RNA, 19 nt, Artificial Sequence
  Description of Artificial Sequence: Synthetic oligonucleotide
ggugccuuggugaauaagc

SEQ ID NO: 1031264 - RNA, 19 nt, Artificial Sequence
  Description of Artificial Sequence: Synthetic oligonucleotide
uaucgcggugccaauccug

SEQ ID NO: 1031265 - RNA, 19 nt, Artificial Sequence
  Description of Artificial Sequence: Synthetic oligonucleotide
uucguagacagggcgauaa

SEQ ID NO: 1031266 - RNA, 19 nt, Artificial Sequence
  Description of Artificial Sequence: Synthetic oligonucleotide
acuguuaucgcggugccaa

SEQ ID NO: 1031267 - RNA, 19 nt, Artificial Sequence
  Description of Artificial Sequence: Synthetic oligonucleotide
gaauggugugagcuuggug

SEQ ID NO: 1031268 - RNA, 19 nt, Artificial Sequence
  Description of Artificial Sequence: Synthetic oligonucleotide
uggguuugcccgaguaacc

SEQ ID NO: 1031269 - RNA, 19 nt, Artificial Sequence
  Description of Artificial Sequence: Synthetic oligonucleotide
uccaagcccaugccgggag

SEQ ID NO: 1031270 - RNA, 19 nt, Artificial Sequence
  Description of Artificial Sequence: Synthetic oligonucleotide
agacucgggcgucagguug

SEQ ID NO: 1031271 - RNA, 19 nt, Artificial Sequence
  Description of Artificial Sequence: Synthetic oligonucleotide
aagaccuuguguggcagga

SEQ ID NO: 1031272 - RNA, 19 nt, Artificial Sequence
  Description of Artificial Sequence: Synthetic oligonucleotide
cuuuccauucgccgcuccg

SEQ ID NO: 1031273 - RNA, 19 nt, Artificial Sequence
  Description of Artificial Sequence: Synthetic oligonucleotide
accuacccaaucccagaac

SEQ ID NO: 1031274 - RNA, 19 nt, Artificial Sequence
  Description of Artificial Sequence: Synthetic oligonucleotide
cuggacgcgccaaggaacc

SEQ ID NO: 1031275 - RNA, 19 nt, Artificial Sequence
  Description of Artificial Sequence: Synthetic oligonucleotide
guaccggaccuggugaugg

SEQ ID NO: 1031276 - RNA, 19 nt, Artificial Sequence
  Description of Artificial Sequence: Synthetic oligonucleotide
gaguaaccuuuccauucgc

SEQ ID NO: 1031277 - RNA, 19 nt, Artificial Sequence
  Description of Artificial Sequence: Synthetic oligonucleotide
ugauggguuugcccgagua

SEQ ID NO: 1031278 - RNA, 19 nt, Artificial Sequence
  Description of Artificial Sequence: Synthetic oligonucleotide
gucggcacuguuaucgcgg

SEQ ID NO: 1031279 - RNA, 19 nt, Artificial Sequence
  Description of Artificial Sequence: Synthetic oligonucleotide
cagaaugaauggugugagc

SEQ ID NO: 1031280 - RNA, 19 nt, Artificial Sequence
  Description of Artificial Sequence: Synthetic oligonucleotide
ucuuggaggcgacuauaaa

SEQ ID NO: 1031281 - RNA, 19 nt, Artificial Sequence
  Description of Artificial Sequence: Synthetic oligonucleotide
ucacuuuggacguguucgu

SEQ ID NO: 1031282 - RNA, 19 nt, Artificial Sequence
  Description of Artificial Sequence: Synthetic oligonucleotide
gagucgugugaggucacgg

SEQ ID NO: 1031283 - RNA, 19 nt, Artificial Sequence
  Description of Artificial Sequence: Synthetic oligonucleotide
cugaaauuguugaagcgcu

SEQ ID NO: 1031284 - RNA, 19 nt, Artificial Sequence
  Description of Artificial Sequence: Synthetic oligonucleotide
agagccuccgauaccaaug

SEQ ID NO: 1031285 - RNA, 19 nt, Artificial Sequence
  Description of Artificial Sequence: Synthetic oligonucleotide
acgcccugaacgaagaucu

SEQ ID NO: 1031286 - RNA, 19 nt, Artificial Sequence
  Description of Artificial Sequence: Synthetic oligonucleotide
acugaucauaggguagcag

SEQ ID NO: 1031287 - RNA, 19 nt, Artificial Sequence
  Description of Artificial Sequence: Synthetic oligonucleotide
gugaguuggaccgguuccg

SEQ ID NO: 1031288 - RNA, 19 nt, Artificial Sequence
  Description of Artificial Sequence: Synthetic oligonucleotide
uuccaucgauguuggagac

SEQ ID NO: 1031289 - RNA, 19 nt, Artificial Sequence
  Description of Artificial Sequence: Synthetic oligonucleotide
cauuaguggaggagucgug

SEQ ID NO: 1031290 - RNA, 19 nt, Artificial Sequence
  Description of Artificial Sequence: Synthetic oligonucleotide
aaguaccgguucuggguga

SEQ ID NO: 1031291 - RNA, 19 nt, Artificial Sequence
  Description of Artificial Sequence: Synthetic oligonucleotide
ugguugggcgauuuccuuc

SEQ ID NO: 1031292 - RNA, 19 nt, Artificial Sequence
  Description of Artificial Sequence: Synthetic oligonucleotide
cucuucguuugacuucccc

SEQ ID NO: 1031293 - RNA, 19 nt, Artificial Sequence
  Description of Artificial Sequence: Synthetic oligonucleotide
cgauaaagugcuuugcaac

SEQ ID NO: 1031294 - RNA, 19 nt, Artificial Sequence
  Description of Artificial Sequence: Synthetic oligonucleotide
uuaucgcggugccaauccu

SEQ ID NO: 1031295 - RNA, 19 nt, Artificial Sequence
  Description of Artificial Sequence: Synthetic oligonucleotide
gaguaauccaccagaauau

SEQ ID NO: 1031296 - RNA, 19 nt, Artificial Sequence
  Description of Artificial Sequence: Synthetic oligonucleotide
aguagcggccaccuaccca

SEQ ID NO: 1031297 - RNA, 19 nt, Artificial Sequence
  Description of Artificial Sequence: Synthetic oligonucleotide
ggcacuguuaucgcggugc

SEQ ID NO: 1031298 - RNA, 19 nt, Artificial Sequence
  Description of Artificial Sequence: Synthetic oligonucleotide
gccguuggacuccaugucg

SEQ ID NO: 1031299 - RNA, 19 nt, Artificial Sequence
  Description of Artificial Sequence: Synthetic oligonucleotide
ggcaaagcggugcauguac

SEQ ID NO: 1031300 - RNA, 19 nt, Artificial Sequence
  Description of Artificial Sequence: Synthetic oligonucleotide
uggccaauguuuuggcaau

SEQ ID NO: 1031301 - RNA, 19 nt, Artificial Sequence
  Description of Artificial Sequence: Synthetic oligonucleotide
uguucguagacagggcgau

SEQ ID NO: 1031302 - RNA, 19 nt, Artificial Sequence
  Description of Artificial Sequence: Synthetic oligonucleotide
gacucgggcgucagguugg

SEQ ID NO: 1031303 - RNA, 19 nt, Artificial Sequence
  Description of Artificial Sequence: Synthetic oligonucleotide
cuuuccggcagcuuggagu

SEQ ID NO: 1031304 - RNA, 19 nt, Artificial Sequence
  Description of Artificial Sequence: Synthetic oligonucleotide
gaacauguuuugaggguca

SEQ ID NO: 1031305 - RNA, 19 nt, Artificial Sequence
  Description of Artificial Sequence: Synthetic oligonucleotide
gaucccuggacgcgccaag

SEQ ID NO: 1031306 - RNA, 19 nt, Artificial Sequence
  Description of Artificial Sequence: Synthetic oligonucleotide
gaggucauggcgggagcgg

SEQ ID NO: 1031307 - RNA, 19 nt, Artificial Sequence
  Description of Artificial Sequence: Synthetic oligonucleotide
accuuuccguauggggugc

SEQ ID NO: 1031308 - RNA, 19 nt, Artificial Sequence
  Description of Artificial Sequence: Synthetic oligonucleotide
ggcguucuucuccagcggg

SEQ ID NO: 1031309 - RNA, 19 nt, Artificial Sequence
  Description of Artificial Sequence: Synthetic oligonucleotide
aaccgaugugcagagcaau

SEQ ID NO: 1031310 - RNA, 19 nt, Artificial Sequence
  Description of Artificial Sequence: Synthetic oligonucleotide
ggaggcgacuauaaacagg

SEQ ID NO: 1031311 - RNA, 19 nt, Artificial Sequence
  Description of Artificial Sequence: Synthetic oligonucleotide
ugccguuggacuccauguc

SEQ ID NO: 1031312 - RNA, 19 nt, Artificial Sequence
  Description of Artificial Sequence: Synthetic oligonucleotide
agcgaggucauggcgggag

SEQ ID NO: 1031313 - RNA, 19 nt, Artificial Sequence
  Description of Artificial Sequence: Synthetic oligonucleotide
uccugaagcguagggcuug

SEQ ID NO: 1031314 - RNA, 19 nt, Artificial Sequence
  Description of Artificial Sequence: Synthetic oligonucleotide
ccuggaccuagccaggucc

SEQ ID NO: 1031315 - RNA, 19 nt, Artificial Sequence
  Description of Artificial Sequence: Synthetic oligonucleotide
cucggcauuggugaugguc

SEQ ID NO: 1031316 - RNA, 19 nt, Artificial Sequence
  Description of Artificial Sequence: Synthetic oligonucleotide
cuauucugaugucccgcug

SEQ ID NO: 1031317 - RNA, 19 nt, Artificial Sequence
  Description of Artificial Sequence: Synthetic oligonucleotide
caggacggcugacuuauuc

SEQ ID NO: 1031318 - RNA, 19 nt, Artificial Sequence
  Description of Artificial Sequence: Synthetic oligonucleotide
cagaugacgcccugaacga

SEQ ID NO: 1031319 - RNA, 19 nt, Artificial Sequence
  Description of Artificial Sequence: Synthetic oligonucleotide
guaucaucuuggugccuug

SEQ ID NO: 1031320 - RNA, 19 nt, Artificial Sequence
  Description of Artificial Sequence: Synthetic oligonucleotide
ggcgauaaagugcuuugca

SEQ ID NO: 1031321 - RNA, 19 nt, Artificial Sequence
  Description of Artificial Sequence: Synthetic oligonucleotide
uguuaucgcggugccaauc

SEQ ID NO: 1031322 - RNA, 19 nt, Artificial Sequence
  Description of Artificial Sequence: Synthetic oligonucleotide
cagaacucgaacauguuuu

SEQ ID NO: 1031323 - RNA, 19 nt, Artificial Sequence
  Description of Artificial Sequence: Synthetic oligonucleotide
guuggacuccaugucgccc

SEQ ID NO: 1031324 - RNA, 19 nt, Artificial Sequence
  Description of Artificial Sequence: Synthetic oligonucleotide
ccgaguaaccuuuccauuc

SEQ ID NO: 1031325 - RNA, 19 nt, Artificial Sequence
  Description of Artificial Sequence: Synthetic oligonucleotide
cagggcgugggucucgcag

SEQ ID NO: 1031326 - RNA, 19 nt, Artificial Sequence
  Description of Artificial Sequence: Synthetic oligonucleotide
uccacccggguaccggacc

SEQ ID NO: 1031327 - RNA, 19 nt, Artificial Sequence
  Description of Artificial Sequence: Synthetic oligonucleotide
uuugcccgaguaaccuuuc

SEQ ID NO: 1031328 - RNA, 19 nt, Artificial Sequence
  Description of Artificial Sequence: Synthetic oligonucleotide
cauucgccgcuccggaccc

SEQ ID NO: 1031329 - RNA, 19 nt, Artificial Sequence
  Description of Artificial Sequence: Synthetic oligonucleotide
gacgcccugaacgaagauc

SEQ ID NO: 1031330 - RNA, 19 nt, Artificial Sequence
  Description of Artificial Sequence: Synthetic oligonucleotide
gugcagaccuuuccguaug

SEQ ID NO: 1031331 - RNA, 19 nt, Artificial Sequence
  Description of Artificial Sequence: Synthetic oligonucleotide
uuuuggcaauguggguucc

SEQ ID NO: 1031332 - RNA, 19 nt, Artificial Sequence
  Description of Artificial Sequence: Synthetic oligonucleotide
guccgugauggguuugccc

SEQ ID NO: 1031333 - RNA, 19 nt, Artificial Sequence
  Description of Artificial Sequence: Synthetic oligonucleotide
acguguucguagacagggc

SEQ ID NO: 1031334 - RNA, 19 nt, Artificial Sequence
  Description of Artificial Sequence: Synthetic oligonucleotide
gucccgcauagucuccacg

SEQ ID NO: 1031335 - RNA, 19 nt, Artificial Sequence
  Description of Artificial Sequence: Synthetic oligonucleotide
aaaccgaugugcagagcaa

SEQ ID NO: 1031336 - RNA, 19 nt, Artificial Sequence
  Description of Artificial Sequence: Synthetic oligonucleotide
ugaccacagcgaguagcgg

SEQ ID NO: 1031337 - RNA, 19 nt, Artificial Sequence
  Description of Artificial Sequence: Synthetic oligonucleotide
ucuuagccucuucguuuga

SEQ ID NO: 1031338 - RNA, 19 nt, Artificial Sequence
  Description of Artificial Sequence: Synthetic oligonucleotide
cguguucguagacagggcg

SEQ ID NO: 1031339 - RNA, 19 nt, Artificial Sequence
  Description of Artificial Sequence: Synthetic oligonucleotide
ucccuggacgcgccaagga

SEQ ID NO: 1031340 - RNA, 19 nt, Artificial Sequence
  Description of Artificial Sequence: Synthetic oligonucleotide
agacggaucccuggacgcg

SEQ ID NO: 1031341 - RNA, 19 nt, Artificial Sequence
  Description of Artificial Sequence: Synthetic oligonucleotide
uccacuccccacuggucga

SEQ ID NO: 1031342 - RNA, 19 nt, Artificial Sequence
  Description of Artificial Sequence: Synthetic oligonucleotide
gacaaaccagaugcgggga

SEQ ID NO: 1031343 - RNA, 19 nt, Artificial Sequence
  Description of Artificial Sequence: Synthetic oligonucleotide
agguucaagcugaaauugu

SEQ ID NO: 1031344 - RNA, 19 nt, Artificial Sequence
  Description of Artificial Sequence: Synthetic oligonucleotide
aaagugcuuugcaacugua

SEQ ID NO: 1031345 - RNA, 19 nt, Artificial Sequence
  Description of Artificial Sequence: Synthetic oligonucleotide
gcgaguagcggccaccuac

SEQ ID NO: 1031346 - RNA, 19 nt, Artificial Sequence
  Description of Artificial Sequence: Synthetic oligonucleotide
cacaagcaucugcaucacc

SEQ ID NO: 1031347 - RNA, 19 nt, Artificial Sequence
  Description of Artificial Sequence: Synthetic oligonucleotide
gaguagcggccaccuaccc

SEQ ID NO: 1031348 - RNA, 19 nt, Artificial Sequence
  Description of Artificial Sequence: Synthetic oligonucleotide
gguugggcgauuuccuuca

SEQ ID NO: 1031349 - RNA, 19 nt, Artificial Sequence
  Description of Artificial Sequence: Synthetic oligonucleotide
uugcaacuguagacggauc

SEQ ID NO: 1031350 - RNA, 19 nt, Artificial Sequence
  Description of Artificial Sequence: Synthetic oligonucleotide
aguaccgguucugggugag

SEQ ID NO: 1031351 - RNA, 19 nt, Artificial Sequence
  Description of Artificial Sequence: Synthetic oligonucleotide
ucggcacuguuaucgcggu

SEQ ID NO: 1031352 - RNA, 19 nt, Artificial Sequence
  Description of Artificial Sequence: Synthetic oligonucleotide
cgaguaaccuuuccauucg

SEQ ID NO: 1031353 - RNA, 19 nt, Artificial Sequence
  Description of Artificial Sequence: Synthetic oligonucleotide
accggaccuggugauggac

SEQ ID NO: 1031354 - RNA, 19 nt, Artificial Sequence
  Description of Artificial Sequence: Synthetic oligonucleotide
ucguagacagggcgauaaa

SEQ ID NO: 1031355 - RNA, 19 nt, Artificial Sequence
  Description of Artificial Sequence: Synthetic oligonucleotide
gcggggaccuccugaagcg

SEQ ID NO: 1031356 - RNA, 19 nt, Artificial Sequence
  Description of Artificial Sequence: Synthetic oligonucleotide
ggucucgcagccauagaag

SEQ ID NO: 1031357 - RNA, 19 nt, Artificial Sequence
  Description of Artificial Sequence: Synthetic oligonucleotide
uccaucgauguuggagaca

SEQ ID NO: 1031358 - RNA, 19 nt, Artificial Sequence
  Description of Artificial Sequence: Synthetic oligonucleotide
gcaucgaaaaggcuccgca

SEQ ID NO: 1031359 - RNA, 19 nt, Artificial Sequence
  Description of Artificial Sequence: Synthetic oligonucleotide
ucgcagccauagaaguuaa

SEQ ID NO: 1031360 - RNA, 19 nt, Artificial Sequence
  Description of Artificial Sequence: Synthetic oligonucleotide
gcucgauauucuucgccag

SEQ ID NO: 1031361 - RNA, 19 nt, Artificial Sequence
  Description of Artificial Sequence: Synthetic oligonucleotide
aaccagaugcggggaccuc

SEQ ID NO: 1031362 - RNA, 19 nt, Artificial Sequence
  Description of Artificial Sequence: Synthetic oligonucleotide
augucgcccugcuggaagu

SEQ ID NO: 1031363 - RNA, 19 nt, Artificial Sequence
  Description of Artificial Sequence: Synthetic oligonucleotide
accgguuccggagggccac

SEQ ID NO: 1031364 - RNA, 19 nt, Artificial Sequence
  Description of Artificial Sequence: Synthetic oligonucleotide
accgaugugcagagcaaug

SEQ ID NO: 1031365 - RNA, 19 nt, Artificial Sequence
  Description of Artificial Sequence: Synthetic oligonucleotide
gcgauaaagugcuuugcaa

SEQ ID NO: 1031366 - RNA, 19 nt, Artificial Sequence
  Description of Artificial Sequence: Synthetic oligonucleotide
aaggcuccgcagguugaug

SEQ ID NO: 1031367 - RNA, 19 nt, Artificial Sequence
  Description of Artificial Sequence: Synthetic oligonucleotide
ccgauaccaauguugacga

SEQ ID NO: 1031368 - RNA, 19 nt, Artificial Sequence
  Description of Artificial Sequence: Synthetic oligonucleotide
caggcucgauauucuucgc

SEQ ID NO: 1031369 - RNA, 19 nt, Artificial Sequence
  Description of Artificial Sequence: Synthetic oligonucleotide
cuguagacggaucccugga

SEQ ID NO: 1031370 - RNA, 19 nt, Artificial Sequence
  Description of Artificial Sequence: Synthetic oligonucleotide
gaguuggaccgguuccgga

SEQ ID NO: 1031371 - RNA, 19 nt, Artificial Sequence
  Description of Artificial Sequence: Synthetic oligonucleotide
ccuccgauaccaauguuga

SEQ ID NO: 1031372 - RNA, 19 nt, Artificial Sequence
  Description of Artificial Sequence: Synthetic oligonucleotide
ccgaugugcagagcaaugg

SEQ ID NO: 1031373 - RNA, 19 nt, Artificial Sequence
  Description of Artificial Sequence: Synthetic oligonucleotide
gccucuucguuugacuucc

SEQ ID NO: 1031374 - RNA, 19 nt, Artificial Sequence
  Description of Artificial Sequence: Synthetic oligonucleotide
accggggcguucuucucca

SEQ ID NO: 1031375 - RNA, 19 nt, Artificial Sequence
  Description of Artificial Sequence: Synthetic oligonucleotide
gcaacuguagacggauccc

SEQ ID NO: 1031376 - RNA, 19 nt, Artificial Sequence
  Description of Artificial Sequence: Synthetic oligonucleotide
ccuggacgcgccaaggaac

SEQ ID NO: 1031377 - RNA, 19 nt, Artificial Sequence
  Description of Artificial Sequence: Synthetic oligonucleotide
caugccgggaggugugcuc

SEQ ID NO: 1031378 - RNA, 19 nt, Artificial Sequence
  Description of Artificial Sequence: Synthetic oligonucleotide
agggcuugagagccucagu

SEQ ID NO: 1031379 - RNA, 19 nt, Artificial Sequence
  Description of Artificial Sequence: Synthetic oligonucleotide
gagccuccgauaccaaugu

SEQ ID NO: 1031380 - RNA, 19 nt, Artificial Sequence
  Description of Artificial Sequence: Synthetic oligonucleotide
ccauucgccgcuccggacc

SEQ ID NO: 1031381 - RNA, 19 nt, Artificial Sequence
  Description of Artificial Sequence: Synthetic oligonucleotide
gggucucgcagccauagaa

SEQ ID NO: 1031382 - RNA, 19 nt, Artificial Sequence
  Description of Artificial Sequence: Synthetic oligonucleotide
guccaauggcugaccacag

SEQ ID NO: 1031383 - RNA, 19 nt, Artificial Sequence
  Description of Artificial Sequence: Synthetic oligonucleotide
ggaagacucgggcgucagg

SEQ ID NO: 1031384 - RNA, 19 nt, Artificial Sequence
  Description of Artificial Sequence: Synthetic oligonucleotide
guguucguagacagggcga

SEQ ID NO: 1031385 - RNA, 19 nt, Artificial Sequence
  Description of Artificial Sequence: Synthetic oligonucleotide
acgauguccgugauggguu

SEQ ID NO: 1031386 - RNA, 19 nt, Artificial Sequence
  Description of Artificial Sequence: Synthetic oligonucleotide
gucagguuggccaauguuu

SEQ ID NO: 1031387 - RNA, 19 nt, Artificial Sequence
  Description of Artificial Sequence: Synthetic oligonucleotide
aagcccaugccgggaggug

SEQ ID NO: 1031388 - RNA, 19 nt, Artificial Sequence
  Description of Artificial Sequence: Synthetic oligonucleotide
agaccuuguguggcaggag

SEQ ID NO: 1031389 - RNA, 19 nt, Artificial Sequence
  Description of Artificial Sequence: Synthetic oligonucleotide
ccguuggacuccaugucgc

SEQ ID NO: 1031390 - RNA, 19 nt, Artificial Sequence
  Description of Artificial Sequence: Synthetic oligonucleotide
ugaugucggcacuguuauc

SEQ ID NO: 1031391 - RNA, 19 nt, Artificial Sequence
  Description of Artificial Sequence: Synthetic oligonucleotide
cauagucuccacgccccug

SEQ ID NO: 1031392 - RNA, 19 nt, Artificial Sequence
  Description of Artificial Sequence: Synthetic oligonucleotide
gacccgcuggcagaaggac

SEQ ID NO: 1031393 - RNA, 19 nt, Artificial Sequence
  Description of Artificial Sequence: Synthetic oligonucleotide
uccacgccccuggaccuag

SEQ ID NO: 1031394 - RNA, 19 nt, Artificial Sequence
  Description of Artificial Sequence: Synthetic oligonucleotide
gcuccgcagguugaugucg

SEQ ID NO: 1031395 - RNA, 19 nt, Artificial Sequence
  Description of Artificial Sequence: Synthetic oligonucleotide
ggaagugcugguccaucca

SEQ ID NO: 1031396 - RNA, 19 nt, Artificial Sequence
  Description of Artificial Sequence: Synthetic oligonucleotide
cgcauagucuccacgcccc

SEQ ID NO: 1031397 - RNA, 19 nt, Artificial Sequence
  Description of Artificial Sequence: Synthetic oligonucleotide
cacgccccuggaccuagcc

SEQ ID NO: 1031398 - RNA, 19 nt, Artificial Sequence
  Description of Artificial Sequence: Synthetic oligonucleotide
augacgcccugaacgaaga

SEQ ID NO: 1031399 - RNA, 19 nt, Artificial Sequence
  Description of Artificial Sequence: Synthetic oligonucleotide
gucaccaugagggguccca

SEQ ID NO: 1031400 - RNA, 19 nt, Artificial Sequence
  Description of Artificial Sequence: Synthetic oligonucleotide
gggcgauuuccuucaaaga

SEQ ID NO: 1031401 - RNA, 19 nt, Artificial Sequence
  Description of Artificial Sequence: Synthetic oligonucleotide
cguagacagggcgauaaag

SEQ ID NO: 1031402 - RNA, 19 nt, Artificial Sequence
  Description of Artificial Sequence: Synthetic oligonucleotide
acccggguaccggaccugg

SEQ ID NO: 1031403 - RNA, 19 nt, Artificial Sequence
  Description of Artificial Sequence: Synthetic oligonucleotide
cuggaccuagccaggucca

SEQ ID NO: 1031404 - RNA, 19 nt, Artificial Sequence
  Description of Artificial Sequence: Synthetic oligonucleotide
acgccccuggaccuagcca

SEQ ID NO: 1031405 - RNA, 19 nt, Artificial Sequence
  Description of Artificial Sequence: Synthetic oligonucleotide
ugacgcccugaacgaagau

SEQ ID NO: 1031406 - RNA, 19 nt, Artificial Sequence
  Description of Artificial Sequence: Synthetic oligonucleotide
uaccggaccuggugaugga

SEQ ID NO: 1031407 - RNA, 19 nt, Artificial Sequence
  Description of Artificial Sequence: Synthetic oligonucleotide
ccgcauagucuccacgccc

SEQ ID NO: 1031408 - RNA, 19 nt, Artificial Sequence
  Description of Artificial Sequence: Synthetic oligonucleotide
caauggggccuguguggug

SEQ ID NO: 1031409 - RNA, 19 nt, Artificial Sequence
  Description of Artificial Sequence: Synthetic oligonucleotide
gucgcccugcuggaaguag

SEQ ID NO: 1031410 - RNA, 19 nt, Artificial Sequence
  Description of Artificial Sequence: Synthetic oligonucleotide
cccauuaguggaggagucg

SEQ ID NO: 1031411 - RNA, 19 nt, Artificial Sequence
  Description of Artificial Sequence: Synthetic oligonucleotide
gucuuggaggcgacuauaa

SEQ ID NO: 1031412 - RNA, 19 nt, Artificial Sequence
  Description of Artificial Sequence: Synthetic oligonucleotide
gggugagcgaggucauggc

SEQ ID NO: 1031413 - RNA, 19 nt, Artificial Sequence
  Description of Artificial Sequence: Synthetic oligonucleotide
gggcguucuucuccagcgg

SEQ ID NO: 1031414 - RNA, 19 nt, Artificial Sequence
  Description of Artificial Sequence: Synthetic oligonucleotide
agcccaugccgggaggugu

SEQ ID NO: 1031415 - RNA, 19 nt, Artificial Sequence
  Description of Artificial Sequence: Synthetic oligonucleotide
aggucauggcgggagcgga

SEQ ID NO: 1031416 - RNA, 19 nt, Artificial Sequence
  Description of Artificial Sequence: Synthetic oligonucleotide
guguggugguccacccggg

SEQ ID NO: 1031417 - RNA, 19 nt, Artificial Sequence
  Description of Artificial Sequence: Synthetic oligonucleotide
caccuacccaaucccagaa

SEQ ID NO: 1031418 - RNA, 19 nt, Artificial Sequence
  Description of Artificial Sequence: Synthetic oligonucleotide
cuuuccguauggggugcug

SEQ ID NO: 1031419 - RNA, 19 nt, Artificial Sequence
  Description of Artificial Sequence: Synthetic oligonucleotide
cugcucgaaguugucaaaa

SEQ ID NO: 1031420 - RNA, 19 nt, Artificial Sequence
  Description of Artificial Sequence: Synthetic oligonucleotide
gcacuguuaucgcggugcc

SEQ ID NO: 1031421 - RNA, 19 nt, Artificial Sequence
  Description of Artificial Sequence: Synthetic oligonucleotide
aggagucgugugaggucac

SEQ ID NO: 1031422 - RNA, 19 nt, Artificial Sequence
  Description of Artificial Sequence: Synthetic oligonucleotide
gggcgauaaagugcuuugc

SEQ ID NO: 1031423 - RNA, 19 nt, Artificial Sequence
  Description of Artificial Sequence: Synthetic oligonucleotide
agaugacgcccugaacgaa

SEQ ID NO: 1031424 - RNA, 19 nt, Artificial Sequence
  Description of Artificial Sequence: Synthetic oligonucleotide
cauuggucccuggcucccc

SEQ ID NO: 1031425 - RNA, 19 nt, Artificial Sequence
  Description of Artificial Sequence: Synthetic oligonucleotide
cgaacauguuuugaggguc

SEQ ID NO: 1031426 - RNA, 19 nt, Artificial Sequence
  Description of Artificial Sequence: Synthetic oligonucleotide
ggacguguucguagacagg

SEQ ID NO: 1031427 - RNA, 19 nt, Artificial Sequence
  Description of Artificial Sequence: Synthetic oligonucleotide
ccaucgauguuggagacaa

SEQ ID NO: 1031428 - RNA, 19 nt, Artificial Sequence
  Description of Artificial Sequence: Synthetic oligonucleotide
uggaccuagccagguccac

SEQ ID NO: 1031429 - RNA, 19 nt, Artificial Sequence
  Description of Artificial Sequence: Synthetic oligonucleotide
caggucagagccuccgaua

SEQ ID NO: 1031430 - RNA, 19 nt, Artificial Sequence
  Description of Artificial Sequence: Synthetic oligonucleotide
cgaguagcggccaccuacc

SEQ ID NO: 1031431 - RNA, 19 nt, Artificial Sequence
  Description of Artificial Sequence: Synthetic oligonucleotide
cacagcgaguagcggccac

SEQ ID NO: 1031432 - RNA, 19 nt, Artificial Sequence
  Description of Artificial Sequence: Synthetic oligonucleotide
gugccuuggugaauaagcu

SEQ ID NO: 1031433 - RNA, 19 nt, Artificial Sequence
  Description of Artificial Sequence: Synthetic oligonucleotide
gggagcggagagccacacg

SEQ ID NO: 1031434 - RNA, 19 nt, Artificial Sequence
  Description of Artificial Sequence: Synthetic oligonucleotide
uccggacccgcuggcagaa

SEQ ID NO: 1031435 - RNA, 19 nt, Artificial Sequence
  Description of Artificial Sequence: Synthetic oligonucleotide
ggcaucgaaaaggcuccgc

SEQ ID NO: 1031436 - RNA, 19 nt, Artificial Sequence
  Description of Artificial Sequence: Synthetic oligonucleotide
ccuacccaaucccagaacu

SEQ ID NO: 1031437 - RNA, 19 nt, Artificial Sequence
  Description of Artificial Sequence: Synthetic oligonucleotide
uggacgcgccaaggaacca

SEQ ID NO: 1031438 - RNA, 19 nt, Artificial Sequence
  Description of Artificial Sequence: Synthetic oligonucleotide
ccguauggggugcuggguc

SEQ ID NO: 1031439 - RNA, 19 nt, Artificial Sequence
  Description of Artificial Sequence: Synthetic oligonucleotide
guuugcccgaguaaccuuu

SEQ ID NO: 1031440 - RNA, 19 nt, Artificial Sequence
  Description of Artificial Sequence: Synthetic oligonucleotide
cugaagcguagggcuugag

SEQ ID NO: 1031441 - RNA, 19 nt, Artificial Sequence
  Description of Artificial Sequence: Synthetic oligonucleotide
cagggaagacucgggcguc

SEQ ID NO: 1031442 - RNA, 19 nt, Artificial Sequence
  Description of Artificial Sequence: Synthetic oligonucleotide
gguaccggaccuggugaug

SEQ ID NO: 1031443 - RNA, 19 nt, Artificial Sequence
  Description of Artificial Sequence: Synthetic oligonucleotide
ggugcagaccuuuccguau

SEQ ID NO: 1031444 - RNA, 19 nt, Artificial Sequence
  Description of Artificial Sequence: Synthetic oligonucleotide
ggucauggcgggagcggag

SEQ ID NO: 1031445 - RNA, 19 nt, Artificial Sequence
  Description of Artificial Sequence: Synthetic oligonucleotide
acgcgccaaggaaccacuc

SEQ ID NO: 1031446 - RNA, 19 nt, Artificial Sequence
  Description of Artificial Sequence: Synthetic oligonucleotide
cguuggacuccaugucgcc

SEQ ID NO: 1031447 - RNA, 19 nt, Artificial Sequence
  Description of Artificial Sequence: Synthetic oligonucleotide
gacuugccguuggacucca

SEQ ID NO: 1031448 - RNA, 19 nt, Artificial Sequence
  Description of Artificial Sequence: Synthetic oligonucleotide
cuccggacccgcuggcaga

SEQ ID NO: 1031449 - RNA, 19 nt, Artificial Sequence
  Description of Artificial Sequence: Synthetic oligonucleotide
gguccacccggguaccgga

SEQ ID NO: 1031450 - RNA, 19 nt, Artificial Sequence
  Description of Artificial Sequence: Synthetic oligonucleotide
ggccaauguuuuggcaaug

SEQ ID NO: 1031451 - RNA, 19 nt, Artificial Sequence
  Description of Artificial Sequence: Synthetic oligonucleotide
agccuccgauaccaauguu

SEQ ID NO: 1031452 - RNA, 19 nt, Artificial Sequence
  Description of Artificial Sequence: Synthetic oligonucleotide
gacgcgccaaggaaccacu

SEQ ID NO: 1031453 - RNA, 19 nt, Artificial Sequence
  Description of Artificial Sequence: Synthetic oligonucleotide
ccggguaccggaccuggug

SEQ ID NO: 1031454 - RNA, 19 nt, Artificial Sequence
  Description of Artificial Sequence: Synthetic oligonucleotide
gagcgcugccguccagcuc

SEQ ID NO: 1031455 - RNA, 19 nt, Artificial Sequence
  Description of Artificial Sequence: Synthetic oligonucleotide
cccugaacgaagaucuugu

SEQ ID NO: 1031456 - RNA, 19 nt, Artificial Sequence
  Description of Artificial Sequence: Synthetic oligonucleotide
ccaagcccaugccgggagg

SEQ ID NO: 1031457 - RNA, 19 nt, Artificial Sequence
  Description of Artificial Sequence: Synthetic oligonucleotide
gcccugcuggaaguaggcg

SEQ ID NO: 1031458 - RNA, 19 nt, Artificial Sequence
  Description of Artificial Sequence: Synthetic oligonucleotide
guaccgguucugggugagc

SEQ ID NO: 1031459 - RNA, 19 nt, Artificial Sequence
  Description of Artificial Sequence: Synthetic oligonucleotide
gaccgguuccggagggcca

SEQ ID NO: 1031460 - RNA, 19 nt, Artificial Sequence
  Description of Artificial Sequence: Synthetic oligonucleotide
cggacccgcuggcagaagg

SEQ ID NO: 1031461 - RNA, 19 nt, Artificial Sequence
  Description of Artificial Sequence: Synthetic oligonucleotide
cacuccccacuggucgaag

SEQ ID NO: 1031462 - RNA, 19 nt, Artificial Sequence
  Description of Artificial Sequence: Synthetic oligonucleotide
gggagcgcugccguccagc

SEQ ID NO: 1031463 - RNA, 19 nt, Artificial Sequence
  Description of Artificial Sequence: Synthetic oligonucleotide
cggcugacuuauucuauuc

SEQ ID NO: 1031464 - RNA, 19 nt, Artificial Sequence
  Description of Artificial Sequence: Synthetic oligonucleotide
cgauccucgguguaguuua

SEQ ID NO: 1031465 - RNA, 19 nt, Artificial Sequence
  Description of Artificial Sequence: Synthetic oligonucleotide
agaaugcauguuggccauu

SEQ ID NO: 1031466 - RNA, 19 nt, Artificial Sequence
  Description of Artificial Sequence: Synthetic oligonucleotide
ggcgucagguuggccaaug

SEQ ID NO: 1031467 - RNA, 19 nt, Artificial Sequence
  Description of Artificial Sequence: Synthetic oligonucleotide
ggugguccacccggguacc

SEQ ID NO: 1031468 - RNA, 19 nt, Artificial Sequence
  Description of Artificial Sequence: Synthetic oligonucleotide
agcgaguagcggccaccua

SEQ ID NO: 1031469 - RNA, 19 nt, Artificial Sequence
  Description of Artificial Sequence: Synthetic oligonucleotide
ggaaaucacaggguaucau

SEQ ID NO: 1031470 - RNA, 19 nt, Artificial Sequence
  Description of Artificial Sequence: Synthetic oligonucleotide
guugggcgauuuccuucaa

SEQ ID NO: 1031471 - RNA, 19 nt, Artificial Sequence
  Description of Artificial Sequence: Synthetic oligonucleotide
gcccauuaguggaggaguc

SEQ ID NO: 1031472 - RNA, 19 nt, Artificial Sequence
  Description of Artificial Sequence: Synthetic oligonucleotide
ggucuuggaggcgacuaua

SEQ ID NO: 1031473 - RNA, 19 nt, Artificial Sequence
  Description of Artificial Sequence: Synthetic oligonucleotide
cacuuuggacguguucgua

SEQ ID NO: 1031474 - RNA, 19 nt, Artificial Sequence
  Description of Artificial Sequence: Synthetic oligonucleotide
cacuguuaucgcggugcca

SEQ ID NO: 1031475 - RNA, 19 nt, Artificial Sequence
  Description of Artificial Sequence: Synthetic oligonucleotide
guccacccggguaccggac

SEQ ID NO: 1031476 - RNA, 19 nt, Artificial Sequence
  Description of Artificial Sequence: Synthetic oligonucleotide
cucgggcgucagguuggcc

SEQ ID NO: 1031477 - RNA, 19 nt, Artificial Sequence
  Description of Artificial Sequence: Synthetic oligonucleotide
guucguagacagggcgaua

SEQ ID NO: 1031478 - RNA, 19 nt, Artificial Sequence
  Description of Artificial Sequence: Synthetic oligonucleotide
ggccaccuacccaauccca

SEQ ID NO: 1031479 - RNA, 19 nt, Artificial Sequence
  Description of Artificial Sequence: Synthetic oligonucleotide
ccucuucguuugacuuccc

SEQ ID NO: 1031480 - RNA, 19 nt, Artificial Sequence
  Description of Artificial Sequence: Synthetic oligonucleotide
cacccggguaccggaccug

SEQ ID NO: 1031481 - RNA, 19 nt, Artificial Sequence
  Description of Artificial Sequence: Synthetic oligonucleotide
gccucugucugggccaaga

SEQ ID NO: 1031482 - RNA, 19 nt, Artificial Sequence
  Description of Artificial Sequence: Synthetic oligonucleotide
ggagcgcugccguccagcu

SEQ ID NO: 1031483 - RNA, 19 nt, Artificial Sequence
  Description of Artificial Sequence: Synthetic oligonucleotide
gguuugcccgaguaaccuu

SEQ ID NO: 1031484 - RNA, 19 nt, Artificial Sequence
  Description of Artificial Sequence: Synthetic oligonucleotide
ggaccggggcguucuucuc

SEQ ID NO: 1031485 - RNA, 19 nt, Artificial Sequence
  Description of Artificial Sequence: Synthetic oligonucleotide
gauccucgguguaguuuau

SEQ ID NO: 1031486 - RNA, 19 nt, Artificial Sequence
  Description of Artificial Sequence: Synthetic oligonucleotide
cccuggacgcgccaaggaa

SEQ ID NO: 1031487 - RNA, 19 nt, Artificial Sequence
  Description of Artificial Sequence: Synthetic oligonucleotide
gcaucacgucucugcuguc

SEQ ID NO: 1031488 - RNA, 19 nt, Artificial Sequence
  Description of Artificial Sequence: Synthetic oligonucleotide
cuguuaucgcggugccaau

SEQ ID NO: 1031489 - RNA, 19 nt, Artificial Sequence
  Description of Artificial Sequence: Synthetic oligonucleotide
cagcgaguagcggccaccu

SEQ ID NO: 1031490 - RNA, 19 nt, Artificial Sequence
  Description of Artificial Sequence: Synthetic oligonucleotide
gcgcuccgggucggcaucg

SEQ ID NO: 1031491 - RNA, 19 nt, Artificial Sequence
  Description of Artificial Sequence: Synthetic oligonucleotide
ggggaccuccugaagcgua

SEQ ID NO: 1031492 - RNA, 19 nt, Artificial Sequence
  Description of Artificial Sequence: Synthetic oligonucleotide
cugcccgauccucggugua

SEQ ID NO: 1031493 - RNA, 19 nt, Artificial Sequence
  Description of Artificial Sequence: Synthetic oligonucleotide
gcauagucuccacgccccu

SEQ ID NO: 1031494 - RNA, 19 nt, Artificial Sequence
  Description of Artificial Sequence: Synthetic oligonucleotide
aggcggcaaagcggugcau

SEQ ID NO: 1031495 - RNA, 19 nt, Artificial Sequence
  Description of Artificial Sequence: Synthetic oligonucleotide
ggaguugguugggcgauuu

SEQ ID NO: 1031496 - RNA, 19 nt, Artificial Sequence
  Description of Artificial Sequence: Synthetic oligonucleotide
cccaugccgggaggugugc

SEQ ID NO: 1031497 - RNA, 19 nt, Artificial Sequence
  Description of Artificial Sequence: Synthetic oligonucleotide
gcgucagguuggccaaugu

SEQ ID NO: 1031498 - RNA, 19 nt, Artificial Sequence
  Description of Artificial Sequence: Synthetic oligonucleotide
ggugccaauccugcagcuu

SEQ ID NO: 1031499 - RNA, 19 nt, Artificial Sequence
  Description of Artificial Sequence: Synthetic oligonucleotide
ccugaagcguagggcuuga

SEQ ID NO: 1031500 - RNA, 19 nt, Artificial Sequence
  Description of Artificial Sequence: Synthetic oligonucleotide
ccggggcguucuucuccag

SEQ ID NO: 1031501 - RNA, 19 nt, Artificial Sequence
  Description of Artificial Sequence: Synthetic oligonucleotide
ccacgccccuggaccuagc

SEQ ID NO: 1031502 - RNA, 19 nt, Artificial Sequence
  Description of Artificial Sequence: Synthetic oligonucleotide
gcagggcgugggucucgca

SEQ ID NO: 1031503 - RNA, 19 nt, Artificial Sequence
  Description of Artificial Sequence: Synthetic oligonucleotide
gcgggagcggagagccaca

SEQ ID NO: 1031504 - RNA, 19 nt, Artificial Sequence
  Description of Artificial Sequence: Synthetic oligonucleotide
cggcacuguuaucgcggug

SEQ ID NO: 1031505 - RNA, 19 nt, Artificial Sequence
  Description of Artificial Sequence: Synthetic oligonucleotide
cuccacgccccuggaccua

SEQ ID NO: 1031506 - RNA, 19 nt, Artificial Sequence
  Description of Artificial Sequence: Synthetic oligonucleotide
ccacccggguaccggaccu

SEQ ID NO: 1031507 - RNA, 19 nt, Artificial Sequence
  Description of Artificial Sequence: Synthetic oligonucleotide
cgucagguuggccaauguu

SEQ ID NO: 1031508 - RNA, 19 nt, Artificial Sequence
  Description of Artificial Sequence: Synthetic oligonucleotide
gcgcugccguccagcucag

SEQ ID NO: 1031509 - RNA, 19 nt, Artificial Sequence
  Description of Artificial Sequence: Synthetic oligonucleotide
ccgauccucgguguaguuu

SEQ ID NO: 1031510 - RNA, 19 nt, Artificial Sequence
  Description of Artificial Sequence: Synthetic oligonucleotide
ccgcuggcagaaggaccuc

SEQ ID NO: 1031511 - RNA, 19 nt, Artificial Sequence
  Description of Artificial Sequence: Synthetic oligonucleotide
ccggacccgcuggcagaag

SEQ ID NO: 1031512 - RNA, 19 nt, Artificial Sequence
  Description of Artificial Sequence: Synthetic oligonucleotide
cgauguccgugauggguuu

SEQ ID NO: 1031513 - RNA, 19 nt, Artificial Sequence
  Description of Artificial Sequence: Synthetic oligonucleotide
cgauaccaauguugacgau

SEQ ID NO: 1031514 - RNA, 19 nt, Artificial Sequence
  Description of Artificial Sequence: Synthetic oligonucleotide
ccuuuccguauggggugcu

SEQ ID NO: 1031515 - RNA, 19 nt, Artificial Sequence
  Description of Artificial Sequence: Synthetic oligonucleotide
cccggguaccggaccuggu

SEQ ID NO: 1031516 - RNA, 19 nt, Artificial Sequence
  Description of Artificial Sequence: Synthetic oligonucleotide
ccgguuccggagggccaca

SEQ ID NO: 1031517 - RNA, 19 nt, Artificial Sequence
  Description of Artificial Sequence: Synthetic oligonucleotide
gggcgucagguuggccaau

SEQ ID NO: 1031518 - RNA, 19 nt, Artificial Sequence
  Description of Artificial Sequence: Synthetic oligonucleotide
gcaggacggcugacuuauu

SEQ ID NO: 1031519 - RNA, 19 nt, Artificial Sequence
  Description of Artificial Sequence: Synthetic oligonucleotide
cggggaccuccugaagcgu

SEQ ID NO: 1031520 - RNA, 19 nt, Artificial Sequence
  Description of Artificial Sequence: Synthetic oligonucleotide
cgguuccggagggccacau

SEQ ID NO: 1031521 - RNA, 19 nt, Artificial Sequence
  Description of Artificial Sequence: Synthetic oligonucleotide
aagauuaaaauccccacgc

SEQ ID NO: 1031522 - RNA, 19 nt, Artificial Sequence
  Description of Artificial Sequence: Synthetic oligonucleotide
uguuuguuggccaagauac

SEQ ID NO: 1031523 - RNA, 19 nt, Artificial Sequence
  Description of Artificial Sequence: Synthetic oligonucleotide
aaucacacaaccaaagagg

SEQ ID NO: 1031524 - RNA, 19 nt, Artificial Sequence
  Description of Artificial Sequence: Synthetic oligonucleotide
uucgauagcauuuauuagc

SEQ ID NO: 1031525 - RNA, 19 nt, Artificial Sequence
  Description of Artificial Sequence: Synthetic oligonucleotide
ucuaauagucacauuaugu

SEQ ID NO: 1031526 - RNA, 19 nt, Artificial Sequence
  Description of Artificial Sequence: Synthetic oligonucleotide
gauaauuaggagaauugcg

SEQ ID NO: 1031527 - RNA, 19 nt, Artificial Sequence
  Description of Artificial Sequence: Synthetic oligonucleotide
ugaucagacgauaauuagg

SEQ ID NO: 1031528 - RNA, 19 nt, Artificial Sequence
  Description of Artificial Sequence: Synthetic oligonucleotide
cuugcuacaaaggagaagc

SEQ ID NO: 1031529 - RNA, 19 nt, Artificial Sequence
  Description of Artificial Sequence: Synthetic oligonucleotide
ugguaaaugacaccugggg

SEQ ID NO: 1031530 - RNA, 19 nt, Artificial Sequence
  Description of Artificial Sequence: Synthetic oligonucleotide
ugcacaauaaacauuggaa

SEQ ID NO: 1031531 - RNA, 19 nt, Artificial Sequence
  Description of Artificial Sequence: Synthetic oligonucleotide
uggaacuucaacaugucca

SEQ ID NO: 1031532 - RNA, 19 nt, Artificial Sequence
  Description of Artificial Sequence: Synthetic oligonucleotide
auauguuaugguuagagaa

SEQ ID NO: 1031533 - RNA, 19 nt, Artificial Sequence
  Description of Artificial Sequence: Synthetic oligonucleotide
ucagacgauaauuaggaga

SEQ ID NO: 1031534 - RNA, 19 nt, Artificial Sequence
  Description of Artificial Sequence: Synthetic oligonucleotide
uaaggaauccacucgaugu

SEQ ID NO: 1031535 - RNA, 19 nt, Artificial Sequence
  Description of Artificial Sequence: Synthetic oligonucleotide
ucuucgauagcauuuauua

SEQ ID NO: 1031536 - RNA, 19 nt, Artificial Sequence
  Description of Artificial Sequence: Synthetic oligonucleotide
uauuuauggauauauguua

SEQ ID NO: 1031537 - RNA, 19 nt, Artificial Sequence
  Description of Artificial Sequence: Synthetic oligonucleotide
uucgucuuaaaugugaaca

SEQ ID NO: 1031538 - RNA, 19 nt, Artificial Sequence
  Description of Artificial Sequence: Synthetic oligonucleotide
aauccaggaaucuaauagu

SEQ ID NO: 1031539 - RNA, 19 nt, Artificial Sequence
  Description of Artificial Sequence: Synthetic oligonucleotide
ucugaaacuucuucuauca

SEQ ID NO: 1031540 - RNA, 19 nt, Artificial Sequence
  Description of Artificial Sequence: Synthetic oligonucleotide
auauauguuaugguuagag

SEQ ID NO: 1031541 - RNA, 19 nt, Artificial Sequence
  Description of Artificial Sequence: Synthetic oligonucleotide
uguaugcccaacuaugacc

SEQ ID NO: 1031542 - RNA, 19 nt, Artificial Sequence
  Description of Artificial Sequence: Synthetic oligonucleotide
ugaaacuucuucuaucacu

SEQ ID NO: 1031543 - RNA, 19 nt, Artificial Sequence
  Description of Artificial Sequence: Synthetic oligonucleotide
uuagcagugggcuucccgg

SEQ ID NO: 1031544 - RNA, 19 nt, Artificial Sequence
  Description of Artificial Sequence: Synthetic oligonucleotide
cauuuaaggaauccacucg

SEQ ID NO: 1031545 - RNA, 19 nt, Artificial Sequence
  Description of Artificial Sequence: Synthetic oligonucleotide
uaaucagaagcaucgauuc

SEQ ID NO: 1031546 - RNA, 19 nt, Artificial Sequence
  Description of Artificial Sequence: Synthetic oligonucleotide
uaagacgucuuucucgugc

SEQ ID NO: 1031547 - RNA, 19 nt, Artificial Sequence
  Description of Artificial Sequence: Synthetic oligonucleotide
uuaugguuagagaagcaac

SEQ ID NO: 1031548 - RNA, 19 nt, Artificial Sequence
  Description of Artificial Sequence: Synthetic oligonucleotide
guaaaugacaccuggggac

SEQ ID NO: 1031549 - RNA, 19 nt, Artificial Sequence
  Description of Artificial Sequence: Synthetic oligonucleotide
acuuagacucgucaggguc

SEQ ID NO: 1031550 - RNA, 19 nt, Artificial Sequence
  Description of Artificial Sequence: Synthetic oligonucleotide
ucgauagcauuuauuagca

SEQ ID NO: 1031551 - RNA, 19 nt, Artificial Sequence
  Description of Artificial Sequence: Synthetic oligonucleotide
ugaaugcaaacauaucuga

SEQ ID NO: 1031552 - RNA, 19 nt, Artificial Sequence
  Description of Artificial Sequence: Synthetic oligonucleotide
auuuauuagcacugcagug

SEQ ID NO: 1031553 - RNA, 19 nt, Artificial Sequence
  Description of Artificial Sequence: Synthetic oligonucleotide
aggugaguaccugagaagc

SEQ ID NO: 1031554 - RNA, 19 nt, Artificial Sequence
  Description of Artificial Sequence: Synthetic oligonucleotide
ucuuggaagacguguagcc

SEQ ID NO: 1031555 - RNA, 19 nt, Artificial Sequence
  Description of Artificial Sequence: Synthetic oligonucleotide
uugaucagacgauaauuag

SEQ ID NO: 1031556 - RNA, 19 nt, Artificial Sequence
  Description of Artificial Sequence: Synthetic oligonucleotide
cucuaagacgucuuucucg

SEQ ID NO: 1031557 - RNA, 19 nt, Artificial Sequence
  Description of Artificial Sequence: Synthetic oligonucleotide
uaauagucacauuauguuc

SEQ ID NO: 1031558 - RNA, 19 nt, Artificial Sequence
  Description of Artificial Sequence: Synthetic oligonucleotide
uauauguuaugguuagaga

SEQ ID NO: 1031559 - RNA, 19 nt, Artificial Sequence
  Description of Artificial Sequence: Synthetic oligonucleotide
gugaagucgauguugauca

SEQ ID NO: 1031560 - RNA, 19 nt, Artificial Sequence
  Description of Artificial Sequence: Synthetic oligonucleotide
uuaaggaauccacucgaug

SEQ ID NO: 1031561 - RNA, 19 nt, Artificial Sequence
  Description of Artificial Sequence: Synthetic oligonucleotide
aagggguugcuuugcuucc

SEQ ID NO: 1031562 - RNA, 19 nt, Artificial Sequence
  Description of Artificial Sequence: Synthetic oligonucleotide
aaaggacgugaacugguag

SEQ ID NO: 1031563 - RNA, 19 nt, Artificial Sequence
  Description of Artificial Sequence: Synthetic oligonucleotide
guagucauauucuccuucg

SEQ ID NO: 1031564 - RNA, 19 nt, Artificial Sequence
  Description of Artificial Sequence: Synthetic oligonucleotide
ucaagggcuugcuacaaag

SEQ ID NO: 1031565 - RNA, 19 nt, Artificial Sequence
  Description of Artificial Sequence: Synthetic oligonucleotide
aauguucuucacaucgugg

SEQ ID NO: 1031566 - RNA, 19 nt, Artificial Sequence
  Description of Artificial Sequence: Synthetic oligonucleotide
ugcgguucgucuuaaaugu

SEQ ID NO: 1031567 - RNA, 19 nt, Artificial Sequence
  Description of Artificial Sequence: Synthetic oligonucleotide
uaaacauuggaaucuuggu

SEQ ID NO: 1031568 - RNA, 19 nt, Artificial Sequence
  Description of Artificial Sequence: Synthetic oligonucleotide
uuuagcagugggcuucccg

SEQ ID NO: 1031569 - RNA, 19 nt, Artificial Sequence
  Description of Artificial Sequence: Synthetic oligonucleotide
uaauuaggagaauugcggu

SEQ ID NO: 1031570 - RNA, 19 nt, Artificial Sequence
  Description of Artificial Sequence: Synthetic oligonucleotide
aaaaccguggguuccaguu

SEQ ID NO: 1031571 - RNA, 19 nt, Artificial Sequence
  Description of Artificial Sequence: Synthetic oligonucleotide
acauuggaaucuuggugcc

SEQ ID NO: 1031572 - RNA, 19 nt, Artificial Sequence
  Description of Artificial Sequence: Synthetic oligonucleotide
aucgauucccuucacuguc

SEQ ID NO: 1031573 - RNA, 19 nt, Artificial Sequence
  Description of Artificial Sequence: Synthetic oligonucleotide
gucgauguugaucagacga

SEQ ID NO: 1031574 - RNA, 19 nt, Artificial Sequence
  Description of Artificial Sequence: Synthetic oligonucleotide
ucauuggucacguagucau

SEQ ID NO: 1031575 - RNA, 19 nt, Artificial Sequence
  Description of Artificial Sequence: Synthetic oligonucleotide
ucccucauuggucacguag

SEQ ID NO: 1031576 - RNA, 19 nt, Artificial Sequence
  Description of Artificial Sequence: Synthetic oligonucleotide
aaggacgugaacugguaga

SEQ ID NO: 1031577 - RNA, 19 nt, Artificial Sequence
  Description of Artificial Sequence: Synthetic oligonucleotide
uuagccacugcgaggacgc

SEQ ID NO: 1031578 - RNA, 19 nt, Artificial Sequence
  Description of Artificial Sequence: Synthetic oligonucleotide
aauuaggagaauugcgguu

SEQ ID NO: 1031579 - RNA, 19 nt, Artificial Sequence
  Description of Artificial Sequence: Synthetic oligonucleotide
uugcgguucgucuuaaaug

SEQ ID NO: 1031580 - RNA, 19 nt, Artificial Sequence
  Description of Artificial Sequence: Synthetic oligonucleotide
ggauauauguuaugguuag

SEQ ID NO: 1031581 - RNA, 19 nt, Artificial Sequence
  Description of Artificial Sequence: Synthetic oligonucleotide
gauaccaccuuuaugccac

SEQ ID NO: 1031582 - RNA, 19 nt, Artificial Sequence
  Description of Artificial Sequence: Synthetic oligonucleotide
uccauugaugguaagccuc

SEQ ID NO: 1031583 - RNA, 19 nt, Artificial Sequence
  Description of Artificial Sequence: Synthetic oligonucleotide
gacgugaacugguagaaga

SEQ ID NO: 1031584 - RNA, 19 nt, Artificial Sequence
  Description of Artificial Sequence: Synthetic oligonucleotide
agacguguagccuucuuug

SEQ ID NO: 1031585 - RNA, 19 nt, Artificial Sequence
  Description of Artificial Sequence: Synthetic oligonucleotide
ucacguagucauauucucc

SEQ ID NO: 1031586 - RNA, 19 nt, Artificial Sequence
  Description of Artificial Sequence: Synthetic oligonucleotide
aucacuuuagcagugggcu

SEQ ID NO: 1031587 - RNA, 19 nt, Artificial Sequence
  Description of Artificial Sequence: Synthetic oligonucleotide
acuaugugccuugauagag

SEQ ID NO: 1031588 - RNA, 19 nt, Artificial Sequence
  Description of Artificial Sequence: Synthetic oligonucleotide
cuucgauagcauuuauuag

SEQ ID NO: 1031589 - RNA, 19 nt, Artificial Sequence
  Description of Artificial Sequence: Synthetic oligonucleotide
aacuaugugccuugauaga

SEQ ID NO: 1031590 - RNA, 19 nt, Artificial Sequence
  Description of Artificial Sequence: Synthetic oligonucleotide
ugagcggaggcacagugcu

SEQ ID NO: 1031591 - RNA, 19 nt, Artificial Sequence
  Description of Artificial Sequence: Synthetic oligonucleotide
ucuaucacuuuagcagugg

SEQ ID NO: 1031592 - RNA, 19 nt, Artificial Sequence
  Description of Artificial Sequence: Synthetic oligonucleotide
ucgucuuaaaugugaacac

SEQ ID NO: 1031593 - RNA, 19 nt, Artificial Sequence
  Description of Artificial Sequence: Synthetic oligonucleotide
cagacgauaauuaggagaa

SEQ ID NO: 1031594 - RNA, 19 nt, Artificial Sequence
  Description of Artificial Sequence: Synthetic oligonucleotide
ugugagcggaggcacagug

SEQ ID NO: 1031595 - RNA, 19 nt, Artificial Sequence
  Description of Artificial Sequence: Synthetic oligonucleotide
gaagcaucgauucccuuca

SEQ ID NO: 1031596 - RNA, 19 nt, Artificial Sequence
  Description of Artificial Sequence: Synthetic oligonucleotide
ucacauugugcagagguga

SEQ ID NO: 1031597 - RNA, 19 nt, Artificial Sequence
  Description of Artificial Sequence: Synthetic oligonucleotide
gauuugcacaagcagccac

SEQ ID NO: 1031598 - RNA, 19 nt, Artificial Sequence
  Description of Artificial Sequence: Synthetic oligonucleotide
gaugguaagccucuuggaa

SEQ ID NO: 1031599 - RNA, 19 nt, Artificial Sequence
  Description of Artificial Sequence: Synthetic oligonucleotide
uucuaucacuuuagcagug

SEQ ID NO: 1031600 - RNA, 19 nt, Artificial Sequence
  Description of Artificial Sequence: Synthetic oligonucleotide
uccgugaagucgauguuga

SEQ ID NO: 1031601 - RNA, 19 nt, Artificial Sequence
  Description of Artificial Sequence: Synthetic oligonucleotide
aagacgucuuucucgugcu

SEQ ID NO: 1031602 - RNA, 19 nt, Artificial Sequence
  Description of Artificial Sequence: Synthetic oligonucleotide
ugggaacccauuuaaggaa

SEQ ID NO: 1031603 - RNA, 19 nt, Artificial Sequence
  Description of Artificial Sequence: Synthetic oligonucleotide
ugagccguccaacuuuaug

SEQ ID NO: 1031604 - RNA, 19 nt, Artificial Sequence
  Description of Artificial Sequence: Synthetic oligonucleotide
agauuaaaauccccacgca

SEQ ID NO: 1031605 - RNA, 19 nt, Artificial Sequence
  Description of Artificial Sequence: Synthetic oligonucleotide
gguaagaucacagugguaa

SEQ ID NO: 1031606 - RNA, 19 nt, Artificial Sequence
  Description of Artificial Sequence: Synthetic oligonucleotide
auuagcacugcaguggagu

SEQ ID NO: 1031607 - RNA, 19 nt, Artificial Sequence
  Description of Artificial Sequence: Synthetic oligonucleotide
ucggaguccuucuugcgcc

SEQ ID NO: 1031608 - RNA, 19 nt, Artificial Sequence
  Description of Artificial Sequence: Synthetic oligonucleotide
gaugagauacucagcagca

SEQ ID NO: 1031609 - RNA, 19 nt, Artificial Sequence
  Description of Artificial Sequence: Synthetic oligonucleotide
gaggagagcaccuguggug

SEQ ID NO: 1031610 - RNA, 19 nt, Artificial Sequence
  Description of Artificial Sequence: Synthetic oligonucleotide
acgauaauuaggagaauug

SEQ ID NO: 1031611 - RNA, 19 nt, Artificial Sequence
  Description of Artificial Sequence: Synthetic oligonucleotide
auuugagggagugcagugg

SEQ ID NO: 1031612 - RNA, 19 nt, Artificial Sequence
  Description of Artificial Sequence: Synthetic oligonucleotide
uggaccugacgcaagcuac

SEQ ID NO: 1031613 - RNA, 19 nt, Artificial Sequence
  Description of Artificial Sequence: Synthetic oligonucleotide
ucuugaggagagcaccugu

SEQ ID NO: 1031614 - RNA, 19 nt, Artificial Sequence
  Description of Artificial Sequence: Synthetic oligonucleotide
uccaaccugggcaaucaca

SEQ ID NO: 1031615 - RNA, 19 nt, Artificial Sequence
  Description of Artificial Sequence: Synthetic oligonucleotide
uguccgagcacccguaauc

SEQ ID NO: 1031616 - RNA, 19 nt, Artificial Sequence
  Description of Artificial Sequence: Synthetic oligonucleotide
agucauauucuccuucgaa

SEQ ID NO: 1031617 - RNA, 19 nt, Artificial Sequence
  Description of Artificial Sequence: Synthetic oligonucleotide
agcuacccacucuaagacg

SEQ ID NO: 1031618 - RNA, 19 nt, Artificial Sequence
  Description of Artificial Sequence: Synthetic oligonucleotide
auugcgguucgucuuaaau

SEQ ID NO: 1031619 - RNA, 19 nt, Artificial Sequence
  Description of Artificial Sequence: Synthetic oligonucleotide
caagggcuugcuacaaagg

SEQ ID NO: 1031620 - RNA, 19 nt, Artificial Sequence
  Description of Artificial Sequence: Synthetic oligonucleotide
uuuaugccacgucucucca

SEQ ID NO: 1031621 - RNA, 19 nt, Artificial Sequence
  Description of Artificial Sequence: Synthetic oligonucleotide
gaugaauuugagggagugc

SEQ ID NO: 1031622 - RNA, 19 nt, Artificial Sequence
  Description of Artificial Sequence: Synthetic oligonucleotide
uuagacucgucaggguccg

SEQ ID NO: 1031623 - RNA, 19 nt, Artificial Sequence
  Description of Artificial Sequence: Synthetic oligonucleotide
aaagcagggugugagccgu

SEQ ID NO: 1031624 - RNA, 19 nt, Artificial Sequence
  Description of Artificial Sequence: Synthetic oligonucleotide
aucagacgauaauuaggag

SEQ ID NO: 1031625 - RNA, 19 nt, Artificial Sequence
  Description of Artificial Sequence: Synthetic oligonucleotide
cauaucugaaacuucuucu

SEQ ID NO: 1031626 - RNA, 19 nt, Artificial Sequence
  Description of Artificial Sequence: Synthetic oligonucleotide
aggaaucuaauagucacau

SEQ ID NO: 1031627 - RNA, 19 nt, Artificial Sequence
  Description of Artificial Sequence: Synthetic oligonucleotide
ccaggaaucuaauagucac

SEQ ID NO: 1031628 - RNA, 19 nt, Artificial Sequence
  Description of Artificial Sequence: Synthetic oligonucleotide
ugcuacaaaggagaagccu

SEQ ID NO: 1031629 - RNA, 19 nt, Artificial Sequence
  Description of Artificial Sequence: Synthetic oligonucleotide
ucgauguugaucagacgau

SEQ ID NO: 1031630 - RNA, 19 nt, Artificial Sequence
  Description of Artificial Sequence: Synthetic oligonucleotide
accaccuuuaugccacguc

SEQ ID NO: 1031631 - RNA, 19 nt, Artificial Sequence
  Description of Artificial Sequence: Synthetic oligonucleotide
gcaucgauucccuucacug

SEQ ID NO: 1031632 - RNA, 19 nt, Artificial Sequence
  Description of Artificial Sequence: Synthetic oligonucleotide
cuugguguccacguggaug

SEQ ID NO: 1031633 - RNA, 19 nt, Artificial Sequence
  Description of Artificial Sequence: Synthetic oligonucleotide
cuuugcuuccggcugcggc

SEQ ID NO: 1031634 - RNA, 19 nt, Artificial Sequence
  Description of Artificial Sequence: Synthetic oligonucleotide
auuggaaucuuggugccgu

SEQ ID NO: 1031635 - RNA, 19 nt, Artificial Sequence
  Description of Artificial Sequence: Synthetic oligonucleotide
cacucgauguucaggcacc

SEQ ID NO: 1031636 - RNA, 19 nt, Artificial Sequence
  Description of Artificial Sequence: Synthetic oligonucleotide
auauguguaugcccaacua

SEQ ID NO: 1031637 - RNA, 19 nt, Artificial Sequence
  Description of Artificial Sequence: Synthetic oligonucleotide
guaaacuuguggaacuuca

SEQ ID NO: 1031638 - RNA, 19 nt, Artificial Sequence
  Description of Artificial Sequence: Synthetic oligonucleotide
ugagggagugcagugguac

SEQ ID NO: 1031639 - RNA, 19 nt, Artificial Sequence
  Description of Artificial Sequence: Synthetic oligonucleotide
aggagaauugcgguucguc

SEQ ID NO: 1031640 - RNA, 19 nt, Artificial Sequence
  Description of Artificial Sequence: Synthetic oligonucleotide
cuucauugaguuauuauau

SEQ ID NO: 1031641 - RNA, 19 nt, Artificial Sequence
  Description of Artificial Sequence: Synthetic oligonucleotide
agucgauguugaucagacg

SEQ ID NO: 1031642 - RNA, 19 nt, Artificial Sequence
  Description of Artificial Sequence: Synthetic oligonucleotide
cccacgauguacuggagcg

SEQ ID NO: 1031643 - RNA, 19 nt, Artificial Sequence
  Description of Artificial Sequence: Synthetic oligonucleotide
cucggaguccuucuugcgc

SEQ ID NO: 1031644 - RNA, 19 nt, Artificial Sequence
  Description of Artificial Sequence: Synthetic oligonucleotide
aauccccacgcagcucugc

SEQ ID NO: 1031645 - RNA, 19 nt, Artificial Sequence
  Description of Artificial Sequence: Synthetic oligonucleotide
aggaauccacucgauguuc

SEQ ID NO: 1031646 - RNA, 19 nt, Artificial Sequence
  Description of Artificial Sequence: Synthetic oligonucleotide
gucacguagucauauucuc

SEQ ID NO: 1031647 - RNA, 19 nt, Artificial Sequence
  Description of Artificial Sequence: Synthetic oligonucleotide
uggacgcugauuugcacaa

SEQ ID NO: 1031648 - RNA, 19 nt, Artificial Sequence
  Description of Artificial Sequence: Synthetic oligonucleotide
aguugggugugauggagau

SEQ ID NO: 1031649 - RNA, 19 nt, Artificial Sequence
  Description of Artificial Sequence: Synthetic oligonucleotide
uuagcacugcaguggaguc

SEQ ID NO: 1031650 - RNA, 19 nt, Artificial Sequence
  Description of Artificial Sequence: Synthetic oligonucleotide
accuuuaugccacgucucu

SEQ ID NO: 1031651 - RNA, 19 nt, Artificial Sequence
  Description of Artificial Sequence: Synthetic oligonucleotide
gaguuauuauauaugugua

SEQ ID NO: 1031652 - RNA, 19 nt, Artificial Sequence
  Description of Artificial Sequence: Synthetic oligonucleotide
cacacaaccaaagaggucu

SEQ ID NO: 1031653 - RNA, 19 nt, Artificial Sequence
  Description of Artificial Sequence: Synthetic oligonucleotide
agcauggaaggguacugga

SEQ ID NO: 1031654 - RNA, 19 nt, Artificial Sequence
  Description of Artificial Sequence: Synthetic oligonucleotide
agcacccguaaucaguggu

SEQ ID NO: 1031655 - RNA, 19 nt, Artificial Sequence
  Description of Artificial Sequence: Synthetic oligonucleotide
gugguaaaugacaccuggg

SEQ ID NO: 1031656 - RNA, 19 nt, Artificial Sequence
  Description of Artificial Sequence: Synthetic oligonucleotide
auguugaucagacgauaau

SEQ ID NO: 1031657 - RNA, 19 nt, Artificial Sequence
  Description of Artificial Sequence: Synthetic oligonucleotide
guugaucagacgauaauua

SEQ ID NO: 1031658 - RNA, 19 nt, Artificial Sequence
  Description of Artificial Sequence: Synthetic oligonucleotide
ucgauucccuucacuguca

SEQ ID NO: 1031659 - RNA, 19 nt, Artificial Sequence
  Description of Artificial Sequence: Synthetic oligonucleotide
ccauuuaaggaauccacuc

SEQ ID NO: 1031660 - RNA, 19 nt, Artificial Sequence
  Description of Artificial Sequence: Synthetic oligonucleotide
acuguaccccaccacgcug

SEQ ID NO: 1031661 - RNA, 19 nt, Artificial Sequence
  Description of Artificial Sequence: Synthetic oligonucleotide
guugcugucugugagcgga

SEQ ID NO: 1031662 - RNA, 19 nt, Artificial Sequence
  Description of Artificial Sequence: Synthetic oligonucleotide
ugaguaccugagaagccau

SEQ ID NO: 1031663 - RNA, 19 nt, Artificial Sequence
  Description of Artificial Sequence: Synthetic oligonucleotide
aguaagggguugcuuugcu

SEQ ID NO: 1031664 - RNA, 19 nt, Artificial Sequence
  Description of Artificial Sequence: Synthetic oligonucleotide
gauguugaucagacgauaa

SEQ ID NO: 1031665 - RNA, 19 nt, Artificial Sequence
  Description of Artificial Sequence: Synthetic oligonucleotide
ugaagucgauguugaucag

SEQ ID NO: 1031666 - RNA, 19 nt, Artificial Sequence
  Description of Artificial Sequence: Synthetic oligonucleotide
uucuugcgcccacuguacc

SEQ ID NO: 1031667 - RNA, 19 nt, Artificial Sequence
  Description of Artificial Sequence: Synthetic oligonucleotide
ggcaaucacacaaccaaag

SEQ ID NO: 1031668 - RNA, 19 nt, Artificial Sequence
  Description of Artificial Sequence: Synthetic oligonucleotide
agaauugcgguucgucuua

SEQ ID NO: 1031669 - RNA, 19 nt, Artificial Sequence
  Description of Artificial Sequence: Synthetic oligonucleotide
cacacgggcagcacucugc

SEQ ID NO: 1031670 - RNA, 19 nt, Artificial Sequence
  Description of Artificial Sequence: Synthetic oligonucleotide
ugugagccguccaacuuua

SEQ ID NO: 1031671 - RNA, 19 nt, Artificial Sequence
  Description of Artificial Sequence: Synthetic oligonucleotide
cagugguaccacccggucg

SEQ ID NO: 1031672 - RNA, 19 nt, Artificial Sequence
  Description of Artificial Sequence: Synthetic oligonucleotide
cugaaacuucuucuaucac

SEQ ID NO: 1031673 - RNA, 19 nt, Artificial Sequence
  Description of Artificial Sequence: Synthetic oligonucleotide
uuucuucgauagcauuuau

SEQ ID NO: 1031674 - RNA, 19 nt, Artificial Sequence
  Description of Artificial Sequence: Synthetic oligonucleotide
guguaugcccaacuaugac

SEQ ID NO: 1031675 - RNA, 19 nt, Artificial Sequence
  Description of Artificial Sequence: Synthetic oligonucleotide
cuucuaucacuuuagcagu

SEQ ID NO: 1031676 - RNA, 19 nt, Artificial Sequence
  Description of Artificial Sequence: Synthetic oligonucleotide
cugauguuagccacugcga

SEQ ID NO: 1031677 - RNA, 19 nt, Artificial Sequence
  Description of Artificial Sequence: Synthetic oligonucleotide
uuggccaagauaccaccuu

SEQ ID NO: 1031678 - RNA, 19 nt, Artificial Sequence
  Description of Artificial Sequence: Synthetic oligonucleotide
agcaucgauucccuucacu

SEQ ID NO: 1031679 - RNA, 19 nt, Artificial Sequence
  Description of Artificial Sequence: Synthetic oligonucleotide
caccucugauguuagccac

SEQ ID NO: 1031680 - RNA, 19 nt, Artificial Sequence
  Description of Artificial Sequence: Synthetic oligonucleotide
gccaccauagccauauaag

SEQ ID NO: 1031681 - RNA, 19 nt, Artificial Sequence
  Description of Artificial Sequence: Synthetic oligonucleotide
aggucgugaagcugcagaa

SEQ ID NO: 1031682 - RNA, 19 nt, Artificial Sequence
  Description of Artificial Sequence: Synthetic oligonucleotide
cuugcgcccacuguacccc

SEQ ID NO: 1031683 - RNA, 19 nt, Artificial Sequence
  Description of Artificial Sequence: Synthetic oligonucleotide
ucuggacgcugauuugcac

SEQ ID NO: 1031684 - RNA, 19 nt, Artificial Sequence
  Description of Artificial Sequence: Synthetic oligonucleotide
cuugcuguccgagcacccg

SEQ ID NO: 1031685 - RNA, 19 nt, Artificial Sequence
  Description of Artificial Sequence: Synthetic oligonucleotide
cuggacgcugauuugcaca

SEQ ID NO: 1031686 - RNA, 19 nt, Artificial Sequence
  Description of Artificial Sequence: Synthetic oligonucleotide
uccgagcacccguaaucag

SEQ ID NO: 1031687 - RNA, 19 nt, Artificial Sequence
  Description of Artificial Sequence: Synthetic oligonucleotide
gugaguaccugagaagcca

SEQ ID NO: 1031688 - RNA, 19 nt, Artificial Sequence
  Description of Artificial Sequence: Synthetic oligonucleotide
acugcgaggacgccaccca

SEQ ID NO: 1031689 - RNA, 19 nt, Artificial Sequence
  Description of Artificial Sequence: Synthetic oligonucleotide
uugcuguccgagcacccgu

SEQ ID NO: 1031690 - RNA, 19 nt, Artificial Sequence
  Description of Artificial Sequence: Synthetic oligonucleotide
cacguagucauauucuccu

SEQ ID NO: 1031691 - RNA, 19 nt, Artificial Sequence
  Description of Artificial Sequence: Synthetic oligonucleotide
ugaaaaccguggguuccag

SEQ ID NO: 1031692 - RNA, 19 nt, Artificial Sequence
  Description of Artificial Sequence: Synthetic oligonucleotide
cauuggaaucuuggugccg

SEQ ID NO: 1031693 - RNA, 19 nt, Artificial Sequence
  Description of Artificial Sequence: Synthetic oligonucleotide
caggaaucuaauagucaca

SEQ ID NO: 1031694 - RNA, 19 nt, Artificial Sequence
  Description of Artificial Sequence: Synthetic oligonucleotide
cacccguaaucaguggucc

SEQ ID NO: 1031695 - RNA, 19 nt, Artificial Sequence
  Description of Artificial Sequence: Synthetic oligonucleotide
agcggaggcacagugcuca

SEQ ID NO: 1031696 - RNA, 19 nt, Artificial Sequence
  Description of Artificial Sequence: Synthetic oligonucleotide
guccgugaagucgauguug

SEQ ID NO: 1031697 - RNA, 19 nt, Artificial Sequence
  Description of Artificial Sequence: Synthetic oligonucleotide
gaggucucccauuuauuua

SEQ ID NO: 1031698 - RNA, 19 nt, Artificial Sequence
  Description of Artificial Sequence: Synthetic oligonucleotide
ccugacgcaagcuacccac

SEQ ID NO: 1031699 - RNA, 19 nt, Artificial Sequence
  Description of Artificial Sequence: Synthetic oligonucleotide
caccuuuaugccacgucuc

SEQ ID NO: 1031700 - RNA, 19 nt, Artificial Sequence
  Description of Artificial Sequence: Synthetic oligonucleotide
ucacacgggcagcacucug

SEQ ID NO: 1031701 - RNA, 19 nt, Artificial Sequence
  Description of Artificial Sequence: Synthetic oligonucleotide
agggugugagccguccaac

SEQ ID NO: 1031702 - RNA, 19 nt, Artificial Sequence
  Description of Artificial Sequence: Synthetic oligonucleotide
auaccaccuuuaugccacg

SEQ ID NO: 1031703 - RNA, 19 nt, Artificial Sequence
  Description of Artificial Sequence: Synthetic oligonucleotide
gagcacccguaaucagugg

SEQ ID NO: 1031704 - RNA, 19 nt, Artificial Sequence
  Description of Artificial Sequence: Synthetic oligonucleotide
cgauaauuaggagaauugc

SEQ ID NO: 1031705 - RNA, 19 nt, Artificial Sequence
  Description of Artificial Sequence: Synthetic oligonucleotide
gcaagcuacccacucuaag

SEQ ID NO: 1031706 - RNA, 19 nt, Artificial Sequence
  Description of Artificial Sequence: Synthetic oligonucleotide
gacgauaauuaggagaauu

SEQ ID NO: 1031707 - RNA, 19 nt, Artificial Sequence
  Description of Artificial Sequence: Synthetic oligonucleotide
ggagguagcacaagaccag

SEQ ID NO: 1031708 - RNA, 19 nt, Artificial Sequence
  Description of Artificial Sequence: Synthetic oligonucleotide
aauugcgguucgucuuaaa

SEQ ID NO: 1031709 - RNA, 19 nt, Artificial Sequence
  Description of Artificial Sequence: Synthetic oligonucleotide
acguccagagggaaggucu

SEQ ID NO: 1031710 - RNA, 19 nt, Artificial Sequence
  Description of Artificial Sequence: Synthetic oligonucleotide
cucgucaggguccgugaag

SEQ ID NO: 1031711 - RNA, 19 nt, Artificial Sequence
  Description of Artificial Sequence: Synthetic oligonucleotide
gaccugacgcaagcuaccc

SEQ ID NO: 1031712 - RNA, 19 nt, Artificial Sequence
  Description of Artificial Sequence: Synthetic oligonucleotide
acucgauguucaggcaccg

SEQ ID NO: 1031713 - RNA, 19 nt, Artificial Sequence
  Description of Artificial Sequence: Synthetic oligonucleotide
cacucuaagacgucuuucu

SEQ ID NO: 1031714 - RNA, 19 nt, Artificial Sequence
  Description of Artificial Sequence: Synthetic oligonucleotide
ugaggguuucugugacugu

SEQ ID NO: 1031715 - RNA, 19 nt, Artificial Sequence
  Description of Artificial Sequence: Synthetic oligonucleotide
gucgucguggucagcagug

SEQ ID NO: 1031716 - RNA, 19 nt, Artificial Sequence
  Description of Artificial Sequence: Synthetic oligonucleotide
acgcaagcuacccacucua

SEQ ID NO: 1031717 - RNA, 19 nt, Artificial Sequence
  Description of Artificial Sequence: Synthetic oligonucleotide
agcguggcgaugaauuuga

SEQ ID NO: 1031718 - RNA, 19 nt, Artificial Sequence
  Description of Artificial Sequence: Synthetic oligonucleotide
gacgccacccaugugucuc

SEQ ID NO: 1031719 - RNA, 19 nt, Artificial Sequence
  Description of Artificial Sequence: Synthetic oligonucleotide
guaaucagaagcaucgauu

SEQ ID NO: 1031720 - RNA, 19 nt, Artificial Sequence
  Description of Artificial Sequence: Synthetic oligonucleotide
ggugccguccuugcuaggg

SEQ ID NO: 1031721 - RNA, 19 nt, Artificial Sequence
  Description of Artificial Sequence: Synthetic oligonucleotide
gagaauugcgguucgucuu

SEQ ID NO: 1031722 - RNA, 19 nt, Artificial Sequence
  Description of Artificial Sequence: Synthetic oligonucleotide
cuaagacgucuuucucgug

SEQ ID NO: 1031723 - RNA, 19 nt, Artificial Sequence
  Description of Artificial Sequence: Synthetic oligonucleotide
gacucgucaggguccguga

SEQ ID NO: 1031724 - RNA, 19 nt, Artificial Sequence
  Description of Artificial Sequence: Synthetic oligonucleotide
ugguaccacccggucgucg

SEQ ID NO: 1031725 - RNA, 19 nt, Artificial Sequence
  Description of Artificial Sequence: Synthetic oligonucleotide
ugguaagaucacaguggua

SEQ ID NO: 1031726 - RNA, 19 nt, Artificial Sequence
  Description of Artificial Sequence: Synthetic oligonucleotide
cugggcaaucacacaacca

SEQ ID NO: 1031727 - RNA, 19 nt, Artificial Sequence
  Description of Artificial Sequence: Synthetic oligonucleotide
ccaggcaugaccaauggua

SEQ ID NO: 1031728 - RNA, 19 nt, Artificial Sequence
  Description of Artificial Sequence: Synthetic oligonucleotide
uucccggccccauggccag

SEQ ID NO: 1031729 - RNA, 19 nt, Artificial Sequence
  Description of Artificial Sequence: Synthetic oligonucleotide
gcuacaaaggagaagccua

SEQ ID NO: 1031730 - RNA, 19 nt, Artificial Sequence
  Description of Artificial Sequence: Synthetic oligonucleotide
cuucccggccccauggcca

SEQ ID NO: 1031731 - RNA, 19 nt, Artificial Sequence
  Description of Artificial Sequence: Synthetic oligonucleotide
aggacgccacccauguguc

SEQ ID NO: 1031732 - RNA, 19 nt, Artificial Sequence
  Description of Artificial Sequence: Synthetic oligonucleotide
ccugggcaaucacacaacc

SEQ ID NO: 1031733 - RNA, 19 nt, Artificial Sequence
  Description of Artificial Sequence: Synthetic oligonucleotide
ugguaaacuuguggaacuu

SEQ ID NO: 1031734 - RNA, 19 nt, Artificial Sequence
  Description of Artificial Sequence: Synthetic oligonucleotide
ggaagcuggaccugacgca

SEQ ID NO: 1031735 - RNA, 19 nt, Artificial Sequence
  Description of Artificial Sequence: Synthetic oligonucleotide
ggagaauugcgguucgucu

SEQ ID NO: 1031736 - RNA, 19 nt, Artificial Sequence
  Description of Artificial Sequence: Synthetic oligonucleotide
ggugaguaccugagaagcc

SEQ ID NO: 1031737 - RNA, 19 nt, Artificial Sequence
  Description of Artificial Sequence: Synthetic oligonucleotide
cgugcuaugaaugcaaaca

SEQ ID NO: 1031738 - RNA, 19 nt, Artificial Sequence
  Description of Artificial Sequence: Synthetic oligonucleotide
agaucucggaguccuucuu

SEQ ID NO: 1031739 - RNA, 19 nt, Artificial Sequence
  Description of Artificial Sequence: Synthetic oligonucleotide
accugacgcaagcuaccca

SEQ ID NO: 1031740 - RNA, 19 nt, Artificial Sequence
  Description of Artificial Sequence: Synthetic oligonucleotide
cacugcgaggacgccaccc

SEQ ID NO: 1031741 - RNA, 19 nt, Artificial Sequence
  Description of Artificial Sequence: Synthetic oligonucleotide
uguuagccacugcgaggac

SEQ ID NO: 1031742 - RNA, 19 nt, Artificial Sequence
  Description of Artificial Sequence: Synthetic oligonucleotide
acccguaaucaguggucca

SEQ ID NO: 1031743 - RNA, 19 nt, Artificial Sequence
  Description of Artificial Sequence: Synthetic oligonucleotide
cuaugugccuugauagagu

SEQ ID NO: 1031744 - RNA, 19 nt, Artificial Sequence
  Description of Artificial Sequence: Synthetic oligonucleotide
ggcacagugcucacacggg

SEQ ID NO: 1031745 - RNA, 19 nt, Artificial Sequence
  Description of Artificial Sequence: Synthetic oligonucleotide
gguaaucagaagcaucgau

SEQ ID NO: 1031746 - RNA, 19 nt, Artificial Sequence
  Description of Artificial Sequence: Synthetic oligonucleotide
gcuugcuacaaaggagaag

SEQ ID NO: 1031747 - RNA, 19 nt, Artificial Sequence
  Description of Artificial Sequence: Synthetic oligonucleotide
ccacucgauguucaggcac

SEQ ID NO: 1031748 - RNA, 19 nt, Artificial Sequence
  Description of Artificial Sequence: Synthetic oligonucleotide
caucguggagguagcacaa

SEQ ID NO: 1031749 - RNA, 19 nt, Artificial Sequence
  Description of Artificial Sequence: Synthetic oligonucleotide
gacgcaagcuacccacucu

SEQ ID NO: 1031750 - RNA, 19 nt, Artificial Sequence
  Description of Artificial Sequence: Synthetic oligonucleotide
uggagccuccauugauggu

SEQ ID NO: 1031751 - RNA, 19 nt, Artificial Sequence
  Description of Artificial Sequence: Synthetic oligonucleotide
gugacuguuggaggcgcug

SEQ ID NO: 1031752 - RNA, 19 nt, Artificial Sequence
  Description of Artificial Sequence: Synthetic oligonucleotide
acguagucauauucuccuu

SEQ ID NO: 1031753 - RNA, 19 nt, Artificial Sequence
  Description of Artificial Sequence: Synthetic oligonucleotide
acgcugauuugcacaagca

SEQ ID NO: 1031754 - RNA, 19 nt, Artificial Sequence
  Description of Artificial Sequence: Synthetic oligonucleotide
gugagcggaggcacagugc

SEQ ID NO: 1031755 - RNA, 19 nt, Artificial Sequence
  Description of Artificial Sequence: Synthetic oligonucleotide
acucgucaggguccgugaa

SEQ ID NO: 1031756 - RNA, 19 nt, Artificial Sequence
  Description of Artificial Sequence: Synthetic oligonucleotide
caucgauucccuucacugu

SEQ ID NO: 1031757 - RNA, 19 nt, Artificial Sequence
  Description of Artificial Sequence: Synthetic oligonucleotide
ugccacgucucuccauauu

SEQ ID NO: 1031758 - RNA, 19 nt, Artificial Sequence
  Description of Artificial Sequence: Synthetic oligonucleotide
ugcggcccacgauguacug

SEQ ID NO: 1031759 - RNA, 19 nt, Artificial Sequence
  Description of Artificial Sequence: Synthetic oligonucleotide
gaaaaccguggguuccagu

SEQ ID NO: 1031760 - RNA, 19 nt, Artificial Sequence
  Description of Artificial Sequence: Synthetic oligonucleotide
cgagcacccguaaucagug

SEQ ID NO: 1031761 - RNA, 19 nt, Artificial Sequence
  Description of Artificial Sequence: Synthetic oligonucleotide
uaggagaauugcgguucgu

SEQ ID NO: 1031762 - RNA, 19 nt, Artificial Sequence
  Description of Artificial Sequence: Synthetic oligonucleotide
cugaaaaccguggguucca

SEQ ID NO: 1031763 - RNA, 19 nt, Artificial Sequence
  Description of Artificial Sequence: Synthetic oligonucleotide
cuccauugaugguaagccu

SEQ ID NO: 1031764 - RNA, 19 nt, Artificial Sequence
  Description of Artificial Sequence: Synthetic oligonucleotide
ggaauccacucgauguuca

SEQ ID NO: 1031765 - RNA, 19 nt, Artificial Sequence
  Description of Artificial Sequence: Synthetic oligonucleotide
cuggaccugacgcaagcua

SEQ ID NO: 1031766 - RNA, 19 nt, Artificial Sequence
  Description of Artificial Sequence: Synthetic oligonucleotide
cauauucuccuucgaaguu

SEQ ID NO: 1031767 - RNA, 19 nt, Artificial Sequence
  Description of Artificial Sequence: Synthetic oligonucleotide
uaccaccuuuaugccacgu

SEQ ID NO: 1031768 - RNA, 19 nt, Artificial Sequence
  Description of Artificial Sequence: Synthetic oligonucleotide
ccacguggaugaguaaggg

SEQ ID NO: 1031769 - RNA, 19 nt, Artificial Sequence
  Description of Artificial Sequence: Synthetic oligonucleotide
cccguaaucagugguccag

SEQ ID NO: 1031770 - RNA, 19 nt, Artificial Sequence
  Description of Artificial Sequence: Synthetic oligonucleotide
gguucgucuuaaaugugaa

SEQ ID NO: 1031771 - RNA, 19 nt, Artificial Sequence
  Description of Artificial Sequence: Synthetic oligonucleotide
agccuccauugaugguaag

SEQ ID NO: 1031772 - RNA, 19 nt, Artificial Sequence
  Description of Artificial Sequence: Synthetic oligonucleotide
guaccacccggucgucgug

SEQ ID NO: 1031773 - RNA, 19 nt, Artificial Sequence
  Description of Artificial Sequence: Synthetic oligonucleotide
cuuggaagacguguagccu

SEQ ID NO: 1031774 - RNA, 19 nt, Artificial Sequence
  Description of Artificial Sequence: Synthetic oligonucleotide
ggaccugacgcaagcuacc

SEQ ID NO: 1031775 - RNA, 19 nt, Artificial Sequence
  Description of Artificial Sequence: Synthetic oligonucleotide
gucuggacgcugauuugca

SEQ ID NO: 1031776 - RNA, 19 nt, Artificial Sequence
  Description of Artificial Sequence: Synthetic oligonucleotide
uugcgcccacuguacccca

SEQ ID NO: 1031777 - RNA, 19 nt, Artificial Sequence
  Description of Artificial Sequence: Synthetic oligonucleotide
ggagucucccuugaggucu

SEQ ID NO: 1031778 - RNA, 19 nt, Artificial Sequence
  Description of Artificial Sequence: Synthetic oligonucleotide
ggaaggguacuggaugcca

SEQ ID NO: 1031779 - RNA, 19 nt, Artificial Sequence
  Description of Artificial Sequence: Synthetic oligonucleotide
augccacgucucuccauau

SEQ ID NO: 1031780 - RNA, 19 nt, Artificial Sequence
  Description of Artificial Sequence: Synthetic oligonucleotide
acgccacccaugugucuca

SEQ ID NO: 1031781 - RNA, 19 nt, Artificial Sequence
  Description of Artificial Sequence: Synthetic oligonucleotide
gaauugcgguucgucuuaa

SEQ ID NO: 1031782 - RNA, 19 nt, Artificial Sequence
  Description of Artificial Sequence: Synthetic oligonucleotide
agacgauaauuaggagaau

SEQ ID NO: 1031783 - RNA, 19 nt, Artificial Sequence
  Description of Artificial Sequence: Synthetic oligonucleotide
ggucacguagucauauucu

SEQ ID NO: 1031784 - RNA, 19 nt, Artificial Sequence
  Description of Artificial Sequence: Synthetic oligonucleotide
cacguccagagggaagguc

SEQ ID NO: 1031785 - RNA, 19 nt, Artificial Sequence
  Description of Artificial Sequence: Synthetic oligonucleotide
ggagagcaccuguggugag

SEQ ID NO: 1031786 - RNA, 19 nt, Artificial Sequence
  Description of Artificial Sequence: Synthetic oligonucleotide
ccguaaucagugguccagg

SEQ ID NO: 1031787 - RNA, 19 nt, Artificial Sequence
  Description of Artificial Sequence: Synthetic oligonucleotide
ccgugcuaugaaugcaaac

SEQ ID NO: 1031788 - RNA, 19 nt, Artificial Sequence
  Description of Artificial Sequence: Synthetic oligonucleotide
ggguugcuuugcuuccggc

SEQ ID NO: 1031789 - RNA, 19 nt, Artificial Sequence
  Description of Artificial Sequence: Synthetic oligonucleotide
ucucgugcucugggacaag

SEQ ID NO: 1031790 - RNA, 19 nt, Artificial Sequence
  Description of Artificial Sequence: Synthetic oligonucleotide
guuggccaagauaccaccu

SEQ ID NO: 1031791 - RNA, 19 nt, Artificial Sequence
  Description of Artificial Sequence: Synthetic oligonucleotide
gcugcggcccacgauguac

SEQ ID NO: 1031792 - RNA, 19 nt, Artificial Sequence
  Description of Artificial Sequence: Synthetic oligonucleotide
accgugcuaugaaugcaaa

SEQ ID NO: 1031793 - RNA, 19 nt, Artificial Sequence
  Description of Artificial Sequence: Synthetic oligonucleotide
ggucucccauuuauuuaug

SEQ ID NO: 1031794 - RNA, 19 nt, Artificial Sequence
  Description of Artificial Sequence: Synthetic oligonucleotide
gguaagccucuuggaagac

SEQ ID NO: 1031795 - RNA, 19 nt, Artificial Sequence
  Description of Artificial Sequence: Synthetic oligonucleotide
gcagugguaccacccgguc

SEQ ID NO: 1031796 - RNA, 19 nt, Artificial Sequence
  Description of Artificial Sequence: Synthetic oligonucleotide
ccaccuuuaugccacgucu

SEQ ID NO: 1031797 - RNA, 19 nt, Artificial Sequence
  Description of Artificial Sequence: Synthetic oligonucleotide
cgauguacuggagcguggc

SEQ ID NO: 1031798 - RNA, 19 nt, Artificial Sequence
  Description of Artificial Sequence: Synthetic oligonucleotide
cgguucgucuuaaauguga

SEQ ID NO: 1031799 - RNA, 19 nt, Artificial Sequence
  Description of Artificial Sequence: Synthetic oligonucleotide
ccacucuaagacgucuuuc

SEQ ID NO: 1031800 - RNA, 19 nt, Artificial Sequence
  Description of Artificial Sequence: Synthetic oligonucleotide
cacuuagacucgucagggu

SEQ ID NO: 1031801 - RNA, 19 nt, Artificial Sequence
  Description of Artificial Sequence: Synthetic oligonucleotide
gcacccguaaucagugguc

SEQ ID NO: 1031802 - RNA, 19 nt, Artificial Sequence
  Description of Artificial Sequence: Synthetic oligonucleotide
cacgcugcccacguccaga

SEQ ID NO: 1031803 - RNA, 19 nt, Artificial Sequence
  Description of Artificial Sequence: Synthetic oligonucleotide
ggcgcugggaacccauuua

SEQ ID NO: 1031804 - RNA, 19 nt, Artificial Sequence
  Description of Artificial Sequence: Synthetic oligonucleotide
gccaagauaccaccuuuau

SEQ ID NO: 1031805 - RNA, 19 nt, Artificial Sequence
  Description of Artificial Sequence: Synthetic oligonucleotide
cugacgcaagcuacccacu

SEQ ID NO: 1031806 - RNA, 19 nt, Artificial Sequence
  Description of Artificial Sequence: Synthetic oligonucleotide
gcgguucgucuuaaaugug

SEQ ID NO: 1031807 - RNA, 19 nt, Artificial Sequence
  Description of Artificial Sequence: Synthetic oligonucleotide
ggacgcugauuugcacaag

SEQ ID NO: 1031808 - RNA, 19 nt, Artificial Sequence
  Description of Artificial Sequence: Synthetic oligonucleotide
cgucguggucagcagugag

SEQ ID NO: 1031809 - RNA, 19 nt, Artificial Sequence
  Description of Artificial Sequence: Synthetic oligonucleotide
ggugugagccguccaacuu

SEQ ID NO: 1031810 - RNA, 19 nt, Artificial Sequence
  Description of Artificial Sequence: Synthetic oligonucleotide
gggugugagccguccaacu

SEQ ID NO: 1031811 - RNA, 19 nt, Artificial Sequence
  Description of Artificial Sequence: Synthetic oligonucleotide
gcgcccacuguaccccacc

SEQ ID NO: 1031812 - RNA, 19 nt, Artificial Sequence
  Description of Artificial Sequence: Synthetic oligonucleotide
cugcggcccacgauguacu

SEQ ID NO: 1031813 - RNA, 19 nt, Artificial Sequence
  Description of Artificial Sequence: Synthetic oligonucleotide
ggucgucguggucagcagu

SEQ ID NO: 1031814 - RNA, 19 nt, Artificial Sequence
  Description of Artificial Sequence: Synthetic oligonucleotide
ggcuugcuacaaaggagaa

SEQ ID NO: 1031815 - RNA, 19 nt, Artificial Sequence
  Description of Artificial Sequence: Synthetic oligonucleotide
gggaacccauuuaaggaau

SEQ ID NO: 1031816 - RNA, 19 nt, Artificial Sequence
  Description of Artificial Sequence: Synthetic oligonucleotide
ggccaagauaccaccuuua

SEQ ID NO: 1031817 - RNA, 19 nt, Artificial Sequence
  Description of Artificial Sequence: Synthetic oligonucleotide
cgauucccuucacugucac

SEQ ID NO: 1031818 - RNA, 19 nt, Artificial Sequence
  Description of Artificial Sequence: Synthetic oligonucleotide
ccgagcacccguaaucagu

SEQ ID NO: 1031819 - RNA, 19 nt, Artificial Sequence
  Description of Artificial Sequence: Synthetic oligonucleotide
cacgcagcucugcucaguu

SEQ ID NO: 1031820 - RNA, 19 nt, Artificial Sequence
  Description of Artificial Sequence: Synthetic oligonucleotide
ccggucgucguggucagca

SEQ ID NO: 1031821 - RNA, 19 nt, Artificial Sequence
  Description of Artificial Sequence: Synthetic oligonucleotide
gcuguccgagcacccguaa

SEQ ID NO: 1031822 - RNA, 19 nt, Artificial Sequence
  Description of Artificial Sequence: Synthetic oligonucleotide
cacuguaguugggugugau

SEQ ID NO: 1031823 - RNA, 19 nt, Artificial Sequence
  Description of Artificial Sequence: Synthetic oligonucleotide
cuguccgagcacccguaau

SEQ ID NO: 1031824 - RNA, 19 nt, Artificial Sequence
  Description of Artificial Sequence: Synthetic oligonucleotide
gcguggcgaugaauuugag

SEQ ID NO: 1031825 - RNA, 19 nt, Artificial Sequence
  Description of Artificial Sequence: Synthetic oligonucleotide
gugguaccacccggucguc

SEQ ID NO: 1031826 - RNA, 19 nt, Artificial Sequence
  Description of Artificial Sequence: Synthetic oligonucleotide
ccguccaacuuuaugccuu

SEQ ID NO: 1031827 - RNA, 19 nt, Artificial Sequence
  Description of Artificial Sequence: Synthetic oligonucleotide
ggucgugaagcugcagaau

SEQ ID NO: 1031828 - RNA, 19 nt, Artificial Sequence
  Description of Artificial Sequence: Synthetic oligonucleotide
gcggaggcacagugcucac

SEQ ID NO: 1031829 - RNA, 19 nt, Artificial Sequence
  Description of Artificial Sequence: Synthetic oligonucleotide
cgauguugaucagacgaua

SEQ ID NO: 1031830 - RNA, 19 nt, Artificial Sequence
  Description of Artificial Sequence: Synthetic oligonucleotide
gcgaugaauuugagggagu

SEQ ID NO: 1031831 - RNA, 19 nt, Artificial Sequence
  Description of Artificial Sequence: Synthetic oligonucleotide
cucgauguucaggcaccgu

SEQ ID NO: 1031832 - RNA, 19 nt, Artificial Sequence
  Description of Artificial Sequence: Synthetic oligonucleotide
ccguuggagccuccauuga

SEQ ID NO: 1031833 - RNA, 19 nt, Artificial Sequence
  Description of Artificial Sequence: Synthetic oligonucleotide
gcaccuguggugaggucgu

SEQ ID NO: 1031834 - RNA, 19 nt, Artificial Sequence
  Description of Artificial Sequence: Synthetic oligonucleotide
cugcgaggacgccacccau

SEQ ID NO: 1031835 - RNA, 19 nt, Artificial Sequence
  Description of Artificial Sequence: Synthetic oligonucleotide
gcuggaccugacgcaagcu

SEQ ID NO: 1031836 - RNA, 19 nt, Artificial Sequence
  Description of Artificial Sequence: Synthetic oligonucleotide
ggacgccacccaugugucu

SEQ ID NO: 1031837 - RNA, 19 nt, Artificial Sequence
  Description of Artificial Sequence: Synthetic oligonucleotide
cugugagcggaggcacagu

SEQ ID NO: 1031838 - RNA, 19 nt, Artificial Sequence
  Description of Artificial Sequence: Synthetic oligonucleotide
cgcaagcuacccacucuaa

SEQ ID NO: 1031839 - RNA, 19 nt, Artificial Sequence
  Description of Artificial Sequence: Synthetic oligonucleotide
gugagccguccaacuuuau

SEQ ID NO: 1031840 - RNA, 19 nt, Artificial Sequence
  Description of Artificial Sequence: Synthetic oligonucleotide
cgugaagcugcagaauguu

SEQ ID NO: 1031841 - RNA, 19 nt, Artificial Sequence
  Description of Artificial Sequence: Synthetic oligonucleotide
ccccguuggagccuccauu

SEQ ID NO: 1031842 - RNA, 19 nt, Artificial Sequence
  Description of Artificial Sequence: Synthetic oligonucleotide
cccggucgucguggucagc

SEQ ID NO: 1031843 - RNA, 19 nt, Artificial Sequence
  Description of Artificial Sequence: Synthetic oligonucleotide
aacuugauaaccuugagca

SEQ ID NO: 1031844 - RNA, 19 nt, Artificial Sequence
  Description of Artificial Sequence: Synthetic oligonucleotide
aacauaauauuggaaaggc

SEQ ID NO: 1031845 - RNA, 19 nt, Artificial Sequence
  Description of Artificial Sequence: Synthetic oligonucleotide
uaugcaaugaugauuagga

SEQ ID NO: 1031846 - RNA, 19 nt, Artificial Sequence
  Description of Artificial Sequence: Synthetic oligonucleotide
uuugacagaacacuggugc

SEQ ID NO: 1031847 - RNA, 19 nt, Artificial Sequence
  Description of Artificial Sequence: Synthetic oligonucleotide
aguaguguaaacuuugcag

SEQ ID NO: 1031848 - RNA, 19 nt, Artificial Sequence
  Description of Artificial Sequence: Synthetic oligonucleotide
augauuaggaacuugauaa

SEQ ID NO: 1031849 - RNA, 19 nt, Artificial Sequence
  Description of Artificial Sequence: Synthetic oligonucleotide
aaacauaauauuggaaagg

SEQ ID NO: 1031850 - RNA, 19 nt, Artificial Sequence
  Description of Artificial Sequence: Synthetic oligonucleotide
ucguuauuuaaauugagcu

SEQ ID NO: 1031851 - RNA, 19 nt, Artificial Sequence
  Description of Artificial Sequence: Synthetic oligonucleotide
aacaccgcaaaccucuugg

SEQ ID NO: 1031852 - RNA, 19 nt, Artificial Sequence
  Description of Artificial Sequence: Synthetic oligonucleotide
uuauaccacaguuugagca

SEQ ID NO: 1031853 - RNA, 19 nt, Artificial Sequence
  Description of Artificial Sequence: Synthetic oligonucleotide
uguggauuuugacagaaca

SEQ ID NO: 1031854 - RNA, 19 nt, Artificial Sequence
  Description of Artificial Sequence: Synthetic oligonucleotide
ucauuauaggacaagucca

SEQ ID NO: 1031855 - RNA, 19 nt, Artificial Sequence
  Description of Artificial Sequence: Synthetic oligonucleotide
uuuaaggcuuuugagaucc

SEQ ID NO: 1031856 - RNA, 19 nt, Artificial Sequence
  Description of Artificial Sequence: Synthetic oligonucleotide
aaauaagcuacucugcuuu

SEQ ID NO: 1031857 - RNA, 19 nt, Artificial Sequence
  Description of Artificial Sequence: Synthetic oligonucleotide
aucgcaucguaccaguucc

SEQ ID NO: 1031858 - RNA, 19 nt, Artificial Sequence
  Description of Artificial Sequence: Synthetic oligonucleotide
accucuaccuuauuguggc

SEQ ID NO: 1031859 - RNA, 19 nt, Artificial Sequence
  Description of Artificial Sequence: Synthetic oligonucleotide
uauaagguguaaaggcacg

SEQ ID NO: 1031860 - RNA, 19 nt, Artificial Sequence
  Description of Artificial Sequence: Synthetic oligonucleotide
uuuagagaacagaugggcc

SEQ ID NO: 1031861 - RNA, 19 nt, Artificial Sequence
  Description of Artificial Sequence: Synthetic oligonucleotide
gaccucggaaaccagagcg

SEQ ID NO: 1031862 - RNA, 19 nt, Artificial Sequence
  Description of Artificial Sequence: Synthetic oligonucleotide
aaaccucuuggagagaacg

SEQ ID NO: 1031863 - RNA, 19 nt, Artificial Sequence
  Description of Artificial Sequence: Synthetic oligonucleotide
gaagcgaaugucauuauag

SEQ ID NO: 1031864 - RNA, 19 nt, Artificial Sequence
  Description of Artificial Sequence: Synthetic oligonucleotide
agaacgguagaacagccag

SEQ ID NO: 1031865 - RNA, 19 nt, Artificial Sequence
  Description of Artificial Sequence: Synthetic oligonucleotide
ucguuauggaugcacaucu

SEQ ID NO: 1031866 - RNA, 19 nt, Artificial Sequence
  Description of Artificial Sequence: Synthetic oligonucleotide
uuaccuuugaugucuaagu

SEQ ID NO: 1031867 - RNA, 19 nt, Artificial Sequence
  Description of Artificial Sequence: Synthetic oligonucleotide
ugucaugacucagagagcc

SEQ ID NO: 1031868 - RNA, 19 nt, Artificial Sequence
  Description of Artificial Sequence: Synthetic oligonucleotide
aaacaaggccuuugccugc

SEQ ID NO: 1031869 - RNA, 19 nt, Artificial Sequence
  Description of Artificial Sequence: Synthetic oligonucleotide
ugcagaacuccuauuucgg

SEQ ID NO: 1031870 - RNA, 19 nt, Artificial Sequence
  Description of Artificial Sequence: Synthetic oligonucleotide
aauaagcuacucugcuuuc

SEQ ID NO: 1031871 - RNA, 19 nt, Artificial Sequence
  Description of Artificial Sequence: Synthetic oligonucleotide
cagagagccgaccagauag

SEQ ID NO: 1031872 - RNA, 19 nt, Artificial Sequence
  Description of Artificial Sequence: Synthetic oligonucleotide
aagguguaaaggcacguca

SEQ ID NO: 1031873 - RNA, 19 nt, Artificial Sequence
  Description of Artificial Sequence: Synthetic oligonucleotide
cucguuauuuaaauugagc

SEQ ID NO: 1031874 - RNA, 19 nt, Artificial Sequence
  Description of Artificial Sequence: Synthetic oligonucleotide
aaacacgguguccggaagg

SEQ ID NO: 1031875 - RNA, 19 nt, Artificial Sequence
  Description of Artificial Sequence: Synthetic oligonucleotide
aagacuaccuaauucuuua

SEQ ID NO: 1031876 - RNA, 19 nt, Artificial Sequence
  Description of Artificial Sequence: Synthetic oligonucleotide
aacuugacgcucaagaccu

SEQ ID NO: 1031877 - RNA, 19 nt, Artificial Sequence
  Description of Artificial Sequence: Synthetic oligonucleotide
aggacuucaaagugauuac

SEQ ID NO: 1031878 - RNA, 19 nt, Artificial Sequence
  Description of Artificial Sequence: Synthetic oligonucleotide
acgcucaagaccuugaggu

SEQ ID NO: 1031879 - RNA, 19 nt, Artificial Sequence
  Description of Artificial Sequence: Synthetic oligonucleotide
augcuuacgaagcacaggu

SEQ ID NO: 1031880 - RNA, 19 nt, Artificial Sequence
  Description of Artificial Sequence: Synthetic oligonucleotide
uugcauaggaagagguggg

SEQ ID NO: 1031881 - RNA, 19 nt, Artificial Sequence
  Description of Artificial Sequence: Synthetic oligonucleotide
uucuaucgauuucagguug

SEQ ID NO: 1031882 - RNA, 19 nt, Artificial Sequence
  Description of Artificial Sequence: Synthetic oligonucleotide
uuauaggacaaguccaggu

SEQ ID NO: 1031883 - RNA, 19 nt, Artificial Sequence
  Description of Artificial Sequence: Synthetic oligonucleotide
guuuagagaacagaugggc

SEQ ID NO: 1031884 - RNA, 19 nt, Artificial Sequence
  Description of Artificial Sequence: Synthetic oligonucleotide
cauuaagacuaccuaauuc

SEQ ID NO: 1031885 - RNA, 19 nt, Artificial Sequence
  Description of Artificial Sequence: Synthetic oligonucleotide
acagaauaucaccuucuuc

SEQ ID NO: 1031886 - RNA, 19 nt, Artificial Sequence
  Description of Artificial Sequence: Synthetic oligonucleotide
agugauuaccuuugauguc

SEQ ID NO: 1031887 - RNA, 19 nt, Artificial Sequence
  Description of Artificial Sequence: Synthetic oligonucleotide
uuucgggugggaugaagcg

SEQ ID NO: 1031888 - RNA, 19 nt, Artificial Sequence
  Description of Artificial Sequence: Synthetic oligonucleotide
aacacgguguccggaaggc

SEQ ID NO: 1031889 - RNA, 19 nt, Artificial Sequence
  Description of Artificial Sequence: Synthetic oligonucleotide
uguuacaagugauggaaaa

SEQ ID NO: 1031890 - RNA, 19 nt, Artificial Sequence
  Description of Artificial Sequence: Synthetic oligonucleotide
uauggaugcacaucuucug

SEQ ID NO: 1031891 - RNA, 19 nt, Artificial Sequence
  Description of Artificial Sequence: Synthetic oligonucleotide
ugaagguuguccagcuggg

SEQ ID NO: 1031892 - RNA, 19 nt, Artificial Sequence
  Description of Artificial Sequence: Synthetic oligonucleotide
guuaugggcguucaucugc

SEQ ID NO: 1031893 - RNA, 19 nt, Artificial Sequence
  Description of Artificial Sequence: Synthetic oligonucleotide
gaaucgacuugagagacug

SEQ ID NO: 1031894 - RNA, 19 nt, Artificial Sequence
  Description of Artificial Sequence: Synthetic oligonucleotide
aaggcauuaagacuaccua

SEQ ID NO: 1031895 - RNA, 19 nt, Artificial Sequence
  Description of Artificial Sequence: Synthetic oligonucleotide
ucuaguuucagagacugua

SEQ ID NO: 1031896 - RNA, 19 nt, Artificial Sequence
  Description of Artificial Sequence: Synthetic oligonucleotide
ugucauuauaggacaaguc

SEQ ID NO: 1031897 - RNA, 19 nt, Artificial Sequence
  Description of Artificial Sequence: Synthetic oligonucleotide
auagaugcuuacgaagcac

SEQ ID NO: 1031898 - RNA, 19 nt, Artificial Sequence
  Description of Artificial Sequence: Synthetic oligonucleotide
aucgacuugagagacuggg

SEQ ID NO: 1031899 - RNA, 19 nt, Artificial Sequence
  Description of Artificial Sequence: Synthetic oligonucleotide
agcgaaugucauuauagga

SEQ ID NO: 1031900 - RNA, 19 nt, Artificial Sequence
  Description of Artificial Sequence: Synthetic oligonucleotide
uuguauuugguagaagcgu

SEQ ID NO: 1031901 - RNA, 19 nt, Artificial Sequence
  Description of Artificial Sequence: Synthetic oligonucleotide
uggaccucggaaaccagag

SEQ ID NO: 1031902 - RNA, 19 nt, Artificial Sequence
  Description of Artificial Sequence: Synthetic oligonucleotide
cauaauauuggaaaggcau

SEQ ID NO: 1031903 - RNA, 19 nt, Artificial Sequence
  Description of Artificial Sequence: Synthetic oligonucleotide
auuucgggugggaugaagc

SEQ ID NO: 1031904 - RNA, 19 nt, Artificial Sequence
  Description of Artificial Sequence: Synthetic oligonucleotide
aggaaucgacuugagagac

SEQ ID NO: 1031905 - RNA, 19 nt, Artificial Sequence
  Description of Artificial Sequence: Synthetic oligonucleotide
auaaccuugagcacggucu

SEQ ID NO: 1031906 - RNA, 19 nt, Artificial Sequence
  Description of Artificial Sequence: Synthetic oligonucleotide
uggugugauugcaagagaa

SEQ ID NO: 1031907 - RNA, 19 nt, Artificial Sequence
  Description of Artificial Sequence: Synthetic oligonucleotide
uaauuuguucucacugacu

SEQ ID NO: 1031908 - RNA, 19 nt, Artificial Sequence
  Description of Artificial Sequence: Synthetic oligonucleotide
aaguaggaaagaaauagua

SEQ ID NO: 1031909 - RNA, 19 nt, Artificial Sequence
  Description of Artificial Sequence: Synthetic oligonucleotide
acaguuugagcacgguuag

SEQ ID NO: 1031910 - RNA, 19 nt, Artificial Sequence
  Description of Artificial Sequence: Synthetic oligonucleotide
guaugcaaugaugauuagg

SEQ ID NO: 1031911 - RNA, 19 nt, Artificial Sequence
  Description of Artificial Sequence: Synthetic oligonucleotide
aaacuggaccucggaaacc

SEQ ID NO: 1031912 - RNA, 19 nt, Artificial Sequence
  Description of Artificial Sequence: Synthetic oligonucleotide
cagguaucggauuuuguug

SEQ ID NO: 1031913 - RNA, 19 nt, Artificial Sequence
  Description of Artificial Sequence: Synthetic oligonucleotide
ugauuaggaacuugauaac

SEQ ID NO: 1031914 - RNA, 19 nt, Artificial Sequence
  Description of Artificial Sequence: Synthetic oligonucleotide
guagaagcguguuucaauc

SEQ ID NO: 1031915 - RNA, 19 nt, Artificial Sequence
  Description of Artificial Sequence: Synthetic oligonucleotide
gacgcucaagaccuugagg

SEQ ID NO: 1031916 - RNA, 19 nt, Artificial Sequence
  Description of Artificial Sequence: Synthetic oligonucleotide
aaggccugacagcaugauc

SEQ ID NO: 1031917 - RNA, 19 nt, Artificial Sequence
  Description of Artificial Sequence: Synthetic oligonucleotide
ugcgcuccagaucgcaucg

SEQ ID NO: 1031918 - RNA, 19 nt, Artificial Sequence
  Description of Artificial Sequence: Synthetic oligonucleotide
gaugcuuacgaagcacagg

SEQ ID NO: 1031919 - RNA, 19 nt, Artificial Sequence
  Description of Artificial Sequence: Synthetic oligonucleotide
ucuaccuuauuguggcuga

SEQ ID NO: 1031920 - RNA, 19 nt, Artificial Sequence
  Description of Artificial Sequence: Synthetic oligonucleotide
agcccgacaaucucccagc

SEQ ID NO: 1031921 - RNA, 19 nt, Artificial Sequence
  Description of Artificial Sequence: Synthetic oligonucleotide
aagugauggaaaaguagug

SEQ ID NO: 1031922 - RNA, 19 nt, Artificial Sequence
  Description of Artificial Sequence: Synthetic oligonucleotide
aggugaugcuguuauacca

SEQ ID NO: 1031923 - RNA, 19 nt, Artificial Sequence
  Description of Artificial Sequence: Synthetic oligonucleotide
agugauggaaaaguagugu

SEQ ID NO: 1031924 - RNA, 19 nt, Artificial Sequence
  Description of Artificial Sequence: Synthetic oligonucleotide
uccuauuucgggugggaug

SEQ ID NO: 1031925 - RNA, 19 nt, Artificial Sequence
  Description of Artificial Sequence: Synthetic oligonucleotide
uaaggcuuuugagaucccg

SEQ ID NO: 1031926 - RNA, 19 nt, Artificial Sequence
  Description of Artificial Sequence: Synthetic oligonucleotide
uuaagacuaccuaauucuu

SEQ ID NO: 1031927 - RNA, 19 nt, Artificial Sequence
  Description of Artificial Sequence: Synthetic oligonucleotide
ugcgguagauuugucaacc

SEQ ID NO: 1031928 - RNA, 19 nt, Artificial Sequence
  Description of Artificial Sequence: Synthetic oligonucleotide
auuaggaacuugauaaccu

SEQ ID NO: 1031929 - RNA, 19 nt, Artificial Sequence
  Description of Artificial Sequence: Synthetic oligonucleotide
uuugagcacgguuaguuuu

SEQ ID NO: 1031930 - RNA, 19 nt, Artificial Sequence
  Description of Artificial Sequence: Synthetic oligonucleotide
gagccgaccagauagagcu

SEQ ID NO: 1031931 - RNA, 19 nt, Artificial Sequence
  Description of Artificial Sequence: Synthetic oligonucleotide
gagagaacgguagaacagc

SEQ ID NO: 1031932 - RNA, 19 nt, Artificial Sequence
  Description of Artificial Sequence: Synthetic oligonucleotide
ugaucucuaguuucagaga

SEQ ID NO: 1031933 - RNA, 19 nt, Artificial Sequence
  Description of Artificial Sequence: Synthetic oligonucleotide
agagaacgguagaacagcc

SEQ ID NO: 1031934 - RNA, 19 nt, Artificial Sequence
  Description of Artificial Sequence: Synthetic oligonucleotide
aguuuagagaacagauggg

SEQ ID NO: 1031935 - RNA, 19 nt, Artificial Sequence
  Description of Artificial Sequence: Synthetic oligonucleotide
agucguuccaggcuaguca

SEQ ID NO: 1031936 - RNA, 19 nt, Artificial Sequence
  Description of Artificial Sequence: Synthetic oligonucleotide
uccacguguagccggaacu

SEQ ID NO: 1031937 - RNA, 19 nt, Artificial Sequence
  Description of Artificial Sequence: Synthetic oligonucleotide
agauagagcucuuccagau

SEQ ID NO: 1031938 - RNA, 19 nt, Artificial Sequence
  Description of Artificial Sequence: Synthetic oligonucleotide
uaagacuaccuaauucuuu

SEQ ID NO: 1031939 - RNA, 19 nt, Artificial Sequence
  Description of Artificial Sequence: Synthetic oligonucleotide
uuaugggcguucaucugca

SEQ ID NO: 1031940 - RNA, 19 nt, Artificial Sequence
  Description of Artificial Sequence: Synthetic oligonucleotide
ucuaucgauuucagguugu

SEQ ID NO: 1031941 - RNA, 19 nt, Artificial Sequence
  Description of Artificial Sequence: Synthetic oligonucleotide
ccacucguuauuuaaauug

SEQ ID NO: 1031942 - RNA, 19 nt, Artificial Sequence
  Description of Artificial Sequence: Synthetic oligonucleotide
ugacagaacacuggugcag

SEQ ID NO: 1031943 - RNA, 19 nt, Artificial Sequence
  Description of Artificial Sequence: Synthetic oligonucleotide
agcuacucugcuuucauuu

SEQ ID NO: 1031944 - RNA, 19 nt, Artificial Sequence
  Description of Artificial Sequence: Synthetic oligonucleotide
aggcauuaagacuaccuaa

SEQ ID NO: 1031945 - RNA, 19 nt, Artificial Sequence
  Description of Artificial Sequence: Synthetic oligonucleotide
acuguaacuccgugauuuc

SEQ ID NO: 1031946 - RNA, 19 nt, Artificial Sequence
  Description of Artificial Sequence: Synthetic oligonucleotide
ucaaucauguuuugaugua

SEQ ID NO: 1031947 - RNA, 19 nt, Artificial Sequence
  Description of Artificial Sequence: Synthetic oligonucleotide
caccucuaccuuauugugg

SEQ ID NO: 1031948 - RNA, 19 nt, Artificial Sequence
  Description of Artificial Sequence: Synthetic oligonucleotide
ucggauuuuguugcauagg

SEQ ID NO: 1031949 - RNA, 19 nt, Artificial Sequence
  Description of Artificial Sequence: Synthetic oligonucleotide
ucaugacucagagagccga

SEQ ID NO: 1031950 - RNA, 19 nt, Artificial Sequence
  Description of Artificial Sequence: Synthetic oligonucleotide
ugaugauuaggaacuugau

SEQ ID NO: 1031951 - RNA, 19 nt, Artificial Sequence
  Description of Artificial Sequence: Synthetic oligonucleotide
gaacuccuauuucgggugg

SEQ ID NO: 1031952 - RNA, 19 nt, Artificial Sequence
  Description of Artificial Sequence: Synthetic oligonucleotide
aguaggaaagaaauaguaa

SEQ ID NO: 1031953 - RNA, 19 nt, Artificial Sequence
  Description of Artificial Sequence: Synthetic oligonucleotide
aguuucuugcaaaaguaga

SEQ ID NO: 1031954 - RNA, 19 nt, Artificial Sequence
  Description of Artificial Sequence: Synthetic oligonucleotide
uccagaucgcaucguacca

SEQ ID NO: 1031955 - RNA, 19 nt, Artificial Sequence
  Description of Artificial Sequence: Synthetic oligonucleotide
caagccauagaugcuuacg

SEQ ID NO: 1031956 - RNA, 19 nt, Artificial Sequence
  Description of Artificial Sequence: Synthetic oligonucleotide
uuaggaacuugauaaccuu

SEQ ID NO: 1031957 - RNA, 19 nt, Artificial Sequence
  Description of Artificial Sequence: Synthetic oligonucleotide
aagcguguuucaaucaugu

SEQ ID NO: 1031958 - RNA, 19 nt, Artificial Sequence
  Description of Artificial Sequence: Synthetic oligonucleotide
gauaaccuugagcacgguc

SEQ ID NO: 1031959 - RNA, 19 nt, Artificial Sequence
  Description of Artificial Sequence: Synthetic oligonucleotide
uguuguaugcaaugaugau

SEQ ID NO: 1031960 - RNA, 19 nt, Artificial Sequence
  Description of Artificial Sequence: Synthetic oligonucleotide
agcgcuguuguaugcaaug

SEQ ID NO: 1031961 - RNA, 19 nt, Artificial Sequence
  Description of Artificial Sequence: Synthetic oligonucleotide
gucguuccaggcuagucag

SEQ ID NO: 1031962 - RNA, 19 nt, Artificial Sequence
  Description of Artificial Sequence: Synthetic oligonucleotide
caaacagagcaucuuccac

SEQ ID NO: 1031963 - RNA, 19 nt, Artificial Sequence
  Description of Artificial Sequence: Synthetic oligonucleotide
acaccucuaccuuauugug

SEQ ID NO: 1031964 - RNA, 19 nt, Artificial Sequence
  Description of Artificial Sequence: Synthetic oligonucleotide
agaguuuagagaacagaug

SEQ ID NO: 1031965 - RNA, 19 nt, Artificial Sequence
  Description of Artificial Sequence: Synthetic oligonucleotide
ucaaacacgguguccggaa

SEQ ID NO: 1031966 - RNA, 19 nt, Artificial Sequence
  Description of Artificial Sequence: Synthetic oligonucleotide
ucugucagauuggucaucu

SEQ ID NO: 1031967 - RNA, 19 nt, Artificial Sequence
  Description of Artificial Sequence: Synthetic oligonucleotide
aaccucuuggagagaacgg

SEQ ID NO: 1031968 - RNA, 19 nt, Artificial Sequence
  Description of Artificial Sequence: Synthetic oligonucleotide
cuggcggacguacauggcg

SEQ ID NO: 1031969 - RNA, 19 nt, Artificial Sequence
  Description of Artificial Sequence: Synthetic oligonucleotide
ugaagcgaaugucauuaua

SEQ ID NO: 1031970 - RNA, 19 nt, Artificial Sequence
  Description of Artificial Sequence: Synthetic oligonucleotide
ugacgcucaagaccuugag

SEQ ID NO: 1031971 - RNA, 19 nt, Artificial Sequence
  Description of Artificial Sequence: Synthetic oligonucleotide
caagugauggaaaaguagu

SEQ ID NO: 1031972 - RNA, 19 nt, Artificial Sequence
  Description of Artificial Sequence: Synthetic oligonucleotide
agaagcguguuucaaucau

SEQ ID NO: 1031973 - RNA, 19 nt, Artificial Sequence
  Description of Artificial Sequence: Synthetic oligonucleotide
uacgaagcacagguaacag

SEQ ID NO: 1031974 - RNA, 19 nt, Artificial Sequence
  Description of Artificial Sequence: Synthetic oligonucleotide
ugcaaaaguagaguucauc

SEQ ID NO: 1031975 - RNA, 19 nt, Artificial Sequence
  Description of Artificial Sequence: Synthetic oligonucleotide
guaaaggcacgucaagcca

SEQ ID NO: 1031976 - RNA, 19 nt, Artificial Sequence
  Description of Artificial Sequence: Synthetic oligonucleotide
gaucgcaucguaccaguuc

SEQ ID NO: 1031977 - RNA, 19 nt, Artificial Sequence
  Description of Artificial Sequence: Synthetic oligonucleotide
aaagagagugcugcacugu

SEQ ID NO: 1031978 - RNA, 19 nt, Artificial Sequence
  Description of Artificial Sequence: Synthetic oligonucleotide
ugaucucuucuaucgauuu

SEQ ID NO: 1031979 - RNA, 19 nt, Artificial Sequence
  Description of Artificial Sequence: Synthetic oligonucleotide
gagguggcuggacacgucc

SEQ ID NO: 1031980 - RNA, 19 nt, Artificial Sequence
  Description of Artificial Sequence: Synthetic oligonucleotide
uguaugcaaugaugauuag

SEQ ID NO: 1031981 - RNA, 19 nt, Artificial Sequence
  Description of Artificial Sequence: Synthetic oligonucleotide
uugagcacgguuaguuuuc

SEQ ID NO: 1031982 - RNA, 19 nt, Artificial Sequence
  Description of Artificial Sequence: Synthetic oligonucleotide
cuagucaguuucuugaugu

SEQ ID NO: 1031983 - RNA, 19 nt, Artificial Sequence
  Description of Artificial Sequence: Synthetic oligonucleotide
caacaccucuaccuuauug

SEQ ID NO: 1031984 - RNA, 19 nt, Artificial Sequence
  Description of Artificial Sequence: Synthetic oligonucleotide
cacucguuauuuaaauuga

SEQ ID NO: 1031985 - RNA, 19 nt, Artificial Sequence
  Description of Artificial Sequence: Synthetic oligonucleotide
accuaauucuuuauauugu

SEQ ID NO: 1031986 - RNA, 19 nt, Artificial Sequence
  Description of Artificial Sequence: Synthetic oligonucleotide
cacaguuugagcacgguua

SEQ ID NO: 1031987 - RNA, 19 nt, Artificial Sequence
  Description of Artificial Sequence: Synthetic oligonucleotide
ggacacguccaccacagcc

SEQ ID NO: 1031988 - RNA, 19 nt, Artificial Sequence
  Description of Artificial Sequence: Synthetic oligonucleotide
uugacgcucaagaccuuga

SEQ ID NO: 1031989 - RNA, 19 nt, Artificial Sequence
  Description of Artificial Sequence: Synthetic oligonucleotide
aguuugagcacgguuaguu

SEQ ID NO: 1031990 - RNA, 19 nt, Artificial Sequence
  Description of Artificial Sequence: Synthetic oligonucleotide
aacuccuauuucggguggg

SEQ ID NO: 1031991 - RNA, 19 nt, Artificial Sequence
  Description of Artificial Sequence: Synthetic oligonucleotide
uugguagaagcguguuuca

SEQ ID NO: 1031992 - RNA, 19 nt, Artificial Sequence
  Description of Artificial Sequence: Synthetic oligonucleotide
acucguuauuuaaauugag

SEQ ID NO: 1031993 - RNA, 19 nt, Artificial Sequence
  Description of Artificial Sequence: Synthetic oligonucleotide
ucuuccacguguagccgga

SEQ ID NO: 1031994 - RNA, 19 nt, Artificial Sequence
  Description of Artificial Sequence: Synthetic oligonucleotide
gaagcguguuucaaucaug

SEQ ID NO: 1031995 - RNA, 19 nt, Artificial Sequence
  Description of Artificial Sequence: Synthetic oligonucleotide
gagucucaaacagagcauc

SEQ ID NO: 1031996 - RNA, 19 nt, Artificial Sequence
  Description of Artificial Sequence: Synthetic oligonucleotide
agagccgaccagauagagc

SEQ ID NO: 1031997 - RNA, 19 nt, Artificial Sequence
  Description of Artificial Sequence: Synthetic oligonucleotide
cguuauuuaaauugagcug

SEQ ID NO: 1031998 - RNA, 19 nt, Artificial Sequence
  Description of Artificial Sequence: Synthetic oligonucleotide
aaccagagcgcuguuguau

SEQ ID NO: 1031999 - RNA, 19 nt, Artificial Sequence
  Description of Artificial Sequence: Synthetic oligonucleotide
agauugcggagguuguaca

SEQ ID NO: 1032000 - RNA, 19 nt, Artificial Sequence
  Description of Artificial Sequence: Synthetic oligonucleotide
ugcuuucauuugcucccgg

SEQ ID NO: 1032001 - RNA, 19 nt, Artificial Sequence
  Description of Artificial Sequence: Synthetic oligonucleotide
accagagcgcuguuguaug

SEQ ID NO: 1032002 - RNA, 19 nt, Artificial Sequence
  Description of Artificial Sequence: Synthetic oligonucleotide
gguguaaaggcacgucaag

SEQ ID NO: 1032003 - RNA, 19 nt, Artificial Sequence
  Description of Artificial Sequence: Synthetic oligonucleotide
caucguaccaguuccagcu

SEQ ID NO: 1032004 - RNA, 19 nt, Artificial Sequence
  Description of Artificial Sequence: Synthetic oligonucleotide
acauaauauuggaaaggca

SEQ ID NO: 1032005 - RNA, 19 nt, Artificial Sequence
  Description of Artificial Sequence: Synthetic oligonucleotide
guagccggaacuucuucac

SEQ ID NO: 1032006 - RNA, 19 nt, Artificial Sequence
  Description of Artificial Sequence: Synthetic oligonucleotide
gaugcuguuauaccacagu

SEQ ID NO: 1032007 - RNA, 19 nt, Artificial Sequence
  Description of Artificial Sequence: Synthetic oligonucleotide
ggagagaacgguagaacag

SEQ ID NO: 1032008 - RNA, 19 nt, Artificial Sequence
  Description of Artificial Sequence: Synthetic oligonucleotide
gguagauuugucaaccaca

SEQ ID NO: 1032009 - RNA, 19 nt, Artificial Sequence
  Description of Artificial Sequence: Synthetic oligonucleotide
uggcggacguacauggcgu

SEQ ID NO: 1032010 - RNA, 19 nt, Artificial Sequence
  Description of Artificial Sequence: Synthetic oligonucleotide
caggaaucgacuugagaga

SEQ ID NO: 1032011 - RNA, 19 nt, Artificial Sequence
  Description of Artificial Sequence: Synthetic oligonucleotide
cuggugcagagagaguucc

SEQ ID NO: 1032012 - RNA, 19 nt, Artificial Sequence
  Description of Artificial Sequence: Synthetic oligonucleotide
ucaagccauagaugcuuac

SEQ ID NO: 1032013 - RNA, 19 nt, Artificial Sequence
  Description of Artificial Sequence: Synthetic oligonucleotide
uaagguguaaaggcacguc

SEQ ID NO: 1032014 - RNA, 19 nt, Artificial Sequence
  Description of Artificial Sequence: Synthetic oligonucleotide
aaccuugagcacggucugg

SEQ ID NO: 1032015 - RNA, 19 nt, Artificial Sequence
  Description of Artificial Sequence: Synthetic oligonucleotide
gugauuaccuuugaugucu

SEQ ID NO: 1032016 - RNA, 19 nt, Artificial Sequence
  Description of Artificial Sequence: Synthetic oligonucleotide
cuaguuucagagacuguaa

SEQ ID NO: 1032017 - RNA, 19 nt, Artificial Sequence
  Description of Artificial Sequence: Synthetic oligonucleotide
ucccggacaucugagggca

SEQ ID NO: 1032018 - RNA, 19 nt, Artificial Sequence
  Description of Artificial Sequence: Synthetic oligonucleotide
aaucgacuugagagacugg

SEQ ID NO: 1032019 - RNA, 19 nt, Artificial Sequence
  Description of Artificial Sequence: Synthetic oligonucleotide
gcucccggacaucugaggg

SEQ ID NO: 1032020 - RNA, 19 nt, Artificial Sequence
  Description of Artificial Sequence: Synthetic oligonucleotide
uugcucccggacaucugag

SEQ ID NO: 1032021 - RNA, 19 nt, Artificial Sequence
  Description of Artificial Sequence: Synthetic oligonucleotide
cuuugccugcucaccuucc

SEQ ID NO: 1032022 - RNA, 19 nt, Artificial Sequence
  Description of Artificial Sequence: Synthetic oligonucleotide
gaacaccgcaaaccucuug

SEQ ID NO: 1032023 - RNA, 19 nt, Artificial Sequence
  Description of Artificial Sequence: Synthetic oligonucleotide
gagagccgaccagauagag

SEQ ID NO: 1032024 - RNA, 19 nt, Artificial Sequence
  Description of Artificial Sequence: Synthetic oligonucleotide
uauuugguagaagcguguu

SEQ ID NO: 1032025 - RNA, 19 nt, Artificial Sequence
  Description of Artificial Sequence: Synthetic oligonucleotide
caaacacgguguccggaag

SEQ ID NO: 1032026 - RNA, 19 nt, Artificial Sequence
  Description of Artificial Sequence: Synthetic oligonucleotide
gguagaacagccaguauaa

SEQ ID NO: 1032027 - RNA, 19 nt, Artificial Sequence
  Description of Artificial Sequence: Synthetic oligonucleotide
cucccggacaucugagggc

SEQ ID NO: 1032028 - RNA, 19 nt, Artificial Sequence
  Description of Artificial Sequence: Synthetic oligonucleotide
caugacucagagagccgac

SEQ ID NO: 1032029 - RNA, 19 nt, Artificial Sequence
  Description of Artificial Sequence: Synthetic oligonucleotide
ugauuaccuuugaugucua

SEQ ID NO: 1032030 - RNA, 19 nt, Artificial Sequence
  Description of Artificial Sequence: Synthetic oligonucleotide
agacuaccuaauucuuuau

SEQ ID NO: 1032031 - RNA, 19 nt, Artificial Sequence
  Description of Artificial Sequence: Synthetic oligonucleotide
cuuccacgaccaauccagc

SEQ ID NO: 1032032 - RNA, 19 nt, Artificial Sequence
  Description of Artificial Sequence: Synthetic oligonucleotide
uuuugagaucccgcaggga

SEQ ID NO: 1032033 - RNA, 19 nt, Artificial Sequence
  Description of Artificial Sequence: Synthetic oligonucleotide
guagaacagccaguauaag

SEQ ID NO: 1032034 - RNA, 19 nt, Artificial Sequence
  Description of Artificial Sequence: Synthetic oligonucleotide
gguggcgggaaucaugaca

SEQ ID NO: 1032035 - RNA, 19 nt, Artificial Sequence
  Description of Artificial Sequence: Synthetic oligonucleotide
agcacggucuggcggacgu

SEQ ID NO: 1032036 - RNA, 19 nt, Artificial Sequence
  Description of Artificial Sequence: Synthetic oligonucleotide
guaacuccgugauuucaaa

SEQ ID NO: 1032037 - RNA, 19 nt, Artificial Sequence
  Description of Artificial Sequence: Synthetic oligonucleotide
ccgacaaucucccagcuca

SEQ ID NO: 1032038 - RNA, 19 nt, Artificial Sequence
  Description of Artificial Sequence: Synthetic oligonucleotide
ggcuuuugagaucccgcag

SEQ ID NO: 1032039 - RNA, 19 nt, Artificial Sequence
  Description of Artificial Sequence: Synthetic oligonucleotide
cugcgguagauuugucaac

SEQ ID NO: 1032040 - RNA, 19 nt, Artificial Sequence
  Description of Artificial Sequence: Synthetic oligonucleotide
gucguuauggaugcacauc

SEQ ID NO: 1032041 - RNA, 19 nt, Artificial Sequence
  Description of Artificial Sequence: Synthetic oligonucleotide
uaugggcguucaucugcag

SEQ ID NO: 1032042 - RNA, 19 nt, Artificial Sequence
  Description of Artificial Sequence: Synthetic oligonucleotide
gcuacucugcuuucauuug

SEQ ID NO: 1032043 - RNA, 19 nt, Artificial Sequence
  Description of Artificial Sequence: Synthetic oligonucleotide
aaggcacgucaagccauag

SEQ ID NO: 1032044 - RNA, 19 nt, Artificial Sequence
  Description of Artificial Sequence: Synthetic oligonucleotide
acguccaccacagccugag

SEQ ID NO: 1032045 - RNA, 19 nt, Artificial Sequence
  Description of Artificial Sequence: Synthetic oligonucleotide
uugcaaaaguagaguucau

SEQ ID NO: 1032046 - RNA, 19 nt, Artificial Sequence
  Description of Artificial Sequence: Synthetic oligonucleotide
acacgguguccggaaggcc

SEQ ID NO: 1032047 - RNA, 19 nt, Artificial Sequence
  Description of Artificial Sequence: Synthetic oligonucleotide
gucaugacucagagagccg

SEQ ID NO: 1032048 - RNA, 19 nt, Artificial Sequence
  Description of Artificial Sequence: Synthetic oligonucleotide
agagucucaaacagagcau

SEQ ID NO: 1032049 - RNA, 19 nt, Artificial Sequence
  Description of Artificial Sequence: Synthetic oligonucleotide
ggugcagagagaguuccug

SEQ ID NO: 1032050 - RNA, 19 nt, Artificial Sequence
  Description of Artificial Sequence: Synthetic oligonucleotide
acuuugcagaacuccuauu

SEQ ID NO: 1032051 - RNA, 19 nt, Artificial Sequence
  Description of Artificial Sequence: Synthetic oligonucleotide
acaccgcaaaccucuugga

SEQ ID NO: 1032052 - RNA, 19 nt, Artificial Sequence
  Description of Artificial Sequence: Synthetic oligonucleotide
cuguuauaccacaguuuga

SEQ ID NO: 1032053 - RNA, 19 nt, Artificial Sequence
  Description of Artificial Sequence: Synthetic oligonucleotide
augaagcgaaugucauuau

SEQ ID NO: 1032054 - RNA, 19 nt, Artificial Sequence
  Description of Artificial Sequence: Synthetic oligonucleotide
gagaacgguagaacagcca

SEQ ID NO: 1032055 - RNA, 19 nt, Artificial Sequence
  Description of Artificial Sequence: Synthetic oligonucleotide
uaccuuauuguggcugaaa

SEQ ID NO: 1032056 - RNA, 19 nt, Artificial Sequence
  Description of Artificial Sequence: Synthetic oligonucleotide
ggacguacauggcguacag

SEQ ID NO: 1032057 - RNA, 19 nt, Artificial Sequence
  Description of Artificial Sequence: Synthetic oligonucleotide
ggcacgucaagccauagau

SEQ ID NO: 1032058 - RNA, 19 nt, Artificial Sequence
  Description of Artificial Sequence: Synthetic oligonucleotide
ucgcaucguaccaguucca

SEQ ID NO: 1032059 - RNA, 19 nt, Artificial Sequence
  Description of Artificial Sequence: Synthetic oligonucleotide
caggaacaccgcaaaccuc

SEQ ID NO: 1032060 - RNA, 19 nt, Artificial Sequence
  Description of Artificial Sequence: Synthetic oligonucleotide
ugagcacgguuaguuuucu

SEQ ID NO: 1032061 - RNA, 19 nt, Artificial Sequence
  Description of Artificial Sequence: Synthetic oligonucleotide
aggcacgucaagccauaga

SEQ ID NO: 1032062 - RNA, 19 nt, Artificial Sequence
  Description of Artificial Sequence: Synthetic oligonucleotide
auagcccgucauguccugg

SEQ ID NO: 1032063 - RNA, 19 nt, Artificial Sequence
  Description of Artificial Sequence: Synthetic oligonucleotide
gcggagguuguacauccag

SEQ ID NO: 1032064 - RNA, 19 nt, Artificial Sequence
  Description of Artificial Sequence: Synthetic oligonucleotide
agguguaaaggcacgucaa

SEQ ID NO: 1032065 - RNA, 19 nt, Artificial Sequence
  Description of Artificial Sequence: Synthetic oligonucleotide
gauugcggagguuguacau

SEQ ID NO: 1032066 - RNA, 19 nt, Artificial Sequence
  Description of Artificial Sequence: Synthetic oligonucleotide
aucucuaguuucagagacu

SEQ ID NO: 1032067 - RNA, 19 nt, Artificial Sequence
  Description of Artificial Sequence: Synthetic oligonucleotide
cuggaccucggaaaccaga

SEQ ID NO: 1032068 - RNA, 19 nt, Artificial Sequence
  Description of Artificial Sequence: Synthetic oligonucleotide
gcaucguaccaguuccagc

SEQ ID NO: 1032069 - RNA, 19 nt, Artificial Sequence
  Description of Artificial Sequence: Synthetic oligonucleotide
cuucuaucgauuucagguu

SEQ ID NO: 1032070 - RNA, 19 nt, Artificial Sequence
  Description of Artificial Sequence: Synthetic oligonucleotide
ccuauuucgggugggauga

SEQ ID NO: 1032071 - RNA, 19 nt, Artificial Sequence
  Description of Artificial Sequence: Synthetic oligonucleotide
gcguguuucaaucauguuu

SEQ ID NO: 1032072 - RNA, 19 nt, Artificial Sequence
  Description of Artificial Sequence: Synthetic oligonucleotide
ucguuccaggcuagucagu

SEQ ID NO: 1032073 - RNA, 19 nt, Artificial Sequence
  Description of Artificial Sequence: Synthetic oligonucleotide
uggacacguccaccacagc

SEQ ID NO: 1032074 - RNA, 19 nt, Artificial Sequence
  Description of Artificial Sequence: Synthetic oligonucleotide
cacggucuggcggacguac

SEQ ID NO: 1032075 - RNA, 19 nt, Artificial Sequence
  Description of Artificial Sequence: Synthetic oligonucleotide
agccaguauaagguguaaa

SEQ ID NO: 1032076 - RNA, 19 nt, Artificial Sequence
  Description of Artificial Sequence: Synthetic oligonucleotide
guguagccggaacuucuuc

SEQ ID NO: 1032077 - RNA, 19 nt, Artificial Sequence
  Description of Artificial Sequence: Synthetic oligonucleotide
cuguaacuccgugauuuca

SEQ ID NO: 1032078 - RNA, 19 nt, Artificial Sequence
  Description of Artificial Sequence: Synthetic oligonucleotide
ggcgggaaucaugacauuc

SEQ ID NO: 1032079 - RNA, 19 nt, Artificial Sequence
  Description of Artificial Sequence: Synthetic oligonucleotide
ccugcgguagauuugucaa

SEQ ID NO: 1032080 - RNA, 19 nt, Artificial Sequence
  Description of Artificial Sequence: Synthetic oligonucleotide
cucgcuucagagcccgaca

SEQ ID NO: 1032081 - RNA, 19 nt, Artificial Sequence
  Description of Artificial Sequence: Synthetic oligonucleotide
guauuugguagaagcgugu

SEQ ID NO: 1032082 - RNA, 19 nt, Artificial Sequence
  Description of Artificial Sequence: Synthetic oligonucleotide
cacgaccaauccagcucgc

SEQ ID NO: 1032083 - RNA, 19 nt, Artificial Sequence
  Description of Artificial Sequence: Synthetic oligonucleotide
ggguccacucguuauuuaa

SEQ ID NO: 1032084 - RNA, 19 nt, Artificial Sequence
  Description of Artificial Sequence: Synthetic oligonucleotide
agagagccgaccagauaga

SEQ ID NO: 1032085 - RNA, 19 nt, Artificial Sequence
  Description of Artificial Sequence: Synthetic oligonucleotide
cacgguguccggaaggccu

SEQ ID NO: 1032086 - RNA, 19 nt, Artificial Sequence
  Description of Artificial Sequence: Synthetic oligonucleotide
cagcaucaccagcuuggug

SEQ ID NO: 1032087 - RNA, 19 nt, Artificial Sequence
  Description of Artificial Sequence: Synthetic oligonucleotide
cuaugucacaguccacugu

SEQ ID NO: 1032088 - RNA, 19 nt, Artificial Sequence
  Description of Artificial Sequence: Synthetic oligonucleotide
gaacacuggugcagagaga

SEQ ID NO: 1032089 - RNA, 19 nt, Artificial Sequence
  Description of Artificial Sequence: Synthetic oligonucleotide
ggcauuaagacuaccuaau

SEQ ID NO: 1032090 - RNA, 19 nt, Artificial Sequence
  Description of Artificial Sequence: Synthetic oligonucleotide
cagaacacuggugcagaga

SEQ ID NO: 1032091 - RNA, 19 nt, Artificial Sequence
  Description of Artificial Sequence: Synthetic oligonucleotide
uccaggcgguuaugggcgu

SEQ ID NO: 1032092 - RNA, 19 nt, Artificial Sequence
  Description of Artificial Sequence: Synthetic oligonucleotide
cagucguuccaggcuaguc

SEQ ID NO: 1032093 - RNA, 19 nt, Artificial Sequence
  Description of Artificial Sequence: Synthetic oligonucleotide
ugauaaccuugagcacggu

SEQ ID NO: 1032094 - RNA, 19 nt, Artificial Sequence
  Description of Artificial Sequence: Synthetic oligonucleotide
ccagagcgcuguuguaugc

SEQ ID NO: 1032095 - RNA, 19 nt, Artificial Sequence
  Description of Artificial Sequence: Synthetic oligonucleotide
accacaguuugagcacggu

SEQ ID NO: 1032096 - RNA, 19 nt, Artificial Sequence
  Description of Artificial Sequence: Synthetic oligonucleotide
acgaccaauccagcucgcu

SEQ ID NO: 1032097 - RNA, 19 nt, Artificial Sequence
  Description of Artificial Sequence: Synthetic oligonucleotide
gcgguuaugggcguucauc

SEQ ID NO: 1032098 - RNA, 19 nt, Artificial Sequence
  Description of Artificial Sequence: Synthetic oligonucleotide
ccagaucgcaucguaccag

SEQ ID NO: 1032099 - RNA, 19 nt, Artificial Sequence
  Description of Artificial Sequence: Synthetic oligonucleotide
cauuugcucccggacaucu

SEQ ID NO: 1032100 - RNA, 19 nt, Artificial Sequence
  Description of Artificial Sequence: Synthetic oligonucleotide
caccagcuuggugccgucg

SEQ ID NO: 1032101 - RNA, 19 nt, Artificial Sequence
  Description of Artificial Sequence: Synthetic oligonucleotide
cgguagauuugucaaccac

SEQ ID NO: 1032102 - RNA, 19 nt, Artificial Sequence
  Description of Artificial Sequence: Synthetic oligonucleotide
gcacgucaagccauagaug

SEQ ID NO: 1032103 - RNA, 19 nt, Artificial Sequence
  Description of Artificial Sequence: Synthetic oligonucleotide
ugguggcgggaaucaugac

SEQ ID NO: 1032104 - RNA, 19 nt, Artificial Sequence
  Description of Artificial Sequence: Synthetic oligonucleotide
cagaucgcaucguaccagu

SEQ ID NO: 1032105 - RNA, 19 nt, Artificial Sequence
  Description of Artificial Sequence: Synthetic oligonucleotide
gagcacggucuggcggacg

SEQ ID NO: 1032106 - RNA, 19 nt, Artificial Sequence
  Description of Artificial Sequence: Synthetic oligonucleotide
acgguguccggaaggccug

SEQ ID NO: 1032107 - RNA, 19 nt, Artificial Sequence
  Description of Artificial Sequence: Synthetic oligonucleotide
cugagggauuuuggagaug

SEQ ID NO: 1032108 - RNA, 19 nt, Artificial Sequence
  Description of Artificial Sequence: Synthetic oligonucleotide
cagagcgcuguuguaugca

SEQ ID NO: 1032109 - RNA, 19 nt, Artificial Sequence
  Description of Artificial Sequence: Synthetic oligonucleotide
ugagcacggucuggcggac

SEQ ID NO: 1032110 - RNA, 19 nt, Artificial Sequence
  Description of Artificial Sequence: Synthetic oligonucleotide
gucagggguccacucguua

SEQ ID NO: 1032111 - RNA, 19 nt, Artificial Sequence
  Description of Artificial Sequence: Synthetic oligonucleotide
acagucguuccaggcuagu

SEQ ID NO: 1032112 - RNA, 19 nt, Artificial Sequence
  Description of Artificial Sequence: Synthetic oligonucleotide
gccgucguuauggaugcac

SEQ ID NO: 1032113 - RNA, 19 nt, Artificial Sequence
  Description of Artificial Sequence: Synthetic oligonucleotide
agcucccgaaugucaucaa

SEQ ID NO: 1032114 - RNA, 19 nt, Artificial Sequence
  Description of Artificial Sequence: Synthetic oligonucleotide
gcuccagaucgcaucguac

SEQ ID NO: 1032115 - RNA, 19 nt, Artificial Sequence
  Description of Artificial Sequence: Synthetic oligonucleotide
gucaagccauagaugcuua

SEQ ID NO: 1032116 - RNA, 19 nt, Artificial Sequence
  Description of Artificial Sequence: Synthetic oligonucleotide
gcgguagauuugucaacca

SEQ ID NO: 1032117 - RNA, 19 nt, Artificial Sequence
  Description of Artificial Sequence: Synthetic oligonucleotide
caggcgguuaugggcguuc

SEQ ID NO: 1032118 - RNA, 19 nt, Artificial Sequence
  Description of Artificial Sequence: Synthetic oligonucleotide
ggcuuucaaccuuguuaca

SEQ ID NO: 1032119 - RNA, 19 nt, Artificial Sequence
  Description of Artificial Sequence: Synthetic oligonucleotide
gggaaucaugacauucuua

SEQ ID NO: 1032120 - RNA, 19 nt, Artificial Sequence
  Description of Artificial Sequence: Synthetic oligonucleotide
gcauuaagacuaccuaauu

SEQ ID NO: 1032121 - RNA, 19 nt, Artificial Sequence
  Description of Artificial Sequence: Synthetic oligonucleotide
cccugcgguagauuuguca

SEQ ID NO: 1032122 - RNA, 19 nt, Artificial Sequence
  Description of Artificial Sequence: Synthetic oligonucleotide
ggaaggccugacagcauga

SEQ ID NO: 1032123 - RNA, 19 nt, Artificial Sequence
  Description of Artificial Sequence: Synthetic oligonucleotide
gucucaaacagagcaucuu

SEQ ID NO: 1032124 - RNA, 19 nt, Artificial Sequence
  Description of Artificial Sequence: Synthetic oligonucleotide
aggcgguuaugggcguuca

SEQ ID NO: 1032125 - RNA, 19 nt, Artificial Sequence
  Description of Artificial Sequence: Synthetic oligonucleotide
cucuaguuucagagacugu

SEQ ID NO: 1032126 - RNA, 19 nt, Artificial Sequence
  Description of Artificial Sequence: Synthetic oligonucleotide
ccgucguuauggaugcaca

SEQ ID NO: 1032127 - RNA, 19 nt, Artificial Sequence
  Description of Artificial Sequence: Synthetic oligonucleotide
agaucgcaucguaccaguu

SEQ ID NO: 1032128 - RNA, 19 nt, Artificial Sequence
  Description of Artificial Sequence: Synthetic oligonucleotide
cuaccuuauuguggcugaa

SEQ ID NO: 1032129 - RNA, 19 nt, Artificial Sequence
  Description of Artificial Sequence: Synthetic oligonucleotide
gcgggaaucaugacauucu

SEQ ID NO: 1032130 - RNA, 19 nt, Artificial Sequence
  Description of Artificial Sequence: Synthetic oligonucleotide
gcucaagaccuugagguuu

SEQ ID NO: 1032131 - RNA, 19 nt, Artificial Sequence
  Description of Artificial Sequence: Synthetic oligonucleotide
acggucuggcggacguaca

SEQ ID NO: 1032132 - RNA, 19 nt, Artificial Sequence
  Description of Artificial Sequence: Synthetic oligonucleotide
cccgacaaucucccagcuc

SEQ ID NO: 1032133 - RNA, 19 nt, Artificial Sequence
  Description of Artificial Sequence: Synthetic oligonucleotide
gcauggggaaugcgcucca

SEQ ID NO: 1032134 - RNA, 19 nt, Artificial Sequence
  Description of Artificial Sequence: Synthetic oligonucleotide
cagccaguauaagguguaa

SEQ ID NO: 1032135 - RNA, 19 nt, Artificial Sequence
  Description of Artificial Sequence: Synthetic oligonucleotide
gccgaccagauagagcucu

SEQ ID NO: 1032136 - RNA, 19 nt, Artificial Sequence
  Description of Artificial Sequence: Synthetic oligonucleotide
gcggacguacauggcguac

SEQ ID NO: 1032137 - RNA, 19 nt, Artificial Sequence
  Description of Artificial Sequence: Synthetic oligonucleotide
cuaucgauuucagguuguu

SEQ ID NO: 1032138 - RNA, 19 nt, Artificial Sequence
  Description of Artificial Sequence: Synthetic oligonucleotide
ggaaucgacuugagagacu

SEQ ID NO: 1032139 - RNA, 19 nt, Artificial Sequence
  Description of Artificial Sequence: Synthetic oligonucleotide
cuauuucgggugggaugaa

SEQ ID NO: 1032140 - RNA, 19 nt, Artificial Sequence
  Description of Artificial Sequence: Synthetic oligonucleotide
ggcggacguacauggcgua

SEQ ID NO: 1032141 - RNA, 19 nt, Artificial Sequence
  Description of Artificial Sequence: Synthetic oligonucleotide
cuuccacguguagccggaa

SEQ ID NO: 1032142 - RNA, 19 nt, Artificial Sequence
  Description of Artificial Sequence: Synthetic oligonucleotide
caguuugagcacgguuagu

SEQ ID NO: 1032143 - RNA, 19 nt, Artificial Sequence
  Description of Artificial Sequence: Synthetic oligonucleotide
cgaccagauagagcucuuc

SEQ ID NO: 1032144 - RNA, 19 nt, Artificial Sequence
  Description of Artificial Sequence: Synthetic oligonucleotide
gccccugcgguagauuugu

SEQ ID NO: 1032145 - RNA, 19 nt, Artificial Sequence
  Description of Artificial Sequence: Synthetic oligonucleotide
cggacguacauggcguaca

SEQ ID NO: 1032146 - RNA, 19 nt, Artificial Sequence
  Description of Artificial Sequence: Synthetic oligonucleotide
gcccgacaaucucccagcu

SEQ ID NO: 1032147 - RNA, 19 nt, Artificial Sequence
  Description of Artificial Sequence: Synthetic oligonucleotide
cgucguuauggaugcacau

SEQ ID NO: 1032148 - RNA, 19 nt, Artificial Sequence
  Description of Artificial Sequence: Synthetic oligonucleotide
ccagauugcggagguugua

SEQ ID NO: 1032149 - RNA, 19 nt, Artificial Sequence
  Description of Artificial Sequence: Synthetic oligonucleotide
ggcgguuaugggcguucau

SEQ ID NO: 1032150 - RNA, 19 nt, Artificial Sequence
  Description of Artificial Sequence: Synthetic oligonucleotide
ccgucauguccuggauguc

SEQ ID NO: 1032151 - RNA, 19 nt, Artificial Sequence
  Description of Artificial Sequence: Synthetic oligonucleotide
gcaacaccucuaccuuauu

SEQ ID NO: 1032152 - RNA, 19 nt, Artificial Sequence
  Description of Artificial Sequence: Synthetic oligonucleotide
ggaacaccgcaaaccucuu

SEQ ID NO: 1032153 - RNA, 19 nt, Artificial Sequence
  Description of Artificial Sequence: Synthetic oligonucleotide
cgaccaauccagcucgcuu

SEQ ID NO: 1032154 - RNA, 19 nt, Artificial Sequence
  Description of Artificial Sequence: Synthetic oligonucleotide
cguuauggaugcacaucuu

SEQ ID NO: 1032155 - RNA, 19 nt, Artificial Sequence
  Description of Artificial Sequence: Synthetic oligonucleotide
gcacggucuggcggacgua

SEQ ID NO: 1032156 - RNA, 19 nt, Artificial Sequence
  Description of Artificial Sequence: Synthetic oligonucleotide
cgguguccggaaggccuga

SEQ ID NO: 1032157 - RNA, 19 nt, Artificial Sequence
  Description of Artificial Sequence: Synthetic oligonucleotide
ccaggcgguuaugggcguu

SEQ ID NO: 1032158 - RNA, 19 nt, Artificial Sequence
  Description of Artificial Sequence: Synthetic oligonucleotide
cauagcaccuccaagaugg

SEQ ID NO: 1032159 - RNA, 19 nt, Artificial Sequence
  Description of Artificial Sequence: Synthetic oligonucleotide
ugagcuagcaaguagcucc

SEQ ID NO: 1032160 - RNA, 19 nt, Artificial Sequence
  Description of Artificial Sequence: Synthetic oligonucleotide
ugcauugcccgcuagauag

SEQ ID NO: 1032161 - RNA, 19 nt, Artificial Sequence
  Description of Artificial Sequence: Synthetic oligonucleotide
gauagaaguaggcaccgcg

SEQ ID NO: 1032162 - RNA, 19 nt, Artificial Sequence
  Description of Artificial Sequence: Synthetic oligonucleotide
gauaagguccaaaagguag

SEQ ID NO: 1032163 - RNA, 19 nt, Artificial Sequence
  Description of Artificial Sequence: Synthetic oligonucleotide
caaaagguagucuggaggg

SEQ ID NO: 1032164 - RNA, 19 nt, Artificial Sequence
  Description of Artificial Sequence: Synthetic oligonucleotide
gauuacaguacucccagag

SEQ ID NO: 1032165 - RNA, 19 nt, Artificial Sequence
  Description of Artificial Sequence: Synthetic oligonucleotide
guagcuaaggcacagugcc

SEQ ID NO: 1032166 - RNA, 19 nt, Artificial Sequence
  Description of Artificial Sequence: Synthetic oligonucleotide
cuugagacgagucugguac

SEQ ID NO: 1032167 - RNA, 19 nt, Artificial Sequence
  Description of Artificial Sequence: Synthetic oligonucleotide
cuagauagaaguaggcacc

SEQ ID NO: 1032168 - RNA, 19 nt, Artificial Sequence
  Description of Artificial Sequence: Synthetic oligonucleotide
ucuucugacgacacagugg

SEQ ID NO: 1032169 - RNA, 19 nt, Artificial Sequence
  Description of Artificial Sequence: Synthetic oligonucleotide
aguucuaaugcuagaaggc

SEQ ID NO: 1032170 - RNA, 19 nt, Artificial Sequence
  Description of Artificial Sequence: Synthetic oligonucleotide
caguucuaaugcuagaagg

SEQ ID NO: 1032171 - RNA, 19 nt, Artificial Sequence
  Description of Artificial Sequence: Synthetic oligonucleotide
aagguagacagcugcaucu

SEQ ID NO: 1032172 - RNA, 19 nt, Artificial Sequence
  Description of Artificial Sequence: Synthetic oligonucleotide
uguaaccagggucaggcag

SEQ ID NO: 1032173 - RNA, 19 nt, Artificial Sequence
  Description of Artificial Sequence: Synthetic oligonucleotide
uguuaugugggagugagcu

SEQ ID NO: 1032174 - RNA, 19 nt, Artificial Sequence
  Description of Artificial Sequence: Synthetic oligonucleotide
gaaggcuuagcagugagag

SEQ ID NO: 1032175 - RNA, 19 nt, Artificial Sequence
  Description of Artificial Sequence: Synthetic oligonucleotide
aacguccguaggcauauac

SEQ ID NO: 1032176 - RNA, 19 nt, Artificial Sequence
  Description of Artificial Sequence: Synthetic oligonucleotide
agacaaguggcccuaguuc

SEQ ID NO: 1032177 - RNA, 19 nt, Artificial Sequence
  Description of Artificial Sequence: Synthetic oligonucleotide
uugcuuagcggccggaacg

SEQ ID NO: 1032178 - RNA, 19 nt, Artificial Sequence
  Description of Artificial Sequence: Synthetic oligonucleotide
aacacuaggcucccagguc

SEQ ID NO: 1032179 - RNA, 19 nt, Artificial Sequence
  Description of Artificial Sequence: Synthetic oligonucleotide
uauacuuugcauugcccgc

SEQ ID NO: 1032180 - RNA, 19 nt, Artificial Sequence
  Description of Artificial Sequence: Synthetic oligonucleotide
aagaugguccugcggggcc

SEQ ID NO: 1032181 - RNA, 19 nt, Artificial Sequence
  Description of Artificial Sequence: Synthetic oligonucleotide
ggaaagacaagccaagagc

SEQ ID NO: 1032182 - RNA, 19 nt, Artificial Sequence
  Description of Artificial Sequence: Synthetic oligonucleotide
aucugaugguagcuaaggc

SEQ ID NO: 1032183 - RNA, 19 nt, Artificial Sequence
  Description of Artificial Sequence: Synthetic oligonucleotide
acgagucugguacuguacc

SEQ ID NO: 1032184 - RNA, 19 nt, Artificial Sequence
  Description of Artificial Sequence: Synthetic oligonucleotide
uauuuggugucucugggaa

SEQ ID NO: 1032185 - RNA, 19 nt, Artificial Sequence
  Description of Artificial Sequence: Synthetic oligonucleotide
aguaacaugaguggcauga

SEQ ID NO: 1032186 - RNA, 19 nt, Artificial Sequence
  Description of Artificial Sequence: Synthetic oligonucleotide
acuccuaguaacaugagug

SEQ ID NO: 1032187 - RNA, 19 nt, Artificial Sequence
  Description of Artificial Sequence: Synthetic oligonucleotide
aggucgcacccauagaggc

SEQ ID NO: 1032188 - RNA, 19 nt, Artificial Sequence
  Description of Artificial Sequence: Synthetic oligonucleotide
ugcucuaaggauccccagg

SEQ ID NO: 1032189 - RNA, 19 nt, Artificial Sequence
  Description of Artificial Sequence: Synthetic oligonucleotide
aaauggaugucaaggcuuc

SEQ ID NO: 1032190 - RNA, 19 nt, Artificial Sequence
  Description of Artificial Sequence: Synthetic oligonucleotide
guagguguucaucaggccc

SEQ ID NO: 1032191 - RNA, 19 nt, Artificial Sequence
  Description of Artificial Sequence: Synthetic oligonucleotide
accgcggcgauccagcagc

SEQ ID NO: 1032192 - RNA, 19 nt, Artificial Sequence
  Description of Artificial Sequence: Synthetic oligonucleotide
uugacagggcccaagcacc

SEQ ID NO: 1032193 - RNA, 19 nt, Artificial Sequence
  Description of Artificial Sequence: Synthetic oligonucleotide
uuacugucuggacuccugg

SEQ ID NO: 1032194 - RNA, 19 nt, Artificial Sequence
  Description of Artificial Sequence: Synthetic oligonucleotide
aggcagcccacacacaggc

SEQ ID NO: 1032195 - RNA, 19 nt, Artificial Sequence
  Description of Artificial Sequence: Synthetic oligonucleotide
caugagauuauccucuuca

SEQ ID NO: 1032196 - RNA, 19 nt, Artificial Sequence
  Description of Artificial Sequence: Synthetic oligonucleotide
cauauacuuugcauugccc

SEQ ID NO: 1032197 - RNA, 19 nt, Artificial Sequence
  Description of Artificial Sequence: Synthetic oligonucleotide
cagaaaacgcagcugguag

SEQ ID NO: 1032198 - RNA, 19 nt, Artificial Sequence
  Description of Artificial Sequence: Synthetic oligonucleotide
ugcacguauaccuucugcu

SEQ ID NO: 1032199 - RNA, 19 nt, Artificial Sequence
  Description of Artificial Sequence: Synthetic oligonucleotide
uugcccgcuagauagaagu

SEQ ID NO: 1032200 - RNA, 19 nt, Artificial Sequence
  Description of Artificial Sequence: Synthetic oligonucleotide
ugucaaggcuuccgcaacg

SEQ ID NO: 1032201 - RNA, 19 nt, Artificial Sequence
  Description of Artificial Sequence: Synthetic oligonucleotide
gagggauaagguccaaaag

SEQ ID NO: 1032202 - RNA, 19 nt, Artificial Sequence
  Description of Artificial Sequence: Synthetic oligonucleotide
guaugguggaugcagugag

SEQ ID NO: 1032203 - RNA, 19 nt, Artificial Sequence
  Description of Artificial Sequence: Synthetic oligonucleotide
caaguagcuccucaggccc

SEQ ID NO: 1032204 - RNA, 19 nt, Artificial Sequence
  Description of Artificial Sequence: Synthetic oligonucleotide
uagcaaguagcuccucagg

SEQ ID NO: 1032205 - RNA, 19 nt, Artificial Sequence
  Description of Artificial Sequence: Synthetic oligonucleotide
uucaaggaugcuagccagg

SEQ ID NO: 1032206 - RNA, 19 nt, Artificial Sequence
  Description of Artificial Sequence: Synthetic oligonucleotide
gcuagauagaaguaggcac

SEQ ID NO: 1032207 - RNA, 19 nt, Artificial Sequence
  Description of Artificial Sequence: Synthetic oligonucleotide
ugaagagcacuccuaguaa

SEQ ID NO: 1032208 - RNA, 19 nt, Artificial Sequence
  Description of Artificial Sequence: Synthetic oligonucleotide
cacguauaccuucugcucc

SEQ ID NO: 1032209 - RNA, 19 nt, Artificial Sequence
  Description of Artificial Sequence: Synthetic oligonucleotide
guugacagggcccaagcac

SEQ ID NO: 1032210 - RNA, 19 nt, Artificial Sequence
  Description of Artificial Sequence: Synthetic oligonucleotide
augaagagcacuccuagua

SEQ ID NO: 1032211 - RNA, 19 nt, Artificial Sequence
  Description of Artificial Sequence: Synthetic oligonucleotide
aaacgcagcugguagcggu

SEQ ID NO: 1032212 - RNA, 19 nt, Artificial Sequence
  Description of Artificial Sequence: Synthetic oligonucleotide
gagugagcuagcaaguagc

SEQ ID NO: 1032213 - RNA, 19 nt, Artificial Sequence
  Description of Artificial Sequence: Synthetic oligonucleotide
ucaucugaugguagcuaag

SEQ ID NO: 1032214 - RNA, 19 nt, Artificial Sequence
  Description of Artificial Sequence: Synthetic oligonucleotide
ggguccaucagcucgaagc

SEQ ID NO: 1032215 - RNA, 19 nt, Artificial Sequence
  Description of Artificial Sequence: Synthetic oligonucleotide
uccaaaagguagucuggag

SEQ ID NO: 1032216 - RNA, 19 nt, Artificial Sequence
  Description of Artificial Sequence: Synthetic oligonucleotide
augucaaggcuuccgcaac

SEQ ID NO: 1032217 - RNA, 19 nt, Artificial Sequence
  Description of Artificial Sequence: Synthetic oligonucleotide
cuucugacgacacagugga

SEQ ID NO: 1032218 - RNA, 19 nt, Artificial Sequence
  Description of Artificial Sequence: Synthetic oligonucleotide
cugguacuguaccacagcc

SEQ ID NO: 1032219 - RNA, 19 nt, Artificial Sequence
  Description of Artificial Sequence: Synthetic oligonucleotide
agcaugggugucuucugac

SEQ ID NO: 1032220 - RNA, 19 nt, Artificial Sequence
  Description of Artificial Sequence: Synthetic oligonucleotide
caucugaugguagcuaagg

SEQ ID NO: 1032221 - RNA, 19 nt, Artificial Sequence
  Description of Artificial Sequence: Synthetic oligonucleotide
aguucaggcuuacugucug

SEQ ID NO: 1032222 - RNA, 19 nt, Artificial Sequence
  Description of Artificial Sequence: Synthetic oligonucleotide
uaguugacagggcccaagc

SEQ ID NO: 1032223 - RNA, 19 nt, Artificial Sequence
  Description of Artificial Sequence: Synthetic oligonucleotide
cuaacucuuauagaccaug

SEQ ID NO: 1032224 - RNA, 19 nt, Artificial Sequence
  Description of Artificial Sequence: Synthetic oligonucleotide
uucaucugaugguagcuaa

SEQ ID NO: 1032225 - RNA, 19 nt, Artificial Sequence
  Description of Artificial Sequence: Synthetic oligonucleotide
uuagcggccggaacggucu

SEQ ID NO: 1032226 - RNA, 19 nt, Artificial Sequence
  Description of Artificial Sequence: Synthetic oligonucleotide
uuugcuuagcggccggaac

SEQ ID NO: 1032227 - RNA, 19 nt, Artificial Sequence
  Description of Artificial Sequence: Synthetic oligonucleotide
gcucuaaggauccccaggg

SEQ ID NO: 1032228 - RNA, 19 nt, Artificial Sequence
  Description of Artificial Sequence: Synthetic oligonucleotide
uuccgcaacguccguaggc

SEQ ID NO: 1032229 - RNA, 19 nt, Artificial Sequence
  Description of Artificial Sequence: Synthetic oligonucleotide
agcacuccuaguaacauga

SEQ ID NO: 1032230 - RNA, 19 nt, Artificial Sequence
  Description of Artificial Sequence: Synthetic oligonucleotide
ucaggauucaaggaugcua

SEQ ID NO: 1032231 - RNA, 19 nt, Artificial Sequence
  Description of Artificial Sequence: Synthetic oligonucleotide
ugggcuuugcuuagcggcc

SEQ ID NO: 1032232 - RNA, 19 nt, Artificial Sequence
  Description of Artificial Sequence: Synthetic oligonucleotide
aaagguagucuggagggau

SEQ ID NO: 1032233 - RNA, 19 nt, Artificial Sequence
  Description of Artificial Sequence: Synthetic oligonucleotide
uccuugcucaggauucaag

SEQ ID NO: 1032234 - RNA, 19 nt, Artificial Sequence
  Description of Artificial Sequence: Synthetic oligonucleotide
agucugccaguagaagucc

SEQ ID NO: 1032235 - RNA, 19 nt, Artificial Sequence
  Description of Artificial Sequence: Synthetic oligonucleotide
uaugguggaugcagugagc

SEQ ID NO: 1032236 - RNA, 19 nt, Artificial Sequence
  Description of Artificial Sequence: Synthetic oligonucleotide
agguaccuaggcugggugg

SEQ ID NO: 1032237 - RNA, 19 nt, Artificial Sequence
  Description of Artificial Sequence: Synthetic oligonucleotide
gaguuguccuauuucuuga

SEQ ID NO: 1032238 - RNA, 19 nt, Artificial Sequence
  Description of Artificial Sequence: Synthetic oligonucleotide
acggucuaggagcaugaag

SEQ ID NO: 1032239 - RNA, 19 nt, Artificial Sequence
  Description of Artificial Sequence: Synthetic oligonucleotide
uuugcauugcccgcuagau

SEQ ID NO: 1032240 - RNA, 19 nt, Artificial Sequence
  Description of Artificial Sequence: Synthetic oligonucleotide
caucccuaacagcuggugc

SEQ ID NO: 1032241 - RNA, 19 nt, Artificial Sequence
  Description of Artificial Sequence: Synthetic oligonucleotide
aaaacgcagcugguagcgg

SEQ ID NO: 1032242 - RNA, 19 nt, Artificial Sequence
  Description of Artificial Sequence: Synthetic oligonucleotide
gacaaguggcccuaguucu

SEQ ID NO: 1032243 - RNA, 19 nt, Artificial Sequence
  Description of Artificial Sequence: Synthetic oligonucleotide
acggauccgagggauaagg

SEQ ID NO: 1032244 - RNA, 19 nt, Artificial Sequence
  Description of Artificial Sequence: Synthetic oligonucleotide
agcggugcucuaaggaucc

SEQ ID NO: 1032245 - RNA, 19 nt, Artificial Sequence
  Description of Artificial Sequence: Synthetic oligonucleotide
ugggagugagcuagcaagu

SEQ ID NO: 1032246 - RNA, 19 nt, Artificial Sequence
  Description of Artificial Sequence: Synthetic oligonucleotide
aagagcacuccuaguaaca

SEQ ID NO: 1032247 - RNA, 19 nt, Artificial Sequence
  Description of Artificial Sequence: Synthetic oligonucleotide
ugcggggccgauuacagua

SEQ ID NO: 1032248 - RNA, 19 nt, Artificial Sequence
  Description of Artificial Sequence: Synthetic oligonucleotide
ugaugguagcuaaggcaca

SEQ ID NO: 1032249 - RNA, 19 nt, Artificial Sequence
  Description of Artificial Sequence: Synthetic oligonucleotide
auaagguccaaaagguagu

SEQ ID NO: 1032250 - RNA, 19 nt, Artificial Sequence
  Description of Artificial Sequence: Synthetic oligonucleotide
acauagcaccuccaagaug

SEQ ID NO: 1032251 - RNA, 19 nt, Artificial Sequence
  Description of Artificial Sequence: Synthetic oligonucleotide
ugcuuagcggccggaacgg

SEQ ID NO: 1032252 - RNA, 19 nt, Artificial Sequence
  Description of Artificial Sequence: Synthetic oligonucleotide
cacccauagaggcacccgg

SEQ ID NO: 1032253 - RNA, 19 nt, Artificial Sequence
  Description of Artificial Sequence: Synthetic oligonucleotide
gcauauacuuugcauugcc

SEQ ID NO: 1032254 - RNA, 19 nt, Artificial Sequence
  Description of Artificial Sequence: Synthetic oligonucleotide
agauagaaguaggcaccgc

SEQ ID NO: 1032255 - RNA, 19 nt, Artificial Sequence
  Description of Artificial Sequence: Synthetic oligonucleotide
gccggaacggucuaggagc

SEQ ID NO: 1032256 - RNA, 19 nt, Artificial Sequence
  Description of Artificial Sequence: Synthetic oligonucleotide
caggucgcacccauagagg

SEQ ID NO: 1032257 - RNA, 19 nt, Artificial Sequence
  Description of Artificial Sequence: Synthetic oligonucleotide
uacaguacucccagagcuc

SEQ ID NO: 1032258 - RNA, 19 nt, Artificial Sequence
  Description of Artificial Sequence: Synthetic oligonucleotide
cuugcucaggauucaagga

SEQ ID NO: 1032259 - RNA, 19 nt, Artificial Sequence
  Description of Artificial Sequence: Synthetic oligonucleotide
cauagaggcacccggacaa

SEQ ID NO: 1032260 - RNA, 19 nt, Artificial Sequence
  Description of Artificial Sequence: Synthetic oligonucleotide
uagcaugggugucuucuga

SEQ ID NO: 1032261 - RNA, 19 nt, Artificial Sequence
  Description of Artificial Sequence: Synthetic oligonucleotide
guaggcaccgcggcgaucc

SEQ ID NO: 1032262 - RNA, 19 nt, Artificial Sequence
  Description of Artificial Sequence: Synthetic oligonucleotide
ggagugagcuagcaaguag

SEQ ID NO: 1032263 - RNA, 19 nt, Artificial Sequence
  Description of Artificial Sequence: Synthetic oligonucleotide
uaaugcuagaaggcuuagc

SEQ ID NO: 1032264 - RNA, 19 nt, Artificial Sequence
  Description of Artificial Sequence: Synthetic oligonucleotide
gcaguucuaaugcuagaag

SEQ ID NO: 1032265 - RNA, 19 nt, Artificial Sequence
  Description of Artificial Sequence: Synthetic oligonucleotide
uagcggugcucuaaggauc

SEQ ID NO: 1032266 - RNA, 19 nt, Artificial Sequence
  Description of Artificial Sequence: Synthetic oligonucleotide
agucugguacuguaccaca

SEQ ID NO: 1032267 - RNA, 19 nt, Artificial Sequence
  Description of Artificial Sequence: Synthetic oligonucleotide
gagcacuccuaguaacaug

SEQ ID NO: 1032268 - RNA, 19 nt, Artificial Sequence
  Description of Artificial Sequence: Synthetic oligonucleotide
caagguagacagcugcauc

SEQ ID NO: 1032269 - RNA, 19 nt, Artificial Sequence
  Description of Artificial Sequence: Synthetic oligonucleotide
guaaccagggucaggcagc

SEQ ID NO: 1032270 - RNA, 19 nt, Artificial Sequence
  Description of Artificial Sequence: Synthetic oligonucleotide
cucgcucuugaauggcugc

SEQ ID NO: 1032271 - RNA, 19 nt, Artificial Sequence
  Description of Artificial Sequence: Synthetic oligonucleotide
cugcacguauaccuucugc

SEQ ID NO: 1032272 - RNA, 19 nt, Artificial Sequence
  Description of Artificial Sequence: Synthetic oligonucleotide
aguugacagggcccaagca

SEQ ID NO: 1032273 - RNA, 19 nt, Artificial Sequence
  Description of Artificial Sequence: Synthetic oligonucleotide
uucucuaguuccugccacu

SEQ ID NO: 1032274 - RNA, 19 nt, Artificial Sequence
  Description of Artificial Sequence: Synthetic oligonucleotide
uggcggcagccaaagaaca

SEQ ID NO: 1032275 - RNA, 19 nt, Artificial Sequence
  Description of Artificial Sequence: Synthetic oligonucleotide
auaguugacagggcccaag

SEQ ID NO: 1032276 - RNA, 19 nt, Artificial Sequence
  Description of Artificial Sequence: Synthetic oligonucleotide
gcuguuaugugggagugag

SEQ ID NO: 1032277 - RNA, 19 nt, Artificial Sequence
  Description of Artificial Sequence: Synthetic oligonucleotide
aguucagcagggcugggua

SEQ ID NO: 1032278 - RNA, 19 nt, Artificial Sequence
  Description of Artificial Sequence: Synthetic oligonucleotide
uccgcaacguccguaggca

SEQ ID NO: 1032279 - RNA, 19 nt, Artificial Sequence
  Description of Artificial Sequence: Synthetic oligonucleotide
ggaacacuaggcucccagg

SEQ ID NO: 1032280 - RNA, 19 nt, Artificial Sequence
  Description of Artificial Sequence: Synthetic oligonucleotide
gaaguaggcaccgcggcga

SEQ ID NO: 1032281 - RNA, 19 nt, Artificial Sequence
  Description of Artificial Sequence: Synthetic oligonucleotide
aguuguccuauuucuugaa

SEQ ID NO: 1032282 - RNA, 19 nt, Artificial Sequence
  Description of Artificial Sequence: Synthetic oligonucleotide
gagucugguacuguaccac

SEQ ID NO: 1032283 - RNA, 19 nt, Artificial Sequence
  Description of Artificial Sequence: Synthetic oligonucleotide
caaguggcccuaguucucg

SEQ ID NO: 1032284 - RNA, 19 nt, Artificial Sequence
  Description of Artificial Sequence: Synthetic oligonucleotide
ccaggucucagucuggaag

SEQ ID NO: 1032285 - RNA, 19 nt, Artificial Sequence
  Description of Artificial Sequence: Synthetic oligonucleotide
ggacggagggguauggugg

SEQ ID NO: 1032286 - RNA, 19 nt, Artificial Sequence
  Description of Artificial Sequence: Synthetic oligonucleotide
aggcugugaccacaguuca

SEQ ID NO: 1032287 - RNA, 19 nt, Artificial Sequence
  Description of Artificial Sequence: Synthetic oligonucleotide
caugggugucuucugacga

SEQ ID NO: 1032288 - RNA, 19 nt, Artificial Sequence
  Description of Artificial Sequence: Synthetic oligonucleotide
auacuuugcauugcccgcu

SEQ ID NO: 1032289 - RNA, 19 nt, Artificial Sequence
  Description of Artificial Sequence: Synthetic oligonucleotide
cccgcuagauagaaguagg

SEQ ID NO: 1032290 - RNA, 19 nt, Artificial Sequence
  Description of Artificial Sequence: Synthetic oligonucleotide
gcuucggccucccacaggc

SEQ ID NO: 1032291 - RNA, 19 nt, Artificial Sequence
  Description of Artificial Sequence: Synthetic oligonucleotide
ccaggucgcacccauagag

SEQ ID NO: 1032292 - RNA, 19 nt, Artificial Sequence
  Description of Artificial Sequence: Synthetic oligonucleotide
guggcccuaguucucggag

SEQ ID NO: 1032293 - RNA, 19 nt, Artificial Sequence
  Description of Artificial Sequence: Synthetic oligonucleotide
ugagucucuggcucccagu

SEQ ID NO: 1032294 - RNA, 19 nt, Artificial Sequence
  Description of Artificial Sequence: Synthetic oligonucleotide
gcacacacggcccagguca

SEQ ID NO: 1032295 - RNA, 19 nt, Artificial Sequence
  Description of Artificial Sequence: Synthetic oligonucleotide
gacggggcuccuugagacg

SEQ ID NO: 1032296 - RNA, 19 nt, Artificial Sequence
  Description of Artificial Sequence: Synthetic oligonucleotide
uggcccuaguucucggagc

SEQ ID NO: 1032297 - RNA, 19 nt, Artificial Sequence
  Description of Artificial Sequence: Synthetic oligonucleotide
cugguagcggugcucuaag

SEQ ID NO: 1032298 - RNA, 19 nt, Artificial Sequence
  Description of Artificial Sequence: Synthetic oligonucleotide
guaggcauauacuuugcau

SEQ ID NO: 1032299 - RNA, 19 nt, Artificial Sequence
  Description of Artificial Sequence: Synthetic oligonucleotide
gguaccuaggcuggguggg

SEQ ID NO: 1032300 - RNA, 19 nt, Artificial Sequence
  Description of Artificial Sequence: Synthetic oligonucleotide
uaguaacaugaguggcaug

SEQ ID NO: 1032301 - RNA, 19 nt, Artificial Sequence
  Description of Artificial Sequence: Synthetic oligonucleotide
ccgauuacaguacucccag

SEQ ID NO: 1032302 - RNA, 19 nt, Artificial Sequence
  Description of Artificial Sequence: Synthetic oligonucleotide
cuuagcggccggaacgguc

SEQ ID NO: 1032303 - RNA, 19 nt, Artificial Sequence
  Description of Artificial Sequence: Synthetic oligonucleotide
caggcccugccagaaaacg

SEQ ID NO: 1032304 - RNA, 19 nt, Artificial Sequence
  Description of Artificial Sequence: Synthetic oligonucleotide
guauaccuucugcuccugc

SEQ ID NO: 1032305 - RNA, 19 nt, Artificial Sequence
  Description of Artificial Sequence: Synthetic oligonucleotide
agugagcuagcaaguagcu

SEQ ID NO: 1032306 - RNA, 19 nt, Artificial Sequence
  Description of Artificial Sequence: Synthetic oligonucleotide
gcuggguagguguucauca

SEQ ID NO: 1032307 - RNA, 19 nt, Artificial Sequence
  Description of Artificial Sequence: Synthetic oligonucleotide
gagucuggcaagguagaca

SEQ ID NO: 1032308 - RNA, 19 nt, Artificial Sequence
  Description of Artificial Sequence: Synthetic oligonucleotide
gccccagcaguucuaaugc

SEQ ID NO: 1032309 - RNA, 19 nt, Artificial Sequence
  Description of Artificial Sequence: Synthetic oligonucleotide
ggauccgagggauaagguc

SEQ ID NO: 1032310 - RNA, 19 nt, Artificial Sequence
  Description of Artificial Sequence: Synthetic oligonucleotide
uaaccagggucaggcagcc

SEQ ID NO: 1032311 - RNA, 19 nt, Artificial Sequence
  Description of Artificial Sequence: Synthetic oligonucleotide
ucaaggcuuccgcaacguc

SEQ ID NO: 1032312 - RNA, 19 nt, Artificial Sequence
  Description of Artificial Sequence: Synthetic oligonucleotide
gacgagucugguacuguac

SEQ ID NO: 1032313 - RNA, 19 nt, Artificial Sequence
  Description of Artificial Sequence: Synthetic oligonucleotide
uugcauugcccgcuagaua

SEQ ID NO: 1032314 - RNA, 19 nt, Artificial Sequence
  Description of Artificial Sequence: Synthetic oligonucleotide
agaggcacccggacaaguc

SEQ ID NO: 1032315 - RNA, 19 nt, Artificial Sequence
  Description of Artificial Sequence: Synthetic oligonucleotide
cucagucugccaguagaag

SEQ ID NO: 1032316 - RNA, 19 nt, Artificial Sequence
  Description of Artificial Sequence: Synthetic oligonucleotide
ucuagcccauguugggaaa

SEQ ID NO: 1032317 - RNA, 19 nt, Artificial Sequence
  Description of Artificial Sequence: Synthetic oligonucleotide
cuguuaugugggagugagc

SEQ ID NO: 1032318 - RNA, 19 nt, Artificial Sequence
  Description of Artificial Sequence: Synthetic oligonucleotide
gcuuccgcaacguccguag

SEQ ID NO: 1032319 - RNA, 19 nt, Artificial Sequence
  Description of Artificial Sequence: Synthetic oligonucleotide
gguagcuaaggcacagugc

SEQ ID NO: 1032320 - RNA, 19 nt, Artificial Sequence
  Description of Artificial Sequence: Synthetic oligonucleotide
cuagcccauguugggaaag

SEQ ID NO: 1032321 - RNA, 19 nt, Artificial Sequence
  Description of Artificial Sequence: Synthetic oligonucleotide
aacgcagcugguagcggug

SEQ ID NO: 1032322 - RNA, 19 nt, Artificial Sequence
  Description of Artificial Sequence: Synthetic oligonucleotide
agaugguccugcggggccg

SEQ ID NO: 1032323 - RNA, 19 nt, Artificial Sequence
  Description of Artificial Sequence: Synthetic oligonucleotide
aguccugaucccgcuggcg

SEQ ID NO: 1032324 - RNA, 19 nt, Artificial Sequence
  Description of Artificial Sequence: Synthetic oligonucleotide
agacgagucugguacugua

SEQ ID NO: 1032325 - RNA, 19 nt, Artificial Sequence
  Description of Artificial Sequence: Synthetic oligonucleotide
guagccuccugggaugagc

SEQ ID NO: 1032326 - RNA, 19 nt, Artificial Sequence
  Description of Artificial Sequence: Synthetic oligonucleotide
ccuaguaacaugaguggca

SEQ ID NO: 1032327 - RNA, 19 nt, Artificial Sequence
  Description of Artificial Sequence: Synthetic oligonucleotide
aggaugcuagccaggagga

SEQ ID NO: 1032328 - RNA, 19 nt, Artificial Sequence
  Description of Artificial Sequence: Synthetic oligonucleotide
agguagacagcugcaucug

SEQ ID NO: 1032329 - RNA, 19 nt, Artificial Sequence
  Description of Artificial Sequence: Synthetic oligonucleotide
ggcccuaguucucggagcc

SEQ ID NO: 1032330 - RNA, 19 nt, Artificial Sequence
  Description of Artificial Sequence: Synthetic oligonucleotide
ugagcgcugggcgcugggg

SEQ ID NO: 1032331 - RNA, 19 nt, Artificial Sequence
  Description of Artificial Sequence: Synthetic oligonucleotide
ggaacggucuaggagcaug

SEQ ID NO: 1032332 - RNA, 19 nt, Artificial Sequence
  Description of Artificial Sequence: Synthetic oligonucleotide
gaacggucuaggagcauga

SEQ ID NO: 1032333 - RNA, 19 nt, Artificial Sequence
  Description of Artificial Sequence: Synthetic oligonucleotide
ccguggacggauccgaggg

SEQ ID NO: 1032334 - RNA, 19 nt, Artificial Sequence
  Description of Artificial Sequence: Synthetic oligonucleotide
gacggagggguauggugga

SEQ ID NO: 1032335 - RNA, 19 nt, Artificial Sequence
  Description of Artificial Sequence: Synthetic oligonucleotide
cucuagcccauguugggaa

SEQ ID NO: 1032336 - RNA, 19 nt, Artificial Sequence
  Description of Artificial Sequence: Synthetic oligonucleotide
ggccgauuacaguacuccc

SEQ ID NO: 1032337 - RNA, 19 nt, Artificial Sequence
  Description of Artificial Sequence: Synthetic oligonucleotide
acgcagcugguagcggugc

SEQ ID NO: 1032338 - RNA, 19 nt, Artificial Sequence
  Description of Artificial Sequence: Synthetic oligonucleotide
agcuucggccucccacagg

SEQ ID NO: 1032339 - RNA, 19 nt, Artificial Sequence
  Description of Artificial Sequence: Synthetic oligonucleotide
uacuuugcauugcccgcua

SEQ ID NO: 1032340 - RNA, 19 nt, Artificial Sequence
  Description of Artificial Sequence: Synthetic oligonucleotide
aaguaggcaccgcggcgau

SEQ ID NO: 1032341 - RNA, 19 nt, Artificial Sequence
  Description of Artificial Sequence: Synthetic oligonucleotide
gagcaugaagagcacuccu

SEQ ID NO: 1032342 - RNA, 19 nt, Artificial Sequence
  Description of Artificial Sequence: Synthetic oligonucleotide
ggccggaacggucuaggag

SEQ ID NO: 1032343 - RNA, 19 nt, Artificial Sequence
  Description of Artificial Sequence: Synthetic oligonucleotide
gggccgauuacaguacucc

SEQ ID NO: 1032344 - RNA, 19 nt, Artificial Sequence
  Description of Artificial Sequence: Synthetic oligonucleotide
acgacggggcuccuugaga

SEQ ID NO: 1032345 - RNA, 19 nt, Artificial Sequence
  Description of Artificial Sequence: Synthetic oligonucleotide
ggcccauaaggcucagugc

SEQ ID NO: 1032346 - RNA, 19 nt, Artificial Sequence
  Description of Artificial Sequence: Synthetic oligonucleotide
gcugacagaucucccacuc

SEQ ID NO: 1032347 - RNA, 19 nt, Artificial Sequence
  Description of Artificial Sequence: Synthetic oligonucleotide
ucgcucuugaauggcugcu

SEQ ID NO: 1032348 - RNA, 19 nt, Artificial Sequence
  Description of Artificial Sequence: Synthetic oligonucleotide
acucgcucuugaauggcug

SEQ ID NO: 1032349 - RNA, 19 nt, Artificial Sequence
  Description of Artificial Sequence: Synthetic oligonucleotide
ggcauauacuuugcauugc

SEQ ID NO: 1032350 - RNA, 19 nt, Artificial Sequence
  Description of Artificial Sequence: Synthetic oligonucleotide
uccugcggggccgauuaca

SEQ ID NO: 1032351 - RNA, 19 nt, Artificial Sequence
  Description of Artificial Sequence: Synthetic oligonucleotide
cagcuguuaugugggagug

SEQ ID NO: 1032352 - RNA, 19 nt, Artificial Sequence
  Description of Artificial Sequence: Synthetic oligonucleotide
gcacguauaccuucugcuc

SEQ ID NO: 1032353 - RNA, 19 nt, Artificial Sequence
  Description of Artificial Sequence: Synthetic oligonucleotide
uagcccauguugggaaaga

SEQ ID NO: 1032354 - RNA, 19 nt, Artificial Sequence
  Description of Artificial Sequence: Synthetic oligonucleotide
acguccguaggcauauacu

SEQ ID NO: 1032355 - RNA, 19 nt, Artificial Sequence
  Description of Artificial Sequence: Synthetic oligonucleotide
auagaggcacccggacaag

SEQ ID NO: 1032356 - RNA, 19 nt, Artificial Sequence
  Description of Artificial Sequence: Synthetic oligonucleotide
gcuagcaaguagcuccuca

SEQ ID NO: 1032357 - RNA, 19 nt, Artificial Sequence
  Description of Artificial Sequence: Synthetic oligonucleotide
ugcccgcuagauagaagua

SEQ ID NO: 1032358 - RNA, 19 nt, Artificial Sequence
  Description of Artificial Sequence: Synthetic oligonucleotide
ggaugucaaggcuuccgca

SEQ ID NO: 1032359 - RNA, 19 nt, Artificial Sequence
  Description of Artificial Sequence: Synthetic oligonucleotide
ccgcucuagcccauguugg

SEQ ID NO: 1032360 - RNA, 19 nt, Artificial Sequence
  Description of Artificial Sequence: Synthetic oligonucleotide
gacggauccgagggauaag

SEQ ID NO: 1032361 - RNA, 19 nt, Artificial Sequence
  Description of Artificial Sequence: Synthetic oligonucleotide
agaaggcuuagcagugaga

SEQ ID NO: 1032362 - RNA, 19 nt, Artificial Sequence
  Description of Artificial Sequence: Synthetic oligonucleotide
guuaugugggagugagcua

SEQ ID NO: 1032363 - RNA, 19 nt, Artificial Sequence
  Description of Artificial Sequence: Synthetic oligonucleotide
cacacacggcccaggucag

SEQ ID NO: 1032364 - RNA, 19 nt, Artificial Sequence
  Description of Artificial Sequence: Synthetic oligonucleotide
gcggcagccaaagaacaag

SEQ ID NO: 1032365 - RNA, 19 nt, Artificial Sequence
  Description of Artificial Sequence: Synthetic oligonucleotide
gcccgcuagauagaaguag

SEQ ID NO: 1032366 - RNA, 19 nt, Artificial Sequence
  Description of Artificial Sequence: Synthetic oligonucleotide
ccgaagugcccacagccag

SEQ ID NO: 1032367 - RNA, 19 nt, Artificial Sequence
  Description of Artificial Sequence: Synthetic oligonucleotide
cccgagagaaggcuguaac

SEQ ID NO: 1032368 - RNA, 19 nt, Artificial Sequence
  Description of Artificial Sequence: Synthetic oligonucleotide
cuaguaacaugaguggcau

SEQ ID NO: 1032369 - RNA, 19 nt, Artificial Sequence
  Description of Artificial Sequence: Synthetic oligonucleotide
cccgcucuagcccauguug

SEQ ID NO: 1032370 - RNA, 19 nt, Artificial Sequence
  Description of Artificial Sequence: Synthetic oligonucleotide
ccauguugggaaagacaag

SEQ ID NO: 1032371 - RNA, 19 nt, Artificial Sequence
  Description of Artificial Sequence: Synthetic oligonucleotide
gaccacaguucagcagggc

SEQ ID NO: 1032372 - RNA, 19 nt, Artificial Sequence
  Description of Artificial Sequence: Synthetic oligonucleotide
cuucggaugcuguccugga

SEQ ID NO: 1032373 - RNA, 19 nt, Artificial Sequence
  Description of Artificial Sequence: Synthetic oligonucleotide
ccggacaaguccuugcuca

SEQ ID NO: 1032374 - RNA, 19 nt, Artificial Sequence
  Description of Artificial Sequence: Synthetic oligonucleotide
cugggaacacuaggcuccc

SEQ ID NO: 1032375 - RNA, 19 nt, Artificial Sequence
  Description of Artificial Sequence: Synthetic oligonucleotide
uggacggauccgagggaua

SEQ ID NO: 1032376 - RNA, 19 nt, Artificial Sequence
  Description of Artificial Sequence: Synthetic oligonucleotide
cccauaaggcucagugcag

SEQ ID NO: 1032377 - RNA, 19 nt, Artificial Sequence
  Description of Artificial Sequence: Synthetic oligonucleotide
ggugcucuaaggaucccca

SEQ ID NO: 1032378 - RNA, 19 nt, Artificial Sequence
  Description of Artificial Sequence: Synthetic oligonucleotide
gugcagauggggcauuccu

SEQ ID NO: 1032379 - RNA, 19 nt, Artificial Sequence
  Description of Artificial Sequence: Synthetic oligonucleotide
ccugcggggccgauuacag

SEQ ID NO: 1032380 - RNA, 19 nt, Artificial Sequence
  Description of Artificial Sequence: Synthetic oligonucleotide
gccacgacggggcuccuug

SEQ ID NO: 1032381 - RNA, 19 nt, Artificial Sequence
  Description of Artificial Sequence: Synthetic oligonucleotide
cccuaguucucggagccgg

SEQ ID NO: 1032382 - RNA, 19 nt, Artificial Sequence
  Description of Artificial Sequence: Synthetic oligonucleotide
agugccagugcagcuguua

SEQ ID NO: 1032383 - RNA, 19 nt, Artificial Sequence
  Description of Artificial Sequence: Synthetic oligonucleotide
guaacaugaguggcaugaa

SEQ ID NO: 1032384 - RNA, 19 nt, Artificial Sequence
  Description of Artificial Sequence: Synthetic oligonucleotide
agcuguuaugugggaguga

SEQ ID NO: 1032385 - RNA, 19 nt, Artificial Sequence
  Description of Artificial Sequence: Synthetic oligonucleotide
cacuccuaguaacaugagu

SEQ ID NO: 1032386 - RNA, 19 nt, Artificial Sequence
  Description of Artificial Sequence: Synthetic oligonucleotide
cccaagcaccaguugaguc

SEQ ID NO: 1032387 - RNA, 19 nt, Artificial Sequence
  Description of Artificial Sequence: Synthetic oligonucleotide
ucccgagagaaggcuguaa

SEQ ID NO: 1032388 - RNA, 19 nt, Artificial Sequence
  Description of Artificial Sequence: Synthetic oligonucleotide
gccgauuacaguacuccca

SEQ ID NO: 1032389 - RNA, 19 nt, Artificial Sequence
  Description of Artificial Sequence: Synthetic oligonucleotide
ccuccauaguugacagggc

SEQ ID NO: 1032390 - RNA, 19 nt, Artificial Sequence
  Description of Artificial Sequence: Synthetic oligonucleotide
acccauagaggcacccgga

SEQ ID NO: 1032391 - RNA, 19 nt, Artificial Sequence
  Description of Artificial Sequence: Synthetic oligonucleotide
guaccuaggcugggugggc

SEQ ID NO: 1032392 - RNA, 19 nt, Artificial Sequence
  Description of Artificial Sequence: Synthetic oligonucleotide
acgacacaguggacagcac

SEQ ID NO: 1032393 - RNA, 19 nt, Artificial Sequence
  Description of Artificial Sequence: Synthetic oligonucleotide
ccguaggcauauacuuugc

SEQ ID NO: 1032394 - RNA, 19 nt, Artificial Sequence
  Description of Artificial Sequence: Synthetic oligonucleotide
aguaggcaccgcggcgauc

SEQ ID NO: 1032395 - RNA, 19 nt, Artificial Sequence
  Description of Artificial Sequence: Synthetic oligonucleotide
cuguaaccagggucaggca

SEQ ID NO: 1032396 - RNA, 19 nt, Artificial Sequence
  Description of Artificial Sequence: Synthetic oligonucleotide
agaaggcccguggacggau

SEQ ID NO: 1032397 - RNA, 19 nt, Artificial Sequence
  Description of Artificial Sequence: Synthetic oligonucleotide
gccggugcugcacguauac

SEQ ID NO: 1032398 - RNA, 19 nt, Artificial Sequence
  Description of Artificial Sequence: Synthetic oligonucleotide
aggcacccggacaaguccu

SEQ ID NO: 1032399 - RNA, 19 nt, Artificial Sequence
  Description of Artificial Sequence: Synthetic oligonucleotide
ggccacguucccgaagugc

SEQ ID NO: 1032400 - RNA, 19 nt, Artificial Sequence
  Description of Artificial Sequence: Synthetic oligonucleotide
auggggcauuccuccucug

SEQ ID NO: 1032401 - RNA, 19 nt, Artificial Sequence
  Description of Artificial Sequence: Synthetic oligonucleotide
ccaagcaccaguugagucu

SEQ ID NO: 1032402 - RNA, 19 nt, Artificial Sequence
  Description of Artificial Sequence: Synthetic oligonucleotide
gacaagccaagagcucaaa

SEQ ID NO: 1032403 - RNA, 19 nt, Artificial Sequence
  Description of Artificial Sequence: Synthetic oligonucleotide
ggauaagguccaaaaggua

SEQ ID NO: 1032404 - RNA, 19 nt, Artificial Sequence
  Description of Artificial Sequence: Synthetic oligonucleotide
cauugcccgcuagauagaa

SEQ ID NO: 1032405 - RNA, 19 nt, Artificial Sequence
  Description of Artificial Sequence: Synthetic oligonucleotide
cugcuccuccauaguugac

SEQ ID NO: 1032406 - RNA, 19 nt, Artificial Sequence
  Description of Artificial Sequence: Synthetic oligonucleotide
cacguucccgaagugccca

SEQ ID NO: 1032407 - RNA, 19 nt, Artificial Sequence
  Description of Artificial Sequence: Synthetic oligonucleotide
cgacggggcuccuugagac

SEQ ID NO: 1032408 - RNA, 19 nt, Artificial Sequence
  Description of Artificial Sequence: Synthetic oligonucleotide
caccgcggcgauccagcag

SEQ ID NO: 1032409 - RNA, 19 nt, Artificial Sequence
  Description of Artificial Sequence: Synthetic oligonucleotide
cccguggacggauccgagg

SEQ ID NO: 1032410 - RNA, 19 nt, Artificial Sequence
  Description of Artificial Sequence: Synthetic oligonucleotide
gguccugcggggccgauua

SEQ ID NO: 1032411 - RNA, 19 nt, Artificial Sequence
  Description of Artificial Sequence: Synthetic oligonucleotide
ggcuguaaccagggucagg

SEQ ID NO: 1032412 - RNA, 19 nt, Artificial Sequence
  Description of Artificial Sequence: Synthetic oligonucleotide
cgagggauaagguccaaaa

SEQ ID NO: 1032413 - RNA, 19 nt, Artificial Sequence
  Description of Artificial Sequence: Synthetic oligonucleotide
cgcucuagcccauguuggg

SEQ ID NO: 1032414 - RNA, 19 nt, Artificial Sequence
  Description of Artificial Sequence: Synthetic oligonucleotide
cagcucgaagcaguuccuc

SEQ ID NO: 1032415 - RNA, 19 nt, Artificial Sequence
  Description of Artificial Sequence: Synthetic oligonucleotide
gagcuagcaaguagcuccu

SEQ ID NO: 1032416 - RNA, 19 nt, Artificial Sequence
  Description of Artificial Sequence: Synthetic oligonucleotide
ugccugccccucacccucu

SEQ ID NO: 1032417 - RNA, 19 nt, Artificial Sequence
  Description of Artificial Sequence: Synthetic oligonucleotide
cagacaaguggcccuaguu

SEQ ID NO: 1032418 - RNA, 19 nt, Artificial Sequence
  Description of Artificial Sequence: Synthetic oligonucleotide
acuaggcucccaggucgca

SEQ ID NO: 1032419 - RNA, 19 nt, Artificial Sequence
  Description of Artificial Sequence: Synthetic oligonucleotide
gagaaggcccguggacgga

SEQ ID NO: 1032420 - RNA, 19 nt, Artificial Sequence
  Description of Artificial Sequence: Synthetic oligonucleotide
uaggcaccgcggcgaucca

SEQ ID NO: 1032421 - RNA, 19 nt, Artificial Sequence
  Description of Artificial Sequence: Synthetic oligonucleotide
ggacggauccgagggauaa

SEQ ID NO: 1032422 - RNA, 19 nt, Artificial Sequence
  Description of Artificial Sequence: Synthetic oligonucleotide
agcccacacacaggcugug

SEQ ID NO: 1032423 - RNA, 19 nt, Artificial Sequence
  Description of Artificial Sequence: Synthetic oligonucleotide
gagacgagucugguacugu

SEQ ID NO: 1032424 - RNA, 19 nt, Artificial Sequence
  Description of Artificial Sequence: Synthetic oligonucleotide
gagccggugcugcacguau

SEQ ID NO: 1032425 - RNA, 19 nt, Artificial Sequence
  Description of Artificial Sequence: Synthetic oligonucleotide
cacucuagcaugggugucu

SEQ ID NO: 1032426 - RNA, 19 nt, Artificial Sequence
  Description of Artificial Sequence: Synthetic oligonucleotide
cacucgcucuugaauggcu

SEQ ID NO: 1032427 - RNA, 19 nt, Artificial Sequence
  Description of Artificial Sequence: Synthetic oligonucleotide
aggcaccgcggcgauccag

SEQ ID NO: 1032428 - RNA, 19 nt, Artificial Sequence
  Description of Artificial Sequence: Synthetic oligonucleotide
gugagaggcggcgggcaca

SEQ ID NO: 1032429 - RNA, 19 nt, Artificial Sequence
  Description of Artificial Sequence: Synthetic oligonucleotide
gcggccggaacggucuagg

SEQ ID NO: 1032430 - RNA, 19 nt, Artificial Sequence
  Description of Artificial Sequence: Synthetic oligonucleotide
ggggccacguucccgaagu

SEQ ID NO: 1032431 - RNA, 19 nt, Artificial Sequence
  Description of Artificial Sequence: Synthetic oligonucleotide
gaaggcccguggacggauc

SEQ ID NO: 1032432 - RNA, 19 nt, Artificial Sequence
  Description of Artificial Sequence: Synthetic oligonucleotide
agccgccgugugugggaag

SEQ ID NO: 1032433 - RNA, 19 nt, Artificial Sequence
  Description of Artificial Sequence: Synthetic oligonucleotide
ggcuuacugucuggacucc

SEQ ID NO: 1032434 - RNA, 19 nt, Artificial Sequence
  Description of Artificial Sequence: Synthetic oligonucleotide
gcacuccuaguaacaugag

SEQ ID NO: 1032435 - RNA, 19 nt, Artificial Sequence
  Description of Artificial Sequence: Synthetic oligonucleotide
cugaucccgcuggcggcag

SEQ ID NO: 1032436 - RNA, 19 nt, Artificial Sequence
  Description of Artificial Sequence: Synthetic oligonucleotide
ccauaaggcucagugcaga

SEQ ID NO: 1032437 - RNA, 19 nt, Artificial Sequence
  Description of Artificial Sequence: Synthetic oligonucleotide
gggguccaucagcucgaag

SEQ ID NO: 1032438 - RNA, 19 nt, Artificial Sequence
  Description of Artificial Sequence: Synthetic oligonucleotide
ccacucgcucuugaauggc

SEQ ID NO: 1032439 - RNA, 19 nt, Artificial Sequence
  Description of Artificial Sequence: Synthetic oligonucleotide
gguuggagaguuguccuau

SEQ ID NO: 1032440 - RNA, 19 nt, Artificial Sequence
  Description of Artificial Sequence: Synthetic oligonucleotide
uccgagggauaagguccaa

SEQ ID NO: 1032441 - RNA, 19 nt, Artificial Sequence
  Description of Artificial Sequence: Synthetic oligonucleotide
ggucgcacccauagaggca

SEQ ID NO: 1032442 - RNA, 19 nt, Artificial Sequence
  Description of Artificial Sequence: Synthetic oligonucleotide
uagcggccggaacggucua

SEQ ID NO: 1032443 - RNA, 19 nt, Artificial Sequence
  Description of Artificial Sequence: Synthetic oligonucleotide
cauaguugacagggcccaa

SEQ ID NO: 1032444 - RNA, 19 nt, Artificial Sequence
  Description of Artificial Sequence: Synthetic oligonucleotide
agcugguagcggugcucua

SEQ ID NO: 1032445 - RNA, 19 nt, Artificial Sequence
  Description of Artificial Sequence: Synthetic oligonucleotide
guccguaggcauauacuuu

SEQ ID NO: 1032446 - RNA, 19 nt, Artificial Sequence
  Description of Artificial Sequence: Synthetic oligonucleotide
guuuggccaugggccacuc

SEQ ID NO: 1032447 - RNA, 19 nt, Artificial Sequence
  Description of Artificial Sequence: Synthetic oligonucleotide
cccggacaaguccuugcuc

SEQ ID NO: 1032448 - RNA, 19 nt, Artificial Sequence
  Description of Artificial Sequence: Synthetic oligonucleotide
gcccuaguucucggagccg

SEQ ID NO: 1032449 - RNA, 19 nt, Artificial Sequence
  Description of Artificial Sequence: Synthetic oligonucleotide
ccagaaaacgcagcuggua

SEQ ID NO: 1032450 - RNA, 19 nt, Artificial Sequence
  Description of Artificial Sequence: Synthetic oligonucleotide
gcagccgccguguguggga

SEQ ID NO: 1032451 - RNA, 19 nt, Artificial Sequence
  Description of Artificial Sequence: Synthetic oligonucleotide
cccacucuagcaugggugu

SEQ ID NO: 1032452 - RNA, 19 nt, Artificial Sequence
  Description of Artificial Sequence: Synthetic oligonucleotide
gggagugagcuagcaagua

SEQ ID NO: 1032453 - RNA, 19 nt, Artificial Sequence
  Description of Artificial Sequence: Synthetic oligonucleotide
ccggaacggucuaggagca

SEQ ID NO: 1032454 - RNA, 19 nt, Artificial Sequence
  Description of Artificial Sequence: Synthetic oligonucleotide
cggcgauccagcagcuccc

SEQ ID NO: 1032455 - RNA, 19 nt, Artificial Sequence
  Description of Artificial Sequence: Synthetic oligonucleotide
gcaacguccguaggcauau

SEQ ID NO: 1032456 - RNA, 19 nt, Artificial Sequence
  Description of Artificial Sequence: Synthetic oligonucleotide
guccugcggggccgauuac

SEQ ID NO: 1032457 - RNA, 19 nt, Artificial Sequence
  Description of Artificial Sequence: Synthetic oligonucleotide
ggggccgauuacaguacuc

SEQ ID NO: 1032458 - RNA, 19 nt, Artificial Sequence
  Description of Artificial Sequence: Synthetic oligonucleotide
gcacccggacaaguccuug

SEQ ID NO: 1032459 - RNA, 19 nt, Artificial Sequence
  Description of Artificial Sequence: Synthetic oligonucleotide
ccgugugugggaagucaca

SEQ ID NO: 1032460 - RNA, 19 nt, Artificial Sequence
  Description of Artificial Sequence: Synthetic oligonucleotide
acggagggguaugguggau

SEQ ID NO: 1032461 - RNA, 19 nt, Artificial Sequence
  Description of Artificial Sequence: Synthetic oligonucleotide
gggccacguucccgaagug

SEQ ID NO: 1032462 - RNA, 19 nt, Artificial Sequence
  Description of Artificial Sequence: Synthetic oligonucleotide
ugguccugcggggccgauu

SEQ ID NO: 1032463 - RNA, 19 nt, Artificial Sequence
  Description of Artificial Sequence: Synthetic oligonucleotide
ggcaugagauuauccucuu

SEQ ID NO: 1032464 - RNA, 19 nt, Artificial Sequence
  Description of Artificial Sequence: Synthetic oligonucleotide
ggcggcagccaaagaacaa

SEQ ID NO: 1032465 - RNA, 19 nt, Artificial Sequence
  Description of Artificial Sequence: Synthetic oligonucleotide
gcggggccgauuacaguac

SEQ ID NO: 1032466 - RNA, 19 nt, Artificial Sequence
  Description of Artificial Sequence: Synthetic oligonucleotide
ccggugcugcacguauacc

SEQ ID NO: 1032467 - RNA, 19 nt, Artificial Sequence
  Description of Artificial Sequence: Synthetic oligonucleotide
gcauugcccgcuagauaga

SEQ ID NO: 1032468 - RNA, 19 nt, Artificial Sequence
  Description of Artificial Sequence: Synthetic oligonucleotide
gcucccaguucaggcuuac

SEQ ID NO: 1032469 - RNA, 19 nt, Artificial Sequence
  Description of Artificial Sequence: Synthetic oligonucleotide
gcucccgagagaaggcugu

SEQ ID NO: 1032470 - RNA, 19 nt, Artificial Sequence
  Description of Artificial Sequence: Synthetic oligonucleotide
ccgcuggcggcagccaaag

SEQ ID NO: 1032471 - RNA, 19 nt, Artificial Sequence
  Description of Artificial Sequence: Synthetic oligonucleotide
agccggugcugcacguaua

SEQ ID NO: 1032472 - RNA, 19 nt, Artificial Sequence
  Description of Artificial Sequence: Synthetic oligonucleotide
cgauuacaguacucccaga

SEQ ID NO: 1032473 - RNA, 19 nt, Artificial Sequence
  Description of Artificial Sequence: Synthetic oligonucleotide
gcccguggacggauccgag

SEQ ID NO: 1032474 - RNA, 19 nt, Artificial Sequence
  Description of Artificial Sequence: Synthetic oligonucleotide
gcaccgcggcgauccagca

SEQ ID NO: 1032475 - RNA, 19 nt, Artificial Sequence
  Description of Artificial Sequence: Synthetic oligonucleotide
gccagaaaacgcagcuggu

SEQ ID NO: 1032476 - RNA, 19 nt, Artificial Sequence
  Description of Artificial Sequence: Synthetic oligonucleotide
cguauaccuucugcuccug

SEQ ID NO: 1032477 - RNA, 19 nt, Artificial Sequence
  Description of Artificial Sequence: Synthetic oligonucleotide
cucccgagagaaggcugua

SEQ ID NO: 1032478 - RNA, 19 nt, Artificial Sequence
  Description of Artificial Sequence: Synthetic oligonucleotide
cccaggucgcacccauaga

SEQ ID NO: 1032479 - RNA, 19 nt, Artificial Sequence
  Description of Artificial Sequence: Synthetic oligonucleotide
cagccgccgugugugggaa

SEQ ID NO: 1032480 - RNA, 19 nt, Artificial Sequence
  Description of Artificial Sequence: Synthetic oligonucleotide
cgcaacguccguaggcaua

SEQ ID NO: 1032481 - RNA, 19 nt, Artificial Sequence
  Description of Artificial Sequence: Synthetic oligonucleotide
gccgccgugugugggaagu

SEQ ID NO: 1032482 - RNA, 19 nt, Artificial Sequence
  Description of Artificial Sequence: Synthetic oligonucleotide
gcccaagcaccaguugagu

SEQ ID NO: 1032483 - RNA, 19 nt, Artificial Sequence
  Description of Artificial Sequence: Synthetic oligonucleotide
gcgcagugucugcuggagu

SEQ ID NO: 1032484 - RNA, 19 nt, Artificial Sequence
  Description of Artificial Sequence: Synthetic oligonucleotide
cggggcuccuugagacgag

SEQ ID NO: 1032485 - RNA, 19 nt, Artificial Sequence
  Description of Artificial Sequence: Synthetic oligonucleotide
ccgagggauaagguccaaa

SEQ ID NO: 1032486 - RNA, 19 nt, Artificial Sequence
  Description of Artificial Sequence: Synthetic oligonucleotide
ccuaguucucggagccggu

SEQ ID NO: 1032487 - RNA, 19 nt, Artificial Sequence
  Description of Artificial Sequence: Synthetic oligonucleotide
ggagccggugcugcacgua

SEQ ID NO: 1032488 - RNA, 19 nt, Artificial Sequence
  Description of Artificial Sequence: Synthetic oligonucleotide
ccacgacggggcuccuuga

SEQ ID NO: 1032489 - RNA, 19 nt, Artificial Sequence
  Description of Artificial Sequence: Synthetic oligonucleotide
ccagacaaguggcccuagu

SEQ ID NO: 1032490 - RNA, 19 nt, Artificial Sequence
  Description of Artificial Sequence: Synthetic oligonucleotide
ggcgauggagaaggcccgu

SEQ ID NO: 1032491 - RNA, 19 nt, Artificial Sequence
  Description of Artificial Sequence: Synthetic oligonucleotide
cucccaguucaggcuuacu

SEQ ID NO: 1032492 - RNA, 19 nt, Artificial Sequence
  Description of Artificial Sequence: Synthetic oligonucleotide
ccccagcaguucuaaugcu

SEQ ID NO: 1032493 - RNA, 19 nt, Artificial Sequence
  Description of Artificial Sequence: Synthetic oligonucleotide
cccgcuggcggcagccaaa

SEQ ID NO: 1032494 - RNA, 19 nt, Artificial Sequence
  Description of Artificial Sequence: Synthetic oligonucleotide
caacguccguaggcauaua

SEQ ID NO: 1032495 - RNA, 19 nt, Artificial Sequence
  Description of Artificial Sequence: Synthetic oligonucleotide
cggauccgagggauaaggu

SEQ ID NO: 1032496 - RNA, 19 nt, Artificial Sequence
  Description of Artificial Sequence: Synthetic oligonucleotide
gcuuagcggccggaacggu

SEQ ID NO: 1032497 - RNA, 19 nt, Artificial Sequence
  Description of Artificial Sequence: Synthetic oligonucleotide
ccaugggccacucgcucuu

SEQ ID NO: 1032498 - RNA, 19 nt, Artificial Sequence
  Description of Artificial Sequence: Synthetic oligonucleotide
caggcccauaaggcucagu

SEQ ID NO: 1032499 - RNA, 19 nt, Artificial Sequence
  Description of Artificial Sequence: Synthetic oligonucleotide
aggccacgacggggcuccu

SEQ ID NO: 1032500 - RNA, 19 nt, Artificial Sequence
  Description of Artificial Sequence: Synthetic oligonucleotide
cggccggaacggucuagga

SEQ ID NO: 1032501 - RNA, 19 nt, Artificial Sequence
  Description of Artificial Sequence: Synthetic oligonucleotide
ccgccgugugugggaaguc

SEQ ID NO: 1032502 - RNA, 19 nt, Artificial Sequence
  Description of Artificial Sequence: Synthetic oligonucleotide
ggcacccggacaaguccuu

SEQ ID NO: 1032503 - RNA, 19 nt, Artificial Sequence
  Description of Artificial Sequence: Synthetic oligonucleotide
ccgcaacguccguaggcau

SEQ ID NO: 1032504 - RNA, 19 nt, Artificial Sequence
  Description of Artificial Sequence: Synthetic oligonucleotide
cggggccgauuacaguacu

SEQ ID NO: 1032505 - RNA, 19 nt, Artificial Sequence
  Description of Artificial Sequence: Synthetic oligonucleotide
ccgcggcgauccagcagcu

SEQ ID NO: 1032506 - RNA, 19 nt, Artificial Sequence
  Description of Artificial Sequence: Synthetic oligonucleotide
cggagccggugcugcacgu

SEQ ID NO: 1032507 - RNA, 19 nt, Artificial Sequence
  Description of Artificial Sequence: Synthetic oligonucleotide
ggccacgacggggcuccuu

SEQ ID NO: 1032508 - RNA, 19 nt, Artificial Sequence
  Description of Artificial Sequence: Synthetic oligonucleotide
cggaacggucuaggagcau

SEQ ID NO: 1032509 - RNA, 19 nt, Artificial Sequence
  Description of Artificial Sequence: Synthetic oligonucleotide
aauaggguugcauuaaugg

SEQ ID NO: 1032510 - RNA, 19 nt, Artificial Sequence
  Description of Artificial Sequence: Synthetic oligonucleotide
aaaauuaggacaaaaguag

SEQ ID NO: 1032511 - RNA, 19 nt, Artificial Sequence
  Description of Artificial Sequence: Synthetic oligonucleotide
gaagaaauaagugagaaug

SEQ ID NO: 1032512 - RNA, 19 nt, Artificial Sequence
  Description of Artificial Sequence: Synthetic oligonucleotide
aagacguugauauccagac

SEQ ID NO: 1032513 - RNA, 19 nt, Artificial Sequence
  Description of Artificial Sequence: Synthetic oligonucleotide
acuauuucuaacuuccugg

SEQ ID NO: 1032514 - RNA, 19 nt, Artificial Sequence
  Description of Artificial Sequence: Synthetic oligonucleotide
uuugagauacuccagguug

SEQ ID NO: 1032515 - RNA, 19 nt, Artificial Sequence
  Description of Artificial Sequence: Synthetic oligonucleotide
aaauaagugagaaugugag

SEQ ID NO: 1032516 - RNA, 19 nt, Artificial Sequence
  Description of Artificial Sequence: Synthetic oligonucleotide
auaagugagaaugugagag

SEQ ID NO: 1032517 - RNA, 19 nt, Artificial Sequence
  Description of Artificial Sequence: Synthetic oligonucleotide
auuaggacaaaaguagacc

SEQ ID NO: 1032518 - RNA, 19 nt, Artificial Sequence
  Description of Artificial Sequence: Synthetic oligonucleotide
agugcaguagccuuuuccc

SEQ ID NO: 1032519 - RNA, 19 nt, Artificial Sequence
  Description of Artificial Sequence: Synthetic oligonucleotide
aacucuaccaugccacagc

SEQ ID NO: 1032520 - RNA, 19 nt, Artificial Sequence
  Description of Artificial Sequence: Synthetic oligonucleotide
aauuaggacaaaaguagac

SEQ ID NO: 1032521 - RNA, 19 nt, Artificial Sequence
  Description of Artificial Sequence: Synthetic oligonucleotide
auaggguugcauuaauggc

SEQ ID NO: 1032522 - RNA, 19 nt, Artificial Sequence
  Description of Artificial Sequence: Synthetic oligonucleotide
acuugcacuucuuagcccc

SEQ ID NO: 1032523 - RNA, 19 nt, Artificial Sequence
  Description of Artificial Sequence: Synthetic oligonucleotide
uuaggacaaaaguagacca

SEQ ID NO: 1032524 - RNA, 19 nt, Artificial Sequence
  Description of Artificial Sequence: Synthetic oligonucleotide
uucaacacagugaagaaau

SEQ ID NO: 1032525 - RNA, 19 nt, Artificial Sequence
  Description of Artificial Sequence: Synthetic oligonucleotide
cugggcauuaucuucaggg

SEQ ID NO: 1032526 - RNA, 19 nt, Artificial Sequence
  Description of Artificial Sequence: Synthetic oligonucleotide
uaguuauuguguauguucc

SEQ ID NO: 1032527 - RNA, 19 nt, Artificial Sequence
  Description of Artificial Sequence: Synthetic oligonucleotide
caucuuauccuucaagacg

SEQ ID NO: 1032528 - RNA, 19 nt, Artificial Sequence
  Description of Artificial Sequence: Synthetic oligonucleotide
cuaacuccgagcuaggagc

SEQ ID NO: 1032529 - RNA, 19 nt, Artificial Sequence
  Description of Artificial Sequence: Synthetic oligonucleotide
auuacuccuaacuccgagc

SEQ ID NO: 1032530 - RNA, 19 nt, Artificial Sequence
  Description of Artificial Sequence: Synthetic oligonucleotide
agugacauuacuccuaacu

SEQ ID NO: 1032531 - RNA, 19 nt, Artificial Sequence
  Description of Artificial Sequence: Synthetic oligonucleotide
ugacauuacuccuaacucc

SEQ ID NO: 1032532 - RNA, 19 nt, Artificial Sequence
  Description of Artificial Sequence: Synthetic oligonucleotide
agauacuccagguuggcuc

SEQ ID NO: 1032533 - RNA, 19 nt, Artificial Sequence
  Description of Artificial Sequence: Synthetic oligonucleotide
aacgcaauugcuccagcuc

SEQ ID NO: 1032534 - RNA, 19 nt, Artificial Sequence
  Description of Artificial Sequence: Synthetic oligonucleotide
ucuagcuugauuuuauguc

SEQ ID NO: 1032535 - RNA, 19 nt, Artificial Sequence
  Description of Artificial Sequence: Synthetic oligonucleotide
agcauaauaaaacaucuua

SEQ ID NO: 1032536 - RNA, 19 nt, Artificial Sequence
  Description of Artificial Sequence: Synthetic oligonucleotide
acgcaauugcuccagcucc

SEQ ID NO: 1032537 - RNA, 19 nt, Artificial Sequence
  Description of Artificial Sequence: Synthetic oligonucleotide
uuauccuucaagacguuga

SEQ ID NO: 1032538 - RNA, 19 nt, Artificial Sequence
  Description of Artificial Sequence: Synthetic oligonucleotide
gacauuacuccuaacuccg

SEQ ID NO: 1032539 - RNA, 19 nt, Artificial Sequence
  Description of Artificial Sequence: Synthetic oligonucleotide
ugcaguagccucuugagcu

SEQ ID NO: 1032540 - RNA, 19 nt, Artificial Sequence
  Description of Artificial Sequence: Synthetic oligonucleotide
uccaucuuauccuucaaga

SEQ ID NO: 1032541 - RNA, 19 nt, Artificial Sequence
  Description of Artificial Sequence: Synthetic oligonucleotide
aauaagugagaaugugaga

SEQ ID NO: 1032542 - RNA, 19 nt, Artificial Sequence
  Description of Artificial Sequence: Synthetic oligonucleotide
aaaaccccauccuacuuug

SEQ ID NO: 1032543 - RNA, 19 nt, Artificial Sequence
  Description of Artificial Sequence: Synthetic oligonucleotide
ucaagcuccucacaggaca

SEQ ID NO: 1032544 - RNA, 19 nt, Artificial Sequence
  Description of Artificial Sequence: Synthetic oligonucleotide
uacuauuucuaacuuccug

SEQ ID NO: 1032545 - RNA, 19 nt, Artificial Sequence
  Description of Artificial Sequence: Synthetic oligonucleotide
uauuccuaaagacucucac

SEQ ID NO: 1032546 - RNA, 19 nt, Artificial Sequence
  Description of Artificial Sequence: Synthetic oligonucleotide
auuuuauguccccagaaaa

SEQ ID NO: 1032547 - RNA, 19 nt, Artificial Sequence
  Description of Artificial Sequence: Synthetic oligonucleotide
cauuaauggcacuuggcag

SEQ ID NO: 1032548 - RNA, 19 nt, Artificial Sequence
  Description of Artificial Sequence: Synthetic oligonucleotide
gaaugugagagacgaggcg

SEQ ID NO: 1032549 - RNA, 19 nt, Artificial Sequence
  Description of Artificial Sequence: Synthetic oligonucleotide
aaugugagagacgaggcgu

SEQ ID NO: 1032550 - RNA, 19 nt, Artificial Sequence
  Description of Artificial Sequence: Synthetic oligonucleotide
acgaauggugggcuggucc

SEQ ID NO: 1032551 - RNA, 19 nt, Artificial Sequence
  Description of Artificial Sequence: Synthetic oligonucleotide
agugaggugaucuccaccu

SEQ ID NO: 1032552 - RNA, 19 nt, Artificial Sequence
  Description of Artificial Sequence: Synthetic oligonucleotide
uuuggacaaaccuuuacua

SEQ ID NO: 1032553 - RNA, 19 nt, Artificial Sequence
  Description of Artificial Sequence: Synthetic oligonucleotide
aggagcauaauaaaacauc

SEQ ID NO: 1032554 - RNA, 19 nt, Artificial Sequence
  Description of Artificial Sequence: Synthetic oligonucleotide
uacacacauaguuauugug

SEQ ID NO: 1032555 - RNA, 19 nt, Artificial Sequence
  Description of Artificial Sequence: Synthetic oligonucleotide
aggacaaggccacggaacg

SEQ ID NO: 1032556 - RNA, 19 nt, Artificial Sequence
  Description of Artificial Sequence: Synthetic oligonucleotide
ugcaguaucccuagagccc

SEQ ID NO: 1032557 - RNA, 19 nt, Artificial Sequence
  Description of Artificial Sequence: Synthetic oligonucleotide
uucuagcuugauuuuaugu

SEQ ID NO: 1032558 - RNA, 19 nt, Artificial Sequence
  Description of Artificial Sequence: Synthetic oligonucleotide
cugcaguaucccuagagcc

SEQ ID NO: 1032559 - RNA, 19 nt, Artificial Sequence
  Description of Artificial Sequence: Synthetic oligonucleotide
gauacuccagguuggcucc

SEQ ID NO: 1032560 - RNA, 19 nt, Artificial Sequence
  Description of Artificial Sequence: Synthetic oligonucleotide
gaagaaggugggcucauug

SEQ ID NO: 1032561 - RNA, 19 nt, Artificial Sequence
  Description of Artificial Sequence: Synthetic oligonucleotide
uugggucaggcuaugugag

SEQ ID NO: 1032562 - RNA, 19 nt, Artificial Sequence
  Description of Artificial Sequence: Synthetic oligonucleotide
gauauacuucuccuucagc

SEQ ID NO: 1032563 - RNA, 19 nt, Artificial Sequence
  Description of Artificial Sequence: Synthetic oligonucleotide
uccuucucggcaagcacgg

SEQ ID NO: 1032564 - RNA, 19 nt, Artificial Sequence
  Description of Artificial Sequence: Synthetic oligonucleotide
auaaaggaagaaggugggc

SEQ ID NO: 1032565 - RNA, 19 nt, Artificial Sequence
  Description of Artificial Sequence: Synthetic oligonucleotide
cacggaacgcaauugcucc

SEQ ID NO: 1032566 - RNA, 19 nt, Artificial Sequence
  Description of Artificial Sequence: Synthetic oligonucleotide
uaggagcauaauaaaacau

SEQ ID NO: 1032567 - RNA, 19 nt, Artificial Sequence
  Description of Artificial Sequence: Synthetic oligonucleotide
agcuugauuuuaugucccc

SEQ ID NO: 1032568 - RNA, 19 nt, Artificial Sequence
  Description of Artificial Sequence: Synthetic oligonucleotide
uccggcaaggucaggaagc

SEQ ID NO: 1032569 - RNA, 19 nt, Artificial Sequence
  Description of Artificial Sequence: Synthetic oligonucleotide
cuaggagcauaauaaaaca

SEQ ID NO: 1032570 - RNA, 19 nt, Artificial Sequence
  Description of Artificial Sequence: Synthetic oligonucleotide
gauuuuauguccccagaaa

SEQ ID NO: 1032571 - RNA, 19 nt, Artificial Sequence
  Description of Artificial Sequence: Synthetic oligonucleotide
aucuuauccuucaagacgu

SEQ ID NO: 1032572 - RNA, 19 nt, Artificial Sequence
  Description of Artificial Sequence: Synthetic oligonucleotide
ugucucaacaccugcagua

SEQ ID NO: 1032573 - RNA, 19 nt, Artificial Sequence
  Description of Artificial Sequence: Synthetic oligonucleotide
uaucccuagagcccaagaa

SEQ ID NO: 1032574 - RNA, 19 nt, Artificial Sequence
  Description of Artificial Sequence: Synthetic oligonucleotide
uaagugagaaugugagaga

SEQ ID NO: 1032575 - RNA, 19 nt, Artificial Sequence
  Description of Artificial Sequence: Synthetic oligonucleotide
uuauuccuaaagacucuca

SEQ ID NO: 1032576 - RNA, 19 nt, Artificial Sequence
  Description of Artificial Sequence: Synthetic oligonucleotide
gugacauuacuccuaacuc

SEQ ID NO: 1032577 - RNA, 19 nt, Artificial Sequence
  Description of Artificial Sequence: Synthetic oligonucleotide
cacauaguuauuguguaug

SEQ ID NO: 1032578 - RNA, 19 nt, Artificial Sequence
  Description of Artificial Sequence: Synthetic oligonucleotide
ugcaguagccuuuucccca

SEQ ID NO: 1032579 - RNA, 19 nt, Artificial Sequence
  Description of Artificial Sequence: Synthetic oligonucleotide
cuaggauggucacgaaugg

SEQ ID NO: 1032580 - RNA, 19 nt, Artificial Sequence
  Description of Artificial Sequence: Synthetic oligonucleotide
uugggcauuaucacuugcu

SEQ ID NO: 1032581 - RNA, 19 nt, Artificial Sequence
  Description of Artificial Sequence: Synthetic oligonucleotide
uuggacaaaccuuuacuau

SEQ ID NO: 1032582 - RNA, 19 nt, Artificial Sequence
  Description of Artificial Sequence: Synthetic oligonucleotide
accccauccuacuuugaac

SEQ ID NO: 1032583 - RNA, 19 nt, Artificial Sequence
  Description of Artificial Sequence: Synthetic oligonucleotide
caccacuucccuaacuugc

SEQ ID NO: 1032584 - RNA, 19 nt, Artificial Sequence
  Description of Artificial Sequence: Synthetic oligonucleotide
uugagcacgaccugggcuc

SEQ ID NO: 1032585 - RNA, 19 nt, Artificial Sequence
  Description of Artificial Sequence: Synthetic oligonucleotide
uugaacugcugugaguuca

SEQ ID NO: 1032586 - RNA, 19 nt, Artificial Sequence
  Description of Artificial Sequence: Synthetic oligonucleotide
agggagauauacuucuccu

SEQ ID NO: 1032587 - RNA, 19 nt, Artificial Sequence
  Description of Artificial Sequence: Synthetic oligonucleotide
guguauguuccaaagucag

SEQ ID NO: 1032588 - RNA, 19 nt, Artificial Sequence
  Description of Artificial Sequence: Synthetic oligonucleotide
auggucacgaauggugggc

SEQ ID NO: 1032589 - RNA, 19 nt, Artificial Sequence
  Description of Artificial Sequence: Synthetic oligonucleotide
aguccuucucggcaagcac

SEQ ID NO: 1032590 - RNA, 19 nt, Artificial Sequence
  Description of Artificial Sequence: Synthetic oligonucleotide
guagaccagacucugacaa

SEQ ID NO: 1032591 - RNA, 19 nt, Artificial Sequence
  Description of Artificial Sequence: Synthetic oligonucleotide
ucccuagagcccaagaaua

SEQ ID NO: 1032592 - RNA, 19 nt, Artificial Sequence
  Description of Artificial Sequence: Synthetic oligonucleotide
uucucggcaagcacggcca

SEQ ID NO: 1032593 - RNA, 19 nt, Artificial Sequence
  Description of Artificial Sequence: Synthetic oligonucleotide
cauuacuccuaacuccgag

SEQ ID NO: 1032594 - RNA, 19 nt, Artificial Sequence
  Description of Artificial Sequence: Synthetic oligonucleotide
uauuucuaacuuccugguc

SEQ ID NO: 1032595 - RNA, 19 nt, Artificial Sequence
  Description of Artificial Sequence: Synthetic oligonucleotide
agaauccgcuccuucagcu

SEQ ID NO: 1032596 - RNA, 19 nt, Artificial Sequence
  Description of Artificial Sequence: Synthetic oligonucleotide
gaauaggguugcauuaaug

SEQ ID NO: 1032597 - RNA, 19 nt, Artificial Sequence
  Description of Artificial Sequence: Synthetic oligonucleotide
caagcuguuccugugcugc

SEQ ID NO: 1032598 - RNA, 19 nt, Artificial Sequence
  Description of Artificial Sequence: Synthetic oligonucleotide
caguucagacaccucagag

SEQ ID NO: 1032599 - RNA, 19 nt, Artificial Sequence
  Description of Artificial Sequence: Synthetic oligonucleotide
agcccaagaauaggguugc

SEQ ID NO: 1032600 - RNA, 19 nt, Artificial Sequence
  Description of Artificial Sequence: Synthetic oligonucleotide
aaaaucugagccugcccuu

SEQ ID NO: 1032601 - RNA, 19 nt, Artificial Sequence
  Description of Artificial Sequence: Synthetic oligonucleotide
aggguugcauuaauggcac

SEQ ID NO: 1032602 - RNA, 19 nt, Artificial Sequence
  Description of Artificial Sequence: Synthetic oligonucleotide
aguuauuguguauguucca

SEQ ID NO: 1032603 - RNA, 19 nt, Artificial Sequence
  Description of Artificial Sequence: Synthetic oligonucleotide
cuucucggcaagcacggcc

SEQ ID NO: 1032604 - RNA, 19 nt, Artificial Sequence
  Description of Artificial Sequence: Synthetic oligonucleotide
agccucuugagcuuuucca

SEQ ID NO: 1032605 - RNA, 19 nt, Artificial Sequence
  Description of Artificial Sequence: Synthetic oligonucleotide
aggauggucacgaauggug

SEQ ID NO: 1032606 - RNA, 19 nt, Artificial Sequence
  Description of Artificial Sequence: Synthetic oligonucleotide
ugguaguagagugcaguag

SEQ ID NO: 1032607 - RNA, 19 nt, Artificial Sequence
  Description of Artificial Sequence: Synthetic oligonucleotide
uggauucauccccauggcu

SEQ ID NO: 1032608 - RNA, 19 nt, Artificial Sequence
  Description of Artificial Sequence: Synthetic oligonucleotide
gcuaggagcauaauaaaac

SEQ ID NO: 1032609 - RNA, 19 nt, Artificial Sequence
  Description of Artificial Sequence: Synthetic oligonucleotide
aucccuagagcccaagaau

SEQ ID NO: 1032610 - RNA, 19 nt, Artificial Sequence
  Description of Artificial Sequence: Synthetic oligonucleotide
uaacuccgagcuaggagca

SEQ ID NO: 1032611 - RNA, 19 nt, Artificial Sequence
  Description of Artificial Sequence: Synthetic oligonucleotide
uuucgggccaacugcucag

SEQ ID NO: 1032612 - RNA, 19 nt, Artificial Sequence
  Description of Artificial Sequence: Synthetic oligonucleotide
cccauaucagaucacuugg

SEQ ID NO: 1032613 - RNA, 19 nt, Artificial Sequence
  Description of Artificial Sequence: Synthetic oligonucleotide
aguuccugccgauggagcu

SEQ ID NO: 1032614 - RNA, 19 nt, Artificial Sequence
  Description of Artificial Sequence: Synthetic oligonucleotide
gcugcagcgagcugcaagg

SEQ ID NO: 1032615 - RNA, 19 nt, Artificial Sequence
  Description of Artificial Sequence: Synthetic oligonucleotide
cuuauuccuaaagacucuc

SEQ ID NO: 1032616 - RNA, 19 nt, Artificial Sequence
  Description of Artificial Sequence: Synthetic oligonucleotide
cugaaguguaagauaguca

SEQ ID NO: 1032617 - RNA, 19 nt, Artificial Sequence
  Description of Artificial Sequence: Synthetic oligonucleotide
ugggagugacauuacuccu

SEQ ID NO: 1032618 - RNA, 19 nt, Artificial Sequence
  Description of Artificial Sequence: Synthetic oligonucleotide
aguagaccagacucugaca

SEQ ID NO: 1032619 - RNA, 19 nt, Artificial Sequence
  Description of Artificial Sequence: Synthetic oligonucleotide
ccuacuuugaacugcugug

SEQ ID NO: 1032620 - RNA, 19 nt, Artificial Sequence
  Description of Artificial Sequence: Synthetic oligonucleotide
ugcuccacauacacacccc

SEQ ID NO: 1032621 - RNA, 19 nt, Artificial Sequence
  Description of Artificial Sequence: Synthetic oligonucleotide
ugugagcgucugcuggcgg

SEQ ID NO: 1032622 - RNA, 19 nt, Artificial Sequence
  Description of Artificial Sequence: Synthetic oligonucleotide
caaguucugggaugaacuc

SEQ ID NO: 1032623 - RNA, 19 nt, Artificial Sequence
  Description of Artificial Sequence: Synthetic oligonucleotide
ggauucauccccauggcug

SEQ ID NO: 1032624 - RNA, 19 nt, Artificial Sequence
  Description of Artificial Sequence: Synthetic oligonucleotide
aaggccacggaacgcaauu

SEQ ID NO: 1032625 - RNA, 19 nt, Artificial Sequence
  Description of Artificial Sequence: Synthetic oligonucleotide
uugguaguagagugcagua

SEQ ID NO: 1032626 - RNA, 19 nt, Artificial Sequence
  Description of Artificial Sequence: Synthetic oligonucleotide
caagaauaggguugcauua

SEQ ID NO: 1032627 - RNA, 19 nt, Artificial Sequence
  Description of Artificial Sequence: Synthetic oligonucleotide
uuaucacuugcuucuccuc

SEQ ID NO: 1032628 - RNA, 19 nt, Artificial Sequence
  Description of Artificial Sequence: Synthetic oligonucleotide
agaauaggguugcauuaau

SEQ ID NO: 1032629 - RNA, 19 nt, Artificial Sequence
  Description of Artificial Sequence: Synthetic oligonucleotide
agagcccaagaauaggguu

SEQ ID NO: 1032630 - RNA, 19 nt, Artificial Sequence
  Description of Artificial Sequence: Synthetic oligonucleotide
agcaagcuguuccugugcu

SEQ ID NO: 1032631 - RNA, 19 nt, Artificial Sequence
  Description of Artificial Sequence: Synthetic oligonucleotide
uuaaucccguccuggccca

SEQ ID NO: 1032632 - RNA, 19 nt, Artificial Sequence
  Description of Artificial Sequence: Synthetic oligonucleotide
aguguaagauagucaggau

SEQ ID NO: 1032633 - RNA, 19 nt, Artificial Sequence
  Description of Artificial Sequence: Synthetic oligonucleotide
uccccauggcugucgagag

SEQ ID NO: 1032634 - RNA, 19 nt, Artificial Sequence
  Description of Artificial Sequence: Synthetic oligonucleotide
ucgggacugaaguguaaga

SEQ ID NO: 1032635 - RNA, 19 nt, Artificial Sequence
  Description of Artificial Sequence: Synthetic oligonucleotide
aguugggcauuaucacuug

SEQ ID NO: 1032636 - RNA, 19 nt, Artificial Sequence
  Description of Artificial Sequence: Synthetic oligonucleotide
cuuauccuucaagacguug

SEQ ID NO: 1032637 - RNA, 19 nt, Artificial Sequence
  Description of Artificial Sequence: Synthetic oligonucleotide
gucacgaauggugggcugg

SEQ ID NO: 1032638 - RNA, 19 nt, Artificial Sequence
  Description of Artificial Sequence: Synthetic oligonucleotide
ggauggucacgaauggugg

SEQ ID NO: 1032639 - RNA, 19 nt, Artificial Sequence
  Description of Artificial Sequence: Synthetic oligonucleotide
uuaauggcacuuggcagaa

SEQ ID NO: 1032640 - RNA, 19 nt, Artificial Sequence
  Description of Artificial Sequence: Synthetic oligonucleotide
cuuuggacaaaccuuuacu

SEQ ID NO: 1032641 - RNA, 19 nt, Artificial Sequence
  Description of Artificial Sequence: Synthetic oligonucleotide
ccagacuggauucaucccc

SEQ ID NO: 1032642 - RNA, 19 nt, Artificial Sequence
  Description of Artificial Sequence: Synthetic oligonucleotide
gcccauaucagaucacuug

SEQ ID NO: 1032643 - RNA, 19 nt, Artificial Sequence
  Description of Artificial Sequence: Synthetic oligonucleotide
uaguagagugcaguagccu

SEQ ID NO: 1032644 - RNA, 19 nt, Artificial Sequence
  Description of Artificial Sequence: Synthetic oligonucleotide
uuugaacugcugugaguuc

SEQ ID NO: 1032645 - RNA, 19 nt, Artificial Sequence
  Description of Artificial Sequence: Synthetic oligonucleotide
acguugauauccagacugg

SEQ ID NO: 1032646 - RNA, 19 nt, Artificial Sequence
  Description of Artificial Sequence: Synthetic oligonucleotide
ugcagcgagcugcaaggcu

SEQ ID NO: 1032647 - RNA, 19 nt, Artificial Sequence
  Description of Artificial Sequence: Synthetic oligonucleotide
gacaaggccacggaacgca

SEQ ID NO: 1032648 - RNA, 19 nt, Artificial Sequence
  Description of Artificial Sequence: Synthetic oligonucleotide
gacuggauucauccccaug

SEQ ID NO: 1032649 - RNA, 19 nt, Artificial Sequence
  Description of Artificial Sequence: Synthetic oligonucleotide
gaccugggcucucaucuug

SEQ ID NO: 1032650 - RNA, 19 nt, Artificial Sequence
  Description of Artificial Sequence: Synthetic oligonucleotide
ggcugugagcgucugcugg

SEQ ID NO: 1032651 - RNA, 19 nt, Artificial Sequence
  Description of Artificial Sequence: Synthetic oligonucleotide
uucccacauaaaagaggca

SEQ ID NO: 1032652 - RNA, 19 nt, Artificial Sequence
  Description of Artificial Sequence: Synthetic oligonucleotide
agacguugauauccagacu

SEQ ID NO: 1032653 - RNA, 19 nt, Artificial Sequence
  Description of Artificial Sequence: Synthetic oligonucleotide
ccaucuuauccuucaagac

SEQ ID NO: 1032654 - RNA, 19 nt, Artificial Sequence
  Description of Artificial Sequence: Synthetic oligonucleotide
ggcacuuggcagaaaaccc

SEQ ID NO: 1032655 - RNA, 19 nt, Artificial Sequence
  Description of Artificial Sequence: Synthetic oligonucleotide
agcaguucagacaccucag

SEQ ID NO: 1032656 - RNA, 19 nt, Artificial Sequence
  Description of Artificial Sequence: Synthetic oligonucleotide
cucgggacugaaguguaag

SEQ ID NO: 1032657 - RNA, 19 nt, Artificial Sequence
  Description of Artificial Sequence: Synthetic oligonucleotide
caaggcuugggucaggcua

SEQ ID NO: 1032658 - RNA, 19 nt, Artificial Sequence
  Description of Artificial Sequence: Synthetic oligonucleotide
guaagauagucaggauggc

SEQ ID NO: 1032659 - RNA, 19 nt, Artificial Sequence
  Description of Artificial Sequence: Synthetic oligonucleotide
uggcccauaucagaucacu

SEQ ID NO: 1032660 - RNA, 19 nt, Artificial Sequence
  Description of Artificial Sequence: Synthetic oligonucleotide
aagcgguagaugauguuuu

SEQ ID NO: 1032661 - RNA, 19 nt, Artificial Sequence
  Description of Artificial Sequence: Synthetic oligonucleotide
ccuaacuccgagcuaggag

SEQ ID NO: 1032662 - RNA, 19 nt, Artificial Sequence
  Description of Artificial Sequence: Synthetic oligonucleotide
gaaaaccccauccuacuuu

SEQ ID NO: 1032663 - RNA, 19 nt, Artificial Sequence
  Description of Artificial Sequence: Synthetic oligonucleotide
agcuccuguugguaguaga

SEQ ID NO: 1032664 - RNA, 19 nt, Artificial Sequence
  Description of Artificial Sequence: Synthetic oligonucleotide
gggcucucaucuuguagcg

SEQ ID NO: 1032665 - RNA, 19 nt, Artificial Sequence
  Description of Artificial Sequence: Synthetic oligonucleotide
accggcuagaggccgcgag

SEQ ID NO: 1032666 - RNA, 19 nt, Artificial Sequence
  Description of Artificial Sequence: Synthetic oligonucleotide
gugagcgucugcuggcggc

SEQ ID NO: 1032667 - RNA, 19 nt, Artificial Sequence
  Description of Artificial Sequence: Synthetic oligonucleotide
guugguaguagagugcagu

SEQ ID NO: 1032668 - RNA, 19 nt, Artificial Sequence
  Description of Artificial Sequence: Synthetic oligonucleotide
ucucggcaagcacggccag

SEQ ID NO: 1032669 - RNA, 19 nt, Artificial Sequence
  Description of Artificial Sequence: Synthetic oligonucleotide
gaacgcaauugcuccagcu

SEQ ID NO: 1032670 - RNA, 19 nt, Artificial Sequence
  Description of Artificial Sequence: Synthetic oligonucleotide
ggucacaucggugcucagg

SEQ ID NO: 1032671 - RNA, 19 nt, Artificial Sequence
  Description of Artificial Sequence: Synthetic oligonucleotide
gcuugggucaggcuaugug

SEQ ID NO: 1032672 - RNA, 19 nt, Artificial Sequence
  Description of Artificial Sequence: Synthetic oligonucleotide
uggucacgaauggugggcu

SEQ ID NO: 1032673 - RNA, 19 nt, Artificial Sequence
  Description of Artificial Sequence: Synthetic oligonucleotide
gcugcaaccugcaguagcc

SEQ ID NO: 1032674 - RNA, 19 nt, Artificial Sequence
  Description of Artificial Sequence: Synthetic oligonucleotide
gugggcuggucccuggaac

SEQ ID NO: 1032675 - RNA, 19 nt, Artificial Sequence
  Description of Artificial Sequence: Synthetic oligonucleotide
gaagcgguagaugauguuu

SEQ ID NO: 1032676 - RNA, 19 nt, Artificial Sequence
  Description of Artificial Sequence: Synthetic oligonucleotide
gggcauuaucacuugcuuc

SEQ ID NO: 1032677 - RNA, 19 nt, Artificial Sequence
  Description of Artificial Sequence: Synthetic oligonucleotide
guaucccuagagcccaaga

SEQ ID NO: 1032678 - RNA, 19 nt, Artificial Sequence
  Description of Artificial Sequence: Synthetic oligonucleotide
uccuaacuccgagcuagga

SEQ ID NO: 1032679 - RNA, 19 nt, Artificial Sequence
  Description of Artificial Sequence: Synthetic oligonucleotide
uugcacuucuuagccccag

SEQ ID NO: 1032680 - RNA, 19 nt, Artificial Sequence
  Description of Artificial Sequence: Synthetic oligonucleotide
acggaacgcaauugcucca

SEQ ID NO: 1032681 - RNA, 19 nt, Artificial Sequence
  Description of Artificial Sequence: Synthetic oligonucleotide
uggcugucgagaggggacc

SEQ ID NO: 1032682 - RNA, 19 nt, Artificial Sequence
  Description of Artificial Sequence: Synthetic oligonucleotide
aguaucccuagagcccaag

SEQ ID NO: 1032683 - RNA, 19 nt, Artificial Sequence
  Description of Artificial Sequence: Synthetic oligonucleotide
auggugggcuggucccugg

SEQ ID NO: 1032684 - RNA, 19 nt, Artificial Sequence
  Description of Artificial Sequence: Synthetic oligonucleotide
auauccagacuggauucau

SEQ ID NO: 1032685 - RNA, 19 nt, Artificial Sequence
  Description of Artificial Sequence: Synthetic oligonucleotide
gcuccuguugguaguagag

SEQ ID NO: 1032686 - RNA, 19 nt, Artificial Sequence
  Description of Artificial Sequence: Synthetic oligonucleotide
uggcuaugcuccaguuccu

SEQ ID NO: 1032687 - RNA, 19 nt, Artificial Sequence
  Description of Artificial Sequence: Synthetic oligonucleotide
cucucaucuuguagcgcuc

SEQ ID NO: 1032688 - RNA, 19 nt, Artificial Sequence
  Description of Artificial Sequence: Synthetic oligonucleotide
ggccacggaacgcaauugc

SEQ ID NO: 1032689 - RNA, 19 nt, Artificial Sequence
  Description of Artificial Sequence: Synthetic oligonucleotide
aggcuaugugaggaggcug

SEQ ID NO: 1032690 - RNA, 19 nt, Artificial Sequence
  Description of Artificial Sequence: Synthetic oligonucleotide
ugugagagacgaggcguaa

SEQ ID NO: 1032691 - RNA, 19 nt, Artificial Sequence
  Description of Artificial Sequence: Synthetic oligonucleotide
cuagaggccgcgagggcca

SEQ ID NO: 1032692 - RNA, 19 nt, Artificial Sequence
  Description of Artificial Sequence: Synthetic oligonucleotide
cugucgagaggggaccggc

SEQ ID NO: 1032693 - RNA, 19 nt, Artificial Sequence
  Description of Artificial Sequence: Synthetic oligonucleotide
cauccuacuuugaacugcu

SEQ ID NO: 1032694 - RNA, 19 nt, Artificial Sequence
  Description of Artificial Sequence: Synthetic oligonucleotide
ggucaggcuaugugaggag

SEQ ID NO: 1032695 - RNA, 19 nt, Artificial Sequence
  Description of Artificial Sequence: Synthetic oligonucleotide
cccuagagcccaagaauag

SEQ ID NO: 1032696 - RNA, 19 nt, Artificial Sequence
  Description of Artificial Sequence: Synthetic oligonucleotide
cuaaagacucucaccacuu

SEQ ID NO: 1032697 - RNA, 19 nt, Artificial Sequence
  Description of Artificial Sequence: Synthetic oligonucleotide
gaguugggcauuaucacuu

SEQ ID NO: 1032698 - RNA, 19 nt, Artificial Sequence
  Description of Artificial Sequence: Synthetic oligonucleotide
gcuagaggccgcgagggcc

SEQ ID NO: 1032699 - RNA, 19 nt, Artificial Sequence
  Description of Artificial Sequence: Synthetic oligonucleotide
ucccuacucugcuccacau

SEQ ID NO: 1032700 - RNA, 19 nt, Artificial Sequence
  Description of Artificial Sequence: Synthetic oligonucleotide
cuugagcacgaccugggcu

SEQ ID NO: 1032701 - RNA, 19 nt, Artificial Sequence
  Description of Artificial Sequence: Synthetic oligonucleotide
gaaggugggcucauuggcu

SEQ ID NO: 1032702 - RNA, 19 nt, Artificial Sequence
  Description of Artificial Sequence: Synthetic oligonucleotide
uagagugcaguagccuuuu

SEQ ID NO: 1032703 - RNA, 19 nt, Artificial Sequence
  Description of Artificial Sequence: Synthetic oligonucleotide
ugccgcccuggcaacccag

SEQ ID NO: 1032704 - RNA, 19 nt, Artificial Sequence
  Description of Artificial Sequence: Synthetic oligonucleotide
ggaguugggcauuaucacu

SEQ ID NO: 1032705 - RNA, 19 nt, Artificial Sequence
  Description of Artificial Sequence: Synthetic oligonucleotide
cgaauggugggcugguccc

SEQ ID NO: 1032706 - RNA, 19 nt, Artificial Sequence
  Description of Artificial Sequence: Synthetic oligonucleotide
uuuuccccaucagcagccu

SEQ ID NO: 1032707 - RNA, 19 nt, Artificial Sequence
  Description of Artificial Sequence: Synthetic oligonucleotide
ggugcccagcaguucagac

SEQ ID NO: 1032708 - RNA, 19 nt, Artificial Sequence
  Description of Artificial Sequence: Synthetic oligonucleotide
cuacucugcuccacauaca

SEQ ID NO: 1032709 - RNA, 19 nt, Artificial Sequence
  Description of Artificial Sequence: Synthetic oligonucleotide
ucccuaacuugcacuucuu

SEQ ID NO: 1032710 - RNA, 19 nt, Artificial Sequence
  Description of Artificial Sequence: Synthetic oligonucleotide
ccacggaacgcaauugcuc

SEQ ID NO: 1032711 - RNA, 19 nt, Artificial Sequence
  Description of Artificial Sequence: Synthetic oligonucleotide
cuggcccauaucagaucac

SEQ ID NO: 1032712 - RNA, 19 nt, Artificial Sequence
  Description of Artificial Sequence: Synthetic oligonucleotide
aggccacggaacgcaauug

SEQ ID NO: 1032713 - RNA, 19 nt, Artificial Sequence
  Description of Artificial Sequence: Synthetic oligonucleotide
ggaacgcaauugcuccagc

SEQ ID NO: 1032714 - RNA, 19 nt, Artificial Sequence
  Description of Artificial Sequence: Synthetic oligonucleotide
cagccgcagggagauauac

SEQ ID NO: 1032715 - RNA, 19 nt, Artificial Sequence
  Description of Artificial Sequence: Synthetic oligonucleotide
cuguccggcaaggucagga

SEQ ID NO: 1032716 - RNA, 19 nt, Artificial Sequence
  Description of Artificial Sequence: Synthetic oligonucleotide
cuugcacuucuuagcccca

SEQ ID NO: 1032717 - RNA, 19 nt, Artificial Sequence
  Description of Artificial Sequence: Synthetic oligonucleotide
gcaguaucccuagagccca

SEQ ID NO: 1032718 - RNA, 19 nt, Artificial Sequence
  Description of Artificial Sequence: Synthetic oligonucleotide
ugagcacgaccugggcucu

SEQ ID NO: 1032719 - RNA, 19 nt, Artificial Sequence
  Description of Artificial Sequence: Synthetic oligonucleotide
ccuggcccauaucagauca

SEQ ID NO: 1032720 - RNA, 19 nt, Artificial Sequence
  Description of Artificial Sequence: Synthetic oligonucleotide
agacuggauucauccccau

SEQ ID NO: 1032721 - RNA, 19 nt, Artificial Sequence
  Description of Artificial Sequence: Synthetic oligonucleotide
gacagccgcagggagauau

SEQ ID NO: 1032722 - RNA, 19 nt, Artificial Sequence
  Description of Artificial Sequence: Synthetic oligonucleotide
cacuucccuaacuugcacu

SEQ ID NO: 1032723 - RNA, 19 nt, Artificial Sequence
  Description of Artificial Sequence: Synthetic oligonucleotide
acauuacuccuaacuccga

SEQ ID NO: 1032724 - RNA, 19 nt, Artificial Sequence
  Description of Artificial Sequence: Synthetic oligonucleotide
gugaggugaucuccaccuc

SEQ ID NO: 1032725 - RNA, 19 nt, Artificial Sequence
  Description of Artificial Sequence: Synthetic oligonucleotide
uucuuagccccagccucuc

SEQ ID NO: 1032726 - RNA, 19 nt, Artificial Sequence
  Description of Artificial Sequence: Synthetic oligonucleotide
agcuggcuaugcuccaguu

SEQ ID NO: 1032727 - RNA, 19 nt, Artificial Sequence
  Description of Artificial Sequence: Synthetic oligonucleotide
gggccaacugcucagcaua

SEQ ID NO: 1032728 - RNA, 19 nt, Artificial Sequence
  Description of Artificial Sequence: Synthetic oligonucleotide
cucggcaagcacggccagg

SEQ ID NO: 1032729 - RNA, 19 nt, Artificial Sequence
  Description of Artificial Sequence: Synthetic oligonucleotide
ccuucaagacguugauauc

SEQ ID NO: 1032730 - RNA, 19 nt, Artificial Sequence
  Description of Artificial Sequence: Synthetic oligonucleotide
ggucacgaauggugggcug

SEQ ID NO: 1032731 - RNA, 19 nt, Artificial Sequence
  Description of Artificial Sequence: Synthetic oligonucleotide
gcucccaucuuugguauuc

SEQ ID NO: 1032732 - RNA, 19 nt, Artificial Sequence
  Description of Artificial Sequence: Synthetic oligonucleotide
aacuccgagcuaggagcau

SEQ ID NO: 1032733 - RNA, 19 nt, Artificial Sequence
  Description of Artificial Sequence: Synthetic oligonucleotide
acuccgagcuaggagcaua

SEQ ID NO: 1032734 - RNA, 19 nt, Artificial Sequence
  Description of Artificial Sequence: Synthetic oligonucleotide
agcgagcugcaaggcuugg

SEQ ID NO: 1032735 - RNA, 19 nt, Artificial Sequence
  Description of Artificial Sequence: Synthetic oligonucleotide
cccauccuacuuugaacug

SEQ ID NO: 1032736 - RNA, 19 nt, Artificial Sequence
  Description of Artificial Sequence: Synthetic oligonucleotide
augugagagacgaggcgua

SEQ ID NO: 1032737 - RNA, 19 nt, Artificial Sequence
  Description of Artificial Sequence: Synthetic oligonucleotide
agcacgaccugggcucuca

SEQ ID NO: 1032738 - RNA, 19 nt, Artificial Sequence
  Description of Artificial Sequence: Synthetic oligonucleotide
accuccuuucgggccaacu

SEQ ID NO: 1032739 - RNA, 19 nt, Artificial Sequence
  Description of Artificial Sequence: Synthetic oligonucleotide
ccggcuagaggccgcgagg

SEQ ID NO: 1032740 - RNA, 19 nt, Artificial Sequence
  Description of Artificial Sequence: Synthetic oligonucleotide
gaauccgcuccuucagcuu

SEQ ID NO: 1032741 - RNA, 19 nt, Artificial Sequence
  Description of Artificial Sequence: Synthetic oligonucleotide
ccuggcaacccagaggaca

SEQ ID NO: 1032742 - RNA, 19 nt, Artificial Sequence
  Description of Artificial Sequence: Synthetic oligonucleotide
aggucacaucggugcucag

SEQ ID NO: 1032743 - RNA, 19 nt, Artificial Sequence
  Description of Artificial Sequence: Synthetic oligonucleotide
ccccauccuacuuugaacu

SEQ ID NO: 1032744 - RNA, 19 nt, Artificial Sequence
  Description of Artificial Sequence: Synthetic oligonucleotide
ggacaaggccacggaacgc

SEQ ID NO: 1032745 - RNA, 19 nt, Artificial Sequence
  Description of Artificial Sequence: Synthetic oligonucleotide
ccggcaaggucaggaagcg

SEQ ID NO: 1032746 - RNA, 19 nt, Artificial Sequence
  Description of Artificial Sequence: Synthetic oligonucleotide
aaucccguccuggcccaua

SEQ ID NO: 1032747 - RNA, 19 nt, Artificial Sequence
  Description of Artificial Sequence: Synthetic oligonucleotide
cagcuccuguugguaguag

SEQ ID NO: 1032748 - RNA, 19 nt, Artificial Sequence
  Description of Artificial Sequence: Synthetic oligonucleotide
cugucucaacaccugcagu

SEQ ID NO: 1032749 - RNA, 19 nt, Artificial Sequence
  Description of Artificial Sequence: Synthetic oligonucleotide
ggggaccggcuagaggccg

SEQ ID NO: 1032750 - RNA, 19 nt, Artificial Sequence
  Description of Artificial Sequence: Synthetic oligonucleotide
gguugcauuaauggcacuu

SEQ ID NO: 1032751 - RNA, 19 nt, Artificial Sequence
  Description of Artificial Sequence: Synthetic oligonucleotide
gggagugacauuacuccua

SEQ ID NO: 1032752 - RNA, 19 nt, Artificial Sequence
  Description of Artificial Sequence: Synthetic oligonucleotide
cucugggagugacauuacu

SEQ ID NO: 1032753 - RNA, 19 nt, Artificial Sequence
  Description of Artificial Sequence: Synthetic oligonucleotide
gcugucgagaggggaccgg

SEQ ID NO: 1032754 - RNA, 19 nt, Artificial Sequence
  Description of Artificial Sequence: Synthetic oligonucleotide
ggaaaucucugaggucaca

SEQ ID NO: 1032755 - RNA, 19 nt, Artificial Sequence
  Description of Artificial Sequence: Synthetic oligonucleotide
uccgagcuaggagcauaau

SEQ ID NO: 1032756 - RNA, 19 nt, Artificial Sequence
  Description of Artificial Sequence: Synthetic oligonucleotide
gucucaacaccugcaguau

SEQ ID NO: 1032757 - RNA, 19 nt, Artificial Sequence
  Description of Artificial Sequence: Synthetic oligonucleotide
ccgcagggagauauacuuc

SEQ ID NO: 1032758 - RNA, 19 nt, Artificial Sequence
  Description of Artificial Sequence: Synthetic oligonucleotide
ggcuaugugaggaggcugu

SEQ ID NO: 1032759 - RNA, 19 nt, Artificial Sequence
  Description of Artificial Sequence: Synthetic oligonucleotide
gaauggugggcuggucccu

SEQ ID NO: 1032760 - RNA, 19 nt, Artificial Sequence
  Description of Artificial Sequence: Synthetic oligonucleotide
cuccuguugguaguagagu

SEQ ID NO: 1032761 - RNA, 19 nt, Artificial Sequence
  Description of Artificial Sequence: Synthetic oligonucleotide
ggaccggcuagaggccgcg

SEQ ID NO: 1032762 - RNA, 19 nt, Artificial Sequence
  Description of Artificial Sequence: Synthetic oligonucleotide
ccgagcuaggagcauaaua

SEQ ID NO: 1032763 - RNA, 19 nt, Artificial Sequence
  Description of Artificial Sequence: Synthetic oligonucleotide
guuucagugugcggucccu

SEQ ID NO: 1032764 - RNA, 19 nt, Artificial Sequence
  Description of Artificial Sequence: Synthetic oligonucleotide
caguagccuuuuccccauc

SEQ ID NO: 1032765 - RNA, 19 nt, Artificial Sequence
  Description of Artificial Sequence: Synthetic oligonucleotide
cggcuagaggccgcgaggg

SEQ ID NO: 1032766 - RNA, 19 nt, Artificial Sequence
  Description of Artificial Sequence: Synthetic oligonucleotide
cggaacgcaauugcuccag

SEQ ID NO: 1032767 - RNA, 19 nt, Artificial Sequence
  Description of Artificial Sequence: Synthetic oligonucleotide
gcuccuucgccaggcuccc

SEQ ID NO: 1032768 - RNA, 19 nt, Artificial Sequence
  Description of Artificial Sequence: Synthetic oligonucleotide
uaaucccguccuggcccau

SEQ ID NO: 1032769 - RNA, 19 nt, Artificial Sequence
  Description of Artificial Sequence: Synthetic oligonucleotide
caaggccacggaacgcaau

SEQ ID NO: 1032770 - RNA, 19 nt, Artificial Sequence
  Description of Artificial Sequence: Synthetic oligonucleotide
gcaguagccuuuuccccau

SEQ ID NO: 1032771 - RNA, 19 nt, Artificial Sequence
  Description of Artificial Sequence: Synthetic oligonucleotide
ccuucgccaggcucccauc

SEQ ID NO: 1032772 - RNA, 19 nt, Artificial Sequence
  Description of Artificial Sequence: Synthetic oligonucleotide
gcgagggccaguguuuugu

SEQ ID NO: 1032773 - RNA, 19 nt, Artificial Sequence
  Description of Artificial Sequence: Synthetic oligonucleotide
cccuaacuugcacuucuua

SEQ ID NO: 1032774 - RNA, 19 nt, Artificial Sequence
  Description of Artificial Sequence: Synthetic oligonucleotide
ccgcccuggcaacccagag

SEQ ID NO: 1032775 - RNA, 19 nt, Artificial Sequence
  Description of Artificial Sequence: Synthetic oligonucleotide
gcaaggucaggaagcggua

SEQ ID NO: 1032776 - RNA, 19 nt, Artificial Sequence
  Description of Artificial Sequence: Synthetic oligonucleotide
gggaccggcuagaggccgc

SEQ ID NO: 1032777 - RNA, 19 nt, Artificial Sequence
  Description of Artificial Sequence: Synthetic oligonucleotide
gggcuggucccuggaacca

SEQ ID NO: 1032778 - RNA, 19 nt, Artificial Sequence
  Description of Artificial Sequence: Synthetic oligonucleotide
ggcccggucccgcugcuua

SEQ ID NO: 1032779 - RNA, 19 nt, Artificial Sequence
  Description of Artificial Sequence: Synthetic oligonucleotide
cuaccaugccacagcccuu

SEQ ID NO: 1032780 - RNA, 19 nt, Artificial Sequence
  Description of Artificial Sequence: Synthetic oligonucleotide
gagcacgaccugggcucuc

SEQ ID NO: 1032781 - RNA, 19 nt, Artificial Sequence
  Description of Artificial Sequence: Synthetic oligonucleotide
gaccggcuagaggccgcga

SEQ ID NO: 1032782 - RNA, 19 nt, Artificial Sequence
  Description of Artificial Sequence: Synthetic oligonucleotide
cugcaaccugcaguagccu

SEQ ID NO: 1032783 - RNA, 19 nt, Artificial Sequence
  Description of Artificial Sequence: Synthetic oligonucleotide
cugccgcccuggcaaccca

SEQ ID NO: 1032784 - RNA, 19 nt, Artificial Sequence
  Description of Artificial Sequence: Synthetic oligonucleotide
ccuucucggcaagcacggc

SEQ ID NO: 1032785 - RNA, 19 nt, Artificial Sequence
  Description of Artificial Sequence: Synthetic oligonucleotide
gcgucugcuggcggcccag

SEQ ID NO: 1032786 - RNA, 19 nt, Artificial Sequence
  Description of Artificial Sequence: Synthetic oligonucleotide
gcugugaguucaacacagu

SEQ ID NO: 1032787 - RNA, 19 nt, Artificial Sequence
  Description of Artificial Sequence: Synthetic oligonucleotide
cccuggcaacccagaggac

SEQ ID NO: 1032788 - RNA, 19 nt, Artificial Sequence
  Description of Artificial Sequence: Synthetic oligonucleotide
ggguugcauuaauggcacu

SEQ ID NO: 1032789 - RNA, 19 nt, Artificial Sequence
  Description of Artificial Sequence: Synthetic oligonucleotide
cggcaaggucaggaagcgg

SEQ ID NO: 1032790 - RNA, 19 nt, Artificial Sequence
  Description of Artificial Sequence: Synthetic oligonucleotide
cccuacucugcuccacaua

SEQ ID NO: 1032791 - RNA, 19 nt, Artificial Sequence
  Description of Artificial Sequence: Synthetic oligonucleotide
ggauggucagcuggucuuu

SEQ ID NO: 1032792 - RNA, 19 nt, Artificial Sequence
  Description of Artificial Sequence: Synthetic oligonucleotide
cccggucccgcugcuuaug

SEQ ID NO: 1032793 - RNA, 19 nt, Artificial Sequence
  Description of Artificial Sequence: Synthetic oligonucleotide
cgcgagggccaguguuuug

SEQ ID NO: 1032794 - RNA, 19 nt, Artificial Sequence
  Description of Artificial Sequence: Synthetic oligonucleotide
ggucucuuucuagcuugau

SEQ ID NO: 1032795 - RNA, 19 nt, Artificial Sequence
  Description of Artificial Sequence: Synthetic oligonucleotide
cucaggaguugggcauuau

SEQ ID NO: 1032796 - RNA, 19 nt, Artificial Sequence
  Description of Artificial Sequence: Synthetic oligonucleotide
gccgcccuggcaacccaga

SEQ ID NO: 1032797 - RNA, 19 nt, Artificial Sequence
  Description of Artificial Sequence: Synthetic oligonucleotide
caucggugcucaggacccu

SEQ ID NO: 1032798 - RNA, 19 nt, Artificial Sequence
  Description of Artificial Sequence: Synthetic oligonucleotide
ggacccucucuaggauggu

SEQ ID NO: 1032799 - RNA, 19 nt, Artificial Sequence
  Description of Artificial Sequence: Synthetic oligonucleotide
cgggccaacugcucagcau

SEQ ID NO: 1032800 - RNA, 19 nt, Artificial Sequence
  Description of Artificial Sequence: Synthetic oligonucleotide
ccgcgagggccaguguuuu

SEQ ID NO: 1032801 - RNA, 19 nt, Artificial Sequence
  Description of Artificial Sequence: Synthetic oligonucleotide
ucaaauauuguucaauggg

SEQ ID NO: 1032802 - RNA, 19 nt, Artificial Sequence
  Description of Artificial Sequence: Synthetic oligonucleotide
uauacaaucauccccaaug

SEQ ID NO: 1032803 - RNA, 19 nt, Artificial Sequence
  Description of Artificial Sequence: Synthetic oligonucleotide
aaagcuccaucguauaagg

SEQ ID NO: 1032804 - RNA, 19 nt, Artificial Sequence
  Description of Artificial Sequence: Synthetic oligonucleotide
uucaaugggacaaccaugc

SEQ ID NO: 1032805 - RNA, 19 nt, Artificial Sequence
  Description of Artificial Sequence: Synthetic oligonucleotide
uaggcaaucagcaaacucu

SEQ ID NO: 1032806 - RNA, 19 nt, Artificial Sequence
  Description of Artificial Sequence: Synthetic oligonucleotide
aagaggcacagcuuagggc

SEQ ID NO: 1032807 - RNA, 19 nt, Artificial Sequence
  Description of Artificial Sequence: Synthetic oligonucleotide
uguaguacugagagguugg

SEQ ID NO: 1032808 - RNA, 19 nt, Artificial Sequence
  Description of Artificial Sequence: Synthetic oligonucleotide
ucucuuuuacaauagagua

SEQ ID NO: 1032809 - RNA, 19 nt, Artificial Sequence
  Description of Artificial Sequence: Synthetic oligonucleotide
gaucuaggaucacagacag

SEQ ID NO: 1032810 - RNA, 19 nt, Artificial Sequence
  Description of Artificial Sequence: Synthetic oligonucleotide
uauccugcagcaauccugg

SEQ ID NO: 1032811 - RNA, 19 nt, Artificial Sequence
  Description of Artificial Sequence: Synthetic oligonucleotide
aauaugucagcagcauggc

SEQ ID NO: 1032812 - RNA, 19 nt, Artificial Sequence
  Description of Artificial Sequence: Synthetic oligonucleotide
acucuaugaagccaggaag

SEQ ID NO: 1032813 - RNA, 19 nt, Artificial Sequence
  Description of Artificial Sequence: Synthetic oligonucleotide
gaagaguccaccugugggg

SEQ ID NO: 1032814 - RNA, 19 nt, Artificial Sequence
  Description of Artificial Sequence: Synthetic oligonucleotide
gaaauaggcaaucagcaaa

SEQ ID NO: 1032815 - RNA, 19 nt, Artificial Sequence
  Description of Artificial Sequence: Synthetic oligonucleotide
cuacuuacugccaucaaug

SEQ ID NO: 1032816 - RNA, 19 nt, Artificial Sequence
  Description of Artificial Sequence: Synthetic oligonucleotide
aguuggggcagaaauaggc

SEQ ID NO: 1032817 - RNA, 19 nt, Artificial Sequence
  Description of Artificial Sequence: Synthetic oligonucleotide
uucaccuuggcucgagugg

SEQ ID NO: 1032818 - RNA, 19 nt, Artificial Sequence
  Description of Artificial Sequence: Synthetic oligonucleotide
ucuaggaucacagacaguu

SEQ ID NO: 1032819 - RNA, 19 nt, Artificial Sequence
  Description of Artificial Sequence: Synthetic oligonucleotide
gaucaccccguuuauaaag

SEQ ID NO: 1032820 - RNA, 19 nt, Artificial Sequence
  Description of Artificial Sequence: Synthetic oligonucleotide
uacaguaguuuucugcuca

SEQ ID NO: 1032821 - RNA, 19 nt, Artificial Sequence
  Description of Artificial Sequence: Synthetic oligonucleotide
aguggcauguuugaagggc

SEQ ID NO: 1032822 - RNA, 19 nt, Artificial Sequence
  Description of Artificial Sequence: Synthetic oligonucleotide
cuuugaguagguuggaaug

SEQ ID NO: 1032823 - RNA, 19 nt, Artificial Sequence
  Description of Artificial Sequence: Synthetic oligonucleotide
acuuggucauuuccgagac

SEQ ID NO: 1032824 - RNA, 19 nt, Artificial Sequence
  Description of Artificial Sequence: Synthetic oligonucleotide
auaggcaaucagcaaacuc

SEQ ID NO: 1032825 - RNA, 19 nt, Artificial Sequence
  Description of Artificial Sequence: Synthetic oligonucleotide
uguauugaagaguccaccu

SEQ ID NO: 1032826 - RNA, 19 nt, Artificial Sequence
  Description of Artificial Sequence: Synthetic oligonucleotide
guuguagcggugcagauac

SEQ ID NO: 1032827 - RNA, 19 nt, Artificial Sequence
  Description of Artificial Sequence: Synthetic oligonucleotide
ucaccuagaucgcuguccg

SEQ ID NO: 1032828 - RNA, 19 nt, Artificial Sequence
  Description of Artificial Sequence: Synthetic oligonucleotide
agcuccaucguauaaggug

SEQ ID NO: 1032829 - RNA, 19 nt, Artificial Sequence
  Description of Artificial Sequence: Synthetic oligonucleotide
uggcuuuucaccuuggcuc

SEQ ID NO: 1032830 - RNA, 19 nt, Artificial Sequence
  Description of Artificial Sequence: Synthetic oligonucleotide
uguuugaagggccuccuga

SEQ ID NO: 1032831 - RNA, 19 nt, Artificial Sequence
  Description of Artificial Sequence: Synthetic oligonucleotide
aacucuaugaagccaggaa

SEQ ID NO: 1032832 - RNA, 19 nt, Artificial Sequence
  Description of Artificial Sequence: Synthetic oligonucleotide
auaacggggugcuggauuc

SEQ ID NO: 1032833 - RNA, 19 nt, Artificial Sequence
  Description of Artificial Sequence: Synthetic oligonucleotide
auuguucaaugggacaacc

SEQ ID NO: 1032834 - RNA, 19 nt, Artificial Sequence
  Description of Artificial Sequence: Synthetic oligonucleotide
acaaucauccccaaugcag

SEQ ID NO: 1032835 - RNA, 19 nt, Artificial Sequence
  Description of Artificial Sequence: Synthetic oligonucleotide
cuagucagcagagugagug

SEQ ID NO: 1032836 - RNA, 19 nt, Artificial Sequence
  Description of Artificial Sequence: Synthetic oligonucleotide
ucauuuccgagaccagagg

SEQ ID NO: 1032837 - RNA, 19 nt, Artificial Sequence
  Description of Artificial Sequence: Synthetic oligonucleotide
ucuaggaagccuuccccgg

SEQ ID NO: 1032838 - RNA, 19 nt, Artificial Sequence
  Description of Artificial Sequence: Synthetic oligonucleotide
uagaucaccccguuuauaa

SEQ ID NO: 1032839 - RNA, 19 nt, Artificial Sequence
  Description of Artificial Sequence: Synthetic oligonucleotide
cagaaauaggcaaucagca

SEQ ID NO: 1032840 - RNA, 19 nt, Artificial Sequence
  Description of Artificial Sequence: Synthetic oligonucleotide
uuuccgagaccagaggagg

SEQ ID NO: 1032841 - RNA, 19 nt, Artificial Sequence
  Description of Artificial Sequence: Synthetic oligonucleotide
uucaacuggagucgguucu

SEQ ID NO: 1032842 - RNA, 19 nt, Artificial Sequence
  Description of Artificial Sequence: Synthetic oligonucleotide
aaguguguauaacggggug

SEQ ID NO: 1032843 - RNA, 19 nt, Artificial Sequence
  Description of Artificial Sequence: Synthetic oligonucleotide
ccuggcuugaccaaaagag

SEQ ID NO: 1032844 - RNA, 19 nt, Artificial Sequence
  Description of Artificial Sequence: Synthetic oligonucleotide
uggaccuagcucaagucug

SEQ ID NO: 1032845 - RNA, 19 nt, Artificial Sequence
  Description of Artificial Sequence: Synthetic oligonucleotide
auagguauccugcagcaau

SEQ ID NO: 1032846 - RNA, 19 nt, Artificial Sequence
  Description of Artificial Sequence: Synthetic oligonucleotide
aauucagcacggcugcaga

SEQ ID NO: 1032847 - RNA, 19 nt, Artificial Sequence
  Description of Artificial Sequence: Synthetic oligonucleotide
aguggagcggcauggauca

SEQ ID NO: 1032848 - RNA, 19 nt, Artificial Sequence
  Description of Artificial Sequence: Synthetic oligonucleotide
ugguagaucaccccguuua

SEQ ID NO: 1032849 - RNA, 19 nt, Artificial Sequence
  Description of Artificial Sequence: Synthetic oligonucleotide
gaagguuccagcuaccucu

SEQ ID NO: 1032850 - RNA, 19 nt, Artificial Sequence
  Description of Artificial Sequence: Synthetic oligonucleotide
uuggaccuagcucaagucu

SEQ ID NO: 1032851 - RNA, 19 nt, Artificial Sequence
  Description of Artificial Sequence: Synthetic oligonucleotide
uguagcggugcagauacag

SEQ ID NO: 1032852 - RNA, 19 nt, Artificial Sequence
  Description of Artificial Sequence: Synthetic oligonucleotide
auucaacuggagucgguuc

SEQ ID NO: 1032853 - RNA, 19 nt, Artificial Sequence
  Description of Artificial Sequence: Synthetic oligonucleotide
agagacuuagcuucuccug

SEQ ID NO: 1032854 - RNA, 19 nt, Artificial Sequence
  Description of Artificial Sequence: Synthetic oligonucleotide
gcauggaucagggagaagg

SEQ ID NO: 1032855 - RNA, 19 nt, Artificial Sequence
  Description of Artificial Sequence: Synthetic oligonucleotide
uaucuguaguacugagagg

SEQ ID NO: 1032856 - RNA, 19 nt, Artificial Sequence
  Description of Artificial Sequence: Synthetic oligonucleotide
cuggaaagcaccucgcgac

SEQ ID NO: 1032857 - RNA, 19 nt, Artificial Sequence
  Description of Artificial Sequence: Synthetic oligonucleotide
ugaguagguuggaaugugc

SEQ ID NO: 1032858 - RNA, 19 nt, Artificial Sequence
  Description of Artificial Sequence: Synthetic oligonucleotide
agacaguuggggcagaaau

SEQ ID NO: 1032859 - RNA, 19 nt, Artificial Sequence
  Description of Artificial Sequence: Synthetic oligonucleotide
agggaaguguguauaacgg

SEQ ID NO: 1032860 - RNA, 19 nt, Artificial Sequence
  Description of Artificial Sequence: Synthetic oligonucleotide
uacuuacugccaucaaugc

SEQ ID NO: 1032861 - RNA, 19 nt, Artificial Sequence
  Description of Artificial Sequence: Synthetic oligonucleotide
uuacaauagaguaguccaa

SEQ ID NO: 1032862 - RNA, 19 nt, Artificial Sequence
  Description of Artificial Sequence: Synthetic oligonucleotide
uacaaucauccccaaugca

SEQ ID NO: 1032863 - RNA, 19 nt, Artificial Sequence
  Description of Artificial Sequence: Synthetic oligonucleotide
agagaggaaguuugaagga

SEQ ID NO: 1032864 - RNA, 19 nt, Artificial Sequence
  Description of Artificial Sequence: Synthetic oligonucleotide
uuucaccuuggcucgagug

SEQ ID NO: 1032865 - RNA, 19 nt, Artificial Sequence
  Description of Artificial Sequence: Synthetic oligonucleotide
uuugaguagguuggaaugu

SEQ ID NO: 1032866 - RNA, 19 nt, Artificial Sequence
  Description of Artificial Sequence: Synthetic oligonucleotide
guuugaaggaauguaguca

SEQ ID NO: 1032867 - RNA, 19 nt, Artificial Sequence
  Description of Artificial Sequence: Synthetic oligonucleotide
gaauguagucagcagagua

SEQ ID NO: 1032868 - RNA, 19 nt, Artificial Sequence
  Description of Artificial Sequence: Synthetic oligonucleotide
guaguccaaaccaagacuc

SEQ ID NO: 1032869 - RNA, 19 nt, Artificial Sequence
  Description of Artificial Sequence: Synthetic oligonucleotide
accuagaucgcuguccgac

SEQ ID NO: 1032870 - RNA, 19 nt, Artificial Sequence
  Description of Artificial Sequence: Synthetic oligonucleotide
guauaaggugcucucuccc

SEQ ID NO: 1032871 - RNA, 19 nt, Artificial Sequence
  Description of Artificial Sequence: Synthetic oligonucleotide
cauuuuauuucaggagggg

SEQ ID NO: 1032872 - RNA, 19 nt, Artificial Sequence
  Description of Artificial Sequence: Synthetic oligonucleotide
aggggauuccagcuccacc

SEQ ID NO: 1032873 - RNA, 19 nt, Artificial Sequence
  Description of Artificial Sequence: Synthetic oligonucleotide
aggaauguagucagcagag

SEQ ID NO: 1032874 - RNA, 19 nt, Artificial Sequence
  Description of Artificial Sequence: Synthetic oligonucleotide
agggguaggcguuguagcg

SEQ ID NO: 1032875 - RNA, 19 nt, Artificial Sequence
  Description of Artificial Sequence: Synthetic oligonucleotide
agaucgcuguccgacaugg

SEQ ID NO: 1032876 - RNA, 19 nt, Artificial Sequence
  Description of Artificial Sequence: Synthetic oligonucleotide
ccuaccauagguauccugc

SEQ ID NO: 1032877 - RNA, 19 nt, Artificial Sequence
  Description of Artificial Sequence: Synthetic oligonucleotide
ucagcccuagucagcagag

SEQ ID NO: 1032878 - RNA, 19 nt, Artificial Sequence
  Description of Artificial Sequence: Synthetic oligonucleotide
agaaauaggcaaucagcaa

SEQ ID NO: 1032879 - RNA, 19 nt, Artificial Sequence
  Description of Artificial Sequence: Synthetic oligonucleotide
uuccgggcuacuuacugcc

SEQ ID NO: 1032880 - RNA, 19 nt, Artificial Sequence
  Description of Artificial Sequence: Synthetic oligonucleotide
gguuggucugcccugagag

SEQ ID NO: 1032881 - RNA, 19 nt, Artificial Sequence
  Description of Artificial Sequence: Synthetic oligonucleotide
acuuacugccaucaaugca

SEQ ID NO: 1032882 - RNA, 19 nt, Artificial Sequence
  Description of Artificial Sequence: Synthetic oligonucleotide
uguagucagcagaguacag

SEQ ID NO: 1032883 - RNA, 19 nt, Artificial Sequence
  Description of Artificial Sequence: Synthetic oligonucleotide
aucaccccguuuauaaagc

SEQ ID NO: 1032884 - RNA, 19 nt, Artificial Sequence
  Description of Artificial Sequence: Synthetic oligonucleotide
ucccuuauacaaucauccc

SEQ ID NO: 1032885 - RNA, 19 nt, Artificial Sequence
  Description of Artificial Sequence: Synthetic oligonucleotide
cauggaucagggagaaggc

SEQ ID NO: 1032886 - RNA, 19 nt, Artificial Sequence
  Description of Artificial Sequence: Synthetic oligonucleotide
acacccgccugacagcucg

SEQ ID NO: 1032887 - RNA, 19 nt, Artificial Sequence
  Description of Artificial Sequence: Synthetic oligonucleotide
ucugcccugagagacuuag

SEQ ID NO: 1032888 - RNA, 19 nt, Artificial Sequence
  Description of Artificial Sequence: Synthetic oligonucleotide
ugucugcugggucuuuucc

SEQ ID NO: 1032889 - RNA, 19 nt, Artificial Sequence
  Description of Artificial Sequence: Synthetic oligonucleotide
ucguauaaggugcucucuc

SEQ ID NO: 1032890 - RNA, 19 nt, Artificial Sequence
  Description of Artificial Sequence: Synthetic oligonucleotide
auaacagugcagccucaag

SEQ ID NO: 1032891 - RNA, 19 nt, Artificial Sequence
  Description of Artificial Sequence: Synthetic oligonucleotide
uuccgagaccagaggaggg

SEQ ID NO: 1032892 - RNA, 19 nt, Artificial Sequence
  Description of Artificial Sequence: Synthetic oligonucleotide
agcccuagucagcagagug

SEQ ID NO: 1032893 - RNA, 19 nt, Artificial Sequence
  Description of Artificial Sequence: Synthetic oligonucleotide
ugccuacuuggucauuucc

SEQ ID NO: 1032894 - RNA, 19 nt, Artificial Sequence
  Description of Artificial Sequence: Synthetic oligonucleotide
uuggucugcccugagagac

SEQ ID NO: 1032895 - RNA, 19 nt, Artificial Sequence
  Description of Artificial Sequence: Synthetic oligonucleotide
gcagaaauaggcaaucagc

SEQ ID NO: 1032896 - RNA, 19 nt, Artificial Sequence
  Description of Artificial Sequence: Synthetic oligonucleotide
ccauuuuauuucaggaggg

SEQ ID NO: 1032897 - RNA, 19 nt, Artificial Sequence
  Description of Artificial Sequence: Synthetic oligonucleotide
gggaucuaggaucacagac

SEQ ID NO: 1032898 - RNA, 19 nt, Artificial Sequence
  Description of Artificial Sequence: Synthetic oligonucleotide
accuagcucaagucugaac

SEQ ID NO: 1032899 - RNA, 19 nt, Artificial Sequence
  Description of Artificial Sequence: Synthetic oligonucleotide
acagcucgcggcuggaaag

SEQ ID NO: 1032900 - RNA, 19 nt, Artificial Sequence
  Description of Artificial Sequence: Synthetic oligonucleotide
guauccugcagcaauccug

SEQ ID NO: 1032901 - RNA, 19 nt, Artificial Sequence
  Description of Artificial Sequence: Synthetic oligonucleotide
uuauacaaucauccccaau

SEQ ID NO: 1032902 - RNA, 19 nt, Artificial Sequence
  Description of Artificial Sequence: Synthetic oligonucleotide
gaauucagcacggcugcag

SEQ ID NO: 1032903 - RNA, 19 nt, Artificial Sequence
  Description of Artificial Sequence: Synthetic oligonucleotide
gggaaguguguauaacggg

SEQ ID NO: 1032904 - RNA, 19 nt, Artificial Sequence
  Description of Artificial Sequence: Synthetic oligonucleotide
agguauccugcagcaaucc

SEQ ID NO: 1032905 - RNA, 19 nt, Artificial Sequence
  Description of Artificial Sequence: Synthetic oligonucleotide
ggagaaaacucccacccac

SEQ ID NO: 1032906 - RNA, 19 nt, Artificial Sequence
  Description of Artificial Sequence: Synthetic oligonucleotide
guagguuggaaugugcaca

SEQ ID NO: 1032907 - RNA, 19 nt, Artificial Sequence
  Description of Artificial Sequence: Synthetic oligonucleotide
guuugaagggccuccugac

SEQ ID NO: 1032908 - RNA, 19 nt, Artificial Sequence
  Description of Artificial Sequence: Synthetic oligonucleotide
cucaccuagaucgcugucc

SEQ ID NO: 1032909 - RNA, 19 nt, Artificial Sequence
  Description of Artificial Sequence: Synthetic oligonucleotide
aauaggcaaucagcaaacu

SEQ ID NO: 1032910 - RNA, 19 nt, Artificial Sequence
  Description of Artificial Sequence: Synthetic oligonucleotide
auguagucagcagaguaca

SEQ ID NO: 1032911 - RNA, 19 nt, Artificial Sequence
  Description of Artificial Sequence: Synthetic oligonucleotide
cccuuauacaaucaucccc

SEQ ID NO: 1032912 - RNA, 19 nt, Artificial Sequence
  Description of Artificial Sequence: Synthetic oligonucleotide
caucguauaaggugcucuc

SEQ ID NO: 1032913 - RNA, 19 nt, Artificial Sequence
  Description of Artificial Sequence: Synthetic oligonucleotide
aacuggagucgguucugug

SEQ ID NO: 1032914 - RNA, 19 nt, Artificial Sequence
  Description of Artificial Sequence: Synthetic oligonucleotide
gggaacggggacuaccugg

SEQ ID NO: 1032915 - RNA, 19 nt, Artificial Sequence
  Description of Artificial Sequence: Synthetic oligonucleotide
guuuauaaagcuccaucgu

SEQ ID NO: 1032916 - RNA, 19 nt, Artificial Sequence
  Description of Artificial Sequence: Synthetic oligonucleotide
ccuuauacaaucaucccca

SEQ ID NO: 1032917 - RNA, 19 nt, Artificial Sequence
  Description of Artificial Sequence: Synthetic oligonucleotide
cuuggaccuagcucaaguc

SEQ ID NO: 1032918 - RNA, 19 nt, Artificial Sequence
  Description of Artificial Sequence: Synthetic oligonucleotide
uuacaguaguuuucugcuc

SEQ ID NO: 1032919 - RNA, 19 nt, Artificial Sequence
  Description of Artificial Sequence: Synthetic oligonucleotide
uagcucaagucugaacuug

SEQ ID NO: 1032920 - RNA, 19 nt, Artificial Sequence
  Description of Artificial Sequence: Synthetic oligonucleotide
guggcgguguauugaagag

SEQ ID NO: 1032921 - RNA, 19 nt, Artificial Sequence
  Description of Artificial Sequence: Synthetic oligonucleotide
uggugcguuggucuccuca

SEQ ID NO: 1032922 - RNA, 19 nt, Artificial Sequence
  Description of Artificial Sequence: Synthetic oligonucleotide
agacuuagcuucuccugcu

SEQ ID NO: 1032923 - RNA, 19 nt, Artificial Sequence
  Description of Artificial Sequence: Synthetic oligonucleotide
cuguaguacugagagguug

SEQ ID NO: 1032924 - RNA, 19 nt, Artificial Sequence
  Description of Artificial Sequence: Synthetic oligonucleotide
gcgaccugacgucagaucc

SEQ ID NO: 1032925 - RNA, 19 nt, Artificial Sequence
  Description of Artificial Sequence: Synthetic oligonucleotide
gagagguuggucugcccug

SEQ ID NO: 1032926 - RNA, 19 nt, Artificial Sequence
  Description of Artificial Sequence: Synthetic oligonucleotide
uuccagcuaccucugugga

SEQ ID NO: 1032927 - RNA, 19 nt, Artificial Sequence
  Description of Artificial Sequence: Synthetic oligonucleotide
uauuguucaaugggacaac

SEQ ID NO: 1032928 - RNA, 19 nt, Artificial Sequence
  Description of Artificial Sequence: Synthetic oligonucleotide
accuaaacauucaacugga

SEQ ID NO: 1032929 - RNA, 19 nt, Artificial Sequence
  Description of Artificial Sequence: Synthetic oligonucleotide
ucagcacggcugcagagau

SEQ ID NO: 1032930 - RNA, 19 nt, Artificial Sequence
  Description of Artificial Sequence: Synthetic oligonucleotide
cucaaacaaccacuuccag

SEQ ID NO: 1032931 - RNA, 19 nt, Artificial Sequence
  Description of Artificial Sequence: Synthetic oligonucleotide
cugagccugccuaggaaag

SEQ ID NO: 1032932 - RNA, 19 nt, Artificial Sequence
  Description of Artificial Sequence: Synthetic oligonucleotide
aacggggacuaccuggcuu

SEQ ID NO: 1032933 - RNA, 19 nt, Artificial Sequence
  Description of Artificial Sequence: Synthetic oligonucleotide
cucgaguggagcggcaugg

SEQ ID NO: 1032934 - RNA, 19 nt, Artificial Sequence
  Description of Artificial Sequence: Synthetic oligonucleotide
ucaccuuggcucgagugga

SEQ ID NO: 1032935 - RNA, 19 nt, Artificial Sequence
  Description of Artificial Sequence: Synthetic oligonucleotide
agcaccucgcgaccugacg

SEQ ID NO: 1032936 - RNA, 19 nt, Artificial Sequence
  Description of Artificial Sequence: Synthetic oligonucleotide
gaguagguuggaaugugca

SEQ ID NO: 1032937 - RNA, 19 nt, Artificial Sequence
  Description of Artificial Sequence: Synthetic oligonucleotide
ucaccccguuuauaaagcu

SEQ ID NO: 1032938 - RNA, 19 nt, Artificial Sequence
  Description of Artificial Sequence: Synthetic oligonucleotide
uggucccuuauacaaucau

SEQ ID NO: 1032939 - RNA, 19 nt, Artificial Sequence
  Description of Artificial Sequence: Synthetic oligonucleotide
cuccuuggggccagguucc

SEQ ID NO: 1032940 - RNA, 19 nt, Artificial Sequence
  Description of Artificial Sequence: Synthetic oligonucleotide
uguggguggcgguguauug

SEQ ID NO: 1032941 - RNA, 19 nt, Artificial Sequence
  Description of Artificial Sequence: Synthetic oligonucleotide
uucagcacggcugcagaga

SEQ ID NO: 1032942 - RNA, 19 nt, Artificial Sequence
  Description of Artificial Sequence: Synthetic oligonucleotide
agucgguucugugaugucu

SEQ ID NO: 1032943 - RNA, 19 nt, Artificial Sequence
  Description of Artificial Sequence: Synthetic oligonucleotide
uggggugcgggacggccgg

SEQ ID NO: 1032944 - RNA, 19 nt, Artificial Sequence
  Description of Artificial Sequence: Synthetic oligonucleotide
gcuccaucguauaaggugc

SEQ ID NO: 1032945 - RNA, 19 nt, Artificial Sequence
  Description of Artificial Sequence: Synthetic oligonucleotide
auagaguaguccaaaccaa

SEQ ID NO: 1032946 - RNA, 19 nt, Artificial Sequence
  Description of Artificial Sequence: Synthetic oligonucleotide
cuuggcucgaguggagcgg

SEQ ID NO: 1032947 - RNA, 19 nt, Artificial Sequence
  Description of Artificial Sequence: Synthetic oligonucleotide
gagacugccccaucccuca

SEQ ID NO: 1032948 - RNA, 19 nt, Artificial Sequence
  Description of Artificial Sequence: Synthetic oligonucleotide
uagaucgcuguccgacaug

SEQ ID NO: 1032949 - RNA, 19 nt, Artificial Sequence
  Description of Artificial Sequence: Synthetic oligonucleotide
uggcauguuugaagggccu

SEQ ID NO: 1032950 - RNA, 19 nt, Artificial Sequence
  Description of Artificial Sequence: Synthetic oligonucleotide
gcagcaacaccaugccugg

SEQ ID NO: 1032951 - RNA, 19 nt, Artificial Sequence
  Description of Artificial Sequence: Synthetic oligonucleotide
uccucaccuagaucgcugu

SEQ ID NO: 1032952 - RNA, 19 nt, Artificial Sequence
  Description of Artificial Sequence: Synthetic oligonucleotide
uuaggggauuccagcucca

SEQ ID NO: 1032953 - RNA, 19 nt, Artificial Sequence
  Description of Artificial Sequence: Synthetic oligonucleotide
gcggcuggaaagcaccucg

SEQ ID NO: 1032954 - RNA, 19 nt, Artificial Sequence
  Description of Artificial Sequence: Synthetic oligonucleotide
accuuggcucgaguggagc

SEQ ID NO: 1032955 - RNA, 19 nt, Artificial Sequence
  Description of Artificial Sequence: Synthetic oligonucleotide
gaguggagcggcauggauc

SEQ ID NO: 1032956 - RNA, 19 nt, Artificial Sequence
  Description of Artificial Sequence: Synthetic oligonucleotide
augccagaauaugucagca

SEQ ID NO: 1032957 - RNA, 19 nt, Artificial Sequence
  Description of Artificial Sequence: Synthetic oligonucleotide
gaccugacgucagaucccc

SEQ ID NO: 1032958 - RNA, 19 nt, Artificial Sequence
  Description of Artificial Sequence: Synthetic oligonucleotide
gguggcgguguauugaaga

SEQ ID NO: 1032959 - RNA, 19 nt, Artificial Sequence
  Description of Artificial Sequence: Synthetic oligonucleotide
gccuacuuggucauuuccg

SEQ ID NO: 1032960 - RNA, 19 nt, Artificial Sequence
  Description of Artificial Sequence: Synthetic oligonucleotide
aaagcaccucgcgaccuga

SEQ ID NO: 1032961 - RNA, 19 nt, Artificial Sequence
  Description of Artificial Sequence: Synthetic oligonucleotide
cuucaccgacuccuugggg

SEQ ID NO: 1032962 - RNA, 19 nt, Artificial Sequence
  Description of Artificial Sequence: Synthetic oligonucleotide
agaggaaguuugaaggaau

SEQ ID NO: 1032963 - RNA, 19 nt, Artificial Sequence
  Description of Artificial Sequence: Synthetic oligonucleotide
ggcccauuuuauuucagga

SEQ ID NO: 1032964 - RNA, 19 nt, Artificial Sequence
  Description of Artificial Sequence: Synthetic oligonucleotide
cuaccauagguauccugca

SEQ ID NO: 1032965 - RNA, 19 nt, Artificial Sequence
  Description of Artificial Sequence: Synthetic oligonucleotide
agaucaccccguuuauaaa

SEQ ID NO: 1032966 - RNA, 19 nt, Artificial Sequence
  Description of Artificial Sequence: Synthetic oligonucleotide
accaagacucaaacaacca

SEQ ID NO: 1032967 - RNA, 19 nt, Artificial Sequence
  Description of Artificial Sequence: Synthetic oligonucleotide
ugcgggaacggggacuacc

SEQ ID NO: 1032968 - RNA, 19 nt, Artificial Sequence
  Description of Artificial Sequence: Synthetic oligonucleotide
uggguggcgguguauugaa

SEQ ID NO: 1032969 - RNA, 19 nt, Artificial Sequence
  Description of Artificial Sequence: Synthetic oligonucleotide
ugagccugccuaggaaagc

SEQ ID NO: 1032970 - RNA, 19 nt, Artificial Sequence
  Description of Artificial Sequence: Synthetic oligonucleotide
aucguauaaggugcucucu

SEQ ID NO: 1032971 - RNA, 19 nt, Artificial Sequence
  Description of Artificial Sequence: Synthetic oligonucleotide
caccccguuuauaaagcuc

SEQ ID NO: 1032972 - RNA, 19 nt, Artificial Sequence
  Description of Artificial Sequence: Synthetic oligonucleotide
aagguuccagcuaccucug

SEQ ID NO: 1032973 - RNA, 19 nt, Artificial Sequence
  Description of Artificial Sequence: Synthetic oligonucleotide
uguggggcuuccagccuca

SEQ ID NO: 1032974 - RNA, 19 nt, Artificial Sequence
  Description of Artificial Sequence: Synthetic oligonucleotide
ugacacccgccugacagcu

SEQ ID NO: 1032975 - RNA, 19 nt, Artificial Sequence
  Description of Artificial Sequence: Synthetic oligonucleotide
cugacacccgccugacagc

SEQ ID NO: 1032976 - RNA, 19 nt, Artificial Sequence
  Description of Artificial Sequence: Synthetic oligonucleotide
ccguuuauaaagcuccauc

SEQ ID NO: 1032977 - RNA, 19 nt, Artificial Sequence
  Description of Artificial Sequence: Synthetic oligonucleotide
agguggaauucagcacggc

SEQ ID NO: 1032978 - RNA, 19 nt, Artificial Sequence
  Description of Artificial Sequence: Synthetic oligonucleotide
cuugaccaaaagaggcaca

SEQ ID NO: 1032979 - RNA, 19 nt, Artificial Sequence
  Description of Artificial Sequence: Synthetic oligonucleotide
cacugucuggugcaaauaa

SEQ ID NO: 1032980 - RNA, 19 nt, Artificial Sequence
  Description of Artificial Sequence: Synthetic oligonucleotide
gaaguguguauaacggggu

SEQ ID NO: 1032981 - RNA, 19 nt, Artificial Sequence
  Description of Artificial Sequence: Synthetic oligonucleotide
gacgccggcguugaugaac

SEQ ID NO: 1032982 - RNA, 19 nt, Artificial Sequence
  Description of Artificial Sequence: Synthetic oligonucleotide
ggcgguguauugaagaguc

SEQ ID NO: 1032983 - RNA, 19 nt, Artificial Sequence
  Description of Artificial Sequence: Synthetic oligonucleotide
uguguauaacggggugcug

SEQ ID NO: 1032984 - RNA, 19 nt, Artificial Sequence
  Description of Artificial Sequence: Synthetic oligonucleotide
cuuuucaccuuggcucgag

SEQ ID NO: 1032985 - RNA, 19 nt, Artificial Sequence
  Description of Artificial Sequence: Synthetic oligonucleotide
cguauaaggugcucucucc

SEQ ID NO: 1032986 - RNA, 19 nt, Artificial Sequence
  Description of Artificial Sequence: Synthetic oligonucleotide
uggcgguguauugaagagu

SEQ ID NO: 1032987 - RNA, 19 nt, Artificial Sequence
  Description of Artificial Sequence: Synthetic oligonucleotide
ccuagcucaagucugaacu

SEQ ID NO: 1032988 - RNA, 19 nt, Artificial Sequence
  Description of Artificial Sequence: Synthetic oligonucleotide
cccauaacagugcagccuc

SEQ ID NO: 1032989 - RNA, 19 nt, Artificial Sequence
  Description of Artificial Sequence: Synthetic oligonucleotide
gaaggcgacgccggcguug

SEQ ID NO: 1032990 - RNA, 19 nt, Artificial Sequence
  Description of Artificial Sequence: Synthetic oligonucleotide
uccuuugaguagguuggaa

SEQ ID NO: 1032991 - RNA, 19 nt, Artificial Sequence
  Description of Artificial Sequence: Synthetic oligonucleotide
uggagucgguucugugaug

SEQ ID NO: 1032992 - RNA, 19 nt, Artificial Sequence
  Description of Artificial Sequence: Synthetic oligonucleotide
aagcuccaucguauaaggu

SEQ ID NO: 1032993 - RNA, 19 nt, Artificial Sequence
  Description of Artificial Sequence: Synthetic oligonucleotide
ucuggugcguuggucuccu

SEQ ID NO: 1032994 - RNA, 19 nt, Artificial Sequence
  Description of Artificial Sequence: Synthetic oligonucleotide
uggucugcccugagagacu

SEQ ID NO: 1032995 - RNA, 19 nt, Artificial Sequence
  Description of Artificial Sequence: Synthetic oligonucleotide
gggacuaccuggcuuuuca

SEQ ID NO: 1032996 - RNA, 19 nt, Artificial Sequence
  Description of Artificial Sequence: Synthetic oligonucleotide
cugagagguuggucugccc

SEQ ID NO: 1032997 - RNA, 19 nt, Artificial Sequence
  Description of Artificial Sequence: Synthetic oligonucleotide
cuggaagcuacugaagucu

SEQ ID NO: 1032998 - RNA, 19 nt, Artificial Sequence
  Description of Artificial Sequence: Synthetic oligonucleotide
agguuggucugcccugaga

SEQ ID NO: 1032999 - RNA, 19 nt, Artificial Sequence
  Description of Artificial Sequence: Synthetic oligonucleotide
ccaaaagaggcacagcuua

SEQ ID NO: 1033000 - RNA, 19 nt, Artificial Sequence
  Description of Artificial Sequence: Synthetic oligonucleotide
ccucuaggaagccuucccc

SEQ ID NO: 1033001 - RNA, 19 nt, Artificial Sequence
  Description of Artificial Sequence: Synthetic oligonucleotide
guuggucugcccugagaga

SEQ ID NO: 1033002 - RNA, 19 nt, Artificial Sequence
  Description of Artificial Sequence: Synthetic oligonucleotide
caugcuuccgggcuacuua

SEQ ID NO: 1033003 - RNA, 19 nt, Artificial Sequence
  Description of Artificial Sequence: Synthetic oligonucleotide
gagaaggcgacgccggcgu

SEQ ID NO: 1033004 - RNA, 19 nt, Artificial Sequence
  Description of Artificial Sequence: Synthetic oligonucleotide
ggaacggggacuaccuggc

SEQ ID NO: 1033005 - RNA, 19 nt, Artificial Sequence
  Description of Artificial Sequence: Synthetic oligonucleotide
ccuaaacauucaacuggag

SEQ ID NO: 1033006 - RNA, 19 nt, Artificial Sequence
  Description of Artificial Sequence: Synthetic oligonucleotide
gagguuggucugcccugag

SEQ ID NO: 1033007 - RNA, 19 nt, Artificial Sequence
  Description of Artificial Sequence: Synthetic oligonucleotide
acccaugcuuccgggcuac

SEQ ID NO: 1033008 - RNA, 19 nt, Artificial Sequence
  Description of Artificial Sequence: Synthetic oligonucleotide
ugcuuccgggcuacuuacu

SEQ ID NO: 1033009 - RNA, 19 nt, Artificial Sequence
  Description of Artificial Sequence: Synthetic oligonucleotide
guaccugccgggucugaca

SEQ ID NO: 1033010 - RNA, 19 nt, Artificial Sequence
  Description of Artificial Sequence: Synthetic oligonucleotide
cacccaccccaguaucacc

SEQ ID NO: 1033011 - RNA, 19 nt, Artificial Sequence
  Description of Artificial Sequence: Synthetic oligonucleotide
acaacacaaggcagagacu

SEQ ID NO: 1033012 - RNA, 19 nt, Artificial Sequence
  Description of Artificial Sequence: Synthetic oligonucleotide
gggguaggcguuguagcgg

SEQ ID NO: 1033013 - RNA, 19 nt, Artificial Sequence
  Description of Artificial Sequence: Synthetic oligonucleotide
ccuacuuggucauuuccga

SEQ ID NO: 1033014 - RNA, 19 nt, Artificial Sequence
  Description of Artificial Sequence: Synthetic oligonucleotide
agaguccaccuguggggcu

SEQ ID NO: 1033015 - RNA, 19 nt, Artificial Sequence
  Description of Artificial Sequence: Synthetic oligonucleotide
agagguuggucugcccuga

SEQ ID NO: 1033016 - RNA, 19 nt, Artificial Sequence
  Description of Artificial Sequence: Synthetic oligonucleotide
ggucccuuauacaaucauc

SEQ ID NO: 1033017 - RNA, 19 nt, Artificial Sequence
  Description of Artificial Sequence: Synthetic oligonucleotide
caguuacauaucuguagua

SEQ ID NO: 1033018 - RNA, 19 nt, Artificial Sequence
  Description of Artificial Sequence: Synthetic oligonucleotide
cagauggcccauuuuauuu

SEQ ID NO: 1033019 - RNA, 19 nt, Artificial Sequence
  Description of Artificial Sequence: Synthetic oligonucleotide
aggcaaucagcaaacucua

SEQ ID NO: 1033020 - RNA, 19 nt, Artificial Sequence
  Description of Artificial Sequence: Synthetic oligonucleotide
uccaucguauaaggugcuc

SEQ ID NO: 1033021 - RNA, 19 nt, Artificial Sequence
  Description of Artificial Sequence: Synthetic oligonucleotide
gguggaauucagcacggcu

SEQ ID NO: 1033022 - RNA, 19 nt, Artificial Sequence
  Description of Artificial Sequence: Synthetic oligonucleotide
ucgcggcuggaaagcaccu

SEQ ID NO: 1033023 - RNA, 19 nt, Artificial Sequence
  Description of Artificial Sequence: Synthetic oligonucleotide
ggucauuuccgagaccaga

SEQ ID NO: 1033024 - RNA, 19 nt, Artificial Sequence
  Description of Artificial Sequence: Synthetic oligonucleotide
guguguauaacggggugcu

SEQ ID NO: 1033025 - RNA, 19 nt, Artificial Sequence
  Description of Artificial Sequence: Synthetic oligonucleotide
gcagagugagugugcuucc

SEQ ID NO: 1033026 - RNA, 19 nt, Artificial Sequence
  Description of Artificial Sequence: Synthetic oligonucleotide
gcccacgcggccucggugg

SEQ ID NO: 1033027 - RNA, 19 nt, Artificial Sequence
  Description of Artificial Sequence: Synthetic oligonucleotide
ucccucagauggcccauuu

SEQ ID NO: 1033028 - RNA, 19 nt, Artificial Sequence
  Description of Artificial Sequence: Synthetic oligonucleotide
gccugccuaggaaagcagg

SEQ ID NO: 1033029 - RNA, 19 nt, Artificial Sequence
  Description of Artificial Sequence: Synthetic oligonucleotide
caccuuggcucgaguggag

SEQ ID NO: 1033030 - RNA, 19 nt, Artificial Sequence
  Description of Artificial Sequence: Synthetic oligonucleotide
caccucgcgaccugacguc

SEQ ID NO: 1033031 - RNA, 19 nt, Artificial Sequence
  Description of Artificial Sequence: Synthetic oligonucleotide
cuguagguauuuuccuucu

SEQ ID NO: 1033032 - RNA, 19 nt, Artificial Sequence
  Description of Artificial Sequence: Synthetic oligonucleotide
gcuacuuacugccaucaau

SEQ ID NO: 1033033 - RNA, 19 nt, Artificial Sequence
  Description of Artificial Sequence: Synthetic oligonucleotide
cucagauggcccauuuuau

SEQ ID NO: 1033034 - RNA, 19 nt, Artificial Sequence
  Description of Artificial Sequence: Synthetic oligonucleotide
gugccuacuuggucauuuc

SEQ ID NO: 1033035 - RNA, 19 nt, Artificial Sequence
  Description of Artificial Sequence: Synthetic oligonucleotide
cagcucgcggcuggaaagc

SEQ ID NO: 1033036 - RNA, 19 nt, Artificial Sequence
  Description of Artificial Sequence: Synthetic oligonucleotide
guggggugcgggacggccg

SEQ ID NO: 1033037 - RNA, 19 nt, Artificial Sequence
  Description of Artificial Sequence: Synthetic oligonucleotide
gagucgguucugugauguc

SEQ ID NO: 1033038 - RNA, 19 nt, Artificial Sequence
  Description of Artificial Sequence: Synthetic oligonucleotide
gcgacgccggcguugauga

SEQ ID NO: 1033039 - RNA, 19 nt, Artificial Sequence
  Description of Artificial Sequence: Synthetic oligonucleotide
cauaacagugcagccucaa

SEQ ID NO: 1033040 - RNA, 19 nt, Artificial Sequence
  Description of Artificial Sequence: Synthetic oligonucleotide
ggacuaccuggcuuuucac

SEQ ID NO: 1033041 - RNA, 19 nt, Artificial Sequence
  Description of Artificial Sequence: Synthetic oligonucleotide
aggcguuguagcggugcag

SEQ ID NO: 1033042 - RNA, 19 nt, Artificial Sequence
  Description of Artificial Sequence: Synthetic oligonucleotide
agcuuggaccuagcucaag

SEQ ID NO: 1033043 - RNA, 19 nt, Artificial Sequence
  Description of Artificial Sequence: Synthetic oligonucleotide
cuggagucgguucugugau

SEQ ID NO: 1033044 - RNA, 19 nt, Artificial Sequence
  Description of Artificial Sequence: Synthetic oligonucleotide
gugcgggacggccggccgg

SEQ ID NO: 1033045 - RNA, 19 nt, Artificial Sequence
  Description of Artificial Sequence: Synthetic oligonucleotide
cugagagacuuagcuucuc

SEQ ID NO: 1033046 - RNA, 19 nt, Artificial Sequence
  Description of Artificial Sequence: Synthetic oligonucleotide
ccuuaggggauuccagcuc

SEQ ID NO: 1033047 - RNA, 19 nt, Artificial Sequence
  Description of Artificial Sequence: Synthetic oligonucleotide
uaacggggugcuggauucu

SEQ ID NO: 1033048 - RNA, 19 nt, Artificial Sequence
  Description of Artificial Sequence: Synthetic oligonucleotide
ggcguuguagcggugcaga

SEQ ID NO: 1033049 - RNA, 19 nt, Artificial Sequence
  Description of Artificial Sequence: Synthetic oligonucleotide
cuagcucaagucugaacuu

SEQ ID NO: 1033050 - RNA, 19 nt, Artificial Sequence
  Description of Artificial Sequence: Synthetic oligonucleotide
caaccaugcuucuccagau

SEQ ID NO: 1033051 - RNA, 19 nt, Artificial Sequence
  Description of Artificial Sequence: Synthetic oligonucleotide
guagaucaccccguuuaua

SEQ ID NO: 1033052 - RNA, 19 nt, Artificial Sequence
  Description of Artificial Sequence: Synthetic oligonucleotide
gcuuggaccuagcucaagu

SEQ ID NO: 1033053 - RNA, 19 nt, Artificial Sequence
  Description of Artificial Sequence: Synthetic oligonucleotide
ggugcgggacggccggccg

SEQ ID NO: 1033054 - RNA, 19 nt, Artificial Sequence
  Description of Artificial Sequence: Synthetic oligonucleotide
cuagaucgcuguccgacau

SEQ ID NO: 1033055 - RNA, 19 nt, Artificial Sequence
  Description of Artificial Sequence: Synthetic oligonucleotide
ugugcacaccuggcuugac

SEQ ID NO: 1033056 - RNA, 19 nt, Artificial Sequence
  Description of Artificial Sequence: Synthetic oligonucleotide
ggggaaugccagaauaugu

SEQ ID NO: 1033057 - RNA, 19 nt, Artificial Sequence
  Description of Artificial Sequence: Synthetic oligonucleotide
ucgcgaccugacgucagau

SEQ ID NO: 1033058 - RNA, 19 nt, Artificial Sequence
  Description of Artificial Sequence: Synthetic oligonucleotide
accucgcgaccugacguca

SEQ ID NO: 1033059 - RNA, 19 nt, Artificial Sequence
  Description of Artificial Sequence: Synthetic oligonucleotide
ggagucgguucugugaugu

SEQ ID NO: 1033060 - RNA, 19 nt, Artificial Sequence
  Description of Artificial Sequence: Synthetic oligonucleotide
gcucgaguggagcggcaug

SEQ ID NO: 1033061 - RNA, 19 nt, Artificial Sequence
  Description of Artificial Sequence: Synthetic oligonucleotide
aucuaggaucacagacagu

SEQ ID NO: 1033062 - RNA, 19 nt, Artificial Sequence
  Description of Artificial Sequence: Synthetic oligonucleotide
gugcguuggucuccucaga

SEQ ID NO: 1033063 - RNA, 19 nt, Artificial Sequence
  Description of Artificial Sequence: Synthetic oligonucleotide
ggaagcuacugaagucuuc

SEQ ID NO: 1033064 - RNA, 19 nt, Artificial Sequence
  Description of Artificial Sequence: Synthetic oligonucleotide
cccuaccauagguauccug

SEQ ID NO: 1033065 - RNA, 19 nt, Artificial Sequence
  Description of Artificial Sequence: Synthetic oligonucleotide
ugacagcucgcggcuggaa

SEQ ID NO: 1033066 - RNA, 19 nt, Artificial Sequence
  Description of Artificial Sequence: Synthetic oligonucleotide
agcucgcggcuggaaagca

SEQ ID NO: 1033067 - RNA, 19 nt, Artificial Sequence
  Description of Artificial Sequence: Synthetic oligonucleotide
cagugguagaucaccccgu

SEQ ID NO: 1033068 - RNA, 19 nt, Artificial Sequence
  Description of Artificial Sequence: Synthetic oligonucleotide
ggcgacgccggcguugaug

SEQ ID NO: 1033069 - RNA, 19 nt, Artificial Sequence
  Description of Artificial Sequence: Synthetic oligonucleotide
gaccuagcucaagucugaa

SEQ ID NO: 1033070 - RNA, 19 nt, Artificial Sequence
  Description of Artificial Sequence: Synthetic oligonucleotide
agccucaagcagccuggua

SEQ ID NO: 1033071 - RNA, 19 nt, Artificial Sequence
  Description of Artificial Sequence: Synthetic oligonucleotide
cgaccugacgucagauccc

SEQ ID NO: 1033072 - RNA, 19 nt, Artificial Sequence
  Description of Artificial Sequence: Synthetic oligonucleotide
ggaccuagcucaagucuga

SEQ ID NO: 1033073 - RNA, 19 nt, Artificial Sequence
  Description of Artificial Sequence: Synthetic oligonucleotide
gccuuaggggauuccagcu

SEQ ID NO: 1033074 - RNA, 19 nt, Artificial Sequence
  Description of Artificial Sequence: Synthetic oligonucleotide
cucgcgaccugacgucaga

SEQ ID NO: 1033075 - RNA, 19 nt, Artificial Sequence
  Description of Artificial Sequence: Synthetic oligonucleotide
cagagugagugugcuucca

SEQ ID NO: 1033076 - RNA, 19 nt, Artificial Sequence
  Description of Artificial Sequence: Synthetic oligonucleotide
cauguuugaagggccuccu

SEQ ID NO: 1033077 - RNA, 19 nt, Artificial Sequence
  Description of Artificial Sequence: Synthetic oligonucleotide
guccuuugaguagguugga

SEQ ID NO: 1033078 - RNA, 19 nt, Artificial Sequence
  Description of Artificial Sequence: Synthetic oligonucleotide
cucguaccugccgggucug

SEQ ID NO: 1033079 - RNA, 19 nt, Artificial Sequence
  Description of Artificial Sequence: Synthetic oligonucleotide
ccuagaucgcuguccgaca

SEQ ID NO: 1033080 - RNA, 19 nt, Artificial Sequence
  Description of Artificial Sequence: Synthetic oligonucleotide
gguagaucaccccguuuau

SEQ ID NO: 1033081 - RNA, 19 nt, Artificial Sequence
  Description of Artificial Sequence: Synthetic oligonucleotide
cugccgggucugacacccg

SEQ ID NO: 1033082 - RNA, 19 nt, Artificial Sequence
  Description of Artificial Sequence: Synthetic oligonucleotide
cuccaucguauaaggugcu

SEQ ID NO: 1033083 - RNA, 19 nt, Artificial Sequence
  Description of Artificial Sequence: Synthetic oligonucleotide
gggcagaaauaggcaauca

SEQ ID NO: 1033084 - RNA, 19 nt, Artificial Sequence
  Description of Artificial Sequence: Synthetic oligonucleotide
gugugcuuccaggggucac

SEQ ID NO: 1033085 - RNA, 19 nt, Artificial Sequence
  Description of Artificial Sequence: Synthetic oligonucleotide
cagcaacaccaugccuggc

SEQ ID NO: 1033086 - RNA, 19 nt, Artificial Sequence
  Description of Artificial Sequence: Synthetic oligonucleotide
gcaccucgcgaccugacgu

SEQ ID NO: 1033087 - RNA, 19 nt, Artificial Sequence
  Description of Artificial Sequence: Synthetic oligonucleotide
gcccuagucagcagaguga

SEQ ID NO: 1033088 - RNA, 19 nt, Artificial Sequence
  Description of Artificial Sequence: Synthetic oligonucleotide
gaacggggacuaccuggcu

SEQ ID NO: 1033089 - RNA, 19 nt, Artificial Sequence
  Description of Artificial Sequence: Synthetic oligonucleotide
cuaugaagccaggaagguu

SEQ ID NO: 1033090 - RNA, 19 nt, Artificial Sequence
  Description of Artificial Sequence: Synthetic oligonucleotide
caacaccaugccuggcucu

SEQ ID NO: 1033091 - RNA, 19 nt, Artificial Sequence
  Description of Artificial Sequence: Synthetic oligonucleotide
gucugacacccgccugaca

SEQ ID NO: 1033092 - RNA, 19 nt, Artificial Sequence
  Description of Artificial Sequence: Synthetic oligonucleotide
caccugcgggaacggggac

SEQ ID NO: 1033093 - RNA, 19 nt, Artificial Sequence
  Description of Artificial Sequence: Synthetic oligonucleotide
gcgccucguaccugccggg

SEQ ID NO: 1033094 - RNA, 19 nt, Artificial Sequence
  Description of Artificial Sequence: Synthetic oligonucleotide
ucguaccugccgggucuga

SEQ ID NO: 1033095 - RNA, 19 nt, Artificial Sequence
  Description of Artificial Sequence: Synthetic oligonucleotide
caccuagaucgcuguccga

SEQ ID NO: 1033096 - RNA, 19 nt, Artificial Sequence
  Description of Artificial Sequence: Synthetic oligonucleotide
gcgguguauugaagagucc

SEQ ID NO: 1033097 - RNA, 19 nt, Artificial Sequence
  Description of Artificial Sequence: Synthetic oligonucleotide
ggcuacuuacugccaucaa

SEQ ID NO: 1033098 - RNA, 19 nt, Artificial Sequence
  Description of Artificial Sequence: Synthetic oligonucleotide
cagcuuggaccuagcucaa

SEQ ID NO: 1033099 - RNA, 19 nt, Artificial Sequence
  Description of Artificial Sequence: Synthetic oligonucleotide
ggaaagcaccucgcgaccu

SEQ ID NO: 1033100 - RNA, 19 nt, Artificial Sequence
  Description of Artificial Sequence: Synthetic oligonucleotide
ggguggcgguguauugaag

SEQ ID NO: 1033101 - RNA, 19 nt, Artificial Sequence
  Description of Artificial Sequence: Synthetic oligonucleotide
ccucgcgaccugacgucag

SEQ ID NO: 1033102 - RNA, 19 nt, Artificial Sequence
  Description of Artificial Sequence: Synthetic oligonucleotide
gcgcgccucguaccugccg

SEQ ID NO: 1033103 - RNA, 19 nt, Artificial Sequence
  Description of Artificial Sequence: Synthetic oligonucleotide
ccuaggaaagcaggcugga

SEQ ID NO: 1033104 - RNA, 19 nt, Artificial Sequence
  Description of Artificial Sequence: Synthetic oligonucleotide
gacacccgccugacagcuc

SEQ ID NO: 1033105 - RNA, 19 nt, Artificial Sequence
  Description of Artificial Sequence: Synthetic oligonucleotide
ggcauggaucagggagaag

SEQ ID NO: 1033106 - RNA, 19 nt, Artificial Sequence
  Description of Artificial Sequence: Synthetic oligonucleotide
cuaccuggcuuuucaccuu

SEQ ID NO: 1033107 - RNA, 19 nt, Artificial Sequence
  Description of Artificial Sequence: Synthetic oligonucleotide
ccaucguauaaggugcucu

SEQ ID NO: 1033108 - RNA, 19 nt, Artificial Sequence
  Description of Artificial Sequence: Synthetic oligonucleotide
guggagcggcauggaucag

SEQ ID NO: 1033109 - RNA, 19 nt, Artificial Sequence
  Description of Artificial Sequence: Synthetic oligonucleotide
ccucaccuagaucgcuguc

SEQ ID NO: 1033110 - RNA, 19 nt, Artificial Sequence
  Description of Artificial Sequence: Synthetic oligonucleotide
ccccguuuauaaagcucca

SEQ ID NO: 1033111 - RNA, 19 nt, Artificial Sequence
  Description of Artificial Sequence: Synthetic oligonucleotide
cgggcuacuuacugccauc

SEQ ID NO: 1033112 - RNA, 19 nt, Artificial Sequence
  Description of Artificial Sequence: Synthetic oligonucleotide
gggagcgcgccucguaccu

SEQ ID NO: 1033113 - RNA, 19 nt, Artificial Sequence
  Description of Artificial Sequence: Synthetic oligonucleotide
cuggaccucuaggaagccu

SEQ ID NO: 1033114 - RNA, 19 nt, Artificial Sequence
  Description of Artificial Sequence: Synthetic oligonucleotide
cgcgaccugacgucagauc

SEQ ID NO: 1033115 - RNA, 19 nt, Artificial Sequence
  Description of Artificial Sequence: Synthetic oligonucleotide
cuggugcguuggucuccuc

SEQ ID NO: 1033116 - RNA, 19 nt, Artificial Sequence
  Description of Artificial Sequence: Synthetic oligonucleotide
ggagcgcgccucguaccug

SEQ ID NO: 1033117 - RNA, 19 nt, Artificial Sequence
  Description of Artificial Sequence: Synthetic oligonucleotide
gaucgcuguccgacauggu

SEQ ID NO: 1033118 - RNA, 19 nt, Artificial Sequence
  Description of Artificial Sequence: Synthetic oligonucleotide
gggugcgggacggccggcc

SEQ ID NO: 1033119 - RNA, 19 nt, Artificial Sequence
  Description of Artificial Sequence: Synthetic oligonucleotide
ccagucccggaggaucuuc

SEQ ID NO: 1033120 - RNA, 19 nt, Artificial Sequence
  Description of Artificial Sequence: Synthetic oligonucleotide
gcuuuucaccuuggcucga

SEQ ID NO: 1033121 - RNA, 19 nt, Artificial Sequence
  Description of Artificial Sequence: Synthetic oligonucleotide
ggggacuaccuggcuuuuc

SEQ ID NO: 1033122 - RNA, 19 nt, Artificial Sequence
  Description of Artificial Sequence: Synthetic oligonucleotide
gcgggaacggggacuaccu

SEQ ID NO: 1033123 - RNA, 19 nt, Artificial Sequence
  Description of Artificial Sequence: Synthetic oligonucleotide
ccccauaacagugcagccu

SEQ ID NO: 1033124 - RNA, 19 nt, Artificial Sequence
  Description of Artificial Sequence: Synthetic oligonucleotide
cguaccugccgggucugac

SEQ ID NO: 1033125 - RNA, 19 nt, Artificial Sequence
  Description of Artificial Sequence: Synthetic oligonucleotide
cacgcggccucgguggggu

SEQ ID NO: 1033126 - RNA, 19 nt, Artificial Sequence
  Description of Artificial Sequence: Synthetic oligonucleotide
cugcgggaacggggacuac

SEQ ID NO: 1033127 - RNA, 19 nt, Artificial Sequence
  Description of Artificial Sequence: Synthetic oligonucleotide
ggcaaucagcaaacucuau

SEQ ID NO: 1033128 - RNA, 19 nt, Artificial Sequence
  Description of Artificial Sequence: Synthetic oligonucleotide
ggucugcccugagagacuu

SEQ ID NO: 1033129 - RNA, 19 nt, Artificial Sequence
  Description of Artificial Sequence: Synthetic oligonucleotide
ccugcgggaacggggacua

SEQ ID NO: 1033130 - RNA, 19 nt, Artificial Sequence
  Description of Artificial Sequence: Synthetic oligonucleotide
gcguuguagcggugcagau

SEQ ID NO: 1033131 - RNA, 19 nt, Artificial Sequence
  Description of Artificial Sequence: Synthetic oligonucleotide
cguuguagcggugcagaua

SEQ ID NO: 1033132 - RNA, 19 nt, Artificial Sequence
  Description of Artificial Sequence: Synthetic oligonucleotide
cagcccuagucagcagagu

SEQ ID NO: 1033133 - RNA, 19 nt, Artificial Sequence
  Description of Artificial Sequence: Synthetic oligonucleotide
ccuagucagcagagugagu

SEQ ID NO: 1033134 - RNA, 19 nt, Artificial Sequence
  Description of Artificial Sequence: Synthetic oligonucleotide
ccacgcggccucggugggg

SEQ ID NO: 1033135 - RNA, 19 nt, Artificial Sequence
  Description of Artificial Sequence: Synthetic oligonucleotide
aggcgacgccggcguugau

SEQ ID NO: 1033136 - RNA, 19 nt, Artificial Sequence
  Description of Artificial Sequence: Synthetic oligonucleotide
gucugcccugagagacuua

SEQ ID NO: 1033137 - RNA, 19 nt, Artificial Sequence
  Description of Artificial Sequence: Synthetic oligonucleotide
ccgggcuacuuacugccau

SEQ ID NO: 1033138 - RNA, 19 nt, Artificial Sequence
  Description of Artificial Sequence: Synthetic oligonucleotide
cccguuuauaaagcuccau

SEQ ID NO: 1033139 - RNA, 19 nt, Artificial Sequence
  Description of Artificial Sequence: Synthetic oligonucleotide
ggggugcgggacggccggc

SEQ ID NO: 1033140 - RNA, 19 nt, Artificial Sequence
  Description of Artificial Sequence: Synthetic oligonucleotide
ccaacaccuguagguauuu

SEQ ID NO: 1033141 - RNA, 19 nt, Artificial Sequence
  Description of Artificial Sequence: Synthetic oligonucleotide
gcgccggggagcgcgccuc

SEQ ID NO: 1033142 - RNA, 19 nt, Artificial Sequence
  Description of Artificial Sequence: Synthetic oligonucleotide
cgccggggagcgcgccucg

SEQ ID NO: 1033143 - RNA, 19 nt, Artificial Sequence
  Description of Artificial Sequence: Synthetic oligonucleotide
ccggcccacgcggccucgg

SEQ ID NO: 1033144 - RNA, 19 nt, Artificial Sequence
  Description of Artificial Sequence: Synthetic oligonucleotide
cgaguggagcggcauggau

SEQ ID NO: 1033145 - RNA, 19 nt, Artificial Sequence
  Description of Artificial Sequence: Synthetic oligonucleotide
ccggggagcgcgccucgua

SEQ ID NO: 1033146 - RNA, 19 nt, Artificial Sequence
  Description of Artificial Sequence: Synthetic oligonucleotide
ccccuaccauagguauccu

SEQ ID NO: 1033147 - RNA, 19 nt, Artificial Sequence
  Description of Artificial Sequence: Synthetic oligonucleotide
cggccucgguggggugcgg

SEQ ID NO: 1033148 - RNA, 19 nt, Artificial Sequence
  Description of Artificial Sequence: Synthetic oligonucleotide
cgacgccggcguugaugaa

SEQ ID NO: 1033149 - RNA, 19 nt, Artificial Sequence
  Description of Artificial Sequence: Synthetic oligonucleotide
cggggacuaccuggcuuuu

SEQ ID NO: 1033150 - RNA, 19 nt, Artificial Sequence
  Description of Artificial Sequence: Synthetic oligonucleotide
auagcuucaaguuuggggc

SEQ ID NO: 1033151 - RNA, 19 nt, Artificial Sequence
  Description of Artificial Sequence: Synthetic oligonucleotide
agcaauaaggcuuugaggu

SEQ ID NO: 1033152 - RNA, 19 nt, Artificial Sequence
  Description of Artificial Sequence: Synthetic oligonucleotide
cauagcuucaaguuugggg

SEQ ID NO: 1033153 - RNA, 19 nt, Artificial Sequence
  Description of Artificial Sequence: Synthetic oligonucleotide
uaugugaugccuuuggcca

SEQ ID NO: 1033154 - RNA, 19 nt, Artificial Sequence
  Description of Artificial Sequence: Synthetic oligonucleotide
ucuuuuacugacauucccc

SEQ ID NO: 1033155 - RNA, 19 nt, Artificial Sequence
  Description of Artificial Sequence: Synthetic oligonucleotide
ucaugugcacaccaugucg

SEQ ID NO: 1033156 - RNA, 19 nt, Artificial Sequence
  Description of Artificial Sequence: Synthetic oligonucleotide
aagggauugugcuuuaaug

SEQ ID NO: 1033157 - RNA, 19 nt, Artificial Sequence
  Description of Artificial Sequence: Synthetic oligonucleotide
ucugcaaagaugagcacag

SEQ ID NO: 1033158 - RNA, 19 nt, Artificial Sequence
  Description of Artificial Sequence: Synthetic oligonucleotide
ugcuuuaaugacagcaggg

SEQ ID NO: 1033159 - RNA, 19 nt, Artificial Sequence
  Description of Artificial Sequence: Synthetic oligonucleotide
gauaccaucucccucuacc

SEQ ID NO: 1033160 - RNA, 19 nt, Artificial Sequence
  Description of Artificial Sequence: Synthetic oligonucleotide
uuaagagaagggauugugc

SEQ ID NO: 1033161 - RNA, 19 nt, Artificial Sequence
  Description of Artificial Sequence: Synthetic oligonucleotide
uugaaacucuugaugggcg

SEQ ID NO: 1033162 - RNA, 19 nt, Artificial Sequence
  Description of Artificial Sequence: Synthetic oligonucleotide
gaagaugguacggaugucg

SEQ ID NO: 1033163 - RNA, 19 nt, Artificial Sequence
  Description of Artificial Sequence: Synthetic oligonucleotide
gauugugcuuuaaugacag

SEQ ID NO: 1033164 - RNA, 19 nt, Artificial Sequence
  Description of Artificial Sequence: Synthetic oligonucleotide
ugagcacugacucaucaca

SEQ ID NO: 1033165 - RNA, 19 nt, Artificial Sequence
  Description of Artificial Sequence: Synthetic oligonucleotide
acggcaguaauauuccagg

SEQ ID NO: 1033166 - RNA, 19 nt, Artificial Sequence
  Description of Artificial Sequence: Synthetic oligonucleotide
uguggcuaccaucaugugc

SEQ ID NO: 1033167 - RNA, 19 nt, Artificial Sequence
  Description of Artificial Sequence: Synthetic oligonucleotide
auuggaucgucauauguga

SEQ ID NO: 1033168 - RNA, 19 nt, Artificial Sequence
  Description of Artificial Sequence: Synthetic oligonucleotide
ucccgaaaugccucaaugg

SEQ ID NO: 1033169 - RNA, 19 nt, Artificial Sequence
  Description of Artificial Sequence: Synthetic oligonucleotide
augccaaucaugucccggc

SEQ ID NO: 1033170 - RNA, 19 nt, Artificial Sequence
  Description of Artificial Sequence: Synthetic oligonucleotide
ugauuggaucgucauaugu

SEQ ID NO: 1033171 - RNA, 19 nt, Artificial Sequence
  Description of Artificial Sequence: Synthetic oligonucleotide
uccaucugcucuuuuacug

SEQ ID NO: 1033172 - RNA, 19 nt, Artificial Sequence
  Description of Artificial Sequence: Synthetic oligonucleotide
ucuaccaggaugugguacc

SEQ ID NO: 1033173 - RNA, 19 nt, Artificial Sequence
  Description of Artificial Sequence: Synthetic oligonucleotide
uguuggguggagaaugccc

SEQ ID NO: 1033174 - RNA, 19 nt, Artificial Sequence
  Description of Artificial Sequence: Synthetic oligonucleotide
gugaauaccagugucuugc

SEQ ID NO: 1033175 - RNA, 19 nt, Artificial Sequence
  Description of Artificial Sequence: Synthetic oligonucleotide
ugcaacugaugccucuugg

SEQ ID NO: 1033176 - RNA, 19 nt, Artificial Sequence
  Description of Artificial Sequence: Synthetic oligonucleotide
augacauccaggcuggcug

SEQ ID NO: 1033177 - RNA, 19 nt, Artificial Sequence
  Description of Artificial Sequence: Synthetic oligonucleotide
agacuaaccauuuucuuuu

SEQ ID NO: 1033178 - RNA, 19 nt, Artificial Sequence
  Description of Artificial Sequence: Synthetic oligonucleotide
gaugguacggaugucgccc

SEQ ID NO: 1033179 - RNA, 19 nt, Artificial Sequence
  Description of Artificial Sequence: Synthetic oligonucleotide
acugacucaucacaggccu

SEQ ID NO: 1033180 - RNA, 19 nt, Artificial Sequence
  Description of Artificial Sequence: Synthetic oligonucleotide
ugauccgauggccaaggcc

SEQ ID NO: 1033181 - RNA, 19 nt, Artificial Sequence
  Description of Artificial Sequence: Synthetic oligonucleotide
acugacaucaaggcucggc

SEQ ID NO: 1033182 - RNA, 19 nt, Artificial Sequence
  Description of Artificial Sequence: Synthetic oligonucleotide
cuugccuucccgaaaugcc

SEQ ID NO: 1033183 - RNA, 19 nt, Artificial Sequence
  Description of Artificial Sequence: Synthetic oligonucleotide
auggugacgggcuuuacca

SEQ ID NO: 1033184 - RNA, 19 nt, Artificial Sequence
  Description of Artificial Sequence: Synthetic oligonucleotide
aagguauucgugaauggca

SEQ ID NO: 1033185 - RNA, 19 nt, Artificial Sequence
  Description of Artificial Sequence: Synthetic oligonucleotide
uucccgaaaugccucaaug

SEQ ID NO: 1033186 - RNA, 19 nt, Artificial Sequence
  Description of Artificial Sequence: Synthetic oligonucleotide
aaggugguagcaauccccg

SEQ ID NO: 1033187 - RNA, 19 nt, Artificial Sequence
  Description of Artificial Sequence: Synthetic oligonucleotide
agaugguacggaugucgcc

SEQ ID NO: 1033188 - RNA, 19 nt, Artificial Sequence
  Description of Artificial Sequence: Synthetic oligonucleotide
cuuggagaaaggcaaccgc

SEQ ID NO: 1033189 - RNA, 19 nt, Artificial Sequence
  Description of Artificial Sequence: Synthetic oligonucleotide
cuuccgaacucgcucaugc

SEQ ID NO: 1033190 - RNA, 19 nt, Artificial Sequence
  Description of Artificial Sequence: Synthetic oligonucleotide
aauccaugaggcguccagg

SEQ ID NO: 1033191 - RNA, 19 nt, Artificial Sequence
  Description of Artificial Sequence: Synthetic oligonucleotide
uggcccuugaaguaggaga

SEQ ID NO: 1033192 - RNA, 19 nt, Artificial Sequence
  Description of Artificial Sequence: Synthetic oligonucleotide
uuccugaacgcccggugcg

SEQ ID NO: 1033193 - RNA, 19 nt, Artificial Sequence
  Description of Artificial Sequence: Synthetic oligonucleotide
cuucacguauuccaccucc

SEQ ID NO: 1033194 - RNA, 19 nt, Artificial Sequence
  Description of Artificial Sequence: Synthetic oligonucleotide
cucuuuuacugacauuccc

SEQ ID NO: 1033195 - RNA, 19 nt, Artificial Sequence
  Description of Artificial Sequence: Synthetic oligonucleotide
ucucgcgaggggcagauga

SEQ ID NO: 1033196 - RNA, 19 nt, Artificial Sequence
  Description of Artificial Sequence: Synthetic oligonucleotide
uggaucgucauaugugaug

SEQ ID NO: 1033197 - RNA, 19 nt, Artificial Sequence
  Description of Artificial Sequence: Synthetic oligonucleotide
guauucgugaauggcaucc

SEQ ID NO: 1033198 - RNA, 19 nt, Artificial Sequence
  Description of Artificial Sequence: Synthetic oligonucleotide
uuuccugaacgcccggugc

SEQ ID NO: 1033199 - RNA, 19 nt, Artificial Sequence
  Description of Artificial Sequence: Synthetic oligonucleotide
ugcauagcuucaaguuugg

SEQ ID NO: 1033200 - RNA, 19 nt, Artificial Sequence
  Description of Artificial Sequence: Synthetic oligonucleotide
auucgugaauggcauccac

SEQ ID NO: 1033201 - RNA, 19 nt, Artificial Sequence
  Description of Artificial Sequence: Synthetic oligonucleotide
ucacgcuuggagaaaggca

SEQ ID NO: 1033202 - RNA, 19 nt, Artificial Sequence
  Description of Artificial Sequence: Synthetic oligonucleotide
acagacggcucagaagucc

SEQ ID NO: 1033203 - RNA, 19 nt, Artificial Sequence
  Description of Artificial Sequence: Synthetic oligonucleotide
cacguauuccaccuccugg

SEQ ID NO: 1033204 - RNA, 19 nt, Artificial Sequence
  Description of Artificial Sequence: Synthetic oligonucleotide
acguucuccuccaaugucc

SEQ ID NO: 1033205 - RNA, 19 nt, Artificial Sequence
  Description of Artificial Sequence: Synthetic oligonucleotide
gccaauucggugcacauag

SEQ ID NO: 1033206 - RNA, 19 nt, Artificial Sequence
  Description of Artificial Sequence: Synthetic oligonucleotide
acggcuggaguccugcaac

SEQ ID NO: 1033207 - RNA, 19 nt, Artificial Sequence
  Description of Artificial Sequence: Synthetic oligonucleotide
cagacggcaguaauauucc

SEQ ID NO: 1033208 - RNA, 19 nt, Artificial Sequence
  Description of Artificial Sequence: Synthetic oligonucleotide
ucgugaauggcauccacau

SEQ ID NO: 1033209 - RNA, 19 nt, Artificial Sequence
  Description of Artificial Sequence: Synthetic oligonucleotide
aaucaugucccggccggac

SEQ ID NO: 1033210 - RNA, 19 nt, Artificial Sequence
  Description of Artificial Sequence: Synthetic oligonucleotide
ucaugucccggccggacag

SEQ ID NO: 1033211 - RNA, 19 nt, Artificial Sequence
  Description of Artificial Sequence: Synthetic oligonucleotide
uucaggacauagcgugggg

SEQ ID NO: 1033212 - RNA, 19 nt, Artificial Sequence
  Description of Artificial Sequence: Synthetic oligonucleotide
caagcacucgagcagguac

SEQ ID NO: 1033213 - RNA, 19 nt, Artificial Sequence
  Description of Artificial Sequence: Synthetic oligonucleotide
cagaagguauucgugaaug

SEQ ID NO: 1033214 - RNA, 19 nt, Artificial Sequence
  Description of Artificial Sequence: Synthetic oligonucleotide
ugugaauaccagugucuug

SEQ ID NO: 1033215 - RNA, 19 nt, Artificial Sequence
  Description of Artificial Sequence: Synthetic oligonucleotide
gacgggcuuuaccagggcg

SEQ ID NO: 1033216 - RNA, 19 nt, Artificial Sequence
  Description of Artificial Sequence: Synthetic oligonucleotide
acguauuccaccuccugga

SEQ ID NO: 1033217 - RNA, 19 nt, Artificial Sequence
  Description of Artificial Sequence: Synthetic oligonucleotide
guggcuaccaucaugugca

SEQ ID NO: 1033218 - RNA, 19 nt, Artificial Sequence
  Description of Artificial Sequence: Synthetic oligonucleotide
caaggcucggccuuccgcc

SEQ ID NO: 1033219 - RNA, 19 nt, Artificial Sequence
  Description of Artificial Sequence: Synthetic oligonucleotide
aaugacagcaggggaagaa

SEQ ID NO: 1033220 - RNA, 19 nt, Artificial Sequence
  Description of Artificial Sequence: Synthetic oligonucleotide
aacucuugaugggcggugg

SEQ ID NO: 1033221 - RNA, 19 nt, Artificial Sequence
  Description of Artificial Sequence: Synthetic oligonucleotide
gcacgucccacguugaugg

SEQ ID NO: 1033222 - RNA, 19 nt, Artificial Sequence
  Description of Artificial Sequence: Synthetic oligonucleotide
agcacuuggagaacaggcg

SEQ ID NO: 1033223 - RNA, 19 nt, Artificial Sequence
  Description of Artificial Sequence: Synthetic oligonucleotide
cagaccucgaaggauggcg

SEQ ID NO: 1033224 - RNA, 19 nt, Artificial Sequence
  Description of Artificial Sequence: Synthetic oligonucleotide
acccggugaaggcaaugcc

SEQ ID NO: 1033225 - RNA, 19 nt, Artificial Sequence
  Description of Artificial Sequence: Synthetic oligonucleotide
ucaaggcucggccuuccgc

SEQ ID NO: 1033226 - RNA, 19 nt, Artificial Sequence
  Description of Artificial Sequence: Synthetic oligonucleotide
ugaauaccagugucuugcc

SEQ ID NO: 1033227 - RNA, 19 nt, Artificial Sequence
  Description of Artificial Sequence: Synthetic oligonucleotide
ggccauaaggcccuucacg

SEQ ID NO: 1033228 - RNA, 19 nt, Artificial Sequence
  Description of Artificial Sequence: Synthetic oligonucleotide
cagaugaugaggccauaag

SEQ ID NO: 1033229 - RNA, 19 nt, Artificial Sequence
  Description of Artificial Sequence: Synthetic oligonucleotide
ggaaaguccaggccuuugg

SEQ ID NO: 1033230 - RNA, 19 nt, Artificial Sequence
  Description of Artificial Sequence: Synthetic oligonucleotide
agcaaauccaugaggcguc

SEQ ID NO: 1033231 - RNA, 19 nt, Artificial Sequence
  Description of Artificial Sequence: Synthetic oligonucleotide
cuucagacauguucaggac

SEQ ID NO: 1033232 - RNA, 19 nt, Artificial Sequence
  Description of Artificial Sequence: Synthetic oligonucleotide
ccucuuggggagaagaggg

SEQ ID NO: 1033233 - RNA, 19 nt, Artificial Sequence
  Description of Artificial Sequence: Synthetic oligonucleotide
ggaucgucauaugugaugc

SEQ ID NO: 1033234 - RNA, 19 nt, Artificial Sequence
  Description of Artificial Sequence: Synthetic oligonucleotide
agcauggacucauccccac

SEQ ID NO: 1033235 - RNA, 19 nt, Artificial Sequence
  Description of Artificial Sequence: Synthetic oligonucleotide
gcacuuggagaacaggcgg

SEQ ID NO: 1033236 - RNA, 19 nt, Artificial Sequence
  Description of Artificial Sequence: Synthetic oligonucleotide
guucaggacauagcguggg

SEQ ID NO: 1033237 - RNA, 19 nt, Artificial Sequence
  Description of Artificial Sequence: Synthetic oligonucleotide
gauccgauggccaaggccu

SEQ ID NO: 1033238 - RNA, 19 nt, Artificial Sequence
  Description of Artificial Sequence: Synthetic oligonucleotide
ugcuuugucugcauagcuu

SEQ ID NO: 1033239 - RNA, 19 nt, Artificial Sequence
  Description of Artificial Sequence: Synthetic oligonucleotide
cuugagggcugguguaugc

SEQ ID NO: 1033240 - RNA, 19 nt, Artificial Sequence
  Description of Artificial Sequence: Synthetic oligonucleotide
aucgucauaugugaugccu

SEQ ID NO: 1033241 - RNA, 19 nt, Artificial Sequence
  Description of Artificial Sequence: Synthetic oligonucleotide
gagaacaggcgguaccuuc

SEQ ID NO: 1033242 - RNA, 19 nt, Artificial Sequence
  Description of Artificial Sequence: Synthetic oligonucleotide
ggcaggaaacuucaucucc

SEQ ID NO: 1033243 - RNA, 19 nt, Artificial Sequence
  Description of Artificial Sequence: Synthetic oligonucleotide
uugauuggaucgucauaug

SEQ ID NO: 1033244 - RNA, 19 nt, Artificial Sequence
  Description of Artificial Sequence: Synthetic oligonucleotide
cacgcuuggagaaaggcaa

SEQ ID NO: 1033245 - RNA, 19 nt, Artificial Sequence
  Description of Artificial Sequence: Synthetic oligonucleotide
acgggcuuuaccagggcgc

SEQ ID NO: 1033246 - RNA, 19 nt, Artificial Sequence
  Description of Artificial Sequence: Synthetic oligonucleotide
acaggcgguaccuucugcu

SEQ ID NO: 1033247 - RNA, 19 nt, Artificial Sequence
  Description of Artificial Sequence: Synthetic oligonucleotide
gacuaaccauuuucuuuug

SEQ ID NO: 1033248 - RNA, 19 nt, Artificial Sequence
  Description of Artificial Sequence: Synthetic oligonucleotide
cagugugaauaccaguguc

SEQ ID NO: 1033249 - RNA, 19 nt, Artificial Sequence
  Description of Artificial Sequence: Synthetic oligonucleotide
ggugacgggcuuuaccagg

SEQ ID NO: 1033250 - RNA, 19 nt, Artificial Sequence
  Description of Artificial Sequence: Synthetic oligonucleotide
cucuuagcaaaauucugaa

SEQ ID NO: 1033251 - RNA, 19 nt, Artificial Sequence
  Description of Artificial Sequence: Synthetic oligonucleotide
auaccagugucuugccuga

SEQ ID NO: 1033252 - RNA, 19 nt, Artificial Sequence
  Description of Artificial Sequence: Synthetic oligonucleotide
gguccaugagcacugacuc

SEQ ID NO: 1033253 - RNA, 19 nt, Artificial Sequence
  Description of Artificial Sequence: Synthetic oligonucleotide
ggugguagcaauccccgug

SEQ ID NO: 1033254 - RNA, 19 nt, Artificial Sequence
  Description of Artificial Sequence: Synthetic oligonucleotide
uugaugggcggugggauac

SEQ ID NO: 1033255 - RNA, 19 nt, Artificial Sequence
  Description of Artificial Sequence: Synthetic oligonucleotide
gaucgucauaugugaugcc

SEQ ID NO: 1033256 - RNA, 19 nt, Artificial Sequence
  Description of Artificial Sequence: Synthetic oligonucleotide
ggaugucgcccucaaagcc

SEQ ID NO: 1033257 - RNA, 19 nt, Artificial Sequence
  Description of Artificial Sequence: Synthetic oligonucleotide
cacguugauggugacgggc

SEQ ID NO: 1033258 - RNA, 19 nt, Artificial Sequence
  Description of Artificial Sequence: Synthetic oligonucleotide
uggugacgggcuuuaccag

SEQ ID NO: 1033259 - RNA, 19 nt, Artificial Sequence
  Description of Artificial Sequence: Synthetic oligonucleotide
cuucacgcuuggagaaagg

SEQ ID NO: 1033260 - RNA, 19 nt, Artificial Sequence
  Description of Artificial Sequence: Synthetic oligonucleotide
gcagcaaauccaugaggcg

SEQ ID NO: 1033261 - RNA, 19 nt, Artificial Sequence
  Description of Artificial Sequence: Synthetic oligonucleotide
cccgaaaugccucaauggc

SEQ ID NO: 1033262 - RNA, 19 nt, Artificial Sequence
  Description of Artificial Sequence: Synthetic oligonucleotide
agaccucgaaggauggcgg

SEQ ID NO: 1033263 - RNA, 19 nt, Artificial Sequence
  Description of Artificial Sequence: Synthetic oligonucleotide
uuggaucgucauaugugau

SEQ ID NO: 1033264 - RNA, 19 nt, Artificial Sequence
  Description of Artificial Sequence: Synthetic oligonucleotide
gauggcggcaggaaacuuc

SEQ ID NO: 1033265 - RNA, 19 nt, Artificial Sequence
  Description of Artificial Sequence: Synthetic oligonucleotide
gcagacggcaguaauauuc

SEQ ID NO: 1033266 - RNA, 19 nt, Artificial Sequence
  Description of Artificial Sequence: Synthetic oligonucleotide
uuugucugcauagcuucaa

SEQ ID NO: 1033267 - RNA, 19 nt, Artificial Sequence
  Description of Artificial Sequence: Synthetic oligonucleotide
uauucgugaauggcaucca

SEQ ID NO: 1033268 - RNA, 19 nt, Artificial Sequence
  Description of Artificial Sequence: Synthetic oligonucleotide
guaugcacggcuggagucc

SEQ ID NO: 1033269 - RNA, 19 nt, Artificial Sequence
  Description of Artificial Sequence: Synthetic oligonucleotide
uagcaauccccguguuucc

SEQ ID NO: 1033270 - RNA, 19 nt, Artificial Sequence
  Description of Artificial Sequence: Synthetic oligonucleotide
gugacgggcuuuaccaggg

SEQ ID NO: 1033271 - RNA, 19 nt, Artificial Sequence
  Description of Artificial Sequence: Synthetic oligonucleotide
aagcacucgagcagguaca

SEQ ID NO: 1033272 - RNA, 19 nt, Artificial Sequence
  Description of Artificial Sequence: Synthetic oligonucleotide
uuccgaacucgcucaugcc

SEQ ID NO: 1033273 - RNA, 19 nt, Artificial Sequence
  Description of Artificial Sequence: Synthetic oligonucleotide
cuugucuugagggcuggug

SEQ ID NO: 1033274 - RNA, 19 nt, Artificial Sequence
  Description of Artificial Sequence: Synthetic oligonucleotide
gacccggugaaggcaaugc

SEQ ID NO: 1033275 - RNA, 19 nt, Artificial Sequence
  Description of Artificial Sequence: Synthetic oligonucleotide
gaacaggcgguaccuucug

SEQ ID NO: 1033276 - RNA, 19 nt, Artificial Sequence
  Description of Artificial Sequence: Synthetic oligonucleotide
caugagcacugacucauca

SEQ ID NO: 1033277 - RNA, 19 nt, Artificial Sequence
  Description of Artificial Sequence: Synthetic oligonucleotide
ugaggcguccagguguggc

SEQ ID NO: 1033278 - RNA, 19 nt, Artificial Sequence
  Description of Artificial Sequence: Synthetic oligonucleotide
agcacucgagcagguacac

SEQ ID NO: 1033279 - RNA, 19 nt, Artificial Sequence
  Description of Artificial Sequence: Synthetic oligonucleotide
uggaucugaauggguguug

SEQ ID NO: 1033280 - RNA, 19 nt, Artificial Sequence
  Description of Artificial Sequence: Synthetic oligonucleotide
gaccucgaaggauggcggc

SEQ ID NO: 1033281 - RNA, 19 nt, Artificial Sequence
  Description of Artificial Sequence: Synthetic oligonucleotide
gguagggaugcccuggauc

SEQ ID NO: 1033282 - RNA, 19 nt, Artificial Sequence
  Description of Artificial Sequence: Synthetic oligonucleotide
cucuaccaggaugugguac

SEQ ID NO: 1033283 - RNA, 19 nt, Artificial Sequence
  Description of Artificial Sequence: Synthetic oligonucleotide
gagaaaggcaaccgcuucu

SEQ ID NO: 1033284 - RNA, 19 nt, Artificial Sequence
  Description of Artificial Sequence: Synthetic oligonucleotide
gcuuggagaaaggcaaccg

SEQ ID NO: 1033285 - RNA, 19 nt, Artificial Sequence
  Description of Artificial Sequence: Synthetic oligonucleotide
guagcgacagauguccaga

SEQ ID NO: 1033286 - RNA, 19 nt, Artificial Sequence
  Description of Artificial Sequence: Synthetic oligonucleotide
ggcgcucuuagcaaaauuc

SEQ ID NO: 1033287 - RNA, 19 nt, Artificial Sequence
  Description of Artificial Sequence: Synthetic oligonucleotide
gccacguucuccuccaaug

SEQ ID NO: 1033288 - RNA, 19 nt, Artificial Sequence
  Description of Artificial Sequence: Synthetic oligonucleotide
cagugucuugccugacccg

SEQ ID NO: 1033289 - RNA, 19 nt, Artificial Sequence
  Description of Artificial Sequence: Synthetic oligonucleotide
caccaugucggauggucuc

SEQ ID NO: 1033290 - RNA, 19 nt, Artificial Sequence
  Description of Artificial Sequence: Synthetic oligonucleotide
agcgacagauguccagacu

SEQ ID NO: 1033291 - RNA, 19 nt, Artificial Sequence
  Description of Artificial Sequence: Synthetic oligonucleotide
gcucuuagcaaaauucuga

SEQ ID NO: 1033292 - RNA, 19 nt, Artificial Sequence
  Description of Artificial Sequence: Synthetic oligonucleotide
uccugaacgcccggugcgg

SEQ ID NO: 1033293 - RNA, 19 nt, Artificial Sequence
  Description of Artificial Sequence: Synthetic oligonucleotide
agguauucgugaauggcau

SEQ ID NO: 1033294 - RNA, 19 nt, Artificial Sequence
  Description of Artificial Sequence: Synthetic oligonucleotide
agaacaggcgguaccuucu

SEQ ID NO: 1033295 - RNA, 19 nt, Artificial Sequence
  Description of Artificial Sequence: Synthetic oligonucleotide
ucccacguugauggugacg

SEQ ID NO: 1033296 - RNA, 19 nt, Artificial Sequence
  Description of Artificial Sequence: Synthetic oligonucleotide
guuuugauuggaucgucau

SEQ ID NO: 1033297 - RNA, 19 nt, Artificial Sequence
  Description of Artificial Sequence: Synthetic oligonucleotide
cacguucuccuccaauguc

SEQ ID NO: 1033298 - RNA, 19 nt, Artificial Sequence
  Description of Artificial Sequence: Synthetic oligonucleotide
uuccgccacacucuccaaa

SEQ ID NO: 1033299 - RNA, 19 nt, Artificial Sequence
  Description of Artificial Sequence: Synthetic oligonucleotide
uguccagacuaaccauuuu

SEQ ID NO: 1033300 - RNA, 19 nt, Artificial Sequence
  Description of Artificial Sequence: Synthetic oligonucleotide
guuuggggcagucagugau

SEQ ID NO: 1033301 - RNA, 19 nt, Artificial Sequence
  Description of Artificial Sequence: Synthetic oligonucleotide
ugccgcucuucagacaugu

SEQ ID NO: 1033302 - RNA, 19 nt, Artificial Sequence
  Description of Artificial Sequence: Synthetic oligonucleotide
aguuuggggcagucaguga

SEQ ID NO: 1033303 - RNA, 19 nt, Artificial Sequence
  Description of Artificial Sequence: Synthetic oligonucleotide
uguuuccugaacgcccggu

SEQ ID NO: 1033304 - RNA, 19 nt, Artificial Sequence
  Description of Artificial Sequence: Synthetic oligonucleotide
ugcacggcuggaguccugc

SEQ ID NO: 1033305 - RNA, 19 nt, Artificial Sequence
  Description of Artificial Sequence: Synthetic oligonucleotide
agcacgucccacguugaug

SEQ ID NO: 1033306 - RNA, 19 nt, Artificial Sequence
  Description of Artificial Sequence: Synthetic oligonucleotide
gacaggcagugugaauacc

SEQ ID NO: 1033307 - RNA, 19 nt, Artificial Sequence
  Description of Artificial Sequence: Synthetic oligonucleotide
gaagggauugugcuuuaau

SEQ ID NO: 1033308 - RNA, 19 nt, Artificial Sequence
  Description of Artificial Sequence: Synthetic oligonucleotide
ugguaccucuuccgaacuc

SEQ ID NO: 1033309 - RNA, 19 nt, Artificial Sequence
  Description of Artificial Sequence: Synthetic oligonucleotide
augguacggaugucgcccu

SEQ ID NO: 1033310 - RNA, 19 nt, Artificial Sequence
  Description of Artificial Sequence: Synthetic oligonucleotide
ggcuucuugucuugagggc

SEQ ID NO: 1033311 - RNA, 19 nt, Artificial Sequence
  Description of Artificial Sequence: Synthetic oligonucleotide
ucgaaggauggcggcagga

SEQ ID NO: 1033312 - RNA, 19 nt, Artificial Sequence
  Description of Artificial Sequence: Synthetic oligonucleotide
ugacgggcuuuaccagggc

SEQ ID NO: 1033313 - RNA, 19 nt, Artificial Sequence
  Description of Artificial Sequence: Synthetic oligonucleotide
ugguuuugauuggaucguc

SEQ ID NO: 1033314 - RNA, 19 nt, Artificial Sequence
  Description of Artificial Sequence: Synthetic oligonucleotide
cagacuaaccauuuucuuu

SEQ ID NO: 1033315 - RNA, 19 nt, Artificial Sequence
  Description of Artificial Sequence: Synthetic oligonucleotide
uucggcaugguggcacuga

SEQ ID NO: 1033316 - RNA, 19 nt, Artificial Sequence
  Description of Artificial Sequence: Synthetic oligonucleotide
ccagguguggcuaccauca

SEQ ID NO: 1033317 - RNA, 19 nt, Artificial Sequence
  Description of Artificial Sequence: Synthetic oligonucleotide
ccguguuuccugaacgccc

SEQ ID NO: 1033318 - RNA, 19 nt, Artificial Sequence
  Description of Artificial Sequence: Synthetic oligonucleotide
ggauugugcuuuaaugaca

SEQ ID NO: 1033319 - RNA, 19 nt, Artificial Sequence
  Description of Artificial Sequence: Synthetic oligonucleotide
uaugcacggcuggaguccu

SEQ ID NO: 1033320 - RNA, 19 nt, Artificial Sequence
  Description of Artificial Sequence: Synthetic oligonucleotide
uggggcagucagugauccg

SEQ ID NO: 1033321 - RNA, 19 nt, Artificial Sequence
  Description of Artificial Sequence: Synthetic oligonucleotide
ggccggacagaaugguagg

SEQ ID NO: 1033322 - RNA, 19 nt, Artificial Sequence
  Description of Artificial Sequence: Synthetic oligonucleotide
aauccccguguuuccugaa

SEQ ID NO: 1033323 - RNA, 19 nt, Artificial Sequence
  Description of Artificial Sequence: Synthetic oligonucleotide
accagggcgcucuuagcaa

SEQ ID NO: 1033324 - RNA, 19 nt, Artificial Sequence
  Description of Artificial Sequence: Synthetic oligonucleotide
gcgacagauguccagacua

SEQ ID NO: 1033325 - RNA, 19 nt, Artificial Sequence
  Description of Artificial Sequence: Synthetic oligonucleotide
ugaacgcccggugcggcca

SEQ ID NO: 1033326 - RNA, 19 nt, Artificial Sequence
  Description of Artificial Sequence: Synthetic oligonucleotide
ucgcgaggggcagaugaug

SEQ ID NO: 1033327 - RNA, 19 nt, Artificial Sequence
  Description of Artificial Sequence: Synthetic oligonucleotide
acgcuuggagaaaggcaac

SEQ ID NO: 1033328 - RNA, 19 nt, Artificial Sequence
  Description of Artificial Sequence: Synthetic oligonucleotide
auaaggcccuucacgcuug

SEQ ID NO: 1033329 - RNA, 19 nt, Artificial Sequence
  Description of Artificial Sequence: Synthetic oligonucleotide
cugaacgcccggugcggcc

SEQ ID NO: 1033330 - RNA, 19 nt, Artificial Sequence
  Description of Artificial Sequence: Synthetic oligonucleotide
aggauggcggcaggaaacu

SEQ ID NO: 1033331 - RNA, 19 nt, Artificial Sequence
  Description of Artificial Sequence: Synthetic oligonucleotide
aggaugccaugggucugcc

SEQ ID NO: 1033332 - RNA, 19 nt, Artificial Sequence
  Description of Artificial Sequence: Synthetic oligonucleotide
gcggcaggaaacuucaucu

SEQ ID NO: 1033333 - RNA, 19 nt, Artificial Sequence
  Description of Artificial Sequence: Synthetic oligonucleotide
guuggguggagaaugcccu

SEQ ID NO: 1033334 - RNA, 19 nt, Artificial Sequence
  Description of Artificial Sequence: Synthetic oligonucleotide
cagacggcucagaagucca

SEQ ID NO: 1033335 - RNA, 19 nt, Artificial Sequence
  Description of Artificial Sequence: Synthetic oligonucleotide
caugccgcucuucagacau

SEQ ID NO: 1033336 - RNA, 19 nt, Artificial Sequence
  Description of Artificial Sequence: Synthetic oligonucleotide
acaccaugucggauggucu

SEQ ID NO: 1033337 - RNA, 19 nt, Artificial Sequence
  Description of Artificial Sequence: Synthetic oligonucleotide
guguuggguggagaaugcc

SEQ ID NO: 1033338 - RNA, 19 nt, Artificial Sequence
  Description of Artificial Sequence: Synthetic oligonucleotide
caauccccguguuuccuga

SEQ ID NO: 1033339 - RNA, 19 nt, Artificial Sequence
  Description of Artificial Sequence: Synthetic oligonucleotide
agcaauccccguguuuccu

SEQ ID NO: 1033340 - RNA, 19 nt, Artificial Sequence
  Description of Artificial Sequence: Synthetic oligonucleotide
gguuuugauuggaucguca

SEQ ID NO: 1033341 - RNA, 19 nt, Artificial Sequence
  Description of Artificial Sequence: Synthetic oligonucleotide
acgucccacguugauggug

SEQ ID NO: 1033342 - RNA, 19 nt, Artificial Sequence
  Description of Artificial Sequence: Synthetic oligonucleotide
ggcggcaggaaacuucauc

SEQ ID NO: 1033343 - RNA, 19 nt, Artificial Sequence
  Description of Artificial Sequence: Synthetic oligonucleotide
ugacccggugaaggcaaug

SEQ ID NO: 1033344 - RNA, 19 nt, Artificial Sequence
  Description of Artificial Sequence: Synthetic oligonucleotide
gaacaugaugacaggcagu

SEQ ID NO: 1033345 - RNA, 19 nt, Artificial Sequence
  Description of Artificial Sequence: Synthetic oligonucleotide
gaaacucuugaugggcggu

SEQ ID NO: 1033346 - RNA, 19 nt, Artificial Sequence
  Description of Artificial Sequence: Synthetic oligonucleotide
gaugacauccaggcuggcu

SEQ ID NO: 1033347 - RNA, 19 nt, Artificial Sequence
  Description of Artificial Sequence: Synthetic oligonucleotide
cagcaaauccaugaggcgu

SEQ ID NO: 1033348 - RNA, 19 nt, Artificial Sequence
  Description of Artificial Sequence: Synthetic oligonucleotide
uacggaugucgcccucaaa

SEQ ID NO: 1033349 - RNA, 19 nt, Artificial Sequence
  Description of Artificial Sequence: Synthetic oligonucleotide
gcugguguaugcacggcug

SEQ ID NO: 1033350 - RNA, 19 nt, Artificial Sequence
  Description of Artificial Sequence: Synthetic oligonucleotide
gcucuuuuacugacauucc

SEQ ID NO: 1033351 - RNA, 19 nt, Artificial Sequence
  Description of Artificial Sequence: Synthetic oligonucleotide
ggggcagucagugauccga

SEQ ID NO: 1033352 - RNA, 19 nt, Artificial Sequence
  Description of Artificial Sequence: Synthetic oligonucleotide
guguaugcacggcuggagu

SEQ ID NO: 1033353 - RNA, 19 nt, Artificial Sequence
  Description of Artificial Sequence: Synthetic oligonucleotide
cuucaggcaugucauaauu

SEQ ID NO: 1033354 - RNA, 19 nt, Artificial Sequence
  Description of Artificial Sequence: Synthetic oligonucleotide
gcccggugcggccaauucg

SEQ ID NO: 1033355 - RNA, 19 nt, Artificial Sequence
  Description of Artificial Sequence: Synthetic oligonucleotide
gcaauccccguguuuccug

SEQ ID NO: 1033356 - RNA, 19 nt, Artificial Sequence
  Description of Artificial Sequence: Synthetic oligonucleotide
ugguccgcucuuccugguc

SEQ ID NO: 1033357 - RNA, 19 nt, Artificial Sequence
  Description of Artificial Sequence: Synthetic oligonucleotide
cauaaggcccuucacgcuu

SEQ ID NO: 1033358 - RNA, 19 nt, Artificial Sequence
  Description of Artificial Sequence: Synthetic oligonucleotide
gcggugggauaccaucucc

SEQ ID NO: 1033359 - RNA, 19 nt, Artificial Sequence
  Description of Artificial Sequence: Synthetic oligonucleotide
gaugggcggugggauacca

SEQ ID NO: 1033360 - RNA, 19 nt, Artificial Sequence
  Description of Artificial Sequence: Synthetic oligonucleotide
ccuucacgcuuggagaaag

SEQ ID NO: 1033361 - RNA, 19 nt, Artificial Sequence
  Description of Artificial Sequence: Synthetic oligonucleotide
agcagacggcaguaauauu

SEQ ID NO: 1033362 - RNA, 19 nt, Artificial Sequence
  Description of Artificial Sequence: Synthetic oligonucleotide
cggaugucgcccucaaagc

SEQ ID NO: 1033363 - RNA, 19 nt, Artificial Sequence
  Description of Artificial Sequence: Synthetic oligonucleotide
gccggacagaaugguaggg

SEQ ID NO: 1033364 - RNA, 19 nt, Artificial Sequence
  Description of Artificial Sequence: Synthetic oligonucleotide
ucuugucuugagggcuggu

SEQ ID NO: 1033365 - RNA, 19 nt, Artificial Sequence
  Description of Artificial Sequence: Synthetic oligonucleotide
gucuugccugacccgguga

SEQ ID NO: 1033366 - RNA, 19 nt, Artificial Sequence
  Description of Artificial Sequence: Synthetic oligonucleotide
caaguuuggggcagucagu

SEQ ID NO: 1033367 - RNA, 19 nt, Artificial Sequence
  Description of Artificial Sequence: Synthetic oligonucleotide
agguaguccuugcggccaa

SEQ ID NO: 1033368 - RNA, 19 nt, Artificial Sequence
  Description of Artificial Sequence: Synthetic oligonucleotide
agagagcacagcgcagcaa

SEQ ID NO: 1033369 - RNA, 19 nt, Artificial Sequence
  Description of Artificial Sequence: Synthetic oligonucleotide
gcgaggggcagaugaugag

SEQ ID NO: 1033370 - RNA, 19 nt, Artificial Sequence
  Description of Artificial Sequence: Synthetic oligonucleotide
ccccguguuuccugaacgc

SEQ ID NO: 1033371 - RNA, 19 nt, Artificial Sequence
  Description of Artificial Sequence: Synthetic oligonucleotide
cugguuuugauuggaucgu

SEQ ID NO: 1033372 - RNA, 19 nt, Artificial Sequence
  Description of Artificial Sequence: Synthetic oligonucleotide
cccggugaaggcaaugcca

SEQ ID NO: 1033373 - RNA, 19 nt, Artificial Sequence
  Description of Artificial Sequence: Synthetic oligonucleotide
uaccaggaugugguaccuc

SEQ ID NO: 1033374 - RNA, 19 nt, Artificial Sequence
  Description of Artificial Sequence: Synthetic oligonucleotide
ugcggccaauguugcugac

SEQ ID NO: 1033375 - RNA, 19 nt, Artificial Sequence
  Description of Artificial Sequence: Synthetic oligonucleotide
guacggaugucgcccucaa

SEQ ID NO: 1033376 - RNA, 19 nt, Artificial Sequence
  Description of Artificial Sequence: Synthetic oligonucleotide
cuggaguccugcaacugau

SEQ ID NO: 1033377 - RNA, 19 nt, Artificial Sequence
  Description of Artificial Sequence: Synthetic oligonucleotide
gcagugugaauaccagugu

SEQ ID NO: 1033378 - RNA, 19 nt, Artificial Sequence
  Description of Artificial Sequence: Synthetic oligonucleotide
gaaaugccucaauggcuuu

SEQ ID NO: 1033379 - RNA, 19 nt, Artificial Sequence
  Description of Artificial Sequence: Synthetic oligonucleotide
augaggcguccaggugugg

SEQ ID NO: 1033380 - RNA, 19 nt, Artificial Sequence
  Description of Artificial Sequence: Synthetic oligonucleotide
ggcggugggauaccaucuc

SEQ ID NO: 1033381 - RNA, 19 nt, Artificial Sequence
  Description of Artificial Sequence: Synthetic oligonucleotide
cacggcuggaguccugcaa

SEQ ID NO: 1033382 - RNA, 19 nt, Artificial Sequence
  Description of Artificial Sequence: Synthetic oligonucleotide
ccgaaaugccucaauggcu

SEQ ID NO: 1033383 - RNA, 19 nt, Artificial Sequence
  Description of Artificial Sequence: Synthetic oligonucleotide
gguacggaugucgcccuca

SEQ ID NO: 1033384 - RNA, 19 nt, Artificial Sequence
  Description of Artificial Sequence: Synthetic oligonucleotide
ccaugaggcguccaggugu

SEQ ID NO: 1033385 - RNA, 19 nt, Artificial Sequence
  Description of Artificial Sequence: Synthetic oligonucleotide
cucgcucaugccgcucuuc

SEQ ID NO: 1033386 - RNA, 19 nt, Artificial Sequence
  Description of Artificial Sequence: Synthetic oligonucleotide
agguagcgacagaugucca

SEQ ID NO: 1033387 - RNA, 19 nt, Artificial Sequence
  Description of Artificial Sequence: Synthetic oligonucleotide
cagguacaccaucuuggcu

SEQ ID NO: 1033388 - RNA, 19 nt, Artificial Sequence
  Description of Artificial Sequence: Synthetic oligonucleotide
ccacguugauggugacggg

SEQ ID NO: 1033389 - RNA, 19 nt, Artificial Sequence
  Description of Artificial Sequence: Synthetic oligonucleotide
cagggcgcucuuagcaaaa

SEQ ID NO: 1033390 - RNA, 19 nt, Artificial Sequence
  Description of Artificial Sequence: Synthetic oligonucleotide
agggcgcucuuagcaaaau

SEQ ID NO: 1033391 - RNA, 19 nt, Artificial Sequence
  Description of Artificial Sequence: Synthetic oligonucleotide
acucgcucaugccgcucuu

SEQ ID NO: 1033392 - RNA, 19 nt, Artificial Sequence
  Description of Artificial Sequence: Synthetic oligonucleotide
uggcggcaggaaacuucau

SEQ ID NO: 1033393 - RNA, 19 nt, Artificial Sequence
  Description of Artificial Sequence: Synthetic oligonucleotide
ggcugguguaugcacggcu

SEQ ID NO: 1033394 - RNA, 19 nt, Artificial Sequence
  Description of Artificial Sequence: Synthetic oligonucleotide
cgucccacguugaugguga

SEQ ID NO: 1033395 - RNA, 19 nt, Artificial Sequence
  Description of Artificial Sequence: Synthetic oligonucleotide
cacugacaucaaggcucgg

SEQ ID NO: 1033396 - RNA, 19 nt, Artificial Sequence
  Description of Artificial Sequence: Synthetic oligonucleotide
gcccuugaaguaggagaag

SEQ ID NO: 1033397 - RNA, 19 nt, Artificial Sequence
  Description of Artificial Sequence: Synthetic oligonucleotide
cagcucucgcgaggggcag

SEQ ID NO: 1033398 - RNA, 19 nt, Artificial Sequence
  Description of Artificial Sequence: Synthetic oligonucleotide
gcgcucuuagcaaaauucu

SEQ ID NO: 1033399 - RNA, 19 nt, Artificial Sequence
  Description of Artificial Sequence: Synthetic oligonucleotide
ccuucacguauuccaccuc

SEQ ID NO: 1033400 - RNA, 19 nt, Artificial Sequence
  Description of Artificial Sequence: Synthetic oligonucleotide
caaucaugucccggccgga

SEQ ID NO: 1033401 - RNA, 19 nt, Artificial Sequence
  Description of Artificial Sequence: Synthetic oligonucleotide
ccugacccggugaaggcaa

SEQ ID NO: 1033402 - RNA, 19 nt, Artificial Sequence
  Description of Artificial Sequence: Synthetic oligonucleotide
ccagcucucgcgaggggca

SEQ ID NO: 1033403 - RNA, 19 nt, Artificial Sequence
  Description of Artificial Sequence: Synthetic oligonucleotide
agacggcucagaaguccau

SEQ ID NO: 1033404 - RNA, 19 nt, Artificial Sequence
  Description of Artificial Sequence: Synthetic oligonucleotide
cgaaaugccucaauggcuu

SEQ ID NO: 1033405 - RNA, 19 nt, Artificial Sequence
  Description of Artificial Sequence: Synthetic oligonucleotide
cuccagcaauaaggcuuug

SEQ ID NO: 1033406 - RNA, 19 nt, Artificial Sequence
  Description of Artificial Sequence: Synthetic oligonucleotide
gggucugccgggccagcuc

SEQ ID NO: 1033407 - RNA, 19 nt, Artificial Sequence
  Description of Artificial Sequence: Synthetic oligonucleotide
cuuccgccacacucuccaa

SEQ ID NO: 1033408 - RNA, 19 nt, Artificial Sequence
  Description of Artificial Sequence: Synthetic oligonucleotide
ccugaacgcccggugcggc

SEQ ID NO: 1033409 - RNA, 19 nt, Artificial Sequence
  Description of Artificial Sequence: Synthetic oligonucleotide
gcacucgagcagguacacc

SEQ ID NO: 1033410 - RNA, 19 nt, Artificial Sequence
  Description of Artificial Sequence: Synthetic oligonucleotide
cuaccaggaugugguaccu

SEQ ID NO: 1033411 - RNA, 19 nt, Artificial Sequence
  Description of Artificial Sequence: Synthetic oligonucleotide
cgcgaggggcagaugauga

SEQ ID NO: 1033412 - RNA, 19 nt, Artificial Sequence
  Description of Artificial Sequence: Synthetic oligonucleotide
agcucucgcgaggggcaga

SEQ ID NO: 1033413 - RNA, 19 nt, Artificial Sequence
  Description of Artificial Sequence: Synthetic oligonucleotide
ggguccaacugguuuugau

SEQ ID NO: 1033414 - RNA, 19 nt, Artificial Sequence
  Description of Artificial Sequence: Synthetic oligonucleotide
cuggaucugaauggguguu

SEQ ID NO: 1033415 - RNA, 19 nt, Artificial Sequence
  Description of Artificial Sequence: Synthetic oligonucleotide
gaacgcccggugcggccaa

SEQ ID NO: 1033416 - RNA, 19 nt, Artificial Sequence
  Description of Artificial Sequence: Synthetic oligonucleotide
cgcucaugccgcucuucag

SEQ ID NO: 1033417 - RNA, 19 nt, Artificial Sequence
  Description of Artificial Sequence: Synthetic oligonucleotide
gccugacccggugaaggca

SEQ ID NO: 1033418 - RNA, 19 nt, Artificial Sequence
  Description of Artificial Sequence: Synthetic oligonucleotide
cucgcgaggggcagaugau

SEQ ID NO: 1033419 - RNA, 19 nt, Artificial Sequence
  Description of Artificial Sequence: Synthetic oligonucleotide
caugucccggccggacaga

SEQ ID NO: 1033420 - RNA, 19 nt, Artificial Sequence
  Description of Artificial Sequence: Synthetic oligonucleotide
cgacagauguccagacuaa

SEQ ID NO: 1033421 - RNA, 19 nt, Artificial Sequence
  Description of Artificial Sequence: Synthetic oligonucleotide
ccagacuaaccauuuucuu

SEQ ID NO: 1033422 - RNA, 19 nt, Artificial Sequence
  Description of Artificial Sequence: Synthetic oligonucleotide
ccauaaggcccuucacgcu

SEQ ID NO: 1033423 - RNA, 19 nt, Artificial Sequence
  Description of Artificial Sequence: Synthetic oligonucleotide
cucucgcgaggggcagaug

SEQ ID NO: 1033424 - RNA, 19 nt, Artificial Sequence
  Description of Artificial Sequence: Synthetic oligonucleotide
cagacauguucaggacaua

SEQ ID NO: 1033425 - RNA, 19 nt, Artificial Sequence
  Description of Artificial Sequence: Synthetic oligonucleotide
augcacggcuggaguccug

SEQ ID NO: 1033426 - RNA, 19 nt, Artificial Sequence
  Description of Artificial Sequence: Synthetic oligonucleotide
aacgcccggugcggccaau

SEQ ID NO: 1033427 - RNA, 19 nt, Artificial Sequence
  Description of Artificial Sequence: Synthetic oligonucleotide
gcguccagguguggcuacc

SEQ ID NO: 1033428 - RNA, 19 nt, Artificial Sequence
  Description of Artificial Sequence: Synthetic oligonucleotide
gggacugcccaggccagcu

SEQ ID NO: 1033429 - RNA, 19 nt, Artificial Sequence
  Description of Artificial Sequence: Synthetic oligonucleotide
gggcgcucuuagcaaaauu

SEQ ID NO: 1033430 - RNA, 19 nt, Artificial Sequence
  Description of Artificial Sequence: Synthetic oligonucleotide
cacgucccacguugauggu

SEQ ID NO: 1033431 - RNA, 19 nt, Artificial Sequence
  Description of Artificial Sequence: Synthetic oligonucleotide
gggguccaacugguuuuga

SEQ ID NO: 1033432 - RNA, 19 nt, Artificial Sequence
  Description of Artificial Sequence: Synthetic oligonucleotide
cgucauaugugaugccuuu

SEQ ID NO: 1033433 - RNA, 19 nt, Artificial Sequence
  Description of Artificial Sequence: Synthetic oligonucleotide
gggcuuuaccagggcgcuc

SEQ ID NO: 1033434 - RNA, 19 nt, Artificial Sequence
  Description of Artificial Sequence: Synthetic oligonucleotide
acgcccggugcggccaauu

SEQ ID NO: 1033435 - RNA, 19 nt, Artificial Sequence
  Description of Artificial Sequence: Synthetic oligonucleotide
cagguguggcuaccaucau

SEQ ID NO: 1033436 - RNA, 19 nt, Artificial Sequence
  Description of Artificial Sequence: Synthetic oligonucleotide
cagcacgucccacguugau

SEQ ID NO: 1033437 - RNA, 19 nt, Artificial Sequence
  Description of Artificial Sequence: Synthetic oligonucleotide
cugacccggugaaggcaau

SEQ ID NO: 1033438 - RNA, 19 nt, Artificial Sequence
  Description of Artificial Sequence: Synthetic oligonucleotide
ggagaacaggcgguaccuu

SEQ ID NO: 1033439 - RNA, 19 nt, Artificial Sequence
  Description of Artificial Sequence: Synthetic oligonucleotide
ccggccggacagaauggua

SEQ ID NO: 1033440 - RNA, 19 nt, Artificial Sequence
  Description of Artificial Sequence: Synthetic oligonucleotide
cgcccggugcggccaauuc

SEQ ID NO: 1033441 - RNA, 19 nt, Artificial Sequence
  Description of Artificial Sequence: Synthetic oligonucleotide
cccuucacgcuuggagaaa

SEQ ID NO: 1033442 - RNA, 19 nt, Artificial Sequence
  Description of Artificial Sequence: Synthetic oligonucleotide
ccacuaagacauccuucuu

SEQ ID NO: 1033443 - RNA, 19 nt, Artificial Sequence
  Description of Artificial Sequence: Synthetic oligonucleotide
gcucucgcgaggggcagau

SEQ ID NO: 1033444 - RNA, 19 nt, Artificial Sequence
  Description of Artificial Sequence: Synthetic oligonucleotide
cggccuuccgccacacucu

SEQ ID NO: 1033445 - RNA, 19 nt, Artificial Sequence
  Description of Artificial Sequence: Synthetic oligonucleotide
gcuuuaccagggcgcucuu

SEQ ID NO: 1033446 - RNA, 19 nt, Artificial Sequence
  Description of Artificial Sequence: Synthetic oligonucleotide
cgggcuuuaccagggcgcu

SEQ ID NO: 1033447 - RNA, 19 nt, Artificial Sequence
  Description of Artificial Sequence: Synthetic oligonucleotide
cggccaauucggugcacau

SEQ ID NO: 1033448 - RNA, 19 nt, Artificial Sequence
  Description of Artificial Sequence: Synthetic oligonucleotide
cccggccggacagaauggu

SEQ ID NO: 1033449 - RNA, 19 nt, Artificial Sequence
  Description of Artificial Sequence: Synthetic oligonucleotide
gccgcucuucagacauguu

SEQ ID NO: 1033450 - RNA, 19 nt, Artificial Sequence
  Description of Artificial Sequence: Synthetic oligonucleotide
aauaauacaauguuacuag

SEQ ID NO: 1033451 - RNA, 19 nt, Artificial Sequence
  Description of Artificial Sequence: Synthetic oligonucleotide
aauguaacuauuuuaaugu

SEQ ID NO: 1033452 - RNA, 19 nt, Artificial Sequence
  Description of Artificial Sequence: Synthetic oligonucleotide
uguuauauacacaagaaug

SEQ ID NO: 1033453 - RNA, 19 nt, Artificial Sequence
  Description of Artificial Sequence: Synthetic oligonucleotide
aauguuacuagaaauuagc

SEQ ID NO: 1033454 - RNA, 19 nt, Artificial Sequence
  Description of Artificial Sequence: Synthetic oligonucleotide
uuuucgaaaagauacaggc

SEQ ID NO: 1033455 - RNA, 19 nt, Artificial Sequence
  Description of Artificial Sequence: Synthetic oligonucleotide
uucgaaaagauacaggcag

SEQ ID NO: 1033456 - RNA, 19 nt, Artificial Sequence
  Description of Artificial Sequence: Synthetic oligonucleotide
uauggugagggauugaugg

SEQ ID NO: 1033457 - RNA, 19 nt, Artificial Sequence
  Description of Artificial Sequence: Synthetic oligonucleotide
aaucacuuaacaauuauag

SEQ ID NO: 1033458 - RNA, 19 nt, Artificial Sequence
  Description of Artificial Sequence: Synthetic oligonucleotide
uauauuggagucacaaugg

SEQ ID NO: 1033459 - RNA, 19 nt, Artificial Sequence
  Description of Artificial Sequence: Synthetic oligonucleotide
uacaagaacgcugagagcg

SEQ ID NO: 1033460 - RNA, 19 nt, Artificial Sequence
  Description of Artificial Sequence: Synthetic oligonucleotide
aauuauagguuuucaauca

SEQ ID NO: 1033461 - RNA, 19 nt, Artificial Sequence
  Description of Artificial Sequence: Synthetic oligonucleotide
caucuuuucgaaaagauac

SEQ ID NO: 1033462 - RNA, 19 nt, Artificial Sequence
  Description of Artificial Sequence: Synthetic oligonucleotide
uuaagaacuucauacauac

SEQ ID NO: 1033463 - RNA, 19 nt, Artificial Sequence
  Description of Artificial Sequence: Synthetic oligonucleotide
uguguacucacacagacca

SEQ ID NO: 1033464 - RNA, 19 nt, Artificial Sequence
  Description of Artificial Sequence: Synthetic oligonucleotide
agucauauuuuccacgccc

SEQ ID NO: 1033465 - RNA, 19 nt, Artificial Sequence
  Description of Artificial Sequence: Synthetic oligonucleotide
aacauauaccgaaaugucc

SEQ ID NO: 1033466 - RNA, 19 nt, Artificial Sequence
  Description of Artificial Sequence: Synthetic oligonucleotide
ucagauuuccauuucuacg

SEQ ID NO: 1033467 - RNA, 19 nt, Artificial Sequence
  Description of Artificial Sequence: Synthetic oligonucleotide
uaaaauugaaacucccucc

SEQ ID NO: 1033468 - RNA, 19 nt, Artificial Sequence
  Description of Artificial Sequence: Synthetic oligonucleotide
agagcagauuguuauauac

SEQ ID NO: 1033469 - RNA, 19 nt, Artificial Sequence
  Description of Artificial Sequence: Synthetic oligonucleotide
aaugaccauaacuguagac

SEQ ID NO: 1033470 - RNA, 19 nt, Artificial Sequence
  Description of Artificial Sequence: Synthetic oligonucleotide
gaauacuuagcaaacaccc

SEQ ID NO: 1033471 - RNA, 19 nt, Artificial Sequence
  Description of Artificial Sequence: Synthetic oligonucleotide
aauauccccacaaugauug

SEQ ID NO: 1033472 - RNA, 19 nt, Artificial Sequence
  Description of Artificial Sequence: Synthetic oligonucleotide
augaccauaacuguagacc

SEQ ID NO: 1033473 - RNA, 19 nt, Artificial Sequence
  Description of Artificial Sequence: Synthetic oligonucleotide
aagaauagcugaacaagcc

SEQ ID NO: 1033474 - RNA, 19 nt, Artificial Sequence
  Description of Artificial Sequence: Synthetic oligonucleotide
aaugcuccaaucauagagc

SEQ ID NO: 1033475 - RNA, 19 nt, Artificial Sequence
  Description of Artificial Sequence: Synthetic oligonucleotide
auugacagcaguccagccc

SEQ ID NO: 1033476 - RNA, 19 nt, Artificial Sequence
  Description of Artificial Sequence: Synthetic oligonucleotide
uguaaagaacacauaauau

SEQ ID NO: 1033477 - RNA, 19 nt, Artificial Sequence
  Description of Artificial Sequence: Synthetic oligonucleotide
ugacaaaucaccaccugag

SEQ ID NO: 1033478 - RNA, 19 nt, Artificial Sequence
  Description of Artificial Sequence: Synthetic oligonucleotide
auacauacuagaaagacug

SEQ ID NO: 1033479 - RNA, 19 nt, Artificial Sequence
  Description of Artificial Sequence: Synthetic oligonucleotide
uguuacuagaaauuagcca

SEQ ID NO: 1033480 - RNA, 19 nt, Artificial Sequence
  Description of Artificial Sequence: Synthetic oligonucleotide
acaggguaaaccuucuucg

SEQ ID NO: 1033481 - RNA, 19 nt, Artificial Sequence
  Description of Artificial Sequence: Synthetic oligonucleotide
agacuugcuagacuaaaac

SEQ ID NO: 1033482 - RNA, 19 nt, Artificial Sequence
  Description of Artificial Sequence: Synthetic oligonucleotide
aaccuuaguauggugaggg

SEQ ID NO: 1033483 - RNA, 19 nt, Artificial Sequence
  Description of Artificial Sequence: Synthetic oligonucleotide
auuuaggaaguaugaagac

SEQ ID NO: 1033484 - RNA, 19 nt, Artificial Sequence
  Description of Artificial Sequence: Synthetic oligonucleotide
ucacuauggacacuggugc

SEQ ID NO: 1033485 - RNA, 19 nt, Artificial Sequence
  Description of Artificial Sequence: Synthetic oligonucleotide
  modified_base (7)..(7): a, c, u, g, unknown or other
gaaaccngauguuugggug

SEQ ID NO: 1033486 - RNA, 19 nt, Artificial Sequence
  Description of Artificial Sequence: Synthetic oligonucleotide
auagccaaccccaagaccg

SEQ ID NO: 1033487 - RNA, 19 nt, Artificial Sequence
  Description of Artificial Sequence: Synthetic oligonucleotide
uuuggagcaugaaugacca

SEQ ID NO: 1033488 - RNA, 19 nt, Artificial Sequence
  Description of Artificial Sequence: Synthetic oligonucleotide
aucacuuaacaauuauagg

SEQ ID NO: 1033489 - RNA, 19 nt, Artificial Sequence
  Description of Artificial Sequence: Synthetic oligonucleotide
acauacuagaaagacugcc

SEQ ID NO: 1033490 - RNA, 19 nt, Artificial Sequence
  Description of Artificial Sequence: Synthetic oligonucleotide
caugagaugaccucuaguc

SEQ ID NO: 1033491 - RNA, 19 nt, Artificial Sequence
  Description of Artificial Sequence: Synthetic oligonucleotide
uauagguuuucaaucauau

SEQ ID NO: 1033492 - RNA, 19 nt, Artificial Sequence
  Description of Artificial Sequence: Synthetic oligonucleotide
ugaagauuaagucuuucau

SEQ ID NO: 1033493 - RNA, 19 nt, Artificial Sequence
  Description of Artificial Sequence: Synthetic oligonucleotide
uguaacuauuuuaauguuc

SEQ ID NO: 1033494 - RNA, 19 nt, Artificial Sequence
  Description of Artificial Sequence: Synthetic oligonucleotide
ugaccauaacuguagaccc

SEQ ID NO: 1033495 - RNA, 19 nt, Artificial Sequence
  Description of Artificial Sequence: Synthetic oligonucleotide
uauaggcuuaaaauuguca

SEQ ID NO: 1033496 - RNA, 19 nt, Artificial Sequence
  Description of Artificial Sequence: Synthetic oligonucleotide
auaugaaggccacaaugac

SEQ ID NO: 1033497 - RNA, 19 nt, Artificial Sequence
  Description of Artificial Sequence: Synthetic oligonucleotide
uuucguuuguuacuuaagu

SEQ ID NO: 1033498 - RNA, 19 nt, Artificial Sequence
  Description of Artificial Sequence: Synthetic oligonucleotide
aggaaguaccucuagucac

SEQ ID NO: 1033499 - RNA, 19 nt, Artificial Sequence
  Description of Artificial Sequence: Synthetic oligonucleotide
agaauacuuagcaaacacc

SEQ ID NO: 1033500 - RNA, 19 nt, Artificial Sequence
  Description of Artificial Sequence: Synthetic oligonucleotide
ucguuuguuacuuaaguuc

SEQ ID NO: 1033501 - RNA, 19 nt, Artificial Sequence
  Description of Artificial Sequence: Synthetic oligonucleotide
uaauaauacaauguuacua

SEQ ID NO: 1033502 - RNA, 19 nt, Artificial Sequence
  Description of Artificial Sequence: Synthetic oligonucleotide
uuagauuucuggagaauga

SEQ ID NO: 1033503 - RNA, 19 nt, Artificial Sequence
  Description of Artificial Sequence: Synthetic oligonucleotide
cuuuggagcaugaaugacc

SEQ ID NO: 1033504 - RNA, 19 nt, Artificial Sequence
  Description of Artificial Sequence: Synthetic oligonucleotide
aagucauauuuuccacgcc

SEQ ID NO: 1033505 - RNA, 19 nt, Artificial Sequence
  Description of Artificial Sequence: Synthetic oligonucleotide
  modified_base (10)..(10): a, c, u, g, unknown or other
ugggaaaccngauguuugg

SEQ ID NO: 1033506 - RNA, 19 nt, Artificial Sequence
  Description of Artificial Sequence: Synthetic oligonucleotide
uguuacuuaaguuccugug

SEQ ID NO: 1033507 - RNA, 19 nt, Artificial Sequence
  Description of Artificial Sequence: Synthetic oligonucleotide
ucaaauucgagugggaaac

SEQ ID NO: 1033508 - RNA, 19 nt, Artificial Sequence
  Description of Artificial Sequence: Synthetic oligonucleotide
uuuagguaauuaaucugug

SEQ ID NO: 1033509 - RNA, 19 nt, Artificial Sequence
  Description of Artificial Sequence: Synthetic oligonucleotide
ugaccucuagucacuaugg

SEQ ID NO: 1033510 - RNA, 19 nt, Artificial Sequence
  Description of Artificial Sequence: Synthetic oligonucleotide
uauaccgaaauguccaaga

SEQ ID NO: 1033511 - RNA, 19 nt, Artificial Sequence
  Description of Artificial Sequence: Synthetic oligonucleotide
uguagcuggagcaaacgca

SEQ ID NO: 1033512 - RNA, 19 nt, Artificial Sequence
  Description of Artificial Sequence: Synthetic oligonucleotide
cuuuucgaaaagauacagg

SEQ ID NO: 1033513 - RNA, 19 nt, Artificial Sequence
  Description of Artificial Sequence: Synthetic oligonucleotide
aagacaacaaaaccuggau

SEQ ID NO: 1033514 - RNA, 19 nt, Artificial Sequence
  Description of Artificial Sequence: Synthetic oligonucleotide
ucuucguuauuauuaagaa

SEQ ID NO: 1033515 - RNA, 19 nt, Artificial Sequence
  Description of Artificial Sequence: Synthetic oligonucleotide
uggaucaccuaacuuaugu

SEQ ID NO: 1033516 - RNA, 19 nt, Artificial Sequence
  Description of Artificial Sequence: Synthetic oligonucleotide
ugagaugaccucuagucac

SEQ ID NO: 1033517 - RNA, 19 nt, Artificial Sequence
  Description of Artificial Sequence: Synthetic oligonucleotide
auguuacuagaaauuagcc

SEQ ID NO: 1033518 - RNA, 19 nt, Artificial Sequence
  Description of Artificial Sequence: Synthetic oligonucleotide
uuguuauauacacaagaau

SEQ ID NO: 1033519 - RNA, 19 nt, Artificial Sequence
  Description of Artificial Sequence: Synthetic oligonucleotide
aaaaccuggaucaccuaac

SEQ ID NO: 1033520 - RNA, 19 nt, Artificial Sequence
  Description of Artificial Sequence: Synthetic oligonucleotide
accaguaguguguucaauc

SEQ ID NO: 1033521 - RNA, 19 nt, Artificial Sequence
  Description of Artificial Sequence: Synthetic oligonucleotide
gaucaccuaacuuauguga

SEQ ID NO: 1033522 - RNA, 19 nt, Artificial Sequence
  Description of Artificial Sequence: Synthetic oligonucleotide
aacugaaguuguaaagaac

SEQ ID NO: 1033523 - RNA, 19 nt, Artificial Sequence
  Description of Artificial Sequence: Synthetic oligonucleotide
accucuagucacuauggac

SEQ ID NO: 1033524 - RNA, 19 nt, Artificial Sequence
  Description of Artificial Sequence: Synthetic oligonucleotide
uuuuccacgccccaggcuc

SEQ ID NO: 1033525 - RNA, 19 nt, Artificial Sequence
  Description of Artificial Sequence: Synthetic oligonucleotide
gacccuagaauacuuagca

SEQ ID NO: 1033526 - RNA, 19 nt, Artificial Sequence
  Description of Artificial Sequence: Synthetic oligonucleotide
ucaacaggcauaucuugcc

SEQ ID NO: 1033527 - RNA, 19 nt, Artificial Sequence
  Description of Artificial Sequence: Synthetic oligonucleotide
uuugggugacaaaucacca

SEQ ID NO: 1033528 - RNA, 19 nt, Artificial Sequence
  Description of Artificial Sequence: Synthetic oligonucleotide
accgauauaaaagucauau

SEQ ID NO: 1033529 - RNA, 19 nt, Artificial Sequence
  Description of Artificial Sequence: Synthetic oligonucleotide
  modified_base (6)..(6): a, c, u, g, unknown or other
aaaccngauguuuggguga

SEQ ID NO: 1033530 - RNA, 19 nt, Artificial Sequence
  Description of Artificial Sequence: Synthetic oligonucleotide
accgaaauguccaagagcu

SEQ ID NO: 1033531 - RNA, 19 nt, Artificial Sequence
  Description of Artificial Sequence: Synthetic oligonucleotide
aagaccgauauaaaaguca

SEQ ID NO: 1033532 - RNA, 19 nt, Artificial Sequence
  Description of Artificial Sequence: Synthetic oligonucleotide
uggcuagucguaaaagacc

SEQ ID NO: 1033533 - RNA, 19 nt, Artificial Sequence
  Description of Artificial Sequence: Synthetic oligonucleotide
aggccaucaaauucgagug

SEQ ID NO: 1033534 - RNA, 19 nt, Artificial Sequence
  Description of Artificial Sequence: Synthetic oligonucleotide
aaccccaagaccgauauaa

SEQ ID NO: 1033535 - RNA, 19 nt, Artificial Sequence
  Description of Artificial Sequence: Synthetic oligonucleotide
auacgcagcaaaguuggcc

SEQ ID NO: 1033536 - RNA, 19 nt, Artificial Sequence
  Description of Artificial Sequence: Synthetic oligonucleotide
aggaaucacaaaauguaac

SEQ ID NO: 1033537 - RNA, 19 nt, Artificial Sequence
  Description of Artificial Sequence: Synthetic oligonucleotide
uacgcagcaaaguuggcca

SEQ ID NO: 1033538 - RNA, 19 nt, Artificial Sequence
  Description of Artificial Sequence: Synthetic oligonucleotide
aaagauacaggcagacuug

SEQ ID NO: 1033539 - RNA, 19 nt, Artificial Sequence
  Description of Artificial Sequence: Synthetic oligonucleotide
ggagcaaacgcauacgcag

SEQ ID NO: 1033540 - RNA, 19 nt, Artificial Sequence
  Description of Artificial Sequence: Synthetic oligonucleotide
uuagguaauuaaucugugu

SEQ ID NO: 1033541 - RNA, 19 nt, Artificial Sequence
  Description of Artificial Sequence: Synthetic oligonucleotide
uugaaacucccuccaauga

SEQ ID NO: 1033542 - RNA, 19 nt, Artificial Sequence
  Description of Artificial Sequence: Synthetic oligonucleotide
gguccuaccacaaagauga

SEQ ID NO: 1033543 - RNA, 19 nt, Artificial Sequence
  Description of Artificial Sequence: Synthetic oligonucleotide
ugucauuagugcauuuaga

SEQ ID NO: 1033544 - RNA, 19 nt, Artificial Sequence
  Description of Artificial Sequence: Synthetic oligonucleotide
auagguuuucaaucauauc

SEQ ID NO: 1033545 - RNA, 19 nt, Artificial Sequence
  Description of Artificial Sequence: Synthetic oligonucleotide
cuucguuauuauuaagaac

SEQ ID NO: 1033546 - RNA, 19 nt, Artificial Sequence
  Description of Artificial Sequence: Synthetic oligonucleotide
uugugaagaagccacucaa

SEQ ID NO: 1033547 - RNA, 19 nt, Artificial Sequence
  Description of Artificial Sequence: Synthetic oligonucleotide
gaggacauuauuugaggac

SEQ ID NO: 1033548 - RNA, 19 nt, Artificial Sequence
  Description of Artificial Sequence: Synthetic oligonucleotide
cagaggacauuauuugagg

SEQ ID NO: 1033549 - RNA, 19 nt, Artificial Sequence
  Description of Artificial Sequence: Synthetic oligonucleotide
accacacacacacauauau

SEQ ID NO: 1033550 - RNA, 19 nt, Artificial Sequence
  Description of Artificial Sequence: Synthetic oligonucleotide
aaugaccacaaauguugca

SEQ ID NO: 1033551 - RNA, 19 nt, Artificial Sequence
  Description of Artificial Sequence: Synthetic oligonucleotide
agaacuucauacauacuag

SEQ ID NO: 1033552 - RNA, 19 nt, Artificial Sequence
  Description of Artificial Sequence: Synthetic oligonucleotide
auaauacaauguuacuaga

SEQ ID NO: 1033553 - RNA, 19 nt, Artificial Sequence
  Description of Artificial Sequence: Synthetic oligonucleotide
uuaugugacauuucacuua

SEQ ID NO: 1033554 - RNA, 19 nt, Artificial Sequence
  Description of Artificial Sequence: Synthetic oligonucleotide
uaaaccuucuucguuauua

SEQ ID NO: 1033555 - RNA, 19 nt, Artificial Sequence
  Description of Artificial Sequence: Synthetic oligonucleotide
acauauaccgaaaugucca

SEQ ID NO: 1033556 - RNA, 19 nt, Artificial Sequence
  Description of Artificial Sequence: Synthetic oligonucleotide
augaccucuagucacuaug

SEQ ID NO: 1033557 - RNA, 19 nt, Artificial Sequence
  Description of Artificial Sequence: Synthetic oligonucleotide
aacgcugagagcgccuagc

SEQ ID NO: 1033558 - RNA, 19 nt, Artificial Sequence
  Description of Artificial Sequence: Synthetic oligonucleotide
ugaacaagccagaacugaa

SEQ ID NO: 1033559 - RNA, 19 nt, Artificial Sequence
  Description of Artificial Sequence: Synthetic oligonucleotide
ugcuagacuaaaacugaca

SEQ ID NO: 1033560 - RNA, 19 nt, Artificial Sequence
  Description of Artificial Sequence: Synthetic oligonucleotide
cucccuccaaugaaaaugc

SEQ ID NO: 1033561 - RNA, 19 nt, Artificial Sequence
  Description of Artificial Sequence: Synthetic oligonucleotide
aaaccuggaucaccuaacu

SEQ ID NO: 1033562 - RNA, 19 nt, Artificial Sequence
  Description of Artificial Sequence: Synthetic oligonucleotide
uggaaccacacacacacau

SEQ ID NO: 1033563 - RNA, 19 nt, Artificial Sequence
  Description of Artificial Sequence: Synthetic oligonucleotide
auaccgaaauguccaagag

SEQ ID NO: 1033564 - RNA, 19 nt, Artificial Sequence
  Description of Artificial Sequence: Synthetic oligonucleotide
ugucuguccaugucgaggu

SEQ ID NO: 1033565 - RNA, 19 nt, Artificial Sequence
  Description of Artificial Sequence: Synthetic oligonucleotide
caagccagaacugaaguug

SEQ ID NO: 1033566 - RNA, 19 nt, Artificial Sequence
  Description of Artificial Sequence: Synthetic oligonucleotide
uuuguuacuuaaguuccug

SEQ ID NO: 1033567 - RNA, 19 nt, Artificial Sequence
  Description of Artificial Sequence: Synthetic oligonucleotide
aauccaggccaggggaugc

SEQ ID NO: 1033568 - RNA, 19 nt, Artificial Sequence
  Description of Artificial Sequence: Synthetic oligonucleotide
aucaccuaacuuaugugac

SEQ ID NO: 1033569 - RNA, 19 nt, Artificial Sequence
  Description of Artificial Sequence: Synthetic oligonucleotide
  modified_base (18)..(18): a, c, u, g, unknown or other
aauucgagugggaaaccng

SEQ ID NO: 1033570 - RNA, 19 nt, Artificial Sequence
  Description of Artificial Sequence: Synthetic oligonucleotide
aaauuagugaaaacuuaaa

SEQ ID NO: 1033571 - RNA, 19 nt, Artificial Sequence
  Description of Artificial Sequence: Synthetic oligonucleotide
uuuagugagcuaccauugu

SEQ ID NO: 1033572 - RNA, 19 nt, Artificial Sequence
  Description of Artificial Sequence: Synthetic oligonucleotide
uuauaggcuuaaaauuguc

SEQ ID NO: 1033573 - RNA, 19 nt, Artificial Sequence
  Description of Artificial Sequence: Synthetic oligonucleotide
cuagucacuauggacacug

SEQ ID NO: 1033574 - RNA, 19 nt, Artificial Sequence
  Description of Artificial Sequence: Synthetic oligonucleotide
  modified_base (19)..(19): a, c, u, g, unknown or other
aaauucgagugggaaaccn

SEQ ID NO: 1033575 - RNA, 19 nt, Artificial Sequence
  Description of Artificial Sequence: Synthetic oligonucleotide
aaaccuuaguauggugagg

SEQ ID NO: 1033576 - RNA, 19 nt, Artificial Sequence
  Description of Artificial Sequence: Synthetic oligonucleotide
agccuuuucuggcuagucg

SEQ ID NO: 1033577 - RNA, 19 nt, Artificial Sequence
  Description of Artificial Sequence: Synthetic oligonucleotide
  modified_base (5)..(5): a, c, u, g, unknown or other
aaccngauguuugggugac

SEQ ID NO: 1033578 - RNA, 19 nt, Artificial Sequence
  Description of Artificial Sequence: Synthetic oligonucleotide
acccaauuuucccaugaag

SEQ ID NO: 1033579 - RNA, 19 nt, Artificial Sequence
  Description of Artificial Sequence: Synthetic oligonucleotide
gaauguuugucuguccaug

SEQ ID NO: 1033580 - RNA, 19 nt, Artificial Sequence
  Description of Artificial Sequence: Synthetic oligonucleotide
aggacauuauuugaggaca

SEQ ID NO: 1033581 - RNA, 19 nt, Artificial Sequence
  Description of Artificial Sequence: Synthetic oligonucleotide
cuugcuagacuaaaacuga

SEQ ID NO: 1033582 - RNA, 19 nt, Artificial Sequence
  Description of Artificial Sequence: Synthetic oligonucleotide
ucgaaaagauacaggcaga

SEQ ID NO: 1033583 - RNA, 19 nt, Artificial Sequence
  Description of Artificial Sequence: Synthetic oligonucleotide
aauacuuagcaaacaccca

SEQ ID NO: 1033584 - RNA, 19 nt, Artificial Sequence
  Description of Artificial Sequence: Synthetic oligonucleotide
gauaugcauggccaccuug

SEQ ID NO: 1033585 - RNA, 19 nt, Artificial Sequence
  Description of Artificial Sequence: Synthetic oligonucleotide
aacaggcauaucuugccau

SEQ ID NO: 1033586 - RNA, 19 nt, Artificial Sequence
  Description of Artificial Sequence: Synthetic oligonucleotide
gaaguuguaaagaacacau

SEQ ID NO: 1033587 - RNA, 19 nt, Artificial Sequence
  Description of Artificial Sequence: Synthetic oligonucleotide
aucaaauucgagugggaaa

SEQ ID NO: 1033588 - RNA, 19 nt, Artificial Sequence
  Description of Artificial Sequence: Synthetic oligonucleotide
guaauuaaucuguguacuc

SEQ ID NO: 1033589 - RNA, 19 nt, Artificial Sequence
  Description of Artificial Sequence: Synthetic oligonucleotide
ucaugaacauauaccgaaa

SEQ ID NO: 1033590 - RNA, 19 nt, Artificial Sequence
  Description of Artificial Sequence: Synthetic oligonucleotide
auuauagguuuucaaucau

SEQ ID NO: 1033591 - RNA, 19 nt, Artificial Sequence
  Description of Artificial Sequence: Synthetic oligonucleotide
uuaguauggugagggauug

SEQ ID NO: 1033592 - RNA, 19 nt, Artificial Sequence
  Description of Artificial Sequence: Synthetic oligonucleotide
aaauugaaacucccuccaa

SEQ ID NO: 1033593 - RNA, 19 nt, Artificial Sequence
  Description of Artificial Sequence: Synthetic oligonucleotide
auauuggagucacaaugga

SEQ ID NO: 1033594 - RNA, 19 nt, Artificial Sequence
  Description of Artificial Sequence: Synthetic oligonucleotide
  modified_base (15)..(15): a, c, u, g, unknown or other
ucgagugggaaaccngaug

SEQ ID NO: 1033595 - RNA, 19 nt, Artificial Sequence
  Description of Artificial Sequence: Synthetic oligonucleotide
caaagucccaaugacauca

SEQ ID NO: 1033596 - RNA, 19 nt, Artificial Sequence
  Description of Artificial Sequence: Synthetic oligonucleotide
agaugaauaugaaggccac

SEQ ID NO: 1033597 - RNA, 19 nt, Artificial Sequence
  Description of Artificial Sequence: Synthetic oligonucleotide
ucauauuuuccacgcccca

SEQ ID NO: 1033598 - RNA, 19 nt, Artificial Sequence
  Description of Artificial Sequence: Synthetic oligonucleotide
cauucuuuaagauaugcau

SEQ ID NO: 1033599 - RNA, 19 nt, Artificial Sequence
  Description of Artificial Sequence: Synthetic oligonucleotide
ugugaagaagccacucaaa

SEQ ID NO: 1033600 - RNA, 19 nt, Artificial Sequence
  Description of Artificial Sequence: Synthetic oligonucleotide
uuagugagcuaccauuguu

SEQ ID NO: 1033601 - RNA, 19 nt, Artificial Sequence
  Description of Artificial Sequence: Synthetic oligonucleotide
uucguuuguuacuuaaguu

SEQ ID NO: 1033602 - RNA, 19 nt, Artificial Sequence
  Description of Artificial Sequence: Synthetic oligonucleotide
cccaagaccgauauaaaag

SEQ ID NO: 1033603 - RNA, 19 nt, Artificial Sequence
  Description of Artificial Sequence: Synthetic oligonucleotide
gaacaagccagaacugaag

SEQ ID NO: 1033604 - RNA, 19 nt, Artificial Sequence
  Description of Artificial Sequence: Synthetic oligonucleotide
ucaccuaacuuaugugaca

SEQ ID NO: 1033605 - RNA, 19 nt, Artificial Sequence
  Description of Artificial Sequence: Synthetic oligonucleotide
uggagcaaacgcauacgca

SEQ ID NO: 1033606 - RNA, 19 nt, Artificial Sequence
  Description of Artificial Sequence: Synthetic oligonucleotide
aacgcauacgcagcaaagu

SEQ ID NO: 1033607 - RNA, 19 nt, Artificial Sequence
  Description of Artificial Sequence: Synthetic oligonucleotide
uagugagcuaccauuguuu

SEQ ID NO: 1033608 - RNA, 19 nt, Artificial Sequence
  Description of Artificial Sequence: Synthetic oligonucleotide
agaugucagauuuccauuu

SEQ ID NO: 1033609 - RNA, 19 nt, Artificial Sequence
  Description of Artificial Sequence: Synthetic oligonucleotide
ggucauuuuagugagcuac

SEQ ID NO: 1033610 - RNA, 19 nt, Artificial Sequence
  Description of Artificial Sequence: Synthetic oligonucleotide
uagugcauuuagauuucug

SEQ ID NO: 1033611 - RNA, 19 nt, Artificial Sequence
  Description of Artificial Sequence: Synthetic oligonucleotide
uugcuagacuaaaacugac

SEQ ID NO: 1033612 - RNA, 19 nt, Artificial Sequence
  Description of Artificial Sequence: Synthetic oligonucleotide
agaugguaucaccaguagu

SEQ ID NO: 1033613 - RNA, 19 nt, Artificial Sequence
  Description of Artificial Sequence: Synthetic oligonucleotide
gugcauuuagauuucugga

SEQ ID NO: 1033614 - RNA, 19 nt, Artificial Sequence
  Description of Artificial Sequence: Synthetic oligonucleotide
aggcuuaaaauugucauua

SEQ ID NO: 1033615 - RNA, 19 nt, Artificial Sequence
  Description of Artificial Sequence: Synthetic oligonucleotide
aaguaauuucuugauccaa

SEQ ID NO: 1033616 - RNA, 19 nt, Artificial Sequence
  Description of Artificial Sequence: Synthetic oligonucleotide
caagaccgauauaaaaguc

SEQ ID NO: 1033617 - RNA, 19 nt, Artificial Sequence
  Description of Artificial Sequence: Synthetic oligonucleotide
uugggugacaaaucaccac

SEQ ID NO: 1033618 - RNA, 19 nt, Artificial Sequence
  Description of Artificial Sequence: Synthetic oligonucleotide
uguagacccuagaauacuu

SEQ ID NO: 1033619 - RNA, 19 nt, Artificial Sequence
  Description of Artificial Sequence: Synthetic oligonucleotide
uggagcaugaaugaccaua

SEQ ID NO: 1033620 - RNA, 19 nt, Artificial Sequence
  Description of Artificial Sequence: Synthetic oligonucleotide
ugguaucaccaguagugug

SEQ ID NO: 1033621 - RNA, 19 nt, Artificial Sequence
  Description of Artificial Sequence: Synthetic oligonucleotide
auagagcagauuguuauau

SEQ ID NO: 1033622 - RNA, 19 nt, Artificial Sequence
  Description of Artificial Sequence: Synthetic oligonucleotide
cucuagucacuauggacac

SEQ ID NO: 1033623 - RNA, 19 nt, Artificial Sequence
  Description of Artificial Sequence: Synthetic oligonucleotide
gcauacgcagcaaaguugg

SEQ ID NO: 1033624 - RNA, 19 nt, Artificial Sequence
  Description of Artificial Sequence: Synthetic oligonucleotide
acuaaaacugacaucuuua

SEQ ID NO: 1033625 - RNA, 19 nt, Artificial Sequence
  Description of Artificial Sequence: Synthetic oligonucleotide
uaagaacuucauacauacu

SEQ ID NO: 1033626 - RNA, 19 nt, Artificial Sequence
  Description of Artificial Sequence: Synthetic oligonucleotide
auuucuacgggagauggua

SEQ ID NO: 1033627 - RNA, 19 nt, Artificial Sequence
  Description of Artificial Sequence: Synthetic oligonucleotide
  modified_base (16)..(16): a, c, u, g, unknown or other
uucgagugggaaaccngau

SEQ ID NO: 1033628 - RNA, 19 nt, Artificial Sequence
  Description of Artificial Sequence: Synthetic oligonucleotide
gugacaaaucaccaccuga

SEQ ID NO: 1033629 - RNA, 19 nt, Artificial Sequence
  Description of Artificial Sequence: Synthetic oligonucleotide
gaugucagauuuccauuuc

SEQ ID NO: 1033630 - RNA, 19 nt, Artificial Sequence
  Description of Artificial Sequence: Synthetic oligonucleotide
gaagauuaagucuuucauu

SEQ ID NO: 1033631 - RNA, 19 nt, Artificial Sequence
  Description of Artificial Sequence: Synthetic oligonucleotide
ucccauugacagcagucca

SEQ ID NO: 1033632 - RNA, 19 nt, Artificial Sequence
  Description of Artificial Sequence: Synthetic oligonucleotide
caguaguguguucaauccc

SEQ ID NO: 1033633 - RNA, 19 nt, Artificial Sequence
  Description of Artificial Sequence: Synthetic oligonucleotide
ccuagaauacuuagcaaac

SEQ ID NO: 1033634 - RNA, 19 nt, Artificial Sequence
  Description of Artificial Sequence: Synthetic oligonucleotide
ucguuauuauuaagaacuu

SEQ ID NO: 1033635 - RNA, 19 nt, Artificial Sequence
  Description of Artificial Sequence: Synthetic oligonucleotide
ugcuccaaucauagagcag

SEQ ID NO: 1033636 - RNA, 19 nt, Artificial Sequence
  Description of Artificial Sequence: Synthetic oligonucleotide
cuguguacucacacagacc

SEQ ID NO: 1033637 - RNA, 19 nt, Artificial Sequence
  Description of Artificial Sequence: Synthetic oligonucleotide
cauauuuuccacgccccag

SEQ ID NO: 1033638 - RNA, 19 nt, Artificial Sequence
  Description of Artificial Sequence: Synthetic oligonucleotide
uacgggagaugguaucacc

SEQ ID NO: 1033639 - RNA, 19 nt, Artificial Sequence
  Description of Artificial Sequence: Synthetic oligonucleotide
uagauuucuggagaaugaa

SEQ ID NO: 1033640 - RNA, 19 nt, Artificial Sequence
  Description of Artificial Sequence: Synthetic oligonucleotide
uaggcuuaaaauugucauu

SEQ ID NO: 1033641 - RNA, 19 nt, Artificial Sequence
  Description of Artificial Sequence: Synthetic oligonucleotide
acaugagaugaccucuagu

SEQ ID NO: 1033642 - RNA, 19 nt, Artificial Sequence
  Description of Artificial Sequence: Synthetic oligonucleotide
caccagcucccauugacag

SEQ ID NO: 1033643 - RNA, 19 nt, Artificial Sequence
  Description of Artificial Sequence: Synthetic oligonucleotide
uauccccacaaugauugug

SEQ ID NO: 1033644 - RNA, 19 nt, Artificial Sequence
  Description of Artificial Sequence: Synthetic oligonucleotide
gaaccacacacacacauau

SEQ ID NO: 1033645 - RNA, 19 nt, Artificial Sequence
  Description of Artificial Sequence: Synthetic oligonucleotide
uaugcauggccaccuugac

SEQ ID NO: 1033646 - RNA, 19 nt, Artificial Sequence
  Description of Artificial Sequence: Synthetic oligonucleotide
gucauauuuuccacgcccc

SEQ ID NO: 1033647 - RNA, 19 nt, Artificial Sequence
  Description of Artificial Sequence: Synthetic oligonucleotide
auauaccgaaauguccaag

SEQ ID NO: 1033648 - RNA, 19 nt, Artificial Sequence
  Description of Artificial Sequence: Synthetic oligonucleotide
uuucuacgggagaugguau

SEQ ID NO: 1033649 - RNA, 19 nt, Artificial Sequence
  Description of Artificial Sequence: Synthetic oligonucleotide
agcaaacgcauacgcagca

SEQ ID NO: 1033650 - RNA, 19 nt, Artificial Sequence
  Description of Artificial Sequence: Synthetic oligonucleotide
acaagaacgcugagagcgc

SEQ ID NO: 1033651 - RNA, 19 nt, Artificial Sequence
  Description of Artificial Sequence: Synthetic oligonucleotide
uuuucuggcuagucguaaa

SEQ ID NO: 1033652 - RNA, 19 nt, Artificial Sequence
  Description of Artificial Sequence: Synthetic oligonucleotide
agauugucuucagaggaca

SEQ ID NO: 1033653 - RNA, 19 nt, Artificial Sequence
  Description of Artificial Sequence: Synthetic oligonucleotide
aacacagaaacugcuugua

SEQ ID NO: 1033654 - RNA, 19 nt, Artificial Sequence
  Description of Artificial Sequence: Synthetic oligonucleotide
uacuuaaguuccugugagu

SEQ ID NO: 1033655 - RNA, 19 nt, Artificial Sequence
  Description of Artificial Sequence: Synthetic oligonucleotide
ggcacuuacaagaacgcug

SEQ ID NO: 1033656 - RNA, 19 nt, Artificial Sequence
  Description of Artificial Sequence: Synthetic oligonucleotide
aggaaguaugaagacagaa

SEQ ID NO: 1033657 - RNA, 19 nt, Artificial Sequence
  Description of Artificial Sequence: Synthetic oligonucleotide
uagucacuauggacacugg

SEQ ID NO: 1033658 - RNA, 19 nt, Artificial Sequence
  Description of Artificial Sequence: Synthetic oligonucleotide
agauuguuauauacacaag

SEQ ID NO: 1033659 - RNA, 19 nt, Artificial Sequence
  Description of Artificial Sequence: Synthetic oligonucleotide
auguaacuauuuuaauguu

SEQ ID NO: 1033660 - RNA, 19 nt, Artificial Sequence
  Description of Artificial Sequence: Synthetic oligonucleotide
gaaugaccauaacuguaga

SEQ ID NO: 1033661 - RNA, 19 nt, Artificial Sequence
  Description of Artificial Sequence: Synthetic oligonucleotide
caucuuuaaaggcaugcaa

SEQ ID NO: 1033662 - RNA, 19 nt, Artificial Sequence
  Description of Artificial Sequence: Synthetic oligonucleotide
aguauggugagggauugau

SEQ ID NO: 1033663 - RNA, 19 nt, Artificial Sequence
  Description of Artificial Sequence: Synthetic oligonucleotide
caugucgagguccuaccac

SEQ ID NO: 1033664 - RNA, 19 nt, Artificial Sequence
  Description of Artificial Sequence: Synthetic oligonucleotide
gucauuuuagugagcuacc

SEQ ID NO: 1033665 - RNA, 19 nt, Artificial Sequence
  Description of Artificial Sequence: Synthetic oligonucleotide
acgcugagagcgccuagcg

SEQ ID NO: 1033666 - RNA, 19 nt, Artificial Sequence
  Description of Artificial Sequence: Synthetic oligonucleotide
auaugcauggccaccuuga

SEQ ID NO: 1033667 - RNA, 19 nt, Artificial Sequence
  Description of Artificial Sequence: Synthetic oligonucleotide
gccaucaaauucgaguggg

SEQ ID NO: 1033668 - RNA, 19 nt, Artificial Sequence
  Description of Artificial Sequence: Synthetic oligonucleotide
aacucccuccaaugaaaau

SEQ ID NO: 1033669 - RNA, 19 nt, Artificial Sequence
  Description of Artificial Sequence: Synthetic oligonucleotide
uucuacgggagaugguauc

SEQ ID NO: 1033670 - RNA, 19 nt, Artificial Sequence
  Description of Artificial Sequence: Synthetic oligonucleotide
agaccgauauaaaagucau

SEQ ID NO: 1033671 - RNA, 19 nt, Artificial Sequence
  Description of Artificial Sequence: Synthetic oligonucleotide
  modified_base (17)..(17): a, c, u, g, unknown or other
auucgagugggaaaccnga

SEQ ID NO: 1033672 - RNA, 19 nt, Artificial Sequence
  Description of Artificial Sequence: Synthetic oligonucleotide
gagcaaacgcauacgcagc

SEQ ID NO: 1033673 - RNA, 19 nt, Artificial Sequence
  Description of Artificial Sequence: Synthetic oligonucleotide
ggaucaccuaacuuaugug

SEQ ID NO: 1033674 - RNA, 19 nt, Artificial Sequence
  Description of Artificial Sequence: Synthetic oligonucleotide
gagcucacaugagaugacc

SEQ ID NO: 1033675 - RNA, 19 nt, Artificial Sequence
  Description of Artificial Sequence: Synthetic oligonucleotide
aucuuuucgaaaagauaca

SEQ ID NO: 1033676 - RNA, 19 nt, Artificial Sequence
  Description of Artificial Sequence: Synthetic oligonucleotide
acgcauacgcagcaaaguu

SEQ ID NO: 1033677 - RNA, 19 nt, Artificial Sequence
  Description of Artificial Sequence: Synthetic oligonucleotide
gcugagagcgccuagcgga

SEQ ID NO: 1033678 - RNA, 19 nt, Artificial Sequence
  Description of Artificial Sequence: Synthetic oligonucleotide
caugaaugaccauaacugu

SEQ ID NO: 1033679 - RNA, 19 nt, Artificial Sequence
  Description of Artificial Sequence: Synthetic oligonucleotide
acgccccaggcucauuucg

SEQ ID NO: 1033680 - RNA, 19 nt, Artificial Sequence
  Description of Artificial Sequence: Synthetic oligonucleotide
uacaggcagacuugcuaga

SEQ ID NO: 1033681 - RNA, 19 nt, Artificial Sequence
  Description of Artificial Sequence: Synthetic oligonucleotide
uacuagaaagacugccauu

SEQ ID NO: 1033682 - RNA, 19 nt, Artificial Sequence
  Description of Artificial Sequence: Synthetic oligonucleotide
aggguaaaccuucuucguu

SEQ ID NO: 1033683 - RNA, 19 nt, Artificial Sequence
  Description of Artificial Sequence: Synthetic oligonucleotide
uagucguaaaagaccuuuu

SEQ ID NO: 1033684 - RNA, 19 nt, Artificial Sequence
  Description of Artificial Sequence: Synthetic oligonucleotide
uucaaucccacaggguaaa

SEQ ID NO: 1033685 - RNA, 19 nt, Artificial Sequence
  Description of Artificial Sequence: Synthetic oligonucleotide
acgcagcaaaguuggccac

SEQ ID NO: 1033686 - RNA, 19 nt, Artificial Sequence
  Description of Artificial Sequence: Synthetic oligonucleotide
cacacacacacauauauuu

SEQ ID NO: 1033687 - RNA, 19 nt, Artificial Sequence
  Description of Artificial Sequence: Synthetic oligonucleotide
ggcuuaaaauugucauuag

SEQ ID NO: 1033688 - RNA, 19 nt, Artificial Sequence
  Description of Artificial Sequence: Synthetic oligonucleotide
cacaugagaugaccucuag

SEQ ID NO: 1033689 - RNA, 19 nt, Artificial Sequence
  Description of Artificial Sequence: Synthetic oligonucleotide
aaacucccuccaaugaaaa

SEQ ID NO: 1033690 - RNA, 19 nt, Artificial Sequence
  Description of Artificial Sequence: Synthetic oligonucleotide
augaaugaccauaacugua

SEQ ID NO: 1033691 - RNA, 19 nt, Artificial Sequence
  Description of Artificial Sequence: Synthetic oligonucleotide
cacuuaacaauuauagguu

SEQ ID NO: 1033692 - RNA, 19 nt, Artificial Sequence
  Description of Artificial Sequence: Synthetic oligonucleotide
uagagcagauuguuauaua

SEQ ID NO: 1033693 - RNA, 19 nt, Artificial Sequence
  Description of Artificial Sequence: Synthetic oligonucleotide
ccuugaccugcucucaugg

SEQ ID NO: 1033694 - RNA, 19 nt, Artificial Sequence
  Description of Artificial Sequence: Synthetic oligonucleotide
uuagugcauuuagauuucu

SEQ ID NO: 1033695 - RNA, 19 nt, Artificial Sequence
  Description of Artificial Sequence: Synthetic oligonucleotide
caagaacgcugagagcgcc

SEQ ID NO: 1033696 - RNA, 19 nt, Artificial Sequence
  Description of Artificial Sequence: Synthetic oligonucleotide
ugucgagguccuaccacaa

SEQ ID NO: 1033697 - RNA, 19 nt, Artificial Sequence
  Description of Artificial Sequence: Synthetic oligonucleotide
accuugaccugcucucaug

SEQ ID NO: 1033698 - RNA, 19 nt, Artificial Sequence
  Description of Artificial Sequence: Synthetic oligonucleotide
cugagagcgccuagcggag

SEQ ID NO: 1033699 - RNA, 19 nt, Artificial Sequence
  Description of Artificial Sequence: Synthetic oligonucleotide
uuuccacgccccaggcuca

SEQ ID NO: 1033700 - RNA, 19 nt, Artificial Sequence
  Description of Artificial Sequence: Synthetic oligonucleotide
agguccuaccacaaagaug

SEQ ID NO: 1033701 - RNA, 19 nt, Artificial Sequence
  Description of Artificial Sequence: Synthetic oligonucleotide
cugaacaagccagaacuga

SEQ ID NO: 1033702 - RNA, 19 nt, Artificial Sequence
  Description of Artificial Sequence: Synthetic oligonucleotide
uuggaaccacacacacaca

SEQ ID NO: 1033703 - RNA, 19 nt, Artificial Sequence
  Description of Artificial Sequence: Synthetic oligonucleotide
acccuagaauacuuagcaa

SEQ ID NO: 1033704 - RNA, 19 nt, Artificial Sequence
  Description of Artificial Sequence: Synthetic oligonucleotide
gguaauuaaucuguguacu

SEQ ID NO: 1033705 - RNA, 19 nt, Artificial Sequence
  Description of Artificial Sequence: Synthetic oligonucleotide
ggccaucaaauucgagugg

SEQ ID NO: 1033706 - RNA, 19 nt, Artificial Sequence
  Description of Artificial Sequence: Synthetic oligonucleotide
cauuauuugaggacaguuu

SEQ ID NO: 1033707 - RNA, 19 nt, Artificial Sequence
  Description of Artificial Sequence: Synthetic oligonucleotide
uagccaaccccaagaccga

SEQ ID NO: 1033708 - RNA, 19 nt, Artificial Sequence
  Description of Artificial Sequence: Synthetic oligonucleotide
cauacgcagcaaaguuggc

SEQ ID NO: 1033709 - RNA, 19 nt, Artificial Sequence
  Description of Artificial Sequence: Synthetic oligonucleotide
uggcacuuacaagaacgcu

SEQ ID NO: 1033710 - RNA, 19 nt, Artificial Sequence
  Description of Artificial Sequence: Synthetic oligonucleotide
gaccucuagucacuaugga

SEQ ID NO: 1033711 - RNA, 19 nt, Artificial Sequence
  Description of Artificial Sequence: Synthetic oligonucleotide
cuuaguauggugagggauu

SEQ ID NO: 1033712 - RNA, 19 nt, Artificial Sequence
  Description of Artificial Sequence: Synthetic oligonucleotide
cuagaaagacugccauuca

SEQ ID NO: 1033713 - RNA, 19 nt, Artificial Sequence
  Description of Artificial Sequence: Synthetic oligonucleotide
  modified_base (9)..(9): a, c, u, g, unknown or other
gggaaaccngauguuuggg

SEQ ID NO: 1033714 - RNA, 19 nt, Artificial Sequence
  Description of Artificial Sequence: Synthetic oligonucleotide
acgggagaugguaucacca

SEQ ID NO: 1033715 - RNA, 19 nt, Artificial Sequence
  Description of Artificial Sequence: Synthetic oligonucleotide
cauauaccgaaauguccaa

SEQ ID NO: 1033716 - RNA, 19 nt, Artificial Sequence
  Description of Artificial Sequence: Synthetic oligonucleotide
agcuaccauuguuuaaaua

SEQ ID NO: 1033717 - RNA, 19 nt, Artificial Sequence
  Description of Artificial Sequence: Synthetic oligonucleotide
accauaacuguagacccua

SEQ ID NO: 1033718 - RNA, 19 nt, Artificial Sequence
  Description of Artificial Sequence: Synthetic oligonucleotide
uagcggagucaccagugua

SEQ ID NO: 1033719 - RNA, 19 nt, Artificial Sequence
  Description of Artificial Sequence: Synthetic oligonucleotide
cagagcccgguuuagguaa

SEQ ID NO: 1033720 - RNA, 19 nt, Artificial Sequence
  Description of Artificial Sequence: Synthetic oligonucleotide
accuuaguauggugaggga

SEQ ID NO: 1033721 - RNA, 19 nt, Artificial Sequence
  Description of Artificial Sequence: Synthetic oligonucleotide
agcucacaugagaugaccu

SEQ ID NO: 1033722 - RNA, 19 nt, Artificial Sequence
  Description of Artificial Sequence: Synthetic oligonucleotide
ggucauagccaaccccaag

SEQ ID NO: 1033723 - RNA, 19 nt, Artificial Sequence
  Description of Artificial Sequence: Synthetic oligonucleotide
ucuagucacuauggacaca

SEQ ID NO: 1033724 - RNA, 19 nt, Artificial Sequence
  Description of Artificial Sequence: Synthetic oligonucleotide
ggguaaaccuucuucguua

SEQ ID NO: 1033725 - RNA, 19 nt, Artificial Sequence
  Description of Artificial Sequence: Synthetic oligonucleotide
caacaggcauaucuugcca

SEQ ID NO: 1033726 - RNA, 19 nt, Artificial Sequence
  Description of Artificial Sequence: Synthetic oligonucleotide
acuauggacacuggugcuu

SEQ ID NO: 1033727 - RNA, 19 nt, Artificial Sequence
  Description of Artificial Sequence: Synthetic oligonucleotide
acaaggcuaagcagcagaa

SEQ ID NO: 1033728 - RNA, 19 nt, Artificial Sequence
  Description of Artificial Sequence: Synthetic oligonucleotide
caugaacauauaccgaaau

SEQ ID NO: 1033729 - RNA, 19 nt, Artificial Sequence
  Description of Artificial Sequence: Synthetic oligonucleotide
ucuagucacuauggacacu

SEQ ID NO: 1033730 - RNA, 19 nt, Artificial Sequence
  Description of Artificial Sequence: Synthetic oligonucleotide
cuggaucaccuaacuuaug

SEQ ID NO: 1033731 - RNA, 19 nt, Artificial Sequence
  Description of Artificial Sequence: Synthetic oligonucleotide
gcacuuacaagaacgcuga

SEQ ID NO: 1033732 - RNA, 19 nt, Artificial Sequence
  Description of Artificial Sequence: Synthetic oligonucleotide
aagaacgcugagagcgccu

SEQ ID NO: 1033733 - RNA, 19 nt, Artificial Sequence
  Description of Artificial Sequence: Synthetic oligonucleotide
ucaccaccugagaauuauu

SEQ ID NO: 1033734 - RNA, 19 nt, Artificial Sequence
  Description of Artificial Sequence: Synthetic oligonucleotide
gagguccuaccacaaagau

SEQ ID NO: 1033735 - RNA, 19 nt, Artificial Sequence
  Description of Artificial Sequence: Synthetic oligonucleotide
agccacucaaagucccaau

SEQ ID NO: 1033736 - RNA, 19 nt, Artificial Sequence
  Description of Artificial Sequence: Synthetic oligonucleotide
ccuagcggagucaccagug

SEQ ID NO: 1033737 - RNA, 19 nt, Artificial Sequence
  Description of Artificial Sequence: Synthetic oligonucleotide
  modified_base (8)..(8): a, c, u, g, unknown or other
ggaaaccngauguuugggu

SEQ ID NO: 1033738 - RNA, 19 nt, Artificial Sequence
  Description of Artificial Sequence: Synthetic oligonucleotide
ccaagaccgauauaaaagu

SEQ ID NO: 1033739 - RNA, 19 nt, Artificial Sequence
  Description of Artificial Sequence: Synthetic oligonucleotide
cuugaccugcucucaugga

SEQ ID NO: 1033740 - RNA, 19 nt, Artificial Sequence
  Description of Artificial Sequence: Synthetic oligonucleotide
uaguauggugagggauuga

SEQ ID NO: 1033741 - RNA, 19 nt, Artificial Sequence
  Description of Artificial Sequence: Synthetic oligonucleotide
cgcauacgcagcaaaguug

SEQ ID NO: 1033742 - RNA, 19 nt, Artificial Sequence
  Description of Artificial Sequence: Synthetic oligonucleotide
cuagucguaaaagaccuuu

SEQ ID NO: 1033743 - RNA, 19 nt, Artificial Sequence
  Description of Artificial Sequence: Synthetic oligonucleotide
gaaguaccucuagucacua

SEQ ID NO: 1033744 - RNA, 19 nt, Artificial Sequence
  Description of Artificial Sequence: Synthetic oligonucleotide
ggcuagucguaaaagaccu

SEQ ID NO: 1033745 - RNA, 19 nt, Artificial Sequence
  Description of Artificial Sequence: Synthetic oligonucleotide
aaccacacacacacauaua

SEQ ID NO: 1033746 - RNA, 19 nt, Artificial Sequence
  Description of Artificial Sequence: Synthetic oligonucleotide
gcagauuguuauauacaca

SEQ ID NO: 1033747 - RNA, 19 nt, Artificial Sequence
  Description of Artificial Sequence: Synthetic oligonucleotide
cuaccacaaagaugaauau

SEQ ID NO: 1033748 - RNA, 19 nt, Artificial Sequence
  Description of Artificial Sequence: Synthetic oligonucleotide
cuuuucuggcuagucguaa

SEQ ID NO: 1033749 - RNA, 19 nt, Artificial Sequence
  Description of Artificial Sequence: Synthetic oligonucleotide
cucauuucguuuguuacuu

SEQ ID NO: 1033750 - RNA, 19 nt, Artificial Sequence
  Description of Artificial Sequence: Synthetic oligonucleotide
guagacccuagaauacuua

SEQ ID NO: 1033751 - RNA, 19 nt, Artificial Sequence
  Description of Artificial Sequence: Synthetic oligonucleotide
ccacucaaagucccaauga

SEQ ID NO: 1033752 - RNA, 19 nt, Artificial Sequence
  Description of Artificial Sequence: Synthetic oligonucleotide
agaacgcugagagcgccua

SEQ ID NO: 1033753 - RNA, 19 nt, Artificial Sequence
  Description of Artificial Sequence: Synthetic oligonucleotide
gcuuuccaaaaggaggcca

SEQ ID NO: 1033754 - RNA, 19 nt, Artificial Sequence
  Description of Artificial Sequence: Synthetic oligonucleotide
agcgccuagcggagucacc

SEQ ID NO: 1033755 - RNA, 19 nt, Artificial Sequence
  Description of Artificial Sequence: Synthetic oligonucleotide
cccaugaagauuaagucuu

SEQ ID NO: 1033756 - RNA, 19 nt, Artificial Sequence
  Description of Artificial Sequence: Synthetic oligonucleotide
uuggagcaugaaugaccau

SEQ ID NO: 1033757 - RNA, 19 nt, Artificial Sequence
  Description of Artificial Sequence: Synthetic oligonucleotide
caccaccugagaauuauuu

SEQ ID NO: 1033758 - RNA, 19 nt, Artificial Sequence
  Description of Artificial Sequence: Synthetic oligonucleotide
ccauaacuguagacccuag

SEQ ID NO: 1033759 - RNA, 19 nt, Artificial Sequence
  Description of Artificial Sequence: Synthetic oligonucleotide
  modified_base (2)..(2): a, c, u, g, unknown or other
cngauguuugggugacaaa

SEQ ID NO: 1033760 - RNA, 19 nt, Artificial Sequence
  Description of Artificial Sequence: Synthetic oligonucleotide
gaccauaacuguagacccu

SEQ ID NO: 1033761 - RNA, 19 nt, Artificial Sequence
  Description of Artificial Sequence: Synthetic oligonucleotide
agaugaccucuagucacua

SEQ ID NO: 1033762 - RNA, 19 nt, Artificial Sequence
  Description of Artificial Sequence: Synthetic oligonucleotide
gaugaccucuagucacuau

SEQ ID NO: 1033763 - RNA, 19 nt, Artificial Sequence
  Description of Artificial Sequence: Synthetic oligonucleotide
gagcgccuagcggagucac

SEQ ID NO: 1033764 - RNA, 19 nt, Artificial Sequence
  Description of Artificial Sequence: Synthetic oligonucleotide
ugagagcgccuagcggagu

SEQ ID NO: 1033765 - RNA, 19 nt, Artificial Sequence
  Description of Artificial Sequence: Synthetic oligonucleotide
gaccgauauaaaagucaua

SEQ ID NO: 1033766 - RNA, 19 nt, Artificial Sequence
  Description of Artificial Sequence: Synthetic oligonucleotide
ccuuuggagcaugaaugac

SEQ ID NO: 1033767 - RNA, 19 nt, Artificial Sequence
  Description of Artificial Sequence: Synthetic oligonucleotide
cgggagaugguaucaccag

SEQ ID NO: 1033768 - RNA, 19 nt, Artificial Sequence
  Description of Artificial Sequence: Synthetic oligonucleotide
cacuauggacacuggugcu

SEQ ID NO: 1033769 - RNA, 19 nt, Artificial Sequence
  Description of Artificial Sequence: Synthetic oligonucleotide
gucgagguccuaccacaaa

SEQ ID NO: 1033770 - RNA, 19 nt, Artificial Sequence
  Description of Artificial Sequence: Synthetic oligonucleotide
agagcgccuagcggaguca

SEQ ID NO: 1033771 - RNA, 19 nt, Artificial Sequence
  Description of Artificial Sequence: Synthetic oligonucleotide
gguaaaccuucuucguuau

SEQ ID NO: 1033772 - RNA, 19 nt, Artificial Sequence
  Description of Artificial Sequence: Synthetic oligonucleotide
agacuaaaacugacaucuu

SEQ ID NO: 1033773 - RNA, 19 nt, Artificial Sequence
  Description of Artificial Sequence: Synthetic oligonucleotide
cacgccccaggcucauuuc

SEQ ID NO: 1033774 - RNA, 19 nt, Artificial Sequence
  Description of Artificial Sequence: Synthetic oligonucleotide
gcggagucaccaguguagc

SEQ ID NO: 1033775 - RNA, 19 nt, Artificial Sequence
  Description of Artificial Sequence: Synthetic oligonucleotide
gcccgguuuagguaauuaa

SEQ ID NO: 1033776 - RNA, 19 nt, Artificial Sequence
  Description of Artificial Sequence: Synthetic oligonucleotide
ccccaagaccgauauaaaa

SEQ ID NO: 1033777 - RNA, 19 nt, Artificial Sequence
  Description of Artificial Sequence: Synthetic oligonucleotide
agcccgguuuagguaauua

SEQ ID NO: 1033778 - RNA, 19 nt, Artificial Sequence
  Description of Artificial Sequence: Synthetic oligonucleotide
  modified_base (3)..(3): a, c, u, g, unknown or other
ccngauguuugggugacaa

SEQ ID NO: 1033779 - RNA, 19 nt, Artificial Sequence
  Description of Artificial Sequence: Synthetic oligonucleotide
cuagcggagucaccagugu

SEQ ID NO: 1033780 - RNA, 19 nt, Artificial Sequence
  Description of Artificial Sequence: Synthetic oligonucleotide
accccaagaccgauauaaa

SEQ ID NO: 1033781 - RNA, 19 nt, Artificial Sequence
  Description of Artificial Sequence: Synthetic oligonucleotide
  modified_base (4)..(4): a, c, u, g, unknown or other
accngauguuugggugaca

SEQ ID NO: 1033782 - RNA, 19 nt, Artificial Sequence
  Description of Artificial Sequence: Synthetic oligonucleotide
aucccacaggguaaaccuu

SEQ ID NO: 1033783 - RNA, 19 nt, Artificial Sequence
  Description of Artificial Sequence: Synthetic oligonucleotide
agccauguacugaggucau

SEQ ID NO: 1033784 - RNA, 19 nt, Artificial Sequence
  Description of Artificial Sequence: Synthetic oligonucleotide
ggaaccacacacacacaua

SEQ ID NO: 1033785 - RNA, 19 nt, Artificial Sequence
  Description of Artificial Sequence: Synthetic oligonucleotide
ccgaaauguccaagagcuc

SEQ ID NO: 1033786 - RNA, 19 nt, Artificial Sequence
  Description of Artificial Sequence: Synthetic oligonucleotide
cccaccacaaccauucuuu

SEQ ID NO: 1033787 - RNA, 19 nt, Artificial Sequence
  Description of Artificial Sequence: Synthetic oligonucleotide
caucaucaacaggcauauc

SEQ ID NO: 1033788 - RNA, 19 nt, Artificial Sequence
  Description of Artificial Sequence: Synthetic oligonucleotide
guguucaaucccacagggu

SEQ ID NO: 1033789 - RNA, 19 nt, Artificial Sequence
  Description of Artificial Sequence: Synthetic oligonucleotide
cgagguccuaccacaaaga

SEQ ID NO: 1033790 - RNA, 19 nt, Artificial Sequence
  Description of Artificial Sequence: Synthetic oligonucleotide
cccgguuuagguaauuaau

SEQ ID NO: 1033791 - RNA, 19 nt, Artificial Sequence
  Description of Artificial Sequence: Synthetic oligonucleotide
agccaaccccaagaccgau

SEQ ID NO: 1033792 - RNA, 19 nt, Artificial Sequence
  Description of Artificial Sequence: Synthetic oligonucleotide
ccaugucgagguccuacca

SEQ ID NO: 1033793 - RNA, 19 nt, Artificial Sequence
  Description of Artificial Sequence: Synthetic oligonucleotide
agccagaacugaaguugua

SEQ ID NO: 1033794 - RNA, 19 nt, Artificial Sequence
  Description of Artificial Sequence: Synthetic oligonucleotide
agagcccgguuuagguaau

SEQ ID NO: 1033795 - RNA, 19 nt, Artificial Sequence
  Description of Artificial Sequence: Synthetic oligonucleotide
ccuuuucuggcuagucgua

SEQ ID NO: 1033796 - RNA, 19 nt, Artificial Sequence
  Description of Artificial Sequence: Synthetic oligonucleotide
ccaaccccaagaccgauau

SEQ ID NO: 1033797 - RNA, 19 nt, Artificial Sequence
  Description of Artificial Sequence: Synthetic oligonucleotide
ccuuaguauggugagggau

SEQ ID NO: 1033798 - RNA, 19 nt, Artificial Sequence
  Description of Artificial Sequence: Synthetic oligonucleotide
gcaaacgcauacgcagcaa

SEQ ID NO: 1033799 - RNA, 19 nt, Artificial Sequence
  Description of Artificial Sequence: Synthetic oligonucleotide
ccgauauaaaagucauauu

SEQ ID NO: 1033800 - RNA, 19 nt, Artificial Sequence
  Description of Artificial Sequence: Synthetic oligonucleotide
gccuagcggagucaccagu

SEQ ID NO: 1033801 - RNA, 19 nt, Artificial Sequence
  Description of Artificial Sequence: Synthetic oligonucleotide
caaccccaagaccgauaua

SEQ ID NO: 1033802 - RNA, 19 nt, Artificial Sequence
  Description of Artificial Sequence: Synthetic oligonucleotide
ccacacacacacauauauu

SEQ ID NO: 1033803 - RNA, 19 nt, Artificial Sequence
  Description of Artificial Sequence: Synthetic oligonucleotide
cgccuagcggagucaccag

SEQ ID NO: 1033804 - RNA, 19 nt, Artificial Sequence
  Description of Artificial Sequence: Synthetic oligonucleotide
uccacgccccaggcucauu

SEQ ID NO: 1033805 - RNA, 19 nt, Artificial Sequence
  Description of Artificial Sequence: Synthetic oligonucleotide
gccaaccccaagaccgaua

SEQ ID NO: 1033806 - RNA, 19 nt, Artificial Sequence
  Description of Artificial Sequence: Synthetic oligonucleotide
gcuagucguaaaagaccuu

SEQ ID NO: 1033807 - RNA, 19 nt, Artificial Sequence
  Description of Artificial Sequence: Synthetic oligonucleotide
gagcccgguuuagguaauu

SEQ ID NO: 1033808 - RNA, 19 nt, Artificial Sequence
  Description of Artificial Sequence: Synthetic oligonucleotide
gccauguacugaggucauu

SEQ ID NO: 1033809 - RNA, 19 nt, Artificial Sequence
  Description of Artificial Sequence: Synthetic oligonucleotide
aagaagauuagccagauca

SEQ ID NO: 1033810 - RNA, 19 nt, Artificial Sequence
  Description of Artificial Sequence: Synthetic oligonucleotide
agagauaccacuuggaugg

SEQ ID NO: 1033811 - RNA, 19 nt, Artificial Sequence
  Description of Artificial Sequence: Synthetic oligonucleotide
aauaauacgugaauagucc

SEQ ID NO: 1033812 - RNA, 19 nt, Artificial Sequence
  Description of Artificial Sequence: Synthetic oligonucleotide
aagauaauggaguaugaug

SEQ ID NO: 1033813 - RNA, 19 nt, Artificial Sequence
  Description of Artificial Sequence: Synthetic oligonucleotide
augagugucacccacacag

SEQ ID NO: 1033814 - RNA, 19 nt, Artificial Sequence
  Description of Artificial Sequence: Synthetic oligonucleotide
acgugaauaguccaugucc

SEQ ID NO: 1033815 - RNA, 19 nt, Artificial Sequence
  Description of Artificial Sequence: Synthetic oligonucleotide
aacagcuuuggccuugacc

SEQ ID NO: 1033816 - RNA, 19 nt, Artificial Sequence
  Description of Artificial Sequence: Synthetic oligonucleotide
guucauaacacaaagucgg

SEQ ID NO: 1033817 - RNA, 19 nt, Artificial Sequence
  Description of Artificial Sequence: Synthetic oligonucleotide
aauaaucagacauggggca

SEQ ID NO: 1033818 - RNA, 19 nt, Artificial Sequence
  Description of Artificial Sequence: Synthetic oligonucleotide
uaagguuuuagacagcacu

SEQ ID NO: 1033819 - RNA, 19 nt, Artificial Sequence
  Description of Artificial Sequence: Synthetic oligonucleotide
aaacagagauaccacuugg

SEQ ID NO: 1033820 - RNA, 19 nt, Artificial Sequence
  Description of Artificial Sequence: Synthetic oligonucleotide
uuauagaagugucugcugc

SEQ ID NO: 1033821 - RNA, 19 nt, Artificial Sequence
  Description of Artificial Sequence: Synthetic oligonucleotide
gcaauaaucagacaugggg

SEQ ID NO: 1033822 - RNA, 19 nt, Artificial Sequence
  Description of Artificial Sequence: Synthetic oligonucleotide
caauaaucagacauggggc

SEQ ID NO: 1033823 - RNA, 19 nt, Artificial Sequence
  Description of Artificial Sequence: Synthetic oligonucleotide
cucaauaauacgugaauag

SEQ ID NO: 1033824 - RNA, 19 nt, Artificial Sequence
  Description of Artificial Sequence: Synthetic oligonucleotide
auuacucaggaucagcauc

SEQ ID NO: 1033825 - RNA, 19 nt, Artificial Sequence
  Description of Artificial Sequence: Synthetic oligonucleotide
aaauaccccaguccuggcc

SEQ ID NO: 1033826 - RNA, 19 nt, Artificial Sequence
  Description of Artificial Sequence: Synthetic oligonucleotide
aauaaccuggcauuacuca

SEQ ID NO: 1033827 - RNA, 19 nt, Artificial Sequence
  Description of Artificial Sequence: Synthetic oligonucleotide
gauggacucaaccagcaag

SEQ ID NO: 1033828 - RNA, 19 nt, Artificial Sequence
  Description of Artificial Sequence: Synthetic oligonucleotide
uagucgugaacauacauga

SEQ ID NO: 1033829 - RNA, 19 nt, Artificial Sequence
  Description of Artificial Sequence: Synthetic oligonucleotide
aacucgucguagcagaaag

SEQ ID NO: 1033830 - RNA, 19 nt, Artificial Sequence
  Description of Artificial Sequence: Synthetic oligonucleotide
uggaguucuggauaguagg

SEQ ID NO: 1033831 - RNA, 19 nt, Artificial Sequence
  Description of Artificial Sequence: Synthetic oligonucleotide
aaacucgcggucuccaaac

SEQ ID NO: 1033832 - RNA, 19 nt, Artificial Sequence
  Description of Artificial Sequence: Synthetic oligonucleotide
caauaauacgugaauaguc

SEQ ID NO: 1033833 - RNA, 19 nt, Artificial Sequence
  Description of Artificial Sequence: Synthetic oligonucleotide
guaguagagaucucgguag

SEQ ID NO: 1033834 - RNA, 19 nt, Artificial Sequence
  Description of Artificial Sequence: Synthetic oligonucleotide
uaauggaguaugaugccag

SEQ ID NO: 1033835 - RNA, 19 nt, Artificial Sequence
  Description of Artificial Sequence: Synthetic oligonucleotide
uuuaagguuuuagacagca

SEQ ID NO: 1033836 - RNA, 19 nt, Artificial Sequence
  Description of Artificial Sequence: Synthetic oligonucleotide
uuaaccacauguagcagca

SEQ ID NO: 1033837 - RNA, 19 nt, Artificial Sequence
  Description of Artificial Sequence: Synthetic oligonucleotide
agcaaaggcuuauagaagu

SEQ ID NO: 1033838 - RNA, 19 nt, Artificial Sequence
  Description of Artificial Sequence: Synthetic oligonucleotide
ugucagggcacccacugcg

SEQ ID NO: 1033839 - RNA, 19 nt, Artificial Sequence
  Description of Artificial Sequence: Synthetic oligonucleotide
ucucaaucugaaaugcagc

SEQ ID NO: 1033840 - RNA, 19 nt, Artificial Sequence
  Description of Artificial Sequence: Synthetic oligonucleotide
acgauggcaccucagcucc

SEQ ID NO: 1033841 - RNA, 19 nt, Artificial Sequence
  Description of Artificial Sequence: Synthetic oligonucleotide
aaaggcuuauagaaguguc

SEQ ID NO: 1033842 - RNA, 19 nt, Artificial Sequence
  Description of Artificial Sequence: Synthetic oligonucleotide
uuaugcacagggauauucc

SEQ ID NO: 1033843 - RNA, 19 nt, Artificial Sequence
  Description of Artificial Sequence: Synthetic oligonucleotide
uuauacaccagcuggacuu

SEQ ID NO: 1033844 - RNA, 19 nt, Artificial Sequence
  Description of Artificial Sequence: Synthetic oligonucleotide
agaaauaccccaguccugg

SEQ ID NO: 1033845 - RNA, 19 nt, Artificial Sequence
  Description of Artificial Sequence: Synthetic oligonucleotide
gaaacagagauaccacuug

SEQ ID NO: 1033846 - RNA, 19 nt, Artificial Sequence
  Description of Artificial Sequence: Synthetic oligonucleotide
aauacgugaauaguccaug

SEQ ID NO: 1033847 - RNA, 19 nt, Artificial Sequence
  Description of Artificial Sequence: Synthetic oligonucleotide
ucccgauaggaaaagagcu

SEQ ID NO: 1033848 - RNA, 19 nt, Artificial Sequence
  Description of Artificial Sequence: Synthetic oligonucleotide
auaacacaaagucggagca

SEQ ID NO: 1033849 - RNA, 19 nt, Artificial Sequence
  Description of Artificial Sequence: Synthetic oligonucleotide
guuaaccacauguagcagc

SEQ ID NO: 1033850 - RNA, 19 nt, Artificial Sequence
  Description of Artificial Sequence: Synthetic oligonucleotide
augggaucuaccaggaugc

SEQ ID NO: 1033851 - RNA, 19 nt, Artificial Sequence
  Description of Artificial Sequence: Synthetic oligonucleotide
uggauaguagggaccaucc

SEQ ID NO: 1033852 - RNA, 19 nt, Artificial Sequence
  Description of Artificial Sequence: Synthetic oligonucleotide
agguuaaccacauguagca

SEQ ID NO: 1033853 - RNA, 19 nt, Artificial Sequence
  Description of Artificial Sequence: Synthetic oligonucleotide
gaugcaauaaucagacaug

SEQ ID NO: 1033854 - RNA, 19 nt, Artificial Sequence
  Description of Artificial Sequence: Synthetic oligonucleotide
uucccuuggaagaagcggc

SEQ ID NO: 1033855 - RNA, 19 nt, Artificial Sequence
  Description of Artificial Sequence: Synthetic oligonucleotide
agaucagaugguugggaac

SEQ ID NO: 1033856 - RNA, 19 nt, Artificial Sequence
  Description of Artificial Sequence: Synthetic oligonucleotide
cagguuaaccacauguagc

SEQ ID NO: 1033857 - RNA, 19 nt, Artificial Sequence
  Description of Artificial Sequence: Synthetic oligonucleotide
caaucugaaaugcagccac

SEQ ID NO: 1033858 - RNA, 19 nt, Artificial Sequence
  Description of Artificial Sequence: Synthetic oligonucleotide
aagagcaucucaagaacuc

SEQ ID NO: 1033859 - RNA, 19 nt, Artificial Sequence
  Description of Artificial Sequence: Synthetic oligonucleotide
aagagacgcucaauaauac

SEQ ID NO: 1033860 - RNA, 19 nt, Artificial Sequence
  Description of Artificial Sequence: Synthetic oligonucleotide
agagacgcucaauaauacg

SEQ ID NO: 1033861 - RNA, 19 nt, Artificial Sequence
  Description of Artificial Sequence: Synthetic oligonucleotide
aggaagauaauggaguaug

SEQ ID NO: 1033862 - RNA, 19 nt, Artificial Sequence
  Description of Artificial Sequence: Synthetic oligonucleotide
auaauacgugaauagucca

SEQ ID NO: 1033863 - RNA, 19 nt, Artificial Sequence
  Description of Artificial Sequence: Synthetic oligonucleotide
acuuuauugaugcccucag

SEQ ID NO: 1033864 - RNA, 19 nt, Artificial Sequence
  Description of Artificial Sequence: Synthetic oligonucleotide
guaguagucgugaacauac

SEQ ID NO: 1033865 - RNA, 19 nt, Artificial Sequence
  Description of Artificial Sequence: Synthetic oligonucleotide
guagggguccuucagaaac

SEQ ID NO: 1033866 - RNA, 19 nt, Artificial Sequence
  Description of Artificial Sequence: Synthetic oligonucleotide
gaacaaagauucuugcaga

SEQ ID NO: 1033867 - RNA, 19 nt, Artificial Sequence
  Description of Artificial Sequence: Synthetic oligonucleotide
aacauacgcaggggaaugc

SEQ ID NO: 1033868 - RNA, 19 nt, Artificial Sequence
  Description of Artificial Sequence: Synthetic oligonucleotide
augaccgucgcccacguug

SEQ ID NO: 1033869 - RNA, 19 nt, Artificial Sequence
  Description of Artificial Sequence: Synthetic oligonucleotide
aaguaguagagaucucggu

SEQ ID NO: 1033870 - RNA, 19 nt, Artificial Sequence
  Description of Artificial Sequence: Synthetic oligonucleotide
gauaggaaaagagcuugag

SEQ ID NO: 1033871 - RNA, 19 nt, Artificial Sequence
  Description of Artificial Sequence: Synthetic oligonucleotide
gauucuugcagacgauggc

SEQ ID NO: 1033872 - RNA, 19 nt, Artificial Sequence
  Description of Artificial Sequence: Synthetic oligonucleotide
caucccgauaggaaaagag

SEQ ID NO: 1033873 - RNA, 19 nt, Artificial Sequence
  Description of Artificial Sequence: Synthetic oligonucleotide
cucgucguagcagaaagcg

SEQ ID NO: 1033874 - RNA, 19 nt, Artificial Sequence
  Description of Artificial Sequence: Synthetic oligonucleotide
uguuggaucagccccacuu

SEQ ID NO: 1033875 - RNA, 19 nt, Artificial Sequence
  Description of Artificial Sequence: Synthetic oligonucleotide
aguaguagagaucucggua

SEQ ID NO: 1033876 - RNA, 19 nt, Artificial Sequence
  Description of Artificial Sequence: Synthetic oligonucleotide
uauagaagugucugcugca

SEQ ID NO: 1033877 - RNA, 19 nt, Artificial Sequence
  Description of Artificial Sequence: Synthetic oligonucleotide
ucggagcaaaggcuuauag

SEQ ID NO: 1033878 - RNA, 19 nt, Artificial Sequence
  Description of Artificial Sequence: Synthetic oligonucleotide
cuuggcaguaucucaggcc

SEQ ID NO: 1033879 - RNA, 19 nt, Artificial Sequence
  Description of Artificial Sequence: Synthetic oligonucleotide
aagauucuugcagacgaug

SEQ ID NO: 1033880 - RNA, 19 nt, Artificial Sequence
  Description of Artificial Sequence: Synthetic oligonucleotide
cagagauaccacuuggaug

SEQ ID NO: 1033881 - RNA, 19 nt, Artificial Sequence
  Description of Artificial Sequence: Synthetic oligonucleotide
agcaucaccacacaccaau

SEQ ID NO: 1033882 - RNA, 19 nt, Artificial Sequence
  Description of Artificial Sequence: Synthetic oligonucleotide
acgguaauugcugaaacca

SEQ ID NO: 1033883 - RNA, 19 nt, Artificial Sequence
  Description of Artificial Sequence: Synthetic oligonucleotide
uagagaucucgguaguuca

SEQ ID NO: 1033884 - RNA, 19 nt, Artificial Sequence
  Description of Artificial Sequence: Synthetic oligonucleotide
cacuagguacucauggaag

SEQ ID NO: 1033885 - RNA, 19 nt, Artificial Sequence
  Description of Artificial Sequence: Synthetic oligonucleotide
gaugccacgguaauugcug

SEQ ID NO: 1033886 - RNA, 19 nt, Artificial Sequence
  Description of Artificial Sequence: Synthetic oligonucleotide
gggaucauaguugagcacg

SEQ ID NO: 1033887 - RNA, 19 nt, Artificial Sequence
  Description of Artificial Sequence: Synthetic oligonucleotide
aaugcccagaggcggaaca

SEQ ID NO: 1033888 - RNA, 19 nt, Artificial Sequence
  Description of Artificial Sequence: Synthetic oligonucleotide
aauggaguaugaugccaga

SEQ ID NO: 1033889 - RNA, 19 nt, Artificial Sequence
  Description of Artificial Sequence: Synthetic oligonucleotide
uccgcggucgcccauggcc

SEQ ID NO: 1033890 - RNA, 19 nt, Artificial Sequence
  Description of Artificial Sequence: Synthetic oligonucleotide
aacacaaagucggagcaaa

SEQ ID NO: 1033891 - RNA, 19 nt, Artificial Sequence
  Description of Artificial Sequence: Synthetic oligonucleotide
accgaggaaaguugaguuc

SEQ ID NO: 1033892 - RNA, 19 nt, Artificial Sequence
  Description of Artificial Sequence: Synthetic oligonucleotide
caccaauucaggaugccac

SEQ ID NO: 1033893 - RNA, 19 nt, Artificial Sequence
  Description of Artificial Sequence: Synthetic oligonucleotide
uucgcuggcggcaccacag

SEQ ID NO: 1033894 - RNA, 19 nt, Artificial Sequence
  Description of Artificial Sequence: Synthetic oligonucleotide
acagagauaccacuuggau

SEQ ID NO: 1033895 - RNA, 19 nt, Artificial Sequence
  Description of Artificial Sequence: Synthetic oligonucleotide
uugaaggguuucauggagu

SEQ ID NO: 1033896 - RNA, 19 nt, Artificial Sequence
  Description of Artificial Sequence: Synthetic oligonucleotide
uccacuguuggaucagccc

SEQ ID NO: 1033897 - RNA, 19 nt, Artificial Sequence
  Description of Artificial Sequence: Synthetic oligonucleotide
aggaugccauacuugauga

SEQ ID NO: 1033898 - RNA, 19 nt, Artificial Sequence
  Description of Artificial Sequence: Synthetic oligonucleotide
cuuggaugggaucuaccag

SEQ ID NO: 1033899 - RNA, 19 nt, Artificial Sequence
  Description of Artificial Sequence: Synthetic oligonucleotide
guagucgugaacauacaug

SEQ ID NO: 1033900 - RNA, 19 nt, Artificial Sequence
  Description of Artificial Sequence: Synthetic oligonucleotide
caggaugccauacuugaug

SEQ ID NO: 1033901 - RNA, 19 nt, Artificial Sequence
  Description of Artificial Sequence: Synthetic oligonucleotide
agagcaaacacggaaccca

SEQ ID NO: 1033902 - RNA, 19 nt, Artificial Sequence
  Description of Artificial Sequence: Synthetic oligonucleotide
agaaagcgcuuucguauuc

SEQ ID NO: 1033903 - RNA, 19 nt, Artificial Sequence
  Description of Artificial Sequence: Synthetic oligonucleotide
ugaccgucgcccacguugg

SEQ ID NO: 1033904 - RNA, 19 nt, Artificial Sequence
  Description of Artificial Sequence: Synthetic oligonucleotide
aguaugaugccagagcaaa

SEQ ID NO: 1033905 - RNA, 19 nt, Artificial Sequence
  Description of Artificial Sequence: Synthetic oligonucleotide
cacgguaauugcugaaacc

SEQ ID NO: 1033906 - RNA, 19 nt, Artificial Sequence
  Description of Artificial Sequence: Synthetic oligonucleotide
guucccuuggaagaagcgg

SEQ ID NO: 1033907 - RNA, 19 nt, Artificial Sequence
  Description of Artificial Sequence: Synthetic oligonucleotide
aguagucgugaacauacau

SEQ ID NO: 1033908 - RNA, 19 nt, Artificial Sequence
  Description of Artificial Sequence: Synthetic oligonucleotide
gagaucucgguaguucagg

SEQ ID NO: 1033909 - RNA, 19 nt, Artificial Sequence
  Description of Artificial Sequence: Synthetic oligonucleotide
guagcagaaagcgcuuucg

SEQ ID NO: 1033910 - RNA, 19 nt, Artificial Sequence
  Description of Artificial Sequence: Synthetic oligonucleotide
uuaagguuuuagacagcac

SEQ ID NO: 1033911 - RNA, 19 nt, Artificial Sequence
  Description of Artificial Sequence: Synthetic oligonucleotide
cucccaaugaccgucgccc

SEQ ID NO: 1033912 - RNA, 19 nt, Artificial Sequence
  Description of Artificial Sequence: Synthetic oligonucleotide
ucucaagaacucgucguag

SEQ ID NO: 1033913 - RNA, 19 nt, Artificial Sequence
  Description of Artificial Sequence: Synthetic oligonucleotide
caggggaaugcucacuagg

SEQ ID NO: 1033914 - RNA, 19 nt, Artificial Sequence
  Description of Artificial Sequence: Synthetic oligonucleotide
ugaacggggacccgcgagc

SEQ ID NO: 1033915 - RNA, 19 nt, Artificial Sequence
  Description of Artificial Sequence: Synthetic oligonucleotide
guuggaugcaauaaucaga

SEQ ID NO: 1033916 - RNA, 19 nt, Artificial Sequence
  Description of Artificial Sequence: Synthetic oligonucleotide
agacucagcauuccaccag

SEQ ID NO: 1033917 - RNA, 19 nt, Artificial Sequence
  Description of Artificial Sequence: Synthetic oligonucleotide
aguccuccgacgccgagag

SEQ ID NO: 1033918 - RNA, 19 nt, Artificial Sequence
  Description of Artificial Sequence: Synthetic oligonucleotide
aggaugccacgguaauugc

SEQ ID NO: 1033919 - RNA, 19 nt, Artificial Sequence
  Description of Artificial Sequence: Synthetic oligonucleotide
aaagccaguagaagaagau

SEQ ID NO: 1033920 - RNA, 19 nt, Artificial Sequence
  Description of Artificial Sequence: Synthetic oligonucleotide
aaggcuuauagaagugucu

SEQ ID NO: 1033921 - RNA, 19 nt, Artificial Sequence
  Description of Artificial Sequence: Synthetic oligonucleotide
auaauggaguaugaugcca

SEQ ID NO: 1033922 - RNA, 19 nt, Artificial Sequence
  Description of Artificial Sequence: Synthetic oligonucleotide
gaagauuagccagaucaga

SEQ ID NO: 1033923 - RNA, 19 nt, Artificial Sequence
  Description of Artificial Sequence: Synthetic oligonucleotide
agggcacccacugcgaggc

SEQ ID NO: 1033924 - RNA, 19 nt, Artificial Sequence
  Description of Artificial Sequence: Synthetic oligonucleotide
caggaugccacgguaauug

SEQ ID NO: 1033925 - RNA, 19 nt, Artificial Sequence
  Description of Artificial Sequence: Synthetic oligonucleotide
uggacuuaggugccauccc

SEQ ID NO: 1033926 - RNA, 19 nt, Artificial Sequence
  Description of Artificial Sequence: Synthetic oligonucleotide
gaaccgccagcuucaagag

SEQ ID NO: 1033927 - RNA, 19 nt, Artificial Sequence
  Description of Artificial Sequence: Synthetic oligonucleotide
ggaguaugaugccagagca

SEQ ID NO: 1033928 - RNA, 19 nt, Artificial Sequence
  Description of Artificial Sequence: Synthetic oligonucleotide
aggcuuauagaagugucug

SEQ ID NO: 1033929 - RNA, 19 nt, Artificial Sequence
  Description of Artificial Sequence: Synthetic oligonucleotide
auaaucagacauggggcag

SEQ ID NO: 1033930 - RNA, 19 nt, Artificial Sequence
  Description of Artificial Sequence: Synthetic oligonucleotide
uacgugaauaguccauguc

SEQ ID NO: 1033931 - RNA, 19 nt, Artificial Sequence
  Description of Artificial Sequence: Synthetic oligonucleotide
aacagagauaccacuugga

SEQ ID NO: 1033932 - RNA, 19 nt, Artificial Sequence
  Description of Artificial Sequence: Synthetic oligonucleotide
ggagugugcagguagccag

SEQ ID NO: 1033933 - RNA, 19 nt, Artificial Sequence
  Description of Artificial Sequence: Synthetic oligonucleotide
ugacagacucagcauucca

SEQ ID NO: 1033934 - RNA, 19 nt, Artificial Sequence
  Description of Artificial Sequence: Synthetic oligonucleotide
ugagugucacccacacagc

SEQ ID NO: 1033935 - RNA, 19 nt, Artificial Sequence
  Description of Artificial Sequence: Synthetic oligonucleotide
gacgauggcaccucagcuc

SEQ ID NO: 1033936 - RNA, 19 nt, Artificial Sequence
  Description of Artificial Sequence: Synthetic oligonucleotide
guugagcacguaguagucg

SEQ ID NO: 1033937 - RNA, 19 nt, Artificial Sequence
  Description of Artificial Sequence: Synthetic oligonucleotide
accucagcucccaaugacc

SEQ ID NO: 1033938 - RNA, 19 nt, Artificial Sequence
  Description of Artificial Sequence: Synthetic oligonucleotide
aguugaguucauaacacaa

SEQ ID NO: 1033939 - RNA, 19 nt, Artificial Sequence
  Description of Artificial Sequence: Synthetic oligonucleotide
gaacauacgcaggggaaug

SEQ ID NO: 1033940 - RNA, 19 nt, Artificial Sequence
  Description of Artificial Sequence: Synthetic oligonucleotide
gacgcucaauaauacguga

SEQ ID NO: 1033941 - RNA, 19 nt, Artificial Sequence
  Description of Artificial Sequence: Synthetic oligonucleotide
ucgucguagcagaaagcgc

SEQ ID NO: 1033942 - RNA, 19 nt, Artificial Sequence
  Description of Artificial Sequence: Synthetic oligonucleotide
guuggaucagccccacuug

SEQ ID NO: 1033943 - RNA, 19 nt, Artificial Sequence
  Description of Artificial Sequence: Synthetic oligonucleotide
uagccagaucagaugguug

SEQ ID NO: 1033944 - RNA, 19 nt, Artificial Sequence
  Description of Artificial Sequence: Synthetic oligonucleotide
ccaaaaguaggugacagac

SEQ ID NO: 1033945 - RNA, 19 nt, Artificial Sequence
  Description of Artificial Sequence: Synthetic oligonucleotide
uggcugugaaugcccagag

SEQ ID NO: 1033946 - RNA, 19 nt, Artificial Sequence
  Description of Artificial Sequence: Synthetic oligonucleotide
agacgauggcaccucagcu

SEQ ID NO: 1033947 - RNA, 19 nt, Artificial Sequence
  Description of Artificial Sequence: Synthetic oligonucleotide
uaguagagaucucgguagu

SEQ ID NO: 1033948 - RNA, 19 nt, Artificial Sequence
  Description of Artificial Sequence: Synthetic oligonucleotide
uagcucacaguuugcugag

SEQ ID NO: 1033949 - RNA, 19 nt, Artificial Sequence
  Description of Artificial Sequence: Synthetic oligonucleotide
ggagugauggacucaacca

SEQ ID NO: 1033950 - RNA, 19 nt, Artificial Sequence
  Description of Artificial Sequence: Synthetic oligonucleotide
agccgcgucucgcaccucc

SEQ ID NO: 1033951 - RNA, 19 nt, Artificial Sequence
  Description of Artificial Sequence: Synthetic oligonucleotide
acacaccaauucaggaugc

SEQ ID NO: 1033952 - RNA, 19 nt, Artificial Sequence
  Description of Artificial Sequence: Synthetic oligonucleotide
uggauagcucacaguuugc

SEQ ID NO: 1033953 - RNA, 19 nt, Artificial Sequence
  Description of Artificial Sequence: Synthetic oligonucleotide
uaguagggaccauccacug

SEQ ID NO: 1033954 - RNA, 19 nt, Artificial Sequence
  Description of Artificial Sequence: Synthetic oligonucleotide
ugcgaggcgcuucucaauc

SEQ ID NO: 1033955 - RNA, 19 nt, Artificial Sequence
  Description of Artificial Sequence: Synthetic oligonucleotide
gagacgcucaauaauacgu

SEQ ID NO: 1033956 - RNA, 19 nt, Artificial Sequence
  Description of Artificial Sequence: Synthetic oligonucleotide
ggaugcaauaaucagacau

SEQ ID NO: 1033957 - RNA, 19 nt, Artificial Sequence
  Description of Artificial Sequence: Synthetic oligonucleotide
uggccaaccaucuguugcu

SEQ ID NO: 1033958 - RNA, 19 nt, Artificial Sequence
  Description of Artificial Sequence: Synthetic oligonucleotide
agguugacaucccgauagg

SEQ ID NO: 1033959 - RNA, 19 nt, Artificial Sequence
  Description of Artificial Sequence: Synthetic oligonucleotide
cacguaguagucgugaaca

SEQ ID NO: 1033960 - RNA, 19 nt, Artificial Sequence
  Description of Artificial Sequence: Synthetic oligonucleotide
agcacuuuauugaugcccu

SEQ ID NO: 1033961 - RNA, 19 nt, Artificial Sequence
  Description of Artificial Sequence: Synthetic oligonucleotide
gcaaacacggaacccacug

SEQ ID NO: 1033962 - RNA, 19 nt, Artificial Sequence
  Description of Artificial Sequence: Synthetic oligonucleotide
ucccuuggaagaagcggcc

SEQ ID NO: 1033963 - RNA, 19 nt, Artificial Sequence
  Description of Artificial Sequence: Synthetic oligonucleotide
aagcgcuuucguauucggg

SEQ ID NO: 1033964 - RNA, 19 nt, Artificial Sequence
  Description of Artificial Sequence: Synthetic oligonucleotide
gccagaaauaccccagucc

SEQ ID NO: 1033965 - RNA, 19 nt, Artificial Sequence
  Description of Artificial Sequence: Synthetic oligonucleotide
agggaccauccacuguugg

SEQ ID NO: 1033966 - RNA, 19 nt, Artificial Sequence
  Description of Artificial Sequence: Synthetic oligonucleotide
cuucaagagacgcucaaua

SEQ ID NO: 1033967 - RNA, 19 nt, Artificial Sequence
  Description of Artificial Sequence: Synthetic oligonucleotide
ucgcaccuccucuucggcg

SEQ ID NO: 1033968 - RNA, 19 nt, Artificial Sequence
  Description of Artificial Sequence: Synthetic oligonucleotide
auggaguaugaugccagag

SEQ ID NO: 1033969 - RNA, 19 nt, Artificial Sequence
  Description of Artificial Sequence: Synthetic oligonucleotide
ggaguucuggauaguaggg

SEQ ID NO: 1033970 - RNA, 19 nt, Artificial Sequence
  Description of Artificial Sequence: Synthetic oligonucleotide
uaguagucgugaacauaca

SEQ ID NO: 1033971 - RNA, 19 nt, Artificial Sequence
  Description of Artificial Sequence: Synthetic oligonucleotide
uuuggccuugacccuucgc

SEQ ID NO: 1033972 - RNA, 19 nt, Artificial Sequence
  Description of Artificial Sequence: Synthetic oligonucleotide
guagagaucucgguaguuc

SEQ ID NO: 1033973 - RNA, 19 nt, Artificial Sequence
  Description of Artificial Sequence: Synthetic oligonucleotide
ccagguuaaccacauguag

SEQ ID NO: 1033974 - RNA, 19 nt, Artificial Sequence
  Description of Artificial Sequence: Synthetic oligonucleotide
aucucaagaacucgucgua

SEQ ID NO: 1033975 - RNA, 19 nt, Artificial Sequence
  Description of Artificial Sequence: Synthetic oligonucleotide
aagccaguagaagaagauu

SEQ ID NO: 1033976 - RNA, 19 nt, Artificial Sequence
  Description of Artificial Sequence: Synthetic oligonucleotide
uuagccagaucagaugguu

SEQ ID NO: 1033977 - RNA, 19 nt, Artificial Sequence
  Description of Artificial Sequence: Synthetic oligonucleotide
ucccgguaaaacucgcggu

SEQ ID NO: 1033978 - RNA, 19 nt, Artificial Sequence
  Description of Artificial Sequence: Synthetic oligonucleotide
acuugaagcugggugaaaa

SEQ ID NO: 1033979 - RNA, 19 nt, Artificial Sequence
  Description of Artificial Sequence: Synthetic oligonucleotide
cuggcggcaccacagguug

SEQ ID NO: 1033980 - RNA, 19 nt, Artificial Sequence
  Description of Artificial Sequence: Synthetic oligonucleotide
aguucagguugucuggaua

SEQ ID NO: 1033981 - RNA, 19 nt, Artificial Sequence
  Description of Artificial Sequence: Synthetic oligonucleotide
aguagggaccauccacugu

SEQ ID NO: 1033982 - RNA, 19 nt, Artificial Sequence
  Description of Artificial Sequence: Synthetic oligonucleotide
agacgcucaauaauacgug

SEQ ID NO: 1033983 - RNA, 19 nt, Artificial Sequence
  Description of Artificial Sequence: Synthetic oligonucleotide
aacucgcggucuccaaacu

SEQ ID NO: 1033984 - RNA, 19 nt, Artificial Sequence
  Description of Artificial Sequence: Synthetic oligonucleotide
acucgcggucuccaaacug

SEQ ID NO: 1033985 - RNA, 19 nt, Artificial Sequence
  Description of Artificial Sequence: Synthetic oligonucleotide
ccagaggcggaacauacgc

SEQ ID NO: 1033986 - RNA, 19 nt, Artificial Sequence
  Description of Artificial Sequence: Synthetic oligonucleotide
acucgucguagcagaaagc

SEQ ID NO: 1033987 - RNA, 19 nt, Artificial Sequence
  Description of Artificial Sequence: Synthetic oligonucleotide
uccucuucggcggccgugg

SEQ ID NO: 1033988 - RNA, 19 nt, Artificial Sequence
  Description of Artificial Sequence: Synthetic oligonucleotide
cuuaggugccauccccaag

SEQ ID NO: 1033989 - RNA, 19 nt, Artificial Sequence
  Description of Artificial Sequence: Synthetic oligonucleotide
aaucugaaaugcagccaca

SEQ ID NO: 1033990 - RNA, 19 nt, Artificial Sequence
  Description of Artificial Sequence: Synthetic oligonucleotide
cauacgcaggggaaugcuc

SEQ ID NO: 1033991 - RNA, 19 nt, Artificial Sequence
  Description of Artificial Sequence: Synthetic oligonucleotide
gucuggauagcucacaguu

SEQ ID NO: 1033992 - RNA, 19 nt, Artificial Sequence
  Description of Artificial Sequence: Synthetic oligonucleotide
augccauacuugaugaggu

SEQ ID NO: 1033993 - RNA, 19 nt, Artificial Sequence
  Description of Artificial Sequence: Synthetic oligonucleotide
aucagaugguugggaaccg

SEQ ID NO: 1033994 - RNA, 19 nt, Artificial Sequence
  Description of Artificial Sequence: Synthetic oligonucleotide
ugauggacucaaccagcaa

SEQ ID NO: 1033995 - RNA, 19 nt, Artificial Sequence
  Description of Artificial Sequence: Synthetic oligonucleotide
auacgcaggggaaugcuca

SEQ ID NO: 1033996 - RNA, 19 nt, Artificial Sequence
  Description of Artificial Sequence: Synthetic oligonucleotide
guugacaucccgauaggaa

SEQ ID NO: 1033997 - RNA, 19 nt, Artificial Sequence
  Description of Artificial Sequence: Synthetic oligonucleotide
cauaguugagcacguagua

SEQ ID NO: 1033998 - RNA, 19 nt, Artificial Sequence
  Description of Artificial Sequence: Synthetic oligonucleotide
cucacuagguacucaugga

SEQ ID NO: 1033999 - RNA, 19 nt, Artificial Sequence
  Description of Artificial Sequence: Synthetic oligonucleotide
uagggaccauccacuguug

SEQ ID NO: 1034000 - RNA, 19 nt, Artificial Sequence
  Description of Artificial Sequence: Synthetic oligonucleotide
aaccgccagcuucaagaga

SEQ ID NO: 1034001 - RNA, 19 nt, Artificial Sequence
  Description of Artificial Sequence: Synthetic oligonucleotide
cugcauugccauaguuccc

SEQ ID NO: 1034002 - RNA, 19 nt, Artificial Sequence
  Description of Artificial Sequence: Synthetic oligonucleotide
cugguugcccaaugaugag

SEQ ID NO: 1034003 - RNA, 19 nt, Artificial Sequence
  Description of Artificial Sequence: Synthetic oligonucleotide
uggaugcaauaaucagaca

SEQ ID NO: 1034004 - RNA, 19 nt, Artificial Sequence
  Description of Artificial Sequence: Synthetic oligonucleotide
cuggauaguagggaccauc

SEQ ID NO: 1034005 - RNA, 19 nt, Artificial Sequence
  Description of Artificial Sequence: Synthetic oligonucleotide
gguugcccaaugaugagug

SEQ ID NO: 1034006 - RNA, 19 nt, Artificial Sequence
  Description of Artificial Sequence: Synthetic oligonucleotide
cugaacggggacccgcgag

SEQ ID NO: 1034007 - RNA, 19 nt, Artificial Sequence
  Description of Artificial Sequence: Synthetic oligonucleotide
cauaggggcagacaggccu

SEQ ID NO: 1034008 - RNA, 19 nt, Artificial Sequence
  Description of Artificial Sequence: Synthetic oligonucleotide
acccugaacggggacccgc

SEQ ID NO: 1034009 - RNA, 19 nt, Artificial Sequence
  Description of Artificial Sequence: Synthetic oligonucleotide
aggggaaugcucacuaggu

SEQ ID NO: 1034010 - RNA, 19 nt, Artificial Sequence
  Description of Artificial Sequence: Synthetic oligonucleotide
acugcgaggcgcuucucaa

SEQ ID NO: 1034011 - RNA, 19 nt, Artificial Sequence
  Description of Artificial Sequence: Synthetic oligonucleotide
cuuggaagaagcggcccac

SEQ ID NO: 1034012 - RNA, 19 nt, Artificial Sequence
  Description of Artificial Sequence: Synthetic oligonucleotide
caccucagcucccaaugac

SEQ ID NO: 1034013 - RNA, 19 nt, Artificial Sequence
  Description of Artificial Sequence: Synthetic oligonucleotide
acagccgcgucucgcaccu

SEQ ID NO: 1034014 - RNA, 19 nt, Artificial Sequence
  Description of Artificial Sequence: Synthetic oligonucleotide
ugucuuuguccgggguagg

SEQ ID NO: 1034015 - RNA, 19 nt, Artificial Sequence
  Description of Artificial Sequence: Synthetic oligonucleotide
uggcaguaucucaggcccc

SEQ ID NO: 1034016 - RNA, 19 nt, Artificial Sequence
  Description of Artificial Sequence: Synthetic oligonucleotide
gaugagugucacccacaca

SEQ ID NO: 1034017 - RNA, 19 nt, Artificial Sequence
  Description of Artificial Sequence: Synthetic oligonucleotide
guaaaacucgcggucucca

SEQ ID NO: 1034018 - RNA, 19 nt, Artificial Sequence
  Description of Artificial Sequence: Synthetic oligonucleotide
uuguccgggguagggacug

SEQ ID NO: 1034019 - RNA, 19 nt, Artificial Sequence
  Description of Artificial Sequence: Synthetic oligonucleotide
cagaucagaugguugggaa

SEQ ID NO: 1034020 - RNA, 19 nt, Artificial Sequence
  Description of Artificial Sequence: Synthetic oligonucleotide
accccaguccuggccaacc

SEQ ID NO: 1034021 - RNA, 19 nt, Artificial Sequence
  Description of Artificial Sequence: Synthetic oligonucleotide
guagggaccauccacuguu

SEQ ID NO: 1034022 - RNA, 19 nt, Artificial Sequence
  Description of Artificial Sequence: Synthetic oligonucleotide
agucgugaacauacaugag

SEQ ID NO: 1034023 - RNA, 19 nt, Artificial Sequence
  Description of Artificial Sequence: Synthetic oligonucleotide
uugacccuucgcuggcggc

SEQ ID NO: 1034024 - RNA, 19 nt, Artificial Sequence
  Description of Artificial Sequence: Synthetic oligonucleotide
ugacccuucgcuggcggca

SEQ ID NO: 1034025 - RNA, 19 nt, Artificial Sequence
  Description of Artificial Sequence: Synthetic oligonucleotide
gagcacguaguagucguga

SEQ ID NO: 1034026 - RNA, 19 nt, Artificial Sequence
  Description of Artificial Sequence: Synthetic oligonucleotide
ccagucccgguaaaacucg

SEQ ID NO: 1034027 - RNA, 19 nt, Artificial Sequence
  Description of Artificial Sequence: Synthetic oligonucleotide
uacgcaggggaaugcucac

SEQ ID NO: 1034028 - RNA, 19 nt, Artificial Sequence
  Description of Artificial Sequence: Synthetic oligonucleotide
acauacgcaggggaaugcu

SEQ ID NO: 1034029 - RNA, 19 nt, Artificial Sequence
  Description of Artificial Sequence: Synthetic oligonucleotide
gugacagacucagcauucc

SEQ ID NO: 1034030 - RNA, 19 nt, Artificial Sequence
  Description of Artificial Sequence: Synthetic oligonucleotide
gagauaccacuuggauggg

SEQ ID NO: 1034031 - RNA, 19 nt, Artificial Sequence
  Description of Artificial Sequence: Synthetic oligonucleotide
agcacguaguagucgugaa

SEQ ID NO: 1034032 - RNA, 19 nt, Artificial Sequence
  Description of Artificial Sequence: Synthetic oligonucleotide
augccacgguaauugcuga

SEQ ID NO: 1034033 - RNA, 19 nt, Artificial Sequence
  Description of Artificial Sequence: Synthetic oligonucleotide
ccgauaggaaaagagcuug

SEQ ID NO: 1034034 - RNA, 19 nt, Artificial Sequence
  Description of Artificial Sequence: Synthetic oligonucleotide
gauaccacuuggaugggau

SEQ ID NO: 1034035 - RNA, 19 nt, Artificial Sequence
  Description of Artificial Sequence: Synthetic oligonucleotide
acguaguagucgugaacau

SEQ ID NO: 1034036 - RNA, 19 nt, Artificial Sequence
  Description of Artificial Sequence: Synthetic oligonucleotide
gguacucauggaagaaggc

SEQ ID NO: 1034037 - RNA, 19 nt, Artificial Sequence
  Description of Artificial Sequence: Synthetic oligonucleotide
gacucagcauuccaccagu

SEQ ID NO: 1034038 - RNA, 19 nt, Artificial Sequence
  Description of Artificial Sequence: Synthetic oligonucleotide
cagcucccaaugaccgucg

SEQ ID NO: 1034039 - RNA, 19 nt, Artificial Sequence
  Description of Artificial Sequence: Synthetic oligonucleotide
gguaaaacucgcggucucc

SEQ ID NO: 1034040 - RNA, 19 nt, Artificial Sequence
  Description of Artificial Sequence: Synthetic oligonucleotide
auuagccagaucagauggu

SEQ ID NO: 1034041 - RNA, 19 nt, Artificial Sequence
  Description of Artificial Sequence: Synthetic oligonucleotide
accucgucgcggcccacuc

SEQ ID NO: 1034042 - RNA, 19 nt, Artificial Sequence
  Description of Artificial Sequence: Synthetic oligonucleotide
cacugucugagcugaacaa

SEQ ID NO: 1034043 - RNA, 19 nt, Artificial Sequence
  Description of Artificial Sequence: Synthetic oligonucleotide
uaaccacauguagcagcag

SEQ ID NO: 1034044 - RNA, 19 nt, Artificial Sequence
  Description of Artificial Sequence: Synthetic oligonucleotide
cacaccaauucaggaugcc

SEQ ID NO: 1034045 - RNA, 19 nt, Artificial Sequence
  Description of Artificial Sequence: Synthetic oligonucleotide
cacagccgcgucucgcacc

SEQ ID NO: 1034046 - RNA, 19 nt, Artificial Sequence
  Description of Artificial Sequence: Synthetic oligonucleotide
gguuaaccacauguagcag

SEQ ID NO: 1034047 - RNA, 19 nt, Artificial Sequence
  Description of Artificial Sequence: Synthetic oligonucleotide
ggaaagauguuggaugcaa

SEQ ID NO: 1034048 - RNA, 19 nt, Artificial Sequence
  Description of Artificial Sequence: Synthetic oligonucleotide
ccaauucaggaugccacgg

SEQ ID NO: 1034049 - RNA, 19 nt, Artificial Sequence
  Description of Artificial Sequence: Synthetic oligonucleotide
ugaugcccucagccccugg

SEQ ID NO: 1034050 - RNA, 19 nt, Artificial Sequence
  Description of Artificial Sequence: Synthetic oligonucleotide
cacuguuggaucagcccca

SEQ ID NO: 1034051 - RNA, 19 nt, Artificial Sequence
  Description of Artificial Sequence: Synthetic oligonucleotide
cuuuggccuugacccuucg

SEQ ID NO: 1034052 - RNA, 19 nt, Artificial Sequence
  Description of Artificial Sequence: Synthetic oligonucleotide
ccuccagaacuccuggccc

SEQ ID NO: 1034053 - RNA, 19 nt, Artificial Sequence
  Description of Artificial Sequence: Synthetic oligonucleotide
cauccacuguuggaucagc

SEQ ID NO: 1034054 - RNA, 19 nt, Artificial Sequence
  Description of Artificial Sequence: Synthetic oligonucleotide
guuuuagacagcacuuuau

SEQ ID NO: 1034055 - RNA, 19 nt, Artificial Sequence
  Description of Artificial Sequence: Synthetic oligonucleotide
ggaagauaauggaguauga

SEQ ID NO: 1034056 - RNA, 19 nt, Artificial Sequence
  Description of Artificial Sequence: Synthetic oligonucleotide
ugccacgguaauugcugaa

SEQ ID NO: 1034057 - RNA, 19 nt, Artificial Sequence
  Description of Artificial Sequence: Synthetic oligonucleotide
gaguaugaugccagagcaa

SEQ ID NO: 1034058 - RNA, 19 nt, Artificial Sequence
  Description of Artificial Sequence: Synthetic oligonucleotide
agauaccacuuggauggga

SEQ ID NO: 1034059 - RNA, 19 nt, Artificial Sequence
  Description of Artificial Sequence: Synthetic oligonucleotide
aacggggacccgcgagcca

SEQ ID NO: 1034060 - RNA, 19 nt, Artificial Sequence
  Description of Artificial Sequence: Synthetic oligonucleotide
cgguaguucagguugucug

SEQ ID NO: 1034061 - RNA, 19 nt, Artificial Sequence
  Description of Artificial Sequence: Synthetic oligonucleotide
acccgcgagccaguccucc

SEQ ID NO: 1034062 - RNA, 19 nt, Artificial Sequence
  Description of Artificial Sequence: Synthetic oligonucleotide
cuagguacucauggaagaa

SEQ ID NO: 1034063 - RNA, 19 nt, Artificial Sequence
  Description of Artificial Sequence: Synthetic oligonucleotide
gguaauugcugaaaccacu

SEQ ID NO: 1034064 - RNA, 19 nt, Artificial Sequence
  Description of Artificial Sequence: Synthetic oligonucleotide
acgcucaauaauacgugaa

SEQ ID NO: 1034065 - RNA, 19 nt, Artificial Sequence
  Description of Artificial Sequence: Synthetic oligonucleotide
ugaaugcccagaggcggaa

SEQ ID NO: 1034066 - RNA, 19 nt, Artificial Sequence
  Description of Artificial Sequence: Synthetic oligonucleotide
gcuuauacaccagcuggac

SEQ ID NO: 1034067 - RNA, 19 nt, Artificial Sequence
  Description of Artificial Sequence: Synthetic oligonucleotide
ccuuggcaguaucucaggc

SEQ ID NO: 1034068 - RNA, 19 nt, Artificial Sequence
  Description of Artificial Sequence: Synthetic oligonucleotide
ugggaucuaccaggaugcc

SEQ ID NO: 1034069 - RNA, 19 nt, Artificial Sequence
  Description of Artificial Sequence: Synthetic oligonucleotide
cagaggcggaacauacgca

SEQ ID NO: 1034070 - RNA, 19 nt, Artificial Sequence
  Description of Artificial Sequence: Synthetic oligonucleotide
gccagagcaaacacggaac

SEQ ID NO: 1034071 - RNA, 19 nt, Artificial Sequence
  Description of Artificial Sequence: Synthetic oligonucleotide
cauggaguucuggauagua

SEQ ID NO: 1034072 - RNA, 19 nt, Artificial Sequence
  Description of Artificial Sequence: Synthetic oligonucleotide
ccaaugaccgucgcccacg

SEQ ID NO: 1034073 - RNA, 19 nt, Artificial Sequence
  Description of Artificial Sequence: Synthetic oligonucleotide
ggauaguagggaccaucca

SEQ ID NO: 1034074 - RNA, 19 nt, Artificial Sequence
  Description of Artificial Sequence: Synthetic oligonucleotide
gcacguaguagucgugaac

SEQ ID NO: 1034075 - RNA, 19 nt, Artificial Sequence
  Description of Artificial Sequence: Synthetic oligonucleotide
ggagcuggcgcgucacccc

SEQ ID NO: 1034076 - RNA, 19 nt, Artificial Sequence
  Description of Artificial Sequence: Synthetic oligonucleotide
agagcuugaggaagauaau

SEQ ID NO: 1034077 - RNA, 19 nt, Artificial Sequence
  Description of Artificial Sequence: Synthetic oligonucleotide
caccacuuaugcacaggga

SEQ ID NO: 1034078 - RNA, 19 nt, Artificial Sequence
  Description of Artificial Sequence: Synthetic oligonucleotide
acccuucgcuggcggcacc

SEQ ID NO: 1034079 - RNA, 19 nt, Artificial Sequence
  Description of Artificial Sequence: Synthetic oligonucleotide
cccgguaaaacucgcgguc

SEQ ID NO: 1034080 - RNA, 19 nt, Artificial Sequence
  Description of Artificial Sequence: Synthetic oligonucleotide
ggaucuaccaggaugccau

SEQ ID NO: 1034081 - RNA, 19 nt, Artificial Sequence
  Description of Artificial Sequence: Synthetic oligonucleotide
cauuacucaggaucagcau

SEQ ID NO: 1034082 - RNA, 19 nt, Artificial Sequence
  Description of Artificial Sequence: Synthetic oligonucleotide
agucggagcaaaggcuuau

SEQ ID NO: 1034083 - RNA, 19 nt, Artificial Sequence
  Description of Artificial Sequence: Synthetic oligonucleotide
cacuuaugcacagggauau

SEQ ID NO: 1034084 - RNA, 19 nt, Artificial Sequence
  Description of Artificial Sequence: Synthetic oligonucleotide
aaugaccgucgcccacguu

SEQ ID NO: 1034085 - RNA, 19 nt, Artificial Sequence
  Description of Artificial Sequence: Synthetic oligonucleotide
ggcuuauacaccagcugga

SEQ ID NO: 1034086 - RNA, 19 nt, Artificial Sequence
  Description of Artificial Sequence: Synthetic oligonucleotide
agcaaacacggaacccacu

SEQ ID NO: 1034087 - RNA, 19 nt, Artificial Sequence
  Description of Artificial Sequence: Synthetic oligonucleotide
gaaugcccagaggcggaac

SEQ ID NO: 1034088 - RNA, 19 nt, Artificial Sequence
  Description of Artificial Sequence: Synthetic oligonucleotide
gccaaccaucuguugcugc

SEQ ID NO: 1034089 - RNA, 19 nt, Artificial Sequence
  Description of Artificial Sequence: Synthetic oligonucleotide
ucguagcagaaagcgcuuu

SEQ ID NO: 1034090 - RNA, 19 nt, Artificial Sequence
  Description of Artificial Sequence: Synthetic oligonucleotide
cuaggaggagugugcaggu

SEQ ID NO: 1034091 - RNA, 19 nt, Artificial Sequence
  Description of Artificial Sequence: Synthetic oligonucleotide
gccgccacccugaacgggg

SEQ ID NO: 1034092 - RNA, 19 nt, Artificial Sequence
  Description of Artificial Sequence: Synthetic oligonucleotide
gcgcuucucaaucugaaau

SEQ ID NO: 1034093 - RNA, 19 nt, Artificial Sequence
  Description of Artificial Sequence: Synthetic oligonucleotide
cgguaauugcugaaaccac

SEQ ID NO: 1034094 - RNA, 19 nt, Artificial Sequence
  Description of Artificial Sequence: Synthetic oligonucleotide
uguccgggguagggacugg

SEQ ID NO: 1034095 - RNA, 19 nt, Artificial Sequence
  Description of Artificial Sequence: Synthetic oligonucleotide
gcucccaaugaccgucgcc

SEQ ID NO: 1034096 - RNA, 19 nt, Artificial Sequence
  Description of Artificial Sequence: Synthetic oligonucleotide
caauucaggaugccacggu

SEQ ID NO: 1034097 - RNA, 19 nt, Artificial Sequence
  Description of Artificial Sequence: Synthetic oligonucleotide
auaccccaguccuggccaa

SEQ ID NO: 1034098 - RNA, 19 nt, Artificial Sequence
  Description of Artificial Sequence: Synthetic oligonucleotide
ucgcccacguugguguguc

SEQ ID NO: 1034099 - RNA, 19 nt, Artificial Sequence
  Description of Artificial Sequence: Synthetic oligonucleotide
acgccgagagccgcccgcg

SEQ ID NO: 1034100 - RNA, 19 nt, Artificial Sequence
  Description of Artificial Sequence: Synthetic oligonucleotide
cugccaaaaguaggugaca

SEQ ID NO: 1034101 - RNA, 19 nt, Artificial Sequence
  Description of Artificial Sequence: Synthetic oligonucleotide
gacccuucgcuggcggcac

SEQ ID NO: 1034102 - RNA, 19 nt, Artificial Sequence
  Description of Artificial Sequence: Synthetic oligonucleotide
ggacccgcgagccaguccu

SEQ ID NO: 1034103 - RNA, 19 nt, Artificial Sequence
  Description of Artificial Sequence: Synthetic oligonucleotide
cccugaacggggacccgcg

SEQ ID NO: 1034104 - RNA, 19 nt, Artificial Sequence
  Description of Artificial Sequence: Synthetic oligonucleotide
ggcugaggccagaaauacc

SEQ ID NO: 1034105 - RNA, 19 nt, Artificial Sequence
  Description of Artificial Sequence: Synthetic oligonucleotide
ggggaaugcucacuaggua

SEQ ID NO: 1034106 - RNA, 19 nt, Artificial Sequence
  Description of Artificial Sequence: Synthetic oligonucleotide
cccagguuagggagggcug

SEQ ID NO: 1034107 - RNA, 19 nt, Artificial Sequence
  Description of Artificial Sequence: Synthetic oligonucleotide
cugcugcaccacuuaugca

SEQ ID NO: 1034108 - RNA, 19 nt, Artificial Sequence
  Description of Artificial Sequence: Synthetic oligonucleotide
ggauagcucacaguuugcu

SEQ ID NO: 1034109 - RNA, 19 nt, Artificial Sequence
  Description of Artificial Sequence: Synthetic oligonucleotide
gcgagccaguccuccgacg

SEQ ID NO: 1034110 - RNA, 19 nt, Artificial Sequence
  Description of Artificial Sequence: Synthetic oligonucleotide
cgucguagcagaaagcgcu

SEQ ID NO: 1034111 - RNA, 19 nt, Artificial Sequence
  Description of Artificial Sequence: Synthetic oligonucleotide
cuucggcggccgugggccc

SEQ ID NO: 1034112 - RNA, 19 nt, Artificial Sequence
  Description of Artificial Sequence: Synthetic oligonucleotide
ccacuggagugauggacuc

SEQ ID NO: 1034113 - RNA, 19 nt, Artificial Sequence
  Description of Artificial Sequence: Synthetic oligonucleotide
gugaauaguccauguccuu

SEQ ID NO: 1034114 - RNA, 19 nt, Artificial Sequence
  Description of Artificial Sequence: Synthetic oligonucleotide
augcccagaggcggaacau

SEQ ID NO: 1034115 - RNA, 19 nt, Artificial Sequence
  Description of Artificial Sequence: Synthetic oligonucleotide
ccacccugaacggggaccc

SEQ ID NO: 1034116 - RNA, 19 nt, Artificial Sequence
  Description of Artificial Sequence: Synthetic oligonucleotide
gggaucuaccaggaugcca

SEQ ID NO: 1034117 - RNA, 19 nt, Artificial Sequence
  Description of Artificial Sequence: Synthetic oligonucleotide
cuucgcuggcggcaccaca

SEQ ID NO: 1034118 - RNA, 19 nt, Artificial Sequence
  Description of Artificial Sequence: Synthetic oligonucleotide
gacucccagcacuggcuua

SEQ ID NO: 1034119 - RNA, 19 nt, Artificial Sequence
  Description of Artificial Sequence: Synthetic oligonucleotide
acuuaugcacagggauauu

SEQ ID NO: 1034120 - RNA, 19 nt, Artificial Sequence
  Description of Artificial Sequence: Synthetic oligonucleotide
agugggccccauaggggca

SEQ ID NO: 1034121 - RNA, 19 nt, Artificial Sequence
  Description of Artificial Sequence: Synthetic oligonucleotide
gcagacgauggcaccucag

SEQ ID NO: 1034122 - RNA, 19 nt, Artificial Sequence
  Description of Artificial Sequence: Synthetic oligonucleotide
gccacccugaacggggacc

SEQ ID NO: 1034123 - RNA, 19 nt, Artificial Sequence
  Description of Artificial Sequence: Synthetic oligonucleotide
ccacuuaugcacagggaua

SEQ ID NO: 1034124 - RNA, 19 nt, Artificial Sequence
  Description of Artificial Sequence: Synthetic oligonucleotide
ccauaggggcagacaggcc

SEQ ID NO: 1034125 - RNA, 19 nt, Artificial Sequence
  Description of Artificial Sequence: Synthetic oligonucleotide
acgcaggggaaugcucacu

SEQ ID NO: 1034126 - RNA, 19 nt, Artificial Sequence
  Description of Artificial Sequence: Synthetic oligonucleotide
guugcccaaugaugagugu

SEQ ID NO: 1034127 - RNA, 19 nt, Artificial Sequence
  Description of Artificial Sequence: Synthetic oligonucleotide
gggaaccgccagcuucaag

SEQ ID NO: 1034128 - RNA, 19 nt, Artificial Sequence
  Description of Artificial Sequence: Synthetic oligonucleotide
gucagggcacccacugcga

SEQ ID NO: 1034129 - RNA, 19 nt, Artificial Sequence
  Description of Artificial Sequence: Synthetic oligonucleotide
agcaggagugggccccaua

SEQ ID NO: 1034130 - RNA, 19 nt, Artificial Sequence
  Description of Artificial Sequence: Synthetic oligonucleotide
ggaacauacgcaggggaau

SEQ ID NO: 1034131 - RNA, 19 nt, Artificial Sequence
  Description of Artificial Sequence: Synthetic oligonucleotide
gucugucuuuguccggggu

SEQ ID NO: 1034132 - RNA, 19 nt, Artificial Sequence
  Description of Artificial Sequence: Synthetic oligonucleotide
cacguuggugugucugucu

SEQ ID NO: 1034133 - RNA, 19 nt, Artificial Sequence
  Description of Artificial Sequence: Synthetic oligonucleotide
gcacuuuauugaugcccuc

SEQ ID NO: 1034134 - RNA, 19 nt, Artificial Sequence
  Description of Artificial Sequence: Synthetic oligonucleotide
cuccgacgccgagagccgc

SEQ ID NO: 1034135 - RNA, 19 nt, Artificial Sequence
  Description of Artificial Sequence: Synthetic oligonucleotide
gccgagagccgcccgcgcc

SEQ ID NO: 1034136 - RNA, 19 nt, Artificial Sequence
  Description of Artificial Sequence: Synthetic oligonucleotide
gccucccagacuaggagga

SEQ ID NO: 1034137 - RNA, 19 nt, Artificial Sequence
  Description of Artificial Sequence: Synthetic oligonucleotide
gccacgguaauugcugaaa

SEQ ID NO: 1034138 - RNA, 19 nt, Artificial Sequence
  Description of Artificial Sequence: Synthetic oligonucleotide
gcccacguuggugugucug

SEQ ID NO: 1034139 - RNA, 19 nt, Artificial Sequence
  Description of Artificial Sequence: Synthetic oligonucleotide
ggcggcaccacagguugac

SEQ ID NO: 1034140 - RNA, 19 nt, Artificial Sequence
  Description of Artificial Sequence: Synthetic oligonucleotide
gccagguuaaccacaugua

SEQ ID NO: 1034141 - RNA, 19 nt, Artificial Sequence
  Description of Artificial Sequence: Synthetic oligonucleotide
cagucggagcaaaggcuua

SEQ ID NO: 1034142 - RNA, 19 nt, Artificial Sequence
  Description of Artificial Sequence: Synthetic oligonucleotide
cacuggagugauggacuca

SEQ ID NO: 1034143 - RNA, 19 nt, Artificial Sequence
  Description of Artificial Sequence: Synthetic oligonucleotide
gcuggacuuaggugccauc

SEQ ID NO: 1034144 - RNA, 19 nt, Artificial Sequence
  Description of Artificial Sequence: Synthetic oligonucleotide
cgauaggaaaagagcuuga

SEQ ID NO: 1034145 - RNA, 19 nt, Artificial Sequence
  Description of Artificial Sequence: Synthetic oligonucleotide
ccagaucagaugguuggga

SEQ ID NO: 1034146 - RNA, 19 nt, Artificial Sequence
  Description of Artificial Sequence: Synthetic oligonucleotide
cacccugaacggggacccg

SEQ ID NO: 1034147 - RNA, 19 nt, Artificial Sequence
  Description of Artificial Sequence: Synthetic oligonucleotide
ccgccagcuucaagagacg

SEQ ID NO: 1034148 - RNA, 19 nt, Artificial Sequence
  Description of Artificial Sequence: Synthetic oligonucleotide
ugggaaccgccagcuucaa

SEQ ID NO: 1034149 - RNA, 19 nt, Artificial Sequence
  Description of Artificial Sequence: Synthetic oligonucleotide
gcggccgugggcccgccgc

SEQ ID NO: 1034150 - RNA, 19 nt, Artificial Sequence
  Description of Artificial Sequence: Synthetic oligonucleotide
cccgcgagccaguccuccg

SEQ ID NO: 1034151 - RNA, 19 nt, Artificial Sequence
  Description of Artificial Sequence: Synthetic oligonucleotide
gucggagcaaaggcuuaua

SEQ ID NO: 1034152 - RNA, 19 nt, Artificial Sequence
  Description of Artificial Sequence: Synthetic oligonucleotide
ccuugacccuucgcuggcg

SEQ ID NO: 1034153 - RNA, 19 nt, Artificial Sequence
  Description of Artificial Sequence: Synthetic oligonucleotide
ccucgucgcggcccacucg

SEQ ID NO: 1034154 - RNA, 19 nt, Artificial Sequence
  Description of Artificial Sequence: Synthetic oligonucleotide
cucugucagggcacccacu

SEQ ID NO: 1034155 - RNA, 19 nt, Artificial Sequence
  Description of Artificial Sequence: Synthetic oligonucleotide
caaugaccgucgcccacgu

SEQ ID NO: 1034156 - RNA, 19 nt, Artificial Sequence
  Description of Artificial Sequence: Synthetic oligonucleotide
cccacugacuuucuuuccu

SEQ ID NO: 1034157 - RNA, 19 nt, Artificial Sequence
  Description of Artificial Sequence: Synthetic oligonucleotide
cgguaaaacucgcggucuc

SEQ ID NO: 1034158 - RNA, 19 nt, Artificial Sequence
  Description of Artificial Sequence: Synthetic oligonucleotide
ggcaguaucucaggccccu

SEQ ID NO: 1034159 - RNA, 19 nt, Artificial Sequence
  Description of Artificial Sequence: Synthetic oligonucleotide
cacuugaagcugggugaaa

SEQ ID NO: 1034160 - RNA, 19 nt, Artificial Sequence
  Description of Artificial Sequence: Synthetic oligonucleotide
ccacguuggugugucuguc

SEQ ID NO: 1034161 - RNA, 19 nt, Artificial Sequence
  Description of Artificial Sequence: Synthetic oligonucleotide
gcggucgcccauggccucg

SEQ ID NO: 1034162 - RNA, 19 nt, Artificial Sequence
  Description of Artificial Sequence: Synthetic oligonucleotide
cugcugggaagcagaggau

SEQ ID NO: 1034163 - RNA, 19 nt, Artificial Sequence
  Description of Artificial Sequence: Synthetic oligonucleotide
ccucuucggcggccguggg

SEQ ID NO: 1034164 - RNA, 19 nt, Artificial Sequence
  Description of Artificial Sequence: Synthetic oligonucleotide
cccgauaggaaaagagcuu

SEQ ID NO: 1034165 - RNA, 19 nt, Artificial Sequence
  Description of Artificial Sequence: Synthetic oligonucleotide
cugcgaggcgcuucucaau

SEQ ID NO: 1034166 - RNA, 19 nt, Artificial Sequence
  Description of Artificial Sequence: Synthetic oligonucleotide
gggcacccacugcgaggcg

SEQ ID NO: 1034167 - RNA, 19 nt, Artificial Sequence
  Description of Artificial Sequence: Synthetic oligonucleotide
cgcucaauaauacgugaau

SEQ ID NO: 1034168 - RNA, 19 nt, Artificial Sequence
  Description of Artificial Sequence: Synthetic oligonucleotide
gacccgcgagccaguccuc

SEQ ID NO: 1034169 - RNA, 19 nt, Artificial Sequence
  Description of Artificial Sequence: Synthetic oligonucleotide
cagcuggacuuaggugcca

SEQ ID NO: 1034170 - RNA, 19 nt, Artificial Sequence
  Description of Artificial Sequence: Synthetic oligonucleotide
gcgaggcgcuucucaaucu

SEQ ID NO: 1034171 - RNA, 19 nt, Artificial Sequence
  Description of Artificial Sequence: Synthetic oligonucleotide
cgcaggggaaugcucacua

SEQ ID NO: 1034172 - RNA, 19 nt, Artificial Sequence
  Description of Artificial Sequence: Synthetic oligonucleotide
cgcgagccaguccuccgac

SEQ ID NO: 1034173 - RNA, 19 nt, Artificial Sequence
  Description of Artificial Sequence: Synthetic oligonucleotide
ccggagcuggcgcgucacc

SEQ ID NO: 1034174 - RNA, 19 nt, Artificial Sequence
  Description of Artificial Sequence: Synthetic oligonucleotide
cccacguuggugugucugu

SEQ ID NO: 1034175 - RNA, 19 nt, Artificial Sequence
  Description of Artificial Sequence: Synthetic oligonucleotide
gaccgucgcccacguuggu

SEQ ID NO: 1034176 - RNA, 19 nt, Artificial Sequence
  Description of Artificial Sequence: Synthetic oligonucleotide
ccugaacggggacccgcga

SEQ ID NO: 1034177 - RNA, 19 nt, Artificial Sequence
  Description of Artificial Sequence: Synthetic oligonucleotide
ggcggccgugggcccgccg

SEQ ID NO: 1034178 - RNA, 19 nt, Artificial Sequence
  Description of Artificial Sequence: Synthetic oligonucleotide
ccaucuguugcugcccagu

SEQ ID NO: 1034179 - RNA, 19 nt, Artificial Sequence
  Description of Artificial Sequence: Synthetic oligonucleotide
ccaggaugccauacuugau

SEQ ID NO: 1034180 - RNA, 19 nt, Artificial Sequence
  Description of Artificial Sequence: Synthetic oligonucleotide
ccuucgcuggcggcaccac

SEQ ID NO: 1034181 - RNA, 19 nt, Artificial Sequence
  Description of Artificial Sequence: Synthetic oligonucleotide
ccgcgagccaguccuccga

SEQ ID NO: 1034182 - RNA, 19 nt, Artificial Sequence
  Description of Artificial Sequence: Synthetic oligonucleotide
gggcccgccgccacccuga

SEQ ID NO: 1034183 - RNA, 19 nt, Artificial Sequence
  Description of Artificial Sequence: Synthetic oligonucleotide
gcggcaccacagguugaca

SEQ ID NO: 1034184 - RNA, 19 nt, Artificial Sequence
  Description of Artificial Sequence: Synthetic oligonucleotide
gguugggaaccgccagcuu

SEQ ID NO: 1034185 - RNA, 19 nt, Artificial Sequence
  Description of Artificial Sequence: Synthetic oligonucleotide
gcauuccaccagucccggu

SEQ ID NO: 1034186 - RNA, 19 nt, Artificial Sequence
  Description of Artificial Sequence: Synthetic oligonucleotide
cgacgccgagagccgcccg

SEQ ID NO: 1034187 - RNA, 19 nt, Artificial Sequence
  Description of Artificial Sequence: Synthetic oligonucleotide
ccgcggucgcccauggccu

SEQ ID NO: 1034188 - RNA, 19 nt, Artificial Sequence
  Description of Artificial Sequence: Synthetic oligonucleotide
cccuucgcuggcggcacca

SEQ ID NO: 1034189 - RNA, 19 nt, Artificial Sequence
  Description of Artificial Sequence: Synthetic oligonucleotide
cgccgccacccugaacggg

SEQ ID NO: 1034190 - RNA, 19 nt, Artificial Sequence
  Description of Artificial Sequence: Synthetic oligonucleotide
ccgccacccugaacgggga

SEQ ID NO: 1034191 - RNA, 19 nt, Artificial Sequence
  Description of Artificial Sequence: Synthetic oligonucleotide
ccgagagccgcccgcgccu

SEQ ID NO: 1034192 - RNA, 19 nt, Artificial Sequence
  Description of Artificial Sequence: Synthetic oligonucleotide
cgccgagagccgcccgcgc

SEQ ID NO: 1034193 - RNA, 19 nt, Artificial Sequence
  Description of Artificial Sequence: Synthetic oligonucleotide
cgcggucgcccauggccuc

SEQ ID NO: 1034194 - RNA, 19 nt, Artificial Sequence
  Description of Artificial Sequence: Synthetic oligonucleotide
ccauguccuugaaggguuu

SEQ ID NO: 1034195 - RNA, 19 nt, Artificial Sequence
  Description of Artificial Sequence: Synthetic oligonucleotide
gagcaggagugggccccau

SEQ ID NO: 1034196 - RNA, 19 nt, Artificial Sequence
  Description of Artificial Sequence: Synthetic oligonucleotide
gcccgccgccacccugaac

SEQ ID NO: 1034197 - RNA, 19 nt, Artificial Sequence
  Description of Artificial Sequence: Synthetic oligonucleotide
gugggcccgccgccacccu

SEQ ID NO: 1034198 - RNA, 19 nt, Artificial Sequence
  Description of Artificial Sequence: Synthetic oligonucleotide
cagccgcgucucgcaccuc

SEQ ID NO: 1034199 - RNA, 19 nt, Artificial Sequence
  Description of Artificial Sequence: Synthetic oligonucleotide
cccagacuaggaggagugu

SEQ ID NO: 1034200 - RNA, 19 nt, Artificial Sequence
  Description of Artificial Sequence: Synthetic oligonucleotide
cgcuggcggcaccacaggu

SEQ ID NO: 1034201 - RNA, 19 nt, Artificial Sequence
  Description of Artificial Sequence: Synthetic oligonucleotide
cacccacugcgaggcgcuu

SEQ ID NO: 1034202 - RNA, 19 nt, Artificial Sequence
  Description of Artificial Sequence: Synthetic oligonucleotide
cggggacccgcgagccagu

SEQ ID NO: 1034203 - RNA, 19 nt, Artificial Sequence
  Description of Artificial Sequence: Synthetic oligonucleotide
cgccuccgcggucgcccau

SEQ ID NO: 1034204 - RNA, 19 nt, Artificial Sequence
  Description of Artificial Sequence: Synthetic oligonucleotide
aauauguguaguuuugccc

SEQ ID NO: 1034205 - RNA, 19 nt, Artificial Sequence
  Description of Artificial Sequence: Synthetic oligonucleotide
aauaaagaagccuauacaa

SEQ ID NO: 1034206 - RNA, 19 nt, Artificial Sequence
  Description of Artificial Sequence: Synthetic oligonucleotide
auauguguaguuuugcccc

SEQ ID NO: 1034207 - RNA, 19 nt, Artificial Sequence
  Description of Artificial Sequence: Synthetic oligonucleotide
ugugcuauaaaccagcacu

SEQ ID NO: 1034208 - RNA, 19 nt, Artificial Sequence
  Description of Artificial Sequence: Synthetic oligonucleotide
aauaucagaauauacggaa

SEQ ID NO: 1034209 - RNA, 19 nt, Artificial Sequence
  Description of Artificial Sequence: Synthetic oligonucleotide
uuuggcaucgcuaagacaa

SEQ ID NO: 1034210 - RNA, 19 nt, Artificial Sequence
  Description of Artificial Sequence: Synthetic oligonucleotide
agauggaucaaaucgcugc

SEQ ID NO: 1034211 - RNA, 19 nt, Artificial Sequence
  Description of Artificial Sequence: Synthetic oligonucleotide
  modified_base (16)..(16): a, c, u, g, unknown or other
uauuccagaccccacnggg

SEQ ID NO: 1034212 - RNA, 19 nt, Artificial Sequence
  Description of Artificial Sequence: Synthetic oligonucleotide
uguacaugugcuauaaacc

SEQ ID NO: 1034213 - RNA, 19 nt, Artificial Sequence
  Description of Artificial Sequence: Synthetic oligonucleotide
aaucagcagagcuucaaac

SEQ ID NO: 1034214 - RNA, 19 nt, Artificial Sequence
  Description of Artificial Sequence: Synthetic oligonucleotide
caacagauggaucaaaucg

SEQ ID NO: 1034215 - RNA, 19 nt, Artificial Sequence
  Description of Artificial Sequence: Synthetic oligonucleotide
uauuacuucucccuggucc

SEQ ID NO: 1034216 - RNA, 19 nt, Artificial Sequence
  Description of Artificial Sequence: Synthetic oligonucleotide
acaaucaguguccaugucc

SEQ ID NO: 1034217 - RNA, 19 nt, Artificial Sequence
  Description of Artificial Sequence: Synthetic oligonucleotide
auuaaggaguuuucgcugc

SEQ ID NO: 1034218 - RNA, 19 nt, Artificial Sequence
  Description of Artificial Sequence: Synthetic oligonucleotide
aaucacuucacacugccgu

SEQ ID NO: 1034219 - RNA, 19 nt, Artificial Sequence
  Description of Artificial Sequence: Synthetic oligonucleotide
uuuguaaggcagauuaugc

SEQ ID NO: 1034220 - RNA, 19 nt, Artificial Sequence
  Description of Artificial Sequence: Synthetic oligonucleotide
aaacuuugcaauaaagaag

SEQ ID NO: 1034221 - RNA, 19 nt, Artificial Sequence
  Description of Artificial Sequence: Synthetic oligonucleotide
gaugcuguaagaaagcgcc

SEQ ID NO: 1034222 - RNA, 19 nt, Artificial Sequence
  Description of Artificial Sequence: Synthetic oligonucleotide
cuaauaaugaagcauucug

SEQ ID NO: 1034223 - RNA, 19 nt, Artificial Sequence
  Description of Artificial Sequence: Synthetic oligonucleotide
aucuuuacggcuuaguuca

SEQ ID NO: 1034224 - RNA, 19 nt, Artificial Sequence
  Description of Artificial Sequence: Synthetic oligonucleotide
gauuaugccauucccacgc

SEQ ID NO: 1034225 - RNA, 19 nt, Artificial Sequence
  Description of Artificial Sequence: Synthetic oligonucleotide
uuuauucaauacuuugucc

SEQ ID NO: 1034226 - RNA, 19 nt, Artificial Sequence
  Description of Artificial Sequence: Synthetic oligonucleotide
caugcaauauuccaaauuc

SEQ ID NO: 1034227 - RNA, 19 nt, Artificial Sequence
  Description of Artificial Sequence: Synthetic oligonucleotide
uugaagauaucuuuacggc

SEQ ID NO: 1034228 - RNA, 19 nt, Artificial Sequence
  Description of Artificial Sequence: Synthetic oligonucleotide
uaaagaagccuauacaauc

SEQ ID NO: 1034229 - RNA, 19 nt, Artificial Sequence
  Description of Artificial Sequence: Synthetic oligonucleotide
uauacaauccuuguuggcc

SEQ ID NO: 1034230 - RNA, 19 nt, Artificial Sequence
  Description of Artificial Sequence: Synthetic oligonucleotide
aaacugacaguauauucca

SEQ ID NO: 1034231 - RNA, 19 nt, Artificial Sequence
  Description of Artificial Sequence: Synthetic oligonucleotide
aauacuuuaguuccaucaa

SEQ ID NO: 1034232 - RNA, 19 nt, Artificial Sequence
  Description of Artificial Sequence: Synthetic oligonucleotide
uccuuuguaaggcagauua

SEQ ID NO: 1034233 - RNA, 19 nt, Artificial Sequence
  Description of Artificial Sequence: Synthetic oligonucleotide
  modified_base (18)..(18): a, c, u, g, unknown or other
uauauuccagaccccacng

SEQ ID NO: 1034234 - RNA, 19 nt, Artificial Sequence
  Description of Artificial Sequence: Synthetic oligonucleotide
gccuauaccuuucagaucg

SEQ ID NO: 1034235 - RNA, 19 nt, Artificial Sequence
  Description of Artificial Sequence: Synthetic oligonucleotide
aguuuaagugccuuuguug

SEQ ID NO: 1034236 - RNA, 19 nt, Artificial Sequence
  Description of Artificial Sequence: Synthetic oligonucleotide
uccaauuugugguuccugg

SEQ ID NO: 1034237 - RNA, 19 nt, Artificial Sequence
  Description of Artificial Sequence: Synthetic oligonucleotide
ugacacaauuccuggaacg

SEQ ID NO: 1034238 - RNA, 19 nt, Artificial Sequence
  Description of Artificial Sequence: Synthetic oligonucleotide
uccauuuccaagaaauacu

SEQ ID NO: 1034239 - RNA, 19 nt, Artificial Sequence
  Description of Artificial Sequence: Synthetic oligonucleotide
uugaggauucagaacauga

SEQ ID NO: 1034240 - RNA, 19 nt, Artificial Sequence
  Description of Artificial Sequence: Synthetic oligonucleotide
ucuauauuccuucucgguc

SEQ ID NO: 1034241 - RNA, 19 nt, Artificial Sequence
  Description of Artificial Sequence: Synthetic oligonucleotide
ugaggauucagaacaugag

SEQ ID NO: 1034242 - RNA, 19 nt, Artificial Sequence
  Description of Artificial Sequence: Synthetic oligonucleotide
auauacggaaauaacaucu

SEQ ID NO: 1034243 - RNA, 19 nt, Artificial Sequence
  Description of Artificial Sequence: Synthetic oligonucleotide
aauuugugguuccuggggu

SEQ ID NO: 1034244 - RNA, 19 nt, Artificial Sequence
  Description of Artificial Sequence: Synthetic oligonucleotide
uucauaaauuuugaggcug

SEQ ID NO: 1034245 - RNA, 19 nt, Artificial Sequence
  Description of Artificial Sequence: Synthetic oligonucleotide
agaauauacggaaauaaca

SEQ ID NO: 1034246 - RNA, 19 nt, Artificial Sequence
  Description of Artificial Sequence: Synthetic oligonucleotide
aacucguaauccucugaac

SEQ ID NO: 1034247 - RNA, 19 nt, Artificial Sequence
  Description of Artificial Sequence: Synthetic oligonucleotide
ugaagauaucuuuacggcu

SEQ ID NO: 1034248 - RNA, 19 nt, Artificial Sequence
  Description of Artificial Sequence: Synthetic oligonucleotide
uuuaagugccuuuguugcg

SEQ ID NO: 1034249 - RNA, 19 nt, Artificial Sequence
  Description of Artificial Sequence: Synthetic oligonucleotide
gacacaaccuccuuguuca

SEQ ID NO: 1034250 - RNA, 19 nt, Artificial Sequence
  Description of Artificial Sequence: Synthetic oligonucleotide
acggaaauaacaucuccag

SEQ ID NO: 1034251 - RNA, 19 nt, Artificial Sequence
  Description of Artificial Sequence: Synthetic oligonucleotide
guugcgucgaagcaaaaug

SEQ ID NO: 1034252 - RNA, 19 nt, Artificial Sequence
  Description of Artificial Sequence: Synthetic oligonucleotide
auucugguaagaauggagg

SEQ ID NO: 1034253 - RNA, 19 nt, Artificial Sequence
  Description of Artificial Sequence: Synthetic oligonucleotide
ucauucuuaugccuauacc

SEQ ID NO: 1034254 - RNA, 19 nt, Artificial Sequence
  Description of Artificial Sequence: Synthetic oligonucleotide
acucguaauccucugaacu

SEQ ID NO: 1034255 - RNA, 19 nt, Artificial Sequence
  Description of Artificial Sequence: Synthetic oligonucleotide
uucggucaaaagauucugg

SEQ ID NO: 1034256 - RNA, 19 nt, Artificial Sequence
  Description of Artificial Sequence: Synthetic oligonucleotide
uaucuuuacggcuuaguuc

SEQ ID NO: 1034257 - RNA, 19 nt, Artificial Sequence
  Description of Artificial Sequence: Synthetic oligonucleotide
ugcuaaauguguauucacu

SEQ ID NO: 1034258 - RNA, 19 nt, Artificial Sequence
  Description of Artificial Sequence: Synthetic oligonucleotide
cacaaaugccuuuagggac

SEQ ID NO: 1034259 - RNA, 19 nt, Artificial Sequence
  Description of Artificial Sequence: Synthetic oligonucleotide
uuagggacugcguucagga

SEQ ID NO: 1034260 - RNA, 19 nt, Artificial Sequence
  Description of Artificial Sequence: Synthetic oligonucleotide
cugggaugcuguaagaaag

SEQ ID NO: 1034261 - RNA, 19 nt, Artificial Sequence
  Description of Artificial Sequence: Synthetic oligonucleotide
aguuuucaacuucaggucu

SEQ ID NO: 1034262 - RNA, 19 nt, Artificial Sequence
  Description of Artificial Sequence: Synthetic oligonucleotide
uugcgucgaagcaaaaugc

SEQ ID NO: 1034263 - RNA, 19 nt, Artificial Sequence
  Description of Artificial Sequence: Synthetic oligonucleotide
aacuguuagcaucuuccug

SEQ ID NO: 1034264 - RNA, 19 nt, Artificial Sequence
  Description of Artificial Sequence: Synthetic oligonucleotide
auaaguaacuggguagaac

SEQ ID NO: 1034265 - RNA, 19 nt, Artificial Sequence
  Description of Artificial Sequence: Synthetic oligonucleotide
ucccuuuaauaucagaaua

SEQ ID NO: 1034266 - RNA, 19 nt, Artificial Sequence
  Description of Artificial Sequence: Synthetic oligonucleotide
cagaauauacggaaauaac

SEQ ID NO: 1034267 - RNA, 19 nt, Artificial Sequence
  Description of Artificial Sequence: Synthetic oligonucleotide
gaugaguaagacgucuggg

SEQ ID NO: 1034268 - RNA, 19 nt, Artificial Sequence
  Description of Artificial Sequence: Synthetic oligonucleotide
ucauaaauuuugaggcuga

SEQ ID NO: 1034269 - RNA, 19 nt, Artificial Sequence
  Description of Artificial Sequence: Synthetic oligonucleotide
uuccauuuccaagaaauac

SEQ ID NO: 1034270 - RNA, 19 nt, Artificial Sequence
  Description of Artificial Sequence: Synthetic oligonucleotide
uuuguugcgucgaagcaaa

SEQ ID NO: 1034271 - RNA, 19 nt, Artificial Sequence
  Description of Artificial Sequence: Synthetic oligonucleotide
ucucaauacugcauugcca

SEQ ID NO: 1034272 - RNA, 19 nt, Artificial Sequence
  Description of Artificial Sequence: Synthetic oligonucleotide
guuucaguuguuccggugc

SEQ ID NO: 1034273 - RNA, 19 nt, Artificial Sequence
  Description of Artificial Sequence: Synthetic oligonucleotide
cagauuaugccauucccac

SEQ ID NO: 1034274 - RNA, 19 nt, Artificial Sequence
  Description of Artificial Sequence: Synthetic oligonucleotide
ugacaguauauuccagacc

SEQ ID NO: 1034275 - RNA, 19 nt, Artificial Sequence
  Description of Artificial Sequence: Synthetic oligonucleotide
gacaggggaauguugugag

SEQ ID NO: 1034276 - RNA, 19 nt, Artificial Sequence
  Description of Artificial Sequence: Synthetic oligonucleotide
uggaucaaaucgcugcagc

SEQ ID NO: 1034277 - RNA, 19 nt, Artificial Sequence
  Description of Artificial Sequence: Synthetic oligonucleotide
uauaccuuucagaucgggu

SEQ ID NO: 1034278 - RNA, 19 nt, Artificial Sequence
  Description of Artificial Sequence: Synthetic oligonucleotide
cugauaugaugucacuucc

SEQ ID NO: 1034279 - RNA, 19 nt, Artificial Sequence
  Description of Artificial Sequence: Synthetic oligonucleotide
uauacggaaauaacaucuc

SEQ ID NO: 1034280 - RNA, 19 nt, Artificial Sequence
  Description of Artificial Sequence: Synthetic oligonucleotide
gaagccuauacaauccuug

SEQ ID NO: 1034281 - RNA, 19 nt, Artificial Sequence
  Description of Artificial Sequence: Synthetic oligonucleotide
aggcagauuaugccauucc

SEQ ID NO: 1034282 - RNA, 19 nt, Artificial Sequence
  Description of Artificial Sequence: Synthetic oligonucleotide
ggagaauucggucaaaaga

SEQ ID NO: 1034283 - RNA, 19 nt, Artificial Sequence
  Description of Artificial Sequence: Synthetic oligonucleotide
ucugauccccggaaaacug

SEQ ID NO: 1034284 - RNA, 19 nt, Artificial Sequence
  Description of Artificial Sequence: Synthetic oligonucleotide
ugcgucgaagcaaaaugcc

SEQ ID NO: 1034285 - RNA, 19 nt, Artificial Sequence
  Description of Artificial Sequence: Synthetic oligonucleotide
agauuaugccauucccacg

SEQ ID NO: 1034286 - RNA, 19 nt, Artificial Sequence
  Description of Artificial Sequence: Synthetic oligonucleotide
aagccuauacaauccuugu

SEQ ID NO: 1034287 - RNA, 19 nt, Artificial Sequence
  Description of Artificial Sequence: Synthetic oligonucleotide
uuucaguuguuccggugcc

SEQ ID NO: 1034288 - RNA, 19 nt, Artificial Sequence
  Description of Artificial Sequence: Synthetic oligonucleotide
cacauaugcacacuguguc

SEQ ID NO: 1034289 - RNA, 19 nt, Artificial Sequence
  Description of Artificial Sequence: Synthetic oligonucleotide
ucggucaaaagauucuggu

SEQ ID NO: 1034290 - RNA, 19 nt, Artificial Sequence
  Description of Artificial Sequence: Synthetic oligonucleotide
acuccauuggccugacaac

SEQ ID NO: 1034291 - RNA, 19 nt, Artificial Sequence
  Description of Artificial Sequence: Synthetic oligonucleotide
aauacugcauugccacacu

SEQ ID NO: 1034292 - RNA, 19 nt, Artificial Sequence
  Description of Artificial Sequence: Synthetic oligonucleotide
aauucggucaaaagauucu

SEQ ID NO: 1034293 - RNA, 19 nt, Artificial Sequence
  Description of Artificial Sequence: Synthetic oligonucleotide
uuuacggcuuaguucagaa

SEQ ID NO: 1034294 - RNA, 19 nt, Artificial Sequence
  Description of Artificial Sequence: Synthetic oligonucleotide
auaccuuucagaucgggua

SEQ ID NO: 1034295 - RNA, 19 nt, Artificial Sequence
  Description of Artificial Sequence: Synthetic oligonucleotide
gaguuuucgcugcaguggc

SEQ ID NO: 1034296 - RNA, 19 nt, Artificial Sequence
  Description of Artificial Sequence: Synthetic oligonucleotide
auaucuuuacggcuuaguu

SEQ ID NO: 1034297 - RNA, 19 nt, Artificial Sequence
  Description of Artificial Sequence: Synthetic oligonucleotide
auuacuucucccugguccu

SEQ ID NO: 1034298 - RNA, 19 nt, Artificial Sequence
  Description of Artificial Sequence: Synthetic oligonucleotide
cucguaauccucugaacug

SEQ ID NO: 1034299 - RNA, 19 nt, Artificial Sequence
  Description of Artificial Sequence: Synthetic oligonucleotide
gagcacaaaugccuuuagg

SEQ ID NO: 1034300 - RNA, 19 nt, Artificial Sequence
  Description of Artificial Sequence: Synthetic oligonucleotide
cauucuuaugccuauaccu

SEQ ID NO: 1034301 - RNA, 19 nt, Artificial Sequence
  Description of Artificial Sequence: Synthetic oligonucleotide
ucucggacauauucaacug

SEQ ID NO: 1034302 - RNA, 19 nt, Artificial Sequence
  Description of Artificial Sequence: Synthetic oligonucleotide
ugccaggcgaaucagcaga

SEQ ID NO: 1034303 - RNA, 19 nt, Artificial Sequence
  Description of Artificial Sequence: Synthetic oligonucleotide
ugauaugaugucacuuccu

SEQ ID NO: 1034304 - RNA, 19 nt, Artificial Sequence
  Description of Artificial Sequence: Synthetic oligonucleotide
aaggaguuuucgcugcagu

SEQ ID NO: 1034305 - RNA, 19 nt, Artificial Sequence
  Description of Artificial Sequence: Synthetic oligonucleotide
cugacaguugugaaugaug

SEQ ID NO: 1034306 - RNA, 19 nt, Artificial Sequence
  Description of Artificial Sequence: Synthetic oligonucleotide
gaauucggucaaaagauuc

SEQ ID NO: 1034307 - RNA, 19 nt, Artificial Sequence
  Description of Artificial Sequence: Synthetic oligonucleotide
augugcuauaaaccagcac

SEQ ID NO: 1034308 - RNA, 19 nt, Artificial Sequence
  Description of Artificial Sequence: Synthetic oligonucleotide
ggucaaaagauucugguaa

SEQ ID NO: 1034309 - RNA, 19 nt, Artificial Sequence
  Description of Artificial Sequence: Synthetic oligonucleotide
gccuauacaauccuuguug

SEQ ID NO: 1034310 - RNA, 19 nt, Artificial Sequence
  Description of Artificial Sequence: Synthetic oligonucleotide
aucaaaucgcugcagcagu

SEQ ID NO: 1034311 - RNA, 19 nt, Artificial Sequence
  Description of Artificial Sequence: Synthetic oligonucleotide
cuauacaauccuuguuggc

SEQ ID NO: 1034312 - RNA, 19 nt, Artificial Sequence
  Description of Artificial Sequence: Synthetic oligonucleotide
  modified_base (3)..(3): a, c, u, g, unknown or other
acngggaauucuuccuuuc

SEQ ID NO: 1034313 - RNA, 19 nt, Artificial Sequence
  Description of Artificial Sequence: Synthetic oligonucleotide
aggggaauguugugagggc

SEQ ID NO: 1034314 - RNA, 19 nt, Artificial Sequence
  Description of Artificial Sequence: Synthetic oligonucleotide
uuuagggacugcguucagg

SEQ ID NO: 1034315 - RNA, 19 nt, Artificial Sequence
  Description of Artificial Sequence: Synthetic oligonucleotide
agacaaucaguguccaugu

SEQ ID NO: 1034316 - RNA, 19 nt, Artificial Sequence
  Description of Artificial Sequence: Synthetic oligonucleotide
ugagauauauggguucugu

SEQ ID NO: 1034317 - RNA, 19 nt, Artificial Sequence
  Description of Artificial Sequence: Synthetic oligonucleotide
aagacaggggaauguugug

SEQ ID NO: 1034318 - RNA, 19 nt, Artificial Sequence
  Description of Artificial Sequence: Synthetic oligonucleotide
auccccggaaaacuguuag

SEQ ID NO: 1034319 - RNA, 19 nt, Artificial Sequence
  Description of Artificial Sequence: Synthetic oligonucleotide
gauggaucaaaucgcugca

SEQ ID NO: 1034320 - RNA, 19 nt, Artificial Sequence
  Description of Artificial Sequence: Synthetic oligonucleotide
aucacuucacacugccguc

SEQ ID NO: 1034321 - RNA, 19 nt, Artificial Sequence
  Description of Artificial Sequence: Synthetic oligonucleotide
uauauuccuucucggucca

SEQ ID NO: 1034322 - RNA, 19 nt, Artificial Sequence
  Description of Artificial Sequence: Synthetic oligonucleotide
ucguaauccucugaacugc

SEQ ID NO: 1034323 - RNA, 19 nt, Artificial Sequence
  Description of Artificial Sequence: Synthetic oligonucleotide
uuagggcugcaauaugugu

SEQ ID NO: 1034324 - RNA, 19 nt, Artificial Sequence
  Description of Artificial Sequence: Synthetic oligonucleotide
gcagcggcacaacagaugg

SEQ ID NO: 1034325 - RNA, 19 nt, Artificial Sequence
  Description of Artificial Sequence: Synthetic oligonucleotide
uauauggguucugucauuc

SEQ ID NO: 1034326 - RNA, 19 nt, Artificial Sequence
  Description of Artificial Sequence: Synthetic oligonucleotide
uucagaucggguaucccau

SEQ ID NO: 1034327 - RNA, 19 nt, Artificial Sequence
  Description of Artificial Sequence: Synthetic oligonucleotide
gacauauucaacugaugcu

SEQ ID NO: 1034328 - RNA, 19 nt, Artificial Sequence
  Description of Artificial Sequence: Synthetic oligonucleotide
auacuuuaguuccaucaaa

SEQ ID NO: 1034329 - RNA, 19 nt, Artificial Sequence
  Description of Artificial Sequence: Synthetic oligonucleotide
  modified_base (19)..(19): a, c, u, g, unknown or other
guauauuccagaccccacn

SEQ ID NO: 1034330 - RNA, 19 nt, Artificial Sequence
  Description of Artificial Sequence: Synthetic oligonucleotide
uuugucccaucccacugca

SEQ ID NO: 1034331 - RNA, 19 nt, Artificial Sequence
  Description of Artificial Sequence: Synthetic oligonucleotide
uauggguucugucauucuu

SEQ ID NO: 1034332 - RNA, 19 nt, Artificial Sequence
  Description of Artificial Sequence: Synthetic oligonucleotide
aaugcccugauagaaugaa

SEQ ID NO: 1034333 - RNA, 19 nt, Artificial Sequence
  Description of Artificial Sequence: Synthetic oligonucleotide
agaucucggacauauucaa

SEQ ID NO: 1034334 - RNA, 19 nt, Artificial Sequence
  Description of Artificial Sequence: Synthetic oligonucleotide
aguauauuccagaccccac

SEQ ID NO: 1034335 - RNA, 19 nt, Artificial Sequence
  Description of Artificial Sequence: Synthetic oligonucleotide
acugcguucaggagugagc

SEQ ID NO: 1034336 - RNA, 19 nt, Artificial Sequence
  Description of Artificial Sequence: Synthetic oligonucleotide
uuaaggaguuuucgcugca

SEQ ID NO: 1034337 - RNA, 19 nt, Artificial Sequence
  Description of Artificial Sequence: Synthetic oligonucleotide
gagauauauggguucuguc

SEQ ID NO: 1034338 - RNA, 19 nt, Artificial Sequence
  Description of Artificial Sequence: Synthetic oligonucleotide
aagugccuuuguugcgucg

SEQ ID NO: 1034339 - RNA, 19 nt, Artificial Sequence
  Description of Artificial Sequence: Synthetic oligonucleotide
gaacucguaauccucugaa

SEQ ID NO: 1034340 - RNA, 19 nt, Artificial Sequence
  Description of Artificial Sequence: Synthetic oligonucleotide
aauaaguaacuggguagaa

SEQ ID NO: 1034341 - RNA, 19 nt, Artificial Sequence
  Description of Artificial Sequence: Synthetic oligonucleotide
caucaaggagaauucgguc

SEQ ID NO: 1034342 - RNA, 19 nt, Artificial Sequence
  Description of Artificial Sequence: Synthetic oligonucleotide
auuaucaaaugaggggcug

SEQ ID NO: 1034343 - RNA, 19 nt, Artificial Sequence
  Description of Artificial Sequence: Synthetic oligonucleotide
ggaguuuucgcugcagugg

SEQ ID NO: 1034344 - RNA, 19 nt, Artificial Sequence
  Description of Artificial Sequence: Synthetic oligonucleotide
caauacugcauugccacac

SEQ ID NO: 1034345 - RNA, 19 nt, Artificial Sequence
  Description of Artificial Sequence: Synthetic oligonucleotide
ucaguuguuccggugccag

SEQ ID NO: 1034346 - RNA, 19 nt, Artificial Sequence
  Description of Artificial Sequence: Synthetic oligonucleotide
ugcuauaaaccagcacucc

SEQ ID NO: 1034347 - RNA, 19 nt, Artificial Sequence
  Description of Artificial Sequence: Synthetic oligonucleotide
uuaucaaaugaggggcuga

SEQ ID NO: 1034348 - RNA, 19 nt, Artificial Sequence
  Description of Artificial Sequence: Synthetic oligonucleotide
uaccuuucagaucggguau

SEQ ID NO: 1034349 - RNA, 19 nt, Artificial Sequence
  Description of Artificial Sequence: Synthetic oligonucleotide
ugcuguaagaaagcgccga

SEQ ID NO: 1034350 - RNA, 19 nt, Artificial Sequence
  Description of Artificial Sequence: Synthetic oligonucleotide
auucggucaaaagauucug

SEQ ID NO: 1034351 - RNA, 19 nt, Artificial Sequence
  Description of Artificial Sequence: Synthetic oligonucleotide
uucuuaugccuauaccuuu

SEQ ID NO: 1034352 - RNA, 19 nt, Artificial Sequence
  Description of Artificial Sequence: Synthetic oligonucleotide
agagcacaaaugccuuuag

SEQ ID NO: 1034353 - RNA, 19 nt, Artificial Sequence
  Description of Artificial Sequence: Synthetic oligonucleotide
uugcaauaaagaagccuau

SEQ ID NO: 1034354 - RNA, 19 nt, Artificial Sequence
  Description of Artificial Sequence: Synthetic oligonucleotide
  modified_base (2)..(2): a, c, u, g, unknown or other
cngggaauucuuccuuucc

SEQ ID NO: 1034355 - RNA, 19 nt, Artificial Sequence
  Description of Artificial Sequence: Synthetic oligonucleotide
ugccgucuuucuauauucc

SEQ ID NO: 1034356 - RNA, 19 nt, Artificial Sequence
  Description of Artificial Sequence: Synthetic oligonucleotide
ucaucacuccauuggccug

SEQ ID NO: 1034357 - RNA, 19 nt, Artificial Sequence
  Description of Artificial Sequence: Synthetic oligonucleotide
ccaaauucucauuuccaag

SEQ ID NO: 1034358 - RNA, 19 nt, Artificial Sequence
  Description of Artificial Sequence: Synthetic oligonucleotide
uguuccggugccaggccag

SEQ ID NO: 1034359 - RNA, 19 nt, Artificial Sequence
  Description of Artificial Sequence: Synthetic oligonucleotide
cugccgucuuucuauauuc

SEQ ID NO: 1034360 - RNA, 19 nt, Artificial Sequence
  Description of Artificial Sequence: Synthetic oligonucleotide
ugaggggcugagauauaug

SEQ ID NO: 1034361 - RNA, 19 nt, Artificial Sequence
  Description of Artificial Sequence: Synthetic oligonucleotide
uucucgguccagucacagg

SEQ ID NO: 1034362 - RNA, 19 nt, Artificial Sequence
  Description of Artificial Sequence: Synthetic oligonucleotide
ucguucucugggaugcugu

SEQ ID NO: 1034363 - RNA, 19 nt, Artificial Sequence
  Description of Artificial Sequence: Synthetic oligonucleotide
uucagaacaugagcuacaa

SEQ ID NO: 1034364 - RNA, 19 nt, Artificial Sequence
  Description of Artificial Sequence: Synthetic oligonucleotide
auuagggcugcaauaugug

SEQ ID NO: 1034365 - RNA, 19 nt, Artificial Sequence
  Description of Artificial Sequence: Synthetic oligonucleotide
cuauaccuuucagaucggg

SEQ ID NO: 1034366 - RNA, 19 nt, Artificial Sequence
  Description of Artificial Sequence: Synthetic oligonucleotide
uaaggaguuuucgcugcag

SEQ ID NO: 1034367 - RNA, 19 nt, Artificial Sequence
  Description of Artificial Sequence: Synthetic oligonucleotide
acagauggaucaaaucgcu

SEQ ID NO: 1034368 - RNA, 19 nt, Artificial Sequence
  Description of Artificial Sequence: Synthetic oligonucleotide
auucuuaugccuauaccuu

SEQ ID NO: 1034369 - RNA, 19 nt, Artificial Sequence
  Description of Artificial Sequence: Synthetic oligonucleotide
ucucugauccccggaaaac

SEQ ID NO: 1034370 - RNA, 19 nt, Artificial Sequence
  Description of Artificial Sequence: Synthetic oligonucleotide
ucuuuacggcuuaguucag

SEQ ID NO: 1034371 - RNA, 19 nt, Artificial Sequence
  Description of Artificial Sequence: Synthetic oligonucleotide
uaagacgucugggagguuu

SEQ ID NO: 1034372 - RNA, 19 nt, Artificial Sequence
  Description of Artificial Sequence: Synthetic oligonucleotide
gaagacaggggaauguugu

SEQ ID NO: 1034373 - RNA, 19 nt, Artificial Sequence
  Description of Artificial Sequence: Synthetic oligonucleotide
ugccuuuagggacugcguu

SEQ ID NO: 1034374 - RNA, 19 nt, Artificial Sequence
  Description of Artificial Sequence: Synthetic oligonucleotide
ccgaacugccacauuaagg

SEQ ID NO: 1034375 - RNA, 19 nt, Artificial Sequence
  Description of Artificial Sequence: Synthetic oligonucleotide
aaaugccuuuagggacugc

SEQ ID NO: 1034376 - RNA, 19 nt, Artificial Sequence
  Description of Artificial Sequence: Synthetic oligonucleotide
cgaacugccacauuaagga

SEQ ID NO: 1034377 - RNA, 19 nt, Artificial Sequence
  Description of Artificial Sequence: Synthetic oligonucleotide
cuugaagcagacacaaccu

SEQ ID NO: 1034378 - RNA, 19 nt, Artificial Sequence
  Description of Artificial Sequence: Synthetic oligonucleotide
agggaugaguaagacgucu

SEQ ID NO: 1034379 - RNA, 19 nt, Artificial Sequence
  Description of Artificial Sequence: Synthetic oligonucleotide
cagauggaucaaaucgcug

SEQ ID NO: 1034380 - RNA, 19 nt, Artificial Sequence
  Description of Artificial Sequence: Synthetic oligonucleotide
agaucggguaucccauuga

SEQ ID NO: 1034381 - RNA, 19 nt, Artificial Sequence
  Description of Artificial Sequence: Synthetic oligonucleotide
agguuuggaugcugaagga

SEQ ID NO: 1034382 - RNA, 19 nt, Artificial Sequence
  Description of Artificial Sequence: Synthetic oligonucleotide
gaucggguaucccauugaa

SEQ ID NO: 1034383 - RNA, 19 nt, Artificial Sequence
  Description of Artificial Sequence: Synthetic oligonucleotide
augcaauauuccaaauucu

SEQ ID NO: 1034384 - RNA, 19 nt, Artificial Sequence
  Description of Artificial Sequence: Synthetic oligonucleotide
ucaaaucgcugcagcaguu

SEQ ID NO: 1034385 - RNA, 19 nt, Artificial Sequence
  Description of Artificial Sequence: Synthetic oligonucleotide
agacaggggaauguuguga

SEQ ID NO: 1034386 - RNA, 19 nt, Artificial Sequence
  Description of Artificial Sequence: Synthetic oligonucleotide
cauaaauuuugaggcugac

SEQ ID NO: 1034387 - RNA, 19 nt, Artificial Sequence
  Description of Artificial Sequence: Synthetic oligonucleotide
gccuuuguugcgucgaagc

SEQ ID NO: 1034388 - RNA, 19 nt, Artificial Sequence
  Description of Artificial Sequence: Synthetic oligonucleotide
gacaacacuuuggcguaag

SEQ ID NO: 1034389 - RNA, 19 nt, Artificial Sequence
  Description of Artificial Sequence: Synthetic oligonucleotide
uguugcgucgaagcaaaau

SEQ ID NO: 1034390 - RNA, 19 nt, Artificial Sequence
  Description of Artificial Sequence: Synthetic oligonucleotide
cuuaguucagaaauuccau

SEQ ID NO: 1034391 - RNA, 19 nt, Artificial Sequence
  Description of Artificial Sequence: Synthetic oligonucleotide
auaaaccagcacuccuccu

SEQ ID NO: 1034392 - RNA, 19 nt, Artificial Sequence
  Description of Artificial Sequence: Synthetic oligonucleotide
ucugacaguugugaaugau

SEQ ID NO: 1034393 - RNA, 19 nt, Artificial Sequence
  Description of Artificial Sequence: Synthetic oligonucleotide
auaucagaauauacggaaa

SEQ ID NO: 1034394 - RNA, 19 nt, Artificial Sequence
  Description of Artificial Sequence: Synthetic oligonucleotide
uccccggaaaacuguuagc

SEQ ID NO: 1034395 - RNA, 19 nt, Artificial Sequence
  Description of Artificial Sequence: Synthetic oligonucleotide
auaacaucuccagcuuuca

SEQ ID NO: 1034396 - RNA, 19 nt, Artificial Sequence
  Description of Artificial Sequence: Synthetic oligonucleotide
guggcugauaugaugucac

SEQ ID NO: 1034397 - RNA, 19 nt, Artificial Sequence
  Description of Artificial Sequence: Synthetic oligonucleotide
ggccugacaacacuuuggc

SEQ ID NO: 1034398 - RNA, 19 nt, Artificial Sequence
  Description of Artificial Sequence: Synthetic oligonucleotide
ucacuucacacugccgucu

SEQ ID NO: 1034399 - RNA, 19 nt, Artificial Sequence
  Description of Artificial Sequence: Synthetic oligonucleotide
uaacuggguagaacauuau

SEQ ID NO: 1034400 - RNA, 19 nt, Artificial Sequence
  Description of Artificial Sequence: Synthetic oligonucleotide
auggaucaaaucgcugcag

SEQ ID NO: 1034401 - RNA, 19 nt, Artificial Sequence
  Description of Artificial Sequence: Synthetic oligonucleotide
uaugcacacugugucucug

SEQ ID NO: 1034402 - RNA, 19 nt, Artificial Sequence
  Description of Artificial Sequence: Synthetic oligonucleotide
gucaucacuccauuggccu

SEQ ID NO: 1034403 - RNA, 19 nt, Artificial Sequence
  Description of Artificial Sequence: Synthetic oligonucleotide
gaacguagacaugggcccc

SEQ ID NO: 1034404 - RNA, 19 nt, Artificial Sequence
  Description of Artificial Sequence: Synthetic oligonucleotide
gcguucaggagugagcagg

SEQ ID NO: 1034405 - RNA, 19 nt, Artificial Sequence
  Description of Artificial Sequence: Synthetic oligonucleotide
acgucugggagguuuggau

SEQ ID NO: 1034406 - RNA, 19 nt, Artificial Sequence
  Description of Artificial Sequence: Synthetic oligonucleotide
caugagcuacaacagcaga

SEQ ID NO: 1034407 - RNA, 19 nt, Artificial Sequence
  Description of Artificial Sequence: Synthetic oligonucleotide
aagacgucugggagguuug

SEQ ID NO: 1034408 - RNA, 19 nt, Artificial Sequence
  Description of Artificial Sequence: Synthetic oligonucleotide
ugauccccggaaaacuguu

SEQ ID NO: 1034409 - RNA, 19 nt, Artificial Sequence
  Description of Artificial Sequence: Synthetic oligonucleotide
ccggaaaacuguuagcauc

SEQ ID NO: 1034410 - RNA, 19 nt, Artificial Sequence
  Description of Artificial Sequence: Synthetic oligonucleotide
caugugcuauaaaccagca

SEQ ID NO: 1034411 - RNA, 19 nt, Artificial Sequence
  Description of Artificial Sequence: Synthetic oligonucleotide
gugcuauaaaccagcacuc

SEQ ID NO: 1034412 - RNA, 19 nt, Artificial Sequence
  Description of Artificial Sequence: Synthetic oligonucleotide
caugggccccucucaauac

SEQ ID NO: 1034413 - RNA, 19 nt, Artificial Sequence
  Description of Artificial Sequence: Synthetic oligonucleotide
acaacacuuuggcguaaga

SEQ ID NO: 1034414 - RNA, 19 nt, Artificial Sequence
  Description of Artificial Sequence: Synthetic oligonucleotide
cagccuugccagccaaugg

SEQ ID NO: 1034415 - RNA, 19 nt, Artificial Sequence
  Description of Artificial Sequence: Synthetic oligonucleotide
gaucucggacauauucaac

SEQ ID NO: 1034416 - RNA, 19 nt, Artificial Sequence
  Description of Artificial Sequence: Synthetic oligonucleotide
gcaauauguguaguuuugc

SEQ ID NO: 1034417 - RNA, 19 nt, Artificial Sequence
  Description of Artificial Sequence: Synthetic oligonucleotide
agccuauacaauccuuguu

SEQ ID NO: 1034418 - RNA, 19 nt, Artificial Sequence
  Description of Artificial Sequence: Synthetic oligonucleotide
ugcguucaggagugagcag

SEQ ID NO: 1034419 - RNA, 19 nt, Artificial Sequence
  Description of Artificial Sequence: Synthetic oligonucleotide
ccacauuaaggaguuuucg

SEQ ID NO: 1034420 - RNA, 19 nt, Artificial Sequence
  Description of Artificial Sequence: Synthetic oligonucleotide
ccugacaacacuuuggcgu

SEQ ID NO: 1034421 - RNA, 19 nt, Artificial Sequence
  Description of Artificial Sequence: Synthetic oligonucleotide
agccauauuuggccuuugu

SEQ ID NO: 1034422 - RNA, 19 nt, Artificial Sequence
  Description of Artificial Sequence: Synthetic oligonucleotide
uauuuggccuuugucccau

SEQ ID NO: 1034423 - RNA, 19 nt, Artificial Sequence
  Description of Artificial Sequence: Synthetic oligonucleotide
ucgaagcaaaaugcccuga

SEQ ID NO: 1034424 - RNA, 19 nt, Artificial Sequence
  Description of Artificial Sequence: Synthetic oligonucleotide
agauaucuuuacggcuuag

SEQ ID NO: 1034425 - RNA, 19 nt, Artificial Sequence
  Description of Artificial Sequence: Synthetic oligonucleotide
uggcugauaugaugucacu

SEQ ID NO: 1034426 - RNA, 19 nt, Artificial Sequence
  Description of Artificial Sequence: Synthetic oligonucleotide
gauaucuuuacggcuuagu

SEQ ID NO: 1034427 - RNA, 19 nt, Artificial Sequence
  Description of Artificial Sequence: Synthetic oligonucleotide
ugccuuuguugcgucgaag

SEQ ID NO: 1034428 - RNA, 19 nt, Artificial Sequence
  Description of Artificial Sequence: Synthetic oligonucleotide
cuucugugcuuuuauauuu

SEQ ID NO: 1034429 - RNA, 19 nt, Artificial Sequence
  Description of Artificial Sequence: Synthetic oligonucleotide
augcuguaagaaagcgccg

SEQ ID NO: 1034430 - RNA, 19 nt, Artificial Sequence
  Description of Artificial Sequence: Synthetic oligonucleotide
cugcguucaggagugagca

SEQ ID NO: 1034431 - RNA, 19 nt, Artificial Sequence
  Description of Artificial Sequence: Synthetic oligonucleotide
uucaguuguuccggugcca

SEQ ID NO: 1034432 - RNA, 19 nt, Artificial Sequence
  Description of Artificial Sequence: Synthetic oligonucleotide
uuggcaucgcuaagacaau

SEQ ID NO: 1034433 - RNA, 19 nt, Artificial Sequence
  Description of Artificial Sequence: Synthetic oligonucleotide
ggcgaaucagcagagcuuc

SEQ ID NO: 1034434 - RNA, 19 nt, Artificial Sequence
  Description of Artificial Sequence: Synthetic oligonucleotide
agaauucggucaaaagauu

SEQ ID NO: 1034435 - RNA, 19 nt, Artificial Sequence
  Description of Artificial Sequence: Synthetic oligonucleotide
gccugacaacacuuuggcg

SEQ ID NO: 1034436 - RNA, 19 nt, Artificial Sequence
  Description of Artificial Sequence: Synthetic oligonucleotide
  modified_base (7)..(7): a, c, u, g, unknown or other
ccccacngggaauucuucc

SEQ ID NO: 1034437 - RNA, 19 nt, Artificial Sequence
  Description of Artificial Sequence: Synthetic oligonucleotide
gcagauuaugccauuccca

SEQ ID NO: 1034438 - RNA, 19 nt, Artificial Sequence
  Description of Artificial Sequence: Synthetic oligonucleotide
ggguagaacauuaucaaau

SEQ ID NO: 1034439 - RNA, 19 nt, Artificial Sequence
  Description of Artificial Sequence: Synthetic oligonucleotide
ggggaauguugugagggcc

SEQ ID NO: 1034440 - RNA, 19 nt, Artificial Sequence
  Description of Artificial Sequence: Synthetic oligonucleotide
gggaauguugugagggccc

SEQ ID NO: 1034441 - RNA, 19 nt, Artificial Sequence
  Description of Artificial Sequence: Synthetic oligonucleotide
gggacugcguucaggagug

SEQ ID NO: 1034442 - RNA, 19 nt, Artificial Sequence
  Description of Artificial Sequence: Synthetic oligonucleotide
cuuuagggacugcguucag

SEQ ID NO: 1034443 - RNA, 19 nt, Artificial Sequence
  Description of Artificial Sequence: Synthetic oligonucleotide
augcccugauagaaugaag

SEQ ID NO: 1034444 - RNA, 19 nt, Artificial Sequence
  Description of Artificial Sequence: Synthetic oligonucleotide
cugagauauauggguucug

SEQ ID NO: 1034445 - RNA, 19 nt, Artificial Sequence
  Description of Artificial Sequence: Synthetic oligonucleotide
agggugugccaggcgaauc

SEQ ID NO: 1034446 - RNA, 19 nt, Artificial Sequence
  Description of Artificial Sequence: Synthetic oligonucleotide
ccuggaacguagacauggg

SEQ ID NO: 1034447 - RNA, 19 nt, Artificial Sequence
  Description of Artificial Sequence: Synthetic oligonucleotide
gcuauaaaccagcacuccu

SEQ ID NO: 1034448 - RNA, 19 nt, Artificial Sequence
  Description of Artificial Sequence: Synthetic oligonucleotide
cacacugccgucuuucuau

SEQ ID NO: 1034449 - RNA, 19 nt, Artificial Sequence
  Description of Artificial Sequence: Synthetic oligonucleotide
gccgaacugccacauuaag

SEQ ID NO: 1034450 - RNA, 19 nt, Artificial Sequence
  Description of Artificial Sequence: Synthetic oligonucleotide
agacgucugggagguuugg

SEQ ID NO: 1034451 - RNA, 19 nt, Artificial Sequence
  Description of Artificial Sequence: Synthetic oligonucleotide
cugccagagucacuguaca

SEQ ID NO: 1034452 - RNA, 19 nt, Artificial Sequence
  Description of Artificial Sequence: Synthetic oligonucleotide
cccuaauaaugaagcauuc

SEQ ID NO: 1034453 - RNA, 19 nt, Artificial Sequence
  Description of Artificial Sequence: Synthetic oligonucleotide
uccugcauuagggcugcaa

SEQ ID NO: 1034454 - RNA, 19 nt, Artificial Sequence
  Description of Artificial Sequence: Synthetic oligonucleotide
cacuguacaugugcuauaa

SEQ ID NO: 1034455 - RNA, 19 nt, Artificial Sequence
  Description of Artificial Sequence: Synthetic oligonucleotide
caggcgaaucagcagagcu

SEQ ID NO: 1034456 - RNA, 19 nt, Artificial Sequence
  Description of Artificial Sequence: Synthetic oligonucleotide
gcgucgaagcaaaaugccc

SEQ ID NO: 1034457 - RNA, 19 nt, Artificial Sequence
  Description of Artificial Sequence: Synthetic oligonucleotide
  modified_base (8)..(8): a, c, u, g, unknown or other
accccacngggaauucuuc

SEQ ID NO: 1034458 - RNA, 19 nt, Artificial Sequence
  Description of Artificial Sequence: Synthetic oligonucleotide
agaagccuauacaauccuu

SEQ ID NO: 1034459 - RNA, 19 nt, Artificial Sequence
  Description of Artificial Sequence: Synthetic oligonucleotide
gccuuuagggacugcguuc

SEQ ID NO: 1034460 - RNA, 19 nt, Artificial Sequence
  Description of Artificial Sequence: Synthetic oligonucleotide
cuuuacggcuuaguucaga

SEQ ID NO: 1034461 - RNA, 19 nt, Artificial Sequence
  Description of Artificial Sequence: Synthetic oligonucleotide
cguucaggagugagcaggg

SEQ ID NO: 1034462 - RNA, 19 nt, Artificial Sequence
  Description of Artificial Sequence: Synthetic oligonucleotide
gggugugccaggcgaauca

SEQ ID NO: 1034463 - RNA, 19 nt, Artificial Sequence
  Description of Artificial Sequence: Synthetic oligonucleotide
uuguugcgucgaagcaaaa

SEQ ID NO: 1034464 - RNA, 19 nt, Artificial Sequence
  Description of Artificial Sequence: Synthetic oligonucleotide
ccuauaccuuucagaucgg

SEQ ID NO: 1034465 - RNA, 19 nt, Artificial Sequence
  Description of Artificial Sequence: Synthetic oligonucleotide
ugacaacacuuuggcguaa

SEQ ID NO: 1034466 - RNA, 19 nt, Artificial Sequence
  Description of Artificial Sequence: Synthetic oligonucleotide
gacgucugggagguuugga

SEQ ID NO: 1034467 - RNA, 19 nt, Artificial Sequence
  Description of Artificial Sequence: Synthetic oligonucleotide
acaccaaguuuaagugccu

SEQ ID NO: 1034468 - RNA, 19 nt, Artificial Sequence
  Description of Artificial Sequence: Synthetic oligonucleotide
guuugucguucucugggau

SEQ ID NO: 1034469 - RNA, 19 nt, Artificial Sequence
  Description of Artificial Sequence: Synthetic oligonucleotide
acggcuuaguucagaaauu

SEQ ID NO: 1034470 - RNA, 19 nt, Artificial Sequence
  Description of Artificial Sequence: Synthetic oligonucleotide
ggugugccaggcgaaucag

SEQ ID NO: 1034471 - RNA, 19 nt, Artificial Sequence
  Description of Artificial Sequence: Synthetic oligonucleotide
cugauccccggaaaacugu

SEQ ID NO: 1034472 - RNA, 19 nt, Artificial Sequence
  Description of Artificial Sequence: Synthetic oligonucleotide
aguuuucgcugcaguggcu

SEQ ID NO: 1034473 - RNA, 19 nt, Artificial Sequence
  Description of Artificial Sequence: Synthetic oligonucleotide
cccucucaauacugcauug

SEQ ID NO: 1034474 - RNA, 19 nt, Artificial Sequence
  Description of Artificial Sequence: Synthetic oligonucleotide
gguaucccauugaagauau

SEQ ID NO: 1034475 - RNA, 19 nt, Artificial Sequence
  Description of Artificial Sequence: Synthetic oligonucleotide
cauuggccugacaacacuu

SEQ ID NO: 1034476 - RNA, 19 nt, Artificial Sequence
  Description of Artificial Sequence: Synthetic oligonucleotide
ggaauguugugagggccca

SEQ ID NO: 1034477 - RNA, 19 nt, Artificial Sequence
  Description of Artificial Sequence: Synthetic oligonucleotide
cugauagaaugaagcccua

SEQ ID NO: 1034478 - RNA, 19 nt, Artificial Sequence
  Description of Artificial Sequence: Synthetic oligonucleotide
ccccggaaaacuguuagca

SEQ ID NO: 1034479 - RNA, 19 nt, Artificial Sequence
  Description of Artificial Sequence: Synthetic oligonucleotide
gauccccggaaaacuguua

SEQ ID NO: 1034480 - RNA, 19 nt, Artificial Sequence
  Description of Artificial Sequence: Synthetic oligonucleotide
ggguaucccauugaagaua

SEQ ID NO: 1034481 - RNA, 19 nt, Artificial Sequence
  Description of Artificial Sequence: Synthetic oligonucleotide
gcugagauauauggguucu

SEQ ID NO: 1034482 - RNA, 19 nt, Artificial Sequence
  Description of Artificial Sequence: Synthetic oligonucleotide
gggaauucuuccuuuccuu

SEQ ID NO: 1034483 - RNA, 19 nt, Artificial Sequence
  Description of Artificial Sequence: Synthetic oligonucleotide
guuccggugccaggccagc

SEQ ID NO: 1034484 - RNA, 19 nt, Artificial Sequence
  Description of Artificial Sequence: Synthetic oligonucleotide
  modified_base (4)..(4): a, c, u, g, unknown or other
cacngggaauucuuccuuu

SEQ ID NO: 1034485 - RNA, 19 nt, Artificial Sequence
  Description of Artificial Sequence: Synthetic oligonucleotide
gcugcaauauguguaguuu

SEQ ID NO: 1034486 - RNA, 19 nt, Artificial Sequence
  Description of Artificial Sequence: Synthetic oligonucleotide
gcccuaauaaugaagcauu

SEQ ID NO: 1034487 - RNA, 19 nt, Artificial Sequence
  Description of Artificial Sequence: Synthetic oligonucleotide
  modified_base (9)..(9): a, c, u, g, unknown or other
gaccccacngggaauucuu

SEQ ID NO: 1034488 - RNA, 19 nt, Artificial Sequence
  Description of Artificial Sequence: Synthetic oligonucleotide
ggccuuugucccaucccac

SEQ ID NO: 1034489 - RNA, 19 nt, Artificial Sequence
  Description of Artificial Sequence: Synthetic oligonucleotide
gguccaaguacaagccaua

SEQ ID NO: 1034490 - RNA, 19 nt, Artificial Sequence
  Description of Artificial Sequence: Synthetic oligonucleotide
gggccccucucaauacugc

SEQ ID NO: 1034491 - RNA, 19 nt, Artificial Sequence
  Description of Artificial Sequence: Synthetic oligonucleotide
cagcggcacaacagaugga

SEQ ID NO: 1034492 - RNA, 19 nt, Artificial Sequence
  Description of Artificial Sequence: Synthetic oligonucleotide
ggcugauaugaugucacuu

SEQ ID NO: 1034493 - RNA, 19 nt, Artificial Sequence
  Description of Artificial Sequence: Synthetic oligonucleotide
gccuuugucccaucccacu

SEQ ID NO: 1034494 - RNA, 19 nt, Artificial Sequence
  Description of Artificial Sequence: Synthetic oligonucleotide
ccugcauuagggcugcaau

SEQ ID NO: 1034495 - RNA, 19 nt, Artificial Sequence
  Description of Artificial Sequence: Synthetic oligonucleotide
  modified_base (6)..(6): a, c, u, g, unknown or other
cccacngggaauucuuccu

SEQ ID NO: 1034496 - RNA, 19 nt, Artificial Sequence
  Description of Artificial Sequence: Synthetic oligonucleotide
agcagaucucggacauauu

SEQ ID NO: 1034497 - RNA, 19 nt, Artificial Sequence
  Description of Artificial Sequence: Synthetic oligonucleotide
guaauccucugaacugcuu

SEQ ID NO: 1034498 - RNA, 19 nt, Artificial Sequence
  Description of Artificial Sequence: Synthetic oligonucleotide
caaaucgcugcagcaguuu

SEQ ID NO: 1034499 - RNA, 19 nt, Artificial Sequence
  Description of Artificial Sequence: Synthetic oligonucleotide
gagggugugccaggcgaau

SEQ ID NO: 1034500 - RNA, 19 nt, Artificial Sequence
  Description of Artificial Sequence: Synthetic oligonucleotide
gcggcacaacagauggauc

SEQ ID NO: 1034501 - RNA, 19 nt, Artificial Sequence
  Description of Artificial Sequence: Synthetic oligonucleotide
ggccacauaugcacacugu

SEQ ID NO: 1034502 - RNA, 19 nt, Artificial Sequence
  Description of Artificial Sequence: Synthetic oligonucleotide
caccaaguuuaagugccuu

SEQ ID NO: 1034503 - RNA, 19 nt, Artificial Sequence
  Description of Artificial Sequence: Synthetic oligonucleotide
cacugccgucuuucuauau

SEQ ID NO: 1034504 - RNA, 19 nt, Artificial Sequence
  Description of Artificial Sequence: Synthetic oligonucleotide
cacuucacacugccgucuu

SEQ ID NO: 1034505 - RNA, 19 nt, Artificial Sequence
  Description of Artificial Sequence: Synthetic oligonucleotide
cguaauccucugaacugcu

SEQ ID NO: 1034506 - RNA, 19 nt, Artificial Sequence
  Description of Artificial Sequence: Synthetic oligonucleotide
cccggaaaacuguuagcau

SEQ ID NO: 1034507 - RNA, 19 nt, Artificial Sequence
  Description of Artificial Sequence: Synthetic oligonucleotide
gcgaaucagcagagcuuca

SEQ ID NO: 1034508 - RNA, 19 nt, Artificial Sequence
  Description of Artificial Sequence: Synthetic oligonucleotide
  modified_base (5)..(5): a, c, u, g, unknown or other
ccacngggaauucuuccuu

SEQ ID NO: 1034509 - RNA, 19 nt, Artificial Sequence
  Description of Artificial Sequence: Synthetic oligonucleotide
ccccucucaauacugcauu

SEQ ID NO: 1034510 - RNA, 19 nt, Artificial Sequence
  Description of Artificial Sequence: Synthetic oligonucleotide
gccccucucaauacugcau

SEQ ID NO: 1034511 - RNA, 19 nt, Artificial Sequence
  Description of Artificial Sequence: Synthetic oligonucleotide
  modified_base (12)..(12): a, c, u, g, unknown or other
ccagaccccacngggaauu

SEQ ID NO: 1034512 - RNA, 19 nt, Artificial Sequence
  Description of Artificial Sequence: Synthetic oligonucleotide
cccaggcaacuugcucuuc

SEQ ID NO: 1034513 - RNA, 19 nt, Artificial Sequence
  Description of Artificial Sequence: Synthetic oligonucleotide
ggacugcguucaggaguga

SEQ ID NO: 1034514 - RNA, 19 nt, Artificial Sequence
  Description of Artificial Sequence: Synthetic oligonucleotide
guaagacgucugggagguu

SEQ ID NO: 1034515 - RNA, 19 nt, Artificial Sequence
  Description of Artificial Sequence: Synthetic oligonucleotide
gcagccgaacugccacauu

SEQ ID NO: 1034516 - RNA, 19 nt, Artificial Sequence
  Description of Artificial Sequence: Synthetic oligonucleotide
cguagacaugggccccucu

SEQ ID NO: 1034517 - RNA, 19 nt, Artificial Sequence
  Description of Artificial Sequence: Synthetic oligonucleotide
auaagaauccgguacacac

SEQ ID NO: 1034518 - RNA, 19 nt, Artificial Sequence
  Description of Artificial Sequence: Synthetic oligonucleotide
aucggugcaaccuugcucc

SEQ ID NO: 1034519 - RNA, 19 nt, Artificial Sequence
  Description of Artificial Sequence: Synthetic oligonucleotide
uguucgaccaacucggugg

SEQ ID NO: 1034520 - RNA, 19 nt, Artificial Sequence
  Description of Artificial Sequence: Synthetic oligonucleotide
uucauguucaaaguguugg

SEQ ID NO: 1034521 - RNA, 19 nt, Artificial Sequence
  Description of Artificial Sequence: Synthetic oligonucleotide
aucaguggcaauaagaauc

SEQ ID NO: 1034522 - RNA, 19 nt, Artificial Sequence
  Description of Artificial Sequence: Synthetic oligonucleotide
ugagccucccagaagaagg

SEQ ID NO: 1034523 - RNA, 19 nt, Artificial Sequence
  Description of Artificial Sequence: Synthetic oligonucleotide
uguuccacgagccacgaug

SEQ ID NO: 1034524 - RNA, 19 nt, Artificial Sequence
  Description of Artificial Sequence: Synthetic oligonucleotide
aaucggugcaaccuugcuc

SEQ ID NO: 1034525 - RNA, 19 nt, Artificial Sequence
  Description of Artificial Sequence: Synthetic oligonucleotide
aacgauaaugcaguccuuc

SEQ ID NO: 1034526 - RNA, 19 nt, Artificial Sequence
  Description of Artificial Sequence: Synthetic oligonucleotide
cucgacagcaugcaaaagg

SEQ ID NO: 1034527 - RNA, 19 nt, Artificial Sequence
  Description of Artificial Sequence: Synthetic oligonucleotide
aucaccaggaaucggaucu

SEQ ID NO: 1034528 - RNA, 19 nt, Artificial Sequence
  Description of Artificial Sequence: Synthetic oligonucleotide
agcccaaacaaucccgacc

SEQ ID NO: 1034529 - RNA, 19 nt, Artificial Sequence
  Description of Artificial Sequence: Synthetic oligonucleotide
cuugaggccacaucagugg

SEQ ID NO: 1034530 - RNA, 19 nt, Artificial Sequence
  Description of Artificial Sequence: Synthetic oligonucleotide
aguuugaucucgcacucuc

SEQ ID NO: 1034531 - RNA, 19 nt, Artificial Sequence
  Description of Artificial Sequence: Synthetic oligonucleotide
uccgcagcaucauacaaag

SEQ ID NO: 1034532 - RNA, 19 nt, Artificial Sequence
  Description of Artificial Sequence: Synthetic oligonucleotide
uccaguuugaucucgcacu

SEQ ID NO: 1034533 - RNA, 19 nt, Artificial Sequence
  Description of Artificial Sequence: Synthetic oligonucleotide
aaugcggaguuggagcagc

SEQ ID NO: 1034534 - RNA, 19 nt, Artificial Sequence
  Description of Artificial Sequence: Synthetic oligonucleotide
gaaggucuggaccaagugc

SEQ ID NO: 1034535 - RNA, 19 nt, Artificial Sequence
  Description of Artificial Sequence: Synthetic oligonucleotide
ugagcuuugcacuguguag

SEQ ID NO: 1034536 - RNA, 19 nt, Artificial Sequence
  Description of Artificial Sequence: Synthetic oligonucleotide
aacuuccgcagcaucauac

SEQ ID NO: 1034537 - RNA, 19 nt, Artificial Sequence
  Description of Artificial Sequence: Synthetic oligonucleotide
ugagugaguugcgugaggg

SEQ ID NO: 1034538 - RNA, 19 nt, Artificial Sequence
  Description of Artificial Sequence: Synthetic oligonucleotide
ugcucagcaaucugguagg

SEQ ID NO: 1034539 - RNA, 19 nt, Artificial Sequence
  Description of Artificial Sequence: Synthetic oligonucleotide
gacuugacaggucuugcag

SEQ ID NO: 1034540 - RNA, 19 nt, Artificial Sequence
  Description of Artificial Sequence: Synthetic oligonucleotide
aggaguggcgaucacuacg

SEQ ID NO: 1034541 - RNA, 19 nt, Artificial Sequence
  Description of Artificial Sequence: Synthetic oligonucleotide
gaggccgcaccauaguugg

SEQ ID NO: 1034542 - RNA, 19 nt, Artificial Sequence
  Description of Artificial Sequence: Synthetic oligonucleotide
ugcacagcccaaacaaucc

SEQ ID NO: 1034543 - RNA, 19 nt, Artificial Sequence
  Description of Artificial Sequence: Synthetic oligonucleotide
ugagagcccgagcucagcg

SEQ ID NO: 1034544 - RNA, 19 nt, Artificial Sequence
  Description of Artificial Sequence: Synthetic oligonucleotide
ugaaaucggugcaaccuug

SEQ ID NO: 1034545 - RNA, 19 nt, Artificial Sequence
  Description of Artificial Sequence: Synthetic oligonucleotide
ggcaauaagaauccgguac

SEQ ID NO: 1034546 - RNA, 19 nt, Artificial Sequence
  Description of Artificial Sequence: Synthetic oligonucleotide
acaacuugcacagugggga

SEQ ID NO: 1034547 - RNA, 19 nt, Artificial Sequence
  Description of Artificial Sequence: Synthetic oligonucleotide
acauuguuccacgagccac

SEQ ID NO: 1034548 - RNA, 19 nt, Artificial Sequence
  Description of Artificial Sequence: Synthetic oligonucleotide
cucucugcgaaccacguug

SEQ ID NO: 1034549 - RNA, 19 nt, Artificial Sequence
  Description of Artificial Sequence: Synthetic oligonucleotide
agugaaaucggugcaaccu

SEQ ID NO: 1034550 - RNA, 19 nt, Artificial Sequence
  Description of Artificial Sequence: Synthetic oligonucleotide
cauuguuccacgagccacg

SEQ ID NO: 1034551 - RNA, 19 nt, Artificial Sequence
  Description of Artificial Sequence: Synthetic oligonucleotide
acgagccacgaugagagcc

SEQ ID NO: 1034552 - RNA, 19 nt, Artificial Sequence
  Description of Artificial Sequence: Synthetic oligonucleotide
uacguguggcuuccgagag

SEQ ID NO: 1034553 - RNA, 19 nt, Artificial Sequence
  Description of Artificial Sequence: Synthetic oligonucleotide
uucgagcugagugaguugc

SEQ ID NO: 1034554 - RNA, 19 nt, Artificial Sequence
  Description of Artificial Sequence: Synthetic oligonucleotide
agaagaugccguauggguc

SEQ ID NO: 1034555 - RNA, 19 nt, Artificial Sequence
  Description of Artificial Sequence: Synthetic oligonucleotide
caugccgccaacgauaaug

SEQ ID NO: 1034556 - RNA, 19 nt, Artificial Sequence
  Description of Artificial Sequence: Synthetic oligonucleotide
auguucaggaccucggccu

SEQ ID NO: 1034557 - RNA, 19 nt, Artificial Sequence
  Description of Artificial Sequence: Synthetic oligonucleotide
acuacguguggcuuccgag

SEQ ID NO: 1034558 - RNA, 19 nt, Artificial Sequence
  Description of Artificial Sequence: Synthetic oligonucleotide
gaaugcagccuggaggagg

SEQ ID NO: 1034559 - RNA, 19 nt, Artificial Sequence
  Description of Artificial Sequence: Synthetic oligonucleotide
cacagcccaaacaaucccg

SEQ ID NO: 1034560 - RNA, 19 nt, Artificial Sequence
  Description of Artificial Sequence: Synthetic oligonucleotide
aucacuacguguggcuucc

SEQ ID NO: 1034561 - RNA, 19 nt, Artificial Sequence
  Description of Artificial Sequence: Synthetic oligonucleotide
gucagcguggcacugaaca

SEQ ID NO: 1034562 - RNA, 19 nt, Artificial Sequence
  Description of Artificial Sequence: Synthetic oligonucleotide
cuggaugugcggcuguucg

SEQ ID NO: 1034563 - RNA, 19 nt, Artificial Sequence
  Description of Artificial Sequence: Synthetic oligonucleotide
uuccgagagagcuccagug

SEQ ID NO: 1034564 - RNA, 19 nt, Artificial Sequence
  Description of Artificial Sequence: Synthetic oligonucleotide
uugaccugcgugaggaugu

SEQ ID NO: 1034565 - RNA, 19 nt, Artificial Sequence
  Description of Artificial Sequence: Synthetic oligonucleotide
agcuuugcacuguguagac

SEQ ID NO: 1034566 - RNA, 19 nt, Artificial Sequence
  Description of Artificial Sequence: Synthetic oligonucleotide
uccgagagagcuccagugc

SEQ ID NO: 1034567 - RNA, 19 nt, Artificial Sequence
  Description of Artificial Sequence: Synthetic oligonucleotide
aaaucggugcaaccuugcu

SEQ ID NO: 1034568 - RNA, 19 nt, Artificial Sequence
  Description of Artificial Sequence: Synthetic oligonucleotide
aaccuugcuccagcaaucg

SEQ ID NO: 1034569 - RNA, 19 nt, Artificial Sequence
  Description of Artificial Sequence: Synthetic oligonucleotide
cauguucaaaguguuggag

SEQ ID NO: 1034570 - RNA, 19 nt, Artificial Sequence
  Description of Artificial Sequence: Synthetic oligonucleotide
ugcgugagggccuggcacg

SEQ ID NO: 1034571 - RNA, 19 nt, Artificial Sequence
  Description of Artificial Sequence: Synthetic oligonucleotide
acaaucccgacccugcaga

SEQ ID NO: 1034572 - RNA, 19 nt, Artificial Sequence
  Description of Artificial Sequence: Synthetic oligonucleotide
aagcucaacuuccgcagca

SEQ ID NO: 1034573 - RNA, 19 nt, Artificial Sequence
  Description of Artificial Sequence: Synthetic oligonucleotide
aguuucugucgacgaaggg

SEQ ID NO: 1034574 - RNA, 19 nt, Artificial Sequence
  Description of Artificial Sequence: Synthetic oligonucleotide
gaauccgguacacacugga

SEQ ID NO: 1034575 - RNA, 19 nt, Artificial Sequence
  Description of Artificial Sequence: Synthetic oligonucleotide
agcgaaccccgccaugccc

SEQ ID NO: 1034576 - RNA, 19 nt, Artificial Sequence
  Description of Artificial Sequence: Synthetic oligonucleotide
cugaacagcagcgucugcc

SEQ ID NO: 1034577 - RNA, 19 nt, Artificial Sequence
  Description of Artificial Sequence: Synthetic oligonucleotide
augcaaccgagcugcaccg

SEQ ID NO: 1034578 - RNA, 19 nt, Artificial Sequence
  Description of Artificial Sequence: Synthetic oligonucleotide
aaucggucggccucaucca

SEQ ID NO: 1034579 - RNA, 19 nt, Artificial Sequence
  Description of Artificial Sequence: Synthetic oligonucleotide
uugaucucgcacucucugc

SEQ ID NO: 1034580 - RNA, 19 nt, Artificial Sequence
  Description of Artificial Sequence: Synthetic oligonucleotide
acucggaaugcggaguugg

SEQ ID NO: 1034581 - RNA, 19 nt, Artificial Sequence
  Description of Artificial Sequence: Synthetic oligonucleotide
uuccgcagcaucauacaaa

SEQ ID NO: 1034582 - RNA, 19 nt, Artificial Sequence
  Description of Artificial Sequence: Synthetic oligonucleotide
acgauaaugcaguccuuca

SEQ ID NO: 1034583 - RNA, 19 nt, Artificial Sequence
  Description of Artificial Sequence: Synthetic oligonucleotide
guggcgaucacuacgugug

SEQ ID NO: 1034584 - RNA, 19 nt, Artificial Sequence
  Description of Artificial Sequence: Synthetic oligonucleotide
guagaucuuggggagcccg

SEQ ID NO: 1034585 - RNA, 19 nt, Artificial Sequence
  Description of Artificial Sequence: Synthetic oligonucleotide
ugaagcgcuuguucuguug

SEQ ID NO: 1034586 - RNA, 19 nt, Artificial Sequence
  Description of Artificial Sequence: Synthetic oligonucleotide
guaggaucuggagacucgg

SEQ ID NO: 1034587 - RNA, 19 nt, Artificial Sequence
  Description of Artificial Sequence: Synthetic oligonucleotide
accaagugcaccagguagg

SEQ ID NO: 1034588 - RNA, 19 nt, Artificial Sequence
  Description of Artificial Sequence: Synthetic oligonucleotide
uccucgacagcaugcaaaa

SEQ ID NO: 1034589 - RNA, 19 nt, Artificial Sequence
  Description of Artificial Sequence: Synthetic oligonucleotide
augccgccaacgauaaugc

SEQ ID NO: 1034590 - RNA, 19 nt, Artificial Sequence
  Description of Artificial Sequence: Synthetic oligonucleotide
gaagcucaacuuccgcagc

SEQ ID NO: 1034591 - RNA, 19 nt, Artificial Sequence
  Description of Artificial Sequence: Synthetic oligonucleotide
uugcgugagggccuggcac

SEQ ID NO: 1034592 - RNA, 19 nt, Artificial Sequence
  Description of Artificial Sequence: Synthetic oligonucleotide
gcccaaacaaucccgaccc

SEQ ID NO: 1034593 - RNA, 19 nt, Artificial Sequence
  Description of Artificial Sequence: Synthetic oligonucleotide
gaucuuggggagcccgggg

SEQ ID NO: 1034594 - RNA, 19 nt, Artificial Sequence
  Description of Artificial Sequence: Synthetic oligonucleotide
guagcgcuggucaagcugc

SEQ ID NO: 1034595 - RNA, 19 nt, Artificial Sequence
  Description of Artificial Sequence: Synthetic oligonucleotide
gaaguacaaaggcagcugu

SEQ ID NO: 1034596 - RNA, 19 nt, Artificial Sequence
  Description of Artificial Sequence: Synthetic oligonucleotide
acgaugagagcccgagcuc

SEQ ID NO: 1034597 - RNA, 19 nt, Artificial Sequence
  Description of Artificial Sequence: Synthetic oligonucleotide
accaacucgguggauguag

SEQ ID NO: 1034598 - RNA, 19 nt, Artificial Sequence
  Description of Artificial Sequence: Synthetic oligonucleotide
cagugugauggccuguccc

SEQ ID NO: 1034599 - RNA, 19 nt, Artificial Sequence
  Description of Artificial Sequence: Synthetic oligonucleotide
ggcagaagaugccguaugg

SEQ ID NO: 1034600 - RNA, 19 nt, Artificial Sequence
  Description of Artificial Sequence: Synthetic oligonucleotide
uguucgagcugagugaguu

SEQ ID NO: 1034601 - RNA, 19 nt, Artificial Sequence
  Description of Artificial Sequence: Synthetic oligonucleotide
gaaaucggugcaaccuugc

SEQ ID NO: 1034602 - RNA, 19 nt, Artificial Sequence
  Description of Artificial Sequence: Synthetic oligonucleotide
gaucacuacguguggcuuc

SEQ ID NO: 1034603 - RNA, 19 nt, Artificial Sequence
  Description of Artificial Sequence: Synthetic oligonucleotide
ugccguauggguccucaga

SEQ ID NO: 1034604 - RNA, 19 nt, Artificial Sequence
  Description of Artificial Sequence: Synthetic oligonucleotide
ucgagcugagugaguugcg

SEQ ID NO: 1034605 - RNA, 19 nt, Artificial Sequence
  Description of Artificial Sequence: Synthetic oligonucleotide
agcugcgaaccauggaaug

SEQ ID NO: 1034606 - RNA, 19 nt, Artificial Sequence
  Description of Artificial Sequence: Synthetic oligonucleotide
acacacuggacuugaacuu

SEQ ID NO: 1034607 - RNA, 19 nt, Artificial Sequence
  Description of Artificial Sequence: Synthetic oligonucleotide
gcaauaagaauccgguaca

SEQ ID NO: 1034608 - RNA, 19 nt, Artificial Sequence
  Description of Artificial Sequence: Synthetic oligonucleotide
uggcgaucacuacgugugg

SEQ ID NO: 1034609 - RNA, 19 nt, Artificial Sequence
  Description of Artificial Sequence: Synthetic oligonucleotide
ugcgcacuggaauggcugc

SEQ ID NO: 1034610 - RNA, 19 nt, Artificial Sequence
  Description of Artificial Sequence: Synthetic oligonucleotide
caauaagaauccgguacac

SEQ ID NO: 1034611 - RNA, 19 nt, Artificial Sequence
  Description of Artificial Sequence: Synthetic oligonucleotide
cagugaaaucggugcaacc

SEQ ID NO: 1034612 - RNA, 19 nt, Artificial Sequence
  Description of Artificial Sequence: Synthetic oligonucleotide
gauguccaggccccuugag

SEQ ID NO: 1034613 - RNA, 19 nt, Artificial Sequence
  Description of Artificial Sequence: Synthetic oligonucleotide
acuuccgcagcaucauaca

SEQ ID NO: 1034614 - RNA, 19 nt, Artificial Sequence
  Description of Artificial Sequence: Synthetic oligonucleotide
agcagcgucugccugcgca

SEQ ID NO: 1034615 - RNA, 19 nt, Artificial Sequence
  Description of Artificial Sequence: Synthetic oligonucleotide
gagugcagugccaccgugg

SEQ ID NO: 1034616 - RNA, 19 nt, Artificial Sequence
  Description of Artificial Sequence: Synthetic oligonucleotide
cugccgacauuguuccacg

SEQ ID NO: 1034617 - RNA, 19 nt, Artificial Sequence
  Description of Artificial Sequence: Synthetic oligonucleotide
gagugaguugcgugagggc

SEQ ID NO: 1034618 - RNA, 19 nt, Artificial Sequence
  Description of Artificial Sequence: Synthetic oligonucleotide
uccaugccgccaacgauaa

SEQ ID NO: 1034619 - RNA, 19 nt, Artificial Sequence
  Description of Artificial Sequence: Synthetic oligonucleotide
cugcgaaccacguugaccu

SEQ ID NO: 1034620 - RNA, 19 nt, Artificial Sequence
  Description of Artificial Sequence: Synthetic oligonucleotide
uguccaugccgccaacgau

SEQ ID NO: 1034621 - RNA, 19 nt, Artificial Sequence
  Description of Artificial Sequence: Synthetic oligonucleotide
aagcgcuuguucuguugcu

SEQ ID NO: 1034622 - RNA, 19 nt, Artificial Sequence
  Description of Artificial Sequence: Synthetic oligonucleotide
acguugaccugcgugagga

SEQ ID NO: 1034623 - RNA, 19 nt, Artificial Sequence
  Description of Artificial Sequence: Synthetic oligonucleotide
augugcggcuguucgagcu

SEQ ID NO: 1034624 - RNA, 19 nt, Artificial Sequence
  Description of Artificial Sequence: Synthetic oligonucleotide
guugaccugcgugaggaug

SEQ ID NO: 1034625 - RNA, 19 nt, Artificial Sequence
  Description of Artificial Sequence: Synthetic oligonucleotide
agcucagcgaaccccgcca

SEQ ID NO: 1034626 - RNA, 19 nt, Artificial Sequence
  Description of Artificial Sequence: Synthetic oligonucleotide
cugcgcacuggaauggcug

SEQ ID NO: 1034627 - RNA, 19 nt, Artificial Sequence
  Description of Artificial Sequence: Synthetic oligonucleotide
ucccgacccugcagaaugg

SEQ ID NO: 1034628 - RNA, 19 nt, Artificial Sequence
  Description of Artificial Sequence: Synthetic oligonucleotide
accuugcuccagcaaucgg

SEQ ID NO: 1034629 - RNA, 19 nt, Artificial Sequence
  Description of Artificial Sequence: Synthetic oligonucleotide
uggcugggaugcaaccgag

SEQ ID NO: 1034630 - RNA, 19 nt, Artificial Sequence
  Description of Artificial Sequence: Synthetic oligonucleotide
guuucugucgacgaagggu

SEQ ID NO: 1034631 - RNA, 19 nt, Artificial Sequence
  Description of Artificial Sequence: Synthetic oligonucleotide
cuacguguggcuuccgaga

SEQ ID NO: 1034632 - RNA, 19 nt, Artificial Sequence
  Description of Artificial Sequence: Synthetic oligonucleotide
cugccugcgcacuggaaug

SEQ ID NO: 1034633 - RNA, 19 nt, Artificial Sequence
  Description of Artificial Sequence: Synthetic oligonucleotide
gugucggucagcguggcac

SEQ ID NO: 1034634 - RNA, 19 nt, Artificial Sequence
  Description of Artificial Sequence: Synthetic oligonucleotide
cacuguccgaaccggggcc

SEQ ID NO: 1034635 - RNA, 19 nt, Artificial Sequence
  Description of Artificial Sequence: Synthetic oligonucleotide
guucacacucaggucugcg

SEQ ID NO: 1034636 - RNA, 19 nt, Artificial Sequence
  Description of Artificial Sequence: Synthetic oligonucleotide
cugagugaguugcgugagg

SEQ ID NO: 1034637 - RNA, 19 nt, Artificial Sequence
  Description of Artificial Sequence: Synthetic oligonucleotide
ugcagugaaaucggugcaa

SEQ ID NO: 1034638 - RNA, 19 nt, Artificial Sequence
  Description of Artificial Sequence: Synthetic oligonucleotide
ucugucgacgaagggucug

SEQ ID NO: 1034639 - RNA, 19 nt, Artificial Sequence
  Description of Artificial Sequence: Synthetic oligonucleotide
ggagacucggaaugcggag

SEQ ID NO: 1034640 - RNA, 19 nt, Artificial Sequence
  Description of Artificial Sequence: Synthetic oligonucleotide
ugcaaccuugcuccagcaa

SEQ ID NO: 1034641 - RNA, 19 nt, Artificial Sequence
  Description of Artificial Sequence: Synthetic oligonucleotide
ggaaugcggaguuggagca

SEQ ID NO: 1034642 - RNA, 19 nt, Artificial Sequence
  Description of Artificial Sequence: Synthetic oligonucleotide
gggacuagcagcaacaggu

SEQ ID NO: 1034643 - RNA, 19 nt, Artificial Sequence
  Description of Artificial Sequence: Synthetic oligonucleotide
uggaugugcggcuguucga

SEQ ID NO: 1034644 - RNA, 19 nt, Artificial Sequence
  Description of Artificial Sequence: Synthetic oligonucleotide
gaugagagcccgagcucag

SEQ ID NO: 1034645 - RNA, 19 nt, Artificial Sequence
  Description of Artificial Sequence: Synthetic oligonucleotide
aaccccgccaugcccgaga

SEQ ID NO: 1034646 - RNA, 19 nt, Artificial Sequence
  Description of Artificial Sequence: Synthetic oligonucleotide
ugccugcgcacuggaaugg

SEQ ID NO: 1034647 - RNA, 19 nt, Artificial Sequence
  Description of Artificial Sequence: Synthetic oligonucleotide
cuccacuguccgaaccggg

SEQ ID NO: 1034648 - RNA, 19 nt, Artificial Sequence
  Description of Artificial Sequence: Synthetic oligonucleotide
agugccugugccaccaugu

SEQ ID NO: 1034649 - RNA, 19 nt, Artificial Sequence
  Description of Artificial Sequence: Synthetic oligonucleotide
uuccacgagccacgaugag

SEQ ID NO: 1034650 - RNA, 19 nt, Artificial Sequence
  Description of Artificial Sequence: Synthetic oligonucleotide
accugcgugaggauguuca

SEQ ID NO: 1034651 - RNA, 19 nt, Artificial Sequence
  Description of Artificial Sequence: Synthetic oligonucleotide
agacaggggacuagcagca

SEQ ID NO: 1034652 - RNA, 19 nt, Artificial Sequence
  Description of Artificial Sequence: Synthetic oligonucleotide
cacgaugagagcccgagcu

SEQ ID NO: 1034653 - RNA, 19 nt, Artificial Sequence
  Description of Artificial Sequence: Synthetic oligonucleotide
agcgggagcgugcacgggu

SEQ ID NO: 1034654 - RNA, 19 nt, Artificial Sequence
  Description of Artificial Sequence: Synthetic oligonucleotide
gccgccaacgauaaugcag

SEQ ID NO: 1034655 - RNA, 19 nt, Artificial Sequence
  Description of Artificial Sequence: Synthetic oligonucleotide
ccuggugggugucaggacc

SEQ ID NO: 1034656 - RNA, 19 nt, Artificial Sequence
  Description of Artificial Sequence: Synthetic oligonucleotide
gaaugcggaguuggagcag

SEQ ID NO: 1034657 - RNA, 19 nt, Artificial Sequence
  Description of Artificial Sequence: Synthetic oligonucleotide
agacucggaaugcggaguu

SEQ ID NO: 1034658 - RNA, 19 nt, Artificial Sequence
  Description of Artificial Sequence: Synthetic oligonucleotide
guucgagcugagugaguug

SEQ ID NO: 1034659 - RNA, 19 nt, Artificial Sequence
  Description of Artificial Sequence: Synthetic oligonucleotide
uuuggaaggucuggaccaa

SEQ ID NO: 1034660 - RNA, 19 nt, Artificial Sequence
  Description of Artificial Sequence: Synthetic oligonucleotide
gucgacgaagggucugccc

SEQ ID NO: 1034661 - RNA, 19 nt, Artificial Sequence
  Description of Artificial Sequence: Synthetic oligonucleotide
ggggacuagcagcaacagg

SEQ ID NO: 1034662 - RNA, 19 nt, Artificial Sequence
  Description of Artificial Sequence: Synthetic oligonucleotide
gccguauggguccucagac

SEQ ID NO: 1034663 - RNA, 19 nt, Artificial Sequence
  Description of Artificial Sequence: Synthetic oligonucleotide
cacguugaccugcgugagg

SEQ ID NO: 1034664 - RNA, 19 nt, Artificial Sequence
  Description of Artificial Sequence: Synthetic oligonucleotide
cugagcuuugcacugugua

SEQ ID NO: 1034665 - RNA, 19 nt, Artificial Sequence
  Description of Artificial Sequence: Synthetic oligonucleotide
cuccucgacagcaugcaaa

SEQ ID NO: 1034666 - RNA, 19 nt, Artificial Sequence
  Description of Artificial Sequence: Synthetic oligonucleotide
cggaaugcggaguuggagc

SEQ ID NO: 1034667 - RNA, 19 nt, Artificial Sequence
  Description of Artificial Sequence: Synthetic oligonucleotide
uggaagugggcagggccgc

SEQ ID NO: 1034668 - RNA, 19 nt, Artificial Sequence
  Description of Artificial Sequence: Synthetic oligonucleotide
gaugccguauggguccuca

SEQ ID NO: 1034669 - RNA, 19 nt, Artificial Sequence
  Description of Artificial Sequence: Synthetic oligonucleotide
acuccccaguuucugucga

SEQ ID NO: 1034670 - RNA, 19 nt, Artificial Sequence
  Description of Artificial Sequence: Synthetic oligonucleotide
agcagcugcgaaccaugga

SEQ ID NO: 1034671 - RNA, 19 nt, Artificial Sequence
  Description of Artificial Sequence: Synthetic oligonucleotide
ggcgugggcugcuucagcc

SEQ ID NO: 1034672 - RNA, 19 nt, Artificial Sequence
  Description of Artificial Sequence: Synthetic oligonucleotide
aggggacuagcagcaacag

SEQ ID NO: 1034673 - RNA, 19 nt, Artificial Sequence
  Description of Artificial Sequence: Synthetic oligonucleotide
cugagccucccagaagaag

SEQ ID NO: 1034674 - RNA, 19 nt, Artificial Sequence
  Description of Artificial Sequence: Synthetic oligonucleotide
guucgaccaacucggugga

SEQ ID NO: 1034675 - RNA, 19 nt, Artificial Sequence
  Description of Artificial Sequence: Synthetic oligonucleotide
agcaacagguucacacuca

SEQ ID NO: 1034676 - RNA, 19 nt, Artificial Sequence
  Description of Artificial Sequence: Synthetic oligonucleotide
ccaacgauaaugcaguccu

SEQ ID NO: 1034677 - RNA, 19 nt, Artificial Sequence
  Description of Artificial Sequence: Synthetic oligonucleotide
ugcaaccgagcugcaccgg

SEQ ID NO: 1034678 - RNA, 19 nt, Artificial Sequence
  Description of Artificial Sequence: Synthetic oligonucleotide
gagccacgaugagagcccg

SEQ ID NO: 1034679 - RNA, 19 nt, Artificial Sequence
  Description of Artificial Sequence: Synthetic oligonucleotide
gcacagcccaaacaauccc

SEQ ID NO: 1034680 - RNA, 19 nt, Artificial Sequence
  Description of Artificial Sequence: Synthetic oligonucleotide
gccgacauuguuccacgag

SEQ ID NO: 1034681 - RNA, 19 nt, Artificial Sequence
  Description of Artificial Sequence: Synthetic oligonucleotide
ccgagagagcuccagugcc

SEQ ID NO: 1034682 - RNA, 19 nt, Artificial Sequence
  Description of Artificial Sequence: Synthetic oligonucleotide
ggcuguucgagcugaguga

SEQ ID NO: 1034683 - RNA, 19 nt, Artificial Sequence
  Description of Artificial Sequence: Synthetic oligonucleotide
ugucgacgaagggucugcc

SEQ ID NO: 1034684 - RNA, 19 nt, Artificial Sequence
  Description of Artificial Sequence: Synthetic oligonucleotide
cugcacgggcuguucgacc

SEQ ID NO: 1034685 - RNA, 19 nt, Artificial Sequence
  Description of Artificial Sequence: Synthetic oligonucleotide
ugugucggucagcguggca

SEQ ID NO: 1034686 - RNA, 19 nt, Artificial Sequence
  Description of Artificial Sequence: Synthetic oligonucleotide
ucggucggccucauccauc

SEQ ID NO: 1034687 - RNA, 19 nt, Artificial Sequence
  Description of Artificial Sequence: Synthetic oligonucleotide
agcgugcacggguggaagu

SEQ ID NO: 1034688 - RNA, 19 nt, Artificial Sequence
  Description of Artificial Sequence: Synthetic oligonucleotide
uccgaaccggggccugagc

SEQ ID NO: 1034689 - RNA, 19 nt, Artificial Sequence
  Description of Artificial Sequence: Synthetic oligonucleotide
gagcgugcacggguggaag

SEQ ID NO: 1034690 - RNA, 19 nt, Artificial Sequence
  Description of Artificial Sequence: Synthetic oligonucleotide
cugcagugaaaucggugca

SEQ ID NO: 1034691 - RNA, 19 nt, Artificial Sequence
  Description of Artificial Sequence: Synthetic oligonucleotide
ugucaggaccaggcagaag

SEQ ID NO: 1034692 - RNA, 19 nt, Artificial Sequence
  Description of Artificial Sequence: Synthetic oligonucleotide
ugcgaaccacguugaccug

SEQ ID NO: 1034693 - RNA, 19 nt, Artificial Sequence
  Description of Artificial Sequence: Synthetic oligonucleotide
aagaugccguauggguccu

SEQ ID NO: 1034694 - RNA, 19 nt, Artificial Sequence
  Description of Artificial Sequence: Synthetic oligonucleotide
gccaacgauaaugcagucc

SEQ ID NO: 1034695 - RNA, 19 nt, Artificial Sequence
  Description of Artificial Sequence: Synthetic oligonucleotide
cuuccgcagcaucauacaa

SEQ ID NO: 1034696 - RNA, 19 nt, Artificial Sequence
  Description of Artificial Sequence: Synthetic oligonucleotide
gaguggcgaucacuacgug

SEQ ID NO: 1034697 - RNA, 19 nt, Artificial Sequence
  Description of Artificial Sequence: Synthetic oligonucleotide
ugccgacauuguuccacga

SEQ ID NO: 1034698 - RNA, 19 nt, Artificial Sequence
  Description of Artificial Sequence: Synthetic oligonucleotide
ugccgccaacgauaaugca

SEQ ID NO: 1034699 - RNA, 19 nt, Artificial Sequence
  Description of Artificial Sequence: Synthetic oligonucleotide
accggcgugggcugcuuca

SEQ ID NO: 1034700 - RNA, 19 nt, Artificial Sequence
  Description of Artificial Sequence: Synthetic oligonucleotide
ggacuugacaggucuugca

SEQ ID NO: 1034701 - RNA, 19 nt, Artificial Sequence
  Description of Artificial Sequence: Synthetic oligonucleotide
augccguauggguccucag

SEQ ID NO: 1034702 - RNA, 19 nt, Artificial Sequence
  Description of Artificial Sequence: Synthetic oligonucleotide
agagagcuccagugccugu

SEQ ID NO: 1034703 - RNA, 19 nt, Artificial Sequence
  Description of Artificial Sequence: Synthetic oligonucleotide
agcgucugccugcgcacug

SEQ ID NO: 1034704 - RNA, 19 nt, Artificial Sequence
  Description of Artificial Sequence: Synthetic oligonucleotide
gcugguuuuggaaggucug

SEQ ID NO: 1034705 - RNA, 19 nt, Artificial Sequence
  Description of Artificial Sequence: Synthetic oligonucleotide
gaaccggggccugagccuc

SEQ ID NO: 1034706 - RNA, 19 nt, Artificial Sequence
  Description of Artificial Sequence: Synthetic oligonucleotide
gcaaccgagcugcaccggc

SEQ ID NO: 1034707 - RNA, 19 nt, Artificial Sequence
  Description of Artificial Sequence: Synthetic oligonucleotide
agugggcagggccgcgcag

SEQ ID NO: 1034708 - RNA, 19 nt, Artificial Sequence
  Description of Artificial Sequence: Synthetic oligonucleotide
gcacucucugcgaaccacg

SEQ ID NO: 1034709 - RNA, 19 nt, Artificial Sequence
  Description of Artificial Sequence: Synthetic oligonucleotide
gcugagugaguugcgugag

SEQ ID NO: 1034710 - RNA, 19 nt, Artificial Sequence
  Description of Artificial Sequence: Synthetic oligonucleotide
ggccgcaccauaguuggcc

SEQ ID NO: 1034711 - RNA, 19 nt, Artificial Sequence
  Description of Artificial Sequence: Synthetic oligonucleotide
guugcgugagggccuggca

SEQ ID NO: 1034712 - RNA, 19 nt, Artificial Sequence
  Description of Artificial Sequence: Synthetic oligonucleotide
gacucggaaugcggaguug

SEQ ID NO: 1034713 - RNA, 19 nt, Artificial Sequence
  Description of Artificial Sequence: Synthetic oligonucleotide
guccaugccgccaacgaua

SEQ ID NO: 1034714 - RNA, 19 nt, Artificial Sequence
  Description of Artificial Sequence: Synthetic oligonucleotide
ugcggcuguucgagcugag

SEQ ID NO: 1034715 - RNA, 19 nt, Artificial Sequence
  Description of Artificial Sequence: Synthetic oligonucleotide
gcugccgacauuguuccac

SEQ ID NO: 1034716 - RNA, 19 nt, Artificial Sequence
  Description of Artificial Sequence: Synthetic oligonucleotide
ccaguuugaucucgcacuc

SEQ ID NO: 1034717 - RNA, 19 nt, Artificial Sequence
  Description of Artificial Sequence: Synthetic oligonucleotide
gugaaaucggugcaaccuu

SEQ ID NO: 1034718 - RNA, 19 nt, Artificial Sequence
  Description of Artificial Sequence: Synthetic oligonucleotide
ccgaaccggggccugagcc

SEQ ID NO: 1034719 - RNA, 19 nt, Artificial Sequence
  Description of Artificial Sequence: Synthetic oligonucleotide
acuguccgaaccggggccu

SEQ ID NO: 1034720 - RNA, 19 nt, Artificial Sequence
  Description of Artificial Sequence: Synthetic oligonucleotide
cagcgaaccccgccaugcc

SEQ ID NO: 1034721 - RNA, 19 nt, Artificial Sequence
  Description of Artificial Sequence: Synthetic oligonucleotide
ucggugcaaccuugcucca

SEQ ID NO: 1034722 - RNA, 19 nt, Artificial Sequence
  Description of Artificial Sequence: Synthetic oligonucleotide
cucggaaugcggaguugga

SEQ ID NO: 1034723 - RNA, 19 nt, Artificial Sequence
  Description of Artificial Sequence: Synthetic oligonucleotide
acucucugcgaaccacguu

SEQ ID NO: 1034724 - RNA, 19 nt, Artificial Sequence
  Description of Artificial Sequence: Synthetic oligonucleotide
ccaagugcaccagguaggc

SEQ ID NO: 1034725 - RNA, 19 nt, Artificial Sequence
  Description of Artificial Sequence: Synthetic oligonucleotide
gagacucggaaugcggagu

SEQ ID NO: 1034726 - RNA, 19 nt, Artificial Sequence
  Description of Artificial Sequence: Synthetic oligonucleotide
ucacuacguguggcuuccg

SEQ ID NO: 1034727 - RNA, 19 nt, Artificial Sequence
  Description of Artificial Sequence: Synthetic oligonucleotide
cuccccaguuucugucgac

SEQ ID NO: 1034728 - RNA, 19 nt, Artificial Sequence
  Description of Artificial Sequence: Synthetic oligonucleotide
gcacgccuggcagaggccg

SEQ ID NO: 1034729 - RNA, 19 nt, Artificial Sequence
  Description of Artificial Sequence: Synthetic oligonucleotide
accgagcugcaccggcgug

SEQ ID NO: 1034730 - RNA, 19 nt, Artificial Sequence
  Description of Artificial Sequence: Synthetic oligonucleotide
cgaaccacguugaccugcg

SEQ ID NO: 1034731 - RNA, 19 nt, Artificial Sequence
  Description of Artificial Sequence: Synthetic oligonucleotide
ggagugcagugccaccgug

SEQ ID NO: 1034732 - RNA, 19 nt, Artificial Sequence
  Description of Artificial Sequence: Synthetic oligonucleotide
gacgaagggucugccccac

SEQ ID NO: 1034733 - RNA, 19 nt, Artificial Sequence
  Description of Artificial Sequence: Synthetic oligonucleotide
guucaggaccucggccucc

SEQ ID NO: 1034734 - RNA, 19 nt, Artificial Sequence
  Description of Artificial Sequence: Synthetic oligonucleotide
uuguuccacgagccacgau

SEQ ID NO: 1034735 - RNA, 19 nt, Artificial Sequence
  Description of Artificial Sequence: Synthetic oligonucleotide
cacgccuggcagaggccgc

SEQ ID NO: 1034736 - RNA, 19 nt, Artificial Sequence
  Description of Artificial Sequence: Synthetic oligonucleotide
gcuccacuguccgaaccgg

SEQ ID NO: 1034737 - RNA, 19 nt, Artificial Sequence
  Description of Artificial Sequence: Synthetic oligonucleotide
agcgcuuguucuguugcuu

SEQ ID NO: 1034738 - RNA, 19 nt, Artificial Sequence
  Description of Artificial Sequence: Synthetic oligonucleotide
gccgcaccauaguuggccc

SEQ ID NO: 1034739 - RNA, 19 nt, Artificial Sequence
  Description of Artificial Sequence: Synthetic oligonucleotide
cacuacguguggcuuccga

SEQ ID NO: 1034740 - RNA, 19 nt, Artificial Sequence
  Description of Artificial Sequence: Synthetic oligonucleotide
ggagcugcgcaggugguca

SEQ ID NO: 1034741 - RNA, 19 nt, Artificial Sequence
  Description of Artificial Sequence: Synthetic oligonucleotide
gcgaaccacguugaccugc

SEQ ID NO: 1034742 - RNA, 19 nt, Artificial Sequence
  Description of Artificial Sequence: Synthetic oligonucleotide
ggguguugugguugaugac

SEQ ID NO: 1034743 - RNA, 19 nt, Artificial Sequence
  Description of Artificial Sequence: Synthetic oligonucleotide
uguccgaaccggggccuga

SEQ ID NO: 1034744 - RNA, 19 nt, Artificial Sequence
  Description of Artificial Sequence: Synthetic oligonucleotide
gcuuccgagagagcuccag

SEQ ID NO: 1034745 - RNA, 19 nt, Artificial Sequence
  Description of Artificial Sequence: Synthetic oligonucleotide
uggcccgcacuccccaguu

SEQ ID NO: 1034746 - RNA, 19 nt, Artificial Sequence
  Description of Artificial Sequence: Synthetic oligonucleotide
cggcuguucgagcugagug

SEQ ID NO: 1034747 - RNA, 19 nt, Artificial Sequence
  Description of Artificial Sequence: Synthetic oligonucleotide
ggaguggcgaucacuacgu

SEQ ID NO: 1034748 - RNA, 19 nt, Artificial Sequence
  Description of Artificial Sequence: Synthetic oligonucleotide
caaucccgacccugcagaa

SEQ ID NO: 1034749 - RNA, 19 nt, Artificial Sequence
  Description of Artificial Sequence: Synthetic oligonucleotide
guuugaucucgcacucucu

SEQ ID NO: 1034750 - RNA, 19 nt, Artificial Sequence
  Description of Artificial Sequence: Synthetic oligonucleotide
cacgggcuguucgaccaac

SEQ ID NO: 1034751 - RNA, 19 nt, Artificial Sequence
  Description of Artificial Sequence: Synthetic oligonucleotide
accaggaaucggaucuuuu

SEQ ID NO: 1034752 - RNA, 19 nt, Artificial Sequence
  Description of Artificial Sequence: Synthetic oligonucleotide
guccgaaccggggccugag

SEQ ID NO: 1034753 - RNA, 19 nt, Artificial Sequence
  Description of Artificial Sequence: Synthetic oligonucleotide
agaugccguauggguccuc

SEQ ID NO: 1034754 - RNA, 19 nt, Artificial Sequence
  Description of Artificial Sequence: Synthetic oligonucleotide
aggccgcaccauaguuggc

SEQ ID NO: 1034755 - RNA, 19 nt, Artificial Sequence
  Description of Artificial Sequence: Synthetic oligonucleotide
caccauguccaugccgcca

SEQ ID NO: 1034756 - RNA, 19 nt, Artificial Sequence
  Description of Artificial Sequence: Synthetic oligonucleotide
gucggucagcguggcacug

SEQ ID NO: 1034757 - RNA, 19 nt, Artificial Sequence
  Description of Artificial Sequence: Synthetic oligonucleotide
cacucucugcgaaccacgu

SEQ ID NO: 1034758 - RNA, 19 nt, Artificial Sequence
  Description of Artificial Sequence: Synthetic oligonucleotide
ccgagcugcaccggcgugg

SEQ ID NO: 1034759 - RNA, 19 nt, Artificial Sequence
  Description of Artificial Sequence: Synthetic oligonucleotide
ccgccaacgauaaugcagu

SEQ ID NO: 1034760 - RNA, 19 nt, Artificial Sequence
  Description of Artificial Sequence: Synthetic oligonucleotide
ggaccaagugcaccaggua

SEQ ID NO: 1034761 - RNA, 19 nt, Artificial Sequence
  Description of Artificial Sequence: Synthetic oligonucleotide
gagcccgagcucagcgaac

SEQ ID NO: 1034762 - RNA, 19 nt, Artificial Sequence
  Description of Artificial Sequence: Synthetic oligonucleotide
gcgaucacuacguguggcu

SEQ ID NO: 1034763 - RNA, 19 nt, Artificial Sequence
  Description of Artificial Sequence: Synthetic oligonucleotide
gaaccccgccaugcccgag

SEQ ID NO: 1034764 - RNA, 19 nt, Artificial Sequence
  Description of Artificial Sequence: Synthetic oligonucleotide
gaccugcgugaggauguuc

SEQ ID NO: 1034765 - RNA, 19 nt, Artificial Sequence
  Description of Artificial Sequence: Synthetic oligonucleotide
gcgugcacggguggaagug

SEQ ID NO: 1034766 - RNA, 19 nt, Artificial Sequence
  Description of Artificial Sequence: Synthetic oligonucleotide
uucgaccaacucgguggau

SEQ ID NO: 1034767 - RNA, 19 nt, Artificial Sequence
  Description of Artificial Sequence: Synthetic oligonucleotide
cucggccugggucugugcu

SEQ ID NO: 1034768 - RNA, 19 nt, Artificial Sequence
  Description of Artificial Sequence: Synthetic oligonucleotide
cagcugcgaaccauggaau

SEQ ID NO: 1034769 - RNA, 19 nt, Artificial Sequence
  Description of Artificial Sequence: Synthetic oligonucleotide
ugaccugcgugaggauguu

SEQ ID NO: 1034770 - RNA, 19 nt, Artificial Sequence
  Description of Artificial Sequence: Synthetic oligonucleotide
caacuuccgcagcaucaua

SEQ ID NO: 1034771 - RNA, 19 nt, Artificial Sequence
  Description of Artificial Sequence: Synthetic oligonucleotide
gcgucugccugcgcacugg

SEQ ID NO: 1034772 - RNA, 19 nt, Artificial Sequence
  Description of Artificial Sequence: Synthetic oligonucleotide
cagcaaucggucggccuca

SEQ ID NO: 1034773 - RNA, 19 nt, Artificial Sequence
  Description of Artificial Sequence: Synthetic oligonucleotide
gacaggggacuagcagcaa

SEQ ID NO: 1034774 - RNA, 19 nt, Artificial Sequence
  Description of Artificial Sequence: Synthetic oligonucleotide
augcggaguuggagcagca

SEQ ID NO: 1034775 - RNA, 19 nt, Artificial Sequence
  Description of Artificial Sequence: Synthetic oligonucleotide
ccacguugaccugcgugag

SEQ ID NO: 1034776 - RNA, 19 nt, Artificial Sequence
  Description of Artificial Sequence: Synthetic oligonucleotide
acgccuggcagaggccgca

SEQ ID NO: 1034777 - RNA, 19 nt, Artificial Sequence
  Description of Artificial Sequence: Synthetic oligonucleotide
cgugcacggguggaagugg

SEQ ID NO: 1034778 - RNA, 19 nt, Artificial Sequence
  Description of Artificial Sequence: Synthetic oligonucleotide
caacucgguggauguagau

SEQ ID NO: 1034779 - RNA, 19 nt, Artificial Sequence
  Description of Artificial Sequence: Synthetic oligonucleotide
ccaggcgcccaggaguggc

SEQ ID NO: 1034780 - RNA, 19 nt, Artificial Sequence
  Description of Artificial Sequence: Synthetic oligonucleotide
gcuuugcacuguguagaca

SEQ ID NO: 1034781 - RNA, 19 nt, Artificial Sequence
  Description of Artificial Sequence: Synthetic oligonucleotide
cuguccgaaccggggccug

SEQ ID NO: 1034782 - RNA, 19 nt, Artificial Sequence
  Description of Artificial Sequence: Synthetic oligonucleotide
ccguauggguccucagaca

SEQ ID NO: 1034783 - RNA, 19 nt, Artificial Sequence
  Description of Artificial Sequence: Synthetic oligonucleotide
ccggcaccagcagguagcg

SEQ ID NO: 1034784 - RNA, 19 nt, Artificial Sequence
  Description of Artificial Sequence: Synthetic oligonucleotide
cgaugagagcccgagcuca

SEQ ID NO: 1034785 - RNA, 19 nt, Artificial Sequence
  Description of Artificial Sequence: Synthetic oligonucleotide
ccugcacgggcuguucgac

SEQ ID NO: 1034786 - RNA, 19 nt, Artificial Sequence
  Description of Artificial Sequence: Synthetic oligonucleotide
gcaucccaggugcccuggc

SEQ ID NO: 1034787 - RNA, 19 nt, Artificial Sequence
  Description of Artificial Sequence: Synthetic oligonucleotide
gaaccacguugaccugcgu

SEQ ID NO: 1034788 - RNA, 19 nt, Artificial Sequence
  Description of Artificial Sequence: Synthetic oligonucleotide
cagaggccgcaccauaguu

SEQ ID NO: 1034789 - RNA, 19 nt, Artificial Sequence
  Description of Artificial Sequence: Synthetic oligonucleotide
agcaaucggucggccucau

SEQ ID NO: 1034790 - RNA, 19 nt, Artificial Sequence
  Description of Artificial Sequence: Synthetic oligonucleotide
caccggcgugggcugcuuc

SEQ ID NO: 1034791 - RNA, 19 nt, Artificial Sequence
  Description of Artificial Sequence: Synthetic oligonucleotide
cccgacccugcagaauggc

SEQ ID NO: 1034792 - RNA, 19 nt, Artificial Sequence
  Description of Artificial Sequence: Synthetic oligonucleotide
ccgguacacacuggacuug

SEQ ID NO: 1034793 - RNA, 19 nt, Artificial Sequence
  Description of Artificial Sequence: Synthetic oligonucleotide
caacgauaaugcaguccuu

SEQ ID NO: 1034794 - RNA, 19 nt, Artificial Sequence
  Description of Artificial Sequence: Synthetic oligonucleotide
cuguucgagcugagugagu

SEQ ID NO: 1034795 - RNA, 19 nt, Artificial Sequence
  Description of Artificial Sequence: Synthetic oligonucleotide
gcccgagcucagcgaaccc

SEQ ID NO: 1034796 - RNA, 19 nt, Artificial Sequence
  Description of Artificial Sequence: Synthetic oligonucleotide
gcuccucgacagcaugcaa

SEQ ID NO: 1034797 - RNA, 19 nt, Artificial Sequence
  Description of Artificial Sequence: Synthetic oligonucleotide
ggagcgugcacggguggaa

SEQ ID NO: 1034798 - RNA, 19 nt, Artificial Sequence
  Description of Artificial Sequence: Synthetic oligonucleotide
cgcacucucugcgaaccac

SEQ ID NO: 1034799 - RNA, 19 nt, Artificial Sequence
  Description of Artificial Sequence: Synthetic oligonucleotide
cgggcuguucgaccaacuc

SEQ ID NO: 1034800 - RNA, 19 nt, Artificial Sequence
  Description of Artificial Sequence: Synthetic oligonucleotide
gcgugagggccuggcacgc

SEQ ID NO: 1034801 - RNA, 19 nt, Artificial Sequence
  Description of Artificial Sequence: Synthetic oligonucleotide
caguuugaucucgcacucu

SEQ ID NO: 1034802 - RNA, 19 nt, Artificial Sequence
  Description of Artificial Sequence: Synthetic oligonucleotide
agccacgaugagagcccga

SEQ ID NO: 1034803 - RNA, 19 nt, Artificial Sequence
  Description of Artificial Sequence: Synthetic oligonucleotide
gggagcgugcacgggugga

SEQ ID NO: 1034804 - RNA, 19 nt, Artificial Sequence
  Description of Artificial Sequence: Synthetic oligonucleotide
ggucagcguggcacugaac

SEQ ID NO: 1034805 - RNA, 19 nt, Artificial Sequence
  Description of Artificial Sequence: Synthetic oligonucleotide
gggccgagcgggagcgugc

SEQ ID NO: 1034806 - RNA, 19 nt, Artificial Sequence
  Description of Artificial Sequence: Synthetic oligonucleotide
ccauggaaugcagccugga

SEQ ID NO: 1034807 - RNA, 19 nt, Artificial Sequence
  Description of Artificial Sequence: Synthetic oligonucleotide
ggcgcgggccgagcgggag

SEQ ID NO: 1034808 - RNA, 19 nt, Artificial Sequence
  Description of Artificial Sequence: Synthetic oligonucleotide
cccugcacgggcuguucga

SEQ ID NO: 1034809 - RNA, 19 nt, Artificial Sequence
  Description of Artificial Sequence: Synthetic oligonucleotide
ccgcacuccccaguuucug

SEQ ID NO: 1034810 - RNA, 19 nt, Artificial Sequence
  Description of Artificial Sequence: Synthetic oligonucleotide
cgggagcgugcacgggugg

SEQ ID NO: 1034811 - RNA, 19 nt, Artificial Sequence
  Description of Artificial Sequence: Synthetic oligonucleotide
cgacgaagggucugcccca

SEQ ID NO: 1034812 - RNA, 19 nt, Artificial Sequence
  Description of Artificial Sequence: Synthetic oligonucleotide
cuggcccgcacuccccagu

SEQ ID NO: 1034813 - RNA, 19 nt, Artificial Sequence
  Description of Artificial Sequence: Synthetic oligonucleotide
ccgcaccauaguuggccca

SEQ ID NO: 1034814 - RNA, 19 nt, Artificial Sequence
  Description of Artificial Sequence: Synthetic oligonucleotide
ccugcgcacuggaauggcu

SEQ ID NO: 1034815 - RNA, 19 nt, Artificial Sequence
  Description of Artificial Sequence: Synthetic oligonucleotide
gcucagcgaaccccgccau

SEQ ID NO: 1034816 - RNA, 19 nt, Artificial Sequence
  Description of Artificial Sequence: Synthetic oligonucleotide
ccgacccugcagaauggcu

SEQ ID NO: 1034817 - RNA, 19 nt, Artificial Sequence
  Description of Artificial Sequence: Synthetic oligonucleotide
cgagagagcuccagugccu

SEQ ID NO: 1034818 - RNA, 19 nt, Artificial Sequence
  Description of Artificial Sequence: Synthetic oligonucleotide
gcacgggcuguucgaccaa

SEQ ID NO: 1034819 - RNA, 19 nt, Artificial Sequence
  Description of Artificial Sequence: Synthetic oligonucleotide
gggccgcgcagcugcugga

SEQ ID NO: 1034820 - RNA, 19 nt, Artificial Sequence
  Description of Artificial Sequence: Synthetic oligonucleotide
ccgcgcagcugcuggaugu

SEQ ID NO: 1034821 - RNA, 19 nt, Artificial Sequence
  Description of Artificial Sequence: Synthetic oligonucleotide
cggcgugggcugcuucagc

SEQ ID NO: 1034822 - RNA, 19 nt, Artificial Sequence
  Description of Artificial Sequence: Synthetic oligonucleotide
gccgagcgggagcgugcac

SEQ ID NO: 1034823 - RNA, 19 nt, Artificial Sequence
  Description of Artificial Sequence: Synthetic oligonucleotide
gcggcuguucgagcugagu

SEQ ID NO: 1034824 - RNA, 19 nt, Artificial Sequence
  Description of Artificial Sequence: Synthetic oligonucleotide
cgaaccccgccaugcccga

SEQ ID NO: 1034825 - RNA, 19 nt, Artificial Sequence
  Description of Artificial Sequence: Synthetic oligonucleotide
gcgccucggccugggucug

SEQ ID NO: 1034826 - RNA, 19 nt, Artificial Sequence
  Description of Artificial Sequence: Synthetic oligonucleotide
ggccgaggucugggaggac

SEQ ID NO: 1034827 - RNA, 19 nt, Artificial Sequence
  Description of Artificial Sequence: Synthetic oligonucleotide
cgaucacuacguguggcuu

SEQ ID NO: 1034828 - RNA, 19 nt, Artificial Sequence
  Description of Artificial Sequence: Synthetic oligonucleotide
ggcccgcacuccccaguuu

SEQ ID NO: 1034829 - RNA, 19 nt, Artificial Sequence
  Description of Artificial Sequence: Synthetic oligonucleotide
ccggggccugagccuccca

SEQ ID NO: 1034830 - RNA, 19 nt, Artificial Sequence
  Description of Artificial Sequence: Synthetic oligonucleotide
ccaugccgccaacgauaau

SEQ ID NO: 1034831 - RNA, 19 nt, Artificial Sequence
  Description of Artificial Sequence: Synthetic oligonucleotide
gcaccggcgugggcugcuu

SEQ ID NO: 1034832 - RNA, 19 nt, Artificial Sequence
  Description of Artificial Sequence: Synthetic oligonucleotide
aaaccauuuacauagauac

SEQ ID NO: 1034833 - RNA, 19 nt, Artificial Sequence
  Description of Artificial Sequence: Synthetic oligonucleotide
aaaacaagaauucuccccg

SEQ ID NO: 1034834 - RNA, 19 nt, Artificial Sequence
  Description of Artificial Sequence: Synthetic oligonucleotide
ucuucuaacaauuaaacca

SEQ ID NO: 1034835 - RNA, 19 nt, Artificial Sequence
  Description of Artificial Sequence: Synthetic oligonucleotide
acuaccaccauacagaggg

SEQ ID NO: 1034836 - RNA, 19 nt, Artificial Sequence
  Description of Artificial Sequence: Synthetic oligonucleotide
uuuacauagauacaguuac

SEQ ID NO: 1034837 - RNA, 19 nt, Artificial Sequence
  Description of Artificial Sequence: Synthetic oligonucleotide
gauaacuugggcuugcugg

SEQ ID NO: 1034838 - RNA, 19 nt, Artificial Sequence
  Description of Artificial Sequence: Synthetic oligonucleotide
aauaaguugguaccugucg

SEQ ID NO: 1034839 - RNA, 19 nt, Artificial Sequence
  Description of Artificial Sequence: Synthetic oligonucleotide
auaaaggcaaaccauuuac

SEQ ID NO: 1034840 - RNA, 19 nt, Artificial Sequence
  Description of Artificial Sequence: Synthetic oligonucleotide
ucaaauaaaagccagccuc

SEQ ID NO: 1034841 - RNA, 19 nt, Artificial Sequence
  Description of Artificial Sequence: Synthetic oligonucleotide
aucaucaucaaagugagcg

SEQ ID NO: 1034842 - RNA, 19 nt, Artificial Sequence
  Description of Artificial Sequence: Synthetic oligonucleotide
uuaguaaccucauaugcgg

SEQ ID NO: 1034843 - RNA, 19 nt, Artificial Sequence
  Description of Artificial Sequence: Synthetic oligonucleotide
aaauccauggcuuccaucu

SEQ ID NO: 1034844 - RNA, 19 nt, Artificial Sequence
  Description of Artificial Sequence: Synthetic oligonucleotide
aaauccaaaugccucaaag

SEQ ID NO: 1034845 - RNA, 19 nt, Artificial Sequence
  Description of Artificial Sequence: Synthetic oligonucleotide
aggcaaaccauuuacauag

SEQ ID NO: 1034846 - RNA, 19 nt, Artificial Sequence
  Description of Artificial Sequence: Synthetic oligonucleotide
uguuaguaaccucauaugc

SEQ ID NO: 1034847 - RNA, 19 nt, Artificial Sequence
  Description of Artificial Sequence: Synthetic oligonucleotide
ucugccauagcacauacug

SEQ ID NO: 1034848 - RNA, 19 nt, Artificial Sequence
  Description of Artificial Sequence: Synthetic oligonucleotide
ucagcgaugauucagguuc

SEQ ID NO: 1034849 - RNA, 19 nt, Artificial Sequence
  Description of Artificial Sequence: Synthetic oligonucleotide
ugauucagguuccagagag

SEQ ID NO: 1034850 - RNA, 19 nt, Artificial Sequence
  Description of Artificial Sequence: Synthetic oligonucleotide
uaacaauuaaaccaacugu

SEQ ID NO: 1034851 - RNA, 19 nt, Artificial Sequence
  Description of Artificial Sequence: Synthetic oligonucleotide
acaguuacuuguuuauugc

SEQ ID NO: 1034852 - RNA, 19 nt, Artificial Sequence
  Description of Artificial Sequence: Synthetic oligonucleotide
aucaucuugagagagacgg

SEQ ID NO: 1034853 - RNA, 19 nt, Artificial Sequence
  Description of Artificial Sequence: Synthetic oligonucleotide
uucuaaguauuucugaaga

SEQ ID NO: 1034854 - RNA, 19 nt, Artificial Sequence
  Description of Artificial Sequence: Synthetic oligonucleotide
gaugauucagguuccagag

SEQ ID NO: 1034855 - RNA, 19 nt, Artificial Sequence
  Description of Artificial Sequence: Synthetic oligonucleotide
ucuguuaguaaccucauau

SEQ ID NO: 1034856 - RNA, 19 nt, Artificial Sequence
  Description of Artificial Sequence: Synthetic oligonucleotide
ucuucaguuaaaauaugcc

SEQ ID NO: 1034857 - RNA, 19 nt, Artificial Sequence
  Description of Artificial Sequence: Synthetic oligonucleotide
ugccauagcacauacuggg

SEQ ID NO: 1034858 - RNA, 19 nt, Artificial Sequence
  Description of Artificial Sequence: Synthetic oligonucleotide
uacgcaugagccaagacug

SEQ ID NO: 1034859 - RNA, 19 nt, Artificial Sequence
  Description of Artificial Sequence: Synthetic oligonucleotide
ucuccauuaauccccagcc

SEQ ID NO: 1034860 - RNA, 19 nt, Artificial Sequence
  Description of Artificial Sequence: Synthetic oligonucleotide
uacucuucaauacaugugu

SEQ ID NO: 1034861 - RNA, 19 nt, Artificial Sequence
  Description of Artificial Sequence: Synthetic oligonucleotide
acaugugucacuuucuuug

SEQ ID NO: 1034862 - RNA, 19 nt, Artificial Sequence
  Description of Artificial Sequence: Synthetic oligonucleotide
aauaaaagccagccucagg

SEQ ID NO: 1034863 - RNA, 19 nt, Artificial Sequence
  Description of Artificial Sequence: Synthetic oligonucleotide
aauccaaaugccucaaaga

SEQ ID NO: 1034864 - RNA, 19 nt, Artificial Sequence
  Description of Artificial Sequence: Synthetic oligonucleotide
aaaggugcugaaaucaccg

SEQ ID NO: 1034865 - RNA, 19 nt, Artificial Sequence
  Description of Artificial Sequence: Synthetic oligonucleotide
ucucuucuaacaauuaaac

SEQ ID NO: 1034866 - RNA, 19 nt, Artificial Sequence
  Description of Artificial Sequence: Synthetic oligonucleotide
aagucugcagcuaucuucc

SEQ ID NO: 1034867 - RNA, 19 nt, Artificial Sequence
  Description of Artificial Sequence: Synthetic oligonucleotide
caagaauucuccccgaagg

SEQ ID NO: 1034868 - RNA, 19 nt, Artificial Sequence
  Description of Artificial Sequence: Synthetic oligonucleotide
aaugaaccaccucaguuca

SEQ ID NO: 1034869 - RNA, 19 nt, Artificial Sequence
  Description of Artificial Sequence: Synthetic oligonucleotide
uacaguuacuuguuuauug

SEQ ID NO: 1034870 - RNA, 19 nt, Artificial Sequence
  Description of Artificial Sequence: Synthetic oligonucleotide
uaugcggcauccaugcugg

SEQ ID NO: 1034871 - RNA, 19 nt, Artificial Sequence
  Description of Artificial Sequence: Synthetic oligonucleotide
uuucuaaguauuucugaag

SEQ ID NO: 1034872 - RNA, 19 nt, Artificial Sequence
  Description of Artificial Sequence: Synthetic oligonucleotide
uccucaaagauuuucgcca

SEQ ID NO: 1034873 - RNA, 19 nt, Artificial Sequence
  Description of Artificial Sequence: Synthetic oligonucleotide
ucauaugcggcauccaugc

SEQ ID NO: 1034874 - RNA, 19 nt, Artificial Sequence
  Description of Artificial Sequence: Synthetic oligonucleotide
uuuuaggguagccugcuug

SEQ ID NO: 1034875 - RNA, 19 nt, Artificial Sequence
  Description of Artificial Sequence: Synthetic oligonucleotide
ucagguuccagagaguuag

SEQ ID NO: 1034876 - RNA, 19 nt, Artificial Sequence
  Description of Artificial Sequence: Synthetic oligonucleotide
ugcacaucagcgaugauuc

SEQ ID NO: 1034877 - RNA, 19 nt, Artificial Sequence
  Description of Artificial Sequence: Synthetic oligonucleotide
aguuacuuguuuauugccc

SEQ ID NO: 1034878 - RNA, 19 nt, Artificial Sequence
  Description of Artificial Sequence: Synthetic oligonucleotide
ucuaacaauuaaaccaacu

SEQ ID NO: 1034879 - RNA, 19 nt, Artificial Sequence
  Description of Artificial Sequence: Synthetic oligonucleotide
ugaaaucaccgacaucggg

SEQ ID NO: 1034880 - RNA, 19 nt, Artificial Sequence
  Description of Artificial Sequence: Synthetic oligonucleotide
guuaguaaccucauaugcg

SEQ ID NO: 1034881 - RNA, 19 nt, Artificial Sequence
  Description of Artificial Sequence: Synthetic oligonucleotide
uugcauuugggucaaacuc

SEQ ID NO: 1034882 - RNA, 19 nt, Artificial Sequence
  Description of Artificial Sequence: Synthetic oligonucleotide
uaaaauaugccaagccuuc

SEQ ID NO: 1034883 - RNA, 19 nt, Artificial Sequence
  Description of Artificial Sequence: Synthetic oligonucleotide
aacaauuaaaccaacuguu

SEQ ID NO: 1034884 - RNA, 19 nt, Artificial Sequence
  Description of Artificial Sequence: Synthetic oligonucleotide
ugagagagacggaagcggg

SEQ ID NO: 1034885 - RNA, 19 nt, Artificial Sequence
  Description of Artificial Sequence: Synthetic oligonucleotide
uuacucuucaauacaugug

SEQ ID NO: 1034886 - RNA, 19 nt, Artificial Sequence
  Description of Artificial Sequence: Synthetic oligonucleotide
cauggauuguuucuucucg

SEQ ID NO: 1034887 - RNA, 19 nt, Artificial Sequence
  Description of Artificial Sequence: Synthetic oligonucleotide
caaucuucccaacaguugc

SEQ ID NO: 1034888 - RNA, 19 nt, Artificial Sequence
  Description of Artificial Sequence: Synthetic oligonucleotide
uguuuauugcccaggaguc

SEQ ID NO: 1034889 - RNA, 19 nt, Artificial Sequence
  Description of Artificial Sequence: Synthetic oligonucleotide
acaauggacaagcuaagca

SEQ ID NO: 1034890 - RNA, 19 nt, Artificial Sequence
  Description of Artificial Sequence: Synthetic oligonucleotide
uucuccuugucagaaacgg

SEQ ID NO: 1034891 - RNA, 19 nt, Artificial Sequence
  Description of Artificial Sequence: Synthetic oligonucleotide
aaaugccucaaagacagca

SEQ ID NO: 1034892 - RNA, 19 nt, Artificial Sequence
  Description of Artificial Sequence: Synthetic oligonucleotide
caauuaaaccaacuguuac

SEQ ID NO: 1034893 - RNA, 19 nt, Artificial Sequence
  Description of Artificial Sequence: Synthetic oligonucleotide
uagacuggguacaucaaug

SEQ ID NO: 1034894 - RNA, 19 nt, Artificial Sequence
  Description of Artificial Sequence: Synthetic oligonucleotide
aaucucuucuaacaauuaa

SEQ ID NO: 1034895 - RNA, 19 nt, Artificial Sequence
  Description of Artificial Sequence: Synthetic oligonucleotide
uuuugcaaggccguaguag

SEQ ID NO: 1034896 - RNA, 19 nt, Artificial Sequence
  Description of Artificial Sequence: Synthetic oligonucleotide
auacgcaugagccaagacu

SEQ ID NO: 1034897 - RNA, 19 nt, Artificial Sequence
  Description of Artificial Sequence: Synthetic oligonucleotide
agcagugcuucacaaugcc

SEQ ID NO: 1034898 - RNA, 19 nt, Artificial Sequence
  Description of Artificial Sequence: Synthetic oligonucleotide
ucaaucuucccaacaguug

SEQ ID NO: 1034899 - RNA, 19 nt, Artificial Sequence
  Description of Artificial Sequence: Synthetic oligonucleotide
aaguacgucuucuucuucu

SEQ ID NO: 1034900 - RNA, 19 nt, Artificial Sequence
  Description of Artificial Sequence: Synthetic oligonucleotide
uaaaugacacaucaucuuu

SEQ ID NO: 1034901 - RNA, 19 nt, Artificial Sequence
  Description of Artificial Sequence: Synthetic oligonucleotide
uaauccccagcccaggugc

SEQ ID NO: 1034902 - RNA, 19 nt, Artificial Sequence
  Description of Artificial Sequence: Synthetic oligonucleotide
acagcauccaccuucgagu

SEQ ID NO: 1034903 - RNA, 19 nt, Artificial Sequence
  Description of Artificial Sequence: Synthetic oligonucleotide
aaugacacaucaucuuuau

SEQ ID NO: 1034904 - RNA, 19 nt, Artificial Sequence
  Description of Artificial Sequence: Synthetic oligonucleotide
uuugcaaggccguaguagu

SEQ ID NO: 1034905 - RNA, 19 nt, Artificial Sequence
  Description of Artificial Sequence: Synthetic oligonucleotide
aacugauccccuuuaaaua

SEQ ID NO: 1034906 - RNA, 19 nt, Artificial Sequence
  Description of Artificial Sequence: Synthetic oligonucleotide
acauagauacaguuacuug

SEQ ID NO: 1034907 - RNA, 19 nt, Artificial Sequence
  Description of Artificial Sequence: Synthetic oligonucleotide
uuuaggguagccugcuugc

SEQ ID NO: 1034908 - RNA, 19 nt, Artificial Sequence
  Description of Artificial Sequence: Synthetic oligonucleotide
agcgucuccauuaaucccc

SEQ ID NO: 1034909 - RNA, 19 nt, Artificial Sequence
  Description of Artificial Sequence: Synthetic oligonucleotide
uaccacggggacaucaggg

SEQ ID NO: 1034910 - RNA, 19 nt, Artificial Sequence
  Description of Artificial Sequence: Synthetic oligonucleotide
auaaguugguaccugucgu

SEQ ID NO: 1034911 - RNA, 19 nt, Artificial Sequence
  Description of Artificial Sequence: Synthetic oligonucleotide
uggaaaggugcugaaauca

SEQ ID NO: 1034912 - RNA, 19 nt, Artificial Sequence
  Description of Artificial Sequence: Synthetic oligonucleotide
aaauaaaagccagccucag

SEQ ID NO: 1034913 - RNA, 19 nt, Artificial Sequence
  Description of Artificial Sequence: Synthetic oligonucleotide
cuaucuuccugggauaucc

SEQ ID NO: 1034914 - RNA, 19 nt, Artificial Sequence
  Description of Artificial Sequence: Synthetic oligonucleotide
gacagcauccaccuucgag

SEQ ID NO: 1034915 - RNA, 19 nt, Artificial Sequence
  Description of Artificial Sequence: Synthetic oligonucleotide
aagacgaagaacugucgau

SEQ ID NO: 1034916 - RNA, 19 nt, Artificial Sequence
  Description of Artificial Sequence: Synthetic oligonucleotide
auaugcggcauccaugcug

SEQ ID NO: 1034917 - RNA, 19 nt, Artificial Sequence
  Description of Artificial Sequence: Synthetic oligonucleotide
agaagcuccauaccggugu

SEQ ID NO: 1034918 - RNA, 19 nt, Artificial Sequence
  Description of Artificial Sequence: Synthetic oligonucleotide
acugauccccuuuaaauau

SEQ ID NO: 1034919 - RNA, 19 nt, Artificial Sequence
  Description of Artificial Sequence: Synthetic oligonucleotide
ugacaauggacaagcuaag

SEQ ID NO: 1034920 - RNA, 19 nt, Artificial Sequence
  Description of Artificial Sequence: Synthetic oligonucleotide
acaagaauucuccccgaag

SEQ ID NO: 1034921 - RNA, 19 nt, Artificial Sequence
  Description of Artificial Sequence: Synthetic oligonucleotide
aauucuccccgaagggugc

SEQ ID NO: 1034922 - RNA, 19 nt, Artificial Sequence
  Description of Artificial Sequence: Synthetic oligonucleotide
agagagacggaagcgggcc

SEQ ID NO: 1034923 - RNA, 19 nt, Artificial Sequence
  Description of Artificial Sequence: Synthetic oligonucleotide
uguggaugcuuuuagggua

SEQ ID NO: 1034924 - RNA, 19 nt, Artificial Sequence
  Description of Artificial Sequence: Synthetic oligonucleotide
ugugacaauggacaagcua

SEQ ID NO: 1034925 - RNA, 19 nt, Artificial Sequence
  Description of Artificial Sequence: Synthetic oligonucleotide
aauggacaagcuaagcagu

SEQ ID NO: 1034926 - RNA, 19 nt, Artificial Sequence
  Description of Artificial Sequence: Synthetic oligonucleotide
caaagacgaagaacugucg

SEQ ID NO: 1034927 - RNA, 19 nt, Artificial Sequence
  Description of Artificial Sequence: Synthetic oligonucleotide
aguuagguuugguggguac

SEQ ID NO: 1034928 - RNA, 19 nt, Artificial Sequence
  Description of Artificial Sequence: Synthetic oligonucleotide
ugauccccuuuaaauauga

SEQ ID NO: 1034929 - RNA, 19 nt, Artificial Sequence
  Description of Artificial Sequence: Synthetic oligonucleotide
aaguauuucugaagaagcu

SEQ ID NO: 1034930 - RNA, 19 nt, Artificial Sequence
  Description of Artificial Sequence: Synthetic oligonucleotide
agaaacggcggcaucaauc

SEQ ID NO: 1034931 - RNA, 19 nt, Artificial Sequence
  Description of Artificial Sequence: Synthetic oligonucleotide
uaaguugguaccugucgug

SEQ ID NO: 1034932 - RNA, 19 nt, Artificial Sequence
  Description of Artificial Sequence: Synthetic oligonucleotide
agacgaagaacugucgauc

SEQ ID NO: 1034933 - RNA, 19 nt, Artificial Sequence
  Description of Artificial Sequence: Synthetic oligonucleotide
caugagccaagacugcucc

SEQ ID NO: 1034934 - RNA, 19 nt, Artificial Sequence
  Description of Artificial Sequence: Synthetic oligonucleotide
cuguuaguaaccucauaug

SEQ ID NO: 1034935 - RNA, 19 nt, Artificial Sequence
  Description of Artificial Sequence: Synthetic oligonucleotide
augaaaacagugucucugu

SEQ ID NO: 1034936 - RNA, 19 nt, Artificial Sequence
  Description of Artificial Sequence: Synthetic oligonucleotide
cuugagagagacggaagcg

SEQ ID NO: 1034937 - RNA, 19 nt, Artificial Sequence
  Description of Artificial Sequence: Synthetic oligonucleotide
uguuucuucucgucaaauc

SEQ ID NO: 1034938 - RNA, 19 nt, Artificial Sequence
  Description of Artificial Sequence: Synthetic oligonucleotide
uuaauccccagcccaggug

SEQ ID NO: 1034939 - RNA, 19 nt, Artificial Sequence
  Description of Artificial Sequence: Synthetic oligonucleotide
caaauaaaagccagccuca

SEQ ID NO: 1034940 - RNA, 19 nt, Artificial Sequence
  Description of Artificial Sequence: Synthetic oligonucleotide
cuggguacaucaaugcuuc

SEQ ID NO: 1034941 - RNA, 19 nt, Artificial Sequence
  Description of Artificial Sequence: Synthetic oligonucleotide
auaccgguguccuccuccc

SEQ ID NO: 1034942 - RNA, 19 nt, Artificial Sequence
  Description of Artificial Sequence: Synthetic oligonucleotide
guccucaaagauuuucgcc

SEQ ID NO: 1034943 - RNA, 19 nt, Artificial Sequence
  Description of Artificial Sequence: Synthetic oligonucleotide
cuuggagaacgugaguggg

SEQ ID NO: 1034944 - RNA, 19 nt, Artificial Sequence
  Description of Artificial Sequence: Synthetic oligonucleotide
ucacaaugcccugugauaa

SEQ ID NO: 1034945 - RNA, 19 nt, Artificial Sequence
  Description of Artificial Sequence: Synthetic oligonucleotide
cagagaguuagguuuggug

SEQ ID NO: 1034946 - RNA, 19 nt, Artificial Sequence
  Description of Artificial Sequence: Synthetic oligonucleotide
aaucaccgacaucggggac

SEQ ID NO: 1034947 - RNA, 19 nt, Artificial Sequence
  Description of Artificial Sequence: Synthetic oligonucleotide
ucacaucuuuugcaaggcc

SEQ ID NO: 1034948 - RNA, 19 nt, Artificial Sequence
  Description of Artificial Sequence: Synthetic oligonucleotide
ugauaacuugggcuugcug

SEQ ID NO: 1034949 - RNA, 19 nt, Artificial Sequence
  Description of Artificial Sequence: Synthetic oligonucleotide
gaaaggugcugaaaucacc

SEQ ID NO: 1034950 - RNA, 19 nt, Artificial Sequence
  Description of Artificial Sequence: Synthetic oligonucleotide
aagaacugucgaucuucag

SEQ ID NO: 1034951 - RNA, 19 nt, Artificial Sequence
  Description of Artificial Sequence: Synthetic oligonucleotide
ggggaaaugaaccaccuca

SEQ ID NO: 1034952 - RNA, 19 nt, Artificial Sequence
  Description of Artificial Sequence: Synthetic oligonucleotide
ucuccggaggacuuguaga

SEQ ID NO: 1034953 - RNA, 19 nt, Artificial Sequence
  Description of Artificial Sequence: Synthetic oligonucleotide
agauacaguuacuuguuua

SEQ ID NO: 1034954 - RNA, 19 nt, Artificial Sequence
  Description of Artificial Sequence: Synthetic oligonucleotide
aacaagaauucuccccgaa

SEQ ID NO: 1034955 - RNA, 19 nt, Artificial Sequence
  Description of Artificial Sequence: Synthetic oligonucleotide
cuuccugggauauccgggc

SEQ ID NO: 1034956 - RNA, 19 nt, Artificial Sequence
  Description of Artificial Sequence: Synthetic oligonucleotide
ugugucacuuucuuugcau

SEQ ID NO: 1034957 - RNA, 19 nt, Artificial Sequence
  Description of Artificial Sequence: Synthetic oligonucleotide
uucacaucuuuugcaaggc

SEQ ID NO: 1034958 - RNA, 19 nt, Artificial Sequence
  Description of Artificial Sequence: Synthetic oligonucleotide
uccucaaaucucuucuaac

SEQ ID NO: 1034959 - RNA, 19 nt, Artificial Sequence
  Description of Artificial Sequence: Synthetic oligonucleotide
acaucagcgaugauucagg

SEQ ID NO: 1034960 - RNA, 19 nt, Artificial Sequence
  Description of Artificial Sequence: Synthetic oligonucleotide
gauacaguuacuuguuuau

SEQ ID NO: 1034961 - RNA, 19 nt, Artificial Sequence
  Description of Artificial Sequence: Synthetic oligonucleotide
accacggggacaucagggg

SEQ ID NO: 1034962 - RNA, 19 nt, Artificial Sequence
  Description of Artificial Sequence: Synthetic oligonucleotide
uuagguuugguggguacca

SEQ ID NO: 1034963 - RNA, 19 nt, Artificial Sequence
  Description of Artificial Sequence: Synthetic oligonucleotide
agguuugguggguaccacg

SEQ ID NO: 1034964 - RNA, 19 nt, Artificial Sequence
  Description of Artificial Sequence: Synthetic oligonucleotide
ugaaccaccucaguucaca

SEQ ID NO: 1034965 - RNA, 19 nt, Artificial Sequence
  Description of Artificial Sequence: Synthetic oligonucleotide
cugccauagcacauacugg

SEQ ID NO: 1034966 - RNA, 19 nt, Artificial Sequence
  Description of Artificial Sequence: Synthetic oligonucleotide
uucacaaugcccugugaua

SEQ ID NO: 1034967 - RNA, 19 nt, Artificial Sequence
  Description of Artificial Sequence: Synthetic oligonucleotide
ucuccuugucagaaacggc

SEQ ID NO: 1034968 - RNA, 19 nt, Artificial Sequence
  Description of Artificial Sequence: Synthetic oligonucleotide
ccucaguucacaaagacga

SEQ ID NO: 1034969 - RNA, 19 nt, Artificial Sequence
  Description of Artificial Sequence: Synthetic oligonucleotide
gucuccauuaauccccagc

SEQ ID NO: 1034970 - RNA, 19 nt, Artificial Sequence
  Description of Artificial Sequence: Synthetic oligonucleotide
gaaaacagugucucuguua

SEQ ID NO: 1034971 - RNA, 19 nt, Artificial Sequence
  Description of Artificial Sequence: Synthetic oligonucleotide
cauaccgguguccuccucc

SEQ ID NO: 1034972 - RNA, 19 nt, Artificial Sequence
  Description of Artificial Sequence: Synthetic oligonucleotide
gaacugauccccuuuaaau

SEQ ID NO: 1034973 - RNA, 19 nt, Artificial Sequence
  Description of Artificial Sequence: Synthetic oligonucleotide
ggauauccgggcuccaugg

SEQ ID NO: 1034974 - RNA, 19 nt, Artificial Sequence
  Description of Artificial Sequence: Synthetic oligonucleotide
cugaaaucaccgacaucgg

SEQ ID NO: 1034975 - RNA, 19 nt, Artificial Sequence
  Description of Artificial Sequence: Synthetic oligonucleotide
aguugguaccugucguguc

SEQ ID NO: 1034976 - RNA, 19 nt, Artificial Sequence
  Description of Artificial Sequence: Synthetic oligonucleotide
accucaguucacaaagacg

SEQ ID NO: 1034977 - RNA, 19 nt, Artificial Sequence
  Description of Artificial Sequence: Synthetic oligonucleotide
gaaacggcggcaucaaucu

SEQ ID NO: 1034978 - RNA, 19 nt, Artificial Sequence
  Description of Artificial Sequence: Synthetic oligonucleotide
aaguugguaccugucgugu

SEQ ID NO: 1034979 - RNA, 19 nt, Artificial Sequence
  Description of Artificial Sequence: Synthetic oligonucleotide
uucgaguccacgccuggga

SEQ ID NO: 1034980 - RNA, 19 nt, Artificial Sequence
  Description of Artificial Sequence: Synthetic oligonucleotide
aaaugacacaucaucuuua

SEQ ID NO: 1034981 - RNA, 19 nt, Artificial Sequence
  Description of Artificial Sequence: Synthetic oligonucleotide
acugucgaucuucaguuaa

SEQ ID NO: 1034982 - RNA, 19 nt, Artificial Sequence
  Description of Artificial Sequence: Synthetic oligonucleotide
aggacugcacaucagcgau

SEQ ID NO: 1034983 - RNA, 19 nt, Artificial Sequence
  Description of Artificial Sequence: Synthetic oligonucleotide
uccucgugcccucggacag

SEQ ID NO: 1034984 - RNA, 19 nt, Artificial Sequence
  Description of Artificial Sequence: Synthetic oligonucleotide
gacaauggacaagcuaagc

SEQ ID NO: 1034985 - RNA, 19 nt, Artificial Sequence
  Description of Artificial Sequence: Synthetic oligonucleotide
cagugucucuguuaguaac

SEQ ID NO: 1034986 - RNA, 19 nt, Artificial Sequence
  Description of Artificial Sequence: Synthetic oligonucleotide
aaggccguaguaguuuucu

SEQ ID NO: 1034987 - RNA, 19 nt, Artificial Sequence
  Description of Artificial Sequence: Synthetic oligonucleotide
auuaauccccagcccaggu

SEQ ID NO: 1034988 - RNA, 19 nt, Artificial Sequence
  Description of Artificial Sequence: Synthetic oligonucleotide
gagcgucuccauuaauccc

SEQ ID NO: 1034989 - RNA, 19 nt, Artificial Sequence
  Description of Artificial Sequence: Synthetic oligonucleotide
guagccugcuugcuccucg

SEQ ID NO: 1034990 - RNA, 19 nt, Artificial Sequence
  Description of Artificial Sequence: Synthetic oligonucleotide
cuccauaccgguguccucc

SEQ ID NO: 1034991 - RNA, 19 nt, Artificial Sequence
  Description of Artificial Sequence: Synthetic oligonucleotide
cuccggaggacuuguagac

SEQ ID NO: 1034992 - RNA, 19 nt, Artificial Sequence
  Description of Artificial Sequence: Synthetic oligonucleotide
cauacagaggguaggcuga

SEQ ID NO: 1034993 - RNA, 19 nt, Artificial Sequence
  Description of Artificial Sequence: Synthetic oligonucleotide
ucagggguccucaaagauu

SEQ ID NO: 1034994 - RNA, 19 nt, Artificial Sequence
  Description of Artificial Sequence: Synthetic oligonucleotide
gaacugucgaucuucaguu

SEQ ID NO: 1034995 - RNA, 19 nt, Artificial Sequence
  Description of Artificial Sequence: Synthetic oligonucleotide
accugucguguccucaguc

SEQ ID NO: 1034996 - RNA, 19 nt, Artificial Sequence
  Description of Artificial Sequence: Synthetic oligonucleotide
gaaauccauggcuuccauc

SEQ ID NO: 1034997 - RNA, 19 nt, Artificial Sequence
  Description of Artificial Sequence: Synthetic oligonucleotide
aagcuccauaccggugucc

SEQ ID NO: 1034998 - RNA, 19 nt, Artificial Sequence
  Description of Artificial Sequence: Synthetic oligonucleotide
caucaucuugagagagacg

SEQ ID NO: 1034999 - RNA, 19 nt, Artificial Sequence
  Description of Artificial Sequence: Synthetic oligonucleotide
cuggaaaggugcugaaauc

SEQ ID NO: 1035000 - RNA, 19 nt, Artificial Sequence
  Description of Artificial Sequence: Synthetic oligonucleotide
aucuuuugcaaggccguag

SEQ ID NO: 1035001 - RNA, 19 nt, Artificial Sequence
  Description of Artificial Sequence: Synthetic oligonucleotide
guuugguggguaccacggg

SEQ ID NO: 1035002 - RNA, 19 nt, Artificial Sequence
  Description of Artificial Sequence: Synthetic oligonucleotide
gccguaguaguuuucuaag

SEQ ID NO: 1035003 - RNA, 19 nt, Artificial Sequence
  Description of Artificial Sequence: Synthetic oligonucleotide
ucucuguuaguaaccucau

SEQ ID NO: 1035004 - RNA, 19 nt, Artificial Sequence
  Description of Artificial Sequence: Synthetic oligonucleotide
ccuugcacuaccaccauac

SEQ ID NO: 1035005 - RNA, 19 nt, Artificial Sequence
  Description of Artificial Sequence: Synthetic oligonucleotide
aaacagugucucuguuagu

SEQ ID NO: 1035006 - RNA, 19 nt, Artificial Sequence
  Description of Artificial Sequence: Synthetic oligonucleotide
ggacuuguagacuggguac

SEQ ID NO: 1035007 - RNA, 19 nt, Artificial Sequence
  Description of Artificial Sequence: Synthetic oligonucleotide
uagauacaguuacuuguuu

SEQ ID NO: 1035008 - RNA, 19 nt, Artificial Sequence
  Description of Artificial Sequence: Synthetic oligonucleotide
guuagguuugguggguacc

SEQ ID NO: 1035009 - RNA, 19 nt, Artificial Sequence
  Description of Artificial Sequence: Synthetic oligonucleotide
guaguaguuuucuaaguau

SEQ ID NO: 1035010 - RNA, 19 nt, Artificial Sequence
  Description of Artificial Sequence: Synthetic oligonucleotide
agcuaagcagugcuucaca

SEQ ID NO: 1035011 - RNA, 19 nt, Artificial Sequence
  Description of Artificial Sequence: Synthetic oligonucleotide
auagauacaguuacuuguu

SEQ ID NO: 1035012 - RNA, 19 nt, Artificial Sequence
  Description of Artificial Sequence: Synthetic oligonucleotide
cuguuucugccauagcaca

SEQ ID NO: 1035013 - RNA, 19 nt, Artificial Sequence
  Description of Artificial Sequence: Synthetic oligonucleotide
ugucgaucuucaguuaaaa

SEQ ID NO: 1035014 - RNA, 19 nt, Artificial Sequence
  Description of Artificial Sequence: Synthetic oligonucleotide
cauuaauccccagcccagg

SEQ ID NO: 1035015 - RNA, 19 nt, Artificial Sequence
  Description of Artificial Sequence: Synthetic oligonucleotide
cugauccccuuuaaauaug

SEQ ID NO: 1035016 - RNA, 19 nt, Artificial Sequence
  Description of Artificial Sequence: Synthetic oligonucleotide
gucuccggaggacuuguag

SEQ ID NO: 1035017 - RNA, 19 nt, Artificial Sequence
  Description of Artificial Sequence: Synthetic oligonucleotide
ugcauacgcaugagccaag

SEQ ID NO: 1035018 - RNA, 19 nt, Artificial Sequence
  Description of Artificial Sequence: Synthetic oligonucleotide
gacgaagaacugucgaucu

SEQ ID NO: 1035019 - RNA, 19 nt, Artificial Sequence
  Description of Artificial Sequence: Synthetic oligonucleotide
caucaaagugagcgucucc

SEQ ID NO: 1035020 - RNA, 19 nt, Artificial Sequence
  Description of Artificial Sequence: Synthetic oligonucleotide
caggagucaccucauuuuc

SEQ ID NO: 1035021 - RNA, 19 nt, Artificial Sequence
  Description of Artificial Sequence: Synthetic oligonucleotide
gguccucaaagauuuucgc

SEQ ID NO: 1035022 - RNA, 19 nt, Artificial Sequence
  Description of Artificial Sequence: Synthetic oligonucleotide
aguccacuguucaucauca

SEQ ID NO: 1035023 - RNA, 19 nt, Artificial Sequence
  Description of Artificial Sequence: Synthetic oligonucleotide
uauccgggcuccauggauu

SEQ ID NO: 1035024 - RNA, 19 nt, Artificial Sequence
  Description of Artificial Sequence: Synthetic oligonucleotide
auauccgggcuccauggau

SEQ ID NO: 1035025 - RNA, 19 nt, Artificial Sequence
  Description of Artificial Sequence: Synthetic oligonucleotide
guaccacggggacaucagg

SEQ ID NO: 1035026 - RNA, 19 nt, Artificial Sequence
  Description of Artificial Sequence: Synthetic oligonucleotide
uaggguagccugcuugcuc

SEQ ID NO: 1035027 - RNA, 19 nt, Artificial Sequence
  Description of Artificial Sequence: Synthetic oligonucleotide
uacaugugucacuuucuuu

SEQ ID NO: 1035028 - RNA, 19 nt, Artificial Sequence
  Description of Artificial Sequence: Synthetic oligonucleotide
ugcagcuaucuuccuggga

SEQ ID NO: 1035029 - RNA, 19 nt, Artificial Sequence
  Description of Artificial Sequence: Synthetic oligonucleotide
uccagagaguuagguuugg

SEQ ID NO: 1035030 - RNA, 19 nt, Artificial Sequence
  Description of Artificial Sequence: Synthetic oligonucleotide
uccaacugugaagauccac

SEQ ID NO: 1035031 - RNA, 19 nt, Artificial Sequence
  Description of Artificial Sequence: Synthetic oligonucleotide
ggguccucaaagauuuucg

SEQ ID NO: 1035032 - RNA, 19 nt, Artificial Sequence
  Description of Artificial Sequence: Synthetic oligonucleotide
uauaggugagguggguuuc

SEQ ID NO: 1035033 - RNA, 19 nt, Artificial Sequence
  Description of Artificial Sequence: Synthetic oligonucleotide
uauugcccaggagucaccu

SEQ ID NO: 1035034 - RNA, 19 nt, Artificial Sequence
  Description of Artificial Sequence: Synthetic oligonucleotide
acaucuuuugcaaggccgu

SEQ ID NO: 1035035 - RNA, 19 nt, Artificial Sequence
  Description of Artificial Sequence: Synthetic oligonucleotide
accaccauacagaggguag

SEQ ID NO: 1035036 - RNA, 19 nt, Artificial Sequence
  Description of Artificial Sequence: Synthetic oligonucleotide
aucuucccaacaguugcag

SEQ ID NO: 1035037 - RNA, 19 nt, Artificial Sequence
  Description of Artificial Sequence: Synthetic oligonucleotide
gcuuggcugagugaaagag

SEQ ID NO: 1035038 - RNA, 19 nt, Artificial Sequence
  Description of Artificial Sequence: Synthetic oligonucleotide
agaggguaggcugagcaaa

SEQ ID NO: 1035039 - RNA, 19 nt, Artificial Sequence
  Description of Artificial Sequence: Synthetic oligonucleotide
aggcuuggcugagugaaag

SEQ ID NO: 1035040 - RNA, 19 nt, Artificial Sequence
  Description of Artificial Sequence: Synthetic oligonucleotide
guggaugcuuuuaggguag

SEQ ID NO: 1035041 - RNA, 19 nt, Artificial Sequence
  Description of Artificial Sequence: Synthetic oligonucleotide
ugucguguccucaguccac

SEQ ID NO: 1035042 - RNA, 19 nt, Artificial Sequence
  Description of Artificial Sequence: Synthetic oligonucleotide
uccacgccugggaagucug

SEQ ID NO: 1035043 - RNA, 19 nt, Artificial Sequence
  Description of Artificial Sequence: Synthetic oligonucleotide
aagaagcuccauaccggug

SEQ ID NO: 1035044 - RNA, 19 nt, Artificial Sequence
  Description of Artificial Sequence: Synthetic oligonucleotide
aacugucgaucuucaguua

SEQ ID NO: 1035045 - RNA, 19 nt, Artificial Sequence
  Description of Artificial Sequence: Synthetic oligonucleotide
uuguuucuucucgucaaau

SEQ ID NO: 1035046 - RNA, 19 nt, Artificial Sequence
  Description of Artificial Sequence: Synthetic oligonucleotide
gagagagacggaagcgggc

SEQ ID NO: 1035047 - RNA, 19 nt, Artificial Sequence
  Description of Artificial Sequence: Synthetic oligonucleotide
cacuaccaccauacagagg

SEQ ID NO: 1035048 - RNA, 19 nt, Artificial Sequence
  Description of Artificial Sequence: Synthetic oligonucleotide
caagcuaagcagugcuuca

SEQ ID NO: 1035049 - RNA, 19 nt, Artificial Sequence
  Description of Artificial Sequence: Synthetic oligonucleotide
cauacgcaugagccaagac

SEQ ID NO: 1035050 - RNA, 19 nt, Artificial Sequence
  Description of Artificial Sequence: Synthetic oligonucleotide
cagcgaugauucagguucc

SEQ ID NO: 1035051 - RNA, 19 nt, Artificial Sequence
  Description of Artificial Sequence: Synthetic oligonucleotide
uaaccucauaugcggcauc

SEQ ID NO: 1035052 - RNA, 19 nt, Artificial Sequence
  Description of Artificial Sequence: Synthetic oligonucleotide
cacaaugcccugugauaac

SEQ ID NO: 1035053 - RNA, 19 nt, Artificial Sequence
  Description of Artificial Sequence: Synthetic oligonucleotide
ugguggguaccacggggac

SEQ ID NO: 1035054 - RNA, 19 nt, Artificial Sequence
  Description of Artificial Sequence: Synthetic oligonucleotide
gauauccgggcuccaugga

SEQ ID NO: 1035055 - RNA, 19 nt, Artificial Sequence
  Description of Artificial Sequence: Synthetic oligonucleotide
acgccugggaagucugcag

SEQ ID NO: 1035056 - RNA, 19 nt, Artificial Sequence
  Description of Artificial Sequence: Synthetic oligonucleotide
gacuggguacaucaaugcu

SEQ ID NO: 1035057 - RNA, 19 nt, Artificial Sequence
  Description of Artificial Sequence: Synthetic oligonucleotide
agguuccagagaguuaggu

SEQ ID NO: 1035058 - RNA, 19 nt, Artificial Sequence
  Description of Artificial Sequence: Synthetic oligonucleotide
ccauuaauccccagcccag

SEQ ID NO: 1035059 - RNA, 19 nt, Artificial Sequence
  Description of Artificial Sequence: Synthetic oligonucleotide
cugcagcuaucuuccuggg

SEQ ID NO: 1035060 - RNA, 19 nt, Artificial Sequence
  Description of Artificial Sequence: Synthetic oligonucleotide
aucagcgaugauucagguu

SEQ ID NO: 1035061 - RNA, 19 nt, Artificial Sequence
  Description of Artificial Sequence: Synthetic oligonucleotide
agcuccauaccgguguccu

SEQ ID NO: 1035062 - RNA, 19 nt, Artificial Sequence
  Description of Artificial Sequence: Synthetic oligonucleotide
uuaggguagccugcuugcu

SEQ ID NO: 1035063 - RNA, 19 nt, Artificial Sequence
  Description of Artificial Sequence: Synthetic oligonucleotide
acgcaugagccaagacugc

SEQ ID NO: 1035064 - RNA, 19 nt, Artificial Sequence
  Description of Artificial Sequence: Synthetic oligonucleotide
auacagaggguaggcugag

SEQ ID NO: 1035065 - RNA, 19 nt, Artificial Sequence
  Description of Artificial Sequence: Synthetic oligonucleotide
ccugucguguccucagucc

SEQ ID NO: 1035066 - RNA, 19 nt, Artificial Sequence
  Description of Artificial Sequence: Synthetic oligonucleotide
cuugucagaaacggcggca

SEQ ID NO: 1035067 - RNA, 19 nt, Artificial Sequence
  Description of Artificial Sequence: Synthetic oligonucleotide
acaggacuauuguucuuuu

SEQ ID NO: 1035068 - RNA, 19 nt, Artificial Sequence
  Description of Artificial Sequence: Synthetic oligonucleotide
agguggguuucccuccacu

SEQ ID NO: 1035069 - RNA, 19 nt, Artificial Sequence
  Description of Artificial Sequence: Synthetic oligonucleotide
auacaguuacuuguuuauu

SEQ ID NO: 1035070 - RNA, 19 nt, Artificial Sequence
  Description of Artificial Sequence: Synthetic oligonucleotide
ggugcugaaaucaccgaca

SEQ ID NO: 1035071 - RNA, 19 nt, Artificial Sequence
  Description of Artificial Sequence: Synthetic oligonucleotide
ggaggacuuguagacuggg

SEQ ID NO: 1035072 - RNA, 19 nt, Artificial Sequence
  Description of Artificial Sequence: Synthetic oligonucleotide
cuucgaguccacgccuggg

SEQ ID NO: 1035073 - RNA, 19 nt, Artificial Sequence
  Description of Artificial Sequence: Synthetic oligonucleotide
accauacagaggguaggcu

SEQ ID NO: 1035074 - RNA, 19 nt, Artificial Sequence
  Description of Artificial Sequence: Synthetic oligonucleotide
cuucaauacaugugucacu

SEQ ID NO: 1035075 - RNA, 19 nt, Artificial Sequence
  Description of Artificial Sequence: Synthetic oligonucleotide
gaaccaccucaguucacaa

SEQ ID NO: 1035076 - RNA, 19 nt, Artificial Sequence
  Description of Artificial Sequence: Synthetic oligonucleotide
gggauauccgggcuccaug

SEQ ID NO: 1035077 - RNA, 19 nt, Artificial Sequence
  Description of Artificial Sequence: Synthetic oligonucleotide
ccggaggacuuguagacug

SEQ ID NO: 1035078 - RNA, 19 nt, Artificial Sequence
  Description of Artificial Sequence: Synthetic oligonucleotide
uccuauaggugaggugggu

SEQ ID NO: 1035079 - RNA, 19 nt, Artificial Sequence
  Description of Artificial Sequence: Synthetic oligonucleotide
cuguuacucuucaauacau

SEQ ID NO: 1035080 - RNA, 19 nt, Artificial Sequence
  Description of Artificial Sequence: Synthetic oligonucleotide
aaacggcggcaucaaucuu

SEQ ID NO: 1035081 - RNA, 19 nt, Artificial Sequence
  Description of Artificial Sequence: Synthetic oligonucleotide
uccauaccgguguccuccu

SEQ ID NO: 1035082 - RNA, 19 nt, Artificial Sequence
  Description of Artificial Sequence: Synthetic oligonucleotide
cugucguguccucagucca

SEQ ID NO: 1035083 - RNA, 19 nt, Artificial Sequence
  Description of Artificial Sequence: Synthetic oligonucleotide
guagacuggguacaucaau

SEQ ID NO: 1035084 - RNA, 19 nt, Artificial Sequence
  Description of Artificial Sequence: Synthetic oligonucleotide
gugcauacgcaugagccaa

SEQ ID NO: 1035085 - RNA, 19 nt, Artificial Sequence
  Description of Artificial Sequence: Synthetic oligonucleotide
uccggaggacuuguagacu

SEQ ID NO: 1035086 - RNA, 19 nt, Artificial Sequence
  Description of Artificial Sequence: Synthetic oligonucleotide
uaccugucguguccucagu

SEQ ID NO: 1035087 - RNA, 19 nt, Artificial Sequence
  Description of Artificial Sequence: Synthetic oligonucleotide
aggagucaccucauuuucu

SEQ ID NO: 1035088 - RNA, 19 nt, Artificial Sequence
  Description of Artificial Sequence: Synthetic oligonucleotide
gacggaagcgggccagguc

SEQ ID NO: 1035089 - RNA, 19 nt, Artificial Sequence
  Description of Artificial Sequence: Synthetic oligonucleotide
acgaagaacugucgaucuu

SEQ ID NO: 1035090 - RNA, 19 nt, Artificial Sequence
  Description of Artificial Sequence: Synthetic oligonucleotide
ggccguaguaguuuucuaa

SEQ ID NO: 1035091 - RNA, 19 nt, Artificial Sequence
  Description of Artificial Sequence: Synthetic oligonucleotide
acuuguagacuggguacau

SEQ ID NO: 1035092 - RNA, 19 nt, Artificial Sequence
  Description of Artificial Sequence: Synthetic oligonucleotide
cacaaagacgaagaacugu

SEQ ID NO: 1035093 - RNA, 19 nt, Artificial Sequence
  Description of Artificial Sequence: Synthetic oligonucleotide
augaaccaccucaguucac

SEQ ID NO: 1035094 - RNA, 19 nt, Artificial Sequence
  Description of Artificial Sequence: Synthetic oligonucleotide
ggacaagcuaagcagugcu

SEQ ID NO: 1035095 - RNA, 19 nt, Artificial Sequence
  Description of Artificial Sequence: Synthetic oligonucleotide
gguaccacggggacaucag

SEQ ID NO: 1035096 - RNA, 19 nt, Artificial Sequence
  Description of Artificial Sequence: Synthetic oligonucleotide
cagggguccucaaagauuu

SEQ ID NO: 1035097 - RNA, 19 nt, Artificial Sequence
  Description of Artificial Sequence: Synthetic oligonucleotide
gggagguccguagagggac

SEQ ID NO: 1035098 - RNA, 19 nt, Artificial Sequence
  Description of Artificial Sequence: Synthetic oligonucleotide
ugcggcauccaugcuggaa

SEQ ID NO: 1035099 - RNA, 19 nt, Artificial Sequence
  Description of Artificial Sequence: Synthetic oligonucleotide
cuugcuccucgugcccucg

SEQ ID NO: 1035100 - RNA, 19 nt, Artificial Sequence
  Description of Artificial Sequence: Synthetic oligonucleotide
accgguguccuccucccuu

SEQ ID NO: 1035101 - RNA, 19 nt, Artificial Sequence
  Description of Artificial Sequence: Synthetic oligonucleotide
gagguccguagagggacug

SEQ ID NO: 1035102 - RNA, 19 nt, Artificial Sequence
  Description of Artificial Sequence: Synthetic oligonucleotide
cucaguucacaaagacgaa

SEQ ID NO: 1035103 - RNA, 19 nt, Artificial Sequence
  Description of Artificial Sequence: Synthetic oligonucleotide
caccucauuuucuccaugu

SEQ ID NO: 1035104 - RNA, 19 nt, Artificial Sequence
  Description of Artificial Sequence: Synthetic oligonucleotide
uggaugcuuuuaggguagc

SEQ ID NO: 1035105 - RNA, 19 nt, Artificial Sequence
  Description of Artificial Sequence: Synthetic oligonucleotide
caaggccguaguaguuuuc

SEQ ID NO: 1035106 - RNA, 19 nt, Artificial Sequence
  Description of Artificial Sequence: Synthetic oligonucleotide
ggacaaagcaggacugcac

SEQ ID NO: 1035107 - RNA, 19 nt, Artificial Sequence
  Description of Artificial Sequence: Synthetic oligonucleotide
gucgaucuucaguuaaaau

SEQ ID NO: 1035108 - RNA, 19 nt, Artificial Sequence
  Description of Artificial Sequence: Synthetic oligonucleotide
ccaacugugaagauccacu

SEQ ID NO: 1035109 - RNA, 19 nt, Artificial Sequence
  Description of Artificial Sequence: Synthetic oligonucleotide
agucugcagcuaucuuccu

SEQ ID NO: 1035110 - RNA, 19 nt, Artificial Sequence
  Description of Artificial Sequence: Synthetic oligonucleotide
uccccgaagggugcugacu

SEQ ID NO: 1035111 - RNA, 19 nt, Artificial Sequence
  Description of Artificial Sequence: Synthetic oligonucleotide
ccaccauacagaggguagg

SEQ ID NO: 1035112 - RNA, 19 nt, Artificial Sequence
  Description of Artificial Sequence: Synthetic oligonucleotide
ggacugaaugccauccaca

SEQ ID NO: 1035113 - RNA, 19 nt, Artificial Sequence
  Description of Artificial Sequence: Synthetic oligonucleotide
gagggagggccaaaaugaa

SEQ ID NO: 1035114 - RNA, 19 nt, Artificial Sequence
  Description of Artificial Sequence: Synthetic oligonucleotide
ugggauauccgggcuccau

SEQ ID NO: 1035115 - RNA, 19 nt, Artificial Sequence
  Description of Artificial Sequence: Synthetic oligonucleotide
ggaugcuuuuaggguagcc

SEQ ID NO: 1035116 - RNA, 19 nt, Artificial Sequence
  Description of Artificial Sequence: Synthetic oligonucleotide
auccaccuucgaguccacg

SEQ ID NO: 1035117 - RNA, 19 nt, Artificial Sequence
  Description of Artificial Sequence: Synthetic oligonucleotide
gcauuugggucaaacucca

SEQ ID NO: 1035118 - RNA, 19 nt, Artificial Sequence
  Description of Artificial Sequence: Synthetic oligonucleotide
ccugggauauccgggcucc

SEQ ID NO: 1035119 - RNA, 19 nt, Artificial Sequence
  Description of Artificial Sequence: Synthetic oligonucleotide
aggucuccggaggacuugu

SEQ ID NO: 1035120 - RNA, 19 nt, Artificial Sequence
  Description of Artificial Sequence: Synthetic oligonucleotide
accuucgaguccacgccug

SEQ ID NO: 1035121 - RNA, 19 nt, Artificial Sequence
  Description of Artificial Sequence: Synthetic oligonucleotide
ccccgaagggugcugacug

SEQ ID NO: 1035122 - RNA, 19 nt, Artificial Sequence
  Description of Artificial Sequence: Synthetic oligonucleotide
gagguggguuucccuccac

SEQ ID NO: 1035123 - RNA, 19 nt, Artificial Sequence
  Description of Artificial Sequence: Synthetic oligonucleotide
uaccgguguccuccucccu

SEQ ID NO: 1035124 - RNA, 19 nt, Artificial Sequence
  Description of Artificial Sequence: Synthetic oligonucleotide
gggguccucaaagauuuuc

SEQ ID NO: 1035125 - RNA, 19 nt, Artificial Sequence
  Description of Artificial Sequence: Synthetic oligonucleotide
cagcccaggugcauacgca

SEQ ID NO: 1035126 - RNA, 19 nt, Artificial Sequence
  Description of Artificial Sequence: Synthetic oligonucleotide
aggccguaguaguuuucua

SEQ ID NO: 1035127 - RNA, 19 nt, Artificial Sequence
  Description of Artificial Sequence: Synthetic oligonucleotide
cccugugauaacuugggcu

SEQ ID NO: 1035128 - RNA, 19 nt, Artificial Sequence
  Description of Artificial Sequence: Synthetic oligonucleotide
caucagcgaugauucaggu

SEQ ID NO: 1035129 - RNA, 19 nt, Artificial Sequence
  Description of Artificial Sequence: Synthetic oligonucleotide
accucauaugcggcaucca

SEQ ID NO: 1035130 - RNA, 19 nt, Artificial Sequence
  Description of Artificial Sequence: Synthetic oligonucleotide
gcccugugauaacuugggc

SEQ ID NO: 1035131 - RNA, 19 nt, Artificial Sequence
  Description of Artificial Sequence: Synthetic oligonucleotide
cucagggguccucaaagau

SEQ ID NO: 1035132 - RNA, 19 nt, Artificial Sequence
  Description of Artificial Sequence: Synthetic oligonucleotide
guaaccucauaugcggcau

SEQ ID NO: 1035133 - RNA, 19 nt, Artificial Sequence
  Description of Artificial Sequence: Synthetic oligonucleotide
agacggaagcgggccaggu

SEQ ID NO: 1035134 - RNA, 19 nt, Artificial Sequence
  Description of Artificial Sequence: Synthetic oligonucleotide
gaguuagguuuggugggua

SEQ ID NO: 1035135 - RNA, 19 nt, Artificial Sequence
  Description of Artificial Sequence: Synthetic oligonucleotide
aguugcagggagacccaaa

SEQ ID NO: 1035136 - RNA, 19 nt, Artificial Sequence
  Description of Artificial Sequence: Synthetic oligonucleotide
ccuucgaguccacgccugg

SEQ ID NO: 1035137 - RNA, 19 nt, Artificial Sequence
  Description of Artificial Sequence: Synthetic oligonucleotide
cucuguuaguaaccucaua

SEQ ID NO: 1035138 - RNA, 19 nt, Artificial Sequence
  Description of Artificial Sequence: Synthetic oligonucleotide
caaagugagcgucuccauu

SEQ ID NO: 1035139 - RNA, 19 nt, Artificial Sequence
  Description of Artificial Sequence: Synthetic oligonucleotide
gguaccugucguguccuca

SEQ ID NO: 1035140 - RNA, 19 nt, Artificial Sequence
  Description of Artificial Sequence: Synthetic oligonucleotide
ugguaccugucguguccuc

SEQ ID NO: 1035141 - RNA, 19 nt, Artificial Sequence
  Description of Artificial Sequence: Synthetic oligonucleotide
cuccccgaagggugcugac

SEQ ID NO: 1035142 - RNA, 19 nt, Artificial Sequence
  Description of Artificial Sequence: Synthetic oligonucleotide
caggucuccggaggacuug

SEQ ID NO: 1035143 - RNA, 19 nt, Artificial Sequence
  Description of Artificial Sequence: Synthetic oligonucleotide
ggcuuggcugagugaaaga

SEQ ID NO: 1035144 - RNA, 19 nt, Artificial Sequence
  Description of Artificial Sequence: Synthetic oligonucleotide
gcaugagccaagacugcuc

SEQ ID NO: 1035145 - RNA, 19 nt, Artificial Sequence
  Description of Artificial Sequence: Synthetic oligonucleotide
gacaagcuaagcagugcuu

SEQ ID NO: 1035146 - RNA, 19 nt, Artificial Sequence
  Description of Artificial Sequence: Synthetic oligonucleotide
ugcccucggacagcccaga

SEQ ID NO: 1035147 - RNA, 19 nt, Artificial Sequence
  Description of Artificial Sequence: Synthetic oligonucleotide
gccaagccuuccucaaauc

SEQ ID NO: 1035148 - RNA, 19 nt, Artificial Sequence
  Description of Artificial Sequence: Synthetic oligonucleotide
ccuccucccuugcacuacc

SEQ ID NO: 1035149 - RNA, 19 nt, Artificial Sequence
  Description of Artificial Sequence: Synthetic oligonucleotide
acugcacaucagcgaugau

SEQ ID NO: 1035150 - RNA, 19 nt, Artificial Sequence
  Description of Artificial Sequence: Synthetic oligonucleotide
cggaggacuuguagacugg

SEQ ID NO: 1035151 - RNA, 19 nt, Artificial Sequence
  Description of Artificial Sequence: Synthetic oligonucleotide
ucgugcccucggacagccc

SEQ ID NO: 1035152 - RNA, 19 nt, Artificial Sequence
  Description of Artificial Sequence: Synthetic oligonucleotide
gaagggagggagggccaaa

SEQ ID NO: 1035153 - RNA, 19 nt, Artificial Sequence
  Description of Artificial Sequence: Synthetic oligonucleotide
cccgaagggugcugacugc

SEQ ID NO: 1035154 - RNA, 19 nt, Artificial Sequence
  Description of Artificial Sequence: Synthetic oligonucleotide
gcagggagacccaaagugu

SEQ ID NO: 1035155 - RNA, 19 nt, Artificial Sequence
  Description of Artificial Sequence: Synthetic oligonucleotide
gcauacgcaugagccaaga

SEQ ID NO: 1035156 - RNA, 19 nt, Artificial Sequence
  Description of Artificial Sequence: Synthetic oligonucleotide
gacccaaaguguggaugcu

SEQ ID NO: 1035157 - RNA, 19 nt, Artificial Sequence
  Description of Artificial Sequence: Synthetic oligonucleotide
caucuuuugcaaggccgua

SEQ ID NO: 1035158 - RNA, 19 nt, Artificial Sequence
  Description of Artificial Sequence: Synthetic oligonucleotide
caggcuuggcugagugaaa

SEQ ID NO: 1035159 - RNA, 19 nt, Artificial Sequence
  Description of Artificial Sequence: Synthetic oligonucleotide
ggcaaaccauuuacauaga

SEQ ID NO: 1035160 - RNA, 19 nt, Artificial Sequence
  Description of Artificial Sequence: Synthetic oligonucleotide
uccgggcuccauggauugu

SEQ ID NO: 1035161 - RNA, 19 nt, Artificial Sequence
  Description of Artificial Sequence: Synthetic oligonucleotide
ccgguguccuccucccuug

SEQ ID NO: 1035162 - RNA, 19 nt, Artificial Sequence
  Description of Artificial Sequence: Synthetic oligonucleotide
ccucagggguccucaaaga

SEQ ID NO: 1035163 - RNA, 19 nt, Artificial Sequence
  Description of Artificial Sequence: Synthetic oligonucleotide
caccuucgaguccacgccu

SEQ ID NO: 1035164 - RNA, 19 nt, Artificial Sequence
  Description of Artificial Sequence: Synthetic oligonucleotide
ucuuugcauuugggucaaa

SEQ ID NO: 1035165 - RNA, 19 nt, Artificial Sequence
  Description of Artificial Sequence: Synthetic oligonucleotide
gcuaucuuccugggauauc

SEQ ID NO: 1035166 - RNA, 19 nt, Artificial Sequence
  Description of Artificial Sequence: Synthetic oligonucleotide
caggcccaucaaaagggau

SEQ ID NO: 1035167 - RNA, 19 nt, Artificial Sequence
  Description of Artificial Sequence: Synthetic oligonucleotide
cuaccaccauacagagggu

SEQ ID NO: 1035168 - RNA, 19 nt, Artificial Sequence
  Description of Artificial Sequence: Synthetic oligonucleotide
ccguaguaguuuucuaagu

SEQ ID NO: 1035169 - RNA, 19 nt, Artificial Sequence
  Description of Artificial Sequence: Synthetic oligonucleotide
cauaugcggcauccaugcu

SEQ ID NO: 1035170 - RNA, 19 nt, Artificial Sequence
  Description of Artificial Sequence: Synthetic oligonucleotide
augcggcauccaugcugga

SEQ ID NO: 1035171 - RNA, 19 nt, Artificial Sequence
  Description of Artificial Sequence: Synthetic oligonucleotide
ccacgccugggaagucugc

SEQ ID NO: 1035172 - RNA, 19 nt, Artificial Sequence
  Description of Artificial Sequence: Synthetic oligonucleotide
ccucauaugcggcauccau

SEQ ID NO: 1035173 - RNA, 19 nt, Artificial Sequence
  Description of Artificial Sequence: Synthetic oligonucleotide
guccacgccugggaagucu

SEQ ID NO: 1035174 - RNA, 19 nt, Artificial Sequence
  Description of Artificial Sequence: Synthetic oligonucleotide
ggggagguccguagaggga

SEQ ID NO: 1035175 - RNA, 19 nt, Artificial Sequence
  Description of Artificial Sequence: Synthetic oligonucleotide
gcaaggccguaguaguuuu

SEQ ID NO: 1035176 - RNA, 19 nt, Artificial Sequence
  Description of Artificial Sequence: Synthetic oligonucleotide
gguagccugcuugcuccuc

SEQ ID NO: 1035177 - RNA, 19 nt, Artificial Sequence
  Description of Artificial Sequence: Synthetic oligonucleotide
gcgucuccauuaaucccca

SEQ ID NO: 1035178 - RNA, 19 nt, Artificial Sequence
  Description of Artificial Sequence: Synthetic oligonucleotide
caaagacagcauccaccuu

SEQ ID NO: 1035179 - RNA, 19 nt, Artificial Sequence
  Description of Artificial Sequence: Synthetic oligonucleotide
cagaaacggcggcaucaau

SEQ ID NO: 1035180 - RNA, 19 nt, Artificial Sequence
  Description of Artificial Sequence: Synthetic oligonucleotide
ccucgugcccucggacagc

SEQ ID NO: 1035181 - RNA, 19 nt, Artificial Sequence
  Description of Artificial Sequence: Synthetic oligonucleotide
cgucuccauuaauccccag

SEQ ID NO: 1035182 - RNA, 19 nt, Artificial Sequence
  Description of Artificial Sequence: Synthetic oligonucleotide
ccauaccgguguccuccuc

SEQ ID NO: 1035183 - RNA, 19 nt, Artificial Sequence
  Description of Artificial Sequence: Synthetic oligonucleotide
ggguagccugcuugcuccu

SEQ ID NO: 1035184 - RNA, 19 nt, Artificial Sequence
  Description of Artificial Sequence: Synthetic oligonucleotide
ccuauaggugagguggguu

SEQ ID NO: 1035185 - RNA, 19 nt, Artificial Sequence
  Description of Artificial Sequence: Synthetic oligonucleotide
ccugggaagucugcagcua

SEQ ID NO: 1035186 - RNA, 19 nt, Artificial Sequence
  Description of Artificial Sequence: Synthetic oligonucleotide
cguguccucaguccacugu

SEQ ID NO: 1035187 - RNA, 19 nt, Artificial Sequence
  Description of Artificial Sequence: Synthetic oligonucleotide
cccuugcacuaccaccaua

SEQ ID NO: 1035188 - RNA, 19 nt, Artificial Sequence
  Description of Artificial Sequence: Synthetic oligonucleotide
gcccucggacagcccagaa

SEQ ID NO: 1035189 - RNA, 19 nt, Artificial Sequence
  Description of Artificial Sequence: Synthetic oligonucleotide
gcuucaggcuuggcugagu

SEQ ID NO: 1035190 - RNA, 19 nt, Artificial Sequence
  Description of Artificial Sequence: Synthetic oligonucleotide
ccagagaguuagguuuggu

SEQ ID NO: 1035191 - RNA, 19 nt, Artificial Sequence
  Description of Artificial Sequence: Synthetic oligonucleotide
ccgggcuccauggauuguu

SEQ ID NO: 1035192 - RNA, 19 nt, Artificial Sequence
  Description of Artificial Sequence: Synthetic oligonucleotide
gcccaggagucaccucauu

SEQ ID NO: 1035193 - RNA, 19 nt, Artificial Sequence
  Description of Artificial Sequence: Synthetic oligonucleotide
cgggcuccauggauuguuu

SEQ ID NO: 1035194 - RNA, 19 nt, Artificial Sequence
  Description of Artificial Sequence: Synthetic oligonucleotide
aauaggaaaggaugagucc

SEQ ID NO: 1035195 - RNA, 19 nt, Artificial Sequence
  Description of Artificial Sequence: Synthetic oligonucleotide
aacacaauucccaugacac

SEQ ID NO: 1035196 - RNA, 19 nt, Artificial Sequence
  Description of Artificial Sequence: Synthetic oligonucleotide
uguccuugggcuaauaagg

SEQ ID NO: 1035197 - RNA, 19 nt, Artificial Sequence
  Description of Artificial Sequence: Synthetic oligonucleotide
aaggggauaacgcucaguc

SEQ ID NO: 1035198 - RNA, 19 nt, Artificial Sequence
  Description of Artificial Sequence: Synthetic oligonucleotide
auauauuugaaugacagca

SEQ ID NO: 1035199 - RNA, 19 nt, Artificial Sequence
  Description of Artificial Sequence: Synthetic oligonucleotide
uguaucguaagccaggaac

SEQ ID NO: 1035200 - RNA, 19 nt, Artificial Sequence
  Description of Artificial Sequence: Synthetic oligonucleotide
aacaggaugauauuccaug

SEQ ID NO: 1035201 - RNA, 19 nt, Artificial Sequence
  Description of Artificial Sequence: Synthetic oligonucleotide
uaacccaccauacugaaug

SEQ ID NO: 1035202 - RNA, 19 nt, Artificial Sequence
  Description of Artificial Sequence: Synthetic oligonucleotide
gauggaauagaccuuucgg

SEQ ID NO: 1035203 - RNA, 19 nt, Artificial Sequence
  Description of Artificial Sequence: Synthetic oligonucleotide
ucuaaaaccucccagcaga

SEQ ID NO: 1035204 - RNA, 19 nt, Artificial Sequence
  Description of Artificial Sequence: Synthetic oligonucleotide
auaggaaaggaugaguccc

SEQ ID NO: 1035205 - RNA, 19 nt, Artificial Sequence
  Description of Artificial Sequence: Synthetic oligonucleotide
ugagcuguaguacauaggu

SEQ ID NO: 1035206 - RNA, 19 nt, Artificial Sequence
  Description of Artificial Sequence: Synthetic oligonucleotide
agcucccuagccuagaacc

SEQ ID NO: 1035207 - RNA, 19 nt, Artificial Sequence
  Description of Artificial Sequence: Synthetic oligonucleotide
aaggccagaguauagauaa

SEQ ID NO: 1035208 - RNA, 19 nt, Artificial Sequence
  Description of Artificial Sequence: Synthetic oligonucleotide
uggauuauacagaaagcag

SEQ ID NO: 1035209 - RNA, 19 nt, Artificial Sequence
  Description of Artificial Sequence: Synthetic oligonucleotide
gacagaauaggucuaauca

SEQ ID NO: 1035210 - RNA, 19 nt, Artificial Sequence
  Description of Artificial Sequence: Synthetic oligonucleotide
aacccuauggccaaggcgg

SEQ ID NO: 1035211 - RNA, 19 nt, Artificial Sequence
  Description of Artificial Sequence: Synthetic oligonucleotide
gauaaagauagcaaugaug

SEQ ID NO: 1035212 - RNA, 19 nt, Artificial Sequence
  Description of Artificial Sequence: Synthetic oligonucleotide
uucggaugaagguaugucg

SEQ ID NO: 1035213 - RNA, 19 nt, Artificial Sequence
  Description of Artificial Sequence: Synthetic oligonucleotide
aauaaggugucccacccca

SEQ ID NO: 1035214 - RNA, 19 nt, Artificial Sequence
  Description of Artificial Sequence: Synthetic oligonucleotide
uuuccccuaacccagauaa

SEQ ID NO: 1035215 - RNA, 19 nt, Artificial Sequence
  Description of Artificial Sequence: Synthetic oligonucleotide
uuggauuauacagaaagca

SEQ ID NO: 1035216 - RNA, 19 nt, Artificial Sequence
  Description of Artificial Sequence: Synthetic oligonucleotide
caggcaaggaucaaguagg

SEQ ID NO: 1035217 - RNA, 19 nt, Artificial Sequence
  Description of Artificial Sequence: Synthetic oligonucleotide
agaagcaaggacuggacag

SEQ ID NO: 1035218 - RNA, 19 nt, Artificial Sequence
  Description of Artificial Sequence: Synthetic oligonucleotide
ucggaugaagguaugucgg

SEQ ID NO: 1035219 - RNA, 19 nt, Artificial Sequence
  Description of Artificial Sequence: Synthetic oligonucleotide
ugaaagcugaagaugguga

SEQ ID NO: 1035220 - RNA, 19 nt, Artificial Sequence
  Description of Artificial Sequence: Synthetic oligonucleotide
gauuucgguccucauaggg

SEQ ID NO: 1035221 - RNA, 19 nt, Artificial Sequence
  Description of Artificial Sequence: Synthetic oligonucleotide
ugauggaauagaccuuucg

SEQ ID NO: 1035222 - RNA, 19 nt, Artificial Sequence
  Description of Artificial Sequence: Synthetic oligonucleotide
agggaagaucacuagguac

SEQ ID NO: 1035223 - RNA, 19 nt, Artificial Sequence
  Description of Artificial Sequence: Synthetic oligonucleotide
uauauuugaaugacagcac

SEQ ID NO: 1035224 - RNA, 19 nt, Artificial Sequence
  Description of Artificial Sequence: Synthetic oligonucleotide
aaggcacuuucccuguccc

SEQ ID NO: 1035225 - RNA, 19 nt, Artificial Sequence
  Description of Artificial Sequence: Synthetic oligonucleotide
accguaaccugguugaggg

SEQ ID NO: 1035226 - RNA, 19 nt, Artificial Sequence
  Description of Artificial Sequence: Synthetic oligonucleotide
gaugauauuccaugggaac

SEQ ID NO: 1035227 - RNA, 19 nt, Artificial Sequence
  Description of Artificial Sequence: Synthetic oligonucleotide
cuaaagaguucugacaggg

SEQ ID NO: 1035228 - RNA, 19 nt, Artificial Sequence
  Description of Artificial Sequence: Synthetic oligonucleotide
augaucauugcuaugauga

SEQ ID NO: 1035229 - RNA, 19 nt, Artificial Sequence
  Description of Artificial Sequence: Synthetic oligonucleotide
uguaguacauaggugaaga

SEQ ID NO: 1035230 - RNA, 19 nt, Artificial Sequence
  Description of Artificial Sequence: Synthetic oligonucleotide
ugauauuccaugggaaccg

SEQ ID NO: 1035231 - RNA, 19 nt, Artificial Sequence
  Description of Artificial Sequence: Synthetic oligonucleotide
auagcaaugauggccacgg

SEQ ID NO: 1035232 - RNA, 19 nt, Artificial Sequence
  Description of Artificial Sequence: Synthetic oligonucleotide
uuucgguccucauagggag

SEQ ID NO: 1035233 - RNA, 19 nt, Artificial Sequence
  Description of Artificial Sequence: Synthetic oligonucleotide
aggaguucucgucuaaaac

SEQ ID NO: 1035234 - RNA, 19 nt, Artificial Sequence
  Description of Artificial Sequence: Synthetic oligonucleotide
cuuggauuauacagaaagc

SEQ ID NO: 1035235 - RNA, 19 nt, Artificial Sequence
  Description of Artificial Sequence: Synthetic oligonucleotide
gacagcuuugguuugguac

SEQ ID NO: 1035236 - RNA, 19 nt, Artificial Sequence
  Description of Artificial Sequence: Synthetic oligonucleotide
agaguauagauaaucaaca

SEQ ID NO: 1035237 - RNA, 19 nt, Artificial Sequence
  Description of Artificial Sequence: Synthetic oligonucleotide
auggaugggaggcaucggc

SEQ ID NO: 1035238 - RNA, 19 nt, Artificial Sequence
  Description of Artificial Sequence: Synthetic oligonucleotide
aucuauacauguuacugga

SEQ ID NO: 1035239 - RNA, 19 nt, Artificial Sequence
  Description of Artificial Sequence: Synthetic oligonucleotide
guacagaggauuucggucc

SEQ ID NO: 1035240 - RNA, 19 nt, Artificial Sequence
  Description of Artificial Sequence: Synthetic oligonucleotide
auauucagaagcaaggacu

SEQ ID NO: 1035241 - RNA, 19 nt, Artificial Sequence
  Description of Artificial Sequence: Synthetic oligonucleotide
agaugccaagccuaaagag

SEQ ID NO: 1035242 - RNA, 19 nt, Artificial Sequence
  Description of Artificial Sequence: Synthetic oligonucleotide
gacuauaucaguguagauc

SEQ ID NO: 1035243 - RNA, 19 nt, Artificial Sequence
  Description of Artificial Sequence: Synthetic oligonucleotide
gaauagaccuuucggauga

SEQ ID NO: 1035244 - RNA, 19 nt, Artificial Sequence
  Description of Artificial Sequence: Synthetic oligonucleotide
agguaugucggacuuuccg

SEQ ID NO: 1035245 - RNA, 19 nt, Artificial Sequence
  Description of Artificial Sequence: Synthetic oligonucleotide
uaaagcugucacuuacggg

SEQ ID NO: 1035246 - RNA, 19 nt, Artificial Sequence
  Description of Artificial Sequence: Synthetic oligonucleotide
uuugguuugguacgugcug

SEQ ID NO: 1035247 - RNA, 19 nt, Artificial Sequence
  Description of Artificial Sequence: Synthetic oligonucleotide
accugauaaaacuggcuuc

SEQ ID NO: 1035248 - RNA, 19 nt, Artificial Sequence
  Description of Artificial Sequence: Synthetic oligonucleotide
ucgucuaaaaccucccagc

SEQ ID NO: 1035249 - RNA, 19 nt, Artificial Sequence
  Description of Artificial Sequence: Synthetic oligonucleotide
cagaauaggucuaaucaug

SEQ ID NO: 1035250 - RNA, 19 nt, Artificial Sequence
  Description of Artificial Sequence: Synthetic oligonucleotide
ggaacagggagacaguagg

SEQ ID NO: 1035251 - RNA, 19 nt, Artificial Sequence
  Description of Artificial Sequence: Synthetic oligonucleotide
gaacccuauggccaaggcg

SEQ ID NO: 1035252 - RNA, 19 nt, Artificial Sequence
  Description of Artificial Sequence: Synthetic oligonucleotide
ugauaaaacuggcuucugu

SEQ ID NO: 1035253 - RNA, 19 nt, Artificial Sequence
  Description of Artificial Sequence: Synthetic oligonucleotide
ucauaaagcccaaggccag

SEQ ID NO: 1035254 - RNA, 19 nt, Artificial Sequence
  Description of Artificial Sequence: Synthetic oligonucleotide
ucccaugacacagaagagg

SEQ ID NO: 1035255 - RNA, 19 nt, Artificial Sequence
  Description of Artificial Sequence: Synthetic oligonucleotide
uuuuauuacguuucugguu

SEQ ID NO: 1035256 - RNA, 19 nt, Artificial Sequence
  Description of Artificial Sequence: Synthetic oligonucleotide
agcauagaccauguggagc

SEQ ID NO: 1035257 - RNA, 19 nt, Artificial Sequence
  Description of Artificial Sequence: Synthetic oligonucleotide
cuaagauguaguccucugg

SEQ ID NO: 1035258 - RNA, 19 nt, Artificial Sequence
  Description of Artificial Sequence: Synthetic oligonucleotide
aaugauggaauagaccuuu

SEQ ID NO: 1035259 - RNA, 19 nt, Artificial Sequence
  Description of Artificial Sequence: Synthetic oligonucleotide
aggguauccaccuggcagg

SEQ ID NO: 1035260 - RNA, 19 nt, Artificial Sequence
  Description of Artificial Sequence: Synthetic oligonucleotide
aaccccaguugcugggacc

SEQ ID NO: 1035261 - RNA, 19 nt, Artificial Sequence
  Description of Artificial Sequence: Synthetic oligonucleotide
uugguuugguacgugcugg

SEQ ID NO: 1035262 - RNA, 19 nt, Artificial Sequence
  Description of Artificial Sequence: Synthetic oligonucleotide
agagaggaacccaaggcac

SEQ ID NO: 1035263 - RNA, 19 nt, Artificial Sequence
  Description of Artificial Sequence: Synthetic oligonucleotide
acagauggcugcccguagc

SEQ ID NO: 1035264 - RNA, 19 nt, Artificial Sequence
  Description of Artificial Sequence: Synthetic oligonucleotide
cagacuuaacccaccauac

SEQ ID NO: 1035265 - RNA, 19 nt, Artificial Sequence
  Description of Artificial Sequence: Synthetic oligonucleotide
gccuaaagaguucugacag

SEQ ID NO: 1035266 - RNA, 19 nt, Artificial Sequence
  Description of Artificial Sequence: Synthetic oligonucleotide
cauuggauggaugggaggc

SEQ ID NO: 1035267 - RNA, 19 nt, Artificial Sequence
  Description of Artificial Sequence: Synthetic oligonucleotide
gguaugucggacuuuccgg

SEQ ID NO: 1035268 - RNA, 19 nt, Artificial Sequence
  Description of Artificial Sequence: Synthetic oligonucleotide
uguguuagaagggaagauc

SEQ ID NO: 1035269 - RNA, 19 nt, Artificial Sequence
  Description of Artificial Sequence: Synthetic oligonucleotide
guucggaaccgugagaucc

SEQ ID NO: 1035270 - RNA, 19 nt, Artificial Sequence
  Description of Artificial Sequence: Synthetic oligonucleotide
auguagacuauaucagugu

SEQ ID NO: 1035271 - RNA, 19 nt, Artificial Sequence
  Description of Artificial Sequence: Synthetic oligonucleotide
uauuggauccaggagggga

SEQ ID NO: 1035272 - RNA, 19 nt, Artificial Sequence
  Description of Artificial Sequence: Synthetic oligonucleotide
ucagucucgacuccccaug

SEQ ID NO: 1035273 - RNA, 19 nt, Artificial Sequence
  Description of Artificial Sequence: Synthetic oligonucleotide
agaacccuauggccaaggc

SEQ ID NO: 1035274 - RNA, 19 nt, Artificial Sequence
  Description of Artificial Sequence: Synthetic oligonucleotide
agaagaggccuguacacga

SEQ ID NO: 1035275 - RNA, 19 nt, Artificial Sequence
  Description of Artificial Sequence: Synthetic oligonucleotide
agaccuuucggaugaaggu

SEQ ID NO: 1035276 - RNA, 19 nt, Artificial Sequence
  Description of Artificial Sequence: Synthetic oligonucleotide
ugggcuaauaagguguccc

SEQ ID NO: 1035277 - RNA, 19 nt, Artificial Sequence
  Description of Artificial Sequence: Synthetic oligonucleotide
agcuuucagagcuaagaga

SEQ ID NO: 1035278 - RNA, 19 nt, Artificial Sequence
  Description of Artificial Sequence: Synthetic oligonucleotide
aaccgugagauccgcccgg

SEQ ID NO: 1035279 - RNA, 19 nt, Artificial Sequence
  Description of Artificial Sequence: Synthetic oligonucleotide
uccucacgaagucacugag

SEQ ID NO: 1035280 - RNA, 19 nt, Artificial Sequence
  Description of Artificial Sequence: Synthetic oligonucleotide
uguacacgaggugaagucc

SEQ ID NO: 1035281 - RNA, 19 nt, Artificial Sequence
  Description of Artificial Sequence: Synthetic oligonucleotide
uucggaaccgugagauccg

SEQ ID NO: 1035282 - RNA, 19 nt, Artificial Sequence
  Description of Artificial Sequence: Synthetic oligonucleotide
cauaggacacguaguacac

SEQ ID NO: 1035283 - RNA, 19 nt, Artificial Sequence
  Description of Artificial Sequence: Synthetic oligonucleotide
aggguaaguggccugugag

SEQ ID NO: 1035284 - RNA, 19 nt, Artificial Sequence
  Description of Artificial Sequence: Synthetic oligonucleotide
gguuggaacagggagacag

SEQ ID NO: 1035285 - RNA, 19 nt, Artificial Sequence
  Description of Artificial Sequence: Synthetic oligonucleotide
accuugagcuguucggaac

SEQ ID NO: 1035286 - RNA, 19 nt, Artificial Sequence
  Description of Artificial Sequence: Synthetic oligonucleotide
uucucgucuaaaaccuccc

SEQ ID NO: 1035287 - RNA, 19 nt, Artificial Sequence
  Description of Artificial Sequence: Synthetic oligonucleotide
gacggaaaugauggaauag

SEQ ID NO: 1035288 - RNA, 19 nt, Artificial Sequence
  Description of Artificial Sequence: Synthetic oligonucleotide
gucauaaagcccaaggcca

SEQ ID NO: 1035289 - RNA, 19 nt, Artificial Sequence
  Description of Artificial Sequence: Synthetic oligonucleotide
cucgucuaaaaccucccag

SEQ ID NO: 1035290 - RNA, 19 nt, Artificial Sequence
  Description of Artificial Sequence: Synthetic oligonucleotide
acguuucugguuguguccc

SEQ ID NO: 1035291 - RNA, 19 nt, Artificial Sequence
  Description of Artificial Sequence: Synthetic oligonucleotide
caaggacuggacagaauag

SEQ ID NO: 1035292 - RNA, 19 nt, Artificial Sequence
  Description of Artificial Sequence: Synthetic oligonucleotide
auaggucuaaucauguccu

SEQ ID NO: 1035293 - RNA, 19 nt, Artificial Sequence
  Description of Artificial Sequence: Synthetic oligonucleotide
agauaaagauagcaaugau

SEQ ID NO: 1035294 - RNA, 19 nt, Artificial Sequence
  Description of Artificial Sequence: Synthetic oligonucleotide
agccuaaagaguucugaca

SEQ ID NO: 1035295 - RNA, 19 nt, Artificial Sequence
  Description of Artificial Sequence: Synthetic oligonucleotide
guagacuauaucaguguag

SEQ ID NO: 1035296 - RNA, 19 nt, Artificial Sequence
  Description of Artificial Sequence: Synthetic oligonucleotide
gaaccgugagauccgcccg

SEQ ID NO: 1035297 - RNA, 19 nt, Artificial Sequence
  Description of Artificial Sequence: Synthetic oligonucleotide
ucacgaagucacugagugg

SEQ ID NO: 1035298 - RNA, 19 nt, Artificial Sequence
  Description of Artificial Sequence: Synthetic oligonucleotide
acuaaagcugucacuuacg

SEQ ID NO: 1035299 - RNA, 19 nt, Artificial Sequence
  Description of Artificial Sequence: Synthetic oligonucleotide
uucuaauugccaacauaaa

SEQ ID NO: 1035300 - RNA, 19 nt, Artificial Sequence
  Description of Artificial Sequence: Synthetic oligonucleotide
aggaacccaaggcacuuuc

SEQ ID NO: 1035301 - RNA, 19 nt, Artificial Sequence
  Description of Artificial Sequence: Synthetic oligonucleotide
gaagguaugucggacuuuc

SEQ ID NO: 1035302 - RNA, 19 nt, Artificial Sequence
  Description of Artificial Sequence: Synthetic oligonucleotide
gauauuccaugggaaccgg

SEQ ID NO: 1035303 - RNA, 19 nt, Artificial Sequence
  Description of Artificial Sequence: Synthetic oligonucleotide
gcaggcaaggaucaaguag

SEQ ID NO: 1035304 - RNA, 19 nt, Artificial Sequence
  Description of Artificial Sequence: Synthetic oligonucleotide
gaaauggugcccgucauaa

SEQ ID NO: 1035305 - RNA, 19 nt, Artificial Sequence
  Description of Artificial Sequence: Synthetic oligonucleotide
gaacagggagacaguaggg

SEQ ID NO: 1035306 - RNA, 19 nt, Artificial Sequence
  Description of Artificial Sequence: Synthetic oligonucleotide
cuuagucugaaagcugaag

SEQ ID NO: 1035307 - RNA, 19 nt, Artificial Sequence
  Description of Artificial Sequence: Synthetic oligonucleotide
caggguacagaggauuucg

SEQ ID NO: 1035308 - RNA, 19 nt, Artificial Sequence
  Description of Artificial Sequence: Synthetic oligonucleotide
acauguuacuggaggaggg

SEQ ID NO: 1035309 - RNA, 19 nt, Artificial Sequence
  Description of Artificial Sequence: Synthetic oligonucleotide
acggaaaugauggaauaga

SEQ ID NO: 1035310 - RNA, 19 nt, Artificial Sequence
  Description of Artificial Sequence: Synthetic oligonucleotide
gaauaggucuaaucauguc

SEQ ID NO: 1035311 - RNA, 19 nt, Artificial Sequence
  Description of Artificial Sequence: Synthetic oligonucleotide
guagcuagcuuggagagga

SEQ ID NO: 1035312 - RNA, 19 nt, Artificial Sequence
  Description of Artificial Sequence: Synthetic oligonucleotide
agcagggugaccguaaccu

SEQ ID NO: 1035313 - RNA, 19 nt, Artificial Sequence
  Description of Artificial Sequence: Synthetic oligonucleotide
auggauaccacagcaguga

SEQ ID NO: 1035314 - RNA, 19 nt, Artificial Sequence
  Description of Artificial Sequence: Synthetic oligonucleotide
uggcuuuauuggauccagg

SEQ ID NO: 1035315 - RNA, 19 nt, Artificial Sequence
  Description of Artificial Sequence: Synthetic oligonucleotide
guacuuggauuauacagaa

SEQ ID NO: 1035316 - RNA, 19 nt, Artificial Sequence
  Description of Artificial Sequence: Synthetic oligonucleotide
acuuacggggcucuccucu

SEQ ID NO: 1035317 - RNA, 19 nt, Artificial Sequence
  Description of Artificial Sequence: Synthetic oligonucleotide
agcuguucggaaccgugag

SEQ ID NO: 1035318 - RNA, 19 nt, Artificial Sequence
  Description of Artificial Sequence: Synthetic oligonucleotide
gguacagaggauuucgguc

SEQ ID NO: 1035319 - RNA, 19 nt, Artificial Sequence
  Description of Artificial Sequence: Synthetic oligonucleotide
gugaccguaaccugguuga

SEQ ID NO: 1035320 - RNA, 19 nt, Artificial Sequence
  Description of Artificial Sequence: Synthetic oligonucleotide
uguguaucguaagccagga

SEQ ID NO: 1035321 - RNA, 19 nt, Artificial Sequence
  Description of Artificial Sequence: Synthetic oligonucleotide
ggaauagaccuuucggaug

SEQ ID NO: 1035322 - RNA, 19 nt, Artificial Sequence
  Description of Artificial Sequence: Synthetic oligonucleotide
ugcagagucauggccguag

SEQ ID NO: 1035323 - RNA, 19 nt, Artificial Sequence
  Description of Artificial Sequence: Synthetic oligonucleotide
gcuaauaaggugucccacc

SEQ ID NO: 1035324 - RNA, 19 nt, Artificial Sequence
  Description of Artificial Sequence: Synthetic oligonucleotide
ggggauaacgcucagucuc

SEQ ID NO: 1035325 - RNA, 19 nt, Artificial Sequence
  Description of Artificial Sequence: Synthetic oligonucleotide
uggugcccgucauaaagcc

SEQ ID NO: 1035326 - RNA, 19 nt, Artificial Sequence
  Description of Artificial Sequence: Synthetic oligonucleotide
ucucgucuaaaaccuccca

SEQ ID NO: 1035327 - RNA, 19 nt, Artificial Sequence
  Description of Artificial Sequence: Synthetic oligonucleotide
gagucauggccguagcuca

SEQ ID NO: 1035328 - RNA, 19 nt, Artificial Sequence
  Description of Artificial Sequence: Synthetic oligonucleotide
cuguacacgaggugaaguc

SEQ ID NO: 1035329 - RNA, 19 nt, Artificial Sequence
  Description of Artificial Sequence: Synthetic oligonucleotide
guucucgucuaaaaccucc

SEQ ID NO: 1035330 - RNA, 19 nt, Artificial Sequence
  Description of Artificial Sequence: Synthetic oligonucleotide
acccagauaaauaaucuau

SEQ ID NO: 1035331 - RNA, 19 nt, Artificial Sequence
  Description of Artificial Sequence: Synthetic oligonucleotide
cuaaaaccucccagcagac

SEQ ID NO: 1035332 - RNA, 19 nt, Artificial Sequence
  Description of Artificial Sequence: Synthetic oligonucleotide
uuucggaugaagguauguc

SEQ ID NO: 1035333 - RNA, 19 nt, Artificial Sequence
  Description of Artificial Sequence: Synthetic oligonucleotide
accgaacuuguguuagaag

SEQ ID NO: 1035334 - RNA, 19 nt, Artificial Sequence
  Description of Artificial Sequence: Synthetic oligonucleotide
augccaguaacaaucccag

SEQ ID NO: 1035335 - RNA, 19 nt, Artificial Sequence
  Description of Artificial Sequence: Synthetic oligonucleotide
agacuuaacccaccauacu

SEQ ID NO: 1035336 - RNA, 19 nt, Artificial Sequence
  Description of Artificial Sequence: Synthetic oligonucleotide
uucgguccucauagggagg

SEQ ID NO: 1035337 - RNA, 19 nt, Artificial Sequence
  Description of Artificial Sequence: Synthetic oligonucleotide
guaucguaagccaggaaca

SEQ ID NO: 1035338 - RNA, 19 nt, Artificial Sequence
  Description of Artificial Sequence: Synthetic oligonucleotide
ucggacuuuccggucaucc

SEQ ID NO: 1035339 - RNA, 19 nt, Artificial Sequence
  Description of Artificial Sequence: Synthetic oligonucleotide
gucucgacuccccaugagc

SEQ ID NO: 1035340 - RNA, 19 nt, Artificial Sequence
  Description of Artificial Sequence: Synthetic oligonucleotide
ggaaccgugagauccgccc

SEQ ID NO: 1035341 - RNA, 19 nt, Artificial Sequence
  Description of Artificial Sequence: Synthetic oligonucleotide
uccccuaacccagauaaau

SEQ ID NO: 1035342 - RNA, 19 nt, Artificial Sequence
  Description of Artificial Sequence: Synthetic oligonucleotide
augaagguaugucggacuu

SEQ ID NO: 1035343 - RNA, 19 nt, Artificial Sequence
  Description of Artificial Sequence: Synthetic oligonucleotide
auuacguuucugguugugu

SEQ ID NO: 1035344 - RNA, 19 nt, Artificial Sequence
  Description of Artificial Sequence: Synthetic oligonucleotide
gaugaagguaugucggacu

SEQ ID NO: 1035345 - RNA, 19 nt, Artificial Sequence
  Description of Artificial Sequence: Synthetic oligonucleotide
cgucauaaagcccaaggcc

SEQ ID NO: 1035346 - RNA, 19 nt, Artificial Sequence
  Description of Artificial Sequence: Synthetic oligonucleotide
uagaacccuauggccaagg

SEQ ID NO: 1035347 - RNA, 19 nt, Artificial Sequence
  Description of Artificial Sequence: Synthetic oligonucleotide
cagaagaggccuguacacg

SEQ ID NO: 1035348 - RNA, 19 nt, Artificial Sequence
  Description of Artificial Sequence: Synthetic oligonucleotide
ggugaucagcagcuggacg

SEQ ID NO: 1035349 - RNA, 19 nt, Artificial Sequence
  Description of Artificial Sequence: Synthetic oligonucleotide
ugccaacauaaaauuuuau

SEQ ID NO: 1035350 - RNA, 19 nt, Artificial Sequence
  Description of Artificial Sequence: Synthetic oligonucleotide
gaccguaaccugguugagg

SEQ ID NO: 1035351 - RNA, 19 nt, Artificial Sequence
  Description of Artificial Sequence: Synthetic oligonucleotide
agcagaccgaacuuguguu

SEQ ID NO: 1035352 - RNA, 19 nt, Artificial Sequence
  Description of Artificial Sequence: Synthetic oligonucleotide
cuugggcuaauaagguguc

SEQ ID NO: 1035353 - RNA, 19 nt, Artificial Sequence
  Description of Artificial Sequence: Synthetic oligonucleotide
ucuggcuuuauuggaucca

SEQ ID NO: 1035354 - RNA, 19 nt, Artificial Sequence
  Description of Artificial Sequence: Synthetic oligonucleotide
uuauuacguuucugguugu

SEQ ID NO: 1035355 - RNA, 19 nt, Artificial Sequence
  Description of Artificial Sequence: Synthetic oligonucleotide
ugaaggggauaacgcucag

SEQ ID NO: 1035356 - RNA, 19 nt, Artificial Sequence
  Description of Artificial Sequence: Synthetic oligonucleotide
uaaaaccucccagcagacc

SEQ ID NO: 1035357 - RNA, 19 nt, Artificial Sequence
  Description of Artificial Sequence: Synthetic oligonucleotide
auuucgguccucauaggga

SEQ ID NO: 1035358 - RNA, 19 nt, Artificial Sequence
  Description of Artificial Sequence: Synthetic oligonucleotide
acuagguaccagagugggc

SEQ ID NO: 1035359 - RNA, 19 nt, Artificial Sequence
  Description of Artificial Sequence: Synthetic oligonucleotide
aggucuaaucauguccuug

SEQ ID NO: 1035360 - RNA, 19 nt, Artificial Sequence
  Description of Artificial Sequence: Synthetic oligonucleotide
gaggaguucucgucuaaaa

SEQ ID NO: 1035361 - RNA, 19 nt, Artificial Sequence
  Description of Artificial Sequence: Synthetic oligonucleotide
gacagauggcugcccguag

SEQ ID NO: 1035362 - RNA, 19 nt, Artificial Sequence
  Description of Artificial Sequence: Synthetic oligonucleotide
augucggacuuuccgguca

SEQ ID NO: 1035363 - RNA, 19 nt, Artificial Sequence
  Description of Artificial Sequence: Synthetic oligonucleotide
cagaccgaacuuguguuag

SEQ ID NO: 1035364 - RNA, 19 nt, Artificial Sequence
  Description of Artificial Sequence: Synthetic oligonucleotide
uuguguuagaagggaagau

SEQ ID NO: 1035365 - RNA, 19 nt, Artificial Sequence
  Description of Artificial Sequence: Synthetic oligonucleotide
cuggcuuuauuggauccag

SEQ ID NO: 1035366 - RNA, 19 nt, Artificial Sequence
  Description of Artificial Sequence: Synthetic oligonucleotide
cuugaagcgccuguguuca

SEQ ID NO: 1035367 - RNA, 19 nt, Artificial Sequence
  Description of Artificial Sequence: Synthetic oligonucleotide
agggcaagacaucuggcuu

SEQ ID NO: 1035368 - RNA, 19 nt, Artificial Sequence
  Description of Artificial Sequence: Synthetic oligonucleotide
guacgugcuggaaauggug

SEQ ID NO: 1035369 - RNA, 19 nt, Artificial Sequence
  Description of Artificial Sequence: Synthetic oligonucleotide
cccgucauaaagcccaagg

SEQ ID NO: 1035370 - RNA, 19 nt, Artificial Sequence
  Description of Artificial Sequence: Synthetic oligonucleotide
caccuuagucugaaagcug

SEQ ID NO: 1035371 - RNA, 19 nt, Artificial Sequence
  Description of Artificial Sequence: Synthetic oligonucleotide
uaugucggacuuuccgguc

SEQ ID NO: 1035372 - RNA, 19 nt, Artificial Sequence
  Description of Artificial Sequence: Synthetic oligonucleotide
gccagugaaggggauaacg

SEQ ID NO: 1035373 - RNA, 19 nt, Artificial Sequence
  Description of Artificial Sequence: Synthetic oligonucleotide
aaauggugcccgucauaaa

SEQ ID NO: 1035374 - RNA, 19 nt, Artificial Sequence
  Description of Artificial Sequence: Synthetic oligonucleotide
ugucccuuugugauauauu

SEQ ID NO: 1035375 - RNA, 19 nt, Artificial Sequence
  Description of Artificial Sequence: Synthetic oligonucleotide
ucucucagucucgacuccc

SEQ ID NO: 1035376 - RNA, 19 nt, Artificial Sequence
  Description of Artificial Sequence: Synthetic oligonucleotide
cuauaucaguguagaucug

SEQ ID NO: 1035377 - RNA, 19 nt, Artificial Sequence
  Description of Artificial Sequence: Synthetic oligonucleotide
cagcuggacggaaaugaug

SEQ ID NO: 1035378 - RNA, 19 nt, Artificial Sequence
  Description of Artificial Sequence: Synthetic oligonucleotide
ggaaaggaugagucccagg

SEQ ID NO: 1035379 - RNA, 19 nt, Artificial Sequence
  Description of Artificial Sequence: Synthetic oligonucleotide
guaaccugguugaggguag

SEQ ID NO: 1035380 - RNA, 19 nt, Artificial Sequence
  Description of Artificial Sequence: Synthetic oligonucleotide
aggggauaacgcucagucu

SEQ ID NO: 1035381 - RNA, 19 nt, Artificial Sequence
  Description of Artificial Sequence: Synthetic oligonucleotide
ccuaaagaguucugacagg

SEQ ID NO: 1035382 - RNA, 19 nt, Artificial Sequence
  Description of Artificial Sequence: Synthetic oligonucleotide
uuacggggcucuccucugc

SEQ ID NO: 1035383 - RNA, 19 nt, Artificial Sequence
  Description of Artificial Sequence: Synthetic oligonucleotide
ucgacuccccaugagcugu

SEQ ID NO: 1035384 - RNA, 19 nt, Artificial Sequence
  Description of Artificial Sequence: Synthetic oligonucleotide
gcuuugguuugguacgugc

SEQ ID NO: 1035385 - RNA, 19 nt, Artificial Sequence
  Description of Artificial Sequence: Synthetic oligonucleotide
gaggccuguacacgaggug

SEQ ID NO: 1035386 - RNA, 19 nt, Artificial Sequence
  Description of Artificial Sequence: Synthetic oligonucleotide
agucucgacuccccaugag

SEQ ID NO: 1035387 - RNA, 19 nt, Artificial Sequence
  Description of Artificial Sequence: Synthetic oligonucleotide
ggcaccuaagauguagucc

SEQ ID NO: 1035388 - RNA, 19 nt, Artificial Sequence
  Description of Artificial Sequence: Synthetic oligonucleotide
auagaccauguggagccag

SEQ ID NO: 1035389 - RNA, 19 nt, Artificial Sequence
  Description of Artificial Sequence: Synthetic oligonucleotide
aggccuguacacgagguga

SEQ ID NO: 1035390 - RNA, 19 nt, Artificial Sequence
  Description of Artificial Sequence: Synthetic oligonucleotide
gcaaggacuggacagaaua

SEQ ID NO: 1035391 - RNA, 19 nt, Artificial Sequence
  Description of Artificial Sequence: Synthetic oligonucleotide
agacuauaucaguguagau

SEQ ID NO: 1035392 - RNA, 19 nt, Artificial Sequence
  Description of Artificial Sequence: Synthetic oligonucleotide
ggacagaauaggucuaauc

SEQ ID NO: 1035393 - RNA, 19 nt, Artificial Sequence
  Description of Artificial Sequence: Synthetic oligonucleotide
ugguuugguacgugcugga

SEQ ID NO: 1035394 - RNA, 19 nt, Artificial Sequence
  Description of Artificial Sequence: Synthetic oligonucleotide
cuuaacccaccauacugaa

SEQ ID NO: 1035395 - RNA, 19 nt, Artificial Sequence
  Description of Artificial Sequence: Synthetic oligonucleotide
ucuuuccccuaacccagau

SEQ ID NO: 1035396 - RNA, 19 nt, Artificial Sequence
  Description of Artificial Sequence: Synthetic oligonucleotide
ccgucauaaagcccaaggc

SEQ ID NO: 1035397 - RNA, 19 nt, Artificial Sequence
  Description of Artificial Sequence: Synthetic oligonucleotide
aguucucgucuaaaaccuc

SEQ ID NO: 1035398 - RNA, 19 nt, Artificial Sequence
  Description of Artificial Sequence: Synthetic oligonucleotide
gacgggagccucuucaccu

SEQ ID NO: 1035399 - RNA, 19 nt, Artificial Sequence
  Description of Artificial Sequence: Synthetic oligonucleotide
uccccagacuuaacccacc

SEQ ID NO: 1035400 - RNA, 19 nt, Artificial Sequence
  Description of Artificial Sequence: Synthetic oligonucleotide
auaaggugucccaccccac

SEQ ID NO: 1035401 - RNA, 19 nt, Artificial Sequence
  Description of Artificial Sequence: Synthetic oligonucleotide
gcaccuaagauguaguccu

SEQ ID NO: 1035402 - RNA, 19 nt, Artificial Sequence
  Description of Artificial Sequence: Synthetic oligonucleotide
cacgaagucacugaguggu

SEQ ID NO: 1035403 - RNA, 19 nt, Artificial Sequence
  Description of Artificial Sequence: Synthetic oligonucleotide
cuuacggggcucuccucug

SEQ ID NO: 1035404 - RNA, 19 nt, Artificial Sequence
  Description of Artificial Sequence: Synthetic oligonucleotide
ggacuuuccggucauccca

SEQ ID NO: 1035405 - RNA, 19 nt, Artificial Sequence
  Description of Artificial Sequence: Synthetic oligonucleotide
auuggauccaggaggggaa

SEQ ID NO: 1035406 - RNA, 19 nt, Artificial Sequence
  Description of Artificial Sequence: Synthetic oligonucleotide
aaggcgggacgggagccuc

SEQ ID NO: 1035407 - RNA, 19 nt, Artificial Sequence
  Description of Artificial Sequence: Synthetic oligonucleotide
gugaaggggauaacgcuca

SEQ ID NO: 1035408 - RNA, 19 nt, Artificial Sequence
  Description of Artificial Sequence: Synthetic oligonucleotide
cccaccauacugaaugaac

SEQ ID NO: 1035409 - RNA, 19 nt, Artificial Sequence
  Description of Artificial Sequence: Synthetic oligonucleotide
uacggggcucuccucugca

SEQ ID NO: 1035410 - RNA, 19 nt, Artificial Sequence
  Description of Artificial Sequence: Synthetic oligonucleotide
uugggcuaauaaggugucc

SEQ ID NO: 1035411 - RNA, 19 nt, Artificial Sequence
  Description of Artificial Sequence: Synthetic oligonucleotide
guaugucggacuuuccggu

SEQ ID NO: 1035412 - RNA, 19 nt, Artificial Sequence
  Description of Artificial Sequence: Synthetic oligonucleotide
gucacuuacggggcucucc

SEQ ID NO: 1035413 - RNA, 19 nt, Artificial Sequence
  Description of Artificial Sequence: Synthetic oligonucleotide
auaggacacguaguacaca

SEQ ID NO: 1035414 - RNA, 19 nt, Artificial Sequence
  Description of Artificial Sequence: Synthetic oligonucleotide
ggauuucgguccucauagg

SEQ ID NO: 1035415 - RNA, 19 nt, Artificial Sequence
  Description of Artificial Sequence: Synthetic oligonucleotide
cucgacuccccaugagcug

SEQ ID NO: 1035416 - RNA, 19 nt, Artificial Sequence
  Description of Artificial Sequence: Synthetic oligonucleotide
gaccuuucggaugaaggua

SEQ ID NO: 1035417 - RNA, 19 nt, Artificial Sequence
  Description of Artificial Sequence: Synthetic oligonucleotide
uguucggaaccgugagauc

SEQ ID NO: 1035418 - RNA, 19 nt, Artificial Sequence
  Description of Artificial Sequence: Synthetic oligonucleotide
aaaccucccagcagaccga

SEQ ID NO: 1035419 - RNA, 19 nt, Artificial Sequence
  Description of Artificial Sequence: Synthetic oligonucleotide
agaccgaacuuguguuaga

SEQ ID NO: 1035420 - RNA, 19 nt, Artificial Sequence
  Description of Artificial Sequence: Synthetic oligonucleotide
ccuaagauguaguccucug

SEQ ID NO: 1035421 - RNA, 19 nt, Artificial Sequence
  Description of Artificial Sequence: Synthetic oligonucleotide
cuuugguuugguacgugcu

SEQ ID NO: 1035422 - RNA, 19 nt, Artificial Sequence
  Description of Artificial Sequence: Synthetic oligonucleotide
gaccgaacuuguguuagaa

SEQ ID NO: 1035423 - RNA, 19 nt, Artificial Sequence
  Description of Artificial Sequence: Synthetic oligonucleotide
guagcucaugggcauugga

SEQ ID NO: 1035424 - RNA, 19 nt, Artificial Sequence
  Description of Artificial Sequence: Synthetic oligonucleotide
aagcccaaggccagaguau

SEQ ID NO: 1035425 - RNA, 19 nt, Artificial Sequence
  Description of Artificial Sequence: Synthetic oligonucleotide
ugaccguaaccugguugag

SEQ ID NO: 1035426 - RNA, 19 nt, Artificial Sequence
  Description of Artificial Sequence: Synthetic oligonucleotide
ugucggacuuuccggucau

SEQ ID NO: 1035427 - RNA, 19 nt, Artificial Sequence
  Description of Artificial Sequence: Synthetic oligonucleotide
gaggguaggcaggguaggc

SEQ ID NO: 1035428 - RNA, 19 nt, Artificial Sequence
  Description of Artificial Sequence: Synthetic oligonucleotide
accccaccugauaaaacug

SEQ ID NO: 1035429 - RNA, 19 nt, Artificial Sequence
  Description of Artificial Sequence: Synthetic oligonucleotide
ugccaguaacaaucccagu

SEQ ID NO: 1035430 - RNA, 19 nt, Artificial Sequence
  Description of Artificial Sequence: Synthetic oligonucleotide
uugguacgugcuggaaaug

SEQ ID NO: 1035431 - RNA, 19 nt, Artificial Sequence
  Description of Artificial Sequence: Synthetic oligonucleotide
gucucucagucucgacucc

SEQ ID NO: 1035432 - RNA, 19 nt, Artificial Sequence
  Description of Artificial Sequence: Synthetic oligonucleotide
ggaugaagguaugucggac

SEQ ID NO: 1035433 - RNA, 19 nt, Artificial Sequence
  Description of Artificial Sequence: Synthetic oligonucleotide
caggguaggcaggguaucc

SEQ ID NO: 1035434 - RNA, 19 nt, Artificial Sequence
  Description of Artificial Sequence: Synthetic oligonucleotide
acggugaucagcagcugga

SEQ ID NO: 1035435 - RNA, 19 nt, Artificial Sequence
  Description of Artificial Sequence: Synthetic oligonucleotide
caccccaccugauaaaacu

SEQ ID NO: 1035436 - RNA, 19 nt, Artificial Sequence
  Description of Artificial Sequence: Synthetic oligonucleotide
uuccccuaacccagauaaa

SEQ ID NO: 1035437 - RNA, 19 nt, Artificial Sequence
  Description of Artificial Sequence: Synthetic oligonucleotide
ucccuagccuagaacccua

SEQ ID NO: 1035438 - RNA, 19 nt, Artificial Sequence
  Description of Artificial Sequence: Synthetic oligonucleotide
ggaugauauuccaugggaa

SEQ ID NO: 1035439 - RNA, 19 nt, Artificial Sequence
  Description of Artificial Sequence: Synthetic oligonucleotide
uaggucuaaucauguccuu

SEQ ID NO: 1035440 - RNA, 19 nt, Artificial Sequence
  Description of Artificial Sequence: Synthetic oligonucleotide
cacgaggugaaguccaccu

SEQ ID NO: 1035441 - RNA, 19 nt, Artificial Sequence
  Description of Artificial Sequence: Synthetic oligonucleotide
gggguuggaacagggagac

SEQ ID NO: 1035442 - RNA, 19 nt, Artificial Sequence
  Description of Artificial Sequence: Synthetic oligonucleotide
ucggaaccgugagauccgc

SEQ ID NO: 1035443 - RNA, 19 nt, Artificial Sequence
  Description of Artificial Sequence: Synthetic oligonucleotide
uugagcuguucggaaccgu

SEQ ID NO: 1035444 - RNA, 19 nt, Artificial Sequence
  Description of Artificial Sequence: Synthetic oligonucleotide
ggcuaauaaggugucccac

SEQ ID NO: 1035445 - RNA, 19 nt, Artificial Sequence
  Description of Artificial Sequence: Synthetic oligonucleotide
gagaggagggcaagacauc

SEQ ID NO: 1035446 - RNA, 19 nt, Artificial Sequence
  Description of Artificial Sequence: Synthetic oligonucleotide
caccuaagauguaguccuc

SEQ ID NO: 1035447 - RNA, 19 nt, Artificial Sequence
  Description of Artificial Sequence: Synthetic oligonucleotide
cccaauaggaaaggaugag

SEQ ID NO: 1035448 - RNA, 19 nt, Artificial Sequence
  Description of Artificial Sequence: Synthetic oligonucleotide
cagucucucagucucgacu

SEQ ID NO: 1035449 - RNA, 19 nt, Artificial Sequence
  Description of Artificial Sequence: Synthetic oligonucleotide
gccuagaacccuauggcca

SEQ ID NO: 1035450 - RNA, 19 nt, Artificial Sequence
  Description of Artificial Sequence: Synthetic oligonucleotide
gaaccggcgucuggguccc

SEQ ID NO: 1035451 - RNA, 19 nt, Artificial Sequence
  Description of Artificial Sequence: Synthetic oligonucleotide
ggacuggacagaauagguc

SEQ ID NO: 1035452 - RNA, 19 nt, Artificial Sequence
  Description of Artificial Sequence: Synthetic oligonucleotide
ugcuggaaauggugcccgu

SEQ ID NO: 1035453 - RNA, 19 nt, Artificial Sequence
  Description of Artificial Sequence: Synthetic oligonucleotide
cuagaacccuauggccaag

SEQ ID NO: 1035454 - RNA, 19 nt, Artificial Sequence
  Description of Artificial Sequence: Synthetic oligonucleotide
ggacgggagccucuucacc

SEQ ID NO: 1035455 - RNA, 19 nt, Artificial Sequence
  Description of Artificial Sequence: Synthetic oligonucleotide
guaguacauaggugaagau

SEQ ID NO: 1035456 - RNA, 19 nt, Artificial Sequence
  Description of Artificial Sequence: Synthetic oligonucleotide
gucauggccguagcucaug

SEQ ID NO: 1035457 - RNA, 19 nt, Artificial Sequence
  Description of Artificial Sequence: Synthetic oligonucleotide
agcuuugguuugguacgug

SEQ ID NO: 1035458 - RNA, 19 nt, Artificial Sequence
  Description of Artificial Sequence: Synthetic oligonucleotide
cuguucggaaccgugagau

SEQ ID NO: 1035459 - RNA, 19 nt, Artificial Sequence
  Description of Artificial Sequence: Synthetic oligonucleotide
gcccaauaggaaaggauga

SEQ ID NO: 1035460 - RNA, 19 nt, Artificial Sequence
  Description of Artificial Sequence: Synthetic oligonucleotide
ggacggaaaugauggaaua

SEQ ID NO: 1035461 - RNA, 19 nt, Artificial Sequence
  Description of Artificial Sequence: Synthetic oligonucleotide
gcagggugaccguaaccug

SEQ ID NO: 1035462 - RNA, 19 nt, Artificial Sequence
  Description of Artificial Sequence: Synthetic oligonucleotide
cagcagaccgaacuugugu

SEQ ID NO: 1035463 - RNA, 19 nt, Artificial Sequence
  Description of Artificial Sequence: Synthetic oligonucleotide
caggguaaguggccuguga

SEQ ID NO: 1035464 - RNA, 19 nt, Artificial Sequence
  Description of Artificial Sequence: Synthetic oligonucleotide
gagaggaacccaaggcacu

SEQ ID NO: 1035465 - RNA, 19 nt, Artificial Sequence
  Description of Artificial Sequence: Synthetic oligonucleotide
ugcccgucauaaagcccaa

SEQ ID NO: 1035466 - RNA, 19 nt, Artificial Sequence
  Description of Artificial Sequence: Synthetic oligonucleotide
gggcaccuaagauguaguc

SEQ ID NO: 1035467 - RNA, 19 nt, Artificial Sequence
  Description of Artificial Sequence: Synthetic oligonucleotide
uugaagcgccuguguucac

SEQ ID NO: 1035468 - RNA, 19 nt, Artificial Sequence
  Description of Artificial Sequence: Synthetic oligonucleotide
gcucccuagccuagaaccc

SEQ ID NO: 1035469 - RNA, 19 nt, Artificial Sequence
  Description of Artificial Sequence: Synthetic oligonucleotide
gccaaggcgggacgggagc

SEQ ID NO: 1035470 - RNA, 19 nt, Artificial Sequence
  Description of Artificial Sequence: Synthetic oligonucleotide
caccauacugaaugaacuu

SEQ ID NO: 1035471 - RNA, 19 nt, Artificial Sequence
  Description of Artificial Sequence: Synthetic oligonucleotide
cacuuacggggcucuccuc

SEQ ID NO: 1035472 - RNA, 19 nt, Artificial Sequence
  Description of Artificial Sequence: Synthetic oligonucleotide
ggugcccgucauaaagccc

SEQ ID NO: 1035473 - RNA, 19 nt, Artificial Sequence
  Description of Artificial Sequence: Synthetic oligonucleotide
cagucucgacuccccauga

SEQ ID NO: 1035474 - RNA, 19 nt, Artificial Sequence
  Description of Artificial Sequence: Synthetic oligonucleotide
gaaggggauaacgcucagu

SEQ ID NO: 1035475 - RNA, 19 nt, Artificial Sequence
  Description of Artificial Sequence: Synthetic oligonucleotide
guccuugggcuaauaaggu

SEQ ID NO: 1035476 - RNA, 19 nt, Artificial Sequence
  Description of Artificial Sequence: Synthetic oligonucleotide
guguaucguaagccaggaa

SEQ ID NO: 1035477 - RNA, 19 nt, Artificial Sequence
  Description of Artificial Sequence: Synthetic oligonucleotide
cuuuccccuaacccagaua

SEQ ID NO: 1035478 - RNA, 19 nt, Artificial Sequence
  Description of Artificial Sequence: Synthetic oligonucleotide
cuuucggaugaagguaugu

SEQ ID NO: 1035479 - RNA, 19 nt, Artificial Sequence
  Description of Artificial Sequence: Synthetic oligonucleotide
ccuagaacccuauggccaa

SEQ ID NO: 1035480 - RNA, 19 nt, Artificial Sequence
  Description of Artificial Sequence: Synthetic oligonucleotide
ggaaauggugcccgucaua

SEQ ID NO: 1035481 - RNA, 19 nt, Artificial Sequence
  Description of Artificial Sequence: Synthetic oligonucleotide
gcuguucggaaccgugaga

SEQ ID NO: 1035482 - RNA, 19 nt, Artificial Sequence
  Description of Artificial Sequence: Synthetic oligonucleotide
ggccacucaagggcugagg

SEQ ID NO: 1035483 - RNA, 19 nt, Artificial Sequence
  Description of Artificial Sequence: Synthetic oligonucleotide
ggguaaguggccugugagu

SEQ ID NO: 1035484 - RNA, 19 nt, Artificial Sequence
  Description of Artificial Sequence: Synthetic oligonucleotide
ccagcagaccgaacuugug

SEQ ID NO: 1035485 - RNA, 19 nt, Artificial Sequence
  Description of Artificial Sequence: Synthetic oligonucleotide
agcaaggacuggacagaau

SEQ ID NO: 1035486 - RNA, 19 nt, Artificial Sequence
  Description of Artificial Sequence: Synthetic oligonucleotide
gcuggacggaaaugaugga

SEQ ID NO: 1035487 - RNA, 19 nt, Artificial Sequence
  Description of Artificial Sequence: Synthetic oligonucleotide
aucauguccuugggcuaau

SEQ ID NO: 1035488 - RNA, 19 nt, Artificial Sequence
  Description of Artificial Sequence: Synthetic oligonucleotide
ggaucaaguaggugaugau

SEQ ID NO: 1035489 - RNA, 19 nt, Artificial Sequence
  Description of Artificial Sequence: Synthetic oligonucleotide
acacggaccuagggcccag

SEQ ID NO: 1035490 - RNA, 19 nt, Artificial Sequence
  Description of Artificial Sequence: Synthetic oligonucleotide
gcagaccgaacuuguguua

SEQ ID NO: 1035491 - RNA, 19 nt, Artificial Sequence
  Description of Artificial Sequence: Synthetic oligonucleotide
gccuguacacgaggugaag

SEQ ID NO: 1035492 - RNA, 19 nt, Artificial Sequence
  Description of Artificial Sequence: Synthetic oligonucleotide
cucagucucgacuccccau

SEQ ID NO: 1035493 - RNA, 19 nt, Artificial Sequence
  Description of Artificial Sequence: Synthetic oligonucleotide
gugucccuuugugauauau

SEQ ID NO: 1035494 - RNA, 19 nt, Artificial Sequence
  Description of Artificial Sequence: Synthetic oligonucleotide
ccaccuuagucugaaagcu

SEQ ID NO: 1035495 - RNA, 19 nt, Artificial Sequence
  Description of Artificial Sequence: Synthetic oligonucleotide
accggcgucugggucccug

SEQ ID NO: 1035496 - RNA, 19 nt, Artificial Sequence
  Description of Artificial Sequence: Synthetic oligonucleotide
ggauaacgcucagucucuc

SEQ ID NO: 1035497 - RNA, 19 nt, Artificial Sequence
  Description of Artificial Sequence: Synthetic oligonucleotide
ccaauaggaaaggaugagu

SEQ ID NO: 1035498 - RNA, 19 nt, Artificial Sequence
  Description of Artificial Sequence: Synthetic oligonucleotide
gccaagccuaaagaguucu

SEQ ID NO: 1035499 - RNA, 19 nt, Artificial Sequence
  Description of Artificial Sequence: Synthetic oligonucleotide
ccaaggcgggacgggagcc

SEQ ID NO: 1035500 - RNA, 19 nt, Artificial Sequence
  Description of Artificial Sequence: Synthetic oligonucleotide
cucccuagccuagaacccu

SEQ ID NO: 1035501 - RNA, 19 nt, Artificial Sequence
  Description of Artificial Sequence: Synthetic oligonucleotide
ccaggguacagaggauuuc

SEQ ID NO: 1035502 - RNA, 19 nt, Artificial Sequence
  Description of Artificial Sequence: Synthetic oligonucleotide
gggauaacgcucagucucu

SEQ ID NO: 1035503 - RNA, 19 nt, Artificial Sequence
  Description of Artificial Sequence: Synthetic oligonucleotide
ggacagauggcugcccgua

SEQ ID NO: 1035504 - RNA, 19 nt, Artificial Sequence
  Description of Artificial Sequence: Synthetic oligonucleotide
ccuuagucugaaagcugaa

SEQ ID NO: 1035505 - RNA, 19 nt, Artificial Sequence
  Description of Artificial Sequence: Synthetic oligonucleotide
cgaggugaaguccaccuua

SEQ ID NO: 1035506 - RNA, 19 nt, Artificial Sequence
  Description of Artificial Sequence: Synthetic oligonucleotide
cacggaccuagggcccagc

SEQ ID NO: 1035507 - RNA, 19 nt, Artificial Sequence
  Description of Artificial Sequence: Synthetic oligonucleotide
ccggcgucugggucccugg

SEQ ID NO: 1035508 - RNA, 19 nt, Artificial Sequence
  Description of Artificial Sequence: Synthetic oligonucleotide
gcaggguaggcaggguauc

SEQ ID NO: 1035509 - RNA, 19 nt, Artificial Sequence
  Description of Artificial Sequence: Synthetic oligonucleotide
ggccuguacacgaggugaa

SEQ ID NO: 1035510 - RNA, 19 nt, Artificial Sequence
  Description of Artificial Sequence: Synthetic oligonucleotide
ccuguacacgaggugaagu

SEQ ID NO: 1035511 - RNA, 19 nt, Artificial Sequence
  Description of Artificial Sequence: Synthetic oligonucleotide
accuagggcccagcccaau

SEQ ID NO: 1035512 - RNA, 19 nt, Artificial Sequence
  Description of Artificial Sequence: Synthetic oligonucleotide
gaggaacccaaggcacuuu

SEQ ID NO: 1035513 - RNA, 19 nt, Artificial Sequence
  Description of Artificial Sequence: Synthetic oligonucleotide
ccgugagauccgcccgggc

SEQ ID NO: 1035514 - RNA, 19 nt, Artificial Sequence
  Description of Artificial Sequence: Synthetic oligonucleotide
ccuagggcccagcccaaua

SEQ ID NO: 1035515 - RNA, 19 nt, Artificial Sequence
  Description of Artificial Sequence: Synthetic oligonucleotide
caaggcgggacgggagccu

SEQ ID NO: 1035516 - RNA, 19 nt, Artificial Sequence
  Description of Artificial Sequence: Synthetic oligonucleotide
ggguuggaacagggagaca

SEQ ID NO: 1035517 - RNA, 19 nt, Artificial Sequence
  Description of Artificial Sequence: Synthetic oligonucleotide
aaccggcgucugggucccu

SEQ ID NO: 1035518 - RNA, 19 nt, Artificial Sequence
  Description of Artificial Sequence: Synthetic oligonucleotide
gcgggacgggagccucuuc

SEQ ID NO: 1035519 - RNA, 19 nt, Artificial Sequence
  Description of Artificial Sequence: Synthetic oligonucleotide
cccuauggccaaggcggga

SEQ ID NO: 1035520 - RNA, 19 nt, Artificial Sequence
  Description of Artificial Sequence: Synthetic oligonucleotide
ccguaaccugguugagggu

SEQ ID NO: 1035521 - RNA, 19 nt, Artificial Sequence
  Description of Artificial Sequence: Synthetic oligonucleotide
ccccaggaucagcugugua

SEQ ID NO: 1035522 - RNA, 19 nt, Artificial Sequence
  Description of Artificial Sequence: Synthetic oligonucleotide
cgacuccccaugagcugua

SEQ ID NO: 1035523 - RNA, 19 nt, Artificial Sequence
  Description of Artificial Sequence: Synthetic oligonucleotide
aaauaggacaguuagaccg

SEQ ID NO: 1035524 - RNA, 19 nt, Artificial Sequence
  Description of Artificial Sequence: Synthetic oligonucleotide
acugcuguaacauacaacg

SEQ ID NO: 1035525 - RNA, 19 nt, Artificial Sequence
  Description of Artificial Sequence: Synthetic oligonucleotide
aguaccauaguacaguuac

SEQ ID NO: 1035526 - RNA, 19 nt, Artificial Sequence
  Description of Artificial Sequence: Synthetic oligonucleotide
gauauaguagccuaaauca

SEQ ID NO: 1035527 - RNA, 19 nt, Artificial Sequence
  Description of Artificial Sequence: Synthetic oligonucleotide
uguuuuaagagaaugccag

SEQ ID NO: 1035528 - RNA, 19 nt, Artificial Sequence
  Description of Artificial Sequence: Synthetic oligonucleotide
aauguauuauuucaggggu

SEQ ID NO: 1035529 - RNA, 19 nt, Artificial Sequence
  Description of Artificial Sequence: Synthetic oligonucleotide
agggguaucacauagugac

SEQ ID NO: 1035530 - RNA, 19 nt, Artificial Sequence
  Description of Artificial Sequence: Synthetic oligonucleotide
aaaauaggacaguuagacc

SEQ ID NO: 1035531 - RNA, 19 nt, Artificial Sequence
  Description of Artificial Sequence: Synthetic oligonucleotide
ucuaucaaaaucuucucag

SEQ ID NO: 1035532 - RNA, 19 nt, Artificial Sequence
  Description of Artificial Sequence: Synthetic oligonucleotide
aaaacagagcgucaaugac

SEQ ID NO: 1035533 - RNA, 19 nt, Artificial Sequence
  Description of Artificial Sequence: Synthetic oligonucleotide
uaugcuagagaauuuauac

SEQ ID NO: 1035534 - RNA, 19 nt, Artificial Sequence
  Description of Artificial Sequence: Synthetic oligonucleotide
aauaggaaauguauuauag

SEQ ID NO: 1035535 - RNA, 19 nt, Artificial Sequence
  Description of Artificial Sequence: Synthetic oligonucleotide
auaggaaauguauuauagc

SEQ ID NO: 1035536 - RNA, 19 nt, Artificial Sequence
  Description of Artificial Sequence: Synthetic oligonucleotide
uauuagagacauuuuauug

SEQ ID NO: 1035537 - RNA, 19 nt, Artificial Sequence
  Description of Artificial Sequence: Synthetic oligonucleotide
cacauagugacucugauac

SEQ ID NO: 1035538 - RNA, 19 nt, Artificial Sequence
  Description of Artificial Sequence: Synthetic oligonucleotide
aaaaucuucucagagacgu

SEQ ID NO: 1035539 - RNA, 19 nt, Artificial Sequence
  Description of Artificial Sequence: Synthetic oligonucleotide
auagacauagcaugccugc

SEQ ID NO: 1035540 - RNA, 19 nt, Artificial Sequence
  Description of Artificial Sequence: Synthetic oligonucleotide
caauguauuauuucagggg

SEQ ID NO: 1035541 - RNA, 19 nt, Artificial Sequence
  Description of Artificial Sequence: Synthetic oligonucleotide
ugcuagagaauuuauacga

SEQ ID NO: 1035542 - RNA, 19 nt, Artificial Sequence
  Description of Artificial Sequence: Synthetic oligonucleotide
ugauauaguagccuaaauc

SEQ ID NO: 1035543 - RNA, 19 nt, Artificial Sequence
  Description of Artificial Sequence: Synthetic oligonucleotide
agucagcucauguauauac

SEQ ID NO: 1035544 - RNA, 19 nt, Artificial Sequence
  Description of Artificial Sequence: Synthetic oligonucleotide
aaggcagcgagauacagga

SEQ ID NO: 1035545 - RNA, 19 nt, Artificial Sequence
  Description of Artificial Sequence: Synthetic oligonucleotide
auacgaaaccuuuaaauca

SEQ ID NO: 1035546 - RNA, 19 nt, Artificial Sequence
  Description of Artificial Sequence: Synthetic oligonucleotide
uccaauguauuauuucagg

SEQ ID NO: 1035547 - RNA, 19 nt, Artificial Sequence
  Description of Artificial Sequence: Synthetic oligonucleotide
uauagccuaaaauaaauua

SEQ ID NO: 1035548 - RNA, 19 nt, Artificial Sequence
  Description of Artificial Sequence: Synthetic oligonucleotide
aaaaugcgaaaauaggaaa

SEQ ID NO: 1035549 - RNA, 19 nt, Artificial Sequence
  Description of Artificial Sequence: Synthetic oligonucleotide
auagccuaaaauaaauuac

SEQ ID NO: 1035550 - RNA, 19 nt, Artificial Sequence
  Description of Artificial Sequence: Synthetic oligonucleotide
agugaaaccaggaaacagc

SEQ ID NO: 1035551 - RNA, 19 nt, Artificial Sequence
  Description of Artificial Sequence: Synthetic oligonucleotide
aacaaccugagcuaugaca

SEQ ID NO: 1035552 - RNA, 19 nt, Artificial Sequence
  Description of Artificial Sequence: Synthetic oligonucleotide
uagccuaaaauaaauuaca

SEQ ID NO: 1035553 - RNA, 19 nt, Artificial Sequence
  Description of Artificial Sequence: Synthetic oligonucleotide
agaacauuacaaaacagag

SEQ ID NO: 1035554 - RNA, 19 nt, Artificial Sequence
  Description of Artificial Sequence: Synthetic oligonucleotide
aaagcgaggauagacagca

SEQ ID NO: 1035555 - RNA, 19 nt, Artificial Sequence
  Description of Artificial Sequence: Synthetic oligonucleotide
uagagaauuuauacgaaac

SEQ ID NO: 1035556 - RNA, 19 nt, Artificial Sequence
  Description of Artificial Sequence: Synthetic oligonucleotide
uuuggguuauucuuguacc

SEQ ID NO: 1035557 - RNA, 19 nt, Artificial Sequence
  Description of Artificial Sequence: Synthetic oligonucleotide
uuuauggugaggaggggag

SEQ ID NO: 1035558 - RNA, 19 nt, Artificial Sequence
  Description of Artificial Sequence: Synthetic oligonucleotide
gaagauacgaagaggaaug

SEQ ID NO: 1035559 - RNA, 19 nt, Artificial Sequence
  Description of Artificial Sequence: Synthetic oligonucleotide
aaaagcaagccuucgggga

SEQ ID NO: 1035560 - RNA, 19 nt, Artificial Sequence
  Description of Artificial Sequence: Synthetic oligonucleotide
gaaaagcaagccuucgggg

SEQ ID NO: 1035561 - RNA, 19 nt, Artificial Sequence
  Description of Artificial Sequence: Synthetic oligonucleotide
uguguauaaaaugucuugc

SEQ ID NO: 1035562 - RNA, 19 nt, Artificial Sequence
  Description of Artificial Sequence: Synthetic oligonucleotide
aauaggacaguuagaccgc

SEQ ID NO: 1035563 - RNA, 19 nt, Artificial Sequence
  Description of Artificial Sequence: Synthetic oligonucleotide
aaugcgaaaauaggaaaug

SEQ ID NO: 1035564 - RNA, 19 nt, Artificial Sequence
  Description of Artificial Sequence: Synthetic oligonucleotide
augcuagagaauuuauacg

SEQ ID NO: 1035565 - RNA, 19 nt, Artificial Sequence
  Description of Artificial Sequence: Synthetic oligonucleotide
ugaauuguauuagagacau

SEQ ID NO: 1035566 - RNA, 19 nt, Artificial Sequence
  Description of Artificial Sequence: Synthetic oligonucleotide
uuccgauagacauagcaug

SEQ ID NO: 1035567 - RNA, 19 nt, Artificial Sequence
  Description of Artificial Sequence: Synthetic oligonucleotide
ucuuguaccaaagcgagga

SEQ ID NO: 1035568 - RNA, 19 nt, Artificial Sequence
  Description of Artificial Sequence: Synthetic oligonucleotide
uguuuuacuccccacggac

SEQ ID NO: 1035569 - RNA, 19 nt, Artificial Sequence
  Description of Artificial Sequence: Synthetic oligonucleotide
aaaauauaacugcacuaaa

SEQ ID NO: 1035570 - RNA, 19 nt, Artificial Sequence
  Description of Artificial Sequence: Synthetic oligonucleotide
agggaaggcagcgagauac

SEQ ID NO: 1035571 - RNA, 19 nt, Artificial Sequence
  Description of Artificial Sequence: Synthetic oligonucleotide
aacagagcgucaaugacag

SEQ ID NO: 1035572 - RNA, 19 nt, Artificial Sequence
  Description of Artificial Sequence: Synthetic oligonucleotide
uguuugccaguuuauugcg

SEQ ID NO: 1035573 - RNA, 19 nt, Artificial Sequence
  Description of Artificial Sequence: Synthetic oligonucleotide
aaaacccgcuuuccaaaac

SEQ ID NO: 1035574 - RNA, 19 nt, Artificial Sequence
  Description of Artificial Sequence: Synthetic oligonucleotide
aauguauuauagccuaaaa

SEQ ID NO: 1035575 - RNA, 19 nt, Artificial Sequence
  Description of Artificial Sequence: Synthetic oligonucleotide
auacgaagaggaaugacac

SEQ ID NO: 1035576 - RNA, 19 nt, Artificial Sequence
  Description of Artificial Sequence: Synthetic oligonucleotide
uaggcaaucacugaauugu

SEQ ID NO: 1035577 - RNA, 19 nt, Artificial Sequence
  Description of Artificial Sequence: Synthetic oligonucleotide
auuuauacgaaaccuuuaa

SEQ ID NO: 1035578 - RNA, 19 nt, Artificial Sequence
  Description of Artificial Sequence: Synthetic oligonucleotide
cugagugaaaccaggaaac

SEQ ID NO: 1035579 - RNA, 19 nt, Artificial Sequence
  Description of Artificial Sequence: Synthetic oligonucleotide
ugcuuacucauuuuccucc

SEQ ID NO: 1035580 - RNA, 19 nt, Artificial Sequence
  Description of Artificial Sequence: Synthetic oligonucleotide
cacggacucauccacaugg

SEQ ID NO: 1035581 - RNA, 19 nt, Artificial Sequence
  Description of Artificial Sequence: Synthetic oligonucleotide
auagcaugccugcaauggc

SEQ ID NO: 1035582 - RNA, 19 nt, Artificial Sequence
  Description of Artificial Sequence: Synthetic oligonucleotide
acgaagaggaaugacacag

SEQ ID NO: 1035583 - RNA, 19 nt, Artificial Sequence
  Description of Artificial Sequence: Synthetic oligonucleotide
uccgauagacauagcaugc

SEQ ID NO: 1035584 - RNA, 19 nt, Artificial Sequence
  Description of Artificial Sequence: Synthetic oligonucleotide
agcgaggauagacagcacg

SEQ ID NO: 1035585 - RNA, 19 nt, Artificial Sequence
  Description of Artificial Sequence: Synthetic oligonucleotide
uuuauacgaaaccuuuaaa

SEQ ID NO: 1035586 - RNA, 19 nt, Artificial Sequence
  Description of Artificial Sequence: Synthetic oligonucleotide
aguuagaccgcuccacuuc

SEQ ID NO: 1035587 - RNA, 19 nt, Artificial Sequence
  Description of Artificial Sequence: Synthetic oligonucleotide
cauuacaaaacagagcguc

SEQ ID NO: 1035588 - RNA, 19 nt, Artificial Sequence
  Description of Artificial Sequence: Synthetic oligonucleotide
auacaacggucauugguac

SEQ ID NO: 1035589 - RNA, 19 nt, Artificial Sequence
  Description of Artificial Sequence: Synthetic oligonucleotide
ucuggagugguacuugugu

SEQ ID NO: 1035590 - RNA, 19 nt, Artificial Sequence
  Description of Artificial Sequence: Synthetic oligonucleotide
auuauuucagggguaucac

SEQ ID NO: 1035591 - RNA, 19 nt, Artificial Sequence
  Description of Artificial Sequence: Synthetic oligonucleotide
cuuaugguugcacucgccc

SEQ ID NO: 1035592 - RNA, 19 nt, Artificial Sequence
  Description of Artificial Sequence: Synthetic oligonucleotide
aaaggcgaaguccacucca

SEQ ID NO: 1035593 - RNA, 19 nt, Artificial Sequence
  Description of Artificial Sequence: Synthetic oligonucleotide
aggaaugacacagaguucu

SEQ ID NO: 1035594 - RNA, 19 nt, Artificial Sequence
  Description of Artificial Sequence: Synthetic oligonucleotide
uucagucuaguuauuuugu

SEQ ID NO: 1035595 - RNA, 19 nt, Artificial Sequence
  Description of Artificial Sequence: Synthetic oligonucleotide
uacacaaaggacuggguaa

SEQ ID NO: 1035596 - RNA, 19 nt, Artificial Sequence
  Description of Artificial Sequence: Synthetic oligonucleotide
acauacaacggucauuggu

SEQ ID NO: 1035597 - RNA, 19 nt, Artificial Sequence
  Description of Artificial Sequence: Synthetic oligonucleotide
aaacccgcuuuccaaaacu

SEQ ID NO: 1035598 - RNA, 19 nt, Artificial Sequence
  Description of Artificial Sequence: Synthetic oligonucleotide
aguacaguuaccuguccug

SEQ ID NO: 1035599 - RNA, 19 nt, Artificial Sequence
  Description of Artificial Sequence: Synthetic oligonucleotide
agccuaaaucacuguaggc

SEQ ID NO: 1035600 - RNA, 19 nt, Artificial Sequence
  Description of Artificial Sequence: Synthetic oligonucleotide
auacuuguguauaaaaugu

SEQ ID NO: 1035601 - RNA, 19 nt, Artificial Sequence
  Description of Artificial Sequence: Synthetic oligonucleotide
uucggggaaagucaugcug

SEQ ID NO: 1035602 - RNA, 19 nt, Artificial Sequence
  Description of Artificial Sequence: Synthetic oligonucleotide
uaacuugaugggaggagag

SEQ ID NO: 1035603 - RNA, 19 nt, Artificial Sequence
  Description of Artificial Sequence: Synthetic oligonucleotide
uacccaguaugcuagagaa

SEQ ID NO: 1035604 - RNA, 19 nt, Artificial Sequence
  Description of Artificial Sequence: Synthetic oligonucleotide
uguuuagguuauuucaguc

SEQ ID NO: 1035605 - RNA, 19 nt, Artificial Sequence
  Description of Artificial Sequence: Synthetic oligonucleotide
auaguacaguuaccugucc

SEQ ID NO: 1035606 - RNA, 19 nt, Artificial Sequence
  Description of Artificial Sequence: Synthetic oligonucleotide
uuuaagagaaugccagcau

SEQ ID NO: 1035607 - RNA, 19 nt, Artificial Sequence
  Description of Artificial Sequence: Synthetic oligonucleotide
aaacaaccugagcuaugac

SEQ ID NO: 1035608 - RNA, 19 nt, Artificial Sequence
  Description of Artificial Sequence: Synthetic oligonucleotide
uuuauugcguuuuggguua

SEQ ID NO: 1035609 - RNA, 19 nt, Artificial Sequence
  Description of Artificial Sequence: Synthetic oligonucleotide
ugguacagcgcacaagcgc

SEQ ID NO: 1035610 - RNA, 19 nt, Artificial Sequence
  Description of Artificial Sequence: Synthetic oligonucleotide
aaaugcgaaaauaggaaau

SEQ ID NO: 1035611 - RNA, 19 nt, Artificial Sequence
  Description of Artificial Sequence: Synthetic oligonucleotide
gauugaggcacaucccacc

SEQ ID NO: 1035612 - RNA, 19 nt, Artificial Sequence
  Description of Artificial Sequence: Synthetic oligonucleotide
agcgcucccauguacagag

SEQ ID NO: 1035613 - RNA, 19 nt, Artificial Sequence
  Description of Artificial Sequence: Synthetic oligonucleotide
uugaugauauaguagccua

SEQ ID NO: 1035614 - RNA, 19 nt, Artificial Sequence
  Description of Artificial Sequence: Synthetic oligonucleotide
gugagcuguagguaugugg

SEQ ID NO: 1035615 - RNA, 19 nt, Artificial Sequence
  Description of Artificial Sequence: Synthetic oligonucleotide
cauguacagagacaggaug

SEQ ID NO: 1035616 - RNA, 19 nt, Artificial Sequence
  Description of Artificial Sequence: Synthetic oligonucleotide
auucuuguaccaaagcgag

SEQ ID NO: 1035617 - RNA, 19 nt, Artificial Sequence
  Description of Artificial Sequence: Synthetic oligonucleotide
ugagauugaggcacauccc

SEQ ID NO: 1035618 - RNA, 19 nt, Artificial Sequence
  Description of Artificial Sequence: Synthetic oligonucleotide
uuauagccuaaaauaaauu

SEQ ID NO: 1035619 - RNA, 19 nt, Artificial Sequence
  Description of Artificial Sequence: Synthetic oligonucleotide
ucggggaaagucaugcuga

SEQ ID NO: 1035620 - RNA, 19 nt, Artificial Sequence
  Description of Artificial Sequence: Synthetic oligonucleotide
uuuuacuccccacggacuc

SEQ ID NO: 1035621 - RNA, 19 nt, Artificial Sequence
  Description of Artificial Sequence: Synthetic oligonucleotide
agucuaguuauuuugucua

SEQ ID NO: 1035622 - RNA, 19 nt, Artificial Sequence
  Description of Artificial Sequence: Synthetic oligonucleotide
ugcgaaaauaggaaaugua

SEQ ID NO: 1035623 - RNA, 19 nt, Artificial Sequence
  Description of Artificial Sequence: Synthetic oligonucleotide
gcuaugacaucugagauug

SEQ ID NO: 1035624 - RNA, 19 nt, Artificial Sequence
  Description of Artificial Sequence: Synthetic oligonucleotide
uuguuuagguuauuucagu

SEQ ID NO: 1035625 - RNA, 19 nt, Artificial Sequence
  Description of Artificial Sequence: Synthetic oligonucleotide
uacuuguguauaaaauguc

SEQ ID NO: 1035626 - RNA, 19 nt, Artificial Sequence
  Description of Artificial Sequence: Synthetic oligonucleotide
agcgagauacaggaaggcc

SEQ ID NO: 1035627 - RNA, 19 nt, Artificial Sequence
  Description of Artificial Sequence: Synthetic oligonucleotide
acugcacuaaaauggauuu

SEQ ID NO: 1035628 - RNA, 19 nt, Artificial Sequence
  Description of Artificial Sequence: Synthetic oligonucleotide
uguauuauuucagggguau

SEQ ID NO: 1035629 - RNA, 19 nt, Artificial Sequence
  Description of Artificial Sequence: Synthetic oligonucleotide
acaguuaccuguccugcag

SEQ ID NO: 1035630 - RNA, 19 nt, Artificial Sequence
  Description of Artificial Sequence: Synthetic oligonucleotide
uagugaacuguauccauaa

SEQ ID NO: 1035631 - RNA, 19 nt, Artificial Sequence
  Description of Artificial Sequence: Synthetic oligonucleotide
gaccgcuccacuucucucg

SEQ ID NO: 1035632 - RNA, 19 nt, Artificial Sequence
  Description of Artificial Sequence: Synthetic oligonucleotide
uggauuuccaauguauuau

SEQ ID NO: 1035633 - RNA, 19 nt, Artificial Sequence
  Description of Artificial Sequence: Synthetic oligonucleotide
auugcguuuuggguuauuc

SEQ ID NO: 1035634 - RNA, 19 nt, Artificial Sequence
  Description of Artificial Sequence: Synthetic oligonucleotide
uucuuguaccaaagcgagg

SEQ ID NO: 1035635 - RNA, 19 nt, Artificial Sequence
  Description of Artificial Sequence: Synthetic oligonucleotide
auuuagugaacuguaucca

SEQ ID NO: 1035636 - RNA, 19 nt, Artificial Sequence
  Description of Artificial Sequence: Synthetic oligonucleotide
ugaugauauaguagccuaa

SEQ ID NO: 1035637 - RNA, 19 nt, Artificial Sequence
  Description of Artificial Sequence: Synthetic oligonucleotide
uuggguuauucuuguacca

SEQ ID NO: 1035638 - RNA, 19 nt, Artificial Sequence
  Description of Artificial Sequence: Synthetic oligonucleotide
guagccuaaaucacuguag

SEQ ID NO: 1035639 - RNA, 19 nt, Artificial Sequence
  Description of Artificial Sequence: Synthetic oligonucleotide
agagcgucaaugacagugc

SEQ ID NO: 1035640 - RNA, 19 nt, Artificial Sequence
  Description of Artificial Sequence: Synthetic oligonucleotide
augcugacgaucaagucag

SEQ ID NO: 1035641 - RNA, 19 nt, Artificial Sequence
  Description of Artificial Sequence: Synthetic oligonucleotide
aggggaguaccauaguaca

SEQ ID NO: 1035642 - RNA, 19 nt, Artificial Sequence
  Description of Artificial Sequence: Synthetic oligonucleotide
auguggagcacguaggcaa

SEQ ID NO: 1035643 - RNA, 19 nt, Artificial Sequence
  Description of Artificial Sequence: Synthetic oligonucleotide
agauacgaagaggaaugac

SEQ ID NO: 1035644 - RNA, 19 nt, Artificial Sequence
  Description of Artificial Sequence: Synthetic oligonucleotide
ugcaaagucagcucaugua

SEQ ID NO: 1035645 - RNA, 19 nt, Artificial Sequence
  Description of Artificial Sequence: Synthetic oligonucleotide
agcacgguauuucugugca

SEQ ID NO: 1035646 - RNA, 19 nt, Artificial Sequence
  Description of Artificial Sequence: Synthetic oligonucleotide
guaggcaaucacugaauug

SEQ ID NO: 1035647 - RNA, 19 nt, Artificial Sequence
  Description of Artificial Sequence: Synthetic oligonucleotide
ggcccuuacacucauacac

SEQ ID NO: 1035648 - RNA, 19 nt, Artificial Sequence
  Description of Artificial Sequence: Synthetic oligonucleotide
cauugguacaugagugagc

SEQ ID NO: 1035649 - RNA, 19 nt, Artificial Sequence
  Description of Artificial Sequence: Synthetic oligonucleotide
cauacaacggucauuggua

SEQ ID NO: 1035650 - RNA, 19 nt, Artificial Sequence
  Description of Artificial Sequence: Synthetic oligonucleotide
auggcuacgaaaacaaccu

SEQ ID NO: 1035651 - RNA, 19 nt, Artificial Sequence
  Description of Artificial Sequence: Synthetic oligonucleotide
aguagccuaaaucacugua

SEQ ID NO: 1035652 - RNA, 19 nt, Artificial Sequence
  Description of Artificial Sequence: Synthetic oligonucleotide
auggauuuccaauguauua

SEQ ID NO: 1035653 - RNA, 19 nt, Artificial Sequence
  Description of Artificial Sequence: Synthetic oligonucleotide
agcauacccaguaugcuag

SEQ ID NO: 1035654 - RNA, 19 nt, Artificial Sequence
  Description of Artificial Sequence: Synthetic oligonucleotide
ucagucuaguuauuuuguc

SEQ ID NO: 1035655 - RNA, 19 nt, Artificial Sequence
  Description of Artificial Sequence: Synthetic oligonucleotide
guauguggagcacguaggc

SEQ ID NO: 1035656 - RNA, 19 nt, Artificial Sequence
  Description of Artificial Sequence: Synthetic oligonucleotide
ucuuaugguugcacucgcc

SEQ ID NO: 1035657 - RNA, 19 nt, Artificial Sequence
  Description of Artificial Sequence: Synthetic oligonucleotide
cagaguucugcaaaggcga

SEQ ID NO: 1035658 - RNA, 19 nt, Artificial Sequence
  Description of Artificial Sequence: Synthetic oligonucleotide
auaacuugaugggaggaga

SEQ ID NO: 1035659 - RNA, 19 nt, Artificial Sequence
  Description of Artificial Sequence: Synthetic oligonucleotide
aauuuauacgaaaccuuua

SEQ ID NO: 1035660 - RNA, 19 nt, Artificial Sequence
  Description of Artificial Sequence: Synthetic oligonucleotide
uggcucucggcauuccagg

SEQ ID NO: 1035661 - RNA, 19 nt, Artificial Sequence
  Description of Artificial Sequence: Synthetic oligonucleotide
acucauacacaaaggacug

SEQ ID NO: 1035662 - RNA, 19 nt, Artificial Sequence
  Description of Artificial Sequence: Synthetic oligonucleotide
gaugagcccucacagucac

SEQ ID NO: 1035663 - RNA, 19 nt, Artificial Sequence
  Description of Artificial Sequence: Synthetic oligonucleotide
ucuggaccgcuccugucag

SEQ ID NO: 1035664 - RNA, 19 nt, Artificial Sequence
  Description of Artificial Sequence: Synthetic oligonucleotide
ucggcauuccaggugacug

SEQ ID NO: 1035665 - RNA, 19 nt, Artificial Sequence
  Description of Artificial Sequence: Synthetic oligonucleotide
cuagagaauuuauacgaaa

SEQ ID NO: 1035666 - RNA, 19 nt, Artificial Sequence
  Description of Artificial Sequence: Synthetic oligonucleotide
agaauuuauacgaaaccuu

SEQ ID NO: 1035667 - RNA, 19 nt, Artificial Sequence
  Description of Artificial Sequence: Synthetic oligonucleotide
agcacguaggcaaucacug

SEQ ID NO: 1035668 - RNA, 19 nt, Artificial Sequence
  Description of Artificial Sequence: Synthetic oligonucleotide
uccgguaguagcccaggca

SEQ ID NO: 1035669 - RNA, 19 nt, Artificial Sequence
  Description of Artificial Sequence: Synthetic oligonucleotide
auacccaguaugcuagaga

SEQ ID NO: 1035670 - RNA, 19 nt, Artificial Sequence
  Description of Artificial Sequence: Synthetic oligonucleotide
ucuaguuauuuugucuaaa

SEQ ID NO: 1035671 - RNA, 19 nt, Artificial Sequence
  Description of Artificial Sequence: Synthetic oligonucleotide
gaugauauaguagccuaaa

SEQ ID NO: 1035672 - RNA, 19 nt, Artificial Sequence
  Description of Artificial Sequence: Synthetic oligonucleotide
aagauacgaagaggaauga

SEQ ID NO: 1035673 - RNA, 19 nt, Artificial Sequence
  Description of Artificial Sequence: Synthetic oligonucleotide
cugaauuguauuagagaca

SEQ ID NO: 1035674 - RNA, 19 nt, Artificial Sequence
  Description of Artificial Sequence: Synthetic oligonucleotide
uggaccgcuccugucaggg

SEQ ID NO: 1035675 - RNA, 19 nt, Artificial Sequence
  Description of Artificial Sequence: Synthetic oligonucleotide
ugagugaaaccaggaaaca

SEQ ID NO: 1035676 - RNA, 19 nt, Artificial Sequence
  Description of Artificial Sequence: Synthetic oligonucleotide
agauugaggcacaucccac

SEQ ID NO: 1035677 - RNA, 19 nt, Artificial Sequence
  Description of Artificial Sequence: Synthetic oligonucleotide
caaagcgaggauagacagc

SEQ ID NO: 1035678 - RNA, 19 nt, Artificial Sequence
  Description of Artificial Sequence: Synthetic oligonucleotide
cuacgaaaacaaccugagc

SEQ ID NO: 1035679 - RNA, 19 nt, Artificial Sequence
  Description of Artificial Sequence: Synthetic oligonucleotide
acaguuagaccgcuccacu

SEQ ID NO: 1035680 - RNA, 19 nt, Artificial Sequence
  Description of Artificial Sequence: Synthetic oligonucleotide
uacgaagaggaaugacaca

SEQ ID NO: 1035681 - RNA, 19 nt, Artificial Sequence
  Description of Artificial Sequence: Synthetic oligonucleotide
augauauaguagccuaaau

SEQ ID NO: 1035682 - RNA, 19 nt, Artificial Sequence
  Description of Artificial Sequence: Synthetic oligonucleotide
cuugacugucccugcagug

SEQ ID NO: 1035683 - RNA, 19 nt, Artificial Sequence
  Description of Artificial Sequence: Synthetic oligonucleotide
uacaguuaccuguccugca

SEQ ID NO: 1035684 - RNA, 19 nt, Artificial Sequence
  Description of Artificial Sequence: Synthetic oligonucleotide
aucacauagugacucugau

SEQ ID NO: 1035685 - RNA, 19 nt, Artificial Sequence
  Description of Artificial Sequence: Synthetic oligonucleotide
ucacauagugacucugaua

SEQ ID NO: 1035686 - RNA, 19 nt, Artificial Sequence
  Description of Artificial Sequence: Synthetic oligonucleotide
uggcuacgaaaacaaccug

SEQ ID NO: 1035687 - RNA, 19 nt, Artificial Sequence
  Description of Artificial Sequence: Synthetic oligonucleotide
aagaggaaugacacagagu

SEQ ID NO: 1035688 - RNA, 19 nt, Artificial Sequence
  Description of Artificial Sequence: Synthetic oligonucleotide
gccauagcauccaugaaag

SEQ ID NO: 1035689 - RNA, 19 nt, Artificial Sequence
  Description of Artificial Sequence: Synthetic oligonucleotide
gacaguuagaccgcuccac

SEQ ID NO: 1035690 - RNA, 19 nt, Artificial Sequence
  Description of Artificial Sequence: Synthetic oligonucleotide
agacauagcaugccugcaa

SEQ ID NO: 1035691 - RNA, 19 nt, Artificial Sequence
  Description of Artificial Sequence: Synthetic oligonucleotide
acaacggucauugguacau

SEQ ID NO: 1035692 - RNA, 19 nt, Artificial Sequence
  Description of Artificial Sequence: Synthetic oligonucleotide
cugauacuuguguauaaaa

SEQ ID NO: 1035693 - RNA, 19 nt, Artificial Sequence
  Description of Artificial Sequence: Synthetic oligonucleotide
gcuacgaaaacaaccugag

SEQ ID NO: 1035694 - RNA, 19 nt, Artificial Sequence
  Description of Artificial Sequence: Synthetic oligonucleotide
guguuuuaagagaaugcca

SEQ ID NO: 1035695 - RNA, 19 nt, Artificial Sequence
  Description of Artificial Sequence: Synthetic oligonucleotide
uacaacggucauugguaca

SEQ ID NO: 1035696 - RNA, 19 nt, Artificial Sequence
  Description of Artificial Sequence: Synthetic oligonucleotide
augaugcuguugucuugac

SEQ ID NO: 1035697 - RNA, 19 nt, Artificial Sequence
  Description of Artificial Sequence: Synthetic oligonucleotide
gcaacugagugaaaccagg

SEQ ID NO: 1035698 - RNA, 19 nt, Artificial Sequence
  Description of Artificial Sequence: Synthetic oligonucleotide
cauggguccaugccauagc

SEQ ID NO: 1035699 - RNA, 19 nt, Artificial Sequence
  Description of Artificial Sequence: Synthetic oligonucleotide
acagcgcacaagcgcuccc

SEQ ID NO: 1035700 - RNA, 19 nt, Artificial Sequence
  Description of Artificial Sequence: Synthetic oligonucleotide
ucucgcucuagugccaucu

SEQ ID NO: 1035701 - RNA, 19 nt, Artificial Sequence
  Description of Artificial Sequence: Synthetic oligonucleotide
agcaacugagugaaaccag

SEQ ID NO: 1035702 - RNA, 19 nt, Artificial Sequence
  Description of Artificial Sequence: Synthetic oligonucleotide
accauccagugagaugagc

SEQ ID NO: 1035703 - RNA, 19 nt, Artificial Sequence
  Description of Artificial Sequence: Synthetic oligonucleotide
guguauaaaaugucuugcu

SEQ ID NO: 1035704 - RNA, 19 nt, Artificial Sequence
  Description of Artificial Sequence: Synthetic oligonucleotide
caaaggcgaaguccacucc

SEQ ID NO: 1035705 - RNA, 19 nt, Artificial Sequence
  Description of Artificial Sequence: Synthetic oligonucleotide
gcguguuuuacuccccacg

SEQ ID NO: 1035706 - RNA, 19 nt, Artificial Sequence
  Description of Artificial Sequence: Synthetic oligonucleotide
cagcacgguauuucugugc

SEQ ID NO: 1035707 - RNA, 19 nt, Artificial Sequence
  Description of Artificial Sequence: Synthetic oligonucleotide
aguuaccuguccugcagaa

SEQ ID NO: 1035708 - RNA, 19 nt, Artificial Sequence
  Description of Artificial Sequence: Synthetic oligonucleotide
uggguuauucuuguaccaa

SEQ ID NO: 1035709 - RNA, 19 nt, Artificial Sequence
  Description of Artificial Sequence: Synthetic oligonucleotide
cacgguauuucugugcauc

SEQ ID NO: 1035710 - RNA, 19 nt, Artificial Sequence
  Description of Artificial Sequence: Synthetic oligonucleotide
agccuaaaauaaauuacau

SEQ ID NO: 1035711 - RNA, 19 nt, Artificial Sequence
  Description of Artificial Sequence: Synthetic oligonucleotide
gcgagauacaggaaggccc

SEQ ID NO: 1035712 - RNA, 19 nt, Artificial Sequence
  Description of Artificial Sequence: Synthetic oligonucleotide
ggauguuccgguaguagcc

SEQ ID NO: 1035713 - RNA, 19 nt, Artificial Sequence
  Description of Artificial Sequence: Synthetic oligonucleotide
gagcauacccaguaugcua

SEQ ID NO: 1035714 - RNA, 19 nt, Artificial Sequence
  Description of Artificial Sequence: Synthetic oligonucleotide
cccgcuuuccaaaacuuag

SEQ ID NO: 1035715 - RNA, 19 nt, Artificial Sequence
  Description of Artificial Sequence: Synthetic oligonucleotide
gaggauagacagcacggua

SEQ ID NO: 1035716 - RNA, 19 nt, Artificial Sequence
  Description of Artificial Sequence: Synthetic oligonucleotide
cuuuauggugaggagggga

SEQ ID NO: 1035717 - RNA, 19 nt, Artificial Sequence
  Description of Artificial Sequence: Synthetic oligonucleotide
guugaugauauaguagccu

SEQ ID NO: 1035718 - RNA, 19 nt, Artificial Sequence
  Description of Artificial Sequence: Synthetic oligonucleotide
cgaaaccuuuaaaucaagg

SEQ ID NO: 1035719 - RNA, 19 nt, Artificial Sequence
  Description of Artificial Sequence: Synthetic oligonucleotide
acauagugacucugauacu

SEQ ID NO: 1035720 - RNA, 19 nt, Artificial Sequence
  Description of Artificial Sequence: Synthetic oligonucleotide
uaguagccuaaaucacugu

SEQ ID NO: 1035721 - RNA, 19 nt, Artificial Sequence
  Description of Artificial Sequence: Synthetic oligonucleotide
guaaaacugcuguaacaua

SEQ ID NO: 1035722 - RNA, 19 nt, Artificial Sequence
  Description of Artificial Sequence: Synthetic oligonucleotide
aguaugcuagagaauuuau

SEQ ID NO: 1035723 - RNA, 19 nt, Artificial Sequence
  Description of Artificial Sequence: Synthetic oligonucleotide
accguguugcucguguuug

SEQ ID NO: 1035724 - RNA, 19 nt, Artificial Sequence
  Description of Artificial Sequence: Synthetic oligonucleotide
uggcaaccaugguagacau

SEQ ID NO: 1035725 - RNA, 19 nt, Artificial Sequence
  Description of Artificial Sequence: Synthetic oligonucleotide
auggugaggaggggaguac

SEQ ID NO: 1035726 - RNA, 19 nt, Artificial Sequence
  Description of Artificial Sequence: Synthetic oligonucleotide
cauacccaguaugcuagag

SEQ ID NO: 1035727 - RNA, 19 nt, Artificial Sequence
  Description of Artificial Sequence: Synthetic oligonucleotide
ucgcucuagugccaucuuc

SEQ ID NO: 1035728 - RNA, 19 nt, Artificial Sequence
  Description of Artificial Sequence: Synthetic oligonucleotide
uggagcacguaggcaauca

SEQ ID NO: 1035729 - RNA, 19 nt, Artificial Sequence
  Description of Artificial Sequence: Synthetic oligonucleotide
auacaggaaggcccugcgu

SEQ ID NO: 1035730 - RNA, 19 nt, Artificial Sequence
  Description of Artificial Sequence: Synthetic oligonucleotide
ggguaaaacugcuguaaca

SEQ ID NO: 1035731 - RNA, 19 nt, Artificial Sequence
  Description of Artificial Sequence: Synthetic oligonucleotide
gcgaggauagacagcacgg

SEQ ID NO: 1035732 - RNA, 19 nt, Artificial Sequence
  Description of Artificial Sequence: Synthetic oligonucleotide
caacugagugaaaccagga

SEQ ID NO: 1035733 - RNA, 19 nt, Artificial Sequence
  Description of Artificial Sequence: Synthetic oligonucleotide
gcagcgagauacaggaagg

SEQ ID NO: 1035734 - RNA, 19 nt, Artificial Sequence
  Description of Artificial Sequence: Synthetic oligonucleotide
agcggcgauggcaccagcc

SEQ ID NO: 1035735 - RNA, 19 nt, Artificial Sequence
  Description of Artificial Sequence: Synthetic oligonucleotide
acacaaaggacuggguaaa

SEQ ID NO: 1035736 - RNA, 19 nt, Artificial Sequence
  Description of Artificial Sequence: Synthetic oligonucleotide
uggugaggaggggaguacc

SEQ ID NO: 1035737 - RNA, 19 nt, Artificial Sequence
  Description of Artificial Sequence: Synthetic oligonucleotide
ugcguguuuuacuccccac

SEQ ID NO: 1035738 - RNA, 19 nt, Artificial Sequence
  Description of Artificial Sequence: Synthetic oligonucleotide
cacguaggcaaucacugaa

SEQ ID NO: 1035739 - RNA, 19 nt, Artificial Sequence
  Description of Artificial Sequence: Synthetic oligonucleotide
uuuacuccccacggacuca

SEQ ID NO: 1035740 - RNA, 19 nt, Artificial Sequence
  Description of Artificial Sequence: Synthetic oligonucleotide
guacaugagugagcuguag

SEQ ID NO: 1035741 - RNA, 19 nt, Artificial Sequence
  Description of Artificial Sequence: Synthetic oligonucleotide
agacagcggcgauggcacc

SEQ ID NO: 1035742 - RNA, 19 nt, Artificial Sequence
  Description of Artificial Sequence: Synthetic oligonucleotide
acucugauacuuguguaua

SEQ ID NO: 1035743 - RNA, 19 nt, Artificial Sequence
  Description of Artificial Sequence: Synthetic oligonucleotide
ccaugaaagggaaggcagc

SEQ ID NO: 1035744 - RNA, 19 nt, Artificial Sequence
  Description of Artificial Sequence: Synthetic oligonucleotide
acgaaaccuuuaaaucaag

SEQ ID NO: 1035745 - RNA, 19 nt, Artificial Sequence
  Description of Artificial Sequence: Synthetic oligonucleotide
cagucuaguuauuuugucu

SEQ ID NO: 1035746 - RNA, 19 nt, Artificial Sequence
  Description of Artificial Sequence: Synthetic oligonucleotide
uacagcgcacaagcgcucc

SEQ ID NO: 1035747 - RNA, 19 nt, Artificial Sequence
  Description of Artificial Sequence: Synthetic oligonucleotide
ggguaucacauagugacuc

SEQ ID NO: 1035748 - RNA, 19 nt, Artificial Sequence
  Description of Artificial Sequence: Synthetic oligonucleotide
uguaggcuaucagggugug

SEQ ID NO: 1035749 - RNA, 19 nt, Artificial Sequence
  Description of Artificial Sequence: Synthetic oligonucleotide
acggucauugguacaugag

SEQ ID NO: 1035750 - RNA, 19 nt, Artificial Sequence
  Description of Artificial Sequence: Synthetic oligonucleotide
guaugcuagagaauuuaua

SEQ ID NO: 1035751 - RNA, 19 nt, Artificial Sequence
  Description of Artificial Sequence: Synthetic oligonucleotide
acaagcgcucccauguaca

SEQ ID NO: 1035752 - RNA, 19 nt, Artificial Sequence
  Description of Artificial Sequence: Synthetic oligonucleotide
aucaaccauccagugagau

SEQ ID NO: 1035753 - RNA, 19 nt, Artificial Sequence
  Description of Artificial Sequence: Synthetic oligonucleotide
cuaucaggguguggaagac

SEQ ID NO: 1035754 - RNA, 19 nt, Artificial Sequence
  Description of Artificial Sequence: Synthetic oligonucleotide
ggcuacgaaaacaaccuga

SEQ ID NO: 1035755 - RNA, 19 nt, Artificial Sequence
  Description of Artificial Sequence: Synthetic oligonucleotide
guguuuuacuccccacgga

SEQ ID NO: 1035756 - RNA, 19 nt, Artificial Sequence
  Description of Artificial Sequence: Synthetic oligonucleotide
ugccaguuuauugcguuuu

SEQ ID NO: 1035757 - RNA, 19 nt, Artificial Sequence
  Description of Artificial Sequence: Synthetic oligonucleotide
auguuccgguaguagccca

SEQ ID NO: 1035758 - RNA, 19 nt, Artificial Sequence
  Description of Artificial Sequence: Synthetic oligonucleotide
aagcgaggauagacagcac

SEQ ID NO: 1035759 - RNA, 19 nt, Artificial Sequence
  Description of Artificial Sequence: Synthetic oligonucleotide
auaggacaguuagaccgcu

SEQ ID NO: 1035760 - RNA, 19 nt, Artificial Sequence
  Description of Artificial Sequence: Synthetic oligonucleotide
agcaugagaugcugacgau

SEQ ID NO: 1035761 - RNA, 19 nt, Artificial Sequence
  Description of Artificial Sequence: Synthetic oligonucleotide
ggguccagaacauuacaaa

SEQ ID NO: 1035762 - RNA, 19 nt, Artificial Sequence
  Description of Artificial Sequence: Synthetic oligonucleotide
aggcccuuacacucauaca

SEQ ID NO: 1035763 - RNA, 19 nt, Artificial Sequence
  Description of Artificial Sequence: Synthetic oligonucleotide
gcugacgaucaagucagag

SEQ ID NO: 1035764 - RNA, 19 nt, Artificial Sequence
  Description of Artificial Sequence: Synthetic oligonucleotide
uugccaguuuauugcguuu

SEQ ID NO: 1035765 - RNA, 19 nt, Artificial Sequence
  Description of Artificial Sequence: Synthetic oligonucleotide
cauagugacucugauacuu

SEQ ID NO: 1035766 - RNA, 19 nt, Artificial Sequence
  Description of Artificial Sequence: Synthetic oligonucleotide
agucaugcugaagggugcu

SEQ ID NO: 1035767 - RNA, 19 nt, Artificial Sequence
  Description of Artificial Sequence: Synthetic oligonucleotide
ggucauugcugagucuucc

SEQ ID NO: 1035768 - RNA, 19 nt, Artificial Sequence
  Description of Artificial Sequence: Synthetic oligonucleotide
aacccgcuuuccaaaacuu

SEQ ID NO: 1035769 - RNA, 19 nt, Artificial Sequence
  Description of Artificial Sequence: Synthetic oligonucleotide
ugccagcauggguccaugc

SEQ ID NO: 1035770 - RNA, 19 nt, Artificial Sequence
  Description of Artificial Sequence: Synthetic oligonucleotide
gccuaaaucacuguaggcu

SEQ ID NO: 1035771 - RNA, 19 nt, Artificial Sequence
  Description of Artificial Sequence: Synthetic oligonucleotide
ccuaaaucacuguaggcua

SEQ ID NO: 1035772 - RNA, 19 nt, Artificial Sequence
  Description of Artificial Sequence: Synthetic oligonucleotide
aaggcgaaguccacuccaa

SEQ ID NO: 1035773 - RNA, 19 nt, Artificial Sequence
  Description of Artificial Sequence: Synthetic oligonucleotide
ugacagugccaugcagaca

SEQ ID NO: 1035774 - RNA, 19 nt, Artificial Sequence
  Description of Artificial Sequence: Synthetic oligonucleotide
ggaaggcaagugaaaagca

SEQ ID NO: 1035775 - RNA, 19 nt, Artificial Sequence
  Description of Artificial Sequence: Synthetic oligonucleotide
aggcccugcguguuuuacu

SEQ ID NO: 1035776 - RNA, 19 nt, Artificial Sequence
  Description of Artificial Sequence: Synthetic oligonucleotide
gcgaaaauaggaaauguau

SEQ ID NO: 1035777 - RNA, 19 nt, Artificial Sequence
  Description of Artificial Sequence: Synthetic oligonucleotide
guauuauuucagggguauc

SEQ ID NO: 1035778 - RNA, 19 nt, Artificial Sequence
  Description of Artificial Sequence: Synthetic oligonucleotide
auguauuauuucaggggua

SEQ ID NO: 1035779 - RNA, 19 nt, Artificial Sequence
  Description of Artificial Sequence: Synthetic oligonucleotide
uggcgccugugcuuacuca

SEQ ID NO: 1035780 - RNA, 19 nt, Artificial Sequence
  Description of Artificial Sequence: Synthetic oligonucleotide
aggaggggaguaccauagu

SEQ ID NO: 1035781 - RNA, 19 nt, Artificial Sequence
  Description of Artificial Sequence: Synthetic oligonucleotide
guaccgggaagaaggagaa

SEQ ID NO: 1035782 - RNA, 19 nt, Artificial Sequence
  Description of Artificial Sequence: Synthetic oligonucleotide
cugcaaaggcgaaguccac

SEQ ID NO: 1035783 - RNA, 19 nt, Artificial Sequence
  Description of Artificial Sequence: Synthetic oligonucleotide
ggggaguaccauaguacag

SEQ ID NO: 1035784 - RNA, 19 nt, Artificial Sequence
  Description of Artificial Sequence: Synthetic oligonucleotide
ggaggggaguaccauagua

SEQ ID NO: 1035785 - RNA, 19 nt, Artificial Sequence
  Description of Artificial Sequence: Synthetic oligonucleotide
agcgucaaugacagugcca

SEQ ID NO: 1035786 - RNA, 19 nt, Artificial Sequence
  Description of Artificial Sequence: Synthetic oligonucleotide
cuaaaucacuguaggcuau

SEQ ID NO: 1035787 - RNA, 19 nt, Artificial Sequence
  Description of Artificial Sequence: Synthetic oligonucleotide
gagcacguaggcaaucacu

SEQ ID NO: 1035788 - RNA, 19 nt, Artificial Sequence
  Description of Artificial Sequence: Synthetic oligonucleotide
cagcucauguauauacacu

SEQ ID NO: 1035789 - RNA, 19 nt, Artificial Sequence
  Description of Artificial Sequence: Synthetic oligonucleotide
guagguauguggagcacgu

SEQ ID NO: 1035790 - RNA, 19 nt, Artificial Sequence
  Description of Artificial Sequence: Synthetic oligonucleotide
gccaguuuauugcguuuug

SEQ ID NO: 1035791 - RNA, 19 nt, Artificial Sequence
  Description of Artificial Sequence: Synthetic oligonucleotide
ucucggcauuccaggugac

SEQ ID NO: 1035792 - RNA, 19 nt, Artificial Sequence
  Description of Artificial Sequence: Synthetic oligonucleotide
gagauacaggaaggcccug

SEQ ID NO: 1035793 - RNA, 19 nt, Artificial Sequence
  Description of Artificial Sequence: Synthetic oligonucleotide
acguaggcaaucacugaau

SEQ ID NO: 1035794 - RNA, 19 nt, Artificial Sequence
  Description of Artificial Sequence: Synthetic oligonucleotide
cuggaccgcuccugucagg

SEQ ID NO: 1035795 - RNA, 19 nt, Artificial Sequence
  Description of Artificial Sequence: Synthetic oligonucleotide
gguacagcgcacaagcgcu

SEQ ID NO: 1035796 - RNA, 19 nt, Artificial Sequence
  Description of Artificial Sequence: Synthetic oligonucleotide
ccgauagacauagcaugcc

SEQ ID NO: 1035797 - RNA, 19 nt, Artificial Sequence
  Description of Artificial Sequence: Synthetic oligonucleotide
gcaugucggucauugcuga

SEQ ID NO: 1035798 - RNA, 19 nt, Artificial Sequence
  Description of Artificial Sequence: Synthetic oligonucleotide
aggcuaucaggguguggaa

SEQ ID NO: 1035799 - RNA, 19 nt, Artificial Sequence
  Description of Artificial Sequence: Synthetic oligonucleotide
gcuagagaauuuauacgaa

SEQ ID NO: 1035800 - RNA, 19 nt, Artificial Sequence
  Description of Artificial Sequence: Synthetic oligonucleotide
ugaccguguugcucguguu

SEQ ID NO: 1035801 - RNA, 19 nt, Artificial Sequence
  Description of Artificial Sequence: Synthetic oligonucleotide
gugaccguguugcucgugu

SEQ ID NO: 1035802 - RNA, 19 nt, Artificial Sequence
  Description of Artificial Sequence: Synthetic oligonucleotide
gaccgcuccugucagggau

SEQ ID NO: 1035803 - RNA, 19 nt, Artificial Sequence
  Description of Artificial Sequence: Synthetic oligonucleotide
gggaguaccauaguacagu

SEQ ID NO: 1035804 - RNA, 19 nt, Artificial Sequence
  Description of Artificial Sequence: Synthetic oligonucleotide
ggacaguuagaccgcucca

SEQ ID NO: 1035805 - RNA, 19 nt, Artificial Sequence
  Description of Artificial Sequence: Synthetic oligonucleotide
gguaucacauagugacucu

SEQ ID NO: 1035806 - RNA, 19 nt, Artificial Sequence
  Description of Artificial Sequence: Synthetic oligonucleotide
cuggcgccugugcuuacuc

SEQ ID NO: 1035807 - RNA, 19 nt, Artificial Sequence
  Description of Artificial Sequence: Synthetic oligonucleotide
agcgcacaagcgcucccau

SEQ ID NO: 1035808 - RNA, 19 nt, Artificial Sequence
  Description of Artificial Sequence: Synthetic oligonucleotide
gcucguguuugccaguuua

SEQ ID NO: 1035809 - RNA, 19 nt, Artificial Sequence
  Description of Artificial Sequence: Synthetic oligonucleotide
cuacgaugucugucaccuc

SEQ ID NO: 1035810 - RNA, 19 nt, Artificial Sequence
  Description of Artificial Sequence: Synthetic oligonucleotide
uuauugcguuuuggguuau

SEQ ID NO: 1035811 - RNA, 19 nt, Artificial Sequence
  Description of Artificial Sequence: Synthetic oligonucleotide
caacggucauugguacaug

SEQ ID NO: 1035812 - RNA, 19 nt, Artificial Sequence
  Description of Artificial Sequence: Synthetic oligonucleotide
ugcucguguuugccaguuu

SEQ ID NO: 1035813 - RNA, 19 nt, Artificial Sequence
  Description of Artificial Sequence: Synthetic oligonucleotide
aucugagauugaggcacau

SEQ ID NO: 1035814 - RNA, 19 nt, Artificial Sequence
  Description of Artificial Sequence: Synthetic oligonucleotide
cuuacucauuuuccucccu

SEQ ID NO: 1035815 - RNA, 19 nt, Artificial Sequence
  Description of Artificial Sequence: Synthetic oligonucleotide
gcacguaggcaaucacuga

SEQ ID NO: 1035816 - RNA, 19 nt, Artificial Sequence
  Description of Artificial Sequence: Synthetic oligonucleotide
cuaugacaucugagauuga

SEQ ID NO: 1035817 - RNA, 19 nt, Artificial Sequence
  Description of Artificial Sequence: Synthetic oligonucleotide
gauagacagcacgguauuu

SEQ ID NO: 1035818 - RNA, 19 nt, Artificial Sequence
  Description of Artificial Sequence: Synthetic oligonucleotide
agccuucggggaaagucau

SEQ ID NO: 1035819 - RNA, 19 nt, Artificial Sequence
  Description of Artificial Sequence: Synthetic oligonucleotide
aggugaccguguugcucgu

SEQ ID NO: 1035820 - RNA, 19 nt, Artificial Sequence
  Description of Artificial Sequence: Synthetic oligonucleotide
gcgucaaugacagugccau

SEQ ID NO: 1035821 - RNA, 19 nt, Artificial Sequence
  Description of Artificial Sequence: Synthetic oligonucleotide
acgcucuggaccgcuccug

SEQ ID NO: 1035822 - RNA, 19 nt, Artificial Sequence
  Description of Artificial Sequence: Synthetic oligonucleotide
gcccuuacacucauacaca

SEQ ID NO: 1035823 - RNA, 19 nt, Artificial Sequence
  Description of Artificial Sequence: Synthetic oligonucleotide
acccgcuuuccaaaacuua

SEQ ID NO: 1035824 - RNA, 19 nt, Artificial Sequence
  Description of Artificial Sequence: Synthetic oligonucleotide
uauugcguuuuggguuauu

SEQ ID NO: 1035825 - RNA, 19 nt, Artificial Sequence
  Description of Artificial Sequence: Synthetic oligonucleotide
gcggcgauggcaccagcca

SEQ ID NO: 1035826 - RNA, 19 nt, Artificial Sequence
  Description of Artificial Sequence: Synthetic oligonucleotide
guacagcgcacaagcgcuc

SEQ ID NO: 1035827 - RNA, 19 nt, Artificial Sequence
  Description of Artificial Sequence: Synthetic oligonucleotide
guugcucguguuugccagu

SEQ ID NO: 1035828 - RNA, 19 nt, Artificial Sequence
  Description of Artificial Sequence: Synthetic oligonucleotide
cauggauguuccgguagua

SEQ ID NO: 1035829 - RNA, 19 nt, Artificial Sequence
  Description of Artificial Sequence: Synthetic oligonucleotide
cucucgcucuagugccauc

SEQ ID NO: 1035830 - RNA, 19 nt, Artificial Sequence
  Description of Artificial Sequence: Synthetic oligonucleotide
acccaguaugcuagagaau

SEQ ID NO: 1035831 - RNA, 19 nt, Artificial Sequence
  Description of Artificial Sequence: Synthetic oligonucleotide
aggugacugugaagcaaaa

SEQ ID NO: 1035832 - RNA, 19 nt, Artificial Sequence
  Description of Artificial Sequence: Synthetic oligonucleotide
ccguguugcucguguuugc

SEQ ID NO: 1035833 - RNA, 19 nt, Artificial Sequence
  Description of Artificial Sequence: Synthetic oligonucleotide
guggagcacguaggcaauc

SEQ ID NO: 1035834 - RNA, 19 nt, Artificial Sequence
  Description of Artificial Sequence: Synthetic oligonucleotide
ccacgcucuggaccgcucc

SEQ ID NO: 1035835 - RNA, 19 nt, Artificial Sequence
  Description of Artificial Sequence: Synthetic oligonucleotide
cccaguaugcuagagaauu

SEQ ID NO: 1035836 - RNA, 19 nt, Artificial Sequence
  Description of Artificial Sequence: Synthetic oligonucleotide
gacgaucaagucagagcau

SEQ ID NO: 1035837 - RNA, 19 nt, Artificial Sequence
  Description of Artificial Sequence: Synthetic oligonucleotide
gcauacccaguaugcuaga

SEQ ID NO: 1035838 - RNA, 19 nt, Artificial Sequence
  Description of Artificial Sequence: Synthetic oligonucleotide
gguacaugagugagcugua

SEQ ID NO: 1035839 - RNA, 19 nt, Artificial Sequence
  Description of Artificial Sequence: Synthetic oligonucleotide
cugcagaaaauaggacagu

SEQ ID NO: 1035840 - RNA, 19 nt, Artificial Sequence
  Description of Artificial Sequence: Synthetic oligonucleotide
ggcgccugugcuuacucau

SEQ ID NO: 1035841 - RNA, 19 nt, Artificial Sequence
  Description of Artificial Sequence: Synthetic oligonucleotide
cgagauacaggaaggcccu

SEQ ID NO: 1035842 - RNA, 19 nt, Artificial Sequence
  Description of Artificial Sequence: Synthetic oligonucleotide
ccacggacucauccacaug

SEQ ID NO: 1035843 - RNA, 19 nt, Artificial Sequence
  Description of Artificial Sequence: Synthetic oligonucleotide
cggucauugguacaugagu

SEQ ID NO: 1035844 - RNA, 19 nt, Artificial Sequence
  Description of Artificial Sequence: Synthetic oligonucleotide
ggugaccguguugcucgug

SEQ ID NO: 1035845 - RNA, 19 nt, Artificial Sequence
  Description of Artificial Sequence: Synthetic oligonucleotide
gggguaucacauagugacu

SEQ ID NO: 1035846 - RNA, 19 nt, Artificial Sequence
  Description of Artificial Sequence: Synthetic oligonucleotide
aggcagcgagauacaggaa

SEQ ID NO: 1035847 - RNA, 19 nt, Artificial Sequence
  Description of Artificial Sequence: Synthetic oligonucleotide
cacgcucuggaccgcuccu

SEQ ID NO: 1035848 - RNA, 19 nt, Artificial Sequence
  Description of Artificial Sequence: Synthetic oligonucleotide
ggaccgcuccugucaggga

SEQ ID NO: 1035849 - RNA, 19 nt, Artificial Sequence
  Description of Artificial Sequence: Synthetic oligonucleotide
cggucauugcugagucuuc

SEQ ID NO: 1035850 - RNA, 19 nt, Artificial Sequence
  Description of Artificial Sequence: Synthetic oligonucleotide
ggcaaccaugguagacauc

SEQ ID NO: 1035851 - RNA, 19 nt, Artificial Sequence
  Description of Artificial Sequence: Synthetic oligonucleotide
cucggcauuccaggugacu

SEQ ID NO: 1035852 - RNA, 19 nt, Artificial Sequence
  Description of Artificial Sequence: Synthetic oligonucleotide
cguaggcaaucacugaauu

SEQ ID NO: 1035853 - RNA, 19 nt, Artificial Sequence
  Description of Artificial Sequence: Synthetic oligonucleotide
cucgcucuagugccaucuu

SEQ ID NO: 1035854 - RNA, 19 nt, Artificial Sequence
  Description of Artificial Sequence: Synthetic oligonucleotide
cccacgcucuggaccgcuc

SEQ ID NO: 1035855 - RNA, 19 nt, Artificial Sequence
  Description of Artificial Sequence: Synthetic oligonucleotide
ccucccucauuucuacgau

SEQ ID NO: 1035856 - RNA, 19 nt, Artificial Sequence
  Description of Artificial Sequence: Synthetic oligonucleotide
gcacgguauuucugugcau

SEQ ID NO: 1035857 - RNA, 19 nt, Artificial Sequence
  Description of Artificial Sequence: Synthetic oligonucleotide
cgaggauagacagcacggu

SEQ ID NO: 1035858 - RNA, 19 nt, Artificial Sequence
  Description of Artificial Sequence: Synthetic oligonucleotide
gcgcucccauguacagaga

SEQ ID NO: 1035859 - RNA, 19 nt, Artificial Sequence
  Description of Artificial Sequence: Synthetic oligonucleotide
gcgccugugcuuacucauu

SEQ ID NO: 1035860 - RNA, 19 nt, Artificial Sequence
  Description of Artificial Sequence: Synthetic oligonucleotide
ccuggcgccugugcuuacu

SEQ ID NO: 1035861 - RNA, 19 nt, Artificial Sequence
  Description of Artificial Sequence: Synthetic oligonucleotide
ccccacgcucuggaccgcu

SEQ ID NO: 1035862 - RNA, 19 nt, Artificial Sequence
  Description of Artificial Sequence: Synthetic oligonucleotide
uuaaauacgcauaauagca

SEQ ID NO: 1035863 - RNA, 19 nt, Artificial Sequence
  Description of Artificial Sequence: Synthetic oligonucleotide
acaaacugcaguuaaauac

SEQ ID NO: 1035864 - RNA, 19 nt, Artificial Sequence
  Description of Artificial Sequence: Synthetic oligonucleotide
uuuacuaucacugccaucc

SEQ ID NO: 1035865 - RNA, 19 nt, Artificial Sequence
  Description of Artificial Sequence: Synthetic oligonucleotide
ugaagaaaggcccuguagg

SEQ ID NO: 1035866 - RNA, 19 nt, Artificial Sequence
  Description of Artificial Sequence: Synthetic oligonucleotide
aauacgucagcgaugacac

SEQ ID NO: 1035867 - RNA, 19 nt, Artificial Sequence
  Description of Artificial Sequence: Synthetic oligonucleotide
uucgacaucuuuauuaccc

SEQ ID NO: 1035868 - RNA, 19 nt, Artificial Sequence
  Description of Artificial Sequence: Synthetic oligonucleotide
ugaacaaggucacuuagcc

SEQ ID NO: 1035869 - RNA, 19 nt, Artificial Sequence
  Description of Artificial Sequence: Synthetic oligonucleotide
uaugugauuaucauuugca

SEQ ID NO: 1035870 - RNA, 19 nt, Artificial Sequence
  Description of Artificial Sequence: Synthetic oligonucleotide
guuaaauacgcauaauagc

SEQ ID NO: 1035871 - RNA, 19 nt, Artificial Sequence
  Description of Artificial Sequence: Synthetic oligonucleotide
aaguucguagcaugcauac

SEQ ID NO: 1035872 - RNA, 19 nt, Artificial Sequence
  Description of Artificial Sequence: Synthetic oligonucleotide
cuuacuuucgcuugcauac

SEQ ID NO: 1035873 - RNA, 19 nt, Artificial Sequence
  Description of Artificial Sequence: Synthetic oligonucleotide
aaaagagggaucuuuaaua

SEQ ID NO: 1035874 - RNA, 19 nt, Artificial Sequence
  Description of Artificial Sequence: Synthetic oligonucleotide
gaugaguucggauaagcag

SEQ ID NO: 1035875 - RNA, 19 nt, Artificial Sequence
  Description of Artificial Sequence: Synthetic oligonucleotide
aggagcaaaugcuucaacc

SEQ ID NO: 1035876 - RNA, 19 nt, Artificial Sequence
  Description of Artificial Sequence: Synthetic oligonucleotide
cauacgucagugaagaaag

SEQ ID NO: 1035877 - RNA, 19 nt, Artificial Sequence
  Description of Artificial Sequence: Synthetic oligonucleotide
uuuaucauuuucgacaucu

SEQ ID NO: 1035878 - RNA, 19 nt, Artificial Sequence
  Description of Artificial Sequence: Synthetic oligonucleotide
auuuugagcagguuugggg

SEQ ID NO: 1035879 - RNA, 19 nt, Artificial Sequence
  Description of Artificial Sequence: Synthetic oligonucleotide
aaguugaguucuaucaugc

SEQ ID NO: 1035880 - RNA, 19 nt, Artificial Sequence
  Description of Artificial Sequence: Synthetic oligonucleotide
aaauacgcauaauagcacu

SEQ ID NO: 1035881 - RNA, 19 nt, Artificial Sequence
  Description of Artificial Sequence: Synthetic oligonucleotide
gauuugacacucuagucgc

SEQ ID NO: 1035882 - RNA, 19 nt, Artificial Sequence
  Description of Artificial Sequence: Synthetic oligonucleotide
guucguagcaugcauacgg

SEQ ID NO: 1035883 - RNA, 19 nt, Artificial Sequence
  Description of Artificial Sequence: Synthetic oligonucleotide
aaaaggccauauccaaagc

SEQ ID NO: 1035884 - RNA, 19 nt, Artificial Sequence
  Description of Artificial Sequence: Synthetic oligonucleotide
aacgcuggucuucacaggg

SEQ ID NO: 1035885 - RNA, 19 nt, Artificial Sequence
  Description of Artificial Sequence: Synthetic oligonucleotide
acugcgaccaucuggacuc

SEQ ID NO: 1035886 - RNA, 19 nt, Artificial Sequence
  Description of Artificial Sequence: Synthetic oligonucleotide
uuuuaggucaucacaugcc

SEQ ID NO: 1035887 - RNA, 19 nt, Artificial Sequence
  Description of Artificial Sequence: Synthetic oligonucleotide
uuuguguauggcaccaagg

SEQ ID NO: 1035888 - RNA, 19 nt, Artificial Sequence
  Description of Artificial Sequence: Synthetic oligonucleotide
aaagcuggcuccaaaacuc

SEQ ID NO: 1035889 - RNA, 19 nt, Artificial Sequence
  Description of Artificial Sequence: Synthetic oligonucleotide
aguuauucugacgacauag

SEQ ID NO: 1035890 - RNA, 19 nt, Artificial Sequence
  Description of Artificial Sequence: Synthetic oligonucleotide
ucuuuaauacgucagcgau

SEQ ID NO: 1035891 - RNA, 19 nt, Artificial Sequence
  Description of Artificial Sequence: Synthetic oligonucleotide
uuggggaaagagcaguugg

SEQ ID NO: 1035892 - RNA, 19 nt, Artificial Sequence
  Description of Artificial Sequence: Synthetic oligonucleotide
cuccaaaacucauuaacgg

SEQ ID NO: 1035893 - RNA, 19 nt, Artificial Sequence
  Description of Artificial Sequence: Synthetic oligonucleotide
gaucuuuaauacgucagcg

SEQ ID NO: 1035894 - RNA, 19 nt, Artificial Sequence
  Description of Artificial Sequence: Synthetic oligonucleotide
cuaacguagcuaaaggggc

SEQ ID NO: 1035895 - RNA, 19 nt, Artificial Sequence
  Description of Artificial Sequence: Synthetic oligonucleotide
acuaaaauguuugaacaag

SEQ ID NO: 1035896 - RNA, 19 nt, Artificial Sequence
  Description of Artificial Sequence: Synthetic oligonucleotide
auuuucgacaucuuuauua

SEQ ID NO: 1035897 - RNA, 19 nt, Artificial Sequence
  Description of Artificial Sequence: Synthetic oligonucleotide
acuuaucugaagucgauca

SEQ ID NO: 1035898 - RNA, 19 nt, Artificial Sequence
  Description of Artificial Sequence: Synthetic oligonucleotide
uuuucgacaucuuuauuac

SEQ ID NO: 1035899 - RNA, 19 nt, Artificial Sequence
  Description of Artificial Sequence: Synthetic oligonucleotide
uuuaggucaucacaugcca

SEQ ID NO: 1035900 - RNA, 19 nt, Artificial Sequence
  Description of Artificial Sequence: Synthetic oligonucleotide
gagacagccaaguucguag

SEQ ID NO: 1035901 - RNA, 19 nt, Artificial Sequence
  Description of Artificial Sequence: Synthetic oligonucleotide
agcuaacguagcuaaaggg

SEQ ID NO: 1035902 - RNA, 19 nt, Artificial Sequence
  Description of Artificial Sequence: Synthetic oligonucleotide
ucuaucaugcugcaccagc

SEQ ID NO: 1035903 - RNA, 19 nt, Artificial Sequence
  Description of Artificial Sequence: Synthetic oligonucleotide
uuagcccucucccagguag

SEQ ID NO: 1035904 - RNA, 19 nt, Artificial Sequence
  Description of Artificial Sequence: Synthetic oligonucleotide
augaagagggaugaguucg

SEQ ID NO: 1035905 - RNA, 19 nt, Artificial Sequence
  Description of Artificial Sequence: Synthetic oligonucleotide
uguguauggcaccaaggag

SEQ ID NO: 1035906 - RNA, 19 nt, Artificial Sequence
  Description of Artificial Sequence: Synthetic oligonucleotide
uugauuguuucgaugacuc

SEQ ID NO: 1035907 - RNA, 19 nt, Artificial Sequence
  Description of Artificial Sequence: Synthetic oligonucleotide
auagcacuuaucugaaguc

SEQ ID NO: 1035908 - RNA, 19 nt, Artificial Sequence
  Description of Artificial Sequence: Synthetic oligonucleotide
uuauucugacgacauagcu

SEQ ID NO: 1035909 - RNA, 19 nt, Artificial Sequence
  Description of Artificial Sequence: Synthetic oligonucleotide
ucuuccucgaaugucauca

SEQ ID NO: 1035910 - RNA, 19 nt, Artificial Sequence
  Description of Artificial Sequence: Synthetic oligonucleotide
acagaacuucgauggaugc

SEQ ID NO: 1035911 - RNA, 19 nt, Artificial Sequence
  Description of Artificial Sequence: Synthetic oligonucleotide
uguugauuugacacucuag

SEQ ID NO: 1035912 - RNA, 19 nt, Artificial Sequence
  Description of Artificial Sequence: Synthetic oligonucleotide
auauccaaagcuaacagca

SEQ ID NO: 1035913 - RNA, 19 nt, Artificial Sequence
  Description of Artificial Sequence: Synthetic oligonucleotide
uaaauacgcauaauagcac

SEQ ID NO: 1035914 - RNA, 19 nt, Artificial Sequence
  Description of Artificial Sequence: Synthetic oligonucleotide
gaagacaagggcucuuccg

SEQ ID NO: 1035915 - RNA, 19 nt, Artificial Sequence
  Description of Artificial Sequence: Synthetic oligonucleotide
ugaagucgaucaaccaucg

SEQ ID NO: 1035916 - RNA, 19 nt, Artificial Sequence
  Description of Artificial Sequence: Synthetic oligonucleotide
aggaguagaguucugccuc

SEQ ID NO: 1035917 - RNA, 19 nt, Artificial Sequence
  Description of Artificial Sequence: Synthetic oligonucleotide
aagacaagggcucuuccgu

SEQ ID NO: 1035918 - RNA, 19 nt, Artificial Sequence
  Description of Artificial Sequence: Synthetic oligonucleotide
gaagaaaggcccuguaggc

SEQ ID NO: 1035919 - RNA, 19 nt, Artificial Sequence
  Description of Artificial Sequence: Synthetic oligonucleotide
aaguacugacccugggugg

SEQ ID NO: 1035920 - RNA, 19 nt, Artificial Sequence
  Description of Artificial Sequence: Synthetic oligonucleotide
auugauguccacauagcac

SEQ ID NO: 1035921 - RNA, 19 nt, Artificial Sequence
  Description of Artificial Sequence: Synthetic oligonucleotide
aacucauuaacggacuaug

SEQ ID NO: 1035922 - RNA, 19 nt, Artificial Sequence
  Description of Artificial Sequence: Synthetic oligonucleotide
uaaaggggccuucaugucc

SEQ ID NO: 1035923 - RNA, 19 nt, Artificial Sequence
  Description of Artificial Sequence: Synthetic oligonucleotide
uaauacgucagcgaugaca

SEQ ID NO: 1035924 - RNA, 19 nt, Artificial Sequence
  Description of Artificial Sequence: Synthetic oligonucleotide
uccaaaacucauuaacgga

SEQ ID NO: 1035925 - RNA, 19 nt, Artificial Sequence
  Description of Artificial Sequence: Synthetic oligonucleotide
ugcaguuaaauacgcauaa

SEQ ID NO: 1035926 - RNA, 19 nt, Artificial Sequence
  Description of Artificial Sequence: Synthetic oligonucleotide
uggacauacaaguuauucu

SEQ ID NO: 1035927 - RNA, 19 nt, Artificial Sequence
  Description of Artificial Sequence: Synthetic oligonucleotide
uacgcauaauagcacugcg

SEQ ID NO: 1035928 - RNA, 19 nt, Artificial Sequence
  Description of Artificial Sequence: Synthetic oligonucleotide
ugaucuauggcaaguucca

SEQ ID NO: 1035929 - RNA, 19 nt, Artificial Sequence
  Description of Artificial Sequence: Synthetic oligonucleotide
acacaaagugcucugguug

SEQ ID NO: 1035930 - RNA, 19 nt, Artificial Sequence
  Description of Artificial Sequence: Synthetic oligonucleotide
ucugaagucgaucaaccau

SEQ ID NO: 1035931 - RNA, 19 nt, Artificial Sequence
  Description of Artificial Sequence: Synthetic oligonucleotide
ucauuaacggacuaugauu

SEQ ID NO: 1035932 - RNA, 19 nt, Artificial Sequence
  Description of Artificial Sequence: Synthetic oligonucleotide
augugauuaucauuugcag

SEQ ID NO: 1035933 - RNA, 19 nt, Artificial Sequence
  Description of Artificial Sequence: Synthetic oligonucleotide
gaagucaaggcacuguuga

SEQ ID NO: 1035934 - RNA, 19 nt, Artificial Sequence
  Description of Artificial Sequence: Synthetic oligonucleotide
auacagacagacaugcugg

SEQ ID NO: 1035935 - RNA, 19 nt, Artificial Sequence
  Description of Artificial Sequence: Synthetic oligonucleotide
cauaauagcacugcgacca

SEQ ID NO: 1035936 - RNA, 19 nt, Artificial Sequence
  Description of Artificial Sequence: Synthetic oligonucleotide
uacggcuggacauacaagu

SEQ ID NO: 1035937 - RNA, 19 nt, Artificial Sequence
  Description of Artificial Sequence: Synthetic oligonucleotide
gagcuaacguagcuaaagg

SEQ ID NO: 1035938 - RNA, 19 nt, Artificial Sequence
  Description of Artificial Sequence: Synthetic oligonucleotide
acugcaguuaaauacgcau

SEQ ID NO: 1035939 - RNA, 19 nt, Artificial Sequence
  Description of Artificial Sequence: Synthetic oligonucleotide
uguauggcaccaaggagca

SEQ ID NO: 1035940 - RNA, 19 nt, Artificial Sequence
  Description of Artificial Sequence: Synthetic oligonucleotide
gacaaguugugccccaucc

SEQ ID NO: 1035941 - RNA, 19 nt, Artificial Sequence
  Description of Artificial Sequence: Synthetic oligonucleotide
aagaaaggcccuguaggcg

SEQ ID NO: 1035942 - RNA, 19 nt, Artificial Sequence
  Description of Artificial Sequence: Synthetic oligonucleotide
ggacauacaaguuauucug

SEQ ID NO: 1035943 - RNA, 19 nt, Artificial Sequence
  Description of Artificial Sequence: Synthetic oligonucleotide
uuuacugagaacugcucaa

SEQ ID NO: 1035944 - RNA, 19 nt, Artificial Sequence
  Description of Artificial Sequence: Synthetic oligonucleotide
ucaaaguacugacccuggg

SEQ ID NO: 1035945 - RNA, 19 nt, Artificial Sequence
  Description of Artificial Sequence: Synthetic oligonucleotide
cuaugugauuaucauuugc

SEQ ID NO: 1035946 - RNA, 19 nt, Artificial Sequence
  Description of Artificial Sequence: Synthetic oligonucleotide
aacaugaagagggaugagu

SEQ ID NO: 1035947 - RNA, 19 nt, Artificial Sequence
  Description of Artificial Sequence: Synthetic oligonucleotide
acgucagugaagaaaggcc

SEQ ID NO: 1035948 - RNA, 19 nt, Artificial Sequence
  Description of Artificial Sequence: Synthetic oligonucleotide
uuagggacuccucagucac

SEQ ID NO: 1035949 - RNA, 19 nt, Artificial Sequence
  Description of Artificial Sequence: Synthetic oligonucleotide
uguuucgaugacuccagcc

SEQ ID NO: 1035950 - RNA, 19 nt, Artificial Sequence
  Description of Artificial Sequence: Synthetic oligonucleotide
uagcacuuaucugaagucg

SEQ ID NO: 1035951 - RNA, 19 nt, Artificial Sequence
  Description of Artificial Sequence: Synthetic oligonucleotide
auacgcauaauagcacugc

SEQ ID NO: 1035952 - RNA, 19 nt, Artificial Sequence
  Description of Artificial Sequence: Synthetic oligonucleotide
agauuucgggcaucaacac

SEQ ID NO: 1035953 - RNA, 19 nt, Artificial Sequence
  Description of Artificial Sequence: Synthetic oligonucleotide
cuuuaaagacaaguugugc

SEQ ID NO: 1035954 - RNA, 19 nt, Artificial Sequence
  Description of Artificial Sequence: Synthetic oligonucleotide
aacuucgauggaugccagc

SEQ ID NO: 1035955 - RNA, 19 nt, Artificial Sequence
  Description of Artificial Sequence: Synthetic oligonucleotide
cauggauaugcaaagguga

SEQ ID NO: 1035956 - RNA, 19 nt, Artificial Sequence
  Description of Artificial Sequence: Synthetic oligonucleotide
guguauggcaccaaggagc

SEQ ID NO: 1035957 - RNA, 19 nt, Artificial Sequence
  Description of Artificial Sequence: Synthetic oligonucleotide
cauguuuaaaagagggauc

SEQ ID NO: 1035958 - RNA, 19 nt, Artificial Sequence
  Description of Artificial Sequence: Synthetic oligonucleotide
acuaucacugccauccaac

SEQ ID NO: 1035959 - RNA, 19 nt, Artificial Sequence
  Description of Artificial Sequence: Synthetic oligonucleotide
gaugcggacaugcaaucug

SEQ ID NO: 1035960 - RNA, 19 nt, Artificial Sequence
  Description of Artificial Sequence: Synthetic oligonucleotide
ucagcgaugacaccaggaa

SEQ ID NO: 1035961 - RNA, 19 nt, Artificial Sequence
  Description of Artificial Sequence: Synthetic oligonucleotide
uucauguccuuacuuucgc

SEQ ID NO: 1035962 - RNA, 19 nt, Artificial Sequence
  Description of Artificial Sequence: Synthetic oligonucleotide
aauagcacugcgaccaucu

SEQ ID NO: 1035963 - RNA, 19 nt, Artificial Sequence
  Description of Artificial Sequence: Synthetic oligonucleotide
agagcuaacguagcuaaag

SEQ ID NO: 1035964 - RNA, 19 nt, Artificial Sequence
  Description of Artificial Sequence: Synthetic oligonucleotide
auuuccuuagcuucaucca

SEQ ID NO: 1035965 - RNA, 19 nt, Artificial Sequence
  Description of Artificial Sequence: Synthetic oligonucleotide
uucgauggaugccagcaca

SEQ ID NO: 1035966 - RNA, 19 nt, Artificial Sequence
  Description of Artificial Sequence: Synthetic oligonucleotide
uugcauacgucagugaaga

SEQ ID NO: 1035967 - RNA, 19 nt, Artificial Sequence
  Description of Artificial Sequence: Synthetic oligonucleotide
agucgaucaaccaucgagg

SEQ ID NO: 1035968 - RNA, 19 nt, Artificial Sequence
  Description of Artificial Sequence: Synthetic oligonucleotide
uaacguagcuaaaggggcc

SEQ ID NO: 1035969 - RNA, 19 nt, Artificial Sequence
  Description of Artificial Sequence: Synthetic oligonucleotide
cugaagucgaucaaccauc

SEQ ID NO: 1035970 - RNA, 19 nt, Artificial Sequence
  Description of Artificial Sequence: Synthetic oligonucleotide
agacagccaaguucguagc

SEQ ID NO: 1035971 - RNA, 19 nt, Artificial Sequence
  Description of Artificial Sequence: Synthetic oligonucleotide
ucgaucaaccaucgagggg

SEQ ID NO: 1035972 - RNA, 19 nt, Artificial Sequence
  Description of Artificial Sequence: Synthetic oligonucleotide
cuuuaauacgucagcgaug

SEQ ID NO: 1035973 - RNA, 19 nt, Artificial Sequence
  Description of Artificial Sequence: Synthetic oligonucleotide
caaguacagaacuucgaug

SEQ ID NO: 1035974 - RNA, 19 nt, Artificial Sequence
  Description of Artificial Sequence: Synthetic oligonucleotide
uuuagggacuccucaguca

SEQ ID NO: 1035975 - RNA, 19 nt, Artificial Sequence
  Description of Artificial Sequence: Synthetic oligonucleotide
uuucgcuugcauacgucag

SEQ ID NO: 1035976 - RNA, 19 nt, Artificial Sequence
  Description of Artificial Sequence: Synthetic oligonucleotide
gcuaacguagcuaaagggg

SEQ ID NO: 1035977 - RNA, 19 nt, Artificial Sequence
  Description of Artificial Sequence: Synthetic oligonucleotide
augauuuugagcagguuug

SEQ ID NO: 1035978 - RNA, 19 nt, Artificial Sequence
  Description of Artificial Sequence: Synthetic oligonucleotide
uaacggacuaugauuucug

SEQ ID NO: 1035979 - RNA, 19 nt, Artificial Sequence
  Description of Artificial Sequence: Synthetic oligonucleotide
aauacgcauaauagcacug

SEQ ID NO: 1035980 - RNA, 19 nt, Artificial Sequence
  Description of Artificial Sequence: Synthetic oligonucleotide
auuaacggacuaugauuuc

SEQ ID NO: 1035981 - RNA, 19 nt, Artificial Sequence
  Description of Artificial Sequence: Synthetic oligonucleotide
aucuuuaauacgucagcga

SEQ ID NO: 1035982 - RNA, 19 nt, Artificial Sequence
  Description of Artificial Sequence: Synthetic oligonucleotide
uugauuugacacucuaguc

SEQ ID NO: 1035983 - RNA, 19 nt, Artificial Sequence
  Description of Artificial Sequence: Synthetic oligonucleotide
cuugcauacgucagugaag

SEQ ID NO: 1035984 - RNA, 19 nt, Artificial Sequence
  Description of Artificial Sequence: Synthetic oligonucleotide
aaagugcucugguuggggu

SEQ ID NO: 1035985 - RNA, 19 nt, Artificial Sequence
  Description of Artificial Sequence: Synthetic oligonucleotide
uacgucagugaagaaaggc

SEQ ID NO: 1035986 - RNA, 19 nt, Artificial Sequence
  Description of Artificial Sequence: Synthetic oligonucleotide
uaaagacaaguugugcccc

SEQ ID NO: 1035987 - RNA, 19 nt, Artificial Sequence
  Description of Artificial Sequence: Synthetic oligonucleotide
uuaacggacuaugauuucu

SEQ ID NO: 1035988 - RNA, 19 nt, Artificial Sequence
  Description of Artificial Sequence: Synthetic oligonucleotide
gucgaucaaccaucgaggg

SEQ ID NO: 1035989 - RNA, 19 nt, Artificial Sequence
  Description of Artificial Sequence: Synthetic oligonucleotide
uacgucagcgaugacacca

SEQ ID NO: 1035990 - RNA, 19 nt, Artificial Sequence
  Description of Artificial Sequence: Synthetic oligonucleotide
cacucuagucgcuggaucc

SEQ ID NO: 1035991 - RNA, 19 nt, Artificial Sequence
  Description of Artificial Sequence: Synthetic oligonucleotide
cugagaacugcucaaucug

SEQ ID NO: 1035992 - RNA, 19 nt, Artificial Sequence
  Description of Artificial Sequence: Synthetic oligonucleotide
ugauuuugagcagguuugg

SEQ ID NO: 1035993 - RNA, 19 nt, Artificial Sequence
  Description of Artificial Sequence: Synthetic oligonucleotide
ucgacaucuuuauuacccc

SEQ ID NO: 1035994 - RNA, 19 nt, Artificial Sequence
  Description of Artificial Sequence: Synthetic oligonucleotide
uaccacagcagagcuaacg

SEQ ID NO: 1035995 - RNA, 19 nt, Artificial Sequence
  Description of Artificial Sequence: Synthetic oligonucleotide
gacauagcucaucuuuagc

SEQ ID NO: 1035996 - RNA, 19 nt, Artificial Sequence
  Description of Artificial Sequence: Synthetic oligonucleotide
gauuuugagcagguuuggg

SEQ ID NO: 1035997 - RNA, 19 nt, Artificial Sequence
  Description of Artificial Sequence: Synthetic oligonucleotide
ucacaugccaacugcauuu

SEQ ID NO: 1035998 - RNA, 19 nt, Artificial Sequence
  Description of Artificial Sequence: Synthetic oligonucleotide
uucguagcaugcauacggc

SEQ ID NO: 1035999 - RNA, 19 nt, Artificial Sequence
  Description of Artificial Sequence: Synthetic oligonucleotide
cagccgauuucauacagac

SEQ ID NO: 1036000 - RNA, 19 nt, Artificial Sequence
  Description of Artificial Sequence: Synthetic oligonucleotide
uuuugagaagaauuuccuu

SEQ ID NO: 1036001 - RNA, 19 nt, Artificial Sequence
  Description of Artificial Sequence: Synthetic oligonucleotide
uguuugaacaaggucacuu

SEQ ID NO: 1036002 - RNA, 19 nt, Artificial Sequence
  Description of Artificial Sequence: Synthetic oligonucleotide
ccaaaacucauuaacggac

SEQ ID NO: 1036003 - RNA, 19 nt, Artificial Sequence
  Description of Artificial Sequence: Synthetic oligonucleotide
gaugauuuugagcagguuu

SEQ ID NO: 1036004 - RNA, 19 nt, Artificial Sequence
  Description of Artificial Sequence: Synthetic oligonucleotide
agggacuccucagucaccc

SEQ ID NO: 1036005 - RNA, 19 nt, Artificial Sequence
  Description of Artificial Sequence: Synthetic oligonucleotide
uccacaaguacagaacuuc

SEQ ID NO: 1036006 - RNA, 19 nt, Artificial Sequence
  Description of Artificial Sequence: Synthetic oligonucleotide
aggucacuuagcccucucc

SEQ ID NO: 1036007 - RNA, 19 nt, Artificial Sequence
  Description of Artificial Sequence: Synthetic oligonucleotide
uguccuuacuuucgcuugc

SEQ ID NO: 1036008 - RNA, 19 nt, Artificial Sequence
  Description of Artificial Sequence: Synthetic oligonucleotide
ugacaaacugcaguuaaau

SEQ ID NO: 1036009 - RNA, 19 nt, Artificial Sequence
  Description of Artificial Sequence: Synthetic oligonucleotide
gagcaaaugcuucaaccca

SEQ ID NO: 1036010 - RNA, 19 nt, Artificial Sequence
  Description of Artificial Sequence: Synthetic oligonucleotide
uuucgacaucuuuauuacc

SEQ ID NO: 1036011 - RNA, 19 nt, Artificial Sequence
  Description of Artificial Sequence: Synthetic oligonucleotide
acuaugugauuaucauuug

SEQ ID NO: 1036012 - RNA, 19 nt, Artificial Sequence
  Description of Artificial Sequence: Synthetic oligonucleotide
uucaaagucguagccagaa

SEQ ID NO: 1036013 - RNA, 19 nt, Artificial Sequence
  Description of Artificial Sequence: Synthetic oligonucleotide
aacccagugacagauggau

SEQ ID NO: 1036014 - RNA, 19 nt, Artificial Sequence
  Description of Artificial Sequence: Synthetic oligonucleotide
aaaaugggcggaccacagu

SEQ ID NO: 1036015 - RNA, 19 nt, Artificial Sequence
  Description of Artificial Sequence: Synthetic oligonucleotide
ucagucaccccuucagcca

SEQ ID NO: 1036016 - RNA, 19 nt, Artificial Sequence
  Description of Artificial Sequence: Synthetic oligonucleotide
ugauuguuucgaugacucc

SEQ ID NO: 1036017 - RNA, 19 nt, Artificial Sequence
  Description of Artificial Sequence: Synthetic oligonucleotide
cauugagggaccaguuccc

SEQ ID NO: 1036018 - RNA, 19 nt, Artificial Sequence
  Description of Artificial Sequence: Synthetic oligonucleotide
agggaucuuuaauacguca

SEQ ID NO: 1036019 - RNA, 19 nt, Artificial Sequence
  Description of Artificial Sequence: Synthetic oligonucleotide
ggaucuuuaauacgucagc

SEQ ID NO: 1036020 - RNA, 19 nt, Artificial Sequence
  Description of Artificial Sequence: Synthetic oligonucleotide
agucacucagaguuucuca

SEQ ID NO: 1036021 - RNA, 19 nt, Artificial Sequence
  Description of Artificial Sequence: Synthetic oligonucleotide
uuacuuucgcuugcauacg

SEQ ID NO: 1036022 - RNA, 19 nt, Artificial Sequence
  Description of Artificial Sequence: Synthetic oligonucleotide
uccuagacauuuguguaug

SEQ ID NO: 1036023 - RNA, 19 nt, Artificial Sequence
  Description of Artificial Sequence: Synthetic oligonucleotide
guugggaagggcuuuccac

SEQ ID NO: 1036024 - RNA, 19 nt, Artificial Sequence
  Description of Artificial Sequence: Synthetic oligonucleotide
auuguuucgaugacuccag

SEQ ID NO: 1036025 - RNA, 19 nt, Artificial Sequence
  Description of Artificial Sequence: Synthetic oligonucleotide
cuggacauacaaguuauuc

SEQ ID NO: 1036026 - RNA, 19 nt, Artificial Sequence
  Description of Artificial Sequence: Synthetic oligonucleotide
acuucgauggaugccagca

SEQ ID NO: 1036027 - RNA, 19 nt, Artificial Sequence
  Description of Artificial Sequence: Synthetic oligonucleotide
ggcuccaaaacucauuaac

SEQ ID NO: 1036028 - RNA, 19 nt, Artificial Sequence
  Description of Artificial Sequence: Synthetic oligonucleotide
uucgcuugcauacgucagu

SEQ ID NO: 1036029 - RNA, 19 nt, Artificial Sequence
  Description of Artificial Sequence: Synthetic oligonucleotide
uacuuucgcuugcauacgu

SEQ ID NO: 1036030 - RNA, 19 nt, Artificial Sequence
  Description of Artificial Sequence: Synthetic oligonucleotide
cacuaugugauuaucauuu

SEQ ID NO: 1036031 - RNA, 19 nt, Artificial Sequence
  Description of Artificial Sequence: Synthetic oligonucleotide
uucgaugacuccagccucu

SEQ ID NO: 1036032 - RNA, 19 nt, Artificial Sequence
  Description of Artificial Sequence: Synthetic oligonucleotide
uuaggucaucacaugccaa

SEQ ID NO: 1036033 - RNA, 19 nt, Artificial Sequence
  Description of Artificial Sequence: Synthetic oligonucleotide
aaacaugaagagggaugag

SEQ ID NO: 1036034 - RNA, 19 nt, Artificial Sequence
  Description of Artificial Sequence: Synthetic oligonucleotide
accagccgauuucauacag

SEQ ID NO: 1036035 - RNA, 19 nt, Artificial Sequence
  Description of Artificial Sequence: Synthetic oligonucleotide
cuuucgcuugcauacguca

SEQ ID NO: 1036036 - RNA, 19 nt, Artificial Sequence
  Description of Artificial Sequence: Synthetic oligonucleotide
cuagucgcuggauccgucc

SEQ ID NO: 1036037 - RNA, 19 nt, Artificial Sequence
  Description of Artificial Sequence: Synthetic oligonucleotide
gcuacauguuuaaaagagg

SEQ ID NO: 1036038 - RNA, 19 nt, Artificial Sequence
  Description of Artificial Sequence: Synthetic oligonucleotide
ggacagaguagucacucag

SEQ ID NO: 1036039 - RNA, 19 nt, Artificial Sequence
  Description of Artificial Sequence: Synthetic oligonucleotide
guucggauaagcagcuucc

SEQ ID NO: 1036040 - RNA, 19 nt, Artificial Sequence
  Description of Artificial Sequence: Synthetic oligonucleotide
aaggcacuguugauuugac

SEQ ID NO: 1036041 - RNA, 19 nt, Artificial Sequence
  Description of Artificial Sequence: Synthetic oligonucleotide
aacguagcuaaaggggccu

SEQ ID NO: 1036042 - RNA, 19 nt, Artificial Sequence
  Description of Artificial Sequence: Synthetic oligonucleotide
cucuggccugccuaguagg

SEQ ID NO: 1036043 - RNA, 19 nt, Artificial Sequence
  Description of Artificial Sequence: Synthetic oligonucleotide
accacagugugguaccaca

SEQ ID NO: 1036044 - RNA, 19 nt, Artificial Sequence
  Description of Artificial Sequence: Synthetic oligonucleotide
cauagcacuuaucugaagu

SEQ ID NO: 1036045 - RNA, 19 nt, Artificial Sequence
  Description of Artificial Sequence: Synthetic oligonucleotide
ugaguucuaucaugcugca

SEQ ID NO: 1036046 - RNA, 19 nt, Artificial Sequence
  Description of Artificial Sequence: Synthetic oligonucleotide
gcaagcuugacucauccuc

SEQ ID NO: 1036047 - RNA, 19 nt, Artificial Sequence
  Description of Artificial Sequence: Synthetic oligonucleotide
agccaaguucguagcaugc

SEQ ID NO: 1036048 - RNA, 19 nt, Artificial Sequence
  Description of Artificial Sequence: Synthetic oligonucleotide
cauuaacggacuaugauuu

SEQ ID NO: 1036049 - RNA, 19 nt, Artificial Sequence
  Description of Artificial Sequence: Synthetic oligonucleotide
agagcaguugggaagggcu

SEQ ID NO: 1036050 - RNA, 19 nt, Artificial Sequence
  Description of Artificial Sequence: Synthetic oligonucleotide
gacauacaaguuauucuga

SEQ ID NO: 1036051 - RNA, 19 nt, Artificial Sequence
  Description of Artificial Sequence: Synthetic oligonucleotide
acaaguugugccccaucca

SEQ ID NO: 1036052 - RNA, 19 nt, Artificial Sequence
  Description of Artificial Sequence: Synthetic oligonucleotide
caccccuucagccacuaug

SEQ ID NO: 1036053 - RNA, 19 nt, Artificial Sequence
  Description of Artificial Sequence: Synthetic oligonucleotide
gacgacauagcucaucuuu

SEQ ID NO: 1036054 - RNA, 19 nt, Artificial Sequence
  Description of Artificial Sequence: Synthetic oligonucleotide
ucaaagucguagccagaaa

SEQ ID NO: 1036055 - RNA, 19 nt, Artificial Sequence
  Description of Artificial Sequence: Synthetic oligonucleotide
agcacugcgaccaucugga

SEQ ID NO: 1036056 - RNA, 19 nt, Artificial Sequence
  Description of Artificial Sequence: Synthetic oligonucleotide
agacaaguugugccccauc

SEQ ID NO: 1036057 - RNA, 19 nt, Artificial Sequence
  Description of Artificial Sequence: Synthetic oligonucleotide
auacgucagcgaugacacc

SEQ ID NO: 1036058 - RNA, 19 nt, Artificial Sequence
  Description of Artificial Sequence: Synthetic oligonucleotide
ugggguuugcuuccggaau

SEQ ID NO: 1036059 - RNA, 19 nt, Artificial Sequence
  Description of Artificial Sequence: Synthetic oligonucleotide
ucauguccuuacuuucgcu

SEQ ID NO: 1036060 - RNA, 19 nt, Artificial Sequence
  Description of Artificial Sequence: Synthetic oligonucleotide
gcaccagccgauuucauac

SEQ ID NO: 1036061 - RNA, 19 nt, Artificial Sequence
  Description of Artificial Sequence: Synthetic oligonucleotide
uuguuucgaugacuccagc

SEQ ID NO: 1036062 - RNA, 19 nt, Artificial Sequence
  Description of Artificial Sequence: Synthetic oligonucleotide
agcagcacgcuggaagaac

SEQ ID NO: 1036063 - RNA, 19 nt, Artificial Sequence
  Description of Artificial Sequence: Synthetic oligonucleotide
ugggcggaccacagugugg

SEQ ID NO: 1036064 - RNA, 19 nt, Artificial Sequence
  Description of Artificial Sequence: Synthetic oligonucleotide
ucguagcaugcauacggcu

SEQ ID NO: 1036065 - RNA, 19 nt, Artificial Sequence
  Description of Artificial Sequence: Synthetic oligonucleotide
uuuuaucauuuucgacauc

SEQ ID NO: 1036066 - RNA, 19 nt, Artificial Sequence
  Description of Artificial Sequence: Synthetic oligonucleotide
aucacaugccaacugcauu

SEQ ID NO: 1036067 - RNA, 19 nt, Artificial Sequence
  Description of Artificial Sequence: Synthetic oligonucleotide
cauacggcuggacauacaa

SEQ ID NO: 1036068 - RNA, 19 nt, Artificial Sequence
  Description of Artificial Sequence: Synthetic oligonucleotide
gggaucuuuaauacgucag

SEQ ID NO: 1036069 - RNA, 19 nt, Artificial Sequence
  Description of Artificial Sequence: Synthetic oligonucleotide
cacgcuggaagaacugaac

SEQ ID NO: 1036070 - RNA, 19 nt, Artificial Sequence
  Description of Artificial Sequence: Synthetic oligonucleotide
guuugaacaaggucacuua

SEQ ID NO: 1036071 - RNA, 19 nt, Artificial Sequence
  Description of Artificial Sequence: Synthetic oligonucleotide
agcuaacagcaccuuucag

SEQ ID NO: 1036072 - RNA, 19 nt, Artificial Sequence
  Description of Artificial Sequence: Synthetic oligonucleotide
acucuagucgcuggauccg

SEQ ID NO: 1036073 - RNA, 19 nt, Artificial Sequence
  Description of Artificial Sequence: Synthetic oligonucleotide
gcagauuucgggcaucaac

SEQ ID NO: 1036074 - RNA, 19 nt, Artificial Sequence
  Description of Artificial Sequence: Synthetic oligonucleotide
guggcucccugacaaacug

SEQ ID NO: 1036075 - RNA, 19 nt, Artificial Sequence
  Description of Artificial Sequence: Synthetic oligonucleotide
ccauggauaugcaaaggug

SEQ ID NO: 1036076 - RNA, 19 nt, Artificial Sequence
  Description of Artificial Sequence: Synthetic oligonucleotide
cagaacuucgauggaugcc

SEQ ID NO: 1036077 - RNA, 19 nt, Artificial Sequence
  Description of Artificial Sequence: Synthetic oligonucleotide
aacugcaguuaaauacgca

SEQ ID NO: 1036078 - RNA, 19 nt, Artificial Sequence
  Description of Artificial Sequence: Synthetic oligonucleotide
uucagccacuaugugauua

SEQ ID NO: 1036079 - RNA, 19 nt, Artificial Sequence
  Description of Artificial Sequence: Synthetic oligonucleotide
cacaaguacagaacuucga

SEQ ID NO: 1036080 - RNA, 19 nt, Artificial Sequence
  Description of Artificial Sequence: Synthetic oligonucleotide
uuucgggcaucaacacucu

SEQ ID NO: 1036081 - RNA, 19 nt, Artificial Sequence
  Description of Artificial Sequence: Synthetic oligonucleotide
gacaugcuggaucucccuc

SEQ ID NO: 1036082 - RNA, 19 nt, Artificial Sequence
  Description of Artificial Sequence: Synthetic oligonucleotide
ucccagguagguuauuauu

SEQ ID NO: 1036083 - RNA, 19 nt, Artificial Sequence
  Description of Artificial Sequence: Synthetic oligonucleotide
cgucagugaagaaaggccc

SEQ ID NO: 1036084 - RNA, 19 nt, Artificial Sequence
  Description of Artificial Sequence: Synthetic oligonucleotide
gcuaaaggggccuucaugu

SEQ ID NO: 1036085 - RNA, 19 nt, Artificial Sequence
  Description of Artificial Sequence: Synthetic oligonucleotide
cagccaaguucguagcaug

SEQ ID NO: 1036086 - RNA, 19 nt, Artificial Sequence
  Description of Artificial Sequence: Synthetic oligonucleotide
ucauggcaagcuugacuca

SEQ ID NO: 1036087 - RNA, 19 nt, Artificial Sequence
  Description of Artificial Sequence: Synthetic oligonucleotide
augggcggaccacagugug

SEQ ID NO: 1036088 - RNA, 19 nt, Artificial Sequence
  Description of Artificial Sequence: Synthetic oligonucleotide
agcacuuaucugaagucga

SEQ ID NO: 1036089 - RNA, 19 nt, Artificial Sequence
  Description of Artificial Sequence: Synthetic oligonucleotide
ggcaucaacacucuucuua

SEQ ID NO: 1036090 - RNA, 19 nt, Artificial Sequence
  Description of Artificial Sequence: Synthetic oligonucleotide
ccugcuuuacuaucacugc

SEQ ID NO: 1036091 - RNA, 19 nt, Artificial Sequence
  Description of Artificial Sequence: Synthetic oligonucleotide
cuuuacuaucacugccauc

SEQ ID NO: 1036092 - RNA, 19 nt, Artificial Sequence
  Description of Artificial Sequence: Synthetic oligonucleotide
gguugaugauuuugagcag

SEQ ID NO: 1036093 - RNA, 19 nt, Artificial Sequence
  Description of Artificial Sequence: Synthetic oligonucleotide
uggauaugcaaaggugaaa

SEQ ID NO: 1036094 - RNA, 19 nt, Artificial Sequence
  Description of Artificial Sequence: Synthetic oligonucleotide
uauuaccccagagcuacau

SEQ ID NO: 1036095 - RNA, 19 nt, Artificial Sequence
  Description of Artificial Sequence: Synthetic oligonucleotide
uggaugcggacaugcaauc

SEQ ID NO: 1036096 - RNA, 19 nt, Artificial Sequence
  Description of Artificial Sequence: Synthetic oligonucleotide
agucuguuuagggacuccu

SEQ ID NO: 1036097 - RNA, 19 nt, Artificial Sequence
  Description of Artificial Sequence: Synthetic oligonucleotide
ucaccgguggcucccugac

SEQ ID NO: 1036098 - RNA, 19 nt, Artificial Sequence
  Description of Artificial Sequence: Synthetic oligonucleotide
aaugggcggaccacagugu

SEQ ID NO: 1036099 - RNA, 19 nt, Artificial Sequence
  Description of Artificial Sequence: Synthetic oligonucleotide
ugcaccagccgauuucaua

SEQ ID NO: 1036100 - RNA, 19 nt, Artificial Sequence
  Description of Artificial Sequence: Synthetic oligonucleotide
ucugacgacauagcucauc

SEQ ID NO: 1036101 - RNA, 19 nt, Artificial Sequence
  Description of Artificial Sequence: Synthetic oligonucleotide
acaugcaaucuguuuucaa

SEQ ID NO: 1036102 - RNA, 19 nt, Artificial Sequence
  Description of Artificial Sequence: Synthetic oligonucleotide
acucauuaacggacuauga

SEQ ID NO: 1036103 - RNA, 19 nt, Artificial Sequence
  Description of Artificial Sequence: Synthetic oligonucleotide
gucacuuagcccucuccca

SEQ ID NO: 1036104 - RNA, 19 nt, Artificial Sequence
  Description of Artificial Sequence: Synthetic oligonucleotide
ugauuaucauuugcagcau

SEQ ID NO: 1036105 - RNA, 19 nt, Artificial Sequence
  Description of Artificial Sequence: Synthetic oligonucleotide
gacagauggaucauccacu

SEQ ID NO: 1036106 - RNA, 19 nt, Artificial Sequence
  Description of Artificial Sequence: Synthetic oligonucleotide
acuuucgcuugcauacguc

SEQ ID NO: 1036107 - RNA, 19 nt, Artificial Sequence
  Description of Artificial Sequence: Synthetic oligonucleotide
gaguuuccuagacauuugu

SEQ ID NO: 1036108 - RNA, 19 nt, Artificial Sequence
  Description of Artificial Sequence: Synthetic oligonucleotide
agccacuaugugauuauca

SEQ ID NO: 1036109 - RNA, 19 nt, Artificial Sequence
  Description of Artificial Sequence: Synthetic oligonucleotide
cuuaucugaagucgaucaa

SEQ ID NO: 1036110 - RNA, 19 nt, Artificial Sequence
  Description of Artificial Sequence: Synthetic oligonucleotide
ugcauacggcuggacauac

SEQ ID NO: 1036111 - RNA, 19 nt, Artificial Sequence
  Description of Artificial Sequence: Synthetic oligonucleotide
guuuaaaagagggaucuuu

SEQ ID NO: 1036112 - RNA, 19 nt, Artificial Sequence
  Description of Artificial Sequence: Synthetic oligonucleotide
uugcuuccggaaucucuca

SEQ ID NO: 1036113 - RNA, 19 nt, Artificial Sequence
  Description of Artificial Sequence: Synthetic oligonucleotide
ucuagucgcuggauccguc

SEQ ID NO: 1036114 - RNA, 19 nt, Artificial Sequence
  Description of Artificial Sequence: Synthetic oligonucleotide
ggucaucacaugccaacug

SEQ ID NO: 1036115 - RNA, 19 nt, Artificial Sequence
  Description of Artificial Sequence: Synthetic oligonucleotide
auacgucagugaagaaagg

SEQ ID NO: 1036116 - RNA, 19 nt, Artificial Sequence
  Description of Artificial Sequence: Synthetic oligonucleotide
guugggguuugcuuccgga

SEQ ID NO: 1036117 - RNA, 19 nt, Artificial Sequence
  Description of Artificial Sequence: Synthetic oligonucleotide
gaacuucgauggaugccag

SEQ ID NO: 1036118 - RNA, 19 nt, Artificial Sequence
  Description of Artificial Sequence: Synthetic oligonucleotide
ccuaguaggagacagccaa

SEQ ID NO: 1036119 - RNA, 19 nt, Artificial Sequence
  Description of Artificial Sequence: Synthetic oligonucleotide
cuucugaguuuccuagaca

SEQ ID NO: 1036120 - RNA, 19 nt, Artificial Sequence
  Description of Artificial Sequence: Synthetic oligonucleotide
cugcaguuaaauacgcaua

SEQ ID NO: 1036121 - RNA, 19 nt, Artificial Sequence
  Description of Artificial Sequence: Synthetic oligonucleotide
gcagagcuaacguagcuaa

SEQ ID NO: 1036122 - RNA, 19 nt, Artificial Sequence
  Description of Artificial Sequence: Synthetic oligonucleotide
cagcacacaaagugcucug

SEQ ID NO: 1036123 - RNA, 19 nt, Artificial Sequence
  Description of Artificial Sequence: Synthetic oligonucleotide
caugcauacggcuggacau

SEQ ID NO: 1036124 - RNA, 19 nt, Artificial Sequence
  Description of Artificial Sequence: Synthetic oligonucleotide
cucauuaacggacuaugau

SEQ ID NO: 1036125 - RNA, 19 nt, Artificial Sequence
  Description of Artificial Sequence: Synthetic oligonucleotide
gcaucaacacucuucuuaa

SEQ ID NO: 1036126 - RNA, 19 nt, Artificial Sequence
  Description of Artificial Sequence: Synthetic oligonucleotide
auaauagcacugcgaccau

SEQ ID NO: 1036127 - RNA, 19 nt, Artificial Sequence
  Description of Artificial Sequence: Synthetic oligonucleotide
acgcauaauagcacugcga

SEQ ID NO: 1036128 - RNA, 19 nt, Artificial Sequence
  Description of Artificial Sequence: Synthetic oligonucleotide
uuaauacgucagcgaugac

SEQ ID NO: 1036129 - RNA, 19 nt, Artificial Sequence
  Description of Artificial Sequence: Synthetic oligonucleotide
cugacgacauagcucaucu

SEQ ID NO: 1036130 - RNA, 19 nt, Artificial Sequence
  Description of Artificial Sequence: Synthetic oligonucleotide
caaguucguagcaugcaua

SEQ ID NO: 1036131 - RNA, 19 nt, Artificial Sequence
  Description of Artificial Sequence: Synthetic oligonucleotide
gacaugcaaucuguuuuca

SEQ ID NO: 1036132 - RNA, 19 nt, Artificial Sequence
  Description of Artificial Sequence: Synthetic oligonucleotide
gacaagggcucuuccguua

SEQ ID NO: 1036133 - RNA, 19 nt, Artificial Sequence
  Description of Artificial Sequence: Synthetic oligonucleotide
caggccugcuuuacuauca

SEQ ID NO: 1036134 - RNA, 19 nt, Artificial Sequence
  Description of Artificial Sequence: Synthetic oligonucleotide
auacggcuggacauacaag

SEQ ID NO: 1036135 - RNA, 19 nt, Artificial Sequence
  Description of Artificial Sequence: Synthetic oligonucleotide
uccuuacuuucgcuugcau

SEQ ID NO: 1036136 - RNA, 19 nt, Artificial Sequence
  Description of Artificial Sequence: Synthetic oligonucleotide
gugugguaccacagcagag

SEQ ID NO: 1036137 - RNA, 19 nt, Artificial Sequence
  Description of Artificial Sequence: Synthetic oligonucleotide
uaauagcacugcgaccauc

SEQ ID NO: 1036138 - RNA, 19 nt, Artificial Sequence
  Description of Artificial Sequence: Synthetic oligonucleotide
guagcuaaaggggccuuca

SEQ ID NO: 1036139 - RNA, 19 nt, Artificial Sequence
  Description of Artificial Sequence: Synthetic oligonucleotide
uccaugucaccgguggcuc

SEQ ID NO: 1036140 - RNA, 19 nt, Artificial Sequence
  Description of Artificial Sequence: Synthetic oligonucleotide
gagggaucuuuaauacguc

SEQ ID NO: 1036141 - RNA, 19 nt, Artificial Sequence
  Description of Artificial Sequence: Synthetic oligonucleotide
uagcuaaaggggccuucau

SEQ ID NO: 1036142 - RNA, 19 nt, Artificial Sequence
  Description of Artificial Sequence: Synthetic oligonucleotide
gaagucgaucaaccaucga

SEQ ID NO: 1036143 - RNA, 19 nt, Artificial Sequence
  Description of Artificial Sequence: Synthetic oligonucleotide
agacaagggcucuuccguu

SEQ ID NO: 1036144 - RNA, 19 nt, Artificial Sequence
  Description of Artificial Sequence: Synthetic oligonucleotide
caaaguacugacccugggu

SEQ ID NO: 1036145 - RNA, 19 nt, Artificial Sequence
  Description of Artificial Sequence: Synthetic oligonucleotide
agucgcuggauccgucccu

SEQ ID NO: 1036146 - RNA, 19 nt, Artificial Sequence
  Description of Artificial Sequence: Synthetic oligonucleotide
ccuguaggcggucuccagg

SEQ ID NO: 1036147 - RNA, 19 nt, Artificial Sequence
  Description of Artificial Sequence: Synthetic oligonucleotide
ccuagacauuuguguaugg

SEQ ID NO: 1036148 - RNA, 19 nt, Artificial Sequence
  Description of Artificial Sequence: Synthetic oligonucleotide
agcaugcauacggcuggac

SEQ ID NO: 1036149 - RNA, 19 nt, Artificial Sequence
  Description of Artificial Sequence: Synthetic oligonucleotide
gccauauccaaagcuaaca

SEQ ID NO: 1036150 - RNA, 19 nt, Artificial Sequence
  Description of Artificial Sequence: Synthetic oligonucleotide
uguaggcggucuccaggaa

SEQ ID NO: 1036151 - RNA, 19 nt, Artificial Sequence
  Description of Artificial Sequence: Synthetic oligonucleotide
cguagcaugcauacggcug

SEQ ID NO: 1036152 - RNA, 19 nt, Artificial Sequence
  Description of Artificial Sequence: Synthetic oligonucleotide
gcauacgucagugaagaaa

SEQ ID NO: 1036153 - RNA, 19 nt, Artificial Sequence
  Description of Artificial Sequence: Synthetic oligonucleotide
gcauugauguccacauagc

SEQ ID NO: 1036154 - RNA, 19 nt, Artificial Sequence
  Description of Artificial Sequence: Synthetic oligonucleotide
guaggcggucuccaggaaa

SEQ ID NO: 1036155 - RNA, 19 nt, Artificial Sequence
  Description of Artificial Sequence: Synthetic oligonucleotide
aggccauauccaaagcuaa

SEQ ID NO: 1036156 - RNA, 19 nt, Artificial Sequence
  Description of Artificial Sequence: Synthetic oligonucleotide
ugguaccacagcagagcua

SEQ ID NO: 1036157 - RNA, 19 nt, Artificial Sequence
  Description of Artificial Sequence: Synthetic oligonucleotide
ggugguccucagaagaaac

SEQ ID NO: 1036158 - RNA, 19 nt, Artificial Sequence
  Description of Artificial Sequence: Synthetic oligonucleotide
acgacauagcucaucuuua

SEQ ID NO: 1036159 - RNA, 19 nt, Artificial Sequence
  Description of Artificial Sequence: Synthetic oligonucleotide
ugcauacgucagugaagaa

SEQ ID NO: 1036160 - RNA, 19 nt, Artificial Sequence
  Description of Artificial Sequence: Synthetic oligonucleotide
cuguugauuugacacucua

SEQ ID NO: 1036161 - RNA, 19 nt, Artificial Sequence
  Description of Artificial Sequence: Synthetic oligonucleotide
cagcacgcuggaagaacug

SEQ ID NO: 1036162 - RNA, 19 nt, Artificial Sequence
  Description of Artificial Sequence: Synthetic oligonucleotide
agugcucugguugggguuu

SEQ ID NO: 1036163 - RNA, 19 nt, Artificial Sequence
  Description of Artificial Sequence: Synthetic oligonucleotide
gucagcgaugacaccagga

SEQ ID NO: 1036164 - RNA, 19 nt, Artificial Sequence
  Description of Artificial Sequence: Synthetic oligonucleotide
ggaugaguucggauaagca

SEQ ID NO: 1036165 - RNA, 19 nt, Artificial Sequence
  Description of Artificial Sequence: Synthetic oligonucleotide
gggguuugcuuccggaauc

SEQ ID NO: 1036166 - RNA, 19 nt, Artificial Sequence
  Description of Artificial Sequence: Synthetic oligonucleotide
caaguugugccccauccau

SEQ ID NO: 1036167 - RNA, 19 nt, Artificial Sequence
  Description of Artificial Sequence: Synthetic oligonucleotide
gaguucuaucaugcugcac

SEQ ID NO: 1036168 - RNA, 19 nt, Artificial Sequence
  Description of Artificial Sequence: Synthetic oligonucleotide
acgucagcgaugacaccag

SEQ ID NO: 1036169 - RNA, 19 nt, Artificial Sequence
  Description of Artificial Sequence: Synthetic oligonucleotide
ccaaggagcaaaugcuuca

SEQ ID NO: 1036170 - RNA, 19 nt, Artificial Sequence
  Description of Artificial Sequence: Synthetic oligonucleotide
cgacauagcucaucuuuag

SEQ ID NO: 1036171 - RNA, 19 nt, Artificial Sequence
  Description of Artificial Sequence: Synthetic oligonucleotide
auuugacacucuagucgcu

SEQ ID NO: 1036172 - RNA, 19 nt, Artificial Sequence
  Description of Artificial Sequence: Synthetic oligonucleotide
ugacgacauagcucaucuu

SEQ ID NO: 1036173 - RNA, 19 nt, Artificial Sequence
  Description of Artificial Sequence: Synthetic oligonucleotide
cuucaacccagugacagau

SEQ ID NO: 1036174 - RNA, 19 nt, Artificial Sequence
  Description of Artificial Sequence: Synthetic oligonucleotide
ggggacagaguagucacuc

SEQ ID NO: 1036175 - RNA, 19 nt, Artificial Sequence
  Description of Artificial Sequence: Synthetic oligonucleotide
ugucaccgguggcucccug

SEQ ID NO: 1036176 - RNA, 19 nt, Artificial Sequence
  Description of Artificial Sequence: Synthetic oligonucleotide
gaccacagugugguaccac

SEQ ID NO: 1036177 - RNA, 19 nt, Artificial Sequence
  Description of Artificial Sequence: Synthetic oligonucleotide
cagcgaugacaccaggaaa

SEQ ID NO: 1036178 - RNA, 19 nt, Artificial Sequence
  Description of Artificial Sequence: Synthetic oligonucleotide
uagcaugcauacggcugga

SEQ ID NO: 1036179 - RNA, 19 nt, Artificial Sequence
  Description of Artificial Sequence: Synthetic oligonucleotide
caaggagcaaaugcuucaa

SEQ ID NO: 1036180 - RNA, 19 nt, Artificial Sequence
  Description of Artificial Sequence: Synthetic oligonucleotide
gcgaugacaccaggaaacc

SEQ ID NO: 1036181 - RNA, 19 nt, Artificial Sequence
  Description of Artificial Sequence: Synthetic oligonucleotide
agccgauuucauacagaca

SEQ ID NO: 1036182 - RNA, 19 nt, Artificial Sequence
  Description of Artificial Sequence: Synthetic oligonucleotide
ggaaaccccagcagguuga

SEQ ID NO: 1036183 - RNA, 19 nt, Artificial Sequence
  Description of Artificial Sequence: Synthetic oligonucleotide
guacugacccuggguggag

SEQ ID NO: 1036184 - RNA, 19 nt, Artificial Sequence
  Description of Artificial Sequence: Synthetic oligonucleotide
agcaguugggaagggcuuu

SEQ ID NO: 1036185 - RNA, 19 nt, Artificial Sequence
  Description of Artificial Sequence: Synthetic oligonucleotide
gcggucuccaggaaacccc

SEQ ID NO: 1036186 - RNA, 19 nt, Artificial Sequence
  Description of Artificial Sequence: Synthetic oligonucleotide
gucaccgguggcucccuga

SEQ ID NO: 1036187 - RNA, 19 nt, Artificial Sequence
  Description of Artificial Sequence: Synthetic oligonucleotide
guggaugcggacaugcaau

SEQ ID NO: 1036188 - RNA, 19 nt, Artificial Sequence
  Description of Artificial Sequence: Synthetic oligonucleotide
gaagggcuuuccacaagua

SEQ ID NO: 1036189 - RNA, 19 nt, Artificial Sequence
  Description of Artificial Sequence: Synthetic oligonucleotide
uucugacgacauagcucau

SEQ ID NO: 1036190 - RNA, 19 nt, Artificial Sequence
  Description of Artificial Sequence: Synthetic oligonucleotide
caucacaugccaacugcau

SEQ ID NO: 1036191 - RNA, 19 nt, Artificial Sequence
  Description of Artificial Sequence: Synthetic oligonucleotide
ggagucaaaugcauccuua

SEQ ID NO: 1036192 - RNA, 19 nt, Artificial Sequence
  Description of Artificial Sequence: Synthetic oligonucleotide
guugugccccauccauguc

SEQ ID NO: 1036193 - RNA, 19 nt, Artificial Sequence
  Description of Artificial Sequence: Synthetic oligonucleotide
ucgcuggauccgucccuug

SEQ ID NO: 1036194 - RNA, 19 nt, Artificial Sequence
  Description of Artificial Sequence: Synthetic oligonucleotide
caccagccgauuucauaca

SEQ ID NO: 1036195 - RNA, 19 nt, Artificial Sequence
  Description of Artificial Sequence: Synthetic oligonucleotide
gggacagaguagucacuca

SEQ ID NO: 1036196 - RNA, 19 nt, Artificial Sequence
  Description of Artificial Sequence: Synthetic oligonucleotide
gcuucaacccagugacaga

SEQ ID NO: 1036197 - RNA, 19 nt, Artificial Sequence
  Description of Artificial Sequence: Synthetic oligonucleotide
ccuuacuuucgcuugcaua

SEQ ID NO: 1036198 - RNA, 19 nt, Artificial Sequence
  Description of Artificial Sequence: Synthetic oligonucleotide
cuacagucucuggccugcc

SEQ ID NO: 1036199 - RNA, 19 nt, Artificial Sequence
  Description of Artificial Sequence: Synthetic oligonucleotide
ggauaagcagcuuccuuuu

SEQ ID NO: 1036200 - RNA, 19 nt, Artificial Sequence
  Description of Artificial Sequence: Synthetic oligonucleotide
cacugcgaccaucuggacu

SEQ ID NO: 1036201 - RNA, 19 nt, Artificial Sequence
  Description of Artificial Sequence: Synthetic oligonucleotide
caaagcuaacagcaccuuu

SEQ ID NO: 1036202 - RNA, 19 nt, Artificial Sequence
  Description of Artificial Sequence: Synthetic oligonucleotide
ggucuuucgccucugcuuu

SEQ ID NO: 1036203 - RNA, 19 nt, Artificial Sequence
  Description of Artificial Sequence: Synthetic oligonucleotide
guccuuacuuucgcuugca

SEQ ID NO: 1036204 - RNA, 19 nt, Artificial Sequence
  Description of Artificial Sequence: Synthetic oligonucleotide
acggcuggacauacaaguu

SEQ ID NO: 1036205 - RNA, 19 nt, Artificial Sequence
  Description of Artificial Sequence: Synthetic oligonucleotide
cagagcuaacguagcuaaa

SEQ ID NO: 1036206 - RNA, 19 nt, Artificial Sequence
  Description of Artificial Sequence: Synthetic oligonucleotide
ucgaugacuccagccucuu

SEQ ID NO: 1036207 - RNA, 19 nt, Artificial Sequence
  Description of Artificial Sequence: Synthetic oligonucleotide
agucucuggccugccuagu

SEQ ID NO: 1036208 - RNA, 19 nt, Artificial Sequence
  Description of Artificial Sequence: Synthetic oligonucleotide
ggacuccucagucaccccu

SEQ ID NO: 1036209 - RNA, 19 nt, Artificial Sequence
  Description of Artificial Sequence: Synthetic oligonucleotide
ucaccccuucagccacuau

SEQ ID NO: 1036210 - RNA, 19 nt, Artificial Sequence
  Description of Artificial Sequence: Synthetic oligonucleotide
cauggcaagcuugacucau

SEQ ID NO: 1036211 - RNA, 19 nt, Artificial Sequence
  Description of Artificial Sequence: Synthetic oligonucleotide
gccaaguucguagcaugca

SEQ ID NO: 1036212 - RNA, 19 nt, Artificial Sequence
  Description of Artificial Sequence: Synthetic oligonucleotide
augcuucaacccagugaca

SEQ ID NO: 1036213 - RNA, 19 nt, Artificial Sequence
  Description of Artificial Sequence: Synthetic oligonucleotide
cauuuguguauggcaccaa

SEQ ID NO: 1036214 - RNA, 19 nt, Artificial Sequence
  Description of Artificial Sequence: Synthetic oligonucleotide
acgcuggucuucacagggu

SEQ ID NO: 1036215 - RNA, 19 nt, Artificial Sequence
  Description of Artificial Sequence: Synthetic oligonucleotide
ccgauuucauacagacaga

SEQ ID NO: 1036216 - RNA, 19 nt, Artificial Sequence
  Description of Artificial Sequence: Synthetic oligonucleotide
cgaugacaccaggaaaccc

SEQ ID NO: 1036217 - RNA, 19 nt, Artificial Sequence
  Description of Artificial Sequence: Synthetic oligonucleotide
gaaaggcccuguaggcggu

SEQ ID NO: 1036218 - RNA, 19 nt, Artificial Sequence
  Description of Artificial Sequence: Synthetic oligonucleotide
gggacuccucagucacccc

SEQ ID NO: 1036219 - RNA, 19 nt, Artificial Sequence
  Description of Artificial Sequence: Synthetic oligonucleotide
ggccugccuaguaggagac

SEQ ID NO: 1036220 - RNA, 19 nt, Artificial Sequence
  Description of Artificial Sequence: Synthetic oligonucleotide
gugccccauccaugucacc

SEQ ID NO: 1036221 - RNA, 19 nt, Artificial Sequence
  Description of Artificial Sequence: Synthetic oligonucleotide
cauccaggccugcuuuacu

SEQ ID NO: 1036222 - RNA, 19 nt, Artificial Sequence
  Description of Artificial Sequence: Synthetic oligonucleotide
acguagcuaaaggggccuu

SEQ ID NO: 1036223 - RNA, 19 nt, Artificial Sequence
  Description of Artificial Sequence: Synthetic oligonucleotide
augucaccgguggcucccu

SEQ ID NO: 1036224 - RNA, 19 nt, Artificial Sequence
  Description of Artificial Sequence: Synthetic oligonucleotide
cuuagcccucucccaggua

SEQ ID NO: 1036225 - RNA, 19 nt, Artificial Sequence
  Description of Artificial Sequence: Synthetic oligonucleotide
ggcaagcuugacucauccu

SEQ ID NO: 1036226 - RNA, 19 nt, Artificial Sequence
  Description of Artificial Sequence: Synthetic oligonucleotide
cguggaugcggacaugcaa

SEQ ID NO: 1036227 - RNA, 19 nt, Artificial Sequence
  Description of Artificial Sequence: Synthetic oligonucleotide
ccagguagguuauuauuuu

SEQ ID NO: 1036228 - RNA, 19 nt, Artificial Sequence
  Description of Artificial Sequence: Synthetic oligonucleotide
gaaaccccagcagguugau

SEQ ID NO: 1036229 - RNA, 19 nt, Artificial Sequence
  Description of Artificial Sequence: Synthetic oligonucleotide
gcagcacgcuggaagaacu

SEQ ID NO: 1036230 - RNA, 19 nt, Artificial Sequence
  Description of Artificial Sequence: Synthetic oligonucleotide
ccaaguucguagcaugcau

SEQ ID NO: 1036231 - RNA, 19 nt, Artificial Sequence
  Description of Artificial Sequence: Synthetic oligonucleotide
gggcggaccacaguguggu

SEQ ID NO: 1036232 - RNA, 19 nt, Artificial Sequence
  Description of Artificial Sequence: Synthetic oligonucleotide
gccuaguaggagacagcca

SEQ ID NO: 1036233 - RNA, 19 nt, Artificial Sequence
  Description of Artificial Sequence: Synthetic oligonucleotide
cggauaagcagcuuccuuu

SEQ ID NO: 1036234 - RNA, 19 nt, Artificial Sequence
  Description of Artificial Sequence: Synthetic oligonucleotide
ggaucucccucugaucuau

SEQ ID NO: 1036235 - RNA, 19 nt, Artificial Sequence
  Description of Artificial Sequence: Synthetic oligonucleotide
ggaugcggacaugcaaucu

SEQ ID NO: 1036236 - RNA, 19 nt, Artificial Sequence
  Description of Artificial Sequence: Synthetic oligonucleotide
gguggcucccugacaaacu

SEQ ID NO: 1036237 - RNA, 19 nt, Artificial Sequence
  Description of Artificial Sequence: Synthetic oligonucleotide
ggguuugcuuccggaaucu

SEQ ID NO: 1036238 - RNA, 19 nt, Artificial Sequence
  Description of Artificial Sequence: Synthetic oligonucleotide
caccgguggcucccugaca

SEQ ID NO: 1036239 - RNA, 19 nt, Artificial Sequence
  Description of Artificial Sequence: Synthetic oligonucleotide
ccucagaagaaacgcuggu

SEQ ID NO: 1036240 - RNA, 19 nt, Artificial Sequence
  Description of Artificial Sequence: Synthetic oligonucleotide
gcacugcgaccaucuggac

SEQ ID NO: 1036241 - RNA, 19 nt, Artificial Sequence
  Description of Artificial Sequence: Synthetic oligonucleotide
cguagcuaaaggggccuuc

SEQ ID NO: 1036242 - RNA, 19 nt, Artificial Sequence
  Description of Artificial Sequence: Synthetic oligonucleotide
guauggcaccaaggagcaa

SEQ ID NO: 1036243 - RNA, 19 nt, Artificial Sequence
  Description of Artificial Sequence: Synthetic oligonucleotide
gcacuuaucugaagucgau

SEQ ID NO: 1036244 - RNA, 19 nt, Artificial Sequence
  Description of Artificial Sequence: Synthetic oligonucleotide
ggggcagauuucgggcauc

SEQ ID NO: 1036245 - RNA, 19 nt, Artificial Sequence
  Description of Artificial Sequence: Synthetic oligonucleotide
gcauacggcuggacauaca

SEQ ID NO: 1036246 - RNA, 19 nt, Artificial Sequence
  Description of Artificial Sequence: Synthetic oligonucleotide
gucgcuggauccgucccuu

SEQ ID NO: 1036247 - RNA, 19 nt, Artificial Sequence
  Description of Artificial Sequence: Synthetic oligonucleotide
gcguggaugcggacaugca

SEQ ID NO: 1036248 - RNA, 19 nt, Artificial Sequence
  Description of Artificial Sequence: Synthetic oligonucleotide
cugcgaccaucuggacuca

SEQ ID NO: 1036249 - RNA, 19 nt, Artificial Sequence
  Description of Artificial Sequence: Synthetic oligonucleotide
cgcuugcauacgucaguga

SEQ ID NO: 1036250 - RNA, 19 nt, Artificial Sequence
  Description of Artificial Sequence: Synthetic oligonucleotide
cgaaugucaucauggcauu

SEQ ID NO: 1036251 - RNA, 19 nt, Artificial Sequence
  Description of Artificial Sequence: Synthetic oligonucleotide
gccugccuaguaggagaca

SEQ ID NO: 1036252 - RNA, 19 nt, Artificial Sequence
  Description of Artificial Sequence: Synthetic oligonucleotide
gcuggacauacaaguuauu

SEQ ID NO: 1036253 - RNA, 19 nt, Artificial Sequence
  Description of Artificial Sequence: Synthetic oligonucleotide
gcgaccaucuggacucauu

SEQ ID NO: 1036254 - RNA, 19 nt, Artificial Sequence
  Description of Artificial Sequence: Synthetic oligonucleotide
gaagguuccacauugcagg

SEQ ID NO: 1036255 - RNA, 19 nt, Artificial Sequence
  Description of Artificial Sequence: Synthetic oligonucleotide
aagaaacgggaguagaaac

SEQ ID NO: 1036256 - RNA, 19 nt, Artificial Sequence
  Description of Artificial Sequence: Synthetic oligonucleotide
cuuuucauggccaaucucc

SEQ ID NO: 1036257 - RNA, 19 nt, Artificial Sequence
  Description of Artificial Sequence: Synthetic oligonucleotide
agaaaguacggucagcuuc

SEQ ID NO: 1036258 - RNA, 19 nt, Artificial Sequence
  Description of Artificial Sequence: Synthetic oligonucleotide
gauguugaugguuguaagg

SEQ ID NO: 1036259 - RNA, 19 nt, Artificial Sequence
  Description of Artificial Sequence: Synthetic oligonucleotide
aaacaugcuaugcucacca

SEQ ID NO: 1036260 - RNA, 19 nt, Artificial Sequence
  Description of Artificial Sequence: Synthetic oligonucleotide
aauaacaaguuuuccucca

SEQ ID NO: 1036261 - RNA, 19 nt, Artificial Sequence
  Description of Artificial Sequence: Synthetic oligonucleotide
agggcugucgcucuugucc

SEQ ID NO: 1036262 - RNA, 19 nt, Artificial Sequence
  Description of Artificial Sequence: Synthetic oligonucleotide
aaagaaaguacggucagcu

SEQ ID NO: 1036263 - RNA, 19 nt, Artificial Sequence
  Description of Artificial Sequence: Synthetic oligonucleotide
gaagcagugucccaguugc

SEQ ID NO: 1036264 - RNA, 19 nt, Artificial Sequence
  Description of Artificial Sequence: Synthetic oligonucleotide
ggaacuuucgcacauaaug

SEQ ID NO: 1036265 - RNA, 19 nt, Artificial Sequence
  Description of Artificial Sequence: Synthetic oligonucleotide
cacauaauggagauccugg

SEQ ID NO: 1036266 - RNA, 19 nt, Artificial Sequence
  Description of Artificial Sequence: Synthetic oligonucleotide
ucgcacauaauggagaucc

SEQ ID NO: 1036267 - RNA, 19 nt, Artificial Sequence
  Description of Artificial Sequence: Synthetic oligonucleotide
aguacggucagcuucaaau

SEQ ID NO: 1036268 - RNA, 19 nt, Artificial Sequence
  Description of Artificial Sequence: Synthetic oligonucleotide
gagguaugcauccagccag

SEQ ID NO: 1036269 - RNA, 19 nt, Artificial Sequence
  Description of Artificial Sequence: Synthetic oligonucleotide
ucggaaauccucaaucagc

SEQ ID NO: 1036270 - RNA, 19 nt, Artificial Sequence
  Description of Artificial Sequence: Synthetic oligonucleotide
gaaggguuucaccucauag

SEQ ID NO: 1036271 - RNA, 19 nt, Artificial Sequence
  Description of Artificial Sequence: Synthetic oligonucleotide
uuaaguguguuucuuccac

SEQ ID NO: 1036272 - RNA, 19 nt, Artificial Sequence
  Description of Artificial Sequence: Synthetic oligonucleotide
ugaacagaaaaugcugagg

SEQ ID NO: 1036273 - RNA, 19 nt, Artificial Sequence
  Description of Artificial Sequence: Synthetic oligonucleotide
aaggguuucaccucauagu

SEQ ID NO: 1036274 - RNA, 19 nt, Artificial Sequence
  Description of Artificial Sequence: Synthetic oligonucleotide
uguucuaggaaaacaugcu

SEQ ID NO: 1036275 - RNA, 19 nt, Artificial Sequence
  Description of Artificial Sequence: Synthetic oligonucleotide
aacgggaguagaaacuggc

SEQ ID NO: 1036276 - RNA, 19 nt, Artificial Sequence
  Description of Artificial Sequence: Synthetic oligonucleotide
aacuuucgcacauaaugga

SEQ ID NO: 1036277 - RNA, 19 nt, Artificial Sequence
  Description of Artificial Sequence: Synthetic oligonucleotide
ucaaauagcuucaugucuu

SEQ ID NO: 1036278 - RNA, 19 nt, Artificial Sequence
  Description of Artificial Sequence: Synthetic oligonucleotide
aaguggcggaaauuccacc

SEQ ID NO: 1036279 - RNA, 19 nt, Artificial Sequence
  Description of Artificial Sequence: Synthetic oligonucleotide
ugaugucguagacacggcg

SEQ ID NO: 1036280 - RNA, 19 nt, Artificial Sequence
  Description of Artificial Sequence: Synthetic oligonucleotide
aaugugaccgaggucugac

SEQ ID NO: 1036281 - RNA, 19 nt, Artificial Sequence
  Description of Artificial Sequence: Synthetic oligonucleotide
uucuaggaaaacaugcuau

SEQ ID NO: 1036282 - RNA, 19 nt, Artificial Sequence
  Description of Artificial Sequence: Synthetic oligonucleotide
ggaaauuccaccaaugggc

SEQ ID NO: 1036283 - RNA, 19 nt, Artificial Sequence
  Description of Artificial Sequence: Synthetic oligonucleotide
caccauguagcuuuaagug

SEQ ID NO: 1036284 - RNA, 19 nt, Artificial Sequence
  Description of Artificial Sequence: Synthetic oligonucleotide
ugugaccgaggucugacag

SEQ ID NO: 1036285 - RNA, 19 nt, Artificial Sequence
  Description of Artificial Sequence: Synthetic oligonucleotide
gaugucaccagacuucuuc

SEQ ID NO: 1036286 - RNA, 19 nt, Artificial Sequence
  Description of Artificial Sequence: Synthetic oligonucleotide
gacccugacagcaacaaag

SEQ ID NO: 1036287 - RNA, 19 nt, Artificial Sequence
  Description of Artificial Sequence: Synthetic oligonucleotide
uucaacugccccaucacga

SEQ ID NO: 1036288 - RNA, 19 nt, Artificial Sequence
  Description of Artificial Sequence: Synthetic oligonucleotide
ugcuaugcucaccauguag

SEQ ID NO: 1036289 - RNA, 19 nt, Artificial Sequence
  Description of Artificial Sequence: Synthetic oligonucleotide
ucaccauguagcuuuaagu

SEQ ID NO: 1036290 - RNA, 19 nt, Artificial Sequence
  Description of Artificial Sequence: Synthetic oligonucleotide
cuugucgccugguaggucg

SEQ ID NO: 1036291 - RNA, 19 nt, Artificial Sequence
  Description of Artificial Sequence: Synthetic oligonucleotide
gacagagacaccguggaag

SEQ ID NO: 1036292 - RNA, 19 nt, Artificial Sequence
  Description of Artificial Sequence: Synthetic oligonucleotide
uccaccuggacuuagugaa

SEQ ID NO: 1036293 - RNA, 19 nt, Artificial Sequence
  Description of Artificial Sequence: Synthetic oligonucleotide
aaauccucaaucagcuggg

SEQ ID NO: 1036294 - RNA, 19 nt, Artificial Sequence
  Description of Artificial Sequence: Synthetic oligonucleotide
aguagaaacuggcagccca

SEQ ID NO: 1036295 - RNA, 19 nt, Artificial Sequence
  Description of Artificial Sequence: Synthetic oligonucleotide
agaaguacagauguugaug

SEQ ID NO: 1036296 - RNA, 19 nt, Artificial Sequence
  Description of Artificial Sequence: Synthetic oligonucleotide
gacccaaugauauccacca

SEQ ID NO: 1036297 - RNA, 19 nt, Artificial Sequence
  Description of Artificial Sequence: Synthetic oligonucleotide
aggagugcaaagaaaguac

SEQ ID NO: 1036298 - RNA, 19 nt, Artificial Sequence
  Description of Artificial Sequence: Synthetic oligonucleotide
auagaagggagcguaggac

SEQ ID NO: 1036299 - RNA, 19 nt, Artificial Sequence
  Description of Artificial Sequence: Synthetic oligonucleotide
gagucuguaccuuuacccc

SEQ ID NO: 1036300 - RNA, 19 nt, Artificial Sequence
  Description of Artificial Sequence: Synthetic oligonucleotide
aacaaguuuuccuccaauu

SEQ ID NO: 1036301 - RNA, 19 nt, Artificial Sequence
  Description of Artificial Sequence: Synthetic oligonucleotide
uccucaaucagcuggguau

SEQ ID NO: 1036302 - RNA, 19 nt, Artificial Sequence
  Description of Artificial Sequence: Synthetic oligonucleotide
aaugaacagcgaagguucc

SEQ ID NO: 1036303 - RNA, 19 nt, Artificial Sequence
  Description of Artificial Sequence: Synthetic oligonucleotide
uuuaaguguguuucuucca

SEQ ID NO: 1036304 - RNA, 19 nt, Artificial Sequence
  Description of Artificial Sequence: Synthetic oligonucleotide
cagucaaugaacagcgaag

SEQ ID NO: 1036305 - RNA, 19 nt, Artificial Sequence
  Description of Artificial Sequence: Synthetic oligonucleotide
aauuccaccaaugggcaga

SEQ ID NO: 1036306 - RNA, 19 nt, Artificial Sequence
  Description of Artificial Sequence: Synthetic oligonucleotide
ccaguugcaccauagaagg

SEQ ID NO: 1036307 - RNA, 19 nt, Artificial Sequence
  Description of Artificial Sequence: Synthetic oligonucleotide
uuuucauggccaaucuccu

SEQ ID NO: 1036308 - RNA, 19 nt, Artificial Sequence
  Description of Artificial Sequence: Synthetic oligonucleotide
gaaacgggaguagaaacug

SEQ ID NO: 1036309 - RNA, 19 nt, Artificial Sequence
  Description of Artificial Sequence: Synthetic oligonucleotide
gaaaacaugcuaugcucac

SEQ ID NO: 1036310 - RNA, 19 nt, Artificial Sequence
  Description of Artificial Sequence: Synthetic oligonucleotide
aagaaguacagauguugau

SEQ ID NO: 1036311 - RNA, 19 nt, Artificial Sequence
  Description of Artificial Sequence: Synthetic oligonucleotide
gaaacuggcagcccacagc

SEQ ID NO: 1036312 - RNA, 19 nt, Artificial Sequence
  Description of Artificial Sequence: Synthetic oligonucleotide
cagaaaaugcugaggacug

SEQ ID NO: 1036313 - RNA, 19 nt, Artificial Sequence
  Description of Artificial Sequence: Synthetic oligonucleotide
ggagucuguaccuuuaccc

SEQ ID NO: 1036314 - RNA, 19 nt, Artificial Sequence
  Description of Artificial Sequence: Synthetic oligonucleotide
gacugcuggagucuguacc

SEQ ID NO: 1036315 - RNA, 19 nt, Artificial Sequence
  Description of Artificial Sequence: Synthetic oligonucleotide
cuugaacagaaaaugcuga

SEQ ID NO: 1036316 - RNA, 19 nt, Artificial Sequence
  Description of Artificial Sequence: Synthetic oligonucleotide
ugccagauuuuccacuuca

SEQ ID NO: 1036317 - RNA, 19 nt, Artificial Sequence
  Description of Artificial Sequence: Synthetic oligonucleotide
gagugcaaagaaaguacgg

SEQ ID NO: 1036318 - RNA, 19 nt, Artificial Sequence
  Description of Artificial Sequence: Synthetic oligonucleotide
aacagcgaagguuccacau

SEQ ID NO: 1036319 - RNA, 19 nt, Artificial Sequence
  Description of Artificial Sequence: Synthetic oligonucleotide
uaaguguguuucuuccacc

SEQ ID NO: 1036320 - RNA, 19 nt, Artificial Sequence
  Description of Artificial Sequence: Synthetic oligonucleotide
guaggacaagaagaaacgg

SEQ ID NO: 1036321 - RNA, 19 nt, Artificial Sequence
  Description of Artificial Sequence: Synthetic oligonucleotide
agugcaaagaaaguacggu

SEQ ID NO: 1036322 - RNA, 19 nt, Artificial Sequence
  Description of Artificial Sequence: Synthetic oligonucleotide
agauaucugcguuucuucu

SEQ ID NO: 1036323 - RNA, 19 nt, Artificial Sequence
  Description of Artificial Sequence: Synthetic oligonucleotide
uggagguaugcauccagcc

SEQ ID NO: 1036324 - RNA, 19 nt, Artificial Sequence
  Description of Artificial Sequence: Synthetic oligonucleotide
ugaccgaggucugacagag

SEQ ID NO: 1036325 - RNA, 19 nt, Artificial Sequence
  Description of Artificial Sequence: Synthetic oligonucleotide
acaugguuccaccuggacu

SEQ ID NO: 1036326 - RNA, 19 nt, Artificial Sequence
  Description of Artificial Sequence: Synthetic oligonucleotide
guagaugauaagccaggcc

SEQ ID NO: 1036327 - RNA, 19 nt, Artificial Sequence
  Description of Artificial Sequence: Synthetic oligonucleotide
gaugucguagacacggcgc

SEQ ID NO: 1036328 - RNA, 19 nt, Artificial Sequence
  Description of Artificial Sequence: Synthetic oligonucleotide
ucccaguugcaccauagaa

SEQ ID NO: 1036329 - RNA, 19 nt, Artificial Sequence
  Description of Artificial Sequence: Synthetic oligonucleotide
acaugcuaugcucaccaug

SEQ ID NO: 1036330 - RNA, 19 nt, Artificial Sequence
  Description of Artificial Sequence: Synthetic oligonucleotide
uguaugccagauuuuccac

SEQ ID NO: 1036331 - RNA, 19 nt, Artificial Sequence
  Description of Artificial Sequence: Synthetic oligonucleotide
gaagaaguacagauguuga

SEQ ID NO: 1036332 - RNA, 19 nt, Artificial Sequence
  Description of Artificial Sequence: Synthetic oligonucleotide
ggaagaaguacagauguug

SEQ ID NO: 1036333 - RNA, 19 nt, Artificial Sequence
  Description of Artificial Sequence: Synthetic oligonucleotide
cagcuggguauucugagcc

SEQ ID NO: 1036334 - RNA, 19 nt, Artificial Sequence
  Description of Artificial Sequence: Synthetic oligonucleotide
uuucgcacauaauggagau

SEQ ID NO: 1036335 - RNA, 19 nt, Artificial Sequence
  Description of Artificial Sequence: Synthetic oligonucleotide
uggaaguggcggaaauucc

SEQ ID NO: 1036336 - RNA, 19 nt, Artificial Sequence
  Description of Artificial Sequence: Synthetic oligonucleotide
caugcuuggugcagaacgc

SEQ ID NO: 1036337 - RNA, 19 nt, Artificial Sequence
  Description of Artificial Sequence: Synthetic oligonucleotide
guacagauguugaugguug

SEQ ID NO: 1036338 - RNA, 19 nt, Artificial Sequence
  Description of Artificial Sequence: Synthetic oligonucleotide
ucauugauggagguaugca

SEQ ID NO: 1036339 - RNA, 19 nt, Artificial Sequence
  Description of Artificial Sequence: Synthetic oligonucleotide
aaacgggaguagaaacugg

SEQ ID NO: 1036340 - RNA, 19 nt, Artificial Sequence
  Description of Artificial Sequence: Synthetic oligonucleotide
cagggacccaaugauaucc

SEQ ID NO: 1036341 - RNA, 19 nt, Artificial Sequence
  Description of Artificial Sequence: Synthetic oligonucleotide
guagacacggcgcucgaug

SEQ ID NO: 1036342 - RNA, 19 nt, Artificial Sequence
  Description of Artificial Sequence: Synthetic oligonucleotide
aaguacagauguugauggu

SEQ ID NO: 1036343 - RNA, 19 nt, Artificial Sequence
  Description of Artificial Sequence: Synthetic oligonucleotide
cauggccuagaucauguug

SEQ ID NO: 1036344 - RNA, 19 nt, Artificial Sequence
  Description of Artificial Sequence: Synthetic oligonucleotide
agaaacuggcagcccacag

SEQ ID NO: 1036345 - RNA, 19 nt, Artificial Sequence
  Description of Artificial Sequence: Synthetic oligonucleotide
ugcccagcggcugaugucg

SEQ ID NO: 1036346 - RNA, 19 nt, Artificial Sequence
  Description of Artificial Sequence: Synthetic oligonucleotide
cuuucgcacauaauggaga

SEQ ID NO: 1036347 - RNA, 19 nt, Artificial Sequence
  Description of Artificial Sequence: Synthetic oligonucleotide
acaagaagaaacgggagua

SEQ ID NO: 1036348 - RNA, 19 nt, Artificial Sequence
  Description of Artificial Sequence: Synthetic oligonucleotide
gaaagcauccguggcgucc

SEQ ID NO: 1036349 - RNA, 19 nt, Artificial Sequence
  Description of Artificial Sequence: Synthetic oligonucleotide
acuuucgcacauaauggag

SEQ ID NO: 1036350 - RNA, 19 nt, Artificial Sequence
  Description of Artificial Sequence: Synthetic oligonucleotide
ugauaagccaggccagcaa

SEQ ID NO: 1036351 - RNA, 19 nt, Artificial Sequence
  Description of Artificial Sequence: Synthetic oligonucleotide
ugaacagcgaagguuccac

SEQ ID NO: 1036352 - RNA, 19 nt, Artificial Sequence
  Description of Artificial Sequence: Synthetic oligonucleotide
cucggugcuuuucauggcc

SEQ ID NO: 1036353 - RNA, 19 nt, Artificial Sequence
  Description of Artificial Sequence: Synthetic oligonucleotide
auggagguaugcauccagc

SEQ ID NO: 1036354 - RNA, 19 nt, Artificial Sequence
  Description of Artificial Sequence: Synthetic oligonucleotide
uaucuggggucuuccuccg

SEQ ID NO: 1036355 - RNA, 19 nt, Artificial Sequence
  Description of Artificial Sequence: Synthetic oligonucleotide
gcggaaauuccaccaaugg

SEQ ID NO: 1036356 - RNA, 19 nt, Artificial Sequence
  Description of Artificial Sequence: Synthetic oligonucleotide
uccacauugcagguggcug

SEQ ID NO: 1036357 - RNA, 19 nt, Artificial Sequence
  Description of Artificial Sequence: Synthetic oligonucleotide
ggagugcaaagaaaguacg

SEQ ID NO: 1036358 - RNA, 19 nt, Artificial Sequence
  Description of Artificial Sequence: Synthetic oligonucleotide
aaggcgaggucgcuaucug

SEQ ID NO: 1036359 - RNA, 19 nt, Artificial Sequence
  Description of Artificial Sequence: Synthetic oligonucleotide
gaagaaacgggaguagaaa

SEQ ID NO: 1036360 - RNA, 19 nt, Artificial Sequence
  Description of Artificial Sequence: Synthetic oligonucleotide
agaaacgggaguagaaacu

SEQ ID NO: 1036361 - RNA, 19 nt, Artificial Sequence
  Description of Artificial Sequence: Synthetic oligonucleotide
gcaaagaaaguacggucag

SEQ ID NO: 1036362 - RNA, 19 nt, Artificial Sequence
  Description of Artificial Sequence: Synthetic oligonucleotide
uccccgacgccacccauag

SEQ ID NO: 1036363 - RNA, 19 nt, Artificial Sequence
  Description of Artificial Sequence: Synthetic oligonucleotide
ccauguagcuuuaagugug

SEQ ID NO: 1036364 - RNA, 19 nt, Artificial Sequence
  Description of Artificial Sequence: Synthetic oligonucleotide
caccucauaguguaggcca

SEQ ID NO: 1036365 - RNA, 19 nt, Artificial Sequence
  Description of Artificial Sequence: Synthetic oligonucleotide
auaacaaguuuuccuccaa

SEQ ID NO: 1036366 - RNA, 19 nt, Artificial Sequence
  Description of Artificial Sequence: Synthetic oligonucleotide
aaagcauccguggcguccu

SEQ ID NO: 1036367 - RNA, 19 nt, Artificial Sequence
  Description of Artificial Sequence: Synthetic oligonucleotide
cuagcucuccaaucagcag

SEQ ID NO: 1036368 - RNA, 19 nt, Artificial Sequence
  Description of Artificial Sequence: Synthetic oligonucleotide
uagacacggcgcucgauga

SEQ ID NO: 1036369 - RNA, 19 nt, Artificial Sequence
  Description of Artificial Sequence: Synthetic oligonucleotide
caucacgaacugcugggcc

SEQ ID NO: 1036370 - RNA, 19 nt, Artificial Sequence
  Description of Artificial Sequence: Synthetic oligonucleotide
agaugauaagccaggccag

SEQ ID NO: 1036371 - RNA, 19 nt, Artificial Sequence
  Description of Artificial Sequence: Synthetic oligonucleotide
aacugccccaucacgaacu

SEQ ID NO: 1036372 - RNA, 19 nt, Artificial Sequence
  Description of Artificial Sequence: Synthetic oligonucleotide
cucauaguguaggccaugc

SEQ ID NO: 1036373 - RNA, 19 nt, Artificial Sequence
  Description of Artificial Sequence: Synthetic oligonucleotide
aagggagcguaggacaaga

SEQ ID NO: 1036374 - RNA, 19 nt, Artificial Sequence
  Description of Artificial Sequence: Synthetic oligonucleotide
aguacagauguugaugguu

SEQ ID NO: 1036375 - RNA, 19 nt, Artificial Sequence
  Description of Artificial Sequence: Synthetic oligonucleotide
ggagcguaggacaagaaga

SEQ ID NO: 1036376 - RNA, 19 nt, Artificial Sequence
  Description of Artificial Sequence: Synthetic oligonucleotide
uacagauguugaugguugu

SEQ ID NO: 1036377 - RNA, 19 nt, Artificial Sequence
  Description of Artificial Sequence: Synthetic oligonucleotide
uggccgaugaggcggcugc

SEQ ID NO: 1036378 - RNA, 19 nt, Artificial Sequence
  Description of Artificial Sequence: Synthetic oligonucleotide
gucguagacacggcgcucg

SEQ ID NO: 1036379 - RNA, 19 nt, Artificial Sequence
  Description of Artificial Sequence: Synthetic oligonucleotide
acccauagccgcugugcac

SEQ ID NO: 1036380 - RNA, 19 nt, Artificial Sequence
  Description of Artificial Sequence: Synthetic oligonucleotide
gcuaugcucaccauguagc

SEQ ID NO: 1036381 - RNA, 19 nt, Artificial Sequence
  Description of Artificial Sequence: Synthetic oligonucleotide
aggcacaccagcauguaug

SEQ ID NO: 1036382 - RNA, 19 nt, Artificial Sequence
  Description of Artificial Sequence: Synthetic oligonucleotide
gaaguggcggaaauuccac

SEQ ID NO: 1036383 - RNA, 19 nt, Artificial Sequence
  Description of Artificial Sequence: Synthetic oligonucleotide
ucggugcuuuucauggcca

SEQ ID NO: 1036384 - RNA, 19 nt, Artificial Sequence
  Description of Artificial Sequence: Synthetic oligonucleotide
aggcagauaucugcguuuc

SEQ ID NO: 1036385 - RNA, 19 nt, Artificial Sequence
  Description of Artificial Sequence: Synthetic oligonucleotide
agacacggcgcucgaugac

SEQ ID NO: 1036386 - RNA, 19 nt, Artificial Sequence
  Description of Artificial Sequence: Synthetic oligonucleotide
gguuguaaggcagauaucu

SEQ ID NO: 1036387 - RNA, 19 nt, Artificial Sequence
  Description of Artificial Sequence: Synthetic oligonucleotide
agcaaggaugcuggacacc

SEQ ID NO: 1036388 - RNA, 19 nt, Artificial Sequence
  Description of Artificial Sequence: Synthetic oligonucleotide
cauagaagggagcguagga

SEQ ID NO: 1036389 - RNA, 19 nt, Artificial Sequence
  Description of Artificial Sequence: Synthetic oligonucleotide
cauugcagguggcugccag

SEQ ID NO: 1036390 - RNA, 19 nt, Artificial Sequence
  Description of Artificial Sequence: Synthetic oligonucleotide
gccuagaucauguugcaga

SEQ ID NO: 1036391 - RNA, 19 nt, Artificial Sequence
  Description of Artificial Sequence: Synthetic oligonucleotide
guaugcauccagccagaug

SEQ ID NO: 1036392 - RNA, 19 nt, Artificial Sequence
  Description of Artificial Sequence: Synthetic oligonucleotide
gggagcguaggacaagaag

SEQ ID NO: 1036393 - RNA, 19 nt, Artificial Sequence
  Description of Artificial Sequence: Synthetic oligonucleotide
uggcgcaaggcucggaaau

SEQ ID NO: 1036394 - RNA, 19 nt, Artificial Sequence
  Description of Artificial Sequence: Synthetic oligonucleotide
cccgacgccacccauagcc

SEQ ID NO: 1036395 - RNA, 19 nt, Artificial Sequence
  Description of Artificial Sequence: Synthetic oligonucleotide
cugccuggcgcaaggcucg

SEQ ID NO: 1036396 - RNA, 19 nt, Artificial Sequence
  Description of Artificial Sequence: Synthetic oligonucleotide
gaggucgcuaucugggguc

SEQ ID NO: 1036397 - RNA, 19 nt, Artificial Sequence
  Description of Artificial Sequence: Synthetic oligonucleotide
cuuggugcagaacgccuug

SEQ ID NO: 1036398 - RNA, 19 nt, Artificial Sequence
  Description of Artificial Sequence: Synthetic oligonucleotide
ggacuuagugaagauggag

SEQ ID NO: 1036399 - RNA, 19 nt, Artificial Sequence
  Description of Artificial Sequence: Synthetic oligonucleotide
aggcgaggucgcuaucugg

SEQ ID NO: 1036400 - RNA, 19 nt, Artificial Sequence
  Description of Artificial Sequence: Synthetic oligonucleotide
gcucuugaacagaaaaugc

SEQ ID NO: 1036401 - RNA, 19 nt, Artificial Sequence
  Description of Artificial Sequence: Synthetic oligonucleotide
ggugcagaacgccuugacc

SEQ ID NO: 1036402 - RNA, 19 nt, Artificial Sequence
  Description of Artificial Sequence: Synthetic oligonucleotide
caguugcaccauagaaggg

SEQ ID NO: 1036403 - RNA, 19 nt, Artificial Sequence
  Description of Artificial Sequence: Synthetic oligonucleotide
agcaguggcgggccaauga

SEQ ID NO: 1036404 - RNA, 19 nt, Artificial Sequence
  Description of Artificial Sequence: Synthetic oligonucleotide
uggugcagaacgccuugac

SEQ ID NO: 1036405 - RNA, 19 nt, Artificial Sequence
  Description of Artificial Sequence: Synthetic oligonucleotide
ucucggugcuuuucauggc

SEQ ID NO: 1036406 - RNA, 19 nt, Artificial Sequence
  Description of Artificial Sequence: Synthetic oligonucleotide
gcguaggacaagaagaaac

SEQ ID NO: 1036407 - RNA, 19 nt, Artificial Sequence
  Description of Artificial Sequence: Synthetic oligonucleotide
agcgaagguuccacauugc

SEQ ID NO: 1036408 - RNA, 19 nt, Artificial Sequence
  Description of Artificial Sequence: Synthetic oligonucleotide
caguggcgggccaaugagg

SEQ ID NO: 1036409 - RNA, 19 nt, Artificial Sequence
  Description of Artificial Sequence: Synthetic oligonucleotide
ugcgguaguugugccuugg

SEQ ID NO: 1036410 - RNA, 19 nt, Artificial Sequence
  Description of Artificial Sequence: Synthetic oligonucleotide
cggaaauuccaccaauggg

SEQ ID NO: 1036411 - RNA, 19 nt, Artificial Sequence
  Description of Artificial Sequence: Synthetic oligonucleotide
ccuagaucauguugcagac

SEQ ID NO: 1036412 - RNA, 19 nt, Artificial Sequence
  Description of Artificial Sequence: Synthetic oligonucleotide
uggccuagaucauguugca

SEQ ID NO: 1036413 - RNA, 19 nt, Artificial Sequence
  Description of Artificial Sequence: Synthetic oligonucleotide
agaacgccuugaccagggg

SEQ ID NO: 1036414 - RNA, 19 nt, Artificial Sequence
  Description of Artificial Sequence: Synthetic oligonucleotide
ccacuugucgccugguagg

SEQ ID NO: 1036415 - RNA, 19 nt, Artificial Sequence
  Description of Artificial Sequence: Synthetic oligonucleotide
cugaugucguagacacggc

SEQ ID NO: 1036416 - RNA, 19 nt, Artificial Sequence
  Description of Artificial Sequence: Synthetic oligonucleotide
uaguugugccuuggcauug

SEQ ID NO: 1036417 - RNA, 19 nt, Artificial Sequence
  Description of Artificial Sequence: Synthetic oligonucleotide
gccacuugucgccugguag

SEQ ID NO: 1036418 - RNA, 19 nt, Artificial Sequence
  Description of Artificial Sequence: Synthetic oligonucleotide
ggcgaggucgcuaucuggg

SEQ ID NO: 1036419 - RNA, 19 nt, Artificial Sequence
  Description of Artificial Sequence: Synthetic oligonucleotide
augauaagccaggccagca

SEQ ID NO: 1036420 - RNA, 19 nt, Artificial Sequence
  Description of Artificial Sequence: Synthetic oligonucleotide
ugguuguaaggcagauauc

SEQ ID NO: 1036421 - RNA, 19 nt, Artificial Sequence
  Description of Artificial Sequence: Synthetic oligonucleotide
gagcguaggacaagaagaa

SEQ ID NO: 1036422 - RNA, 19 nt, Artificial Sequence
  Description of Artificial Sequence: Synthetic oligonucleotide
gcagcccacagcaaguccg

SEQ ID NO: 1036423 - RNA, 19 nt, Artificial Sequence
  Description of Artificial Sequence: Synthetic oligonucleotide
agucacauccggguccuug

SEQ ID NO: 1036424 - RNA, 19 nt, Artificial Sequence
  Description of Artificial Sequence: Synthetic oligonucleotide
aucuggggucuuccuccgc

SEQ ID NO: 1036425 - RNA, 19 nt, Artificial Sequence
  Description of Artificial Sequence: Synthetic oligonucleotide
gguagaugauaagccaggc

SEQ ID NO: 1036426 - RNA, 19 nt, Artificial Sequence
  Description of Artificial Sequence: Synthetic oligonucleotide
uagaaacuggcagcccaca

SEQ ID NO: 1036427 - RNA, 19 nt, Artificial Sequence
  Description of Artificial Sequence: Synthetic oligonucleotide
uuuccacuucaaaguucac

SEQ ID NO: 1036428 - RNA, 19 nt, Artificial Sequence
  Description of Artificial Sequence: Synthetic oligonucleotide
aggcguggaaagcauccgu

SEQ ID NO: 1036429 - RNA, 19 nt, Artificial Sequence
  Description of Artificial Sequence: Synthetic oligonucleotide
gaacagcgaagguuccaca

SEQ ID NO: 1036430 - RNA, 19 nt, Artificial Sequence
  Description of Artificial Sequence: Synthetic oligonucleotide
uggggcuagcucuccaauc

SEQ ID NO: 1036431 - RNA, 19 nt, Artificial Sequence
  Description of Artificial Sequence: Synthetic oligonucleotide
acagcgaagguuccacauu

SEQ ID NO: 1036432 - RNA, 19 nt, Artificial Sequence
  Description of Artificial Sequence: Synthetic oligonucleotide
ggagguaugcauccagcca

SEQ ID NO: 1036433 - RNA, 19 nt, Artificial Sequence
  Description of Artificial Sequence: Synthetic oligonucleotide
cacccugcgguaguugugc

SEQ ID NO: 1036434 - RNA, 19 nt, Artificial Sequence
  Description of Artificial Sequence: Synthetic oligonucleotide
aaguacggucagcuucaaa

SEQ ID NO: 1036435 - RNA, 19 nt, Artificial Sequence
  Description of Artificial Sequence: Synthetic oligonucleotide
gcauguaugccagauuuuc

SEQ ID NO: 1036436 - RNA, 19 nt, Artificial Sequence
  Description of Artificial Sequence: Synthetic oligonucleotide
cacauugcagguggcugcc

SEQ ID NO: 1036437 - RNA, 19 nt, Artificial Sequence
  Description of Artificial Sequence: Synthetic oligonucleotide
cagauguugaugguuguaa

SEQ ID NO: 1036438 - RNA, 19 nt, Artificial Sequence
  Description of Artificial Sequence: Synthetic oligonucleotide
cauugauggagguaugcau

SEQ ID NO: 1036439 - RNA, 19 nt, Artificial Sequence
  Description of Artificial Sequence: Synthetic oligonucleotide
ggacccaaugauauccacc

SEQ ID NO: 1036440 - RNA, 19 nt, Artificial Sequence
  Description of Artificial Sequence: Synthetic oligonucleotide
cgaagguuccacauugcag

SEQ ID NO: 1036441 - RNA, 19 nt, Artificial Sequence
  Description of Artificial Sequence: Synthetic oligonucleotide
ggggcuagcucuccaauca

SEQ ID NO: 1036442 - RNA, 19 nt, Artificial Sequence
  Description of Artificial Sequence: Synthetic oligonucleotide
agauccugguggaaggcgu

SEQ ID NO: 1036443 - RNA, 19 nt, Artificial Sequence
  Description of Artificial Sequence: Synthetic oligonucleotide
gcaguggcgggccaaugag

SEQ ID NO: 1036444 - RNA, 19 nt, Artificial Sequence
  Description of Artificial Sequence: Synthetic oligonucleotide
caggagugcaaagaaagua

SEQ ID NO: 1036445 - RNA, 19 nt, Artificial Sequence
  Description of Artificial Sequence: Synthetic oligonucleotide
ccacauugcagguggcugc

SEQ ID NO: 1036446 - RNA, 19 nt, Artificial Sequence
  Description of Artificial Sequence: Synthetic oligonucleotide
augugaccgaggucugaca

SEQ ID NO: 1036447 - RNA, 19 nt, Artificial Sequence
  Description of Artificial Sequence: Synthetic oligonucleotide
caacugccccaucacgaac

SEQ ID NO: 1036448 - RNA, 19 nt, Artificial Sequence
  Description of Artificial Sequence: Synthetic oligonucleotide
cgaggucugacagagacac

SEQ ID NO: 1036449 - RNA, 19 nt, Artificial Sequence
  Description of Artificial Sequence: Synthetic oligonucleotide
cucgaugaccagccacuug

SEQ ID NO: 1036450 - RNA, 19 nt, Artificial Sequence
  Description of Artificial Sequence: Synthetic oligonucleotide
ccaccaaugggcagagaag

SEQ ID NO: 1036451 - RNA, 19 nt, Artificial Sequence
  Description of Artificial Sequence: Synthetic oligonucleotide
ugggccgaagagguagaug

SEQ ID NO: 1036452 - RNA, 19 nt, Artificial Sequence
  Description of Artificial Sequence: Synthetic oligonucleotide
gccgcugugcacaaguccc

SEQ ID NO: 1036453 - RNA, 19 nt, Artificial Sequence
  Description of Artificial Sequence: Synthetic oligonucleotide
caggaacuuucgcacauaa

SEQ ID NO: 1036454 - RNA, 19 nt, Artificial Sequence
  Description of Artificial Sequence: Synthetic oligonucleotide
ugauauccaccagggcggu

SEQ ID NO: 1036455 - RNA, 19 nt, Artificial Sequence
  Description of Artificial Sequence: Synthetic oligonucleotide
ccauagaagggagcguagg

SEQ ID NO: 1036456 - RNA, 19 nt, Artificial Sequence
  Description of Artificial Sequence: Synthetic oligonucleotide
gccgugguggccgaugagg

SEQ ID NO: 1036457 - RNA, 19 nt, Artificial Sequence
  Description of Artificial Sequence: Synthetic oligonucleotide
ucguagacacggcgcucga

SEQ ID NO: 1036458 - RNA, 19 nt, Artificial Sequence
  Description of Artificial Sequence: Synthetic oligonucleotide
gaugcuggacacccagccu

SEQ ID NO: 1036459 - RNA, 19 nt, Artificial Sequence
  Description of Artificial Sequence: Synthetic oligonucleotide
ggcggaaauuccaccaaug

SEQ ID NO: 1036460 - RNA, 19 nt, Artificial Sequence
  Description of Artificial Sequence: Synthetic oligonucleotide
gugaggagggcugucgcuc

SEQ ID NO: 1036461 - RNA, 19 nt, Artificial Sequence
  Description of Artificial Sequence: Synthetic oligonucleotide
gcuagcucuccaaucagca

SEQ ID NO: 1036462 - RNA, 19 nt, Artificial Sequence
  Description of Artificial Sequence: Synthetic oligonucleotide
gcuggguauucugagcccc

SEQ ID NO: 1036463 - RNA, 19 nt, Artificial Sequence
  Description of Artificial Sequence: Synthetic oligonucleotide
aggacccugacagcaacaa

SEQ ID NO: 1036464 - RNA, 19 nt, Artificial Sequence
  Description of Artificial Sequence: Synthetic oligonucleotide
acgggaguagaaacuggca

SEQ ID NO: 1036465 - RNA, 19 nt, Artificial Sequence
  Description of Artificial Sequence: Synthetic oligonucleotide
uucgcacauaauggagauc

SEQ ID NO: 1036466 - RNA, 19 nt, Artificial Sequence
  Description of Artificial Sequence: Synthetic oligonucleotide
uugucgccugguaggucgu

SEQ ID NO: 1036467 - RNA, 19 nt, Artificial Sequence
  Description of Artificial Sequence: Synthetic oligonucleotide
gugaccgaggucugacaga

SEQ ID NO: 1036468 - RNA, 19 nt, Artificial Sequence
  Description of Artificial Sequence: Synthetic oligonucleotide
gaaugugaccgaggucuga

SEQ ID NO: 1036469 - RNA, 19 nt, Artificial Sequence
  Description of Artificial Sequence: Synthetic oligonucleotide
ggcguggaaagcauccgug

SEQ ID NO: 1036470 - RNA, 19 nt, Artificial Sequence
  Description of Artificial Sequence: Synthetic oligonucleotide
agcguaggacaagaagaaa

SEQ ID NO: 1036471 - RNA, 19 nt, Artificial Sequence
  Description of Artificial Sequence: Synthetic oligonucleotide
agcggaagaugggcagggg

SEQ ID NO: 1036472 - RNA, 19 nt, Artificial Sequence
  Description of Artificial Sequence: Synthetic oligonucleotide
gucgugcuggcggaucugc

SEQ ID NO: 1036473 - RNA, 19 nt, Artificial Sequence
  Description of Artificial Sequence: Synthetic oligonucleotide
aaaguacggucagcuucaa

SEQ ID NO: 1036474 - RNA, 19 nt, Artificial Sequence
  Description of Artificial Sequence: Synthetic oligonucleotide
aguugugccuuggcauugu

SEQ ID NO: 1036475 - RNA, 19 nt, Artificial Sequence
  Description of Artificial Sequence: Synthetic oligonucleotide
cucaaucagcuggguauuc

SEQ ID NO: 1036476 - RNA, 19 nt, Artificial Sequence
  Description of Artificial Sequence: Synthetic oligonucleotide
acccaugagggugcugucu

SEQ ID NO: 1036477 - RNA, 19 nt, Artificial Sequence
  Description of Artificial Sequence: Synthetic oligonucleotide
gcgaagguuccacauugca

SEQ ID NO: 1036478 - RNA, 19 nt, Artificial Sequence
  Description of Artificial Sequence: Synthetic oligonucleotide
cugggugccgcugugccca

SEQ ID NO: 1036479 - RNA, 19 nt, Artificial Sequence
  Description of Artificial Sequence: Synthetic oligonucleotide
gggcuagcucuccaaucag

SEQ ID NO: 1036480 - RNA, 19 nt, Artificial Sequence
  Description of Artificial Sequence: Synthetic oligonucleotide
ugucguagacacggcgcuc

SEQ ID NO: 1036481 - RNA, 19 nt, Artificial Sequence
  Description of Artificial Sequence: Synthetic oligonucleotide
gugauccacacaaaccagu

SEQ ID NO: 1036482 - RNA, 19 nt, Artificial Sequence
  Description of Artificial Sequence: Synthetic oligonucleotide
cauccguggcguccuccgc

SEQ ID NO: 1036483 - RNA, 19 nt, Artificial Sequence
  Description of Artificial Sequence: Synthetic oligonucleotide
ggcuagcucuccaaucagc

SEQ ID NO: 1036484 - RNA, 19 nt, Artificial Sequence
  Description of Artificial Sequence: Synthetic oligonucleotide
gucccaguugcaccauaga

SEQ ID NO: 1036485 - RNA, 19 nt, Artificial Sequence
  Description of Artificial Sequence: Synthetic oligonucleotide
ccgugguggccgaugaggc

SEQ ID NO: 1036486 - RNA, 19 nt, Artificial Sequence
  Description of Artificial Sequence: Synthetic oligonucleotide
gguaggucgugcuggcgga

SEQ ID NO: 1036487 - RNA, 19 nt, Artificial Sequence
  Description of Artificial Sequence: Synthetic oligonucleotide
accccggaaugugaccgag

SEQ ID NO: 1036488 - RNA, 19 nt, Artificial Sequence
  Description of Artificial Sequence: Synthetic oligonucleotide
agggacccaaugauaucca

SEQ ID NO: 1036489 - RNA, 19 nt, Artificial Sequence
  Description of Artificial Sequence: Synthetic oligonucleotide
ggagauccugguggaaggc

SEQ ID NO: 1036490 - RNA, 19 nt, Artificial Sequence
  Description of Artificial Sequence: Synthetic oligonucleotide
ugagcaguggcgggccaau

SEQ ID NO: 1036491 - RNA, 19 nt, Artificial Sequence
  Description of Artificial Sequence: Synthetic oligonucleotide
cuggguauucugagcccca

SEQ ID NO: 1036492 - RNA, 19 nt, Artificial Sequence
  Description of Artificial Sequence: Synthetic oligonucleotide
uggguauucugagccccau

SEQ ID NO: 1036493 - RNA, 19 nt, Artificial Sequence
  Description of Artificial Sequence: Synthetic oligonucleotide
gggacccaaugauauccac

SEQ ID NO: 1036494 - RNA, 19 nt, Artificial Sequence
  Description of Artificial Sequence: Synthetic oligonucleotide
gucgccugguaggucgugc

SEQ ID NO: 1036495 - RNA, 19 nt, Artificial Sequence
  Description of Artificial Sequence: Synthetic oligonucleotide
augcuaugcucaccaugua

SEQ ID NO: 1036496 - RNA, 19 nt, Artificial Sequence
  Description of Artificial Sequence: Synthetic oligonucleotide
aggaacuuucgcacauaau

SEQ ID NO: 1036497 - RNA, 19 nt, Artificial Sequence
  Description of Artificial Sequence: Synthetic oligonucleotide
gaccccggaaugugaccga

SEQ ID NO: 1036498 - RNA, 19 nt, Artificial Sequence
  Description of Artificial Sequence: Synthetic oligonucleotide
gucgcuaucuggggucuuc

SEQ ID NO: 1036499 - RNA, 19 nt, Artificial Sequence
  Description of Artificial Sequence: Synthetic oligonucleotide
gcgcaaggcucggaaaucc

SEQ ID NO: 1036500 - RNA, 19 nt, Artificial Sequence
  Description of Artificial Sequence: Synthetic oligonucleotide
auguagcuuuaaguguguu

SEQ ID NO: 1036501 - RNA, 19 nt, Artificial Sequence
  Description of Artificial Sequence: Synthetic oligonucleotide
aggucgcuaucuggggucu

SEQ ID NO: 1036502 - RNA, 19 nt, Artificial Sequence
  Description of Artificial Sequence: Synthetic oligonucleotide
ccgacgccacccauagccg

SEQ ID NO: 1036503 - RNA, 19 nt, Artificial Sequence
  Description of Artificial Sequence: Synthetic oligonucleotide
gugcgggccccucccgcgg

SEQ ID NO: 1036504 - RNA, 19 nt, Artificial Sequence
  Description of Artificial Sequence: Synthetic oligonucleotide
ggccuagaucauguugcag

SEQ ID NO: 1036505 - RNA, 19 nt, Artificial Sequence
  Description of Artificial Sequence: Synthetic oligonucleotide
agccacuugucgccuggua

SEQ ID NO: 1036506 - RNA, 19 nt, Artificial Sequence
  Description of Artificial Sequence: Synthetic oligonucleotide
cugcgguaguugugccuug

SEQ ID NO: 1036507 - RNA, 19 nt, Artificial Sequence
  Description of Artificial Sequence: Synthetic oligonucleotide
cagaugucaccagacuucu

SEQ ID NO: 1036508 - RNA, 19 nt, Artificial Sequence
  Description of Artificial Sequence: Synthetic oligonucleotide
acacggcgcucgaugacca

SEQ ID NO: 1036509 - RNA, 19 nt, Artificial Sequence
  Description of Artificial Sequence: Synthetic oligonucleotide
gccagaaugagagcagcaa

SEQ ID NO: 1036510 - RNA, 19 nt, Artificial Sequence
  Description of Artificial Sequence: Synthetic oligonucleotide
ugucgccugguaggucgug

SEQ ID NO: 1036511 - RNA, 19 nt, Artificial Sequence
  Description of Artificial Sequence: Synthetic oligonucleotide
cagcacugggccugagaga

SEQ ID NO: 1036512 - RNA, 19 nt, Artificial Sequence
  Description of Artificial Sequence: Synthetic oligonucleotide
cauagccgcugugcacaag

SEQ ID NO: 1036513 - RNA, 19 nt, Artificial Sequence
  Description of Artificial Sequence: Synthetic oligonucleotide
gugacugcuggagucugua

SEQ ID NO: 1036514 - RNA, 19 nt, Artificial Sequence
  Description of Artificial Sequence: Synthetic oligonucleotide
gagcaguggcgggccaaug

SEQ ID NO: 1036515 - RNA, 19 nt, Artificial Sequence
  Description of Artificial Sequence: Synthetic oligonucleotide
gcaaggcucggaaauccuc

SEQ ID NO: 1036516 - RNA, 19 nt, Artificial Sequence
  Description of Artificial Sequence: Synthetic oligonucleotide
caccguggaaggcgagguc

SEQ ID NO: 1036517 - RNA, 19 nt, Artificial Sequence
  Description of Artificial Sequence: Synthetic oligonucleotide
gcgguaguugugccuuggc

SEQ ID NO: 1036518 - RNA, 19 nt, Artificial Sequence
  Description of Artificial Sequence: Synthetic oligonucleotide
cacggcgcucgaugaccag

SEQ ID NO: 1036519 - RNA, 19 nt, Artificial Sequence
  Description of Artificial Sequence: Synthetic oligonucleotide
ccaucacgaacugcugggc

SEQ ID NO: 1036520 - RNA, 19 nt, Artificial Sequence
  Description of Artificial Sequence: Synthetic oligonucleotide
ggguauucugagccccauc

SEQ ID NO: 1036521 - RNA, 19 nt, Artificial Sequence
  Description of Artificial Sequence: Synthetic oligonucleotide
ccauacuccacagaugacu

SEQ ID NO: 1036522 - RNA, 19 nt, Artificial Sequence
  Description of Artificial Sequence: Synthetic oligonucleotide
ggcugaugucguagacacg

SEQ ID NO: 1036523 - RNA, 19 nt, Artificial Sequence
  Description of Artificial Sequence: Synthetic oligonucleotide
cuggcgcaaggcucggaaa

SEQ ID NO: 1036524 - RNA, 19 nt, Artificial Sequence
  Description of Artificial Sequence: Synthetic oligonucleotide
ggacugaggaaagcccaca

SEQ ID NO: 1036525 - RNA, 19 nt, Artificial Sequence
  Description of Artificial Sequence: Synthetic oligonucleotide
cccauagccgcugugcaca

SEQ ID NO: 1036526 - RNA, 19 nt, Artificial Sequence
  Description of Artificial Sequence: Synthetic oligonucleotide
cagcggcugaugucguaga

SEQ ID NO: 1036527 - RNA, 19 nt, Artificial Sequence
  Description of Artificial Sequence: Synthetic oligonucleotide
ccgcugugcacaagucccc

SEQ ID NO: 1036528 - RNA, 19 nt, Artificial Sequence
  Description of Artificial Sequence: Synthetic oligonucleotide
ggaaagcauccguggcguc

SEQ ID NO: 1036529 - RNA, 19 nt, Artificial Sequence
  Description of Artificial Sequence: Synthetic oligonucleotide
ccggaccccggaaugugac

SEQ ID NO: 1036530 - RNA, 19 nt, Artificial Sequence
  Description of Artificial Sequence: Synthetic oligonucleotide
acgccacccauagccgcug

SEQ ID NO: 1036531 - RNA, 19 nt, Artificial Sequence
  Description of Artificial Sequence: Synthetic oligonucleotide
ccugggugccgcugugccc

SEQ ID NO: 1036532 - RNA, 19 nt, Artificial Sequence
  Description of Artificial Sequence: Synthetic oligonucleotide
caggugccacggccauagg

SEQ ID NO: 1036533 - RNA, 19 nt, Artificial Sequence
  Description of Artificial Sequence: Synthetic oligonucleotide
gacgccacccauagccgcu

SEQ ID NO: 1036534 - RNA, 19 nt, Artificial Sequence
  Description of Artificial Sequence: Synthetic oligonucleotide
ccccggaaugugaccgagg

SEQ ID NO: 1036535 - RNA, 19 nt, Artificial Sequence
  Description of Artificial Sequence: Synthetic oligonucleotide
gcggcugaugucguagaca

SEQ ID NO: 1036536 - RNA, 19 nt, Artificial Sequence
  Description of Artificial Sequence: Synthetic oligonucleotide
ggcgcaaggcucggaaauc

SEQ ID NO: 1036537 - RNA, 19 nt, Artificial Sequence
  Description of Artificial Sequence: Synthetic oligonucleotide
ggugaggagggcugucgcu

SEQ ID NO: 1036538 - RNA, 19 nt, Artificial Sequence
  Description of Artificial Sequence: Synthetic oligonucleotide
ggacccugacagcaacaaa

SEQ ID NO: 1036539 - RNA, 19 nt, Artificial Sequence
  Description of Artificial Sequence: Synthetic oligonucleotide
aggaaggguuucaccucau

SEQ ID NO: 1036540 - RNA, 19 nt, Artificial Sequence
  Description of Artificial Sequence: Synthetic oligonucleotide
agggagcguaggacaagaa

SEQ ID NO: 1036541 - RNA, 19 nt, Artificial Sequence
  Description of Artificial Sequence: Synthetic oligonucleotide
uccgcgccgugguggccga

SEQ ID NO: 1036542 - RNA, 19 nt, Artificial Sequence
  Description of Artificial Sequence: Synthetic oligonucleotide
gccgaugaggcggcugccc

SEQ ID NO: 1036543 - RNA, 19 nt, Artificial Sequence
  Description of Artificial Sequence: Synthetic oligonucleotide
ccucauaguguaggccaug

SEQ ID NO: 1036544 - RNA, 19 nt, Artificial Sequence
  Description of Artificial Sequence: Synthetic oligonucleotide
ccacccugcgguaguugug

SEQ ID NO: 1036545 - RNA, 19 nt, Artificial Sequence
  Description of Artificial Sequence: Synthetic oligonucleotide
cuaugugucuggguugcuu

SEQ ID NO: 1036546 - RNA, 19 nt, Artificial Sequence
  Description of Artificial Sequence: Synthetic oligonucleotide
gccauacuccacagaugac

SEQ ID NO: 1036547 - RNA, 19 nt, Artificial Sequence
  Description of Artificial Sequence: Synthetic oligonucleotide
cccggaaugugaccgaggu

SEQ ID NO: 1036548 - RNA, 19 nt, Artificial Sequence
  Description of Artificial Sequence: Synthetic oligonucleotide
ccaaugggcagagaagccu

SEQ ID NO: 1036549 - RNA, 19 nt, Artificial Sequence
  Description of Artificial Sequence: Synthetic oligonucleotide
ggcgggccaaugaggaaga

SEQ ID NO: 1036550 - RNA, 19 nt, Artificial Sequence
  Description of Artificial Sequence: Synthetic oligonucleotide
ggguuucaccucauagugu

SEQ ID NO: 1036551 - RNA, 19 nt, Artificial Sequence
  Description of Artificial Sequence: Synthetic oligonucleotide
cacuugucgccugguaggu

SEQ ID NO: 1036552 - RNA, 19 nt, Artificial Sequence
  Description of Artificial Sequence: Synthetic oligonucleotide
gaccgaggucugacagaga

SEQ ID NO: 1036553 - RNA, 19 nt, Artificial Sequence
  Description of Artificial Sequence: Synthetic oligonucleotide
gccacccugcgguaguugu

SEQ ID NO: 1036554 - RNA, 19 nt, Artificial Sequence
  Description of Artificial Sequence: Synthetic oligonucleotide
cucccgcggccccgguccc

SEQ ID NO: 1036555 - RNA, 19 nt, Artificial Sequence
  Description of Artificial Sequence: Synthetic oligonucleotide
ccuggcgcaaggcucggaa

SEQ ID NO: 1036556 - RNA, 19 nt, Artificial Sequence
  Description of Artificial Sequence: Synthetic oligonucleotide
ccgaggucugacagagaca

SEQ ID NO: 1036557 - RNA, 19 nt, Artificial Sequence
  Description of Artificial Sequence: Synthetic oligonucleotide
ggccaaucuccuuggggau

SEQ ID NO: 1036558 - RNA, 19 nt, Artificial Sequence
  Description of Artificial Sequence: Synthetic oligonucleotide
ggcagauaucugcguuucu

SEQ ID NO: 1036559 - RNA, 19 nt, Artificial Sequence
  Description of Artificial Sequence: Synthetic oligonucleotide
cggaccccggaaugugacc

SEQ ID NO: 1036560 - RNA, 19 nt, Artificial Sequence
  Description of Artificial Sequence: Synthetic oligonucleotide
gcggugaggaaggguuuca

SEQ ID NO: 1036561 - RNA, 19 nt, Artificial Sequence
  Description of Artificial Sequence: Synthetic oligonucleotide
ggagggcugucgcucuugu

SEQ ID NO: 1036562 - RNA, 19 nt, Artificial Sequence
  Description of Artificial Sequence: Synthetic oligonucleotide
ggccgaugaggcggcugcc

SEQ ID NO: 1036563 - RNA, 19 nt, Artificial Sequence
  Description of Artificial Sequence: Synthetic oligonucleotide
cgcucgaugaccagccacu

SEQ ID NO: 1036564 - RNA, 19 nt, Artificial Sequence
  Description of Artificial Sequence: Synthetic oligonucleotide
ccgggcuccccgacgccac

SEQ ID NO: 1036565 - RNA, 19 nt, Artificial Sequence
  Description of Artificial Sequence: Synthetic oligonucleotide
cuggcccagucucggugcu

SEQ ID NO: 1036566 - RNA, 19 nt, Artificial Sequence
  Description of Artificial Sequence: Synthetic oligonucleotide
cccggaccccggaauguga

SEQ ID NO: 1036567 - RNA, 19 nt, Artificial Sequence
  Description of Artificial Sequence: Synthetic oligonucleotide
gguaugcauccagccagau

SEQ ID NO: 1036568 - RNA, 19 nt, Artificial Sequence
  Description of Artificial Sequence: Synthetic oligonucleotide
ccccggaccccggaaugug

SEQ ID NO: 1036569 - RNA, 19 nt, Artificial Sequence
  Description of Artificial Sequence: Synthetic oligonucleotide
guaggucgugcuggcggau

SEQ ID NO: 1036570 - RNA, 19 nt, Artificial Sequence
  Description of Artificial Sequence: Synthetic oligonucleotide
ccauagccgcugugcacaa

SEQ ID NO: 1036571 - RNA, 19 nt, Artificial Sequence
  Description of Artificial Sequence: Synthetic oligonucleotide
ccugcgguaguugugccuu

SEQ ID NO: 1036572 - RNA, 19 nt, Artificial Sequence
  Description of Artificial Sequence: Synthetic oligonucleotide
gccgcugugcccagcggcu

SEQ ID NO: 1036573 - RNA, 19 nt, Artificial Sequence
  Description of Artificial Sequence: Synthetic oligonucleotide
cuuccacccugguccuguu

SEQ ID NO: 1036574 - RNA, 19 nt, Artificial Sequence
  Description of Artificial Sequence: Synthetic oligonucleotide
cggccauagggcucuugaa

SEQ ID NO: 1036575 - RNA, 19 nt, Artificial Sequence
  Description of Artificial Sequence: Synthetic oligonucleotide
ccgcugugcccagcggcug

SEQ ID NO: 1036576 - RNA, 19 nt, Artificial Sequence
  Description of Artificial Sequence: Synthetic oligonucleotide
ccccgacgccacccauagc

SEQ ID NO: 1036577 - RNA, 19 nt, Artificial Sequence
  Description of Artificial Sequence: Synthetic oligonucleotide
cgccgugguggccgaugag

SEQ ID NO: 1036578 - RNA, 19 nt, Artificial Sequence
  Description of Artificial Sequence: Synthetic oligonucleotide
cgcaaggcucggaaauccu

SEQ ID NO: 1036579 - RNA, 19 nt, Artificial Sequence
  Description of Artificial Sequence: Synthetic oligonucleotide
cgcacauaauggagauccu

SEQ ID NO: 1036580 - RNA, 19 nt, Artificial Sequence
  Description of Artificial Sequence: Synthetic oligonucleotide
ccuccgcgccgugguggcc

SEQ ID NO: 1036581 - RNA, 19 nt, Artificial Sequence
  Description of Artificial Sequence: Synthetic oligonucleotide
gcgggccaaugaggaagaa

SEQ ID NO: 1036582 - RNA, 19 nt, Artificial Sequence
  Description of Artificial Sequence: Synthetic oligonucleotide
gggcggugaggaaggguuu

SEQ ID NO: 1036583 - RNA, 19 nt, Artificial Sequence
  Description of Artificial Sequence: Synthetic oligonucleotide
ccuaugugucuggguugcu

SEQ ID NO: 1036584 - RNA, 19 nt, Artificial Sequence
  Description of Artificial Sequence: Synthetic oligonucleotide
ggucgcuaucuggggucuu

SEQ ID NO: 1036585 - RNA, 19 nt, Artificial Sequence
  Description of Artificial Sequence: Synthetic oligonucleotide
cguagacacggcgcucgau

SEQ ID NO: 1036586 - RNA, 19 nt, Artificial Sequence
  Description of Artificial Sequence: Synthetic oligonucleotide
ccgcgccgugguggccgau

SEQ ID NO: 1036587 - RNA, 19 nt, Artificial Sequence
  Description of Artificial Sequence: Synthetic oligonucleotide
aaauuaaggaugguuuccc

SEQ ID NO: 1036588 - RNA, 19 nt, Artificial Sequence
  Description of Artificial Sequence: Synthetic oligonucleotide
uugcuuguggaaauuaagg

SEQ ID NO: 1036589 - RNA, 19 nt, Artificial Sequence
  Description of Artificial Sequence: Synthetic oligonucleotide
acucccauaaacucuaagg

SEQ ID NO: 1036590 - RNA, 19 nt, Artificial Sequence
  Description of Artificial Sequence: Synthetic oligonucleotide
uguuaaagagcacuuugag

SEQ ID NO: 1036591 - RNA, 19 nt, Artificial Sequence
  Description of Artificial Sequence: Synthetic oligonucleotide
aagacaaagaggaauucgg

SEQ ID NO: 1036592 - RNA, 19 nt, Artificial Sequence
  Description of Artificial Sequence: Synthetic oligonucleotide
agcuuugcgagucucuucc

SEQ ID NO: 1036593 - RNA, 19 nt, Artificial Sequence
  Description of Artificial Sequence: Synthetic oligonucleotide
caaaucauggauagugugg

SEQ ID NO: 1036594 - RNA, 19 nt, Artificial Sequence
  Description of Artificial Sequence: Synthetic oligonucleotide
uccauauugacucccauaa

SEQ ID NO: 1036595 - RNA, 19 nt, Artificial Sequence
  Description of Artificial Sequence: Synthetic oligonucleotide
cauauugacucccauaaac

SEQ ID NO: 1036596 - RNA, 19 nt, Artificial Sequence
  Description of Artificial Sequence: Synthetic oligonucleotide
uuguggaaauuaaggaugg

SEQ ID NO: 1036597 - RNA, 19 nt, Artificial Sequence
  Description of Artificial Sequence: Synthetic oligonucleotide
ucgaguaagacauccaugu

SEQ ID NO: 1036598 - RNA, 19 nt, Artificial Sequence
  Description of Artificial Sequence: Synthetic oligonucleotide
aggagauucaccguguggc

SEQ ID NO: 1036599 - RNA, 19 nt, Artificial Sequence
  Description of Artificial Sequence: Synthetic oligonucleotide
uucguguagcuccagggcg

SEQ ID NO: 1036600 - RNA, 19 nt, Artificial Sequence
  Description of Artificial Sequence: Synthetic oligonucleotide
uccgucaauacgcugagca

SEQ ID NO: 1036601 - RNA, 19 nt, Artificial Sequence
  Description of Artificial Sequence: Synthetic oligonucleotide
agcacgagauugcacaggc

SEQ ID NO: 1036602 - RNA, 19 nt, Artificial Sequence
  Description of Artificial Sequence: Synthetic oligonucleotide
agaggaauucggcagcuac

SEQ ID NO: 1036603 - RNA, 19 nt, Artificial Sequence
  Description of Artificial Sequence: Synthetic oligonucleotide
uggaaauuaaggaugguuu

SEQ ID NO: 1036604 - RNA, 19 nt, Artificial Sequence
  Description of Artificial Sequence: Synthetic oligonucleotide
auucgggauagucugcagc

SEQ ID NO: 1036605 - RNA, 19 nt, Artificial Sequence
  Description of Artificial Sequence: Synthetic oligonucleotide
cauccaaacauuugagggg

SEQ ID NO: 1036606 - RNA, 19 nt, Artificial Sequence
  Description of Artificial Sequence: Synthetic oligonucleotide
auuuccguagccuguguac

SEQ ID NO: 1036607 - RNA, 19 nt, Artificial Sequence
  Description of Artificial Sequence: Synthetic oligonucleotide
uaggauucgggauagucug

SEQ ID NO: 1036608 - RNA, 19 nt, Artificial Sequence
  Description of Artificial Sequence: Synthetic oligonucleotide
cuugacagagucaaaggug

SEQ ID NO: 1036609 - RNA, 19 nt, Artificial Sequence
  Description of Artificial Sequence: Synthetic oligonucleotide
cacccuuccagucacaggg

SEQ ID NO: 1036610 - RNA, 19 nt, Artificial Sequence
  Description of Artificial Sequence: Synthetic oligonucleotide
ccucacaucucuuagaggg

SEQ ID NO: 1036611 - RNA, 19 nt, Artificial Sequence
  Description of Artificial Sequence: Synthetic oligonucleotide
uggggaguaaagagaaagg

SEQ ID NO: 1036612 - RNA, 19 nt, Artificial Sequence
  Description of Artificial Sequence: Synthetic oligonucleotide
aaccaucacacagugccgc

SEQ ID NO: 1036613 - RNA, 19 nt, Artificial Sequence
  Description of Artificial Sequence: Synthetic oligonucleotide
agagcauaagacaaagagg

SEQ ID NO: 1036614 - RNA, 19 nt, Artificial Sequence
  Description of Artificial Sequence: Synthetic oligonucleotide
gguuggaugacucugugcc

SEQ ID NO: 1036615 - RNA, 19 nt, Artificial Sequence
  Description of Artificial Sequence: Synthetic oligonucleotide
aagacuaccacaguccuaa

SEQ ID NO: 1036616 - RNA, 19 nt, Artificial Sequence
  Description of Artificial Sequence: Synthetic oligonucleotide
gaugaaucggggcacacuc

SEQ ID NO: 1036617 - RNA, 19 nt, Artificial Sequence
  Description of Artificial Sequence: Synthetic oligonucleotide
aggaauucggcagcuaccc

SEQ ID NO: 1036618 - RNA, 19 nt, Artificial Sequence
  Description of Artificial Sequence: Synthetic oligonucleotide
agagaguaagacuaccaca

SEQ ID NO: 1036619 - RNA, 19 nt, Artificial Sequence
  Description of Artificial Sequence: Synthetic oligonucleotide
uucgggauagucugcagcc

SEQ ID NO: 1036620 - RNA, 19 nt, Artificial Sequence
  Description of Artificial Sequence: Synthetic oligonucleotide
aaucauggauagugugggg

SEQ ID NO: 1036621 - RNA, 19 nt, Artificial Sequence
  Description of Artificial Sequence: Synthetic oligonucleotide
aguuagcaggaaaaggagc

SEQ ID NO: 1036622 - RNA, 19 nt, Artificial Sequence
  Description of Artificial Sequence: Synthetic oligonucleotide
aacucuaaggauccuucgu

SEQ ID NO: 1036623 - RNA, 19 nt, Artificial Sequence
  Description of Artificial Sequence: Synthetic oligonucleotide
ucauggauaguguggggag

SEQ ID NO: 1036624 - RNA, 19 nt, Artificial Sequence
  Description of Artificial Sequence: Synthetic oligonucleotide
agacucgaguaagacaucc

SEQ ID NO: 1036625 - RNA, 19 nt, Artificial Sequence
  Description of Artificial Sequence: Synthetic oligonucleotide
uaccacaguccuaaacacg

SEQ ID NO: 1036626 - RNA, 19 nt, Artificial Sequence
  Description of Artificial Sequence: Synthetic oligonucleotide
agagacucgaguaagacau

SEQ ID NO: 1036627 - RNA, 19 nt, Artificial Sequence
  Description of Artificial Sequence: Synthetic oligonucleotide
aggcaaaucauggauagug

SEQ ID NO: 1036628 - RNA, 19 nt, Artificial Sequence
  Description of Artificial Sequence: Synthetic oligonucleotide
gauaguguggggaguaaag

SEQ ID NO: 1036629 - RNA, 19 nt, Artificial Sequence
  Description of Artificial Sequence: Synthetic oligonucleotide
accgguaaagggcagcauc

SEQ ID NO: 1036630 - RNA, 19 nt, Artificial Sequence
  Description of Artificial Sequence: Synthetic oligonucleotide
uguguacuugaugaaucgg

SEQ ID NO: 1036631 - RNA, 19 nt, Artificial Sequence
  Description of Artificial Sequence: Synthetic oligonucleotide
uccuaaacacgagaaacug

SEQ ID NO: 1036632 - RNA, 19 nt, Artificial Sequence
  Description of Artificial Sequence: Synthetic oligonucleotide
ucuguauccagguguguca

SEQ ID NO: 1036633 - RNA, 19 nt, Artificial Sequence
  Description of Artificial Sequence: Synthetic oligonucleotide
guguacuugaugaaucggg

SEQ ID NO: 1036634 - RNA, 19 nt, Artificial Sequence
  Description of Artificial Sequence: Synthetic oligonucleotide
ccuuccauaggauugggcg

SEQ ID NO: 1036635 - RNA, 19 nt, Artificial Sequence
  Description of Artificial Sequence: Synthetic oligonucleotide
auagcaggcuagugcaugg

SEQ ID NO: 1036636 - RNA, 19 nt, Artificial Sequence
  Description of Artificial Sequence: Synthetic oligonucleotide
ugugacggugacaagcccu

SEQ ID NO: 1036637 - RNA, 19 nt, Artificial Sequence
  Description of Artificial Sequence: Synthetic oligonucleotide
ucucggguuaggauucggg

SEQ ID NO: 1036638 - RNA, 19 nt, Artificial Sequence
  Description of Artificial Sequence: Synthetic oligonucleotide
aggaguguggcuucucuag

SEQ ID NO: 1036639 - RNA, 19 nt, Artificial Sequence
  Description of Artificial Sequence: Synthetic oligonucleotide
guggggaguaaagagaaag

SEQ ID NO: 1036640 - RNA, 19 nt, Artificial Sequence
  Description of Artificial Sequence: Synthetic oligonucleotide
uguucacuagcuucauggc

SEQ ID NO: 1036641 - RNA, 19 nt, Artificial Sequence
  Description of Artificial Sequence: Synthetic oligonucleotide
gaguaagacauccaugucu

SEQ ID NO: 1036642 - RNA, 19 nt, Artificial Sequence
  Description of Artificial Sequence: Synthetic oligonucleotide
ugacucugugccuggagag

SEQ ID NO: 1036643 - RNA, 19 nt, Artificial Sequence
  Description of Artificial Sequence: Synthetic oligonucleotide
gaauucggcagcuacccuc

SEQ ID NO: 1036644 - RNA, 19 nt, Artificial Sequence
  Description of Artificial Sequence: Synthetic oligonucleotide
ugucucuugggccggaagu

SEQ ID NO: 1036645 - RNA, 19 nt, Artificial Sequence
  Description of Artificial Sequence: Synthetic oligonucleotide
uagucucacacauugcauc

SEQ ID NO: 1036646 - RNA, 19 nt, Artificial Sequence
  Description of Artificial Sequence: Synthetic oligonucleotide
caaagaacuggacuucgug

SEQ ID NO: 1036647 - RNA, 19 nt, Artificial Sequence
  Description of Artificial Sequence: Synthetic oligonucleotide
ucccauaaacucuaaggau

SEQ ID NO: 1036648 - RNA, 19 nt, Artificial Sequence
  Description of Artificial Sequence: Synthetic oligonucleotide
ggcacauuccgucaauacg

SEQ ID NO: 1036649 - RNA, 19 nt, Artificial Sequence
  Description of Artificial Sequence: Synthetic oligonucleotide
gaguaaagagaaaggcucc

SEQ ID NO: 1036650 - RNA, 19 nt, Artificial Sequence
  Description of Artificial Sequence: Synthetic oligonucleotide
ugugcggucuccagcagca

SEQ ID NO: 1036651 - RNA, 19 nt, Artificial Sequence
  Description of Artificial Sequence: Synthetic oligonucleotide
ucuaggcagcaccccaagg

SEQ ID NO: 1036652 - RNA, 19 nt, Artificial Sequence
  Description of Artificial Sequence: Synthetic oligonucleotide
ucggcagcuacccucuuca

SEQ ID NO: 1036653 - RNA, 19 nt, Artificial Sequence
  Description of Artificial Sequence: Synthetic oligonucleotide
aauacgcugagcacaggug

SEQ ID NO: 1036654 - RNA, 19 nt, Artificial Sequence
  Description of Artificial Sequence: Synthetic oligonucleotide
cucccauaaacucuaagga

SEQ ID NO: 1036655 - RNA, 19 nt, Artificial Sequence
  Description of Artificial Sequence: Synthetic oligonucleotide
ggaguaaagagaaaggcuc

SEQ ID NO: 1036656 - RNA, 19 nt, Artificial Sequence
  Description of Artificial Sequence: Synthetic oligonucleotide
ugcaugcgggcacauuccg

SEQ ID NO: 1036657 - RNA, 19 nt, Artificial Sequence
  Description of Artificial Sequence: Synthetic oligonucleotide
acacucucagagcauaaga

SEQ ID NO: 1036658 - RNA, 19 nt, Artificial Sequence
  Description of Artificial Sequence: Synthetic oligonucleotide
cagagaguaagacuaccac

SEQ ID NO: 1036659 - RNA, 19 nt, Artificial Sequence
  Description of Artificial Sequence: Synthetic oligonucleotide
gagaaggacauccaaacau

SEQ ID NO: 1036660 - RNA, 19 nt, Artificial Sequence
  Description of Artificial Sequence: Synthetic oligonucleotide
cauuccgucaauacgcuga

SEQ ID NO: 1036661 - RNA, 19 nt, Artificial Sequence
  Description of Artificial Sequence: Synthetic oligonucleotide
aucuguauccagguguguc

SEQ ID NO: 1036662 - RNA, 19 nt, Artificial Sequence
  Description of Artificial Sequence: Synthetic oligonucleotide
uggggauagcuccuuuugc

SEQ ID NO: 1036663 - RNA, 19 nt, Artificial Sequence
  Description of Artificial Sequence: Synthetic oligonucleotide
cugagcacgagauugcaca

SEQ ID NO: 1036664 - RNA, 19 nt, Artificial Sequence
  Description of Artificial Sequence: Synthetic oligonucleotide
uucucuaggcagcacccca

SEQ ID NO: 1036665 - RNA, 19 nt, Artificial Sequence
  Description of Artificial Sequence: Synthetic oligonucleotide
ucuugucccaaacucuuua

SEQ ID NO: 1036666 - RNA, 19 nt, Artificial Sequence
  Description of Artificial Sequence: Synthetic oligonucleotide
gcgaagggcaguuagcagg

SEQ ID NO: 1036667 - RNA, 19 nt, Artificial Sequence
  Description of Artificial Sequence: Synthetic oligonucleotide
auuugaggggcaaguuucc

SEQ ID NO: 1036668 - RNA, 19 nt, Artificial Sequence
  Description of Artificial Sequence: Synthetic oligonucleotide
ggggauagcuccuuuugcg

SEQ ID NO: 1036669 - RNA, 19 nt, Artificial Sequence
  Description of Artificial Sequence: Synthetic oligonucleotide
ucuggcggcuggcaaauga

SEQ ID NO: 1036670 - RNA, 19 nt, Artificial Sequence
  Description of Artificial Sequence: Synthetic oligonucleotide
gagauucaccguguggccg

SEQ ID NO: 1036671 - RNA, 19 nt, Artificial Sequence
  Description of Artificial Sequence: Synthetic oligonucleotide
uaaacacgagaaacuggac

SEQ ID NO: 1036672 - RNA, 19 nt, Artificial Sequence
  Description of Artificial Sequence: Synthetic oligonucleotide
cuucguguagcuccagggc

SEQ ID NO: 1036673 - RNA, 19 nt, Artificial Sequence
  Description of Artificial Sequence: Synthetic oligonucleotide
ccauaaacucuaaggaucc

SEQ ID NO: 1036674 - RNA, 19 nt, Artificial Sequence
  Description of Artificial Sequence: Synthetic oligonucleotide
uugagagacucgaguaaga

SEQ ID NO: 1036675 - RNA, 19 nt, Artificial Sequence
  Description of Artificial Sequence: Synthetic oligonucleotide
acucgaguaagacauccau

SEQ ID NO: 1036676 - RNA, 19 nt, Artificial Sequence
  Description of Artificial Sequence: Synthetic oligonucleotide
cucgaguaagacauccaug

SEQ ID NO: 1036677 - RNA, 19 nt, Artificial Sequence
  Description of Artificial Sequence: Synthetic oligonucleotide
auugggcggcuucuccucc

SEQ ID NO: 1036678 - RNA, 19 nt, Artificial Sequence
  Description of Artificial Sequence: Synthetic oligonucleotide
auuccgucaauacgcugag

SEQ ID NO: 1036679 - RNA, 19 nt, Artificial Sequence
  Description of Artificial Sequence: Synthetic oligonucleotide
ugagagacucgaguaagac

SEQ ID NO: 1036680 - RNA, 19 nt, Artificial Sequence
  Description of Artificial Sequence: Synthetic oligonucleotide
uccucacaucucuuagagg

SEQ ID NO: 1036681 - RNA, 19 nt, Artificial Sequence
  Description of Artificial Sequence: Synthetic oligonucleotide
agacgcuucucuaggaagg

SEQ ID NO: 1036682 - RNA, 19 nt, Artificial Sequence
  Description of Artificial Sequence: Synthetic oligonucleotide
gaugguuucccagucuuca

SEQ ID NO: 1036683 - RNA, 19 nt, Artificial Sequence
  Description of Artificial Sequence: Synthetic oligonucleotide
uuccauaggauugggcggc

SEQ ID NO: 1036684 - RNA, 19 nt, Artificial Sequence
  Description of Artificial Sequence: Synthetic oligonucleotide
uugcuggcgcacaucagug

SEQ ID NO: 1036685 - RNA, 19 nt, Artificial Sequence
  Description of Artificial Sequence: Synthetic oligonucleotide
gaagugaggugaccccggg

SEQ ID NO: 1036686 - RNA, 19 nt, Artificial Sequence
  Description of Artificial Sequence: Synthetic oligonucleotide
cccauaaacucuaaggauc

SEQ ID NO: 1036687 - RNA, 19 nt, Artificial Sequence
  Description of Artificial Sequence: Synthetic oligonucleotide
agcaucugcgcugcggggc

SEQ ID NO: 1036688 - RNA, 19 nt, Artificial Sequence
  Description of Artificial Sequence: Synthetic oligonucleotide
agugcgaagggcaguuagc

SEQ ID NO: 1036689 - RNA, 19 nt, Artificial Sequence
  Description of Artificial Sequence: Synthetic oligonucleotide
accacaguccuaaacacga

SEQ ID NO: 1036690 - RNA, 19 nt, Artificial Sequence
  Description of Artificial Sequence: Synthetic oligonucleotide
gcaaaucauggauagugug

SEQ ID NO: 1036691 - RNA, 19 nt, Artificial Sequence
  Description of Artificial Sequence: Synthetic oligonucleotide
accccaaggacacgucugg

SEQ ID NO: 1036692 - RNA, 19 nt, Artificial Sequence
  Description of Artificial Sequence: Synthetic oligonucleotide
agauugcacaggcauuuga

SEQ ID NO: 1036693 - RNA, 19 nt, Artificial Sequence
  Description of Artificial Sequence: Synthetic oligonucleotide
cauuugagagacucgagua

SEQ ID NO: 1036694 - RNA, 19 nt, Artificial Sequence
  Description of Artificial Sequence: Synthetic oligonucleotide
gcacauuccgucaauacgc

SEQ ID NO: 1036695 - RNA, 19 nt, Artificial Sequence
  Description of Artificial Sequence: Synthetic oligonucleotide
aauucggcagcuacccucu

SEQ ID NO: 1036696 - RNA, 19 nt, Artificial Sequence
  Description of Artificial Sequence: Synthetic oligonucleotide
ucacagagaguaagacuac

SEQ ID NO: 1036697 - RNA, 19 nt, Artificial Sequence
  Description of Artificial Sequence: Synthetic oligonucleotide
ugcugcuagcaucugcgcu

SEQ ID NO: 1036698 - RNA, 19 nt, Artificial Sequence
  Description of Artificial Sequence: Synthetic oligonucleotide
cugaguacuggcccucggg

SEQ ID NO: 1036699 - RNA, 19 nt, Artificial Sequence
  Description of Artificial Sequence: Synthetic oligonucleotide
caugcgggcacauuccguc

SEQ ID NO: 1036700 - RNA, 19 nt, Artificial Sequence
  Description of Artificial Sequence: Synthetic oligonucleotide
ccuaaacacgagaaacugg

SEQ ID NO: 1036701 - RNA, 19 nt, Artificial Sequence
  Description of Artificial Sequence: Synthetic oligonucleotide
gucaauacgcugagcacag

SEQ ID NO: 1036702 - RNA, 19 nt, Artificial Sequence
  Description of Artificial Sequence: Synthetic oligonucleotide
auguuaaagagcacuuuga

SEQ ID NO: 1036703 - RNA, 19 nt, Artificial Sequence
  Description of Artificial Sequence: Synthetic oligonucleotide
caaccaucacacagugccg

SEQ ID NO: 1036704 - RNA, 19 nt, Artificial Sequence
  Description of Artificial Sequence: Synthetic oligonucleotide
guuaggauucgggauaguc

SEQ ID NO: 1036705 - RNA, 19 nt, Artificial Sequence
  Description of Artificial Sequence: Synthetic oligonucleotide
gggauagcuccuuuugcgg

SEQ ID NO: 1036706 - RNA, 19 nt, Artificial Sequence
  Description of Artificial Sequence: Synthetic oligonucleotide
guagccuguguacuugaug

SEQ ID NO: 1036707 - RNA, 19 nt, Artificial Sequence
  Description of Artificial Sequence: Synthetic oligonucleotide
aggugacacggugugacgg

SEQ ID NO: 1036708 - RNA, 19 nt, Artificial Sequence
  Description of Artificial Sequence: Synthetic oligonucleotide
ucggguuaggauucgggau

SEQ ID NO: 1036709 - RNA, 19 nt, Artificial Sequence
  Description of Artificial Sequence: Synthetic oligonucleotide
auaguguggggaguaaaga

SEQ ID NO: 1036710 - RNA, 19 nt, Artificial Sequence
  Description of Artificial Sequence: Synthetic oligonucleotide
guaaagagaaaggcucccc

SEQ ID NO: 1036711 - RNA, 19 nt, Artificial Sequence
  Description of Artificial Sequence: Synthetic oligonucleotide
caggcauuugagagacucg

SEQ ID NO: 1036712 - RNA, 19 nt, Artificial Sequence
  Description of Artificial Sequence: Synthetic oligonucleotide
cagggcgagaaggacaucc

SEQ ID NO: 1036713 - RNA, 19 nt, Artificial Sequence
  Description of Artificial Sequence: Synthetic oligonucleotide
ccuuuugcgguacaguccc

SEQ ID NO: 1036714 - RNA, 19 nt, Artificial Sequence
  Description of Artificial Sequence: Synthetic oligonucleotide
uggaugacucugugccugg

SEQ ID NO: 1036715 - RNA, 19 nt, Artificial Sequence
  Description of Artificial Sequence: Synthetic oligonucleotide
ugaccccggggacucaucc

SEQ ID NO: 1036716 - RNA, 19 nt, Artificial Sequence
  Description of Artificial Sequence: Synthetic oligonucleotide
uccuccacccuuccaguca

SEQ ID NO: 1036717 - RNA, 19 nt, Artificial Sequence
  Description of Artificial Sequence: Synthetic oligonucleotide
agcaggcuagugcauggag

SEQ ID NO: 1036718 - RNA, 19 nt, Artificial Sequence
  Description of Artificial Sequence: Synthetic oligonucleotide
ggggaguaaagagaaaggc

SEQ ID NO: 1036719 - RNA, 19 nt, Artificial Sequence
  Description of Artificial Sequence: Synthetic oligonucleotide
ugugccucagaaacaucaa

SEQ ID NO: 1036720 - RNA, 19 nt, Artificial Sequence
  Description of Artificial Sequence: Synthetic oligonucleotide
ugcgagucucuuccugucc

SEQ ID NO: 1036721 - RNA, 19 nt, Artificial Sequence
  Description of Artificial Sequence: Synthetic oligonucleotide
caagcuuguuucgaagcag

SEQ ID NO: 1036722 - RNA, 19 nt, Artificial Sequence
  Description of Artificial Sequence: Synthetic oligonucleotide
agccauaaggccccuggca

SEQ ID NO: 1036723 - RNA, 19 nt, Artificial Sequence
  Description of Artificial Sequence: Synthetic oligonucleotide
gauucgggauagucugcag

SEQ ID NO: 1036724 - RNA, 19 nt, Artificial Sequence
  Description of Artificial Sequence: Synthetic oligonucleotide
agauucaccguguggccgu

SEQ ID NO: 1036725 - RNA, 19 nt, Artificial Sequence
  Description of Artificial Sequence: Synthetic oligonucleotide
uuuccguagccuguguacu

SEQ ID NO: 1036726 - RNA, 19 nt, Artificial Sequence
  Description of Artificial Sequence: Synthetic oligonucleotide
ugcggggcugcugagcacg

SEQ ID NO: 1036727 - RNA, 19 nt, Artificial Sequence
  Description of Artificial Sequence: Synthetic oligonucleotide
ggcaguuagcaggaaaagg

SEQ ID NO: 1036728 - RNA, 19 nt, Artificial Sequence
  Description of Artificial Sequence: Synthetic oligonucleotide
auagcuccuuuugcgguac

SEQ ID NO: 1036729 - RNA, 19 nt, Artificial Sequence
  Description of Artificial Sequence: Synthetic oligonucleotide
cauaaggccccuggcagcc

SEQ ID NO: 1036730 - RNA, 19 nt, Artificial Sequence
  Description of Artificial Sequence: Synthetic oligonucleotide
agugccgcagaaggguccc

SEQ ID NO: 1036731 - RNA, 19 nt, Artificial Sequence
  Description of Artificial Sequence: Synthetic oligonucleotide
uuugaggggcaaguuuccc

SEQ ID NO: 1036732 - RNA, 19 nt, Artificial Sequence
  Description of Artificial Sequence: Synthetic oligonucleotide
gguacagucccacacgcuc

SEQ ID NO: 1036733 - RNA, 19 nt, Artificial Sequence
  Description of Artificial Sequence: Synthetic oligonucleotide
gcgagaaggacauccaaac

SEQ ID NO: 1036734 - RNA, 19 nt, Artificial Sequence
  Description of Artificial Sequence: Synthetic oligonucleotide
acagagaguaagacuacca

SEQ ID NO: 1036735 - RNA, 19 nt, Artificial Sequence
  Description of Artificial Sequence: Synthetic oligonucleotide
cacagagaguaagacuacc

SEQ ID NO: 1036736 - RNA, 19 nt, Artificial Sequence
  Description of Artificial Sequence: Synthetic oligonucleotide
uuuugcgguacagucccac

SEQ ID NO: 1036737 - RNA, 19 nt, Artificial Sequence
  Description of Artificial Sequence: Synthetic oligonucleotide
cagugcgaagggcaguuag

SEQ ID NO: 1036738 - RNA, 19 nt, Artificial Sequence
  Description of Artificial Sequence: Synthetic oligonucleotide
ggugcaugcgggcacauuc

SEQ ID NO: 1036739 - RNA, 19 nt, Artificial Sequence
  Description of Artificial Sequence: Synthetic oligonucleotide
ugauguuaaagagcacuuu

SEQ ID NO: 1036740 - RNA, 19 nt, Artificial Sequence
  Description of Artificial Sequence: Synthetic oligonucleotide
ucaugccuuccauaggauu

SEQ ID NO: 1036741 - RNA, 19 nt, Artificial Sequence
  Description of Artificial Sequence: Synthetic oligonucleotide
ccuucguguagcuccaggg

SEQ ID NO: 1036742 - RNA, 19 nt, Artificial Sequence
  Description of Artificial Sequence: Synthetic oligonucleotide
gcgcacaucagugcgaagg

SEQ ID NO: 1036743 - RNA, 19 nt, Artificial Sequence
  Description of Artificial Sequence: Synthetic oligonucleotide
cuggcggcuggcaaaugag

SEQ ID NO: 1036744 - RNA, 19 nt, Artificial Sequence
  Description of Artificial Sequence: Synthetic oligonucleotide
ucucuaggcagcaccccaa

SEQ ID NO: 1036745 - RNA, 19 nt, Artificial Sequence
  Description of Artificial Sequence: Synthetic oligonucleotide
agaagugaggugaccccgg

SEQ ID NO: 1036746 - RNA, 19 nt, Artificial Sequence
  Description of Artificial Sequence: Synthetic oligonucleotide
uugggccggaaguaccacc

SEQ ID NO: 1036747 - RNA, 19 nt, Artificial Sequence
  Description of Artificial Sequence: Synthetic oligonucleotide
gauugggcggcuucuccuc

SEQ ID NO: 1036748 - RNA, 19 nt, Artificial Sequence
  Description of Artificial Sequence: Synthetic oligonucleotide
ugacacggugugacgguga

SEQ ID NO: 1036749 - RNA, 19 nt, Artificial Sequence
  Description of Artificial Sequence: Synthetic oligonucleotide
ugacaagcccugcuccagu

SEQ ID NO: 1036750 - RNA, 19 nt, Artificial Sequence
  Description of Artificial Sequence: Synthetic oligonucleotide
cugcugagcacgagauugc

SEQ ID NO: 1036751 - RNA, 19 nt, Artificial Sequence
  Description of Artificial Sequence: Synthetic oligonucleotide
aggauucgggauagucugc

SEQ ID NO: 1036752 - RNA, 19 nt, Artificial Sequence
  Description of Artificial Sequence: Synthetic oligonucleotide
acauuccgucaauacgcug

SEQ ID NO: 1036753 - RNA, 19 nt, Artificial Sequence
  Description of Artificial Sequence: Synthetic oligonucleotide
guggaacuccucugugcgg

SEQ ID NO: 1036754 - RNA, 19 nt, Artificial Sequence
  Description of Artificial Sequence: Synthetic oligonucleotide
aaacaguugcuggcgcaca

SEQ ID NO: 1036755 - RNA, 19 nt, Artificial Sequence
  Description of Artificial Sequence: Synthetic oligonucleotide
ucaggccgaguccucacau

SEQ ID NO: 1036756 - RNA, 19 nt, Artificial Sequence
  Description of Artificial Sequence: Synthetic oligonucleotide
agagcugccccuccauagu

SEQ ID NO: 1036757 - RNA, 19 nt, Artificial Sequence
  Description of Artificial Sequence: Synthetic oligonucleotide
cucggguuaggauucggga

SEQ ID NO: 1036758 - RNA, 19 nt, Artificial Sequence
  Description of Artificial Sequence: Synthetic oligonucleotide
gauagcuccuuuugcggua

SEQ ID NO: 1036759 - RNA, 19 nt, Artificial Sequence
  Description of Artificial Sequence: Synthetic oligonucleotide
auugcaucuugcagagaag

SEQ ID NO: 1036760 - RNA, 19 nt, Artificial Sequence
  Description of Artificial Sequence: Synthetic oligonucleotide
ucuccuccacccuuccagu

SEQ ID NO: 1036761 - RNA, 19 nt, Artificial Sequence
  Description of Artificial Sequence: Synthetic oligonucleotide
aaggcaaaucauggauagu

SEQ ID NO: 1036762 - RNA, 19 nt, Artificial Sequence
  Description of Artificial Sequence: Synthetic oligonucleotide
auaggauugggcggcuucu

SEQ ID NO: 1036763 - RNA, 19 nt, Artificial Sequence
  Description of Artificial Sequence: Synthetic oligonucleotide
caagaagggcacugaucac

SEQ ID NO: 1036764 - RNA, 19 nt, Artificial Sequence
  Description of Artificial Sequence: Synthetic oligonucleotide
ccugaaacaguugcuggcg

SEQ ID NO: 1036765 - RNA, 19 nt, Artificial Sequence
  Description of Artificial Sequence: Synthetic oligonucleotide
ggagauucaccguguggcc

SEQ ID NO: 1036766 - RNA, 19 nt, Artificial Sequence
  Description of Artificial Sequence: Synthetic oligonucleotide
ucaauacgcugagcacagg

SEQ ID NO: 1036767 - RNA, 19 nt, Artificial Sequence
  Description of Artificial Sequence: Synthetic oligonucleotide
ucucuugggccggaaguac

SEQ ID NO: 1036768 - RNA, 19 nt, Artificial Sequence
  Description of Artificial Sequence: Synthetic oligonucleotide
aaggagccucaggucaaag

SEQ ID NO: 1036769 - RNA, 19 nt, Artificial Sequence
  Description of Artificial Sequence: Synthetic oligonucleotide
auagucucacacauugcau

SEQ ID NO: 1036770 - RNA, 19 nt, Artificial Sequence
  Description of Artificial Sequence: Synthetic oligonucleotide
ggugugacggugacaagcc

SEQ ID NO: 1036771 - RNA, 19 nt, Artificial Sequence
  Description of Artificial Sequence: Synthetic oligonucleotide
caccccaaggacacgucug

SEQ ID NO: 1036772 - RNA, 19 nt, Artificial Sequence
  Description of Artificial Sequence: Synthetic oligonucleotide
agcaaccaucacacagugc

SEQ ID NO: 1036773 - RNA, 19 nt, Artificial Sequence
  Description of Artificial Sequence: Synthetic oligonucleotide
uguggaaauuaaggauggu

SEQ ID NO: 1036774 - RNA, 19 nt, Artificial Sequence
  Description of Artificial Sequence: Synthetic oligonucleotide
cacacucucagagcauaag

SEQ ID NO: 1036775 - RNA, 19 nt, Artificial Sequence
  Description of Artificial Sequence: Synthetic oligonucleotide
uggcggcuggcaaaugagu

SEQ ID NO: 1036776 - RNA, 19 nt, Artificial Sequence
  Description of Artificial Sequence: Synthetic oligonucleotide
gaacuggacuucgugggga

SEQ ID NO: 1036777 - RNA, 19 nt, Artificial Sequence
  Description of Artificial Sequence: Synthetic oligonucleotide
cacggugugacggugacaa

SEQ ID NO: 1036778 - RNA, 19 nt, Artificial Sequence
  Description of Artificial Sequence: Synthetic oligonucleotide
gagccucaggucaaagaac

SEQ ID NO: 1036779 - RNA, 19 nt, Artificial Sequence
  Description of Artificial Sequence: Synthetic oligonucleotide
caccguguggccguggaac

SEQ ID NO: 1036780 - RNA, 19 nt, Artificial Sequence
  Description of Artificial Sequence: Synthetic oligonucleotide
uuccuggcaggacggugca

SEQ ID NO: 1036781 - RNA, 19 nt, Artificial Sequence
  Description of Artificial Sequence: Synthetic oligonucleotide
uggccguggaacuccucug

SEQ ID NO: 1036782 - RNA, 19 nt, Artificial Sequence
  Description of Artificial Sequence: Synthetic oligonucleotide
cucuaggcagcaccccaag

SEQ ID NO: 1036783 - RNA, 19 nt, Artificial Sequence
  Description of Artificial Sequence: Synthetic oligonucleotide
cugugcggucuccagcagc

SEQ ID NO: 1036784 - RNA, 19 nt, Artificial Sequence
  Description of Artificial Sequence: Synthetic oligonucleotide
ugcugagcacgagauugca

SEQ ID NO: 1036785 - RNA, 19 nt, Artificial Sequence
  Description of Artificial Sequence: Synthetic oligonucleotide
uugcgagucucuuccuguc

SEQ ID NO: 1036786 - RNA, 19 nt, Artificial Sequence
  Description of Artificial Sequence: Synthetic oligonucleotide
gugacggugacaagcccug

SEQ ID NO: 1036787 - RNA, 19 nt, Artificial Sequence
  Description of Artificial Sequence: Synthetic oligonucleotide
ugcggucucggguuaggau

SEQ ID NO: 1036788 - RNA, 19 nt, Artificial Sequence
  Description of Artificial Sequence: Synthetic oligonucleotide
acagugccgcagaaggguc

SEQ ID NO: 1036789 - RNA, 19 nt, Artificial Sequence
  Description of Artificial Sequence: Synthetic oligonucleotide
accguguggccguggaacu

SEQ ID NO: 1036790 - RNA, 19 nt, Artificial Sequence
  Description of Artificial Sequence: Synthetic oligonucleotide
agucuugucccaaacucuu

SEQ ID NO: 1036791 - RNA, 19 nt, Artificial Sequence
  Description of Artificial Sequence: Synthetic oligonucleotide
acuuugcuuguggaaauua

SEQ ID NO: 1036792 - RNA, 19 nt, Artificial Sequence
  Description of Artificial Sequence: Synthetic oligonucleotide
cacaggguugaugcuggcc

SEQ ID NO: 1036793 - RNA, 19 nt, Artificial Sequence
  Description of Artificial Sequence: Synthetic oligonucleotide
cauccccauggguuggaug

SEQ ID NO: 1036794 - RNA, 19 nt, Artificial Sequence
  Description of Artificial Sequence: Synthetic oligonucleotide
cacgagauugcacaggcau

SEQ ID NO: 1036795 - RNA, 19 nt, Artificial Sequence
  Description of Artificial Sequence: Synthetic oligonucleotide
gugacaagcccugcuccag

SEQ ID NO: 1036796 - RNA, 19 nt, Artificial Sequence
  Description of Artificial Sequence: Synthetic oligonucleotide
cugcugcuagcaucugcgc

SEQ ID NO: 1036797 - RNA, 19 nt, Artificial Sequence
  Description of Artificial Sequence: Synthetic oligonucleotide
caauacgcugagcacaggu

SEQ ID NO: 1036798 - RNA, 19 nt, Artificial Sequence
  Description of Artificial Sequence: Synthetic oligonucleotide
cagccauaaggccccuggc

SEQ ID NO: 1036799 - RNA, 19 nt, Artificial Sequence
  Description of Artificial Sequence: Synthetic oligonucleotide
cucuaaggauccuucgugu

SEQ ID NO: 1036800 - RNA, 19 nt, Artificial Sequence
  Description of Artificial Sequence: Synthetic oligonucleotide
acaccgugcagcuccugaa

SEQ ID NO: 1036801 - RNA, 19 nt, Artificial Sequence
  Description of Artificial Sequence: Synthetic oligonucleotide
ggcggacaagcuuguuucg

SEQ ID NO: 1036802 - RNA, 19 nt, Artificial Sequence
  Description of Artificial Sequence: Synthetic oligonucleotide
gcggcuggcaaaugagucc

SEQ ID NO: 1036803 - RNA, 19 nt, Artificial Sequence
  Description of Artificial Sequence: Synthetic oligonucleotide
aggauccuucguguagcuc

SEQ ID NO: 1036804 - RNA, 19 nt, Artificial Sequence
  Description of Artificial Sequence: Synthetic oligonucleotide
aaaggagccucaggucaaa

SEQ ID NO: 1036805 - RNA, 19 nt, Artificial Sequence
  Description of Artificial Sequence: Synthetic oligonucleotide
gugugacggugacaagccc

SEQ ID NO: 1036806 - RNA, 19 nt, Artificial Sequence
  Description of Artificial Sequence: Synthetic oligonucleotide
uggugcagacgcuucucua

SEQ ID NO: 1036807 - RNA, 19 nt, Artificial Sequence
  Description of Artificial Sequence: Synthetic oligonucleotide
gcacaggugccacacacuc

SEQ ID NO: 1036808 - RNA, 19 nt, Artificial Sequence
  Description of Artificial Sequence: Synthetic oligonucleotide
uuccguagccuguguacuu

SEQ ID NO: 1036809 - RNA, 19 nt, Artificial Sequence
  Description of Artificial Sequence: Synthetic oligonucleotide
caucacacagugccgcaga

SEQ ID NO: 1036810 - RNA, 19 nt, Artificial Sequence
  Description of Artificial Sequence: Synthetic oligonucleotide
gauccuucguguagcucca

SEQ ID NO: 1036811 - RNA, 19 nt, Artificial Sequence
  Description of Artificial Sequence: Synthetic oligonucleotide
gaccccggggacucauccc

SEQ ID NO: 1036812 - RNA, 19 nt, Artificial Sequence
  Description of Artificial Sequence: Synthetic oligonucleotide
gacucgaguaagacaucca

SEQ ID NO: 1036813 - RNA, 19 nt, Artificial Sequence
  Description of Artificial Sequence: Synthetic oligonucleotide
ggguuggaugacucugugc

SEQ ID NO: 1036814 - RNA, 19 nt, Artificial Sequence
  Description of Artificial Sequence: Synthetic oligonucleotide
aucagugcgaagggcaguu

SEQ ID NO: 1036815 - RNA, 19 nt, Artificial Sequence
  Description of Artificial Sequence: Synthetic oligonucleotide
ggagaccagcagcuuugcg

SEQ ID NO: 1036816 - RNA, 19 nt, Artificial Sequence
  Description of Artificial Sequence: Synthetic oligonucleotide
gggcacauuccgucaauac

SEQ ID NO: 1036817 - RNA, 19 nt, Artificial Sequence
  Description of Artificial Sequence: Synthetic oligonucleotide
caucuucagucagggucgg

SEQ ID NO: 1036818 - RNA, 19 nt, Artificial Sequence
  Description of Artificial Sequence: Synthetic oligonucleotide
agccuguguacuugaugaa

SEQ ID NO: 1036819 - RNA, 19 nt, Artificial Sequence
  Description of Artificial Sequence: Synthetic oligonucleotide
gagcaaagccgcugccauc

SEQ ID NO: 1036820 - RNA, 19 nt, Artificial Sequence
  Description of Artificial Sequence: Synthetic oligonucleotide
agcauaagacaaagaggaa

SEQ ID NO: 1036821 - RNA, 19 nt, Artificial Sequence
  Description of Artificial Sequence: Synthetic oligonucleotide
ugacucccauaaacucuaa

SEQ ID NO: 1036822 - RNA, 19 nt, Artificial Sequence
  Description of Artificial Sequence: Synthetic oligonucleotide
ggguuaggauucgggauag

SEQ ID NO: 1036823 - RNA, 19 nt, Artificial Sequence
  Description of Artificial Sequence: Synthetic oligonucleotide
gacaagcccugcuccagua

SEQ ID NO: 1036824 - RNA, 19 nt, Artificial Sequence
  Description of Artificial Sequence: Synthetic oligonucleotide
aggacggugcaugcgggca

SEQ ID NO: 1036825 - RNA, 19 nt, Artificial Sequence
  Description of Artificial Sequence: Synthetic oligonucleotide
ggugacaagcccugcucca

SEQ ID NO: 1036826 - RNA, 19 nt, Artificial Sequence
  Description of Artificial Sequence: Synthetic oligonucleotide
gggauagucugcagccagg

SEQ ID NO: 1036827 - RNA, 19 nt, Artificial Sequence
  Description of Artificial Sequence: Synthetic oligonucleotide
uggcgcacaucagugcgaa

SEQ ID NO: 1036828 - RNA, 19 nt, Artificial Sequence
  Description of Artificial Sequence: Synthetic oligonucleotide
caguccuaaacacgagaaa

SEQ ID NO: 1036829 - RNA, 19 nt, Artificial Sequence
  Description of Artificial Sequence: Synthetic oligonucleotide
gacggugacaagcccugcu

SEQ ID NO: 1036830 - RNA, 19 nt, Artificial Sequence
  Description of Artificial Sequence: Synthetic oligonucleotide
gggcaguuagcaggaaaag

SEQ ID NO: 1036831 - RNA, 19 nt, Artificial Sequence
  Description of Artificial Sequence: Synthetic oligonucleotide
gugacacggugugacggug

SEQ ID NO: 1036832 - RNA, 19 nt, Artificial Sequence
  Description of Artificial Sequence: Synthetic oligonucleotide
gucucggguuaggauucgg

SEQ ID NO: 1036833 - RNA, 19 nt, Artificial Sequence
  Description of Artificial Sequence: Synthetic oligonucleotide
ccguggaacuccucugugc

SEQ ID NO: 1036834 - RNA, 19 nt, Artificial Sequence
  Description of Artificial Sequence: Synthetic oligonucleotide
ggcuagugcauggaggcuc

SEQ ID NO: 1036835 - RNA, 19 nt, Artificial Sequence
  Description of Artificial Sequence: Synthetic oligonucleotide
cacaccgugcagcuccuga

SEQ ID NO: 1036836 - RNA, 19 nt, Artificial Sequence
  Description of Artificial Sequence: Synthetic oligonucleotide
uaggauugggcggcuucuc

SEQ ID NO: 1036837 - RNA, 19 nt, Artificial Sequence
  Description of Artificial Sequence: Synthetic oligonucleotide
ggccuuagcuucccuguac

SEQ ID NO: 1036838 - RNA, 19 nt, Artificial Sequence
  Description of Artificial Sequence: Synthetic oligonucleotide
guggccguggaacuccucu

SEQ ID NO: 1036839 - RNA, 19 nt, Artificial Sequence
  Description of Artificial Sequence: Synthetic oligonucleotide
gauucaccguguggccgug

SEQ ID NO: 1036840 - RNA, 19 nt, Artificial Sequence
  Description of Artificial Sequence: Synthetic oligonucleotide
uuccgucaauacgcugagc

SEQ ID NO: 1036841 - RNA, 19 nt, Artificial Sequence
  Description of Artificial Sequence: Synthetic oligonucleotide
acgcuccacuagccucacc

SEQ ID NO: 1036842 - RNA, 19 nt, Artificial Sequence
  Description of Artificial Sequence: Synthetic oligonucleotide
ggauucgggauagucugca

SEQ ID NO: 1036843 - RNA, 19 nt, Artificial Sequence
  Description of Artificial Sequence: Synthetic oligonucleotide
acacgagaaacuggaccaa

SEQ ID NO: 1036844 - RNA, 19 nt, Artificial Sequence
  Description of Artificial Sequence: Synthetic oligonucleotide
ugacggugacaagcccugc

SEQ ID NO: 1036845 - RNA, 19 nt, Artificial Sequence
  Description of Artificial Sequence: Synthetic oligonucleotide
agcacaggugccacacacu

SEQ ID NO: 1036846 - RNA, 19 nt, Artificial Sequence
  Description of Artificial Sequence: Synthetic oligonucleotide
acggugugacggugacaag

SEQ ID NO: 1036847 - RNA, 19 nt, Artificial Sequence
  Description of Artificial Sequence: Synthetic oligonucleotide
ggauagcuccuuuugcggu

SEQ ID NO: 1036848 - RNA, 19 nt, Artificial Sequence
  Description of Artificial Sequence: Synthetic oligonucleotide
agggucggagucagggucu

SEQ ID NO: 1036849 - RNA, 19 nt, Artificial Sequence
  Description of Artificial Sequence: Synthetic oligonucleotide
gugauguuaaagagcacuu

SEQ ID NO: 1036850 - RNA, 19 nt, Artificial Sequence
  Description of Artificial Sequence: Synthetic oligonucleotide
ccgucaauacgcugagcac

SEQ ID NO: 1036851 - RNA, 19 nt, Artificial Sequence
  Description of Artificial Sequence: Synthetic oligonucleotide
caggccgaguccucacauc

SEQ ID NO: 1036852 - RNA, 19 nt, Artificial Sequence
  Description of Artificial Sequence: Synthetic oligonucleotide
cacauuccgucaauacgcu

SEQ ID NO: 1036853 - RNA, 19 nt, Artificial Sequence
  Description of Artificial Sequence: Synthetic oligonucleotide
acagucccacacgcuccac

SEQ ID NO: 1036854 - RNA, 19 nt, Artificial Sequence
  Description of Artificial Sequence: Synthetic oligonucleotide
cggugugacggugacaagc

SEQ ID NO: 1036855 - RNA, 19 nt, Artificial Sequence
  Description of Artificial Sequence: Synthetic oligonucleotide
acgcuucucuaggaaggca

SEQ ID NO: 1036856 - RNA, 19 nt, Artificial Sequence
  Description of Artificial Sequence: Synthetic oligonucleotide
agggcgagaaggacaucca

SEQ ID NO: 1036857 - RNA, 19 nt, Artificial Sequence
  Description of Artificial Sequence: Synthetic oligonucleotide
ucguggggauagcuccuuu

SEQ ID NO: 1036858 - RNA, 19 nt, Artificial Sequence
  Description of Artificial Sequence: Synthetic oligonucleotide
cacagugccgcagaagggu

SEQ ID NO: 1036859 - RNA, 19 nt, Artificial Sequence
  Description of Artificial Sequence: Synthetic oligonucleotide
ggcggcuggcaaaugaguc

SEQ ID NO: 1036860 - RNA, 19 nt, Artificial Sequence
  Description of Artificial Sequence: Synthetic oligonucleotide
gcuccaguaaggagaccag

SEQ ID NO: 1036861 - RNA, 19 nt, Artificial Sequence
  Description of Artificial Sequence: Synthetic oligonucleotide
ccacaguccuaaacacgag

SEQ ID NO: 1036862 - RNA, 19 nt, Artificial Sequence
  Description of Artificial Sequence: Synthetic oligonucleotide
uguggccguggaacuccuc

SEQ ID NO: 1036863 - RNA, 19 nt, Artificial Sequence
  Description of Artificial Sequence: Synthetic oligonucleotide
cuggcgcacaucagugcga

SEQ ID NO: 1036864 - RNA, 19 nt, Artificial Sequence
  Description of Artificial Sequence: Synthetic oligonucleotide
cccauggguuggaugacuc

SEQ ID NO: 1036865 - RNA, 19 nt, Artificial Sequence
  Description of Artificial Sequence: Synthetic oligonucleotide
ccgcucugucucuugggcc

SEQ ID NO: 1036866 - RNA, 19 nt, Artificial Sequence
  Description of Artificial Sequence: Synthetic oligonucleotide
agacuaccacaguccuaaa

SEQ ID NO: 1036867 - RNA, 19 nt, Artificial Sequence
  Description of Artificial Sequence: Synthetic oligonucleotide
aggcuagugcauggaggcu

SEQ ID NO: 1036868 - RNA, 19 nt, Artificial Sequence
  Description of Artificial Sequence: Synthetic oligonucleotide
gccguggaacuccucugug

SEQ ID NO: 1036869 - RNA, 19 nt, Artificial Sequence
  Description of Artificial Sequence: Synthetic oligonucleotide
cuccccugcuggagaggag

SEQ ID NO: 1036870 - RNA, 19 nt, Artificial Sequence
  Description of Artificial Sequence: Synthetic oligonucleotide
augaggcggacaagcuugu

SEQ ID NO: 1036871 - RNA, 19 nt, Artificial Sequence
  Description of Artificial Sequence: Synthetic oligonucleotide
cgucaauacgcugagcaca

SEQ ID NO: 1036872 - RNA, 19 nt, Artificial Sequence
  Description of Artificial Sequence: Synthetic oligonucleotide
cgggauagucugcagccag

SEQ ID NO: 1036873 - RNA, 19 nt, Artificial Sequence
  Description of Artificial Sequence: Synthetic oligonucleotide
ggacggugcaugcgggcac

SEQ ID NO: 1036874 - RNA, 19 nt, Artificial Sequence
  Description of Artificial Sequence: Synthetic oligonucleotide
cacgagaaacuggaccaaa

SEQ ID NO: 1036875 - RNA, 19 nt, Artificial Sequence
  Description of Artificial Sequence: Synthetic oligonucleotide
cuuuugcgguacaguccca

SEQ ID NO: 1036876 - RNA, 19 nt, Artificial Sequence
  Description of Artificial Sequence: Synthetic oligonucleotide
ggcaaaucauggauagugu

SEQ ID NO: 1036877 - RNA, 19 nt, Artificial Sequence
  Description of Artificial Sequence: Synthetic oligonucleotide
ucagugcgaagggcaguua

SEQ ID NO: 1036878 - RNA, 19 nt, Artificial Sequence
  Description of Artificial Sequence: Synthetic oligonucleotide
ccaggagauucaccgugug

SEQ ID NO: 1036879 - RNA, 19 nt, Artificial Sequence
  Description of Artificial Sequence: Synthetic oligonucleotide
ccccagguaccgguaaagg

SEQ ID NO: 1036880 - RNA, 19 nt, Artificial Sequence
  Description of Artificial Sequence: Synthetic oligonucleotide
ggauugggcggcuucuccu

SEQ ID NO: 1036881 - RNA, 19 nt, Artificial Sequence
  Description of Artificial Sequence: Synthetic oligonucleotide
ggauaguguggggaguaaa

SEQ ID NO: 1036882 - RNA, 19 nt, Artificial Sequence
  Description of Artificial Sequence: Synthetic oligonucleotide
agcugcggucucggguuag

SEQ ID NO: 1036883 - RNA, 19 nt, Artificial Sequence
  Description of Artificial Sequence: Synthetic oligonucleotide
gcugagcacgagauugcac

SEQ ID NO: 1036884 - RNA, 19 nt, Artificial Sequence
  Description of Artificial Sequence: Synthetic oligonucleotide
ggugacacggugugacggu

SEQ ID NO: 1036885 - RNA, 19 nt, Artificial Sequence
  Description of Artificial Sequence: Synthetic oligonucleotide
cgaguaagacauccauguc

SEQ ID NO: 1036886 - RNA, 19 nt, Artificial Sequence
  Description of Artificial Sequence: Synthetic oligonucleotide
guccccagguaccgguaaa

SEQ ID NO: 1036887 - RNA, 19 nt, Artificial Sequence
  Description of Artificial Sequence: Synthetic oligonucleotide
acacggugugacggugaca

SEQ ID NO: 1036888 - RNA, 19 nt, Artificial Sequence
  Description of Artificial Sequence: Synthetic oligonucleotide
ggcacacucucagagcaua

SEQ ID NO: 1036889 - RNA, 19 nt, Artificial Sequence
  Description of Artificial Sequence: Synthetic oligonucleotide
ccgguaaagggcagcaucu

SEQ ID NO: 1036890 - RNA, 19 nt, Artificial Sequence
  Description of Artificial Sequence: Synthetic oligonucleotide
cgagaaggacauccaaaca

SEQ ID NO: 1036891 - RNA, 19 nt, Artificial Sequence
  Description of Artificial Sequence: Synthetic oligonucleotide
ggaacuccucugugcgguc

SEQ ID NO: 1036892 - RNA, 19 nt, Artificial Sequence
  Description of Artificial Sequence: Synthetic oligonucleotide
cugcggggcugcugagcac

SEQ ID NO: 1036893 - RNA, 19 nt, Artificial Sequence
  Description of Artificial Sequence: Synthetic oligonucleotide
ggcucuggcggcuggcaaa

SEQ ID NO: 1036894 - RNA, 19 nt, Artificial Sequence
  Description of Artificial Sequence: Synthetic oligonucleotide
cccaaggacacgucuggaa

SEQ ID NO: 1036895 - RNA, 19 nt, Artificial Sequence
  Description of Artificial Sequence: Synthetic oligonucleotide
gcggucucggguuaggauu

SEQ ID NO: 1036896 - RNA, 19 nt, Artificial Sequence
  Description of Artificial Sequence: Synthetic oligonucleotide
gcgagucucuuccuguccu

SEQ ID NO: 1036897 - RNA, 19 nt, Artificial Sequence
  Description of Artificial Sequence: Synthetic oligonucleotide
gaaggggagcaaagccgcu

SEQ ID NO: 1036898 - RNA, 19 nt, Artificial Sequence
  Description of Artificial Sequence: Synthetic oligonucleotide
ccgugcagcuccugaaaca

SEQ ID NO: 1036899 - RNA, 19 nt, Artificial Sequence
  Description of Artificial Sequence: Synthetic oligonucleotide
ggucuggugcagacgcuuc

SEQ ID NO: 1036900 - RNA, 19 nt, Artificial Sequence
  Description of Artificial Sequence: Synthetic oligonucleotide
cuguauccaggugugucau

SEQ ID NO: 1036901 - RNA, 19 nt, Artificial Sequence
  Description of Artificial Sequence: Synthetic oligonucleotide
ccucaggccgaguccucac

SEQ ID NO: 1036902 - RNA, 19 nt, Artificial Sequence
  Description of Artificial Sequence: Synthetic oligonucleotide
cacgcuccacuagccucac

SEQ ID NO: 1036903 - RNA, 19 nt, Artificial Sequence
  Description of Artificial Sequence: Synthetic oligonucleotide
ggaauucggcagcuacccu

SEQ ID NO: 1036904 - RNA, 19 nt, Artificial Sequence
  Description of Artificial Sequence: Synthetic oligonucleotide
cagucccacacgcuccacu

SEQ ID NO: 1036905 - RNA, 19 nt, Artificial Sequence
  Description of Artificial Sequence: Synthetic oligonucleotide
cagucacaggguugaugcu

SEQ ID NO: 1036906 - RNA, 19 nt, Artificial Sequence
  Description of Artificial Sequence: Synthetic oligonucleotide
ccccaccucaggccgaguc

SEQ ID NO: 1036907 - RNA, 19 nt, Artificial Sequence
  Description of Artificial Sequence: Synthetic oligonucleotide
gcgagccucugcugcuagc

SEQ ID NO: 1036908 - RNA, 19 nt, Artificial Sequence
  Description of Artificial Sequence: Synthetic oligonucleotide
ggccguggaacuccucugu

SEQ ID NO: 1036909 - RNA, 19 nt, Artificial Sequence
  Description of Artificial Sequence: Synthetic oligonucleotide
gucaugccuuccauaggau

SEQ ID NO: 1036910 - RNA, 19 nt, Artificial Sequence
  Description of Artificial Sequence: Synthetic oligonucleotide
caucugcgcugcggggcug

SEQ ID NO: 1036911 - RNA, 19 nt, Artificial Sequence
  Description of Artificial Sequence: Synthetic oligonucleotide
cuccucugugcggucucca

SEQ ID NO: 1036912 - RNA, 19 nt, Artificial Sequence
  Description of Artificial Sequence: Synthetic oligonucleotide
caucagugcgaagggcagu

SEQ ID NO: 1036913 - RNA, 19 nt, Artificial Sequence
  Description of Artificial Sequence: Synthetic oligonucleotide
gcuccuuuugcgguacagu

SEQ ID NO: 1036914 - RNA, 19 nt, Artificial Sequence
  Description of Artificial Sequence: Synthetic oligonucleotide
cucuggcggcuggcaaaug

SEQ ID NO: 1036915 - RNA, 19 nt, Artificial Sequence
  Description of Artificial Sequence: Synthetic oligonucleotide
gcacgagauugcacaggca

SEQ ID NO: 1036916 - RNA, 19 nt, Artificial Sequence
  Description of Artificial Sequence: Synthetic oligonucleotide
caggguugaugcuggccuu

SEQ ID NO: 1036917 - RNA, 19 nt, Artificial Sequence
  Description of Artificial Sequence: Synthetic oligonucleotide
cguguagcuccagggcgag

SEQ ID NO: 1036918 - RNA, 19 nt, Artificial Sequence
  Description of Artificial Sequence: Synthetic oligonucleotide
cugugccuggagaguuugu

SEQ ID NO: 1036919 - RNA, 19 nt, Artificial Sequence
  Description of Artificial Sequence: Synthetic oligonucleotide
cccaggagauucaccgugu

SEQ ID NO: 1036920 - RNA, 19 nt, Artificial Sequence
  Description of Artificial Sequence: Synthetic oligonucleotide
cagcugcggucucggguua

SEQ ID NO: 1036921 - RNA, 19 nt, Artificial Sequence
  Description of Artificial Sequence: Synthetic oligonucleotide
gccucaccaccaggcgagc

SEQ ID NO: 1036922 - RNA, 19 nt, Artificial Sequence
  Description of Artificial Sequence: Synthetic oligonucleotide
ccccagcgucaguuccagc

SEQ ID NO: 1036923 - RNA, 19 nt, Artificial Sequence
  Description of Artificial Sequence: Synthetic oligonucleotide
gcaugcgggcacauuccgu

SEQ ID NO: 1036924 - RNA, 19 nt, Artificial Sequence
  Description of Artificial Sequence: Synthetic oligonucleotide
gguuaggauucgggauagu

SEQ ID NO: 1036925 - RNA, 19 nt, Artificial Sequence
  Description of Artificial Sequence: Synthetic oligonucleotide
gcacaccgugcagcuccug

SEQ ID NO: 1036926 - RNA, 19 nt, Artificial Sequence
  Description of Artificial Sequence: Synthetic oligonucleotide
ggugaccccggggacucau

SEQ ID NO: 1036927 - RNA, 19 nt, Artificial Sequence
  Description of Artificial Sequence: Synthetic oligonucleotide
ccccggggacucaucccca

SEQ ID NO: 1036928 - RNA, 19 nt, Artificial Sequence
  Description of Artificial Sequence: Synthetic oligonucleotide
gcgggcacauuccgucaau

SEQ ID NO: 1036929 - RNA, 19 nt, Artificial Sequence
  Description of Artificial Sequence: Synthetic oligonucleotide
cguggggauagcuccuuuu

SEQ ID NO: 1036930 - RNA, 19 nt, Artificial Sequence
  Description of Artificial Sequence: Synthetic oligonucleotide
gcggggcugcugagcacga

SEQ ID NO: 1036931 - RNA, 19 nt, Artificial Sequence
  Description of Artificial Sequence: Synthetic oligonucleotide
cgguacagucccacacgcu

SEQ ID NO: 1036932 - RNA, 19 nt, Artificial Sequence
  Description of Artificial Sequence: Synthetic oligonucleotide
cguagccuguguacuugau

SEQ ID NO: 1036933 - RNA, 19 nt, Artificial Sequence
  Description of Artificial Sequence: Synthetic oligonucleotide
cccggggacucauccccau

SEQ ID NO: 1036934 - RNA, 19 nt, Artificial Sequence
  Description of Artificial Sequence: Synthetic oligonucleotide
aaaaugaggaacuagaauc

SEQ ID NO: 1036935 - RNA, 19 nt, Artificial Sequence
  Description of Artificial Sequence: Synthetic oligonucleotide
aacuauauacagcagcugc

SEQ ID NO: 1036936 - RNA, 19 nt, Artificial Sequence
  Description of Artificial Sequence: Synthetic oligonucleotide
aauaaacucagguguaggc

SEQ ID NO: 1036937 - RNA, 19 nt, Artificial Sequence
  Description of Artificial Sequence: Synthetic oligonucleotide
aagucacucgaccagaccc

SEQ ID NO: 1036938 - RNA, 19 nt, Artificial Sequence
  Description of Artificial Sequence: Synthetic oligonucleotide
auuuaugccguucaggugg

SEQ ID NO: 1036939 - RNA, 19 nt, Artificial Sequence
  Description of Artificial Sequence: Synthetic oligonucleotide
uucauuugcaaaaugagga

SEQ ID NO: 1036940 - RNA, 19 nt, Artificial Sequence
  Description of Artificial Sequence: Synthetic oligonucleotide
agauuuagcaaguacaaag

SEQ ID NO: 1036941 - RNA, 19 nt, Artificial Sequence
  Description of Artificial Sequence: Synthetic oligonucleotide
aaaucuauuguuccaaaug

SEQ ID NO: 1036942 - RNA, 19 nt, Artificial Sequence
  Description of Artificial Sequence: Synthetic oligonucleotide
aaucuauuguuccaaauga

SEQ ID NO: 1036943 - RNA, 19 nt, Artificial Sequence
  Description of Artificial Sequence: Synthetic oligonucleotide
aauucgaaaggcuugaaau

SEQ ID NO: 1036944 - RNA, 19 nt, Artificial Sequence
  Description of Artificial Sequence: Synthetic oligonucleotide
aaagcauccugcuuguaac

SEQ ID NO: 1036945 - RNA, 19 nt, Artificial Sequence
  Description of Artificial Sequence: Synthetic oligonucleotide
aaugaucacgaauuccucg

SEQ ID NO: 1036946 - RNA, 19 nt, Artificial Sequence
  Description of Artificial Sequence: Synthetic oligonucleotide
auaauuuucccuugguuac

SEQ ID NO: 1036947 - RNA, 19 nt, Artificial Sequence
  Description of Artificial Sequence: Synthetic oligonucleotide
aauggaaaggcacuguaug

SEQ ID NO: 1036948 - RNA, 19 nt, Artificial Sequence
  Description of Artificial Sequence: Synthetic oligonucleotide
gaaacaaagacagauuuag

SEQ ID NO: 1036949 - RNA, 19 nt, Artificial Sequence
  Description of Artificial Sequence: Synthetic oligonucleotide
uuucagguaacuacguugg

SEQ ID NO: 1036950 - RNA, 19 nt, Artificial Sequence
  Description of Artificial Sequence: Synthetic oligonucleotide
ugcuauaauguuaaaagcu

SEQ ID NO: 1036951 - RNA, 19 nt, Artificial Sequence
  Description of Artificial Sequence: Synthetic oligonucleotide
agauaagacacagagaauc

SEQ ID NO: 1036952 - RNA, 19 nt, Artificial Sequence
  Description of Artificial Sequence: Synthetic oligonucleotide
uuugguuuaaaugaagagc

SEQ ID NO: 1036953 - RNA, 19 nt, Artificial Sequence
  Description of Artificial Sequence: Synthetic oligonucleotide
uuuaagcucaguuacaaaa

SEQ ID NO: 1036954 - RNA, 19 nt, Artificial Sequence
  Description of Artificial Sequence: Synthetic oligonucleotide
aaccugacaaaacucauug

SEQ ID NO: 1036955 - RNA, 19 nt, Artificial Sequence
  Description of Artificial Sequence: Synthetic oligonucleotide
cauuaauuagugcagaaac

SEQ ID NO: 1036956 - RNA, 19 nt, Artificial Sequence
  Description of Artificial Sequence: Synthetic oligonucleotide
auuugcuugagggugagcc

SEQ ID NO: 1036957 - RNA, 19 nt, Artificial Sequence
  Description of Artificial Sequence: Synthetic oligonucleotide
uuuagcaaguacaaaggug

SEQ ID NO: 1036958 - RNA, 19 nt, Artificial Sequence
  Description of Artificial Sequence: Synthetic oligonucleotide
aauaugauuugguuuaaau

SEQ ID NO: 1036959 - RNA, 19 nt, Artificial Sequence
  Description of Artificial Sequence: Synthetic oligonucleotide
aaggugacuacaauuuucc

SEQ ID NO: 1036960 - RNA, 19 nt, Artificial Sequence
  Description of Artificial Sequence: Synthetic oligonucleotide
aauaccgacugugugcugc

SEQ ID NO: 1036961 - RNA, 19 nt, Artificial Sequence
  Description of Artificial Sequence: Synthetic oligonucleotide
uuaagcucaguuacaaaag

SEQ ID NO: 1036962 - RNA, 19 nt, Artificial Sequence
  Description of Artificial Sequence: Synthetic oligonucleotide
cuuaauaccgacugugugc

SEQ ID NO: 1036963 - RNA, 19 nt, Artificial Sequence
  Description of Artificial Sequence: Synthetic oligonucleotide
ugugcauuaauuagugcag

SEQ ID NO: 1036964 - RNA, 19 nt, Artificial Sequence
  Description of Artificial Sequence: Synthetic oligonucleotide
ugaacacucaauuuaugcc

SEQ ID NO: 1036965 - RNA, 19 nt, Artificial Sequence
  Description of Artificial Sequence: Synthetic oligonucleotide
agugauugcaggccaaggc

SEQ ID NO: 1036966 - RNA, 19 nt, Artificial Sequence
  Description of Artificial Sequence: Synthetic oligonucleotide
gauuuagcaaguacaaagg

SEQ ID NO: 1036967 - RNA, 19 nt, Artificial Sequence
  Description of Artificial Sequence: Synthetic oligonucleotide
gauucuugcgcagaggugg

SEQ ID NO: 1036968 - RNA, 19 nt, Artificial Sequence
  Description of Artificial Sequence: Synthetic oligonucleotide
ucuauuguuccaaaugacu

SEQ ID NO: 1036969 - RNA, 19 nt, Artificial Sequence
  Description of Artificial Sequence: Synthetic oligonucleotide
aauaaauggaaaggcacug

SEQ ID NO: 1036970 - RNA, 19 nt, Artificial Sequence
  Description of Artificial Sequence: Synthetic oligonucleotide
cuugucugcagaaagcuag

SEQ ID NO: 1036971 - RNA, 19 nt, Artificial Sequence
  Description of Artificial Sequence: Synthetic oligonucleotide
aaagucacucgaccagacc

SEQ ID NO: 1036972 - RNA, 19 nt, Artificial Sequence
  Description of Artificial Sequence: Synthetic oligonucleotide
auucgaaaggcuugaaauc

SEQ ID NO: 1036973 - RNA, 19 nt, Artificial Sequence
  Description of Artificial Sequence: Synthetic oligonucleotide
acaaaagcagcgcugacug

SEQ ID NO: 1036974 - RNA, 19 nt, Artificial Sequence
  Description of Artificial Sequence: Synthetic oligonucleotide
uugguuacaaauacuuuga

SEQ ID NO: 1036975 - RNA, 19 nt, Artificial Sequence
  Description of Artificial Sequence: Synthetic oligonucleotide
cucauugugcauuaauuag

SEQ ID NO: 1036976 - RNA, 19 nt, Artificial Sequence
  Description of Artificial Sequence: Synthetic oligonucleotide
uugcuauaauguuaaaagc

SEQ ID NO: 1036977 - RNA, 19 nt, Artificial Sequence
  Description of Artificial Sequence: Synthetic oligonucleotide
cugaacacucaauuuaugc

SEQ ID NO: 1036978 - RNA, 19 nt, Artificial Sequence
  Description of Artificial Sequence: Synthetic oligonucleotide
aaaggugacuacaauuuuc

SEQ ID NO: 1036979 - RNA, 19 nt, Artificial Sequence
  Description of Artificial Sequence: Synthetic oligonucleotide
acuaugaaauaugauuugg

SEQ ID NO: 1036980 - RNA, 19 nt, Artificial Sequence
  Description of Artificial Sequence: Synthetic oligonucleotide
ugcaacauaagaaggugca

SEQ ID NO: 1036981 - RNA, 19 nt, Artificial Sequence
  Description of Artificial Sequence: Synthetic oligonucleotide
aaaacuguuuuaaggagug

SEQ ID NO: 1036982 - RNA, 19 nt, Artificial Sequence
  Description of Artificial Sequence: Synthetic oligonucleotide
aaacccgcgcaucaccacc

SEQ ID NO: 1036983 - RNA, 19 nt, Artificial Sequence
  Description of Artificial Sequence: Synthetic oligonucleotide
ucaauuuaugccguucagg

SEQ ID NO: 1036984 - RNA, 19 nt, Artificial Sequence
  Description of Artificial Sequence: Synthetic oligonucleotide
ugaaccaaugaaacccgcg

SEQ ID NO: 1036985 - RNA, 19 nt, Artificial Sequence
  Description of Artificial Sequence: Synthetic oligonucleotide
cuuucagguaacuacguug

SEQ ID NO: 1036986 - RNA, 19 nt, Artificial Sequence
  Description of Artificial Sequence: Synthetic oligonucleotide
uugauuugcaacugugacc

SEQ ID NO: 1036987 - RNA, 19 nt, Artificial Sequence
  Description of Artificial Sequence: Synthetic oligonucleotide
aaaagcauccugcuuguaa

SEQ ID NO: 1036988 - RNA, 19 nt, Artificial Sequence
  Description of Artificial Sequence: Synthetic oligonucleotide
aaacagaccugaucucgac

SEQ ID NO: 1036989 - RNA, 19 nt, Artificial Sequence
  Description of Artificial Sequence: Synthetic oligonucleotide
ucgaccagacccaaugggg

SEQ ID NO: 1036990 - RNA, 19 nt, Artificial Sequence
  Description of Artificial Sequence: Synthetic oligonucleotide
ugaucucgacagaagaaag

SEQ ID NO: 1036991 - RNA, 19 nt, Artificial Sequence
  Description of Artificial Sequence: Synthetic oligonucleotide
auugaaagucacucgacca

SEQ ID NO: 1036992 - RNA, 19 nt, Artificial Sequence
  Description of Artificial Sequence: Synthetic oligonucleotide
aauuuaugccguucaggug

SEQ ID NO: 1036993 - RNA, 19 nt, Artificial Sequence
  Description of Artificial Sequence: Synthetic oligonucleotide
aaagcgcuuucauaaauaa

SEQ ID NO: 1036994 - RNA, 19 nt, Artificial Sequence
  Description of Artificial Sequence: Synthetic oligonucleotide
cuacguugguuauugaaag

SEQ ID NO: 1036995 - RNA, 19 nt, Artificial Sequence
  Description of Artificial Sequence: Synthetic oligonucleotide
uaagcucaguuacaaaaga

SEQ ID NO: 1036996 - RNA, 19 nt, Artificial Sequence
  Description of Artificial Sequence: Synthetic oligonucleotide
gaaccaaugaaacccgcgc

SEQ ID NO: 1036997 - RNA, 19 nt, Artificial Sequence
  Description of Artificial Sequence: Synthetic oligonucleotide
acagaccugaucucgacag

SEQ ID NO: 1036998 - RNA, 19 nt, Artificial Sequence
  Description of Artificial Sequence: Synthetic oligonucleotide
uuucccgucauagaaagga

SEQ ID NO: 1036999 - RNA, 19 nt, Artificial Sequence
  Description of Artificial Sequence: Synthetic oligonucleotide
uucucuaacuggaaucuca

SEQ ID NO: 1037000 - RNA, 19 nt, Artificial Sequence
  Description of Artificial Sequence: Synthetic oligonucleotide
aaaugaggaacuagaaucu

SEQ ID NO: 1037001 - RNA, 19 nt, Artificial Sequence
  Description of Artificial Sequence: Synthetic oligonucleotide
acaaagacagauuuagcaa

SEQ ID NO: 1037002 - RNA, 19 nt, Artificial Sequence
  Description of Artificial Sequence: Synthetic oligonucleotide
aaaacccuccagcguaaac

SEQ ID NO: 1037003 - RNA, 19 nt, Artificial Sequence
  Description of Artificial Sequence: Synthetic oligonucleotide
uucgaaaggcuugaaauca

SEQ ID NO: 1037004 - RNA, 19 nt, Artificial Sequence
  Description of Artificial Sequence: Synthetic oligonucleotide
ucuagauaggggucaaucu

SEQ ID NO: 1037005 - RNA, 19 nt, Artificial Sequence
  Description of Artificial Sequence: Synthetic oligonucleotide
uggcaaaugaucacgaauu

SEQ ID NO: 1037006 - RNA, 19 nt, Artificial Sequence
  Description of Artificial Sequence: Synthetic oligonucleotide
aaauucgaaaggcuugaaa

SEQ ID NO: 1037007 - RNA, 19 nt, Artificial Sequence
  Description of Artificial Sequence: Synthetic oligonucleotide
uccagcguaaacuaugaaa

SEQ ID NO: 1037008 - RNA, 19 nt, Artificial Sequence
  Description of Artificial Sequence: Synthetic oligonucleotide
aucugugucaaucccagca

SEQ ID NO: 1037009 - RNA, 19 nt, Artificial Sequence
  Description of Artificial Sequence: Synthetic oligonucleotide
gauccucuaacugagggug

SEQ ID NO: 1037010 - RNA, 19 nt, Artificial Sequence
  Description of Artificial Sequence: Synthetic oligonucleotide
cuagauaggggucaaucug

SEQ ID NO: 1037011 - RNA, 19 nt, Artificial Sequence
  Description of Artificial Sequence: Synthetic oligonucleotide
agcauugagcaucccgugc

SEQ ID NO: 1037012 - RNA, 19 nt, Artificial Sequence
  Description of Artificial Sequence: Synthetic oligonucleotide
uuauugaaagucacucgac

SEQ ID NO: 1037013 - RNA, 19 nt, Artificial Sequence
  Description of Artificial Sequence: Synthetic oligonucleotide
augaaacccgcgcaucacc

SEQ ID NO: 1037014 - RNA, 19 nt, Artificial Sequence
  Description of Artificial Sequence: Synthetic oligonucleotide
aacuacguugguuauugaa

SEQ ID NO: 1037015 - RNA, 19 nt, Artificial Sequence
  Description of Artificial Sequence: Synthetic oligonucleotide
aaugaaacccgcgcaucac

SEQ ID NO: 1037016 - RNA, 19 nt, Artificial Sequence
  Description of Artificial Sequence: Synthetic oligonucleotide
cuaacuggaaucucaguuc

SEQ ID NO: 1037017 - RNA, 19 nt, Artificial Sequence
  Description of Artificial Sequence: Synthetic oligonucleotide
auauacagcagcugcucag

SEQ ID NO: 1037018 - RNA, 19 nt, Artificial Sequence
  Description of Artificial Sequence: Synthetic oligonucleotide
uuaauaccgacugugugcu

SEQ ID NO: 1037019 - RNA, 19 nt, Artificial Sequence
  Description of Artificial Sequence: Synthetic oligonucleotide
ucagguguaggcauccugu

SEQ ID NO: 1037020 - RNA, 19 nt, Artificial Sequence
  Description of Artificial Sequence: Synthetic oligonucleotide
guaacuacguugguuauug

SEQ ID NO: 1037021 - RNA, 19 nt, Artificial Sequence
  Description of Artificial Sequence: Synthetic oligonucleotide
ucccaguggauuuuggagc

SEQ ID NO: 1037022 - RNA, 19 nt, Artificial Sequence
  Description of Artificial Sequence: Synthetic oligonucleotide
aaacucauugugcauuaau

SEQ ID NO: 1037023 - RNA, 19 nt, Artificial Sequence
  Description of Artificial Sequence: Synthetic oligonucleotide
uauugcaaggaauguaaaa

SEQ ID NO: 1037024 - RNA, 19 nt, Artificial Sequence
  Description of Artificial Sequence: Synthetic oligonucleotide
acguugguuauugaaaguc

SEQ ID NO: 1037025 - RNA, 19 nt, Artificial Sequence
  Description of Artificial Sequence: Synthetic oligonucleotide
uacaaaggugacuacaauu

SEQ ID NO: 1037026 - RNA, 19 nt, Artificial Sequence
  Description of Artificial Sequence: Synthetic oligonucleotide
aaccaaugaaacccgcgca

SEQ ID NO: 1037027 - RNA, 19 nt, Artificial Sequence
  Description of Artificial Sequence: Synthetic oligonucleotide
acuacauuugcuugagggu

SEQ ID NO: 1037028 - RNA, 19 nt, Artificial Sequence
  Description of Artificial Sequence: Synthetic oligonucleotide
aaaugaucacgaauuccuc

SEQ ID NO: 1037029 - RNA, 19 nt, Artificial Sequence
  Description of Artificial Sequence: Synthetic oligonucleotide
gguuauugaaagucacucg

SEQ ID NO: 1037030 - RNA, 19 nt, Artificial Sequence
  Description of Artificial Sequence: Synthetic oligonucleotide
aaacuucuaucaacccucc

SEQ ID NO: 1037031 - RNA, 19 nt, Artificial Sequence
  Description of Artificial Sequence: Synthetic oligonucleotide
ugguuauugaaagucacuc

SEQ ID NO: 1037032 - RNA, 19 nt, Artificial Sequence
  Description of Artificial Sequence: Synthetic oligonucleotide
acaccacuccaccaaauag

SEQ ID NO: 1037033 - RNA, 19 nt, Artificial Sequence
  Description of Artificial Sequence: Synthetic oligonucleotide
gaucucgacagaagaaagg

SEQ ID NO: 1037034 - RNA, 19 nt, Artificial Sequence
  Description of Artificial Sequence: Synthetic oligonucleotide
ucaaaucugagagaugauc

SEQ ID NO: 1037035 - RNA, 19 nt, Artificial Sequence
  Description of Artificial Sequence: Synthetic oligonucleotide
agaaucuucuagauagggg

SEQ ID NO: 1037036 - RNA, 19 nt, Artificial Sequence
  Description of Artificial Sequence: Synthetic oligonucleotide
acuggaaucucaguucuuc

SEQ ID NO: 1037037 - RNA, 19 nt, Artificial Sequence
  Description of Artificial Sequence: Synthetic oligonucleotide
uggacacauaguuuguugu

SEQ ID NO: 1037038 - RNA, 19 nt, Artificial Sequence
  Description of Artificial Sequence: Synthetic oligonucleotide
accauuucccgucauagaa

SEQ ID NO: 1037039 - RNA, 19 nt, Artificial Sequence
  Description of Artificial Sequence: Synthetic oligonucleotide
uuuaugccguucagguggg

SEQ ID NO: 1037040 - RNA, 19 nt, Artificial Sequence
  Description of Artificial Sequence: Synthetic oligonucleotide
agucagacugagugauugc

SEQ ID NO: 1037041 - RNA, 19 nt, Artificial Sequence
  Description of Artificial Sequence: Synthetic oligonucleotide
ucccgucauagaaaggaag

SEQ ID NO: 1037042 - RNA, 19 nt, Artificial Sequence
  Description of Artificial Sequence: Synthetic oligonucleotide
cauucaagauggcagccag

SEQ ID NO: 1037043 - RNA, 19 nt, Artificial Sequence
  Description of Artificial Sequence: Synthetic oligonucleotide
aaagacagauuuagcaagu

SEQ ID NO: 1037044 - RNA, 19 nt, Artificial Sequence
  Description of Artificial Sequence: Synthetic oligonucleotide
aucuauuguuccaaaugac

SEQ ID NO: 1037045 - RNA, 19 nt, Artificial Sequence
  Description of Artificial Sequence: Synthetic oligonucleotide
acuuuagaggggucucugg

SEQ ID NO: 1037046 - RNA, 19 nt, Artificial Sequence
  Description of Artificial Sequence: Synthetic oligonucleotide
aguauugcaaggaauguaa

SEQ ID NO: 1037047 - RNA, 19 nt, Artificial Sequence
  Description of Artificial Sequence: Synthetic oligonucleotide
ucuaacugagggugcuggg

SEQ ID NO: 1037048 - RNA, 19 nt, Artificial Sequence
  Description of Artificial Sequence: Synthetic oligonucleotide
auuugcuauaauguuaaaa

SEQ ID NO: 1037049 - RNA, 19 nt, Artificial Sequence
  Description of Artificial Sequence: Synthetic oligonucleotide
caacauaagaaggugcaac

SEQ ID NO: 1037050 - RNA, 19 nt, Artificial Sequence
  Description of Artificial Sequence: Synthetic oligonucleotide
agugcaacauaagaaggug

SEQ ID NO: 1037051 - RNA, 19 nt, Artificial Sequence
  Description of Artificial Sequence: Synthetic oligonucleotide
caaaugaucacgaauuccu

SEQ ID NO: 1037052 - RNA, 19 nt, Artificial Sequence
  Description of Artificial Sequence: Synthetic oligonucleotide
gcaacugcaaggaugaacc

SEQ ID NO: 1037053 - RNA, 19 nt, Artificial Sequence
  Description of Artificial Sequence: Synthetic oligonucleotide
gaaaauucgaaaggcuuga

SEQ ID NO: 1037054 - RNA, 19 nt, Artificial Sequence
  Description of Artificial Sequence: Synthetic oligonucleotide
caaauuugcuauaauguua

SEQ ID NO: 1037055 - RNA, 19 nt, Artificial Sequence
  Description of Artificial Sequence: Synthetic oligonucleotide
agcgcugacugcuuucagg

SEQ ID NO: 1037056 - RNA, 19 nt, Artificial Sequence
  Description of Artificial Sequence: Synthetic oligonucleotide
uccagggucggucccagcc

SEQ ID NO: 1037057 - RNA, 19 nt, Artificial Sequence
  Description of Artificial Sequence: Synthetic oligonucleotide
gaagucugcuggcaaauga

SEQ ID NO: 1037058 - RNA, 19 nt, Artificial Sequence
  Description of Artificial Sequence: Synthetic oligonucleotide
ugcuuaauaccgacugugu

SEQ ID NO: 1037059 - RNA, 19 nt, Artificial Sequence
  Description of Artificial Sequence: Synthetic oligonucleotide
ccaaaucagacccaagggg

SEQ ID NO: 1037060 - RNA, 19 nt, Artificial Sequence
  Description of Artificial Sequence: Synthetic oligonucleotide
acucgugucuccaggaugg

SEQ ID NO: 1037061 - RNA, 19 nt, Artificial Sequence
  Description of Artificial Sequence: Synthetic oligonucleotide
agcguaaacuaugaaauau

SEQ ID NO: 1037062 - RNA, 19 nt, Artificial Sequence
  Description of Artificial Sequence: Synthetic oligonucleotide
aacucauugugcauuaauu

SEQ ID NO: 1037063 - RNA, 19 nt, Artificial Sequence
  Description of Artificial Sequence: Synthetic oligonucleotide
augcuuaauaccgacugug

SEQ ID NO: 1037064 - RNA, 19 nt, Artificial Sequence
  Description of Artificial Sequence: Synthetic oligonucleotide
guaggcauccugucaauac

SEQ ID NO: 1037065 - RNA, 19 nt, Artificial Sequence
  Description of Artificial Sequence: Synthetic oligonucleotide
uucuagauaggggucaauc

SEQ ID NO: 1037066 - RNA, 19 nt, Artificial Sequence
  Description of Artificial Sequence: Synthetic oligonucleotide
ggugcaacaaaccauuuaa

SEQ ID NO: 1037067 - RNA, 19 nt, Artificial Sequence
  Description of Artificial Sequence: Synthetic oligonucleotide
gucucuggggaccauuucc

SEQ ID NO: 1037068 - RNA, 19 nt, Artificial Sequence
  Description of Artificial Sequence: Synthetic oligonucleotide
cucgaccagacccaauggg

SEQ ID NO: 1037069 - RNA, 19 nt, Artificial Sequence
  Description of Artificial Sequence: Synthetic oligonucleotide
caauuuaugccguucaggu

SEQ ID NO: 1037070 - RNA, 19 nt, Artificial Sequence
  Description of Artificial Sequence: Synthetic oligonucleotide
aacacucaauuuaugccgu

SEQ ID NO: 1037071 - RNA, 19 nt, Artificial Sequence
  Description of Artificial Sequence: Synthetic oligonucleotide
ggaaaauucgaaaggcuug

SEQ ID NO: 1037072 - RNA, 19 nt, Artificial Sequence
  Description of Artificial Sequence: Synthetic oligonucleotide
aaauggaaaggcacuguau

SEQ ID NO: 1037073 - RNA, 19 nt, Artificial Sequence
  Description of Artificial Sequence: Synthetic oligonucleotide
gacugagugauugcaggcc

SEQ ID NO: 1037074 - RNA, 19 nt, Artificial Sequence
  Description of Artificial Sequence: Synthetic oligonucleotide
ugugucgccagugccagca

SEQ ID NO: 1037075 - RNA, 19 nt, Artificial Sequence
  Description of Artificial Sequence: Synthetic oligonucleotide
gagauucuugcgcagaggu

SEQ ID NO: 1037076 - RNA, 19 nt, Artificial Sequence
  Description of Artificial Sequence: Synthetic oligonucleotide
ggaacuagaaucugggaaa

SEQ ID NO: 1037077 - RNA, 19 nt, Artificial Sequence
  Description of Artificial Sequence: Synthetic oligonucleotide
ggucauucaagauggcagc

SEQ ID NO: 1037078 - RNA, 19 nt, Artificial Sequence
  Description of Artificial Sequence: Synthetic oligonucleotide
acagauuuagcaaguacaa

SEQ ID NO: 1037079 - RNA, 19 nt, Artificial Sequence
  Description of Artificial Sequence: Synthetic oligonucleotide
acuacguugguuauugaaa

SEQ ID NO: 1037080 - RNA, 19 nt, Artificial Sequence
  Description of Artificial Sequence: Synthetic oligonucleotide
ugcuuucagguaacuacgu

SEQ ID NO: 1037081 - RNA, 19 nt, Artificial Sequence
  Description of Artificial Sequence: Synthetic oligonucleotide
aacugcaaggaugaaccaa

SEQ ID NO: 1037082 - RNA, 19 nt, Artificial Sequence
  Description of Artificial Sequence: Synthetic oligonucleotide
aaugggguacuugugcuua

SEQ ID NO: 1037083 - RNA, 19 nt, Artificial Sequence
  Description of Artificial Sequence: Synthetic oligonucleotide
aguacaaaggugacuacaa

SEQ ID NO: 1037084 - RNA, 19 nt, Artificial Sequence
  Description of Artificial Sequence: Synthetic oligonucleotide
uccuaggacauuucccagu

SEQ ID NO: 1037085 - RNA, 19 nt, Artificial Sequence
  Description of Artificial Sequence: Synthetic oligonucleotide
cccgucauagaaaggaagg

SEQ ID NO: 1037086 - RNA, 19 nt, Artificial Sequence
  Description of Artificial Sequence: Synthetic oligonucleotide
cagcauacaccacuccacc

SEQ ID NO: 1037087 - RNA, 19 nt, Artificial Sequence
  Description of Artificial Sequence: Synthetic oligonucleotide
uacguugguuauugaaagu

SEQ ID NO: 1037088 - RNA, 19 nt, Artificial Sequence
  Description of Artificial Sequence: Synthetic oligonucleotide
caugcugugucgccagugc

SEQ ID NO: 1037089 - RNA, 19 nt, Artificial Sequence
  Description of Artificial Sequence: Synthetic oligonucleotide
gacguccaguuuuaaauaa

SEQ ID NO: 1037090 - RNA, 19 nt, Artificial Sequence
  Description of Artificial Sequence: Synthetic oligonucleotide
auaaauggaaaggcacugu

SEQ ID NO: 1037091 - RNA, 19 nt, Artificial Sequence
  Description of Artificial Sequence: Synthetic oligonucleotide
uccaccaaauaggucauuc

SEQ ID NO: 1037092 - RNA, 19 nt, Artificial Sequence
  Description of Artificial Sequence: Synthetic oligonucleotide
ugagcaucccgugcaaggc

SEQ ID NO: 1037093 - RNA, 19 nt, Artificial Sequence
  Description of Artificial Sequence: Synthetic oligonucleotide
gauuuuggagcaugcuuaa

SEQ ID NO: 1037094 - RNA, 19 nt, Artificial Sequence
  Description of Artificial Sequence: Synthetic oligonucleotide
gagcaugcuuaauaccgac

SEQ ID NO: 1037095 - RNA, 19 nt, Artificial Sequence
  Description of Artificial Sequence: Synthetic oligonucleotide
ucagacguccaguuuuaaa

SEQ ID NO: 1037096 - RNA, 19 nt, Artificial Sequence
  Description of Artificial Sequence: Synthetic oligonucleotide
caaggggauccagagacag

SEQ ID NO: 1037097 - RNA, 19 nt, Artificial Sequence
  Description of Artificial Sequence: Synthetic oligonucleotide
accaaugaaacccgcgcau

SEQ ID NO: 1037098 - RNA, 19 nt, Artificial Sequence
  Description of Artificial Sequence: Synthetic oligonucleotide
cagguaacuacguugguua

SEQ ID NO: 1037099 - RNA, 19 nt, Artificial Sequence
  Description of Artificial Sequence: Synthetic oligonucleotide
uguccaggcgagauccucu

SEQ ID NO: 1037100 - RNA, 19 nt, Artificial Sequence
  Description of Artificial Sequence: Synthetic oligonucleotide
gagugauugcaggccaagg

SEQ ID NO: 1037101 - RNA, 19 nt, Artificial Sequence
  Description of Artificial Sequence: Synthetic oligonucleotide
acacauaguuuguuguuuu

SEQ ID NO: 1037102 - RNA, 19 nt, Artificial Sequence
  Description of Artificial Sequence: Synthetic oligonucleotide
uaauuuucccuugguuaca

SEQ ID NO: 1037103 - RNA, 19 nt, Artificial Sequence
  Description of Artificial Sequence: Synthetic oligonucleotide
gcuuaauaccgacugugug

SEQ ID NO: 1037104 - RNA, 19 nt, Artificial Sequence
  Description of Artificial Sequence: Synthetic oligonucleotide
cuugggugccagugcaggg

SEQ ID NO: 1037105 - RNA, 19 nt, Artificial Sequence
  Description of Artificial Sequence: Synthetic oligonucleotide
auagaaaggaaggggcaga

SEQ ID NO: 1037106 - RNA, 19 nt, Artificial Sequence
  Description of Artificial Sequence: Synthetic oligonucleotide
agacguccaguuuuaaaua

SEQ ID NO: 1037107 - RNA, 19 nt, Artificial Sequence
  Description of Artificial Sequence: Synthetic oligonucleotide
ucagguaacuacguugguu

SEQ ID NO: 1037108 - RNA, 19 nt, Artificial Sequence
  Description of Artificial Sequence: Synthetic oligonucleotide
ucccuugguuacaaauacu

SEQ ID NO: 1037109 - RNA, 19 nt, Artificial Sequence
  Description of Artificial Sequence: Synthetic oligonucleotide
gugacuacaauuuucccuu

SEQ ID NO: 1037110 - RNA, 19 nt, Artificial Sequence
  Description of Artificial Sequence: Synthetic oligonucleotide
gugcaacauaagaaggugc

SEQ ID NO: 1037111 - RNA, 19 nt, Artificial Sequence
  Description of Artificial Sequence: Synthetic oligonucleotide
agcauacaccacuccacca

SEQ ID NO: 1037112 - RNA, 19 nt, Artificial Sequence
  Description of Artificial Sequence: Synthetic oligonucleotide
uacuugugcuuaucugugu

SEQ ID NO: 1037113 - RNA, 19 nt, Artificial Sequence
  Description of Artificial Sequence: Synthetic oligonucleotide
gauaagacacagagaaucu

SEQ ID NO: 1037114 - RNA, 19 nt, Artificial Sequence
  Description of Artificial Sequence: Synthetic oligonucleotide
acugcaaggaugaaccaau

SEQ ID NO: 1037115 - RNA, 19 nt, Artificial Sequence
  Description of Artificial Sequence: Synthetic oligonucleotide
acuguuuuaaggaguguaa

SEQ ID NO: 1037116 - RNA, 19 nt, Artificial Sequence
  Description of Artificial Sequence: Synthetic oligonucleotide
gauaggggucaaucugaac

SEQ ID NO: 1037117 - RNA, 19 nt, Artificial Sequence
  Description of Artificial Sequence: Synthetic oligonucleotide
uugguaaacuuggugguuu

SEQ ID NO: 1037118 - RNA, 19 nt, Artificial Sequence
  Description of Artificial Sequence: Synthetic oligonucleotide
aggcgagauccucuaacug

SEQ ID NO: 1037119 - RNA, 19 nt, Artificial Sequence
  Description of Artificial Sequence: Synthetic oligonucleotide
aaaauucgaaaggcuugaa

SEQ ID NO: 1037120 - RNA, 19 nt, Artificial Sequence
  Description of Artificial Sequence: Synthetic oligonucleotide
gaggaacuagaaucuggga

SEQ ID NO: 1037121 - RNA, 19 nt, Artificial Sequence
  Description of Artificial Sequence: Synthetic oligonucleotide
caccaaauaggucauucaa

SEQ ID NO: 1037122 - RNA, 19 nt, Artificial Sequence
  Description of Artificial Sequence: Synthetic oligonucleotide
uucccgucauagaaaggaa

SEQ ID NO: 1037123 - RNA, 19 nt, Artificial Sequence
  Description of Artificial Sequence: Synthetic oligonucleotide
gaaagcuagcuccuugggu

SEQ ID NO: 1037124 - RNA, 19 nt, Artificial Sequence
  Description of Artificial Sequence: Synthetic oligonucleotide
aacccgcgcaucaccaccg

SEQ ID NO: 1037125 - RNA, 19 nt, Artificial Sequence
  Description of Artificial Sequence: Synthetic oligonucleotide
agguguaggcauccuguca

SEQ ID NO: 1037126 - RNA, 19 nt, Artificial Sequence
  Description of Artificial Sequence: Synthetic oligonucleotide
ugucgccagugccagcagc

SEQ ID NO: 1037127 - RNA, 19 nt, Artificial Sequence
  Description of Artificial Sequence: Synthetic oligonucleotide
gacccaaugggguacuugu

SEQ ID NO: 1037128 - RNA, 19 nt, Artificial Sequence
  Description of Artificial Sequence: Synthetic oligonucleotide
agcagcgcugacugcuuuc

SEQ ID NO: 1037129 - RNA, 19 nt, Artificial Sequence
  Description of Artificial Sequence: Synthetic oligonucleotide
ucuugcgcagaggugggga

SEQ ID NO: 1037130 - RNA, 19 nt, Artificial Sequence
  Description of Artificial Sequence: Synthetic oligonucleotide
uucagguaacuacguuggu

SEQ ID NO: 1037131 - RNA, 19 nt, Artificial Sequence
  Description of Artificial Sequence: Synthetic oligonucleotide
accugacaaaacucauugu

SEQ ID NO: 1037132 - RNA, 19 nt, Artificial Sequence
  Description of Artificial Sequence: Synthetic oligonucleotide
cagacguccaguuuuaaau

SEQ ID NO: 1037133 - RNA, 19 nt, Artificial Sequence
  Description of Artificial Sequence: Synthetic oligonucleotide
agcaaguacaaaggugacu

SEQ ID NO: 1037134 - RNA, 19 nt, Artificial Sequence
  Description of Artificial Sequence: Synthetic oligonucleotide
ggcgagauccucuaacuga

SEQ ID NO: 1037135 - RNA, 19 nt, Artificial Sequence
  Description of Artificial Sequence: Synthetic oligonucleotide
guauaggccugacuugcca

SEQ ID NO: 1037136 - RNA, 19 nt, Artificial Sequence
  Description of Artificial Sequence: Synthetic oligonucleotide
ugccagugcaggguauagg

SEQ ID NO: 1037137 - RNA, 19 nt, Artificial Sequence
  Description of Artificial Sequence: Synthetic oligonucleotide
cucagguguaggcauccug

SEQ ID NO: 1037138 - RNA, 19 nt, Artificial Sequence
  Description of Artificial Sequence: Synthetic oligonucleotide
accaccgucaguauugcaa

SEQ ID NO: 1037139 - RNA, 19 nt, Artificial Sequence
  Description of Artificial Sequence: Synthetic oligonucleotide
auaagacacagagaaucuu

SEQ ID NO: 1037140 - RNA, 19 nt, Artificial Sequence
  Description of Artificial Sequence: Synthetic oligonucleotide
cacucgugucuccaggaug

SEQ ID NO: 1037141 - RNA, 19 nt, Artificial Sequence
  Description of Artificial Sequence: Synthetic oligonucleotide
aggugcaacaaaccauuua

SEQ ID NO: 1037142 - RNA, 19 nt, Artificial Sequence
  Description of Artificial Sequence: Synthetic oligonucleotide
accgacugugugcugcucu

SEQ ID NO: 1037143 - RNA, 19 nt, Artificial Sequence
  Description of Artificial Sequence: Synthetic oligonucleotide
augggccggguguccaggc

SEQ ID NO: 1037144 - RNA, 19 nt, Artificial Sequence
  Description of Artificial Sequence: Synthetic oligonucleotide
agagcugaagccacucgug

SEQ ID NO: 1037145 - RNA, 19 nt, Artificial Sequence
  Description of Artificial Sequence: Synthetic oligonucleotide
gguguaggcauccugucaa

SEQ ID NO: 1037146 - RNA, 19 nt, Artificial Sequence
  Description of Artificial Sequence: Synthetic oligonucleotide
gucagacugagugauugca

SEQ ID NO: 1037147 - RNA, 19 nt, Artificial Sequence
  Description of Artificial Sequence: Synthetic oligonucleotide
cagcugaacacucaauuua

SEQ ID NO: 1037148 - RNA, 19 nt, Artificial Sequence
  Description of Artificial Sequence: Synthetic oligonucleotide
caccgucaguauugcaagg

SEQ ID NO: 1037149 - RNA, 19 nt, Artificial Sequence
  Description of Artificial Sequence: Synthetic oligonucleotide
ccacauaagugcaacauaa

SEQ ID NO: 1037150 - RNA, 19 nt, Artificial Sequence
  Description of Artificial Sequence: Synthetic oligonucleotide
gaccauuucccgucauaga

SEQ ID NO: 1037151 - RNA, 19 nt, Artificial Sequence
  Description of Artificial Sequence: Synthetic oligonucleotide
ggaaaggcacuguauggca

SEQ ID NO: 1037152 - RNA, 19 nt, Artificial Sequence
  Description of Artificial Sequence: Synthetic oligonucleotide
accgucaguauugcaagga

SEQ ID NO: 1037153 - RNA, 19 nt, Artificial Sequence
  Description of Artificial Sequence: Synthetic oligonucleotide
ugucugcagaaagcuagcu

SEQ ID NO: 1037154 - RNA, 19 nt, Artificial Sequence
  Description of Artificial Sequence: Synthetic oligonucleotide
ugugaccagcaguucccca

SEQ ID NO: 1037155 - RNA, 19 nt, Artificial Sequence
  Description of Artificial Sequence: Synthetic oligonucleotide
gaccugaucucgacagaag

SEQ ID NO: 1037156 - RNA, 19 nt, Artificial Sequence
  Description of Artificial Sequence: Synthetic oligonucleotide
auuucccaguggauuuugg

SEQ ID NO: 1037157 - RNA, 19 nt, Artificial Sequence
  Description of Artificial Sequence: Synthetic oligonucleotide
gcguaaacuaugaaauaug

SEQ ID NO: 1037158 - RNA, 19 nt, Artificial Sequence
  Description of Artificial Sequence: Synthetic oligonucleotide
cugaucucgacagaagaaa

SEQ ID NO: 1037159 - RNA, 19 nt, Artificial Sequence
  Description of Artificial Sequence: Synthetic oligonucleotide
gauuugcaacugugaccag

SEQ ID NO: 1037160 - RNA, 19 nt, Artificial Sequence
  Description of Artificial Sequence: Synthetic oligonucleotide
cugcaaggaugaaccaaug

SEQ ID NO: 1037161 - RNA, 19 nt, Artificial Sequence
  Description of Artificial Sequence: Synthetic oligonucleotide
cccaaugggguacuugugc

SEQ ID NO: 1037162 - RNA, 19 nt, Artificial Sequence
  Description of Artificial Sequence: Synthetic oligonucleotide
ggguacuugugcuuaucug

SEQ ID NO: 1037163 - RNA, 19 nt, Artificial Sequence
  Description of Artificial Sequence: Synthetic oligonucleotide
agccagucagacugaguga

SEQ ID NO: 1037164 - RNA, 19 nt, Artificial Sequence
  Description of Artificial Sequence: Synthetic oligonucleotide
cguaaacuaugaaauauga

SEQ ID NO: 1037165 - RNA, 19 nt, Artificial Sequence
  Description of Artificial Sequence: Synthetic oligonucleotide
agaccugaucucgacagaa

SEQ ID NO: 1037166 - RNA, 19 nt, Artificial Sequence
  Description of Artificial Sequence: Synthetic oligonucleotide
uugggugccagugcagggu

SEQ ID NO: 1037167 - RNA, 19 nt, Artificial Sequence
  Description of Artificial Sequence: Synthetic oligonucleotide
uaacuacguugguuauuga

SEQ ID NO: 1037168 - RNA, 19 nt, Artificial Sequence
  Description of Artificial Sequence: Synthetic oligonucleotide
uuguuccaaaugacuuaaa

SEQ ID NO: 1037169 - RNA, 19 nt, Artificial Sequence
  Description of Artificial Sequence: Synthetic oligonucleotide
ucuucuagauaggggucaa

SEQ ID NO: 1037170 - RNA, 19 nt, Artificial Sequence
  Description of Artificial Sequence: Synthetic oligonucleotide
cacucaauuuaugccguuc

SEQ ID NO: 1037171 - RNA, 19 nt, Artificial Sequence
  Description of Artificial Sequence: Synthetic oligonucleotide
caggguauaggccugacuu

SEQ ID NO: 1037172 - RNA, 19 nt, Artificial Sequence
  Description of Artificial Sequence: Synthetic oligonucleotide
agguaacuacguugguuau

SEQ ID NO: 1037173 - RNA, 19 nt, Artificial Sequence
  Description of Artificial Sequence: Synthetic oligonucleotide
gccacggggagauucuugc

SEQ ID NO: 1037174 - RNA, 19 nt, Artificial Sequence
  Description of Artificial Sequence: Synthetic oligonucleotide
ggguguccaggcgagaucc

SEQ ID NO: 1037175 - RNA, 19 nt, Artificial Sequence
  Description of Artificial Sequence: Synthetic oligonucleotide
uguaggcauccugucaaua

SEQ ID NO: 1037176 - RNA, 19 nt, Artificial Sequence
  Description of Artificial Sequence: Synthetic oligonucleotide
ccaccgucaguauugcaag

SEQ ID NO: 1037177 - RNA, 19 nt, Artificial Sequence
  Description of Artificial Sequence: Synthetic oligonucleotide
agauucuugcgcagaggug

SEQ ID NO: 1037178 - RNA, 19 nt, Artificial Sequence
  Description of Artificial Sequence: Synthetic oligonucleotide
aggcauccugucaauaccu

SEQ ID NO: 1037179 - RNA, 19 nt, Artificial Sequence
  Description of Artificial Sequence: Synthetic oligonucleotide
gaaaggcuugaaaucaaau

SEQ ID NO: 1037180 - RNA, 19 nt, Artificial Sequence
  Description of Artificial Sequence: Synthetic oligonucleotide
gcgagauccucuaacugag

SEQ ID NO: 1037181 - RNA, 19 nt, Artificial Sequence
  Description of Artificial Sequence: Synthetic oligonucleotide
ucaccaccgucaguauugc

SEQ ID NO: 1037182 - RNA, 19 nt, Artificial Sequence
  Description of Artificial Sequence: Synthetic oligonucleotide
cagguguaggcauccuguc

SEQ ID NO: 1037183 - RNA, 19 nt, Artificial Sequence
  Description of Artificial Sequence: Synthetic oligonucleotide
uaauaccgacugugugcug

SEQ ID NO: 1037184 - RNA, 19 nt, Artificial Sequence
  Description of Artificial Sequence: Synthetic oligonucleotide
uggggaccauuucccguca

SEQ ID NO: 1037185 - RNA, 19 nt, Artificial Sequence
  Description of Artificial Sequence: Synthetic oligonucleotide
gggguuaaauaaauggaaa

SEQ ID NO: 1037186 - RNA, 19 nt, Artificial Sequence
  Description of Artificial Sequence: Synthetic oligonucleotide
ggagauucuugcgcagagg

SEQ ID NO: 1037187 - RNA, 19 nt, Artificial Sequence
  Description of Artificial Sequence: Synthetic oligonucleotide
gacuacaauuuucccuugu

SEQ ID NO: 1037188 - RNA, 19 nt, Artificial Sequence
  Description of Artificial Sequence: Synthetic oligonucleotide
ccagcguaaacuaugaaau

SEQ ID NO: 1037189 - RNA, 19 nt, Artificial Sequence
  Description of Artificial Sequence: Synthetic oligonucleotide
agacccaaugggguacuug

SEQ ID NO: 1037190 - RNA, 19 nt, Artificial Sequence
  Description of Artificial Sequence: Synthetic oligonucleotide
ggcaacugcaaggaugaac

SEQ ID NO: 1037191 - RNA, 19 nt, Artificial Sequence
  Description of Artificial Sequence: Synthetic oligonucleotide
agucacucgaccagaccca

SEQ ID NO: 1037192 - RNA, 19 nt, Artificial Sequence
  Description of Artificial Sequence: Synthetic oligonucleotide
ggcuugaaaucaaaucuga

SEQ ID NO: 1037193 - RNA, 19 nt, Artificial Sequence
  Description of Artificial Sequence: Synthetic oligonucleotide
ccgucauagaaaggaaggg

SEQ ID NO: 1037194 - RNA, 19 nt, Artificial Sequence
  Description of Artificial Sequence: Synthetic oligonucleotide
cauacaccacuccaccaaa

SEQ ID NO: 1037195 - RNA, 19 nt, Artificial Sequence
  Description of Artificial Sequence: Synthetic oligonucleotide
ugcgcagagguggggaaaa

SEQ ID NO: 1037196 - RNA, 19 nt, Artificial Sequence
  Description of Artificial Sequence: Synthetic oligonucleotide
guauugcaaggaauguaaa

SEQ ID NO: 1037197 - RNA, 19 nt, Artificial Sequence
  Description of Artificial Sequence: Synthetic oligonucleotide
caaucugaaccuucuuggu

SEQ ID NO: 1037198 - RNA, 19 nt, Artificial Sequence
  Description of Artificial Sequence: Synthetic oligonucleotide
uuaugccguucaggugggg

SEQ ID NO: 1037199 - RNA, 19 nt, Artificial Sequence
  Description of Artificial Sequence: Synthetic oligonucleotide
uccaggcgagauccucuaa

SEQ ID NO: 1037200 - RNA, 19 nt, Artificial Sequence
  Description of Artificial Sequence: Synthetic oligonucleotide
gcauccugucaauaccuuc

SEQ ID NO: 1037201 - RNA, 19 nt, Artificial Sequence
  Description of Artificial Sequence: Synthetic oligonucleotide
ccaggcgagauccucuaac

SEQ ID NO: 1037202 - RNA, 19 nt, Artificial Sequence
  Description of Artificial Sequence: Synthetic oligonucleotide
caacugcaaggaugaacca

SEQ ID NO: 1037203 - RNA, 19 nt, Artificial Sequence
  Description of Artificial Sequence: Synthetic oligonucleotide
aaggugcaacaaaccauuu

SEQ ID NO: 1037204 - RNA, 19 nt, Artificial Sequence
  Description of Artificial Sequence: Synthetic oligonucleotide
cagauuuagcaaguacaaa

SEQ ID NO: 1037205 - RNA, 19 nt, Artificial Sequence
  Description of Artificial Sequence: Synthetic oligonucleotide
cagcguaaacuaugaaaua

SEQ ID NO: 1037206 - RNA, 19 nt, Artificial Sequence
  Description of Artificial Sequence: Synthetic oligonucleotide
aaagcagcgcugacugcuu

SEQ ID NO: 1037207 - RNA, 19 nt, Artificial Sequence
  Description of Artificial Sequence: Synthetic oligonucleotide
acacucaauuuaugccguu

SEQ ID NO: 1037208 - RNA, 19 nt, Artificial Sequence
  Description of Artificial Sequence: Synthetic oligonucleotide
caugcuuaauaccgacugu

SEQ ID NO: 1037209 - RNA, 19 nt, Artificial Sequence
  Description of Artificial Sequence: Synthetic oligonucleotide
gacugcuuucagguaacua

SEQ ID NO: 1037210 - RNA, 19 nt, Artificial Sequence
  Description of Artificial Sequence: Synthetic oligonucleotide
gguauaggccugacuugcc

SEQ ID NO: 1037211 - RNA, 19 nt, Artificial Sequence
  Description of Artificial Sequence: Synthetic oligonucleotide
cuggaaucucaguucuucu

SEQ ID NO: 1037212 - RNA, 19 nt, Artificial Sequence
  Description of Artificial Sequence: Synthetic oligonucleotide
cauuugcuugagggugagc

SEQ ID NO: 1037213 - RNA, 19 nt, Artificial Sequence
  Description of Artificial Sequence: Synthetic oligonucleotide
ugcugggaacuuguccaaa

SEQ ID NO: 1037214 - RNA, 19 nt, Artificial Sequence
  Description of Artificial Sequence: Synthetic oligonucleotide
caggcgagauccucuaacu

SEQ ID NO: 1037215 - RNA, 19 nt, Artificial Sequence
  Description of Artificial Sequence: Synthetic oligonucleotide
cuugcgcagagguggggaa

SEQ ID NO: 1037216 - RNA, 19 nt, Artificial Sequence
  Description of Artificial Sequence: Synthetic oligonucleotide
cugaagccacucgugucuc

SEQ ID NO: 1037217 - RNA, 19 nt, Artificial Sequence
  Description of Artificial Sequence: Synthetic oligonucleotide
ggagcaugcuuaauaccga

SEQ ID NO: 1037218 - RNA, 19 nt, Artificial Sequence
  Description of Artificial Sequence: Synthetic oligonucleotide
cguugguuauugaaaguca

SEQ ID NO: 1037219 - RNA, 19 nt, Artificial Sequence
  Description of Artificial Sequence: Synthetic oligonucleotide
caaggcacuuuagaggggu

SEQ ID NO: 1037220 - RNA, 19 nt, Artificial Sequence
  Description of Artificial Sequence: Synthetic oligonucleotide
ggaagucugcuggcaaaug

SEQ ID NO: 1037221 - RNA, 19 nt, Artificial Sequence
  Description of Artificial Sequence: Synthetic oligonucleotide
auacaccacuccaccaaau

SEQ ID NO: 1037222 - RNA, 19 nt, Artificial Sequence
  Description of Artificial Sequence: Synthetic oligonucleotide
cugagugauugcaggccaa

SEQ ID NO: 1037223 - RNA, 19 nt, Artificial Sequence
  Description of Artificial Sequence: Synthetic oligonucleotide
uugcgcagagguggggaaa

SEQ ID NO: 1037224 - RNA, 19 nt, Artificial Sequence
  Description of Artificial Sequence: Synthetic oligonucleotide
gggaaaauucgaaaggcuu

SEQ ID NO: 1037225 - RNA, 19 nt, Artificial Sequence
  Description of Artificial Sequence: Synthetic oligonucleotide
cccaguggauuuuggagca

SEQ ID NO: 1037226 - RNA, 19 nt, Artificial Sequence
  Description of Artificial Sequence: Synthetic oligonucleotide
cucgugucuccaggauggg

SEQ ID NO: 1037227 - RNA, 19 nt, Artificial Sequence
  Description of Artificial Sequence: Synthetic oligonucleotide
gcuucucuaacuggaaucu

SEQ ID NO: 1037228 - RNA, 19 nt, Artificial Sequence
  Description of Artificial Sequence: Synthetic oligonucleotide
cccagcauacaccacucca

SEQ ID NO: 1037229 - RNA, 19 nt, Artificial Sequence
  Description of Artificial Sequence: Synthetic oligonucleotide
gagggugcugggaacuugu

SEQ ID NO: 1037230 - RNA, 19 nt, Artificial Sequence
  Description of Artificial Sequence: Synthetic oligonucleotide
cucuaacuggaaucucagu

SEQ ID NO: 1037231 - RNA, 19 nt, Artificial Sequence
  Description of Artificial Sequence: Synthetic oligonucleotide
ggcacuuuagaggggucuc

SEQ ID NO: 1037232 - RNA, 19 nt, Artificial Sequence
  Description of Artificial Sequence: Synthetic oligonucleotide
cagcgcugacugcuuucag

SEQ ID NO: 1037233 - RNA, 19 nt, Artificial Sequence
  Description of Artificial Sequence: Synthetic oligonucleotide
cagaccugaucucgacaga

SEQ ID NO: 1037234 - RNA, 19 nt, Artificial Sequence
  Description of Artificial Sequence: Synthetic oligonucleotide
gggguacuugugcuuaucu

SEQ ID NO: 1037235 - RNA, 19 nt, Artificial Sequence
  Description of Artificial Sequence: Synthetic oligonucleotide
ccauuucccgucauagaaa

SEQ ID NO: 1037236 - RNA, 19 nt, Artificial Sequence
  Description of Artificial Sequence: Synthetic oligonucleotide
cccuugguuacaaauacuu

SEQ ID NO: 1037237 - RNA, 19 nt, Artificial Sequence
  Description of Artificial Sequence: Synthetic oligonucleotide
ggacacauaguuuguuguu

SEQ ID NO: 1037238 - RNA, 19 nt, Artificial Sequence
  Description of Artificial Sequence: Synthetic oligonucleotide
aggggucaaucugaaccuu

SEQ ID NO: 1037239 - RNA, 19 nt, Artificial Sequence
  Description of Artificial Sequence: Synthetic oligonucleotide
ggacauuucccaguggauu

SEQ ID NO: 1037240 - RNA, 19 nt, Artificial Sequence
  Description of Artificial Sequence: Synthetic oligonucleotide
gcgcuuucauaaauaaacu

SEQ ID NO: 1037241 - RNA, 19 nt, Artificial Sequence
  Description of Artificial Sequence: Synthetic oligonucleotide
gucacucgaccagacccaa

SEQ ID NO: 1037242 - RNA, 19 nt, Artificial Sequence
  Description of Artificial Sequence: Synthetic oligonucleotide
guauggcaacugcaaggau

SEQ ID NO: 1037243 - RNA, 19 nt, Artificial Sequence
  Description of Artificial Sequence: Synthetic oligonucleotide
ccgugcaaggcacuuuaga

SEQ ID NO: 1037244 - RNA, 19 nt, Artificial Sequence
  Description of Artificial Sequence: Synthetic oligonucleotide
cccacauaagugcaacaua

SEQ ID NO: 1037245 - RNA, 19 nt, Artificial Sequence
  Description of Artificial Sequence: Synthetic oligonucleotide
uaccgacugugugcugcuc

SEQ ID NO: 1037246 - RNA, 19 nt, Artificial Sequence
  Description of Artificial Sequence: Synthetic oligonucleotide
cccgugcaaggcacuuuag

SEQ ID NO: 1037247 - RNA, 19 nt, Artificial Sequence
  Description of Artificial Sequence: Synthetic oligonucleotide
uggcaacugcaaggaugaa

SEQ ID NO: 1037248 - RNA, 19 nt, Artificial Sequence
  Description of Artificial Sequence: Synthetic oligonucleotide
ucgccagugccagcagcuu

SEQ ID NO: 1037249 - RNA, 19 nt, Artificial Sequence
  Description of Artificial Sequence: Synthetic oligonucleotide
gcugcucagacguccaguu

SEQ ID NO: 1037250 - RNA, 19 nt, Artificial Sequence
  Description of Artificial Sequence: Synthetic oligonucleotide
ggucggucccagccaguca

SEQ ID NO: 1037251 - RNA, 19 nt, Artificial Sequence
  Description of Artificial Sequence: Synthetic oligonucleotide
ccgucaguauugcaaggaa

SEQ ID NO: 1037252 - RNA, 19 nt, Artificial Sequence
  Description of Artificial Sequence: Synthetic oligonucleotide
ccuugucugcagaaagcua

SEQ ID NO: 1037253 - RNA, 19 nt, Artificial Sequence
  Description of Artificial Sequence: Synthetic oligonucleotide
cucagacguccaguuuuaa

SEQ ID NO: 1037254 - RNA, 19 nt, Artificial Sequence
  Description of Artificial Sequence: Synthetic oligonucleotide
gugcaggguauaggccuga

SEQ ID NO: 1037255 - RNA, 19 nt, Artificial Sequence
  Description of Artificial Sequence: Synthetic oligonucleotide
ccuugguuacaaauacuuu

SEQ ID NO: 1037256 - RNA, 19 nt, Artificial Sequence
  Description of Artificial Sequence: Synthetic oligonucleotide
gguaacuacguugguuauu

SEQ ID NO: 1037257 - RNA, 19 nt, Artificial Sequence
  Description of Artificial Sequence: Synthetic oligonucleotide
gcaggguauaggccugacu

SEQ ID NO: 1037258 - RNA, 19 nt, Artificial Sequence
  Description of Artificial Sequence: Synthetic oligonucleotide
gcucagacguccaguuuua

SEQ ID NO: 1037259 - RNA, 19 nt, Artificial Sequence
  Description of Artificial Sequence: Synthetic oligonucleotide
gcgcagagguggggaaaag

SEQ ID NO: 1037260 - RNA, 19 nt, Artificial Sequence
  Description of Artificial Sequence: Synthetic oligonucleotide
ccccagacacaaauuugcu

SEQ ID NO: 1037261 - RNA, 19 nt, Artificial Sequence
  Description of Artificial Sequence: Synthetic oligonucleotide
cugcucagacguccaguuu

SEQ ID NO: 1037262 - RNA, 19 nt, Artificial Sequence
  Description of Artificial Sequence: Synthetic oligonucleotide
caucccgugcaaggcacuu

SEQ ID NO: 1037263 - RNA, 19 nt, Artificial Sequence
  Description of Artificial Sequence: Synthetic oligonucleotide
ggggaccauuucccgucau

SEQ ID NO: 1037264 - RNA, 19 nt, Artificial Sequence
  Description of Artificial Sequence: Synthetic oligonucleotide
gcaucccgugcaaggcacu

SEQ ID NO: 1037265 - RNA, 19 nt, Artificial Sequence
  Description of Artificial Sequence: Synthetic oligonucleotide
cuccaccaaauaggucauu

SEQ ID NO: 1037266 - RNA, 19 nt, Artificial Sequence
  Description of Artificial Sequence: Synthetic oligonucleotide
gccggguguccaggcgaga

SEQ ID NO: 1037267 - RNA, 19 nt, Artificial Sequence
  Description of Artificial Sequence: Synthetic oligonucleotide
ccaguggauuuuggagcau

SEQ ID NO: 1037268 - RNA, 19 nt, Artificial Sequence
  Description of Artificial Sequence: Synthetic oligonucleotide
ggugagccugaggguccuu

SEQ ID NO: 1037269 - RNA, 19 nt, Artificial Sequence
  Description of Artificial Sequence: Synthetic oligonucleotide
aauaacgacuccaagaugc

SEQ ID NO: 1037270 - RNA, 19 nt, Artificial Sequence
  Description of Artificial Sequence: Synthetic oligonucleotide
aauauugcuagccacuuac

SEQ ID NO: 1037271 - RNA, 19 nt, Artificial Sequence
  Description of Artificial Sequence: Synthetic oligonucleotide
uaaguuagaacuuacauga

SEQ ID NO: 1037272 - RNA, 19 nt, Artificial Sequence
  Description of Artificial Sequence: Synthetic oligonucleotide
uuauuaacagcuuaguugc

SEQ ID NO: 1037273 - RNA, 19 nt, Artificial Sequence
  Description of Artificial Sequence: Synthetic oligonucleotide
uuaauuuugaauaucgcac

SEQ ID NO: 1037274 - RNA, 19 nt, Artificial Sequence
  Description of Artificial Sequence: Synthetic oligonucleotide
ucucauguaaguuagaacu

SEQ ID NO: 1037275 - RNA, 19 nt, Artificial Sequence
  Description of Artificial Sequence: Synthetic oligonucleotide
uuuacuauuacuacuauua

SEQ ID NO: 1037276 - RNA, 19 nt, Artificial Sequence
  Description of Artificial Sequence: Synthetic oligonucleotide
agagauagcauuccuauac

SEQ ID NO: 1037277 - RNA, 19 nt, Artificial Sequence
  Description of Artificial Sequence: Synthetic oligonucleotide
aagaacucgauaaauaacg

SEQ ID NO: 1037278 - RNA, 19 nt, Artificial Sequence
  Description of Artificial Sequence: Synthetic oligonucleotide
uagucuaaaacauauagac

SEQ ID NO: 1037279 - RNA, 19 nt, Artificial Sequence
  Description of Artificial Sequence: Synthetic oligonucleotide
uuuuaauuagcaucgaaca

SEQ ID NO: 1037280 - RNA, 19 nt, Artificial Sequence
  Description of Artificial Sequence: Synthetic oligonucleotide
aauuuugaauaucgcacac

SEQ ID NO: 1037281 - RNA, 19 nt, Artificial Sequence
  Description of Artificial Sequence: Synthetic oligonucleotide
uaaauagucccuuaacuag

SEQ ID NO: 1037282 - RNA, 19 nt, Artificial Sequence
  Description of Artificial Sequence: Synthetic oligonucleotide
uauaaauagucccuuaacu

SEQ ID NO: 1037283 - RNA, 19 nt, Artificial Sequence
  Description of Artificial Sequence: Synthetic oligonucleotide
aaaacauauagacaacgga

SEQ ID NO: 1037284 - RNA, 19 nt, Artificial Sequence
  Description of Artificial Sequence: Synthetic oligonucleotide
auuaauuuugaauaucgca

SEQ ID NO: 1037285 - RNA, 19 nt, Artificial Sequence
  Description of Artificial Sequence: Synthetic oligonucleotide
uccuaaaaugccuugaagc

SEQ ID NO: 1037286 - RNA, 19 nt, Artificial Sequence
  Description of Artificial Sequence: Synthetic oligonucleotide
uuauccuuagcuaugccag

SEQ ID NO: 1037287 - RNA, 19 nt, Artificial Sequence
  Description of Artificial Sequence: Synthetic oligonucleotide
aagucaacaggacagcauc

SEQ ID NO: 1037288 - RNA, 19 nt, Artificial Sequence
  Description of Artificial Sequence: Synthetic oligonucleotide
auaaauaacgacuccaaga

SEQ ID NO: 1037289 - RNA, 19 nt, Artificial Sequence
  Description of Artificial Sequence: Synthetic oligonucleotide
uaaauaacgacuccaagau

SEQ ID NO: 1037290 - RNA, 19 nt, Artificial Sequence
  Description of Artificial Sequence: Synthetic oligonucleotide
ucugaggugauauuauggg

SEQ ID NO: 1037291 - RNA, 19 nt, Artificial Sequence
  Description of Artificial Sequence: Synthetic oligonucleotide
uucuaagagacuuuaaaac

SEQ ID NO: 1037292 - RNA, 19 nt, Artificial Sequence
  Description of Artificial Sequence: Synthetic oligonucleotide
auauaaauagucccuuaac

SEQ ID NO: 1037293 - RNA, 19 nt, Artificial Sequence
  Description of Artificial Sequence: Synthetic oligonucleotide
  modified_base (5)..(5): a, c, u, g, unknown or other
cacanauacacacacacac

SEQ ID NO: 1037294 - RNA, 19 nt, Artificial Sequence
  Description of Artificial Sequence: Synthetic oligonucleotide
uguagugccaaaacgaagu

SEQ ID NO: 1037295 - RNA, 19 nt, Artificial Sequence
  Description of Artificial Sequence: Synthetic oligonucleotide
uuugccaacuuaauuuggg

SEQ ID NO: 1037296 - RNA, 19 nt, Artificial Sequence
  Description of Artificial Sequence: Synthetic oligonucleotide
acuauugccuguuugguag

SEQ ID NO: 1037297 - RNA, 19 nt, Artificial Sequence
  Description of Artificial Sequence: Synthetic oligonucleotide
uuaguccaaaugcacacgg

SEQ ID NO: 1037298 - RNA, 19 nt, Artificial Sequence
  Description of Artificial Sequence: Synthetic oligonucleotide
uguaaguuagaacuuacau

SEQ ID NO: 1037299 - RNA, 19 nt, Artificial Sequence
  Description of Artificial Sequence: Synthetic oligonucleotide
aaaccaaagagauagcauu

SEQ ID NO: 1037300 - RNA, 19 nt, Artificial Sequence
  Description of Artificial Sequence: Synthetic oligonucleotide
uuugcuaucuuauuuacua

SEQ ID NO: 1037301 - RNA, 19 nt, Artificial Sequence
  Description of Artificial Sequence: Synthetic oligonucleotide
gauacacacacacacacac

SEQ ID NO: 1037302 - RNA, 19 nt, Artificial Sequence
  Description of Artificial Sequence: Synthetic oligonucleotide
guuaguaugguuuacccac

SEQ ID NO: 1037303 - RNA, 19 nt, Artificial Sequence
  Description of Artificial Sequence: Synthetic oligonucleotide
uaugguuuacccacuauug

SEQ ID NO: 1037304 - RNA, 19 nt, Artificial Sequence
  Description of Artificial Sequence: Synthetic oligonucleotide
aacuuaggagccuccagac

SEQ ID NO: 1037305 - RNA, 19 nt, Artificial Sequence
  Description of Artificial Sequence: Synthetic oligonucleotide
uuuccaaucacagugaguc

SEQ ID NO: 1037306 - RNA, 19 nt, Artificial Sequence
  Description of Artificial Sequence: Synthetic oligonucleotide
  modified_base (7)..(7): a, c, u, g, unknown or other
cacacanauacacacacac

SEQ ID NO: 1037307 - RNA, 19 nt, Artificial Sequence
  Description of Artificial Sequence: Synthetic oligonucleotide
aaggggacaauccaggaca

SEQ ID NO: 1037308 - RNA, 19 nt, Artificial Sequence
  Description of Artificial Sequence: Synthetic oligonucleotide
acauuaauuuugaauaucg

SEQ ID NO: 1037309 - RNA, 19 nt, Artificial Sequence
  Description of Artificial Sequence: Synthetic oligonucleotide
aaaugcuuugaauggagcu

SEQ ID NO: 1037310 - RNA, 19 nt, Artificial Sequence
  Description of Artificial Sequence: Synthetic oligonucleotide
gguagucuaaaacauauag

SEQ ID NO: 1037311 - RNA, 19 nt, Artificial Sequence
  Description of Artificial Sequence: Synthetic oligonucleotide
aacucgauaaauaacgacu

SEQ ID NO: 1037312 - RNA, 19 nt, Artificial Sequence
  Description of Artificial Sequence: Synthetic oligonucleotide
ugauauuaugggauggggc

SEQ ID NO: 1037313 - RNA, 19 nt, Artificial Sequence
  Description of Artificial Sequence: Synthetic oligonucleotide
uuuugaauaucgcacacua

SEQ ID NO: 1037314 - RNA, 19 nt, Artificial Sequence
  Description of Artificial Sequence: Synthetic oligonucleotide
uaauuuugaauaucgcaca

SEQ ID NO: 1037315 - RNA, 19 nt, Artificial Sequence
  Description of Artificial Sequence: Synthetic oligonucleotide
gauaaauaacgacuccaag

SEQ ID NO: 1037316 - RNA, 19 nt, Artificial Sequence
  Description of Artificial Sequence: Synthetic oligonucleotide
uaucuuauuuacuauuacu

SEQ ID NO: 1037317 - RNA, 19 nt, Artificial Sequence
  Description of Artificial Sequence: Synthetic oligonucleotide
cuccagacaacuuucagag

SEQ ID NO: 1037318 - RNA, 19 nt, Artificial Sequence
  Description of Artificial Sequence: Synthetic oligonucleotide
aacgacuccaagaugcccc

SEQ ID NO: 1037319 - RNA, 19 nt, Artificial Sequence
  Description of Artificial Sequence: Synthetic oligonucleotide
uaguguagugccaaaacga

SEQ ID NO: 1037320 - RNA, 19 nt, Artificial Sequence
  Description of Artificial Sequence: Synthetic oligonucleotide
uugaauaucgcacacuauu

SEQ ID NO: 1037321 - RNA, 19 nt, Artificial Sequence
  Description of Artificial Sequence: Synthetic oligonucleotide
cucacucuaacccuaaccc

SEQ ID NO: 1037322 - RNA, 19 nt, Artificial Sequence
  Description of Artificial Sequence: Synthetic oligonucleotide
aaacauauagacaacggau

SEQ ID NO: 1037323 - RNA, 19 nt, Artificial Sequence
  Description of Artificial Sequence: Synthetic oligonucleotide
uacacacacacacacacac

SEQ ID NO: 1037324 - RNA, 19 nt, Artificial Sequence
  Description of Artificial Sequence: Synthetic oligonucleotide
aaaucuagacuccaaguua

SEQ ID NO: 1037325 - RNA, 19 nt, Artificial Sequence
  Description of Artificial Sequence: Synthetic oligonucleotide
cuaguguagugccaaaacg

SEQ ID NO: 1037326 - RNA, 19 nt, Artificial Sequence
  Description of Artificial Sequence: Synthetic oligonucleotide
aaguggcuagcuuuccagc

SEQ ID NO: 1037327 - RNA, 19 nt, Artificial Sequence
  Description of Artificial Sequence: Synthetic oligonucleotide
aagucaggcagugaguuuc

SEQ ID NO: 1037328 - RNA, 19 nt, Artificial Sequence
  Description of Artificial Sequence: Synthetic oligonucleotide
auagcauuccuauacacau

SEQ ID NO: 1037329 - RNA, 19 nt, Artificial Sequence
  Description of Artificial Sequence: Synthetic oligonucleotide
uccaaguuauccauugccc

SEQ ID NO: 1037330 - RNA, 19 nt, Artificial Sequence
  Description of Artificial Sequence: Synthetic oligonucleotide
uccaagaugccccagugga

SEQ ID NO: 1037331 - RNA, 19 nt, Artificial Sequence
  Description of Artificial Sequence: Synthetic oligonucleotide
auaaauagucccuuaacua

SEQ ID NO: 1037332 - RNA, 19 nt, Artificial Sequence
  Description of Artificial Sequence: Synthetic oligonucleotide
uugaaaauuucuucagcug

SEQ ID NO: 1037333 - RNA, 19 nt, Artificial Sequence
  Description of Artificial Sequence: Synthetic oligonucleotide
aaagaggaaagguagucua

SEQ ID NO: 1037334 - RNA, 19 nt, Artificial Sequence
  Description of Artificial Sequence: Synthetic oligonucleotide
uuacuugguaucuuaagaa

SEQ ID NO: 1037335 - RNA, 19 nt, Artificial Sequence
  Description of Artificial Sequence: Synthetic oligonucleotide
ugaggugauauuaugggau

SEQ ID NO: 1037336 - RNA, 19 nt, Artificial Sequence
  Description of Artificial Sequence: Synthetic oligonucleotide
  modified_base (13)..(13): a, c, u, g, unknown or other
cacacacacacanauacac

SEQ ID NO: 1037337 - RNA, 19 nt, Artificial Sequence
  Description of Artificial Sequence: Synthetic oligonucleotide
aagcagaaaagcucaugag

SEQ ID NO: 1037338 - RNA, 19 nt, Artificial Sequence
  Description of Artificial Sequence: Synthetic oligonucleotide
aggcaguuaagucaggcag

SEQ ID NO: 1037339 - RNA, 19 nt, Artificial Sequence
  Description of Artificial Sequence: Synthetic oligonucleotide
ugguucucauguaaguuag

SEQ ID NO: 1037340 - RNA, 19 nt, Artificial Sequence
  Description of Artificial Sequence: Synthetic oligonucleotide
ugguuuacccacuauugcc

SEQ ID NO: 1037341 - RNA, 19 nt, Artificial Sequence
  Description of Artificial Sequence: Synthetic oligonucleotide
aacaaaacauuaauaggcu

SEQ ID NO: 1037342 - RNA, 19 nt, Artificial Sequence
  Description of Artificial Sequence: Synthetic oligonucleotide
cauuaauuuugaauaucgc

SEQ ID NO: 1037343 - RNA, 19 nt, Artificial Sequence
  Description of Artificial Sequence: Synthetic oligonucleotide
  modified_base (4)..(4): a, c, u, g, unknown or other
acanauacacacacacacc

SEQ ID NO: 1037344 - RNA, 19 nt, Artificial Sequence
  Description of Artificial Sequence: Synthetic oligonucleotide
uuagaacuuacaugagugc

SEQ ID NO: 1037345 - RNA, 19 nt, Artificial Sequence
  Description of Artificial Sequence: Synthetic oligonucleotide
  modified_base (15)..(15): a, c, u, g, unknown or other
cacacacacacacanauac

SEQ ID NO: 1037346 - RNA, 19 nt, Artificial Sequence
  Description of Artificial Sequence: Synthetic oligonucleotide
aaaaccaaaucuauaguaa

SEQ ID NO: 1037347 - RNA, 19 nt, Artificial Sequence
  Description of Artificial Sequence: Synthetic oligonucleotide
uaauaggcucccuuuaucu

SEQ ID NO: 1037348 - RNA, 19 nt, Artificial Sequence
  Description of Artificial Sequence: Synthetic oligonucleotide
aacccuaacccugacuugg

SEQ ID NO: 1037349 - RNA, 19 nt, Artificial Sequence
  Description of Artificial Sequence: Synthetic oligonucleotide
ucuaguguagugccaaaac

SEQ ID NO: 1037350 - RNA, 19 nt, Artificial Sequence
  Description of Artificial Sequence: Synthetic oligonucleotide
gucaauuccaaggaagagg

SEQ ID NO: 1037351 - RNA, 19 nt, Artificial Sequence
  Description of Artificial Sequence: Synthetic oligonucleotide
aaauaacgacuccaagaug

SEQ ID NO: 1037352 - RNA, 19 nt, Artificial Sequence
  Description of Artificial Sequence: Synthetic oligonucleotide
acacuauuuauuaacagcu

SEQ ID NO: 1037353 - RNA, 19 nt, Artificial Sequence
  Description of Artificial Sequence: Synthetic oligonucleotide
agaacuuacaugagugccc

SEQ ID NO: 1037354 - RNA, 19 nt, Artificial Sequence
  Description of Artificial Sequence: Synthetic oligonucleotide
acacacacacaccaacuac

SEQ ID NO: 1037355 - RNA, 19 nt, Artificial Sequence
  Description of Artificial Sequence: Synthetic oligonucleotide
cugggauacacacacacac

SEQ ID NO: 1037356 - RNA, 19 nt, Artificial Sequence
  Description of Artificial Sequence: Synthetic oligonucleotide
caacgggaaaucuagacuc

SEQ ID NO: 1037357 - RNA, 19 nt, Artificial Sequence
  Description of Artificial Sequence: Synthetic oligonucleotide
gauauuaugggauggggcu

SEQ ID NO: 1037358 - RNA, 19 nt, Artificial Sequence
  Description of Artificial Sequence: Synthetic oligonucleotide
cauccaacgggaaaucuag

SEQ ID NO: 1037359 - RNA, 19 nt, Artificial Sequence
  Description of Artificial Sequence: Synthetic oligonucleotide
agaaagaggaaagguaguc

SEQ ID NO: 1037360 - RNA, 19 nt, Artificial Sequence
  Description of Artificial Sequence: Synthetic oligonucleotide
  modified_base (3)..(3): a, c, u, g, unknown or other
canauacacacacacacca

SEQ ID NO: 1037361 - RNA, 19 nt, Artificial Sequence
  Description of Artificial Sequence: Synthetic oligonucleotide
ugguuaguaugguuuaccc

SEQ ID NO: 1037362 - RNA, 19 nt, Artificial Sequence
  Description of Artificial Sequence: Synthetic oligonucleotide
uuugaauggagcugccuga

SEQ ID NO: 1037363 - RNA, 19 nt, Artificial Sequence
  Description of Artificial Sequence: Synthetic oligonucleotide
cuuugaauggagcugccug

SEQ ID NO: 1037364 - RNA, 19 nt, Artificial Sequence
  Description of Artificial Sequence: Synthetic oligonucleotide
caagaacucgauaaauaac

SEQ ID NO: 1037365 - RNA, 19 nt, Artificial Sequence
  Description of Artificial Sequence: Synthetic oligonucleotide
aagguagucuaaaacauau

SEQ ID NO: 1037366 - RNA, 19 nt, Artificial Sequence
  Description of Artificial Sequence: Synthetic oligonucleotide
gaacucgauaaauaacgac

SEQ ID NO: 1037367 - RNA, 19 nt, Artificial Sequence
  Description of Artificial Sequence: Synthetic oligonucleotide
acucgauaaauaacgacuc

SEQ ID NO: 1037368 - RNA, 19 nt, Artificial Sequence
  Description of Artificial Sequence: Synthetic oligonucleotide
aaaacauugucaauuccaa

SEQ ID NO: 1037369 - RNA, 19 nt, Artificial Sequence
  Description of Artificial Sequence: Synthetic oligonucleotide
agucccuuaacuagaaggg

SEQ ID NO: 1037370 - RNA, 19 nt, Artificial Sequence
  Description of Artificial Sequence: Synthetic oligonucleotide
aaccuuccaguuuacauua

SEQ ID NO: 1037371 - RNA, 19 nt, Artificial Sequence
  Description of Artificial Sequence: Synthetic oligonucleotide
uauuaugggauggggcugg

SEQ ID NO: 1037372 - RNA, 19 nt, Artificial Sequence
  Description of Artificial Sequence: Synthetic oligonucleotide
ugaauaucgcacacuauuu

SEQ ID NO: 1037373 - RNA, 19 nt, Artificial Sequence
  Description of Artificial Sequence: Synthetic oligonucleotide
cuuacuugguaucuuaaga

SEQ ID NO: 1037374 - RNA, 19 nt, Artificial Sequence
  Description of Artificial Sequence: Synthetic oligonucleotide
uagacaacggaugggauac

SEQ ID NO: 1037375 - RNA, 19 nt, Artificial Sequence
  Description of Artificial Sequence: Synthetic oligonucleotide
uuaauaggcucccuuuauc

SEQ ID NO: 1037376 - RNA, 19 nt, Artificial Sequence
  Description of Artificial Sequence: Synthetic oligonucleotide
cacacacacacacacacac

SEQ ID NO: 1037377 - RNA, 19 nt, Artificial Sequence
  Description of Artificial Sequence: Synthetic oligonucleotide
cucauaaccuacacauuag

SEQ ID NO: 1037378 - RNA, 19 nt, Artificial Sequence
  Description of Artificial Sequence: Synthetic oligonucleotide
aacgcugacucacugggau

SEQ ID NO: 1037379 - RNA, 19 nt, Artificial Sequence
  Description of Artificial Sequence: Synthetic oligonucleotide
uaauuuggguccuuauccu

SEQ ID NO: 1037380 - RNA, 19 nt, Artificial Sequence
  Description of Artificial Sequence: Synthetic oligonucleotide
aaauagucccuuaacuaga

SEQ ID NO: 1037381 - RNA, 19 nt, Artificial Sequence
  Description of Artificial Sequence: Synthetic oligonucleotide
agugccaaaacgaagugcu

SEQ ID NO: 1037382 - RNA, 19 nt, Artificial Sequence
  Description of Artificial Sequence: Synthetic oligonucleotide
aaucuagacuccaaguuau

SEQ ID NO: 1037383 - RNA, 19 nt, Artificial Sequence
  Description of Artificial Sequence: Synthetic oligonucleotide
uucucauguaaguuagaac

SEQ ID NO: 1037384 - RNA, 19 nt, Artificial Sequence
  Description of Artificial Sequence: Synthetic oligonucleotide
ugguguaaaauuaggcaau

SEQ ID NO: 1037385 - RNA, 19 nt, Artificial Sequence
  Description of Artificial Sequence: Synthetic oligonucleotide
uccaacgggaaaucuagac

SEQ ID NO: 1037386 - RNA, 19 nt, Artificial Sequence
  Description of Artificial Sequence: Synthetic oligonucleotide
uacuugguaucuuaagaaa

SEQ ID NO: 1037387 - RNA, 19 nt, Artificial Sequence
  Description of Artificial Sequence: Synthetic oligonucleotide
uaucgcacacuauuuauua

SEQ ID NO: 1037388 - RNA, 19 nt, Artificial Sequence
  Description of Artificial Sequence: Synthetic oligonucleotide
cauguaaguuagaacuuac

SEQ ID NO: 1037389 - RNA, 19 nt, Artificial Sequence
  Description of Artificial Sequence: Synthetic oligonucleotide
ucuggcugguguaaaauua

SEQ ID NO: 1037390 - RNA, 19 nt, Artificial Sequence
  Description of Artificial Sequence: Synthetic oligonucleotide
agaggcaguuaagucaggc

SEQ ID NO: 1037391 - RNA, 19 nt, Artificial Sequence
  Description of Artificial Sequence: Synthetic oligonucleotide
gaugugguucucauguaag

SEQ ID NO: 1037392 - RNA, 19 nt, Artificial Sequence
  Description of Artificial Sequence: Synthetic oligonucleotide
aaagggcucccucaaaauu

SEQ ID NO: 1037393 - RNA, 19 nt, Artificial Sequence
  Description of Artificial Sequence: Synthetic oligonucleotide
uagcuuuccagcagucuag

SEQ ID NO: 1037394 - RNA, 19 nt, Artificial Sequence
  Description of Artificial Sequence: Synthetic oligonucleotide
cacucuaacccuaacccug

SEQ ID NO: 1037395 - RNA, 19 nt, Artificial Sequence
  Description of Artificial Sequence: Synthetic oligonucleotide
gaacuuaggagccuccaga

SEQ ID NO: 1037396 - RNA, 19 nt, Artificial Sequence
  Description of Artificial Sequence: Synthetic oligonucleotide
aguacggcaaccucagagu

SEQ ID NO: 1037397 - RNA, 19 nt, Artificial Sequence
  Description of Artificial Sequence: Synthetic oligonucleotide
ucccuuaacuagaagggaa

SEQ ID NO: 1037398 - RNA, 19 nt, Artificial Sequence
  Description of Artificial Sequence: Synthetic oligonucleotide
uggaccucaccaaaagaga

SEQ ID NO: 1037399 - RNA, 19 nt, Artificial Sequence
  Description of Artificial Sequence: Synthetic oligonucleotide
aagugcucaucucacugga

SEQ ID NO: 1037400 - RNA, 19 nt, Artificial Sequence
  Description of Artificial Sequence: Synthetic oligonucleotide
ucuuucuuuggaccucacc

SEQ ID NO: 1037401 - RNA, 19 nt, Artificial Sequence
  Description of Artificial Sequence: Synthetic oligonucleotide
gugagucuaguguagugcc

SEQ ID NO: 1037402 - RNA, 19 nt, Artificial Sequence
  Description of Artificial Sequence: Synthetic oligonucleotide
agaaacugccagauguucg

SEQ ID NO: 1037403 - RNA, 19 nt, Artificial Sequence
  Description of Artificial Sequence: Synthetic oligonucleotide
cuuauccuuagcuaugcca

SEQ ID NO: 1037404 - RNA, 19 nt, Artificial Sequence
  Description of Artificial Sequence: Synthetic oligonucleotide
aucuuauuuacuauuacua

SEQ ID NO: 1037405 - RNA, 19 nt, Artificial Sequence
  Description of Artificial Sequence: Synthetic oligonucleotide
auuaauaggcucccuuuau

SEQ ID NO: 1037406 - RNA, 19 nt, Artificial Sequence
  Description of Artificial Sequence: Synthetic oligonucleotide
gucugaggugauauuaugg

SEQ ID NO: 1037407 - RNA, 19 nt, Artificial Sequence
  Description of Artificial Sequence: Synthetic oligonucleotide
caauccaggacaagccagg

SEQ ID NO: 1037408 - RNA, 19 nt, Artificial Sequence
  Description of Artificial Sequence: Synthetic oligonucleotide
gccaacuuaauuugggucc

SEQ ID NO: 1037409 - RNA, 19 nt, Artificial Sequence
  Description of Artificial Sequence: Synthetic oligonucleotide
cauuaaagggaggagagca

SEQ ID NO: 1037410 - RNA, 19 nt, Artificial Sequence
  Description of Artificial Sequence: Synthetic oligonucleotide
caguacggcaaccucagag

SEQ ID NO: 1037411 - RNA, 19 nt, Artificial Sequence
  Description of Artificial Sequence: Synthetic oligonucleotide
agaaaagcucaugagauua

SEQ ID NO: 1037412 - RNA, 19 nt, Artificial Sequence
  Description of Artificial Sequence: Synthetic oligonucleotide
caaguuauccauugcccac

SEQ ID NO: 1037413 - RNA, 19 nt, Artificial Sequence
  Description of Artificial Sequence: Synthetic oligonucleotide
ucccuuuaucuacuaaaac

SEQ ID NO: 1037414 - RNA, 19 nt, Artificial Sequence
  Description of Artificial Sequence: Synthetic oligonucleotide
cagggacccaccauuaaag

SEQ ID NO: 1037415 - RNA, 19 nt, Artificial Sequence
  Description of Artificial Sequence: Synthetic oligonucleotide
agacaacuuucagagcacc

SEQ ID NO: 1037416 - RNA, 19 nt, Artificial Sequence
  Description of Artificial Sequence: Synthetic oligonucleotide
ugucaauuccaaggaagag

SEQ ID NO: 1037417 - RNA, 19 nt, Artificial Sequence
  Description of Artificial Sequence: Synthetic oligonucleotide
accauuaaagggaggagag

SEQ ID NO: 1037418 - RNA, 19 nt, Artificial Sequence
  Description of Artificial Sequence: Synthetic oligonucleotide
gugauauuaugggaugggg

SEQ ID NO: 1037419 - RNA, 19 nt, Artificial Sequence
  Description of Artificial Sequence: Synthetic oligonucleotide
ugcccuuaguccaaaugca

SEQ ID NO: 1037420 - RNA, 19 nt, Artificial Sequence
  Description of Artificial Sequence: Synthetic oligonucleotide
aggugguaccaccugguuc

SEQ ID NO: 1037421 - RNA, 19 nt, Artificial Sequence
  Description of Artificial Sequence: Synthetic oligonucleotide
ugagauuagcucccugcac

SEQ ID NO: 1037422 - RNA, 19 nt, Artificial Sequence
  Description of Artificial Sequence: Synthetic oligonucleotide
ugccaacuuaauuuggguc

SEQ ID NO: 1037423 - RNA, 19 nt, Artificial Sequence
  Description of Artificial Sequence: Synthetic oligonucleotide
acgggaaccagacucccag

SEQ ID NO: 1037424 - RNA, 19 nt, Artificial Sequence
  Description of Artificial Sequence: Synthetic oligonucleotide
ugccaaaacgaagugcuca

SEQ ID NO: 1037425 - RNA, 19 nt, Artificial Sequence
  Description of Artificial Sequence: Synthetic oligonucleotide
cucgauaaauaacgacucc

SEQ ID NO: 1037426 - RNA, 19 nt, Artificial Sequence
  Description of Artificial Sequence: Synthetic oligonucleotide
auuuacuauuacuacuauu

SEQ ID NO: 1037427 - RNA, 19 nt, Artificial Sequence
  Description of Artificial Sequence: Synthetic oligonucleotide
augagauuagcucccugca

SEQ ID NO: 1037428 - RNA, 19 nt, Artificial Sequence
  Description of Artificial Sequence: Synthetic oligonucleotide
uuaagucaggcagugaguu

SEQ ID NO: 1037429 - RNA, 19 nt, Artificial Sequence
  Description of Artificial Sequence: Synthetic oligonucleotide
auaacgacuccaagaugcc

SEQ ID NO: 1037430 - RNA, 19 nt, Artificial Sequence
  Description of Artificial Sequence: Synthetic oligonucleotide
agucugaggugauauuaug

SEQ ID NO: 1037431 - RNA, 19 nt, Artificial Sequence
  Description of Artificial Sequence: Synthetic oligonucleotide
ucacagugagucuagugua

SEQ ID NO: 1037432 - RNA, 19 nt, Artificial Sequence
  Description of Artificial Sequence: Synthetic oligonucleotide
aaaccccuaaguggcuagc

SEQ ID NO: 1037433 - RNA, 19 nt, Artificial Sequence
  Description of Artificial Sequence: Synthetic oligonucleotide
ucacucuaacccuaacccu

SEQ ID NO: 1037434 - RNA, 19 nt, Artificial Sequence
  Description of Artificial Sequence: Synthetic oligonucleotide
ugggauacacacacacaca

SEQ ID NO: 1037435 - RNA, 19 nt, Artificial Sequence
  Description of Artificial Sequence: Synthetic oligonucleotide
uuugaauaucgcacacuau

SEQ ID NO: 1037436 - RNA, 19 nt, Artificial Sequence
  Description of Artificial Sequence: Synthetic oligonucleotide
uacacacacacaccaacua

SEQ ID NO: 1037437 - RNA, 19 nt, Artificial Sequence
  Description of Artificial Sequence: Synthetic oligonucleotide
cuuacaugagugcccuuag

SEQ ID NO: 1037438 - RNA, 19 nt, Artificial Sequence
  Description of Artificial Sequence: Synthetic oligonucleotide
aaguuauccauugcccacu

SEQ ID NO: 1037439 - RNA, 19 nt, Artificial Sequence
  Description of Artificial Sequence: Synthetic oligonucleotide
gcaacgcugacucacuggg

SEQ ID NO: 1037440 - RNA, 19 nt, Artificial Sequence
  Description of Artificial Sequence: Synthetic oligonucleotide
aguggcuagcuuuccagca

SEQ ID NO: 1037441 - RNA, 19 nt, Artificial Sequence
  Description of Artificial Sequence: Synthetic oligonucleotide
uuaacagcuuaguugcauu

SEQ ID NO: 1037442 - RNA, 19 nt, Artificial Sequence
  Description of Artificial Sequence: Synthetic oligonucleotide
ucauugaaggccacuucau

SEQ ID NO: 1037443 - RNA, 19 nt, Artificial Sequence
  Description of Artificial Sequence: Synthetic oligonucleotide
auagacaacggaugggaua

SEQ ID NO: 1037444 - RNA, 19 nt, Artificial Sequence
  Description of Artificial Sequence: Synthetic oligonucleotide
uugccaacuuaauuugggu

SEQ ID NO: 1037445 - RNA, 19 nt, Artificial Sequence
  Description of Artificial Sequence: Synthetic oligonucleotide
guagucuaaaacauauaga

SEQ ID NO: 1037446 - RNA, 19 nt, Artificial Sequence
  Description of Artificial Sequence: Synthetic oligonucleotide
uauagacaacggaugggau

SEQ ID NO: 1037447 - RNA, 19 nt, Artificial Sequence
  Description of Artificial Sequence: Synthetic oligonucleotide
aagggaggagagcaacgcu

SEQ ID NO: 1037448 - RNA, 19 nt, Artificial Sequence
  Description of Artificial Sequence: Synthetic oligonucleotide
aggugauauuaugggaugg

SEQ ID NO: 1037449 - RNA, 19 nt, Artificial Sequence
  Description of Artificial Sequence: Synthetic oligonucleotide
gaauaucgcacacuauuua

SEQ ID NO: 1037450 - RNA, 19 nt, Artificial Sequence
  Description of Artificial Sequence: Synthetic oligonucleotide
acauaaaaccuuccaguuu

SEQ ID NO: 1037451 - RNA, 19 nt, Artificial Sequence
  Description of Artificial Sequence: Synthetic oligonucleotide
cacagugagucuaguguag

SEQ ID NO: 1037452 - RNA, 19 nt, Artificial Sequence
  Description of Artificial Sequence: Synthetic oligonucleotide
gggauacacacacacacac

SEQ ID NO: 1037453 - RNA, 19 nt, Artificial Sequence
  Description of Artificial Sequence: Synthetic oligonucleotide
aaagucaacaggacagcau

SEQ ID NO: 1037454 - RNA, 19 nt, Artificial Sequence
  Description of Artificial Sequence: Synthetic oligonucleotide
cauguaggugagucugagg

SEQ ID NO: 1037455 - RNA, 19 nt, Artificial Sequence
  Description of Artificial Sequence: Synthetic oligonucleotide
gaugccccaguggaaaugc

SEQ ID NO: 1037456 - RNA, 19 nt, Artificial Sequence
  Description of Artificial Sequence: Synthetic oligonucleotide
aagagauagcauuccuaua

SEQ ID NO: 1037457 - RNA, 19 nt, Artificial Sequence
  Description of Artificial Sequence: Synthetic oligonucleotide
ugagucuaguguagugcca

SEQ ID NO: 1037458 - RNA, 19 nt, Artificial Sequence
  Description of Artificial Sequence: Synthetic oligonucleotide
ugacucacugggauacaca

SEQ ID NO: 1037459 - RNA, 19 nt, Artificial Sequence
  Description of Artificial Sequence: Synthetic oligonucleotide
uauugccuguuugguaggg

SEQ ID NO: 1037460 - RNA, 19 nt, Artificial Sequence
  Description of Artificial Sequence: Synthetic oligonucleotide
ugugcaguacggcaaccuc

SEQ ID NO: 1037461 - RNA, 19 nt, Artificial Sequence
  Description of Artificial Sequence: Synthetic oligonucleotide
aacggaugggauacuuguc

SEQ ID NO: 1037462 - RNA, 19 nt, Artificial Sequence
  Description of Artificial Sequence: Synthetic oligonucleotide
auuuugaauaucgcacacu

SEQ ID NO: 1037463 - RNA, 19 nt, Artificial Sequence
  Description of Artificial Sequence: Synthetic oligonucleotide
uagugccaaaacgaagugc

SEQ ID NO: 1037464 - RNA, 19 nt, Artificial Sequence
  Description of Artificial Sequence: Synthetic oligonucleotide
aacauccaacgggaaaucu

SEQ ID NO: 1037465 - RNA, 19 nt, Artificial Sequence
  Description of Artificial Sequence: Synthetic oligonucleotide
guuuacccacuauugccug

SEQ ID NO: 1037466 - RNA, 19 nt, Artificial Sequence
  Description of Artificial Sequence: Synthetic oligonucleotide
cuauugccuguuugguagg

SEQ ID NO: 1037467 - RNA, 19 nt, Artificial Sequence
  Description of Artificial Sequence: Synthetic oligonucleotide
uuagcucccugcacaauua

SEQ ID NO: 1037468 - RNA, 19 nt, Artificial Sequence
  Description of Artificial Sequence: Synthetic oligonucleotide
  modified_base (19)..(19): a, c, u, g, unknown or other
cacacacacacacacacan

SEQ ID NO: 1037469 - RNA, 19 nt, Artificial Sequence
  Description of Artificial Sequence: Synthetic oligonucleotide
auuaacagcuuaguugcau

SEQ ID NO: 1037470 - RNA, 19 nt, Artificial Sequence
  Description of Artificial Sequence: Synthetic oligonucleotide
auagucccuuaacuagaag

SEQ ID NO: 1037471 - RNA, 19 nt, Artificial Sequence
  Description of Artificial Sequence: Synthetic oligonucleotide
auauuaugggauggggcug

SEQ ID NO: 1037472 - RNA, 19 nt, Artificial Sequence
  Description of Artificial Sequence: Synthetic oligonucleotide
ccuaaaaugccuugaagca

SEQ ID NO: 1037473 - RNA, 19 nt, Artificial Sequence
  Description of Artificial Sequence: Synthetic oligonucleotide
uguucacgcacuagggcua

SEQ ID NO: 1037474 - RNA, 19 nt, Artificial Sequence
  Description of Artificial Sequence: Synthetic oligonucleotide
  modified_base (2)..(2): a, c, u, g, unknown or other
anauacacacacacaccaa

SEQ ID NO: 1037475 - RNA, 19 nt, Artificial Sequence
  Description of Artificial Sequence: Synthetic oligonucleotide
ucccugcacaauuaauuaa

SEQ ID NO: 1037476 - RNA, 19 nt, Artificial Sequence
  Description of Artificial Sequence: Synthetic oligonucleotide
gaggcaguuaagucaggca

SEQ ID NO: 1037477 - RNA, 19 nt, Artificial Sequence
  Description of Artificial Sequence: Synthetic oligonucleotide
auaaaaccuuccaguuuac

SEQ ID NO: 1037478 - RNA, 19 nt, Artificial Sequence
  Description of Artificial Sequence: Synthetic oligonucleotide
cccacuauugccuguuugg

SEQ ID NO: 1037479 - RNA, 19 nt, Artificial Sequence
  Description of Artificial Sequence: Synthetic oligonucleotide
agagacuuuaaaacaucca

SEQ ID NO: 1037480 - RNA, 19 nt, Artificial Sequence
  Description of Artificial Sequence: Synthetic oligonucleotide
ugugguucucauguaaguu

SEQ ID NO: 1037481 - RNA, 19 nt, Artificial Sequence
  Description of Artificial Sequence: Synthetic oligonucleotide
uccaguuuugucccugguu

SEQ ID NO: 1037482 - RNA, 19 nt, Artificial Sequence
  Description of Artificial Sequence: Synthetic oligonucleotide
ccagacaacuuucagagca

SEQ ID NO: 1037483 - RNA, 19 nt, Artificial Sequence
  Description of Artificial Sequence: Synthetic oligonucleotide
uuuacccacuauugccugu

SEQ ID NO: 1037484 - RNA, 19 nt, Artificial Sequence
  Description of Artificial Sequence: Synthetic oligonucleotide
agaacucgauaaauaacga

SEQ ID NO: 1037485 - RNA, 19 nt, Artificial Sequence
  Description of Artificial Sequence: Synthetic oligonucleotide
gggacaauccaggacaagc

SEQ ID NO: 1037486 - RNA, 19 nt, Artificial Sequence
  Description of Artificial Sequence: Synthetic oligonucleotide
acggcaaccucagaguucu

SEQ ID NO: 1037487 - RNA, 19 nt, Artificial Sequence
  Description of Artificial Sequence: Synthetic oligonucleotide
augccuugaagcagaaaag

SEQ ID NO: 1037488 - RNA, 19 nt, Artificial Sequence
  Description of Artificial Sequence: Synthetic oligonucleotide
uggcuagcuuuccagcagu

SEQ ID NO: 1037489 - RNA, 19 nt, Artificial Sequence
  Description of Artificial Sequence: Synthetic oligonucleotide
cugaggugauauuauggga

SEQ ID NO: 1037490 - RNA, 19 nt, Artificial Sequence
  Description of Artificial Sequence: Synthetic oligonucleotide
aaacauuaauaggcucccu

SEQ ID NO: 1037491 - RNA, 19 nt, Artificial Sequence
  Description of Artificial Sequence: Synthetic oligonucleotide
  modified_base (10)..(10): a, c, u, g, unknown or other
acacacacanauacacaca

SEQ ID NO: 1037492 - RNA, 19 nt, Artificial Sequence
  Description of Artificial Sequence: Synthetic oligonucleotide
uaacgacuccaagaugccc

SEQ ID NO: 1037493 - RNA, 19 nt, Artificial Sequence
  Description of Artificial Sequence: Synthetic oligonucleotide
aguaugguuuacccacuau

SEQ ID NO: 1037494 - RNA, 19 nt, Artificial Sequence
  Description of Artificial Sequence: Synthetic oligonucleotide
gugcucaucucacuggaga

SEQ ID NO: 1037495 - RNA, 19 nt, Artificial Sequence
  Description of Artificial Sequence: Synthetic oligonucleotide
agguguucagggaacuuag

SEQ ID NO: 1037496 - RNA, 19 nt, Artificial Sequence
  Description of Artificial Sequence: Synthetic oligonucleotide
agauuagcucccugcacaa

SEQ ID NO: 1037497 - RNA, 19 nt, Artificial Sequence
  Description of Artificial Sequence: Synthetic oligonucleotide
uuagcuaugccaggucauc

SEQ ID NO: 1037498 - RNA, 19 nt, Artificial Sequence
  Description of Artificial Sequence: Synthetic oligonucleotide
uucuggcugguguaaaauu

SEQ ID NO: 1037499 - RNA, 19 nt, Artificial Sequence
  Description of Artificial Sequence: Synthetic oligonucleotide
gugguucucauguaaguua

SEQ ID NO: 1037500 - RNA, 19 nt, Artificial Sequence
  Description of Artificial Sequence: Synthetic oligonucleotide
auacacacacacaccaacu

SEQ ID NO: 1037501 - RNA, 19 nt, Artificial Sequence
  Description of Artificial Sequence: Synthetic oligonucleotide
  modified_base (14)..(14): a, c, u, g, unknown or other
acacacacacacanauaca

SEQ ID NO: 1037502 - RNA, 19 nt, Artificial Sequence
  Description of Artificial Sequence: Synthetic oligonucleotide
guguagugccaaaacgaag

SEQ ID NO: 1037503 - RNA, 19 nt, Artificial Sequence
  Description of Artificial Sequence: Synthetic oligonucleotide
aagaugccccaguggaaau

SEQ ID NO: 1037504 - RNA, 19 nt, Artificial Sequence
  Description of Artificial Sequence: Synthetic oligonucleotide
gguugugugugcaguacgg

SEQ ID NO: 1037505 - RNA, 19 nt, Artificial Sequence
  Description of Artificial Sequence: Synthetic oligonucleotide
aguguagugccaaaacgaa

SEQ ID NO: 1037506 - RNA, 19 nt, Artificial Sequence
  Description of Artificial Sequence: Synthetic oligonucleotide
acuuacaugagugcccuua

SEQ ID NO: 1037507 - RNA, 19 nt, Artificial Sequence
  Description of Artificial Sequence: Synthetic oligonucleotide
ugcuuugaauggagcugcc

SEQ ID NO: 1037508 - RNA, 19 nt, Artificial Sequence
  Description of Artificial Sequence: Synthetic oligonucleotide
cugacuuggugcacuguuc

SEQ ID NO: 1037509 - RNA, 19 nt, Artificial Sequence
  Description of Artificial Sequence: Synthetic oligonucleotide
cagugagucuaguguagug

SEQ ID NO: 1037510 - RNA, 19 nt, Artificial Sequence
  Description of Artificial Sequence: Synthetic oligonucleotide
gguuaguaugguuuaccca

SEQ ID NO: 1037511 - RNA, 19 nt, Artificial Sequence
  Description of Artificial Sequence: Synthetic oligonucleotide
auguaaguuagaacuuaca

SEQ ID NO: 1037512 - RNA, 19 nt, Artificial Sequence
  Description of Artificial Sequence: Synthetic oligonucleotide
aucgcacacuauuuauuaa

SEQ ID NO: 1037513 - RNA, 19 nt, Artificial Sequence
  Description of Artificial Sequence: Synthetic oligonucleotide
cucccuuuaucuacuaaaa

SEQ ID NO: 1037514 - RNA, 19 nt, Artificial Sequence
  Description of Artificial Sequence: Synthetic oligonucleotide
uguucggcugggccugacc

SEQ ID NO: 1037515 - RNA, 19 nt, Artificial Sequence
  Description of Artificial Sequence: Synthetic oligonucleotide
ggacaauccaggacaagcc

SEQ ID NO: 1037516 - RNA, 19 nt, Artificial Sequence
  Description of Artificial Sequence: Synthetic oligonucleotide
cugccagauguucggcugg

SEQ ID NO: 1037517 - RNA, 19 nt, Artificial Sequence
  Description of Artificial Sequence: Synthetic oligonucleotide
uagccacuuacuugguauc

SEQ ID NO: 1037518 - RNA, 19 nt, Artificial Sequence
  Description of Artificial Sequence: Synthetic oligonucleotide
caccauuaaagggaggaga

SEQ ID NO: 1037519 - RNA, 19 nt, Artificial Sequence
  Description of Artificial Sequence: Synthetic oligonucleotide
cauuaauaggcucccuuua

SEQ ID NO: 1037520 - RNA, 19 nt, Artificial Sequence
  Description of Artificial Sequence: Synthetic oligonucleotide
gagcaacgcugacucacug

SEQ ID NO: 1037521 - RNA, 19 nt, Artificial Sequence
  Description of Artificial Sequence: Synthetic oligonucleotide
agaagcagggacccaccau

SEQ ID NO: 1037522 - RNA, 19 nt, Artificial Sequence
  Description of Artificial Sequence: Synthetic oligonucleotide
acgaagugcucaucucacu

SEQ ID NO: 1037523 - RNA, 19 nt, Artificial Sequence
  Description of Artificial Sequence: Synthetic oligonucleotide
ggaaaucuagacuccaagu

SEQ ID NO: 1037524 - RNA, 19 nt, Artificial Sequence
  Description of Artificial Sequence: Synthetic oligonucleotide
aaccccuaaguggcuagcu

SEQ ID NO: 1037525 - RNA, 19 nt, Artificial Sequence
  Description of Artificial Sequence: Synthetic oligonucleotide
aguuuugucccugguuagu

SEQ ID NO: 1037526 - RNA, 19 nt, Artificial Sequence
  Description of Artificial Sequence: Synthetic oligonucleotide
cagacuggggccuguuuuc

SEQ ID NO: 1037527 - RNA, 19 nt, Artificial Sequence
  Description of Artificial Sequence: Synthetic oligonucleotide
gaagcagggacccaccauu

SEQ ID NO: 1037528 - RNA, 19 nt, Artificial Sequence
  Description of Artificial Sequence: Synthetic oligonucleotide
guaugguuuacccacuauu

SEQ ID NO: 1037529 - RNA, 19 nt, Artificial Sequence
  Description of Artificial Sequence: Synthetic oligonucleotide
cacacuguuucaaauguau

SEQ ID NO: 1037530 - RNA, 19 nt, Artificial Sequence
  Description of Artificial Sequence: Synthetic oligonucleotide
  modified_base (17)..(17): a, c, u, g, unknown or other
cacacacacacacacanau

SEQ ID NO: 1037531 - RNA, 19 nt, Artificial Sequence
  Description of Artificial Sequence: Synthetic oligonucleotide
gaacuuacaugagugcccu

SEQ ID NO: 1037532 - RNA, 19 nt, Artificial Sequence
  Description of Artificial Sequence: Synthetic oligonucleotide
acaacggaugggauacuug

SEQ ID NO: 1037533 - RNA, 19 nt, Artificial Sequence
  Description of Artificial Sequence: Synthetic oligonucleotide
gagucuaguguagugccaa

SEQ ID NO: 1037534 - RNA, 19 nt, Artificial Sequence
  Description of Artificial Sequence: Synthetic oligonucleotide
ucccagagcuuugcuaucu

SEQ ID NO: 1037535 - RNA, 19 nt, Artificial Sequence
  Description of Artificial Sequence: Synthetic oligonucleotide
gcuaugccaggucaucuug

SEQ ID NO: 1037536 - RNA, 19 nt, Artificial Sequence
  Description of Artificial Sequence: Synthetic oligonucleotide
caacggaugggauacuugu

SEQ ID NO: 1037537 - RNA, 19 nt, Artificial Sequence
  Description of Artificial Sequence: Synthetic oligonucleotide
aacaaaccccuaaguggcu

SEQ ID NO: 1037538 - RNA, 19 nt, Artificial Sequence
  Description of Artificial Sequence: Synthetic oligonucleotide
acagugagucuaguguagu

SEQ ID NO: 1037539 - RNA, 19 nt, Artificial Sequence
  Description of Artificial Sequence: Synthetic oligonucleotide
uaagucaggcagugaguuu

SEQ ID NO: 1037540 - RNA, 19 nt, Artificial Sequence
  Description of Artificial Sequence: Synthetic oligonucleotide
uuggguccuuauccuuagc

SEQ ID NO: 1037541 - RNA, 19 nt, Artificial Sequence
  Description of Artificial Sequence: Synthetic oligonucleotide
aucuagacuccaaguuauc

SEQ ID NO: 1037542 - RNA, 19 nt, Artificial Sequence
  Description of Artificial Sequence: Synthetic oligonucleotide
auaucgcacacuauuuauu

SEQ ID NO: 1037543 - RNA, 19 nt, Artificial Sequence
  Description of Artificial Sequence: Synthetic oligonucleotide
gcucccuuuaucuacuaaa

SEQ ID NO: 1037544 - RNA, 19 nt, Artificial Sequence
  Description of Artificial Sequence: Synthetic oligonucleotide
gcccacuucucucugagga

SEQ ID NO: 1037545 - RNA, 19 nt, Artificial Sequence
  Description of Artificial Sequence: Synthetic oligonucleotide
ccaaucacagugagucuag

SEQ ID NO: 1037546 - RNA, 19 nt, Artificial Sequence
  Description of Artificial Sequence: Synthetic oligonucleotide
gugugugcaguacggcaac

SEQ ID NO: 1037547 - RNA, 19 nt, Artificial Sequence
  Description of Artificial Sequence: Synthetic oligonucleotide
agccacuuacuugguaucu

SEQ ID NO: 1037548 - RNA, 19 nt, Artificial Sequence
  Description of Artificial Sequence: Synthetic oligonucleotide
auauugcuagccacuuacu

SEQ ID NO: 1037549 - RNA, 19 nt, Artificial Sequence
  Description of Artificial Sequence: Synthetic oligonucleotide
ccaaguuauccauugccca

SEQ ID NO: 1037550 - RNA, 19 nt, Artificial Sequence
  Description of Artificial Sequence: Synthetic oligonucleotide
agaugccccaguggaaaug

SEQ ID NO: 1037551 - RNA, 19 nt, Artificial Sequence
  Description of Artificial Sequence: Synthetic oligonucleotide
agcaucauugaaggccacu

SEQ ID NO: 1037552 - RNA, 19 nt, Artificial Sequence
  Description of Artificial Sequence: Synthetic oligonucleotide
auacacacacacacacaca

SEQ ID NO: 1037553 - RNA, 19 nt, Artificial Sequence
  Description of Artificial Sequence: Synthetic oligonucleotide
uuacccacuauugccuguu

SEQ ID NO: 1037554 - RNA, 19 nt, Artificial Sequence
  Description of Artificial Sequence: Synthetic oligonucleotide
ccaaggaagaggcaguuaa

SEQ ID NO: 1037555 - RNA, 19 nt, Artificial Sequence
  Description of Artificial Sequence: Synthetic oligonucleotide
acauccaacgggaaaucua

SEQ ID NO: 1037556 - RNA, 19 nt, Artificial Sequence
  Description of Artificial Sequence: Synthetic oligonucleotide
cacuuacuugguaucuuaa

SEQ ID NO: 1037557 - RNA, 19 nt, Artificial Sequence
  Description of Artificial Sequence: Synthetic oligonucleotide
cauugcccacuucucucug

SEQ ID NO: 1037558 - RNA, 19 nt, Artificial Sequence
  Description of Artificial Sequence: Synthetic oligonucleotide
ggaacccucaaaucccaga

SEQ ID NO: 1037559 - RNA, 19 nt, Artificial Sequence
  Description of Artificial Sequence: Synthetic oligonucleotide
gugcaguacggcaaccuca

SEQ ID NO: 1037560 - RNA, 19 nt, Artificial Sequence
  Description of Artificial Sequence: Synthetic oligonucleotide
ugggguugugugugcagua

SEQ ID NO: 1037561 - RNA, 19 nt, Artificial Sequence
  Description of Artificial Sequence: Synthetic oligonucleotide
gcucaugagauuagcuccc

SEQ ID NO: 1037562 - RNA, 19 nt, Artificial Sequence
  Description of Artificial Sequence: Synthetic oligonucleotide
gaccucaccaaaagagaaa

SEQ ID NO: 1037563 - RNA, 19 nt, Artificial Sequence
  Description of Artificial Sequence: Synthetic oligonucleotide
cacgcacuagggcuagcug

SEQ ID NO: 1037564 - RNA, 19 nt, Artificial Sequence
  Description of Artificial Sequence: Synthetic oligonucleotide
agucuaguguagugccaaa

SEQ ID NO: 1037565 - RNA, 19 nt, Artificial Sequence
  Description of Artificial Sequence: Synthetic oligonucleotide
gucccuuaacuagaaggga

SEQ ID NO: 1037566 - RNA, 19 nt, Artificial Sequence
  Description of Artificial Sequence: Synthetic oligonucleotide
  modified_base (16)..(16): a, c, u, g, unknown or other
acacacacacacacanaua

SEQ ID NO: 1037567 - RNA, 19 nt, Artificial Sequence
  Description of Artificial Sequence: Synthetic oligonucleotide
gguguucagggaacuuagg

SEQ ID NO: 1037568 - RNA, 19 nt, Artificial Sequence
  Description of Artificial Sequence: Synthetic oligonucleotide
gguccuuauccuuagcuau

SEQ ID NO: 1037569 - RNA, 19 nt, Artificial Sequence
  Description of Artificial Sequence: Synthetic oligonucleotide
ugcuagccacuuacuuggu

SEQ ID NO: 1037570 - RNA, 19 nt, Artificial Sequence
  Description of Artificial Sequence: Synthetic oligonucleotide
guucacgcacuagggcuag

SEQ ID NO: 1037571 - RNA, 19 nt, Artificial Sequence
  Description of Artificial Sequence: Synthetic oligonucleotide
guuuugucccugguuagua

SEQ ID NO: 1037572 - RNA, 19 nt, Artificial Sequence
  Description of Artificial Sequence: Synthetic oligonucleotide
ccaguuuugucccugguua

SEQ ID NO: 1037573 - RNA, 19 nt, Artificial Sequence
  Description of Artificial Sequence: Synthetic oligonucleotide
aacuuacaugagugcccuu

SEQ ID NO: 1037574 - RNA, 19 nt, Artificial Sequence
  Description of Artificial Sequence: Synthetic oligonucleotide
cucccagguguucagggaa

SEQ ID NO: 1037575 - RNA, 19 nt, Artificial Sequence
  Description of Artificial Sequence: Synthetic oligonucleotide
acacuguuucaaauguauu

SEQ ID NO: 1037576 - RNA, 19 nt, Artificial Sequence
  Description of Artificial Sequence: Synthetic oligonucleotide
agcuuuccagcagucuagu

SEQ ID NO: 1037577 - RNA, 19 nt, Artificial Sequence
  Description of Artificial Sequence: Synthetic oligonucleotide
guuaagucaggcagugagu

SEQ ID NO: 1037578 - RNA, 19 nt, Artificial Sequence
  Description of Artificial Sequence: Synthetic oligonucleotide
accccuaaguggcuagcuu

SEQ ID NO: 1037579 - RNA, 19 nt, Artificial Sequence
  Description of Artificial Sequence: Synthetic oligonucleotide
acacacacacacacacaca

SEQ ID NO: 1037580 - RNA, 19 nt, Artificial Sequence
  Description of Artificial Sequence: Synthetic oligonucleotide
agaguucuuacagguggua

SEQ ID NO: 1037581 - RNA, 19 nt, Artificial Sequence
  Description of Artificial Sequence: Synthetic oligonucleotide
agcagggacccaccauuaa

SEQ ID NO: 1037582 - RNA, 19 nt, Artificial Sequence
  Description of Artificial Sequence: Synthetic oligonucleotide
uccagacuggggccuguuu

SEQ ID NO: 1037583 - RNA, 19 nt, Artificial Sequence
  Description of Artificial Sequence: Synthetic oligonucleotide
gacaaccacauaaaaccuu

SEQ ID NO: 1037584 - RNA, 19 nt, Artificial Sequence
  Description of Artificial Sequence: Synthetic oligonucleotide
ggaccucaccaaaagagaa

SEQ ID NO: 1037585 - RNA, 19 nt, Artificial Sequence
  Description of Artificial Sequence: Synthetic oligonucleotide
ccauuaaagggaggagagc

SEQ ID NO: 1037586 - RNA, 19 nt, Artificial Sequence
  Description of Artificial Sequence: Synthetic oligonucleotide
ccuuagcuaugccagguca

SEQ ID NO: 1037587 - RNA, 19 nt, Artificial Sequence
  Description of Artificial Sequence: Synthetic oligonucleotide
cuuagcuaugccaggucau

SEQ ID NO: 1037588 - RNA, 19 nt, Artificial Sequence
  Description of Artificial Sequence: Synthetic oligonucleotide
ggugguguucacgcacuag

SEQ ID NO: 1037589 - RNA, 19 nt, Artificial Sequence
  Description of Artificial Sequence: Synthetic oligonucleotide
gguuuacccacuauugccu

SEQ ID NO: 1037590 - RNA, 19 nt, Artificial Sequence
  Description of Artificial Sequence: Synthetic oligonucleotide
ggcaaaagggcucccucaa

SEQ ID NO: 1037591 - RNA, 19 nt, Artificial Sequence
  Description of Artificial Sequence: Synthetic oligonucleotide
uaacccugacuuggugcac

SEQ ID NO: 1037592 - RNA, 19 nt, Artificial Sequence
  Description of Artificial Sequence: Synthetic oligonucleotide
ccuuauccuuagcuaugcc

SEQ ID NO: 1037593 - RNA, 19 nt, Artificial Sequence
  Description of Artificial Sequence: Synthetic oligonucleotide
cgauaaauaacgacuccaa

SEQ ID NO: 1037594 - RNA, 19 nt, Artificial Sequence
  Description of Artificial Sequence: Synthetic oligonucleotide
gguguaaaauuaggcaaua

SEQ ID NO: 1037595 - RNA, 19 nt, Artificial Sequence
  Description of Artificial Sequence: Synthetic oligonucleotide
ggauacacacacacacaca

SEQ ID NO: 1037596 - RNA, 19 nt, Artificial Sequence
  Description of Artificial Sequence: Synthetic oligonucleotide
cacuucucucugaggagaa

SEQ ID NO: 1037597 - RNA, 19 nt, Artificial Sequence
  Description of Artificial Sequence: Synthetic oligonucleotide
ugagugcccuuaguccaaa

SEQ ID NO: 1037598 - RNA, 19 nt, Artificial Sequence
  Description of Artificial Sequence: Synthetic oligonucleotide
cagguguucagggaacuua

SEQ ID NO: 1037599 - RNA, 19 nt, Artificial Sequence
  Description of Artificial Sequence: Synthetic oligonucleotide
  modified_base (18)..(18): a, c, u, g, unknown or other
acacacacacacacacana

SEQ ID NO: 1037600 - RNA, 19 nt, Artificial Sequence
  Description of Artificial Sequence: Synthetic oligonucleotide
agguagucuaaaacauaua

SEQ ID NO: 1037601 - RNA, 19 nt, Artificial Sequence
  Description of Artificial Sequence: Synthetic oligonucleotide
cagcagucuaguuuggauu

SEQ ID NO: 1037602 - RNA, 19 nt, Artificial Sequence
  Description of Artificial Sequence: Synthetic oligonucleotide
gguaccaccugguuccagu

SEQ ID NO: 1037603 - RNA, 19 nt, Artificial Sequence
  Description of Artificial Sequence: Synthetic oligonucleotide
acacacuguuucaaaugua

SEQ ID NO: 1037604 - RNA, 19 nt, Artificial Sequence
  Description of Artificial Sequence: Synthetic oligonucleotide
gcagggacccaccauuaaa

SEQ ID NO: 1037605 - RNA, 19 nt, Artificial Sequence
  Description of Artificial Sequence: Synthetic oligonucleotide
cuagggcuagcugggcauc

SEQ ID NO: 1037606 - RNA, 19 nt, Artificial Sequence
  Description of Artificial Sequence: Synthetic oligonucleotide
agucuaguuuggauuuauu

SEQ ID NO: 1037607 - RNA, 19 nt, Artificial Sequence
  Description of Artificial Sequence: Synthetic oligonucleotide
ccugcacaauuaauuaaaa

SEQ ID NO: 1037608 - RNA, 19 nt, Artificial Sequence
  Description of Artificial Sequence: Synthetic oligonucleotide
gccuguuugguaggggaug

SEQ ID NO: 1037609 - RNA, 19 nt, Artificial Sequence
  Description of Artificial Sequence: Synthetic oligonucleotide
auccaacgggaaaucuaga

SEQ ID NO: 1037610 - RNA, 19 nt, Artificial Sequence
  Description of Artificial Sequence: Synthetic oligonucleotide
guacggcaaccucagaguu

SEQ ID NO: 1037611 - RNA, 19 nt, Artificial Sequence
  Description of Artificial Sequence: Synthetic oligonucleotide
acgcugacucacugggaua

SEQ ID NO: 1037612 - RNA, 19 nt, Artificial Sequence
  Description of Artificial Sequence: Synthetic oligonucleotide
gggugggaacccucaaauc

SEQ ID NO: 1037613 - RNA, 19 nt, Artificial Sequence
  Description of Artificial Sequence: Synthetic oligonucleotide
caacgcugacucacuggga

SEQ ID NO: 1037614 - RNA, 19 nt, Artificial Sequence
  Description of Artificial Sequence: Synthetic oligonucleotide
cccuuaacuagaagggaaa

SEQ ID NO: 1037615 - RNA, 19 nt, Artificial Sequence
  Description of Artificial Sequence: Synthetic oligonucleotide
guuuccaaucacagugagu

SEQ ID NO: 1037616 - RNA, 19 nt, Artificial Sequence
  Description of Artificial Sequence: Synthetic oligonucleotide
gcccuuaguccaaaugcac

SEQ ID NO: 1037617 - RNA, 19 nt, Artificial Sequence
  Description of Artificial Sequence: Synthetic oligonucleotide
agggcucccucaaaauuuu

SEQ ID NO: 1037618 - RNA, 19 nt, Artificial Sequence
  Description of Artificial Sequence: Synthetic oligonucleotide
augagugcccuuaguccaa

SEQ ID NO: 1037619 - RNA, 19 nt, Artificial Sequence
  Description of Artificial Sequence: Synthetic oligonucleotide
acccaccauuaaagggagg

SEQ ID NO: 1037620 - RNA, 19 nt, Artificial Sequence
  Description of Artificial Sequence: Synthetic oligonucleotide
gugccaaaacgaagugcuc

SEQ ID NO: 1037621 - RNA, 19 nt, Artificial Sequence
  Description of Artificial Sequence: Synthetic oligonucleotide
ggaggagagcaacgcugac

SEQ ID NO: 1037622 - RNA, 19 nt, Artificial Sequence
  Description of Artificial Sequence: Synthetic oligonucleotide
gacaacggaugggauacuu

SEQ ID NO: 1037623 - RNA, 19 nt, Artificial Sequence
  Description of Artificial Sequence: Synthetic oligonucleotide
ggggugggaacccucaaau

SEQ ID NO: 1037624 - RNA, 19 nt, Artificial Sequence
  Description of Artificial Sequence: Synthetic oligonucleotide
aggggacaauccaggacaa

SEQ ID NO: 1037625 - RNA, 19 nt, Artificial Sequence
  Description of Artificial Sequence: Synthetic oligonucleotide
cacgggaaccagacuccca

SEQ ID NO: 1037626 - RNA, 19 nt, Artificial Sequence
  Description of Artificial Sequence: Synthetic oligonucleotide
agacaacggaugggauacu

SEQ ID NO: 1037627 - RNA, 19 nt, Artificial Sequence
  Description of Artificial Sequence: Synthetic oligonucleotide
acccuaacccugacuuggu

SEQ ID NO: 1037628 - RNA, 19 nt, Artificial Sequence
  Description of Artificial Sequence: Synthetic oligonucleotide
gccaaaacgaagugcucau

SEQ ID NO: 1037629 - RNA, 19 nt, Artificial Sequence
  Description of Artificial Sequence: Synthetic oligonucleotide
gggaacccucaaaucccag

SEQ ID NO: 1037630 - RNA, 19 nt, Artificial Sequence
  Description of Artificial Sequence: Synthetic oligonucleotide
gcaaaagggcucccucaaa

SEQ ID NO: 1037631 - RNA, 19 nt, Artificial Sequence
  Description of Artificial Sequence: Synthetic oligonucleotide
ccacuuacuugguaucuua

SEQ ID NO: 1037632 - RNA, 19 nt, Artificial Sequence
  Description of Artificial Sequence: Synthetic oligonucleotide
ggcaaccucagaguucuua

SEQ ID NO: 1037633 - RNA, 19 nt, Artificial Sequence
  Description of Artificial Sequence: Synthetic oligonucleotide
ccuuaacuagaagggaaaa

SEQ ID NO: 1037634 - RNA, 19 nt, Artificial Sequence
  Description of Artificial Sequence: Synthetic oligonucleotide
ggcaguuaagucaggcagu

SEQ ID NO: 1037635 - RNA, 19 nt, Artificial Sequence
  Description of Artificial Sequence: Synthetic oligonucleotide
ggggacaauccaggacaag

SEQ ID NO: 1037636 - RNA, 19 nt, Artificial Sequence
  Description of Artificial Sequence: Synthetic oligonucleotide
cccuaacccugacuuggug

SEQ ID NO: 1037637 - RNA, 19 nt, Artificial Sequence
  Description of Artificial Sequence: Synthetic oligonucleotide
ggugguacuggaugugguu

SEQ ID NO: 1037638 - RNA, 19 nt, Artificial Sequence
  Description of Artificial Sequence: Synthetic oligonucleotide
ccaaaacgaagugcucauc

SEQ ID NO: 1037639 - RNA, 19 nt, Artificial Sequence
  Description of Artificial Sequence: Synthetic oligonucleotide
gauuagcucccugcacaau

SEQ ID NO: 1037640 - RNA, 19 nt, Artificial Sequence
  Description of Artificial Sequence: Synthetic oligonucleotide
ggcucccuuuaucuacuaa

SEQ ID NO: 1037641 - RNA, 19 nt, Artificial Sequence
  Description of Artificial Sequence: Synthetic oligonucleotide
ccuaggcucucauaaccua

SEQ ID NO: 1037642 - RNA, 19 nt, Artificial Sequence
  Description of Artificial Sequence: Synthetic oligonucleotide
gggccugacccucacucua

SEQ ID NO: 1037643 - RNA, 19 nt, Artificial Sequence
  Description of Artificial Sequence: Synthetic oligonucleotide
agggcuagcugggcaucaa

SEQ ID NO: 1037644 - RNA, 19 nt, Artificial Sequence
  Description of Artificial Sequence: Synthetic oligonucleotide
cagucuaguuuggauuuau

SEQ ID NO: 1037645 - RNA, 19 nt, Artificial Sequence
  Description of Artificial Sequence: Synthetic oligonucleotide
ccucaaaucccagagcuuu

SEQ ID NO: 1037646 - RNA, 19 nt, Artificial Sequence
  Description of Artificial Sequence: Synthetic oligonucleotide
ccaacuuaauuuggguccu

SEQ ID NO: 1037647 - RNA, 19 nt, Artificial Sequence
  Description of Artificial Sequence: Synthetic oligonucleotide
ccugacuuggugcacuguu

SEQ ID NO: 1037648 - RNA, 19 nt, Artificial Sequence
  Description of Artificial Sequence: Synthetic oligonucleotide
gugcacuguuccugggguu

SEQ ID NO: 1037649 - RNA, 19 nt, Artificial Sequence
  Description of Artificial Sequence: Synthetic oligonucleotide
gcaguacggcaaccucaga

SEQ ID NO: 1037650 - RNA, 19 nt, Artificial Sequence
  Description of Artificial Sequence: Synthetic oligonucleotide
ccccuaaguggcuagcuuu

SEQ ID NO: 1037651 - RNA, 19 nt, Artificial Sequence
  Description of Artificial Sequence: Synthetic oligonucleotide
gcagucuaguuuggauuua

SEQ ID NO: 1037652 - RNA, 19 nt, Artificial Sequence
  Description of Artificial Sequence: Synthetic oligonucleotide
cgggaaaucuagacuccaa

SEQ ID NO: 1037653 - RNA, 19 nt, Artificial Sequence
  Description of Artificial Sequence: Synthetic oligonucleotide
ccacuauugccuguuuggu

SEQ ID NO: 1037654 - RNA, 19 nt, Artificial Sequence
  Description of Artificial Sequence: Synthetic oligonucleotide
gggugguguucacgcacua

SEQ ID NO: 1037655 - RNA, 19 nt, Artificial Sequence
  Description of Artificial Sequence: Synthetic oligonucleotide
gggcaucaagaaagaggaa

SEQ ID NO: 1037656 - RNA, 19 nt, Artificial Sequence
  Description of Artificial Sequence: Synthetic oligonucleotide
cgacuccaagaugccccag

SEQ ID NO: 1037657 - RNA, 19 nt, Artificial Sequence
  Description of Artificial Sequence: Synthetic oligonucleotide
ccuuuccuccagacaacuu

SEQ ID NO: 1037658 - RNA, 19 nt, Artificial Sequence
  Description of Artificial Sequence: Synthetic oligonucleotide
cggcaaccucagaguucuu

SEQ ID NO: 1037659 - RNA, 19 nt, Artificial Sequence
  Description of Artificial Sequence: Synthetic oligonucleotide
  modified_base (1)..(1): a, c, u, g, unknown or other
nauacacacacacaccaac

SEQ ID NO: 1037660 - RNA, 19 nt, Artificial Sequence
  Description of Artificial Sequence: Synthetic oligonucleotide
gaaaaguucacucugcagc

SEQ ID NO: 1037661 - RNA, 19 nt, Artificial Sequence
  Description of Artificial Sequence: Synthetic oligonucleotide
guuuagaccauacagguag

SEQ ID NO: 1037662 - RNA, 19 nt, Artificial Sequence
  Description of Artificial Sequence: Synthetic oligonucleotide
aguaucgugagguuugugc

SEQ ID NO: 1037663 - RNA, 19 nt, Artificial Sequence
  Description of Artificial Sequence: Synthetic oligonucleotide
aucuaauuuauuccggacc

SEQ ID NO: 1037664 - RNA, 19 nt, Artificial Sequence
  Description of Artificial Sequence: Synthetic oligonucleotide
cauaguuuagaccauacag

SEQ ID NO: 1037665 - RNA, 19 nt, Artificial Sequence
  Description of Artificial Sequence: Synthetic oligonucleotide
uguuauguauguaaaagac

SEQ ID NO: 1037666 - RNA, 19 nt, Artificial Sequence
  Description of Artificial Sequence: Synthetic oligonucleotide
gaugcauacagacaagucc

SEQ ID NO: 1037667 - RNA, 19 nt, Artificial Sequence
  Description of Artificial Sequence: Synthetic oligonucleotide
ugcaacacuggccauaacg

SEQ ID NO: 1037668 - RNA, 19 nt, Artificial Sequence
  Description of Artificial Sequence: Synthetic oligonucleotide
auauacuuagcuuguaccg

SEQ ID NO: 1037669 - RNA, 19 nt, Artificial Sequence
  Description of Artificial Sequence: Synthetic oligonucleotide
gauauacuuagcuuguacc

SEQ ID NO: 1037670 - RNA, 19 nt, Artificial Sequence
  Description of Artificial Sequence: Synthetic oligonucleotide
agacaaaucagucaggcca

SEQ ID NO: 1037671 - RNA, 19 nt, Artificial Sequence
  Description of Artificial Sequence: Synthetic oligonucleotide
ucuuaauugcauaaugcug

SEQ ID NO: 1037672 - RNA, 19 nt, Artificial Sequence
  Description of Artificial Sequence: Synthetic oligonucleotide
ucuaauuuauuccggaccu

SEQ ID NO: 1037673 - RNA, 19 nt, Artificial Sequence
  Description of Artificial Sequence: Synthetic oligonucleotide
aaccuuuacuucucggagc

SEQ ID NO: 1037674 - RNA, 19 nt, Artificial Sequence
  Description of Artificial Sequence: Synthetic oligonucleotide
aauauuucuaggcuucaga

SEQ ID NO: 1037675 - RNA, 19 nt, Artificial Sequence
  Description of Artificial Sequence: Synthetic oligonucleotide
uuuuaagaguguaagucca

SEQ ID NO: 1037676 - RNA, 19 nt, Artificial Sequence
  Description of Artificial Sequence: Synthetic oligonucleotide
uuaaguaucgugagguuug

SEQ ID NO: 1037677 - RNA, 19 nt, Artificial Sequence
  Description of Artificial Sequence: Synthetic oligonucleotide
auagacaaaucagucaggc

SEQ ID NO: 1037678 - RNA, 19 nt, Artificial Sequence
  Description of Artificial Sequence: Synthetic oligonucleotide
ugauagccgacaauguugg

SEQ ID NO: 1037679 - RNA, 19 nt, Artificial Sequence
  Description of Artificial Sequence: Synthetic oligonucleotide
uauguaaaagacacccucc

SEQ ID NO: 1037680 - RNA, 19 nt, Artificial Sequence
  Description of Artificial Sequence: Synthetic oligonucleotide
guaagaauuaucuucacaa

SEQ ID NO: 1037681 - RNA, 19 nt, Artificial Sequence
  Description of Artificial Sequence: Synthetic oligonucleotide
gaccaucuaauuuauuccg

SEQ ID NO: 1037682 - RNA, 19 nt, Artificial Sequence
  Description of Artificial Sequence: Synthetic oligonucleotide
aaaaguucacucugcagca

SEQ ID NO: 1037683 - RNA, 19 nt, Artificial Sequence
  Description of Artificial Sequence: Synthetic oligonucleotide
ucauuuaaguaucgugagg

SEQ ID NO: 1037684 - RNA, 19 nt, Artificial Sequence
  Description of Artificial Sequence: Synthetic oligonucleotide
uuuaguugcacuguuaauc

SEQ ID NO: 1037685 - RNA, 19 nt, Artificial Sequence
  Description of Artificial Sequence: Synthetic oligonucleotide
guaaaagacacccuccacc

SEQ ID NO: 1037686 - RNA, 19 nt, Artificial Sequence
  Description of Artificial Sequence: Synthetic oligonucleotide
auaguuuagaccauacagg

SEQ ID NO: 1037687 - RNA, 19 nt, Artificial Sequence
  Description of Artificial Sequence: Synthetic oligonucleotide
agacaacauaguuuagacc

SEQ ID NO: 1037688 - RNA, 19 nt, Artificial Sequence
  Description of Artificial Sequence: Synthetic oligonucleotide
aaugcugaccaucuaauuu

SEQ ID NO: 1037689 - RNA, 19 nt, Artificial Sequence
  Description of Artificial Sequence: Synthetic oligonucleotide
uucguugcaacacuggcca

SEQ ID NO: 1037690 - RNA, 19 nt, Artificial Sequence
  Description of Artificial Sequence: Synthetic oligonucleotide
ugaaaguuuacauuccuau

SEQ ID NO: 1037691 - RNA, 19 nt, Artificial Sequence
  Description of Artificial Sequence: Synthetic oligonucleotide
uaagaauuaucuucacaag

SEQ ID NO: 1037692 - RNA, 19 nt, Artificial Sequence
  Description of Artificial Sequence: Synthetic oligonucleotide
uucgauuuccuucucuugc

SEQ ID NO: 1037693 - RNA, 19 nt, Artificial Sequence
  Description of Artificial Sequence: Synthetic oligonucleotide
uuaguugcacuguuaauca

SEQ ID NO: 1037694 - RNA, 19 nt, Artificial Sequence
  Description of Artificial Sequence: Synthetic oligonucleotide
uaaaagacacccuccacca

SEQ ID NO: 1037695 - RNA, 19 nt, Artificial Sequence
  Description of Artificial Sequence: Synthetic oligonucleotide
aguguaaguccacuuuccc

SEQ ID NO: 1037696 - RNA, 19 nt, Artificial Sequence
  Description of Artificial Sequence: Synthetic oligonucleotide
augcauacagacaaguccc

SEQ ID NO: 1037697 - RNA, 19 nt, Artificial Sequence
  Description of Artificial Sequence: Synthetic oligonucleotide
aaauuuucguugcaacacu

SEQ ID NO: 1037698 - RNA, 19 nt, Artificial Sequence
  Description of Artificial Sequence: Synthetic oligonucleotide
uuuacugagggauucgggu

SEQ ID NO: 1037699 - RNA, 19 nt, Artificial Sequence
  Description of Artificial Sequence: Synthetic oligonucleotide
uuuuccuaagaugucaagc

SEQ ID NO: 1037700 - RNA, 19 nt, Artificial Sequence
  Description of Artificial Sequence: Synthetic oligonucleotide
uauacuuagcuuguaccgg

SEQ ID NO: 1037701 - RNA, 19 nt, Artificial Sequence
  Description of Artificial Sequence: Synthetic oligonucleotide
ucucggagcaccuucauac

SEQ ID NO: 1037702 - RNA, 19 nt, Artificial Sequence
  Description of Artificial Sequence: Synthetic oligonucleotide
uuuguaugaugucugcaca

SEQ ID NO: 1037703 - RNA, 19 nt, Artificial Sequence
  Description of Artificial Sequence: Synthetic oligonucleotide
uucagaaugccuucagaag

SEQ ID NO: 1037704 - RNA, 19 nt, Artificial Sequence
  Description of Artificial Sequence: Synthetic oligonucleotide
cugaccaucuaauuuauuc

SEQ ID NO: 1037705 - RNA, 19 nt, Artificial Sequence
  Description of Artificial Sequence: Synthetic oligonucleotide
ugguagacaacauaguuua

SEQ ID NO: 1037706 - RNA, 19 nt, Artificial Sequence
  Description of Artificial Sequence: Synthetic oligonucleotide
acauaucugacuuggcauc

SEQ ID NO: 1037707 - RNA, 19 nt, Artificial Sequence
  Description of Artificial Sequence: Synthetic oligonucleotide
uguaaguccacuuucccau

SEQ ID NO: 1037708 - RNA, 19 nt, Artificial Sequence
  Description of Artificial Sequence: Synthetic oligonucleotide
uuaaugucagguuugccaa

SEQ ID NO: 1037709 - RNA, 19 nt, Artificial Sequence
  Description of Artificial Sequence: Synthetic oligonucleotide
uucaaaagcuaucucccug

SEQ ID NO: 1037710 - RNA, 19 nt, Artificial Sequence
  Description of Artificial Sequence: Synthetic oligonucleotide
cuuaugccuguuaagacug

SEQ ID NO: 1037711 - RNA, 19 nt, Artificial Sequence
  Description of Artificial Sequence: Synthetic oligonucleotide
agugugauagccgacaaug

SEQ ID NO: 1037712 - RNA, 19 nt, Artificial Sequence
  Description of Artificial Sequence: Synthetic oligonucleotide
auuaaaugagugauggcuc

SEQ ID NO: 1037713 - RNA, 19 nt, Artificial Sequence
  Description of Artificial Sequence: Synthetic oligonucleotide
uucaagagagggcaguuga

SEQ ID NO: 1037714 - RNA, 19 nt, Artificial Sequence
  Description of Artificial Sequence: Synthetic oligonucleotide
uggacuaugcccauguuau

SEQ ID NO: 1037715 - RNA, 19 nt, Artificial Sequence
  Description of Artificial Sequence: Synthetic oligonucleotide
aacauaguuuagaccauac

SEQ ID NO: 1037716 - RNA, 19 nt, Artificial Sequence
  Description of Artificial Sequence: Synthetic oligonucleotide
ugagguuugugcuucaaaa

SEQ ID NO: 1037717 - RNA, 19 nt, Artificial Sequence
  Description of Artificial Sequence: Synthetic oligonucleotide
ugcaacaucaggugguacc

SEQ ID NO: 1037718 - RNA, 19 nt, Artificial Sequence
  Description of Artificial Sequence: Synthetic oligonucleotide
ugcauaaugcugaccaucu

SEQ ID NO: 1037719 - RNA, 19 nt, Artificial Sequence
  Description of Artificial Sequence: Synthetic oligonucleotide
uuaaaugagugauggcucu

SEQ ID NO: 1037720 - RNA, 19 nt, Artificial Sequence
  Description of Artificial Sequence: Synthetic oligonucleotide
ggaaaggaggcuuaguugc

SEQ ID NO: 1037721 - RNA, 19 nt, Artificial Sequence
  Description of Artificial Sequence: Synthetic oligonucleotide
aagcuauacauaucugacu

SEQ ID NO: 1037722 - RNA, 19 nt, Artificial Sequence
  Description of Artificial Sequence: Synthetic oligonucleotide
aggagcuggauauacuuag

SEQ ID NO: 1037723 - RNA, 19 nt, Artificial Sequence
  Description of Artificial Sequence: Synthetic oligonucleotide
auauuucuaggcuucagau

SEQ ID NO: 1037724 - RNA, 19 nt, Artificial Sequence
  Description of Artificial Sequence: Synthetic oligonucleotide
uuuagaccauacagguagg

SEQ ID NO: 1037725 - RNA, 19 nt, Artificial Sequence
  Description of Artificial Sequence: Synthetic oligonucleotide
agcuauacauaucugacuu

SEQ ID NO: 1037726 - RNA, 19 nt, Artificial Sequence
  Description of Artificial Sequence: Synthetic oligonucleotide
guaaaugaagacagcagcc

SEQ ID NO: 1037727 - RNA, 19 nt, Artificial Sequence
  Description of Artificial Sequence: Synthetic oligonucleotide
agaauuaucuucacaagga

SEQ ID NO: 1037728 - RNA, 19 nt, Artificial Sequence
  Description of Artificial Sequence: Synthetic oligonucleotide
aaugugaaguuaacauuuc

SEQ ID NO: 1037729 - RNA, 19 nt, Artificial Sequence
  Description of Artificial Sequence: Synthetic oligonucleotide
uaauuuauuccggaccuug

SEQ ID NO: 1037730 - RNA, 19 nt, Artificial Sequence
  Description of Artificial Sequence: Synthetic oligonucleotide
auacagucuguuuuaguug

SEQ ID NO: 1037731 - RNA, 19 nt, Artificial Sequence
  Description of Artificial Sequence: Synthetic oligonucleotide
gacgacucaaauucacugc

SEQ ID NO: 1037732 - RNA, 19 nt, Artificial Sequence
  Description of Artificial Sequence: Synthetic oligonucleotide
ugugguguagucucaguga

SEQ ID NO: 1037733 - RNA, 19 nt, Artificial Sequence
  Description of Artificial Sequence: Synthetic oligonucleotide
gcuggauauacuuagcuug

SEQ ID NO: 1037734 - RNA, 19 nt, Artificial Sequence
  Description of Artificial Sequence: Synthetic oligonucleotide
auccgaccaguccuuaugc

SEQ ID NO: 1037735 - RNA, 19 nt, Artificial Sequence
  Description of Artificial Sequence: Synthetic oligonucleotide
ucuuuggcagaccucauua

SEQ ID NO: 1037736 - RNA, 19 nt, Artificial Sequence
  Description of Artificial Sequence: Synthetic oligonucleotide
aguuaggagcuggauauac

SEQ ID NO: 1037737 - RNA, 19 nt, Artificial Sequence
  Description of Artificial Sequence: Synthetic oligonucleotide
ucugcauguaagaauuauc

SEQ ID NO: 1037738 - RNA, 19 nt, Artificial Sequence
  Description of Artificial Sequence: Synthetic oligonucleotide
aaguucagaaugccuucag

SEQ ID NO: 1037739 - RNA, 19 nt, Artificial Sequence
  Description of Artificial Sequence: Synthetic oligonucleotide
aagaguguaaguccacuuu

SEQ ID NO: 1037740 - RNA, 19 nt, Artificial Sequence
  Description of Artificial Sequence: Synthetic oligonucleotide
agauccuuccaacuguuca

SEQ ID NO: 1037741 - RNA, 19 nt, Artificial Sequence
  Description of Artificial Sequence: Synthetic oligonucleotide
uuguggccgaaccacauga

SEQ ID NO: 1037742 - RNA, 19 nt, Artificial Sequence
  Description of Artificial Sequence: Synthetic oligonucleotide
agcacuucaagagagggca

SEQ ID NO: 1037743 - RNA, 19 nt, Artificial Sequence
  Description of Artificial Sequence: Synthetic oligonucleotide
cacuaagucagcaguguag

SEQ ID NO: 1037744 - RNA, 19 nt, Artificial Sequence
  Description of Artificial Sequence: Synthetic oligonucleotide
cucucacuuauccaguccc

SEQ ID NO: 1037745 - RNA, 19 nt, Artificial Sequence
  Description of Artificial Sequence: Synthetic oligonucleotide
uaaggguugaaaguuuaca

SEQ ID NO: 1037746 - RNA, 19 nt, Artificial Sequence
  Description of Artificial Sequence: Synthetic oligonucleotide
gaagacucauccgaggaug

SEQ ID NO: 1037747 - RNA, 19 nt, Artificial Sequence
  Description of Artificial Sequence: Synthetic oligonucleotide
ugucuggaaaaguucacuc

SEQ ID NO: 1037748 - RNA, 19 nt, Artificial Sequence
  Description of Artificial Sequence: Synthetic oligonucleotide
uauccgaccaguccuuaug

SEQ ID NO: 1037749 - RNA, 19 nt, Artificial Sequence
  Description of Artificial Sequence: Synthetic oligonucleotide
ugaugcuugacaacugguc

SEQ ID NO: 1037750 - RNA, 19 nt, Artificial Sequence
  Description of Artificial Sequence: Synthetic oligonucleotide
cuuagcuuguaccggacac

SEQ ID NO: 1037751 - RNA, 19 nt, Artificial Sequence
  Description of Artificial Sequence: Synthetic oligonucleotide
uuaauugcauaaugcugac

SEQ ID NO: 1037752 - RNA, 19 nt, Artificial Sequence
  Description of Artificial Sequence: Synthetic oligonucleotide
cacuuauccagucccacag

SEQ ID NO: 1037753 - RNA, 19 nt, Artificial Sequence
  Description of Artificial Sequence: Synthetic oligonucleotide
ugauggacucucucuuugg

SEQ ID NO: 1037754 - RNA, 19 nt, Artificial Sequence
  Description of Artificial Sequence: Synthetic oligonucleotide
ucauuaaaugagugauggc

SEQ ID NO: 1037755 - RNA, 19 nt, Artificial Sequence
  Description of Artificial Sequence: Synthetic oligonucleotide
uuuacuucucggagcaccu

SEQ ID NO: 1037756 - RNA, 19 nt, Artificial Sequence
  Description of Artificial Sequence: Synthetic oligonucleotide
uaccggacaccuuuuacug

SEQ ID NO: 1037757 - RNA, 19 nt, Artificial Sequence
  Description of Artificial Sequence: Synthetic oligonucleotide
cuuuacuucucggagcacc

SEQ ID NO: 1037758 - RNA, 19 nt, Artificial Sequence
  Description of Artificial Sequence: Synthetic oligonucleotide
ucugacuuggcaucauacu

SEQ ID NO: 1037759 - RNA, 19 nt, Artificial Sequence
  Description of Artificial Sequence: Synthetic oligonucleotide
acucagauccuuccaacug

SEQ ID NO: 1037760 - RNA, 19 nt, Artificial Sequence
  Description of Artificial Sequence: Synthetic oligonucleotide
cacaugaacauguucuauc

SEQ ID NO: 1037761 - RNA, 19 nt, Artificial Sequence
  Description of Artificial Sequence: Synthetic oligonucleotide
uguuaaucaggauuuucuu

SEQ ID NO: 1037762 - RNA, 19 nt, Artificial Sequence
  Description of Artificial Sequence: Synthetic oligonucleotide
uguccugaauggcugaaaa

SEQ ID NO: 1037763 - RNA, 19 nt, Artificial Sequence
  Description of Artificial Sequence: Synthetic oligonucleotide
cugacuuggcaucauacuc

SEQ ID NO: 1037764 - RNA, 19 nt, Artificial Sequence
  Description of Artificial Sequence: Synthetic oligonucleotide
uuuaaguaucgugagguuu

SEQ ID NO: 1037765 - RNA, 19 nt, Artificial Sequence
  Description of Artificial Sequence: Synthetic oligonucleotide
ugugauagccgacaauguu

SEQ ID NO: 1037766 - RNA, 19 nt, Artificial Sequence
  Description of Artificial Sequence: Synthetic oligonucleotide
acgacucaaauucacugcu

SEQ ID NO: 1037767 - RNA, 19 nt, Artificial Sequence
  Description of Artificial Sequence: Synthetic oligonucleotide
accuuuacuucucggagca

SEQ ID NO: 1037768 - RNA, 19 nt, Artificial Sequence
  Description of Artificial Sequence: Synthetic oligonucleotide
acaccuuuuacugagggau

SEQ ID NO: 1037769 - RNA, 19 nt, Artificial Sequence
  Description of Artificial Sequence: Synthetic oligonucleotide
aguuaugcccaaguggcag

SEQ ID NO: 1037770 - RNA, 19 nt, Artificial Sequence
  Description of Artificial Sequence: Synthetic oligonucleotide
ucggagcaccuucauacag

SEQ ID NO: 1037771 - RNA, 19 nt, Artificial Sequence
  Description of Artificial Sequence: Synthetic oligonucleotide
uccgaguuaugcccaagug

SEQ ID NO: 1037772 - RNA, 19 nt, Artificial Sequence
  Description of Artificial Sequence: Synthetic oligonucleotide
auacuuagcuuguaccgga

SEQ ID NO: 1037773 - RNA, 19 nt, Artificial Sequence
  Description of Artificial Sequence: Synthetic oligonucleotide
uauuccggaccuuguauac

SEQ ID NO: 1037774 - RNA, 19 nt, Artificial Sequence
  Description of Artificial Sequence: Synthetic oligonucleotide
uaagacuguugcucgcucc

SEQ ID NO: 1037775 - RNA, 19 nt, Artificial Sequence
  Description of Artificial Sequence: Synthetic oligonucleotide
aguguuccagcaaggagac

SEQ ID NO: 1037776 - RNA, 19 nt, Artificial Sequence
  Description of Artificial Sequence: Synthetic oligonucleotide
uagacaaaucagucaggcc

SEQ ID NO: 1037777 - RNA, 19 nt, Artificial Sequence
  Description of Artificial Sequence: Synthetic oligonucleotide
aggcgaugcauacagacaa

SEQ ID NO: 1037778 - RNA, 19 nt, Artificial Sequence
  Description of Artificial Sequence: Synthetic oligonucleotide
uguaccggacaccuuuuac

SEQ ID NO: 1037779 - RNA, 19 nt, Artificial Sequence
  Description of Artificial Sequence: Synthetic oligonucleotide
gugauagccgacaauguug

SEQ ID NO: 1037780 - RNA, 19 nt, Artificial Sequence
  Description of Artificial Sequence: Synthetic oligonucleotide
accucauuaaaugagugau

SEQ ID NO: 1037781 - RNA, 19 nt, Artificial Sequence
  Description of Artificial Sequence: Synthetic oligonucleotide
auauccuccuuuuccuaag

SEQ ID NO: 1037782 - RNA, 19 nt, Artificial Sequence
  Description of Artificial Sequence: Synthetic oligonucleotide
aacaucaggugguaccgaa

SEQ ID NO: 1037783 - RNA, 19 nt, Artificial Sequence
  Description of Artificial Sequence: Synthetic oligonucleotide
uguuaagacuguugcucgc

SEQ ID NO: 1037784 - RNA, 19 nt, Artificial Sequence
  Description of Artificial Sequence: Synthetic oligonucleotide
ucggguauccgaccagucc

SEQ ID NO: 1037785 - RNA, 19 nt, Artificial Sequence
  Description of Artificial Sequence: Synthetic oligonucleotide
acauaguuuagaccauaca

SEQ ID NO: 1037786 - RNA, 19 nt, Artificial Sequence
  Description of Artificial Sequence: Synthetic oligonucleotide
uccuuaugccuguuaagac

SEQ ID NO: 1037787 - RNA, 19 nt, Artificial Sequence
  Description of Artificial Sequence: Synthetic oligonucleotide
uuaagaguguaaguccacu

SEQ ID NO: 1037788 - RNA, 19 nt, Artificial Sequence
  Description of Artificial Sequence: Synthetic oligonucleotide
cugauagacaaaucaguca

SEQ ID NO: 1037789 - RNA, 19 nt, Artificial Sequence
  Description of Artificial Sequence: Synthetic oligonucleotide
gagcuaaacucaucacugc

SEQ ID NO: 1037790 - RNA, 19 nt, Artificial Sequence
  Description of Artificial Sequence: Synthetic oligonucleotide
auacagacaaguccccacu

SEQ ID NO: 1037791 - RNA, 19 nt, Artificial Sequence
  Description of Artificial Sequence: Synthetic oligonucleotide
augcugaccaucuaauuua

SEQ ID NO: 1037792 - RNA, 19 nt, Artificial Sequence
  Description of Artificial Sequence: Synthetic oligonucleotide
cucugugacgcguuccucc

SEQ ID NO: 1037793 - RNA, 19 nt, Artificial Sequence
  Description of Artificial Sequence: Synthetic oligonucleotide
acuuauccagucccacagg

SEQ ID NO: 1037794 - RNA, 19 nt, Artificial Sequence
  Description of Artificial Sequence: Synthetic oligonucleotide
acgcguuccucccaguuag

SEQ ID NO: 1037795 - RNA, 19 nt, Artificial Sequence
  Description of Artificial Sequence: Synthetic oligonucleotide
gaucacuaagucagcagug

SEQ ID NO: 1037796 - RNA, 19 nt, Artificial Sequence
  Description of Artificial Sequence: Synthetic oligonucleotide
aguccuuaugccuguuaag

SEQ ID NO: 1037797 - RNA, 19 nt, Artificial Sequence
  Description of Artificial Sequence: Synthetic oligonucleotide
agucucagugagcuaaacu

SEQ ID NO: 1037798 - RNA, 19 nt, Artificial Sequence
  Description of Artificial Sequence: Synthetic oligonucleotide
auccaugcagugugauagc

SEQ ID NO: 1037799 - RNA, 19 nt, Artificial Sequence
  Description of Artificial Sequence: Synthetic oligonucleotide
uguuuuaguugcacuguua

SEQ ID NO: 1037800 - RNA, 19 nt, Artificial Sequence
  Description of Artificial Sequence: Synthetic oligonucleotide
aaaagcuaucucccuggau

SEQ ID NO: 1037801 - RNA, 19 nt, Artificial Sequence
  Description of Artificial Sequence: Synthetic oligonucleotide
aacguagggacaagcagcu

SEQ ID NO: 1037802 - RNA, 19 nt, Artificial Sequence
  Description of Artificial Sequence: Synthetic oligonucleotide
cauaaugcugaccaucuaa

SEQ ID NO: 1037803 - RNA, 19 nt, Artificial Sequence
  Description of Artificial Sequence: Synthetic oligonucleotide
uacucagauccuuccaacu

SEQ ID NO: 1037804 - RNA, 19 nt, Artificial Sequence
  Description of Artificial Sequence: Synthetic oligonucleotide
cuuuuccuaagaugucaag

SEQ ID NO: 1037805 - RNA, 19 nt, Artificial Sequence
  Description of Artificial Sequence: Synthetic oligonucleotide
gaccucauuaaaugaguga

SEQ ID NO: 1037806 - RNA, 19 nt, Artificial Sequence
  Description of Artificial Sequence: Synthetic oligonucleotide
uagcucaccagguuguuau

SEQ ID NO: 1037807 - RNA, 19 nt, Artificial Sequence
  Description of Artificial Sequence: Synthetic oligonucleotide
cugcauguaagaauuaucu

SEQ ID NO: 1037808 - RNA, 19 nt, Artificial Sequence
  Description of Artificial Sequence: Synthetic oligonucleotide
cauaacguagggacaagca

SEQ ID NO: 1037809 - RNA, 19 nt, Artificial Sequence
  Description of Artificial Sequence: Synthetic oligonucleotide
aauuuauuccggaccuugu

SEQ ID NO: 1037810 - RNA, 19 nt, Artificial Sequence
  Description of Artificial Sequence: Synthetic oligonucleotide
cgaguuaugcccaaguggc

SEQ ID NO: 1037811 - RNA, 19 nt, Artificial Sequence
  Description of Artificial Sequence: Synthetic oligonucleotide
uuuuaguugcacuguuaau

SEQ ID NO: 1037812 - RNA, 19 nt, Artificial Sequence
  Description of Artificial Sequence: Synthetic oligonucleotide
agggauucggguauccgac

SEQ ID NO: 1037813 - RNA, 19 nt, Artificial Sequence
  Description of Artificial Sequence: Synthetic oligonucleotide
uuagcuuguaccggacacc

SEQ ID NO: 1037814 - RNA, 19 nt, Artificial Sequence
  Description of Artificial Sequence: Synthetic oligonucleotide
ucugugacgcguuccuccc

SEQ ID NO: 1037815 - RNA, 19 nt, Artificial Sequence
  Description of Artificial Sequence: Synthetic oligonucleotide
uucccucucaucccuucag

SEQ ID NO: 1037816 - RNA, 19 nt, Artificial Sequence
  Description of Artificial Sequence: Synthetic oligonucleotide
accaucuaauuuauuccgg

SEQ ID NO: 1037817 - RNA, 19 nt, Artificial Sequence
  Description of Artificial Sequence: Synthetic oligonucleotide
gaguguaaguccacuuucc

SEQ ID NO: 1037818 - RNA, 19 nt, Artificial Sequence
  Description of Artificial Sequence: Synthetic oligonucleotide
cuaaggguugaaaguuuac

SEQ ID NO: 1037819 - RNA, 19 nt, Artificial Sequence
  Description of Artificial Sequence: Synthetic oligonucleotide
ggacgacucaaauucacug

SEQ ID NO: 1037820 - RNA, 19 nt, Artificial Sequence
  Description of Artificial Sequence: Synthetic oligonucleotide
uaguugcacuguuaaucag

SEQ ID NO: 1037821 - RNA, 19 nt, Artificial Sequence
  Description of Artificial Sequence: Synthetic oligonucleotide
aucucccuggaucugauuu

SEQ ID NO: 1037822 - RNA, 19 nt, Artificial Sequence
  Description of Artificial Sequence: Synthetic oligonucleotide
caaggauccugauggacuc

SEQ ID NO: 1037823 - RNA, 19 nt, Artificial Sequence
  Description of Artificial Sequence: Synthetic oligonucleotide
cuuuguccugggaaaggag

SEQ ID NO: 1037824 - RNA, 19 nt, Artificial Sequence
  Description of Artificial Sequence: Synthetic oligonucleotide
uuacugagggauucgggua

SEQ ID NO: 1037825 - RNA, 19 nt, Artificial Sequence
  Description of Artificial Sequence: Synthetic oligonucleotide
ugcauguaagaauuaucuu

SEQ ID NO: 1037826 - RNA, 19 nt, Artificial Sequence
  Description of Artificial Sequence: Synthetic oligonucleotide
uuaagacuguugcucgcuc

SEQ ID NO: 1037827 - RNA, 19 nt, Artificial Sequence
  Description of Artificial Sequence: Synthetic oligonucleotide
ucucacuuauccaguccca

SEQ ID NO: 1037828 - RNA, 19 nt, Artificial Sequence
  Description of Artificial Sequence: Synthetic oligonucleotide
uacugagggauucggguau

SEQ ID NO: 1037829 - RNA, 19 nt, Artificial Sequence
  Description of Artificial Sequence: Synthetic oligonucleotide
augcccauguuauguaugu

SEQ ID NO: 1037830 - RNA, 19 nt, Artificial Sequence
  Description of Artificial Sequence: Synthetic oligonucleotide
acaaggauccugauggacu

SEQ ID NO: 1037831 - RNA, 19 nt, Artificial Sequence
  Description of Artificial Sequence: Synthetic oligonucleotide
ugcagugugauagccgaca

SEQ ID NO: 1037832 - RNA, 19 nt, Artificial Sequence
  Description of Artificial Sequence: Synthetic oligonucleotide
caucauacucagauccuuc

SEQ ID NO: 1037833 - RNA, 19 nt, Artificial Sequence
  Description of Artificial Sequence: Synthetic oligonucleotide
ucauccgaggauguaaaau

SEQ ID NO: 1037834 - RNA, 19 nt, Artificial Sequence
  Description of Artificial Sequence: Synthetic oligonucleotide
uuccggaccuuguauacuc

SEQ ID NO: 1037835 - RNA, 19 nt, Artificial Sequence
  Description of Artificial Sequence: Synthetic oligonucleotide
uacuucucggagcaccuuc

SEQ ID NO: 1037836 - RNA, 19 nt, Artificial Sequence
  Description of Artificial Sequence: Synthetic oligonucleotide
uugcauaaugcugaccauc

SEQ ID NO: 1037837 - RNA, 19 nt, Artificial Sequence
  Description of Artificial Sequence: Synthetic oligonucleotide
agcucacacagcugcaucu

SEQ ID NO: 1037838 - RNA, 19 nt, Artificial Sequence
  Description of Artificial Sequence: Synthetic oligonucleotide
ucaggccauuuucuuggag

SEQ ID NO: 1037839 - RNA, 19 nt, Artificial Sequence
  Description of Artificial Sequence: Synthetic oligonucleotide
auuuauuccggaccuugua

SEQ ID NO: 1037840 - RNA, 19 nt, Artificial Sequence
  Description of Artificial Sequence: Synthetic oligonucleotide
ggauauacuuagcuuguac

SEQ ID NO: 1037841 - RNA, 19 nt, Artificial Sequence
  Description of Artificial Sequence: Synthetic oligonucleotide
gcugaugcuugacaacugg

SEQ ID NO: 1037842 - RNA, 19 nt, Artificial Sequence
  Description of Artificial Sequence: Synthetic oligonucleotide
gauucggguauccgaccag

SEQ ID NO: 1037843 - RNA, 19 nt, Artificial Sequence
  Description of Artificial Sequence: Synthetic oligonucleotide
gagggauucggguauccga

SEQ ID NO: 1037844 - RNA, 19 nt, Artificial Sequence
  Description of Artificial Sequence: Synthetic oligonucleotide
gaucacacccaagcuauac

SEQ ID NO: 1037845 - RNA, 19 nt, Artificial Sequence
  Description of Artificial Sequence: Synthetic oligonucleotide
guuaugcccaaguggcagc

SEQ ID NO: 1037846 - RNA, 19 nt, Artificial Sequence
  Description of Artificial Sequence: Synthetic oligonucleotide
ucaagagagggcaguugaa

SEQ ID NO: 1037847 - RNA, 19 nt, Artificial Sequence
  Description of Artificial Sequence: Synthetic oligonucleotide
ugagggauucggguauccg

SEQ ID NO: 1037848 - RNA, 19 nt, Artificial Sequence
  Description of Artificial Sequence: Synthetic oligonucleotide
aguucaacggacgacucaa

SEQ ID NO: 1037849 - RNA, 19 nt, Artificial Sequence
  Description of Artificial Sequence: Synthetic oligonucleotide
acuuucccaugguagacaa

SEQ ID NO: 1037850 - RNA, 19 nt, Artificial Sequence
  Description of Artificial Sequence: Synthetic oligonucleotide
ucacuaagucagcagugua

SEQ ID NO: 1037851 - RNA, 19 nt, Artificial Sequence
  Description of Artificial Sequence: Synthetic oligonucleotide
aggugaguucagcaaauau

SEQ ID NO: 1037852 - RNA, 19 nt, Artificial Sequence
  Description of Artificial Sequence: Synthetic oligonucleotide
gaggauguaaaauuuccuu

SEQ ID NO: 1037853 - RNA, 19 nt, Artificial Sequence
  Description of Artificial Sequence: Synthetic oligonucleotide
uaaaugagugauggcucug

SEQ ID NO: 1037854 - RNA, 19 nt, Artificial Sequence
  Description of Artificial Sequence: Synthetic oligonucleotide
auuuaaguaucgugagguu

SEQ ID NO: 1037855 - RNA, 19 nt, Artificial Sequence
  Description of Artificial Sequence: Synthetic oligonucleotide
cuugaucucuguucccuuc

SEQ ID NO: 1037856 - RNA, 19 nt, Artificial Sequence
  Description of Artificial Sequence: Synthetic oligonucleotide
aaaagacacccuccaccaa

SEQ ID NO: 1037857 - RNA, 19 nt, Artificial Sequence
  Description of Artificial Sequence: Synthetic oligonucleotide
ccgaguuaugcccaagugg

SEQ ID NO: 1037858 - RNA, 19 nt, Artificial Sequence
  Description of Artificial Sequence: Synthetic oligonucleotide
guguaaguccacuuuccca

SEQ ID NO: 1037859 - RNA, 19 nt, Artificial Sequence
  Description of Artificial Sequence: Synthetic oligonucleotide
gauagccgacaauguuggg

SEQ ID NO: 1037860 - RNA, 19 nt, Artificial Sequence
  Description of Artificial Sequence: Synthetic oligonucleotide
gaauuaucuucacaaggau

SEQ ID NO: 1037861 - RNA, 19 nt, Artificial Sequence
  Description of Artificial Sequence: Synthetic oligonucleotide
auaaugcugaccaucuaau

SEQ ID NO: 1037862 - RNA, 19 nt, Artificial Sequence
  Description of Artificial Sequence: Synthetic oligonucleotide
guccuuaugccuguuaaga

SEQ ID NO: 1037863 - RNA, 19 nt, Artificial Sequence
  Description of Artificial Sequence: Synthetic oligonucleotide
agcuggauauacuuagcuu

SEQ ID NO: 1037864 - RNA, 19 nt, Artificial Sequence
  Description of Artificial Sequence: Synthetic oligonucleotide
gguaccgaaccucugucug

SEQ ID NO: 1037865 - RNA, 19 nt, Artificial Sequence
  Description of Artificial Sequence: Synthetic oligonucleotide
uagcuuguaccggacaccu

SEQ ID NO: 1037866 - RNA, 19 nt, Artificial Sequence
  Description of Artificial Sequence: Synthetic oligonucleotide
caguugaaugggaacucug

SEQ ID NO: 1037867 - RNA, 19 nt, Artificial Sequence
  Description of Artificial Sequence: Synthetic oligonucleotide
uaaugcugaccaucuaauu

SEQ ID NO: 1037868 - RNA, 19 nt, Artificial Sequence
  Description of Artificial Sequence: Synthetic oligonucleotide
agacaaguccccacucugg

SEQ ID NO: 1037869 - RNA, 19 nt, Artificial Sequence
  Description of Artificial Sequence: Synthetic oligonucleotide
acuuagcuuguaccggaca

SEQ ID NO: 1037870 - RNA, 19 nt, Artificial Sequence
  Description of Artificial Sequence: Synthetic oligonucleotide
uuagaccauacagguaggu

SEQ ID NO: 1037871 - RNA, 19 nt, Artificial Sequence
  Description of Artificial Sequence: Synthetic oligonucleotide
ucagugagcuaaacucauc

SEQ ID NO: 1037872 - RNA, 19 nt, Artificial Sequence
  Description of Artificial Sequence: Synthetic oligonucleotide
agaccucauuaaaugagug

SEQ ID NO: 1037873 - RNA, 19 nt, Artificial Sequence
  Description of Artificial Sequence: Synthetic oligonucleotide
uacuuagcuuguaccggac

SEQ ID NO: 1037874 - RNA, 19 nt, Artificial Sequence
  Description of Artificial Sequence: Synthetic oligonucleotide
cuguucaggcgaugcauac

SEQ ID NO: 1037875 - RNA, 19 nt, Artificial Sequence
  Description of Artificial Sequence: Synthetic oligonucleotide
gacaccuuuuacugaggga

SEQ ID NO: 1037876 - RNA, 19 nt, Artificial Sequence
  Description of Artificial Sequence: Synthetic oligonucleotide
auugcauaaugcugaccau

SEQ ID NO: 1037877 - RNA, 19 nt, Artificial Sequence
  Description of Artificial Sequence: Synthetic oligonucleotide
ugcugaccaucuaauuuau

SEQ ID NO: 1037878 - RNA, 19 nt, Artificial Sequence
  Description of Artificial Sequence: Synthetic oligonucleotide
acggacgacucaaauucac

SEQ ID NO: 1037879 - RNA, 19 nt, Artificial Sequence
  Description of Artificial Sequence: Synthetic oligonucleotide
gcaacaucaggugguaccg

SEQ ID NO: 1037880 - RNA, 19 nt, Artificial Sequence
  Description of Artificial Sequence: Synthetic oligonucleotide
ugacaacuggucugauaga

SEQ ID NO: 1037881 - RNA, 19 nt, Artificial Sequence
  Description of Artificial Sequence: Synthetic oligonucleotide
uuggaguucaacggacgac

SEQ ID NO: 1037882 - RNA, 19 nt, Artificial Sequence
  Description of Artificial Sequence: Synthetic oligonucleotide
gcagaccucauuaaaugag

SEQ ID NO: 1037883 - RNA, 19 nt, Artificial Sequence
  Description of Artificial Sequence: Synthetic oligonucleotide
gaaccucugucuguuccag

SEQ ID NO: 1037884 - RNA, 19 nt, Artificial Sequence
  Description of Artificial Sequence: Synthetic oligonucleotide
gcuaaacucaucacugcag

SEQ ID NO: 1037885 - RNA, 19 nt, Artificial Sequence
  Description of Artificial Sequence: Synthetic oligonucleotide
uagaccauacagguagguc

SEQ ID NO: 1037886 - RNA, 19 nt, Artificial Sequence
  Description of Artificial Sequence: Synthetic oligonucleotide
cucuggacgugugugucgg

SEQ ID NO: 1037887 - RNA, 19 nt, Artificial Sequence
  Description of Artificial Sequence: Synthetic oligonucleotide
uuaacaccaccuugaucuc

SEQ ID NO: 1037888 - RNA, 19 nt, Artificial Sequence
  Description of Artificial Sequence: Synthetic oligonucleotide
cccagcuaaggguugaaag

SEQ ID NO: 1037889 - RNA, 19 nt, Artificial Sequence
  Description of Artificial Sequence: Synthetic oligonucleotide
gguugaaaguuuacauucc

SEQ ID NO: 1037890 - RNA, 19 nt, Artificial Sequence
  Description of Artificial Sequence: Synthetic oligonucleotide
cugacagcacuucaagaga

SEQ ID NO: 1037891 - RNA, 19 nt, Artificial Sequence
  Description of Artificial Sequence: Synthetic oligonucleotide
guaucgugagguuugugcu

SEQ ID NO: 1037892 - RNA, 19 nt, Artificial Sequence
  Description of Artificial Sequence: Synthetic oligonucleotide
ccuguuaagacuguugcuc

SEQ ID NO: 1037893 - RNA, 19 nt, Artificial Sequence
  Description of Artificial Sequence: Synthetic oligonucleotide
gaccuuguauacucuucca

SEQ ID NO: 1037894 - RNA, 19 nt, Artificial Sequence
  Description of Artificial Sequence: Synthetic oligonucleotide
aggauccugauggacucuc

SEQ ID NO: 1037895 - RNA, 19 nt, Artificial Sequence
  Description of Artificial Sequence: Synthetic oligonucleotide
gagcuggauauacuuagcu

SEQ ID NO: 1037896 - RNA, 19 nt, Artificial Sequence
  Description of Artificial Sequence: Synthetic oligonucleotide
cuuggaguucaacggacga

SEQ ID NO: 1037897 - RNA, 19 nt, Artificial Sequence
  Description of Artificial Sequence: Synthetic oligonucleotide
aucaggugguaccgaaccu

SEQ ID NO: 1037898 - RNA, 19 nt, Artificial Sequence
  Description of Artificial Sequence: Synthetic oligonucleotide
uggacgugugugucggugu

SEQ ID NO: 1037899 - RNA, 19 nt, Artificial Sequence
  Description of Artificial Sequence: Synthetic oligonucleotide
gaguucaacggacgacuca

SEQ ID NO: 1037900 - RNA, 19 nt, Artificial Sequence
  Description of Artificial Sequence: Synthetic oligonucleotide
ccaagcuauacauaucuga

SEQ ID NO: 1037901 - RNA, 19 nt, Artificial Sequence
  Description of Artificial Sequence: Synthetic oligonucleotide
ccuuccaacuguucaggcg

SEQ ID NO: 1037902 - RNA, 19 nt, Artificial Sequence
  Description of Artificial Sequence: Synthetic oligonucleotide
cacauggcucaaguguucc

SEQ ID NO: 1037903 - RNA, 19 nt, Artificial Sequence
  Description of Artificial Sequence: Synthetic oligonucleotide
acaucaggugguaccgaac

SEQ ID NO: 1037904 - RNA, 19 nt, Artificial Sequence
  Description of Artificial Sequence: Synthetic oligonucleotide
ugugugucgguguucccuu

SEQ ID NO: 1037905 - RNA, 19 nt, Artificial Sequence
  Description of Artificial Sequence: Synthetic oligonucleotide
ugucgguguucccuuccca

SEQ ID NO: 1037906 - RNA, 19 nt, Artificial Sequence
  Description of Artificial Sequence: Synthetic oligonucleotide
uuaugcccaaguggcagcu

SEQ ID NO: 1037907 - RNA, 19 nt, Artificial Sequence
  Description of Artificial Sequence: Synthetic oligonucleotide
uaucgugagguuugugcuu

SEQ ID NO: 1037908 - RNA, 19 nt, Artificial Sequence
  Description of Artificial Sequence: Synthetic oligonucleotide
ugcuguuccugaucacuaa

SEQ ID NO: 1037909 - RNA, 19 nt, Artificial Sequence
  Description of Artificial Sequence: Synthetic oligonucleotide
cacaaggauccugauggac

SEQ ID NO: 1037910 - RNA, 19 nt, Artificial Sequence
  Description of Artificial Sequence: Synthetic oligonucleotide
auauaauggaggagcugcu

SEQ ID NO: 1037911 - RNA, 19 nt, Artificial Sequence
  Description of Artificial Sequence: Synthetic oligonucleotide
uaaguaucgugagguuugu

SEQ ID NO: 1037912 - RNA, 19 nt, Artificial Sequence
  Description of Artificial Sequence: Synthetic oligonucleotide
cuuuuguaugaugucugca

SEQ ID NO: 1037913 - RNA, 19 nt, Artificial Sequence
  Description of Artificial Sequence: Synthetic oligonucleotide
cucacuuauccagucccac

SEQ ID NO: 1037914 - RNA, 19 nt, Artificial Sequence
  Description of Artificial Sequence: Synthetic oligonucleotide
gacucauccgaggauguaa

SEQ ID NO: 1037915 - RNA, 19 nt, Artificial Sequence
  Description of Artificial Sequence: Synthetic oligonucleotide
aacggacgacucaaauuca

SEQ ID NO: 1037916 - RNA, 19 nt, Artificial Sequence
  Description of Artificial Sequence: Synthetic oligonucleotide
ucucucuuuggcagaccuc

SEQ ID NO: 1037917 - RNA, 19 nt, Artificial Sequence
  Description of Artificial Sequence: Synthetic oligonucleotide
guggccgaaccacaugaac

SEQ ID NO: 1037918 - RNA, 19 nt, Artificial Sequence
  Description of Artificial Sequence: Synthetic oligonucleotide
guaccggacaccuuuuacu

SEQ ID NO: 1037919 - RNA, 19 nt, Artificial Sequence
  Description of Artificial Sequence: Synthetic oligonucleotide
aaguaucgugagguuugug

SEQ ID NO: 1037920 - RNA, 19 nt, Artificial Sequence
  Description of Artificial Sequence: Synthetic oligonucleotide
gauggcucuguuguggugu

SEQ ID NO: 1037921 - RNA, 19 nt, Artificial Sequence
  Description of Artificial Sequence: Synthetic oligonucleotide
uguggccgaaccacaugaa

SEQ ID NO: 1037922 - RNA, 19 nt, Artificial Sequence
  Description of Artificial Sequence: Synthetic oligonucleotide
accugccagaaccuuuacu

SEQ ID NO: 1037923 - RNA, 19 nt, Artificial Sequence
  Description of Artificial Sequence: Synthetic oligonucleotide
guagggacaagcagcuuca

SEQ ID NO: 1037924 - RNA, 19 nt, Artificial Sequence
  Description of Artificial Sequence: Synthetic oligonucleotide
aggaggcuuaguugcuucu

SEQ ID NO: 1037925 - RNA, 19 nt, Artificial Sequence
  Description of Artificial Sequence: Synthetic oligonucleotide
caugcucugacagcacuuc

SEQ ID NO: 1037926 - RNA, 19 nt, Artificial Sequence
  Description of Artificial Sequence: Synthetic oligonucleotide
uucggguauccgaccaguc

SEQ ID NO: 1037927 - RNA, 19 nt, Artificial Sequence
  Description of Artificial Sequence: Synthetic oligonucleotide
ccggacaccuuuuacugag

SEQ ID NO: 1037928 - RNA, 19 nt, Artificial Sequence
  Description of Artificial Sequence: Synthetic oligonucleotide
caaguccgaguuaugccca

SEQ ID NO: 1037929 - RNA, 19 nt, Artificial Sequence
  Description of Artificial Sequence: Synthetic oligonucleotide
uccggaccuuguauacucu

SEQ ID NO: 1037930 - RNA, 19 nt, Artificial Sequence
  Description of Artificial Sequence: Synthetic oligonucleotide
accggacaccuuuuacuga

SEQ ID NO: 1037931 - RNA, 19 nt, Artificial Sequence
  Description of Artificial Sequence: Synthetic oligonucleotide
acauggcucaaguguucca

SEQ ID NO: 1037932 - RNA, 19 nt, Artificial Sequence
  Description of Artificial Sequence: Synthetic oligonucleotide
auucggguauccgaccagu

SEQ ID NO: 1037933 - RNA, 19 nt, Artificial Sequence
  Description of Artificial Sequence: Synthetic oligonucleotide
ucuguggacuaugcccaug

SEQ ID NO: 1037934 - RNA, 19 nt, Artificial Sequence
  Description of Artificial Sequence: Synthetic oligonucleotide
gugguaccgaaccucuguc

SEQ ID NO: 1037935 - RNA, 19 nt, Artificial Sequence
  Description of Artificial Sequence: Synthetic oligonucleotide
ccucauuaaaugagugaug

SEQ ID NO: 1037936 - RNA, 19 nt, Artificial Sequence
  Description of Artificial Sequence: Synthetic oligonucleotide
acaacuggucugauagaca

SEQ ID NO: 1037937 - RNA, 19 nt, Artificial Sequence
  Description of Artificial Sequence: Synthetic oligonucleotide
uuguaccggacaccuuuua

SEQ ID NO: 1037938 - RNA, 19 nt, Artificial Sequence
  Description of Artificial Sequence: Synthetic oligonucleotide
cagcaguguagcucaccag

SEQ ID NO: 1037939 - RNA, 19 nt, Artificial Sequence
  Description of Artificial Sequence: Synthetic oligonucleotide
caguccuuaugccuguuaa

SEQ ID NO: 1037940 - RNA, 19 nt, Artificial Sequence
  Description of Artificial Sequence: Synthetic oligonucleotide
acugagggauucggguauc

SEQ ID NO: 1037941 - RNA, 19 nt, Artificial Sequence
  Description of Artificial Sequence: Synthetic oligonucleotide
cuuccaaguccgaguuaug

SEQ ID NO: 1037942 - RNA, 19 nt, Artificial Sequence
  Description of Artificial Sequence: Synthetic oligonucleotide
ccaacuguucaggcgaugc

SEQ ID NO: 1037943 - RNA, 19 nt, Artificial Sequence
  Description of Artificial Sequence: Synthetic oligonucleotide
uaugccuguuaagacuguu

SEQ ID NO: 1037944 - RNA, 19 nt, Artificial Sequence
  Description of Artificial Sequence: Synthetic oligonucleotide
accgaaccucugucuguuc

SEQ ID NO: 1037945 - RNA, 19 nt, Artificial Sequence
  Description of Artificial Sequence: Synthetic oligonucleotide
cuuuggcagaccucauuaa

SEQ ID NO: 1037946 - RNA, 19 nt, Artificial Sequence
  Description of Artificial Sequence: Synthetic oligonucleotide
auuccggaccuuguauacu

SEQ ID NO: 1037947 - RNA, 19 nt, Artificial Sequence
  Description of Artificial Sequence: Synthetic oligonucleotide
cagaccucauuaaaugagu

SEQ ID NO: 1037948 - RNA, 19 nt, Artificial Sequence
  Description of Artificial Sequence: Synthetic oligonucleotide
gugucgguguucccuuccc

SEQ ID NO: 1037949 - RNA, 19 nt, Artificial Sequence
  Description of Artificial Sequence: Synthetic oligonucleotide
cuggacgugugugucggug

SEQ ID NO: 1037950 - RNA, 19 nt, Artificial Sequence
  Description of Artificial Sequence: Synthetic oligonucleotide
acuggccauaacguaggga

SEQ ID NO: 1037951 - RNA, 19 nt, Artificial Sequence
  Description of Artificial Sequence: Synthetic oligonucleotide
ggauucggguauccgacca

SEQ ID NO: 1037952 - RNA, 19 nt, Artificial Sequence
  Description of Artificial Sequence: Synthetic oligonucleotide
caaguucagaaugccuuca

SEQ ID NO: 1037953 - RNA, 19 nt, Artificial Sequence
  Description of Artificial Sequence: Synthetic oligonucleotide
caaaagcuaucucccugga

SEQ ID NO: 1037954 - RNA, 19 nt, Artificial Sequence
  Description of Artificial Sequence: Synthetic oligonucleotide
uggauauacuuagcuugua

SEQ ID NO: 1037955 - RNA, 19 nt, Artificial Sequence
  Description of Artificial Sequence: Synthetic oligonucleotide
cuugacaacuggucugaua

SEQ ID NO: 1037956 - RNA, 19 nt, Artificial Sequence
  Description of Artificial Sequence: Synthetic oligonucleotide
auccgaggauguaaaauuu

SEQ ID NO: 1037957 - RNA, 19 nt, Artificial Sequence
  Description of Artificial Sequence: Synthetic oligonucleotide
acucauccgaggauguaaa

SEQ ID NO: 1037958 - RNA, 19 nt, Artificial Sequence
  Description of Artificial Sequence: Synthetic oligonucleotide
cguagggacaagcagcuuc

SEQ ID NO: 1037959 - RNA, 19 nt, Artificial Sequence
  Description of Artificial Sequence: Synthetic oligonucleotide
ucgguguucccuucccauu

SEQ ID NO: 1037960 - RNA, 19 nt, Artificial Sequence
  Description of Artificial Sequence: Synthetic oligonucleotide
cagauccuuccaacuguuc

SEQ ID NO: 1037961 - RNA, 19 nt, Artificial Sequence
  Description of Artificial Sequence: Synthetic oligonucleotide
cucccuggaucugauuuuc

SEQ ID NO: 1037962 - RNA, 19 nt, Artificial Sequence
  Description of Artificial Sequence: Synthetic oligonucleotide
gacaaaucagucaggccau

SEQ ID NO: 1037963 - RNA, 19 nt, Artificial Sequence
  Description of Artificial Sequence: Synthetic oligonucleotide
uugcacuguuaaucaggau

SEQ ID NO: 1037964 - RNA, 19 nt, Artificial Sequence
  Description of Artificial Sequence: Synthetic oligonucleotide
gacgcguuccucccaguua

SEQ ID NO: 1037965 - RNA, 19 nt, Artificial Sequence
  Description of Artificial Sequence: Synthetic oligonucleotide
guuaagacuguugcucgcu

SEQ ID NO: 1037966 - RNA, 19 nt, Artificial Sequence
  Description of Artificial Sequence: Synthetic oligonucleotide
cuguuccugaucacuaagu

SEQ ID NO: 1037967 - RNA, 19 nt, Artificial Sequence
  Description of Artificial Sequence: Synthetic oligonucleotide
uaccgaaccucugucuguu

SEQ ID NO: 1037968 - RNA, 19 nt, Artificial Sequence
  Description of Artificial Sequence: Synthetic oligonucleotide
ccuuuuacugagggauucg

SEQ ID NO: 1037969 - RNA, 19 nt, Artificial Sequence
  Description of Artificial Sequence: Synthetic oligonucleotide
agccgacaauguugggaug

SEQ ID NO: 1037970 - RNA, 19 nt, Artificial Sequence
  Description of Artificial Sequence: Synthetic oligonucleotide
ccauaacguagggacaagc

SEQ ID NO: 1037971 - RNA, 19 nt, Artificial Sequence
  Description of Artificial Sequence: Synthetic oligonucleotide
gucagcaguguagcucacc

SEQ ID NO: 1037972 - RNA, 19 nt, Artificial Sequence
  Description of Artificial Sequence: Synthetic oligonucleotide
uccuuccaaguccgaguua

SEQ ID NO: 1037973 - RNA, 19 nt, Artificial Sequence
  Description of Artificial Sequence: Synthetic oligonucleotide
acuguucaggcgaugcaua

SEQ ID NO: 1037974 - RNA, 19 nt, Artificial Sequence
  Description of Artificial Sequence: Synthetic oligonucleotide
cucggagcaccuucauaca

SEQ ID NO: 1037975 - RNA, 19 nt, Artificial Sequence
  Description of Artificial Sequence: Synthetic oligonucleotide
ggagcuggauauacuuagc

SEQ ID NO: 1037976 - RNA, 19 nt, Artificial Sequence
  Description of Artificial Sequence: Synthetic oligonucleotide
aguccgaguuaugcccaag

SEQ ID NO: 1037977 - RNA, 19 nt, Artificial Sequence
  Description of Artificial Sequence: Synthetic oligonucleotide
ugcccaaguggcagcugau

SEQ ID NO: 1037978 - RNA, 19 nt, Artificial Sequence
  Description of Artificial Sequence: Synthetic oligonucleotide
acccuccaccaauucuuga

SEQ ID NO: 1037979 - RNA, 19 nt, Artificial Sequence
  Description of Artificial Sequence: Synthetic oligonucleotide
ggacuaugcccauguuaug

SEQ ID NO: 1037980 - RNA, 19 nt, Artificial Sequence
  Description of Artificial Sequence: Synthetic oligonucleotide
gaaaggaggcuuaguugcu

SEQ ID NO: 1037981 - RNA, 19 nt, Artificial Sequence
  Description of Artificial Sequence: Synthetic oligonucleotide
agcuaaggguugaaaguuu

SEQ ID NO: 1037982 - RNA, 19 nt, Artificial Sequence
  Description of Artificial Sequence: Synthetic oligonucleotide
agaccugccagaaccuuua

SEQ ID NO: 1037983 - RNA, 19 nt, Artificial Sequence
  Description of Artificial Sequence: Synthetic oligonucleotide
cccauguuauguauguaaa

SEQ ID NO: 1037984 - RNA, 19 nt, Artificial Sequence
  Description of Artificial Sequence: Synthetic oligonucleotide
cuaagucagcaguguagcu

SEQ ID NO: 1037985 - RNA, 19 nt, Artificial Sequence
  Description of Artificial Sequence: Synthetic oligonucleotide
ggugguaccgaaccucugu

SEQ ID NO: 1037986 - RNA, 19 nt, Artificial Sequence
  Description of Artificial Sequence: Synthetic oligonucleotide
ccauguuauguauguaaaa

SEQ ID NO: 1037987 - RNA, 19 nt, Artificial Sequence
  Description of Artificial Sequence: Synthetic oligonucleotide
cccaagcuauacauaucug

SEQ ID NO: 1037988 - RNA, 19 nt, Artificial Sequence
  Description of Artificial Sequence: Synthetic oligonucleotide
uugcaacacuggccauaac

SEQ ID NO: 1037989 - RNA, 19 nt, Artificial Sequence
  Description of Artificial Sequence: Synthetic oligonucleotide
gcaacacuggccauaacgu

SEQ ID NO: 1037990 - RNA, 19 nt, Artificial Sequence
  Description of Artificial Sequence: Synthetic oligonucleotide
agcuaucucccuggaucug

SEQ ID NO: 1037991 - RNA, 19 nt, Artificial Sequence
  Description of Artificial Sequence: Synthetic oligonucleotide
cucauccgaggauguaaaa

SEQ ID NO: 1037992 - RNA, 19 nt, Artificial Sequence
  Description of Artificial Sequence: Synthetic oligonucleotide
uaucucccuggaucugauu

SEQ ID NO: 1037993 - RNA, 19 nt, Artificial Sequence
  Description of Artificial Sequence: Synthetic oligonucleotide
guccgaguuaugcccaagu

SEQ ID NO: 1037994 - RNA, 19 nt, Artificial Sequence
  Description of Artificial Sequence: Synthetic oligonucleotide
cuaugcccauguuauguau

SEQ ID NO: 1037995 - RNA, 19 nt, Artificial Sequence
  Description of Artificial Sequence: Synthetic oligonucleotide
cgaugcauacagacaaguc

SEQ ID NO: 1037996 - RNA, 19 nt, Artificial Sequence
  Description of Artificial Sequence: Synthetic oligonucleotide
guaccgaaccucugucugu

SEQ ID NO: 1037997 - RNA, 19 nt, Artificial Sequence
  Description of Artificial Sequence: Synthetic oligonucleotide
ggccauaacguagggacaa

SEQ ID NO: 1037998 - RNA, 19 nt, Artificial Sequence
  Description of Artificial Sequence: Synthetic oligonucleotide
ggcgaugcauacagacaag

SEQ ID NO: 1037999 - RNA, 19 nt, Artificial Sequence
  Description of Artificial Sequence: Synthetic oligonucleotide
gaggugaguucagcaaaua

SEQ ID NO: 1038000 - RNA, 19 nt, Artificial Sequence
  Description of Artificial Sequence: Synthetic oligonucleotide
ucguugcaacacuggccau

SEQ ID NO: 1038001 - RNA, 19 nt, Artificial Sequence
  Description of Artificial Sequence: Synthetic oligonucleotide
gguguucccuucccauuuc

SEQ ID NO: 1038002 - RNA, 19 nt, Artificial Sequence
  Description of Artificial Sequence: Synthetic oligonucleotide
gauggccucugugacgcgu

SEQ ID NO: 1038003 - RNA, 19 nt, Artificial Sequence
  Description of Artificial Sequence: Synthetic oligonucleotide
gucgguguucccuucccau

SEQ ID NO: 1038004 - RNA, 19 nt, Artificial Sequence
  Description of Artificial Sequence: Synthetic oligonucleotide
guguagcucaccagguugu

SEQ ID NO: 1038005 - RNA, 19 nt, Artificial Sequence
  Description of Artificial Sequence: Synthetic oligonucleotide
ggccgaaccacaugaacau

SEQ ID NO: 1038006 - RNA, 19 nt, Artificial Sequence
  Description of Artificial Sequence: Synthetic oligonucleotide
cucuguugugguguagucu

SEQ ID NO: 1038007 - RNA, 19 nt, Artificial Sequence
  Description of Artificial Sequence: Synthetic oligonucleotide
gugugauagccgacaaugu

SEQ ID NO: 1038008 - RNA, 19 nt, Artificial Sequence
  Description of Artificial Sequence: Synthetic oligonucleotide
guagucucagugagcuaaa

SEQ ID NO: 1038009 - RNA, 19 nt, Artificial Sequence
  Description of Artificial Sequence: Synthetic oligonucleotide
ccgaaccacaugaacaugu

SEQ ID NO: 1038010 - RNA, 19 nt, Artificial Sequence
  Description of Artificial Sequence: Synthetic oligonucleotide
cagcuaaggguugaaaguu

SEQ ID NO: 1038011 - RNA, 19 nt, Artificial Sequence
  Description of Artificial Sequence: Synthetic oligonucleotide
ggaguucaacggacgacuc

SEQ ID NO: 1038012 - RNA, 19 nt, Artificial Sequence
  Description of Artificial Sequence: Synthetic oligonucleotide
acaaaucagucaggccauu

SEQ ID NO: 1038013 - RNA, 19 nt, Artificial Sequence
  Description of Artificial Sequence: Synthetic oligonucleotide
gcauacagacaagucccca

SEQ ID NO: 1038014 - RNA, 19 nt, Artificial Sequence
  Description of Artificial Sequence: Synthetic oligonucleotide
ccacuuucccaugguagac

SEQ ID NO: 1038015 - RNA, 19 nt, Artificial Sequence
  Description of Artificial Sequence: Synthetic oligonucleotide
gccauaacguagggacaag

SEQ ID NO: 1038016 - RNA, 19 nt, Artificial Sequence
  Description of Artificial Sequence: Synthetic oligonucleotide
guucaacggacgacucaaa

SEQ ID NO: 1038017 - RNA, 19 nt, Artificial Sequence
  Description of Artificial Sequence: Synthetic oligonucleotide
cggaccuuguauacucuuc

SEQ ID NO: 1038018 - RNA, 19 nt, Artificial Sequence
  Description of Artificial Sequence: Synthetic oligonucleotide
guauccgaccaguccuuau

SEQ ID NO: 1038019 - RNA, 19 nt, Artificial Sequence
  Description of Artificial Sequence: Synthetic oligonucleotide
uccccagcuaaggguugaa

SEQ ID NO: 1038020 - RNA, 19 nt, Artificial Sequence
  Description of Artificial Sequence: Synthetic oligonucleotide
gguuuggcucaugcacaug

SEQ ID NO: 1038021 - RNA, 19 nt, Artificial Sequence
  Description of Artificial Sequence: Synthetic oligonucleotide
cuuguaccggacaccuuuu

SEQ ID NO: 1038022 - RNA, 19 nt, Artificial Sequence
  Description of Artificial Sequence: Synthetic oligonucleotide
gccgacaauguugggaugu

SEQ ID NO: 1038023 - RNA, 19 nt, Artificial Sequence
  Description of Artificial Sequence: Synthetic oligonucleotide
gcgaugcauacagacaagu

SEQ ID NO: 1038024 - RNA, 19 nt, Artificial Sequence
  Description of Artificial Sequence: Synthetic oligonucleotide
cggacaccuuuuacugagg

SEQ ID NO: 1038025 - RNA, 19 nt, Artificial Sequence
  Description of Artificial Sequence: Synthetic oligonucleotide
cuguccugaauggcugaaa

SEQ ID NO: 1038026 - RNA, 19 nt, Artificial Sequence
  Description of Artificial Sequence: Synthetic oligonucleotide
gcauaaugcugaccaucua

SEQ ID NO: 1038027 - RNA, 19 nt, Artificial Sequence
  Description of Artificial Sequence: Synthetic oligonucleotide
cuaauuuauuccggaccuu

SEQ ID NO: 1038028 - RNA, 19 nt, Artificial Sequence
  Description of Artificial Sequence: Synthetic oligonucleotide
gcaguugaaugggaacucu

SEQ ID NO: 1038029 - RNA, 19 nt, Artificial Sequence
  Description of Artificial Sequence: Synthetic oligonucleotide
ccgaccaguccuuaugccu

SEQ ID NO: 1038030 - RNA, 19 nt, Artificial Sequence
  Description of Artificial Sequence: Synthetic oligonucleotide
caaaucagucaggccauuu

SEQ ID NO: 1038031 - RNA, 19 nt, Artificial Sequence
  Description of Artificial Sequence: Synthetic oligonucleotide
gcguuccucccaguuagga

SEQ ID NO: 1038032 - RNA, 19 nt, Artificial Sequence
  Description of Artificial Sequence: Synthetic oligonucleotide
caguguagcucaccagguu

SEQ ID NO: 1038033 - RNA, 19 nt, Artificial Sequence
  Description of Artificial Sequence: Synthetic oligonucleotide
gccucugugacgcguuccu

SEQ ID NO: 1038034 - RNA, 19 nt, Artificial Sequence
  Description of Artificial Sequence: Synthetic oligonucleotide
caguuaggagcuggauaua

SEQ ID NO: 1038035 - RNA, 19 nt, Artificial Sequence
  Description of Artificial Sequence: Synthetic oligonucleotide
acguagggacaagcagcuu

SEQ ID NO: 1038036 - RNA, 19 nt, Artificial Sequence
  Description of Artificial Sequence: Synthetic oligonucleotide
agcuuguaccggacaccuu

SEQ ID NO: 1038037 - RNA, 19 nt, Artificial Sequence
  Description of Artificial Sequence: Synthetic oligonucleotide
cggguauccgaccaguccu

SEQ ID NO: 1038038 - RNA, 19 nt, Artificial Sequence
  Description of Artificial Sequence: Synthetic oligonucleotide
gguauccgaccaguccuua

SEQ ID NO: 1038039 - RNA, 19 nt, Artificial Sequence
  Description of Artificial Sequence: Synthetic oligonucleotide
gugacgcguuccucccagu

SEQ ID NO: 1038040 - RNA, 19 nt, Artificial Sequence
  Description of Artificial Sequence: Synthetic oligonucleotide
ccaguccuuaugccuguua

SEQ ID NO: 1038041 - RNA, 19 nt, Artificial Sequence
  Description of Artificial Sequence: Synthetic oligonucleotide
ggaggcuuaguugcuucuu

SEQ ID NO: 1038042 - RNA, 19 nt, Artificial Sequence
  Description of Artificial Sequence: Synthetic oligonucleotide
ggauccugauggacucucu

SEQ ID NO: 1038043 - RNA, 19 nt, Artificial Sequence
  Description of Artificial Sequence: Synthetic oligonucleotide
cggacgacucaaauucacu

SEQ ID NO: 1038044 - RNA, 19 nt, Artificial Sequence
  Description of Artificial Sequence: Synthetic oligonucleotide
cgcuuguuccucucacuua

SEQ ID NO: 1038045 - RNA, 19 nt, Artificial Sequence
  Description of Artificial Sequence: Synthetic oligonucleotide
ccgcuuguuccucucacuu

SEQ ID NO: 1038046 - RNA, 19 nt, Artificial Sequence
  Description of Artificial Sequence: Synthetic oligonucleotide
ggagaccugccagaaccuu

SEQ ID NO: 1038047 - RNA, 19 nt, Artificial Sequence
  Description of Artificial Sequence: Synthetic oligonucleotide
gguccagucugagcucuuu

SEQ ID NO: 1038048 - RNA, 19 nt, Artificial Sequence
  Description of Artificial Sequence: Synthetic oligonucleotide
ggguauccgaccaguccuu

SEQ ID NO: 1038049 - RNA, 19 nt, Artificial Sequence
  Description of Artificial Sequence: Synthetic oligonucleotide
gcugaccaucuaauuuauu

SEQ ID NO: 1038050 - RNA, 19 nt, Artificial Sequence
  Description of Artificial Sequence: Synthetic oligonucleotide
ccggaccuuguauacucuu

SEQ ID NO: 1038051 - RNA, 19 nt, Artificial Sequence
  Description of Artificial Sequence: Synthetic oligonucleotide
gcuugacaacuggucugau

SEQ ID NO: 1038052 - RNA, 19 nt, Artificial Sequence
  Description of Artificial Sequence: Synthetic oligonucleotide
ccgacaauguugggauguu

SEQ ID NO: 1038053 - RNA, 19 nt, Artificial Sequence
  Description of Artificial Sequence: Synthetic oligonucleotide
uauauauauauauauaugu

SEQ ID NO: 1038054 - RNA, 19 nt, Artificial Sequence
  Description of Artificial Sequence: Synthetic oligonucleotide
aaaacuaucacucugccaa

SEQ ID NO: 1038055 - RNA, 19 nt, Artificial Sequence
  Description of Artificial Sequence: Synthetic oligonucleotide
aaguugaacauugacagcc

SEQ ID NO: 1038056 - RNA, 19 nt, Artificial Sequence
  Description of Artificial Sequence: Synthetic oligonucleotide
aauguaaauuaaucuuucc

SEQ ID NO: 1038057 - RNA, 19 nt, Artificial Sequence
  Description of Artificial Sequence: Synthetic oligonucleotide
uauauauauauauauauau

SEQ ID NO: 1038058 - RNA, 19 nt, Artificial Sequence
  Description of Artificial Sequence: Synthetic oligonucleotide
uauauauauauauaugugu

SEQ ID NO: 1038059 - RNA, 19 nt, Artificial Sequence
  Description of Artificial Sequence: Synthetic oligonucleotide
aguagaauucugaagaucc

SEQ ID NO: 1038060 - RNA, 19 nt, Artificial Sequence
  Description of Artificial Sequence: Synthetic oligonucleotide
cauuucaacauaauuaccc

SEQ ID NO: 1038061 - RNA, 19 nt, Artificial Sequence
  Description of Artificial Sequence: Synthetic oligonucleotide
ugcauaaucuuaaugaugu

SEQ ID NO: 1038062 - RNA, 19 nt, Artificial Sequence
  Description of Artificial Sequence: Synthetic oligonucleotide
uguaaauuaaucuuucccu

SEQ ID NO: 1038063 - RNA, 19 nt, Artificial Sequence
  Description of Artificial Sequence: Synthetic oligonucleotide
aacccaaaagucugaaacc

SEQ ID NO: 1038064 - RNA, 19 nt, Artificial Sequence
  Description of Artificial Sequence: Synthetic oligonucleotide
aaugcagauaguaaaacag

SEQ ID NO: 1038065 - RNA, 19 nt, Artificial Sequence
  Description of Artificial Sequence: Synthetic oligonucleotide
uuuagucccugcaugaagg

SEQ ID NO: 1038066 - RNA, 19 nt, Artificial Sequence
  Description of Artificial Sequence: Synthetic oligonucleotide
cuucauagcacaaggaagg

SEQ ID NO: 1038067 - RNA, 19 nt, Artificial Sequence
  Description of Artificial Sequence: Synthetic oligonucleotide
gauaguaaaacagagguga

SEQ ID NO: 1038068 - RNA, 19 nt, Artificial Sequence
  Description of Artificial Sequence: Synthetic oligonucleotide
aucauaaucucugacacac

SEQ ID NO: 1038069 - RNA, 19 nt, Artificial Sequence
  Description of Artificial Sequence: Synthetic oligonucleotide
uuugucuaaauccucuugc

SEQ ID NO: 1038070 - RNA, 19 nt, Artificial Sequence
  Description of Artificial Sequence: Synthetic oligonucleotide
aaacagaggugacuuacac

SEQ ID NO: 1038071 - RNA, 19 nt, Artificial Sequence
  Description of Artificial Sequence: Synthetic oligonucleotide
ugaauuaguguucaugaga

SEQ ID NO: 1038072 - RNA, 19 nt, Artificial Sequence
  Description of Artificial Sequence: Synthetic oligonucleotide
uucucucuaggcuugaggg

SEQ ID NO: 1038073 - RNA, 19 nt, Artificial Sequence
  Description of Artificial Sequence: Synthetic oligonucleotide
aaauguguccagaaguccc

SEQ ID NO: 1038074 - RNA, 19 nt, Artificial Sequence
  Description of Artificial Sequence: Synthetic oligonucleotide
gaaguagauaaacagcuug

SEQ ID NO: 1038075 - RNA, 19 nt, Artificial Sequence
  Description of Artificial Sequence: Synthetic oligonucleotide
ucugaaacaccucuggccc

SEQ ID NO: 1038076 - RNA, 19 nt, Artificial Sequence
  Description of Artificial Sequence: Synthetic oligonucleotide
ugaaucauaaucucugaca

SEQ ID NO: 1038077 - RNA, 19 nt, Artificial Sequence
  Description of Artificial Sequence: Synthetic oligonucleotide
aucaagauauuccaagauc

SEQ ID NO: 1038078 - RNA, 19 nt, Artificial Sequence
  Description of Artificial Sequence: Synthetic oligonucleotide
ucuauuuagucccugcaug

SEQ ID NO: 1038079 - RNA, 19 nt, Artificial Sequence
  Description of Artificial Sequence: Synthetic oligonucleotide
cuuauuggcuccaagcucc

SEQ ID NO: 1038080 - RNA, 19 nt, Artificial Sequence
  Description of Artificial Sequence: Synthetic oligonucleotide
auaauuacccuauaccaug

SEQ ID NO: 1038081 - RNA, 19 nt, Artificial Sequence
  Description of Artificial Sequence: Synthetic oligonucleotide
aagcauguuagaugagggc

SEQ ID NO: 1038082 - RNA, 19 nt, Artificial Sequence
  Description of Artificial Sequence: Synthetic oligonucleotide
aauaguuuccucaguugcc

SEQ ID NO: 1038083 - RNA, 19 nt, Artificial Sequence
  Description of Artificial Sequence: Synthetic oligonucleotide
accauauauauauauauau

SEQ ID NO: 1038084 - RNA, 19 nt, Artificial Sequence
  Description of Artificial Sequence: Synthetic oligonucleotide
uuuccuaacccaaaagucu

SEQ ID NO: 1038085 - RNA, 19 nt, Artificial Sequence
  Description of Artificial Sequence: Synthetic oligonucleotide
uuugcaacgagagcaaggg

SEQ ID NO: 1038086 - RNA, 19 nt, Artificial Sequence
  Description of Artificial Sequence: Synthetic oligonucleotide
aagaaccauauauauauau

SEQ ID NO: 1038087 - RNA, 19 nt, Artificial Sequence
  Description of Artificial Sequence: Synthetic oligonucleotide
ucuuguuacugcuacacca

SEQ ID NO: 1038088 - RNA, 19 nt, Artificial Sequence
  Description of Artificial Sequence: Synthetic oligonucleotide
uuaugaaacuucuaugccu

SEQ ID NO: 1038089 - RNA, 19 nt, Artificial Sequence
  Description of Artificial Sequence: Synthetic oligonucleotide
uauauauauauaugugugu

SEQ ID NO: 1038090 - RNA, 19 nt, Artificial Sequence
  Description of Artificial Sequence: Synthetic oligonucleotide
aacuucuaugccugagacc

SEQ ID NO: 1038091 - RNA, 19 nt, Artificial Sequence
  Description of Artificial Sequence: Synthetic oligonucleotide
auauauauauauaugugug

SEQ ID NO: 1038092 - RNA, 19 nt, Artificial Sequence
  Description of Artificial Sequence: Synthetic oligonucleotide
uguacuuugaaaguugaac

SEQ ID NO: 1038093 - RNA, 19 nt, Artificial Sequence
  Description of Artificial Sequence: Synthetic oligonucleotide
aaaacaccacucugggugg

SEQ ID NO: 1038094 - RNA, 19 nt, Artificial Sequence
  Description of Artificial Sequence: Synthetic oligonucleotide
aacuggucaacaguaaauc

SEQ ID NO: 1038095 - RNA, 19 nt, Artificial Sequence
  Description of Artificial Sequence: Synthetic oligonucleotide
uaucacucugccaaaaccu

SEQ ID NO: 1038096 - RNA, 19 nt, Artificial Sequence
  Description of Artificial Sequence: Synthetic oligonucleotide
accuagugaaucuacagug

SEQ ID NO: 1038097 - RNA, 19 nt, Artificial Sequence
  Description of Artificial Sequence: Synthetic oligonucleotide
gacuagaucauuaugugac

SEQ ID NO: 1038098 - RNA, 19 nt, Artificial Sequence
  Description of Artificial Sequence: Synthetic oligonucleotide
ucauagauaccugaauuag

SEQ ID NO: 1038099 - RNA, 19 nt, Artificial Sequence
  Description of Artificial Sequence: Synthetic oligonucleotide
uagaucauuaugugacugg

SEQ ID NO: 1038100 - RNA, 19 nt, Artificial Sequence
  Description of Artificial Sequence: Synthetic oligonucleotide
aaccuguauaagcugagca

SEQ ID NO: 1038101 - RNA, 19 nt, Artificial Sequence
  Description of Artificial Sequence: Synthetic oligonucleotide
uugaaaguugaacauugac

SEQ ID NO: 1038102 - RNA, 19 nt, Artificial Sequence
  Description of Artificial Sequence: Synthetic oligonucleotide
cuuuaaaacuaucacucug

SEQ ID NO: 1038103 - RNA, 19 nt, Artificial Sequence
  Description of Artificial Sequence: Synthetic oligonucleotide
uggucaacaguaaaucgcc

SEQ ID NO: 1038104 - RNA, 19 nt, Artificial Sequence
  Description of Artificial Sequence: Synthetic oligonucleotide
caaaaugugucugaaacac

SEQ ID NO: 1038105 - RNA, 19 nt, Artificial Sequence
  Description of Artificial Sequence: Synthetic oligonucleotide
uccaaacgcacucaaggag

SEQ ID NO: 1038106 - RNA, 19 nt, Artificial Sequence
  Description of Artificial Sequence: Synthetic oligonucleotide
aaauguggucagcucacuc

SEQ ID NO: 1038107 - RNA, 19 nt, Artificial Sequence
  Description of Artificial Sequence: Synthetic oligonucleotide
uuguuaugaaacuucuaug

SEQ ID NO: 1038108 - RNA, 19 nt, Artificial Sequence
  Description of Artificial Sequence: Synthetic oligonucleotide
auauauauauauauaugug

SEQ ID NO: 1038109 - RNA, 19 nt, Artificial Sequence
  Description of Artificial Sequence: Synthetic oligonucleotide
auauauauauauauauaug

SEQ ID NO: 1038110 - RNA, 19 nt, Artificial Sequence
  Description of Artificial Sequence: Synthetic oligonucleotide
agaucauuaugugacuggc

SEQ ID NO: 1038111 - RNA, 19 nt, Artificial Sequence
  Description of Artificial Sequence: Synthetic oligonucleotide
uuuaccuuccaccaucuau

SEQ ID NO: 1038112 - RNA, 19 nt, Artificial Sequence
  Description of Artificial Sequence: Synthetic oligonucleotide
ucacaguagguuugcaacg

SEQ ID NO: 1038113 - RNA, 19 nt, Artificial Sequence
  Description of Artificial Sequence: Synthetic oligonucleotide
guacuuugaaaguugaaca

SEQ ID NO: 1038114 - RNA, 19 nt, Artificial Sequence
  Description of Artificial Sequence: Synthetic oligonucleotide
uuuccuuagaauuccuucu

SEQ ID NO: 1038115 - RNA, 19 nt, Artificial Sequence
  Description of Artificial Sequence: Synthetic oligonucleotide
agugaaucuacagugccgg

SEQ ID NO: 1038116 - RNA, 19 nt, Artificial Sequence
  Description of Artificial Sequence: Synthetic oligonucleotide
acagagacauguuuuaccu

SEQ ID NO: 1038117 - RNA, 19 nt, Artificial Sequence
  Description of Artificial Sequence: Synthetic oligonucleotide
cucacacacacacaaacag

SEQ ID NO: 1038118 - RNA, 19 nt, Artificial Sequence
  Description of Artificial Sequence: Synthetic oligonucleotide
gacagagacauguuuuacc

SEQ ID NO: 1038119 - RNA, 19 nt, Artificial Sequence
  Description of Artificial Sequence: Synthetic oligonucleotide
uagugaaucuacagugccg

SEQ ID NO: 1038120 - RNA, 19 nt, Artificial Sequence
  Description of Artificial Sequence: Synthetic oligonucleotide
aauuaaucuuucccuuucu

SEQ ID NO: 1038121 - RNA, 19 nt, Artificial Sequence
  Description of Artificial Sequence: Synthetic oligonucleotide
ucuaucagacuguacuuug

SEQ ID NO: 1038122 - RNA, 19 nt, Artificial Sequence
  Description of Artificial Sequence: Synthetic oligonucleotide
uuaccuuccaccaucuauc

SEQ ID NO: 1038123 - RNA, 19 nt, Artificial Sequence
  Description of Artificial Sequence: Synthetic oligonucleotide
uggcccauuguuaugaaac

SEQ ID NO: 1038124 - RNA, 19 nt, Artificial Sequence
  Description of Artificial Sequence: Synthetic oligonucleotide
uuccuaacccaaaagucug

SEQ ID NO: 1038125 - RNA, 19 nt, Artificial Sequence
  Description of Artificial Sequence: Synthetic oligonucleotide
cauauauauauauauauau

SEQ ID NO: 1038126 - RNA, 19 nt, Artificial Sequence
  Description of Artificial Sequence: Synthetic oligonucleotide
aaaccuguauaagcugagc

SEQ ID NO: 1038127 - RNA, 19 nt, Artificial Sequence
  Description of Artificial Sequence: Synthetic oligonucleotide
uggggauucuuucucuagg

SEQ ID NO: 1038128 - RNA, 19 nt, Artificial Sequence
  Description of Artificial Sequence: Synthetic oligonucleotide
agucuuguuacugcuacac

SEQ ID NO: 1038129 - RNA, 19 nt, Artificial Sequence
  Description of Artificial Sequence: Synthetic oligonucleotide
uuaugcuucuuauuggcuc

SEQ ID NO: 1038130 - RNA, 19 nt, Artificial Sequence
  Description of Artificial Sequence: Synthetic oligonucleotide
cuaucacucugccaaaacc

SEQ ID NO: 1038131 - RNA, 19 nt, Artificial Sequence
  Description of Artificial Sequence: Synthetic oligonucleotide
uccucacacacacacaaac

SEQ ID NO: 1038132 - RNA, 19 nt, Artificial Sequence
  Description of Artificial Sequence: Synthetic oligonucleotide
gaugguaaagacuuaucaa

SEQ ID NO: 1038133 - RNA, 19 nt, Artificial Sequence
  Description of Artificial Sequence: Synthetic oligonucleotide
uucauagauaccugaauua

SEQ ID NO: 1038134 - RNA, 19 nt, Artificial Sequence
  Description of Artificial Sequence: Synthetic oligonucleotide
uguuuuaccuguuggcugu

SEQ ID NO: 1038135 - RNA, 19 nt, Artificial Sequence
  Description of Artificial Sequence: Synthetic oligonucleotide
aaucauaaucucugacaca

SEQ ID NO: 1038136 - RNA, 19 nt, Artificial Sequence
  Description of Artificial Sequence: Synthetic oligonucleotide
ucacacacacacaaacagc

SEQ ID NO: 1038137 - RNA, 19 nt, Artificial Sequence
  Description of Artificial Sequence: Synthetic oligonucleotide
cauaaucuuaaugauguuc

SEQ ID NO: 1038138 - RNA, 19 nt, Artificial Sequence
  Description of Artificial Sequence: Synthetic oligonucleotide
ugugacagagacauguuuu

SEQ ID NO: 1038139 - RNA, 19 nt, Artificial Sequence
  Description of Artificial Sequence: Synthetic oligonucleotide
agaauaguuuccucaguug

SEQ ID NO: 1038140 - RNA, 19 nt, Artificial Sequence
  Description of Artificial Sequence: Synthetic oligonucleotide
agcucuauuuagucccugc

SEQ ID NO: 1038141 - RNA, 19 nt, Artificial Sequence
  Description of Artificial Sequence: Synthetic oligonucleotide
aaaaccaggauaccccaaa

SEQ ID NO: 1038142 - RNA, 19 nt, Artificial Sequence
  Description of Artificial Sequence: Synthetic oligonucleotide
auuaaucuuucccuuucug

SEQ ID NO: 1038143 - RNA, 19 nt, Artificial Sequence
  Description of Artificial Sequence: Synthetic oligonucleotide
auuuagucccugcaugaag

SEQ ID NO: 1038144 - RNA, 19 nt, Artificial Sequence
  Description of Artificial Sequence: Synthetic oligonucleotide
gaaccauauauauauauau

SEQ ID NO: 1038145 - RNA, 19 nt, Artificial Sequence
  Description of Artificial Sequence: Synthetic oligonucleotide
uguguguagggcucucugg

SEQ ID NO: 1038146 - RNA, 19 nt, Artificial Sequence
  Description of Artificial Sequence: Synthetic oligonucleotide
caauguaaauuaaucuuuc

SEQ ID NO: 1038147 - RNA, 19 nt, Artificial Sequence
  Description of Artificial Sequence: Synthetic oligonucleotide
uccucaguugcccuaaagu

SEQ ID NO: 1038148 - RNA, 19 nt, Artificial Sequence
  Description of Artificial Sequence: Synthetic oligonucleotide
gacuuacacaugcacacug

SEQ ID NO: 1038149 - RNA, 19 nt, Artificial Sequence
  Description of Artificial Sequence: Synthetic oligonucleotide
caguaaaucgccugcuucc

SEQ ID NO: 1038150 - RNA, 19 nt, Artificial Sequence
  Description of Artificial Sequence: Synthetic oligonucleotide
gauaccccaaaaugugucc

SEQ ID NO: 1038151 - RNA, 19 nt, Artificial Sequence
  Description of Artificial Sequence: Synthetic oligonucleotide
agaccuagugaaucuacag

SEQ ID NO: 1038152 - RNA, 19 nt, Artificial Sequence
  Description of Artificial Sequence: Synthetic oligonucleotide
uguuagaugagggcuacug

SEQ ID NO: 1038153 - RNA, 19 nt, Artificial Sequence
  Description of Artificial Sequence: Synthetic oligonucleotide
ucuuauuggcuccaagcuc

SEQ ID NO: 1038154 - RNA, 19 nt, Artificial Sequence
  Description of Artificial Sequence: Synthetic oligonucleotide
cccuauaccaugaagaaac

SEQ ID NO: 1038155 - RNA, 19 nt, Artificial Sequence
  Description of Artificial Sequence: Synthetic oligonucleotide
aaguuuggcccauuguuau

SEQ ID NO: 1038156 - RNA, 19 nt, Artificial Sequence
  Description of Artificial Sequence: Synthetic oligonucleotide
caccuuauggauacagggg

SEQ ID NO: 1038157 - RNA, 19 nt, Artificial Sequence
  Description of Artificial Sequence: Synthetic oligonucleotide
uuggcaagaaccauauaua

SEQ ID NO: 1038158 - RNA, 19 nt, Artificial Sequence
  Description of Artificial Sequence: Synthetic oligonucleotide
ugagcauuuccuaacccaa

SEQ ID NO: 1038159 - RNA, 19 nt, Artificial Sequence
  Description of Artificial Sequence: Synthetic oligonucleotide
ugaacauugacagcccuga

SEQ ID NO: 1038160 - RNA, 19 nt, Artificial Sequence
  Description of Artificial Sequence: Synthetic oligonucleotide
uacuuugaaaguugaacau

SEQ ID NO: 1038161 - RNA, 19 nt, Artificial Sequence
  Description of Artificial Sequence: Synthetic oligonucleotide
cagauaguaaaacagaggu

SEQ ID NO: 1038162 - RNA, 19 nt, Artificial Sequence
  Description of Artificial Sequence: Synthetic oligonucleotide
auauauauauaugugugua

SEQ ID NO: 1038163 - RNA, 19 nt, Artificial Sequence
  Description of Artificial Sequence: Synthetic oligonucleotide
gaucccaugaaaagaauuc

SEQ ID NO: 1038164 - RNA, 19 nt, Artificial Sequence
  Description of Artificial Sequence: Synthetic oligonucleotide
uguuucugaaaauuuuaua

SEQ ID NO: 1038165 - RNA, 19 nt, Artificial Sequence
  Description of Artificial Sequence: Synthetic oligonucleotide
agcaucugaaucauaaucu

SEQ ID NO: 1038166 - RNA, 19 nt, Artificial Sequence
  Description of Artificial Sequence: Synthetic oligonucleotide
aacgagagcaagggagccc

SEQ ID NO: 1038167 - RNA, 19 nt, Artificial Sequence
  Description of Artificial Sequence: Synthetic oligonucleotide
uucugaagaucccaugaaa

SEQ ID NO: 1038168 - RNA, 19 nt, Artificial Sequence
  Description of Artificial Sequence: Synthetic oligonucleotide
ucuaaauccucuugcucac

SEQ ID NO: 1038169 - RNA, 19 nt, Artificial Sequence
  Description of Artificial Sequence: Synthetic oligonucleotide
gacuucauagcacaaggaa

SEQ ID NO: 1038170 - RNA, 19 nt, Artificial Sequence
  Description of Artificial Sequence: Synthetic oligonucleotide
uaugugacuggcucaugcc

SEQ ID NO: 1038171 - RNA, 19 nt, Artificial Sequence
  Description of Artificial Sequence: Synthetic oligonucleotide
uggggaauugacucuggag

SEQ ID NO: 1038172 - RNA, 19 nt, Artificial Sequence
  Description of Artificial Sequence: Synthetic oligonucleotide
gcaccuuauggauacaggg

SEQ ID NO: 1038173 - RNA, 19 nt, Artificial Sequence
  Description of Artificial Sequence: Synthetic oligonucleotide
uuagucccugcaugaaggg

SEQ ID NO: 1038174 - RNA, 19 nt, Artificial Sequence
  Description of Artificial Sequence: Synthetic oligonucleotide
gaagccacaaaagaaugca

SEQ ID NO: 1038175 - RNA, 19 nt, Artificial Sequence
  Description of Artificial Sequence: Synthetic oligonucleotide
caggauaccccaaaaugug

SEQ ID NO: 1038176 - RNA, 19 nt, Artificial Sequence
  Description of Artificial Sequence: Synthetic oligonucleotide
ucauuaugugacuggcuca

SEQ ID NO: 1038177 - RNA, 19 nt, Artificial Sequence
  Description of Artificial Sequence: Synthetic oligonucleotide
ucuggguacuccauucaug

SEQ ID NO: 1038178 - RNA, 19 nt, Artificial Sequence
  Description of Artificial Sequence: Synthetic oligonucleotide
cucaguugcccuaaaguuc

SEQ ID NO: 1038179 - RNA, 19 nt, Artificial Sequence
  Description of Artificial Sequence: Synthetic oligonucleotide
ugucuaaauccucuugcuc

SEQ ID NO: 1038180 - RNA, 19 nt, Artificial Sequence
  Description of Artificial Sequence: Synthetic oligonucleotide
ugaaacccaaaacucuguc

SEQ ID NO: 1038181 - RNA, 19 nt, Artificial Sequence
  Description of Artificial Sequence: Synthetic oligonucleotide
cugaauuaguguucaugag

SEQ ID NO: 1038182 - RNA, 19 nt, Artificial Sequence
  Description of Artificial Sequence: Synthetic oligonucleotide
auauauguguguagggcuc

SEQ ID NO: 1038183 - RNA, 19 nt, Artificial Sequence
  Description of Artificial Sequence: Synthetic oligonucleotide
cagcaucugaaucauaauc

SEQ ID NO: 1038184 - RNA, 19 nt, Artificial Sequence
  Description of Artificial Sequence: Synthetic oligonucleotide
uggcaagaaccauauauau

SEQ ID NO: 1038185 - RNA, 19 nt, Artificial Sequence
  Description of Artificial Sequence: Synthetic oligonucleotide
uaucagacuguacuuugaa

SEQ ID NO: 1038186 - RNA, 19 nt, Artificial Sequence
  Description of Artificial Sequence: Synthetic oligonucleotide
agcccugagcuuauuaacc

SEQ ID NO: 1038187 - RNA, 19 nt, Artificial Sequence
  Description of Artificial Sequence: Synthetic oligonucleotide
auauauauauauauauaua

SEQ ID NO: 1038188 - RNA, 19 nt, Artificial Sequence
  Description of Artificial Sequence: Synthetic oligonucleotide
aagaaugcagauaguaaaa

SEQ ID NO: 1038189 - RNA, 19 nt, Artificial Sequence
  Description of Artificial Sequence: Synthetic oligonucleotide
ugagaccuagugaaucuac

SEQ ID NO: 1038190 - RNA, 19 nt, Artificial Sequence
  Description of Artificial Sequence: Synthetic oligonucleotide
acacaugcacacuguuggc

SEQ ID NO: 1038191 - RNA, 19 nt, Artificial Sequence
  Description of Artificial Sequence: Synthetic oligonucleotide
uacugcaccaacugaaaau

SEQ ID NO: 1038192 - RNA, 19 nt, Artificial Sequence
  Description of Artificial Sequence: Synthetic oligonucleotide
uuucaacauaauuacccua

SEQ ID NO: 1038193 - RNA, 19 nt, Artificial Sequence
  Description of Artificial Sequence: Synthetic oligonucleotide
agugcuuugucuaaauccu

SEQ ID NO: 1038194 - RNA, 19 nt, Artificial Sequence
  Description of Artificial Sequence: Synthetic oligonucleotide
gggaauugacucuggaggg

SEQ ID NO: 1038195 - RNA, 19 nt, Artificial Sequence
  Description of Artificial Sequence: Synthetic oligonucleotide
aacgcacucaaggagcucu

SEQ ID NO: 1038196 - RNA, 19 nt, Artificial Sequence
  Description of Artificial Sequence: Synthetic oligonucleotide
cagaaguagauaaacagcu

SEQ ID NO: 1038197 - RNA, 19 nt, Artificial Sequence
  Description of Artificial Sequence: Synthetic oligonucleotide
cuagaucauucucucuagg

SEQ ID NO: 1038198 - RNA, 19 nt, Artificial Sequence
  Description of Artificial Sequence: Synthetic oligonucleotide
agauccaaaaugugucuga

SEQ ID NO: 1038199 - RNA, 19 nt, Artificial Sequence
  Description of Artificial Sequence: Synthetic oligonucleotide
uaaaucgccugcuuccuuc

SEQ ID NO: 1038200 - RNA, 19 nt, Artificial Sequence
  Description of Artificial Sequence: Synthetic oligonucleotide
cuggcccuaagcauguuag

SEQ ID NO: 1038201 - RNA, 19 nt, Artificial Sequence
  Description of Artificial Sequence: Synthetic oligonucleotide
uacccuauaccaugaagaa

SEQ ID NO: 1038202 - RNA, 19 nt, Artificial Sequence
  Description of Artificial Sequence: Synthetic oligonucleotide
uacaaguuuggcccauugu

SEQ ID NO: 1038203 - RNA, 19 nt, Artificial Sequence
  Description of Artificial Sequence: Synthetic oligonucleotide
guugcccuaaaguucuuug

SEQ ID NO: 1038204 - RNA, 19 nt, Artificial Sequence
  Description of Artificial Sequence: Synthetic oligonucleotide
aguugaacauugacagccc

SEQ ID NO: 1038205 - RNA, 19 nt, Artificial Sequence
  Description of Artificial Sequence: Synthetic oligonucleotide
guuggcuguauuuggcaag

SEQ ID NO: 1038206 - RNA, 19 nt, Artificial Sequence
  Description of Artificial Sequence: Synthetic oligonucleotide
guuugcaacgagagcaagg

SEQ ID NO: 1038207 - RNA, 19 nt, Artificial Sequence
  Description of Artificial Sequence: Synthetic oligonucleotide
acaccuguuucugugugac

SEQ ID NO: 1038208 - RNA, 19 nt, Artificial Sequence
  Description of Artificial Sequence: Synthetic oligonucleotide
ucuguaaauguggccagca

SEQ ID NO: 1038209 - RNA, 19 nt, Artificial Sequence
  Description of Artificial Sequence: Synthetic oligonucleotide
aaccauauauauauauaua

SEQ ID NO: 1038210 - RNA, 19 nt, Artificial Sequence
  Description of Artificial Sequence: Synthetic oligonucleotide
ucagaugguaaagacuuau

SEQ ID NO: 1038211 - RNA, 19 nt, Artificial Sequence
  Description of Artificial Sequence: Synthetic oligonucleotide
cuagaucauuaugugacug

SEQ ID NO: 1038212 - RNA, 19 nt, Artificial Sequence
  Description of Artificial Sequence: Synthetic oligonucleotide
cuauuuagucccugcauga

SEQ ID NO: 1038213 - RNA, 19 nt, Artificial Sequence
  Description of Artificial Sequence: Synthetic oligonucleotide
aguaaaccaaaaccaggau

SEQ ID NO: 1038214 - RNA, 19 nt, Artificial Sequence
  Description of Artificial Sequence: Synthetic oligonucleotide
accuguauaagcugagcau

SEQ ID NO: 1038215 - RNA, 19 nt, Artificial Sequence
  Description of Artificial Sequence: Synthetic oligonucleotide
guaaagacuuaucaagaua

SEQ ID NO: 1038216 - RNA, 19 nt, Artificial Sequence
  Description of Artificial Sequence: Synthetic oligonucleotide
cacuguuggcaccuggugc

SEQ ID NO: 1038217 - RNA, 19 nt, Artificial Sequence
  Description of Artificial Sequence: Synthetic oligonucleotide
uaguaaaacagaggugacu

SEQ ID NO: 1038218 - RNA, 19 nt, Artificial Sequence
  Description of Artificial Sequence: Synthetic oligonucleotide
cugcaugaaggguagagga

SEQ ID NO: 1038219 - RNA, 19 nt, Artificial Sequence
  Description of Artificial Sequence: Synthetic oligonucleotide
ucuggggaauugacucugg

SEQ ID NO: 1038220 - RNA, 19 nt, Artificial Sequence
  Description of Artificial Sequence: Synthetic oligonucleotide
auuggcacccgggauacag

SEQ ID NO: 1038221 - RNA, 19 nt, Artificial Sequence
  Description of Artificial Sequence: Synthetic oligonucleotide
aaaacagaggugacuuaca

SEQ ID NO: 1038222 - RNA, 19 nt, Artificial Sequence
  Description of Artificial Sequence: Synthetic oligonucleotide
cuaugccugagaccaauug

SEQ ID NO: 1038223 - RNA, 19 nt, Artificial Sequence
  Description of Artificial Sequence: Synthetic oligonucleotide
guggcagcaauguaaauua

SEQ ID NO: 1038224 - RNA, 19 nt, Artificial Sequence
  Description of Artificial Sequence: Synthetic oligonucleotide
agauaguaaaacagaggug

SEQ ID NO: 1038225 - RNA, 19 nt, Artificial Sequence
  Description of Artificial Sequence: Synthetic oligonucleotide
accugaauuaguguucaug

SEQ ID NO: 1038226 - RNA, 19 nt, Artificial Sequence
  Description of Artificial Sequence: Synthetic oligonucleotide
aauuacccuauaccaugaa

SEQ ID NO: 1038227 - RNA, 19 nt, Artificial Sequence
  Description of Artificial Sequence: Synthetic oligonucleotide
guaaauguggccagcaaaa

SEQ ID NO: 1038228 - RNA, 19 nt, Artificial Sequence
  Description of Artificial Sequence: Synthetic oligonucleotide
aggaagacuagaucauuau

SEQ ID NO: 1038229 - RNA, 19 nt, Artificial Sequence
  Description of Artificial Sequence: Synthetic oligonucleotide
aauguguccagaagucccu

SEQ ID NO: 1038230 - RNA, 19 nt, Artificial Sequence
  Description of Artificial Sequence: Synthetic oligonucleotide
uucauggcguguuugccuc

SEQ ID NO: 1038231 - RNA, 19 nt, Artificial Sequence
  Description of Artificial Sequence: Synthetic oligonucleotide
ugcaugaaggguagaggaa

SEQ ID NO: 1038232 - RNA, 19 nt, Artificial Sequence
  Description of Artificial Sequence: Synthetic oligonucleotide
ggaagacuagaucauuaug

SEQ ID NO: 1038233 - RNA, 19 nt, Artificial Sequence
  Description of Artificial Sequence: Synthetic oligonucleotide
agagcuuggcgcuuuuccu

SEQ ID NO: 1038234 - RNA, 19 nt, Artificial Sequence
  Description of Artificial Sequence: Synthetic oligonucleotide
caaaagaaugcagauagua

SEQ ID NO: 1038235 - RNA, 19 nt, Artificial Sequence
  Description of Artificial Sequence: Synthetic oligonucleotide
uucauagcacaaggaaggc

SEQ ID NO: 1038236 - RNA, 19 nt, Artificial Sequence
  Description of Artificial Sequence: Synthetic oligonucleotide
guagguuugcaacgagagc

SEQ ID NO: 1038237 - RNA, 19 nt, Artificial Sequence
  Description of Artificial Sequence: Synthetic oligonucleotide
uguauuuggcaagaaccau

SEQ ID NO: 1038238 - RNA, 19 nt, Artificial Sequence
  Description of Artificial Sequence: Synthetic oligonucleotide
aaacuaucacucugccaaa

SEQ ID NO: 1038239 - RNA, 19 nt, Artificial Sequence
  Description of Artificial Sequence: Synthetic oligonucleotide
ucucuggguacuccauuca

SEQ ID NO: 1038240 - RNA, 19 nt, Artificial Sequence
  Description of Artificial Sequence: Synthetic oligonucleotide
uugcccuaaaguucuuugu

SEQ ID NO: 1038241 - RNA, 19 nt, Artificial Sequence
  Description of Artificial Sequence: Synthetic oligonucleotide
cugagcauuuccuaaccca

SEQ ID NO: 1038242 - RNA, 19 nt, Artificial Sequence
  Description of Artificial Sequence: Synthetic oligonucleotide
ccaaacgcacucaaggagc

SEQ ID NO: 1038243 - RNA, 19 nt, Artificial Sequence
  Description of Artificial Sequence: Synthetic oligonucleotide
acaguagguuugcaacgag

SEQ ID NO: 1038244 - RNA, 19 nt, Artificial Sequence
  Description of Artificial Sequence: Synthetic oligonucleotide
ucaagagccggcugagggu

SEQ ID NO: 1038245 - RNA, 19 nt, Artificial Sequence
  Description of Artificial Sequence: Synthetic oligonucleotide
cauuuccuaacccaaaagu

SEQ ID NO: 1038246 - RNA, 19 nt, Artificial Sequence
  Description of Artificial Sequence: Synthetic oligonucleotide
uccuaacccaaaagucuga

SEQ ID NO: 1038247 - RNA, 19 nt, Artificial Sequence
  Description of Artificial Sequence: Synthetic oligonucleotide
caucugguuccuguaaggc

SEQ ID NO: 1038248 - RNA, 19 nt, Artificial Sequence
  Description of Artificial Sequence: Synthetic oligonucleotide
auaccugaauuaguguuca

SEQ ID NO: 1038249 - RNA, 19 nt, Artificial Sequence
  Description of Artificial Sequence: Synthetic oligonucleotide
agaugcucagaugguaaag

SEQ ID NO: 1038250 - RNA, 19 nt, Artificial Sequence
  Description of Artificial Sequence: Synthetic oligonucleotide
agaaccauauauauauaua

SEQ ID NO: 1038251 - RNA, 19 nt, Artificial Sequence
  Description of Artificial Sequence: Synthetic oligonucleotide
cacacacacacaaacagcu

SEQ ID NO: 1038252 - RNA, 19 nt, Artificial Sequence
  Description of Artificial Sequence: Synthetic oligonucleotide
ggcuccaagcuccaaacgc

SEQ ID NO: 1038253 - RNA, 19 nt, Artificial Sequence
  Description of Artificial Sequence: Synthetic oligonucleotide
guagaauucugaagauccc

SEQ ID NO: 1038254 - RNA, 19 nt, Artificial Sequence
  Description of Artificial Sequence: Synthetic oligonucleotide
gauucauagauaccugaau

SEQ ID NO: 1038255 - RNA, 19 nt, Artificial Sequence
  Description of Artificial Sequence: Synthetic oligonucleotide
uauauguguguagggcucu

SEQ ID NO: 1038256 - RNA, 19 nt, Artificial Sequence
  Description of Artificial Sequence: Synthetic oligonucleotide
uuuaccuguuggcuguauu

SEQ ID NO: 1038257 - RNA, 19 nt, Artificial Sequence
  Description of Artificial Sequence: Synthetic oligonucleotide
aggaaggccccaaaccaac

SEQ ID NO: 1038258 - RNA, 19 nt, Artificial Sequence
  Description of Artificial Sequence: Synthetic oligonucleotide
cauccucacacacacacaa

SEQ ID NO: 1038259 - RNA, 19 nt, Artificial Sequence
  Description of Artificial Sequence: Synthetic oligonucleotide
cuggggauucuuucucuag

SEQ ID NO: 1038260 - RNA, 19 nt, Artificial Sequence
  Description of Artificial Sequence: Synthetic oligonucleotide
caaaccaacaaaaccugua

SEQ ID NO: 1038261 - RNA, 19 nt, Artificial Sequence
  Description of Artificial Sequence: Synthetic oligonucleotide
uguauaagcugagcauuuc

SEQ ID NO: 1038262 - RNA, 19 nt, Artificial Sequence
  Description of Artificial Sequence: Synthetic oligonucleotide
gucuuguuacugcuacacc

SEQ ID NO: 1038263 - RNA, 19 nt, Artificial Sequence
  Description of Artificial Sequence: Synthetic oligonucleotide
cauucauggcguguuugcc

SEQ ID NO: 1038264 - RNA, 19 nt, Artificial Sequence
  Description of Artificial Sequence: Synthetic oligonucleotide
ucaguacccacaccuguuu

SEQ ID NO: 1038265 - RNA, 19 nt, Artificial Sequence
  Description of Artificial Sequence: Synthetic oligonucleotide
ugacagagacauguuuuac

SEQ ID NO: 1038266 - RNA, 19 nt, Artificial Sequence
  Description of Artificial Sequence: Synthetic oligonucleotide
agcaccuuauggauacagg

SEQ ID NO: 1038267 - RNA, 19 nt, Artificial Sequence
  Description of Artificial Sequence: Synthetic oligonucleotide
cugauuuggaacuggucaa

SEQ ID NO: 1038268 - RNA, 19 nt, Artificial Sequence
  Description of Artificial Sequence: Synthetic oligonucleotide
uauuuagucccugcaugaa

SEQ ID NO: 1038269 - RNA, 19 nt, Artificial Sequence
  Description of Artificial Sequence: Synthetic oligonucleotide
aguuuggcccauuguuaug

SEQ ID NO: 1038270 - RNA, 19 nt, Artificial Sequence
  Description of Artificial Sequence: Synthetic oligonucleotide
uuacugcuacaccauccuc

SEQ ID NO: 1038271 - RNA, 19 nt, Artificial Sequence
  Description of Artificial Sequence: Synthetic oligonucleotide
gaauuccuacaaguuuggc

SEQ ID NO: 1038272 - RNA, 19 nt, Artificial Sequence
  Description of Artificial Sequence: Synthetic oligonucleotide
gaccuagugaaucuacagu

SEQ ID NO: 1038273 - RNA, 19 nt, Artificial Sequence
  Description of Artificial Sequence: Synthetic oligonucleotide
ugccaacuuuguaauuuuc

SEQ ID NO: 1038274 - RNA, 19 nt, Artificial Sequence
  Description of Artificial Sequence: Synthetic oligonucleotide
uuauuggcuccaagcucca

SEQ ID NO: 1038275 - RNA, 19 nt, Artificial Sequence
  Description of Artificial Sequence: Synthetic oligonucleotide
cagcccugagcuuauuaac

SEQ ID NO: 1038276 - RNA, 19 nt, Artificial Sequence
  Description of Artificial Sequence: Synthetic oligonucleotide
agacauguuuuaccuucca

SEQ ID NO: 1038277 - RNA, 19 nt, Artificial Sequence
  Description of Artificial Sequence: Synthetic oligonucleotide
cccauuguuaugaaacuuc

SEQ ID NO: 1038278 - RNA, 19 nt, Artificial Sequence
  Description of Artificial Sequence: Synthetic oligonucleotide
agaauucugaagaucccau

SEQ ID NO: 1038279 - RNA, 19 nt, Artificial Sequence
  Description of Artificial Sequence: Synthetic oligonucleotide
aguaaaucgccugcuuccu

SEQ ID NO: 1038280 - RNA, 19 nt, Artificial Sequence
  Description of Artificial Sequence: Synthetic oligonucleotide
ucuggcccuaagcauguua

SEQ ID NO: 1038281 - RNA, 19 nt, Artificial Sequence
  Description of Artificial Sequence: Synthetic oligonucleotide
cuccaagcuccaaacgcac

SEQ ID NO: 1038282 - RNA, 19 nt, Artificial Sequence
  Description of Artificial Sequence: Synthetic oligonucleotide
gugaaucuacagugccggg

SEQ ID NO: 1038283 - RNA, 19 nt, Artificial Sequence
  Description of Artificial Sequence: Synthetic oligonucleotide
aaagacuuaucaagauauu

SEQ ID NO: 1038284 - RNA, 19 nt, Artificial Sequence
  Description of Artificial Sequence: Synthetic oligonucleotide
uccaagcuccaaacgcacu

SEQ ID NO: 1038285 - RNA, 19 nt, Artificial Sequence
  Description of Artificial Sequence: Synthetic oligonucleotide
aacuaucacucugccaaaa

SEQ ID NO: 1038286 - RNA, 19 nt, Artificial Sequence
  Description of Artificial Sequence: Synthetic oligonucleotide
cauguuagaugagggcuac

SEQ ID NO: 1038287 - RNA, 19 nt, Artificial Sequence
  Description of Artificial Sequence: Synthetic oligonucleotide
uugcaacgagagcaaggga

SEQ ID NO: 1038288 - RNA, 19 nt, Artificial Sequence
  Description of Artificial Sequence: Synthetic oligonucleotide
gaaauugcuuuaaaacuau

SEQ ID NO: 1038289 - RNA, 19 nt, Artificial Sequence
  Description of Artificial Sequence: Synthetic oligonucleotide
ggagcccuagucuuguuac

SEQ ID NO: 1038290 - RNA, 19 nt, Artificial Sequence
  Description of Artificial Sequence: Synthetic oligonucleotide
cacucaaggagcucucuga

SEQ ID NO: 1038291 - RNA, 19 nt, Artificial Sequence
  Description of Artificial Sequence: Synthetic oligonucleotide
cuccaaacgcacucaagga

SEQ ID NO: 1038292 - RNA, 19 nt, Artificial Sequence
  Description of Artificial Sequence: Synthetic oligonucleotide
ugccgggaacacagaagag

SEQ ID NO: 1038293 - RNA, 19 nt, Artificial Sequence
  Description of Artificial Sequence: Synthetic oligonucleotide
cugugagaccuagugaauc

SEQ ID NO: 1038294 - RNA, 19 nt, Artificial Sequence
  Description of Artificial Sequence: Synthetic oligonucleotide
cuaucagacuguacuuuga

SEQ ID NO: 1038295 - RNA, 19 nt, Artificial Sequence
  Description of Artificial Sequence: Synthetic oligonucleotide
gccgggaacacagaagagg

SEQ ID NO: 1038296 - RNA, 19 nt, Artificial Sequence
  Description of Artificial Sequence: Synthetic oligonucleotide
ugacuuacacaugcacacu

SEQ ID NO: 1038297 - RNA, 19 nt, Artificial Sequence
  Description of Artificial Sequence: Synthetic oligonucleotide
ugcuggggauucuuucucu

SEQ ID NO: 1038298 - RNA, 19 nt, Artificial Sequence
  Description of Artificial Sequence: Synthetic oligonucleotide
agacuguacuuugaaaguu

SEQ ID NO: 1038299 - RNA, 19 nt, Artificial Sequence
  Description of Artificial Sequence: Synthetic oligonucleotide
caauuggcacccgggauac

SEQ ID NO: 1038300 - RNA, 19 nt, Artificial Sequence
  Description of Artificial Sequence: Synthetic oligonucleotide
ugucgccggcggaagaaga

SEQ ID NO: 1038301 - RNA, 19 nt, Artificial Sequence
  Description of Artificial Sequence: Synthetic oligonucleotide
agcccuagucuuguuacug

SEQ ID NO: 1038302 - RNA, 19 nt, Artificial Sequence
  Description of Artificial Sequence: Synthetic oligonucleotide
acucugccaaaaccucaag

SEQ ID NO: 1038303 - RNA, 19 nt, Artificial Sequence
  Description of Artificial Sequence: Synthetic oligonucleotide
aggaaguagggcuggcuuu

SEQ ID NO: 1038304 - RNA, 19 nt, Artificial Sequence
  Description of Artificial Sequence: Synthetic oligonucleotide
aagucccuguucacaguag

SEQ ID NO: 1038305 - RNA, 19 nt, Artificial Sequence
  Description of Artificial Sequence: Synthetic oligonucleotide
accucuggcccuaagcaug

SEQ ID NO: 1038306 - RNA, 19 nt, Artificial Sequence
  Description of Artificial Sequence: Synthetic oligonucleotide
aaucgccugcuuccuucca

SEQ ID NO: 1038307 - RNA, 19 nt, Artificial Sequence
  Description of Artificial Sequence: Synthetic oligonucleotide
guauuuggcaagaaccaua

SEQ ID NO: 1038308 - RNA, 19 nt, Artificial Sequence
  Description of Artificial Sequence: Synthetic oligonucleotide
aucuaucagacuguacuuu

SEQ ID NO: 1038309 - RNA, 19 nt, Artificial Sequence
  Description of Artificial Sequence: Synthetic oligonucleotide
caacgagagcaagggagcc

SEQ ID NO: 1038310 - RNA, 19 nt, Artificial Sequence
  Description of Artificial Sequence: Synthetic oligonucleotide
gcccuaagcauguuagaug

SEQ ID NO: 1038311 - RNA, 19 nt, Artificial Sequence
  Description of Artificial Sequence: Synthetic oligonucleotide
uuggcacccgggauacaga

SEQ ID NO: 1038312 - RNA, 19 nt, Artificial Sequence
  Description of Artificial Sequence: Synthetic oligonucleotide
cccaaaauguguccagaag

SEQ ID NO: 1038313 - RNA, 19 nt, Artificial Sequence
  Description of Artificial Sequence: Synthetic oligonucleotide
accaucuaucagacuguac

SEQ ID NO: 1038314 - RNA, 19 nt, Artificial Sequence
  Description of Artificial Sequence: Synthetic oligonucleotide
uuggcccauuguuaugaaa

SEQ ID NO: 1038315 - RNA, 19 nt, Artificial Sequence
  Description of Artificial Sequence: Synthetic oligonucleotide
ggcguguuugccucugugc

SEQ ID NO: 1038316 - RNA, 19 nt, Artificial Sequence
  Description of Artificial Sequence: Synthetic oligonucleotide
guaccacaguauucaaaga

SEQ ID NO: 1038317 - RNA, 19 nt, Artificial Sequence
  Description of Artificial Sequence: Synthetic oligonucleotide
ccaggagucuagaucauuc

SEQ ID NO: 1038318 - RNA, 19 nt, Artificial Sequence
  Description of Artificial Sequence: Synthetic oligonucleotide
ggcagguagggagauagug

SEQ ID NO: 1038319 - RNA, 19 nt, Artificial Sequence
  Description of Artificial Sequence: Synthetic oligonucleotide
ccauucauggcguguuugc

SEQ ID NO: 1038320 - RNA, 19 nt, Artificial Sequence
  Description of Artificial Sequence: Synthetic oligonucleotide
cagcaccuuauggauacag

SEQ ID NO: 1038321 - RNA, 19 nt, Artificial Sequence
  Description of Artificial Sequence: Synthetic oligonucleotide
agacuucauagcacaagga

SEQ ID NO: 1038322 - RNA, 19 nt, Artificial Sequence
  Description of Artificial Sequence: Synthetic oligonucleotide
auauguguguagggcucuc

SEQ ID NO: 1038323 - RNA, 19 nt, Artificial Sequence
  Description of Artificial Sequence: Synthetic oligonucleotide
ccauauauauauauauaua

SEQ ID NO: 1038324 - RNA, 19 nt, Artificial Sequence
  Description of Artificial Sequence: Synthetic oligonucleotide
uuuggcccauuguuaugaa

SEQ ID NO: 1038325 - RNA, 19 nt, Artificial Sequence
  Description of Artificial Sequence: Synthetic oligonucleotide
uugcucacaguagguuugc

SEQ ID NO: 1038326 - RNA, 19 nt, Artificial Sequence
  Description of Artificial Sequence: Synthetic oligonucleotide
uggcgcuuuuccuuagaau

SEQ ID NO: 1038327 - RNA, 19 nt, Artificial Sequence
  Description of Artificial Sequence: Synthetic oligonucleotide
gucagcucacuccagccaa

SEQ ID NO: 1038328 - RNA, 19 nt, Artificial Sequence
  Description of Artificial Sequence: Synthetic oligonucleotide
uacuccauucauggcgugu

SEQ ID NO: 1038329 - RNA, 19 nt, Artificial Sequence
  Description of Artificial Sequence: Synthetic oligonucleotide
guacccacaccuguuucug

SEQ ID NO: 1038330 - RNA, 19 nt, Artificial Sequence
  Description of Artificial Sequence: Synthetic oligonucleotide
aggauaccccaaaaugugu

SEQ ID NO: 1038331 - RNA, 19 nt, Artificial Sequence
  Description of Artificial Sequence: Synthetic oligonucleotide
gaauugacucuggagggcu

SEQ ID NO: 1038332 - RNA, 19 nt, Artificial Sequence
  Description of Artificial Sequence: Synthetic oligonucleotide
uuuuaccuuccaccaucua

SEQ ID NO: 1038333 - RNA, 19 nt, Artificial Sequence
  Description of Artificial Sequence: Synthetic oligonucleotide
ccaucuaucagacuguacu

SEQ ID NO: 1038334 - RNA, 19 nt, Artificial Sequence
  Description of Artificial Sequence: Synthetic oligonucleotide
cagacuguacuuugaaagu

SEQ ID NO: 1038335 - RNA, 19 nt, Artificial Sequence
  Description of Artificial Sequence: Synthetic oligonucleotide
caagauccaaaaugugucu

SEQ ID NO: 1038336 - RNA, 19 nt, Artificial Sequence
  Description of Artificial Sequence: Synthetic oligonucleotide
cucugugccuaggaagcag

SEQ ID NO: 1038337 - RNA, 19 nt, Artificial Sequence
  Description of Artificial Sequence: Synthetic oligonucleotide
gcugagcauuuccuaaccc

SEQ ID NO: 1038338 - RNA, 19 nt, Artificial Sequence
  Description of Artificial Sequence: Synthetic oligonucleotide
gguagggagauagugaggu

SEQ ID NO: 1038339 - RNA, 19 nt, Artificial Sequence
  Description of Artificial Sequence: Synthetic oligonucleotide
agguagggagauagugagg

SEQ ID NO: 1038340 - RNA, 19 nt, Artificial Sequence
  Description of Artificial Sequence: Synthetic oligonucleotide
uggcccuaagcauguuaga

SEQ ID NO: 1038341 - RNA, 19 nt, Artificial Sequence
  Description of Artificial Sequence: Synthetic oligonucleotide
cacccgggauacagaauag

SEQ ID NO: 1038342 - RNA, 19 nt, Artificial Sequence
  Description of Artificial Sequence: Synthetic oligonucleotide
agucucuggggaauugacu

SEQ ID NO: 1038343 - RNA, 19 nt, Artificial Sequence
  Description of Artificial Sequence: Synthetic oligonucleotide
gaacuggucaacaguaaau

SEQ ID NO: 1038344 - RNA, 19 nt, Artificial Sequence
  Description of Artificial Sequence: Synthetic oligonucleotide
gguaaagacuuaucaagau

SEQ ID NO: 1038345 - RNA, 19 nt, Artificial Sequence
  Description of Artificial Sequence: Synthetic oligonucleotide
uugcaacccuuuucuguaa

SEQ ID NO: 1038346 - RNA, 19 nt, Artificial Sequence
  Description of Artificial Sequence: Synthetic oligonucleotide
ggaauugacucuggagggc

SEQ ID NO: 1038347 - RNA, 19 nt, Artificial Sequence
  Description of Artificial Sequence: Synthetic oligonucleotide
gucugaaacccaaaacucu

SEQ ID NO: 1038348 - RNA, 19 nt, Artificial Sequence
  Description of Artificial Sequence: Synthetic oligonucleotide
gcaacgagagcaagggagc

SEQ ID NO: 1038349 - RNA, 19 nt, Artificial Sequence
  Description of Artificial Sequence: Synthetic oligonucleotide
ggaaguagggcuggcuuug

SEQ ID NO: 1038350 - RNA, 19 nt, Artificial Sequence
  Description of Artificial Sequence: Synthetic oligonucleotide
cuuguuacugcuacaccau

SEQ ID NO: 1038351 - RNA, 19 nt, Artificial Sequence
  Description of Artificial Sequence: Synthetic oligonucleotide
ggaagaagagcuuggcgcu

SEQ ID NO: 1038352 - RNA, 19 nt, Artificial Sequence
  Description of Artificial Sequence: Synthetic oligonucleotide
agcuuggcgcuuuuccuua

SEQ ID NO: 1038353 - RNA, 19 nt, Artificial Sequence
  Description of Artificial Sequence: Synthetic oligonucleotide
auuaugugacuggcucaug

SEQ ID NO: 1038354 - RNA, 19 nt, Artificial Sequence
  Description of Artificial Sequence: Synthetic oligonucleotide
agcucacuccagccaaccu

SEQ ID NO: 1038355 - RNA, 19 nt, Artificial Sequence
  Description of Artificial Sequence: Synthetic oligonucleotide
ggauaccccaaaauguguc

SEQ ID NO: 1038356 - RNA, 19 nt, Artificial Sequence
  Description of Artificial Sequence: Synthetic oligonucleotide
cacaguagguuugcaacga

SEQ ID NO: 1038357 - RNA, 19 nt, Artificial Sequence
  Description of Artificial Sequence: Synthetic oligonucleotide
caagaaccauauauauaua

SEQ ID NO: 1038358 - RNA, 19 nt, Artificial Sequence
  Description of Artificial Sequence: Synthetic oligonucleotide
cuacugcaccaacugaaaa

SEQ ID NO: 1038359 - RNA, 19 nt, Artificial Sequence
  Description of Artificial Sequence: Synthetic oligonucleotide
acuccauucauggcguguu

SEQ ID NO: 1038360 - RNA, 19 nt, Artificial Sequence
  Description of Artificial Sequence: Synthetic oligonucleotide
gcucuauuuagucccugca

SEQ ID NO: 1038361 - RNA, 19 nt, Artificial Sequence
  Description of Artificial Sequence: Synthetic oligonucleotide
ucauucucucuaggcuuga

SEQ ID NO: 1038362 - RNA, 19 nt, Artificial Sequence
  Description of Artificial Sequence: Synthetic oligonucleotide
acccuauaccaugaagaaa

SEQ ID NO: 1038363 - RNA, 19 nt, Artificial Sequence
  Description of Artificial Sequence: Synthetic oligonucleotide
ugagaccaauuggcacccg

SEQ ID NO: 1038364 - RNA, 19 nt, Artificial Sequence
  Description of Artificial Sequence: Synthetic oligonucleotide
gacagcccugagcuuauua

SEQ ID NO: 1038365 - RNA, 19 nt, Artificial Sequence
  Description of Artificial Sequence: Synthetic oligonucleotide
ugacuggcucaugccuggg

SEQ ID NO: 1038366 - RNA, 19 nt, Artificial Sequence
  Description of Artificial Sequence: Synthetic oligonucleotide
gaagaggacagcaccuuau

SEQ ID NO: 1038367 - RNA, 19 nt, Artificial Sequence
  Description of Artificial Sequence: Synthetic oligonucleotide
cauucucucuaggcuugag

SEQ ID NO: 1038368 - RNA, 19 nt, Artificial Sequence
  Description of Artificial Sequence: Synthetic oligonucleotide
ucauggcguguuugccucu

SEQ ID NO: 1038369 - RNA, 19 nt, Artificial Sequence
  Description of Artificial Sequence: Synthetic oligonucleotide
uuuuaccuguuggcuguau

SEQ ID NO: 1038370 - RNA, 19 nt, Artificial Sequence
  Description of Artificial Sequence: Synthetic oligonucleotide
ccaggauaccccaaaaugu

SEQ ID NO: 1038371 - RNA, 19 nt, Artificial Sequence
  Description of Artificial Sequence: Synthetic oligonucleotide
gcccuagucuuguuacugc

SEQ ID NO: 1038372 - RNA, 19 nt, Artificial Sequence
  Description of Artificial Sequence: Synthetic oligonucleotide
gaacucaggugccaacuuu

SEQ ID NO: 1038373 - RNA, 19 nt, Artificial Sequence
  Description of Artificial Sequence: Synthetic oligonucleotide
gcaugaaggguagaggaaa

SEQ ID NO: 1038374 - RNA, 19 nt, Artificial Sequence
  Description of Artificial Sequence: Synthetic oligonucleotide
gucgccggcggaagaagag

SEQ ID NO: 1038375 - RNA, 19 nt, Artificial Sequence
  Description of Artificial Sequence: Synthetic oligonucleotide
cagcucacuccagccaacc

SEQ ID NO: 1038376 - RNA, 19 nt, Artificial Sequence
  Description of Artificial Sequence: Synthetic oligonucleotide
gcucagaugguaaagacuu

SEQ ID NO: 1038377 - RNA, 19 nt, Artificial Sequence
  Description of Artificial Sequence: Synthetic oligonucleotide
cucuauuuagucccugcau

SEQ ID NO: 1038378 - RNA, 19 nt, Artificial Sequence
  Description of Artificial Sequence: Synthetic oligonucleotide
guacuccauucauggcgug

SEQ ID NO: 1038379 - RNA, 19 nt, Artificial Sequence
  Description of Artificial Sequence: Synthetic oligonucleotide
cacaccuguuucuguguga

SEQ ID NO: 1038380 - RNA, 19 nt, Artificial Sequence
  Description of Artificial Sequence: Synthetic oligonucleotide
caucuaucagacuguacuu

SEQ ID NO: 1038381 - RNA, 19 nt, Artificial Sequence
  Description of Artificial Sequence: Synthetic oligonucleotide
acccgggauacagaauagu

SEQ ID NO: 1038382 - RNA, 19 nt, Artificial Sequence
  Description of Artificial Sequence: Synthetic oligonucleotide
aggagcucucugacaguuc

SEQ ID NO: 1038383 - RNA, 19 nt, Artificial Sequence
  Description of Artificial Sequence: Synthetic oligonucleotide
ggucagcucacuccagcca

SEQ ID NO: 1038384 - RNA, 19 nt, Artificial Sequence
  Description of Artificial Sequence: Synthetic oligonucleotide
cauggcguguuugccucug

SEQ ID NO: 1038385 - RNA, 19 nt, Artificial Sequence
  Description of Artificial Sequence: Synthetic oligonucleotide
cuggggaauugacucugga

SEQ ID NO: 1038386 - RNA, 19 nt, Artificial Sequence
  Description of Artificial Sequence: Synthetic oligonucleotide
uaccugaauuaguguucau

SEQ ID NO: 1038387 - RNA, 19 nt, Artificial Sequence
  Description of Artificial Sequence: Synthetic oligonucleotide
gcucacaguagguuugcaa

SEQ ID NO: 1038388 - RNA, 19 nt, Artificial Sequence
  Description of Artificial Sequence: Synthetic oligonucleotide
caugaaggguagaggaaau

SEQ ID NO: 1038389 - RNA, 19 nt, Artificial Sequence
  Description of Artificial Sequence: Synthetic oligonucleotide
guuuuaccuuccaccaucu

SEQ ID NO: 1038390 - RNA, 19 nt, Artificial Sequence
  Description of Artificial Sequence: Synthetic oligonucleotide
cuguauaagcugagcauuu

SEQ ID NO: 1038391 - RNA, 19 nt, Artificial Sequence
  Description of Artificial Sequence: Synthetic oligonucleotide
ccucacacacacacaaaca

SEQ ID NO: 1038392 - RNA, 19 nt, Artificial Sequence
  Description of Artificial Sequence: Synthetic oligonucleotide
uccuacaaguuuggcccau

SEQ ID NO: 1038393 - RNA, 19 nt, Artificial Sequence
  Description of Artificial Sequence: Synthetic oligonucleotide
cauuaugugacuggcucau

SEQ ID NO: 1038394 - RNA, 19 nt, Artificial Sequence
  Description of Artificial Sequence: Synthetic oligonucleotide
ccugagcuuauuaaccaaa

SEQ ID NO: 1038395 - RNA, 19 nt, Artificial Sequence
  Description of Artificial Sequence: Synthetic oligonucleotide
gcuccaagcuccaaacgca

SEQ ID NO: 1038396 - RNA, 19 nt, Artificial Sequence
  Description of Artificial Sequence: Synthetic oligonucleotide
guguuugccucugugccua

SEQ ID NO: 1038397 - RNA, 19 nt, Artificial Sequence
  Description of Artificial Sequence: Synthetic oligonucleotide
gagcuuggcgcuuuuccuu

SEQ ID NO: 1038398 - RNA, 19 nt, Artificial Sequence
  Description of Artificial Sequence: Synthetic oligonucleotide
gaaauguggucagcucacu

SEQ ID NO: 1038399 - RNA, 19 nt, Artificial Sequence
  Description of Artificial Sequence: Synthetic oligonucleotide
ggggauucuuucucuaggu

SEQ ID NO: 1038400 - RNA, 19 nt, Artificial Sequence
  Description of Artificial Sequence: Synthetic oligonucleotide
cccugcaugaaggguagag

SEQ ID NO: 1038401 - RNA, 19 nt, Artificial Sequence
  Description of Artificial Sequence: Synthetic oligonucleotide
aauuggcacccgggauaca

SEQ ID NO: 1038402 - RNA, 19 nt, Artificial Sequence
  Description of Artificial Sequence: Synthetic oligonucleotide
acgcacucaaggagcucuc

SEQ ID NO: 1038403 - RNA, 19 nt, Artificial Sequence
  Description of Artificial Sequence: Synthetic oligonucleotide
gugucgccggcggaagaag

SEQ ID NO: 1038404 - RNA, 19 nt, Artificial Sequence
  Description of Artificial Sequence: Synthetic oligonucleotide
auggcguguuugccucugu

SEQ ID NO: 1038405 - RNA, 19 nt, Artificial Sequence
  Description of Artificial Sequence: Synthetic oligonucleotide
aggugccaacuuuguaauu

SEQ ID NO: 1038406 - RNA, 19 nt, Artificial Sequence
  Description of Artificial Sequence: Synthetic oligonucleotide
ggugccaacuuuguaauuu

SEQ ID NO: 1038407 - RNA, 19 nt, Artificial Sequence
  Description of Artificial Sequence: Synthetic oligonucleotide
ccuuccacagucaggaagu

SEQ ID NO: 1038408 - RNA, 19 nt, Artificial Sequence
  Description of Artificial Sequence: Synthetic oligonucleotide
gggcugugagaccuaguga

SEQ ID NO: 1038409 - RNA, 19 nt, Artificial Sequence
  Description of Artificial Sequence: Synthetic oligonucleotide
gguacuccauucauggcgu

SEQ ID NO: 1038410 - RNA, 19 nt, Artificial Sequence
  Description of Artificial Sequence: Synthetic oligonucleotide
ccuauaccaugaagaaaca

SEQ ID NO: 1038411 - RNA, 19 nt, Artificial Sequence
  Description of Artificial Sequence: Synthetic oligonucleotide
auguuagaugagggcuacu

SEQ ID NO: 1038412 - RNA, 19 nt, Artificial Sequence
  Description of Artificial Sequence: Synthetic oligonucleotide
gccggcugaggguugcccc

SEQ ID NO: 1038413 - RNA, 19 nt, Artificial Sequence
  Description of Artificial Sequence: Synthetic oligonucleotide
ccacaccuguuucugugug

SEQ ID NO: 1038414 - RNA, 19 nt, Artificial Sequence
  Description of Artificial Sequence: Synthetic oligonucleotide
gugagaccuagugaaucua

SEQ ID NO: 1038415 - RNA, 19 nt, Artificial Sequence
  Description of Artificial Sequence: Synthetic oligonucleotide
ccaauuggcacccgggaua

SEQ ID NO: 1038416 - RNA, 19 nt, Artificial Sequence
  Description of Artificial Sequence: Synthetic oligonucleotide
gagcccuagucuuguuacu

SEQ ID NO: 1038417 - RNA, 19 nt, Artificial Sequence
  Description of Artificial Sequence: Synthetic oligonucleotide
gacuggcucaugccugggu

SEQ ID NO: 1038418 - RNA, 19 nt, Artificial Sequence
  Description of Artificial Sequence: Synthetic oligonucleotide
gcauguuagaugagggcua

SEQ ID NO: 1038419 - RNA, 19 nt, Artificial Sequence
  Description of Artificial Sequence: Synthetic oligonucleotide
auccucacacacacacaaa

SEQ ID NO: 1038420 - RNA, 19 nt, Artificial Sequence
  Description of Artificial Sequence: Synthetic oligonucleotide
cuucuaugccugagaccaa

SEQ ID NO: 1038421 - RNA, 19 nt, Artificial Sequence
  Description of Artificial Sequence: Synthetic oligonucleotide
gcuacugcaccaacugaaa

SEQ ID NO: 1038422 - RNA, 19 nt, Artificial Sequence
  Description of Artificial Sequence: Synthetic oligonucleotide
ccucaguugcccuaaaguu

SEQ ID NO: 1038423 - RNA, 19 nt, Artificial Sequence
  Description of Artificial Sequence: Synthetic oligonucleotide
guaaaucgccugcuuccuu

SEQ ID NO: 1038424 - RNA, 19 nt, Artificial Sequence
  Description of Artificial Sequence: Synthetic oligonucleotide
gggagcccuagucuuguua

SEQ ID NO: 1038425 - RNA, 19 nt, Artificial Sequence
  Description of Artificial Sequence: Synthetic oligonucleotide
cugugccuaggaagcagcu

SEQ ID NO: 1038426 - RNA, 19 nt, Artificial Sequence
  Description of Artificial Sequence: Synthetic oligonucleotide
gcuggggauucuuucucua

SEQ ID NO: 1038427 - RNA, 19 nt, Artificial Sequence
  Description of Artificial Sequence: Synthetic oligonucleotide
ccccaaaauguguccagaa

SEQ ID NO: 1038428 - RNA, 19 nt, Artificial Sequence
  Description of Artificial Sequence: Synthetic oligonucleotide
ucccugcaugaaggguaga

SEQ ID NO: 1038429 - RNA, 19 nt, Artificial Sequence
  Description of Artificial Sequence: Synthetic oligonucleotide
caccaucuaucagacugua

SEQ ID NO: 1038430 - RNA, 19 nt, Artificial Sequence
  Description of Artificial Sequence: Synthetic oligonucleotide
gucaguacccacaccuguu

SEQ ID NO: 1038431 - RNA, 19 nt, Artificial Sequence
  Description of Artificial Sequence: Synthetic oligonucleotide
ccauccucacacacacaca

SEQ ID NO: 1038432 - RNA, 19 nt, Artificial Sequence
  Description of Artificial Sequence: Synthetic oligonucleotide
caagagccggcugaggguu

SEQ ID NO: 1038433 - RNA, 19 nt, Artificial Sequence
  Description of Artificial Sequence: Synthetic oligonucleotide
ccuaacccaaaagucugaa

SEQ ID NO: 1038434 - RNA, 19 nt, Artificial Sequence
  Description of Artificial Sequence: Synthetic oligonucleotide
ccuguauaagcugagcauu

SEQ ID NO: 1038435 - RNA, 19 nt, Artificial Sequence
  Description of Artificial Sequence: Synthetic oligonucleotide
ggugucgccggcggaagaa

SEQ ID NO: 1038436 - RNA, 19 nt, Artificial Sequence
  Description of Artificial Sequence: Synthetic oligonucleotide
cccugagcuuauuaaccaa

SEQ ID NO: 1038437 - RNA, 19 nt, Artificial Sequence
  Description of Artificial Sequence: Synthetic oligonucleotide
cucuugcucacaguagguu

SEQ ID NO: 1038438 - RNA, 19 nt, Artificial Sequence
  Description of Artificial Sequence: Synthetic oligonucleotide
ccgggauacagaauaguuu

SEQ ID NO: 1038439 - RNA, 19 nt, Artificial Sequence
  Description of Artificial Sequence: Synthetic oligonucleotide
ugacagcccugagcuuauu

SEQ ID NO: 1038440 - RNA, 19 nt, Artificial Sequence
  Description of Artificial Sequence: Synthetic oligonucleotide
gcccauuguuaugaaacuu

SEQ ID NO: 1038441 - RNA, 19 nt, Artificial Sequence
  Description of Artificial Sequence: Synthetic oligonucleotide
ccucuggcccuaagcaugu

SEQ ID NO: 1038442 - RNA, 19 nt, Artificial Sequence
  Description of Artificial Sequence: Synthetic oligonucleotide
cguguuugccucugugccu

SEQ ID NO: 1038443 - RNA, 19 nt, Artificial Sequence
  Description of Artificial Sequence: Synthetic oligonucleotide
cgccggcggaagaagagcu

SEQ ID NO: 1038444 - RNA, 19 nt, Artificial Sequence
  Description of Artificial Sequence: Synthetic oligonucleotide
cucuggcccuaagcauguu

SEQ ID NO: 1038445 - RNA, 19 nt, Artificial Sequence
  Description of Artificial Sequence: Synthetic oligonucleotide
cgagagcaagggagcccua

SEQ ID NO: 1038446 - RNA, 19 nt, Artificial Sequence
  Description of Artificial Sequence: Synthetic oligonucleotide
cgcacucaaggagcucucu

SEQ ID NO: 1038447 - RNA, 19 nt, Artificial Sequence
  Description of Artificial Sequence: Synthetic oligonucleotide
auaacauuagaauuaaggc

SEQ ID NO: 1038448 - RNA, 19 nt, Artificial Sequence
  Description of Artificial Sequence: Synthetic oligonucleotide
aauggugcaaaauuacuac

SEQ ID NO: 1038449 - RNA, 19 nt, Artificial Sequence
  Description of Artificial Sequence: Synthetic oligonucleotide
aaucauugugcucaggguc

SEQ ID NO: 1038450 - RNA, 19 nt, Artificial Sequence
  Description of Artificial Sequence: Synthetic oligonucleotide
aaagaauaacauuagaauu

SEQ ID NO: 1038451 - RNA, 19 nt, Artificial Sequence
  Description of Artificial Sequence: Synthetic oligonucleotide
aaaauuacuacaucauuga

SEQ ID NO: 1038452 - RNA, 19 nt, Artificial Sequence
  Description of Artificial Sequence: Synthetic oligonucleotide
uugauaacaucuaacaaug

SEQ ID NO: 1038453 - RNA, 19 nt, Artificial Sequence
  Description of Artificial Sequence: Synthetic oligonucleotide
uccugauuaaaauaaaagc

SEQ ID NO: 1038454 - RNA, 19 nt, Artificial Sequence
  Description of Artificial Sequence: Synthetic oligonucleotide
uuagaauuaaggcaguaac

SEQ ID NO: 1038455 - RNA, 19 nt, Artificial Sequence
  Description of Artificial Sequence: Synthetic oligonucleotide
aaagaucccucucacuggc

SEQ ID NO: 1038456 - RNA, 19 nt, Artificial Sequence
  Description of Artificial Sequence: Synthetic oligonucleotide
aauuuguugccucugguca

SEQ ID NO: 1038457 - RNA, 19 nt, Artificial Sequence
  Description of Artificial Sequence: Synthetic oligonucleotide
uuuuacauugacuggauac

SEQ ID NO: 1038458 - RNA, 19 nt, Artificial Sequence
  Description of Artificial Sequence: Synthetic oligonucleotide
cauacauggucuuaaaagc

SEQ ID NO: 1038459 - RNA, 19 nt, Artificial Sequence
  Description of Artificial Sequence: Synthetic oligonucleotide
auugauaacaucuaacaau

SEQ ID NO: 1038460 - RNA, 19 nt, Artificial Sequence
  Description of Artificial Sequence: Synthetic oligonucleotide
agcuauucugguuaggugg

SEQ ID NO: 1038461 - RNA, 19 nt, Artificial Sequence
  Description of Artificial Sequence: Synthetic oligonucleotide
aauauauccagagaacucu

SEQ ID NO: 1038462 - RNA, 19 nt, Artificial Sequence
  Description of Artificial Sequence: Synthetic oligonucleotide
uguagcauagccuccagcc

SEQ ID NO: 1038463 - RNA, 19 nt, Artificial Sequence
  Description of Artificial Sequence: Synthetic oligonucleotide
aucacuagcaaucauugug

SEQ ID NO: 1038464 - RNA, 19 nt, Artificial Sequence
  Description of Artificial Sequence: Synthetic oligonucleotide
aagcacauuacccugacau

SEQ ID NO: 1038465 - RNA, 19 nt, Artificial Sequence
  Description of Artificial Sequence: Synthetic oligonucleotide
uuguuaaagaaaaccagac

SEQ ID NO: 1038466 - RNA, 19 nt, Artificial Sequence
  Description of Artificial Sequence: Synthetic oligonucleotide
ucucgauuagccauccugg

SEQ ID NO: 1038467 - RNA, 19 nt, Artificial Sequence
  Description of Artificial Sequence: Synthetic oligonucleotide
uaaaaucucuaucaauaca

SEQ ID NO: 1038468 - RNA, 19 nt, Artificial Sequence
  Description of Artificial Sequence: Synthetic oligonucleotide
ugaagcaggacucaucugu

SEQ ID NO: 1038469 - RNA, 19 nt, Artificial Sequence
  Description of Artificial Sequence: Synthetic oligonucleotide
gaauaagccuccauggugg

SEQ ID NO: 1038470 - RNA, 19 nt, Artificial Sequence
  Description of Artificial Sequence: Synthetic oligonucleotide
cacugcuuaacaaaucucg

SEQ ID NO: 1038471 - RNA, 19 nt, Artificial Sequence
  Description of Artificial Sequence: Synthetic oligonucleotide
ggguaugacauucugaagg

SEQ ID NO: 1038472 - RNA, 19 nt, Artificial Sequence
  Description of Artificial Sequence: Synthetic oligonucleotide
aaucucuaucaauacacgu

SEQ ID NO: 1038473 - RNA, 19 nt, Artificial Sequence
  Description of Artificial Sequence: Synthetic oligonucleotide
gucaaucucacuucgagug

SEQ ID NO: 1038474 - RNA, 19 nt, Artificial Sequence
  Description of Artificial Sequence: Synthetic oligonucleotide
auuacccugacauaguccu

SEQ ID NO: 1038475 - RNA, 19 nt, Artificial Sequence
  Description of Artificial Sequence: Synthetic oligonucleotide
acuucgagugaccacaauc

SEQ ID NO: 1038476 - RNA, 19 nt, Artificial Sequence
  Description of Artificial Sequence: Synthetic oligonucleotide
cuucgagugaccacaaucc

SEQ ID NO: 1038477 - RNA, 19 nt, Artificial Sequence
  Description of Artificial Sequence: Synthetic oligonucleotide
aagaauaacauuagaauua

SEQ ID NO: 1038478 - RNA, 19 nt, Artificial Sequence
  Description of Artificial Sequence: Synthetic oligonucleotide
ucucuaucaauacacguuc

SEQ ID NO: 1038479 - RNA, 19 nt, Artificial Sequence
  Description of Artificial Sequence: Synthetic oligonucleotide
ugugcauaaaaucucuauc

SEQ ID NO: 1038480 - RNA, 19 nt, Artificial Sequence
  Description of Artificial Sequence: Synthetic oligonucleotide
uucaauauauccagagaac

SEQ ID NO: 1038481 - RNA, 19 nt, Artificial Sequence
  Description of Artificial Sequence: Synthetic oligonucleotide
aacggcuggacacaacauc

SEQ ID NO: 1038482 - RNA, 19 nt, Artificial Sequence
  Description of Artificial Sequence: Synthetic oligonucleotide
uuugcggagaauuucugca

SEQ ID NO: 1038483 - RNA, 19 nt, Artificial Sequence
  Description of Artificial Sequence: Synthetic oligonucleotide
uuauucaauuugaaguccu

SEQ ID NO: 1038484 - RNA, 19 nt, Artificial Sequence
  Description of Artificial Sequence: Synthetic oligonucleotide
agaucuuuaauuaaauccu

SEQ ID NO: 1038485 - RNA, 19 nt, Artificial Sequence
  Description of Artificial Sequence: Synthetic oligonucleotide
uaacaucuaacaaugucuc

SEQ ID NO: 1038486 - RNA, 19 nt, Artificial Sequence
  Description of Artificial Sequence: Synthetic oligonucleotide
ugggcuaacaggauagccc

SEQ ID NO: 1038487 - RNA, 19 nt, Artificial Sequence
  Description of Artificial Sequence: Synthetic oligonucleotide
auauccagagaacucucgg

SEQ ID NO: 1038488 - RNA, 19 nt, Artificial Sequence
  Description of Artificial Sequence: Synthetic oligonucleotide
uacauggucuuaaaagcug

SEQ ID NO: 1038489 - RNA, 19 nt, Artificial Sequence
  Description of Artificial Sequence: Synthetic oligonucleotide
accaccauaagacugugca

SEQ ID NO: 1038490 - RNA, 19 nt, Artificial Sequence
  Description of Artificial Sequence: Synthetic oligonucleotide
aaagcuauucugguuaggu

SEQ ID NO: 1038491 - RNA, 19 nt, Artificial Sequence
  Description of Artificial Sequence: Synthetic oligonucleotide
aagcaggacucaucugucc

SEQ ID NO: 1038492 - RNA, 19 nt, Artificial Sequence
  Description of Artificial Sequence: Synthetic oligonucleotide
acaaaucucgauuagccau

SEQ ID NO: 1038493 - RNA, 19 nt, Artificial Sequence
  Description of Artificial Sequence: Synthetic oligonucleotide
acaaggucaaucucacuuc

SEQ ID NO: 1038494 - RNA, 19 nt, Artificial Sequence
  Description of Artificial Sequence: Synthetic oligonucleotide
uuagagauugucgugauuu

SEQ ID NO: 1038495 - RNA, 19 nt, Artificial Sequence
  Description of Artificial Sequence: Synthetic oligonucleotide
aagauggucuucaaaccac

SEQ ID NO: 1038496 - RNA, 19 nt, Artificial Sequence
  Description of Artificial Sequence: Synthetic oligonucleotide
aaaucucgauuagccaucc

SEQ ID NO: 1038497 - RNA, 19 nt, Artificial Sequence
  Description of Artificial Sequence: Synthetic oligonucleotide
uuuacauugacuggauaca

SEQ ID NO: 1038498 - RNA, 19 nt, Artificial Sequence
  Description of Artificial Sequence: Synthetic oligonucleotide
uucugauacaucuggguga

SEQ ID NO: 1038499 - RNA, 19 nt, Artificial Sequence
  Description of Artificial Sequence: Synthetic oligonucleotide
uuuaucugaacaaggucaa

SEQ ID NO: 1038500 - RNA, 19 nt, Artificial Sequence
  Description of Artificial Sequence: Synthetic oligonucleotide
aauacacguucuugaguuc

SEQ ID NO: 1038501 - RNA, 19 nt, Artificial Sequence
  Description of Artificial Sequence: Synthetic oligonucleotide
ugcuuuaucugaacaaggu

SEQ ID NO: 1038502 - RNA, 19 nt, Artificial Sequence
  Description of Artificial Sequence: Synthetic oligonucleotide
ucucucauagcaucaaagu

SEQ ID NO: 1038503 - RNA, 19 nt, Artificial Sequence
  Description of Artificial Sequence: Synthetic oligonucleotide
aucaauacacguucuugag

SEQ ID NO: 1038504 - RNA, 19 nt, Artificial Sequence
  Description of Artificial Sequence: Synthetic oligonucleotide
uuaggugguguugacauug

SEQ ID NO: 1038505 - RNA, 19 nt, Artificial Sequence
  Description of Artificial Sequence: Synthetic oligonucleotide
gugcauaaaaucucuauca

SEQ ID NO: 1038506 - RNA, 19 nt, Artificial Sequence
  Description of Artificial Sequence: Synthetic oligonucleotide
uuaaauccuugccauacau

SEQ ID NO: 1038507 - RNA, 19 nt, Artificial Sequence
  Description of Artificial Sequence: Synthetic oligonucleotide
gacauucugaaggagggag

SEQ ID NO: 1038508 - RNA, 19 nt, Artificial Sequence
  Description of Artificial Sequence: Synthetic oligonucleotide
ugcauaaaaucucuaucaa

SEQ ID NO: 1038509 - RNA, 19 nt, Artificial Sequence
  Description of Artificial Sequence: Synthetic oligonucleotide
ugcuuaacaaaucucgauu

SEQ ID NO: 1038510 - RNA, 19 nt, Artificial Sequence
  Description of Artificial Sequence: Synthetic oligonucleotide
cuuaacaaaucucgauuag

SEQ ID NO: 1038511 - RNA, 19 nt, Artificial Sequence
  Description of Artificial Sequence: Synthetic oligonucleotide
cuagcaaucauugugcuca

SEQ ID NO: 1038512 - RNA, 19 nt, Artificial Sequence
  Description of Artificial Sequence: Synthetic oligonucleotide
caccauaagacugugcagg

SEQ ID NO: 1038513 - RNA, 19 nt, Artificial Sequence
  Description of Artificial Sequence: Synthetic oligonucleotide
acauuacccugacauaguc

SEQ ID NO: 1038514 - RNA, 19 nt, Artificial Sequence
  Description of Artificial Sequence: Synthetic oligonucleotide
ucugacuuaauguccuucu

SEQ ID NO: 1038515 - RNA, 19 nt, Artificial Sequence
  Description of Artificial Sequence: Synthetic oligonucleotide
gaauuaaggcaguaacaac

SEQ ID NO: 1038516 - RNA, 19 nt, Artificial Sequence
  Description of Artificial Sequence: Synthetic oligonucleotide
ucaauacacguucuugagu

SEQ ID NO: 1038517 - RNA, 19 nt, Artificial Sequence
  Description of Artificial Sequence: Synthetic oligonucleotide
aagagcuucauuuguuaaa

SEQ ID NO: 1038518 - RNA, 19 nt, Artificial Sequence
  Description of Artificial Sequence: Synthetic oligonucleotide
ccauacauggucuuaaaag

SEQ ID NO: 1038519 - RNA, 19 nt, Artificial Sequence
  Description of Artificial Sequence: Synthetic oligonucleotide
caucuggugguuuacacuc

SEQ ID NO: 1038520 - RNA, 19 nt, Artificial Sequence
  Description of Artificial Sequence: Synthetic oligonucleotide
gcaaucauugugcucaggg

SEQ ID NO: 1038521 - RNA, 19 nt, Artificial Sequence
  Description of Artificial Sequence: Synthetic oligonucleotide
cucguccaaacucugauug

SEQ ID NO: 1038522 - RNA, 19 nt, Artificial Sequence
  Description of Artificial Sequence: Synthetic oligonucleotide
gaaguccugauuaaaauaa

SEQ ID NO: 1038523 - RNA, 19 nt, Artificial Sequence
  Description of Artificial Sequence: Synthetic oligonucleotide
cacaauccugaccagagug

SEQ ID NO: 1038524 - RNA, 19 nt, Artificial Sequence
  Description of Artificial Sequence: Synthetic oligonucleotide
gugcaaaauuacuacauca

SEQ ID NO: 1038525 - RNA, 19 nt, Artificial Sequence
  Description of Artificial Sequence: Synthetic oligonucleotide
caauauauccagagaacuc

SEQ ID NO: 1038526 - RNA, 19 nt, Artificial Sequence
  Description of Artificial Sequence: Synthetic oligonucleotide
cauuggaacggcuggacac

SEQ ID NO: 1038527 - RNA, 19 nt, Artificial Sequence
  Description of Artificial Sequence: Synthetic oligonucleotide
uauccagagaacucucggc

SEQ ID NO: 1038528 - RNA, 19 nt, Artificial Sequence
  Description of Artificial Sequence: Synthetic oligonucleotide
uaauuuguugccucugguc

SEQ ID NO: 1038529 - RNA, 19 nt, Artificial Sequence
  Description of Artificial Sequence: Synthetic oligonucleotide
caaagaucccucucacugg

SEQ ID NO: 1038530 - RNA, 19 nt, Artificial Sequence
  Description of Artificial Sequence: Synthetic oligonucleotide
guaucacuagcaaucauug

SEQ ID NO: 1038531 - RNA, 19 nt, Artificial Sequence
  Description of Artificial Sequence: Synthetic oligonucleotide
uggugcaaaauuacuacau

SEQ ID NO: 1038532 - RNA, 19 nt, Artificial Sequence
  Description of Artificial Sequence: Synthetic oligonucleotide
uggucuuaaaagcuguuuu

SEQ ID NO: 1038533 - RNA, 19 nt, Artificial Sequence
  Description of Artificial Sequence: Synthetic oligonucleotide
acaucauugauaugguuuu

SEQ ID NO: 1038534 - RNA, 19 nt, Artificial Sequence
  Description of Artificial Sequence: Synthetic oligonucleotide
caaggucaaucucacuucg

SEQ ID NO: 1038535 - RNA, 19 nt, Artificial Sequence
  Description of Artificial Sequence: Synthetic oligonucleotide
agaacucucggcuuacacu

SEQ ID NO: 1038536 - RNA, 19 nt, Artificial Sequence
  Description of Artificial Sequence: Synthetic oligonucleotide
uaucugaacaaggucaauc

SEQ ID NO: 1038537 - RNA, 19 nt, Artificial Sequence
  Description of Artificial Sequence: Synthetic oligonucleotide
cauggaguaguagagucgc

SEQ ID NO: 1038538 - RNA, 19 nt, Artificial Sequence
  Description of Artificial Sequence: Synthetic oligonucleotide
uucaaaauguccugaggua

SEQ ID NO: 1038539 - RNA, 19 nt, Artificial Sequence
  Description of Artificial Sequence: Synthetic oligonucleotide
ggucuucugauacaucugg

SEQ ID NO: 1038540 - RNA, 19 nt, Artificial Sequence
  Description of Artificial Sequence: Synthetic oligonucleotide
cuuugcggagaauuucugc

SEQ ID NO: 1038541 - RNA, 19 nt, Artificial Sequence
  Description of Artificial Sequence: Synthetic oligonucleotide
ucggauugucccuugggug

SEQ ID NO: 1038542 - RNA, 19 nt, Artificial Sequence
  Description of Artificial Sequence: Synthetic oligonucleotide
gaggauauccagggaaagg

SEQ ID NO: 1038543 - RNA, 19 nt, Artificial Sequence
  Description of Artificial Sequence: Synthetic oligonucleotide
cauuacccugacauagucc

SEQ ID NO: 1038544 - RNA, 19 nt, Artificial Sequence
  Description of Artificial Sequence: Synthetic oligonucleotide
gacuugagaucuuuaauua

SEQ ID NO: 1038545 - RNA, 19 nt, Artificial Sequence
  Description of Artificial Sequence: Synthetic oligonucleotide
ucccggauagacuggaaca

SEQ ID NO: 1038546 - RNA, 19 nt, Artificial Sequence
  Description of Artificial Sequence: Synthetic oligonucleotide
aagcagugagaaugaagcu

SEQ ID NO: 1038547 - RNA, 19 nt, Artificial Sequence
  Description of Artificial Sequence: Synthetic oligonucleotide
guggauagccagaaaagcc

SEQ ID NO: 1038548 - RNA, 19 nt, Artificial Sequence
  Description of Artificial Sequence: Synthetic oligonucleotide
ugcaucucucauagcauca

SEQ ID NO: 1038549 - RNA, 19 nt, Artificial Sequence
  Description of Artificial Sequence: Synthetic oligonucleotide
caaggucucguccaaacuc

SEQ ID NO: 1038550 - RNA, 19 nt, Artificial Sequence
  Description of Artificial Sequence: Synthetic oligonucleotide
uaguauguagaaggcauga

SEQ ID NO: 1038551 - RNA, 19 nt, Artificial Sequence
  Description of Artificial Sequence: Synthetic oligonucleotide
ggaauaagccuccauggug

SEQ ID NO: 1038552 - RNA, 19 nt, Artificial Sequence
  Description of Artificial Sequence: Synthetic oligonucleotide
uuuagggcgcacugcaaga

SEQ ID NO: 1038553 - RNA, 19 nt, Artificial Sequence
  Description of Artificial Sequence: Synthetic oligonucleotide
agugagaaugaagcuuuac

SEQ ID NO: 1038554 - RNA, 19 nt, Artificial Sequence
  Description of Artificial Sequence: Synthetic oligonucleotide
uuccauauuuccacucaac

SEQ ID NO: 1038555 - RNA, 19 nt, Artificial Sequence
  Description of Artificial Sequence: Synthetic oligonucleotide
gguggcaaggaucauguug

SEQ ID NO: 1038556 - RNA, 19 nt, Artificial Sequence
  Description of Artificial Sequence: Synthetic oligonucleotide
ucugguuaggugguguuga

SEQ ID NO: 1038557 - RNA, 19 nt, Artificial Sequence
  Description of Artificial Sequence: Synthetic oligonucleotide
ucauuggaacggcuggaca

SEQ ID NO: 1038558 - RNA, 19 nt, Artificial Sequence
  Description of Artificial Sequence: Synthetic oligonucleotide
ucgaauuucuugauuuguu

SEQ ID NO: 1038559 - RNA, 19 nt, Artificial Sequence
  Description of Artificial Sequence: Synthetic oligonucleotide
acguucaaaauguccugag

SEQ ID NO: 1038560 - RNA, 19 nt, Artificial Sequence
  Description of Artificial Sequence: Synthetic oligonucleotide
cuggguaugacauucugaa

SEQ ID NO: 1038561 - RNA, 19 nt, Artificial Sequence
  Description of Artificial Sequence: Synthetic oligonucleotide
caugugcaaaccaagcaca

SEQ ID NO: 1038562 - RNA, 19 nt, Artificial Sequence
  Description of Artificial Sequence: Synthetic oligonucleotide
ugcaaaccaagcacauuac

SEQ ID NO: 1038563 - RNA, 19 nt, Artificial Sequence
  Description of Artificial Sequence: Synthetic oligonucleotide
gagucaucgcagcaggcug

SEQ ID NO: 1038564 - RNA, 19 nt, Artificial Sequence
  Description of Artificial Sequence: Synthetic oligonucleotide
caaaucucgauuagccauc

SEQ ID NO: 1038565 - RNA, 19 nt, Artificial Sequence
  Description of Artificial Sequence: Synthetic oligonucleotide
aucucucauagcaucaaag

SEQ ID NO: 1038566 - RNA, 19 nt, Artificial Sequence
  Description of Artificial Sequence: Synthetic oligonucleotide
ucaaggucucguccaaacu

SEQ ID NO: 1038567 - RNA, 19 nt, Artificial Sequence
  Description of Artificial Sequence: Synthetic oligonucleotide
aggcugcucggauuguccc

SEQ ID NO: 1038568 - RNA, 19 nt, Artificial Sequence
  Description of Artificial Sequence: Synthetic oligonucleotide
gaguaguagagucgcucag

SEQ ID NO: 1038569 - RNA, 19 nt, Artificial Sequence
  Description of Artificial Sequence: Synthetic oligonucleotide
agacguucaaaauguccug

SEQ ID NO: 1038570 - RNA, 19 nt, Artificial Sequence
  Description of Artificial Sequence: Synthetic oligonucleotide
cauccuggaauaagccucc

SEQ ID NO: 1038571 - RNA, 19 nt, Artificial Sequence
  Description of Artificial Sequence: Synthetic oligonucleotide
uaagcaccuccucccauug

SEQ ID NO: 1038572 - RNA, 19 nt, Artificial Sequence
  Description of Artificial Sequence: Synthetic oligonucleotide
gagucgcucagcaaagaag

SEQ ID NO: 1038573 - RNA, 19 nt, Artificial Sequence
  Description of Artificial Sequence: Synthetic oligonucleotide
auaaaagcagugagaauga

SEQ ID NO: 1038574 - RNA, 19 nt, Artificial Sequence
  Description of Artificial Sequence: Synthetic oligonucleotide
augaacagggcaaggauca

SEQ ID NO: 1038575 - RNA, 19 nt, Artificial Sequence
  Description of Artificial Sequence: Synthetic oligonucleotide
cugggauagggauacugac

SEQ ID NO: 1038576 - RNA, 19 nt, Artificial Sequence
  Description of Artificial Sequence: Synthetic oligonucleotide
uucgagugaccacaauccu

SEQ ID NO: 1038577 - RNA, 19 nt, Artificial Sequence
  Description of Artificial Sequence: Synthetic oligonucleotide
acaauccugaccagagugg

SEQ ID NO: 1038578 - RNA, 19 nt, Artificial Sequence
  Description of Artificial Sequence: Synthetic oligonucleotide
uucauugcuuugcggagaa

SEQ ID NO: 1038579 - RNA, 19 nt, Artificial Sequence
  Description of Artificial Sequence: Synthetic oligonucleotide
gugcaaaccaagcacauua

SEQ ID NO: 1038580 - RNA, 19 nt, Artificial Sequence
  Description of Artificial Sequence: Synthetic oligonucleotide
auacauggucuuaaaagcu

SEQ ID NO: 1038581 - RNA, 19 nt, Artificial Sequence
  Description of Artificial Sequence: Synthetic oligonucleotide
auucaauuugaaguccuga

SEQ ID NO: 1038582 - RNA, 19 nt, Artificial Sequence
  Description of Artificial Sequence: Synthetic oligonucleotide
auauauccagagaacucuc

SEQ ID NO: 1038583 - RNA, 19 nt, Artificial Sequence
  Description of Artificial Sequence: Synthetic oligonucleotide
uggguaugacauucugaag

SEQ ID NO: 1038584 - RNA, 19 nt, Artificial Sequence
  Description of Artificial Sequence: Synthetic oligonucleotide
ucugguggcaaggaucaug

SEQ ID NO: 1038585 - RNA, 19 nt, Artificial Sequence
  Description of Artificial Sequence: Synthetic oligonucleotide
cucaaggucucguccaaac

SEQ ID NO: 1038586 - RNA, 19 nt, Artificial Sequence
  Description of Artificial Sequence: Synthetic oligonucleotide
cacucugguucucaucacg

SEQ ID NO: 1038587 - RNA, 19 nt, Artificial Sequence
  Description of Artificial Sequence: Synthetic oligonucleotide
cauaguauguagaaggcau

SEQ ID NO: 1038588 - RNA, 19 nt, Artificial Sequence
  Description of Artificial Sequence: Synthetic oligonucleotide
ucgauuagccauccuggaa

SEQ ID NO: 1038589 - RNA, 19 nt, Artificial Sequence
  Description of Artificial Sequence: Synthetic oligonucleotide
gcucaucugucccaaaucc

SEQ ID NO: 1038590 - RNA, 19 nt, Artificial Sequence
  Description of Artificial Sequence: Synthetic oligonucleotide
aaggucucguccaaacucu

SEQ ID NO: 1038591 - RNA, 19 nt, Artificial Sequence
  Description of Artificial Sequence: Synthetic oligonucleotide
gagacguucaaaauguccu

SEQ ID NO: 1038592 - RNA, 19 nt, Artificial Sequence
  Description of Artificial Sequence: Synthetic oligonucleotide
ucugauacaucugggugaa

SEQ ID NO: 1038593 - RNA, 19 nt, Artificial Sequence
  Description of Artificial Sequence: Synthetic oligonucleotide
aucugacuuaauguccuuc

SEQ ID NO: 1038594 - RNA, 19 nt, Artificial Sequence
  Description of Artificial Sequence: Synthetic oligonucleotide
guagcauagccuccagccc

SEQ ID NO: 1038595 - RNA, 19 nt, Artificial Sequence
  Description of Artificial Sequence: Synthetic oligonucleotide
uaucacuagcaaucauugu

SEQ ID NO: 1038596 - RNA, 19 nt, Artificial Sequence
  Description of Artificial Sequence: Synthetic oligonucleotide
uugggcuaacaggauagcc

SEQ ID NO: 1038597 - RNA, 19 nt, Artificial Sequence
  Description of Artificial Sequence: Synthetic oligonucleotide
cauugcugcaugcagaucu

SEQ ID NO: 1038598 - RNA, 19 nt, Artificial Sequence
  Description of Artificial Sequence: Synthetic oligonucleotide
gcacauuacccugacauag

SEQ ID NO: 1038599 - RNA, 19 nt, Artificial Sequence
  Description of Artificial Sequence: Synthetic oligonucleotide
gccaacgauggccagaagc

SEQ ID NO: 1038600 - RNA, 19 nt, Artificial Sequence
  Description of Artificial Sequence: Synthetic oligonucleotide
cugacauaguccuuaguaa

SEQ ID NO: 1038601 - RNA, 19 nt, Artificial Sequence
  Description of Artificial Sequence: Synthetic oligonucleotide
uggcuuucagcugagggaa

SEQ ID NO: 1038602 - RNA, 19 nt, Artificial Sequence
  Description of Artificial Sequence: Synthetic oligonucleotide
caaagccuuguccucccgg

SEQ ID NO: 1038603 - RNA, 19 nt, Artificial Sequence
  Description of Artificial Sequence: Synthetic oligonucleotide
ugauuuguucuugugcaua

SEQ ID NO: 1038604 - RNA, 19 nt, Artificial Sequence
  Description of Artificial Sequence: Synthetic oligonucleotide
gguaugacauucugaagga

SEQ ID NO: 1038605 - RNA, 19 nt, Artificial Sequence
  Description of Artificial Sequence: Synthetic oligonucleotide
cacguucuugaguuccugc

SEQ ID NO: 1038606 - RNA, 19 nt, Artificial Sequence
  Description of Artificial Sequence: Synthetic oligonucleotide
aggcggggcgguuuagggc

SEQ ID NO: 1038607 - RNA, 19 nt, Artificial Sequence
  Description of Artificial Sequence: Synthetic oligonucleotide
ugggugaacaucugcuuua

SEQ ID NO: 1038608 - RNA, 19 nt, Artificial Sequence
  Description of Artificial Sequence: Synthetic oligonucleotide
agggcgcacugcaagaugg

SEQ ID NO: 1038609 - RNA, 19 nt, Artificial Sequence
  Description of Artificial Sequence: Synthetic oligonucleotide
uugauuuguucuugugcau

SEQ ID NO: 1038610 - RNA, 19 nt, Artificial Sequence
  Description of Artificial Sequence: Synthetic oligonucleotide
aaacuccaggcaucauagu

SEQ ID NO: 1038611 - RNA, 19 nt, Artificial Sequence
  Description of Artificial Sequence: Synthetic oligonucleotide
aucucuaucaauacacguu

SEQ ID NO: 1038612 - RNA, 19 nt, Artificial Sequence
  Description of Artificial Sequence: Synthetic oligonucleotide
guugccucuggucauugga

SEQ ID NO: 1038613 - RNA, 19 nt, Artificial Sequence
  Description of Artificial Sequence: Synthetic oligonucleotide
guagagucgcucagcaaag

SEQ ID NO: 1038614 - RNA, 19 nt, Artificial Sequence
  Description of Artificial Sequence: Synthetic oligonucleotide
cuucucaaggucucgucca

SEQ ID NO: 1038615 - RNA, 19 nt, Artificial Sequence
  Description of Artificial Sequence: Synthetic oligonucleotide
ugcucggauugucccuugg

SEQ ID NO: 1038616 - RNA, 19 nt, Artificial Sequence
  Description of Artificial Sequence: Synthetic oligonucleotide
ucggcuuacacugcuuaac

SEQ ID NO: 1038617 - RNA, 19 nt, Artificial Sequence
  Description of Artificial Sequence: Synthetic oligonucleotide
gacauaguccuuaguaaaa

SEQ ID NO: 1038618 - RNA, 19 nt, Artificial Sequence
  Description of Artificial Sequence: Synthetic oligonucleotide
ccccucaccagccugauag

SEQ ID NO: 1038619 - RNA, 19 nt, Artificial Sequence
  Description of Artificial Sequence: Synthetic oligonucleotide
agagucgcucagcaaagaa

SEQ ID NO: 1038620 - RNA, 19 nt, Artificial Sequence
  Description of Artificial Sequence: Synthetic oligonucleotide
ugguggguaagcaccuccu

SEQ ID NO: 1038621 - RNA, 19 nt, Artificial Sequence
  Description of Artificial Sequence: Synthetic oligonucleotide
uacacguucuugaguuccu

SEQ ID NO: 1038622 - RNA, 19 nt, Artificial Sequence
  Description of Artificial Sequence: Synthetic oligonucleotide
acugcuuaacaaaucucga

SEQ ID NO: 1038623 - RNA, 19 nt, Artificial Sequence
  Description of Artificial Sequence: Synthetic oligonucleotide
gacguucaaaauguccuga

SEQ ID NO: 1038624 - RNA, 19 nt, Artificial Sequence
  Description of Artificial Sequence: Synthetic oligonucleotide
aauccugaccagaguggag

SEQ ID NO: 1038625 - RNA, 19 nt, Artificial Sequence
  Description of Artificial Sequence: Synthetic oligonucleotide
cacgaggagacguucaaaa

SEQ ID NO: 1038626 - RNA, 19 nt, Artificial Sequence
  Description of Artificial Sequence: Synthetic oligonucleotide
aaauguccugagguaucug

SEQ ID NO: 1038627 - RNA, 19 nt, Artificial Sequence
  Description of Artificial Sequence: Synthetic oligonucleotide
aucugggugaacaucugcu

SEQ ID NO: 1038628 - RNA, 19 nt, Artificial Sequence
  Description of Artificial Sequence: Synthetic oligonucleotide
acauggucuuaaaagcugu

SEQ ID NO: 1038629 - RNA, 19 nt, Artificial Sequence
  Description of Artificial Sequence: Synthetic oligonucleotide
uucugguuaggugguguug

SEQ ID NO: 1038630 - RNA, 19 nt, Artificial Sequence
  Description of Artificial Sequence: Synthetic oligonucleotide
ggaacggcuggacacaaca

SEQ ID NO: 1038631 - RNA, 19 nt, Artificial Sequence
  Description of Artificial Sequence: Synthetic oligonucleotide
cucccggauagacuggaac

SEQ ID NO: 1038632 - RNA, 19 nt, Artificial Sequence
  Description of Artificial Sequence: Synthetic oligonucleotide
agucaucgcagcaggcugg

SEQ ID NO: 1038633 - RNA, 19 nt, Artificial Sequence
  Description of Artificial Sequence: Synthetic oligonucleotide
uagccuggguaugacauuc

SEQ ID NO: 1038634 - RNA, 19 nt, Artificial Sequence
  Description of Artificial Sequence: Synthetic oligonucleotide
gcuuaacaaaucucgauua

SEQ ID NO: 1038635 - RNA, 19 nt, Artificial Sequence
  Description of Artificial Sequence: Synthetic oligonucleotide
ggcaucauaguauguagaa

SEQ ID NO: 1038636 - RNA, 19 nt, Artificial Sequence
  Description of Artificial Sequence: Synthetic oligonucleotide
ggcaaggaucaauucuucc

SEQ ID NO: 1038637 - RNA, 19 nt, Artificial Sequence
  Description of Artificial Sequence: Synthetic oligonucleotide
gauagccuggguaugacau

SEQ ID NO: 1038638 - RNA, 19 nt, Artificial Sequence
  Description of Artificial Sequence: Synthetic oligonucleotide
uugccauacauggucuuaa

SEQ ID NO: 1038639 - RNA, 19 nt, Artificial Sequence
  Description of Artificial Sequence: Synthetic oligonucleotide
cuuguccucccggauagac

SEQ ID NO: 1038640 - RNA, 19 nt, Artificial Sequence
  Description of Artificial Sequence: Synthetic oligonucleotide
cugacuuaauguccuucuc

SEQ ID NO: 1038641 - RNA, 19 nt, Artificial Sequence
  Description of Artificial Sequence: Synthetic oligonucleotide
auuggaacggcuggacaca

SEQ ID NO: 1038642 - RNA, 19 nt, Artificial Sequence
  Description of Artificial Sequence: Synthetic oligonucleotide
cauucugaaggagggagca

SEQ ID NO: 1038643 - RNA, 19 nt, Artificial Sequence
  Description of Artificial Sequence: Synthetic oligonucleotide
acgaggagacguucaaaau

SEQ ID NO: 1038644 - RNA, 19 nt, Artificial Sequence
  Description of Artificial Sequence: Synthetic oligonucleotide
ugguucucaucacgguuuc

SEQ ID NO: 1038645 - RNA, 19 nt, Artificial Sequence
  Description of Artificial Sequence: Synthetic oligonucleotide
gguagccgacacuuggugc

SEQ ID NO: 1038646 - RNA, 19 nt, Artificial Sequence
  Description of Artificial Sequence: Synthetic oligonucleotide
gcuggcuaggguaaggagc

SEQ ID NO: 1038647 - RNA, 19 nt, Artificial Sequence
  Description of Artificial Sequence: Synthetic oligonucleotide
agccugauagaggcgcugg

SEQ ID NO: 1038648 - RNA, 19 nt, Artificial Sequence
  Description of Artificial Sequence: Synthetic oligonucleotide
acuccaggcaucauaguau

SEQ ID NO: 1038649 - RNA, 19 nt, Artificial Sequence
  Description of Artificial Sequence: Synthetic oligonucleotide
uguugcuugcaagggcucu

SEQ ID NO: 1038650 - RNA, 19 nt, Artificial Sequence
  Description of Artificial Sequence: Synthetic oligonucleotide
uagagauugucgugauuuu

SEQ ID NO: 1038651 - RNA, 19 nt, Artificial Sequence
  Description of Artificial Sequence: Synthetic oligonucleotide
gccucuggucauuggaacg

SEQ ID NO: 1038652 - RNA, 19 nt, Artificial Sequence
  Description of Artificial Sequence: Synthetic oligonucleotide
gcuugcaagggcucugaag

SEQ ID NO: 1038653 - RNA, 19 nt, Artificial Sequence
  Description of Artificial Sequence: Synthetic oligonucleotide
aagaaggcggggcgguuua

SEQ ID NO: 1038654 - RNA, 19 nt, Artificial Sequence
  Description of Artificial Sequence: Synthetic oligonucleotide
gauagaggcgcugggcauc

SEQ ID NO: 1038655 - RNA, 19 nt, Artificial Sequence
  Description of Artificial Sequence: Synthetic oligonucleotide
agcacauuacccugacaua

SEQ ID NO: 1038656 - RNA, 19 nt, Artificial Sequence
  Description of Artificial Sequence: Synthetic oligonucleotide
ugguaucacuagcaaucau

SEQ ID NO: 1038657 - RNA, 19 nt, Artificial Sequence
  Description of Artificial Sequence: Synthetic oligonucleotide
ugguuaggugguguugaca

SEQ ID NO: 1038658 - RNA, 19 nt, Artificial Sequence
  Description of Artificial Sequence: Synthetic oligonucleotide
aaagaaggcggggcgguuu

SEQ ID NO: 1038659 - RNA, 19 nt, Artificial Sequence
  Description of Artificial Sequence: Synthetic oligonucleotide
aucucacuucgagugacca

SEQ ID NO: 1038660 - RNA, 19 nt, Artificial Sequence
  Description of Artificial Sequence: Synthetic oligonucleotide
gcaucauaguauguagaag

SEQ ID NO: 1038661 - RNA, 19 nt, Artificial Sequence
  Description of Artificial Sequence: Synthetic oligonucleotide
cugguacuggaaccugggc

SEQ ID NO: 1038662 - RNA, 19 nt, Artificial Sequence
  Description of Artificial Sequence: Synthetic oligonucleotide
guagccgacacuuggugcu

SEQ ID NO: 1038663 - RNA, 19 nt, Artificial Sequence
  Description of Artificial Sequence: Synthetic oligonucleotide
agggcaaggaucaauucuu

SEQ ID NO: 1038664 - RNA, 19 nt, Artificial Sequence
  Description of Artificial Sequence: Synthetic oligonucleotide
aguauguagaaggcaugaa

SEQ ID NO: 1038665 - RNA, 19 nt, Artificial Sequence
  Description of Artificial Sequence: Synthetic oligonucleotide
uuguugcuugcaagggcuc

SEQ ID NO: 1038666 - RNA, 19 nt, Artificial Sequence
  Description of Artificial Sequence: Synthetic oligonucleotide
uauccagggaaaggugggu

SEQ ID NO: 1038667 - RNA, 19 nt, Artificial Sequence
  Description of Artificial Sequence: Synthetic oligonucleotide
agcaccuuucauggaguag

SEQ ID NO: 1038668 - RNA, 19 nt, Artificial Sequence
  Description of Artificial Sequence: Synthetic oligonucleotide
auugcuuugcggagaauuu

SEQ ID NO: 1038669 - RNA, 19 nt, Artificial Sequence
  Description of Artificial Sequence: Synthetic oligonucleotide
ccuucauugcuuugcggag

SEQ ID NO: 1038670 - RNA, 19 nt, Artificial Sequence
  Description of Artificial Sequence: Synthetic oligonucleotide
gacacgaggagacguucaa

SEQ ID NO: 1038671 - RNA, 19 nt, Artificial Sequence
  Description of Artificial Sequence: Synthetic oligonucleotide
ggagcagcgucaccgcccg

SEQ ID NO: 1038672 - RNA, 19 nt, Artificial Sequence
  Description of Artificial Sequence: Synthetic oligonucleotide
gguuaggugguguugacau

SEQ ID NO: 1038673 - RNA, 19 nt, Artificial Sequence
  Description of Artificial Sequence: Synthetic oligonucleotide
uccuggaauaagccuccau

SEQ ID NO: 1038674 - RNA, 19 nt, Artificial Sequence
  Description of Artificial Sequence: Synthetic oligonucleotide
auggucuuaaaagcuguuu

SEQ ID NO: 1038675 - RNA, 19 nt, Artificial Sequence
  Description of Artificial Sequence: Synthetic oligonucleotide
ugccauacauggucuuaaa

SEQ ID NO: 1038676 - RNA, 19 nt, Artificial Sequence
  Description of Artificial Sequence: Synthetic oligonucleotide
acauuagaauuaaggcagu

SEQ ID NO: 1038677 - RNA, 19 nt, Artificial Sequence
  Description of Artificial Sequence: Synthetic oligonucleotide
cucgauuagccauccugga

SEQ ID NO: 1038678 - RNA, 19 nt, Artificial Sequence
  Description of Artificial Sequence: Synthetic oligonucleotide
ccugguacuggaaccuggg

SEQ ID NO: 1038679 - RNA, 19 nt, Artificial Sequence
  Description of Artificial Sequence: Synthetic oligonucleotide
gguggguagccuguagggg

SEQ ID NO: 1038680 - RNA, 19 nt, Artificial Sequence
  Description of Artificial Sequence: Synthetic oligonucleotide
cuugggcuaacaggauagc

SEQ ID NO: 1038681 - RNA, 19 nt, Artificial Sequence
  Description of Artificial Sequence: Synthetic oligonucleotide
ccugacauaguccuuagua

SEQ ID NO: 1038682 - RNA, 19 nt, Artificial Sequence
  Description of Artificial Sequence: Synthetic oligonucleotide
uuagggcgcacugcaagau

SEQ ID NO: 1038683 - RNA, 19 nt, Artificial Sequence
  Description of Artificial Sequence: Synthetic oligonucleotide
aggcaucauaguauguaga

SEQ ID NO: 1038684 - RNA, 19 nt, Artificial Sequence
  Description of Artificial Sequence: Synthetic oligonucleotide
accuccucccauuggugga

SEQ ID NO: 1038685 - RNA, 19 nt, Artificial Sequence
  Description of Artificial Sequence: Synthetic oligonucleotide
cugguuaggugguguugac

SEQ ID NO: 1038686 - RNA, 19 nt, Artificial Sequence
  Description of Artificial Sequence: Synthetic oligonucleotide
uuaucugaacaaggucaau

SEQ ID NO: 1038687 - RNA, 19 nt, Artificial Sequence
  Description of Artificial Sequence: Synthetic oligonucleotide
uaucugacuuaauguccuu

SEQ ID NO: 1038688 - RNA, 19 nt, Artificial Sequence
  Description of Artificial Sequence: Synthetic oligonucleotide
gcucggauugucccuuggg

SEQ ID NO: 1038689 - RNA, 19 nt, Artificial Sequence
  Description of Artificial Sequence: Synthetic oligonucleotide
uagagucgcucagcaaaga

SEQ ID NO: 1038690 - RNA, 19 nt, Artificial Sequence
  Description of Artificial Sequence: Synthetic oligonucleotide
aggagacguucaaaauguc

SEQ ID NO: 1038691 - RNA, 19 nt, Artificial Sequence
  Description of Artificial Sequence: Synthetic oligonucleotide
ugugcaaaccaagcacauu

SEQ ID NO: 1038692 - RNA, 19 nt, Artificial Sequence
  Description of Artificial Sequence: Synthetic oligonucleotide
cggauugucccuugggugc

SEQ ID NO: 1038693 - RNA, 19 nt, Artificial Sequence
  Description of Artificial Sequence: Synthetic oligonucleotide
uggacacgaggagacguuc

SEQ ID NO: 1038694 - RNA, 19 nt, Artificial Sequence
  Description of Artificial Sequence: Synthetic oligonucleotide
cgcuuuccccgcaauaugg

SEQ ID NO: 1038695 - RNA, 19 nt, Artificial Sequence
  Description of Artificial Sequence: Synthetic oligonucleotide
caauccugaccagagugga

SEQ ID NO: 1038696 - RNA, 19 nt, Artificial Sequence
  Description of Artificial Sequence: Synthetic oligonucleotide
acauugcugcaugcagauc

SEQ ID NO: 1038697 - RNA, 19 nt, Artificial Sequence
  Description of Artificial Sequence: Synthetic oligonucleotide
aggcaugaacagggcaagg

SEQ ID NO: 1038698 - RNA, 19 nt, Artificial Sequence
  Description of Artificial Sequence: Synthetic oligonucleotide
cucucauagcaucaaaguu

SEQ ID NO: 1038699 - RNA, 19 nt, Artificial Sequence
  Description of Artificial Sequence: Synthetic oligonucleotide
cuucauugcuuugcggaga

SEQ ID NO: 1038700 - RNA, 19 nt, Artificial Sequence
  Description of Artificial Sequence: Synthetic oligonucleotide
ggagaauuucugcaucucu

SEQ ID NO: 1038701 - RNA, 19 nt, Artificial Sequence
  Description of Artificial Sequence: Synthetic oligonucleotide
ggguagccgacacuuggug

SEQ ID NO: 1038702 - RNA, 19 nt, Artificial Sequence
  Description of Artificial Sequence: Synthetic oligonucleotide
gaaccugggcugguccacc

SEQ ID NO: 1038703 - RNA, 19 nt, Artificial Sequence
  Description of Artificial Sequence: Synthetic oligonucleotide
ggauagacuggaacacccc

SEQ ID NO: 1038704 - RNA, 19 nt, Artificial Sequence
  Description of Artificial Sequence: Synthetic oligonucleotide
auagggauacugacccgga

SEQ ID NO: 1038705 - RNA, 19 nt, Artificial Sequence
  Description of Artificial Sequence: Synthetic oligonucleotide
uggaacggcuggacacaac

SEQ ID NO: 1038706 - RNA, 19 nt, Artificial Sequence
  Description of Artificial Sequence: Synthetic oligonucleotide
ccaccauaagacugugcag

SEQ ID NO: 1038707 - RNA, 19 nt, Artificial Sequence
  Description of Artificial Sequence: Synthetic oligonucleotide
ggcuggcuaggguaaggag

SEQ ID NO: 1038708 - RNA, 19 nt, Artificial Sequence
  Description of Artificial Sequence: Synthetic oligonucleotide
cuuccccucaccagccuga

SEQ ID NO: 1038709 - RNA, 19 nt, Artificial Sequence
  Description of Artificial Sequence: Synthetic oligonucleotide
cgagugaccacaauccuga

SEQ ID NO: 1038710 - RNA, 19 nt, Artificial Sequence
  Description of Artificial Sequence: Synthetic oligonucleotide
gcauaaaaucucuaucaau

SEQ ID NO: 1038711 - RNA, 19 nt, Artificial Sequence
  Description of Artificial Sequence: Synthetic oligonucleotide
agggaaagguggguagccu

SEQ ID NO: 1038712 - RNA, 19 nt, Artificial Sequence
  Description of Artificial Sequence: Synthetic oligonucleotide
cugcuuaacaaaucucgau

SEQ ID NO: 1038713 - RNA, 19 nt, Artificial Sequence
  Description of Artificial Sequence: Synthetic oligonucleotide
caggguacugagaaggcau

SEQ ID NO: 1038714 - RNA, 19 nt, Artificial Sequence
  Description of Artificial Sequence: Synthetic oligonucleotide
auuagccauccuggaauaa

SEQ ID NO: 1038715 - RNA, 19 nt, Artificial Sequence
  Description of Artificial Sequence: Synthetic oligonucleotide
caucgcagcaggcuggcua

SEQ ID NO: 1038716 - RNA, 19 nt, Artificial Sequence
  Description of Artificial Sequence: Synthetic oligonucleotide
uggcaaggaucauguugaa

SEQ ID NO: 1038717 - RNA, 19 nt, Artificial Sequence
  Description of Artificial Sequence: Synthetic oligonucleotide
cucggauugucccuugggu

SEQ ID NO: 1038718 - RNA, 19 nt, Artificial Sequence
  Description of Artificial Sequence: Synthetic oligonucleotide
cuaggguaaggagcauguc

SEQ ID NO: 1038719 - RNA, 19 nt, Artificial Sequence
  Description of Artificial Sequence: Synthetic oligonucleotide
cagagaacucucggcuuac

SEQ ID NO: 1038720 - RNA, 19 nt, Artificial Sequence
  Description of Artificial Sequence: Synthetic oligonucleotide
cauuagaauuaaggcagua

SEQ ID NO: 1038721 - RNA, 19 nt, Artificial Sequence
  Description of Artificial Sequence: Synthetic oligonucleotide
gguaucacuagcaaucauu

SEQ ID NO: 1038722 - RNA, 19 nt, Artificial Sequence
  Description of Artificial Sequence: Synthetic oligonucleotide
gccugauagaggcgcuggg

SEQ ID NO: 1038723 - RNA, 19 nt, Artificial Sequence
  Description of Artificial Sequence: Synthetic oligonucleotide
cucuaucaauacacguucu

SEQ ID NO: 1038724 - RNA, 19 nt, Artificial Sequence
  Description of Artificial Sequence: Synthetic oligonucleotide
ggcuuacacugcuuaacaa

SEQ ID NO: 1038725 - RNA, 19 nt, Artificial Sequence
  Description of Artificial Sequence: Synthetic oligonucleotide
uagccgacacuuggugcug

SEQ ID NO: 1038726 - RNA, 19 nt, Artificial Sequence
  Description of Artificial Sequence: Synthetic oligonucleotide
gucaucgcagcaggcuggc

SEQ ID NO: 1038727 - RNA, 19 nt, Artificial Sequence
  Description of Artificial Sequence: Synthetic oligonucleotide
ggauacugacccggagggg

SEQ ID NO: 1038728 - RNA, 19 nt, Artificial Sequence
  Description of Artificial Sequence: Synthetic oligonucleotide
agccgacacuuggugcugg

SEQ ID NO: 1038729 - RNA, 19 nt, Artificial Sequence
  Description of Artificial Sequence: Synthetic oligonucleotide
ggauagccuggguaugaca

SEQ ID NO: 1038730 - RNA, 19 nt, Artificial Sequence
  Description of Artificial Sequence: Synthetic oligonucleotide
ggcuaggguaaggagcaug

SEQ ID NO: 1038731 - RNA, 19 nt, Artificial Sequence
  Description of Artificial Sequence: Synthetic oligonucleotide
agagaacucucggcuuaca

SEQ ID NO: 1038732 - RNA, 19 nt, Artificial Sequence
  Description of Artificial Sequence: Synthetic oligonucleotide
cacauuacccugacauagu

SEQ ID NO: 1038733 - RNA, 19 nt, Artificial Sequence
  Description of Artificial Sequence: Synthetic oligonucleotide
aucuggugguuuacacucu

SEQ ID NO: 1038734 - RNA, 19 nt, Artificial Sequence
  Description of Artificial Sequence: Synthetic oligonucleotide
ccuggguaugacauucuga

SEQ ID NO: 1038735 - RNA, 19 nt, Artificial Sequence
  Description of Artificial Sequence: Synthetic oligonucleotide
ccaagcacauuacccugac

SEQ ID NO: 1038736 - RNA, 19 nt, Artificial Sequence
  Description of Artificial Sequence: Synthetic oligonucleotide
cucggcuuacacugcuuaa

SEQ ID NO: 1038737 - RNA, 19 nt, Artificial Sequence
  Description of Artificial Sequence: Synthetic oligonucleotide
acacgaggagacguucaaa

SEQ ID NO: 1038738 - RNA, 19 nt, Artificial Sequence
  Description of Artificial Sequence: Synthetic oligonucleotide
cuugccauacauggucuua

SEQ ID NO: 1038739 - RNA, 19 nt, Artificial Sequence
  Description of Artificial Sequence: Synthetic oligonucleotide
cccuugggugcccugaguc

SEQ ID NO: 1038740 - RNA, 19 nt, Artificial Sequence
  Description of Artificial Sequence: Synthetic oligonucleotide
aggucucguccaaacucug

SEQ ID NO: 1038741 - RNA, 19 nt, Artificial Sequence
  Description of Artificial Sequence: Synthetic oligonucleotide
cccggauagacuggaacac

SEQ ID NO: 1038742 - RNA, 19 nt, Artificial Sequence
  Description of Artificial Sequence: Synthetic oligonucleotide
gcuuugcggagaauuucug

SEQ ID NO: 1038743 - RNA, 19 nt, Artificial Sequence
  Description of Artificial Sequence: Synthetic oligonucleotide
gggagcagcgucaccgccc

SEQ ID NO: 1038744 - RNA, 19 nt, Artificial Sequence
  Description of Artificial Sequence: Synthetic oligonucleotide
ccggauagacuggaacacc

SEQ ID NO: 1038745 - RNA, 19 nt, Artificial Sequence
  Description of Artificial Sequence: Synthetic oligonucleotide
ccuuaaacuccaggcauca

SEQ ID NO: 1038746 - RNA, 19 nt, Artificial Sequence
  Description of Artificial Sequence: Synthetic oligonucleotide
auggaguaguagagucgcu

SEQ ID NO: 1038747 - RNA, 19 nt, Artificial Sequence
  Description of Artificial Sequence: Synthetic oligonucleotide
ucaccgcccggcccgcuuu

SEQ ID NO: 1038748 - RNA, 19 nt, Artificial Sequence
  Description of Artificial Sequence: Synthetic oligonucleotide
cagccugauagaggcgcug

SEQ ID NO: 1038749 - RNA, 19 nt, Artificial Sequence
  Description of Artificial Sequence: Synthetic oligonucleotide
caccuuucauggaguagua

SEQ ID NO: 1038750 - RNA, 19 nt, Artificial Sequence
  Description of Artificial Sequence: Synthetic oligonucleotide
gccauccuggaauaagccu

SEQ ID NO: 1038751 - RNA, 19 nt, Artificial Sequence
  Description of Artificial Sequence: Synthetic oligonucleotide
auggacacgaggagacguu

SEQ ID NO: 1038752 - RNA, 19 nt, Artificial Sequence
  Description of Artificial Sequence: Synthetic oligonucleotide
acgguuucccuggcacaug

SEQ ID NO: 1038753 - RNA, 19 nt, Artificial Sequence
  Description of Artificial Sequence: Synthetic oligonucleotide
caguaacaacaugugcaaa

SEQ ID NO: 1038754 - RNA, 19 nt, Artificial Sequence
  Description of Artificial Sequence: Synthetic oligonucleotide
guuggaggcugcucggauu

SEQ ID NO: 1038755 - RNA, 19 nt, Artificial Sequence
  Description of Artificial Sequence: Synthetic oligonucleotide
gcgguuuagggcgcacugc

SEQ ID NO: 1038756 - RNA, 19 nt, Artificial Sequence
  Description of Artificial Sequence: Synthetic oligonucleotide
cuggccaacgauggccaga

SEQ ID NO: 1038757 - RNA, 19 nt, Artificial Sequence
  Description of Artificial Sequence: Synthetic oligonucleotide
ggaucaauucuuccauauu

SEQ ID NO: 1038758 - RNA, 19 nt, Artificial Sequence
  Description of Artificial Sequence: Synthetic oligonucleotide
ucaucgcagcaggcuggcu

SEQ ID NO: 1038759 - RNA, 19 nt, Artificial Sequence
  Description of Artificial Sequence: Synthetic oligonucleotide
gcuauucugguuagguggu

SEQ ID NO: 1038760 - RNA, 19 nt, Artificial Sequence
  Description of Artificial Sequence: Synthetic oligonucleotide
ggacacgaggagacguuca

SEQ ID NO: 1038761 - RNA, 19 nt, Artificial Sequence
  Description of Artificial Sequence: Synthetic oligonucleotide
ggggauagccuggguauga

SEQ ID NO: 1038762 - RNA, 19 nt, Artificial Sequence
  Description of Artificial Sequence: Synthetic oligonucleotide
cagcaccuuucauggagua

SEQ ID NO: 1038763 - RNA, 19 nt, Artificial Sequence
  Description of Artificial Sequence: Synthetic oligonucleotide
gggauagccuggguaugac

SEQ ID NO: 1038764 - RNA, 19 nt, Artificial Sequence
  Description of Artificial Sequence: Synthetic oligonucleotide
cagugagaaugaagcuuua

SEQ ID NO: 1038765 - RNA, 19 nt, Artificial Sequence
  Description of Artificial Sequence: Synthetic oligonucleotide
gaacggcuggacacaacau

SEQ ID NO: 1038766 - RNA, 19 nt, Artificial Sequence
  Description of Artificial Sequence: Synthetic oligonucleotide
guuaggugguguugacauu

SEQ ID NO: 1038767 - RNA, 19 nt, Artificial Sequence
  Description of Artificial Sequence: Synthetic oligonucleotide
ccgcuuuccccgcaauaug

SEQ ID NO: 1038768 - RNA, 19 nt, Artificial Sequence
  Description of Artificial Sequence: Synthetic oligonucleotide
gcuuuccccgcaauaugga

SEQ ID NO: 1038769 - RNA, 19 nt, Artificial Sequence
  Description of Artificial Sequence: Synthetic oligonucleotide
ggaaagccacugggauagg

SEQ ID NO: 1038770 - RNA, 19 nt, Artificial Sequence
  Description of Artificial Sequence: Synthetic oligonucleotide
uuccccucaccagccugau

SEQ ID NO: 1038771 - RNA, 19 nt, Artificial Sequence
  Description of Artificial Sequence: Synthetic oligonucleotide
uccccucaccagccugaua

SEQ ID NO: 1038772 - RNA, 19 nt, Artificial Sequence
  Description of Artificial Sequence: Synthetic oligonucleotide
cgauuagccauccuggaau

SEQ ID NO: 1038773 - RNA, 19 nt, Artificial Sequence
  Description of Artificial Sequence: Synthetic oligonucleotide
ggcgcacugcaagaugguc

SEQ ID NO: 1038774 - RNA, 19 nt, Artificial Sequence
  Description of Artificial Sequence: Synthetic oligonucleotide
cgguuuagggcgcacugca

SEQ ID NO: 1038775 - RNA, 19 nt, Artificial Sequence
  Description of Artificial Sequence: Synthetic oligonucleotide
ccaggguacugagaaggca

SEQ ID NO: 1038776 - RNA, 19 nt, Artificial Sequence
  Description of Artificial Sequence: Synthetic oligonucleotide
gguuuagggcgcacugcaa

SEQ ID NO: 1038777 - RNA, 19 nt, Artificial Sequence
  Description of Artificial Sequence: Synthetic oligonucleotide
ggcucugaagagcuucauu

SEQ ID NO: 1038778 - RNA, 19 nt, Artificial Sequence
  Description of Artificial Sequence: Synthetic oligonucleotide
ggcugcucggauugucccu

SEQ ID NO: 1038779 - RNA, 19 nt, Artificial Sequence
  Description of Artificial Sequence: Synthetic oligonucleotide
cggagaauuucugcaucuc

SEQ ID NO: 1038780 - RNA, 19 nt, Artificial Sequence
  Description of Artificial Sequence: Synthetic oligonucleotide
ccagcaccuuucauggagu

SEQ ID NO: 1038781 - RNA, 19 nt, Artificial Sequence
  Description of Artificial Sequence: Synthetic oligonucleotide
gcauagccuccagccccgg

SEQ ID NO: 1038782 - RNA, 19 nt, Artificial Sequence
  Description of Artificial Sequence: Synthetic oligonucleotide
ccauugguggaaagccacu

SEQ ID NO: 1038783 - RNA, 19 nt, Artificial Sequence
  Description of Artificial Sequence: Synthetic oligonucleotide
caccgcccggcccgcuuuc

SEQ ID NO: 1038784 - RNA, 19 nt, Artificial Sequence
  Description of Artificial Sequence: Synthetic oligonucleotide
cccuggcacauggacacga

SEQ ID NO: 1038785 - RNA, 19 nt, Artificial Sequence
  Description of Artificial Sequence: Synthetic oligonucleotide
gggugaacaucugcuuuau

SEQ ID NO: 1038786 - RNA, 19 nt, Artificial Sequence
  Description of Artificial Sequence: Synthetic oligonucleotide
gggguagccgacacuuggu

SEQ ID NO: 1038787 - RNA, 19 nt, Artificial Sequence
  Description of Artificial Sequence: Synthetic oligonucleotide
ccucucacuggccaacgau

SEQ ID NO: 1038788 - RNA, 19 nt, Artificial Sequence
  Description of Artificial Sequence: Synthetic oligonucleotide
gcccgcuuuccccgcaaua

SEQ ID NO: 1038789 - RNA, 19 nt, Artificial Sequence
  Description of Artificial Sequence: Synthetic oligonucleotide
ccacaauccugaccagagu

SEQ ID NO: 1038790 - RNA, 19 nt, Artificial Sequence
  Description of Artificial Sequence: Synthetic oligonucleotide
caaagaaggcggggcgguu

SEQ ID NO: 1038791 - RNA, 19 nt, Artificial Sequence
  Description of Artificial Sequence: Synthetic oligonucleotide
gcugcucggauugucccuu

SEQ ID NO: 1038792 - RNA, 19 nt, Artificial Sequence
  Description of Artificial Sequence: Synthetic oligonucleotide
ccgcccggcccgcuuuccc

SEQ ID NO: 1038793 - RNA, 19 nt, Artificial Sequence
  Description of Artificial Sequence: Synthetic oligonucleotide
ggacuugggcuaacaggau

SEQ ID NO: 1038794 - RNA, 19 nt, Artificial Sequence
  Description of Artificial Sequence: Synthetic oligonucleotide
gucaccgcccggcccgcuu

SEQ ID NO: 1038795 - RNA, 19 nt, Artificial Sequence
  Description of Artificial Sequence: Synthetic oligonucleotide
cccugacauaguccuuagu

SEQ ID NO: 1038796 - RNA, 19 nt, Artificial Sequence
  Description of Artificial Sequence: Synthetic oligonucleotide
gggcucugaagagcuucau

SEQ ID NO: 1038797 - RNA, 19 nt, Artificial Sequence
  Description of Artificial Sequence: Synthetic oligonucleotide
ggcccgcuuuccccgcaau

SEQ ID NO: 1038798 - RNA, 19 nt, Artificial Sequence
  Description of Artificial Sequence: Synthetic oligonucleotide
cgucaccgcccggcccgcu

SEQ ID NO: 1038799 - RNA, 19 nt, Artificial Sequence
  Description of Artificial Sequence: Synthetic oligonucleotide
cauaagauuaacuagaacc

SEQ ID NO: 1038800 - RNA, 19 nt, Artificial Sequence
  Description of Artificial Sequence: Synthetic oligonucleotide
auuaacuagaaccaaacuc

SEQ ID NO: 1038801 - RNA, 19 nt, Artificial Sequence
  Description of Artificial Sequence: Synthetic oligonucleotide
uguuaugugauccauauga

SEQ ID NO: 1038802 - RNA, 19 nt, Artificial Sequence
  Description of Artificial Sequence: Synthetic oligonucleotide
uuaacuagaaccaaacuca

SEQ ID NO: 1038803 - RNA, 19 nt, Artificial Sequence
  Description of Artificial Sequence: Synthetic oligonucleotide
aagaaaccaguucaguccc

SEQ ID NO: 1038804 - RNA, 19 nt, Artificial Sequence
  Description of Artificial Sequence: Synthetic oligonucleotide
ugugacuaacauuagaaag

SEQ ID NO: 1038805 - RNA, 19 nt, Artificial Sequence
  Description of Artificial Sequence: Synthetic oligonucleotide
uuuaguaugcauucaauug

SEQ ID NO: 1038806 - RNA, 19 nt, Artificial Sequence
  Description of Artificial Sequence: Synthetic oligonucleotide
auuaagagggaauuguacg

SEQ ID NO: 1038807 - RNA, 19 nt, Artificial Sequence
  Description of Artificial Sequence: Synthetic oligonucleotide
uuuaggauaagaaaccagu

SEQ ID NO: 1038808 - RNA, 19 nt, Artificial Sequence
  Description of Artificial Sequence: Synthetic oligonucleotide
  modified_base (11)..(11): a, c, u, g, unknown or other
uccacuauacncuuuaagc

SEQ ID NO: 1038809 - RNA, 19 nt, Artificial Sequence
  Description of Artificial Sequence: Synthetic oligonucleotide
aauuguacgucccuaaagu

SEQ ID NO: 1038810 - RNA, 19 nt, Artificial Sequence
  Description of Artificial Sequence: Synthetic oligonucleotide
uauaugaaggccaacggca

SEQ ID NO: 1038811 - RNA, 19 nt, Artificial Sequence
  Description of Artificial Sequence: Synthetic oligonucleotide
  modified_base (4)..(4): a, c, u, g, unknown or other
uacncuuuaagcaugacuu

SEQ ID NO: 1038812 - RNA, 19 nt, Artificial Sequence
  Description of Artificial Sequence: Synthetic oligonucleotide
aauaaauugucaucaacau

SEQ ID NO: 1038813 - RNA, 19 nt, Artificial Sequence
  Description of Artificial Sequence: Synthetic oligonucleotide
uaagaaaccaguucagucc

SEQ ID NO: 1038814 - RNA, 19 nt, Artificial Sequence
  Description of Artificial Sequence: Synthetic oligonucleotide
aaggacaaauugcucaugg

SEQ ID NO: 1038815 - RNA, 19 nt, Artificial Sequence
  Description of Artificial Sequence: Synthetic oligonucleotide
aaccaaauaaauugucauc

SEQ ID NO: 1038816 - RNA, 19 nt, Artificial Sequence
  Description of Artificial Sequence: Synthetic oligonucleotide
auuaaggacaaauugcuca

SEQ ID NO: 1038817 - RNA, 19 nt, Artificial Sequence
  Description of Artificial Sequence: Synthetic oligonucleotide
aaguuaaccaguccggcuc

SEQ ID NO: 1038818 - RNA, 19 nt, Artificial Sequence
  Description of Artificial Sequence: Synthetic oligonucleotide
aauuaagagggaauuguac

SEQ ID NO: 1038819 - RNA, 19 nt, Artificial Sequence
  Description of Artificial Sequence: Synthetic oligonucleotide
ucuggugaaacacaugacc

SEQ ID NO: 1038820 - RNA, 19 nt, Artificial Sequence
  Description of Artificial Sequence: Synthetic oligonucleotide
aagagggaauuguacgucc

SEQ ID NO: 1038821 - RNA, 19 nt, Artificial Sequence
  Description of Artificial Sequence: Synthetic oligonucleotide
aacauugugacuaacauua

SEQ ID NO: 1038822 - RNA, 19 nt, Artificial Sequence
  Description of Artificial Sequence: Synthetic oligonucleotide
cuuacuacuaaaagugucc

SEQ ID NO: 1038823 - RNA, 19 nt, Artificial Sequence
  Description of Artificial Sequence: Synthetic oligonucleotide
ugaacaagccccagcaucg

SEQ ID NO: 1038824 - RNA, 19 nt, Artificial Sequence
  Description of Artificial Sequence: Synthetic oligonucleotide
uuauuuaaccaagaggugc

SEQ ID NO: 1038825 - RNA, 19 nt, Artificial Sequence
  Description of Artificial Sequence: Synthetic oligonucleotide
ucuacuucaaucuugcguc

SEQ ID NO: 1038826 - RNA, 19 nt, Artificial Sequence
  Description of Artificial Sequence: Synthetic oligonucleotide
auucgcauuaacuucauca

SEQ ID NO: 1038827 - RNA, 19 nt, Artificial Sequence
  Description of Artificial Sequence: Synthetic oligonucleotide
acuaggauaaauuucuacu

SEQ ID NO: 1038828 - RNA, 19 nt, Artificial Sequence
  Description of Artificial Sequence: Synthetic oligonucleotide
ucuuaagcuauauucauaa

SEQ ID NO: 1038829 - RNA, 19 nt, Artificial Sequence
  Description of Artificial Sequence: Synthetic oligonucleotide
uuauaugaaggccaacggc

SEQ ID NO: 1038830 - RNA, 19 nt, Artificial Sequence
  Description of Artificial Sequence: Synthetic oligonucleotide
aaagcuaaccguuccaaga

SEQ ID NO: 1038831 - RNA, 19 nt, Artificial Sequence
  Description of Artificial Sequence: Synthetic oligonucleotide
augcauucaauugacauac

SEQ ID NO: 1038832 - RNA, 19 nt, Artificial Sequence
  Description of Artificial Sequence: Synthetic oligonucleotide
gauuuuacccaccaaagga

SEQ ID NO: 1038833 - RNA, 19 nt, Artificial Sequence
  Description of Artificial Sequence: Synthetic oligonucleotide
agucccacuagauuugacc

SEQ ID NO: 1038834 - RNA, 19 nt, Artificial Sequence
  Description of Artificial Sequence: Synthetic oligonucleotide
ucuacuauucuucuuuugu

SEQ ID NO: 1038835 - RNA, 19 nt, Artificial Sequence
  Description of Artificial Sequence: Synthetic oligonucleotide
aaacauuaacuucugaauu

SEQ ID NO: 1038836 - RNA, 19 nt, Artificial Sequence
  Description of Artificial Sequence: Synthetic oligonucleotide
acauuuaggauaagaaacc

SEQ ID NO: 1038837 - RNA, 19 nt, Artificial Sequence
  Description of Artificial Sequence: Synthetic oligonucleotide
uaaagucuuacuaggauaa

SEQ ID NO: 1038838 - RNA, 19 nt, Artificial Sequence
  Description of Artificial Sequence: Synthetic oligonucleotide
aaauucucgaggcaaacaa

SEQ ID NO: 1038839 - RNA, 19 nt, Artificial Sequence
  Description of Artificial Sequence: Synthetic oligonucleotide
aauaauuaagagggaauug

SEQ ID NO: 1038840 - RNA, 19 nt, Artificial Sequence
  Description of Artificial Sequence: Synthetic oligonucleotide
uaaaccgccacauugguaa

SEQ ID NO: 1038841 - RNA, 19 nt, Artificial Sequence
  Description of Artificial Sequence: Synthetic oligonucleotide
agcgcaacaaucuuaagcu

SEQ ID NO: 1038842 - RNA, 19 nt, Artificial Sequence
  Description of Artificial Sequence: Synthetic oligonucleotide
cugaagagaagcaaucggg

SEQ ID NO: 1038843 - RNA, 19 nt, Artificial Sequence
  Description of Artificial Sequence: Synthetic oligonucleotide
caucauuugacaauagcug

SEQ ID NO: 1038844 - RNA, 19 nt, Artificial Sequence
  Description of Artificial Sequence: Synthetic oligonucleotide
gacauaaugaguguggaac

SEQ ID NO: 1038845 - RNA, 19 nt, Artificial Sequence
  Description of Artificial Sequence: Synthetic oligonucleotide
augaguguggaacguaccc

SEQ ID NO: 1038846 - RNA, 19 nt, Artificial Sequence
  Description of Artificial Sequence: Synthetic oligonucleotide
gugacuaacauuagaaagg

SEQ ID NO: 1038847 - RNA, 19 nt, Artificial Sequence
  Description of Artificial Sequence: Synthetic oligonucleotide
uuuauuggcacaugaacaa

SEQ ID NO: 1038848 - RNA, 19 nt, Artificial Sequence
  Description of Artificial Sequence: Synthetic oligonucleotide
uagcgcaacaaucuuaagc

SEQ ID NO: 1038849 - RNA, 19 nt, Artificial Sequence
  Description of Artificial Sequence: Synthetic oligonucleotide
acugcacuaacauuaaacu

SEQ ID NO: 1038850 - RNA, 19 nt, Artificial Sequence
  Description of Artificial Sequence: Synthetic oligonucleotide
uugacaauagcuguuguug

SEQ ID NO: 1038851 - RNA, 19 nt, Artificial Sequence
  Description of Artificial Sequence: Synthetic oligonucleotide
aacauuaacuucugaauuu

SEQ ID NO: 1038852 - RNA, 19 nt, Artificial Sequence
  Description of Artificial Sequence: Synthetic oligonucleotide
aauacauccuuacuacuaa

SEQ ID NO: 1038853 - RNA, 19 nt, Artificial Sequence
  Description of Artificial Sequence: Synthetic oligonucleotide
uaagucagggucuucgucc

SEQ ID NO: 1038854 - RNA, 19 nt, Artificial Sequence
  Description of Artificial Sequence: Synthetic oligonucleotide
gaauaagucagggucuucg

SEQ ID NO: 1038855 - RNA, 19 nt, Artificial Sequence
  Description of Artificial Sequence: Synthetic oligonucleotide
cuuauaugaaggccaacgg

SEQ ID NO: 1038856 - RNA, 19 nt, Artificial Sequence
  Description of Artificial Sequence: Synthetic oligonucleotide
ucuuacuaggauaaauuuc

SEQ ID NO: 1038857 - RNA, 19 nt, Artificial Sequence
  Description of Artificial Sequence: Synthetic oligonucleotide
uguuuaucuucaaauacau

SEQ ID NO: 1038858 - RNA, 19 nt, Artificial Sequence
  Description of Artificial Sequence: Synthetic oligonucleotide
uugugggacagacauaaug

SEQ ID NO: 1038859 - RNA, 19 nt, Artificial Sequence
  Description of Artificial Sequence: Synthetic oligonucleotide
uuguacgucccuaaagugc

SEQ ID NO: 1038860 - RNA, 19 nt, Artificial Sequence
  Description of Artificial Sequence: Synthetic oligonucleotide
agagcauacauuauuuaac

SEQ ID NO: 1038861 - RNA, 19 nt, Artificial Sequence
  Description of Artificial Sequence: Synthetic oligonucleotide
auacaaggcaaccaaauaa

SEQ ID NO: 1038862 - RNA, 19 nt, Artificial Sequence
  Description of Artificial Sequence: Synthetic oligonucleotide
ucugaauuuccaaugcagu

SEQ ID NO: 1038863 - RNA, 19 nt, Artificial Sequence
  Description of Artificial Sequence: Synthetic oligonucleotide
uuaagagggaauuguacgu

SEQ ID NO: 1038864 - RNA, 19 nt, Artificial Sequence
  Description of Artificial Sequence: Synthetic oligonucleotide
uucauuaguguuaugugau

SEQ ID NO: 1038865 - RNA, 19 nt, Artificial Sequence
  Description of Artificial Sequence: Synthetic oligonucleotide
gaauuguacgucccuaaag

SEQ ID NO: 1038866 - RNA, 19 nt, Artificial Sequence
  Description of Artificial Sequence: Synthetic oligonucleotide
cuccauaucuucauuagug

SEQ ID NO: 1038867 - RNA, 19 nt, Artificial Sequence
  Description of Artificial Sequence: Synthetic oligonucleotide
aaucuugcguccacuauac

SEQ ID NO: 1038868 - RNA, 19 nt, Artificial Sequence
  Description of Artificial Sequence: Synthetic oligonucleotide
auaauguguauuuccuguc

SEQ ID NO: 1038869 - RNA, 19 nt, Artificial Sequence
  Description of Artificial Sequence: Synthetic oligonucleotide
auaauuaagagggaauugu

SEQ ID NO: 1038870 - RNA, 19 nt, Artificial Sequence
  Description of Artificial Sequence: Synthetic oligonucleotide
auaagauuaacuagaacca

SEQ ID NO: 1038871 - RNA, 19 nt, Artificial Sequence
  Description of Artificial Sequence: Synthetic oligonucleotide
aucauuugacaauagcugu

SEQ ID NO: 1038872 - RNA, 19 nt, Artificial Sequence
  Description of Artificial Sequence: Synthetic oligonucleotide
uaagaugggacaucauuug

SEQ ID NO: 1038873 - RNA, 19 nt, Artificial Sequence
  Description of Artificial Sequence: Synthetic oligonucleotide
  modified_base (18)..(18): a, c, u, g, unknown or other
ucuugcguccacuauacnc

SEQ ID NO: 1038874 - RNA, 19 nt, Artificial Sequence
  Description of Artificial Sequence: Synthetic oligonucleotide
guaagggagcuguagaaag

SEQ ID NO: 1038875 - RNA, 19 nt, Artificial Sequence
  Description of Artificial Sequence: Synthetic oligonucleotide
aguaaaacauccagucugc

SEQ ID NO: 1038876 - RNA, 19 nt, Artificial Sequence
  Description of Artificial Sequence: Synthetic oligonucleotide
uguaaagucuuacuaggau

SEQ ID NO: 1038877 - RNA, 19 nt, Artificial Sequence
  Description of Artificial Sequence: Synthetic oligonucleotide
gaugguugcuccuugugug

SEQ ID NO: 1038878 - RNA, 19 nt, Artificial Sequence
  Description of Artificial Sequence: Synthetic oligonucleotide
aaucggguggaagagguag

SEQ ID NO: 1038879 - RNA, 19 nt, Artificial Sequence
  Description of Artificial Sequence: Synthetic oligonucleotide
aaccacaaaucucuugaug

SEQ ID NO: 1038880 - RNA, 19 nt, Artificial Sequence
  Description of Artificial Sequence: Synthetic oligonucleotide
auuuaaaccgccacauugg

SEQ ID NO: 1038881 - RNA, 19 nt, Artificial Sequence
  Description of Artificial Sequence: Synthetic oligonucleotide
ugacuaacauuagaaaggc

SEQ ID NO: 1038882 - RNA, 19 nt, Artificial Sequence
  Description of Artificial Sequence: Synthetic oligonucleotide
agggaaagcuaaccguucc

SEQ ID NO: 1038883 - RNA, 19 nt, Artificial Sequence
  Description of Artificial Sequence: Synthetic oligonucleotide
gaagcaaucggguggaaga

SEQ ID NO: 1038884 - RNA, 19 nt, Artificial Sequence
  Description of Artificial Sequence: Synthetic oligonucleotide
ugucucagagcauacauua

SEQ ID NO: 1038885 - RNA, 19 nt, Artificial Sequence
  Description of Artificial Sequence: Synthetic oligonucleotide
  modified_base (5)..(5): a, c, u, g, unknown or other
auacncuuuaagcaugacu

SEQ ID NO: 1038886 - RNA, 19 nt, Artificial Sequence
  Description of Artificial Sequence: Synthetic oligonucleotide
aguaaucaauuagcaagcc

SEQ ID NO: 1038887 - RNA, 19 nt, Artificial Sequence
  Description of Artificial Sequence: Synthetic oligonucleotide
guuguauuggaguagcgca

SEQ ID NO: 1038888 - RNA, 19 nt, Artificial Sequence
  Description of Artificial Sequence: Synthetic oligonucleotide
ucaugguuaagaugggaca

SEQ ID NO: 1038889 - RNA, 19 nt, Artificial Sequence
  Description of Artificial Sequence: Synthetic oligonucleotide
aauucucgaggcaaacaac

SEQ ID NO: 1038890 - RNA, 19 nt, Artificial Sequence
  Description of Artificial Sequence: Synthetic oligonucleotide
aguuaaccaguccggcucc

SEQ ID NO: 1038891 - RNA, 19 nt, Artificial Sequence
  Description of Artificial Sequence: Synthetic oligonucleotide
cuuacuaggauaaauuucu

SEQ ID NO: 1038892 - RNA, 19 nt, Artificial Sequence
  Description of Artificial Sequence: Synthetic oligonucleotide
cacugcacuaacauuaaac

SEQ ID NO: 1038893 - RNA, 19 nt, Artificial Sequence
  Description of Artificial Sequence: Synthetic oligonucleotide
ugacauacaaggcaaccaa

SEQ ID NO: 1038894 - RNA, 19 nt, Artificial Sequence
  Description of Artificial Sequence: Synthetic oligonucleotide
gauacucaaagcuuauuaa

SEQ ID NO: 1038895 - RNA, 19 nt, Artificial Sequence
  Description of Artificial Sequence: Synthetic oligonucleotide
uguugucacuaucugaguc

SEQ ID NO: 1038896 - RNA, 19 nt, Artificial Sequence
  Description of Artificial Sequence: Synthetic oligonucleotide
uaaugaguguggaacguac

SEQ ID NO: 1038897 - RNA, 19 nt, Artificial Sequence
  Description of Artificial Sequence: Synthetic oligonucleotide
aaacauugugacuaacauu

SEQ ID NO: 1038898 - RNA, 19 nt, Artificial Sequence
  Description of Artificial Sequence: Synthetic oligonucleotide
uucaaaauucucgaggcaa

SEQ ID NO: 1038899 - RNA, 19 nt, Artificial Sequence
  Description of Artificial Sequence: Synthetic oligonucleotide
uuuuacccaccaaaggacu

SEQ ID NO: 1038900 - RNA, 19 nt, Artificial Sequence
  Description of Artificial Sequence: Synthetic oligonucleotide
cauuaguguuaugugaucc

SEQ ID NO: 1038901 - RNA, 19 nt, Artificial Sequence
  Description of Artificial Sequence: Synthetic oligonucleotide
ggagaaaacauuuaggaua

SEQ ID NO: 1038902 - RNA, 19 nt, Artificial Sequence
  Description of Artificial Sequence: Synthetic oligonucleotide
agauacucaaagcuuauua

SEQ ID NO: 1038903 - RNA, 19 nt, Artificial Sequence
  Description of Artificial Sequence: Synthetic oligonucleotide
cucaugguuaagaugggac

SEQ ID NO: 1038904 - RNA, 19 nt, Artificial Sequence
  Description of Artificial Sequence: Synthetic oligonucleotide
cuaucugagucauuuucag

SEQ ID NO: 1038905 - RNA, 19 nt, Artificial Sequence
  Description of Artificial Sequence: Synthetic oligonucleotide
uacuaggauaaauuucuac

SEQ ID NO: 1038906 - RNA, 19 nt, Artificial Sequence
  Description of Artificial Sequence: Synthetic oligonucleotide
uuuaaaccgccacauuggu

SEQ ID NO: 1038907 - RNA, 19 nt, Artificial Sequence
  Description of Artificial Sequence: Synthetic oligonucleotide
uaugcauucaauugacaua

SEQ ID NO: 1038908 - RNA, 19 nt, Artificial Sequence
  Description of Artificial Sequence: Synthetic oligonucleotide
cuucgucccagucagauuc

SEQ ID NO: 1038909 - RNA, 19 nt, Artificial Sequence
  Description of Artificial Sequence: Synthetic oligonucleotide
aaccguuccaagaauaagu

SEQ ID NO: 1038910 - RNA, 19 nt, Artificial Sequence
  Description of Artificial Sequence: Synthetic oligonucleotide
aaccacauaacaaugcaau

SEQ ID NO: 1038911 - RNA, 19 nt, Artificial Sequence
  Description of Artificial Sequence: Synthetic oligonucleotide
uaauuaagagggaauugua

SEQ ID NO: 1038912 - RNA, 19 nt, Artificial Sequence
  Description of Artificial Sequence: Synthetic oligonucleotide
aaauugcucaugguuaaga

SEQ ID NO: 1038913 - RNA, 19 nt, Artificial Sequence
  Description of Artificial Sequence: Synthetic oligonucleotide
gaaagcuaaccguuccaag

SEQ ID NO: 1038914 - RNA, 19 nt, Artificial Sequence
  Description of Artificial Sequence: Synthetic oligonucleotide
aagaugggacaucauuuga

SEQ ID NO: 1038915 - RNA, 19 nt, Artificial Sequence
  Description of Artificial Sequence: Synthetic oligonucleotide
agauucuacagggaaguuc

SEQ ID NO: 1038916 - RNA, 19 nt, Artificial Sequence
  Description of Artificial Sequence: Synthetic oligonucleotide
auuguacgucccuaaagug

SEQ ID NO: 1038917 - RNA, 19 nt, Artificial Sequence
  Description of Artificial Sequence: Synthetic oligonucleotide
guauguacugagaaacagg

SEQ ID NO: 1038918 - RNA, 19 nt, Artificial Sequence
  Description of Artificial Sequence: Synthetic oligonucleotide
auugugacuaacauuagaa

SEQ ID NO: 1038919 - RNA, 19 nt, Artificial Sequence
  Description of Artificial Sequence: Synthetic oligonucleotide
auuauucgcauuaacuuca

SEQ ID NO: 1038920 - RNA, 19 nt, Artificial Sequence
  Description of Artificial Sequence: Synthetic oligonucleotide
uuaaggacaaauugcucau

SEQ ID NO: 1038921 - RNA, 19 nt, Artificial Sequence
  Description of Artificial Sequence: Synthetic oligonucleotide
uacagugcaguguaccagc

SEQ ID NO: 1038922 - RNA, 19 nt, Artificial Sequence
  Description of Artificial Sequence: Synthetic oligonucleotide
acagacauaaugagugugg

SEQ ID NO: 1038923 - RNA, 19 nt, Artificial Sequence
  Description of Artificial Sequence: Synthetic oligonucleotide
uuaggauaagaaaccaguu

SEQ ID NO: 1038924 - RNA, 19 nt, Artificial Sequence
  Description of Artificial Sequence: Synthetic oligonucleotide
aagcuaaccguuccaagaa

SEQ ID NO: 1038925 - RNA, 19 nt, Artificial Sequence
  Description of Artificial Sequence: Synthetic oligonucleotide
cuugugugauaaauaaguc

SEQ ID NO: 1038926 - RNA, 19 nt, Artificial Sequence
  Description of Artificial Sequence: Synthetic oligonucleotide
aacuaaacuucaaaccaca

SEQ ID NO: 1038927 - RNA, 19 nt, Artificial Sequence
  Description of Artificial Sequence: Synthetic oligonucleotide
uacauccuuacuacuaaaa

SEQ ID NO: 1038928 - RNA, 19 nt, Artificial Sequence
  Description of Artificial Sequence: Synthetic oligonucleotide
auauaaucaguugguauca

SEQ ID NO: 1038929 - RNA, 19 nt, Artificial Sequence
  Description of Artificial Sequence: Synthetic oligonucleotide
aacaaucuuaagcuauauu

SEQ ID NO: 1038930 - RNA, 19 nt, Artificial Sequence
  Description of Artificial Sequence: Synthetic oligonucleotide
gacaauagcuguuguugug

SEQ ID NO: 1038931 - RNA, 19 nt, Artificial Sequence
  Description of Artificial Sequence: Synthetic oligonucleotide
ggucuggcaauauuuauug

SEQ ID NO: 1038932 - RNA, 19 nt, Artificial Sequence
  Description of Artificial Sequence: Synthetic oligonucleotide
ggauuuuacccaccaaagg

SEQ ID NO: 1038933 - RNA, 19 nt, Artificial Sequence
  Description of Artificial Sequence: Synthetic oligonucleotide
agaugggacaucauuugac

SEQ ID NO: 1038934 - RNA, 19 nt, Artificial Sequence
  Description of Artificial Sequence: Synthetic oligonucleotide
ugacaauagcuguuguugu

SEQ ID NO: 1038935 - RNA, 19 nt, Artificial Sequence
  Description of Artificial Sequence: Synthetic oligonucleotide
uuacuacuaaaagugucca

SEQ ID NO: 1038936 - RNA, 19 nt, Artificial Sequence
  Description of Artificial Sequence: Synthetic oligonucleotide
uugugacuaacauuagaaa

SEQ ID NO: 1038937 - RNA, 19 nt, Artificial Sequence
  Description of Artificial Sequence: Synthetic oligonucleotide
ggccaaguuaaccaguccg

SEQ ID NO: 1038938 - RNA, 19 nt, Artificial Sequence
  Description of Artificial Sequence: Synthetic oligonucleotide
uauuuccugucacugcacu

SEQ ID NO: 1038939 - RNA, 19 nt, Artificial Sequence
  Description of Artificial Sequence: Synthetic oligonucleotide
ucagggaaagcuaaccguu

SEQ ID NO: 1038940 - RNA, 19 nt, Artificial Sequence
  Description of Artificial Sequence: Synthetic oligonucleotide
uaauuucaugucucagagc

SEQ ID NO: 1038941 - RNA, 19 nt, Artificial Sequence
  Description of Artificial Sequence: Synthetic oligonucleotide
uccaagaauaagucagggu

SEQ ID NO: 1038942 - RNA, 19 nt, Artificial Sequence
  Description of Artificial Sequence: Synthetic oligonucleotide
auaaucaguugguaucaga

SEQ ID NO: 1038943 - RNA, 19 nt, Artificial Sequence
  Description of Artificial Sequence: Synthetic oligonucleotide
uuagcaagccaugucccag

SEQ ID NO: 1038944 - RNA, 19 nt, Artificial Sequence
  Description of Artificial Sequence: Synthetic oligonucleotide
uaacuagaaccaaacucaa

SEQ ID NO: 1038945 - RNA, 19 nt, Artificial Sequence
  Description of Artificial Sequence: Synthetic oligonucleotide
uuauuggcacaugaacaag

SEQ ID NO: 1038946 - RNA, 19 nt, Artificial Sequence
  Description of Artificial Sequence: Synthetic oligonucleotide
aggucagggaaagcuaacc

SEQ ID NO: 1038947 - RNA, 19 nt, Artificial Sequence
  Description of Artificial Sequence: Synthetic oligonucleotide
ugacccaugaagccagugu

SEQ ID NO: 1038948 - RNA, 19 nt, Artificial Sequence
  Description of Artificial Sequence: Synthetic oligonucleotide
aagucuuacuaggauaaau

SEQ ID NO: 1038949 - RNA, 19 nt, Artificial Sequence
  Description of Artificial Sequence: Synthetic oligonucleotide
uguaccagcaggccaaguu

SEQ ID NO: 1038950 - RNA, 19 nt, Artificial Sequence
  Description of Artificial Sequence: Synthetic oligonucleotide
ucauuugacaauagcuguu

SEQ ID NO: 1038951 - RNA, 19 nt, Artificial Sequence
  Description of Artificial Sequence: Synthetic oligonucleotide
uaagauacucaaagcuuau

SEQ ID NO: 1038952 - RNA, 19 nt, Artificial Sequence
  Description of Artificial Sequence: Synthetic oligonucleotide
uuguauuggaguagcgcaa

SEQ ID NO: 1038953 - RNA, 19 nt, Artificial Sequence
  Description of Artificial Sequence: Synthetic oligonucleotide
guaaagucuuacuaggaua

SEQ ID NO: 1038954 - RNA, 19 nt, Artificial Sequence
  Description of Artificial Sequence: Synthetic oligonucleotide
ucucccaguggauuuuacc

SEQ ID NO: 1038955 - RNA, 19 nt, Artificial Sequence
  Description of Artificial Sequence: Synthetic oligonucleotide
  modified_base (8)..(8): a, c, u, g, unknown or other
acuauacncuuuaagcaug

SEQ ID NO: 1038956 - RNA, 19 nt, Artificial Sequence
  Description of Artificial Sequence: Synthetic oligonucleotide
guaaucaauuagcaagcca

SEQ ID NO: 1038957 - RNA, 19 nt, Artificial Sequence
  Description of Artificial Sequence: Synthetic oligonucleotide
cuaggauaaauuucuacua

SEQ ID NO: 1038958 - RNA, 19 nt, Artificial Sequence
  Description of Artificial Sequence: Synthetic oligonucleotide
auuggaguagcgcaacaau

SEQ ID NO: 1038959 - RNA, 19 nt, Artificial Sequence
  Description of Artificial Sequence: Synthetic oligonucleotide
  modified_base (12)..(12): a, c, u, g, unknown or other
guccacuauacncuuuaag

SEQ ID NO: 1038960 - RNA, 19 nt, Artificial Sequence
  Description of Artificial Sequence: Synthetic oligonucleotide
auuauuuaaccaagaggug

SEQ ID NO: 1038961 - RNA, 19 nt, Artificial Sequence
  Description of Artificial Sequence: Synthetic oligonucleotide
uggcaauauuuauuggcac

SEQ ID NO: 1038962 - RNA, 19 nt, Artificial Sequence
  Description of Artificial Sequence: Synthetic oligonucleotide
aggauaaauuucuacuauu

SEQ ID NO: 1038963 - RNA, 19 nt, Artificial Sequence
  Description of Artificial Sequence: Synthetic oligonucleotide
ugugauccauaugaccugc

SEQ ID NO: 1038964 - RNA, 19 nt, Artificial Sequence
  Description of Artificial Sequence: Synthetic oligonucleotide
uaaccguuccaagaauaag

SEQ ID NO: 1038965 - RNA, 19 nt, Artificial Sequence
  Description of Artificial Sequence: Synthetic oligonucleotide
accaguucagucccacuag

SEQ ID NO: 1038966 - RNA, 19 nt, Artificial Sequence
  Description of Artificial Sequence: Synthetic oligonucleotide
uguggaacguacccagccu

SEQ ID NO: 1038967 - RNA, 19 nt, Artificial Sequence
  Description of Artificial Sequence: Synthetic oligonucleotide
uauaaucaguugguaucag

SEQ ID NO: 1038968 - RNA, 19 nt, Artificial Sequence
  Description of Artificial Sequence: Synthetic oligonucleotide
cauucaguacagugcagug

SEQ ID NO: 1038969 - RNA, 19 nt, Artificial Sequence
  Description of Artificial Sequence: Synthetic oligonucleotide
accguuccaagaauaaguc

SEQ ID NO: 1038970 - RNA, 19 nt, Artificial Sequence
  Description of Artificial Sequence: Synthetic oligonucleotide
auucucgaggcaaacaaca

SEQ ID NO: 1038971 - RNA, 19 nt, Artificial Sequence
  Description of Artificial Sequence: Synthetic oligonucleotide
uuugacccugccuuguaaa

SEQ ID NO: 1038972 - RNA, 19 nt, Artificial Sequence
  Description of Artificial Sequence: Synthetic oligonucleotide
uagcaagccaugucccagg

SEQ ID NO: 1038973 - RNA, 19 nt, Artificial Sequence
  Description of Artificial Sequence: Synthetic oligonucleotide
gguauguacugagaaacag

SEQ ID NO: 1038974 - RNA, 19 nt, Artificial Sequence
  Description of Artificial Sequence: Synthetic oligonucleotide
aagcaaucggguggaagag

SEQ ID NO: 1038975 - RNA, 19 nt, Artificial Sequence
  Description of Artificial Sequence: Synthetic oligonucleotide
aguccauccaagccauaag

SEQ ID NO: 1038976 - RNA, 19 nt, Artificial Sequence
  Description of Artificial Sequence: Synthetic oligonucleotide
cuacagggaaguucugaag

SEQ ID NO: 1038977 - RNA, 19 nt, Artificial Sequence
  Description of Artificial Sequence: Synthetic oligonucleotide
  modified_base (7)..(7): a, c, u, g, unknown or other
cuauacncuuuaagcauga

SEQ ID NO: 1038978 - RNA, 19 nt, Artificial Sequence
  Description of Artificial Sequence: Synthetic oligonucleotide
aaagcccaacacagguagc

SEQ ID NO: 1038979 - RNA, 19 nt, Artificial Sequence
  Description of Artificial Sequence: Synthetic oligonucleotide
augugauccauaugaccug

SEQ ID NO: 1038980 - RNA, 19 nt, Artificial Sequence
  Description of Artificial Sequence: Synthetic oligonucleotide
uggucuggcaauauuuauu

SEQ ID NO: 1038981 - RNA, 19 nt, Artificial Sequence
  Description of Artificial Sequence: Synthetic oligonucleotide
agagggaauuguacguccc

SEQ ID NO: 1038982 - RNA, 19 nt, Artificial Sequence
  Description of Artificial Sequence: Synthetic oligonucleotide
ugucaucaacaucagcaua

SEQ ID NO: 1038983 - RNA, 19 nt, Artificial Sequence
  Description of Artificial Sequence: Synthetic oligonucleotide
aucaauuagcaagccaugu

SEQ ID NO: 1038984 - RNA, 19 nt, Artificial Sequence
  Description of Artificial Sequence: Synthetic oligonucleotide
ucaaucuugcguccacuau

SEQ ID NO: 1038985 - RNA, 19 nt, Artificial Sequence
  Description of Artificial Sequence: Synthetic oligonucleotide
augaccugcccuuccuuuc

SEQ ID NO: 1038986 - RNA, 19 nt, Artificial Sequence
  Description of Artificial Sequence: Synthetic oligonucleotide
cacaagguagccccauuag

SEQ ID NO: 1038987 - RNA, 19 nt, Artificial Sequence
  Description of Artificial Sequence: Synthetic oligonucleotide
auuugacaauagcuguugu

SEQ ID NO: 1038988 - RNA, 19 nt, Artificial Sequence
  Description of Artificial Sequence: Synthetic oligonucleotide
ugggugugaagaguaaaac

SEQ ID NO: 1038989 - RNA, 19 nt, Artificial Sequence
  Description of Artificial Sequence: Synthetic oligonucleotide
uguauuggaguagcgcaac

SEQ ID NO: 1038990 - RNA, 19 nt, Artificial Sequence
  Description of Artificial Sequence: Synthetic oligonucleotide
guaagauacucaaagcuua

SEQ ID NO: 1038991 - RNA, 19 nt, Artificial Sequence
  Description of Artificial Sequence: Synthetic oligonucleotide
ggauaaauuucuacuauuc

SEQ ID NO: 1038992 - RNA, 19 nt, Artificial Sequence
  Description of Artificial Sequence: Synthetic oligonucleotide
cagagcauacauuauuuaa

SEQ ID NO: 1038993 - RNA, 19 nt, Artificial Sequence
  Description of Artificial Sequence: Synthetic oligonucleotide
uaagagggaauuguacguc

SEQ ID NO: 1038994 - RNA, 19 nt, Artificial Sequence
  Description of Artificial Sequence: Synthetic oligonucleotide
gguaucagagggugaagcc

SEQ ID NO: 1038995 - RNA, 19 nt, Artificial Sequence
  Description of Artificial Sequence: Synthetic oligonucleotide
guaugcauucaauugacau

SEQ ID NO: 1038996 - RNA, 19 nt, Artificial Sequence
  Description of Artificial Sequence: Synthetic oligonucleotide
  modified_base (2)..(2): a, c, u, g, unknown or other
cncuuuaagcaugacuuuc

SEQ ID NO: 1038997 - RNA, 19 nt, Artificial Sequence
  Description of Artificial Sequence: Synthetic oligonucleotide
aaguccauccaagccauaa

SEQ ID NO: 1038998 - RNA, 19 nt, Artificial Sequence
  Description of Artificial Sequence: Synthetic oligonucleotide
cuacuucaaucuugcgucc

SEQ ID NO: 1038999 - RNA, 19 nt, Artificial Sequence
  Description of Artificial Sequence: Synthetic oligonucleotide
cgcauuaacuucaucauug

SEQ ID NO: 1039000 - RNA, 19 nt, Artificial Sequence
  Description of Artificial Sequence: Synthetic oligonucleotide
aagaauaagucagggucuu

SEQ ID NO: 1039001 - RNA, 19 nt, Artificial Sequence
  Description of Artificial Sequence: Synthetic oligonucleotide
agucuuacuaggauaaauu

SEQ ID NO: 1039002 - RNA, 19 nt, Artificial Sequence
  Description of Artificial Sequence: Synthetic oligonucleotide
agaagcaaucggguggaag

SEQ ID NO: 1039003 - RNA, 19 nt, Artificial Sequence
  Description of Artificial Sequence: Synthetic oligonucleotide
ugcccugacccaugaagcc

SEQ ID NO: 1039004 - RNA, 19 nt, Artificial Sequence
  Description of Artificial Sequence: Synthetic oligonucleotide
augguuaagaugggacauc

SEQ ID NO: 1039005 - RNA, 19 nt, Artificial Sequence
  Description of Artificial Sequence: Synthetic oligonucleotide
agugcuuaugagaaccaca

SEQ ID NO: 1039006 - RNA, 19 nt, Artificial Sequence
  Description of Artificial Sequence: Synthetic oligonucleotide
guuaagaugggacaucauu

SEQ ID NO: 1039007 - RNA, 19 nt, Artificial Sequence
  Description of Artificial Sequence: Synthetic oligonucleotide
aggacaaauugcucauggu

SEQ ID NO: 1039008 - RNA, 19 nt, Artificial Sequence
  Description of Artificial Sequence: Synthetic oligonucleotide
  modified_base (17)..(17): a, c, u, g, unknown or other
cuugcguccacuauacncu

SEQ ID NO: 1039009 - RNA, 19 nt, Artificial Sequence
  Description of Artificial Sequence: Synthetic oligonucleotide
guacugagaaacagggcug

SEQ ID NO: 1039010 - RNA, 19 nt, Artificial Sequence
  Description of Artificial Sequence: Synthetic oligonucleotide
gguuguauuggaguagcgc

SEQ ID NO: 1039011 - RNA, 19 nt, Artificial Sequence
  Description of Artificial Sequence: Synthetic oligonucleotide
guacccagccucuucuccc

SEQ ID NO: 1039012 - RNA, 19 nt, Artificial Sequence
  Description of Artificial Sequence: Synthetic oligonucleotide
guuuaguaugcauucaauu

SEQ ID NO: 1039013 - RNA, 19 nt, Artificial Sequence
  Description of Artificial Sequence: Synthetic oligonucleotide
gggucuucgucccagucag

SEQ ID NO: 1039014 - RNA, 19 nt, Artificial Sequence
  Description of Artificial Sequence: Synthetic oligonucleotide
agggucuucgucccaguca

SEQ ID NO: 1039015 - RNA, 19 nt, Artificial Sequence
  Description of Artificial Sequence: Synthetic oligonucleotide
uaucuaaguaagggagcug

SEQ ID NO: 1039016 - RNA, 19 nt, Artificial Sequence
  Description of Artificial Sequence: Synthetic oligonucleotide
uaguguuaugugauccaua

SEQ ID NO: 1039017 - RNA, 19 nt, Artificial Sequence
  Description of Artificial Sequence: Synthetic oligonucleotide
acagaucauuuacucuacu

SEQ ID NO: 1039018 - RNA, 19 nt, Artificial Sequence
  Description of Artificial Sequence: Synthetic oligonucleotide
uaccugggaucacuggaac

SEQ ID NO: 1039019 - RNA, 19 nt, Artificial Sequence
  Description of Artificial Sequence: Synthetic oligonucleotide
gaaaccaguucagucccac

SEQ ID NO: 1039020 - RNA, 19 nt, Artificial Sequence
  Description of Artificial Sequence: Synthetic oligonucleotide
uuauucgcauuaacuucau

SEQ ID NO: 1039021 - RNA, 19 nt, Artificial Sequence
  Description of Artificial Sequence: Synthetic oligonucleotide
caagaauaagucagggucu

SEQ ID NO: 1039022 - RNA, 19 nt, Artificial Sequence
  Description of Artificial Sequence: Synthetic oligonucleotide
ucccacuagauuugacccu

SEQ ID NO: 1039023 - RNA, 19 nt, Artificial Sequence
  Description of Artificial Sequence: Synthetic oligonucleotide
guugguaucagagggugaa

SEQ ID NO: 1039024 - RNA, 19 nt, Artificial Sequence
  Description of Artificial Sequence: Synthetic oligonucleotide
aucauuguugcugcgccgu

SEQ ID NO: 1039025 - RNA, 19 nt, Artificial Sequence
  Description of Artificial Sequence: Synthetic oligonucleotide
uguccguauuccaaaucuu

SEQ ID NO: 1039026 - RNA, 19 nt, Artificial Sequence
  Description of Artificial Sequence: Synthetic oligonucleotide
ccuuacuacuaaaaguguc

SEQ ID NO: 1039027 - RNA, 19 nt, Artificial Sequence
  Description of Artificial Sequence: Synthetic oligonucleotide
ucucuugaugguugcuccu

SEQ ID NO: 1039028 - RNA, 19 nt, Artificial Sequence
  Description of Artificial Sequence: Synthetic oligonucleotide
auacauccuuacuacuaaa

SEQ ID NO: 1039029 - RNA, 19 nt, Artificial Sequence
  Description of Artificial Sequence: Synthetic oligonucleotide
agcaaucggguggaagagg

SEQ ID NO: 1039030 - RNA, 19 nt, Artificial Sequence
  Description of Artificial Sequence: Synthetic oligonucleotide
  modified_base (3)..(3): a, c, u, g, unknown or other
acncuuuaagcaugacuuu

SEQ ID NO: 1039031 - RNA, 19 nt, Artificial Sequence
  Description of Artificial Sequence: Synthetic oligonucleotide
caaccaaauaaauugucau

SEQ ID NO: 1039032 - RNA, 19 nt, Artificial Sequence
  Description of Artificial Sequence: Synthetic oligonucleotide
caguugguaucagagggug

SEQ ID NO: 1039033 - RNA, 19 nt, Artificial Sequence
  Description of Artificial Sequence: Synthetic oligonucleotide
cuaaccguuccaagaauaa

SEQ ID NO: 1039034 - RNA, 19 nt, Artificial Sequence
  Description of Artificial Sequence: Synthetic oligonucleotide
agugccuguccguauucca

SEQ ID NO: 1039035 - RNA, 19 nt, Artificial Sequence
  Description of Artificial Sequence: Synthetic oligonucleotide
ucaguacagugcaguguac

SEQ ID NO: 1039036 - RNA, 19 nt, Artificial Sequence
  Description of Artificial Sequence: Synthetic oligonucleotide
auaaguccauccaagccau

SEQ ID NO: 1039037 - RNA, 19 nt, Artificial Sequence
  Description of Artificial Sequence: Synthetic oligonucleotide
uauucgcauuaacuucauc

SEQ ID NO: 1039038 - RNA, 19 nt, Artificial Sequence
  Description of Artificial Sequence: Synthetic oligonucleotide
uaaccaagaggugcuggac

SEQ ID NO: 1039039 - RNA, 19 nt, Artificial Sequence
  Description of Artificial Sequence: Synthetic oligonucleotide
ugucccagguauguacuga

SEQ ID NO: 1039040 - RNA, 19 nt, Artificial Sequence
  Description of Artificial Sequence: Synthetic oligonucleotide
ugcauucaauugacauaca

SEQ ID NO: 1039041 - RNA, 19 nt, Artificial Sequence
  Description of Artificial Sequence: Synthetic oligonucleotide
  modified_base (9)..(9): a, c, u, g, unknown or other
cacuauacncuuuaagcau

SEQ ID NO: 1039042 - RNA, 19 nt, Artificial Sequence
  Description of Artificial Sequence: Synthetic oligonucleotide
agaauaagucagggucuuc

SEQ ID NO: 1039043 - RNA, 19 nt, Artificial Sequence
  Description of Artificial Sequence: Synthetic oligonucleotide
auguugucacuaucugagu

SEQ ID NO: 1039044 - RNA, 19 nt, Artificial Sequence
  Description of Artificial Sequence: Synthetic oligonucleotide
ugacccugccuuguaaagu

SEQ ID NO: 1039045 - RNA, 19 nt, Artificial Sequence
  Description of Artificial Sequence: Synthetic oligonucleotide
acaagccccagcaucgcag

SEQ ID NO: 1039046 - RNA, 19 nt, Artificial Sequence
  Description of Artificial Sequence: Synthetic oligonucleotide
aaagucuuacuaggauaaa

SEQ ID NO: 1039047 - RNA, 19 nt, Artificial Sequence
  Description of Artificial Sequence: Synthetic oligonucleotide
accaguccggcuccauauc

SEQ ID NO: 1039048 - RNA, 19 nt, Artificial Sequence
  Description of Artificial Sequence: Synthetic oligonucleotide
  modified_base (6)..(6): a, c, u, g, unknown or other
uauacncuuuaagcaugac

SEQ ID NO: 1039049 - RNA, 19 nt, Artificial Sequence
  Description of Artificial Sequence: Synthetic oligonucleotide
cacauucaguacagugcag

SEQ ID NO: 1039050 - RNA, 19 nt, Artificial Sequence
  Description of Artificial Sequence: Synthetic oligonucleotide
uugguaucagagggugaag

SEQ ID NO: 1039051 - RNA, 19 nt, Artificial Sequence
  Description of Artificial Sequence: Synthetic oligonucleotide
aaagcuuauuaaggacaaa

SEQ ID NO: 1039052 - RNA, 19 nt, Artificial Sequence
  Description of Artificial Sequence: Synthetic oligonucleotide
guggaacguacccagccuc

SEQ ID NO: 1039053 - RNA, 19 nt, Artificial Sequence
  Description of Artificial Sequence: Synthetic oligonucleotide
acuaugcuuuguuuaucuu

SEQ ID NO: 1039054 - RNA, 19 nt, Artificial Sequence
  Description of Artificial Sequence: Synthetic oligonucleotide
aggcaaccaaauaaauugu

SEQ ID NO: 1039055 - RNA, 19 nt, Artificial Sequence
  Description of Artificial Sequence: Synthetic oligonucleotide
aacggcaaacagggcaaca

SEQ ID NO: 1039056 - RNA, 19 nt, Artificial Sequence
  Description of Artificial Sequence: Synthetic oligonucleotide
aucauuuacucuacuucaa

SEQ ID NO: 1039057 - RNA, 19 nt, Artificial Sequence
  Description of Artificial Sequence: Synthetic oligonucleotide
agcuaaccguuccaagaau

SEQ ID NO: 1039058 - RNA, 19 nt, Artificial Sequence
  Description of Artificial Sequence: Synthetic oligonucleotide
gaacguacccagccucuuc

SEQ ID NO: 1039059 - RNA, 19 nt, Artificial Sequence
  Description of Artificial Sequence: Synthetic oligonucleotide
guaccagcaggccaaguua

SEQ ID NO: 1039060 - RNA, 19 nt, Artificial Sequence
  Description of Artificial Sequence: Synthetic oligonucleotide
uaaccaguccggcuccaua

SEQ ID NO: 1039061 - RNA, 19 nt, Artificial Sequence
  Description of Artificial Sequence: Synthetic oligonucleotide
auaaugaguguggaacgua

SEQ ID NO: 1039062 - RNA, 19 nt, Artificial Sequence
  Description of Artificial Sequence: Synthetic oligonucleotide
gcauucaauugacauacaa

SEQ ID NO: 1039063 - RNA, 19 nt, Artificial Sequence
  Description of Artificial Sequence: Synthetic oligonucleotide
gacauacaaggcaaccaaa

SEQ ID NO: 1039064 - RNA, 19 nt, Artificial Sequence
  Description of Artificial Sequence: Synthetic oligonucleotide
ucagucccacuagauuuga

SEQ ID NO: 1039065 - RNA, 19 nt, Artificial Sequence
  Description of Artificial Sequence: Synthetic oligonucleotide
auaugaaggccaacggcaa

SEQ ID NO: 1039066 - RNA, 19 nt, Artificial Sequence
  Description of Artificial Sequence: Synthetic oligonucleotide
uucucccaguggauuuuac

SEQ ID NO: 1039067 - RNA, 19 nt, Artificial Sequence
  Description of Artificial Sequence: Synthetic oligonucleotide
guagcgcaacaaucuuaag

SEQ ID NO: 1039068 - RNA, 19 nt, Artificial Sequence
  Description of Artificial Sequence: Synthetic oligonucleotide
cuaucuaaguaagggagcu

SEQ ID NO: 1039069 - RNA, 19 nt, Artificial Sequence
  Description of Artificial Sequence: Synthetic oligonucleotide
acuaaacuucaaaccacaa

SEQ ID NO: 1039070 - RNA, 19 nt, Artificial Sequence
  Description of Artificial Sequence: Synthetic oligonucleotide
acguacccagccucuucuc

SEQ ID NO: 1039071 - RNA, 19 nt, Artificial Sequence
  Description of Artificial Sequence: Synthetic oligonucleotide
uucgucccagucagauucu

SEQ ID NO: 1039072 - RNA, 19 nt, Artificial Sequence
  Description of Artificial Sequence: Synthetic oligonucleotide
agguauguacugagaaaca

SEQ ID NO: 1039073 - RNA, 19 nt, Artificial Sequence
  Description of Artificial Sequence: Synthetic oligonucleotide
agcaagccaugucccaggu

SEQ ID NO: 1039074 - RNA, 19 nt, Artificial Sequence
  Description of Artificial Sequence: Synthetic oligonucleotide
ucauuguugcugcgccguc

SEQ ID NO: 1039075 - RNA, 19 nt, Artificial Sequence
  Description of Artificial Sequence: Synthetic oligonucleotide
guauuggaguagcgcaaca

SEQ ID NO: 1039076 - RNA, 19 nt, Artificial Sequence
  Description of Artificial Sequence: Synthetic oligonucleotide
cagugucuugagaacucuc

SEQ ID NO: 1039077 - RNA, 19 nt, Artificial Sequence
  Description of Artificial Sequence: Synthetic oligonucleotide
caugucucagagcauacau

SEQ ID NO: 1039078 - RNA, 19 nt, Artificial Sequence
  Description of Artificial Sequence: Synthetic oligonucleotide
aaccgccacauugguaagu

SEQ ID NO: 1039079 - RNA, 19 nt, Artificial Sequence
  Description of Artificial Sequence: Synthetic oligonucleotide
guugaaagugccuguccgu

SEQ ID NO: 1039080 - RNA, 19 nt, Artificial Sequence
  Description of Artificial Sequence: Synthetic oligonucleotide
gaacaagccccagcaucgc

SEQ ID NO: 1039081 - RNA, 19 nt, Artificial Sequence
  Description of Artificial Sequence: Synthetic oligonucleotide
gccaaccacauaacaaugc

SEQ ID NO: 1039082 - RNA, 19 nt, Artificial Sequence
  Description of Artificial Sequence: Synthetic oligonucleotide
auaugaccugcccuuccuu

SEQ ID NO: 1039083 - RNA, 19 nt, Artificial Sequence
  Description of Artificial Sequence: Synthetic oligonucleotide
agccaugucccagguaugu

SEQ ID NO: 1039084 - RNA, 19 nt, Artificial Sequence
  Description of Artificial Sequence: Synthetic oligonucleotide
caguggauuuuacccacca

SEQ ID NO: 1039085 - RNA, 19 nt, Artificial Sequence
  Description of Artificial Sequence: Synthetic oligonucleotide
agacugcaccccaagacau

SEQ ID NO: 1039086 - RNA, 19 nt, Artificial Sequence
  Description of Artificial Sequence: Synthetic oligonucleotide
gauaaccauuccaaauuau

SEQ ID NO: 1039087 - RNA, 19 nt, Artificial Sequence
  Description of Artificial Sequence: Synthetic oligonucleotide
ggacaaauugcucaugguu

SEQ ID NO: 1039088 - RNA, 19 nt, Artificial Sequence
  Description of Artificial Sequence: Synthetic oligonucleotide
ucuucgucccagucagauu

SEQ ID NO: 1039089 - RNA, 19 nt, Artificial Sequence
  Description of Artificial Sequence: Synthetic oligonucleotide
uccauaugaccugcccuuc

SEQ ID NO: 1039090 - RNA, 19 nt, Artificial Sequence
  Description of Artificial Sequence: Synthetic oligonucleotide
uacgucccuaaagugcuua

SEQ ID NO: 1039091 - RNA, 19 nt, Artificial Sequence
  Description of Artificial Sequence: Synthetic oligonucleotide
gauuugacccugccuugua

SEQ ID NO: 1039092 - RNA, 19 nt, Artificial Sequence
  Description of Artificial Sequence: Synthetic oligonucleotide
caaguuaaccaguccggcu

SEQ ID NO: 1039093 - RNA, 19 nt, Artificial Sequence
  Description of Artificial Sequence: Synthetic oligonucleotide
ucgaggcaaacaacacauu

SEQ ID NO: 1039094 - RNA, 19 nt, Artificial Sequence
  Description of Artificial Sequence: Synthetic oligonucleotide
aagccaugucccagguaug

SEQ ID NO: 1039095 - RNA, 19 nt, Artificial Sequence
  Description of Artificial Sequence: Synthetic oligonucleotide
gaaagugccuguccguauu

SEQ ID NO: 1039096 - RNA, 19 nt, Artificial Sequence
  Description of Artificial Sequence: Synthetic oligonucleotide
caucgcaguggcuuguucu

SEQ ID NO: 1039097 - RNA, 19 nt, Artificial Sequence
  Description of Artificial Sequence: Synthetic oligonucleotide
gguagccccauuagcaaac

SEQ ID NO: 1039098 - RNA, 19 nt, Artificial Sequence
  Description of Artificial Sequence: Synthetic oligonucleotide
ggaauuguacgucccuaaa

SEQ ID NO: 1039099 - RNA, 19 nt, Artificial Sequence
  Description of Artificial Sequence: Synthetic oligonucleotide
aguguccauguugucacua

SEQ ID NO: 1039100 - RNA, 19 nt, Artificial Sequence
  Description of Artificial Sequence: Synthetic oligonucleotide
gagggaauuguacgucccu

SEQ ID NO: 1039101 - RNA, 19 nt, Artificial Sequence
  Description of Artificial Sequence: Synthetic oligonucleotide
guggcuuguucuuccuaga

SEQ ID NO: 1039102 - RNA, 19 nt, Artificial Sequence
  Description of Artificial Sequence: Synthetic oligonucleotide
gggaaguucugaagagaag

SEQ ID NO: 1039103 - RNA, 19 nt, Artificial Sequence
  Description of Artificial Sequence: Synthetic oligonucleotide
  modified_base (19)..(19): a, c, u, g, unknown or other
aucuugcguccacuauacn

SEQ ID NO: 1039104 - RNA, 19 nt, Artificial Sequence
  Description of Artificial Sequence: Synthetic oligonucleotide
caugucccagguauguacu

SEQ ID NO: 1039105 - RNA, 19 nt, Artificial Sequence
  Description of Artificial Sequence: Synthetic oligonucleotide
gggaauuguacgucccuaa

SEQ ID NO: 1039106 - RNA, 19 nt, Artificial Sequence
  Description of Artificial Sequence: Synthetic oligonucleotide
agggaauuguacgucccua

SEQ ID NO: 1039107 - RNA, 19 nt, Artificial Sequence
  Description of Artificial Sequence: Synthetic oligonucleotide
gggacaucauuugacaaua

SEQ ID NO: 1039108 - RNA, 19 nt, Artificial Sequence
  Description of Artificial Sequence: Synthetic oligonucleotide
cagaucauuuacucuacuu

SEQ ID NO: 1039109 - RNA, 19 nt, Artificial Sequence
  Description of Artificial Sequence: Synthetic oligonucleotide
aguugguaucagaggguga

SEQ ID NO: 1039110 - RNA, 19 nt, Artificial Sequence
  Description of Artificial Sequence: Synthetic oligonucleotide
ccagcaggccaaguuaacc

SEQ ID NO: 1039111 - RNA, 19 nt, Artificial Sequence
  Description of Artificial Sequence: Synthetic oligonucleotide
caugguuaagaugggacau

SEQ ID NO: 1039112 - RNA, 19 nt, Artificial Sequence
  Description of Artificial Sequence: Synthetic oligonucleotide
augucucagagcauacauu

SEQ ID NO: 1039113 - RNA, 19 nt, Artificial Sequence
  Description of Artificial Sequence: Synthetic oligonucleotide
cuagagaacugugaacuau

SEQ ID NO: 1039114 - RNA, 19 nt, Artificial Sequence
  Description of Artificial Sequence: Synthetic oligonucleotide
ggaaagcuaaccguuccaa

SEQ ID NO: 1039115 - RNA, 19 nt, Artificial Sequence
  Description of Artificial Sequence: Synthetic oligonucleotide
cagucccacuagauuugac

SEQ ID NO: 1039116 - RNA, 19 nt, Artificial Sequence
  Description of Artificial Sequence: Synthetic oligonucleotide
ugguugcuccuugugugau

SEQ ID NO: 1039117 - RNA, 19 nt, Artificial Sequence
  Description of Artificial Sequence: Synthetic oligonucleotide
acgucccuaaagugcuuau

SEQ ID NO: 1039118 - RNA, 19 nt, Artificial Sequence
  Description of Artificial Sequence: Synthetic oligonucleotide
ccauaugaccugcccuucc

SEQ ID NO: 1039119 - RNA, 19 nt, Artificial Sequence
  Description of Artificial Sequence: Synthetic oligonucleotide
gguagccaggaaauaauua

SEQ ID NO: 1039120 - RNA, 19 nt, Artificial Sequence
  Description of Artificial Sequence: Synthetic oligonucleotide
gcaagcuguaagauacuca

SEQ ID NO: 1039121 - RNA, 19 nt, Artificial Sequence
  Description of Artificial Sequence: Synthetic oligonucleotide
cauaugaccugcccuuccu

SEQ ID NO: 1039122 - RNA, 19 nt, Artificial Sequence
  Description of Artificial Sequence: Synthetic oligonucleotide
gaccugcccuuccuuucac

SEQ ID NO: 1039123 - RNA, 19 nt, Artificial Sequence
  Description of Artificial Sequence: Synthetic oligonucleotide
ccaguggauuuuacccacc

SEQ ID NO: 1039124 - RNA, 19 nt, Artificial Sequence
  Description of Artificial Sequence: Synthetic oligonucleotide
gcuaaccguuccaagaaua

SEQ ID NO: 1039125 - RNA, 19 nt, Artificial Sequence
  Description of Artificial Sequence: Synthetic oligonucleotide
caacggcaaacagggcaac

SEQ ID NO: 1039126 - RNA, 19 nt, Artificial Sequence
  Description of Artificial Sequence: Synthetic oligonucleotide
guagccccauuagcaaaca

SEQ ID NO: 1039127 - RNA, 19 nt, Artificial Sequence
  Description of Artificial Sequence: Synthetic oligonucleotide
ggcaacagugucggccucc

SEQ ID NO: 1039128 - RNA, 19 nt, Artificial Sequence
  Description of Artificial Sequence: Synthetic oligonucleotide
cguacccagccucuucucc

SEQ ID NO: 1039129 - RNA, 19 nt, Artificial Sequence
  Description of Artificial Sequence: Synthetic oligonucleotide
cccauuagcaaacauccau

SEQ ID NO: 1039130 - RNA, 19 nt, Artificial Sequence
  Description of Artificial Sequence: Synthetic oligonucleotide
ggacagacauaaugagugu

SEQ ID NO: 1039131 - RNA, 19 nt, Artificial Sequence
  Description of Artificial Sequence: Synthetic oligonucleotide
gucuucgucccagucagau

SEQ ID NO: 1039132 - RNA, 19 nt, Artificial Sequence
  Description of Artificial Sequence: Synthetic oligonucleotide
ccguuccaagaauaaguca

SEQ ID NO: 1039133 - RNA, 19 nt, Artificial Sequence
  Description of Artificial Sequence: Synthetic oligonucleotide
gcuccauaucuucauuagu

SEQ ID NO: 1039134 - RNA, 19 nt, Artificial Sequence
  Description of Artificial Sequence: Synthetic oligonucleotide
gcaaucggguggaagaggu

SEQ ID NO: 1039135 - RNA, 19 nt, Artificial Sequence
  Description of Artificial Sequence: Synthetic oligonucleotide
caguucagucccacuagau

SEQ ID NO: 1039136 - RNA, 19 nt, Artificial Sequence
  Description of Artificial Sequence: Synthetic oligonucleotide
ucgucccagucagauucua

SEQ ID NO: 1039137 - RNA, 19 nt, Artificial Sequence
  Description of Artificial Sequence: Synthetic oligonucleotide
gcuggucuggcaauauuua

SEQ ID NO: 1039138 - RNA, 19 nt, Artificial Sequence
  Description of Artificial Sequence: Synthetic oligonucleotide
ccaguucagucccacuaga

SEQ ID NO: 1039139 - RNA, 19 nt, Artificial Sequence
  Description of Artificial Sequence: Synthetic oligonucleotide
caaucggguggaagaggua

SEQ ID NO: 1039140 - RNA, 19 nt, Artificial Sequence
  Description of Artificial Sequence: Synthetic oligonucleotide
ggaguagcgcaacaaucuu

SEQ ID NO: 1039141 - RNA, 19 nt, Artificial Sequence
  Description of Artificial Sequence: Synthetic oligonucleotide
ccuagagaacugugaacua

SEQ ID NO: 1039142 - RNA, 19 nt, Artificial Sequence
  Description of Artificial Sequence: Synthetic oligonucleotide
gcgcaacaaucuuaagcua

SEQ ID NO: 1039143 - RNA, 19 nt, Artificial Sequence
  Description of Artificial Sequence: Synthetic oligonucleotide
cgcaacaaucuuaagcuau

SEQ ID NO: 1039144 - RNA, 19 nt, Artificial Sequence
  Description of Artificial Sequence: Synthetic oligonucleotide
agcaucgcaguggcuuguu

SEQ ID NO: 1039145 - RNA, 19 nt, Artificial Sequence
  Description of Artificial Sequence: Synthetic oligonucleotide
gcaucgcaguggcuuguuc

SEQ ID NO: 1039146 - RNA, 19 nt, Artificial Sequence
  Description of Artificial Sequence: Synthetic oligonucleotide
gcccugacccaugaagcca

SEQ ID NO: 1039147 - RNA, 19 nt, Artificial Sequence
  Description of Artificial Sequence: Synthetic oligonucleotide
gagaagcaaucggguggaa

SEQ ID NO: 1039148 - RNA, 19 nt, Artificial Sequence
  Description of Artificial Sequence: Synthetic oligonucleotide
gaccacaagguagccccau

SEQ ID NO: 1039149 - RNA, 19 nt, Artificial Sequence
  Description of Artificial Sequence: Synthetic oligonucleotide
cgucccuaaagugcuuaug

SEQ ID NO: 1039150 - RNA, 19 nt, Artificial Sequence
  Description of Artificial Sequence: Synthetic oligonucleotide
gucugcccugacccaugaa

SEQ ID NO: 1039151 - RNA, 19 nt, Artificial Sequence
  Description of Artificial Sequence: Synthetic oligonucleotide
ccaguccggcuccauaucu

SEQ ID NO: 1039152 - RNA, 19 nt, Artificial Sequence
  Description of Artificial Sequence: Synthetic oligonucleotide
cgccacauugguaaguuuu

SEQ ID NO: 1039153 - RNA, 19 nt, Artificial Sequence
  Description of Artificial Sequence: Synthetic oligonucleotide
guugugcaaauggcugcuu

SEQ ID NO: 1039154 - RNA, 19 nt, Artificial Sequence
  Description of Artificial Sequence: Synthetic oligonucleotide
gguuaagaugggacaucau

SEQ ID NO: 1039155 - RNA, 19 nt, Artificial Sequence
  Description of Artificial Sequence: Synthetic oligonucleotide
gccuguccguauuccaaau

SEQ ID NO: 1039156 - RNA, 19 nt, Artificial Sequence
  Description of Artificial Sequence: Synthetic oligonucleotide
  modified_base (13)..(13): a, c, u, g, unknown or other
cguccacuauacncuuuaa

SEQ ID NO: 1039157 - RNA, 19 nt, Artificial Sequence
  Description of Artificial Sequence: Synthetic oligonucleotide
gccuccagccaaccacaua

SEQ ID NO: 1039158 - RNA, 19 nt, Artificial Sequence
  Description of Artificial Sequence: Synthetic oligonucleotide
guguaccagcaggccaagu

SEQ ID NO: 1039159 - RNA, 19 nt, Artificial Sequence
  Description of Artificial Sequence: Synthetic oligonucleotide
ggucuucgucccagucaga

SEQ ID NO: 1039160 - RNA, 19 nt, Artificial Sequence
  Description of Artificial Sequence: Synthetic oligonucleotide
cccuuuagauguacuuguu

SEQ ID NO: 1039161 - RNA, 19 nt, Artificial Sequence
  Description of Artificial Sequence: Synthetic oligonucleotide
cagcaucgcaguggcuugu

SEQ ID NO: 1039162 - RNA, 19 nt, Artificial Sequence
  Description of Artificial Sequence: Synthetic oligonucleotide
ggaacguacccagccucuu

SEQ ID NO: 1039163 - RNA, 19 nt, Artificial Sequence
  Description of Artificial Sequence: Synthetic oligonucleotide
guacgucccuaaagugcuu

SEQ ID NO: 1039164 - RNA, 19 nt, Artificial Sequence
  Description of Artificial Sequence: Synthetic oligonucleotide
cgccgucucuucuucucaa

SEQ ID NO: 1039165 - RNA, 19 nt, Artificial Sequence
  Description of Artificial Sequence: Synthetic oligonucleotide
ccggcuccauaucuucauu

SEQ ID NO: 1039166 - RNA, 19 nt, Artificial Sequence
  Description of Artificial Sequence: Synthetic oligonucleotide
ccagucccacagacuugau

SEQ ID NO: 1039167 - RNA, 19 nt, Artificial Sequence
  Description of Artificial Sequence: Synthetic oligonucleotide
aauacuggaacucugccuc

SEQ ID NO: 1039168 - RNA, 19 nt, Artificial Sequence
  Description of Artificial Sequence: Synthetic oligonucleotide
aaagauguaacucgccagg

SEQ ID NO: 1039169 - RNA, 19 nt, Artificial Sequence
  Description of Artificial Sequence: Synthetic oligonucleotide
aaguauagaauagucugcc

SEQ ID NO: 1039170 - RNA, 19 nt, Artificial Sequence
  Description of Artificial Sequence: Synthetic oligonucleotide
uucgccaaggucaaaauag

SEQ ID NO: 1039171 - RNA, 19 nt, Artificial Sequence
  Description of Artificial Sequence: Synthetic oligonucleotide
ugucgaaagauguaacucg

SEQ ID NO: 1039172 - RNA, 19 nt, Artificial Sequence
  Description of Artificial Sequence: Synthetic oligonucleotide
agaauugcaaucuccaaag

SEQ ID NO: 1039173 - RNA, 19 nt, Artificial Sequence
  Description of Artificial Sequence: Synthetic oligonucleotide
aacacccacaucuaaaucu

SEQ ID NO: 1039174 - RNA, 19 nt, Artificial Sequence
  Description of Artificial Sequence: Synthetic oligonucleotide
caagucacuaguuucauag

SEQ ID NO: 1039175 - RNA, 19 nt, Artificial Sequence
  Description of Artificial Sequence: Synthetic oligonucleotide
agaaccuugauuauguugg

SEQ ID NO: 1039176 - RNA, 19 nt, Artificial Sequence
  Description of Artificial Sequence: Synthetic oligonucleotide
uagagugugacucccaaag

SEQ ID NO: 1039177 - RNA, 19 nt, Artificial Sequence
  Description of Artificial Sequence: Synthetic oligonucleotide
cuuugugugagccacuucg

SEQ ID NO: 1039178 - RNA, 19 nt, Artificial Sequence
  Description of Artificial Sequence: Synthetic oligonucleotide
ugguaaaggaacaauguga

SEQ ID NO: 1039179 - RNA, 19 nt, Artificial Sequence
  Description of Artificial Sequence: Synthetic oligonucleotide
auauccagaaccuugauua

SEQ ID NO: 1039180 - RNA, 19 nt, Artificial Sequence
  Description of Artificial Sequence: Synthetic oligonucleotide
aaacuguauacucagucgu

SEQ ID NO: 1039181 - RNA, 19 nt, Artificial Sequence
  Description of Artificial Sequence: Synthetic oligonucleotide
aaugacugccuccaugguc

SEQ ID NO: 1039182 - RNA, 19 nt, Artificial Sequence
  Description of Artificial Sequence: Synthetic oligonucleotide
uucacuucaaacuguauac

SEQ ID NO: 1039183 - RNA, 19 nt, Artificial Sequence
  Description of Artificial Sequence: Synthetic oligonucleotide
ucuaucaacuuaauuguga

SEQ ID NO: 1039184 - RNA, 19 nt, Artificial Sequence
  Description of Artificial Sequence: Synthetic oligonucleotide
ucagaggauaccaaagcag

SEQ ID NO: 1039185 - RNA, 19 nt, Artificial Sequence
  Description of Artificial Sequence: Synthetic oligonucleotide
uuaauugugaaguccucag

SEQ ID NO: 1039186 - RNA, 19 nt, Artificial Sequence
  Description of Artificial Sequence: Synthetic oligonucleotide
aauccaacaaucuuaccaa

SEQ ID NO: 1039187 - RNA, 19 nt, Artificial Sequence
  Description of Artificial Sequence: Synthetic oligonucleotide
agaauacuggaacucugcc

SEQ ID NO: 1039188 - RNA, 19 nt, Artificial Sequence
  Description of Artificial Sequence: Synthetic oligonucleotide
cuugcagcugauaacaagc

SEQ ID NO: 1039189 - RNA, 19 nt, Artificial Sequence
  Description of Artificial Sequence: Synthetic oligonucleotide
uuaggagcaacaucucucg

SEQ ID NO: 1039190 - RNA, 19 nt, Artificial Sequence
  Description of Artificial Sequence: Synthetic oligonucleotide
uguauacucagucguaagc

SEQ ID NO: 1039191 - RNA, 19 nt, Artificial Sequence
  Description of Artificial Sequence: Synthetic oligonucleotide
gauuauguuggcauguucc

SEQ ID NO: 1039192 - RNA, 19 nt, Artificial Sequence
  Description of Artificial Sequence: Synthetic oligonucleotide
guuugcaagguucacaggc

SEQ ID NO: 1039193 - RNA, 19 nt, Artificial Sequence
  Description of Artificial Sequence: Synthetic oligonucleotide
aucaacuuaauugugaagu

SEQ ID NO: 1039194 - RNA, 19 nt, Artificial Sequence
  Description of Artificial Sequence: Synthetic oligonucleotide
ucaccuagaauacuggaac

SEQ ID NO: 1039195 - RNA, 19 nt, Artificial Sequence
  Description of Artificial Sequence: Synthetic oligonucleotide
caaacuguauacucagucg

SEQ ID NO: 1039196 - RNA, 19 nt, Artificial Sequence
  Description of Artificial Sequence: Synthetic oligonucleotide
ucaaacuguauacucaguc

SEQ ID NO: 1039197 - RNA, 19 nt, Artificial Sequence
  Description of Artificial Sequence: Synthetic oligonucleotide
uaacaagccacuuucuggc

SEQ ID NO: 1039198 - RNA, 19 nt, Artificial Sequence
  Description of Artificial Sequence: Synthetic oligonucleotide
ucguaagccaucucggugg

SEQ ID NO: 1039199 - RNA, 19 nt, Artificial Sequence
  Description of Artificial Sequence: Synthetic oligonucleotide
gauguaacucgccaggggc

SEQ ID NO: 1039200 - RNA, 19 nt, Artificial Sequence
  Description of Artificial Sequence: Synthetic oligonucleotide
gaaagauguaacucgccag

SEQ ID NO: 1039201 - RNA, 19 nt, Artificial Sequence
  Description of Artificial Sequence: Synthetic oligonucleotide
  modified_base (7)..(7): a, c, u, g, unknown or other
cuuugunugcuccuucucc

SEQ ID NO: 1039202 - RNA, 19 nt, Artificial Sequence
  Description of Artificial Sequence: Synthetic oligonucleotide
acuaguuucauaguguuca

SEQ ID NO: 1039203 - RNA, 19 nt, Artificial Sequence
  Description of Artificial Sequence: Synthetic oligonucleotide
aauaggugccaguuaggag

SEQ ID NO: 1039204 - RNA, 19 nt, Artificial Sequence
  Description of Artificial Sequence: Synthetic oligonucleotide
aaagauaaguguauagagu

SEQ ID NO: 1039205 - RNA, 19 nt, Artificial Sequence
  Description of Artificial Sequence: Synthetic oligonucleotide
aauugcaaucuccaaagua

SEQ ID NO: 1039206 - RNA, 19 nt, Artificial Sequence
  Description of Artificial Sequence: Synthetic oligonucleotide
gauaacaagccacuuucug

SEQ ID NO: 1039207 - RNA, 19 nt, Artificial Sequence
  Description of Artificial Sequence: Synthetic oligonucleotide
gaucuggacacucagucug

SEQ ID NO: 1039208 - RNA, 19 nt, Artificial Sequence
  Description of Artificial Sequence: Synthetic oligonucleotide
gauaaguguauagagugug

SEQ ID NO: 1039209 - RNA, 19 nt, Artificial Sequence
  Description of Artificial Sequence: Synthetic oligonucleotide
uucagaggauaccaaagca

SEQ ID NO: 1039210 - RNA, 19 nt, Artificial Sequence
  Description of Artificial Sequence: Synthetic oligonucleotide
ucucgcugaguucagaugu

SEQ ID NO: 1039211 - RNA, 19 nt, Artificial Sequence
  Description of Artificial Sequence: Synthetic oligonucleotide
caaagcuggaucgagagag

SEQ ID NO: 1039212 - RNA, 19 nt, Artificial Sequence
  Description of Artificial Sequence: Synthetic oligonucleotide
uccaaagcuggaucgagag

SEQ ID NO: 1039213 - RNA, 19 nt, Artificial Sequence
  Description of Artificial Sequence: Synthetic oligonucleotide
aagaccacaucuccagcuc

SEQ ID NO: 1039214 - RNA, 19 nt, Artificial Sequence
  Description of Artificial Sequence: Synthetic oligonucleotide
caacaaucuuaccaaaacc

SEQ ID NO: 1039215 - RNA, 19 nt, Artificial Sequence
  Description of Artificial Sequence: Synthetic oligonucleotide
uccaucacuagcuggaaga

SEQ ID NO: 1039216 - RNA, 19 nt, Artificial Sequence
  Description of Artificial Sequence: Synthetic oligonucleotide
uagaauacuggaacucugc

SEQ ID NO: 1039217 - RNA, 19 nt, Artificial Sequence
  Description of Artificial Sequence: Synthetic oligonucleotide
caauccaacaaucuuacca

SEQ ID NO: 1039218 - RNA, 19 nt, Artificial Sequence
  Description of Artificial Sequence: Synthetic oligonucleotide
aacccuuugugugagccac

SEQ ID NO: 1039219 - RNA, 19 nt, Artificial Sequence
  Description of Artificial Sequence: Synthetic oligonucleotide
aguaacuuuuccaaguuug

SEQ ID NO: 1039220 - RNA, 19 nt, Artificial Sequence
  Description of Artificial Sequence: Synthetic oligonucleotide
  modified_base (6)..(6): a, c, u, g, unknown or other
uuugunugcuccuucucca

SEQ ID NO: 1039221 - RNA, 19 nt, Artificial Sequence
  Description of Artificial Sequence: Synthetic oligonucleotide
guagacgugaucuggacac

SEQ ID NO: 1039222 - RNA, 19 nt, Artificial Sequence
  Description of Artificial Sequence: Synthetic oligonucleotide
ugagccgaaaucuaucaac

SEQ ID NO: 1039223 - RNA, 19 nt, Artificial Sequence
  Description of Artificial Sequence: Synthetic oligonucleotide
caagcuccaaacuugcagc

SEQ ID NO: 1039224 - RNA, 19 nt, Artificial Sequence
  Description of Artificial Sequence: Synthetic oligonucleotide
aaauaggugccaguuagga

SEQ ID NO: 1039225 - RNA, 19 nt, Artificial Sequence
  Description of Artificial Sequence: Synthetic oligonucleotide
agugugacucccaaagacc

SEQ ID NO: 1039226 - RNA, 19 nt, Artificial Sequence
  Description of Artificial Sequence: Synthetic oligonucleotide
ccaaggucaaaauaggugc

SEQ ID NO: 1039227 - RNA, 19 nt, Artificial Sequence
  Description of Artificial Sequence: Synthetic oligonucleotide
uccacagaaaguauagaau

SEQ ID NO: 1039228 - RNA, 19 nt, Artificial Sequence
  Description of Artificial Sequence: Synthetic oligonucleotide
ggcacauaccaucagaacc

SEQ ID NO: 1039229 - RNA, 19 nt, Artificial Sequence
  Description of Artificial Sequence: Synthetic oligonucleotide
cucaauccaacaaucuuac

SEQ ID NO: 1039230 - RNA, 19 nt, Artificial Sequence
  Description of Artificial Sequence: Synthetic oligonucleotide
gagugugacucccaaagac

SEQ ID NO: 1039231 - RNA, 19 nt, Artificial Sequence
  Description of Artificial Sequence: Synthetic oligonucleotide
aagauguaacucgccaggg

SEQ ID NO: 1039232 - RNA, 19 nt, Artificial Sequence
  Description of Artificial Sequence: Synthetic oligonucleotide
caucgaaacccuuugugug

SEQ ID NO: 1039233 - RNA, 19 nt, Artificial Sequence
  Description of Artificial Sequence: Synthetic oligonucleotide
acaggaguagacgugaucu

SEQ ID NO: 1039234 - RNA, 19 nt, Artificial Sequence
  Description of Artificial Sequence: Synthetic oligonucleotide
guauacucagucguaagcc

SEQ ID NO: 1039235 - RNA, 19 nt, Artificial Sequence
  Description of Artificial Sequence: Synthetic oligonucleotide
aagcccaguuagaagauuc

SEQ ID NO: 1039236 - RNA, 19 nt, Artificial Sequence
  Description of Artificial Sequence: Synthetic oligonucleotide
agauguaacucgccagggg

SEQ ID NO: 1039237 - RNA, 19 nt, Artificial Sequence
  Description of Artificial Sequence: Synthetic oligonucleotide
uuugcaagguucacaggcu

SEQ ID NO: 1039238 - RNA, 19 nt, Artificial Sequence
  Description of Artificial Sequence: Synthetic oligonucleotide
acaucuaaaucugagccca

SEQ ID NO: 1039239 - RNA, 19 nt, Artificial Sequence
  Description of Artificial Sequence: Synthetic oligonucleotide
acuucgcuuggacucuugc

SEQ ID NO: 1039240 - RNA, 19 nt, Artificial Sequence
  Description of Artificial Sequence: Synthetic oligonucleotide
uauagagugugacucccaa

SEQ ID NO: 1039241 - RNA, 19 nt, Artificial Sequence
  Description of Artificial Sequence: Synthetic oligonucleotide
caucucuugggaacugucg

SEQ ID NO: 1039242 - RNA, 19 nt, Artificial Sequence
  Description of Artificial Sequence: Synthetic oligonucleotide
caugcuuuuccaucacuag

SEQ ID NO: 1039243 - RNA, 19 nt, Artificial Sequence
  Description of Artificial Sequence: Synthetic oligonucleotide
uccaaguuugggauccuca

SEQ ID NO: 1039244 - RNA, 19 nt, Artificial Sequence
  Description of Artificial Sequence: Synthetic oligonucleotide
cuggcaaggaucaggcggg

SEQ ID NO: 1039245 - RNA, 19 nt, Artificial Sequence
  Description of Artificial Sequence: Synthetic oligonucleotide
cacgcuucacuucaaacug

SEQ ID NO: 1039246 - RNA, 19 nt, Artificial Sequence
  Description of Artificial Sequence: Synthetic oligonucleotide
uagguaggcagcugagccg

SEQ ID NO: 1039247 - RNA, 19 nt, Artificial Sequence
  Description of Artificial Sequence: Synthetic oligonucleotide
aggauaccaaagcaguucu

SEQ ID NO: 1039248 - RNA, 19 nt, Artificial Sequence
  Description of Artificial Sequence: Synthetic oligonucleotide
cuagaauacuggaacucug

SEQ ID NO: 1039249 - RNA, 19 nt, Artificial Sequence
  Description of Artificial Sequence: Synthetic oligonucleotide
aucgagagagcucaggcau

SEQ ID NO: 1039250 - RNA, 19 nt, Artificial Sequence
  Description of Artificial Sequence: Synthetic oligonucleotide
gcuggcaaggaucaggcgg

SEQ ID NO: 1039251 - RNA, 19 nt, Artificial Sequence
  Description of Artificial Sequence: Synthetic oligonucleotide
cuuaccaaaaccuucuccu

SEQ ID NO: 1039252 - RNA, 19 nt, Artificial Sequence
  Description of Artificial Sequence: Synthetic oligonucleotide
aguuaggagcaacaucucu

SEQ ID NO: 1039253 - RNA, 19 nt, Artificial Sequence
  Description of Artificial Sequence: Synthetic oligonucleotide
uaguguucagaggauacca

SEQ ID NO: 1039254 - RNA, 19 nt, Artificial Sequence
  Description of Artificial Sequence: Synthetic oligonucleotide
ucgaaagauguaacucgcc

SEQ ID NO: 1039255 - RNA, 19 nt, Artificial Sequence
  Description of Artificial Sequence: Synthetic oligonucleotide
agggauucuccucaaagau

SEQ ID NO: 1039256 - RNA, 19 nt, Artificial Sequence
  Description of Artificial Sequence: Synthetic oligonucleotide
gauccacucguuccuauac

SEQ ID NO: 1039257 - RNA, 19 nt, Artificial Sequence
  Description of Artificial Sequence: Synthetic oligonucleotide
uugucgaaagauguaacuc

SEQ ID NO: 1039258 - RNA, 19 nt, Artificial Sequence
  Description of Artificial Sequence: Synthetic oligonucleotide
aggcacauaccaucagaac

SEQ ID NO: 1039259 - RNA, 19 nt, Artificial Sequence
  Description of Artificial Sequence: Synthetic oligonucleotide
  modified_base (4)..(4): a, c, u, g, unknown or other
ugunugcuccuucuccacu

SEQ ID NO: 1039260 - RNA, 19 nt, Artificial Sequence
  Description of Artificial Sequence: Synthetic oligonucleotide
aggaguagacgugaucugg

SEQ ID NO: 1039261 - RNA, 19 nt, Artificial Sequence
  Description of Artificial Sequence: Synthetic oligonucleotide
cagucguaagccaucucgg

SEQ ID NO: 1039262 - RNA, 19 nt, Artificial Sequence
  Description of Artificial Sequence: Synthetic oligonucleotide
aagcuccaaacuugcagcu

SEQ ID NO: 1039263 - RNA, 19 nt, Artificial Sequence
  Description of Artificial Sequence: Synthetic oligonucleotide
ugugaucagcuucucuaga

SEQ ID NO: 1039264 - RNA, 19 nt, Artificial Sequence
  Description of Artificial Sequence: Synthetic oligonucleotide
ucuagagugguccgcugcu

SEQ ID NO: 1039265 - RNA, 19 nt, Artificial Sequence
  Description of Artificial Sequence: Synthetic oligonucleotide
uugcaagguucacaggcug

SEQ ID NO: 1039266 - RNA, 19 nt, Artificial Sequence
  Description of Artificial Sequence: Synthetic oligonucleotide
accuagaauacuggaacuc

SEQ ID NO: 1039267 - RNA, 19 nt, Artificial Sequence
  Description of Artificial Sequence: Synthetic oligonucleotide
aguugucgaaagauguaac

SEQ ID NO: 1039268 - RNA, 19 nt, Artificial Sequence
  Description of Artificial Sequence: Synthetic oligonucleotide
cuaaaucugagcccaccac

SEQ ID NO: 1039269 - RNA, 19 nt, Artificial Sequence
  Description of Artificial Sequence: Synthetic oligonucleotide
uucuagguaggcagcugag

SEQ ID NO: 1039270 - RNA, 19 nt, Artificial Sequence
  Description of Artificial Sequence: Synthetic oligonucleotide
ucacuagcuggaagaaccc

SEQ ID NO: 1039271 - RNA, 19 nt, Artificial Sequence
  Description of Artificial Sequence: Synthetic oligonucleotide
aguagacgugaucuggaca

SEQ ID NO: 1039272 - RNA, 19 nt, Artificial Sequence
  Description of Artificial Sequence: Synthetic oligonucleotide
aguauagaauagucugccu

SEQ ID NO: 1039273 - RNA, 19 nt, Artificial Sequence
  Description of Artificial Sequence: Synthetic oligonucleotide
ugguaggcacauaccauca

SEQ ID NO: 1039274 - RNA, 19 nt, Artificial Sequence
  Description of Artificial Sequence: Synthetic oligonucleotide
aucgaaacccuuuguguga

SEQ ID NO: 1039275 - RNA, 19 nt, Artificial Sequence
  Description of Artificial Sequence: Synthetic oligonucleotide
uccucaauccaacaaucuu

SEQ ID NO: 1039276 - RNA, 19 nt, Artificial Sequence
  Description of Artificial Sequence: Synthetic oligonucleotide
cuaucaacuuaauugugaa

SEQ ID NO: 1039277 - RNA, 19 nt, Artificial Sequence
  Description of Artificial Sequence: Synthetic oligonucleotide
uccacacaaaguuggggac

SEQ ID NO: 1039278 - RNA, 19 nt, Artificial Sequence
  Description of Artificial Sequence: Synthetic oligonucleotide
aggagcaacaucucucggu

SEQ ID NO: 1039279 - RNA, 19 nt, Artificial Sequence
  Description of Artificial Sequence: Synthetic oligonucleotide
  modified_base (3)..(3): a, c, u, g, unknown or other
gunugcuccuucuccacug

SEQ ID NO: 1039280 - RNA, 19 nt, Artificial Sequence
  Description of Artificial Sequence: Synthetic oligonucleotide
aacugucgggccuucgcca

SEQ ID NO: 1039281 - RNA, 19 nt, Artificial Sequence
  Description of Artificial Sequence: Synthetic oligonucleotide
ggacucuucaaaccaaggc

SEQ ID NO: 1039282 - RNA, 19 nt, Artificial Sequence
  Description of Artificial Sequence: Synthetic oligonucleotide
uugggauccucaauccaac

SEQ ID NO: 1039283 - RNA, 19 nt, Artificial Sequence
  Description of Artificial Sequence: Synthetic oligonucleotide
gaacugucgggccuucgcc

SEQ ID NO: 1039284 - RNA, 19 nt, Artificial Sequence
  Description of Artificial Sequence: Synthetic oligonucleotide
ucuguagggguuucccaug

SEQ ID NO: 1039285 - RNA, 19 nt, Artificial Sequence
  Description of Artificial Sequence: Synthetic oligonucleotide
aguuugcaagguucacagg

SEQ ID NO: 1039286 - RNA, 19 nt, Artificial Sequence
  Description of Artificial Sequence: Synthetic oligonucleotide
gaggauaccaaagcaguuc

SEQ ID NO: 1039287 - RNA, 19 nt, Artificial Sequence
  Description of Artificial Sequence: Synthetic oligonucleotide
aaacccuuugugugagcca

SEQ ID NO: 1039288 - RNA, 19 nt, Artificial Sequence
  Description of Artificial Sequence: Synthetic oligonucleotide
caguuagaagauucauaag

SEQ ID NO: 1039289 - RNA, 19 nt, Artificial Sequence
  Description of Artificial Sequence: Synthetic oligonucleotide
gguagagcuaggcaggcug

SEQ ID NO: 1039290 - RNA, 19 nt, Artificial Sequence
  Description of Artificial Sequence: Synthetic oligonucleotide
uaggagcaacaucucucgg

SEQ ID NO: 1039291 - RNA, 19 nt, Artificial Sequence
  Description of Artificial Sequence: Synthetic oligonucleotide
cuguauacucagucguaag

SEQ ID NO: 1039292 - RNA, 19 nt, Artificial Sequence
  Description of Artificial Sequence: Synthetic oligonucleotide
cacucguuccuauacugug

SEQ ID NO: 1039293 - RNA, 19 nt, Artificial Sequence
  Description of Artificial Sequence: Synthetic oligonucleotide
caaaguaacuuuuccaagu

SEQ ID NO: 1039294 - RNA, 19 nt, Artificial Sequence
  Description of Artificial Sequence: Synthetic oligonucleotide
gaucgagagagcucaggca

SEQ ID NO: 1039295 - RNA, 19 nt, Artificial Sequence
  Description of Artificial Sequence: Synthetic oligonucleotide
accaguugucgaaagaugu

SEQ ID NO: 1039296 - RNA, 19 nt, Artificial Sequence
  Description of Artificial Sequence: Synthetic oligonucleotide
gaaccuugauuauguuggc

SEQ ID NO: 1039297 - RNA, 19 nt, Artificial Sequence
  Description of Artificial Sequence: Synthetic oligonucleotide
aacccuugguuuucaaaua

SEQ ID NO: 1039298 - RNA, 19 nt, Artificial Sequence
  Description of Artificial Sequence: Synthetic oligonucleotide
gucguaagccaucucggug

SEQ ID NO: 1039299 - RNA, 19 nt, Artificial Sequence
  Description of Artificial Sequence: Synthetic oligonucleotide
caugagaacuucgggugcg

SEQ ID NO: 1039300 - RNA, 19 nt, Artificial Sequence
  Description of Artificial Sequence: Synthetic oligonucleotide
  modified_base (2)..(2): a, c, u, g, unknown or other
gngcccaucucuugggaac

SEQ ID NO: 1039301 - RNA, 19 nt, Artificial Sequence
  Description of Artificial Sequence: Synthetic oligonucleotide
auggaguggguagagcuag

SEQ ID NO: 1039302 - RNA, 19 nt, Artificial Sequence
  Description of Artificial Sequence: Synthetic oligonucleotide
caucagaaccaggaucugg

SEQ ID NO: 1039303 - RNA, 19 nt, Artificial Sequence
  Description of Artificial Sequence: Synthetic oligonucleotide
ucaauccaacaaucuuacc

SEQ ID NO: 1039304 - RNA, 19 nt, Artificial Sequence
  Description of Artificial Sequence: Synthetic oligonucleotide
ucacuucaaacuguauacu

SEQ ID NO: 1039305 - RNA, 19 nt, Artificial Sequence
  Description of Artificial Sequence: Synthetic oligonucleotide
cuuaauugugaaguccuca

SEQ ID NO: 1039306 - RNA, 19 nt, Artificial Sequence
  Description of Artificial Sequence: Synthetic oligonucleotide
ggaucgagagagcucaggc

SEQ ID NO: 1039307 - RNA, 19 nt, Artificial Sequence
  Description of Artificial Sequence: Synthetic oligonucleotide
gauggcggucaaugaaagc

SEQ ID NO: 1039308 - RNA, 19 nt, Artificial Sequence
  Description of Artificial Sequence: Synthetic oligonucleotide
ucuagguaggcagcugagc

SEQ ID NO: 1039309 - RNA, 19 nt, Artificial Sequence
  Description of Artificial Sequence: Synthetic oligonucleotide
ccaguuagaagauucauaa

SEQ ID NO: 1039310 - RNA, 19 nt, Artificial Sequence
  Description of Artificial Sequence: Synthetic oligonucleotide
ucuuucuagguaggcagcu

SEQ ID NO: 1039311 - RNA, 19 nt, Artificial Sequence
  Description of Artificial Sequence: Synthetic oligonucleotide
ucgaaacccuuugugugag

SEQ ID NO: 1039312 - RNA, 19 nt, Artificial Sequence
  Description of Artificial Sequence: Synthetic oligonucleotide
uggaagaacccuugguuuu

SEQ ID NO: 1039313 - RNA, 19 nt, Artificial Sequence
  Description of Artificial Sequence: Synthetic oligonucleotide
cuuuggagcgcagguagcc

SEQ ID NO: 1039314 - RNA, 19 nt, Artificial Sequence
  Description of Artificial Sequence: Synthetic oligonucleotide
cagaauugcaaucuccaaa

SEQ ID NO: 1039315 - RNA, 19 nt, Artificial Sequence
  Description of Artificial Sequence: Synthetic oligonucleotide
cacacgcuucacuucaaac

SEQ ID NO: 1039316 - RNA, 19 nt, Artificial Sequence
  Description of Artificial Sequence: Synthetic oligonucleotide
ugcgcaguacucaauuguu

SEQ ID NO: 1039317 - RNA, 19 nt, Artificial Sequence
  Description of Artificial Sequence: Synthetic oligonucleotide
gcaaggaucaggcgggucc

SEQ ID NO: 1039318 - RNA, 19 nt, Artificial Sequence
  Description of Artificial Sequence: Synthetic oligonucleotide
gaucaggcggguccgggug

SEQ ID NO: 1039319 - RNA, 19 nt, Artificial Sequence
  Description of Artificial Sequence: Synthetic oligonucleotide
cucuagagugguccgcugc

SEQ ID NO: 1039320 - RNA, 19 nt, Artificial Sequence
  Description of Artificial Sequence: Synthetic oligonucleotide
gcugcuguaagauccacuc

SEQ ID NO: 1039321 - RNA, 19 nt, Artificial Sequence
  Description of Artificial Sequence: Synthetic oligonucleotide
aaccuugauuauguuggca

SEQ ID NO: 1039322 - RNA, 19 nt, Artificial Sequence
  Description of Artificial Sequence: Synthetic oligonucleotide
gaguagacgugaucuggac

SEQ ID NO: 1039323 - RNA, 19 nt, Artificial Sequence
  Description of Artificial Sequence: Synthetic oligonucleotide
uguagggguuucccaugag

SEQ ID NO: 1039324 - RNA, 19 nt, Artificial Sequence
  Description of Artificial Sequence: Synthetic oligonucleotide
uucugcccgaccacguccc

SEQ ID NO: 1039325 - RNA, 19 nt, Artificial Sequence
  Description of Artificial Sequence: Synthetic oligonucleotide
agagugugacucccaaaga

SEQ ID NO: 1039326 - RNA, 19 nt, Artificial Sequence
  Description of Artificial Sequence: Synthetic oligonucleotide
gagaaggcagcccaucgaa

SEQ ID NO: 1039327 - RNA, 19 nt, Artificial Sequence
  Description of Artificial Sequence: Synthetic oligonucleotide
  modified_base (5)..(5): a, c, u, g, unknown or other
uugunugcuccuucuccac

SEQ ID NO: 1039328 - RNA, 19 nt, Artificial Sequence
  Description of Artificial Sequence: Synthetic oligonucleotide
ugucucgcugaguucagau

SEQ ID NO: 1039329 - RNA, 19 nt, Artificial Sequence
  Description of Artificial Sequence: Synthetic oligonucleotide
aggaacaaugugauggagu

SEQ ID NO: 1039330 - RNA, 19 nt, Artificial Sequence
  Description of Artificial Sequence: Synthetic oligonucleotide
agucguaagccaucucggu

SEQ ID NO: 1039331 - RNA, 19 nt, Artificial Sequence
  Description of Artificial Sequence: Synthetic oligonucleotide
aagauccacucguuccuau

SEQ ID NO: 1039332 - RNA, 19 nt, Artificial Sequence
  Description of Artificial Sequence: Synthetic oligonucleotide
caccaguugucgaaagaug

SEQ ID NO: 1039333 - RNA, 19 nt, Artificial Sequence
  Description of Artificial Sequence: Synthetic oligonucleotide
agacaccaguugucgaaag

SEQ ID NO: 1039334 - RNA, 19 nt, Artificial Sequence
  Description of Artificial Sequence: Synthetic oligonucleotide
uguaguuugcaagguucac

SEQ ID NO: 1039335 - RNA, 19 nt, Artificial Sequence
  Description of Artificial Sequence: Synthetic oligonucleotide
acuucgggugcgcaguacu

SEQ ID NO: 1039336 - RNA, 19 nt, Artificial Sequence
  Description of Artificial Sequence: Synthetic oligonucleotide
guugucgaaagauguaacu

SEQ ID NO: 1039337 - RNA, 19 nt, Artificial Sequence
  Description of Artificial Sequence: Synthetic oligonucleotide
uacucagucguaagccauc

SEQ ID NO: 1039338 - RNA, 19 nt, Artificial Sequence
  Description of Artificial Sequence: Synthetic oligonucleotide
uggcggucaaugaaagcaa

SEQ ID NO: 1039339 - RNA, 19 nt, Artificial Sequence
  Description of Artificial Sequence: Synthetic oligonucleotide
uggcugguugguccgacac

SEQ ID NO: 1039340 - RNA, 19 nt, Artificial Sequence
  Description of Artificial Sequence: Synthetic oligonucleotide
agcccaucgaaacccuuug

SEQ ID NO: 1039341 - RNA, 19 nt, Artificial Sequence
  Description of Artificial Sequence: Synthetic oligonucleotide
caguacucaauuguuccac

SEQ ID NO: 1039342 - RNA, 19 nt, Artificial Sequence
  Description of Artificial Sequence: Synthetic oligonucleotide
acuguauacucagucguaa

SEQ ID NO: 1039343 - RNA, 19 nt, Artificial Sequence
  Description of Artificial Sequence: Synthetic oligonucleotide
  modified_base (18)..(18): a, c, u, g, unknown or other
ugcccgaccacgucccgng

SEQ ID NO: 1039344 - RNA, 19 nt, Artificial Sequence
  Description of Artificial Sequence: Synthetic oligonucleotide
ggugccacaggaguagacg

SEQ ID NO: 1039345 - RNA, 19 nt, Artificial Sequence
  Description of Artificial Sequence: Synthetic oligonucleotide
agcuaggcaggcuggcaag

SEQ ID NO: 1039346 - RNA, 19 nt, Artificial Sequence
  Description of Artificial Sequence: Synthetic oligonucleotide
ucauaguguucagaggaua

SEQ ID NO: 1039347 - RNA, 19 nt, Artificial Sequence
  Description of Artificial Sequence: Synthetic oligonucleotide
guagagcuaggcaggcugg

SEQ ID NO: 1039348 - RNA, 19 nt, Artificial Sequence
  Description of Artificial Sequence: Synthetic oligonucleotide
agacgugaucuggacacuc

SEQ ID NO: 1039349 - RNA, 19 nt, Artificial Sequence
  Description of Artificial Sequence: Synthetic oligonucleotide
auaccaucagaaccaggau

SEQ ID NO: 1039350 - RNA, 19 nt, Artificial Sequence
  Description of Artificial Sequence: Synthetic oligonucleotide
cuucccagguguaguuugc

SEQ ID NO: 1039351 - RNA, 19 nt, Artificial Sequence
  Description of Artificial Sequence: Synthetic oligonucleotide
aacuucgggugcgcaguac

SEQ ID NO: 1039352 - RNA, 19 nt, Artificial Sequence
  Description of Artificial Sequence: Synthetic oligonucleotide
cuguaagauccacucguuc

SEQ ID NO: 1039353 - RNA, 19 nt, Artificial Sequence
  Description of Artificial Sequence: Synthetic oligonucleotide
guaguuugcaagguucaca

SEQ ID NO: 1039354 - RNA, 19 nt, Artificial Sequence
  Description of Artificial Sequence: Synthetic oligonucleotide
aggugucucgcugaguuca

SEQ ID NO: 1039355 - RNA, 19 nt, Artificial Sequence
  Description of Artificial Sequence: Synthetic oligonucleotide
auaaguguauagaguguga

SEQ ID NO: 1039356 - RNA, 19 nt, Artificial Sequence
  Description of Artificial Sequence: Synthetic oligonucleotide
uggaguggguagagcuagg

SEQ ID NO: 1039357 - RNA, 19 nt, Artificial Sequence
  Description of Artificial Sequence: Synthetic oligonucleotide
agcaaucacgauguucuca

SEQ ID NO: 1039358 - RNA, 19 nt, Artificial Sequence
  Description of Artificial Sequence: Synthetic oligonucleotide
ggagcaacaucucucgguc

SEQ ID NO: 1039359 - RNA, 19 nt, Artificial Sequence
  Description of Artificial Sequence: Synthetic oligonucleotide
agaccacaucuccagcucu

SEQ ID NO: 1039360 - RNA, 19 nt, Artificial Sequence
  Description of Artificial Sequence: Synthetic oligonucleotide
gguguaguuugcaagguuc

SEQ ID NO: 1039361 - RNA, 19 nt, Artificial Sequence
  Description of Artificial Sequence: Synthetic oligonucleotide
caaaccaaggcuuggcucu

SEQ ID NO: 1039362 - RNA, 19 nt, Artificial Sequence
  Description of Artificial Sequence: Synthetic oligonucleotide
gcagcugauaacaagccac

SEQ ID NO: 1039363 - RNA, 19 nt, Artificial Sequence
  Description of Artificial Sequence: Synthetic oligonucleotide
accucgcugcuguaagauc

SEQ ID NO: 1039364 - RNA, 19 nt, Artificial Sequence
  Description of Artificial Sequence: Synthetic oligonucleotide
ugguccgacacaccucuuc

SEQ ID NO: 1039365 - RNA, 19 nt, Artificial Sequence
  Description of Artificial Sequence: Synthetic oligonucleotide
gccaaggucaaaauaggug

SEQ ID NO: 1039366 - RNA, 19 nt, Artificial Sequence
  Description of Artificial Sequence: Synthetic oligonucleotide
gucccgguggcuauguaag

SEQ ID NO: 1039367 - RNA, 19 nt, Artificial Sequence
  Description of Artificial Sequence: Synthetic oligonucleotide
cuggggaaaccaggaaugg

SEQ ID NO: 1039368 - RNA, 19 nt, Artificial Sequence
  Description of Artificial Sequence: Synthetic oligonucleotide
guaagauccacucguuccu

SEQ ID NO: 1039369 - RNA, 19 nt, Artificial Sequence
  Description of Artificial Sequence: Synthetic oligonucleotide
agcugagccgaaaucuauc

SEQ ID NO: 1039370 - RNA, 19 nt, Artificial Sequence
  Description of Artificial Sequence: Synthetic oligonucleotide
ugggauccucaauccaaca

SEQ ID NO: 1039371 - RNA, 19 nt, Artificial Sequence
  Description of Artificial Sequence: Synthetic oligonucleotide
caaggaucaggcggguccg

SEQ ID NO: 1039372 - RNA, 19 nt, Artificial Sequence
  Description of Artificial Sequence: Synthetic oligonucleotide
cacuaguuucauaguguuc

SEQ ID NO: 1039373 - RNA, 19 nt, Artificial Sequence
  Description of Artificial Sequence: Synthetic oligonucleotide
auagagugugacucccaaa

SEQ ID NO: 1039374 - RNA, 19 nt, Artificial Sequence
  Description of Artificial Sequence: Synthetic oligonucleotide
agucccgguggcuauguaa

SEQ ID NO: 1039375 - RNA, 19 nt, Artificial Sequence
  Description of Artificial Sequence: Synthetic oligonucleotide
gucucgcugaguucagaug

SEQ ID NO: 1039376 - RNA, 19 nt, Artificial Sequence
  Description of Artificial Sequence: Synthetic oligonucleotide
cagaggauaccaaagcagu

SEQ ID NO: 1039377 - RNA, 19 nt, Artificial Sequence
  Description of Artificial Sequence: Synthetic oligonucleotide
aggguugcagagcucugga

SEQ ID NO: 1039378 - RNA, 19 nt, Artificial Sequence
  Description of Artificial Sequence: Synthetic oligonucleotide
aaaccaaggcuuggcucug

SEQ ID NO: 1039379 - RNA, 19 nt, Artificial Sequence
  Description of Artificial Sequence: Synthetic oligonucleotide
uggcuauguaagagguccu

SEQ ID NO: 1039380 - RNA, 19 nt, Artificial Sequence
  Description of Artificial Sequence: Synthetic oligonucleotide
caggaguagacgugaucug

SEQ ID NO: 1039381 - RNA, 19 nt, Artificial Sequence
  Description of Artificial Sequence: Synthetic oligonucleotide
guugguccgacacaccucu

SEQ ID NO: 1039382 - RNA, 19 nt, Artificial Sequence
  Description of Artificial Sequence: Synthetic oligonucleotide
aacuguauacucagucgua

SEQ ID NO: 1039383 - RNA, 19 nt, Artificial Sequence
  Description of Artificial Sequence: Synthetic oligonucleotide
gguccgacacaccucuucc

SEQ ID NO: 1039384 - RNA, 19 nt, Artificial Sequence
  Description of Artificial Sequence: Synthetic oligonucleotide
uguaacucgccaggggcuc

SEQ ID NO: 1039385 - RNA, 19 nt, Artificial Sequence
  Description of Artificial Sequence: Synthetic oligonucleotide
uggcauguuccaccuugga

SEQ ID NO: 1039386 - RNA, 19 nt, Artificial Sequence
  Description of Artificial Sequence: Synthetic oligonucleotide
cugccucuuucuagguagg

SEQ ID NO: 1039387 - RNA, 19 nt, Artificial Sequence
  Description of Artificial Sequence: Synthetic oligonucleotide
uuuggagcgcagguagccu

SEQ ID NO: 1039388 - RNA, 19 nt, Artificial Sequence
  Description of Artificial Sequence: Synthetic oligonucleotide
cacacaaaguuggggacuc

SEQ ID NO: 1039389 - RNA, 19 nt, Artificial Sequence
  Description of Artificial Sequence: Synthetic oligonucleotide
gcacauaccaucagaacca

SEQ ID NO: 1039390 - RNA, 19 nt, Artificial Sequence
  Description of Artificial Sequence: Synthetic oligonucleotide
caggguugcagagcucugg

SEQ ID NO: 1039391 - RNA, 19 nt, Artificial Sequence
  Description of Artificial Sequence: Synthetic oligonucleotide
gagugguccgcugcucagg

SEQ ID NO: 1039392 - RNA, 19 nt, Artificial Sequence
  Description of Artificial Sequence: Synthetic oligonucleotide
uuggagcgcagguagccua

SEQ ID NO: 1039393 - RNA, 19 nt, Artificial Sequence
  Description of Artificial Sequence: Synthetic oligonucleotide
gagccgaaaucuaucaacu

SEQ ID NO: 1039394 - RNA, 19 nt, Artificial Sequence
  Description of Artificial Sequence: Synthetic oligonucleotide
cacauaccaucagaaccag

SEQ ID NO: 1039395 - RNA, 19 nt, Artificial Sequence
  Description of Artificial Sequence: Synthetic oligonucleotide
cucgcugaguucagaugug

SEQ ID NO: 1039396 - RNA, 19 nt, Artificial Sequence
  Description of Artificial Sequence: Synthetic oligonucleotide
gcuggaucgagagagcuca

SEQ ID NO: 1039397 - RNA, 19 nt, Artificial Sequence
  Description of Artificial Sequence: Synthetic oligonucleotide
ugagaacuucgggugcgca

SEQ ID NO: 1039398 - RNA, 19 nt, Artificial Sequence
  Description of Artificial Sequence: Synthetic oligonucleotide
gagcgcagguagccuacag

SEQ ID NO: 1039399 - RNA, 19 nt, Artificial Sequence
  Description of Artificial Sequence: Synthetic oligonucleotide
caucuaaaucugagcccac

SEQ ID NO: 1039400 - RNA, 19 nt, Artificial Sequence
  Description of Artificial Sequence: Synthetic oligonucleotide
acucagucguaagccaucu

SEQ ID NO: 1039401 - RNA, 19 nt, Artificial Sequence
  Description of Artificial Sequence: Synthetic oligonucleotide
gucaccuagaauacuggaa

SEQ ID NO: 1039402 - RNA, 19 nt, Artificial Sequence
  Description of Artificial Sequence: Synthetic oligonucleotide
ggaacaaugugauggaguu

SEQ ID NO: 1039403 - RNA, 19 nt, Artificial Sequence
  Description of Artificial Sequence: Synthetic oligonucleotide
gguggcgucggcccagagg

SEQ ID NO: 1039404 - RNA, 19 nt, Artificial Sequence
  Description of Artificial Sequence: Synthetic oligonucleotide
gcugagccgaaaucuauca

SEQ ID NO: 1039405 - RNA, 19 nt, Artificial Sequence
  Description of Artificial Sequence: Synthetic oligonucleotide
gagcuaggcaggcuggcaa

SEQ ID NO: 1039406 - RNA, 19 nt, Artificial Sequence
  Description of Artificial Sequence: Synthetic oligonucleotide
agguguaguuugcaagguu

SEQ ID NO: 1039407 - RNA, 19 nt, Artificial Sequence
  Description of Artificial Sequence: Synthetic oligonucleotide
gguaggcacauaccaucag

SEQ ID NO: 1039408 - RNA, 19 nt, Artificial Sequence
  Description of Artificial Sequence: Synthetic oligonucleotide
ccuugauuauguuggcaug

SEQ ID NO: 1039409 - RNA, 19 nt, Artificial Sequence
  Description of Artificial Sequence: Synthetic oligonucleotide
guccggguggcugaguccc

SEQ ID NO: 1039410 - RNA, 19 nt, Artificial Sequence
  Description of Artificial Sequence: Synthetic oligonucleotide
cuugauuauguuggcaugu

SEQ ID NO: 1039411 - RNA, 19 nt, Artificial Sequence
  Description of Artificial Sequence: Synthetic oligonucleotide
ccgaaaucuaucaacuuaa

SEQ ID NO: 1039412 - RNA, 19 nt, Artificial Sequence
  Description of Artificial Sequence: Synthetic oligonucleotide
cacaggaguagacgugauc

SEQ ID NO: 1039413 - RNA, 19 nt, Artificial Sequence
  Description of Artificial Sequence: Synthetic oligonucleotide
ucugcccgaccacgucccg

SEQ ID NO: 1039414 - RNA, 19 nt, Artificial Sequence
  Description of Artificial Sequence: Synthetic oligonucleotide
gccgaaaucuaucaacuua

SEQ ID NO: 1039415 - RNA, 19 nt, Artificial Sequence
  Description of Artificial Sequence: Synthetic oligonucleotide
auacucagucguaagccau

SEQ ID NO: 1039416 - RNA, 19 nt, Artificial Sequence
  Description of Artificial Sequence: Synthetic oligonucleotide
auguaacucgccaggggcu

SEQ ID NO: 1039417 - RNA, 19 nt, Artificial Sequence
  Description of Artificial Sequence: Synthetic oligonucleotide
ugcuagcugcccuguggug

SEQ ID NO: 1039418 - RNA, 19 nt, Artificial Sequence
  Description of Artificial Sequence: Synthetic oligonucleotide
caguuaggagcaacaucuc

SEQ ID NO: 1039419 - RNA, 19 nt, Artificial Sequence
  Description of Artificial Sequence: Synthetic oligonucleotide
cuucgggugcgcaguacuc

SEQ ID NO: 1039420 - RNA, 19 nt, Artificial Sequence
  Description of Artificial Sequence: Synthetic oligonucleotide
ucgggugcgcaguacucaa

SEQ ID NO: 1039421 - RNA, 19 nt, Artificial Sequence
  Description of Artificial Sequence: Synthetic oligonucleotide
guccgacacaccucuuccc

SEQ ID NO: 1039422 - RNA, 19 nt, Artificial Sequence
  Description of Artificial Sequence: Synthetic oligonucleotide
agcuggaucgagagagcuc

SEQ ID NO: 1039423 - RNA, 19 nt, Artificial Sequence
  Description of Artificial Sequence: Synthetic oligonucleotide
ccgguggcuauguaagagg

SEQ ID NO: 1039424 - RNA, 19 nt, Artificial Sequence
  Description of Artificial Sequence: Synthetic oligonucleotide
ccugcuagcugcccugugg

SEQ ID NO: 1039425 - RNA, 19 nt, Artificial Sequence
  Description of Artificial Sequence: Synthetic oligonucleotide
agccgaaaucuaucaacuu

SEQ ID NO: 1039426 - RNA, 19 nt, Artificial Sequence
  Description of Artificial Sequence: Synthetic oligonucleotide
ggugcgcaguacucaauug

SEQ ID NO: 1039427 - RNA, 19 nt, Artificial Sequence
  Description of Artificial Sequence: Synthetic oligonucleotide
  modified_base (9)..(9): a, c, u, g, unknown or other
acgucccgngcccaucucu

SEQ ID NO: 1039428 - RNA, 19 nt, Artificial Sequence
  Description of Artificial Sequence: Synthetic oligonucleotide
gaagaacccuugguuuuca

SEQ ID NO: 1039429 - RNA, 19 nt, Artificial Sequence
  Description of Artificial Sequence: Synthetic oligonucleotide
agauccacucguuccuaua

SEQ ID NO: 1039430 - RNA, 19 nt, Artificial Sequence
  Description of Artificial Sequence: Synthetic oligonucleotide
ucauccaagcagggauggc

SEQ ID NO: 1039431 - RNA, 19 nt, Artificial Sequence
  Description of Artificial Sequence: Synthetic oligonucleotide
gucaaaauaggugccaguu

SEQ ID NO: 1039432 - RNA, 19 nt, Artificial Sequence
  Description of Artificial Sequence: Synthetic oligonucleotide
ggauggcggucaaugaaag

SEQ ID NO: 1039433 - RNA, 19 nt, Artificial Sequence
  Description of Artificial Sequence: Synthetic oligonucleotide
ccucaauccaacaaucuua

SEQ ID NO: 1039434 - RNA, 19 nt, Artificial Sequence
  Description of Artificial Sequence: Synthetic oligonucleotide
uaagauccacucguuccua

SEQ ID NO: 1039435 - RNA, 19 nt, Artificial Sequence
  Description of Artificial Sequence: Synthetic oligonucleotide
aguguucagaggauaccaa

SEQ ID NO: 1039436 - RNA, 19 nt, Artificial Sequence
  Description of Artificial Sequence: Synthetic oligonucleotide
uucccagguguaguuugca

SEQ ID NO: 1039437 - RNA, 19 nt, Artificial Sequence
  Description of Artificial Sequence: Synthetic oligonucleotide
acugucgggccuucgccaa

SEQ ID NO: 1039438 - RNA, 19 nt, Artificial Sequence
  Description of Artificial Sequence: Synthetic oligonucleotide
auagaauagucugccucuu

SEQ ID NO: 1039439 - RNA, 19 nt, Artificial Sequence
  Description of Artificial Sequence: Synthetic oligonucleotide
agccaaguccugaccucgc

SEQ ID NO: 1039440 - RNA, 19 nt, Artificial Sequence
  Description of Artificial Sequence: Synthetic oligonucleotide
ggggugaaugacugccucc

SEQ ID NO: 1039441 - RNA, 19 nt, Artificial Sequence
  Description of Artificial Sequence: Synthetic oligonucleotide
gacgugaucuggacacuca

SEQ ID NO: 1039442 - RNA, 19 nt, Artificial Sequence
  Description of Artificial Sequence: Synthetic oligonucleotide
uuccuauacugugggcagu

SEQ ID NO: 1039443 - RNA, 19 nt, Artificial Sequence
  Description of Artificial Sequence: Synthetic oligonucleotide
  modified_base (7)..(7): a, c, u, g, unknown or other
gucccgngcccaucucuug

SEQ ID NO: 1039444 - RNA, 19 nt, Artificial Sequence
  Description of Artificial Sequence: Synthetic oligonucleotide
ggcagugugucaggaagcc

SEQ ID NO: 1039445 - RNA, 19 nt, Artificial Sequence
  Description of Artificial Sequence: Synthetic oligonucleotide
agcuccaaacuugcagcug

SEQ ID NO: 1039446 - RNA, 19 nt, Artificial Sequence
  Description of Artificial Sequence: Synthetic oligonucleotide
ucccgguggcuauguaaga

SEQ ID NO: 1039447 - RNA, 19 nt, Artificial Sequence
  Description of Artificial Sequence: Synthetic oligonucleotide
gugcgcaguacucaauugu

SEQ ID NO: 1039448 - RNA, 19 nt, Artificial Sequence
  Description of Artificial Sequence: Synthetic oligonucleotide
caaucacgauguucucauc

SEQ ID NO: 1039449 - RNA, 19 nt, Artificial Sequence
  Description of Artificial Sequence: Synthetic oligonucleotide
agaggauaccaaagcaguu

SEQ ID NO: 1039450 - RNA, 19 nt, Artificial Sequence
  Description of Artificial Sequence: Synthetic oligonucleotide
cagugcugaucaccaggag

SEQ ID NO: 1039451 - RNA, 19 nt, Artificial Sequence
  Description of Artificial Sequence: Synthetic oligonucleotide
cugcaguccacacaaaguu

SEQ ID NO: 1039452 - RNA, 19 nt, Artificial Sequence
  Description of Artificial Sequence: Synthetic oligonucleotide
gcauggaguggguagagcu

SEQ ID NO: 1039453 - RNA, 19 nt, Artificial Sequence
  Description of Artificial Sequence: Synthetic oligonucleotide
cuguagggguuucccauga

SEQ ID NO: 1039454 - RNA, 19 nt, Artificial Sequence
  Description of Artificial Sequence: Synthetic oligonucleotide
cauggaguggguagagcua

SEQ ID NO: 1039455 - RNA, 19 nt, Artificial Sequence
  Description of Artificial Sequence: Synthetic oligonucleotide
gggauccucaauccaacaa

SEQ ID NO: 1039456 - RNA, 19 nt, Artificial Sequence
  Description of Artificial Sequence: Synthetic oligonucleotide
ugagucccgguggcuaugu

SEQ ID NO: 1039457 - RNA, 19 nt, Artificial Sequence
  Description of Artificial Sequence: Synthetic oligonucleotide
uagacgugaucuggacacu

SEQ ID NO: 1039458 - RNA, 19 nt, Artificial Sequence
  Description of Artificial Sequence: Synthetic oligonucleotide
gcaagguucacaggcugug

SEQ ID NO: 1039459 - RNA, 19 nt, Artificial Sequence
  Description of Artificial Sequence: Synthetic oligonucleotide
guguggggcucaggcaugg

SEQ ID NO: 1039460 - RNA, 19 nt, Artificial Sequence
  Description of Artificial Sequence: Synthetic oligonucleotide
agcccaguuagaagauuca

SEQ ID NO: 1039461 - RNA, 19 nt, Artificial Sequence
  Description of Artificial Sequence: Synthetic oligonucleotide
cgaaagauguaacucgcca

SEQ ID NO: 1039462 - RNA, 19 nt, Artificial Sequence
  Description of Artificial Sequence: Synthetic oligonucleotide
caccuuggacagaauugca

SEQ ID NO: 1039463 - RNA, 19 nt, Artificial Sequence
  Description of Artificial Sequence: Synthetic oligonucleotide
cuggaucgagagagcucag

SEQ ID NO: 1039464 - RNA, 19 nt, Artificial Sequence
  Description of Artificial Sequence: Synthetic oligonucleotide
  modified_base (10)..(10): a, c, u, g, unknown or other
ccucuuugunugcuccuuc

SEQ ID NO: 1039465 - RNA, 19 nt, Artificial Sequence
  Description of Artificial Sequence: Synthetic oligonucleotide
ggguugcagagcucuggag

SEQ ID NO: 1039466 - RNA, 19 nt, Artificial Sequence
  Description of Artificial Sequence: Synthetic oligonucleotide
ucgggccuucgccaagguc

SEQ ID NO: 1039467 - RNA, 19 nt, Artificial Sequence
  Description of Artificial Sequence: Synthetic oligonucleotide
caccuagaauacuggaacu

SEQ ID NO: 1039468 - RNA, 19 nt, Artificial Sequence
  Description of Artificial Sequence: Synthetic oligonucleotide
ggaguagacgugaucugga

SEQ ID NO: 1039469 - RNA, 19 nt, Artificial Sequence
  Description of Artificial Sequence: Synthetic oligonucleotide
ccagagguuaggacugcug

SEQ ID NO: 1039470 - RNA, 19 nt, Artificial Sequence
  Description of Artificial Sequence: Synthetic oligonucleotide
cuagagugguccgcugcuc

SEQ ID NO: 1039471 - RNA, 19 nt, Artificial Sequence
  Description of Artificial Sequence: Synthetic oligonucleotide
cuucgcuuggacucuugcu

SEQ ID NO: 1039472 - RNA, 19 nt, Artificial Sequence
  Description of Artificial Sequence: Synthetic oligonucleotide
gagccacuucgcuuggacu

SEQ ID NO: 1039473 - RNA, 19 nt, Artificial Sequence
  Description of Artificial Sequence: Synthetic oligonucleotide
cagggauggcggucaauga

SEQ ID NO: 1039474 - RNA, 19 nt, Artificial Sequence
  Description of Artificial Sequence: Synthetic oligonucleotide
aaccaaggcuuggcucuga

SEQ ID NO: 1039475 - RNA, 19 nt, Artificial Sequence
  Description of Artificial Sequence: Synthetic oligonucleotide
  modified_base (12)..(12): a, c, u, g, unknown or other
accacgucccgngcccauc

SEQ ID NO: 1039476 - RNA, 19 nt, Artificial Sequence
  Description of Artificial Sequence: Synthetic oligonucleotide
cugagccgaaaucuaucaa

SEQ ID NO: 1039477 - RNA, 19 nt, Artificial Sequence
  Description of Artificial Sequence: Synthetic oligonucleotide
aacucgccaggggcucauc

SEQ ID NO: 1039478 - RNA, 19 nt, Artificial Sequence
  Description of Artificial Sequence: Synthetic oligonucleotide
acaaugugauggaguucug

SEQ ID NO: 1039479 - RNA, 19 nt, Artificial Sequence
  Description of Artificial Sequence: Synthetic oligonucleotide
cucagucguaagccaucuc

SEQ ID NO: 1039480 - RNA, 19 nt, Artificial Sequence
  Description of Artificial Sequence: Synthetic oligonucleotide
cacuucgcuuggacucuug

SEQ ID NO: 1039481 - RNA, 19 nt, Artificial Sequence
  Description of Artificial Sequence: Synthetic oligonucleotide
ccaaguccugaccucgcug

SEQ ID NO: 1039482 - RNA, 19 nt, Artificial Sequence
  Description of Artificial Sequence: Synthetic oligonucleotide
  modified_base (11)..(11): a, c, u, g, unknown or other
accucuuugunugcuccuu

SEQ ID NO: 1039483 - RNA, 19 nt, Artificial Sequence
  Description of Artificial Sequence: Synthetic oligonucleotide
ggauaccaaagcaguucug

SEQ ID NO: 1039484 - RNA, 19 nt, Artificial Sequence
  Description of Artificial Sequence: Synthetic oligonucleotide
  modified_base (5)..(5): a, c, u, g, unknown or other
cccgngcccaucucuuggg

SEQ ID NO: 1039485 - RNA, 19 nt, Artificial Sequence
  Description of Artificial Sequence: Synthetic oligonucleotide
  modified_base (16)..(16): a, c, u, g, unknown or other
cccgaccacgucccgngcc

SEQ ID NO: 1039486 - RNA, 19 nt, Artificial Sequence
  Description of Artificial Sequence: Synthetic oligonucleotide
gcugauaacaagccacuuu

SEQ ID NO: 1039487 - RNA, 19 nt, Artificial Sequence
  Description of Artificial Sequence: Synthetic oligonucleotide
ccaaguuugggauccucaa

SEQ ID NO: 1039488 - RNA, 19 nt, Artificial Sequence
  Description of Artificial Sequence: Synthetic oligonucleotide
ccaugcuuuuccaucacua

SEQ ID NO: 1039489 - RNA, 19 nt, Artificial Sequence
  Description of Artificial Sequence: Synthetic oligonucleotide
cuuggacucuugcucccaa

SEQ ID NO: 1039490 - RNA, 19 nt, Artificial Sequence
  Description of Artificial Sequence: Synthetic oligonucleotide
gggauggcggucaaugaaa

SEQ ID NO: 1039491 - RNA, 19 nt, Artificial Sequence
  Description of Artificial Sequence: Synthetic oligonucleotide
ccaucgaaacccuuugugu

SEQ ID NO: 1039492 - RNA, 19 nt, Artificial Sequence
  Description of Artificial Sequence: Synthetic oligonucleotide
ggucaaaauaggugccagu

SEQ ID NO: 1039493 - RNA, 19 nt, Artificial Sequence
  Description of Artificial Sequence: Synthetic oligonucleotide
cccgguggcuauguaagag

SEQ ID NO: 1039494 - RNA, 19 nt, Artificial Sequence
  Description of Artificial Sequence: Synthetic oligonucleotide
cugucgggccuucgccaag

SEQ ID NO: 1039495 - RNA, 19 nt, Artificial Sequence
  Description of Artificial Sequence: Synthetic oligonucleotide
ccaggggucugugaucagc

SEQ ID NO: 1039496 - RNA, 19 nt, Artificial Sequence
  Description of Artificial Sequence: Synthetic oligonucleotide
aagccacuuucuggcuggu

SEQ ID NO: 1039497 - RNA, 19 nt, Artificial Sequence
  Description of Artificial Sequence: Synthetic oligonucleotide
acaggguugcagagcucug

SEQ ID NO: 1039498 - RNA, 19 nt, Artificial Sequence
  Description of Artificial Sequence: Synthetic oligonucleotide
ccgacacaccucuucccag

SEQ ID NO: 1039499 - RNA, 19 nt, Artificial Sequence
  Description of Artificial Sequence: Synthetic oligonucleotide
ugguggcgucggcccagag

SEQ ID NO: 1039500 - RNA, 19 nt, Artificial Sequence
  Description of Artificial Sequence: Synthetic oligonucleotide
  modified_base (10)..(10): a, c, u, g, unknown or other
cacgucccgngcccaucuc

SEQ ID NO: 1039501 - RNA, 19 nt, Artificial Sequence
  Description of Artificial Sequence: Synthetic oligonucleotide
  modified_base (15)..(15): a, c, u, g, unknown or other
ccgaccacgucccgngccc

SEQ ID NO: 1039502 - RNA, 19 nt, Artificial Sequence
  Description of Artificial Sequence: Synthetic oligonucleotide
gaccucgcugcuguaagau

SEQ ID NO: 1039503 - RNA, 19 nt, Artificial Sequence
  Description of Artificial Sequence: Synthetic oligonucleotide
uaacucgccaggggcucau

SEQ ID NO: 1039504 - RNA, 19 nt, Artificial Sequence
  Description of Artificial Sequence: Synthetic oligonucleotide
cugcuagcugcccuguggu

SEQ ID NO: 1039505 - RNA, 19 nt, Artificial Sequence
  Description of Artificial Sequence: Synthetic oligonucleotide
gaacaggguugcagagcuc

SEQ ID NO: 1039506 - RNA, 19 nt, Artificial Sequence
  Description of Artificial Sequence: Synthetic oligonucleotide
ggcauggaguggguagagc

SEQ ID NO: 1039507 - RNA, 19 nt, Artificial Sequence
  Description of Artificial Sequence: Synthetic oligonucleotide
ggguccggguggcugaguc

SEQ ID NO: 1039508 - RNA, 19 nt, Artificial Sequence
  Description of Artificial Sequence: Synthetic oligonucleotide
caucucggugguagcagcu

SEQ ID NO: 1039509 - RNA, 19 nt, Artificial Sequence
  Description of Artificial Sequence: Synthetic oligonucleotide
gguggcuauguaagagguc

SEQ ID NO: 1039510 - RNA, 19 nt, Artificial Sequence
  Description of Artificial Sequence: Synthetic oligonucleotide
guaacucgccaggggcuca

SEQ ID NO: 1039511 - RNA, 19 nt, Artificial Sequence
  Description of Artificial Sequence: Synthetic oligonucleotide
gguugguccgacacaccuc

SEQ ID NO: 1039512 - RNA, 19 nt, Artificial Sequence
  Description of Artificial Sequence: Synthetic oligonucleotide
gguuucccaugagaacuuc

SEQ ID NO: 1039513 - RNA, 19 nt, Artificial Sequence
  Description of Artificial Sequence: Synthetic oligonucleotide
ggcugguugguccgacaca

SEQ ID NO: 1039514 - RNA, 19 nt, Artificial Sequence
  Description of Artificial Sequence: Synthetic oligonucleotide
gucggcccagagguuagga

SEQ ID NO: 1039515 - RNA, 19 nt, Artificial Sequence
  Description of Artificial Sequence: Synthetic oligonucleotide
uugguccgacacaccucuu

SEQ ID NO: 1039516 - RNA, 19 nt, Artificial Sequence
  Description of Artificial Sequence: Synthetic oligonucleotide
gcugaucaccaggagccuc

SEQ ID NO: 1039517 - RNA, 19 nt, Artificial Sequence
  Description of Artificial Sequence: Synthetic oligonucleotide
gccuucgccaaggucaaaa

SEQ ID NO: 1039518 - RNA, 19 nt, Artificial Sequence
  Description of Artificial Sequence: Synthetic oligonucleotide
guaggcagcugagccgaaa

SEQ ID NO: 1039519 - RNA, 19 nt, Artificial Sequence
  Description of Artificial Sequence: Synthetic oligonucleotide
  modified_base (12)..(12): a, c, u, g, unknown or other
caccucuuugunugcuccu

SEQ ID NO: 1039520 - RNA, 19 nt, Artificial Sequence
  Description of Artificial Sequence: Synthetic oligonucleotide
ccaaagcuggaucgagaga

SEQ ID NO: 1039521 - RNA, 19 nt, Artificial Sequence
  Description of Artificial Sequence: Synthetic oligonucleotide
gggaacugucgggccuucg

SEQ ID NO: 1039522 - RNA, 19 nt, Artificial Sequence
  Description of Artificial Sequence: Synthetic oligonucleotide
ugggaacugucgggccuuc

SEQ ID NO: 1039523 - RNA, 19 nt, Artificial Sequence
  Description of Artificial Sequence: Synthetic oligonucleotide
gugucucgcugaguucaga

SEQ ID NO: 1039524 - RNA, 19 nt, Artificial Sequence
  Description of Artificial Sequence: Synthetic oligonucleotide
ccuuugugugagccacuuc

SEQ ID NO: 1039525 - RNA, 19 nt, Artificial Sequence
  Description of Artificial Sequence: Synthetic oligonucleotide
cacuagcuggaagaacccu

SEQ ID NO: 1039526 - RNA, 19 nt, Artificial Sequence
  Description of Artificial Sequence: Synthetic oligonucleotide
acccuuugugugagccacu

SEQ ID NO: 1039527 - RNA, 19 nt, Artificial Sequence
  Description of Artificial Sequence: Synthetic oligonucleotide
uccugaccucgcugcugua

SEQ ID NO: 1039528 - RNA, 19 nt, Artificial Sequence
  Description of Artificial Sequence: Synthetic oligonucleotide
caagguucacaggcugugu

SEQ ID NO: 1039529 - RNA, 19 nt, Artificial Sequence
  Description of Artificial Sequence: Synthetic oligonucleotide
cacaaaguuggggacucuu

SEQ ID NO: 1039530 - RNA, 19 nt, Artificial Sequence
  Description of Artificial Sequence: Synthetic oligonucleotide
ccaagcagggauggcgguc

SEQ ID NO: 1039531 - RNA, 19 nt, Artificial Sequence
  Description of Artificial Sequence: Synthetic oligonucleotide
cccuugguuuucaaauaua

SEQ ID NO: 1039532 - RNA, 19 nt, Artificial Sequence
  Description of Artificial Sequence: Synthetic oligonucleotide
ggaucaggcggguccgggu

SEQ ID NO: 1039533 - RNA, 19 nt, Artificial Sequence
  Description of Artificial Sequence: Synthetic oligonucleotide
ggcgucggcccagagguua

SEQ ID NO: 1039534 - RNA, 19 nt, Artificial Sequence
  Description of Artificial Sequence: Synthetic oligonucleotide
  modified_base (19)..(19): a, c, u, g, unknown or other
cugcccgaccacgucccgn

SEQ ID NO: 1039535 - RNA, 19 nt, Artificial Sequence
  Description of Artificial Sequence: Synthetic oligonucleotide
gcgucggcccagagguuag

SEQ ID NO: 1039536 - RNA, 19 nt, Artificial Sequence
  Description of Artificial Sequence: Synthetic oligonucleotide
ccggguggcugagucccgg

SEQ ID NO: 1039537 - RNA, 19 nt, Artificial Sequence
  Description of Artificial Sequence: Synthetic oligonucleotide
ggcuuucaagucacuaguu

SEQ ID NO: 1039538 - RNA, 19 nt, Artificial Sequence
  Description of Artificial Sequence: Synthetic oligonucleotide
gccaaguccugaccucgcu

SEQ ID NO: 1039539 - RNA, 19 nt, Artificial Sequence
  Description of Artificial Sequence: Synthetic oligonucleotide
  modified_base (4)..(4): a, c, u, g, unknown or other
ccgngcccaucucuuggga

SEQ ID NO: 1039540 - RNA, 19 nt, Artificial Sequence
  Description of Artificial Sequence: Synthetic oligonucleotide
cgguggcuauguaagaggu

SEQ ID NO: 1039541 - RNA, 19 nt, Artificial Sequence
  Description of Artificial Sequence: Synthetic oligonucleotide
gcccaguuagaagauucau

SEQ ID NO: 1039542 - RNA, 19 nt, Artificial Sequence
  Description of Artificial Sequence: Synthetic oligonucleotide
  modified_base (3)..(3): a, c, u, g, unknown or other
cgngcccaucucuugggaa

SEQ ID NO: 1039543 - RNA, 19 nt, Artificial Sequence
  Description of Artificial Sequence: Synthetic oligonucleotide
ggagcgcagguagccuaca

SEQ ID NO: 1039544 - RNA, 19 nt, Artificial Sequence
  Description of Artificial Sequence: Synthetic oligonucleotide
ccugaccucgcugcuguaa

SEQ ID NO: 1039545 - RNA, 19 nt, Artificial Sequence
  Description of Artificial Sequence: Synthetic oligonucleotide
  modified_base (17)..(17): a, c, u, g, unknown or other
gcccgaccacgucccgngc

SEQ ID NO: 1039546 - RNA, 19 nt, Artificial Sequence
  Description of Artificial Sequence: Synthetic oligonucleotide
cgaaaucuaucaacuuaau

SEQ ID NO: 1039547 - RNA, 19 nt, Artificial Sequence
  Description of Artificial Sequence: Synthetic oligonucleotide
gggccuucgccaaggucaa

SEQ ID NO: 1039548 - RNA, 19 nt, Artificial Sequence
  Description of Artificial Sequence: Synthetic oligonucleotide
ccuucgccaaggucaaaau

SEQ ID NO: 1039549 - RNA, 19 nt, Artificial Sequence
  Description of Artificial Sequence: Synthetic oligonucleotide
aggugccaguuaggagcaa

SEQ ID NO: 1039550 - RNA, 19 nt, Artificial Sequence
  Description of Artificial Sequence: Synthetic oligonucleotide
gucgggccuucgccaaggu

SEQ ID NO: 1039551 - RNA, 19 nt, Artificial Sequence
  Description of Artificial Sequence: Synthetic oligonucleotide
  modified_base (13)..(13): a, c, u, g, unknown or other
gaccacgucccgngcccau

SEQ ID NO: 1039552 - RNA, 19 nt, Artificial Sequence
  Description of Artificial Sequence: Synthetic oligonucleotide
cuccugcuagcugcccugu

SEQ ID NO: 1039553 - RNA, 19 nt, Artificial Sequence
  Description of Artificial Sequence: Synthetic oligonucleotide
ggguagagcuaggcaggcu

SEQ ID NO: 1039554 - RNA, 19 nt, Artificial Sequence
  Description of Artificial Sequence: Synthetic oligonucleotide
  modified_base (11)..(11): a, c, u, g, unknown or other
ccacgucccgngcccaucu

SEQ ID NO: 1039555 - RNA, 19 nt, Artificial Sequence
  Description of Artificial Sequence: Synthetic oligonucleotide
gcagcccaucgaaacccuu

SEQ ID NO: 1039556 - RNA, 19 nt, Artificial Sequence
  Description of Artificial Sequence: Synthetic oligonucleotide
  modified_base (8)..(8): a, c, u, g, unknown or other
cgucccgngcccaucucuu

SEQ ID NO: 1039557 - RNA, 19 nt, Artificial Sequence
  Description of Artificial Sequence: Synthetic oligonucleotide
ggccuucgccaaggucaaa

SEQ ID NO: 1039558 - RNA, 19 nt, Artificial Sequence
  Description of Artificial Sequence: Synthetic oligonucleotide
ccacuucgcuuggacucuu

SEQ ID NO: 1039559 - RNA, 19 nt, Artificial Sequence
  Description of Artificial Sequence: Synthetic oligonucleotide
uuguaaugcaauucgaacc

SEQ ID NO: 1039560 - RNA, 19 nt, Artificial Sequence
  Description of Artificial Sequence: Synthetic oligonucleotide
acuaccgccuguuaggccc

SEQ ID NO: 1039561 - RNA, 19 nt, Artificial Sequence
  Description of Artificial Sequence: Synthetic oligonucleotide
ugcaauucgaaccauguuc

SEQ ID NO: 1039562 - RNA, 19 nt, Artificial Sequence
  Description of Artificial Sequence: Synthetic oligonucleotide
aguucuaccagucaccuca

SEQ ID NO: 1039563 - RNA, 19 nt, Artificial Sequence
  Description of Artificial Sequence: Synthetic oligonucleotide
gaagacuugagagacuugg

SEQ ID NO: 1039564 - RNA, 19 nt, Artificial Sequence
  Description of Artificial Sequence: Synthetic oligonucleotide
aauucgaaccauguucucg

SEQ ID NO: 1039565 - RNA, 19 nt, Artificial Sequence
  Description of Artificial Sequence: Synthetic oligonucleotide
ucuaccagucaccucaucc

SEQ ID NO: 1039566 - RNA, 19 nt, Artificial Sequence
  Description of Artificial Sequence: Synthetic oligonucleotide
ucagaucguauucacuggg

SEQ ID NO: 1039567 - RNA, 19 nt, Artificial Sequence
  Description of Artificial Sequence: Synthetic oligonucleotide
aggagauuggacuuccugg

SEQ ID NO: 1039568 - RNA, 19 nt, Artificial Sequence
  Description of Artificial Sequence: Synthetic oligonucleotide
acugcuuuaugacaaaccu

SEQ ID NO: 1039569 - RNA, 19 nt, Artificial Sequence
  Description of Artificial Sequence: Synthetic oligonucleotide
agauuggacuuccuggggc

SEQ ID NO: 1039570 - RNA, 19 nt, Artificial Sequence
  Description of Artificial Sequence: Synthetic oligonucleotide
acccagaugcugcagacgc

SEQ ID NO: 1039571 - RNA, 19 nt, Artificial Sequence
  Description of Artificial Sequence: Synthetic oligonucleotide
aagcguuguauucugcaag

SEQ ID NO: 1039572 - RNA, 19 nt, Artificial Sequence
  Description of Artificial Sequence: Synthetic oligonucleotide
cucggcgucaccuucaccg

SEQ ID NO: 1039573 - RNA, 19 nt, Artificial Sequence
  Description of Artificial Sequence: Synthetic oligonucleotide
aagcgcgagucuuuauucc

SEQ ID NO: 1039574 - RNA, 19 nt, Artificial Sequence
  Description of Artificial Sequence: Synthetic oligonucleotide
aagcacgguccucugaaac

SEQ ID NO: 1039575 - RNA, 19 nt, Artificial Sequence
  Description of Artificial Sequence: Synthetic oligonucleotide
acgaugggcaucuccaggc

SEQ ID NO: 1039576 - RNA, 19 nt, Artificial Sequence
  Description of Artificial Sequence: Synthetic oligonucleotide
guuguaaugcaauucgaac

SEQ ID NO: 1039577 - RNA, 19 nt, Artificial Sequence
  Description of Artificial Sequence: Synthetic oligonucleotide
aaagagagucagugugugg

SEQ ID NO: 1039578 - RNA, 19 nt, Artificial Sequence
  Description of Artificial Sequence: Synthetic oligonucleotide
ccuaacaaagucucgaagg

SEQ ID NO: 1039579 - RNA, 19 nt, Artificial Sequence
  Description of Artificial Sequence: Synthetic oligonucleotide
aagagagucaguguguggu

SEQ ID NO: 1039580 - RNA, 19 nt, Artificial Sequence
  Description of Artificial Sequence: Synthetic oligonucleotide
aagagguuugccugaaaga

SEQ ID NO: 1039581 - RNA, 19 nt, Artificial Sequence
  Description of Artificial Sequence: Synthetic oligonucleotide
uccuaacaaagucucgaag

SEQ ID NO: 1039582 - RNA, 19 nt, Artificial Sequence
  Description of Artificial Sequence: Synthetic oligonucleotide
aaacagggguccucucacc

SEQ ID NO: 1039583 - RNA, 19 nt, Artificial Sequence
  Description of Artificial Sequence: Synthetic oligonucleotide
aaugcaauucgaaccaugu

SEQ ID NO: 1039584 - RNA, 19 nt, Artificial Sequence
  Description of Artificial Sequence: Synthetic oligonucleotide
agcguuguauucugcaagg

SEQ ID NO: 1039585 - RNA, 19 nt, Artificial Sequence
  Description of Artificial Sequence: Synthetic oligonucleotide
agcaguacggugcucggcg

SEQ ID NO: 1039586 - RNA, 19 nt, Artificial Sequence
  Description of Artificial Sequence: Synthetic oligonucleotide
ugaaacuucagaucguauu

SEQ ID NO: 1039587 - RNA, 19 nt, Artificial Sequence
  Description of Artificial Sequence: Synthetic oligonucleotide
caaagaacucgucaggcac

SEQ ID NO: 1039588 - RNA, 19 nt, Artificial Sequence
  Description of Artificial Sequence: Synthetic oligonucleotide
ugcaaugggcuccuguuug

SEQ ID NO: 1039589 - RNA, 19 nt, Artificial Sequence
  Description of Artificial Sequence: Synthetic oligonucleotide
uugggaggagcgaugaaca

SEQ ID NO: 1039590 - RNA, 19 nt, Artificial Sequence
  Description of Artificial Sequence: Synthetic oligonucleotide
ugaagcguuguauucugca

SEQ ID NO: 1039591 - RNA, 19 nt, Artificial Sequence
  Description of Artificial Sequence: Synthetic oligonucleotide
aagacuugagagacuuggc

SEQ ID NO: 1039592 - RNA, 19 nt, Artificial Sequence
  Description of Artificial Sequence: Synthetic oligonucleotide
acuugagagacuuggcuga

SEQ ID NO: 1039593 - RNA, 19 nt, Artificial Sequence
  Description of Artificial Sequence: Synthetic oligonucleotide
agggucucgaucaacgggc

SEQ ID NO: 1039594 - RNA, 19 nt, Artificial Sequence
  Description of Artificial Sequence: Synthetic oligonucleotide
acuagggcggaagaagccc

SEQ ID NO: 1039595 - RNA, 19 nt, Artificial Sequence
  Description of Artificial Sequence: Synthetic oligonucleotide
ugggcugccccuugaaugg

SEQ ID NO: 1039596 - RNA, 19 nt, Artificial Sequence
  Description of Artificial Sequence: Synthetic oligonucleotide
uaaaaggagagcucaggau

SEQ ID NO: 1039597 - RNA, 19 nt, Artificial Sequence
  Description of Artificial Sequence: Synthetic oligonucleotide
aucggcucagacuccaggg

SEQ ID NO: 1039598 - RNA, 19 nt, Artificial Sequence
  Description of Artificial Sequence: Synthetic oligonucleotide
gauuggacuuccuggggcc

SEQ ID NO: 1039599 - RNA, 19 nt, Artificial Sequence
  Description of Artificial Sequence: Synthetic oligonucleotide
ucagugaucggcucagacu

SEQ ID NO: 1039600 - RNA, 19 nt, Artificial Sequence
  Description of Artificial Sequence: Synthetic oligonucleotide
cagugaucggcucagacuc

SEQ ID NO: 1039601 - RNA, 19 nt, Artificial Sequence
  Description of Artificial Sequence: Synthetic oligonucleotide
acggucagggaagaggacc

SEQ ID NO: 1039602 - RNA, 19 nt, Artificial Sequence
  Description of Artificial Sequence: Synthetic oligonucleotide
ucugcaaggcaguucuacc

SEQ ID NO: 1039603 - RNA, 19 nt, Artificial Sequence
  Description of Artificial Sequence: Synthetic oligonucleotide
ucaagcacgguccucugaa

SEQ ID NO: 1039604 - RNA, 19 nt, Artificial Sequence
  Description of Artificial Sequence: Synthetic oligonucleotide
uuugggaggagcgaugaac

SEQ ID NO: 1039605 - RNA, 19 nt, Artificial Sequence
  Description of Artificial Sequence: Synthetic oligonucleotide
ggcauuguuaggcagguug

SEQ ID NO: 1039606 - RNA, 19 nt, Artificial Sequence
  Description of Artificial Sequence: Synthetic oligonucleotide
aaaguguacaagggcagca

SEQ ID NO: 1039607 - RNA, 19 nt, Artificial Sequence
  Description of Artificial Sequence: Synthetic oligonucleotide
guaaaaggagagcucagga

SEQ ID NO: 1039608 - RNA, 19 nt, Artificial Sequence
  Description of Artificial Sequence: Synthetic oligonucleotide
uagcucucaccucuugccg

SEQ ID NO: 1039609 - RNA, 19 nt, Artificial Sequence
  Description of Artificial Sequence: Synthetic oligonucleotide
ccaguuguaaugcaauucg

SEQ ID NO: 1039610 - RNA, 19 nt, Artificial Sequence
  Description of Artificial Sequence: Synthetic oligonucleotide
aucguauucacugggguug

SEQ ID NO: 1039611 - RNA, 19 nt, Artificial Sequence
  Description of Artificial Sequence: Synthetic oligonucleotide
caggcuucuccucacaggc

SEQ ID NO: 1039612 - RNA, 19 nt, Artificial Sequence
  Description of Artificial Sequence: Synthetic oligonucleotide
gaaagagagucagugugug

SEQ ID NO: 1039613 - RNA, 19 nt, Artificial Sequence
  Description of Artificial Sequence: Synthetic oligonucleotide
gagauuggacuuccugggg

SEQ ID NO: 1039614 - RNA, 19 nt, Artificial Sequence
  Description of Artificial Sequence: Synthetic oligonucleotide
ugacaaaccugaugguggc

SEQ ID NO: 1039615 - RNA, 19 nt, Artificial Sequence
  Description of Artificial Sequence: Synthetic oligonucleotide
agagacuuggcugaaugug

SEQ ID NO: 1039616 - RNA, 19 nt, Artificial Sequence
  Description of Artificial Sequence: Synthetic oligonucleotide
cacugucucacuagggcgg

SEQ ID NO: 1039617 - RNA, 19 nt, Artificial Sequence
  Description of Artificial Sequence: Synthetic oligonucleotide
acugaagcguuguauucug

SEQ ID NO: 1039618 - RNA, 19 nt, Artificial Sequence
  Description of Artificial Sequence: Synthetic oligonucleotide
uuguuaggcagguuggcaa

SEQ ID NO: 1039619 - RNA, 19 nt, Artificial Sequence
  Description of Artificial Sequence: Synthetic oligonucleotide
uguucucgggucccucucg

SEQ ID NO: 1039620 - RNA, 19 nt, Artificial Sequence
  Description of Artificial Sequence: Synthetic oligonucleotide
agaucguauucacuggggu

SEQ ID NO: 1039621 - RNA, 19 nt, Artificial Sequence
  Description of Artificial Sequence: Synthetic oligonucleotide
agucuuuauuccugcucgg

SEQ ID NO: 1039622 - RNA, 19 nt, Artificial Sequence
  Description of Artificial Sequence: Synthetic oligonucleotide
ugucugagcaucugcuggc

SEQ ID NO: 1039623 - RNA, 19 nt, Artificial Sequence
  Description of Artificial Sequence: Synthetic oligonucleotide
gaagcgcgagucuuuauuc

SEQ ID NO: 1039624 - RNA, 19 nt, Artificial Sequence
  Description of Artificial Sequence: Synthetic oligonucleotide
agguguuugcaucacccug

SEQ ID NO: 1039625 - RNA, 19 nt, Artificial Sequence
  Description of Artificial Sequence: Synthetic oligonucleotide
uggcugaaugugaugucag

SEQ ID NO: 1039626 - RNA, 19 nt, Artificial Sequence
  Description of Artificial Sequence: Synthetic oligonucleotide
ccuggucuguacaaaaugg

SEQ ID NO: 1039627 - RNA, 19 nt, Artificial Sequence
  Description of Artificial Sequence: Synthetic oligonucleotide
cuccucacaucauccacgg

SEQ ID NO: 1039628 - RNA, 19 nt, Artificial Sequence
  Description of Artificial Sequence: Synthetic oligonucleotide
uggcacuaccgccuguuag

SEQ ID NO: 1039629 - RNA, 19 nt, Artificial Sequence
  Description of Artificial Sequence: Synthetic oligonucleotide
agagagucagugugugguc

SEQ ID NO: 1039630 - RNA, 19 nt, Artificial Sequence
  Description of Artificial Sequence: Synthetic oligonucleotide
cagaucguauucacugggg

SEQ ID NO: 1039631 - RNA, 19 nt, Artificial Sequence
  Description of Artificial Sequence: Synthetic oligonucleotide
agcucucaccucuugccgg

SEQ ID NO: 1039632 - RNA, 19 nt, Artificial Sequence
  Description of Artificial Sequence: Synthetic oligonucleotide
uacacacaaacaggggucc

SEQ ID NO: 1039633 - RNA, 19 nt, Artificial Sequence
  Description of Artificial Sequence: Synthetic oligonucleotide
gcaaaucuccacuggagag

SEQ ID NO: 1039634 - RNA, 19 nt, Artificial Sequence
  Description of Artificial Sequence: Synthetic oligonucleotide
acagggucucgaucaacgg

SEQ ID NO: 1039635 - RNA, 19 nt, Artificial Sequence
  Description of Artificial Sequence: Synthetic oligonucleotide
cacuacagggucucgauca

SEQ ID NO: 1039636 - RNA, 19 nt, Artificial Sequence
  Description of Artificial Sequence: Synthetic oligonucleotide
uaggcagguuggcaaaucu

SEQ ID NO: 1039637 - RNA, 19 nt, Artificial Sequence
  Description of Artificial Sequence: Synthetic oligonucleotide
cucacuagggcggaagaag

SEQ ID NO: 1039638 - RNA, 19 nt, Artificial Sequence
  Description of Artificial Sequence: Synthetic oligonucleotide
gagacgguguguucuagca

SEQ ID NO: 1039639 - RNA, 19 nt, Artificial Sequence
  Description of Artificial Sequence: Synthetic oligonucleotide
ggauguaacggucagggaa

SEQ ID NO: 1039640 - RNA, 19 nt, Artificial Sequence
  Description of Artificial Sequence: Synthetic oligonucleotide
gguaaaaggagagcucagg

SEQ ID NO: 1039641 - RNA, 19 nt, Artificial Sequence
  Description of Artificial Sequence: Synthetic oligonucleotide
ucgaucaacgggcgguuca

SEQ ID NO: 1039642 - RNA, 19 nt, Artificial Sequence
  Description of Artificial Sequence: Synthetic oligonucleotide
aaccugaugguggcacuac

SEQ ID NO: 1039643 - RNA, 19 nt, Artificial Sequence
  Description of Artificial Sequence: Synthetic oligonucleotide
uggcuccuaacaaagucuc

SEQ ID NO: 1039644 - RNA, 19 nt, Artificial Sequence
  Description of Artificial Sequence: Synthetic oligonucleotide
agguuggcaaaucuccacu

SEQ ID NO: 1039645 - RNA, 19 nt, Artificial Sequence
  Description of Artificial Sequence: Synthetic oligonucleotide
ggcacuaccgccuguuagg

SEQ ID NO: 1039646 - RNA, 19 nt, Artificial Sequence
  Description of Artificial Sequence: Synthetic oligonucleotide
cauacaccuggccaccagc

SEQ ID NO: 1039647 - RNA, 19 nt, Artificial Sequence
  Description of Artificial Sequence: Synthetic oligonucleotide
acacuacagggucucgauc

SEQ ID NO: 1039648 - RNA, 19 nt, Artificial Sequence
  Description of Artificial Sequence: Synthetic oligonucleotide
aggagcgaugaacagguaa

SEQ ID NO: 1039649 - RNA, 19 nt, Artificial Sequence
  Description of Artificial Sequence: Synthetic oligonucleotide
ucgucaggcaccucugcug

SEQ ID NO: 1039650 - RNA, 19 nt, Artificial Sequence
  Description of Artificial Sequence: Synthetic oligonucleotide
aggcccagugacugaagcg

SEQ ID NO: 1039651 - RNA, 19 nt, Artificial Sequence
  Description of Artificial Sequence: Synthetic oligonucleotide
agcgaugaacagguaaaag

SEQ ID NO: 1039652 - RNA, 19 nt, Artificial Sequence
  Description of Artificial Sequence: Synthetic oligonucleotide
ugcagacgcucccuggucu

SEQ ID NO: 1039653 - RNA, 19 nt, Artificial Sequence
  Description of Artificial Sequence: Synthetic oligonucleotide
aguuguaaugcaauucgaa

SEQ ID NO: 1039654 - RNA, 19 nt, Artificial Sequence
  Description of Artificial Sequence: Synthetic oligonucleotide
agaagcgcgagucuuuauu

SEQ ID NO: 1039655 - RNA, 19 nt, Artificial Sequence
  Description of Artificial Sequence: Synthetic oligonucleotide
uucugcaaggcaguucuac

SEQ ID NO: 1039656 - RNA, 19 nt, Artificial Sequence
  Description of Artificial Sequence: Synthetic oligonucleotide
agcacgguccucugaaacu

SEQ ID NO: 1039657 - RNA, 19 nt, Artificial Sequence
  Description of Artificial Sequence: Synthetic oligonucleotide
acgaaaggggcagaugcag

SEQ ID NO: 1039658 - RNA, 19 nt, Artificial Sequence
  Description of Artificial Sequence: Synthetic oligonucleotide
uggguagcguuccaguuuu

SEQ ID NO: 1039659 - RNA, 19 nt, Artificial Sequence
  Description of Artificial Sequence: Synthetic oligonucleotide
agacgguguguucuagcag

SEQ ID NO: 1039660 - RNA, 19 nt, Artificial Sequence
  Description of Artificial Sequence: Synthetic oligonucleotide
uaacaaagucucgaagguc

SEQ ID NO: 1039661 - RNA, 19 nt, Artificial Sequence
  Description of Artificial Sequence: Synthetic oligonucleotide
ggucuguacaaaauggcug

SEQ ID NO: 1039662 - RNA, 19 nt, Artificial Sequence
  Description of Artificial Sequence: Synthetic oligonucleotide
ucucgggucccucucggcu

SEQ ID NO: 1039663 - RNA, 19 nt, Artificial Sequence
  Description of Artificial Sequence: Synthetic oligonucleotide
cauuuugggaggagcgaug

SEQ ID NO: 1039664 - RNA, 19 nt, Artificial Sequence
  Description of Artificial Sequence: Synthetic oligonucleotide
uuuggguagcguuccaguu

SEQ ID NO: 1039665 - RNA, 19 nt, Artificial Sequence
  Description of Artificial Sequence: Synthetic oligonucleotide
agcagggaagagguuugcc

SEQ ID NO: 1039666 - RNA, 19 nt, Artificial Sequence
  Description of Artificial Sequence: Synthetic oligonucleotide
gaagcguuguauucugcaa

SEQ ID NO: 1039667 - RNA, 19 nt, Artificial Sequence
  Description of Artificial Sequence: Synthetic oligonucleotide
auuuugggaggagcgauga

SEQ ID NO: 1039668 - RNA, 19 nt, Artificial Sequence
  Description of Artificial Sequence: Synthetic oligonucleotide
auuguuaggcagguuggca

SEQ ID NO: 1039669 - RNA, 19 nt, Artificial Sequence
  Description of Artificial Sequence: Synthetic oligonucleotide
uuggguagcguuccaguuu

SEQ ID NO: 1039670 - RNA, 19 nt, Artificial Sequence
  Description of Artificial Sequence: Synthetic oligonucleotide
gacgguguguucuagcagu

SEQ ID NO: 1039671 - RNA, 19 nt, Artificial Sequence
  Description of Artificial Sequence: Synthetic oligonucleotide
caaaguguacaagggcagc

SEQ ID NO: 1039672 - RNA, 19 nt, Artificial Sequence
  Description of Artificial Sequence: Synthetic oligonucleotide
ugguucaggucuccccugc

SEQ ID NO: 1039673 - RNA, 19 nt, Artificial Sequence
  Description of Artificial Sequence: Synthetic oligonucleotide
uccccagaguucaaaggaa

SEQ ID NO: 1039674 - RNA, 19 nt, Artificial Sequence
  Description of Artificial Sequence: Synthetic oligonucleotide
cucagugaucggcucagac

SEQ ID NO: 1039675 - RNA, 19 nt, Artificial Sequence
  Description of Artificial Sequence: Synthetic oligonucleotide
guauucacugggguugaag

SEQ ID NO: 1039676 - RNA, 19 nt, Artificial Sequence
  Description of Artificial Sequence: Synthetic oligonucleotide
uugccggcuggcaacuuca

SEQ ID NO: 1039677 - RNA, 19 nt, Artificial Sequence
  Description of Artificial Sequence: Synthetic oligonucleotide
agcgcgagucuuuauuccu

SEQ ID NO: 1039678 - RNA, 19 nt, Artificial Sequence
  Description of Artificial Sequence: Synthetic oligonucleotide
cuccagaucaggguggcac

SEQ ID NO: 1039679 - RNA, 19 nt, Artificial Sequence
  Description of Artificial Sequence: Synthetic oligonucleotide
auguucucgggucccucuc

SEQ ID NO: 1039680 - RNA, 19 nt, Artificial Sequence
  Description of Artificial Sequence: Synthetic oligonucleotide
ccucacaucauccacgguc

SEQ ID NO: 1039681 - RNA, 19 nt, Artificial Sequence
  Description of Artificial Sequence: Synthetic oligonucleotide
ucacccagaugcugcagac

SEQ ID NO: 1039682 - RNA, 19 nt, Artificial Sequence
  Description of Artificial Sequence: Synthetic oligonucleotide
cagguuggcaaaucuccac

SEQ ID NO: 1039683 - RNA, 19 nt, Artificial Sequence
  Description of Artificial Sequence: Synthetic oligonucleotide
cuagaugccuggucagcug

SEQ ID NO: 1039684 - RNA, 19 nt, Artificial Sequence
  Description of Artificial Sequence: Synthetic oligonucleotide
agucaccucaucccucaug

SEQ ID NO: 1039685 - RNA, 19 nt, Artificial Sequence
  Description of Artificial Sequence: Synthetic oligonucleotide
guuccagguagagaccugc

SEQ ID NO: 1039686 - RNA, 19 nt, Artificial Sequence
  Description of Artificial Sequence: Synthetic oligonucleotide
cauuguuaggcagguuggc

SEQ ID NO: 1039687 - RNA, 19 nt, Artificial Sequence
  Description of Artificial Sequence: Synthetic oligonucleotide
gggacauacaccuggccac

SEQ ID NO: 1039688 - RNA, 19 nt, Artificial Sequence
  Description of Artificial Sequence: Synthetic oligonucleotide
guucucgggucccucucgg

SEQ ID NO: 1039689 - RNA, 19 nt, Artificial Sequence
  Description of Artificial Sequence: Synthetic oligonucleotide
cuguuaggcccagugacug

SEQ ID NO: 1039690 - RNA, 19 nt, Artificial Sequence
  Description of Artificial Sequence: Synthetic oligonucleotide
gguggcuccuaacaaaguc

SEQ ID NO: 1039691 - RNA, 19 nt, Artificial Sequence
  Description of Artificial Sequence: Synthetic oligonucleotide
uggggagacgguguguucu

SEQ ID NO: 1039692 - RNA, 19 nt, Artificial Sequence
  Description of Artificial Sequence: Synthetic oligonucleotide
aacggucagggaagaggac

SEQ ID NO: 1039693 - RNA, 19 nt, Artificial Sequence
  Description of Artificial Sequence: Synthetic oligonucleotide
aggucuccccugcugaacu

SEQ ID NO: 1039694 - RNA, 19 nt, Artificial Sequence
  Description of Artificial Sequence: Synthetic oligonucleotide
cugcaaggcaguucuacca

SEQ ID NO: 1039695 - RNA, 19 nt, Artificial Sequence
  Description of Artificial Sequence: Synthetic oligonucleotide
gccuggucagcugacaugg

SEQ ID NO: 1039696 - RNA, 19 nt, Artificial Sequence
  Description of Artificial Sequence: Synthetic oligonucleotide
ugcccacggugucacacug

SEQ ID NO: 1039697 - RNA, 19 nt, Artificial Sequence
  Description of Artificial Sequence: Synthetic oligonucleotide
cuccucaccaggcuuugac

SEQ ID NO: 1039698 - RNA, 19 nt, Artificial Sequence
  Description of Artificial Sequence: Synthetic oligonucleotide
gcauuguuaggcagguugg

SEQ ID NO: 1039699 - RNA, 19 nt, Artificial Sequence
  Description of Artificial Sequence: Synthetic oligonucleotide
cugaagcguuguauucugc

SEQ ID NO: 1039700 - RNA, 19 nt, Artificial Sequence
  Description of Artificial Sequence: Synthetic oligonucleotide
cucaccucuugccggcugg

SEQ ID NO: 1039701 - RNA, 19 nt, Artificial Sequence
  Description of Artificial Sequence: Synthetic oligonucleotide
uguaacggucagggaagag

SEQ ID NO: 1039702 - RNA, 19 nt, Artificial Sequence
  Description of Artificial Sequence: Synthetic oligonucleotide
agaucaggguggcacacua

SEQ ID NO: 1039703 - RNA, 19 nt, Artificial Sequence
  Description of Artificial Sequence: Synthetic oligonucleotide
ggggccuugcuccugacug

SEQ ID NO: 1039704 - RNA, 19 nt, Artificial Sequence
  Description of Artificial Sequence: Synthetic oligonucleotide
gguggcacacuacaggguc

SEQ ID NO: 1039705 - RNA, 19 nt, Artificial Sequence
  Description of Artificial Sequence: Synthetic oligonucleotide
gccugaaagagagucagug

SEQ ID NO: 1039706 - RNA, 19 nt, Artificial Sequence
  Description of Artificial Sequence: Synthetic oligonucleotide
cuuuauuccugcucggggu

SEQ ID NO: 1039707 - RNA, 19 nt, Artificial Sequence
  Description of Artificial Sequence: Synthetic oligonucleotide
aaguccugccgccggcaug

SEQ ID NO: 1039708 - RNA, 19 nt, Artificial Sequence
  Description of Artificial Sequence: Synthetic oligonucleotide
gguagagaccugcugguuc

SEQ ID NO: 1039709 - RNA, 19 nt, Artificial Sequence
  Description of Artificial Sequence: Synthetic oligonucleotide
gagaagcucccagaggguc

SEQ ID NO: 1039710 - RNA, 19 nt, Artificial Sequence
  Description of Artificial Sequence: Synthetic oligonucleotide
gccuguuaggcccagugac

SEQ ID NO: 1039711 - RNA, 19 nt, Artificial Sequence
  Description of Artificial Sequence: Synthetic oligonucleotide
ugcuagaugccuggucagc

SEQ ID NO: 1039712 - RNA, 19 nt, Artificial Sequence
  Description of Artificial Sequence: Synthetic oligonucleotide
gaucaacgggcgguucagg

SEQ ID NO: 1039713 - RNA, 19 nt, Artificial Sequence
  Description of Artificial Sequence: Synthetic oligonucleotide
gccacuugggcacuuugcc

SEQ ID NO: 1039714 - RNA, 19 nt, Artificial Sequence
  Description of Artificial Sequence: Synthetic oligonucleotide
ucccucauguacacacaaa

SEQ ID NO: 1039715 - RNA, 19 nt, Artificial Sequence
  Description of Artificial Sequence: Synthetic oligonucleotide
gguccuguggcugacgaug

SEQ ID NO: 1039716 - RNA, 19 nt, Artificial Sequence
  Description of Artificial Sequence: Synthetic oligonucleotide
ugguagcucucaccucuug

SEQ ID NO: 1039717 - RNA, 19 nt, Artificial Sequence
  Description of Artificial Sequence: Synthetic oligonucleotide
ugccccuugaaugggcucu

SEQ ID NO: 1039718 - RNA, 19 nt, Artificial Sequence
  Description of Artificial Sequence: Synthetic oligonucleotide
gcaaccuggagccaucauc

SEQ ID NO: 1039719 - RNA, 19 nt, Artificial Sequence
  Description of Artificial Sequence: Synthetic oligonucleotide
augcaauucgaaccauguu

SEQ ID NO: 1039720 - RNA, 19 nt, Artificial Sequence
  Description of Artificial Sequence: Synthetic oligonucleotide
aacgggcgguucaggcucc

SEQ ID NO: 1039721 - RNA, 19 nt, Artificial Sequence
  Description of Artificial Sequence: Synthetic oligonucleotide
aggcagguuggcaaaucuc

SEQ ID NO: 1039722 - RNA, 19 nt, Artificial Sequence
  Description of Artificial Sequence: Synthetic oligonucleotide
ucucacuagggcggaagaa

SEQ ID NO: 1039723 - RNA, 19 nt, Artificial Sequence
  Description of Artificial Sequence: Synthetic oligonucleotide
caauucgaaccauguucuc

SEQ ID NO: 1039724 - RNA, 19 nt, Artificial Sequence
  Description of Artificial Sequence: Synthetic oligonucleotide
uccgcucacucuugagcug

SEQ ID NO: 1039725 - RNA, 19 nt, Artificial Sequence
  Description of Artificial Sequence: Synthetic oligonucleotide
cccagaguucaaaggaagc

SEQ ID NO: 1039726 - RNA, 19 nt, Artificial Sequence
  Description of Artificial Sequence: Synthetic oligonucleotide
aggauguaacggucaggga

SEQ ID NO: 1039727 - RNA, 19 nt, Artificial Sequence
  Description of Artificial Sequence: Synthetic oligonucleotide
agggcggaagaagcccugc

SEQ ID NO: 1039728 - RNA, 19 nt, Artificial Sequence
  Description of Artificial Sequence: Synthetic oligonucleotide
acuacagggucucgaucaa

SEQ ID NO: 1039729 - RNA, 19 nt, Artificial Sequence
  Description of Artificial Sequence: Synthetic oligonucleotide
gaucguauucacugggguu

SEQ ID NO: 1039730 - RNA, 19 nt, Artificial Sequence
  Description of Artificial Sequence: Synthetic oligonucleotide
cguuuuggggccagcaccg

SEQ ID NO: 1039731 - RNA, 19 nt, Artificial Sequence
  Description of Artificial Sequence: Synthetic oligonucleotide
ucguauucacugggguuga

SEQ ID NO: 1039732 - RNA, 19 nt, Artificial Sequence
  Description of Artificial Sequence: Synthetic oligonucleotide
guacaagggcagcagggaa

SEQ ID NO: 1039733 - RNA, 19 nt, Artificial Sequence
  Description of Artificial Sequence: Synthetic oligonucleotide
uguggcugacgaugggcau

SEQ ID NO: 1039734 - RNA, 19 nt, Artificial Sequence
  Description of Artificial Sequence: Synthetic oligonucleotide
gauccggcggcccgggaca

SEQ ID NO: 1039735 - RNA, 19 nt, Artificial Sequence
  Description of Artificial Sequence: Synthetic oligonucleotide
ccucucacccagaugcugc

SEQ ID NO: 1039736 - RNA, 19 nt, Artificial Sequence
  Description of Artificial Sequence: Synthetic oligonucleotide
aggggcagaugcagacucc

SEQ ID NO: 1039737 - RNA, 19 nt, Artificial Sequence
  Description of Artificial Sequence: Synthetic oligonucleotide
cuugccggcuggcaacuuc

SEQ ID NO: 1039738 - RNA, 19 nt, Artificial Sequence
  Description of Artificial Sequence: Synthetic oligonucleotide
ucaggucuccccugcugaa

SEQ ID NO: 1039739 - RNA, 19 nt, Artificial Sequence
  Description of Artificial Sequence: Synthetic oligonucleotide
gguguuugcaucacccuga

SEQ ID NO: 1039740 - RNA, 19 nt, Artificial Sequence
  Description of Artificial Sequence: Synthetic oligonucleotide
cuccuaacaaagucucgaa

SEQ ID NO: 1039741 - RNA, 19 nt, Artificial Sequence
  Description of Artificial Sequence: Synthetic oligonucleotide
aguacggugcucggcguca

SEQ ID NO: 1039742 - RNA, 19 nt, Artificial Sequence
  Description of Artificial Sequence: Synthetic oligonucleotide
uucucgggucccucucggc

SEQ ID NO: 1039743 - RNA, 19 nt, Artificial Sequence
  Description of Artificial Sequence: Synthetic oligonucleotide
guggggauccggcggcccg

SEQ ID NO: 1039744 - RNA, 19 nt, Artificial Sequence
  Description of Artificial Sequence: Synthetic oligonucleotide
ucuagcaguccagguucca

SEQ ID NO: 1039745 - RNA, 19 nt, Artificial Sequence
  Description of Artificial Sequence: Synthetic oligonucleotide
cacuaccgccuguuaggcc

SEQ ID NO: 1039746 - RNA, 19 nt, Artificial Sequence
  Description of Artificial Sequence: Synthetic oligonucleotide
ggagacgguguguucuagc

SEQ ID NO: 1039747 - RNA, 19 nt, Artificial Sequence
  Description of Artificial Sequence: Synthetic oligonucleotide
ggaccauuuugggaggagc

SEQ ID NO: 1039748 - RNA, 19 nt, Artificial Sequence
  Description of Artificial Sequence: Synthetic oligonucleotide
ggcgccgcccguuuugggg

SEQ ID NO: 1039749 - RNA, 19 nt, Artificial Sequence
  Description of Artificial Sequence: Synthetic oligonucleotide
accagucaccucaucccuc

SEQ ID NO: 1039750 - RNA, 19 nt, Artificial Sequence
  Description of Artificial Sequence: Synthetic oligonucleotide
gcuccuaacaaagucucga

SEQ ID NO: 1039751 - RNA, 19 nt, Artificial Sequence
  Description of Artificial Sequence: Synthetic oligonucleotide
uuccccagguggcuccuaa

SEQ ID NO: 1039752 - RNA, 19 nt, Artificial Sequence
  Description of Artificial Sequence: Synthetic oligonucleotide
gugacugaagcguuguauu

SEQ ID NO: 1039753 - RNA, 19 nt, Artificial Sequence
  Description of Artificial Sequence: Synthetic oligonucleotide
ggagcgaugaacagguaaa

SEQ ID NO: 1039754 - RNA, 19 nt, Artificial Sequence
  Description of Artificial Sequence: Synthetic oligonucleotide
aggaccauuuugggaggag

SEQ ID NO: 1039755 - RNA, 19 nt, Artificial Sequence
  Description of Artificial Sequence: Synthetic oligonucleotide
gguugaaguccugccgccg

SEQ ID NO: 1039756 - RNA, 19 nt, Artificial Sequence
  Description of Artificial Sequence: Synthetic oligonucleotide
cauccaguuguaaugcaau

SEQ ID NO: 1039757 - RNA, 19 nt, Artificial Sequence
  Description of Artificial Sequence: Synthetic oligonucleotide
cgaaccauguucucggguc

SEQ ID NO: 1039758 - RNA, 19 nt, Artificial Sequence
  Description of Artificial Sequence: Synthetic oligonucleotide
cugcaggauguaacgguca

SEQ ID NO: 1039759 - RNA, 19 nt, Artificial Sequence
  Description of Artificial Sequence: Synthetic oligonucleotide
agacuuggcugaaugugau

SEQ ID NO: 1039760 - RNA, 19 nt, Artificial Sequence
  Description of Artificial Sequence: Synthetic oligonucleotide
cuuuggguagcguuccagu

SEQ ID NO: 1039761 - RNA, 19 nt, Artificial Sequence
  Description of Artificial Sequence: Synthetic oligonucleotide
cucgggucccucucggcuc

SEQ ID NO: 1039762 - RNA, 19 nt, Artificial Sequence
  Description of Artificial Sequence: Synthetic oligonucleotide
cacggugucacacugcuuu

SEQ ID NO: 1039763 - RNA, 19 nt, Artificial Sequence
  Description of Artificial Sequence: Synthetic oligonucleotide
cacccagaugcugcagacg

SEQ ID NO: 1039764 - RNA, 19 nt, Artificial Sequence
  Description of Artificial Sequence: Synthetic oligonucleotide
uccugcaaccuggagccau

SEQ ID NO: 1039765 - RNA, 19 nt, Artificial Sequence
  Description of Artificial Sequence: Synthetic oligonucleotide
uucuaccagucaccucauc

SEQ ID NO: 1039766 - RNA, 19 nt, Artificial Sequence
  Description of Artificial Sequence: Synthetic oligonucleotide
cccuggucuguacaaaaug

SEQ ID NO: 1039767 - RNA, 19 nt, Artificial Sequence
  Description of Artificial Sequence: Synthetic oligonucleotide
ugcucggcgucaccuucac

SEQ ID NO: 1039768 - RNA, 19 nt, Artificial Sequence
  Description of Artificial Sequence: Synthetic oligonucleotide
gacgcucccuggucuguac

SEQ ID NO: 1039769 - RNA, 19 nt, Artificial Sequence
  Description of Artificial Sequence: Synthetic oligonucleotide
gagcgaugaacagguaaaa

SEQ ID NO: 1039770 - RNA, 19 nt, Artificial Sequence
  Description of Artificial Sequence: Synthetic oligonucleotide
gccagaggaagacuugaga

SEQ ID NO: 1039771 - RNA, 19 nt, Artificial Sequence
  Description of Artificial Sequence: Synthetic oligonucleotide
ugcaaccuggagccaucau

SEQ ID NO: 1039772 - RNA, 19 nt, Artificial Sequence
  Description of Artificial Sequence: Synthetic oligonucleotide
gcaauucgaaccauguucu

SEQ ID NO: 1039773 - RNA, 19 nt, Artificial Sequence
  Description of Artificial Sequence: Synthetic oligonucleotide
ggguugaaguccugccgcc

SEQ ID NO: 1039774 - RNA, 19 nt, Artificial Sequence
  Description of Artificial Sequence: Synthetic oligonucleotide
ggucucgaucaacgggcgg

SEQ ID NO: 1039775 - RNA, 19 nt, Artificial Sequence
  Description of Artificial Sequence: Synthetic oligonucleotide
ggaggagcgaugaacaggu

SEQ ID NO: 1039776 - RNA, 19 nt, Artificial Sequence
  Description of Artificial Sequence: Synthetic oligonucleotide
uacggugcucggcgucacc

SEQ ID NO: 1039777 - RNA, 19 nt, Artificial Sequence
  Description of Artificial Sequence: Synthetic oligonucleotide
gacugcaaugggcuccugu

SEQ ID NO: 1039778 - RNA, 19 nt, Artificial Sequence
  Description of Artificial Sequence: Synthetic oligonucleotide
aaguguccugcaaccugga

SEQ ID NO: 1039779 - RNA, 19 nt, Artificial Sequence
  Description of Artificial Sequence: Synthetic oligonucleotide
auguaacggucagggaaga

SEQ ID NO: 1039780 - RNA, 19 nt, Artificial Sequence
  Description of Artificial Sequence: Synthetic oligonucleotide
uggcaacuucagccacuug

SEQ ID NO: 1039781 - RNA, 19 nt, Artificial Sequence
  Description of Artificial Sequence: Synthetic oligonucleotide
gcagcaguacggugcucgg

SEQ ID NO: 1039782 - RNA, 19 nt, Artificial Sequence
  Description of Artificial Sequence: Synthetic oligonucleotide
acggugcucggcgucaccu

SEQ ID NO: 1039783 - RNA, 19 nt, Artificial Sequence
  Description of Artificial Sequence: Synthetic oligonucleotide
ucaccucuugccggcuggc

SEQ ID NO: 1039784 - RNA, 19 nt, Artificial Sequence
  Description of Artificial Sequence: Synthetic oligonucleotide
ggacauacaccuggccacc

SEQ ID NO: 1039785 - RNA, 19 nt, Artificial Sequence
  Description of Artificial Sequence: Synthetic oligonucleotide
ggcuccuaacaaagucucg

SEQ ID NO: 1039786 - RNA, 19 nt, Artificial Sequence
  Description of Artificial Sequence: Synthetic oligonucleotide
gcucucaccucuugccggc

SEQ ID NO: 1039787 - RNA, 19 nt, Artificial Sequence
  Description of Artificial Sequence: Synthetic oligonucleotide
gcaggauguaacggucagg

SEQ ID NO: 1039788 - RNA, 19 nt, Artificial Sequence
  Description of Artificial Sequence: Synthetic oligonucleotide
caucauccacggucacuuc

SEQ ID NO: 1039789 - RNA, 19 nt, Artificial Sequence
  Description of Artificial Sequence: Synthetic oligonucleotide
uugagagacuuggcugaau

SEQ ID NO: 1039790 - RNA, 19 nt, Artificial Sequence
  Description of Artificial Sequence: Synthetic oligonucleotide
cccuugaaugggcucuggg

SEQ ID NO: 1039791 - RNA, 19 nt, Artificial Sequence
  Description of Artificial Sequence: Synthetic oligonucleotide
ucucgaucaacgggcgguu

SEQ ID NO: 1039792 - RNA, 19 nt, Artificial Sequence
  Description of Artificial Sequence: Synthetic oligonucleotide
gcagggaagagguuugccu

SEQ ID NO: 1039793 - RNA, 19 nt, Artificial Sequence
  Description of Artificial Sequence: Synthetic oligonucleotide
acgcucccuggucuguaca

SEQ ID NO: 1039794 - RNA, 19 nt, Artificial Sequence
  Description of Artificial Sequence: Synthetic oligonucleotide
ggcugaaugugaugucaga

SEQ ID NO: 1039795 - RNA, 19 nt, Artificial Sequence
  Description of Artificial Sequence: Synthetic oligonucleotide
cugccgccggcaugugucc

SEQ ID NO: 1039796 - RNA, 19 nt, Artificial Sequence
  Description of Artificial Sequence: Synthetic oligonucleotide
gucucgaucaacgggcggu

SEQ ID NO: 1039797 - RNA, 19 nt, Artificial Sequence
  Description of Artificial Sequence: Synthetic oligonucleotide
uccugccgccggcaugugu

SEQ ID NO: 1039798 - RNA, 19 nt, Artificial Sequence
  Description of Artificial Sequence: Synthetic oligonucleotide
gcuuccgcucacucuugag

SEQ ID NO: 1039799 - RNA, 19 nt, Artificial Sequence
  Description of Artificial Sequence: Synthetic oligonucleotide
gaacuccccagaguucaaa

SEQ ID NO: 1039800 - RNA, 19 nt, Artificial Sequence
  Description of Artificial Sequence: Synthetic oligonucleotide
caguacggugcucggcguc

SEQ ID NO: 1039801 - RNA, 19 nt, Artificial Sequence
  Description of Artificial Sequence: Synthetic oligonucleotide
ggcuuagaagggccuccag

SEQ ID NO: 1039802 - RNA, 19 nt, Artificial Sequence
  Description of Artificial Sequence: Synthetic oligonucleotide
cuagggcggaagaagcccu

SEQ ID NO: 1039803 - RNA, 19 nt, Artificial Sequence
  Description of Artificial Sequence: Synthetic oligonucleotide
guggcugacgaugggcauc

SEQ ID NO: 1039804 - RNA, 19 nt, Artificial Sequence
  Description of Artificial Sequence: Synthetic oligonucleotide
gcgucuccucacaucaucc

SEQ ID NO: 1039805 - RNA, 19 nt, Artificial Sequence
  Description of Artificial Sequence: Synthetic oligonucleotide
acccucagcgccaccuuug

SEQ ID NO: 1039806 - RNA, 19 nt, Artificial Sequence
  Description of Artificial Sequence: Synthetic oligonucleotide
cagcaguacggugcucggc

SEQ ID NO: 1039807 - RNA, 19 nt, Artificial Sequence
  Description of Artificial Sequence: Synthetic oligonucleotide
cuugggcuuagaagggccu

SEQ ID NO: 1039808 - RNA, 19 nt, Artificial Sequence
  Description of Artificial Sequence: Synthetic oligonucleotide
acggugucacacugcuuua

SEQ ID NO: 1039809 - RNA, 19 nt, Artificial Sequence
  Description of Artificial Sequence: Synthetic oligonucleotide
ggugcucggcgucaccuuc

SEQ ID NO: 1039810 - RNA, 19 nt, Artificial Sequence
  Description of Artificial Sequence: Synthetic oligonucleotide
ccucuugccggcuggcaac

SEQ ID NO: 1039811 - RNA, 19 nt, Artificial Sequence
  Description of Artificial Sequence: Synthetic oligonucleotide
ggauccggcggcccgggac

SEQ ID NO: 1039812 - RNA, 19 nt, Artificial Sequence
  Description of Artificial Sequence: Synthetic oligonucleotide
gucccucucggcuccggga

SEQ ID NO: 1039813 - RNA, 19 nt, Artificial Sequence
  Description of Artificial Sequence: Synthetic oligonucleotide
ccgcucacucuugagcugg

SEQ ID NO: 1039814 - RNA, 19 nt, Artificial Sequence
  Description of Artificial Sequence: Synthetic oligonucleotide
gcacuaccgccuguuaggc

SEQ ID NO: 1039815 - RNA, 19 nt, Artificial Sequence
  Description of Artificial Sequence: Synthetic oligonucleotide
cugccccuugaaugggcuc

SEQ ID NO: 1039816 - RNA, 19 nt, Artificial Sequence
  Description of Artificial Sequence: Synthetic oligonucleotide
gcagugguggggauccggc

SEQ ID NO: 1039817 - RNA, 19 nt, Artificial Sequence
  Description of Artificial Sequence: Synthetic oligonucleotide
cgcgagucuuuauuccugc

SEQ ID NO: 1039818 - RNA, 19 nt, Artificial Sequence
  Description of Artificial Sequence: Synthetic oligonucleotide
gcagacgcucccuggucug

SEQ ID NO: 1039819 - RNA, 19 nt, Artificial Sequence
  Description of Artificial Sequence: Synthetic oligonucleotide
cacacuacagggucucgau

SEQ ID NO: 1039820 - RNA, 19 nt, Artificial Sequence
  Description of Artificial Sequence: Synthetic oligonucleotide
cugaaacuucagaucguau

SEQ ID NO: 1039821 - RNA, 19 nt, Artificial Sequence
  Description of Artificial Sequence: Synthetic oligonucleotide
gccaucauccaguuguaau

SEQ ID NO: 1039822 - RNA, 19 nt, Artificial Sequence
  Description of Artificial Sequence: Synthetic oligonucleotide
ggaagacuugagagacuug

SEQ ID NO: 1039823 - RNA, 19 nt, Artificial Sequence
  Description of Artificial Sequence: Synthetic oligonucleotide
gcguuguauucugcaaggc

SEQ ID NO: 1039824 - RNA, 19 nt, Artificial Sequence
  Description of Artificial Sequence: Synthetic oligonucleotide
agguggcuccuaacaaagu

SEQ ID NO: 1039825 - RNA, 19 nt, Artificial Sequence
  Description of Artificial Sequence: Synthetic oligonucleotide
gggucuggcgggaacaaaa

SEQ ID NO: 1039826 - RNA, 19 nt, Artificial Sequence
  Description of Artificial Sequence: Synthetic oligonucleotide
cuugagagacuuggcugaa

SEQ ID NO: 1039827 - RNA, 19 nt, Artificial Sequence
  Description of Artificial Sequence: Synthetic oligonucleotide
cuguuugcccacgguguca

SEQ ID NO: 1039828 - RNA, 19 nt, Artificial Sequence
  Description of Artificial Sequence: Synthetic oligonucleotide
cucgaucaacgggcgguuc

SEQ ID NO: 1039829 - RNA, 19 nt, Artificial Sequence
  Description of Artificial Sequence: Synthetic oligonucleotide
gcgccgcccguuuuggggc

SEQ ID NO: 1039830 - RNA, 19 nt, Artificial Sequence
  Description of Artificial Sequence: Synthetic oligonucleotide
ggcccagugacugaagcgu

SEQ ID NO: 1039831 - RNA, 19 nt, Artificial Sequence
  Description of Artificial Sequence: Synthetic oligonucleotide
guaaugcaauucgaaccau

SEQ ID NO: 1039832 - RNA, 19 nt, Artificial Sequence
  Description of Artificial Sequence: Synthetic oligonucleotide
gcgguucaggcuccugcug

SEQ ID NO: 1039833 - RNA, 19 nt, Artificial Sequence
  Description of Artificial Sequence: Synthetic oligonucleotide
ccgccuguuaggcccagug

SEQ ID NO: 1039834 - RNA, 19 nt, Artificial Sequence
  Description of Artificial Sequence: Synthetic oligonucleotide
gcgcgagucuuuauuccug

SEQ ID NO: 1039835 - RNA, 19 nt, Artificial Sequence
  Description of Artificial Sequence: Synthetic oligonucleotide
gggagacgguguguucuag

SEQ ID NO: 1039836 - RNA, 19 nt, Artificial Sequence
  Description of Artificial Sequence: Synthetic oligonucleotide
gguuccagguagagaccug

SEQ ID NO: 1039837 - RNA, 19 nt, Artificial Sequence
  Description of Artificial Sequence: Synthetic oligonucleotide
gccggcuggcaacuucagc

SEQ ID NO: 1039838 - RNA, 19 nt, Artificial Sequence
  Description of Artificial Sequence: Synthetic oligonucleotide
ccgggacauacaccuggcc

SEQ ID NO: 1039839 - RNA, 19 nt, Artificial Sequence
  Description of Artificial Sequence: Synthetic oligonucleotide
guuuuggggccagcaccga

SEQ ID NO: 1039840 - RNA, 19 nt, Artificial Sequence
  Description of Artificial Sequence: Synthetic oligonucleotide
ccugcaaccuggagccauc

SEQ ID NO: 1039841 - RNA, 19 nt, Artificial Sequence
  Description of Artificial Sequence: Synthetic oligonucleotide
gcacacuacagggucucga

SEQ ID NO: 1039842 - RNA, 19 nt, Artificial Sequence
  Description of Artificial Sequence: Synthetic oligonucleotide
guuugcccacggugucaca

SEQ ID NO: 1039843 - RNA, 19 nt, Artificial Sequence
  Description of Artificial Sequence: Synthetic oligonucleotide
caggaccauuuugggagga

SEQ ID NO: 1039844 - RNA, 19 nt, Artificial Sequence
  Description of Artificial Sequence: Synthetic oligonucleotide
ccccuccucagugaucggc

SEQ ID NO: 1039845 - RNA, 19 nt, Artificial Sequence
  Description of Artificial Sequence: Synthetic oligonucleotide
cugcaaccuggagccauca

SEQ ID NO: 1039846 - RNA, 19 nt, Artificial Sequence
  Description of Artificial Sequence: Synthetic oligonucleotide
guacggugcucggcgucac

SEQ ID NO: 1039847 - RNA, 19 nt, Artificial Sequence
  Description of Artificial Sequence: Synthetic oligonucleotide
gugcucggcgucaccuuca

SEQ ID NO: 1039848 - RNA, 19 nt, Artificial Sequence
  Description of Artificial Sequence: Synthetic oligonucleotide
ggcgguucaggcuccugcu

SEQ ID NO: 1039849 - RNA, 19 nt, Artificial Sequence
  Description of Artificial Sequence: Synthetic oligonucleotide
ccccaccagagaagggaac

SEQ ID NO: 1039850 - RNA, 19 nt, Artificial Sequence
  Description of Artificial Sequence: Synthetic oligonucleotide
gacccucagcgccaccuuu

SEQ ID NO: 1039851 - RNA, 19 nt, Artificial Sequence
  Description of Artificial Sequence: Synthetic oligonucleotide
cgaucaacgggcgguucag

SEQ ID NO: 1039852 - RNA, 19 nt, Artificial Sequence
  Description of Artificial Sequence: Synthetic oligonucleotide
cugacugcaaugggcuccu

SEQ ID NO: 1039853 - RNA, 19 nt, Artificial Sequence
  Description of Artificial Sequence: Synthetic oligonucleotide
agacgcucccuggucugua

SEQ ID NO: 1039854 - RNA, 19 nt, Artificial Sequence
  Description of Artificial Sequence: Synthetic oligonucleotide
ccuguuaggcccagugacu

SEQ ID NO: 1039855 - RNA, 19 nt, Artificial Sequence
  Description of Artificial Sequence: Synthetic oligonucleotide
cagcaccgacaccgcggag

SEQ ID NO: 1039856 - RNA, 19 nt, Artificial Sequence
  Description of Artificial Sequence: Synthetic oligonucleotide
gguggggauccggcggccc

SEQ ID NO: 1039857 - RNA, 19 nt, Artificial Sequence
  Description of Artificial Sequence: Synthetic oligonucleotide
gagacaggucaagcacggu

SEQ ID NO: 1039858 - RNA, 19 nt, Artificial Sequence
  Description of Artificial Sequence: Synthetic oligonucleotide
gggcuuagaagggccucca

SEQ ID NO: 1039859 - RNA, 19 nt, Artificial Sequence
  Description of Artificial Sequence: Synthetic oligonucleotide
ggggagacgguguguucua

SEQ ID NO: 1039860 - RNA, 19 nt, Artificial Sequence
  Description of Artificial Sequence: Synthetic oligonucleotide
gcucggcgucaccuucacc

SEQ ID NO: 1039861 - RNA, 19 nt, Artificial Sequence
  Description of Artificial Sequence: Synthetic oligonucleotide
caccucuugccggcuggca

SEQ ID NO: 1039862 - RNA, 19 nt, Artificial Sequence
  Description of Artificial Sequence: Synthetic oligonucleotide
aggaagcaaggggcugcua

SEQ ID NO: 1039863 - RNA, 19 nt, Artificial Sequence
  Description of Artificial Sequence: Synthetic oligonucleotide
gcgagucuuuauuccugcu

SEQ ID NO: 1039864 - RNA, 19 nt, Artificial Sequence
  Description of Artificial Sequence: Synthetic oligonucleotide
ccggcggcccgggacauac

SEQ ID NO: 1039865 - RNA, 19 nt, Artificial Sequence
  Description of Artificial Sequence: Synthetic oligonucleotide
gcggcccgggacauacacc

SEQ ID NO: 1039866 - RNA, 19 nt, Artificial Sequence
  Description of Artificial Sequence: Synthetic oligonucleotide
ggacuuccuggggccuugc

SEQ ID NO: 1039867 - RNA, 19 nt, Artificial Sequence
  Description of Artificial Sequence: Synthetic oligonucleotide
gccccuugaaugggcucug

SEQ ID NO: 1039868 - RNA, 19 nt, Artificial Sequence
  Description of Artificial Sequence: Synthetic oligonucleotide
gggaacgaaaggggcagau

SEQ ID NO: 1039869 - RNA, 19 nt, Artificial Sequence
  Description of Artificial Sequence: Synthetic oligonucleotide
gcccacggugucacacugc

SEQ ID NO: 1039870 - RNA, 19 nt, Artificial Sequence
  Description of Artificial Sequence: Synthetic oligonucleotide
gccgccggcauguguccuc

SEQ ID NO: 1039871 - RNA, 19 nt, Artificial Sequence
  Description of Artificial Sequence: Synthetic oligonucleotide
accgccuguuaggcccagu

SEQ ID NO: 1039872 - RNA, 19 nt, Artificial Sequence
  Description of Artificial Sequence: Synthetic oligonucleotide
cggcuggcaacuucagcca

SEQ ID NO: 1039873 - RNA, 19 nt, Artificial Sequence
  Description of Artificial Sequence: Synthetic oligonucleotide
gcaguacggugcucggcgu

SEQ ID NO: 1039874 - RNA, 19 nt, Artificial Sequence
  Description of Artificial Sequence: Synthetic oligonucleotide
ccgccggcauguguccucc

SEQ ID NO: 1039875 - RNA, 19 nt, Artificial Sequence
  Description of Artificial Sequence: Synthetic oligonucleotide
auuccccagguggcuccua

SEQ ID NO: 1039876 - RNA, 19 nt, Artificial Sequence
  Description of Artificial Sequence: Synthetic oligonucleotide
cggcccgggacauacaccu

SEQ ID NO: 1039877 - RNA, 19 nt, Artificial Sequence
  Description of Artificial Sequence: Synthetic oligonucleotide
auccggcggcccgggacau

SEQ ID NO: 1039878 - RNA, 19 nt, Artificial Sequence
  Description of Artificial Sequence: Synthetic oligonucleotide
acgggcgguucaggcuccu

SEQ ID NO: 1039879 - RNA, 19 nt, Artificial Sequence
  Description of Artificial Sequence: Synthetic oligonucleotide
cgccuguuaggcccaguga

SEQ ID NO: 1039880 - RNA, 19 nt, Artificial Sequence
  Description of Artificial Sequence: Synthetic oligonucleotide
ggucagggaagaggacccu

SEQ ID NO: 1039881 - RNA, 19 nt, Artificial Sequence
  Description of Artificial Sequence: Synthetic oligonucleotide
ggaggagauuggacuuccu

SEQ ID NO: 1039882 - RNA, 19 nt, Artificial Sequence
  Description of Artificial Sequence: Synthetic oligonucleotide
cgcucccuggucuguacaa

SEQ ID NO: 1039883 - RNA, 19 nt, Artificial Sequence
  Description of Artificial Sequence: Synthetic oligonucleotide
ccggcauguguccuccagu

SEQ ID NO: 1039884 - RNA, 19 nt, Artificial Sequence
  Description of Artificial Sequence: Synthetic oligonucleotide
cccagaugcugcagacgcu

SEQ ID NO: 1039885 - RNA, 19 nt, Artificial Sequence
  Description of Artificial Sequence: Synthetic oligonucleotide
gccaggcgucuccucacau

SEQ ID NO: 1039886 - RNA, 19 nt, Artificial Sequence
  Description of Artificial Sequence: Synthetic oligonucleotide
gggauccggcggcccggga

SEQ ID NO: 1039887 - RNA, 19 nt, Artificial Sequence
  Description of Artificial Sequence: Synthetic oligonucleotide
ccuccagaucaggguggca

SEQ ID NO: 1039888 - RNA, 19 nt, Artificial Sequence
  Description of Artificial Sequence: Synthetic oligonucleotide
cggcuccgggacacaggca

SEQ ID NO: 1039889 - RNA, 19 nt, Artificial Sequence
  Description of Artificial Sequence: Synthetic oligonucleotide
cgggucccucucggcuccg

SEQ ID NO: 1039890 - RNA, 19 nt, Artificial Sequence
  Description of Artificial Sequence: Synthetic oligonucleotide
ccacggugucacacugcuu

SEQ ID NO: 1039891 - RNA, 19 nt, Artificial Sequence
  Description of Artificial Sequence: Synthetic oligonucleotide
cguguggcgccgcccguuu

SEQ ID NO: 1039892 - RNA, 19 nt, Artificial Sequence
  Description of Artificial Sequence: Synthetic oligonucleotide
cgccggcauguguccucca

SEQ ID NO: 1039893 - RNA, 19 nt, Artificial Sequence
  Description of Artificial Sequence: Synthetic oligonucleotide
cggugcucggcgucaccuu

SEQ ID NO: 1039894 - RNA, 19 nt, Artificial Sequence
  Description of Artificial Sequence: Synthetic oligonucleotide
ccguguggcgccgcccguu

SEQ ID NO: 1039895 - RNA, 19 nt, Artificial Sequence
  Description of Artificial Sequence: Synthetic oligonucleotide
ugaaguaagaaaaugaaaa

SEQ ID NO: 1039896 - RNA, 19 nt, Artificial Sequence
  Description of Artificial Sequence: Synthetic oligonucleotide
gaauauuggacgcauagag

SEQ ID NO: 1039897 - RNA, 19 nt, Artificial Sequence
  Description of Artificial Sequence: Synthetic oligonucleotide
auucguaucgcucuagggc

SEQ ID NO: 1039898 - RNA, 19 nt, Artificial Sequence
  Description of Artificial Sequence: Synthetic oligonucleotide
aaguaguccacaccaugcc

SEQ ID NO: 1039899 - RNA, 19 nt, Artificial Sequence
  Description of Artificial Sequence: Synthetic oligonucleotide
uuugacguucuucaccucg

SEQ ID NO: 1039900 - RNA, 19 nt, Artificial Sequence
  Description of Artificial Sequence: Synthetic oligonucleotide
uacugauaagcagugaggg

SEQ ID NO: 1039901 - RNA, 19 nt, Artificial Sequence
  Description of Artificial Sequence: Synthetic oligonucleotide
uauacuggggcgcaaggag

SEQ ID NO: 1039902 - RNA, 19 nt, Artificial Sequence
  Description of Artificial Sequence: Synthetic oligonucleotide
uuaaauuggccgaggcugg

SEQ ID NO: 1039903 - RNA, 19 nt, Artificial Sequence
  Description of Artificial Sequence: Synthetic oligonucleotide
aucaucuugaacaagucag

SEQ ID NO: 1039904 - RNA, 19 nt, Artificial Sequence
  Description of Artificial Sequence: Synthetic oligonucleotide
agucaaguaguccacacca

SEQ ID NO: 1039905 - RNA, 19 nt, Artificial Sequence
  Description of Artificial Sequence: Synthetic oligonucleotide
aggaucgcugauuuugacc

SEQ ID NO: 1039906 - RNA, 19 nt, Artificial Sequence
  Description of Artificial Sequence: Synthetic oligonucleotide
aauaaaagccccacgagaa

SEQ ID NO: 1039907 - RNA, 19 nt, Artificial Sequence
  Description of Artificial Sequence: Synthetic oligonucleotide
auggauuugacguucuuca

SEQ ID NO: 1039908 - RNA, 19 nt, Artificial Sequence
  Description of Artificial Sequence: Synthetic oligonucleotide
uuuuaaauuggccgaggcu

SEQ ID NO: 1039909 - RNA, 19 nt, Artificial Sequence
  Description of Artificial Sequence: Synthetic oligonucleotide
ucgcagaaggcgcugauag

SEQ ID NO: 1039910 - RNA, 19 nt, Artificial Sequence
  Description of Artificial Sequence: Synthetic oligonucleotide
cuugacgcggccuugguag

SEQ ID NO: 1039911 - RNA, 19 nt, Artificial Sequence
  Description of Artificial Sequence: Synthetic oligonucleotide
cuagcugguacugauaagc

SEQ ID NO: 1039912 - RNA, 19 nt, Artificial Sequence
  Description of Artificial Sequence: Synthetic oligonucleotide
ucuagcaccaccacgcccu

SEQ ID NO: 1039913 - RNA, 19 nt, Artificial Sequence
  Description of Artificial Sequence: Synthetic oligonucleotide
gaaccagucaaguagucca

SEQ ID NO: 1039914 - RNA, 19 nt, Artificial Sequence
  Description of Artificial Sequence: Synthetic oligonucleotide
ugcacgaagcgguaaacag

SEQ ID NO: 1039915 - RNA, 19 nt, Artificial Sequence
  Description of Artificial Sequence: Synthetic oligonucleotide
ucaaguaguccacaccaug

SEQ ID NO: 1039916 - RNA, 19 nt, Artificial Sequence
  Description of Artificial Sequence: Synthetic oligonucleotide
aacgaacugaaguaagaaa

SEQ ID NO: 1039917 - RNA, 19 nt, Artificial Sequence
  Description of Artificial Sequence: Synthetic oligonucleotide
guugacagagcagaaauug

SEQ ID NO: 1039918 - RNA, 19 nt, Artificial Sequence
  Description of Artificial Sequence: Synthetic oligonucleotide
auucguugcaguaguaggc

SEQ ID NO: 1039919 - RNA, 19 nt, Artificial Sequence
  Description of Artificial Sequence: Synthetic oligonucleotide
uucguaucgcucuagggcu

SEQ ID NO: 1039920 - RNA, 19 nt, Artificial Sequence
  Description of Artificial Sequence: Synthetic oligonucleotide
agacggacgggccaagccc

SEQ ID NO: 1039921 - RNA, 19 nt, Artificial Sequence
  Description of Artificial Sequence: Synthetic oligonucleotide
aauaccauuucaguuccca

SEQ ID NO: 1039922 - RNA, 19 nt, Artificial Sequence
  Description of Artificial Sequence: Synthetic oligonucleotide
gaaaacgaacugaaguaag

SEQ ID NO: 1039923 - RNA, 19 nt, Artificial Sequence
  Description of Artificial Sequence: Synthetic oligonucleotide
uaaauuaagugaggggagc

SEQ ID NO: 1039924 - RNA, 19 nt, Artificial Sequence
  Description of Artificial Sequence: Synthetic oligonucleotide
uccccuacaguacaggagu

SEQ ID NO: 1039925 - RNA, 19 nt, Artificial Sequence
  Description of Artificial Sequence: Synthetic oligonucleotide
uucucacucguaacgaaca

SEQ ID NO: 1039926 - RNA, 19 nt, Artificial Sequence
  Description of Artificial Sequence: Synthetic oligonucleotide
ugccaauaaggguggaagg

SEQ ID NO: 1039927 - RNA, 19 nt, Artificial Sequence
  Description of Artificial Sequence: Synthetic oligonucleotide
ugauuuugaccguucgagc

SEQ ID NO: 1039928 - RNA, 19 nt, Artificial Sequence
  Description of Artificial Sequence: Synthetic oligonucleotide
auaaauuaagugaggggag

SEQ ID NO: 1039929 - RNA, 19 nt, Artificial Sequence
  Description of Artificial Sequence: Synthetic oligonucleotide
ucauaguucuuucuuuaaa

SEQ ID NO: 1039930 - RNA, 19 nt, Artificial Sequence
  Description of Artificial Sequence: Synthetic oligonucleotide
guaguaggcagguucgucc

SEQ ID NO: 1039931 - RNA, 19 nt, Artificial Sequence
  Description of Artificial Sequence: Synthetic oligonucleotide
accagguacguguuucggc

SEQ ID NO: 1039932 - RNA, 19 nt, Artificial Sequence
  Description of Artificial Sequence: Synthetic oligonucleotide
gagcauauugccuguggag

SEQ ID NO: 1039933 - RNA, 19 nt, Artificial Sequence
  Description of Artificial Sequence: Synthetic oligonucleotide
cauguauagcugcacagug

SEQ ID NO: 1039934 - RNA, 19 nt, Artificial Sequence
  Description of Artificial Sequence: Synthetic oligonucleotide
aaauuaagugaggggagcu

SEQ ID NO: 1039935 - RNA, 19 nt, Artificial Sequence
  Description of Artificial Sequence: Synthetic oligonucleotide
acaccuccacaucacauuc

SEQ ID NO: 1039936 - RNA, 19 nt, Artificial Sequence
  Description of Artificial Sequence: Synthetic oligonucleotide
auaccauuucaguucccac

SEQ ID NO: 1039937 - RNA, 19 nt, Artificial Sequence
  Description of Artificial Sequence: Synthetic oligonucleotide
aaaacgaacugaaguaaga

SEQ ID NO: 1039938 - RNA, 19 nt, Artificial Sequence
  Description of Artificial Sequence: Synthetic oligonucleotide
uaccauuucaguucccacu

SEQ ID NO: 1039939 - RNA, 19 nt, Artificial Sequence
  Description of Artificial Sequence: Synthetic oligonucleotide
gauuugacguucuucaccu

SEQ ID NO: 1039940 - RNA, 19 nt, Artificial Sequence
  Description of Artificial Sequence: Synthetic oligonucleotide
aauuaagugaggggagcug

SEQ ID NO: 1039941 - RNA, 19 nt, Artificial Sequence
  Description of Artificial Sequence: Synthetic oligonucleotide
ugauagucucccaguagug

SEQ ID NO: 1039942 - RNA, 19 nt, Artificial Sequence
  Description of Artificial Sequence: Synthetic oligonucleotide
auaggguaggguugggaag

SEQ ID NO: 1039943 - RNA, 19 nt, Artificial Sequence
  Description of Artificial Sequence: Synthetic oligonucleotide
ucaugcacuucaaaccacu

SEQ ID NO: 1039944 - RNA, 19 nt, Artificial Sequence
  Description of Artificial Sequence: Synthetic oligonucleotide
gaccguucgagcuacguuc

SEQ ID NO: 1039945 - RNA, 19 nt, Artificial Sequence
  Description of Artificial Sequence: Synthetic oligonucleotide
gaguguuacccgcaugaag

SEQ ID NO: 1039946 - RNA, 19 nt, Artificial Sequence
  Description of Artificial Sequence: Synthetic oligonucleotide
acgaacugaaguaagaaaa

SEQ ID NO: 1039947 - RNA, 19 nt, Artificial Sequence
  Description of Artificial Sequence: Synthetic oligonucleotide
agguacguguuucggcugc

SEQ ID NO: 1039948 - RNA, 19 nt, Artificial Sequence
  Description of Artificial Sequence: Synthetic oligonucleotide
guaacgaacaggauguuga

SEQ ID NO: 1039949 - RNA, 19 nt, Artificial Sequence
  Description of Artificial Sequence: Synthetic oligonucleotide
augguaguggcccaccaug

SEQ ID NO: 1039950 - RNA, 19 nt, Artificial Sequence
  Description of Artificial Sequence: Synthetic oligonucleotide
agugaggggccccacguuc

SEQ ID NO: 1039951 - RNA, 19 nt, Artificial Sequence
  Description of Artificial Sequence: Synthetic oligonucleotide
aauuggccgaggcugggga

SEQ ID NO: 1039952 - RNA, 19 nt, Artificial Sequence
  Description of Artificial Sequence: Synthetic oligonucleotide
gaaguaagaaaaugaaaau

SEQ ID NO: 1039953 - RNA, 19 nt, Artificial Sequence
  Description of Artificial Sequence: Synthetic oligonucleotide
gauuuugaccguucgagcu

SEQ ID NO: 1039954 - RNA, 19 nt, Artificial Sequence
  Description of Artificial Sequence: Synthetic oligonucleotide
uuaagugaggggagcugcc

SEQ ID NO: 1039955 - RNA, 19 nt, Artificial Sequence
  Description of Artificial Sequence: Synthetic oligonucleotide
accaugagagcccggcugg

SEQ ID NO: 1039956 - RNA, 19 nt, Artificial Sequence
  Description of Artificial Sequence: Synthetic oligonucleotide
ucucacucguaacgaacag

SEQ ID NO: 1039957 - RNA, 19 nt, Artificial Sequence
  Description of Artificial Sequence: Synthetic oligonucleotide
guuacccgcaugaaggcgg

SEQ ID NO: 1039958 - RNA, 19 nt, Artificial Sequence
  Description of Artificial Sequence: Synthetic oligonucleotide
aguagccugcacccagugc

SEQ ID NO: 1039959 - RNA, 19 nt, Artificial Sequence
  Description of Artificial Sequence: Synthetic oligonucleotide
ucgcagugcaccagguacg

SEQ ID NO: 1039960 - RNA, 19 nt, Artificial Sequence
  Description of Artificial Sequence: Synthetic oligonucleotide
guucgagcuacguuccagg

SEQ ID NO: 1039961 - RNA, 19 nt, Artificial Sequence
  Description of Artificial Sequence: Synthetic oligonucleotide
aaagccccacgagaaacuc

SEQ ID NO: 1039962 - RNA, 19 nt, Artificial Sequence
  Description of Artificial Sequence: Synthetic oligonucleotide
uucaccucguuccauucgu

SEQ ID NO: 1039963 - RNA, 19 nt, Artificial Sequence
  Description of Artificial Sequence: Synthetic oligonucleotide
agcaccaugagagcccggc

SEQ ID NO: 1039964 - RNA, 19 nt, Artificial Sequence
  Description of Artificial Sequence: Synthetic oligonucleotide
uaggcgauuuucuucccug

SEQ ID NO: 1039965 - RNA, 19 nt, Artificial Sequence
  Description of Artificial Sequence: Synthetic oligonucleotide
gcagguucguccuugacgc

SEQ ID NO: 1039966 - RNA, 19 nt, Artificial Sequence
  Description of Artificial Sequence: Synthetic oligonucleotide
augccgaucgcagaaggcg

SEQ ID NO: 1039967 - RNA, 19 nt, Artificial Sequence
  Description of Artificial Sequence: Synthetic oligonucleotide
cauauacuggggcgcaagg

SEQ ID NO: 1039968 - RNA, 19 nt, Artificial Sequence
  Description of Artificial Sequence: Synthetic oligonucleotide
agaaaacgaacugaaguaa

SEQ ID NO: 1039969 - RNA, 19 nt, Artificial Sequence
  Description of Artificial Sequence: Synthetic oligonucleotide
accucguuccauucguauc

SEQ ID NO: 1039970 - RNA, 19 nt, Artificial Sequence
  Description of Artificial Sequence: Synthetic oligonucleotide
ggauuugacguucuucacc

SEQ ID NO: 1039971 - RNA, 19 nt, Artificial Sequence
  Description of Artificial Sequence: Synthetic oligonucleotide
uugguaggcgauuuucuuc

SEQ ID NO: 1039972 - RNA, 19 nt, Artificial Sequence
  Description of Artificial Sequence: Synthetic oligonucleotide
uguuacccgcaugaaggcg

SEQ ID NO: 1039973 - RNA, 19 nt, Artificial Sequence
  Description of Artificial Sequence: Synthetic oligonucleotide
cacaccaugccgaucgcag

SEQ ID NO: 1039974 - RNA, 19 nt, Artificial Sequence
  Description of Artificial Sequence: Synthetic oligonucleotide
auuggacgcauagagguca

SEQ ID NO: 1039975 - RNA, 19 nt, Artificial Sequence
  Description of Artificial Sequence: Synthetic oligonucleotide
agcauauugccuguggagu

SEQ ID NO: 1039976 - RNA, 19 nt, Artificial Sequence
  Description of Artificial Sequence: Synthetic oligonucleotide
aaccagucaaguaguccac

SEQ ID NO: 1039977 - RNA, 19 nt, Artificial Sequence
  Description of Artificial Sequence: Synthetic oligonucleotide
aaugguaguggcccaccau

SEQ ID NO: 1039978 - RNA, 19 nt, Artificial Sequence
  Description of Artificial Sequence: Synthetic oligonucleotide
aaauaccauuucaguuccc

SEQ ID NO: 1039979 - RNA, 19 nt, Artificial Sequence
  Description of Artificial Sequence: Synthetic oligonucleotide
aauaaggguggaagggcug

SEQ ID NO: 1039980 - RNA, 19 nt, Artificial Sequence
  Description of Artificial Sequence: Synthetic oligonucleotide
aacaggaauauuggacgca

SEQ ID NO: 1039981 - RNA, 19 nt, Artificial Sequence
  Description of Artificial Sequence: Synthetic oligonucleotide
cugguacugauaagcagug

SEQ ID NO: 1039982 - RNA, 19 nt, Artificial Sequence
  Description of Artificial Sequence: Synthetic oligonucleotide
acaugaaucaugggcacga

SEQ ID NO: 1039983 - RNA, 19 nt, Artificial Sequence
  Description of Artificial Sequence: Synthetic oligonucleotide
gcgguaaacaggaauauug

SEQ ID NO: 1039984 - RNA, 19 nt, Artificial Sequence
  Description of Artificial Sequence: Synthetic oligonucleotide
uuacccgcaugaaggcggg

SEQ ID NO: 1039985 - RNA, 19 nt, Artificial Sequence
  Description of Artificial Sequence: Synthetic oligonucleotide
cucguaacgaacaggaugu

SEQ ID NO: 1039986 - RNA, 19 nt, Artificial Sequence
  Description of Artificial Sequence: Synthetic oligonucleotide
augcacuucaaaccacuca

SEQ ID NO: 1039987 - RNA, 19 nt, Artificial Sequence
  Description of Artificial Sequence: Synthetic oligonucleotide
gaagcgguaaacaggaaua

SEQ ID NO: 1039988 - RNA, 19 nt, Artificial Sequence
  Description of Artificial Sequence: Synthetic oligonucleotide
uauuggacgcauagagguc

SEQ ID NO: 1039989 - RNA, 19 nt, Artificial Sequence
  Description of Artificial Sequence: Synthetic oligonucleotide
uugacguucuucaccucgu

SEQ ID NO: 1039990 - RNA, 19 nt, Artificial Sequence
  Description of Artificial Sequence: Synthetic oligonucleotide
uacaguacaggagucgcuc

SEQ ID NO: 1039991 - RNA, 19 nt, Artificial Sequence
  Description of Artificial Sequence: Synthetic oligonucleotide
ugccuguggaguguuaccc

SEQ ID NO: 1039992 - RNA, 19 nt, Artificial Sequence
  Description of Artificial Sequence: Synthetic oligonucleotide
cacguuccaggcaauguug

SEQ ID NO: 1039993 - RNA, 19 nt, Artificial Sequence
  Description of Artificial Sequence: Synthetic oligonucleotide
ugccgaucgcagaaggcgc

SEQ ID NO: 1039994 - RNA, 19 nt, Artificial Sequence
  Description of Artificial Sequence: Synthetic oligonucleotide
ccucguuccauucguaucg

SEQ ID NO: 1039995 - RNA, 19 nt, Artificial Sequence
  Description of Artificial Sequence: Synthetic oligonucleotide
cagccaguagccugcaccc

SEQ ID NO: 1039996 - RNA, 19 nt, Artificial Sequence
  Description of Artificial Sequence: Synthetic oligonucleotide
aaucaugggcacgauggau

SEQ ID NO: 1039997 - RNA, 19 nt, Artificial Sequence
  Description of Artificial Sequence: Synthetic oligonucleotide
uuuugaccguucgagcuac

SEQ ID NO: 1039998 - RNA, 19 nt, Artificial Sequence
  Description of Artificial Sequence: Synthetic oligonucleotide
agccccacgagaaacucac

SEQ ID NO: 1039999 - RNA, 19 nt, Artificial Sequence
  Description of Artificial Sequence: Synthetic oligonucleotide
guacaggagucgcucaccc

SEQ ID NO: 1040000 - RNA, 19 nt, Artificial Sequence
  Description of Artificial Sequence: Synthetic oligonucleotide
guacugguccaagaaagug

SEQ ID NO: 1040001 - RNA, 19 nt, Artificial Sequence
  Description of Artificial Sequence: Synthetic oligonucleotide
aucgcgacgugcuggcggg

SEQ ID NO: 1040002 - RNA, 19 nt, Artificial Sequence
  Description of Artificial Sequence: Synthetic oligonucleotide
ugauguugacagagcagaa

SEQ ID NO: 1040003 - RNA, 19 nt, Artificial Sequence
  Description of Artificial Sequence: Synthetic oligonucleotide
cucacucguaacgaacagg

SEQ ID NO: 1040004 - RNA, 19 nt, Artificial Sequence
  Description of Artificial Sequence: Synthetic oligonucleotide
ucguugcaguaguaggcag

SEQ ID NO: 1040005 - RNA, 19 nt, Artificial Sequence
  Description of Artificial Sequence: Synthetic oligonucleotide
uaaauuggccgaggcuggg

SEQ ID NO: 1040006 - RNA, 19 nt, Artificial Sequence
  Description of Artificial Sequence: Synthetic oligonucleotide
ucgagcuacguuccaggac

SEQ ID NO: 1040007 - RNA, 19 nt, Artificial Sequence
  Description of Artificial Sequence: Synthetic oligonucleotide
uggauuugacguucuucac

SEQ ID NO: 1040008 - RNA, 19 nt, Artificial Sequence
  Description of Artificial Sequence: Synthetic oligonucleotide
gccguucucacucguaacg

SEQ ID NO: 1040009 - RNA, 19 nt, Artificial Sequence
  Description of Artificial Sequence: Synthetic oligonucleotide
uucgagcuacguuccagga

SEQ ID NO: 1040010 - RNA, 19 nt, Artificial Sequence
  Description of Artificial Sequence: Synthetic oligonucleotide
auuuugaccguucgagcua

SEQ ID NO: 1040011 - RNA, 19 nt, Artificial Sequence
  Description of Artificial Sequence: Synthetic oligonucleotide
ggguacugguccaagaaag

SEQ ID NO: 1040012 - RNA, 19 nt, Artificial Sequence
  Description of Artificial Sequence: Synthetic oligonucleotide
caucgcgacgugcuggcgg

SEQ ID NO: 1040013 - RNA, 19 nt, Artificial Sequence
  Description of Artificial Sequence: Synthetic oligonucleotide
agguucguccuugacgcgg

SEQ ID NO: 1040014 - RNA, 19 nt, Artificial Sequence
  Description of Artificial Sequence: Synthetic oligonucleotide
ggggcguccggccucaucg

SEQ ID NO: 1040015 - RNA, 19 nt, Artificial Sequence
  Description of Artificial Sequence: Synthetic oligonucleotide
uggcguucggcugccaggg

SEQ ID NO: 1040016 - RNA, 19 nt, Artificial Sequence
  Description of Artificial Sequence: Synthetic oligonucleotide
gacggacgggccaagcccg

SEQ ID NO: 1040017 - RNA, 19 nt, Artificial Sequence
  Description of Artificial Sequence: Synthetic oligonucleotide
gacguaggggaggggagcg

SEQ ID NO: 1040018 - RNA, 19 nt, Artificial Sequence
  Description of Artificial Sequence: Synthetic oligonucleotide
gggaccuucauguauagcu

SEQ ID NO: 1040019 - RNA, 19 nt, Artificial Sequence
  Description of Artificial Sequence: Synthetic oligonucleotide
caggaggucggguuucccc

SEQ ID NO: 1040020 - RNA, 19 nt, Artificial Sequence
  Description of Artificial Sequence: Synthetic oligonucleotide
ucucccguugcaccuggca

SEQ ID NO: 1040021 - RNA, 19 nt, Artificial Sequence
  Description of Artificial Sequence: Synthetic oligonucleotide
accguucgagcuacguucc

SEQ ID NO: 1040022 - RNA, 19 nt, Artificial Sequence
  Description of Artificial Sequence: Synthetic oligonucleotide
acgcauagaggucauccaa

SEQ ID NO: 1040023 - RNA, 19 nt, Artificial Sequence
  Description of Artificial Sequence: Synthetic oligonucleotide
cucaucgcgacgugcuggc

SEQ ID NO: 1040024 - RNA, 19 nt, Artificial Sequence
  Description of Artificial Sequence: Synthetic oligonucleotide
uacguguuucggcugccgu

SEQ ID NO: 1040025 - RNA, 19 nt, Artificial Sequence
  Description of Artificial Sequence: Synthetic oligonucleotide
guguuacccgcaugaaggc

SEQ ID NO: 1040026 - RNA, 19 nt, Artificial Sequence
  Description of Artificial Sequence: Synthetic oligonucleotide
cucaugcacuucaaaccac

SEQ ID NO: 1040027 - RNA, 19 nt, Artificial Sequence
  Description of Artificial Sequence: Synthetic oligonucleotide
aagcgguaaacaggaauau

SEQ ID NO: 1040028 - RNA, 19 nt, Artificial Sequence
  Description of Artificial Sequence: Synthetic oligonucleotide
cucccguugcaccuggcag

SEQ ID NO: 1040029 - RNA, 19 nt, Artificial Sequence
  Description of Artificial Sequence: Synthetic oligonucleotide
gauguugacagagcagaaa

SEQ ID NO: 1040030 - RNA, 19 nt, Artificial Sequence
  Description of Artificial Sequence: Synthetic oligonucleotide
guuccauucguaucgcucu

SEQ ID NO: 1040031 - RNA, 19 nt, Artificial Sequence
  Description of Artificial Sequence: Synthetic oligonucleotide
uugacgcggccuugguagg

SEQ ID NO: 1040032 - RNA, 19 nt, Artificial Sequence
  Description of Artificial Sequence: Synthetic oligonucleotide
ugcaccagguacguguuuc

SEQ ID NO: 1040033 - RNA, 19 nt, Artificial Sequence
  Description of Artificial Sequence: Synthetic oligonucleotide
caccaugagagcccggcug

SEQ ID NO: 1040034 - RNA, 19 nt, Artificial Sequence
  Description of Artificial Sequence: Synthetic oligonucleotide
acaucacauucguugcagu

SEQ ID NO: 1040035 - RNA, 19 nt, Artificial Sequence
  Description of Artificial Sequence: Synthetic oligonucleotide
auauacuggggcgcaagga

SEQ ID NO: 1040036 - RNA, 19 nt, Artificial Sequence
  Description of Artificial Sequence: Synthetic oligonucleotide
gcaguaguaggcagguucg

SEQ ID NO: 1040037 - RNA, 19 nt, Artificial Sequence
  Description of Artificial Sequence: Synthetic oligonucleotide
accuggcagugcuucauug

SEQ ID NO: 1040038 - RNA, 19 nt, Artificial Sequence
  Description of Artificial Sequence: Synthetic oligonucleotide
uuugaccguucgagcuacg

SEQ ID NO: 1040039 - RNA, 19 nt, Artificial Sequence
  Description of Artificial Sequence: Synthetic oligonucleotide
guucucacucguaacgaac

SEQ ID NO: 1040040 - RNA, 19 nt, Artificial Sequence
  Description of Artificial Sequence: Synthetic oligonucleotide
augggcacgauggauuuga

SEQ ID NO: 1040041 - RNA, 19 nt, Artificial Sequence
  Description of Artificial Sequence: Synthetic oligonucleotide
caugcacuucaaaccacuc

SEQ ID NO: 1040042 - RNA, 19 nt, Artificial Sequence
  Description of Artificial Sequence: Synthetic oligonucleotide
ucaugggcacgauggauuu

SEQ ID NO: 1040043 - RNA, 19 nt, Artificial Sequence
  Description of Artificial Sequence: Synthetic oligonucleotide
gcauauugccuguggagug

SEQ ID NO: 1040044 - RNA, 19 nt, Artificial Sequence
  Description of Artificial Sequence: Synthetic oligonucleotide
uccauucguaucgcucuag

SEQ ID NO: 1040045 - RNA, 19 nt, Artificial Sequence
  Description of Artificial Sequence: Synthetic oligonucleotide
aggcgugugcugguggccc

SEQ ID NO: 1040046 - RNA, 19 nt, Artificial Sequence
  Description of Artificial Sequence: Synthetic oligonucleotide
gcugauagucucccaguag

SEQ ID NO: 1040047 - RNA, 19 nt, Artificial Sequence
  Description of Artificial Sequence: Synthetic oligonucleotide
auuggccgaggcuggggag

SEQ ID NO: 1040048 - RNA, 19 nt, Artificial Sequence
  Description of Artificial Sequence: Synthetic oligonucleotide
cucuagcaccaccacgccc

SEQ ID NO: 1040049 - RNA, 19 nt, Artificial Sequence
  Description of Artificial Sequence: Synthetic oligonucleotide
gaaugguaguggcccacca

SEQ ID NO: 1040050 - RNA, 19 nt, Artificial Sequence
  Description of Artificial Sequence: Synthetic oligonucleotide
ugaccguucgagcuacguu

SEQ ID NO: 1040051 - RNA, 19 nt, Artificial Sequence
  Description of Artificial Sequence: Synthetic oligonucleotide
agggcuagcugguacugau

SEQ ID NO: 1040052 - RNA, 19 nt, Artificial Sequence
  Description of Artificial Sequence: Synthetic oligonucleotide
gcgggagccagcgugaagg

SEQ ID NO: 1040053 - RNA, 19 nt, Artificial Sequence
  Description of Artificial Sequence: Synthetic oligonucleotide
ccggacauauacuggggcg

SEQ ID NO: 1040054 - RNA, 19 nt, Artificial Sequence
  Description of Artificial Sequence: Synthetic oligonucleotide
cacgauggauuugacguuc

SEQ ID NO: 1040055 - RNA, 19 nt, Artificial Sequence
  Description of Artificial Sequence: Synthetic oligonucleotide
gcacgaagcgguaaacagg

SEQ ID NO: 1040056 - RNA, 19 nt, Artificial Sequence
  Description of Artificial Sequence: Synthetic oligonucleotide
agggaccuucauguauagc

SEQ ID NO: 1040057 - RNA, 19 nt, Artificial Sequence
  Description of Artificial Sequence: Synthetic oligonucleotide
uaucgcucuagggcuagcu

SEQ ID NO: 1040058 - RNA, 19 nt, Artificial Sequence
  Description of Artificial Sequence: Synthetic oligonucleotide
gcgauuuucuucccugccc

SEQ ID NO: 1040059 - RNA, 19 nt, Artificial Sequence
  Description of Artificial Sequence: Synthetic oligonucleotide
cuuccccuacaguacagga

SEQ ID NO: 1040060 - RNA, 19 nt, Artificial Sequence
  Description of Artificial Sequence: Synthetic oligonucleotide
caguacaggagucgcucac

SEQ ID NO: 1040061 - RNA, 19 nt, Artificial Sequence
  Description of Artificial Sequence: Synthetic oligonucleotide
ucucccaguagugcucaug

SEQ ID NO: 1040062 - RNA, 19 nt, Artificial Sequence
  Description of Artificial Sequence: Synthetic oligonucleotide
agugaggggagcugccaau

SEQ ID NO: 1040063 - RNA, 19 nt, Artificial Sequence
  Description of Artificial Sequence: Synthetic oligonucleotide
auugacugcaggaggcaga

SEQ ID NO: 1040064 - RNA, 19 nt, Artificial Sequence
  Description of Artificial Sequence: Synthetic oligonucleotide
gucauccaagauuggccac

SEQ ID NO: 1040065 - RNA, 19 nt, Artificial Sequence
  Description of Artificial Sequence: Synthetic oligonucleotide
aggcaucguaggccugcgc

SEQ ID NO: 1040066 - RNA, 19 nt, Artificial Sequence
  Description of Artificial Sequence: Synthetic oligonucleotide
cagggaccuucauguauag

SEQ ID NO: 1040067 - RNA, 19 nt, Artificial Sequence
  Description of Artificial Sequence: Synthetic oligonucleotide
uggggcgcaaggagagccc

SEQ ID NO: 1040068 - RNA, 19 nt, Artificial Sequence
  Description of Artificial Sequence: Synthetic oligonucleotide
ccuacaguacaggagucgc

SEQ ID NO: 1040069 - RNA, 19 nt, Artificial Sequence
  Description of Artificial Sequence: Synthetic oligonucleotide
uugaccguucgagcuacgu

SEQ ID NO: 1040070 - RNA, 19 nt, Artificial Sequence
  Description of Artificial Sequence: Synthetic oligonucleotide
uuccauucguaucgcucua

SEQ ID NO: 1040071 - RNA, 19 nt, Artificial Sequence
  Description of Artificial Sequence: Synthetic oligonucleotide
ccccacgagaaacucaccc

SEQ ID NO: 1040072 - RNA, 19 nt, Artificial Sequence
  Description of Artificial Sequence: Synthetic oligonucleotide
caucacauucguugcagua

SEQ ID NO: 1040073 - RNA, 19 nt, Artificial Sequence
  Description of Artificial Sequence: Synthetic oligonucleotide
ggcuagcugguacugauaa

SEQ ID NO: 1040074 - RNA, 19 nt, Artificial Sequence
  Description of Artificial Sequence: Synthetic oligonucleotide
ggaccuucauguauagcug

SEQ ID NO: 1040075 - RNA, 19 nt, Artificial Sequence
  Description of Artificial Sequence: Synthetic oligonucleotide
uuucggcugccguucucac

SEQ ID NO: 1040076 - RNA, 19 nt, Artificial Sequence
  Description of Artificial Sequence: Synthetic oligonucleotide
uaguccacaccaugccgau

SEQ ID NO: 1040077 - RNA, 19 nt, Artificial Sequence
  Description of Artificial Sequence: Synthetic oligonucleotide
ucguuccauucguaucgcu

SEQ ID NO: 1040078 - RNA, 19 nt, Artificial Sequence
  Description of Artificial Sequence: Synthetic oligonucleotide
acgcccuguaggcccgcgc

SEQ ID NO: 1040079 - RNA, 19 nt, Artificial Sequence
  Description of Artificial Sequence: Synthetic oligonucleotide
ccauucguaucgcucuagg

SEQ ID NO: 1040080 - RNA, 19 nt, Artificial Sequence
  Description of Artificial Sequence: Synthetic oligonucleotide
cuagggcuagcugguacug

SEQ ID NO: 1040081 - RNA, 19 nt, Artificial Sequence
  Description of Artificial Sequence: Synthetic oligonucleotide
cagguacguguuucggcug

SEQ ID NO: 1040082 - RNA, 19 nt, Artificial Sequence
  Description of Artificial Sequence: Synthetic oligonucleotide
guuucggcugccguucuca

SEQ ID NO: 1040083 - RNA, 19 nt, Artificial Sequence
  Description of Artificial Sequence: Synthetic oligonucleotide
ggguuugagcaccaugaga

SEQ ID NO: 1040084 - RNA, 19 nt, Artificial Sequence
  Description of Artificial Sequence: Synthetic oligonucleotide
guacguguuucggcugccg

SEQ ID NO: 1040085 - RNA, 19 nt, Artificial Sequence
  Description of Artificial Sequence: Synthetic oligonucleotide
ugcgugggcgggcgagcgg

SEQ ID NO: 1040086 - RNA, 19 nt, Artificial Sequence
  Description of Artificial Sequence: Synthetic oligonucleotide
ucguaucgcucuagggcua

SEQ ID NO: 1040087 - RNA, 19 nt, Artificial Sequence
  Description of Artificial Sequence: Synthetic oligonucleotide
cucguuccauucguaucgc

SEQ ID NO: 1040088 - RNA, 19 nt, Artificial Sequence
  Description of Artificial Sequence: Synthetic oligonucleotide
uguuucggcugccguucuc

SEQ ID NO: 1040089 - RNA, 19 nt, Artificial Sequence
  Description of Artificial Sequence: Synthetic oligonucleotide
ugacguucuucaccucguu

SEQ ID NO: 1040090 - RNA, 19 nt, Artificial Sequence
  Description of Artificial Sequence: Synthetic oligonucleotide
acguguuucggcugccguu

SEQ ID NO: 1040091 - RNA, 19 nt, Artificial Sequence
  Description of Artificial Sequence: Synthetic oligonucleotide
uccuugacgcggccuuggu

SEQ ID NO: 1040092 - RNA, 19 nt, Artificial Sequence
  Description of Artificial Sequence: Synthetic oligonucleotide
accaugccgaucgcagaag

SEQ ID NO: 1040093 - RNA, 19 nt, Artificial Sequence
  Description of Artificial Sequence: Synthetic oligonucleotide
cagguucguccuugacgcg

SEQ ID NO: 1040094 - RNA, 19 nt, Artificial Sequence
  Description of Artificial Sequence: Synthetic oligonucleotide
cgcauagaggucauccaag

SEQ ID NO: 1040095 - RNA, 19 nt, Artificial Sequence
  Description of Artificial Sequence: Synthetic oligonucleotide
gcggguuugagcaccauga

SEQ ID NO: 1040096 - RNA, 19 nt, Artificial Sequence
  Description of Artificial Sequence: Synthetic oligonucleotide
uauugccuguggaguguua

SEQ ID NO: 1040097 - RNA, 19 nt, Artificial Sequence
  Description of Artificial Sequence: Synthetic oligonucleotide
aggagucgcucacccucag

SEQ ID NO: 1040098 - RNA, 19 nt, Artificial Sequence
  Description of Artificial Sequence: Synthetic oligonucleotide
ucaucgcgacgugcuggcg

SEQ ID NO: 1040099 - RNA, 19 nt, Artificial Sequence
  Description of Artificial Sequence: Synthetic oligonucleotide
uagggcuagcugguacuga

SEQ ID NO: 1040100 - RNA, 19 nt, Artificial Sequence
  Description of Artificial Sequence: Synthetic oligonucleotide
ugggcacgauggauuugac

SEQ ID NO: 1040101 - RNA, 19 nt, Artificial Sequence
  Description of Artificial Sequence: Synthetic oligonucleotide
cgagcuacguuccaggaca

SEQ ID NO: 1040102 - RNA, 19 nt, Artificial Sequence
  Description of Artificial Sequence: Synthetic oligonucleotide
acccgcaugaaggcgggca

SEQ ID NO: 1040103 - RNA, 19 nt, Artificial Sequence
  Description of Artificial Sequence: Synthetic oligonucleotide
uaggcccgcgcugcggcgg

SEQ ID NO: 1040104 - RNA, 19 nt, Artificial Sequence
  Description of Artificial Sequence: Synthetic oligonucleotide
agcgguaaacaggaauauu

SEQ ID NO: 1040105 - RNA, 19 nt, Artificial Sequence
  Description of Artificial Sequence: Synthetic oligonucleotide
aucgcugauuuugaccguu

SEQ ID NO: 1040106 - RNA, 19 nt, Artificial Sequence
  Description of Artificial Sequence: Synthetic oligonucleotide
gugaggggccccacguucc

SEQ ID NO: 1040107 - RNA, 19 nt, Artificial Sequence
  Description of Artificial Sequence: Synthetic oligonucleotide
guaggcccgcgcugcggcg

SEQ ID NO: 1040108 - RNA, 19 nt, Artificial Sequence
  Description of Artificial Sequence: Synthetic oligonucleotide
gguagagguguccaacgcu

SEQ ID NO: 1040109 - RNA, 19 nt, Artificial Sequence
  Description of Artificial Sequence: Synthetic oligonucleotide
caucgaggcccugcccugg

SEQ ID NO: 1040110 - RNA, 19 nt, Artificial Sequence
  Description of Artificial Sequence: Synthetic oligonucleotide
ggggcgggacugcaaaccc

SEQ ID NO: 1040111 - RNA, 19 nt, Artificial Sequence
  Description of Artificial Sequence: Synthetic oligonucleotide
cguuccauucguaucgcuc

SEQ ID NO: 1040112 - RNA, 19 nt, Artificial Sequence
  Description of Artificial Sequence: Synthetic oligonucleotide
ggaaugguaguggcccacc

SEQ ID NO: 1040113 - RNA, 19 nt, Artificial Sequence
  Description of Artificial Sequence: Synthetic oligonucleotide
cccuacaguacaggagucg

SEQ ID NO: 1040114 - RNA, 19 nt, Artificial Sequence
  Description of Artificial Sequence: Synthetic oligonucleotide
gucccugcauuaauccaca

SEQ ID NO: 1040115 - RNA, 19 nt, Artificial Sequence
  Description of Artificial Sequence: Synthetic oligonucleotide
agucaggaucgcugauuuu

SEQ ID NO: 1040116 - RNA, 19 nt, Artificial Sequence
  Description of Artificial Sequence: Synthetic oligonucleotide
acgggccaagcccggacau

SEQ ID NO: 1040117 - RNA, 19 nt, Artificial Sequence
  Description of Artificial Sequence: Synthetic oligonucleotide
ccucaucgcgacgugcugg

SEQ ID NO: 1040118 - RNA, 19 nt, Artificial Sequence
  Description of Artificial Sequence: Synthetic oligonucleotide
ggcguccggccucaucgcg

SEQ ID NO: 1040119 - RNA, 19 nt, Artificial Sequence
  Description of Artificial Sequence: Synthetic oligonucleotide
cuagcaccaccacgcccug

SEQ ID NO: 1040120 - RNA, 19 nt, Artificial Sequence
  Description of Artificial Sequence: Synthetic oligonucleotide
guucguccuugacgcggcc

SEQ ID NO: 1040121 - RNA, 19 nt, Artificial Sequence
  Description of Artificial Sequence: Synthetic oligonucleotide
gcaucguaggccugcgcca

SEQ ID NO: 1040122 - RNA, 19 nt, Artificial Sequence
  Description of Artificial Sequence: Synthetic oligonucleotide
gguucguccuugacgcggc

SEQ ID NO: 1040123 - RNA, 19 nt, Artificial Sequence
  Description of Artificial Sequence: Synthetic oligonucleotide
cuacaguacaggagucgcu

SEQ ID NO: 1040124 - RNA, 19 nt, Artificial Sequence
  Description of Artificial Sequence: Synthetic oligonucleotide
cccagcaggagaaaacgaa

SEQ ID NO: 1040125 - RNA, 19 nt, Artificial Sequence
  Description of Artificial Sequence: Synthetic oligonucleotide
ggacguaggggaggggagc

SEQ ID NO: 1040126 - RNA, 19 nt, Artificial Sequence
  Description of Artificial Sequence: Synthetic oligonucleotide
gaucgcugauuuugaccgu

SEQ ID NO: 1040127 - RNA, 19 nt, Artificial Sequence
  Description of Artificial Sequence: Synthetic oligonucleotide
cugcgugggcgggcgagcg

SEQ ID NO: 1040128 - RNA, 19 nt, Artificial Sequence
  Description of Artificial Sequence: Synthetic oligonucleotide
caugggcacgauggauuug

SEQ ID NO: 1040129 - RNA, 19 nt, Artificial Sequence
  Description of Artificial Sequence: Synthetic oligonucleotide
gacauauacuggggcgcaa

SEQ ID NO: 1040130 - RNA, 19 nt, Artificial Sequence
  Description of Artificial Sequence: Synthetic oligonucleotide
accacgcccuguaggcccg

SEQ ID NO: 1040131 - RNA, 19 nt, Artificial Sequence
  Description of Artificial Sequence: Synthetic oligonucleotide
gcccucgcagugcaccagg

SEQ ID NO: 1040132 - RNA, 19 nt, Artificial Sequence
  Description of Artificial Sequence: Synthetic oligonucleotide
acgugcuggcgggagccag

SEQ ID NO: 1040133 - RNA, 19 nt, Artificial Sequence
  Description of Artificial Sequence: Synthetic oligonucleotide
gcguucggcugccagggac

SEQ ID NO: 1040134 - RNA, 19 nt, Artificial Sequence
  Description of Artificial Sequence: Synthetic oligonucleotide
cggacauauacuggggcgc

SEQ ID NO: 1040135 - RNA, 19 nt, Artificial Sequence
  Description of Artificial Sequence: Synthetic oligonucleotide
cauauugccuguggagugu

SEQ ID NO: 1040136 - RNA, 19 nt, Artificial Sequence
  Description of Artificial Sequence: Synthetic oligonucleotide
ggacauauacuggggcgca

SEQ ID NO: 1040137 - RNA, 19 nt, Artificial Sequence
  Description of Artificial Sequence: Synthetic oligonucleotide
aucgcagaaggcgcugaua

SEQ ID NO: 1040138 - RNA, 19 nt, Artificial Sequence
  Description of Artificial Sequence: Synthetic oligonucleotide
cuccucggugcgguacugc

SEQ ID NO: 1040139 - RNA, 19 nt, Artificial Sequence
  Description of Artificial Sequence: Synthetic oligonucleotide
gccuugguaggcgauuuuc

SEQ ID NO: 1040140 - RNA, 19 nt, Artificial Sequence
  Description of Artificial Sequence: Synthetic oligonucleotide
cacccucaggugggguugg

SEQ ID NO: 1040141 - RNA, 19 nt, Artificial Sequence
  Description of Artificial Sequence: Synthetic oligonucleotide
ccagguacguguuucggcu

SEQ ID NO: 1040142 - RNA, 19 nt, Artificial Sequence
  Description of Artificial Sequence: Synthetic oligonucleotide
gaggucggguuuccccaaa

SEQ ID NO: 1040143 - RNA, 19 nt, Artificial Sequence
  Description of Artificial Sequence: Synthetic oligonucleotide
gaucgcagaaggcgcugau

SEQ ID NO: 1040144 - RNA, 19 nt, Artificial Sequence
  Description of Artificial Sequence: Synthetic oligonucleotide
gguacguguuucggcugcc

SEQ ID NO: 1040145 - RNA, 19 nt, Artificial Sequence
  Description of Artificial Sequence: Synthetic oligonucleotide
gcgugggcgggcgagcggg

SEQ ID NO: 1040146 - RNA, 19 nt, Artificial Sequence
  Description of Artificial Sequence: Synthetic oligonucleotide
gcgcacagcccucgcagug

SEQ ID NO: 1040147 - RNA, 19 nt, Artificial Sequence
  Description of Artificial Sequence: Synthetic oligonucleotide
guaucgcucuagggcuagc

SEQ ID NO: 1040148 - RNA, 19 nt, Artificial Sequence
  Description of Artificial Sequence: Synthetic oligonucleotide
gcuacguuccaggacacau

SEQ ID NO: 1040149 - RNA, 19 nt, Artificial Sequence
  Description of Artificial Sequence: Synthetic oligonucleotide
ggcggagacggacgggcca

SEQ ID NO: 1040150 - RNA, 19 nt, Artificial Sequence
  Description of Artificial Sequence: Synthetic oligonucleotide
acggacgggccaagcccgg

SEQ ID NO: 1040151 - RNA, 19 nt, Artificial Sequence
  Description of Artificial Sequence: Synthetic oligonucleotide
caccucguuccauucguau

SEQ ID NO: 1040152 - RNA, 19 nt, Artificial Sequence
  Description of Artificial Sequence: Synthetic oligonucleotide
ggcgugugcugguggcccc

SEQ ID NO: 1040153 - RNA, 19 nt, Artificial Sequence
  Description of Artificial Sequence: Synthetic oligonucleotide
cguucgagcuacguuccag

SEQ ID NO: 1040154 - RNA, 19 nt, Artificial Sequence
  Description of Artificial Sequence: Synthetic oligonucleotide
cguguuucggcugccguuc

SEQ ID NO: 1040155 - RNA, 19 nt, Artificial Sequence
  Description of Artificial Sequence: Synthetic oligonucleotide
ccaucgaggcccugcccug

SEQ ID NO: 1040156 - RNA, 19 nt, Artificial Sequence
  Description of Artificial Sequence: Synthetic oligonucleotide
gccucaucgcgacgugcug

SEQ ID NO: 1040157 - RNA, 19 nt, Artificial Sequence
  Description of Artificial Sequence: Synthetic oligonucleotide
uacccgcaugaaggcgggc

SEQ ID NO: 1040158 - RNA, 19 nt, Artificial Sequence
  Description of Artificial Sequence: Synthetic oligonucleotide
gucaaguaguccacaccau

SEQ ID NO: 1040159 - RNA, 19 nt, Artificial Sequence
  Description of Artificial Sequence: Synthetic oligonucleotide
ccuugguaggcgauuuucu

SEQ ID NO: 1040160 - RNA, 19 nt, Artificial Sequence
  Description of Artificial Sequence: Synthetic oligonucleotide
ccggcuggagccgcgggcg

SEQ ID NO: 1040161 - RNA, 19 nt, Artificial Sequence
  Description of Artificial Sequence: Synthetic oligonucleotide
ggaguguuacccgcaugaa

SEQ ID NO: 1040162 - RNA, 19 nt, Artificial Sequence
  Description of Artificial Sequence: Synthetic oligonucleotide
gggcgggacugcaaacccc

SEQ ID NO: 1040163 - RNA, 19 nt, Artificial Sequence
  Description of Artificial Sequence: Synthetic oligonucleotide
gagcccggcuggagccgcg

SEQ ID NO: 1040164 - RNA, 19 nt, Artificial Sequence
  Description of Artificial Sequence: Synthetic oligonucleotide
caguagugcucaugcacuu

SEQ ID NO: 1040165 - RNA, 19 nt, Artificial Sequence
  Description of Artificial Sequence: Synthetic oligonucleotide
gcgacgugcuggcgggagc

SEQ ID NO: 1040166 - RNA, 19 nt, Artificial Sequence
  Description of Artificial Sequence: Synthetic oligonucleotide
cucacccucaggugggguu

SEQ ID NO: 1040167 - RNA, 19 nt, Artificial Sequence
  Description of Artificial Sequence: Synthetic oligonucleotide
gcgagcggggcguccggcc

SEQ ID NO: 1040168 - RNA, 19 nt, Artificial Sequence
  Description of Artificial Sequence: Synthetic oligonucleotide
cacgcccuguaggcccgcg

SEQ ID NO: 1040169 - RNA, 19 nt, Artificial Sequence
  Description of Artificial Sequence: Synthetic oligonucleotide
gacgugcuggcgggagcca

SEQ ID NO: 1040170 - RNA, 19 nt, Artificial Sequence
  Description of Artificial Sequence: Synthetic oligonucleotide
ggaggucggguuuccccaa

SEQ ID NO: 1040171 - RNA, 19 nt, Artificial Sequence
  Description of Artificial Sequence: Synthetic oligonucleotide
gggcguccggccucaucgc

SEQ ID NO: 1040172 - RNA, 19 nt, Artificial Sequence
  Description of Artificial Sequence: Synthetic oligonucleotide
acgaagcgguaaacaggaa

SEQ ID NO: 1040173 - RNA, 19 nt, Artificial Sequence
  Description of Artificial Sequence: Synthetic oligonucleotide
ccagcgugaaggcaucgua

SEQ ID NO: 1040174 - RNA, 19 nt, Artificial Sequence
  Description of Artificial Sequence: Synthetic oligonucleotide
ccguucucacucguaacga

SEQ ID NO: 1040175 - RNA, 19 nt, Artificial Sequence
  Description of Artificial Sequence: Synthetic oligonucleotide
gccgcgcccugcgugggcg

SEQ ID NO: 1040176 - RNA, 19 nt, Artificial Sequence
  Description of Artificial Sequence: Synthetic oligonucleotide
cgacgugcuggcgggagcc

SEQ ID NO: 1040177 - RNA, 19 nt, Artificial Sequence
  Description of Artificial Sequence: Synthetic oligonucleotide
guguuucggcugccguucu

SEQ ID NO: 1040178 - RNA, 19 nt, Artificial Sequence
  Description of Artificial Sequence: Synthetic oligonucleotide
cguaucgcucuagggcuag

SEQ ID NO: 1040179 - RNA, 19 nt, Artificial Sequence
  Description of Artificial Sequence: Synthetic oligonucleotide
gcgugugcugguggccccg

SEQ ID NO: 1040180 - RNA, 19 nt, Artificial Sequence
  Description of Artificial Sequence: Synthetic oligonucleotide
cgaagcgguaaacaggaau

SEQ ID NO: 1040181 - RNA, 19 nt, Artificial Sequence
  Description of Artificial Sequence: Synthetic oligonucleotide
caccaugggcugagcauau

SEQ ID NO: 1040182 - RNA, 19 nt, Artificial Sequence
  Description of Artificial Sequence: Synthetic oligonucleotide
agcggggcguccggccuca

SEQ ID NO: 1040183 - RNA, 19 nt, Artificial Sequence
  Description of Artificial Sequence: Synthetic oligonucleotide
cguucucacucguaacgaa

SEQ ID NO: 1040184 - RNA, 19 nt, Artificial Sequence
  Description of Artificial Sequence: Synthetic oligonucleotide
gcgggaccuaggucccagc

SEQ ID NO: 1040185 - RNA, 19 nt, Artificial Sequence
  Description of Artificial Sequence: Synthetic oligonucleotide
ucgcgacgugcuggcggga

SEQ ID NO: 1040186 - RNA, 19 nt, Artificial Sequence
  Description of Artificial Sequence: Synthetic oligonucleotide
ggagcggguuugagcacca

SEQ ID NO: 1040187 - RNA, 19 nt, Artificial Sequence
  Description of Artificial Sequence: Synthetic oligonucleotide
caugaaucaugggcacgau

SEQ ID NO: 1040188 - RNA, 19 nt, Artificial Sequence
  Description of Artificial Sequence: Synthetic oligonucleotide
ggccucaucgcgacgugcu

SEQ ID NO: 1040189 - RNA, 19 nt, Artificial Sequence
  Description of Artificial Sequence: Synthetic oligonucleotide
gcacgauggauuugacguu

SEQ ID NO: 1040190 - RNA, 19 nt, Artificial Sequence
  Description of Artificial Sequence: Synthetic oligonucleotide
ccccaucgaggcccugccc

SEQ ID NO: 1040191 - RNA, 19 nt, Artificial Sequence
  Description of Artificial Sequence: Synthetic oligonucleotide
ccagaggcgggaccuaggu

SEQ ID NO: 1040192 - RNA, 19 nt, Artificial Sequence
  Description of Artificial Sequence: Synthetic oligonucleotide
ccgaucgcagaaggcgcug

SEQ ID NO: 1040193 - RNA, 19 nt, Artificial Sequence
  Description of Artificial Sequence: Synthetic oligonucleotide
gcaccaugagagcccggcu

SEQ ID NO: 1040194 - RNA, 19 nt, Artificial Sequence
  Description of Artificial Sequence: Synthetic oligonucleotide
ccugcgugggcgggcgagc

SEQ ID NO: 1040195 - RNA, 19 nt, Artificial Sequence
  Description of Artificial Sequence: Synthetic oligonucleotide
gcguccggccucaucgcga

SEQ ID NO: 1040196 - RNA, 19 nt, Artificial Sequence
  Description of Artificial Sequence: Synthetic oligonucleotide
ccuugacgcggccuuggua

SEQ ID NO: 1040197 - RNA, 19 nt, Artificial Sequence
  Description of Artificial Sequence: Synthetic oligonucleotide
agcgggccucccagaggca

SEQ ID NO: 1040198 - RNA, 19 nt, Artificial Sequence
  Description of Artificial Sequence: Synthetic oligonucleotide
gcggagacggacgggccaa

SEQ ID NO: 1040199 - RNA, 19 nt, Artificial Sequence
  Description of Artificial Sequence: Synthetic oligonucleotide
ggcguucggcugccaggga

SEQ ID NO: 1040200 - RNA, 19 nt, Artificial Sequence
  Description of Artificial Sequence: Synthetic oligonucleotide
gggcuagcugguacugaua

SEQ ID NO: 1040201 - RNA, 19 nt, Artificial Sequence
  Description of Artificial Sequence: Synthetic oligonucleotide
ccggccucaucgcgacgug

SEQ ID NO: 1040202 - RNA, 19 nt, Artificial Sequence
  Description of Artificial Sequence: Synthetic oligonucleotide
gccgaucgcagaaggcgcu

SEQ ID NO: 1040203 - RNA, 19 nt, Artificial Sequence
  Description of Artificial Sequence: Synthetic oligonucleotide
ccgcgcccugcgugggcgg

SEQ ID NO: 1040204 - RNA, 19 nt, Artificial Sequence
  Description of Artificial Sequence: Synthetic oligonucleotide
ccguucgagcuacguucca

SEQ ID NO: 1040205 - RNA, 19 nt, Artificial Sequence
  Description of Artificial Sequence: Synthetic oligonucleotide
ccaugagagcccggcugga

SEQ ID NO: 1040206 - RNA, 19 nt, Artificial Sequence
  Description of Artificial Sequence: Synthetic oligonucleotide
ccguugcaccuggcagugc

SEQ ID NO: 1040207 - RNA, 19 nt, Artificial Sequence
  Description of Artificial Sequence: Synthetic oligonucleotide
cgaucgcagaaggcgcuga

SEQ ID NO: 1040208 - RNA, 19 nt, Artificial Sequence
  Description of Artificial Sequence: Synthetic oligonucleotide
cgcccugcgugggcgggcg

SEQ ID NO: 1040209 - RNA, 19 nt, Artificial Sequence
  Description of Artificial Sequence: Synthetic oligonucleotide
gcgcugcacgaagcgguaa

SEQ ID NO: 1040210 - RNA, 19 nt, Artificial Sequence
  Description of Artificial Sequence: Synthetic oligonucleotide
gcgcccugcgugggcgggc

SEQ ID NO: 1040211 - RNA, 19 nt, Artificial Sequence
  Description of Artificial Sequence: Synthetic oligonucleotide
gcucacccucagguggggu

SEQ ID NO: 1040212 - RNA, 19 nt, Artificial Sequence
  Description of Artificial Sequence: Synthetic oligonucleotide
cgcccuguaggcccgcgcu

SEQ ID NO: 1040213 - RNA, 19 nt, Artificial Sequence
  Description of Artificial Sequence: Synthetic oligonucleotide
ccgcgcugcggcggcgcgc

SEQ ID NO: 1040214 - RNA, 19 nt, Artificial Sequence
  Description of Artificial Sequence: Synthetic oligonucleotide
ccgcaccaggcucucccgu

SEQ ID NO: 1040215 - RNA, 19 nt, Artificial Sequence
  Description of Artificial Sequence: Synthetic oligonucleotide
cgccgcgcccugcgugggc

SEQ ID NO: 1040216 - RNA, 19 nt, Artificial Sequence
  Description of Artificial Sequence: Synthetic oligonucleotide
gcccugcgugggcgggcga

SEQ ID NO: 1040217 - RNA, 19 nt, Artificial Sequence
  Description of Artificial Sequence: Synthetic oligonucleotide
cggacgggccaagcccgga

SEQ ID NO: 1040218 - RNA, 19 nt, Artificial Sequence
  Description of Artificial Sequence: Synthetic oligonucleotide
cgcggccuugguaggcgau

SEQ ID NO: 1040219 - RNA, 19 nt, Artificial Sequence
  Description of Artificial Sequence: Synthetic oligonucleotide
gcggggcguccggccucau

SEQ ID NO: 1040220 - RNA, 19 nt, Artificial Sequence
  Description of Artificial Sequence: Synthetic oligonucleotide
aagucuaacauccuccagg

SEQ ID NO: 1040221 - RNA, 19 nt, Artificial Sequence
  Description of Artificial Sequence: Synthetic oligonucleotide
aagaguauggguaaggagg

SEQ ID NO: 1040222 - RNA, 19 nt, Artificial Sequence
  Description of Artificial Sequence: Synthetic oligonucleotide
ucacauacguuacaaaagg

SEQ ID NO: 1040223 - RNA, 19 nt, Artificial Sequence
  Description of Artificial Sequence: Synthetic oligonucleotide
aaauguacagaaauugcac

SEQ ID NO: 1040224 - RNA, 19 nt, Artificial Sequence
  Description of Artificial Sequence: Synthetic oligonucleotide
aaauugcacagccacacag

SEQ ID NO: 1040225 - RNA, 19 nt, Artificial Sequence
  Description of Artificial Sequence: Synthetic oligonucleotide
uaauccugaacauacaagu

SEQ ID NO: 1040226 - RNA, 19 nt, Artificial Sequence
  Description of Artificial Sequence: Synthetic oligonucleotide
uugcacuagguaaauaagg

SEQ ID NO: 1040227 - RNA, 19 nt, Artificial Sequence
  Description of Artificial Sequence: Synthetic oligonucleotide
agacauauggguaugagag

SEQ ID NO: 1040228 - RNA, 19 nt, Artificial Sequence
  Description of Artificial Sequence: Synthetic oligonucleotide
ugcacuagguaaauaaggc

SEQ ID NO: 1040229 - RNA, 19 nt, Artificial Sequence
  Description of Artificial Sequence: Synthetic oligonucleotide
acaagggcagccuuguggc

SEQ ID NO: 1040230 - RNA, 19 nt, Artificial Sequence
  Description of Artificial Sequence: Synthetic oligonucleotide
cuaaugaggacucuaggag

SEQ ID NO: 1040231 - RNA, 19 nt, Artificial Sequence
  Description of Artificial Sequence: Synthetic oligonucleotide
aaggaaaagaaaucacgca

SEQ ID NO: 1040232 - RNA, 19 nt, Artificial Sequence
  Description of Artificial Sequence: Synthetic oligonucleotide
agauaugcuacagaacagc

SEQ ID NO: 1040233 - RNA, 19 nt, Artificial Sequence
  Description of Artificial Sequence: Synthetic oligonucleotide
agaaauugcacagccacac

SEQ ID NO: 1040234 - RNA, 19 nt, Artificial Sequence
  Description of Artificial Sequence: Synthetic oligonucleotide
agguaaauaaggcucucgg

SEQ ID NO: 1040235 - RNA, 19 nt, Artificial Sequence
  Description of Artificial Sequence: Synthetic oligonucleotide
uaugcuacagaacagccua

SEQ ID NO: 1040236 - RNA, 19 nt, Artificial Sequence
  Description of Artificial Sequence: Synthetic oligonucleotide
aauacggcagacuugcaau

SEQ ID NO: 1040237 - RNA, 19 nt, Artificial Sequence
  Description of Artificial Sequence: Synthetic oligonucleotide
aauguaacuaaggaaggga

SEQ ID NO: 1040238 - RNA, 19 nt, Artificial Sequence
  Description of Artificial Sequence: Synthetic oligonucleotide
agucuaacauccuccaggg

SEQ ID NO: 1040239 - RNA, 19 nt, Artificial Sequence
  Description of Artificial Sequence: Synthetic oligonucleotide
agagucuguacacuuuuac

SEQ ID NO: 1040240 - RNA, 19 nt, Artificial Sequence
  Description of Artificial Sequence: Synthetic oligonucleotide
aaucacgcauggugcaacc

SEQ ID NO: 1040241 - RNA, 19 nt, Artificial Sequence
  Description of Artificial Sequence: Synthetic oligonucleotide
ggcaauguaacuaaggaag

SEQ ID NO: 1040242 - RNA, 19 nt, Artificial Sequence
  Description of Artificial Sequence: Synthetic oligonucleotide
aggguaugggaacaggugg

SEQ ID NO: 1040243 - RNA, 19 nt, Artificial Sequence
  Description of Artificial Sequence: Synthetic oligonucleotide
uuucuaaugcauacuguga

SEQ ID NO: 1040244 - RNA, 19 nt, Artificial Sequence
  Description of Artificial Sequence: Synthetic oligonucleotide
guagguagagcucagcccc

SEQ ID NO: 1040245 - RNA, 19 nt, Artificial Sequence
  Description of Artificial Sequence: Synthetic oligonucleotide
uccugaacauacaaguuga

SEQ ID NO: 1040246 - RNA, 19 nt, Artificial Sequence
  Description of Artificial Sequence: Synthetic oligonucleotide
aguauauagaaaagagggg

SEQ ID NO: 1040247 - RNA, 19 nt, Artificial Sequence
  Description of Artificial Sequence: Synthetic oligonucleotide
uauagaaaagaggggcugg

SEQ ID NO: 1040248 - RNA, 19 nt, Artificial Sequence
  Description of Artificial Sequence: Synthetic oligonucleotide
auuguaucuggcccugcgc

SEQ ID NO: 1040249 - RNA, 19 nt, Artificial Sequence
  Description of Artificial Sequence: Synthetic oligonucleotide
gaaacugugggaugugccc

SEQ ID NO: 1040250 - RNA, 19 nt, Artificial Sequence
  Description of Artificial Sequence: Synthetic oligonucleotide
uuagaaucuaggguauggg

SEQ ID NO: 1040251 - RNA, 19 nt, Artificial Sequence
  Description of Artificial Sequence: Synthetic oligonucleotide
agacuugcaauuaagauaa

SEQ ID NO: 1040252 - RNA, 19 nt, Artificial Sequence
  Description of Artificial Sequence: Synthetic oligonucleotide
uguagguagagcucagccc

SEQ ID NO: 1040253 - RNA, 19 nt, Artificial Sequence
  Description of Artificial Sequence: Synthetic oligonucleotide
uccuaaugaggacucuagg

SEQ ID NO: 1040254 - RNA, 19 nt, Artificial Sequence
  Description of Artificial Sequence: Synthetic oligonucleotide
aagugcacugcucacugug

SEQ ID NO: 1040255 - RNA, 19 nt, Artificial Sequence
  Description of Artificial Sequence: Synthetic oligonucleotide
uuccuaaugaggacucuag

SEQ ID NO: 1040256 - RNA, 19 nt, Artificial Sequence
  Description of Artificial Sequence: Synthetic oligonucleotide
aaauacggcagacuugcaa

SEQ ID NO: 1040257 - RNA, 19 nt, Artificial Sequence
  Description of Artificial Sequence: Synthetic oligonucleotide
gaggcgacugcacacacag

SEQ ID NO: 1040258 - RNA, 19 nt, Artificial Sequence
  Description of Artificial Sequence: Synthetic oligonucleotide
gaaucuaggguaugggaac

SEQ ID NO: 1040259 - RNA, 19 nt, Artificial Sequence
  Description of Artificial Sequence: Synthetic oligonucleotide
aaaaucuguggagagucug

SEQ ID NO: 1040260 - RNA, 19 nt, Artificial Sequence
  Description of Artificial Sequence: Synthetic oligonucleotide
caaauguacagaaauugca

SEQ ID NO: 1040261 - RNA, 19 nt, Artificial Sequence
  Description of Artificial Sequence: Synthetic oligonucleotide
cacuuuacgaggcaugggc

SEQ ID NO: 1040262 - RNA, 19 nt, Artificial Sequence
  Description of Artificial Sequence: Synthetic oligonucleotide
gaaagugcacugcucacug

SEQ ID NO: 1040263 - RNA, 19 nt, Artificial Sequence
  Description of Artificial Sequence: Synthetic oligonucleotide
aaaucacgcauggugcaac

SEQ ID NO: 1040264 - RNA, 19 nt, Artificial Sequence
  Description of Artificial Sequence: Synthetic oligonucleotide
gacgcuucaguucugcgug

SEQ ID NO: 1040265 - RNA, 19 nt, Artificial Sequence
  Description of Artificial Sequence: Synthetic oligonucleotide
uaaaaggccccuguguucc

SEQ ID NO: 1040266 - RNA, 19 nt, Artificial Sequence
  Description of Artificial Sequence: Synthetic oligonucleotide
agaguggugucccucggac

SEQ ID NO: 1040267 - RNA, 19 nt, Artificial Sequence
  Description of Artificial Sequence: Synthetic oligonucleotide
aaauaaggcucucggccug

SEQ ID NO: 1040268 - RNA, 19 nt, Artificial Sequence
  Description of Artificial Sequence: Synthetic oligonucleotide
cuaacaaccccaccagagg

SEQ ID NO: 1040269 - RNA, 19 nt, Artificial Sequence
  Description of Artificial Sequence: Synthetic oligonucleotide
gauaugcuacagaacagcc

SEQ ID NO: 1040270 - RNA, 19 nt, Artificial Sequence
  Description of Artificial Sequence: Synthetic oligonucleotide
auagacugcgauagggugc

SEQ ID NO: 1040271 - RNA, 19 nt, Artificial Sequence
  Description of Artificial Sequence: Synthetic oligonucleotide
aguuuccuuaauccugaac

SEQ ID NO: 1040272 - RNA, 19 nt, Artificial Sequence
  Description of Artificial Sequence: Synthetic oligonucleotide
agcaagaugacgcuucagu

SEQ ID NO: 1040273 - RNA, 19 nt, Artificial Sequence
  Description of Artificial Sequence: Synthetic oligonucleotide
uagaaucuaggguauggga

SEQ ID NO: 1040274 - RNA, 19 nt, Artificial Sequence
  Description of Artificial Sequence: Synthetic oligonucleotide
uuuggcaguuuccuuaauc

SEQ ID NO: 1040275 - RNA, 19 nt, Artificial Sequence
  Description of Artificial Sequence: Synthetic oligonucleotide
aaggcccuagcuccugccc

SEQ ID NO: 1040276 - RNA, 19 nt, Artificial Sequence
  Description of Artificial Sequence: Synthetic oligonucleotide
cagcaagcgagcaagcggg

SEQ ID NO: 1040277 - RNA, 19 nt, Artificial Sequence
  Description of Artificial Sequence: Synthetic oligonucleotide
aaauagcuaaauaaauuuu

SEQ ID NO: 1040278 - RNA, 19 nt, Artificial Sequence
  Description of Artificial Sequence: Synthetic oligonucleotide
agggcuuagaaucuagggu

SEQ ID NO: 1040279 - RNA, 19 nt, Artificial Sequence
  Description of Artificial Sequence: Synthetic oligonucleotide
guccaaggaaguuuggcag

SEQ ID NO: 1040280 - RNA, 19 nt, Artificial Sequence
  Description of Artificial Sequence: Synthetic oligonucleotide
cauagacugcgauagggug

SEQ ID NO: 1040281 - RNA, 19 nt, Artificial Sequence
  Description of Artificial Sequence: Synthetic oligonucleotide
auggguaugagagaguggu

SEQ ID NO: 1040282 - RNA, 19 nt, Artificial Sequence
  Description of Artificial Sequence: Synthetic oligonucleotide
caagaguauggguaaggag

SEQ ID NO: 1040283 - RNA, 19 nt, Artificial Sequence
  Description of Artificial Sequence: Synthetic oligonucleotide
agacagaggucacuuuacg

SEQ ID NO: 1040284 - RNA, 19 nt, Artificial Sequence
  Description of Artificial Sequence: Synthetic oligonucleotide
cacgcucaacuuaaaaggc

SEQ ID NO: 1040285 - RNA, 19 nt, Artificial Sequence
  Description of Artificial Sequence: Synthetic oligonucleotide
auauucugcugucugggca

SEQ ID NO: 1040286 - RNA, 19 nt, Artificial Sequence
  Description of Artificial Sequence: Synthetic oligonucleotide
caagaugacgcuucaguuc

SEQ ID NO: 1040287 - RNA, 19 nt, Artificial Sequence
  Description of Artificial Sequence: Synthetic oligonucleotide
gauggugagccugggacgg

SEQ ID NO: 1040288 - RNA, 19 nt, Artificial Sequence
  Description of Artificial Sequence: Synthetic oligonucleotide
cuauuucccuugcagugcg

SEQ ID NO: 1040289 - RNA, 19 nt, Artificial Sequence
  Description of Artificial Sequence: Synthetic oligonucleotide
caauguaacuaaggaaggg

SEQ ID NO: 1040290 - RNA, 19 nt, Artificial Sequence
  Description of Artificial Sequence: Synthetic oligonucleotide
ugcauacugugaaaggaaa

SEQ ID NO: 1040291 - RNA, 19 nt, Artificial Sequence
  Description of Artificial Sequence: Synthetic oligonucleotide
auauagaaaagaggggcug

SEQ ID NO: 1040292 - RNA, 19 nt, Artificial Sequence
  Description of Artificial Sequence: Synthetic oligonucleotide
acuuccacccuuccuaaug

SEQ ID NO: 1040293 - RNA, 19 nt, Artificial Sequence
  Description of Artificial Sequence: Synthetic oligonucleotide
augagcuaggcccacacau

SEQ ID NO: 1040294 - RNA, 19 nt, Artificial Sequence
  Description of Artificial Sequence: Synthetic oligonucleotide
uccgguccaaggaaguuug

SEQ ID NO: 1040295 - RNA, 19 nt, Artificial Sequence
  Description of Artificial Sequence: Synthetic oligonucleotide
uuaguuucuaaugcauacu

SEQ ID NO: 1040296 - RNA, 19 nt, Artificial Sequence
  Description of Artificial Sequence: Synthetic oligonucleotide
uggcaauguaacuaaggaa

SEQ ID NO: 1040297 - RNA, 19 nt, Artificial Sequence
  Description of Artificial Sequence: Synthetic oligonucleotide
agaaaucacgcauggugca

SEQ ID NO: 1040298 - RNA, 19 nt, Artificial Sequence
  Description of Artificial Sequence: Synthetic oligonucleotide
gaccuccccauauugcuag

SEQ ID NO: 1040299 - RNA, 19 nt, Artificial Sequence
  Description of Artificial Sequence: Synthetic oligonucleotide
uuaaaaggccccuguguuc

SEQ ID NO: 1040300 - RNA, 19 nt, Artificial Sequence
  Description of Artificial Sequence: Synthetic oligonucleotide
cauuguaucuggcccugcg

SEQ ID NO: 1040301 - RNA, 19 nt, Artificial Sequence
  Description of Artificial Sequence: Synthetic oligonucleotide
acuucugacguuugcauuu

SEQ ID NO: 1040302 - RNA, 19 nt, Artificial Sequence
  Description of Artificial Sequence: Synthetic oligonucleotide
gucacuuuacgaggcaugg

SEQ ID NO: 1040303 - RNA, 19 nt, Artificial Sequence
  Description of Artificial Sequence: Synthetic oligonucleotide
ucuaggguaugggaacagg

SEQ ID NO: 1040304 - RNA, 19 nt, Artificial Sequence
  Description of Artificial Sequence: Synthetic oligonucleotide
guauggguaaggaggaaag

SEQ ID NO: 1040305 - RNA, 19 nt, Artificial Sequence
  Description of Artificial Sequence: Synthetic oligonucleotide
acacaugaagugugggaag

SEQ ID NO: 1040306 - RNA, 19 nt, Artificial Sequence
  Description of Artificial Sequence: Synthetic oligonucleotide
ugagcuaggcccacacaug

SEQ ID NO: 1040307 - RNA, 19 nt, Artificial Sequence
  Description of Artificial Sequence: Synthetic oligonucleotide
ucaacuuaaaaggccccug

SEQ ID NO: 1040308 - RNA, 19 nt, Artificial Sequence
  Description of Artificial Sequence: Synthetic oligonucleotide
acgcucaacuuaaaaggcc

SEQ ID NO: 1040309 - RNA, 19 nt, Artificial Sequence
  Description of Artificial Sequence: Synthetic oligonucleotide
cuuaauccugaacauacaa

SEQ ID NO: 1040310 - RNA, 19 nt, Artificial Sequence
  Description of Artificial Sequence: Synthetic oligonucleotide
ugcuaggaggcgcucagac

SEQ ID NO: 1040311 - RNA, 19 nt, Artificial Sequence
  Description of Artificial Sequence: Synthetic oligonucleotide
cagacuugcaauuaagaua

SEQ ID NO: 1040312 - RNA, 19 nt, Artificial Sequence
  Description of Artificial Sequence: Synthetic oligonucleotide
cacgcauggugcaaccugg

SEQ ID NO: 1040313 - RNA, 19 nt, Artificial Sequence
  Description of Artificial Sequence: Synthetic oligonucleotide
ucagaaccagggcuuagaa

SEQ ID NO: 1040314 - RNA, 19 nt, Artificial Sequence
  Description of Artificial Sequence: Synthetic oligonucleotide
aggaaacugugggaugugc

SEQ ID NO: 1040315 - RNA, 19 nt, Artificial Sequence
  Description of Artificial Sequence: Synthetic oligonucleotide
aagucuccgguccaaggaa

SEQ ID NO: 1040316 - RNA, 19 nt, Artificial Sequence
  Description of Artificial Sequence: Synthetic oligonucleotide
uuuacgaggcaugggcaag

SEQ ID NO: 1040317 - RNA, 19 nt, Artificial Sequence
  Description of Artificial Sequence: Synthetic oligonucleotide
gggagcaagucuaacaucc

SEQ ID NO: 1040318 - RNA, 19 nt, Artificial Sequence
  Description of Artificial Sequence: Synthetic oligonucleotide
aaucuaggguaugggaaca

SEQ ID NO: 1040319 - RNA, 19 nt, Artificial Sequence
  Description of Artificial Sequence: Synthetic oligonucleotide
ugagagcuaacaaccccac

SEQ ID NO: 1040320 - RNA, 19 nt, Artificial Sequence
  Description of Artificial Sequence: Synthetic oligonucleotide
guacauuauuacaugguuc

SEQ ID NO: 1040321 - RNA, 19 nt, Artificial Sequence
  Description of Artificial Sequence: Synthetic oligonucleotide
ugugggaugugccccuccc

SEQ ID NO: 1040322 - RNA, 19 nt, Artificial Sequence
  Description of Artificial Sequence: Synthetic oligonucleotide
aaugaggacucuaggaguu

SEQ ID NO: 1040323 - RNA, 19 nt, Artificial Sequence
  Description of Artificial Sequence: Synthetic oligonucleotide
cauauucugcugucugggc

SEQ ID NO: 1040324 - RNA, 19 nt, Artificial Sequence
  Description of Artificial Sequence: Synthetic oligonucleotide
acugcaugcaauggcgagg

SEQ ID NO: 1040325 - RNA, 19 nt, Artificial Sequence
  Description of Artificial Sequence: Synthetic oligonucleotide
aggacuuccacccuuccua

SEQ ID NO: 1040326 - RNA, 19 nt, Artificial Sequence
  Description of Artificial Sequence: Synthetic oligonucleotide
uguaucuggcccugcgccc

SEQ ID NO: 1040327 - RNA, 19 nt, Artificial Sequence
  Description of Artificial Sequence: Synthetic oligonucleotide
acuagguaaauaaggcucu

SEQ ID NO: 1040328 - RNA, 19 nt, Artificial Sequence
  Description of Artificial Sequence: Synthetic oligonucleotide
uauggguaaggaggaaagc

SEQ ID NO: 1040329 - RNA, 19 nt, Artificial Sequence
  Description of Artificial Sequence: Synthetic oligonucleotide
ugggcaagaguauggguaa

SEQ ID NO: 1040330 - RNA, 19 nt, Artificial Sequence
  Description of Artificial Sequence: Synthetic oligonucleotide
uggggaccuccccauauug

SEQ ID NO: 1040331 - RNA, 19 nt, Artificial Sequence
  Description of Artificial Sequence: Synthetic oligonucleotide
cuaggaguuuaagugcagc

SEQ ID NO: 1040332 - RNA, 19 nt, Artificial Sequence
  Description of Artificial Sequence: Synthetic oligonucleotide
cacaugaagugugggaagc

SEQ ID NO: 1040333 - RNA, 19 nt, Artificial Sequence
  Description of Artificial Sequence: Synthetic oligonucleotide
gagaaagugcacugcucac

SEQ ID NO: 1040334 - RNA, 19 nt, Artificial Sequence
  Description of Artificial Sequence: Synthetic oligonucleotide
ugacucagaaccagggcuu

SEQ ID NO: 1040335 - RNA, 19 nt, Artificial Sequence
  Description of Artificial Sequence: Synthetic oligonucleotide
aggagcaagaugacgcuuc

SEQ ID NO: 1040336 - RNA, 19 nt, Artificial Sequence
  Description of Artificial Sequence: Synthetic oligonucleotide
uagacugcgauagggugca

SEQ ID NO: 1040337 - RNA, 19 nt, Artificial Sequence
  Description of Artificial Sequence: Synthetic oligonucleotide
cucuaggaguuuaagugca

SEQ ID NO: 1040338 - RNA, 19 nt, Artificial Sequence
  Description of Artificial Sequence: Synthetic oligonucleotide
gcaauguaacuaaggaagg

SEQ ID NO: 1040339 - RNA, 19 nt, Artificial Sequence
  Description of Artificial Sequence: Synthetic oligonucleotide
cagacagaggucacuuuac

SEQ ID NO: 1040340 - RNA, 19 nt, Artificial Sequence
  Description of Artificial Sequence: Synthetic oligonucleotide
ucacuuuacgaggcauggg

SEQ ID NO: 1040341 - RNA, 19 nt, Artificial Sequence
  Description of Artificial Sequence: Synthetic oligonucleotide
agaguauggguaaggagga

SEQ ID NO: 1040342 - RNA, 19 nt, Artificial Sequence
  Description of Artificial Sequence: Synthetic oligonucleotide
gaugacgcuucaguucugc

SEQ ID NO: 1040343 - RNA, 19 nt, Artificial Sequence
  Description of Artificial Sequence: Synthetic oligonucleotide
guaugagagaguggugucc

SEQ ID NO: 1040344 - RNA, 19 nt, Artificial Sequence
  Description of Artificial Sequence: Synthetic oligonucleotide
gagcuaggcccacacauga

SEQ ID NO: 1040345 - RNA, 19 nt, Artificial Sequence
  Description of Artificial Sequence: Synthetic oligonucleotide
augacgcuucaguucugcg

SEQ ID NO: 1040346 - RNA, 19 nt, Artificial Sequence
  Description of Artificial Sequence: Synthetic oligonucleotide
agcauggcugagccacacc

SEQ ID NO: 1040347 - RNA, 19 nt, Artificial Sequence
  Description of Artificial Sequence: Synthetic oligonucleotide
agaaagugcacugcucacu

SEQ ID NO: 1040348 - RNA, 19 nt, Artificial Sequence
  Description of Artificial Sequence: Synthetic oligonucleotide
uacaugguucaaaguccug

SEQ ID NO: 1040349 - RNA, 19 nt, Artificial Sequence
  Description of Artificial Sequence: Synthetic oligonucleotide
gcuaacaaccccaccagag

SEQ ID NO: 1040350 - RNA, 19 nt, Artificial Sequence
  Description of Artificial Sequence: Synthetic oligonucleotide
gaggcgcucagacagaggu

SEQ ID NO: 1040351 - RNA, 19 nt, Artificial Sequence
  Description of Artificial Sequence: Synthetic oligonucleotide
gggcaaaggcccuagcucc

SEQ ID NO: 1040352 - RNA, 19 nt, Artificial Sequence
  Description of Artificial Sequence: Synthetic oligonucleotide
ggauggugagccugggacg

SEQ ID NO: 1040353 - RNA, 19 nt, Artificial Sequence
  Description of Artificial Sequence: Synthetic oligonucleotide
ugucccucggacaggugcu

SEQ ID NO: 1040354 - RNA, 19 nt, Artificial Sequence
  Description of Artificial Sequence: Synthetic oligonucleotide
gcaggagaaugcuuuacug

SEQ ID NO: 1040355 - RNA, 19 nt, Artificial Sequence
  Description of Artificial Sequence: Synthetic oligonucleotide
gaggggcccgcagagaaag

SEQ ID NO: 1040356 - RNA, 19 nt, Artificial Sequence
  Description of Artificial Sequence: Synthetic oligonucleotide
augggaacagguggggauc

SEQ ID NO: 1040357 - RNA, 19 nt, Artificial Sequence
  Description of Artificial Sequence: Synthetic oligonucleotide
ucggccugagagcuaacaa

SEQ ID NO: 1040358 - RNA, 19 nt, Artificial Sequence
  Description of Artificial Sequence: Synthetic oligonucleotide
caagucuaacauccuccag

SEQ ID NO: 1040359 - RNA, 19 nt, Artificial Sequence
  Description of Artificial Sequence: Synthetic oligonucleotide
cuccccauauugcuaggag

SEQ ID NO: 1040360 - RNA, 19 nt, Artificial Sequence
  Description of Artificial Sequence: Synthetic oligonucleotide
auagaaaagaggggcuggu

SEQ ID NO: 1040361 - RNA, 19 nt, Artificial Sequence
  Description of Artificial Sequence: Synthetic oligonucleotide
auaugcuacagaacagccu

SEQ ID NO: 1040362 - RNA, 19 nt, Artificial Sequence
  Description of Artificial Sequence: Synthetic oligonucleotide
cuccagccgacuucugacg

SEQ ID NO: 1040363 - RNA, 19 nt, Artificial Sequence
  Description of Artificial Sequence: Synthetic oligonucleotide
uauugcuaggaggcgcuca

SEQ ID NO: 1040364 - RNA, 19 nt, Artificial Sequence
  Description of Artificial Sequence: Synthetic oligonucleotide
gagagcuaacaaccccacc

SEQ ID NO: 1040365 - RNA, 19 nt, Artificial Sequence
  Description of Artificial Sequence: Synthetic oligonucleotide
uggguaugagagaguggug

SEQ ID NO: 1040366 - RNA, 19 nt, Artificial Sequence
  Description of Artificial Sequence: Synthetic oligonucleotide
ugcacugcucacugugugu

SEQ ID NO: 1040367 - RNA, 19 nt, Artificial Sequence
  Description of Artificial Sequence: Synthetic oligonucleotide
cauuauuacaugguucaaa

SEQ ID NO: 1040368 - RNA, 19 nt, Artificial Sequence
  Description of Artificial Sequence: Synthetic oligonucleotide
cuugcagugcgcacgcuca

SEQ ID NO: 1040369 - RNA, 19 nt, Artificial Sequence
  Description of Artificial Sequence: Synthetic oligonucleotide
gauagggugcagcauggcu

SEQ ID NO: 1040370 - RNA, 19 nt, Artificial Sequence
  Description of Artificial Sequence: Synthetic oligonucleotide
ugcuacagaacagccuaga

SEQ ID NO: 1040371 - RNA, 19 nt, Artificial Sequence
  Description of Artificial Sequence: Synthetic oligonucleotide
gccgcuauuucccuugcag

SEQ ID NO: 1040372 - RNA, 19 nt, Artificial Sequence
  Description of Artificial Sequence: Synthetic oligonucleotide
gggcuuagaaucuagggua

SEQ ID NO: 1040373 - RNA, 19 nt, Artificial Sequence
  Description of Artificial Sequence: Synthetic oligonucleotide
augggcaagaguaugggua

SEQ ID NO: 1040374 - RNA, 19 nt, Artificial Sequence
  Description of Artificial Sequence: Synthetic oligonucleotide
aauaaggcucucggccuga

SEQ ID NO: 1040375 - RNA, 19 nt, Artificial Sequence
  Description of Artificial Sequence: Synthetic oligonucleotide
agggccgcuauuucccuug

SEQ ID NO: 1040376 - RNA, 19 nt, Artificial Sequence
  Description of Artificial Sequence: Synthetic oligonucleotide
augaagugugggaagcugu

SEQ ID NO: 1040377 - RNA, 19 nt, Artificial Sequence
  Description of Artificial Sequence: Synthetic oligonucleotide
agcuaacaaccccaccaga

SEQ ID NO: 1040378 - RNA, 19 nt, Artificial Sequence
  Description of Artificial Sequence: Synthetic oligonucleotide
ucuggcucccagacauaug

SEQ ID NO: 1040379 - RNA, 19 nt, Artificial Sequence
  Description of Artificial Sequence: Synthetic oligonucleotide
ccagcaagcgagcaagcgg

SEQ ID NO: 1040380 - RNA, 19 nt, Artificial Sequence
  Description of Artificial Sequence: Synthetic oligonucleotide
augcuuuacuggcccaacu

SEQ ID NO: 1040381 - RNA, 19 nt, Artificial Sequence
  Description of Artificial Sequence: Synthetic oligonucleotide
ggcuuuaguuucuaaugca

SEQ ID NO: 1040382 - RNA, 19 nt, Artificial Sequence
  Description of Artificial Sequence: Synthetic oligonucleotide
ucugggaauccaagagcau

SEQ ID NO: 1040383 - RNA, 19 nt, Artificial Sequence
  Description of Artificial Sequence: Synthetic oligonucleotide
agugcgcacgcucaacuua

SEQ ID NO: 1040384 - RNA, 19 nt, Artificial Sequence
  Description of Artificial Sequence: Synthetic oligonucleotide
uuccagcaagcgagcaagc

SEQ ID NO: 1040385 - RNA, 19 nt, Artificial Sequence
  Description of Artificial Sequence: Synthetic oligonucleotide
uuacgaggcaugggcaaga

SEQ ID NO: 1040386 - RNA, 19 nt, Artificial Sequence
  Description of Artificial Sequence: Synthetic oligonucleotide
ggcaagaguauggguaagg

SEQ ID NO: 1040387 - RNA, 19 nt, Artificial Sequence
  Description of Artificial Sequence: Synthetic oligonucleotide
gacugcgauagggugcagc

SEQ ID NO: 1040388 - RNA, 19 nt, Artificial Sequence
  Description of Artificial Sequence: Synthetic oligonucleotide
gguaugggaacaggugggg

SEQ ID NO: 1040389 - RNA, 19 nt, Artificial Sequence
  Description of Artificial Sequence: Synthetic oligonucleotide
ugagagaguggugucccuc

SEQ ID NO: 1040390 - RNA, 19 nt, Artificial Sequence
  Description of Artificial Sequence: Synthetic oligonucleotide
ccugagagcuaacaacccc

SEQ ID NO: 1040391 - RNA, 19 nt, Artificial Sequence
  Description of Artificial Sequence: Synthetic oligonucleotide
ggaaacugugggaugugcc

SEQ ID NO: 1040392 - RNA, 19 nt, Artificial Sequence
  Description of Artificial Sequence: Synthetic oligonucleotide
agcaagcgggcuuuaguuu

SEQ ID NO: 1040393 - RNA, 19 nt, Artificial Sequence
  Description of Artificial Sequence: Synthetic oligonucleotide
acccuuccuaaugaggacu

SEQ ID NO: 1040394 - RNA, 19 nt, Artificial Sequence
  Description of Artificial Sequence: Synthetic oligonucleotide
cuuaaaaggccccuguguu

SEQ ID NO: 1040395 - RNA, 19 nt, Artificial Sequence
  Description of Artificial Sequence: Synthetic oligonucleotide
caugcaauggcgaggggcu

SEQ ID NO: 1040396 - RNA, 19 nt, Artificial Sequence
  Description of Artificial Sequence: Synthetic oligonucleotide
aggaguuuaagugcagcuu

SEQ ID NO: 1040397 - RNA, 19 nt, Artificial Sequence
  Description of Artificial Sequence: Synthetic oligonucleotide
auacggcagacuugcaauu

SEQ ID NO: 1040398 - RNA, 19 nt, Artificial Sequence
  Description of Artificial Sequence: Synthetic oligonucleotide
ugcaugcaauggcgagggg

SEQ ID NO: 1040399 - RNA, 19 nt, Artificial Sequence
  Description of Artificial Sequence: Synthetic oligonucleotide
gucuguguugguggggaag

SEQ ID NO: 1040400 - RNA, 19 nt, Artificial Sequence
  Description of Artificial Sequence: Synthetic oligonucleotide
gguaugagagagugguguc

SEQ ID NO: 1040401 - RNA, 19 nt, Artificial Sequence
  Description of Artificial Sequence: Synthetic oligonucleotide
uggggugaggagaggcgac

SEQ ID NO: 1040402 - RNA, 19 nt, Artificial Sequence
  Description of Artificial Sequence: Synthetic oligonucleotide
uggcgauuccagcccuugc

SEQ ID NO: 1040403 - RNA, 19 nt, Artificial Sequence
  Description of Artificial Sequence: Synthetic oligonucleotide
acgcuucaguucugcgugg

SEQ ID NO: 1040404 - RNA, 19 nt, Artificial Sequence
  Description of Artificial Sequence: Synthetic oligonucleotide
gccucuggcgauuccagcc

SEQ ID NO: 1040405 - RNA, 19 nt, Artificial Sequence
  Description of Artificial Sequence: Synthetic oligonucleotide
aucuaggguaugggaacag

SEQ ID NO: 1040406 - RNA, 19 nt, Artificial Sequence
  Description of Artificial Sequence: Synthetic oligonucleotide
gagaggcgacugcacacac

SEQ ID NO: 1040407 - RNA, 19 nt, Artificial Sequence
  Description of Artificial Sequence: Synthetic oligonucleotide
agccuuguggcugaguaua

SEQ ID NO: 1040408 - RNA, 19 nt, Artificial Sequence
  Description of Artificial Sequence: Synthetic oligonucleotide
cuaggguaugggaacaggu

SEQ ID NO: 1040409 - RNA, 19 nt, Artificial Sequence
  Description of Artificial Sequence: Synthetic oligonucleotide
acggcagacuugcaauuaa

SEQ ID NO: 1040410 - RNA, 19 nt, Artificial Sequence
  Description of Artificial Sequence: Synthetic oligonucleotide
ugaggacucuaggaguuua

SEQ ID NO: 1040411 - RNA, 19 nt, Artificial Sequence
  Description of Artificial Sequence: Synthetic oligonucleotide
gcaagcgggcuuuaguuuc

SEQ ID NO: 1040412 - RNA, 19 nt, Artificial Sequence
  Description of Artificial Sequence: Synthetic oligonucleotide
gcaugcaauggcgaggggc

SEQ ID NO: 1040413 - RNA, 19 nt, Artificial Sequence
  Description of Artificial Sequence: Synthetic oligonucleotide
ggagaaugcuuuacuggcc

SEQ ID NO: 1040414 - RNA, 19 nt, Artificial Sequence
  Description of Artificial Sequence: Synthetic oligonucleotide
uacgaggcaugggcaagag

SEQ ID NO: 1040415 - RNA, 19 nt, Artificial Sequence
  Description of Artificial Sequence: Synthetic oligonucleotide
gauuccagcccuugcugua

SEQ ID NO: 1040416 - RNA, 19 nt, Artificial Sequence
  Description of Artificial Sequence: Synthetic oligonucleotide
gcaagucuaacauccucca

SEQ ID NO: 1040417 - RNA, 19 nt, Artificial Sequence
  Description of Artificial Sequence: Synthetic oligonucleotide
cacccuuccuaaugaggac

SEQ ID NO: 1040418 - RNA, 19 nt, Artificial Sequence
  Description of Artificial Sequence: Synthetic oligonucleotide
agucuccgguccaaggaag

SEQ ID NO: 1040419 - RNA, 19 nt, Artificial Sequence
  Description of Artificial Sequence: Synthetic oligonucleotide
aaaauacggcagacuugca

SEQ ID NO: 1040420 - RNA, 19 nt, Artificial Sequence
  Description of Artificial Sequence: Synthetic oligonucleotide
uaaggcucucggccugaga

SEQ ID NO: 1040421 - RNA, 19 nt, Artificial Sequence
  Description of Artificial Sequence: Synthetic oligonucleotide
ggcagucagaagucuccgg

SEQ ID NO: 1040422 - RNA, 19 nt, Artificial Sequence
  Description of Artificial Sequence: Synthetic oligonucleotide
ccauauugcuaggaggcgc

SEQ ID NO: 1040423 - RNA, 19 nt, Artificial Sequence
  Description of Artificial Sequence: Synthetic oligonucleotide
ugagccugggacgggcaug

SEQ ID NO: 1040424 - RNA, 19 nt, Artificial Sequence
  Description of Artificial Sequence: Synthetic oligonucleotide
gaugcuccagccgacuucu

SEQ ID NO: 1040425 - RNA, 19 nt, Artificial Sequence
  Description of Artificial Sequence: Synthetic oligonucleotide
agcaagcgagcaagcgggc

SEQ ID NO: 1040426 - RNA, 19 nt, Artificial Sequence
  Description of Artificial Sequence: Synthetic oligonucleotide
gaggaaacugugggaugug

SEQ ID NO: 1040427 - RNA, 19 nt, Artificial Sequence
  Description of Artificial Sequence: Synthetic oligonucleotide
gagcaagcgggcuuuaguu

SEQ ID NO: 1040428 - RNA, 19 nt, Artificial Sequence
  Description of Artificial Sequence: Synthetic oligonucleotide
aggcccuagcuccugcccu

SEQ ID NO: 1040429 - RNA, 19 nt, Artificial Sequence
  Description of Artificial Sequence: Synthetic oligonucleotide
augugccccucccugccug

SEQ ID NO: 1040430 - RNA, 19 nt, Artificial Sequence
  Description of Artificial Sequence: Synthetic oligonucleotide
uacggcagacuugcaauua

SEQ ID NO: 1040431 - RNA, 19 nt, Artificial Sequence
  Description of Artificial Sequence: Synthetic oligonucleotide
acgcauggugcaaccuggc

SEQ ID NO: 1040432 - RNA, 19 nt, Artificial Sequence
  Description of Artificial Sequence: Synthetic oligonucleotide
ucggacaggugcuggggua

SEQ ID NO: 1040433 - RNA, 19 nt, Artificial Sequence
  Description of Artificial Sequence: Synthetic oligonucleotide
aguucugcguggccaggaa

SEQ ID NO: 1040434 - RNA, 19 nt, Artificial Sequence
  Description of Artificial Sequence: Synthetic oligonucleotide
gagagggagcaagucuaac

SEQ ID NO: 1040435 - RNA, 19 nt, Artificial Sequence
  Description of Artificial Sequence: Synthetic oligonucleotide
gcaugaggggcccgcagag

SEQ ID NO: 1040436 - RNA, 19 nt, Artificial Sequence
  Description of Artificial Sequence: Synthetic oligonucleotide
uggugagccugggacgggc

SEQ ID NO: 1040437 - RNA, 19 nt, Artificial Sequence
  Description of Artificial Sequence: Synthetic oligonucleotide
uggugucccucggacaggu

SEQ ID NO: 1040438 - RNA, 19 nt, Artificial Sequence
  Description of Artificial Sequence: Synthetic oligonucleotide
cuugccugccccauauucu

SEQ ID NO: 1040439 - RNA, 19 nt, Artificial Sequence
  Description of Artificial Sequence: Synthetic oligonucleotide
ggucacuuuacgaggcaug

SEQ ID NO: 1040440 - RNA, 19 nt, Artificial Sequence
  Description of Artificial Sequence: Synthetic oligonucleotide
gcagacuugcaauuaagau

SEQ ID NO: 1040441 - RNA, 19 nt, Artificial Sequence
  Description of Artificial Sequence: Synthetic oligonucleotide
cuguguugguggggaaggg

SEQ ID NO: 1040442 - RNA, 19 nt, Artificial Sequence
  Description of Artificial Sequence: Synthetic oligonucleotide
ggcgcucagacagagguca

SEQ ID NO: 1040443 - RNA, 19 nt, Artificial Sequence
  Description of Artificial Sequence: Synthetic oligonucleotide
gcgauuccagcccuugcug

SEQ ID NO: 1040444 - RNA, 19 nt, Artificial Sequence
  Description of Artificial Sequence: Synthetic oligonucleotide
cuaggcccacacaugaagu

SEQ ID NO: 1040445 - RNA, 19 nt, Artificial Sequence
  Description of Artificial Sequence: Synthetic oligonucleotide
caacuuaaaaggccccugu

SEQ ID NO: 1040446 - RNA, 19 nt, Artificial Sequence
  Description of Artificial Sequence: Synthetic oligonucleotide
augcuacagaacagccuag

SEQ ID NO: 1040447 - RNA, 19 nt, Artificial Sequence
  Description of Artificial Sequence: Synthetic oligonucleotide
agugcacugcucacugugu

SEQ ID NO: 1040448 - RNA, 19 nt, Artificial Sequence
  Description of Artificial Sequence: Synthetic oligonucleotide
uugcagugcgcacgcucaa

SEQ ID NO: 1040449 - RNA, 19 nt, Artificial Sequence
  Description of Artificial Sequence: Synthetic oligonucleotide
aagcgagcaagcgggcuuu

SEQ ID NO: 1040450 - RNA, 19 nt, Artificial Sequence
  Description of Artificial Sequence: Synthetic oligonucleotide
gcacuagguaaauaaggcu

SEQ ID NO: 1040451 - RNA, 19 nt, Artificial Sequence
  Description of Artificial Sequence: Synthetic oligonucleotide
gcgauagggugcagcaugg

SEQ ID NO: 1040452 - RNA, 19 nt, Artificial Sequence
  Description of Artificial Sequence: Synthetic oligonucleotide
uggugcaaccuggccaccu

SEQ ID NO: 1040453 - RNA, 19 nt, Artificial Sequence
  Description of Artificial Sequence: Synthetic oligonucleotide
cucagaaccagggcuuaga

SEQ ID NO: 1040454 - RNA, 19 nt, Artificial Sequence
  Description of Artificial Sequence: Synthetic oligonucleotide
gcaugagcuaggcccacac

SEQ ID NO: 1040455 - RNA, 19 nt, Artificial Sequence
  Description of Artificial Sequence: Synthetic oligonucleotide
auaaggcucucggccugag

SEQ ID NO: 1040456 - RNA, 19 nt, Artificial Sequence
  Description of Artificial Sequence: Synthetic oligonucleotide
acagaacagccuagagcug

SEQ ID NO: 1040457 - RNA, 19 nt, Artificial Sequence
  Description of Artificial Sequence: Synthetic oligonucleotide
gaaccagggcuuagaaucu

SEQ ID NO: 1040458 - RNA, 19 nt, Artificial Sequence
  Description of Artificial Sequence: Synthetic oligonucleotide
gcucaacuuaaaaggcccc

SEQ ID NO: 1040459 - RNA, 19 nt, Artificial Sequence
  Description of Artificial Sequence: Synthetic oligonucleotide
ugcagugcgcacgcucaac

SEQ ID NO: 1040460 - RNA, 19 nt, Artificial Sequence
  Description of Artificial Sequence: Synthetic oligonucleotide
ggguaugagagaguggugu

SEQ ID NO: 1040461 - RNA, 19 nt, Artificial Sequence
  Description of Artificial Sequence: Synthetic oligonucleotide
ccuaagugacucagaacca

SEQ ID NO: 1040462 - RNA, 19 nt, Artificial Sequence
  Description of Artificial Sequence: Synthetic oligonucleotide
caugagcuaggcccacaca

SEQ ID NO: 1040463 - RNA, 19 nt, Artificial Sequence
  Description of Artificial Sequence: Synthetic oligonucleotide
ggagcaagaugacgcuuca

SEQ ID NO: 1040464 - RNA, 19 nt, Artificial Sequence
  Description of Artificial Sequence: Synthetic oligonucleotide
gagccacaccuccaggacu

SEQ ID NO: 1040465 - RNA, 19 nt, Artificial Sequence
  Description of Artificial Sequence: Synthetic oligonucleotide
ccucuggcgauuccagccc

SEQ ID NO: 1040466 - RNA, 19 nt, Artificial Sequence
  Description of Artificial Sequence: Synthetic oligonucleotide
gcugguucccuggacaguc

SEQ ID NO: 1040467 - RNA, 19 nt, Artificial Sequence
  Description of Artificial Sequence: Synthetic oligonucleotide
cuggcgauuccagcccuug

SEQ ID NO: 1040468 - RNA, 19 nt, Artificial Sequence
  Description of Artificial Sequence: Synthetic oligonucleotide
ccagaggggccauuguauc

SEQ ID NO: 1040469 - RNA, 19 nt, Artificial Sequence
  Description of Artificial Sequence: Synthetic oligonucleotide
ggggcagauaugcuacaga

SEQ ID NO: 1040470 - RNA, 19 nt, Artificial Sequence
  Description of Artificial Sequence: Synthetic oligonucleotide
ucuccgguccaaggaaguu

SEQ ID NO: 1040471 - RNA, 19 nt, Artificial Sequence
  Description of Artificial Sequence: Synthetic oligonucleotide
cccauauugcuaggaggcg

SEQ ID NO: 1040472 - RNA, 19 nt, Artificial Sequence
  Description of Artificial Sequence: Synthetic oligonucleotide
gaggacucuaggaguuuaa

SEQ ID NO: 1040473 - RNA, 19 nt, Artificial Sequence
  Description of Artificial Sequence: Synthetic oligonucleotide
agccacaccuccaggacuu

SEQ ID NO: 1040474 - RNA, 19 nt, Artificial Sequence
  Description of Artificial Sequence: Synthetic oligonucleotide
cucaacuuaaaaggccccu

SEQ ID NO: 1040475 - RNA, 19 nt, Artificial Sequence
  Description of Artificial Sequence: Synthetic oligonucleotide
caugggcaagaguaugggu

SEQ ID NO: 1040476 - RNA, 19 nt, Artificial Sequence
  Description of Artificial Sequence: Synthetic oligonucleotide
aggcgcucagacagagguc

SEQ ID NO: 1040477 - RNA, 19 nt, Artificial Sequence
  Description of Artificial Sequence: Synthetic oligonucleotide
uugcuaggaggcgcucaga

SEQ ID NO: 1040478 - RNA, 19 nt, Artificial Sequence
  Description of Artificial Sequence: Synthetic oligonucleotide
aacauccuccagggccgcu

SEQ ID NO: 1040479 - RNA, 19 nt, Artificial Sequence
  Description of Artificial Sequence: Synthetic oligonucleotide
ggggcccgcagagaaagug

SEQ ID NO: 1040480 - RNA, 19 nt, Artificial Sequence
  Description of Artificial Sequence: Synthetic oligonucleotide
caccagaggggccauugua

SEQ ID NO: 1040481 - RNA, 19 nt, Artificial Sequence
  Description of Artificial Sequence: Synthetic oligonucleotide
agaggcgacugcacacaca

SEQ ID NO: 1040482 - RNA, 19 nt, Artificial Sequence
  Description of Artificial Sequence: Synthetic oligonucleotide
ggggaccuccccauauugc

SEQ ID NO: 1040483 - RNA, 19 nt, Artificial Sequence
  Description of Artificial Sequence: Synthetic oligonucleotide
ggcgauuccagcccuugcu

SEQ ID NO: 1040484 - RNA, 19 nt, Artificial Sequence
  Description of Artificial Sequence: Synthetic oligonucleotide
cagaggggccauuguaucu

SEQ ID NO: 1040485 - RNA, 19 nt, Artificial Sequence
  Description of Artificial Sequence: Synthetic oligonucleotide
ggagaggcgacugcacaca

SEQ ID NO: 1040486 - RNA, 19 nt, Artificial Sequence
  Description of Artificial Sequence: Synthetic oligonucleotide
gcuguagguagagcucagc

SEQ ID NO: 1040487 - RNA, 19 nt, Artificial Sequence
  Description of Artificial Sequence: Synthetic oligonucleotide
gugcgcacgcucaacuuaa

SEQ ID NO: 1040488 - RNA, 19 nt, Artificial Sequence
  Description of Artificial Sequence: Synthetic oligonucleotide
ggacuuccacccuuccuaa

SEQ ID NO: 1040489 - RNA, 19 nt, Artificial Sequence
  Description of Artificial Sequence: Synthetic oligonucleotide
ggggacaagggcagccuug

SEQ ID NO: 1040490 - RNA, 19 nt, Artificial Sequence
  Description of Artificial Sequence: Synthetic oligonucleotide
agcccuugcuguagguaga

SEQ ID NO: 1040491 - RNA, 19 nt, Artificial Sequence
  Description of Artificial Sequence: Synthetic oligonucleotide
cucucggccugagagcuaa

SEQ ID NO: 1040492 - RNA, 19 nt, Artificial Sequence
  Description of Artificial Sequence: Synthetic oligonucleotide
gggcccgcagagaaagugc

SEQ ID NO: 1040493 - RNA, 19 nt, Artificial Sequence
  Description of Artificial Sequence: Synthetic oligonucleotide
ggccucuggcgauuccagc

SEQ ID NO: 1040494 - RNA, 19 nt, Artificial Sequence
  Description of Artificial Sequence: Synthetic oligonucleotide
gcgacugcacacacagggc

SEQ ID NO: 1040495 - RNA, 19 nt, Artificial Sequence
  Description of Artificial Sequence: Synthetic oligonucleotide
cugcccuaagugacucaga

SEQ ID NO: 1040496 - RNA, 19 nt, Artificial Sequence
  Description of Artificial Sequence: Synthetic oligonucleotide
caccaacaaguucucugua

SEQ ID NO: 1040497 - RNA, 19 nt, Artificial Sequence
  Description of Artificial Sequence: Synthetic oligonucleotide
gaugugccccucccugccu

SEQ ID NO: 1040498 - RNA, 19 nt, Artificial Sequence
  Description of Artificial Sequence: Synthetic oligonucleotide
ggguacauggggagcucug

SEQ ID NO: 1040499 - RNA, 19 nt, Artificial Sequence
  Description of Artificial Sequence: Synthetic oligonucleotide
gacgggcaugggaggagca

SEQ ID NO: 1040500 - RNA, 19 nt, Artificial Sequence
  Description of Artificial Sequence: Synthetic oligonucleotide
gggcaagaguauggguaag

SEQ ID NO: 1040501 - RNA, 19 nt, Artificial Sequence
  Description of Artificial Sequence: Synthetic oligonucleotide
ggacgggcaugggaggagc

SEQ ID NO: 1040502 - RNA, 19 nt, Artificial Sequence
  Description of Artificial Sequence: Synthetic oligonucleotide
aagcgggcuuuaguuucua

SEQ ID NO: 1040503 - RNA, 19 nt, Artificial Sequence
  Description of Artificial Sequence: Synthetic oligonucleotide
acgggcaugggaggagcaa

SEQ ID NO: 1040504 - RNA, 19 nt, Artificial Sequence
  Description of Artificial Sequence: Synthetic oligonucleotide
ggacugcaugcaauggcga

SEQ ID NO: 1040505 - RNA, 19 nt, Artificial Sequence
  Description of Artificial Sequence: Synthetic oligonucleotide
gcccuugcuguagguagag

SEQ ID NO: 1040506 - RNA, 19 nt, Artificial Sequence
  Description of Artificial Sequence: Synthetic oligonucleotide
ccauagacugcgauagggu

SEQ ID NO: 1040507 - RNA, 19 nt, Artificial Sequence
  Description of Artificial Sequence: Synthetic oligonucleotide
caguucugcguggccagga

SEQ ID NO: 1040508 - RNA, 19 nt, Artificial Sequence
  Description of Artificial Sequence: Synthetic oligonucleotide
caguuuccuuaauccugaa

SEQ ID NO: 1040509 - RNA, 19 nt, Artificial Sequence
  Description of Artificial Sequence: Synthetic oligonucleotide
gcagugcgcacgcucaacu

SEQ ID NO: 1040510 - RNA, 19 nt, Artificial Sequence
  Description of Artificial Sequence: Synthetic oligonucleotide
agcuaggcccacacaugaa

SEQ ID NO: 1040511 - RNA, 19 nt, Artificial Sequence
  Description of Artificial Sequence: Synthetic oligonucleotide
cgguccaaggaaguuuggc

SEQ ID NO: 1040512 - RNA, 19 nt, Artificial Sequence
  Description of Artificial Sequence: Synthetic oligonucleotide
gucccucggacaggugcug

SEQ ID NO: 1040513 - RNA, 19 nt, Artificial Sequence
  Description of Artificial Sequence: Synthetic oligonucleotide
gcgggcuuuaguuucuaau

SEQ ID NO: 1040514 - RNA, 19 nt, Artificial Sequence
  Description of Artificial Sequence: Synthetic oligonucleotide
agcuugccugccccauauu

SEQ ID NO: 1040515 - RNA, 19 nt, Artificial Sequence
  Description of Artificial Sequence: Synthetic oligonucleotide
ccgguccaaggaaguuugg

SEQ ID NO: 1040516 - RNA, 19 nt, Artificial Sequence
  Description of Artificial Sequence: Synthetic oligonucleotide
gaggagcaagaugacgcuu

SEQ ID NO: 1040517 - RNA, 19 nt, Artificial Sequence
  Description of Artificial Sequence: Synthetic oligonucleotide
gggacgggcaugggaggag

SEQ ID NO: 1040518 - RNA, 19 nt, Artificial Sequence
  Description of Artificial Sequence: Synthetic oligonucleotide
gacuuccacccuuccuaau

SEQ ID NO: 1040519 - RNA, 19 nt, Artificial Sequence
  Description of Artificial Sequence: Synthetic oligonucleotide
agccgacuucugacguuug

SEQ ID NO: 1040520 - RNA, 19 nt, Artificial Sequence
  Description of Artificial Sequence: Synthetic oligonucleotide
gugggaugugccccucccu

SEQ ID NO: 1040521 - RNA, 19 nt, Artificial Sequence
  Description of Artificial Sequence: Synthetic oligonucleotide
gggagaugcuccagccgac

SEQ ID NO: 1040522 - RNA, 19 nt, Artificial Sequence
  Description of Artificial Sequence: Synthetic oligonucleotide
gggccgcuauuucccuugc

SEQ ID NO: 1040523 - RNA, 19 nt, Artificial Sequence
  Description of Artificial Sequence: Synthetic oligonucleotide
gcgcacgcucaacuuaaaa

SEQ ID NO: 1040524 - RNA, 19 nt, Artificial Sequence
  Description of Artificial Sequence: Synthetic oligonucleotide
cagcuugccugccccauau

SEQ ID NO: 1040525 - RNA, 19 nt, Artificial Sequence
  Description of Artificial Sequence: Synthetic oligonucleotide
ggcuuagaaucuaggguau

SEQ ID NO: 1040526 - RNA, 19 nt, Artificial Sequence
  Description of Artificial Sequence: Synthetic oligonucleotide
cucuggcgauuccagcccu

SEQ ID NO: 1040527 - RNA, 19 nt, Artificial Sequence
  Description of Artificial Sequence: Synthetic oligonucleotide
agacugcgauagggugcag

SEQ ID NO: 1040528 - RNA, 19 nt, Artificial Sequence
  Description of Artificial Sequence: Synthetic oligonucleotide
ccauuguaucuggcccugc

SEQ ID NO: 1040529 - RNA, 19 nt, Artificial Sequence
  Description of Artificial Sequence: Synthetic oligonucleotide
gccuggguccuuggcuggg

SEQ ID NO: 1040530 - RNA, 19 nt, Artificial Sequence
  Description of Artificial Sequence: Synthetic oligonucleotide
ccgcuauuucccuugcagu

SEQ ID NO: 1040531 - RNA, 19 nt, Artificial Sequence
  Description of Artificial Sequence: Synthetic oligonucleotide
ggaccuccccauauugcua

SEQ ID NO: 1040532 - RNA, 19 nt, Artificial Sequence
  Description of Artificial Sequence: Synthetic oligonucleotide
cuucugacguuugcauuuu

SEQ ID NO: 1040533 - RNA, 19 nt, Artificial Sequence
  Description of Artificial Sequence: Synthetic oligonucleotide
ggugagccugggacgggca

SEQ ID NO: 1040534 - RNA, 19 nt, Artificial Sequence
  Description of Artificial Sequence: Synthetic oligonucleotide
gcucagacagaggucacuu

SEQ ID NO: 1040535 - RNA, 19 nt, Artificial Sequence
  Description of Artificial Sequence: Synthetic oligonucleotide
ccuugccuguccauagacu

SEQ ID NO: 1040536 - RNA, 19 nt, Artificial Sequence
  Description of Artificial Sequence: Synthetic oligonucleotide
ggccgcuauuucccuugca

SEQ ID NO: 1040537 - RNA, 19 nt, Artificial Sequence
  Description of Artificial Sequence: Synthetic oligonucleotide
caggcaugaggggcccgca

SEQ ID NO: 1040538 - RNA, 19 nt, Artificial Sequence
  Description of Artificial Sequence: Synthetic oligonucleotide
cuggacagucuggcuccca

SEQ ID NO: 1040539 - RNA, 19 nt, Artificial Sequence
  Description of Artificial Sequence: Synthetic oligonucleotide
cccugauggacugcaugca

SEQ ID NO: 1040540 - RNA, 19 nt, Artificial Sequence
  Description of Artificial Sequence: Synthetic oligonucleotide
cagugcgcacgcucaacuu

SEQ ID NO: 1040541 - RNA, 19 nt, Artificial Sequence
  Description of Artificial Sequence: Synthetic oligonucleotide
cccgcagagaaagugcacu

SEQ ID NO: 1040542 - RNA, 19 nt, Artificial Sequence
  Description of Artificial Sequence: Synthetic oligonucleotide
cagccgacuucugacguuu

SEQ ID NO: 1040543 - RNA, 19 nt, Artificial Sequence
  Description of Artificial Sequence: Synthetic oligonucleotide
ccuccccauauugcuagga

SEQ ID NO: 1040544 - RNA, 19 nt, Artificial Sequence
  Description of Artificial Sequence: Synthetic oligonucleotide
ggugucccucggacaggug

SEQ ID NO: 1040545 - RNA, 19 nt, Artificial Sequence
  Description of Artificial Sequence: Synthetic oligonucleotide
ggcaaaggcccuagcuccu

SEQ ID NO: 1040546 - RNA, 19 nt, Artificial Sequence
  Description of Artificial Sequence: Synthetic oligonucleotide
cccaucucugucccacaaa

SEQ ID NO: 1040547 - RNA, 19 nt, Artificial Sequence
  Description of Artificial Sequence: Synthetic oligonucleotide
cuggggaccuccccauauu

SEQ ID NO: 1040548 - RNA, 19 nt, Artificial Sequence
  Description of Artificial Sequence: Synthetic oligonucleotide
agcgagcaagcgggcuuua

SEQ ID NO: 1040549 - RNA, 19 nt, Artificial Sequence
  Description of Artificial Sequence: Synthetic oligonucleotide
cugcguggccaggaagggu

SEQ ID NO: 1040550 - RNA, 19 nt, Artificial Sequence
  Description of Artificial Sequence: Synthetic oligonucleotide
gcgcucagacagaggucac

SEQ ID NO: 1040551 - RNA, 19 nt, Artificial Sequence
  Description of Artificial Sequence: Synthetic oligonucleotide
ccccuugccuguccauaga

SEQ ID NO: 1040552 - RNA, 19 nt, Artificial Sequence
  Description of Artificial Sequence: Synthetic oligonucleotide
ccuuccuaaugaggacucu

SEQ ID NO: 1040553 - RNA, 19 nt, Artificial Sequence
  Description of Artificial Sequence: Synthetic oligonucleotide
gcucucggccugagagcua

SEQ ID NO: 1040554 - RNA, 19 nt, Artificial Sequence
  Description of Artificial Sequence: Synthetic oligonucleotide
aauugagaaaauuagagcc

SEQ ID NO: 1040555 - RNA, 19 nt, Artificial Sequence
  Description of Artificial Sequence: Synthetic oligonucleotide
uaaucuguagcacagaggg

SEQ ID NO: 1040556 - RNA, 19 nt, Artificial Sequence
  Description of Artificial Sequence: Synthetic oligonucleotide
uauuaaggcagcaugauag

SEQ ID NO: 1040557 - RNA, 19 nt, Artificial Sequence
  Description of Artificial Sequence: Synthetic oligonucleotide
aaauuagagccccagagag

SEQ ID NO: 1040558 - RNA, 19 nt, Artificial Sequence
  Description of Artificial Sequence: Synthetic oligonucleotide
aaaaugaccaucagcaccc

SEQ ID NO: 1040559 - RNA, 19 nt, Artificial Sequence
  Description of Artificial Sequence: Synthetic oligonucleotide
uccggaaucuuuauuaagg

SEQ ID NO: 1040560 - RNA, 19 nt, Artificial Sequence
  Description of Artificial Sequence: Synthetic oligonucleotide
auugguagguucuugcccc

SEQ ID NO: 1040561 - RNA, 19 nt, Artificial Sequence
  Description of Artificial Sequence: Synthetic oligonucleotide
uucucaauagucaggggcg

SEQ ID NO: 1040562 - RNA, 19 nt, Artificial Sequence
  Description of Artificial Sequence: Synthetic oligonucleotide
uccgauauagcauggauug

SEQ ID NO: 1040563 - RNA, 19 nt, Artificial Sequence
  Description of Artificial Sequence: Synthetic oligonucleotide
uacucaaacccucugcugg

SEQ ID NO: 1040564 - RNA, 19 nt, Artificial Sequence
  Description of Artificial Sequence: Synthetic oligonucleotide
agaauugguagguucuugc

SEQ ID NO: 1040565 - RNA, 19 nt, Artificial Sequence
  Description of Artificial Sequence: Synthetic oligonucleotide
uggcaauugagaaaauuag

SEQ ID NO: 1040566 - RNA, 19 nt, Artificial Sequence
  Description of Artificial Sequence: Synthetic oligonucleotide
uuucgcgcagcuuagaggc

SEQ ID NO: 1040567 - RNA, 19 nt, Artificial Sequence
  Description of Artificial Sequence: Synthetic oligonucleotide
caauugagaaaauuagagc

SEQ ID NO: 1040568 - RNA, 19 nt, Artificial Sequence
  Description of Artificial Sequence: Synthetic oligonucleotide
caaagcaagaauugguagg

SEQ ID NO: 1040569 - RNA, 19 nt, Artificial Sequence
  Description of Artificial Sequence: Synthetic oligonucleotide
auauagcauggauuguucc

SEQ ID NO: 1040570 - RNA, 19 nt, Artificial Sequence
  Description of Artificial Sequence: Synthetic oligonucleotide
auugagaaaauuagagccc

SEQ ID NO: 1040571 - RNA, 19 nt, Artificial Sequence
  Description of Artificial Sequence: Synthetic oligonucleotide
ugcaauugcgccuuucggg

SEQ ID NO: 1040572 - RNA, 19 nt, Artificial Sequence
  Description of Artificial Sequence: Synthetic oligonucleotide
aaucgugugcaaucacagc

SEQ ID NO: 1040573 - RNA, 19 nt, Artificial Sequence
  Description of Artificial Sequence: Synthetic oligonucleotide
aaagaccugugucaauagg

SEQ ID NO: 1040574 - RNA, 19 nt, Artificial Sequence
  Description of Artificial Sequence: Synthetic oligonucleotide
cuucucaauagucaggggc

SEQ ID NO: 1040575 - RNA, 19 nt, Artificial Sequence
  Description of Artificial Sequence: Synthetic oligonucleotide
uccguauagaugcaaagcu

SEQ ID NO: 1040576 - RNA, 19 nt, Artificial Sequence
  Description of Artificial Sequence: Synthetic oligonucleotide
gaagacgagguacagggcc

SEQ ID NO: 1040577 - RNA, 19 nt, Artificial Sequence
  Description of Artificial Sequence: Synthetic oligonucleotide
uuggcaauugagaaaauua

SEQ ID NO: 1040578 - RNA, 19 nt, Artificial Sequence
  Description of Artificial Sequence: Synthetic oligonucleotide
uagaaaugggccaccagcc

SEQ ID NO: 1040579 - RNA, 19 nt, Artificial Sequence
  Description of Artificial Sequence: Synthetic oligonucleotide
uauuccggaaucuuuauua

SEQ ID NO: 1040580 - RNA, 19 nt, Artificial Sequence
  Description of Artificial Sequence: Synthetic oligonucleotide
aauugcgccuuucgggugg

SEQ ID NO: 1040581 - RNA, 19 nt, Artificial Sequence
  Description of Artificial Sequence: Synthetic oligonucleotide
auggauuguuccuagagga

SEQ ID NO: 1040582 - RNA, 19 nt, Artificial Sequence
  Description of Artificial Sequence: Synthetic oligonucleotide
aaaccuuguggccuaagga

SEQ ID NO: 1040583 - RNA, 19 nt, Artificial Sequence
  Description of Artificial Sequence: Synthetic oligonucleotide
aggacugucggucacuggg

SEQ ID NO: 1040584 - RNA, 19 nt, Artificial Sequence
  Description of Artificial Sequence: Synthetic oligonucleotide
ucacaaggaaugcuggugc

SEQ ID NO: 1040585 - RNA, 19 nt, Artificial Sequence
  Description of Artificial Sequence: Synthetic oligonucleotide
uuugaccaaggacugucgg

SEQ ID NO: 1040586 - RNA, 19 nt, Artificial Sequence
  Description of Artificial Sequence: Synthetic oligonucleotide
cuuagugcacaacuguggg

SEQ ID NO: 1040587 - RNA, 19 nt, Artificial Sequence
  Description of Artificial Sequence: Synthetic oligonucleotide
aucgugugcaaucacagca

SEQ ID NO: 1040588 - RNA, 19 nt, Artificial Sequence
  Description of Artificial Sequence: Synthetic oligonucleotide
uuguauucaaagcaauaaa

SEQ ID NO: 1040589 - RNA, 19 nt, Artificial Sequence
  Description of Artificial Sequence: Synthetic oligonucleotide
guuaccaccgcuugugggg

SEQ ID NO: 1040590 - RNA, 19 nt, Artificial Sequence
  Description of Artificial Sequence: Synthetic oligonucleotide
agcccucaaucacagaagc

SEQ ID NO: 1040591 - RNA, 19 nt, Artificial Sequence
  Description of Artificial Sequence: Synthetic oligonucleotide
aaaucgugugcaaucacag

SEQ ID NO: 1040592 - RNA, 19 nt, Artificial Sequence
  Description of Artificial Sequence: Synthetic oligonucleotide
uuacacagcagccaucuaa

SEQ ID NO: 1040593 - RNA, 19 nt, Artificial Sequence
  Description of Artificial Sequence: Synthetic oligonucleotide
uuuugaccaaggacugucg

SEQ ID NO: 1040594 - RNA, 19 nt, Artificial Sequence
  Description of Artificial Sequence: Synthetic oligonucleotide
cauggauuguuccuagagg

SEQ ID NO: 1040595 - RNA, 19 nt, Artificial Sequence
  Description of Artificial Sequence: Synthetic oligonucleotide
uugagaaaauuagagcccc

SEQ ID NO: 1040596 - RNA, 19 nt, Artificial Sequence
  Description of Artificial Sequence: Synthetic oligonucleotide
aaagcgguagcagagggga

SEQ ID NO: 1040597 - RNA, 19 nt, Artificial Sequence
  Description of Artificial Sequence: Synthetic oligonucleotide
cauggauuacacagcagcc

SEQ ID NO: 1040598 - RNA, 19 nt, Artificial Sequence
  Description of Artificial Sequence: Synthetic oligonucleotide
acuuccgugccugugauuc

SEQ ID NO: 1040599 - RNA, 19 nt, Artificial Sequence
  Description of Artificial Sequence: Synthetic oligonucleotide
ucuguaagcucaucugcag

SEQ ID NO: 1040600 - RNA, 19 nt, Artificial Sequence
  Description of Artificial Sequence: Synthetic oligonucleotide
cuaaggaaagaccuguguc

SEQ ID NO: 1040601 - RNA, 19 nt, Artificial Sequence
  Description of Artificial Sequence: Synthetic oligonucleotide
agcaccuuagugcacaacu

SEQ ID NO: 1040602 - RNA, 19 nt, Artificial Sequence
  Description of Artificial Sequence: Synthetic oligonucleotide
gaauugguagguucuugcc

SEQ ID NO: 1040603 - RNA, 19 nt, Artificial Sequence
  Description of Artificial Sequence: Synthetic oligonucleotide
uguggccuaaggaaagacc

SEQ ID NO: 1040604 - RNA, 19 nt, Artificial Sequence
  Description of Artificial Sequence: Synthetic oligonucleotide
ugugcaaucacagcagcca

SEQ ID NO: 1040605 - RNA, 19 nt, Artificial Sequence
  Description of Artificial Sequence: Synthetic oligonucleotide
ucaauagucaggggcgugg

SEQ ID NO: 1040606 - RNA, 19 nt, Artificial Sequence
  Description of Artificial Sequence: Synthetic oligonucleotide
cuuuauuaaggcagcauga

SEQ ID NO: 1040607 - RNA, 19 nt, Artificial Sequence
  Description of Artificial Sequence: Synthetic oligonucleotide
cagaagcuaagcaggaagc

SEQ ID NO: 1040608 - RNA, 19 nt, Artificial Sequence
  Description of Artificial Sequence: Synthetic oligonucleotide
agagccaggaaaucgugug

SEQ ID NO: 1040609 - RNA, 19 nt, Artificial Sequence
  Description of Artificial Sequence: Synthetic oligonucleotide
uucucugaccagcauggcc

SEQ ID NO: 1040610 - RNA, 19 nt, Artificial Sequence
  Description of Artificial Sequence: Synthetic oligonucleotide
gauaggcaggaccuggccc

SEQ ID NO: 1040611 - RNA, 19 nt, Artificial Sequence
  Description of Artificial Sequence: Synthetic oligonucleotide
cuuggaccucuccagauag

SEQ ID NO: 1040612 - RNA, 19 nt, Artificial Sequence
  Description of Artificial Sequence: Synthetic oligonucleotide
uuauuaaggcagcaugaua

SEQ ID NO: 1040613 - RNA, 19 nt, Artificial Sequence
  Description of Artificial Sequence: Synthetic oligonucleotide
ucgggcuuccgauauagca

SEQ ID NO: 1040614 - RNA, 19 nt, Artificial Sequence
  Description of Artificial Sequence: Synthetic oligonucleotide
ucgugugcaaucacagcag

SEQ ID NO: 1040615 - RNA, 19 nt, Artificial Sequence
  Description of Artificial Sequence: Synthetic oligonucleotide
aaacccucugcuggaagac

SEQ ID NO: 1040616 - RNA, 19 nt, Artificial Sequence
  Description of Artificial Sequence: Synthetic oligonucleotide
uggauuacacagcagccau

SEQ ID NO: 1040617 - RNA, 19 nt, Artificial Sequence
  Description of Artificial Sequence: Synthetic oligonucleotide
gcauggauuacacagcagc

SEQ ID NO: 1040618 - RNA, 19 nt, Artificial Sequence
  Description of Artificial Sequence: Synthetic oligonucleotide
uagcgaucauggauggagg

SEQ ID NO: 1040619 - RNA, 19 nt, Artificial Sequence
  Description of Artificial Sequence: Synthetic oligonucleotide
guuucgcgcagcuuagagg

SEQ ID NO: 1040620 - RNA, 19 nt, Artificial Sequence
  Description of Artificial Sequence: Synthetic oligonucleotide
caguacgccagcaucuucc

SEQ ID NO: 1040621 - RNA, 19 nt, Artificial Sequence
  Description of Artificial Sequence: Synthetic oligonucleotide
cucgcaacacagcagcucc

SEQ ID NO: 1040622 - RNA, 19 nt, Artificial Sequence
  Description of Artificial Sequence: Synthetic oligonucleotide
uggaccacaaagcgguagc

SEQ ID NO: 1040623 - RNA, 19 nt, Artificial Sequence
  Description of Artificial Sequence: Synthetic oligonucleotide
uuccggaaucuuuauuaag

SEQ ID NO: 1040624 - RNA, 19 nt, Artificial Sequence
  Description of Artificial Sequence: Synthetic oligonucleotide
aagcaaagcaagaauuggu

SEQ ID NO: 1040625 - RNA, 19 nt, Artificial Sequence
  Description of Artificial Sequence: Synthetic oligonucleotide
gaaguaggaggcucgcggc

SEQ ID NO: 1040626 - RNA, 19 nt, Artificial Sequence
  Description of Artificial Sequence: Synthetic oligonucleotide
agcgaucauggauggaggg

SEQ ID NO: 1040627 - RNA, 19 nt, Artificial Sequence
  Description of Artificial Sequence: Synthetic oligonucleotide
ucggucacugggcagagaa

SEQ ID NO: 1040628 - RNA, 19 nt, Artificial Sequence
  Description of Artificial Sequence: Synthetic oligonucleotide
uuacucaaacccucugcug

SEQ ID NO: 1040629 - RNA, 19 nt, Artificial Sequence
  Description of Artificial Sequence: Synthetic oligonucleotide
cauccauccuuacucaaac

SEQ ID NO: 1040630 - RNA, 19 nt, Artificial Sequence
  Description of Artificial Sequence: Synthetic oligonucleotide
guaaucuguagcacagagg

SEQ ID NO: 1040631 - RNA, 19 nt, Artificial Sequence
  Description of Artificial Sequence: Synthetic oligonucleotide
ucagcaccccucaaagagc

SEQ ID NO: 1040632 - RNA, 19 nt, Artificial Sequence
  Description of Artificial Sequence: Synthetic oligonucleotide
aagaauugguagguucuug

SEQ ID NO: 1040633 - RNA, 19 nt, Artificial Sequence
  Description of Artificial Sequence: Synthetic oligonucleotide
gacucacaaggaaugcugg

SEQ ID NO: 1040634 - RNA, 19 nt, Artificial Sequence
  Description of Artificial Sequence: Synthetic oligonucleotide
auuaaggcagcaugauaga

SEQ ID NO: 1040635 - RNA, 19 nt, Artificial Sequence
  Description of Artificial Sequence: Synthetic oligonucleotide
uaagcucaucugcagacau

SEQ ID NO: 1040636 - RNA, 19 nt, Artificial Sequence
  Description of Artificial Sequence: Synthetic oligonucleotide
acauugcaaagguguaauc

SEQ ID NO: 1040637 - RNA, 19 nt, Artificial Sequence
  Description of Artificial Sequence: Synthetic oligonucleotide
auucccgcaacugccaagg

SEQ ID NO: 1040638 - RNA, 19 nt, Artificial Sequence
  Description of Artificial Sequence: Synthetic oligonucleotide
guagcgcuccuccaggcgg

SEQ ID NO: 1040639 - RNA, 19 nt, Artificial Sequence
  Description of Artificial Sequence: Synthetic oligonucleotide
uuuauuccggaaucuuuau

SEQ ID NO: 1040640 - RNA, 19 nt, Artificial Sequence
  Description of Artificial Sequence: Synthetic oligonucleotide
uggcugugacaucuguggg

SEQ ID NO: 1040641 - RNA, 19 nt, Artificial Sequence
  Description of Artificial Sequence: Synthetic oligonucleotide
uuccgauauagcauggauu

SEQ ID NO: 1040642 - RNA, 19 nt, Artificial Sequence
  Description of Artificial Sequence: Synthetic oligonucleotide
gaaaucgugugcaaucaca

SEQ ID NO: 1040643 - RNA, 19 nt, Artificial Sequence
  Description of Artificial Sequence: Synthetic oligonucleotide
augauagaaaugggccacc

SEQ ID NO: 1040644 - RNA, 19 nt, Artificial Sequence
  Description of Artificial Sequence: Synthetic oligonucleotide
caggaaaucgugugcaauc

SEQ ID NO: 1040645 - RNA, 19 nt, Artificial Sequence
  Description of Artificial Sequence: Synthetic oligonucleotide
aguacgccagcaucuuccg

SEQ ID NO: 1040646 - RNA, 19 nt, Artificial Sequence
  Description of Artificial Sequence: Synthetic oligonucleotide
gauauagcauggauuguuc

SEQ ID NO: 1040647 - RNA, 19 nt, Artificial Sequence
  Description of Artificial Sequence: Synthetic oligonucleotide
uacauugcaaagguguaau

SEQ ID NO: 1040648 - RNA, 19 nt, Artificial Sequence
  Description of Artificial Sequence: Synthetic oligonucleotide
acauagagcuggcuccuag

SEQ ID NO: 1040649 - RNA, 19 nt, Artificial Sequence
  Description of Artificial Sequence: Synthetic oligonucleotide
ucccgcaacugccaaggag

SEQ ID NO: 1040650 - RNA, 19 nt, Artificial Sequence
  Description of Artificial Sequence: Synthetic oligonucleotide
gagaggagggacucacaag

SEQ ID NO: 1040651 - RNA, 19 nt, Artificial Sequence
  Description of Artificial Sequence: Synthetic oligonucleotide
agagaggagggacucacaa

SEQ ID NO: 1040652 - RNA, 19 nt, Artificial Sequence
  Description of Artificial Sequence: Synthetic oligonucleotide
aaaggcggugcagaaucag

SEQ ID NO: 1040653 - RNA, 19 nt, Artificial Sequence
  Description of Artificial Sequence: Synthetic oligonucleotide
auagggcuuggaccucucc

SEQ ID NO: 1040654 - RNA, 19 nt, Artificial Sequence
  Description of Artificial Sequence: Synthetic oligonucleotide
ucgcaggcaguccacuucc

SEQ ID NO: 1040655 - RNA, 19 nt, Artificial Sequence
  Description of Artificial Sequence: Synthetic oligonucleotide
ggggacgcaagacagguag

SEQ ID NO: 1040656 - RNA, 19 nt, Artificial Sequence
  Description of Artificial Sequence: Synthetic oligonucleotide
uugaccaaggacugucggu

SEQ ID NO: 1040657 - RNA, 19 nt, Artificial Sequence
  Description of Artificial Sequence: Synthetic oligonucleotide
ugaccaaggacugucgguc

SEQ ID NO: 1040658 - RNA, 19 nt, Artificial Sequence
  Description of Artificial Sequence: Synthetic oligonucleotide
aaguaggaggcucgcggca

SEQ ID NO: 1040659 - RNA, 19 nt, Artificial Sequence
  Description of Artificial Sequence: Synthetic oligonucleotide
uuuggcaauugagaaaauu

SEQ ID NO: 1040660 - RNA, 19 nt, Artificial Sequence
  Description of Artificial Sequence: Synthetic oligonucleotide
ucccuccaagagcagcugg

SEQ ID NO: 1040661 - RNA, 19 nt, Artificial Sequence
  Description of Artificial Sequence: Synthetic oligonucleotide
cagcaccccucaaagagcc

SEQ ID NO: 1040662 - RNA, 19 nt, Artificial Sequence
  Description of Artificial Sequence: Synthetic oligonucleotide
agaaucagagccaggaaau

SEQ ID NO: 1040663 - RNA, 19 nt, Artificial Sequence
  Description of Artificial Sequence: Synthetic oligonucleotide
ucuaaggggcaacaccuuu

SEQ ID NO: 1040664 - RNA, 19 nt, Artificial Sequence
  Description of Artificial Sequence: Synthetic oligonucleotide
cugcaauugcgccuuucgg

SEQ ID NO: 1040665 - RNA, 19 nt, Artificial Sequence
  Description of Artificial Sequence: Synthetic oligonucleotide
uuucggguggggacgcaag

SEQ ID NO: 1040666 - RNA, 19 nt, Artificial Sequence
  Description of Artificial Sequence: Synthetic oligonucleotide
uuaaggcagcaugauagaa

SEQ ID NO: 1040667 - RNA, 19 nt, Artificial Sequence
  Description of Artificial Sequence: Synthetic oligonucleotide
auuccggaaucuuuauuaa

SEQ ID NO: 1040668 - RNA, 19 nt, Artificial Sequence
  Description of Artificial Sequence: Synthetic oligonucleotide
ucgaucugcuccugacagg

SEQ ID NO: 1040669 - RNA, 19 nt, Artificial Sequence
  Description of Artificial Sequence: Synthetic oligonucleotide
gcauggauuguuccuagag

SEQ ID NO: 1040670 - RNA, 19 nt, Artificial Sequence
  Description of Artificial Sequence: Synthetic oligonucleotide
cuccuggaccacaaagcgg

SEQ ID NO: 1040671 - RNA, 19 nt, Artificial Sequence
  Description of Artificial Sequence: Synthetic oligonucleotide
agcagccucgggucgggcc

SEQ ID NO: 1040672 - RNA, 19 nt, Artificial Sequence
  Description of Artificial Sequence: Synthetic oligonucleotide
caaagagcccucaaucaca

SEQ ID NO: 1040673 - RNA, 19 nt, Artificial Sequence
  Description of Artificial Sequence: Synthetic oligonucleotide
uggauuguuccuagaggaa

SEQ ID NO: 1040674 - RNA, 19 nt, Artificial Sequence
  Description of Artificial Sequence: Synthetic oligonucleotide
uuauuccggaaucuuuauu

SEQ ID NO: 1040675 - RNA, 19 nt, Artificial Sequence
  Description of Artificial Sequence: Synthetic oligonucleotide
ucaggggcgugguuucgcg

SEQ ID NO: 1040676 - RNA, 19 nt, Artificial Sequence
  Description of Artificial Sequence: Synthetic oligonucleotide
agggacucacaaggaaugc

SEQ ID NO: 1040677 - RNA, 19 nt, Artificial Sequence
  Description of Artificial Sequence: Synthetic oligonucleotide
aguaccgaggagcugcaau

SEQ ID NO: 1040678 - RNA, 19 nt, Artificial Sequence
  Description of Artificial Sequence: Synthetic oligonucleotide
agacauccuccucgcagcg

SEQ ID NO: 1040679 - RNA, 19 nt, Artificial Sequence
  Description of Artificial Sequence: Synthetic oligonucleotide
aggcuguucccuccaagag

SEQ ID NO: 1040680 - RNA, 19 nt, Artificial Sequence
  Description of Artificial Sequence: Synthetic oligonucleotide
ugccugugauuccugccag

SEQ ID NO: 1040681 - RNA, 19 nt, Artificial Sequence
  Description of Artificial Sequence: Synthetic oligonucleotide
acuuuaccuguuuggauuu

SEQ ID NO: 1040682 - RNA, 19 nt, Artificial Sequence
  Description of Artificial Sequence: Synthetic oligonucleotide
uuggaccucuccagauagg

SEQ ID NO: 1040683 - RNA, 19 nt, Artificial Sequence
  Description of Artificial Sequence: Synthetic oligonucleotide
caccuuuggaaggaacugg

SEQ ID NO: 1040684 - RNA, 19 nt, Artificial Sequence
  Description of Artificial Sequence: Synthetic oligonucleotide
cauccaguacgccagcauc

SEQ ID NO: 1040685 - RNA, 19 nt, Artificial Sequence
  Description of Artificial Sequence: Synthetic oligonucleotide
caaccagcaccuuagugca

SEQ ID NO: 1040686 - RNA, 19 nt, Artificial Sequence
  Description of Artificial Sequence: Synthetic oligonucleotide
gagccaggaaaucgugugc

SEQ ID NO: 1040687 - RNA, 19 nt, Artificial Sequence
  Description of Artificial Sequence: Synthetic oligonucleotide
auggauuacacagcagcca

SEQ ID NO: 1040688 - RNA, 19 nt, Artificial Sequence
  Description of Artificial Sequence: Synthetic oligonucleotide
gcugcaauugcgccuuucg

SEQ ID NO: 1040689 - RNA, 19 nt, Artificial Sequence
  Description of Artificial Sequence: Synthetic oligonucleotide
cucccauucccgcaacugc

SEQ ID NO: 1040690 - RNA, 19 nt, Artificial Sequence
  Description of Artificial Sequence: Synthetic oligonucleotide
acguagcgcuccuccaggc

SEQ ID NO: 1040691 - RNA, 19 nt, Artificial Sequence
  Description of Artificial Sequence: Synthetic oligonucleotide
acgcaagacagguagcgau

SEQ ID NO: 1040692 - RNA, 19 nt, Artificial Sequence
  Description of Artificial Sequence: Synthetic oligonucleotide
caucuaaggggcaacaccu

SEQ ID NO: 1040693 - RNA, 19 nt, Artificial Sequence
  Description of Artificial Sequence: Synthetic oligonucleotide
cacaacuguggggauaggc

SEQ ID NO: 1040694 - RNA, 19 nt, Artificial Sequence
  Description of Artificial Sequence: Synthetic oligonucleotide
agaagcuaagcaggaagca

SEQ ID NO: 1040695 - RNA, 19 nt, Artificial Sequence
  Description of Artificial Sequence: Synthetic oligonucleotide
aaggccuaggcuguucccu

SEQ ID NO: 1040696 - RNA, 19 nt, Artificial Sequence
  Description of Artificial Sequence: Synthetic oligonucleotide
aggaaaucgugugcaauca

SEQ ID NO: 1040697 - RNA, 19 nt, Artificial Sequence
  Description of Artificial Sequence: Synthetic oligonucleotide
gcggugcagaaucagagcc

SEQ ID NO: 1040698 - RNA, 19 nt, Artificial Sequence
  Description of Artificial Sequence: Synthetic oligonucleotide
cccgcaacugccaaggagc

SEQ ID NO: 1040699 - RNA, 19 nt, Artificial Sequence
  Description of Artificial Sequence: Synthetic oligonucleotide
gaccacaaagcgguagcag

SEQ ID NO: 1040700 - RNA, 19 nt, Artificial Sequence
  Description of Artificial Sequence: Synthetic oligonucleotide
gguuaccaccgcuuguggg

SEQ ID NO: 1040701 - RNA, 19 nt, Artificial Sequence
  Description of Artificial Sequence: Synthetic oligonucleotide
ugguccguauagaugcaaa

SEQ ID NO: 1040702 - RNA, 19 nt, Artificial Sequence
  Description of Artificial Sequence: Synthetic oligonucleotide
acagcaaccaccaggguua

SEQ ID NO: 1040703 - RNA, 19 nt, Artificial Sequence
  Description of Artificial Sequence: Synthetic oligonucleotide
uagguucuugccccucuga

SEQ ID NO: 1040704 - RNA, 19 nt, Artificial Sequence
  Description of Artificial Sequence: Synthetic oligonucleotide
aagacgagguacagggccu

SEQ ID NO: 1040705 - RNA, 19 nt, Artificial Sequence
  Description of Artificial Sequence: Synthetic oligonucleotide
gguacagggccucaggaga

SEQ ID NO: 1040706 - RNA, 19 nt, Artificial Sequence
  Description of Artificial Sequence: Synthetic oligonucleotide
cagcagccaucuaaggggc

SEQ ID NO: 1040707 - RNA, 19 nt, Artificial Sequence
  Description of Artificial Sequence: Synthetic oligonucleotide
ccggaaucuuuauuaaggc

SEQ ID NO: 1040708 - RNA, 19 nt, Artificial Sequence
  Description of Artificial Sequence: Synthetic oligonucleotide
cguauagaugcaaagcuuc

SEQ ID NO: 1040709 - RNA, 19 nt, Artificial Sequence
  Description of Artificial Sequence: Synthetic oligonucleotide
ccaucuaaggggcaacacc

SEQ ID NO: 1040710 - RNA, 19 nt, Artificial Sequence
  Description of Artificial Sequence: Synthetic oligonucleotide
accaucagcaccccucaaa

SEQ ID NO: 1040711 - RNA, 19 nt, Artificial Sequence
  Description of Artificial Sequence: Synthetic oligonucleotide
gguuucgcgcagcuuagag

SEQ ID NO: 1040712 - RNA, 19 nt, Artificial Sequence
  Description of Artificial Sequence: Synthetic oligonucleotide
cuuacucaaacccucugcu

SEQ ID NO: 1040713 - RNA, 19 nt, Artificial Sequence
  Description of Artificial Sequence: Synthetic oligonucleotide
gcagacauagagcuggcuc

SEQ ID NO: 1040714 - RNA, 19 nt, Artificial Sequence
  Description of Artificial Sequence: Synthetic oligonucleotide
ggacgcaagacagguagcg

SEQ ID NO: 1040715 - RNA, 19 nt, Artificial Sequence
  Description of Artificial Sequence: Synthetic oligonucleotide
aggcucgcggcacguagcg

SEQ ID NO: 1040716 - RNA, 19 nt, Artificial Sequence
  Description of Artificial Sequence: Synthetic oligonucleotide
ugcggcuugaucuccuuuu

SEQ ID NO: 1040717 - RNA, 19 nt, Artificial Sequence
  Description of Artificial Sequence: Synthetic oligonucleotide
acugucggucacugggcag

SEQ ID NO: 1040718 - RNA, 19 nt, Artificial Sequence
  Description of Artificial Sequence: Synthetic oligonucleotide
aggccuaggcuguucccuc

SEQ ID NO: 1040719 - RNA, 19 nt, Artificial Sequence
  Description of Artificial Sequence: Synthetic oligonucleotide
cccucuuacaguuguauuc

SEQ ID NO: 1040720 - RNA, 19 nt, Artificial Sequence
  Description of Artificial Sequence: Synthetic oligonucleotide
uucggguggggacgcaaga

SEQ ID NO: 1040721 - RNA, 19 nt, Artificial Sequence
  Description of Artificial Sequence: Synthetic oligonucleotide
aauagucaggggcgugguu

SEQ ID NO: 1040722 - RNA, 19 nt, Artificial Sequence
  Description of Artificial Sequence: Synthetic oligonucleotide
caaacccucugcuggaaga

SEQ ID NO: 1040723 - RNA, 19 nt, Artificial Sequence
  Description of Artificial Sequence: Synthetic oligonucleotide
gaacuggggcguuuuggca

SEQ ID NO: 1040724 - RNA, 19 nt, Artificial Sequence
  Description of Artificial Sequence: Synthetic oligonucleotide
uuagagccccagagaggag

SEQ ID NO: 1040725 - RNA, 19 nt, Artificial Sequence
  Description of Artificial Sequence: Synthetic oligonucleotide
aguuguauucaaagcaaua

SEQ ID NO: 1040726 - RNA, 19 nt, Artificial Sequence
  Description of Artificial Sequence: Synthetic oligonucleotide
ccuuacucaaacccucugc

SEQ ID NO: 1040727 - RNA, 19 nt, Artificial Sequence
  Description of Artificial Sequence: Synthetic oligonucleotide
aauagggcuuggaccucuc

SEQ ID NO: 1040728 - RNA, 19 nt, Artificial Sequence
  Description of Artificial Sequence: Synthetic oligonucleotide
ucucaauagucaggggcgu

SEQ ID NO: 1040729 - RNA, 19 nt, Artificial Sequence
  Description of Artificial Sequence: Synthetic oligonucleotide
uugggcuuugugaggggaa

SEQ ID NO: 1040730 - RNA, 19 nt, Artificial Sequence
  Description of Artificial Sequence: Synthetic oligonucleotide
ggacucacaaggaaugcug

SEQ ID NO: 1040731 - RNA, 19 nt, Artificial Sequence
  Description of Artificial Sequence: Synthetic oligonucleotide
ggcaauugagaaaauuaga

SEQ ID NO: 1040732 - RNA, 19 nt, Artificial Sequence
  Description of Artificial Sequence: Synthetic oligonucleotide
cauucccgcaacugccaag

SEQ ID NO: 1040733 - RNA, 19 nt, Artificial Sequence
  Description of Artificial Sequence: Synthetic oligonucleotide
uacccucuuacaguuguau

SEQ ID NO: 1040734 - RNA, 19 nt, Artificial Sequence
  Description of Artificial Sequence: Synthetic oligonucleotide
ccacaaagcgguagcagag

SEQ ID NO: 1040735 - RNA, 19 nt, Artificial Sequence
  Description of Artificial Sequence: Synthetic oligonucleotide
aaggcggugcagaaucaga

SEQ ID NO: 1040736 - RNA, 19 nt, Artificial Sequence
  Description of Artificial Sequence: Synthetic oligonucleotide
gccccuugggcuuugugag

SEQ ID NO: 1040737 - RNA, 19 nt, Artificial Sequence
  Description of Artificial Sequence: Synthetic oligonucleotide
gaucauggauggaggguac

SEQ ID NO: 1040738 - RNA, 19 nt, Artificial Sequence
  Description of Artificial Sequence: Synthetic oligonucleotide
ugggagcauggauuacaca

SEQ ID NO: 1040739 - RNA, 19 nt, Artificial Sequence
  Description of Artificial Sequence: Synthetic oligonucleotide
guggccuaaggaaagaccu

SEQ ID NO: 1040740 - RNA, 19 nt, Artificial Sequence
  Description of Artificial Sequence: Synthetic oligonucleotide
ggagcauggauuacacagc

SEQ ID NO: 1040741 - RNA, 19 nt, Artificial Sequence
  Description of Artificial Sequence: Synthetic oligonucleotide
auccaguacgccagcaucu

SEQ ID NO: 1040742 - RNA, 19 nt, Artificial Sequence
  Description of Artificial Sequence: Synthetic oligonucleotide
guagguucuugccccucug

SEQ ID NO: 1040743 - RNA, 19 nt, Artificial Sequence
  Description of Artificial Sequence: Synthetic oligonucleotide
caaggccuaggcuguuccc

SEQ ID NO: 1040744 - RNA, 19 nt, Artificial Sequence
  Description of Artificial Sequence: Synthetic oligonucleotide
uggcuccuaggccuugaac

SEQ ID NO: 1040745 - RNA, 19 nt, Artificial Sequence
  Description of Artificial Sequence: Synthetic oligonucleotide
uuaccaccgcuuguggggu

SEQ ID NO: 1040746 - RNA, 19 nt, Artificial Sequence
  Description of Artificial Sequence: Synthetic oligonucleotide
caauugcgccuuucgggug

SEQ ID NO: 1040747 - RNA, 19 nt, Artificial Sequence
  Description of Artificial Sequence: Synthetic oligonucleotide
gugcccucgcaacacagca

SEQ ID NO: 1040748 - RNA, 19 nt, Artificial Sequence
  Description of Artificial Sequence: Synthetic oligonucleotide
ggcuccuaggccuugaacu

SEQ ID NO: 1040749 - RNA, 19 nt, Artificial Sequence
  Description of Artificial Sequence: Synthetic oligonucleotide
gugugcaaucacagcagcc

SEQ ID NO: 1040750 - RNA, 19 nt, Artificial Sequence
  Description of Artificial Sequence: Synthetic oligonucleotide
ggcguuuuggcaauugaga

SEQ ID NO: 1040751 - RNA, 19 nt, Artificial Sequence
  Description of Artificial Sequence: Synthetic oligonucleotide
gcguuuuggcaauugagaa

SEQ ID NO: 1040752 - RNA, 19 nt, Artificial Sequence
  Description of Artificial Sequence: Synthetic oligonucleotide
ccgaggagcugcaauugcg

SEQ ID NO: 1040753 - RNA, 19 nt, Artificial Sequence
  Description of Artificial Sequence: Synthetic oligonucleotide
gaccaaggacugucgguca

SEQ ID NO: 1040754 - RNA, 19 nt, Artificial Sequence
  Description of Artificial Sequence: Synthetic oligonucleotide
uucgcgcagcuuagaggcc

SEQ ID NO: 1040755 - RNA, 19 nt, Artificial Sequence
  Description of Artificial Sequence: Synthetic oligonucleotide
ucgcgcagcuuagaggcca

SEQ ID NO: 1040756 - RNA, 19 nt, Artificial Sequence
  Description of Artificial Sequence: Synthetic oligonucleotide
ggcugcuagagccccgggg

SEQ ID NO: 1040757 - RNA, 19 nt, Artificial Sequence
  Description of Artificial Sequence: Synthetic oligonucleotide
ggaaaucgugugcaaucac

SEQ ID NO: 1040758 - RNA, 19 nt, Artificial Sequence
  Description of Artificial Sequence: Synthetic oligonucleotide
aaccagcaccuuagugcac

SEQ ID NO: 1040759 - RNA, 19 nt, Artificial Sequence
  Description of Artificial Sequence: Synthetic oligonucleotide
gaccugugucaauagggcu

SEQ ID NO: 1040760 - RNA, 19 nt, Artificial Sequence
  Description of Artificial Sequence: Synthetic oligonucleotide
cuugugggguacaggccuc

SEQ ID NO: 1040761 - RNA, 19 nt, Artificial Sequence
  Description of Artificial Sequence: Synthetic oligonucleotide
accaccgcuugugggguac

SEQ ID NO: 1040762 - RNA, 19 nt, Artificial Sequence
  Description of Artificial Sequence: Synthetic oligonucleotide
cuucgaucugcuccugaca

SEQ ID NO: 1040763 - RNA, 19 nt, Artificial Sequence
  Description of Artificial Sequence: Synthetic oligonucleotide
accugugucaauagggcuu

SEQ ID NO: 1040764 - RNA, 19 nt, Artificial Sequence
  Description of Artificial Sequence: Synthetic oligonucleotide
ugagcuggucaggugggaa

SEQ ID NO: 1040765 - RNA, 19 nt, Artificial Sequence
  Description of Artificial Sequence: Synthetic oligonucleotide
guacauugcaaagguguaa

SEQ ID NO: 1040766 - RNA, 19 nt, Artificial Sequence
  Description of Artificial Sequence: Synthetic oligonucleotide
ggguacauugcaaaggugu

SEQ ID NO: 1040767 - RNA, 19 nt, Artificial Sequence
  Description of Artificial Sequence: Synthetic oligonucleotide
cucgggucgggcccggccc

SEQ ID NO: 1040768 - RNA, 19 nt, Artificial Sequence
  Description of Artificial Sequence: Synthetic oligonucleotide
acccucuuacaguuguauu

SEQ ID NO: 1040769 - RNA, 19 nt, Artificial Sequence
  Description of Artificial Sequence: Synthetic oligonucleotide
gggcguuuuggcaauugag

SEQ ID NO: 1040770 - RNA, 19 nt, Artificial Sequence
  Description of Artificial Sequence: Synthetic oligonucleotide
guaagcucaucugcagaca

SEQ ID NO: 1040771 - RNA, 19 nt, Artificial Sequence
  Description of Artificial Sequence: Synthetic oligonucleotide
ggaggcucgcggcacguag

SEQ ID NO: 1040772 - RNA, 19 nt, Artificial Sequence
  Description of Artificial Sequence: Synthetic oligonucleotide
uguagcacagagggccaaa

SEQ ID NO: 1040773 - RNA, 19 nt, Artificial Sequence
  Description of Artificial Sequence: Synthetic oligonucleotide
gcggagcaagcucugcagg

SEQ ID NO: 1040774 - RNA, 19 nt, Artificial Sequence
  Description of Artificial Sequence: Synthetic oligonucleotide
agcauggauuacacagcag

SEQ ID NO: 1040775 - RNA, 19 nt, Artificial Sequence
  Description of Artificial Sequence: Synthetic oligonucleotide
ugcuggugcauggacuuua

SEQ ID NO: 1040776 - RNA, 19 nt, Artificial Sequence
  Description of Artificial Sequence: Synthetic oligonucleotide
acuggggcguuuuggcaau

SEQ ID NO: 1040777 - RNA, 19 nt, Artificial Sequence
  Description of Artificial Sequence: Synthetic oligonucleotide
uugguccguauagaugcaa

SEQ ID NO: 1040778 - RNA, 19 nt, Artificial Sequence
  Description of Artificial Sequence: Synthetic oligonucleotide
gugguuucgcgcagcuuag

SEQ ID NO: 1040779 - RNA, 19 nt, Artificial Sequence
  Description of Artificial Sequence: Synthetic oligonucleotide
ucggguggggacgcaagac

SEQ ID NO: 1040780 - RNA, 19 nt, Artificial Sequence
  Description of Artificial Sequence: Synthetic oligonucleotide
ugucggucacugggcagag

SEQ ID NO: 1040781 - RNA, 19 nt, Artificial Sequence
  Description of Artificial Sequence: Synthetic oligonucleotide
aucgggcuuccgauauagc

SEQ ID NO: 1040782 - RNA, 19 nt, Artificial Sequence
  Description of Artificial Sequence: Synthetic oligonucleotide
ugcgccuuucgggugggga

SEQ ID NO: 1040783 - RNA, 19 nt, Artificial Sequence
  Description of Artificial Sequence: Synthetic oligonucleotide
gaaaggcggugcagaauca

SEQ ID NO: 1040784 - RNA, 19 nt, Artificial Sequence
  Description of Artificial Sequence: Synthetic oligonucleotide
accaaggccuaggcuguuc

SEQ ID NO: 1040785 - RNA, 19 nt, Artificial Sequence
  Description of Artificial Sequence: Synthetic oligonucleotide
cacuguacccucuuacagu

SEQ ID NO: 1040786 - RNA, 19 nt, Artificial Sequence
  Description of Artificial Sequence: Synthetic oligonucleotide
ggguggggacgcaagacag

SEQ ID NO: 1040787 - RNA, 19 nt, Artificial Sequence
  Description of Artificial Sequence: Synthetic oligonucleotide
guauagaugcaaagcuucu

SEQ ID NO: 1040788 - RNA, 19 nt, Artificial Sequence
  Description of Artificial Sequence: Synthetic oligonucleotide
caucagcaccccucaaaga

SEQ ID NO: 1040789 - RNA, 19 nt, Artificial Sequence
  Description of Artificial Sequence: Synthetic oligonucleotide
uggggcguuuuggcaauug

SEQ ID NO: 1040790 - RNA, 19 nt, Artificial Sequence
  Description of Artificial Sequence: Synthetic oligonucleotide
ucaauagggcuuggaccuc

SEQ ID NO: 1040791 - RNA, 19 nt, Artificial Sequence
  Description of Artificial Sequence: Synthetic oligonucleotide
gcaauugcgccuuucgggu

SEQ ID NO: 1040792 - RNA, 19 nt, Artificial Sequence
  Description of Artificial Sequence: Synthetic oligonucleotide
aucauggauggaggguaca

SEQ ID NO: 1040793 - RNA, 19 nt, Artificial Sequence
  Description of Artificial Sequence: Synthetic oligonucleotide
guacgccagcaucuuccgc

SEQ ID NO: 1040794 - RNA, 19 nt, Artificial Sequence
  Description of Artificial Sequence: Synthetic oligonucleotide
ugccgggugcccucgcaac

SEQ ID NO: 1040795 - RNA, 19 nt, Artificial Sequence
  Description of Artificial Sequence: Synthetic oligonucleotide
ggccccuugggcuuuguga

SEQ ID NO: 1040796 - RNA, 19 nt, Artificial Sequence
  Description of Artificial Sequence: Synthetic oligonucleotide
agcugggagcauggauuac

SEQ ID NO: 1040797 - RNA, 19 nt, Artificial Sequence
  Description of Artificial Sequence: Synthetic oligonucleotide
gaggcucgcggcacguagc

SEQ ID NO: 1040798 - RNA, 19 nt, Artificial Sequence
  Description of Artificial Sequence: Synthetic oligonucleotide
acgagguacagggccucag

SEQ ID NO: 1040799 - RNA, 19 nt, Artificial Sequence
  Description of Artificial Sequence: Synthetic oligonucleotide
cuuccgauauagcauggau

SEQ ID NO: 1040800 - RNA, 19 nt, Artificial Sequence
  Description of Artificial Sequence: Synthetic oligonucleotide
auugcgccuuucggguggg

SEQ ID NO: 1040801 - RNA, 19 nt, Artificial Sequence
  Description of Artificial Sequence: Synthetic oligonucleotide
ccaaggccuaggcuguucc

SEQ ID NO: 1040802 - RNA, 19 nt, Artificial Sequence
  Description of Artificial Sequence: Synthetic oligonucleotide
cuugguccguauagaugca

SEQ ID NO: 1040803 - RNA, 19 nt, Artificial Sequence
  Description of Artificial Sequence: Synthetic oligonucleotide
gguacaggccucacuguac

SEQ ID NO: 1040804 - RNA, 19 nt, Artificial Sequence
  Description of Artificial Sequence: Synthetic oligonucleotide
uucccgcaacugccaagga

SEQ ID NO: 1040805 - RNA, 19 nt, Artificial Sequence
  Description of Artificial Sequence: Synthetic oligonucleotide
caggcucgcaggcagucca

SEQ ID NO: 1040806 - RNA, 19 nt, Artificial Sequence
  Description of Artificial Sequence: Synthetic oligonucleotide
gcaccuuagugcacaacug

SEQ ID NO: 1040807 - RNA, 19 nt, Artificial Sequence
  Description of Artificial Sequence: Synthetic oligonucleotide
gguggggacgcaagacagg

SEQ ID NO: 1040808 - RNA, 19 nt, Artificial Sequence
  Description of Artificial Sequence: Synthetic oligonucleotide
agcaccccucaaagagccc

SEQ ID NO: 1040809 - RNA, 19 nt, Artificial Sequence
  Description of Artificial Sequence: Synthetic oligonucleotide
guaccgaggagcugcaauu

SEQ ID NO: 1040810 - RNA, 19 nt, Artificial Sequence
  Description of Artificial Sequence: Synthetic oligonucleotide
ccucuuacaguuguauuca

SEQ ID NO: 1040811 - RNA, 19 nt, Artificial Sequence
  Description of Artificial Sequence: Synthetic oligonucleotide
cugucggucacugggcaga

SEQ ID NO: 1040812 - RNA, 19 nt, Artificial Sequence
  Description of Artificial Sequence: Synthetic oligonucleotide
ucuuccgcaugugcggcuu

SEQ ID NO: 1040813 - RNA, 19 nt, Artificial Sequence
  Description of Artificial Sequence: Synthetic oligonucleotide
caccagcccaaaccuugug

SEQ ID NO: 1040814 - RNA, 19 nt, Artificial Sequence
  Description of Artificial Sequence: Synthetic oligonucleotide
gucaggggcgugguuucgc

SEQ ID NO: 1040815 - RNA, 19 nt, Artificial Sequence
  Description of Artificial Sequence: Synthetic oligonucleotide
gcggcuugaucuccuuuug

SEQ ID NO: 1040816 - RNA, 19 nt, Artificial Sequence
  Description of Artificial Sequence: Synthetic oligonucleotide
ccaggguuaccaccgcuug

SEQ ID NO: 1040817 - RNA, 19 nt, Artificial Sequence
  Description of Artificial Sequence: Synthetic oligonucleotide
ggcuuccgauauagcaugg

SEQ ID NO: 1040818 - RNA, 19 nt, Artificial Sequence
  Description of Artificial Sequence: Synthetic oligonucleotide
caccccucaaagagcccuc

SEQ ID NO: 1040819 - RNA, 19 nt, Artificial Sequence
  Description of Artificial Sequence: Synthetic oligonucleotide
ggacugucggucacugggc

SEQ ID NO: 1040820 - RNA, 19 nt, Artificial Sequence
  Description of Artificial Sequence: Synthetic oligonucleotide
ccagauaggcucuguccuc

SEQ ID NO: 1040821 - RNA, 19 nt, Artificial Sequence
  Description of Artificial Sequence: Synthetic oligonucleotide
accaggguuaccaccgcuu

SEQ ID NO: 1040822 - RNA, 19 nt, Artificial Sequence
  Description of Artificial Sequence: Synthetic oligonucleotide
guggggacgcaagacaggu

SEQ ID NO: 1040823 - RNA, 19 nt, Artificial Sequence
  Description of Artificial Sequence: Synthetic oligonucleotide
cccucaaucacagaagcua

SEQ ID NO: 1040824 - RNA, 19 nt, Artificial Sequence
  Description of Artificial Sequence: Synthetic oligonucleotide
cuuccgcaugugcggcuug

SEQ ID NO: 1040825 - RNA, 19 nt, Artificial Sequence
  Description of Artificial Sequence: Synthetic oligonucleotide
ggggcguuuuggcaauuga

SEQ ID NO: 1040826 - RNA, 19 nt, Artificial Sequence
  Description of Artificial Sequence: Synthetic oligonucleotide
acaguaccgaggagcugca

SEQ ID NO: 1040827 - RNA, 19 nt, Artificial Sequence
  Description of Artificial Sequence: Synthetic oligonucleotide
cucgcggcacguagcgcuc

SEQ ID NO: 1040828 - RNA, 19 nt, Artificial Sequence
  Description of Artificial Sequence: Synthetic oligonucleotide
uggucugacugggccccug

SEQ ID NO: 1040829 - RNA, 19 nt, Artificial Sequence
  Description of Artificial Sequence: Synthetic oligonucleotide
cgagguacagggccucagg

SEQ ID NO: 1040830 - RNA, 19 nt, Artificial Sequence
  Description of Artificial Sequence: Synthetic oligonucleotide
cagagccaggaaaucgugu

SEQ ID NO: 1040831 - RNA, 19 nt, Artificial Sequence
  Description of Artificial Sequence: Synthetic oligonucleotide
ggguacaggccucacugua

SEQ ID NO: 1040832 - RNA, 19 nt, Artificial Sequence
  Description of Artificial Sequence: Synthetic oligonucleotide
ccucugaccaaggccuagg

SEQ ID NO: 1040833 - RNA, 19 nt, Artificial Sequence
  Description of Artificial Sequence: Synthetic oligonucleotide
aaugggccaccagcccaaa

SEQ ID NO: 1040834 - RNA, 19 nt, Artificial Sequence
  Description of Artificial Sequence: Synthetic oligonucleotide
gggcagucugggcagcuuc

SEQ ID NO: 1040835 - RNA, 19 nt, Artificial Sequence
  Description of Artificial Sequence: Synthetic oligonucleotide
ggugcccucgcaacacagc

SEQ ID NO: 1040836 - RNA, 19 nt, Artificial Sequence
  Description of Artificial Sequence: Synthetic oligonucleotide
gcgccuuucggguggggac

SEQ ID NO: 1040837 - RNA, 19 nt, Artificial Sequence
  Description of Artificial Sequence: Synthetic oligonucleotide
ggauuacacagcagccauc

SEQ ID NO: 1040838 - RNA, 19 nt, Artificial Sequence
  Description of Artificial Sequence: Synthetic oligonucleotide
gacgagguacagggccuca

SEQ ID NO: 1040839 - RNA, 19 nt, Artificial Sequence
  Description of Artificial Sequence: Synthetic oligonucleotide
ucccggagggcagcuucga

SEQ ID NO: 1040840 - RNA, 19 nt, Artificial Sequence
  Description of Artificial Sequence: Synthetic oligonucleotide
ggagcugacuggccaugca

SEQ ID NO: 1040841 - RNA, 19 nt, Artificial Sequence
  Description of Artificial Sequence: Synthetic oligonucleotide
gaaggaacuggggcguuuu

SEQ ID NO: 1040842 - RNA, 19 nt, Artificial Sequence
  Description of Artificial Sequence: Synthetic oligonucleotide
cgcaagacagguagcgauc

SEQ ID NO: 1040843 - RNA, 19 nt, Artificial Sequence
  Description of Artificial Sequence: Synthetic oligonucleotide
ggaccacaaagcgguagca

SEQ ID NO: 1040844 - RNA, 19 nt, Artificial Sequence
  Description of Artificial Sequence: Synthetic oligonucleotide
ucgcggcacguagcgcucc

SEQ ID NO: 1040845 - RNA, 19 nt, Artificial Sequence
  Description of Artificial Sequence: Synthetic oligonucleotide
gccaucuaaggggcaacac

SEQ ID NO: 1040846 - RNA, 19 nt, Artificial Sequence
  Description of Artificial Sequence: Synthetic oligonucleotide
cagcaccuuagugcacaac

SEQ ID NO: 1040847 - RNA, 19 nt, Artificial Sequence
  Description of Artificial Sequence: Synthetic oligonucleotide
gggacgcaagacagguagc

SEQ ID NO: 1040848 - RNA, 19 nt, Artificial Sequence
  Description of Artificial Sequence: Synthetic oligonucleotide
ccgugccugugauuccugc

SEQ ID NO: 1040849 - RNA, 19 nt, Artificial Sequence
  Description of Artificial Sequence: Synthetic oligonucleotide
uccgcaugugcggcuugau

SEQ ID NO: 1040850 - RNA, 19 nt, Artificial Sequence
  Description of Artificial Sequence: Synthetic oligonucleotide
gcucgcggcacguagcgcu

SEQ ID NO: 1040851 - RNA, 19 nt, Artificial Sequence
  Description of Artificial Sequence: Synthetic oligonucleotide
ggggcgugguuucgcgcag

SEQ ID NO: 1040852 - RNA, 19 nt, Artificial Sequence
  Description of Artificial Sequence: Synthetic oligonucleotide
cuuucggguggggacgcaa

SEQ ID NO: 1040853 - RNA, 19 nt, Artificial Sequence
  Description of Artificial Sequence: Synthetic oligonucleotide
agcgauccagguaguucau

SEQ ID NO: 1040854 - RNA, 19 nt, Artificial Sequence
  Description of Artificial Sequence: Synthetic oligonucleotide
gacauagagcuggcuccua

SEQ ID NO: 1040855 - RNA, 19 nt, Artificial Sequence
  Description of Artificial Sequence: Synthetic oligonucleotide
gcuuccgauauagcaugga

SEQ ID NO: 1040856 - RNA, 19 nt, Artificial Sequence
  Description of Artificial Sequence: Synthetic oligonucleotide
agcagccaucuaaggggca

SEQ ID NO: 1040857 - RNA, 19 nt, Artificial Sequence
  Description of Artificial Sequence: Synthetic oligonucleotide
gugggguacaggccucacu

SEQ ID NO: 1040858 - RNA, 19 nt, Artificial Sequence
  Description of Artificial Sequence: Synthetic oligonucleotide
caauagggcuuggaccucu

SEQ ID NO: 1040859 - RNA, 19 nt, Artificial Sequence
  Description of Artificial Sequence: Synthetic oligonucleotide
gggccaccagcccaaaccu

SEQ ID NO: 1040860 - RNA, 19 nt, Artificial Sequence
  Description of Artificial Sequence: Synthetic oligonucleotide
ggccccuggcugcuagagc

SEQ ID NO: 1040861 - RNA, 19 nt, Artificial Sequence
  Description of Artificial Sequence: Synthetic oligonucleotide
gggacucacaaggaaugcu

SEQ ID NO: 1040862 - RNA, 19 nt, Artificial Sequence
  Description of Artificial Sequence: Synthetic oligonucleotide
caagaauugguagguucuu

SEQ ID NO: 1040863 - RNA, 19 nt, Artificial Sequence
  Description of Artificial Sequence: Synthetic oligonucleotide
cagccucgggucgggcccg

SEQ ID NO: 1040864 - RNA, 19 nt, Artificial Sequence
  Description of Artificial Sequence: Synthetic oligonucleotide
ccaguacgccagcaucuuc

SEQ ID NO: 1040865 - RNA, 19 nt, Artificial Sequence
  Description of Artificial Sequence: Synthetic oligonucleotide
caggguuaccaccgcuugu

SEQ ID NO: 1040866 - RNA, 19 nt, Artificial Sequence
  Description of Artificial Sequence: Synthetic oligonucleotide
ccaggcggagcaagcucug

SEQ ID NO: 1040867 - RNA, 19 nt, Artificial Sequence
  Description of Artificial Sequence: Synthetic oligonucleotide
ccgcaugugcggcuugauc

SEQ ID NO: 1040868 - RNA, 19 nt, Artificial Sequence
  Description of Artificial Sequence: Synthetic oligonucleotide
cgaucauggauggagggua

SEQ ID NO: 1040869 - RNA, 19 nt, Artificial Sequence
  Description of Artificial Sequence: Synthetic oligonucleotide
ccguauagaugcaaagcuu

SEQ ID NO: 1040870 - RNA, 19 nt, Artificial Sequence
  Description of Artificial Sequence: Synthetic oligonucleotide
cgccuuucggguggggacg

SEQ ID NO: 1040871 - RNA, 19 nt, Artificial Sequence
  Description of Artificial Sequence: Synthetic oligonucleotide
ccaaaccuuguggccuaag

SEQ ID NO: 1040872 - RNA, 19 nt, Artificial Sequence
  Description of Artificial Sequence: Synthetic oligonucleotide
guacccucuuacaguugua

SEQ ID NO: 1040873 - RNA, 19 nt, Artificial Sequence
  Description of Artificial Sequence: Synthetic oligonucleotide
gcaccccucaaagagcccu

SEQ ID NO: 1040874 - RNA, 19 nt, Artificial Sequence
  Description of Artificial Sequence: Synthetic oligonucleotide
gccgggugcccucgcaaca

SEQ ID NO: 1040875 - RNA, 19 nt, Artificial Sequence
  Description of Artificial Sequence: Synthetic oligonucleotide
gcgaucauggauggagggu

SEQ ID NO: 1040876 - RNA, 19 nt, Artificial Sequence
  Description of Artificial Sequence: Synthetic oligonucleotide
ccucgggucgggcccggcc

SEQ ID NO: 1040877 - RNA, 19 nt, Artificial Sequence
  Description of Artificial Sequence: Synthetic oligonucleotide
gcacaacuguggggauagg

SEQ ID NO: 1040878 - RNA, 19 nt, Artificial Sequence
  Description of Artificial Sequence: Synthetic oligonucleotide
gcauccaguacgccagcau

SEQ ID NO: 1040879 - RNA, 19 nt, Artificial Sequence
  Description of Artificial Sequence: Synthetic oligonucleotide
cccucugaccaaggccuag

SEQ ID NO: 1040880 - RNA, 19 nt, Artificial Sequence
  Description of Artificial Sequence: Synthetic oligonucleotide
gcuggucaggugggaagga

SEQ ID NO: 1040881 - RNA, 19 nt, Artificial Sequence
  Description of Artificial Sequence: Synthetic oligonucleotide
ggcccggggcgcgugccgg

SEQ ID NO: 1040882 - RNA, 19 nt, Artificial Sequence
  Description of Artificial Sequence: Synthetic oligonucleotide
agccucgggucgggcccgg

SEQ ID NO: 1040883 - RNA, 19 nt, Artificial Sequence
  Description of Artificial Sequence: Synthetic oligonucleotide
ccgggugcccucgcaacac

SEQ ID NO: 1040884 - RNA, 19 nt, Artificial Sequence
  Description of Artificial Sequence: Synthetic oligonucleotide
ggcgugguuucgcgcagcu

SEQ ID NO: 1040885 - RNA, 19 nt, Artificial Sequence
  Description of Artificial Sequence: Synthetic oligonucleotide
gucggucacugggcagaga

SEQ ID NO: 1040886 - RNA, 19 nt, Artificial Sequence
  Description of Artificial Sequence: Synthetic oligonucleotide
cccucaaagagcccucaau

SEQ ID NO: 1040887 - RNA, 19 nt, Artificial Sequence
  Description of Artificial Sequence: Synthetic oligonucleotide
gggcgugguuucgcgcagc

SEQ ID NO: 1040888 - RNA, 19 nt, Artificial Sequence
  Description of Artificial Sequence: Synthetic oligonucleotide
aggaggcucgcggcacgua

SEQ ID NO: 1040889 - RNA, 19 nt, Artificial Sequence
  Description of Artificial Sequence: Synthetic oligonucleotide
gcccucaaucacagaagcu

SEQ ID NO: 1040890 - RNA, 19 nt, Artificial Sequence
  Description of Artificial Sequence: Synthetic oligonucleotide
cccaucgggcuuccgauau

SEQ ID NO: 1040891 - RNA, 19 nt, Artificial Sequence
  Description of Artificial Sequence: Synthetic oligonucleotide
caguaccgaggagcugcaa

SEQ ID NO: 1040892 - RNA, 19 nt, Artificial Sequence
  Description of Artificial Sequence: Synthetic oligonucleotide
gccacagcuugguccguau

SEQ ID NO: 1040893 - RNA, 19 nt, Artificial Sequence
  Description of Artificial Sequence: Synthetic oligonucleotide
gcucgcaggcaguccacuu

SEQ ID NO: 1040894 - RNA, 19 nt, Artificial Sequence
  Description of Artificial Sequence: Synthetic oligonucleotide
cacuuccgugccugugauu

SEQ ID NO: 1040895 - RNA, 19 nt, Artificial Sequence
  Description of Artificial Sequence: Synthetic oligonucleotide
ggggcgcgugccgggugcc

SEQ ID NO: 1040896 - RNA, 19 nt, Artificial Sequence
  Description of Artificial Sequence: Synthetic oligonucleotide
ccgauauagcauggauugu

SEQ ID NO: 1040897 - RNA, 19 nt, Artificial Sequence
  Description of Artificial Sequence: Synthetic oligonucleotide
gcgcgugccgggugcccuc

SEQ ID NO: 1040898 - RNA, 19 nt, Artificial Sequence
  Description of Artificial Sequence: Synthetic oligonucleotide
cgcagcgcugcuccucaca

SEQ ID NO: 1040899 - RNA, 19 nt, Artificial Sequence
  Description of Artificial Sequence: Synthetic oligonucleotide
gcgugccgggugcccucgc

SEQ ID NO: 1040900 - RNA, 19 nt, Artificial Sequence
  Description of Artificial Sequence: Synthetic oligonucleotide
ccccaucgggcuuccgaua

SEQ ID NO: 1040901 - RNA, 19 nt, Artificial Sequence
  Description of Artificial Sequence: Synthetic oligonucleotide
ccaucgggcuuccgauaua

SEQ ID NO: 1040902 - RNA, 19 nt, Artificial Sequence
  Description of Artificial Sequence: Synthetic oligonucleotide
cgcgugccgggugcccucg

SEQ ID NO: 1040903 - RNA, 19 nt, Artificial Sequence
  Description of Artificial Sequence: Synthetic oligonucleotide
cccggcccggggcgcgugc

SEQ ID NO: 1040904 - RNA, 19 nt, Artificial Sequence
  Description of Artificial Sequence: Synthetic oligonucleotide
ggcgcgugccgggugcccu

SEQ ID NO: 1040905 - RNA, 19 nt, Artificial Sequence
  Description of Artificial Sequence: Synthetic oligonucleotide
cgugccgggugcccucgca

SEQ ID NO: 1040906 - RNA, 19 nt, Artificial Sequence
  Description of Artificial Sequence: Synthetic oligonucleotide
ccuuucggguggggacgca

SEQ ID NO: 1040907 - RNA, 19 nt, Artificial Sequence
  Description of Artificial Sequence: Synthetic oligonucleotide
gcucucccggagggcagcu

SEQ ID NO: 1040908 - RNA, 19 nt, Artificial Sequence
  Description of Artificial Sequence: Synthetic oligonucleotide
cuggggcguuuuggcaauu

SEQ ID NO: 1040909 - RNA, 19 nt, Artificial Sequence
  Description of Artificial Sequence: Synthetic oligonucleotide
gcgugguuucgcgcagcuu

SEQ ID NO: 1040910 - RNA, 19 nt, Artificial Sequence
  Description of Artificial Sequence: Synthetic oligonucleotide
cgcggcacguagcgcuccu

SEQ ID NO: 1040911 - RNA, 19 nt, Artificial Sequence
  Description of Artificial Sequence: Synthetic oligonucleotide
aaaccaaaccuuuucaacc

SEQ ID NO: 1040912 - RNA, 19 nt, Artificial Sequence
  Description of Artificial Sequence: Synthetic oligonucleotide
auauauaauauauauaaug

SEQ ID NO: 1040913 - RNA, 19 nt, Artificial Sequence
  Description of Artificial Sequence: Synthetic oligonucleotide
uauauaauauauauaaugu

SEQ ID NO: 1040914 - RNA, 19 nt, Artificial Sequence
  Description of Artificial Sequence: Synthetic oligonucleotide
aaaggaguaaagcugaauc

SEQ ID NO: 1040915 - RNA, 19 nt, Artificial Sequence
  Description of Artificial Sequence: Synthetic oligonucleotide
agauauauaauauauauaa

SEQ ID NO: 1040916 - RNA, 19 nt, Artificial Sequence
  Description of Artificial Sequence: Synthetic oligonucleotide
aaagacacuacacuguaac

SEQ ID NO: 1040917 - RNA, 19 nt, Artificial Sequence
  Description of Artificial Sequence: Synthetic oligonucleotide
uacuauaauauauauacag

SEQ ID NO: 1040918 - RNA, 19 nt, Artificial Sequence
  Description of Artificial Sequence: Synthetic oligonucleotide
aauaaauugauaucagugu

SEQ ID NO: 1040919 - RNA, 19 nt, Artificial Sequence
  Description of Artificial Sequence: Synthetic oligonucleotide
aaggaguaaagcugaaucc

SEQ ID NO: 1040920 - RNA, 19 nt, Artificial Sequence
  Description of Artificial Sequence: Synthetic oligonucleotide
ucagcuaaaguaaagacac

SEQ ID NO: 1040921 - RNA, 19 nt, Artificial Sequence
  Description of Artificial Sequence: Synthetic oligonucleotide
uguauagacauauauacgu

SEQ ID NO: 1040922 - RNA, 19 nt, Artificial Sequence
  Description of Artificial Sequence: Synthetic oligonucleotide
aauguauguugacagucgc

SEQ ID NO: 1040923 - RNA, 19 nt, Artificial Sequence
  Description of Artificial Sequence: Synthetic oligonucleotide
auagauauauaauauauau

SEQ ID NO: 1040924 - RNA, 19 nt, Artificial Sequence
  Description of Artificial Sequence: Synthetic oligonucleotide
cauaguugcuuuaagaagc

SEQ ID NO: 1040925 - RNA, 19 nt, Artificial Sequence
  Description of Artificial Sequence: Synthetic oligonucleotide
uuugguauaaaucccugag

SEQ ID NO: 1040926 - RNA, 19 nt, Artificial Sequence
  Description of Artificial Sequence: Synthetic oligonucleotide
auuagcucacugcaaaggc

SEQ ID NO: 1040927 - RNA, 19 nt, Artificial Sequence
  Description of Artificial Sequence: Synthetic oligonucleotide
acgcaauauaacuauacac

SEQ ID NO: 1040928 - RNA, 19 nt, Artificial Sequence
  Description of Artificial Sequence: Synthetic oligonucleotide
cuugacaacauauacucag

SEQ ID NO: 1040929 - RNA, 19 nt, Artificial Sequence
  Description of Artificial Sequence: Synthetic oligonucleotide
uuuugugucaaaaggauau

SEQ ID NO: 1040930 - RNA, 19 nt, Artificial Sequence
  Description of Artificial Sequence: Synthetic oligonucleotide
uugaucauuaacaaguuua

SEQ ID NO: 1040931 - RNA, 19 nt, Artificial Sequence
  Description of Artificial Sequence: Synthetic oligonucleotide
aagacacuacacuguaacc

SEQ ID NO: 1040932 - RNA, 19 nt, Artificial Sequence
  Description of Artificial Sequence: Synthetic oligonucleotide
aacguuagcuuauuagcuc

SEQ ID NO: 1040933 - RNA, 19 nt, Artificial Sequence
  Description of Artificial Sequence: Synthetic oligonucleotide
uaauggaucaugucaauug

SEQ ID NO: 1040934 - RNA, 19 nt, Artificial Sequence
  Description of Artificial Sequence: Synthetic oligonucleotide
auaucaguguaucaaaucu

SEQ ID NO: 1040935 - RNA, 19 nt, Artificial Sequence
  Description of Artificial Sequence: Synthetic oligonucleotide
caaacguuagcuuauuagc

SEQ ID NO: 1040936 - RNA, 19 nt, Artificial Sequence
  Description of Artificial Sequence: Synthetic oligonucleotide
acaacaugacaauuuaguc

SEQ ID NO: 1040937 - RNA, 19 nt, Artificial Sequence
  Description of Artificial Sequence: Synthetic oligonucleotide
auaaauaaaauggagcgca

SEQ ID NO: 1040938 - RNA, 19 nt, Artificial Sequence
  Description of Artificial Sequence: Synthetic oligonucleotide
aacguauacagaaaacagg

SEQ ID NO: 1040939 - RNA, 19 nt, Artificial Sequence
  Description of Artificial Sequence: Synthetic oligonucleotide
aaugcuaaggcuugcugug

SEQ ID NO: 1040940 - RNA, 19 nt, Artificial Sequence
  Description of Artificial Sequence: Synthetic oligonucleotide
auacguauggaaucuuccc

SEQ ID NO: 1040941 - RNA, 19 nt, Artificial Sequence
  Description of Artificial Sequence: Synthetic oligonucleotide
uacguauggaaucuucccg

SEQ ID NO: 1040942 - RNA, 19 nt, Artificial Sequence
  Description of Artificial Sequence: Synthetic oligonucleotide
aaacgcaauauaacuauac

SEQ ID NO: 1040943 - RNA, 19 nt, Artificial Sequence
  Description of Artificial Sequence: Synthetic oligonucleotide
ugguauaaaucccugagaa

SEQ ID NO: 1040944 - RNA, 19 nt, Artificial Sequence
  Description of Artificial Sequence: Synthetic oligonucleotide
uauuuugcauuacauagaa

SEQ ID NO: 1040945 - RNA, 19 nt, Artificial Sequence
  Description of Artificial Sequence: Synthetic oligonucleotide
uguucucuaaugaagggac

SEQ ID NO: 1040946 - RNA, 19 nt, Artificial Sequence
  Description of Artificial Sequence: Synthetic oligonucleotide
uguaaaccaaaccuuuuca

SEQ ID NO: 1040947 - RNA, 19 nt, Artificial Sequence
  Description of Artificial Sequence: Synthetic oligonucleotide
ucagacauauacuauaaua

SEQ ID NO: 1040948 - RNA, 19 nt, Artificial Sequence
  Description of Artificial Sequence: Synthetic oligonucleotide
gacaauuuagucugcaaac

SEQ ID NO: 1040949 - RNA, 19 nt, Artificial Sequence
  Description of Artificial Sequence: Synthetic oligonucleotide
uauacguauggaaucuucc

SEQ ID NO: 1040950 - RNA, 19 nt, Artificial Sequence
  Description of Artificial Sequence: Synthetic oligonucleotide
aauggaucaugucaauugu

SEQ ID NO: 1040951 - RNA, 19 nt, Artificial Sequence
  Description of Artificial Sequence: Synthetic oligonucleotide
accuacacaacuuucuguc

SEQ ID NO: 1040952 - RNA, 19 nt, Artificial Sequence
  Description of Artificial Sequence: Synthetic oligonucleotide
uaucaaaucuuaauuacuu

SEQ ID NO: 1040953 - RNA, 19 nt, Artificial Sequence
  Description of Artificial Sequence: Synthetic oligonucleotide
aacgcaauauaacuauaca

SEQ ID NO: 1040954 - RNA, 19 nt, Artificial Sequence
  Description of Artificial Sequence: Synthetic oligonucleotide
uauaauaccgguguggcuc

SEQ ID NO: 1040955 - RNA, 19 nt, Artificial Sequence
  Description of Artificial Sequence: Synthetic oligonucleotide
ugugaacguauacagaaaa

SEQ ID NO: 1040956 - RNA, 19 nt, Artificial Sequence
  Description of Artificial Sequence: Synthetic oligonucleotide
gcuguauagacauauauac

SEQ ID NO: 1040957 - RNA, 19 nt, Artificial Sequence
  Description of Artificial Sequence: Synthetic oligonucleotide
accuaugcagaauagauau

SEQ ID NO: 1040958 - RNA, 19 nt, Artificial Sequence
  Description of Artificial Sequence: Synthetic oligonucleotide
caaacauaccucuagcaug

SEQ ID NO: 1040959 - RNA, 19 nt, Artificial Sequence
  Description of Artificial Sequence: Synthetic oligonucleotide
agaauguauguugacaguc

SEQ ID NO: 1040960 - RNA, 19 nt, Artificial Sequence
  Description of Artificial Sequence: Synthetic oligonucleotide
ugacaauuuagucugcaaa

SEQ ID NO: 1040961 - RNA, 19 nt, Artificial Sequence
  Description of Artificial Sequence: Synthetic oligonucleotide
uauuagcucacugcaaagg

SEQ ID NO: 1040962 - RNA, 19 nt, Artificial Sequence
  Description of Artificial Sequence: Synthetic oligonucleotide
acaacuuucuguccugcac

SEQ ID NO: 1040963 - RNA, 19 nt, Artificial Sequence
  Description of Artificial Sequence: Synthetic oligonucleotide
ucgagugccuguuauaagc

SEQ ID NO: 1040964 - RNA, 19 nt, Artificial Sequence
  Description of Artificial Sequence: Synthetic oligonucleotide
cuguauagacauauauacg

SEQ ID NO: 1040965 - RNA, 19 nt, Artificial Sequence
  Description of Artificial Sequence: Synthetic oligonucleotide
ucuggcauacuguauauuc

SEQ ID NO: 1040966 - RNA, 19 nt, Artificial Sequence
  Description of Artificial Sequence: Synthetic oligonucleotide
aaccaaaccuuuucaaccu

SEQ ID NO: 1040967 - RNA, 19 nt, Artificial Sequence
  Description of Artificial Sequence: Synthetic oligonucleotide
auaaauugauaucagugua

SEQ ID NO: 1040968 - RNA, 19 nt, Artificial Sequence
  Description of Artificial Sequence: Synthetic oligonucleotide
aguuuguuaaauaugcuga

SEQ ID NO: 1040969 - RNA, 19 nt, Artificial Sequence
  Description of Artificial Sequence: Synthetic oligonucleotide
gauggagguguuuuguuug

SEQ ID NO: 1040970 - RNA, 19 nt, Artificial Sequence
  Description of Artificial Sequence: Synthetic oligonucleotide
ugacaacauauacucagug

SEQ ID NO: 1040971 - RNA, 19 nt, Artificial Sequence
  Description of Artificial Sequence: Synthetic oligonucleotide
uagauauauaauauauaua

SEQ ID NO: 1040972 - RNA, 19 nt, Artificial Sequence
  Description of Artificial Sequence: Synthetic oligonucleotide
augcagaauagauauauaa

SEQ ID NO: 1040973 - RNA, 19 nt, Artificial Sequence
  Description of Artificial Sequence: Synthetic oligonucleotide
ucucacuacugguauuucg

SEQ ID NO: 1040974 - RNA, 19 nt, Artificial Sequence
  Description of Artificial Sequence: Synthetic oligonucleotide
uuaaugcuaaggcuugcug

SEQ ID NO: 1040975 - RNA, 19 nt, Artificial Sequence
  Description of Artificial Sequence: Synthetic oligonucleotide
gaauguauguugacagucg

SEQ ID NO: 1040976 - RNA, 19 nt, Artificial Sequence
  Description of Artificial Sequence: Synthetic oligonucleotide
uagguuacagaaccgucag

SEQ ID NO: 1040977 - RNA, 19 nt, Artificial Sequence
  Description of Artificial Sequence: Synthetic oligonucleotide
auuguuuuggaaaacauuu

SEQ ID NO: 1040978 - RNA, 19 nt, Artificial Sequence
  Description of Artificial Sequence: Synthetic oligonucleotide
uucuuaaugcuaaggcuug

SEQ ID NO: 1040979 - RNA, 19 nt, Artificial Sequence
  Description of Artificial Sequence: Synthetic oligonucleotide
aguacaauaaaugcucuca

SEQ ID NO: 1040980 - RNA, 19 nt, Artificial Sequence
  Description of Artificial Sequence: Synthetic oligonucleotide
gauaucaguguaucaaauc

SEQ ID NO: 1040981 - RNA, 19 nt, Artificial Sequence
  Description of Artificial Sequence: Synthetic oligonucleotide
caauuuagucugcaaacgc

SEQ ID NO: 1040982 - RNA, 19 nt, Artificial Sequence
  Description of Artificial Sequence: Synthetic oligonucleotide
uaaugcuaaggcuugcugu

SEQ ID NO: 1040983 - RNA, 19 nt, Artificial Sequence
  Description of Artificial Sequence: Synthetic oligonucleotide
aaaccaagcuacugcagcu

SEQ ID NO: 1040984 - RNA, 19 nt, Artificial Sequence
  Description of Artificial Sequence: Synthetic oligonucleotide
aauuuagucugcaaacgca

SEQ ID NO: 1040985 - RNA, 19 nt, Artificial Sequence
  Description of Artificial Sequence: Synthetic oligonucleotide
uuuugcaccaaaacauagu

SEQ ID NO: 1040986 - RNA, 19 nt, Artificial Sequence
  Description of Artificial Sequence: Synthetic oligonucleotide
guuauaagcauguguggug

SEQ ID NO: 1040987 - RNA, 19 nt, Artificial Sequence
  Description of Artificial Sequence: Synthetic oligonucleotide
cauauaauaccgguguggc

SEQ ID NO: 1040988 - RNA, 19 nt, Artificial Sequence
  Description of Artificial Sequence: Synthetic oligonucleotide
uguuauaagcauguguggu

SEQ ID NO: 1040989 - RNA, 19 nt, Artificial Sequence
  Description of Artificial Sequence: Synthetic oligonucleotide
uugguagucacaucuccag

SEQ ID NO: 1040990 - RNA, 19 nt, Artificial Sequence
  Description of Artificial Sequence: Synthetic oligonucleotide
uguguugucccucuuuagu

SEQ ID NO: 1040991 - RNA, 19 nt, Artificial Sequence
  Description of Artificial Sequence: Synthetic oligonucleotide
uagcuuauuagcucacugc

SEQ ID NO: 1040992 - RNA, 19 nt, Artificial Sequence
  Description of Artificial Sequence: Synthetic oligonucleotide
aaucccugagaauguaugu

SEQ ID NO: 1040993 - RNA, 19 nt, Artificial Sequence
  Description of Artificial Sequence: Synthetic oligonucleotide
uuauuagcucacugcaaag

SEQ ID NO: 1040994 - RNA, 19 nt, Artificial Sequence
  Description of Artificial Sequence: Synthetic oligonucleotide
aaacguuagcuuauuagcu

SEQ ID NO: 1040995 - RNA, 19 nt, Artificial Sequence
  Description of Artificial Sequence: Synthetic oligonucleotide
aaacauaccucuagcaugu

SEQ ID NO: 1040996 - RNA, 19 nt, Artificial Sequence
  Description of Artificial Sequence: Synthetic oligonucleotide
gaaucuucccgacagaucu

SEQ ID NO: 1040997 - RNA, 19 nt, Artificial Sequence
  Description of Artificial Sequence: Synthetic oligonucleotide
uucuggacgaacagcacug

SEQ ID NO: 1040998 - RNA, 19 nt, Artificial Sequence
  Description of Artificial Sequence: Synthetic oligonucleotide
uuaguuuguuaaauaugcu

SEQ ID NO: 1040999 - RNA, 19 nt, Artificial Sequence
  Description of Artificial Sequence: Synthetic oligonucleotide
uugguauaaaucccugaga

SEQ ID NO: 1041000 - RNA, 19 nt, Artificial Sequence
  Description of Artificial Sequence: Synthetic oligonucleotide
uuugguagucacaucucca

SEQ ID NO: 1041001 - RNA, 19 nt, Artificial Sequence
  Description of Artificial Sequence: Synthetic oligonucleotide
acuuaacacacaaacuuuc

SEQ ID NO: 1041002 - RNA, 19 nt, Artificial Sequence
  Description of Artificial Sequence: Synthetic oligonucleotide
ccuguuauaagcaugugug

SEQ ID NO: 1041003 - RNA, 19 nt, Artificial Sequence
  Description of Artificial Sequence: Synthetic oligonucleotide
acaaacauaccucuagcau

SEQ ID NO: 1041004 - RNA, 19 nt, Artificial Sequence
  Description of Artificial Sequence: Synthetic oligonucleotide
aagaugaguuacaaaggag

SEQ ID NO: 1041005 - RNA, 19 nt, Artificial Sequence
  Description of Artificial Sequence: Synthetic oligonucleotide
gaagcacuagguuacagaa

SEQ ID NO: 1041006 - RNA, 19 nt, Artificial Sequence
  Description of Artificial Sequence: Synthetic oligonucleotide
ugcuuuuguuugaaguaag

SEQ ID NO: 1041007 - RNA, 19 nt, Artificial Sequence
  Description of Artificial Sequence: Synthetic oligonucleotide
uuuugguauaaaucccuga

SEQ ID NO: 1041008 - RNA, 19 nt, Artificial Sequence
  Description of Artificial Sequence: Synthetic oligonucleotide
ugcaaacgcaauauaacua

SEQ ID NO: 1041009 - RNA, 19 nt, Artificial Sequence
  Description of Artificial Sequence: Synthetic oligonucleotide
uuguuugaaguaagucuag

SEQ ID NO: 1041010 - RNA, 19 nt, Artificial Sequence
  Description of Artificial Sequence: Synthetic oligonucleotide
auaugcugaaaaugugaag

SEQ ID NO: 1041011 - RNA, 19 nt, Artificial Sequence
  Description of Artificial Sequence: Synthetic oligonucleotide
cagugauuuaguuacauaa

SEQ ID NO: 1041012 - RNA, 19 nt, Artificial Sequence
  Description of Artificial Sequence: Synthetic oligonucleotide
uuauaagcauguguggugu

SEQ ID NO: 1041013 - RNA, 19 nt, Artificial Sequence
  Description of Artificial Sequence: Synthetic oligonucleotide
acagucgcuaaguuuccac

SEQ ID NO: 1041014 - RNA, 19 nt, Artificial Sequence
  Description of Artificial Sequence: Synthetic oligonucleotide
acguauacagaaaacagga

SEQ ID NO: 1041015 - RNA, 19 nt, Artificial Sequence
  Description of Artificial Sequence: Synthetic oligonucleotide
ucccugagaauguauguug

SEQ ID NO: 1041016 - RNA, 19 nt, Artificial Sequence
  Description of Artificial Sequence: Synthetic oligonucleotide
agacauauacuauaauaua

SEQ ID NO: 1041017 - RNA, 19 nt, Artificial Sequence
  Description of Artificial Sequence: Synthetic oligonucleotide
ugauaucaguguaucaaau

SEQ ID NO: 1041018 - RNA, 19 nt, Artificial Sequence
  Description of Artificial Sequence: Synthetic oligonucleotide
auauauacguauggaaucu

SEQ ID NO: 1041019 - RNA, 19 nt, Artificial Sequence
  Description of Artificial Sequence: Synthetic oligonucleotide
cacgggacaacuuuugcac

SEQ ID NO: 1041020 - RNA, 19 nt, Artificial Sequence
  Description of Artificial Sequence: Synthetic oligonucleotide
uguauguugacagucgcua

SEQ ID NO: 1041021 - RNA, 19 nt, Artificial Sequence
  Description of Artificial Sequence: Synthetic oligonucleotide
agcauguuuacaugaguga

SEQ ID NO: 1041022 - RNA, 19 nt, Artificial Sequence
  Description of Artificial Sequence: Synthetic oligonucleotide
uucgagguacuugucacag

SEQ ID NO: 1041023 - RNA, 19 nt, Artificial Sequence
  Description of Artificial Sequence: Synthetic oligonucleotide
uuagucugcaaacgcaaua

SEQ ID NO: 1041024 - RNA, 19 nt, Artificial Sequence
  Description of Artificial Sequence: Synthetic oligonucleotide
cacugcaaaggcguaaugg

SEQ ID NO: 1041025 - RNA, 19 nt, Artificial Sequence
  Description of Artificial Sequence: Synthetic oligonucleotide
aagcgaggcguacuuuuag

SEQ ID NO: 1041026 - RNA, 19 nt, Artificial Sequence
  Description of Artificial Sequence: Synthetic oligonucleotide
aagcaugugugguguagug

SEQ ID NO: 1041027 - RNA, 19 nt, Artificial Sequence
  Description of Artificial Sequence: Synthetic oligonucleotide
cuauguggacuuuugccac

SEQ ID NO: 1041028 - RNA, 19 nt, Artificial Sequence
  Description of Artificial Sequence: Synthetic oligonucleotide
acgggacaacuuuugcacc

SEQ ID NO: 1041029 - RNA, 19 nt, Artificial Sequence
  Description of Artificial Sequence: Synthetic oligonucleotide
acuacugguauuucguuuu

SEQ ID NO: 1041030 - RNA, 19 nt, Artificial Sequence
  Description of Artificial Sequence: Synthetic oligonucleotide
aggguacaaaggcaggcuc

SEQ ID NO: 1041031 - RNA, 19 nt, Artificial Sequence
  Description of Artificial Sequence: Synthetic oligonucleotide
acguuagcuuauuagcuca

SEQ ID NO: 1041032 - RNA, 19 nt, Artificial Sequence
  Description of Artificial Sequence: Synthetic oligonucleotide
auauacguauggaaucuuc

SEQ ID NO: 1041033 - RNA, 19 nt, Artificial Sequence
  Description of Artificial Sequence: Synthetic oligonucleotide
ugcacaaacguuagcuuau

SEQ ID NO: 1041034 - RNA, 19 nt, Artificial Sequence
  Description of Artificial Sequence: Synthetic oligonucleotide
acguauggaaucuucccga

SEQ ID NO: 1041035 - RNA, 19 nt, Artificial Sequence
  Description of Artificial Sequence: Synthetic oligonucleotide
uggacgaacagcacugcaa

SEQ ID NO: 1041036 - RNA, 19 nt, Artificial Sequence
  Description of Artificial Sequence: Synthetic oligonucleotide
cuagguuacagaaccguca

SEQ ID NO: 1041037 - RNA, 19 nt, Artificial Sequence
  Description of Artificial Sequence: Synthetic oligonucleotide
uugccacuugacaacauau

SEQ ID NO: 1041038 - RNA, 19 nt, Artificial Sequence
  Description of Artificial Sequence: Synthetic oligonucleotide
aagcacuagguuacagaac

SEQ ID NO: 1041039 - RNA, 19 nt, Artificial Sequence
  Description of Artificial Sequence: Synthetic oligonucleotide
agucuagagaaaauaaaau

SEQ ID NO: 1041040 - RNA, 19 nt, Artificial Sequence
  Description of Artificial Sequence: Synthetic oligonucleotide
ucucuaaugaagggacaag

SEQ ID NO: 1041041 - RNA, 19 nt, Artificial Sequence
  Description of Artificial Sequence: Synthetic oligonucleotide
acaugcacaagcauugugu

SEQ ID NO: 1041042 - RNA, 19 nt, Artificial Sequence
  Description of Artificial Sequence: Synthetic oligonucleotide
ggcguaauggaucauguca

SEQ ID NO: 1041043 - RNA, 19 nt, Artificial Sequence
  Description of Artificial Sequence: Synthetic oligonucleotide
augagugaugaaguacaac

SEQ ID NO: 1041044 - RNA, 19 nt, Artificial Sequence
  Description of Artificial Sequence: Synthetic oligonucleotide
gacacuacacuguaaccaa

SEQ ID NO: 1041045 - RNA, 19 nt, Artificial Sequence
  Description of Artificial Sequence: Synthetic oligonucleotide
acuacacuguaaccaaggu

SEQ ID NO: 1041046 - RNA, 19 nt, Artificial Sequence
  Description of Artificial Sequence: Synthetic oligonucleotide
ucuuuagucgagugccugu

SEQ ID NO: 1041047 - RNA, 19 nt, Artificial Sequence
  Description of Artificial Sequence: Synthetic oligonucleotide
uaccuaugcagaauagaua

SEQ ID NO: 1041048 - RNA, 19 nt, Artificial Sequence
  Description of Artificial Sequence: Synthetic oligonucleotide
gucagcuaaaguaaagaca

SEQ ID NO: 1041049 - RNA, 19 nt, Artificial Sequence
  Description of Artificial Sequence: Synthetic oligonucleotide
agagacacgggacaacuuu

SEQ ID NO: 1041050 - RNA, 19 nt, Artificial Sequence
  Description of Artificial Sequence: Synthetic oligonucleotide
auuuuaaguuucguaggcu

SEQ ID NO: 1041051 - RNA, 19 nt, Artificial Sequence
  Description of Artificial Sequence: Synthetic oligonucleotide
acuagguuacagaaccguc

SEQ ID NO: 1041052 - RNA, 19 nt, Artificial Sequence
  Description of Artificial Sequence: Synthetic oligonucleotide
acacgggacaacuuuugca

SEQ ID NO: 1041053 - RNA, 19 nt, Artificial Sequence
  Description of Artificial Sequence: Synthetic oligonucleotide
gaaaacaggagagcuaugu

SEQ ID NO: 1041054 - RNA, 19 nt, Artificial Sequence
  Description of Artificial Sequence: Synthetic oligonucleotide
cagaauagauauauaauau

SEQ ID NO: 1041055 - RNA, 19 nt, Artificial Sequence
  Description of Artificial Sequence: Synthetic oligonucleotide
gacacgggacaacuuuugc

SEQ ID NO: 1041056 - RNA, 19 nt, Artificial Sequence
  Description of Artificial Sequence: Synthetic oligonucleotide
acaguuugguagucacauc

SEQ ID NO: 1041057 - RNA, 19 nt, Artificial Sequence
  Description of Artificial Sequence: Synthetic oligonucleotide
ucugugcacaaacguuagc

SEQ ID NO: 1041058 - RNA, 19 nt, Artificial Sequence
  Description of Artificial Sequence: Synthetic oligonucleotide
gcugugaacguauacagaa

SEQ ID NO: 1041059 - RNA, 19 nt, Artificial Sequence
  Description of Artificial Sequence: Synthetic oligonucleotide
aaggcguaauggaucaugu

SEQ ID NO: 1041060 - RNA, 19 nt, Artificial Sequence
  Description of Artificial Sequence: Synthetic oligonucleotide
gcuauguggacuuuugcca

SEQ ID NO: 1041061 - RNA, 19 nt, Artificial Sequence
  Description of Artificial Sequence: Synthetic oligonucleotide
agcauugugugccaugcuu

SEQ ID NO: 1041062 - RNA, 19 nt, Artificial Sequence
  Description of Artificial Sequence: Synthetic oligonucleotide
auaauaccgguguggcucu

SEQ ID NO: 1041063 - RNA, 19 nt, Artificial Sequence
  Description of Artificial Sequence: Synthetic oligonucleotide
agacaaggcaagauagaag

SEQ ID NO: 1041064 - RNA, 19 nt, Artificial Sequence
  Description of Artificial Sequence: Synthetic oligonucleotide
auacuauaauauauauaca

SEQ ID NO: 1041065 - RNA, 19 nt, Artificial Sequence
  Description of Artificial Sequence: Synthetic oligonucleotide
uggagcgcaugaaauaguu

SEQ ID NO: 1041066 - RNA, 19 nt, Artificial Sequence
  Description of Artificial Sequence: Synthetic oligonucleotide
guguugucccucuuuaguc

SEQ ID NO: 1041067 - RNA, 19 nt, Artificial Sequence
  Description of Artificial Sequence: Synthetic oligonucleotide
gaaaaguugaacagucaua

SEQ ID NO: 1041068 - RNA, 19 nt, Artificial Sequence
  Description of Artificial Sequence: Synthetic oligonucleotide
ugacagucgcuaaguuucc

SEQ ID NO: 1041069 - RNA, 19 nt, Artificial Sequence
  Description of Artificial Sequence: Synthetic oligonucleotide
agugauuuaguuacauaaa

SEQ ID NO: 1041070 - RNA, 19 nt, Artificial Sequence
  Description of Artificial Sequence: Synthetic oligonucleotide
gauauauaauauauauaau

SEQ ID NO: 1041071 - RNA, 19 nt, Artificial Sequence
  Description of Artificial Sequence: Synthetic oligonucleotide
caagguugguauuuuaaua

SEQ ID NO: 1041072 - RNA, 19 nt, Artificial Sequence
  Description of Artificial Sequence: Synthetic oligonucleotide
gaaccgucagcuaaaguaa

SEQ ID NO: 1041073 - RNA, 19 nt, Artificial Sequence
  Description of Artificial Sequence: Synthetic oligonucleotide
uugcuuuaagaagcacuag

SEQ ID NO: 1041074 - RNA, 19 nt, Artificial Sequence
  Description of Artificial Sequence: Synthetic oligonucleotide
augacaauuuagucugcaa

SEQ ID NO: 1041075 - RNA, 19 nt, Artificial Sequence
  Description of Artificial Sequence: Synthetic oligonucleotide
aagcuacugcagcuucaag

SEQ ID NO: 1041076 - RNA, 19 nt, Artificial Sequence
  Description of Artificial Sequence: Synthetic oligonucleotide
gagccaaccccgaagcgag

SEQ ID NO: 1041077 - RNA, 19 nt, Artificial Sequence
  Description of Artificial Sequence: Synthetic oligonucleotide
aggcguaauggaucauguc

SEQ ID NO: 1041078 - RNA, 19 nt, Artificial Sequence
  Description of Artificial Sequence: Synthetic oligonucleotide
gcuaaguuuccacaugcac

SEQ ID NO: 1041079 - RNA, 19 nt, Artificial Sequence
  Description of Artificial Sequence: Synthetic oligonucleotide
ucuuaaugcuaaggcuugc

SEQ ID NO: 1041080 - RNA, 19 nt, Artificial Sequence
  Description of Artificial Sequence: Synthetic oligonucleotide
auucgagguacuugucaca

SEQ ID NO: 1041081 - RNA, 19 nt, Artificial Sequence
  Description of Artificial Sequence: Synthetic oligonucleotide
auaaaauggagcgcaugaa

SEQ ID NO: 1041082 - RNA, 19 nt, Artificial Sequence
  Description of Artificial Sequence: Synthetic oligonucleotide
caguacaauaaaugcucuc

SEQ ID NO: 1041083 - RNA, 19 nt, Artificial Sequence
  Description of Artificial Sequence: Synthetic oligonucleotide
aggcacgaaccccaguucu

SEQ ID NO: 1041084 - RNA, 19 nt, Artificial Sequence
  Description of Artificial Sequence: Synthetic oligonucleotide
uguugacagucgcuaaguu

SEQ ID NO: 1041085 - RNA, 19 nt, Artificial Sequence
  Description of Artificial Sequence: Synthetic oligonucleotide
gaggcguacuuuuaguccu

SEQ ID NO: 1041086 - RNA, 19 nt, Artificial Sequence
  Description of Artificial Sequence: Synthetic oligonucleotide
aucaguguaucaaaucuua

SEQ ID NO: 1041087 - RNA, 19 nt, Artificial Sequence
  Description of Artificial Sequence: Synthetic oligonucleotide
agucgagugccuguuauaa

SEQ ID NO: 1041088 - RNA, 19 nt, Artificial Sequence
  Description of Artificial Sequence: Synthetic oligonucleotide
cugcaaacgcaauauaacu

SEQ ID NO: 1041089 - RNA, 19 nt, Artificial Sequence
  Description of Artificial Sequence: Synthetic oligonucleotide
caguuugguagucacaucu

SEQ ID NO: 1041090 - RNA, 19 nt, Artificial Sequence
  Description of Artificial Sequence: Synthetic oligonucleotide
aguccgaagguggcucugc

SEQ ID NO: 1041091 - RNA, 19 nt, Artificial Sequence
  Description of Artificial Sequence: Synthetic oligonucleotide
augaguuacaaaggaguaa

SEQ ID NO: 1041092 - RNA, 19 nt, Artificial Sequence
  Description of Artificial Sequence: Synthetic oligonucleotide
aagcauugugugccaugcu

SEQ ID NO: 1041093 - RNA, 19 nt, Artificial Sequence
  Description of Artificial Sequence: Synthetic oligonucleotide
aggagagcuauguggacuu

SEQ ID NO: 1041094 - RNA, 19 nt, Artificial Sequence
  Description of Artificial Sequence: Synthetic oligonucleotide
ucguuuuguuaguuuguua

SEQ ID NO: 1041095 - RNA, 19 nt, Artificial Sequence
  Description of Artificial Sequence: Synthetic oligonucleotide
uguaaccaagguugguauu

SEQ ID NO: 1041096 - RNA, 19 nt, Artificial Sequence
  Description of Artificial Sequence: Synthetic oligonucleotide
acaugacaauuuagucugc

SEQ ID NO: 1041097 - RNA, 19 nt, Artificial Sequence
  Description of Artificial Sequence: Synthetic oligonucleotide
acaguacaauaaaugcucu

SEQ ID NO: 1041098 - RNA, 19 nt, Artificial Sequence
  Description of Artificial Sequence: Synthetic oligonucleotide
uucguuuuguuaguuuguu

SEQ ID NO: 1041099 - RNA, 19 nt, Artificial Sequence
  Description of Artificial Sequence: Synthetic oligonucleotide
gucgagugccuguuauaag

SEQ ID NO: 1041100 - RNA, 19 nt, Artificial Sequence
  Description of Artificial Sequence: Synthetic oligonucleotide
agcgaggcguacuuuuagu

SEQ ID NO: 1041101 - RNA, 19 nt, Artificial Sequence
  Description of Artificial Sequence: Synthetic oligonucleotide
acgaaccccaguucuggca

SEQ ID NO: 1041102 - RNA, 19 nt, Artificial Sequence
  Description of Artificial Sequence: Synthetic oligonucleotide
ucacuacugguauuucguu

SEQ ID NO: 1041103 - RNA, 19 nt, Artificial Sequence
  Description of Artificial Sequence: Synthetic oligonucleotide
gugcacaaacguuagcuua

SEQ ID NO: 1041104 - RNA, 19 nt, Artificial Sequence
  Description of Artificial Sequence: Synthetic oligonucleotide
aucaacaguuugguaguca

SEQ ID NO: 1041105 - RNA, 19 nt, Artificial Sequence
  Description of Artificial Sequence: Synthetic oligonucleotide
agucauaccuacacaacuu

SEQ ID NO: 1041106 - RNA, 19 nt, Artificial Sequence
  Description of Artificial Sequence: Synthetic oligonucleotide
uauauacguauggaaucuu

SEQ ID NO: 1041107 - RNA, 19 nt, Artificial Sequence
  Description of Artificial Sequence: Synthetic oligonucleotide
cuacugguauuucguuuug

SEQ ID NO: 1041108 - RNA, 19 nt, Artificial Sequence
  Description of Artificial Sequence: Synthetic oligonucleotide
uuugugucaaaaggauauu

SEQ ID NO: 1041109 - RNA, 19 nt, Artificial Sequence
  Description of Artificial Sequence: Synthetic oligonucleotide
uauaagcauguguggugua

SEQ ID NO: 1041110 - RNA, 19 nt, Artificial Sequence
  Description of Artificial Sequence: Synthetic oligonucleotide
ugaauccauucgagguacu

SEQ ID NO: 1041111 - RNA, 19 nt, Artificial Sequence
  Description of Artificial Sequence: Synthetic oligonucleotide
caagauagaaggcugcuuu

SEQ ID NO: 1041112 - RNA, 19 nt, Artificial Sequence
  Description of Artificial Sequence: Synthetic oligonucleotide
cucuuuagucgagugccug

SEQ ID NO: 1041113 - RNA, 19 nt, Artificial Sequence
  Description of Artificial Sequence: Synthetic oligonucleotide
aauaccgguguggcucugu

SEQ ID NO: 1041114 - RNA, 19 nt, Artificial Sequence
  Description of Artificial Sequence: Synthetic oligonucleotide
acuuuugcaccaaaacaua

SEQ ID NO: 1041115 - RNA, 19 nt, Artificial Sequence
  Description of Artificial Sequence: Synthetic oligonucleotide
uuucguaggcuaggaggca

SEQ ID NO: 1041116 - RNA, 19 nt, Artificial Sequence
  Description of Artificial Sequence: Synthetic oligonucleotide
gacaagagacacgggacaa

SEQ ID NO: 1041117 - RNA, 19 nt, Artificial Sequence
  Description of Artificial Sequence: Synthetic oligonucleotide
accgucagcuaaaguaaag

SEQ ID NO: 1041118 - RNA, 19 nt, Artificial Sequence
  Description of Artificial Sequence: Synthetic oligonucleotide
cuacacaacuuucuguccu

SEQ ID NO: 1041119 - RNA, 19 nt, Artificial Sequence
  Description of Artificial Sequence: Synthetic oligonucleotide
uacugguauuucguuuugu

SEQ ID NO: 1041120 - RNA, 19 nt, Artificial Sequence
  Description of Artificial Sequence: Synthetic oligonucleotide
cagucgcuaaguuuccaca

SEQ ID NO: 1041121 - RNA, 19 nt, Artificial Sequence
  Description of Artificial Sequence: Synthetic oligonucleotide
acuugacaacauauacuca

SEQ ID NO: 1041122 - RNA, 19 nt, Artificial Sequence
  Description of Artificial Sequence: Synthetic oligonucleotide
ggacaagagacacgggaca

SEQ ID NO: 1041123 - RNA, 19 nt, Artificial Sequence
  Description of Artificial Sequence: Synthetic oligonucleotide
ccuacacaacuuucugucc

SEQ ID NO: 1041124 - RNA, 19 nt, Artificial Sequence
  Description of Artificial Sequence: Synthetic oligonucleotide
agccacgugggucagccuu

SEQ ID NO: 1041125 - RNA, 19 nt, Artificial Sequence
  Description of Artificial Sequence: Synthetic oligonucleotide
gcaaacgcaauauaacuau

SEQ ID NO: 1041126 - RNA, 19 nt, Artificial Sequence
  Description of Artificial Sequence: Synthetic oligonucleotide
auacucaguguaaaccaaa

SEQ ID NO: 1041127 - RNA, 19 nt, Artificial Sequence
  Description of Artificial Sequence: Synthetic oligonucleotide
caugacaauuuagucugca

SEQ ID NO: 1041128 - RNA, 19 nt, Artificial Sequence
  Description of Artificial Sequence: Synthetic oligonucleotide
auguauguugacagucgcu

SEQ ID NO: 1041129 - RNA, 19 nt, Artificial Sequence
  Description of Artificial Sequence: Synthetic oligonucleotide
agcugcgcaguccgaaggu

SEQ ID NO: 1041130 - RNA, 19 nt, Artificial Sequence
  Description of Artificial Sequence: Synthetic oligonucleotide
cacgaaccccaguucuggc

SEQ ID NO: 1041131 - RNA, 19 nt, Artificial Sequence
  Description of Artificial Sequence: Synthetic oligonucleotide
agacacgggacaacuuuug

SEQ ID NO: 1041132 - RNA, 19 nt, Artificial Sequence
  Description of Artificial Sequence: Synthetic oligonucleotide
caguguaucaaaucuuaau

SEQ ID NO: 1041133 - RNA, 19 nt, Artificial Sequence
  Description of Artificial Sequence: Synthetic oligonucleotide
cguauacagaaaacaggag

SEQ ID NO: 1041134 - RNA, 19 nt, Artificial Sequence
  Description of Artificial Sequence: Synthetic oligonucleotide
caugagugaugaaguacaa

SEQ ID NO: 1041135 - RNA, 19 nt, Artificial Sequence
  Description of Artificial Sequence: Synthetic oligonucleotide
ggacgaacagcacugcaaa

SEQ ID NO: 1041136 - RNA, 19 nt, Artificial Sequence
  Description of Artificial Sequence: Synthetic oligonucleotide
guugacagucgcuaaguuu

SEQ ID NO: 1041137 - RNA, 19 nt, Artificial Sequence
  Description of Artificial Sequence: Synthetic oligonucleotide
cgaggcguacuuuuagucc

SEQ ID NO: 1041138 - RNA, 19 nt, Artificial Sequence
  Description of Artificial Sequence: Synthetic oligonucleotide
agagaacugaaaaguugaa

SEQ ID NO: 1041139 - RNA, 19 nt, Artificial Sequence
  Description of Artificial Sequence: Synthetic oligonucleotide
guuacagaaccgucagcua

SEQ ID NO: 1041140 - RNA, 19 nt, Artificial Sequence
  Description of Artificial Sequence: Synthetic oligonucleotide
caaacgcaauauaacuaua

SEQ ID NO: 1041141 - RNA, 19 nt, Artificial Sequence
  Description of Artificial Sequence: Synthetic oligonucleotide
cugugaacguauacagaaa

SEQ ID NO: 1041142 - RNA, 19 nt, Artificial Sequence
  Description of Artificial Sequence: Synthetic oligonucleotide
uagucgagugccuguuaua

SEQ ID NO: 1041143 - RNA, 19 nt, Artificial Sequence
  Description of Artificial Sequence: Synthetic oligonucleotide
gguugguauuuuaauaaua

SEQ ID NO: 1041144 - RNA, 19 nt, Artificial Sequence
  Description of Artificial Sequence: Synthetic oligonucleotide
gcacgaaccccaguucugg

SEQ ID NO: 1041145 - RNA, 19 nt, Artificial Sequence
  Description of Artificial Sequence: Synthetic oligonucleotide
uucucacuacugguauuuc

SEQ ID NO: 1041146 - RNA, 19 nt, Artificial Sequence
  Description of Artificial Sequence: Synthetic oligonucleotide
guaaccaagguugguauuu

SEQ ID NO: 1041147 - RNA, 19 nt, Artificial Sequence
  Description of Artificial Sequence: Synthetic oligonucleotide
gguauuucguuuuguuagu

SEQ ID NO: 1041148 - RNA, 19 nt, Artificial Sequence
  Description of Artificial Sequence: Synthetic oligonucleotide
gcgaggcguacuuuuaguc

SEQ ID NO: 1041149 - RNA, 19 nt, Artificial Sequence
  Description of Artificial Sequence: Synthetic oligonucleotide
uaccgguguggcucuguuc

SEQ ID NO: 1041150 - RNA, 19 nt, Artificial Sequence
  Description of Artificial Sequence: Synthetic oligonucleotide
guagucacaucuccaguuu

SEQ ID NO: 1041151 - RNA, 19 nt, Artificial Sequence
  Description of Artificial Sequence: Synthetic oligonucleotide
auaccgguguggcucuguu

SEQ ID NO: 1041152 - RNA, 19 nt, Artificial Sequence
  Description of Artificial Sequence: Synthetic oligonucleotide
cuuaaugcuaaggcuugcu

SEQ ID NO: 1041153 - RNA, 19 nt, Artificial Sequence
  Description of Artificial Sequence: Synthetic oligonucleotide
uucuggcauacuguauauu

SEQ ID NO: 1041154 - RNA, 19 nt, Artificial Sequence
  Description of Artificial Sequence: Synthetic oligonucleotide
gacagucgcuaaguuucca

SEQ ID NO: 1041155 - RNA, 19 nt, Artificial Sequence
  Description of Artificial Sequence: Synthetic oligonucleotide
gcguaauggaucaugucaa

SEQ ID NO: 1041156 - RNA, 19 nt, Artificial Sequence
  Description of Artificial Sequence: Synthetic oligonucleotide
gccuguuauaagcaugugu

SEQ ID NO: 1041157 - RNA, 19 nt, Artificial Sequence
  Description of Artificial Sequence: Synthetic oligonucleotide
gugaugaaguacaaccuuu

SEQ ID NO: 1041158 - RNA, 19 nt, Artificial Sequence
  Description of Artificial Sequence: Synthetic oligonucleotide
gaagcgaggcguacuuuua

SEQ ID NO: 1041159 - RNA, 19 nt, Artificial Sequence
  Description of Artificial Sequence: Synthetic oligonucleotide
guaauggaucaugucaauu

SEQ ID NO: 1041160 - RNA, 19 nt, Artificial Sequence
  Description of Artificial Sequence: Synthetic oligonucleotide
cacaaacguuagcuuauua

SEQ ID NO: 1041161 - RNA, 19 nt, Artificial Sequence
  Description of Artificial Sequence: Synthetic oligonucleotide
caagcuacugcagcuucaa

SEQ ID NO: 1041162 - RNA, 19 nt, Artificial Sequence
  Description of Artificial Sequence: Synthetic oligonucleotide
gagugccuguuauaagcau

SEQ ID NO: 1041163 - RNA, 19 nt, Artificial Sequence
  Description of Artificial Sequence: Synthetic oligonucleotide
guuagcuuauuagcucacu

SEQ ID NO: 1041164 - RNA, 19 nt, Artificial Sequence
  Description of Artificial Sequence: Synthetic oligonucleotide
ggguacaaaggcaggcuca

SEQ ID NO: 1041165 - RNA, 19 nt, Artificial Sequence
  Description of Artificial Sequence: Synthetic oligonucleotide
cacuagguuacagaaccgu

SEQ ID NO: 1041166 - RNA, 19 nt, Artificial Sequence
  Description of Artificial Sequence: Synthetic oligonucleotide
gaguaaagcugaauccauu

SEQ ID NO: 1041167 - RNA, 19 nt, Artificial Sequence
  Description of Artificial Sequence: Synthetic oligonucleotide
aggaggcacgaaccccagu

SEQ ID NO: 1041168 - RNA, 19 nt, Artificial Sequence
  Description of Artificial Sequence: Synthetic oligonucleotide
cccugagaauguauguuga

SEQ ID NO: 1041169 - RNA, 19 nt, Artificial Sequence
  Description of Artificial Sequence: Synthetic oligonucleotide
uaauaccgguguggcucug

SEQ ID NO: 1041170 - RNA, 19 nt, Artificial Sequence
  Description of Artificial Sequence: Synthetic oligonucleotide
aacauaccucuagcauguu

SEQ ID NO: 1041171 - RNA, 19 nt, Artificial Sequence
  Description of Artificial Sequence: Synthetic oligonucleotide
accuacaaacauaccucua

SEQ ID NO: 1041172 - RNA, 19 nt, Artificial Sequence
  Description of Artificial Sequence: Synthetic oligonucleotide
gcuuauuagcucacugcaa

SEQ ID NO: 1041173 - RNA, 19 nt, Artificial Sequence
  Description of Artificial Sequence: Synthetic oligonucleotide
ccaaccccgaagcgaggcg

SEQ ID NO: 1041174 - RNA, 19 nt, Artificial Sequence
  Description of Artificial Sequence: Synthetic oligonucleotide
ggcacgaaccccaguucug

SEQ ID NO: 1041175 - RNA, 19 nt, Artificial Sequence
  Description of Artificial Sequence: Synthetic oligonucleotide
gucacaucuccaguuuggu

SEQ ID NO: 1041176 - RNA, 19 nt, Artificial Sequence
  Description of Artificial Sequence: Synthetic oligonucleotide
gccaaccccgaagcgaggc

SEQ ID NO: 1041177 - RNA, 19 nt, Artificial Sequence
  Description of Artificial Sequence: Synthetic oligonucleotide
cguuagcuuauuagcucac

SEQ ID NO: 1041178 - RNA, 19 nt, Artificial Sequence
  Description of Artificial Sequence: Synthetic oligonucleotide
ggcauacuguauauucuua

SEQ ID NO: 1041179 - RNA, 19 nt, Artificial Sequence
  Description of Artificial Sequence: Synthetic oligonucleotide
caaaggaguaaagcugaau

SEQ ID NO: 1041180 - RNA, 19 nt, Artificial Sequence
  Description of Artificial Sequence: Synthetic oligonucleotide
guauuucguuuuguuaguu

SEQ ID NO: 1041181 - RNA, 19 nt, Artificial Sequence
  Description of Artificial Sequence: Synthetic oligonucleotide
ccaagguugguauuuuaau

SEQ ID NO: 1041182 - RNA, 19 nt, Artificial Sequence
  Description of Artificial Sequence: Synthetic oligonucleotide
aaccccgaagcgaggcgua

SEQ ID NO: 1041183 - RNA, 19 nt, Artificial Sequence
  Description of Artificial Sequence: Synthetic oligonucleotide
ggaguaaagcugaauccau

SEQ ID NO: 1041184 - RNA, 19 nt, Artificial Sequence
  Description of Artificial Sequence: Synthetic oligonucleotide
agccaaccccgaagcgagg

SEQ ID NO: 1041185 - RNA, 19 nt, Artificial Sequence
  Description of Artificial Sequence: Synthetic oligonucleotide
caguccgaagguggcucug

SEQ ID NO: 1041186 - RNA, 19 nt, Artificial Sequence
  Description of Artificial Sequence: Synthetic oligonucleotide
ccaaaccuuuucaaccucu

SEQ ID NO: 1041187 - RNA, 19 nt, Artificial Sequence
  Description of Artificial Sequence: Synthetic oligonucleotide
cuuuagucgagugccuguu

SEQ ID NO: 1041188 - RNA, 19 nt, Artificial Sequence
  Description of Artificial Sequence: Synthetic oligonucleotide
cuaaggcuugcuguguguu

SEQ ID NO: 1041189 - RNA, 19 nt, Artificial Sequence
  Description of Artificial Sequence: Synthetic oligonucleotide
guaggcuaggaggcacgaa

SEQ ID NO: 1041190 - RNA, 19 nt, Artificial Sequence
  Description of Artificial Sequence: Synthetic oligonucleotide
ggcguacuuuuaguccuuc

SEQ ID NO: 1041191 - RNA, 19 nt, Artificial Sequence
  Description of Artificial Sequence: Synthetic oligonucleotide
agcucacugcaaaggcgua

SEQ ID NO: 1041192 - RNA, 19 nt, Artificial Sequence
  Description of Artificial Sequence: Synthetic oligonucleotide
caaccccgaagcgaggcgu

SEQ ID NO: 1041193 - RNA, 19 nt, Artificial Sequence
  Description of Artificial Sequence: Synthetic oligonucleotide
aggcguacuuuuaguccuu

SEQ ID NO: 1041194 - RNA, 19 nt, Artificial Sequence
  Description of Artificial Sequence: Synthetic oligonucleotide
cacuguaaccaagguuggu

SEQ ID NO: 1041195 - RNA, 19 nt, Artificial Sequence
  Description of Artificial Sequence: Synthetic oligonucleotide
cgcuaaguuuccacaugca

SEQ ID NO: 1041196 - RNA, 19 nt, Artificial Sequence
  Description of Artificial Sequence: Synthetic oligonucleotide
gcaagauagaaggcugcuu

SEQ ID NO: 1041197 - RNA, 19 nt, Artificial Sequence
  Description of Artificial Sequence: Synthetic oligonucleotide
cgcaguccgaagguggcuc

SEQ ID NO: 1041198 - RNA, 19 nt, Artificial Sequence
  Description of Artificial Sequence: Synthetic oligonucleotide
cguaauggaucaugucaau

SEQ ID NO: 1041199 - RNA, 19 nt, Artificial Sequence
  Description of Artificial Sequence: Synthetic oligonucleotide
cgaagcgaggcguacuuuu

SEQ ID NO: 1041200 - RNA, 19 nt, Artificial Sequence
  Description of Artificial Sequence: Synthetic oligonucleotide
cccgaagcgaggcguacuu

SEQ ID NO: 1041201 - RNA, 19 nt, Artificial Sequence
  Description of Artificial Sequence: Synthetic oligonucleotide
ggagagcuauguggacuuu

SEQ ID NO: 1041202 - RNA, 19 nt, Artificial Sequence
  Description of Artificial Sequence: Synthetic oligonucleotide
ccacgugggucagccuucu

SEQ ID NO: 1041203 - RNA, 19 nt, Artificial Sequence
  Description of Artificial Sequence: Synthetic oligonucleotide
ccccgaagcgaggcguacu

SEQ ID NO: 1041204 - RNA, 19 nt, Artificial Sequence
  Description of Artificial Sequence: Synthetic oligonucleotide
ccgaagcgaggcguacuuu

SEQ ID NO: 1041205 - RNA, 19 nt, Artificial Sequence
  Description of Artificial Sequence: Synthetic oligonucleotide
gaugcuacaaauuuaaggc

SEQ ID NO: 1041206 - RNA, 19 nt, Artificial Sequence
  Description of Artificial Sequence: Synthetic oligonucleotide
uguguaaacaggcaaagag

SEQ ID NO: 1041207 - RNA, 19 nt, Artificial Sequence
  Description of Artificial Sequence: Synthetic oligonucleotide
uuugguuuaauaaagcacu

SEQ ID NO: 1041208 - RNA, 19 nt, Artificial Sequence
  Description of Artificial Sequence: Synthetic oligonucleotide
uuuaguacaucaauuacug

SEQ ID NO: 1041209 - RNA, 19 nt, Artificial Sequence
  Description of Artificial Sequence: Synthetic oligonucleotide
ucuaucuggacguagagcc

SEQ ID NO: 1041210 - RNA, 19 nt, Artificial Sequence
  Description of Artificial Sequence: Synthetic oligonucleotide
cuuacaggcaaacagagcc

SEQ ID NO: 1041211 - RNA, 19 nt, Artificial Sequence
  Description of Artificial Sequence: Synthetic oligonucleotide
agcucaguaaaguaguucc

SEQ ID NO: 1041212 - RNA, 19 nt, Artificial Sequence
  Description of Artificial Sequence: Synthetic oligonucleotide
aaaguaguuccucugauga

SEQ ID NO: 1041213 - RNA, 19 nt, Artificial Sequence
  Description of Artificial Sequence: Synthetic oligonucleotide
aaauuuaaggcuauccacg

SEQ ID NO: 1041214 - RNA, 19 nt, Artificial Sequence
  Description of Artificial Sequence: Synthetic oligonucleotide
aaguguaucagagagaaga

SEQ ID NO: 1041215 - RNA, 19 nt, Artificial Sequence
  Description of Artificial Sequence: Synthetic oligonucleotide
uguacuaagcagauugagg

SEQ ID NO: 1041216 - RNA, 19 nt, Artificial Sequence
  Description of Artificial Sequence: Synthetic oligonucleotide
aaugacagcgcgauagucc

SEQ ID NO: 1041217 - RNA, 19 nt, Artificial Sequence
  Description of Artificial Sequence: Synthetic oligonucleotide
ugaacuaacauuucagacu

SEQ ID NO: 1041218 - RNA, 19 nt, Artificial Sequence
  Description of Artificial Sequence: Synthetic oligonucleotide
ucuuuaucgacccugguuc

SEQ ID NO: 1041219 - RNA, 19 nt, Artificial Sequence
  Description of Artificial Sequence: Synthetic oligonucleotide
aacgaaagguaucuuuagg

SEQ ID NO: 1041220 - RNA, 19 nt, Artificial Sequence
  Description of Artificial Sequence: Synthetic oligonucleotide
aacaguuaucgacacgggg

SEQ ID NO: 1041221 - RNA, 19 nt, Artificial Sequence
  Description of Artificial Sequence: Synthetic oligonucleotide
aaacguaucccauucauuu

SEQ ID NO: 1041222 - RNA, 19 nt, Artificial Sequence
  Description of Artificial Sequence: Synthetic oligonucleotide
uucucuaucaaauuugcaa

SEQ ID NO: 1041223 - RNA, 19 nt, Artificial Sequence
  Description of Artificial Sequence: Synthetic oligonucleotide
aucuauccaagauggaagc

SEQ ID NO: 1041224 - RNA, 19 nt, Artificial Sequence
  Description of Artificial Sequence: Synthetic oligonucleotide
uaguaagugcgccagagug

SEQ ID NO: 1041225 - RNA, 19 nt, Artificial Sequence
  Description of Artificial Sequence: Synthetic oligonucleotide
gauguuggcaggcagcccg

SEQ ID NO: 1041226 - RNA, 19 nt, Artificial Sequence
  Description of Artificial Sequence: Synthetic oligonucleotide
uucugaacuaacauuucag

SEQ ID NO: 1041227 - RNA, 19 nt, Artificial Sequence
  Description of Artificial Sequence: Synthetic oligonucleotide
uggacguagagccugaaca

SEQ ID NO: 1041228 - RNA, 19 nt, Artificial Sequence
  Description of Artificial Sequence: Synthetic oligonucleotide
aaacgaaagguaucuuuag

SEQ ID NO: 1041229 - RNA, 19 nt, Artificial Sequence
  Description of Artificial Sequence: Synthetic oligonucleotide
ucucuaucaaauuugcaac

SEQ ID NO: 1041230 - RNA, 19 nt, Artificial Sequence
  Description of Artificial Sequence: Synthetic oligonucleotide
cucuguacuaagcagauug

SEQ ID NO: 1041231 - RNA, 19 nt, Artificial Sequence
  Description of Artificial Sequence: Synthetic oligonucleotide
caaauuuaaggcuauccac

SEQ ID NO: 1041232 - RNA, 19 nt, Artificial Sequence
  Description of Artificial Sequence: Synthetic oligonucleotide
uguuacacauguauuaaaa

SEQ ID NO: 1041233 - RNA, 19 nt, Artificial Sequence
  Description of Artificial Sequence: Synthetic oligonucleotide
uguugccucagauuuauug

SEQ ID NO: 1041234 - RNA, 19 nt, Artificial Sequence
  Description of Artificial Sequence: Synthetic oligonucleotide
uggagaaaguucauuagac

SEQ ID NO: 1041235 - RNA, 19 nt, Artificial Sequence
  Description of Artificial Sequence: Synthetic oligonucleotide
gguuuaauaaagcacuugc

SEQ ID NO: 1041236 - RNA, 19 nt, Artificial Sequence
  Description of Artificial Sequence: Synthetic oligonucleotide
uccgcagugagccacaaac

SEQ ID NO: 1041237 - RNA, 19 nt, Artificial Sequence
  Description of Artificial Sequence: Synthetic oligonucleotide
aacuauauauucuguguaa

SEQ ID NO: 1041238 - RNA, 19 nt, Artificial Sequence
  Description of Artificial Sequence: Synthetic oligonucleotide
aaucuaucuggacguagag

SEQ ID NO: 1041239 - RNA, 19 nt, Artificial Sequence
  Description of Artificial Sequence: Synthetic oligonucleotide
gaagcuagguuugucaucc

SEQ ID NO: 1041240 - RNA, 19 nt, Artificial Sequence
  Description of Artificial Sequence: Synthetic oligonucleotide
agcgcgauaguccaaaaug

SEQ ID NO: 1041241 - RNA, 19 nt, Artificial Sequence
  Description of Artificial Sequence: Synthetic oligonucleotide
cacuuuugguuuaauaaag

SEQ ID NO: 1041242 - RNA, 19 nt, Artificial Sequence
  Description of Artificial Sequence: Synthetic oligonucleotide
ucaaauuugcaaccagcug

SEQ ID NO: 1041243 - RNA, 19 nt, Artificial Sequence
  Description of Artificial Sequence: Synthetic oligonucleotide
uuugcaagaacugauggaa

SEQ ID NO: 1041244 - RNA, 19 nt, Artificial Sequence
  Description of Artificial Sequence: Synthetic oligonucleotide
gaucuauccaagauggaag

SEQ ID NO: 1041245 - RNA, 19 nt, Artificial Sequence
  Description of Artificial Sequence: Synthetic oligonucleotide
aagagacugauggacacuc

SEQ ID NO: 1041246 - RNA, 19 nt, Artificial Sequence
  Description of Artificial Sequence: Synthetic oligonucleotide
acuaacauuucagacuaac

SEQ ID NO: 1041247 - RNA, 19 nt, Artificial Sequence
  Description of Artificial Sequence: Synthetic oligonucleotide
aaguaguuccucugaugac

SEQ ID NO: 1041248 - RNA, 19 nt, Artificial Sequence
  Description of Artificial Sequence: Synthetic oligonucleotide
uuaugaaauucuugaaggu

SEQ ID NO: 1041249 - RNA, 19 nt, Artificial Sequence
  Description of Artificial Sequence: Synthetic oligonucleotide
accgaucuucccaagaucc

SEQ ID NO: 1041250 - RNA, 19 nt, Artificial Sequence
  Description of Artificial Sequence: Synthetic oligonucleotide
cugaacuaacauuucagac

SEQ ID NO: 1041251 - RNA, 19 nt, Artificial Sequence
  Description of Artificial Sequence: Synthetic oligonucleotide
uaacuauauauucugugua

SEQ ID NO: 1041252 - RNA, 19 nt, Artificial Sequence
  Description of Artificial Sequence: Synthetic oligonucleotide
uccugaucuauccaagaug

SEQ ID NO: 1041253 - RNA, 19 nt, Artificial Sequence
  Description of Artificial Sequence: Synthetic oligonucleotide
acaccuguaaacguauccc

SEQ ID NO: 1041254 - RNA, 19 nt, Artificial Sequence
  Description of Artificial Sequence: Synthetic oligonucleotide
gggagagugaccuugagug

SEQ ID NO: 1041255 - RNA, 19 nt, Artificial Sequence
  Description of Artificial Sequence: Synthetic oligonucleotide
gaacuaacauuucagacua

SEQ ID NO: 1041256 - RNA, 19 nt, Artificial Sequence
  Description of Artificial Sequence: Synthetic oligonucleotide
aacccugaggucaaaacag

SEQ ID NO: 1041257 - RNA, 19 nt, Artificial Sequence
  Description of Artificial Sequence: Synthetic oligonucleotide
acuggucagccuuaaacag

SEQ ID NO: 1041258 - RNA, 19 nt, Artificial Sequence
  Description of Artificial Sequence: Synthetic oligonucleotide
acguaucccauucauuuuc

SEQ ID NO: 1041259 - RNA, 19 nt, Artificial Sequence
  Description of Artificial Sequence: Synthetic oligonucleotide
uuucagucuuuaucgaccc

SEQ ID NO: 1041260 - RNA, 19 nt, Artificial Sequence
  Description of Artificial Sequence: Synthetic oligonucleotide
cucuaucaaauuugcaacc

SEQ ID NO: 1041261 - RNA, 19 nt, Artificial Sequence
  Description of Artificial Sequence: Synthetic oligonucleotide
aguaaaguaguuccucuga

SEQ ID NO: 1041262 - RNA, 19 nt, Artificial Sequence
  Description of Artificial Sequence: Synthetic oligonucleotide
aagaccucgaagguacugg

SEQ ID NO: 1041263 - RNA, 19 nt, Artificial Sequence
  Description of Artificial Sequence: Synthetic oligonucleotide
uaaaguaguuccucugaug

SEQ ID NO: 1041264 - RNA, 19 nt, Artificial Sequence
  Description of Artificial Sequence: Synthetic oligonucleotide
aaucgugcugguuuucuga

SEQ ID NO: 1041265 - RNA, 19 nt, Artificial Sequence
  Description of Artificial Sequence: Synthetic oligonucleotide
cagguaugacugaagaacc

SEQ ID NO: 1041266 - RNA, 19 nt, Artificial Sequence
  Description of Artificial Sequence: Synthetic oligonucleotide
gaagaagcuagguuuguca

SEQ ID NO: 1041267 - RNA, 19 nt, Artificial Sequence
  Description of Artificial Sequence: Synthetic oligonucleotide
gaugcauucgucaggggag

SEQ ID NO: 1041268 - RNA, 19 nt, Artificial Sequence
  Description of Artificial Sequence: Synthetic oligonucleotide
uaaaacagaccuucugaac

SEQ ID NO: 1041269 - RNA, 19 nt, Artificial Sequence
  Description of Artificial Sequence: Synthetic oligonucleotide
auugaguggugguaguaag

SEQ ID NO: 1041270 - RNA, 19 nt, Artificial Sequence
  Description of Artificial Sequence: Synthetic oligonucleotide
uuaaucugcagcuuugcuu

SEQ ID NO: 1041271 - RNA, 19 nt, Artificial Sequence
  Description of Artificial Sequence: Synthetic oligonucleotide
aagguacuggaggggaucc

SEQ ID NO: 1041272 - RNA, 19 nt, Artificial Sequence
  Description of Artificial Sequence: Synthetic oligonucleotide
gaucacgaauucuuuguug

SEQ ID NO: 1041273 - RNA, 19 nt, Artificial Sequence
  Description of Artificial Sequence: Synthetic oligonucleotide
ugcaagaacugauggaaac

SEQ ID NO: 1041274 - RNA, 19 nt, Artificial Sequence
  Description of Artificial Sequence: Synthetic oligonucleotide
uucguuuaguacaucaauu

SEQ ID NO: 1041275 - RNA, 19 nt, Artificial Sequence
  Description of Artificial Sequence: Synthetic oligonucleotide
ucguuuaguacaucaauua

SEQ ID NO: 1041276 - RNA, 19 nt, Artificial Sequence
  Description of Artificial Sequence: Synthetic oligonucleotide
aggcgauugccaucaaagc

SEQ ID NO: 1041277 - RNA, 19 nt, Artificial Sequence
  Description of Artificial Sequence: Synthetic oligonucleotide
uggaagucggccuuuccag

SEQ ID NO: 1041278 - RNA, 19 nt, Artificial Sequence
  Description of Artificial Sequence: Synthetic oligonucleotide
cugagaacuggucaugcgc

SEQ ID NO: 1041279 - RNA, 19 nt, Artificial Sequence
  Description of Artificial Sequence: Synthetic oligonucleotide
caacuggucagccuuaaac

SEQ ID NO: 1041280 - RNA, 19 nt, Artificial Sequence
  Description of Artificial Sequence: Synthetic oligonucleotide
aacccaaggagcucaacaa

SEQ ID NO: 1041281 - RNA, 19 nt, Artificial Sequence
  Description of Artificial Sequence: Synthetic oligonucleotide
ugaucuauccaagauggaa

SEQ ID NO: 1041282 - RNA, 19 nt, Artificial Sequence
  Description of Artificial Sequence: Synthetic oligonucleotide
ugggagauaaccugagaac

SEQ ID NO: 1041283 - RNA, 19 nt, Artificial Sequence
  Description of Artificial Sequence: Synthetic oligonucleotide
agagcauuaaggaaugugu

SEQ ID NO: 1041284 - RNA, 19 nt, Artificial Sequence
  Description of Artificial Sequence: Synthetic oligonucleotide
ugaguggugguaguaagug

SEQ ID NO: 1041285 - RNA, 19 nt, Artificial Sequence
  Description of Artificial Sequence: Synthetic oligonucleotide
uuaaggcuauccacggagc

SEQ ID NO: 1041286 - RNA, 19 nt, Artificial Sequence
  Description of Artificial Sequence: Synthetic oligonucleotide
aguaagugcgccagagugc

SEQ ID NO: 1041287 - RNA, 19 nt, Artificial Sequence
  Description of Artificial Sequence: Synthetic oligonucleotide
aucuaucuggacguagagc

SEQ ID NO: 1041288 - RNA, 19 nt, Artificial Sequence
  Description of Artificial Sequence: Synthetic oligonucleotide
uguaaacguaucccauuca

SEQ ID NO: 1041289 - RNA, 19 nt, Artificial Sequence
  Description of Artificial Sequence: Synthetic oligonucleotide
agaagcuagguuugucauc

SEQ ID NO: 1041290 - RNA, 19 nt, Artificial Sequence
  Description of Artificial Sequence: Synthetic oligonucleotide
acaaacgaaagguaucuuu

SEQ ID NO: 1041291 - RNA, 19 nt, Artificial Sequence
  Description of Artificial Sequence: Synthetic oligonucleotide
ucggcacuuguguaaacag

SEQ ID NO: 1041292 - RNA, 19 nt, Artificial Sequence
  Description of Artificial Sequence: Synthetic oligonucleotide
uuucucuaucaaauuugca

SEQ ID NO: 1041293 - RNA, 19 nt, Artificial Sequence
  Description of Artificial Sequence: Synthetic oligonucleotide
aacaucaacuggucagccu

SEQ ID NO: 1041294 - RNA, 19 nt, Artificial Sequence
  Description of Artificial Sequence: Synthetic oligonucleotide
augcuacaaauuuaaggcu

SEQ ID NO: 1041295 - RNA, 19 nt, Artificial Sequence
  Description of Artificial Sequence: Synthetic oligonucleotide
uaaggcuauccacggagca

SEQ ID NO: 1041296 - RNA, 19 nt, Artificial Sequence
  Description of Artificial Sequence: Synthetic oligonucleotide
aauugcaagggcacgggcu

SEQ ID NO: 1041297 - RNA, 19 nt, Artificial Sequence
  Description of Artificial Sequence: Synthetic oligonucleotide
agcccauaaagcaagggag

SEQ ID NO: 1041298 - RNA, 19 nt, Artificial Sequence
  Description of Artificial Sequence: Synthetic oligonucleotide
aggcuauccacggagcagc

SEQ ID NO: 1041299 - RNA, 19 nt, Artificial Sequence
  Description of Artificial Sequence: Synthetic oligonucleotide
cacaccuguaaacguaucc

SEQ ID NO: 1041300 - RNA, 19 nt, Artificial Sequence
  Description of Artificial Sequence: Synthetic oligonucleotide
gucaaaacaguuaucgaca

SEQ ID NO: 1041301 - RNA, 19 nt, Artificial Sequence
  Description of Artificial Sequence: Synthetic oligonucleotide
uuuccugaucuauccaaga

SEQ ID NO: 1041302 - RNA, 19 nt, Artificial Sequence
  Description of Artificial Sequence: Synthetic oligonucleotide
gaacccaaggagcucaaca

SEQ ID NO: 1041303 - RNA, 19 nt, Artificial Sequence
  Description of Artificial Sequence: Synthetic oligonucleotide
ugacacgcugggagaaucg

SEQ ID NO: 1041304 - RNA, 19 nt, Artificial Sequence
  Description of Artificial Sequence: Synthetic oligonucleotide
augacagcgcgauagucca

SEQ ID NO: 1041305 - RNA, 19 nt, Artificial Sequence
  Description of Artificial Sequence: Synthetic oligonucleotide
acaguuaucgacacggggu

SEQ ID NO: 1041306 - RNA, 19 nt, Artificial Sequence
  Description of Artificial Sequence: Synthetic oligonucleotide
guuuucugaaaggcgauug

SEQ ID NO: 1041307 - RNA, 19 nt, Artificial Sequence
  Description of Artificial Sequence: Synthetic oligonucleotide
ucacgaauucuuuguugag

SEQ ID NO: 1041308 - RNA, 19 nt, Artificial Sequence
  Description of Artificial Sequence: Synthetic oligonucleotide
caaaacaguuaucgacacg

SEQ ID NO: 1041309 - RNA, 19 nt, Artificial Sequence
  Description of Artificial Sequence: Synthetic oligonucleotide
ugguuuaauaaagcacuug

SEQ ID NO: 1041310 - RNA, 19 nt, Artificial Sequence
  Description of Artificial Sequence: Synthetic oligonucleotide
uguuggucaccacacgauc

SEQ ID NO: 1041311 - RNA, 19 nt, Artificial Sequence
  Description of Artificial Sequence: Synthetic oligonucleotide
acacgaucccucucggcac

SEQ ID NO: 1041312 - RNA, 19 nt, Artificial Sequence
  Description of Artificial Sequence: Synthetic oligonucleotide
agcuagguuugucauccuc

SEQ ID NO: 1041313 - RNA, 19 nt, Artificial Sequence
  Description of Artificial Sequence: Synthetic oligonucleotide
aaacaguuaucgacacggg

SEQ ID NO: 1041314 - RNA, 19 nt, Artificial Sequence
  Description of Artificial Sequence: Synthetic oligonucleotide
aguuguccuguguugccuc

SEQ ID NO: 1041315 - RNA, 19 nt, Artificial Sequence
  Description of Artificial Sequence: Synthetic oligonucleotide
cuaaaacagaccuucugaa

SEQ ID NO: 1041316 - RNA, 19 nt, Artificial Sequence
  Description of Artificial Sequence: Synthetic oligonucleotide
uucaggaugcauaccccga

SEQ ID NO: 1041317 - RNA, 19 nt, Artificial Sequence
  Description of Artificial Sequence: Synthetic oligonucleotide
gagggucugguagagacug

SEQ ID NO: 1041318 - RNA, 19 nt, Artificial Sequence
  Description of Artificial Sequence: Synthetic oligonucleotide
agguaugacugaagaaccc

SEQ ID NO: 1041319 - RNA, 19 nt, Artificial Sequence
  Description of Artificial Sequence: Synthetic oligonucleotide
guaagugcgccagagugcc

SEQ ID NO: 1041320 - RNA, 19 nt, Artificial Sequence
  Description of Artificial Sequence: Synthetic oligonucleotide
ugcuaaguuguccuguguu

SEQ ID NO: 1041321 - RNA, 19 nt, Artificial Sequence
  Description of Artificial Sequence: Synthetic oligonucleotide
uggaaacuccugcucacac

SEQ ID NO: 1041322 - RNA, 19 nt, Artificial Sequence
  Description of Artificial Sequence: Synthetic oligonucleotide
uuccugaucuauccaagau

SEQ ID NO: 1041323 - RNA, 19 nt, Artificial Sequence
  Description of Artificial Sequence: Synthetic oligonucleotide
ucccaagauccugagcugg

SEQ ID NO: 1041324 - RNA, 19 nt, Artificial Sequence
  Description of Artificial Sequence: Synthetic oligonucleotide
agcugggaugaacuuccgc

SEQ ID NO: 1041325 - RNA, 19 nt, Artificial Sequence
  Description of Artificial Sequence: Synthetic oligonucleotide
aaggcuauccacggagcag

SEQ ID NO: 1041326 - RNA, 19 nt, Artificial Sequence
  Description of Artificial Sequence: Synthetic oligonucleotide
gaaaguucauuagaccaga

SEQ ID NO: 1041327 - RNA, 19 nt, Artificial Sequence
  Description of Artificial Sequence: Synthetic oligonucleotide
cagccuuaaacaggcaucg

SEQ ID NO: 1041328 - RNA, 19 nt, Artificial Sequence
  Description of Artificial Sequence: Synthetic oligonucleotide
uaaacguaucccauucauu

SEQ ID NO: 1041329 - RNA, 19 nt, Artificial Sequence
  Description of Artificial Sequence: Synthetic oligonucleotide
cauuagaccagauuucucu

SEQ ID NO: 1041330 - RNA, 19 nt, Artificial Sequence
  Description of Artificial Sequence: Synthetic oligonucleotide
ggaagacuaaaacagaccu

SEQ ID NO: 1041331 - RNA, 19 nt, Artificial Sequence
  Description of Artificial Sequence: Synthetic oligonucleotide
ggccauauguacucugugg

SEQ ID NO: 1041332 - RNA, 19 nt, Artificial Sequence
  Description of Artificial Sequence: Synthetic oligonucleotide
uaucuggacguagagccug

SEQ ID NO: 1041333 - RNA, 19 nt, Artificial Sequence
  Description of Artificial Sequence: Synthetic oligonucleotide
agaccagauuucucuauca

SEQ ID NO: 1041334 - RNA, 19 nt, Artificial Sequence
  Description of Artificial Sequence: Synthetic oligonucleotide
gaugagcgggcgauguugg

SEQ ID NO: 1041335 - RNA, 19 nt, Artificial Sequence
  Description of Artificial Sequence: Synthetic oligonucleotide
aacguaucccauucauuuu

SEQ ID NO: 1041336 - RNA, 19 nt, Artificial Sequence
  Description of Artificial Sequence: Synthetic oligonucleotide
ugacuuugcugagagcagc

SEQ ID NO: 1041337 - RNA, 19 nt, Artificial Sequence
  Description of Artificial Sequence: Synthetic oligonucleotide
ucauuagaccagauuucuc

SEQ ID NO: 1041338 - RNA, 19 nt, Artificial Sequence
  Description of Artificial Sequence: Synthetic oligonucleotide
ugcugaaauaaggaaacuu

SEQ ID NO: 1041339 - RNA, 19 nt, Artificial Sequence
  Description of Artificial Sequence: Synthetic oligonucleotide
gaauugcaagggcacgggc

SEQ ID NO: 1041340 - RNA, 19 nt, Artificial Sequence
  Description of Artificial Sequence: Synthetic oligonucleotide
auaagaacccaaggagcuc

SEQ ID NO: 1041341 - RNA, 19 nt, Artificial Sequence
  Description of Artificial Sequence: Synthetic oligonucleotide
uugguuuaauaaagcacuu

SEQ ID NO: 1041342 - RNA, 19 nt, Artificial Sequence
  Description of Artificial Sequence: Synthetic oligonucleotide
aggaugcauaccccgaaca

SEQ ID NO: 1041343 - RNA, 19 nt, Artificial Sequence
  Description of Artificial Sequence: Synthetic oligonucleotide
agaaacagugcugccccac

SEQ ID NO: 1041344 - RNA, 19 nt, Artificial Sequence
  Description of Artificial Sequence: Synthetic oligonucleotide
caaacgaaagguaucuuua

SEQ ID NO: 1041345 - RNA, 19 nt, Artificial Sequence
  Description of Artificial Sequence: Synthetic oligonucleotide
caguuaucgacacggggug

SEQ ID NO: 1041346 - RNA, 19 nt, Artificial Sequence
  Description of Artificial Sequence: Synthetic oligonucleotide
cgauaguccaaaaugcugc

SEQ ID NO: 1041347 - RNA, 19 nt, Artificial Sequence
  Description of Artificial Sequence: Synthetic oligonucleotide
gggccuuacaggcaaacag

SEQ ID NO: 1041348 - RNA, 19 nt, Artificial Sequence
  Description of Artificial Sequence: Synthetic oligonucleotide
auuagaccagauuucucua

SEQ ID NO: 1041349 - RNA, 19 nt, Artificial Sequence
  Description of Artificial Sequence: Synthetic oligonucleotide
aaucacaccuguaaacgua

SEQ ID NO: 1041350 - RNA, 19 nt, Artificial Sequence
  Description of Artificial Sequence: Synthetic oligonucleotide
ugaucacgaauucuuuguu

SEQ ID NO: 1041351 - RNA, 19 nt, Artificial Sequence
  Description of Artificial Sequence: Synthetic oligonucleotide
uugcaagaacugauggaaa

SEQ ID NO: 1041352 - RNA, 19 nt, Artificial Sequence
  Description of Artificial Sequence: Synthetic oligonucleotide
auuuaaggcuauccacgga

SEQ ID NO: 1041353 - RNA, 19 nt, Artificial Sequence
  Description of Artificial Sequence: Synthetic oligonucleotide
uggguguuacacauguauu

SEQ ID NO: 1041354 - RNA, 19 nt, Artificial Sequence
  Description of Artificial Sequence: Synthetic oligonucleotide
gguucugaauugcaagggc

SEQ ID NO: 1041355 - RNA, 19 nt, Artificial Sequence
  Description of Artificial Sequence: Synthetic oligonucleotide
agaugagcgggcgauguug

SEQ ID NO: 1041356 - RNA, 19 nt, Artificial Sequence
  Description of Artificial Sequence: Synthetic oligonucleotide
aucgacacggggugaagcu

SEQ ID NO: 1041357 - RNA, 19 nt, Artificial Sequence
  Description of Artificial Sequence: Synthetic oligonucleotide
ugaggucaaaacaguuauc

SEQ ID NO: 1041358 - RNA, 19 nt, Artificial Sequence
  Description of Artificial Sequence: Synthetic oligonucleotide
caaucuaucuggacguaga

SEQ ID NO: 1041359 - RNA, 19 nt, Artificial Sequence
  Description of Artificial Sequence: Synthetic oligonucleotide
gcugcaaccuuccaguaac

SEQ ID NO: 1041360 - RNA, 19 nt, Artificial Sequence
  Description of Artificial Sequence: Synthetic oligonucleotide
agaccgaucuucccaagau

SEQ ID NO: 1041361 - RNA, 19 nt, Artificial Sequence
  Description of Artificial Sequence: Synthetic oligonucleotide
cauucgucaggggaguaag

SEQ ID NO: 1041362 - RNA, 19 nt, Artificial Sequence
  Description of Artificial Sequence: Synthetic oligonucleotide
uaucgacacggggugaagc

SEQ ID NO: 1041363 - RNA, 19 nt, Artificial Sequence
  Description of Artificial Sequence: Synthetic oligonucleotide
gaagucggccuuuccagga

SEQ ID NO: 1041364 - RNA, 19 nt, Artificial Sequence
  Description of Artificial Sequence: Synthetic oligonucleotide
ucccucucggcacuugugu

SEQ ID NO: 1041365 - RNA, 19 nt, Artificial Sequence
  Description of Artificial Sequence: Synthetic oligonucleotide
cagacuaacuauauauucu

SEQ ID NO: 1041366 - RNA, 19 nt, Artificial Sequence
  Description of Artificial Sequence: Synthetic oligonucleotide
uuaucgacccugguucuga

SEQ ID NO: 1041367 - RNA, 19 nt, Artificial Sequence
  Description of Artificial Sequence: Synthetic oligonucleotide
aaguuguccuguguugccu

SEQ ID NO: 1041368 - RNA, 19 nt, Artificial Sequence
  Description of Artificial Sequence: Synthetic oligonucleotide
gccuuaaacaggcaucggc

SEQ ID NO: 1041369 - RNA, 19 nt, Artificial Sequence
  Description of Artificial Sequence: Synthetic oligonucleotide
gguaguaagugcgccagag

SEQ ID NO: 1041370 - RNA, 19 nt, Artificial Sequence
  Description of Artificial Sequence: Synthetic oligonucleotide
gcuaaguuguccuguguug

SEQ ID NO: 1041371 - RNA, 19 nt, Artificial Sequence
  Description of Artificial Sequence: Synthetic oligonucleotide
gugguaguaagugcgccag

SEQ ID NO: 1041372 - RNA, 19 nt, Artificial Sequence
  Description of Artificial Sequence: Synthetic oligonucleotide
uucccaaugacagcgcgau

SEQ ID NO: 1041373 - RNA, 19 nt, Artificial Sequence
  Description of Artificial Sequence: Synthetic oligonucleotide
aggagcucaacaacaagga

SEQ ID NO: 1041374 - RNA, 19 nt, Artificial Sequence
  Description of Artificial Sequence: Synthetic oligonucleotide
cacacgaucccucucggca

SEQ ID NO: 1041375 - RNA, 19 nt, Artificial Sequence
  Description of Artificial Sequence: Synthetic oligonucleotide
uccaagauggaagcugauc

SEQ ID NO: 1041376 - RNA, 19 nt, Artificial Sequence
  Description of Artificial Sequence: Synthetic oligonucleotide
uuuaucgacccugguucug

SEQ ID NO: 1041377 - RNA, 19 nt, Artificial Sequence
  Description of Artificial Sequence: Synthetic oligonucleotide
uaccccgaacaaaaugcaa

SEQ ID NO: 1041378 - RNA, 19 nt, Artificial Sequence
  Description of Artificial Sequence: Synthetic oligonucleotide
gaaacagugcugccccaca

SEQ ID NO: 1041379 - RNA, 19 nt, Artificial Sequence
  Description of Artificial Sequence: Synthetic oligonucleotide
aucaauuacugaagaauua

SEQ ID NO: 1041380 - RNA, 19 nt, Artificial Sequence
  Description of Artificial Sequence: Synthetic oligonucleotide
agagccugaacaacaagaa

SEQ ID NO: 1041381 - RNA, 19 nt, Artificial Sequence
  Description of Artificial Sequence: Synthetic oligonucleotide
gacguagagccugaacaac

SEQ ID NO: 1041382 - RNA, 19 nt, Artificial Sequence
  Description of Artificial Sequence: Synthetic oligonucleotide
agugagccacaaacgaaag

SEQ ID NO: 1041383 - RNA, 19 nt, Artificial Sequence
  Description of Artificial Sequence: Synthetic oligonucleotide
uccaacaaucacaccugua

SEQ ID NO: 1041384 - RNA, 19 nt, Artificial Sequence
  Description of Artificial Sequence: Synthetic oligonucleotide
gaccgaucuucccaagauc

SEQ ID NO: 1041385 - RNA, 19 nt, Artificial Sequence
  Description of Artificial Sequence: Synthetic oligonucleotide
ugagaccgaucuucccaag

SEQ ID NO: 1041386 - RNA, 19 nt, Artificial Sequence
  Description of Artificial Sequence: Synthetic oligonucleotide
guaaacguaucccauucau

SEQ ID NO: 1041387 - RNA, 19 nt, Artificial Sequence
  Description of Artificial Sequence: Synthetic oligonucleotide
uggugguaguaagugcgcc

SEQ ID NO: 1041388 - RNA, 19 nt, Artificial Sequence
  Description of Artificial Sequence: Synthetic oligonucleotide
acggggugaagcugggaug

SEQ ID NO: 1041389 - RNA, 19 nt, Artificial Sequence
  Description of Artificial Sequence: Synthetic oligonucleotide
ugagcucaguaaaguaguu

SEQ ID NO: 1041390 - RNA, 19 nt, Artificial Sequence
  Description of Artificial Sequence: Synthetic oligonucleotide
cacuuguguaaacaggcaa

SEQ ID NO: 1041391 - RNA, 19 nt, Artificial Sequence
  Description of Artificial Sequence: Synthetic oligonucleotide
guacuggaggggauccucg

SEQ ID NO: 1041392 - RNA, 19 nt, Artificial Sequence
  Description of Artificial Sequence: Synthetic oligonucleotide
gaagguacuggaggggauc

SEQ ID NO: 1041393 - RNA, 19 nt, Artificial Sequence
  Description of Artificial Sequence: Synthetic oligonucleotide
aagugcgccagagugccau

SEQ ID NO: 1041394 - RNA, 19 nt, Artificial Sequence
  Description of Artificial Sequence: Synthetic oligonucleotide
agaaucgugcugguuuucu

SEQ ID NO: 1041395 - RNA, 19 nt, Artificial Sequence
  Description of Artificial Sequence: Synthetic oligonucleotide
caccuguaaacguauccca

SEQ ID NO: 1041396 - RNA, 19 nt, Artificial Sequence
  Description of Artificial Sequence: Synthetic oligonucleotide
ccuuaaacaggcaucggca

SEQ ID NO: 1041397 - RNA, 19 nt, Artificial Sequence
  Description of Artificial Sequence: Synthetic oligonucleotide
ugccucagauuuauugauu

SEQ ID NO: 1041398 - RNA, 19 nt, Artificial Sequence
  Description of Artificial Sequence: Synthetic oligonucleotide
uuaucgacacggggugaag

SEQ ID NO: 1041399 - RNA, 19 nt, Artificial Sequence
  Description of Artificial Sequence: Synthetic oligonucleotide
aagucggccuuuccaggau

SEQ ID NO: 1041400 - RNA, 19 nt, Artificial Sequence
  Description of Artificial Sequence: Synthetic oligonucleotide
cuggaagucggccuuucca

SEQ ID NO: 1041401 - RNA, 19 nt, Artificial Sequence
  Description of Artificial Sequence: Synthetic oligonucleotide
ggagauaaccugagaacug

SEQ ID NO: 1041402 - RNA, 19 nt, Artificial Sequence
  Description of Artificial Sequence: Synthetic oligonucleotide
caacaaucacaccuguaaa

SEQ ID NO: 1041403 - RNA, 19 nt, Artificial Sequence
  Description of Artificial Sequence: Synthetic oligonucleotide
ccaacaaucacaccuguaa

SEQ ID NO: 1041404 - RNA, 19 nt, Artificial Sequence
  Description of Artificial Sequence: Synthetic oligonucleotide
agacugauggacacucugu

SEQ ID NO: 1041405 - RNA, 19 nt, Artificial Sequence
  Description of Artificial Sequence: Synthetic oligonucleotide
aagaacccugaggucaaaa

SEQ ID NO: 1041406 - RNA, 19 nt, Artificial Sequence
  Description of Artificial Sequence: Synthetic oligonucleotide
cugagcucaguaaaguagu

SEQ ID NO: 1041407 - RNA, 19 nt, Artificial Sequence
  Description of Artificial Sequence: Synthetic oligonucleotide
agccacaaacgaaagguau

SEQ ID NO: 1041408 - RNA, 19 nt, Artificial Sequence
  Description of Artificial Sequence: Synthetic oligonucleotide
agucggccuuuccaggaug

SEQ ID NO: 1041409 - RNA, 19 nt, Artificial Sequence
  Description of Artificial Sequence: Synthetic oligonucleotide
cucaacaacaaggaagacu

SEQ ID NO: 1041410 - RNA, 19 nt, Artificial Sequence
  Description of Artificial Sequence: Synthetic oligonucleotide
ugguaguaagugcgccaga

SEQ ID NO: 1041411 - RNA, 19 nt, Artificial Sequence
  Description of Artificial Sequence: Synthetic oligonucleotide
ccccgaacaaaaugcaaag

SEQ ID NO: 1041412 - RNA, 19 nt, Artificial Sequence
  Description of Artificial Sequence: Synthetic oligonucleotide
ucaacuggucagccuuaaa

SEQ ID NO: 1041413 - RNA, 19 nt, Artificial Sequence
  Description of Artificial Sequence: Synthetic oligonucleotide
ucacaccuguaaacguauc

SEQ ID NO: 1041414 - RNA, 19 nt, Artificial Sequence
  Description of Artificial Sequence: Synthetic oligonucleotide
gagacuggggagagugacc

SEQ ID NO: 1041415 - RNA, 19 nt, Artificial Sequence
  Description of Artificial Sequence: Synthetic oligonucleotide
accccgaacaaaaugcaaa

SEQ ID NO: 1041416 - RNA, 19 nt, Artificial Sequence
  Description of Artificial Sequence: Synthetic oligonucleotide
agcccgaagaagcuagguu

SEQ ID NO: 1041417 - RNA, 19 nt, Artificial Sequence
  Description of Artificial Sequence: Synthetic oligonucleotide
ucgacacggggugaagcug

SEQ ID NO: 1041418 - RNA, 19 nt, Artificial Sequence
  Description of Artificial Sequence: Synthetic oligonucleotide
auucgucaggggaguaagg

SEQ ID NO: 1041419 - RNA, 19 nt, Artificial Sequence
  Description of Artificial Sequence: Synthetic oligonucleotide
guaaaguaguuccucugau

SEQ ID NO: 1041420 - RNA, 19 nt, Artificial Sequence
  Description of Artificial Sequence: Synthetic oligonucleotide
cugcaaucuaucuggacgu

SEQ ID NO: 1041421 - RNA, 19 nt, Artificial Sequence
  Description of Artificial Sequence: Synthetic oligonucleotide
agcugcaaccuuccaguaa

SEQ ID NO: 1041422 - RNA, 19 nt, Artificial Sequence
  Description of Artificial Sequence: Synthetic oligonucleotide
ucggggccuucccauuugc

SEQ ID NO: 1041423 - RNA, 19 nt, Artificial Sequence
  Description of Artificial Sequence: Synthetic oligonucleotide
auaccccgaacaaaaugca

SEQ ID NO: 1041424 - RNA, 19 nt, Artificial Sequence
  Description of Artificial Sequence: Synthetic oligonucleotide
caggaugcauaccccgaac

SEQ ID NO: 1041425 - RNA, 19 nt, Artificial Sequence
  Description of Artificial Sequence: Synthetic oligonucleotide
gcgauaguccaaaaugcug

SEQ ID NO: 1041426 - RNA, 19 nt, Artificial Sequence
  Description of Artificial Sequence: Synthetic oligonucleotide
aucacaccuguaaacguau

SEQ ID NO: 1041427 - RNA, 19 nt, Artificial Sequence
  Description of Artificial Sequence: Synthetic oligonucleotide
cuggacguagagccugaac

SEQ ID NO: 1041428 - RNA, 19 nt, Artificial Sequence
  Description of Artificial Sequence: Synthetic oligonucleotide
aggaaugugucuggaugga

SEQ ID NO: 1041429 - RNA, 19 nt, Artificial Sequence
  Description of Artificial Sequence: Synthetic oligonucleotide
gcgcgauaguccaaaaugc

SEQ ID NO: 1041430 - RNA, 19 nt, Artificial Sequence
  Description of Artificial Sequence: Synthetic oligonucleotide
agagugaccuugaguguug

SEQ ID NO: 1041431 - RNA, 19 nt, Artificial Sequence
  Description of Artificial Sequence: Synthetic oligonucleotide
caagaccucgaagguacug

SEQ ID NO: 1041432 - RNA, 19 nt, Artificial Sequence
  Description of Artificial Sequence: Synthetic oligonucleotide
agauaaccugagaacuggu

SEQ ID NO: 1041433 - RNA, 19 nt, Artificial Sequence
  Description of Artificial Sequence: Synthetic oligonucleotide
gcaaucuaucuggacguag

SEQ ID NO: 1041434 - RNA, 19 nt, Artificial Sequence
  Description of Artificial Sequence: Synthetic oligonucleotide
agccuuaaacaggcaucgg

SEQ ID NO: 1041435 - RNA, 19 nt, Artificial Sequence
  Description of Artificial Sequence: Synthetic oligonucleotide
gauccucggggccuuccca

SEQ ID NO: 1041436 - RNA, 19 nt, Artificial Sequence
  Description of Artificial Sequence: Synthetic oligonucleotide
caaucacaccuguaaacgu

SEQ ID NO: 1041437 - RNA, 19 nt, Artificial Sequence
  Description of Artificial Sequence: Synthetic oligonucleotide
cauugaguggugguaguaa

SEQ ID NO: 1041438 - RNA, 19 nt, Artificial Sequence
  Description of Artificial Sequence: Synthetic oligonucleotide
gacagcgcgauaguccaaa

SEQ ID NO: 1041439 - RNA, 19 nt, Artificial Sequence
  Description of Artificial Sequence: Synthetic oligonucleotide
ucaccacacgaucccucuc

SEQ ID NO: 1041440 - RNA, 19 nt, Artificial Sequence
  Description of Artificial Sequence: Synthetic oligonucleotide
aggggaguaagggccauau

SEQ ID NO: 1041441 - RNA, 19 nt, Artificial Sequence
  Description of Artificial Sequence: Synthetic oligonucleotide
accuguaaacguaucccau

SEQ ID NO: 1041442 - RNA, 19 nt, Artificial Sequence
  Description of Artificial Sequence: Synthetic oligonucleotide
ggacguagagccugaacaa

SEQ ID NO: 1041443 - RNA, 19 nt, Artificial Sequence
  Description of Artificial Sequence: Synthetic oligonucleotide
ucgugcugguuuucugaaa

SEQ ID NO: 1041444 - RNA, 19 nt, Artificial Sequence
  Description of Artificial Sequence: Synthetic oligonucleotide
gacacggggugaagcuggg

SEQ ID NO: 1041445 - RNA, 19 nt, Artificial Sequence
  Description of Artificial Sequence: Synthetic oligonucleotide
cacgggcuacaagaccucg

SEQ ID NO: 1041446 - RNA, 19 nt, Artificial Sequence
  Description of Artificial Sequence: Synthetic oligonucleotide
guuaucgacacggggugaa

SEQ ID NO: 1041447 - RNA, 19 nt, Artificial Sequence
  Description of Artificial Sequence: Synthetic oligonucleotide
guugagagucagcuuuucu

SEQ ID NO: 1041448 - RNA, 19 nt, Artificial Sequence
  Description of Artificial Sequence: Synthetic oligonucleotide
aguuaucgacacgggguga

SEQ ID NO: 1041449 - RNA, 19 nt, Artificial Sequence
  Description of Artificial Sequence: Synthetic oligonucleotide
ggaugcauaccccgaacaa

SEQ ID NO: 1041450 - RNA, 19 nt, Artificial Sequence
  Description of Artificial Sequence: Synthetic oligonucleotide
cccgaagaagcuagguuug

SEQ ID NO: 1041451 - RNA, 19 nt, Artificial Sequence
  Description of Artificial Sequence: Synthetic oligonucleotide
ugcgccagagugccauguc

SEQ ID NO: 1041452 - RNA, 19 nt, Artificial Sequence
  Description of Artificial Sequence: Synthetic oligonucleotide
agggccauauguacucugu

SEQ ID NO: 1041453 - RNA, 19 nt, Artificial Sequence
  Description of Artificial Sequence: Synthetic oligonucleotide
aagguaucuuuagguugaa

SEQ ID NO: 1041454 - RNA, 19 nt, Artificial Sequence
  Description of Artificial Sequence: Synthetic oligonucleotide
gucggccuuuccaggaugc

SEQ ID NO: 1041455 - RNA, 19 nt, Artificial Sequence
  Description of Artificial Sequence: Synthetic oligonucleotide
cgaacaaaaugcaaagcaa

SEQ ID NO: 1041456 - RNA, 19 nt, Artificial Sequence
  Description of Artificial Sequence: Synthetic oligonucleotide
ucucggcacuuguguaaac

SEQ ID NO: 1041457 - RNA, 19 nt, Artificial Sequence
  Description of Artificial Sequence: Synthetic oligonucleotide
acgcugggagaaucgugcu

SEQ ID NO: 1041458 - RNA, 19 nt, Artificial Sequence
  Description of Artificial Sequence: Synthetic oligonucleotide
uaagugcgccagagugcca

SEQ ID NO: 1041459 - RNA, 19 nt, Artificial Sequence
  Description of Artificial Sequence: Synthetic oligonucleotide
gcauggguguuacacaugu

SEQ ID NO: 1041460 - RNA, 19 nt, Artificial Sequence
  Description of Artificial Sequence: Synthetic oligonucleotide
augcauucgucaggggagu

SEQ ID NO: 1041461 - RNA, 19 nt, Artificial Sequence
  Description of Artificial Sequence: Synthetic oligonucleotide
gggccauauguacucugug

SEQ ID NO: 1041462 - RNA, 19 nt, Artificial Sequence
  Description of Artificial Sequence: Synthetic oligonucleotide
cccaagauccugagcuggg

SEQ ID NO: 1041463 - RNA, 19 nt, Artificial Sequence
  Description of Artificial Sequence: Synthetic oligonucleotide
gaagacuaaaacagaccuu

SEQ ID NO: 1041464 - RNA, 19 nt, Artificial Sequence
  Description of Artificial Sequence: Synthetic oligonucleotide
guaguaagugcgccagagu

SEQ ID NO: 1041465 - RNA, 19 nt, Artificial Sequence
  Description of Artificial Sequence: Synthetic oligonucleotide
gcuacaagaccucgaaggu

SEQ ID NO: 1041466 - RNA, 19 nt, Artificial Sequence
  Description of Artificial Sequence: Synthetic oligonucleotide
cuuuaucgacccugguucu

SEQ ID NO: 1041467 - RNA, 19 nt, Artificial Sequence
  Description of Artificial Sequence: Synthetic oligonucleotide
agugcgccagagugccaug

SEQ ID NO: 1041468 - RNA, 19 nt, Artificial Sequence
  Description of Artificial Sequence: Synthetic oligonucleotide
gagagugaccuugaguguu

SEQ ID NO: 1041469 - RNA, 19 nt, Artificial Sequence
  Description of Artificial Sequence: Synthetic oligonucleotide
agggccuuacaggcaaaca

SEQ ID NO: 1041470 - RNA, 19 nt, Artificial Sequence
  Description of Artificial Sequence: Synthetic oligonucleotide
gggagaaucgugcugguuu

SEQ ID NO: 1041471 - RNA, 19 nt, Artificial Sequence
  Description of Artificial Sequence: Synthetic oligonucleotide
ugcaaucuaucuggacgua

SEQ ID NO: 1041472 - RNA, 19 nt, Artificial Sequence
  Description of Artificial Sequence: Synthetic oligonucleotide
ggagcucaacaacaaggaa

SEQ ID NO: 1041473 - RNA, 19 nt, Artificial Sequence
  Description of Artificial Sequence: Synthetic oligonucleotide
cgacacggggugaagcugg

SEQ ID NO: 1041474 - RNA, 19 nt, Artificial Sequence
  Description of Artificial Sequence: Synthetic oligonucleotide
cccgaacaaaaugcaaagc

SEQ ID NO: 1041475 - RNA, 19 nt, Artificial Sequence
  Description of Artificial Sequence: Synthetic oligonucleotide
gagaaucgugcugguuuuc

SEQ ID NO: 1041476 - RNA, 19 nt, Artificial Sequence
  Description of Artificial Sequence: Synthetic oligonucleotide
gguaugacugaagaacccu

SEQ ID NO: 1041477 - RNA, 19 nt, Artificial Sequence
  Description of Artificial Sequence: Synthetic oligonucleotide
ugacagcgcgauaguccaa

SEQ ID NO: 1041478 - RNA, 19 nt, Artificial Sequence
  Description of Artificial Sequence: Synthetic oligonucleotide
gaacuuccgcagugagcca

SEQ ID NO: 1041479 - RNA, 19 nt, Artificial Sequence
  Description of Artificial Sequence: Synthetic oligonucleotide
ggcgauguuggcaggcagc

SEQ ID NO: 1041480 - RNA, 19 nt, Artificial Sequence
  Description of Artificial Sequence: Synthetic oligonucleotide
cuacaagaccucgaaggua

SEQ ID NO: 1041481 - RNA, 19 nt, Artificial Sequence
  Description of Artificial Sequence: Synthetic oligonucleotide
gucaccacacgaucccucu

SEQ ID NO: 1041482 - RNA, 19 nt, Artificial Sequence
  Description of Artificial Sequence: Synthetic oligonucleotide
acagcgcgauaguccaaaa

SEQ ID NO: 1041483 - RNA, 19 nt, Artificial Sequence
  Description of Artificial Sequence: Synthetic oligonucleotide
cacucuguacuaagcagau

SEQ ID NO: 1041484 - RNA, 19 nt, Artificial Sequence
  Description of Artificial Sequence: Synthetic oligonucleotide
cuaucuggacguagagccu

SEQ ID NO: 1041485 - RNA, 19 nt, Artificial Sequence
  Description of Artificial Sequence: Synthetic oligonucleotide
gcccauaaagcaagggaga

SEQ ID NO: 1041486 - RNA, 19 nt, Artificial Sequence
  Description of Artificial Sequence: Synthetic oligonucleotide
gcccgaagaagcuagguuu

SEQ ID NO: 1041487 - RNA, 19 nt, Artificial Sequence
  Description of Artificial Sequence: Synthetic oligonucleotide
aucccucucggcacuugug

SEQ ID NO: 1041488 - RNA, 19 nt, Artificial Sequence
  Description of Artificial Sequence: Synthetic oligonucleotide
ucuggacguagagccugaa

SEQ ID NO: 1041489 - RNA, 19 nt, Artificial Sequence
  Description of Artificial Sequence: Synthetic oligonucleotide
uccuuucguuuaguacauc

SEQ ID NO: 1041490 - RNA, 19 nt, Artificial Sequence
  Description of Artificial Sequence: Synthetic oligonucleotide
aaacuccugcucacacauu

SEQ ID NO: 1041491 - RNA, 19 nt, Artificial Sequence
  Description of Artificial Sequence: Synthetic oligonucleotide
gacacgcugggagaaucgu

SEQ ID NO: 1041492 - RNA, 19 nt, Artificial Sequence
  Description of Artificial Sequence: Synthetic oligonucleotide
ugggagaaucgugcugguu

SEQ ID NO: 1041493 - RNA, 19 nt, Artificial Sequence
  Description of Artificial Sequence: Synthetic oligonucleotide
cacggggugaagcugggau

SEQ ID NO: 1041494 - RNA, 19 nt, Artificial Sequence
  Description of Artificial Sequence: Synthetic oligonucleotide
acccugguucugaauugca

SEQ ID NO: 1041495 - RNA, 19 nt, Artificial Sequence
  Description of Artificial Sequence: Synthetic oligonucleotide
acgggcuacaagaccucga

SEQ ID NO: 1041496 - RNA, 19 nt, Artificial Sequence
  Description of Artificial Sequence: Synthetic oligonucleotide
cgcagugagccacaaacga

SEQ ID NO: 1041497 - RNA, 19 nt, Artificial Sequence
  Description of Artificial Sequence: Synthetic oligonucleotide
agguacuggaggggauccu

SEQ ID NO: 1041498 - RNA, 19 nt, Artificial Sequence
  Description of Artificial Sequence: Synthetic oligonucleotide
gcacuuguguaaacaggca

SEQ ID NO: 1041499 - RNA, 19 nt, Artificial Sequence
  Description of Artificial Sequence: Synthetic oligonucleotide
cauggguguuacacaugua

SEQ ID NO: 1041500 - RNA, 19 nt, Artificial Sequence
  Description of Artificial Sequence: Synthetic oligonucleotide
guaguuccucugaugacuu

SEQ ID NO: 1041501 - RNA, 19 nt, Artificial Sequence
  Description of Artificial Sequence: Synthetic oligonucleotide
ggggagagugaccuugagu

SEQ ID NO: 1041502 - RNA, 19 nt, Artificial Sequence
  Description of Artificial Sequence: Synthetic oligonucleotide
ggagaaucgugcugguuuu

SEQ ID NO: 1041503 - RNA, 19 nt, Artificial Sequence
  Description of Artificial Sequence: Synthetic oligonucleotide
uccuggcgaagagcauuaa

SEQ ID NO: 1041504 - RNA, 19 nt, Artificial Sequence
  Description of Artificial Sequence: Synthetic oligonucleotide
ggaaugugucuggauggaa

SEQ ID NO: 1041505 - RNA, 19 nt, Artificial Sequence
  Description of Artificial Sequence: Synthetic oligonucleotide
gaagaacccugaggucaaa

SEQ ID NO: 1041506 - RNA, 19 nt, Artificial Sequence
  Description of Artificial Sequence: Synthetic oligonucleotide
ccacacgaucccucucggc

SEQ ID NO: 1041507 - RNA, 19 nt, Artificial Sequence
  Description of Artificial Sequence: Synthetic oligonucleotide
ggucaccacacgaucccuc

SEQ ID NO: 1041508 - RNA, 19 nt, Artificial Sequence
  Description of Artificial Sequence: Synthetic oligonucleotide
gcagcccgaagaagcuagg

SEQ ID NO: 1041509 - RNA, 19 nt, Artificial Sequence
  Description of Artificial Sequence: Synthetic oligonucleotide
guccuguguugccucagau

SEQ ID NO: 1041510 - RNA, 19 nt, Artificial Sequence
  Description of Artificial Sequence: Synthetic oligonucleotide
gagaugagcgggcgauguu

SEQ ID NO: 1041511 - RNA, 19 nt, Artificial Sequence
  Description of Artificial Sequence: Synthetic oligonucleotide
cgaagaagcuagguuuguc

SEQ ID NO: 1041512 - RNA, 19 nt, Artificial Sequence
  Description of Artificial Sequence: Synthetic oligonucleotide
gcauucgucaggggaguaa

SEQ ID NO: 1041513 - RNA, 19 nt, Artificial Sequence
  Description of Artificial Sequence: Synthetic oligonucleotide
cacgaucccucucggcacu

SEQ ID NO: 1041514 - RNA, 19 nt, Artificial Sequence
  Description of Artificial Sequence: Synthetic oligonucleotide
cagcgcgauaguccaaaau

SEQ ID NO: 1041515 - RNA, 19 nt, Artificial Sequence
  Description of Artificial Sequence: Synthetic oligonucleotide
cacaaacgaaagguaucuu

SEQ ID NO: 1041516 - RNA, 19 nt, Artificial Sequence
  Description of Artificial Sequence: Synthetic oligonucleotide
aggggauccucggggccuu

SEQ ID NO: 1041517 - RNA, 19 nt, Artificial Sequence
  Description of Artificial Sequence: Synthetic oligonucleotide
cuuccgcagugagccacaa

SEQ ID NO: 1041518 - RNA, 19 nt, Artificial Sequence
  Description of Artificial Sequence: Synthetic oligonucleotide
gugcgccagagugccaugu

SEQ ID NO: 1041519 - RNA, 19 nt, Artificial Sequence
  Description of Artificial Sequence: Synthetic oligonucleotide
cgggcuacaagaccucgaa

SEQ ID NO: 1041520 - RNA, 19 nt, Artificial Sequence
  Description of Artificial Sequence: Synthetic oligonucleotide
cagcccgaagaagcuaggu

SEQ ID NO: 1041521 - RNA, 19 nt, Artificial Sequence
  Description of Artificial Sequence: Synthetic oligonucleotide
acgaucccucucggcacuu

SEQ ID NO: 1041522 - RNA, 19 nt, Artificial Sequence
  Description of Artificial Sequence: Synthetic oligonucleotide
ccgaagaagcuagguuugu

SEQ ID NO: 1041523 - RNA, 19 nt, Artificial Sequence
  Description of Artificial Sequence: Synthetic oligonucleotide
cgaagguacuggaggggau

SEQ ID NO: 1041524 - RNA, 19 nt, Artificial Sequence
  Description of Artificial Sequence: Synthetic oligonucleotide
gccccacacuggauccacu

SEQ ID NO: 1041525 - RNA, 19 nt, Artificial Sequence
  Description of Artificial Sequence: Synthetic oligonucleotide
aaaauaauaagccuggugc

SEQ ID NO: 1041526 - RNA, 19 nt, Artificial Sequence
  Description of Artificial Sequence: Synthetic oligonucleotide
ugauuaauaaauaagagga

SEQ ID NO: 1041527 - RNA, 19 nt, Artificial Sequence
  Description of Artificial Sequence: Synthetic oligonucleotide
agagauuuaucacagaugc

SEQ ID NO: 1041528 - RNA, 19 nt, Artificial Sequence
  Description of Artificial Sequence: Synthetic oligonucleotide
aauguuuuaauccaguuca

SEQ ID NO: 1041529 - RNA, 19 nt, Artificial Sequence
  Description of Artificial Sequence: Synthetic oligonucleotide
aauuguaggauauucagag

SEQ ID NO: 1041530 - RNA, 19 nt, Artificial Sequence
  Description of Artificial Sequence: Synthetic oligonucleotide
aauaauuacuucaugaggg

SEQ ID NO: 1041531 - RNA, 19 nt, Artificial Sequence
  Description of Artificial Sequence: Synthetic oligonucleotide
aaauaagaggaauguaucc

SEQ ID NO: 1041532 - RNA, 19 nt, Artificial Sequence
  Description of Artificial Sequence: Synthetic oligonucleotide
aaauaauuacuucaugagg

SEQ ID NO: 1041533 - RNA, 19 nt, Artificial Sequence
  Description of Artificial Sequence: Synthetic oligonucleotide
agagauaagaaccaguagg

SEQ ID NO: 1041534 - RNA, 19 nt, Artificial Sequence
  Description of Artificial Sequence: Synthetic oligonucleotide
aagaauaugacuugcagcu

SEQ ID NO: 1041535 - RNA, 19 nt, Artificial Sequence
  Description of Artificial Sequence: Synthetic oligonucleotide
aauaacucaaccaugaaga

SEQ ID NO: 1041536 - RNA, 19 nt, Artificial Sequence
  Description of Artificial Sequence: Synthetic oligonucleotide
uucaagucgaucuacaaag

SEQ ID NO: 1041537 - RNA, 19 nt, Artificial Sequence
  Description of Artificial Sequence: Synthetic oligonucleotide
acuuaugcaggauauacac

SEQ ID NO: 1041538 - RNA, 19 nt, Artificial Sequence
  Description of Artificial Sequence: Synthetic oligonucleotide
uuaauuguaggauauucag

SEQ ID NO: 1041539 - RNA, 19 nt, Artificial Sequence
  Description of Artificial Sequence: Synthetic oligonucleotide
uuaaggucgacacacagug

SEQ ID NO: 1041540 - RNA, 19 nt, Artificial Sequence
  Description of Artificial Sequence: Synthetic oligonucleotide
aacacaauaacucaaccau

SEQ ID NO: 1041541 - RNA, 19 nt, Artificial Sequence
  Description of Artificial Sequence: Synthetic oligonucleotide
ucuuguucaguuuauuggg

SEQ ID NO: 1041542 - RNA, 19 nt, Artificial Sequence
  Description of Artificial Sequence: Synthetic oligonucleotide
aaggucgacacacaguggg

SEQ ID NO: 1041543 - RNA, 19 nt, Artificial Sequence
  Description of Artificial Sequence: Synthetic oligonucleotide
uauucguagaauuagcuuc

SEQ ID NO: 1041544 - RNA, 19 nt, Artificial Sequence
  Description of Artificial Sequence: Synthetic oligonucleotide
agauuuaucacagaugcag

SEQ ID NO: 1041545 - RNA, 19 nt, Artificial Sequence
  Description of Artificial Sequence: Synthetic oligonucleotide
uccuauauaagauauucgu

SEQ ID NO: 1041546 - RNA, 19 nt, Artificial Sequence
  Description of Artificial Sequence: Synthetic oligonucleotide
aauuaugccaucagcugcc

SEQ ID NO: 1041547 - RNA, 19 nt, Artificial Sequence
  Description of Artificial Sequence: Synthetic oligonucleotide
auauucagagauuuaucac

SEQ ID NO: 1041548 - RNA, 19 nt, Artificial Sequence
  Description of Artificial Sequence: Synthetic oligonucleotide
aaauaauaagccuggugcu

SEQ ID NO: 1041549 - RNA, 19 nt, Artificial Sequence
  Description of Artificial Sequence: Synthetic oligonucleotide
uuuuaauccaguucaaguc

SEQ ID NO: 1041550 - RNA, 19 nt, Artificial Sequence
  Description of Artificial Sequence: Synthetic oligonucleotide
aagauauucguagaauuag

SEQ ID NO: 1041551 - RNA, 19 nt, Artificial Sequence
  Description of Artificial Sequence: Synthetic oligonucleotide
acaacacaauaacucaacc

SEQ ID NO: 1041552 - RNA, 19 nt, Artificial Sequence
  Description of Artificial Sequence: Synthetic oligonucleotide
aacaggaugacucguacga

SEQ ID NO: 1041553 - RNA, 19 nt, Artificial Sequence
  Description of Artificial Sequence: Synthetic oligonucleotide
agaccucuaacaucaaagc

SEQ ID NO: 1041554 - RNA, 19 nt, Artificial Sequence
  Description of Artificial Sequence: Synthetic oligonucleotide
ugacacaacgguaaaagcu

SEQ ID NO: 1041555 - RNA, 19 nt, Artificial Sequence
  Description of Artificial Sequence: Synthetic oligonucleotide
uaaauaagaggaauguauc

SEQ ID NO: 1041556 - RNA, 19 nt, Artificial Sequence
  Description of Artificial Sequence: Synthetic oligonucleotide
augccaaugacuuugaaau

SEQ ID NO: 1041557 - RNA, 19 nt, Artificial Sequence
  Description of Artificial Sequence: Synthetic oligonucleotide
aacucaaccaugaagauau

SEQ ID NO: 1041558 - RNA, 19 nt, Artificial Sequence
  Description of Artificial Sequence: Synthetic oligonucleotide
auauacacgcaugacaugg

SEQ ID NO: 1041559 - RNA, 19 nt, Artificial Sequence
  Description of Artificial Sequence: Synthetic oligonucleotide
ucuguccuagcuauggagg

SEQ ID NO: 1041560 - RNA, 19 nt, Artificial Sequence
  Description of Artificial Sequence: Synthetic oligonucleotide
acucguacgagccagaaga

SEQ ID NO: 1041561 - RNA, 19 nt, Artificial Sequence
  Description of Artificial Sequence: Synthetic oligonucleotide
uuauuaagcuguaauguuc

SEQ ID NO: 1041562 - RNA, 19 nt, Artificial Sequence
  Description of Artificial Sequence: Synthetic oligonucleotide
auuuauuaagcuguaaugu

SEQ ID NO: 1041563 - RNA, 19 nt, Artificial Sequence
  Description of Artificial Sequence: Synthetic oligonucleotide
uuccuauauaagauauucg

SEQ ID NO: 1041564 - RNA, 19 nt, Artificial Sequence
  Description of Artificial Sequence: Synthetic oligonucleotide
uuaauuuaauuguaggaua

SEQ ID NO: 1041565 - RNA, 19 nt, Artificial Sequence
  Description of Artificial Sequence: Synthetic oligonucleotide
ucaugagggauuuaacugc

SEQ ID NO: 1041566 - RNA, 19 nt, Artificial Sequence
  Description of Artificial Sequence: Synthetic oligonucleotide
uauauaagauauucguaga

SEQ ID NO: 1041567 - RNA, 19 nt, Artificial Sequence
  Description of Artificial Sequence: Synthetic oligonucleotide
cauauagucuccaugaaca

SEQ ID NO: 1041568 - RNA, 19 nt, Artificial Sequence
  Description of Artificial Sequence: Synthetic oligonucleotide
aagaccucuaacaucaaag

SEQ ID NO: 1041569 - RNA, 19 nt, Artificial Sequence
  Description of Artificial Sequence: Synthetic oligonucleotide
gauaagaaccaguaggcca

SEQ ID NO: 1041570 - RNA, 19 nt, Artificial Sequence
  Description of Artificial Sequence: Synthetic oligonucleotide
ucagagauuuaucacagau

SEQ ID NO: 1041571 - RNA, 19 nt, Artificial Sequence
  Description of Artificial Sequence: Synthetic oligonucleotide
gacaaugcaaacgaugugc

SEQ ID NO: 1041572 - RNA, 19 nt, Artificial Sequence
  Description of Artificial Sequence: Synthetic oligonucleotide
ucaauuaugccaucagcug

SEQ ID NO: 1041573 - RNA, 19 nt, Artificial Sequence
  Description of Artificial Sequence: Synthetic oligonucleotide
aagagcuccauccaaacuu

SEQ ID NO: 1041574 - RNA, 19 nt, Artificial Sequence
  Description of Artificial Sequence: Synthetic oligonucleotide
augaagauaucauugguaa

SEQ ID NO: 1041575 - RNA, 19 nt, Artificial Sequence
  Description of Artificial Sequence: Synthetic oligonucleotide
agugauuaauaaauaagag

SEQ ID NO: 1041576 - RNA, 19 nt, Artificial Sequence
  Description of Artificial Sequence: Synthetic oligonucleotide
uguucaguuuauugggagg

SEQ ID NO: 1041577 - RNA, 19 nt, Artificial Sequence
  Description of Artificial Sequence: Synthetic oligonucleotide
caauaacucaaccaugaag

SEQ ID NO: 1041578 - RNA, 19 nt, Artificial Sequence
  Description of Artificial Sequence: Synthetic oligonucleotide
gaagcggccaaacaccagg

SEQ ID NO: 1041579 - RNA, 19 nt, Artificial Sequence
  Description of Artificial Sequence: Synthetic oligonucleotide
uaagguauaugcacgugca

SEQ ID NO: 1041580 - RNA, 19 nt, Artificial Sequence
  Description of Artificial Sequence: Synthetic oligonucleotide
gaagcugaaggugaaaccc

SEQ ID NO: 1041581 - RNA, 19 nt, Artificial Sequence
  Description of Artificial Sequence: Synthetic oligonucleotide
aguuccgcggccccgagcc

SEQ ID NO: 1041582 - RNA, 19 nt, Artificial Sequence
  Description of Artificial Sequence: Synthetic oligonucleotide
acauuuauuaagcuguaau

SEQ ID NO: 1041583 - RNA, 19 nt, Artificial Sequence
  Description of Artificial Sequence: Synthetic oligonucleotide
ugaaggugaaacccaaugu

SEQ ID NO: 1041584 - RNA, 19 nt, Artificial Sequence
  Description of Artificial Sequence: Synthetic oligonucleotide
aaagccagugauuaauaaa

SEQ ID NO: 1041585 - RNA, 19 nt, Artificial Sequence
  Description of Artificial Sequence: Synthetic oligonucleotide
gagauaagaaccaguaggc

SEQ ID NO: 1041586 - RNA, 19 nt, Artificial Sequence
  Description of Artificial Sequence: Synthetic oligonucleotide
caacuaagguauaugcacg

SEQ ID NO: 1041587 - RNA, 19 nt, Artificial Sequence
  Description of Artificial Sequence: Synthetic oligonucleotide
cuaagguauaugcacgugc

SEQ ID NO: 1041588 - RNA, 19 nt, Artificial Sequence
  Description of Artificial Sequence: Synthetic oligonucleotide
auaagauauucguagaauu

SEQ ID NO: 1041589 - RNA, 19 nt, Artificial Sequence
  Description of Artificial Sequence: Synthetic oligonucleotide
auguugagcaaucucaccu

SEQ ID NO: 1041590 - RNA, 19 nt, Artificial Sequence
  Description of Artificial Sequence: Synthetic oligonucleotide
guauccaucacuuugcaaa

SEQ ID NO: 1041591 - RNA, 19 nt, Artificial Sequence
  Description of Artificial Sequence: Synthetic oligonucleotide
uguugaacuaaauacuaua

SEQ ID NO: 1041592 - RNA, 19 nt, Artificial Sequence
  Description of Artificial Sequence: Synthetic oligonucleotide
uuuauuaagcuguaauguu

SEQ ID NO: 1041593 - RNA, 19 nt, Artificial Sequence
  Description of Artificial Sequence: Synthetic oligonucleotide
ucuucugacguuacugcag

SEQ ID NO: 1041594 - RNA, 19 nt, Artificial Sequence
  Description of Artificial Sequence: Synthetic oligonucleotide
ugcacauuagacacuguca

SEQ ID NO: 1041595 - RNA, 19 nt, Artificial Sequence
  Description of Artificial Sequence: Synthetic oligonucleotide
ggaaauaauuacuucauga

SEQ ID NO: 1041596 - RNA, 19 nt, Artificial Sequence
  Description of Artificial Sequence: Synthetic oligonucleotide
caauuaugccaucagcugc

SEQ ID NO: 1041597 - RNA, 19 nt, Artificial Sequence
  Description of Artificial Sequence: Synthetic oligonucleotide
aacccaaugucagagauaa

SEQ ID NO: 1041598 - RNA, 19 nt, Artificial Sequence
  Description of Artificial Sequence: Synthetic oligonucleotide
uuuauugggagggguaggg

SEQ ID NO: 1041599 - RNA, 19 nt, Artificial Sequence
  Description of Artificial Sequence: Synthetic oligonucleotide
acugacacaacgguaaaag

SEQ ID NO: 1041600 - RNA, 19 nt, Artificial Sequence
  Description of Artificial Sequence: Synthetic oligonucleotide
aggauauacacgcaugaca

SEQ ID NO: 1041601 - RNA, 19 nt, Artificial Sequence
  Description of Artificial Sequence: Synthetic oligonucleotide
aacuaagguauaugcacgu

SEQ ID NO: 1041602 - RNA, 19 nt, Artificial Sequence
  Description of Artificial Sequence: Synthetic oligonucleotide
agauauucguagaauuagc

SEQ ID NO: 1041603 - RNA, 19 nt, Artificial Sequence
  Description of Artificial Sequence: Synthetic oligonucleotide
ucuauuguguugaacuaaa

SEQ ID NO: 1041604 - RNA, 19 nt, Artificial Sequence
  Description of Artificial Sequence: Synthetic oligonucleotide
auucguagaauuagcuucc

SEQ ID NO: 1041605 - RNA, 19 nt, Artificial Sequence
  Description of Artificial Sequence: Synthetic oligonucleotide
gaaguacugugacagguug

SEQ ID NO: 1041606 - RNA, 19 nt, Artificial Sequence
  Description of Artificial Sequence: Synthetic oligonucleotide
gaagauaucauugguaaaa

SEQ ID NO: 1041607 - RNA, 19 nt, Artificial Sequence
  Description of Artificial Sequence: Synthetic oligonucleotide
agauaagaaccaguaggcc

SEQ ID NO: 1041608 - RNA, 19 nt, Artificial Sequence
  Description of Artificial Sequence: Synthetic oligonucleotide
cuuaugcaggauauacacg

SEQ ID NO: 1041609 - RNA, 19 nt, Artificial Sequence
  Description of Artificial Sequence: Synthetic oligonucleotide
ugcuucuugugccaccagg

SEQ ID NO: 1041610 - RNA, 19 nt, Artificial Sequence
  Description of Artificial Sequence: Synthetic oligonucleotide
acagaugcagacaggaaac

SEQ ID NO: 1041611 - RNA, 19 nt, Artificial Sequence
  Description of Artificial Sequence: Synthetic oligonucleotide
auaauuacuucaugaggga

SEQ ID NO: 1041612 - RNA, 19 nt, Artificial Sequence
  Description of Artificial Sequence: Synthetic oligonucleotide
uucuugugccaccagguca

SEQ ID NO: 1041613 - RNA, 19 nt, Artificial Sequence
  Description of Artificial Sequence: Synthetic oligonucleotide
uauguucacagaauggcuu

SEQ ID NO: 1041614 - RNA, 19 nt, Artificial Sequence
  Description of Artificial Sequence: Synthetic oligonucleotide
auaagaaccaguaggccag

SEQ ID NO: 1041615 - RNA, 19 nt, Artificial Sequence
  Description of Artificial Sequence: Synthetic oligonucleotide
uuaagcugaggcacaacac

SEQ ID NO: 1041616 - RNA, 19 nt, Artificial Sequence
  Description of Artificial Sequence: Synthetic oligonucleotide
agucgaucuacaaagaccu

SEQ ID NO: 1041617 - RNA, 19 nt, Artificial Sequence
  Description of Artificial Sequence: Synthetic oligonucleotide
cagagagucaauuaugcca

SEQ ID NO: 1041618 - RNA, 19 nt, Artificial Sequence
  Description of Artificial Sequence: Synthetic oligonucleotide
uacuuaugcaggauauaca

SEQ ID NO: 1041619 - RNA, 19 nt, Artificial Sequence
  Description of Artificial Sequence: Synthetic oligonucleotide
ugcagcuaagaccagggaa

SEQ ID NO: 1041620 - RNA, 19 nt, Artificial Sequence
  Description of Artificial Sequence: Synthetic oligonucleotide
gaacaggaugacucguacg

SEQ ID NO: 1041621 - RNA, 19 nt, Artificial Sequence
  Description of Artificial Sequence: Synthetic oligonucleotide
gaaacugacacaacgguaa

SEQ ID NO: 1041622 - RNA, 19 nt, Artificial Sequence
  Description of Artificial Sequence: Synthetic oligonucleotide
auaagaggaauguauccau

SEQ ID NO: 1041623 - RNA, 19 nt, Artificial Sequence
  Description of Artificial Sequence: Synthetic oligonucleotide
uugucuguccuagcuaugg

SEQ ID NO: 1041624 - RNA, 19 nt, Artificial Sequence
  Description of Artificial Sequence: Synthetic oligonucleotide
uguugagcaaucucaccug

SEQ ID NO: 1041625 - RNA, 19 nt, Artificial Sequence
  Description of Artificial Sequence: Synthetic oligonucleotide
cuggacaguaacuucugag

SEQ ID NO: 1041626 - RNA, 19 nt, Artificial Sequence
  Description of Artificial Sequence: Synthetic oligonucleotide
ugcaggauauacacgcaug

SEQ ID NO: 1041627 - RNA, 19 nt, Artificial Sequence
  Description of Artificial Sequence: Synthetic oligonucleotide
auuaagcuguaauguucac

SEQ ID NO: 1041628 - RNA, 19 nt, Artificial Sequence
  Description of Artificial Sequence: Synthetic oligonucleotide
aggaaacugacacaacggu

SEQ ID NO: 1041629 - RNA, 19 nt, Artificial Sequence
  Description of Artificial Sequence: Synthetic oligonucleotide
cuucugacguuacugcagg

SEQ ID NO: 1041630 - RNA, 19 nt, Artificial Sequence
  Description of Artificial Sequence: Synthetic oligonucleotide
aguuuacugaugccaauga

SEQ ID NO: 1041631 - RNA, 19 nt, Artificial Sequence
  Description of Artificial Sequence: Synthetic oligonucleotide
cagggaaauaauuacuuca

SEQ ID NO: 1041632 - RNA, 19 nt, Artificial Sequence
  Description of Artificial Sequence: Synthetic oligonucleotide
ccagugauuaauaaauaag

SEQ ID NO: 1041633 - RNA, 19 nt, Artificial Sequence
  Description of Artificial Sequence: Synthetic oligonucleotide
accucuaacaucaaagcca

SEQ ID NO: 1041634 - RNA, 19 nt, Artificial Sequence
  Description of Artificial Sequence: Synthetic oligonucleotide
aggaugacucguacgagcc

SEQ ID NO: 1041635 - RNA, 19 nt, Artificial Sequence
  Description of Artificial Sequence: Synthetic oligonucleotide
gaugacucguacgagccag

SEQ ID NO: 1041636 - RNA, 19 nt, Artificial Sequence
  Description of Artificial Sequence: Synthetic oligonucleotide
aaacgaugugcuucuugug

SEQ ID NO: 1041637 - RNA, 19 nt, Artificial Sequence
  Description of Artificial Sequence: Synthetic oligonucleotide
agguuggacacgucaaguc

SEQ ID NO: 1041638 - RNA, 19 nt, Artificial Sequence
  Description of Artificial Sequence: Synthetic oligonucleotide
gaugccaaugacuuugaaa

SEQ ID NO: 1041639 - RNA, 19 nt, Artificial Sequence
  Description of Artificial Sequence: Synthetic oligonucleotide
uuaagcuguaauguucaca

SEQ ID NO: 1041640 - RNA, 19 nt, Artificial Sequence
  Description of Artificial Sequence: Synthetic oligonucleotide
gaggcagagcgguagcacg

SEQ ID NO: 1041641 - RNA, 19 nt, Artificial Sequence
  Description of Artificial Sequence: Synthetic oligonucleotide
ccaacuaagguauaugcac

SEQ ID NO: 1041642 - RNA, 19 nt, Artificial Sequence
  Description of Artificial Sequence: Synthetic oligonucleotide
acacgucaaguccaaggac

SEQ ID NO: 1041643 - RNA, 19 nt, Artificial Sequence
  Description of Artificial Sequence: Synthetic oligonucleotide
ucgccaguagcccaugggc

SEQ ID NO: 1041644 - RNA, 19 nt, Artificial Sequence
  Description of Artificial Sequence: Synthetic oligonucleotide
cuuaagcugaggcacaaca

SEQ ID NO: 1041645 - RNA, 19 nt, Artificial Sequence
  Description of Artificial Sequence: Synthetic oligonucleotide
aagaccagggaaauaauua

SEQ ID NO: 1041646 - RNA, 19 nt, Artificial Sequence
  Description of Artificial Sequence: Synthetic oligonucleotide
ucaagucgaucuacaaaga

SEQ ID NO: 1041647 - RNA, 19 nt, Artificial Sequence
  Description of Artificial Sequence: Synthetic oligonucleotide
auauucguagaauuagcuu

SEQ ID NO: 1041648 - RNA, 19 nt, Artificial Sequence
  Description of Artificial Sequence: Synthetic oligonucleotide
uauaugcacgugcaugcgu

SEQ ID NO: 1041649 - RNA, 19 nt, Artificial Sequence
  Description of Artificial Sequence: Synthetic oligonucleotide
gauauacacgcaugacaug

SEQ ID NO: 1041650 - RNA, 19 nt, Artificial Sequence
  Description of Artificial Sequence: Synthetic oligonucleotide
aauaauaagccuggugcuu

SEQ ID NO: 1041651 - RNA, 19 nt, Artificial Sequence
  Description of Artificial Sequence: Synthetic oligonucleotide
auacacgcaugacauggag

SEQ ID NO: 1041652 - RNA, 19 nt, Artificial Sequence
  Description of Artificial Sequence: Synthetic oligonucleotide
agaauuagcuucccaacua

SEQ ID NO: 1041653 - RNA, 19 nt, Artificial Sequence
  Description of Artificial Sequence: Synthetic oligonucleotide
aauuacuucaugagggauu

SEQ ID NO: 1041654 - RNA, 19 nt, Artificial Sequence
  Description of Artificial Sequence: Synthetic oligonucleotide
caacacaauaacucaacca

SEQ ID NO: 1041655 - RNA, 19 nt, Artificial Sequence
  Description of Artificial Sequence: Synthetic oligonucleotide
cuguccuagcuauggaggg

SEQ ID NO: 1041656 - RNA, 19 nt, Artificial Sequence
  Description of Artificial Sequence: Synthetic oligonucleotide
aggauauucagagauuuau

SEQ ID NO: 1041657 - RNA, 19 nt, Artificial Sequence
  Description of Artificial Sequence: Synthetic oligonucleotide
cugacacaacgguaaaagc

SEQ ID NO: 1041658 - RNA, 19 nt, Artificial Sequence
  Description of Artificial Sequence: Synthetic oligonucleotide
gauuaauaaauaagaggaa

SEQ ID NO: 1041659 - RNA, 19 nt, Artificial Sequence
  Description of Artificial Sequence: Synthetic oligonucleotide
caggaugacucguacgagc

SEQ ID NO: 1041660 - RNA, 19 nt, Artificial Sequence
  Description of Artificial Sequence: Synthetic oligonucleotide
aaguacugugacagguugg

SEQ ID NO: 1041661 - RNA, 19 nt, Artificial Sequence
  Description of Artificial Sequence: Synthetic oligonucleotide
auguucacaauguuuuaau

SEQ ID NO: 1041662 - RNA, 19 nt, Artificial Sequence
  Description of Artificial Sequence: Synthetic oligonucleotide
ucaaagccagugauuaaua

SEQ ID NO: 1041663 - RNA, 19 nt, Artificial Sequence
  Description of Artificial Sequence: Synthetic oligonucleotide
gucuguccuagcuauggag

SEQ ID NO: 1041664 - RNA, 19 nt, Artificial Sequence
  Description of Artificial Sequence: Synthetic oligonucleotide
ugaagauaucauugguaaa

SEQ ID NO: 1041665 - RNA, 19 nt, Artificial Sequence
  Description of Artificial Sequence: Synthetic oligonucleotide
agguauaugcacgugcaug

SEQ ID NO: 1041666 - RNA, 19 nt, Artificial Sequence
  Description of Artificial Sequence: Synthetic oligonucleotide
uauccaucacuuugcaaaa

SEQ ID NO: 1041667 - RNA, 19 nt, Artificial Sequence
  Description of Artificial Sequence: Synthetic oligonucleotide
uauacacgcaugacaugga

SEQ ID NO: 1041668 - RNA, 19 nt, Artificial Sequence
  Description of Artificial Sequence: Synthetic oligonucleotide
ugggcugaaguuuacugau

SEQ ID NO: 1041669 - RNA, 19 nt, Artificial Sequence
  Description of Artificial Sequence: Synthetic oligonucleotide
auuguaggauauucagaga

SEQ ID NO: 1041670 - RNA, 19 nt, Artificial Sequence
  Description of Artificial Sequence: Synthetic oligonucleotide
cacccucauacuuaugcag

SEQ ID NO: 1041671 - RNA, 19 nt, Artificial Sequence
  Description of Artificial Sequence: Synthetic oligonucleotide
cagagauaagaaccaguag

SEQ ID NO: 1041672 - RNA, 19 nt, Artificial Sequence
  Description of Artificial Sequence: Synthetic oligonucleotide
uaacuucugagccgcgcgc

SEQ ID NO: 1041673 - RNA, 19 nt, Artificial Sequence
  Description of Artificial Sequence: Synthetic oligonucleotide
guacgagccagaagaagcg

SEQ ID NO: 1041674 - RNA, 19 nt, Artificial Sequence
  Description of Artificial Sequence: Synthetic oligonucleotide
ggagggaucaccaaagaac

SEQ ID NO: 1041675 - RNA, 19 nt, Artificial Sequence
  Description of Artificial Sequence: Synthetic oligonucleotide
caaugacuuugaaaucagc

SEQ ID NO: 1041676 - RNA, 19 nt, Artificial Sequence
  Description of Artificial Sequence: Synthetic oligonucleotide
ugucagagauaagaaccag

SEQ ID NO: 1041677 - RNA, 19 nt, Artificial Sequence
  Description of Artificial Sequence: Synthetic oligonucleotide
uggagggaucaccaaagaa

SEQ ID NO: 1041678 - RNA, 19 nt, Artificial Sequence
  Description of Artificial Sequence: Synthetic oligonucleotide
acccuguugagacggaugu

SEQ ID NO: 1041679 - RNA, 19 nt, Artificial Sequence
  Description of Artificial Sequence: Synthetic oligonucleotide
auaacucaaccaugaagau

SEQ ID NO: 1041680 - RNA, 19 nt, Artificial Sequence
  Description of Artificial Sequence: Synthetic oligonucleotide
ucuuguccgcaguuccgcg

SEQ ID NO: 1041681 - RNA, 19 nt, Artificial Sequence
  Description of Artificial Sequence: Synthetic oligonucleotide
gauuuaucacagaugcaga

SEQ ID NO: 1041682 - RNA, 19 nt, Artificial Sequence
  Description of Artificial Sequence: Synthetic oligonucleotide
gauauucguagaauuagcu

SEQ ID NO: 1041683 - RNA, 19 nt, Artificial Sequence
  Description of Artificial Sequence: Synthetic oligonucleotide
gguuggacacgucaagucc

SEQ ID NO: 1041684 - RNA, 19 nt, Artificial Sequence
  Description of Artificial Sequence: Synthetic oligonucleotide
acgguaaaagcuugaaauu

SEQ ID NO: 1041685 - RNA, 19 nt, Artificial Sequence
  Description of Artificial Sequence: Synthetic oligonucleotide
gaucuacauaaguucuuuc

SEQ ID NO: 1041686 - RNA, 19 nt, Artificial Sequence
  Description of Artificial Sequence: Synthetic oligonucleotide
caggugacaaugcaaacga

SEQ ID NO: 1041687 - RNA, 19 nt, Artificial Sequence
  Description of Artificial Sequence: Synthetic oligonucleotide
aaacugacacaacgguaaa

SEQ ID NO: 1041688 - RNA, 19 nt, Artificial Sequence
  Description of Artificial Sequence: Synthetic oligonucleotide
uauugggagggguaggguu

SEQ ID NO: 1041689 - RNA, 19 nt, Artificial Sequence
  Description of Artificial Sequence: Synthetic oligonucleotide
cugcacauuagacacuguc

SEQ ID NO: 1041690 - RNA, 19 nt, Artificial Sequence
  Description of Artificial Sequence: Synthetic oligonucleotide
ugcacgaagcgcucaguca

SEQ ID NO: 1041691 - RNA, 19 nt, Artificial Sequence
  Description of Artificial Sequence: Synthetic oligonucleotide
ccuauguucacagaauggc

SEQ ID NO: 1041692 - RNA, 19 nt, Artificial Sequence
  Description of Artificial Sequence: Synthetic oligonucleotide
gcacauuagacacugucac

SEQ ID NO: 1041693 - RNA, 19 nt, Artificial Sequence
  Description of Artificial Sequence: Synthetic oligonucleotide
aguacugugacagguugga

SEQ ID NO: 1041694 - RNA, 19 nt, Artificial Sequence
  Description of Artificial Sequence: Synthetic oligonucleotide
acccucauacuuaugcagg

SEQ ID NO: 1041695 - RNA, 19 nt, Artificial Sequence
  Description of Artificial Sequence: Synthetic oligonucleotide
aguucaagucgaucuacaa

SEQ ID NO: 1041696 - RNA, 19 nt, Artificial Sequence
  Description of Artificial Sequence: Synthetic oligonucleotide
auagccauccaggugacaa

SEQ ID NO: 1041697 - RNA, 19 nt, Artificial Sequence
  Description of Artificial Sequence: Synthetic oligonucleotide
uccauauagucuccaugaa

SEQ ID NO: 1041698 - RNA, 19 nt, Artificial Sequence
  Description of Artificial Sequence: Synthetic oligonucleotide
uaauuacuucaugagggau

SEQ ID NO: 1041699 - RNA, 19 nt, Artificial Sequence
  Description of Artificial Sequence: Synthetic oligonucleotide
auuacuucaugagggauuu

SEQ ID NO: 1041700 - RNA, 19 nt, Artificial Sequence
  Description of Artificial Sequence: Synthetic oligonucleotide
aagguauaugcacgugcau

SEQ ID NO: 1041701 - RNA, 19 nt, Artificial Sequence
  Description of Artificial Sequence: Synthetic oligonucleotide
aggugaaacccaaugucag

SEQ ID NO: 1041702 - RNA, 19 nt, Artificial Sequence
  Description of Artificial Sequence: Synthetic oligonucleotide
aaccaguaggccaggagga

SEQ ID NO: 1041703 - RNA, 19 nt, Artificial Sequence
  Description of Artificial Sequence: Synthetic oligonucleotide
uuguccgcaguuccgcggc

SEQ ID NO: 1041704 - RNA, 19 nt, Artificial Sequence
  Description of Artificial Sequence: Synthetic oligonucleotide
cuuguccgcaguuccgcgg

SEQ ID NO: 1041705 - RNA, 19 nt, Artificial Sequence
  Description of Artificial Sequence: Synthetic oligonucleotide
cuucaugagggauuuaacu

SEQ ID NO: 1041706 - RNA, 19 nt, Artificial Sequence
  Description of Artificial Sequence: Synthetic oligonucleotide
guuuauugggagggguagg

SEQ ID NO: 1041707 - RNA, 19 nt, Artificial Sequence
  Description of Artificial Sequence: Synthetic oligonucleotide
acguuguccucuccgaaca

SEQ ID NO: 1041708 - RNA, 19 nt, Artificial Sequence
  Description of Artificial Sequence: Synthetic oligonucleotide
gucaauuaugccaucagcu

SEQ ID NO: 1041709 - RNA, 19 nt, Artificial Sequence
  Description of Artificial Sequence: Synthetic oligonucleotide
ucguagaauuagcuuccca

SEQ ID NO: 1041710 - RNA, 19 nt, Artificial Sequence
  Description of Artificial Sequence: Synthetic oligonucleotide
agagcgguagcacggugug

SEQ ID NO: 1041711 - RNA, 19 nt, Artificial Sequence
  Description of Artificial Sequence: Synthetic oligonucleotide
uccauccaaacuuuccaua

SEQ ID NO: 1041712 - RNA, 19 nt, Artificial Sequence
  Description of Artificial Sequence: Synthetic oligonucleotide
uccgaacaggcuguucacg

SEQ ID NO: 1041713 - RNA, 19 nt, Artificial Sequence
  Description of Artificial Sequence: Synthetic oligonucleotide
auaugcacgugcaugcgug

SEQ ID NO: 1041714 - RNA, 19 nt, Artificial Sequence
  Description of Artificial Sequence: Synthetic oligonucleotide
agagucaauuaugccauca

SEQ ID NO: 1041715 - RNA, 19 nt, Artificial Sequence
  Description of Artificial Sequence: Synthetic oligonucleotide
gaaacccaaugucagagau

SEQ ID NO: 1041716 - RNA, 19 nt, Artificial Sequence
  Description of Artificial Sequence: Synthetic oligonucleotide
uccaguucaagucgaucua

SEQ ID NO: 1041717 - RNA, 19 nt, Artificial Sequence
  Description of Artificial Sequence: Synthetic oligonucleotide
uguauccaucacuuugcaa

SEQ ID NO: 1041718 - RNA, 19 nt, Artificial Sequence
  Description of Artificial Sequence: Synthetic oligonucleotide
gugggauuguuggacacag

SEQ ID NO: 1041719 - RNA, 19 nt, Artificial Sequence
  Description of Artificial Sequence: Synthetic oligonucleotide
uucagagauuuaucacaga

SEQ ID NO: 1041720 - RNA, 19 nt, Artificial Sequence
  Description of Artificial Sequence: Synthetic oligonucleotide
gguuuguuggggcugccag

SEQ ID NO: 1041721 - RNA, 19 nt, Artificial Sequence
  Description of Artificial Sequence: Synthetic oligonucleotide
ugucuguccuagcuaugga

SEQ ID NO: 1041722 - RNA, 19 nt, Artificial Sequence
  Description of Artificial Sequence: Synthetic oligonucleotide
acgaagcgcucagucagcc

SEQ ID NO: 1041723 - RNA, 19 nt, Artificial Sequence
  Description of Artificial Sequence: Synthetic oligonucleotide
cguacgagccagaagaagc

SEQ ID NO: 1041724 - RNA, 19 nt, Artificial Sequence
  Description of Artificial Sequence: Synthetic oligonucleotide
uaugcacgugcaugcgugc

SEQ ID NO: 1041725 - RNA, 19 nt, Artificial Sequence
  Description of Artificial Sequence: Synthetic oligonucleotide
uccucuccgaacaggcugu

SEQ ID NO: 1041726 - RNA, 19 nt, Artificial Sequence
  Description of Artificial Sequence: Synthetic oligonucleotide
gcacgaagcgcucagucag

SEQ ID NO: 1041727 - RNA, 19 nt, Artificial Sequence
  Description of Artificial Sequence: Synthetic oligonucleotide
agggaaauaauuacuucau

SEQ ID NO: 1041728 - RNA, 19 nt, Artificial Sequence
  Description of Artificial Sequence: Synthetic oligonucleotide
uugagcaaucucaccuggu

SEQ ID NO: 1041729 - RNA, 19 nt, Artificial Sequence
  Description of Artificial Sequence: Synthetic oligonucleotide
caugagggauuuaacugca

SEQ ID NO: 1041730 - RNA, 19 nt, Artificial Sequence
  Description of Artificial Sequence: Synthetic oligonucleotide
gacucguacgagccagaag

SEQ ID NO: 1041731 - RNA, 19 nt, Artificial Sequence
  Description of Artificial Sequence: Synthetic oligonucleotide
ucguacgagccagaagaag

SEQ ID NO: 1041732 - RNA, 19 nt, Artificial Sequence
  Description of Artificial Sequence: Synthetic oligonucleotide
uaggauauucagagauuua

SEQ ID NO: 1041733 - RNA, 19 nt, Artificial Sequence
  Description of Artificial Sequence: Synthetic oligonucleotide
aagcugaaggugaaaccca

SEQ ID NO: 1041734 - RNA, 19 nt, Artificial Sequence
  Description of Artificial Sequence: Synthetic oligonucleotide
auguauccaucacuuugca

SEQ ID NO: 1041735 - RNA, 19 nt, Artificial Sequence
  Description of Artificial Sequence: Synthetic oligonucleotide
ggauuguuggacacagagg

SEQ ID NO: 1041736 - RNA, 19 nt, Artificial Sequence
  Description of Artificial Sequence: Synthetic oligonucleotide
gugggaaauaccaggugug

SEQ ID NO: 1041737 - RNA, 19 nt, Artificial Sequence
  Description of Artificial Sequence: Synthetic oligonucleotide
augcaggauauacacgcau

SEQ ID NO: 1041738 - RNA, 19 nt, Artificial Sequence
  Description of Artificial Sequence: Synthetic oligonucleotide
uagcuauggagggaucacc

SEQ ID NO: 1041739 - RNA, 19 nt, Artificial Sequence
  Description of Artificial Sequence: Synthetic oligonucleotide
gcuaagaccagggaaauaa

SEQ ID NO: 1041740 - RNA, 19 nt, Artificial Sequence
  Description of Artificial Sequence: Synthetic oligonucleotide
uccaggugacaaugcaaac

SEQ ID NO: 1041741 - RNA, 19 nt, Artificial Sequence
  Description of Artificial Sequence: Synthetic oligonucleotide
gugggcugaaguuuacuga

SEQ ID NO: 1041742 - RNA, 19 nt, Artificial Sequence
  Description of Artificial Sequence: Synthetic oligonucleotide
gcuguucacgcucugcgag

SEQ ID NO: 1041743 - RNA, 19 nt, Artificial Sequence
  Description of Artificial Sequence: Synthetic oligonucleotide
acuaagguauaugcacgug

SEQ ID NO: 1041744 - RNA, 19 nt, Artificial Sequence
  Description of Artificial Sequence: Synthetic oligonucleotide
cucgccaguagcccauggg

SEQ ID NO: 1041745 - RNA, 19 nt, Artificial Sequence
  Description of Artificial Sequence: Synthetic oligonucleotide
agcgguagcacggugugcu

SEQ ID NO: 1041746 - RNA, 19 nt, Artificial Sequence
  Description of Artificial Sequence: Synthetic oligonucleotide
ugccaaugacuuugaaauc

SEQ ID NO: 1041747 - RNA, 19 nt, Artificial Sequence
  Description of Artificial Sequence: Synthetic oligonucleotide
ccaggugacaaugcaaacg

SEQ ID NO: 1041748 - RNA, 19 nt, Artificial Sequence
  Description of Artificial Sequence: Synthetic oligonucleotide
guugaacuaaauacuauau

SEQ ID NO: 1041749 - RNA, 19 nt, Artificial Sequence
  Description of Artificial Sequence: Synthetic oligonucleotide
aacugacacaacgguaaaa

SEQ ID NO: 1041750 - RNA, 19 nt, Artificial Sequence
  Description of Artificial Sequence: Synthetic oligonucleotide
cccuauguucacagaaugg

SEQ ID NO: 1041751 - RNA, 19 nt, Artificial Sequence
  Description of Artificial Sequence: Synthetic oligonucleotide
agcuucccaacuaagguau

SEQ ID NO: 1041752 - RNA, 19 nt, Artificial Sequence
  Description of Artificial Sequence: Synthetic oligonucleotide
aaauaccagguguggcauu

SEQ ID NO: 1041753 - RNA, 19 nt, Artificial Sequence
  Description of Artificial Sequence: Synthetic oligonucleotide
aacuucugagccgcgcgca

SEQ ID NO: 1041754 - RNA, 19 nt, Artificial Sequence
  Description of Artificial Sequence: Synthetic oligonucleotide
accagggaaauaauuacuu

SEQ ID NO: 1041755 - RNA, 19 nt, Artificial Sequence
  Description of Artificial Sequence: Synthetic oligonucleotide
ugcacgugcaugcgugcac

SEQ ID NO: 1041756 - RNA, 19 nt, Artificial Sequence
  Description of Artificial Sequence: Synthetic oligonucleotide
ccauauagucuccaugaac

SEQ ID NO: 1041757 - RNA, 19 nt, Artificial Sequence
  Description of Artificial Sequence: Synthetic oligonucleotide
ugagccgcgcgcacguugu

SEQ ID NO: 1041758 - RNA, 19 nt, Artificial Sequence
  Description of Artificial Sequence: Synthetic oligonucleotide
uuggacacgucaaguccaa

SEQ ID NO: 1041759 - RNA, 19 nt, Artificial Sequence
  Description of Artificial Sequence: Synthetic oligonucleotide
cuagcuauggagggaucac

SEQ ID NO: 1041760 - RNA, 19 nt, Artificial Sequence
  Description of Artificial Sequence: Synthetic oligonucleotide
uucgaguacaggguuucuc

SEQ ID NO: 1041761 - RNA, 19 nt, Artificial Sequence
  Description of Artificial Sequence: Synthetic oligonucleotide
caugggcccugucaugaag

SEQ ID NO: 1041762 - RNA, 19 nt, Artificial Sequence
  Description of Artificial Sequence: Synthetic oligonucleotide
agcuauggagggaucacca

SEQ ID NO: 1041763 - RNA, 19 nt, Artificial Sequence
  Description of Artificial Sequence: Synthetic oligonucleotide
gccagugauuaauaaauaa

SEQ ID NO: 1041764 - RNA, 19 nt, Artificial Sequence
  Description of Artificial Sequence: Synthetic oligonucleotide
acaggaugacucguacgag

SEQ ID NO: 1041765 - RNA, 19 nt, Artificial Sequence
  Description of Artificial Sequence: Synthetic oligonucleotide
cacgucaaguccaaggacu

SEQ ID NO: 1041766 - RNA, 19 nt, Artificial Sequence
  Description of Artificial Sequence: Synthetic oligonucleotide
agacggauguugagcaauc

SEQ ID NO: 1041767 - RNA, 19 nt, Artificial Sequence
  Description of Artificial Sequence: Synthetic oligonucleotide
acaacgguaaaagcuugaa

SEQ ID NO: 1041768 - RNA, 19 nt, Artificial Sequence
  Description of Artificial Sequence: Synthetic oligonucleotide
caggauauacacgcaugac

SEQ ID NO: 1041769 - RNA, 19 nt, Artificial Sequence
  Description of Artificial Sequence: Synthetic oligonucleotide
ggccuuaaggucgacacac

SEQ ID NO: 1041770 - RNA, 19 nt, Artificial Sequence
  Description of Artificial Sequence: Synthetic oligonucleotide
uguccuagcuauggaggga

SEQ ID NO: 1041771 - RNA, 19 nt, Artificial Sequence
  Description of Artificial Sequence: Synthetic oligonucleotide
acgugcaugcgugcacacc

SEQ ID NO: 1041772 - RNA, 19 nt, Artificial Sequence
  Description of Artificial Sequence: Synthetic oligonucleotide
gcaggauauacacgcauga

SEQ ID NO: 1041773 - RNA, 19 nt, Artificial Sequence
  Description of Artificial Sequence: Synthetic oligonucleotide
auggguucuccuugucugu

SEQ ID NO: 1041774 - RNA, 19 nt, Artificial Sequence
  Description of Artificial Sequence: Synthetic oligonucleotide
cuugucuguccuagcuaug

SEQ ID NO: 1041775 - RNA, 19 nt, Artificial Sequence
  Description of Artificial Sequence: Synthetic oligonucleotide
cagugggaaauaccaggug

SEQ ID NO: 1041776 - RNA, 19 nt, Artificial Sequence
  Description of Artificial Sequence: Synthetic oligonucleotide
cacccuguugagacggaug

SEQ ID NO: 1041777 - RNA, 19 nt, Artificial Sequence
  Description of Artificial Sequence: Synthetic oligonucleotide
cuuaaggucgacacacagu

SEQ ID NO: 1041778 - RNA, 19 nt, Artificial Sequence
  Description of Artificial Sequence: Synthetic oligonucleotide
ggauauucagagauuuauc

SEQ ID NO: 1041779 - RNA, 19 nt, Artificial Sequence
  Description of Artificial Sequence: Synthetic oligonucleotide
acguuacugcagguggcac

SEQ ID NO: 1041780 - RNA, 19 nt, Artificial Sequence
  Description of Artificial Sequence: Synthetic oligonucleotide
cugcacgaagcgcucaguc

SEQ ID NO: 1041781 - RNA, 19 nt, Artificial Sequence
  Description of Artificial Sequence: Synthetic oligonucleotide
ugagacggauguugagcaa

SEQ ID NO: 1041782 - RNA, 19 nt, Artificial Sequence
  Description of Artificial Sequence: Synthetic oligonucleotide
gcaaacgaugugcuucuug

SEQ ID NO: 1041783 - RNA, 19 nt, Artificial Sequence
  Description of Artificial Sequence: Synthetic oligonucleotide
gacagguuggacacgucaa

SEQ ID NO: 1041784 - RNA, 19 nt, Artificial Sequence
  Description of Artificial Sequence: Synthetic oligonucleotide
ggauauacacgcaugacau

SEQ ID NO: 1041785 - RNA, 19 nt, Artificial Sequence
  Description of Artificial Sequence: Synthetic oligonucleotide
cacgaagcgcucagucagc

SEQ ID NO: 1041786 - RNA, 19 nt, Artificial Sequence
  Description of Artificial Sequence: Synthetic oligonucleotide
agcccaugggcccugucau

SEQ ID NO: 1041787 - RNA, 19 nt, Artificial Sequence
  Description of Artificial Sequence: Synthetic oligonucleotide
gacguuacugcagguggca

SEQ ID NO: 1041788 - RNA, 19 nt, Artificial Sequence
  Description of Artificial Sequence: Synthetic oligonucleotide
aaacccaaugucagagaua

SEQ ID NO: 1041789 - RNA, 19 nt, Artificial Sequence
  Description of Artificial Sequence: Synthetic oligonucleotide
uccgcaguuccgcggcccc

SEQ ID NO: 1041790 - RNA, 19 nt, Artificial Sequence
  Description of Artificial Sequence: Synthetic oligonucleotide
ggugaaacccaaugucaga

SEQ ID NO: 1041791 - RNA, 19 nt, Artificial Sequence
  Description of Artificial Sequence: Synthetic oligonucleotide
ccuauauaagauauucgua

SEQ ID NO: 1041792 - RNA, 19 nt, Artificial Sequence
  Description of Artificial Sequence: Synthetic oligonucleotide
cuucugagccgcgcgcacg

SEQ ID NO: 1041793 - RNA, 19 nt, Artificial Sequence
  Description of Artificial Sequence: Synthetic oligonucleotide
ccagggaaauaauuacuuc

SEQ ID NO: 1041794 - RNA, 19 nt, Artificial Sequence
  Description of Artificial Sequence: Synthetic oligonucleotide
cacaacgguaaaagcuuga

SEQ ID NO: 1041795 - RNA, 19 nt, Artificial Sequence
  Description of Artificial Sequence: Synthetic oligonucleotide
gaccagggaaauaauuacu

SEQ ID NO: 1041796 - RNA, 19 nt, Artificial Sequence
  Description of Artificial Sequence: Synthetic oligonucleotide
agccgcgcgcacguugucc

SEQ ID NO: 1041797 - RNA, 19 nt, Artificial Sequence
  Description of Artificial Sequence: Synthetic oligonucleotide
aagcggccaaacaccaggu

SEQ ID NO: 1041798 - RNA, 19 nt, Artificial Sequence
  Description of Artificial Sequence: Synthetic oligonucleotide
ccuucacuuguccuuggag

SEQ ID NO: 1041799 - RNA, 19 nt, Artificial Sequence
  Description of Artificial Sequence: Synthetic oligonucleotide
gcagcuaagaccagggaaa

SEQ ID NO: 1041800 - RNA, 19 nt, Artificial Sequence
  Description of Artificial Sequence: Synthetic oligonucleotide
cguagaauuagcuucccaa

SEQ ID NO: 1041801 - RNA, 19 nt, Artificial Sequence
  Description of Artificial Sequence: Synthetic oligonucleotide
cugaaguacugugacaggu

SEQ ID NO: 1041802 - RNA, 19 nt, Artificial Sequence
  Description of Artificial Sequence: Synthetic oligonucleotide
uuucgaguacaggguuucu

SEQ ID NO: 1041803 - RNA, 19 nt, Artificial Sequence
  Description of Artificial Sequence: Synthetic oligonucleotide
cacgaggcagagcgguagc

SEQ ID NO: 1041804 - RNA, 19 nt, Artificial Sequence
  Description of Artificial Sequence: Synthetic oligonucleotide
ugacucguacgagccagaa

SEQ ID NO: 1041805 - RNA, 19 nt, Artificial Sequence
  Description of Artificial Sequence: Synthetic oligonucleotide
agaauaugacuugcagcua

SEQ ID NO: 1041806 - RNA, 19 nt, Artificial Sequence
  Description of Artificial Sequence: Synthetic oligonucleotide
gggaucaccaaagaacaaa

SEQ ID NO: 1041807 - RNA, 19 nt, Artificial Sequence
  Description of Artificial Sequence: Synthetic oligonucleotide
ggcccugucaugaaguaga

SEQ ID NO: 1041808 - RNA, 19 nt, Artificial Sequence
  Description of Artificial Sequence: Synthetic oligonucleotide
augggcccugucaugaagu

SEQ ID NO: 1041809 - RNA, 19 nt, Artificial Sequence
  Description of Artificial Sequence: Synthetic oligonucleotide
gagaacaggaugacucgua

SEQ ID NO: 1041810 - RNA, 19 nt, Artificial Sequence
  Description of Artificial Sequence: Synthetic oligonucleotide
uuguuggggcugccagcug

SEQ ID NO: 1041811 - RNA, 19 nt, Artificial Sequence
  Description of Artificial Sequence: Synthetic oligonucleotide
uacugcagguggcacccuu

SEQ ID NO: 1041812 - RNA, 19 nt, Artificial Sequence
  Description of Artificial Sequence: Synthetic oligonucleotide
cagaauggcuuucuauugu

SEQ ID NO: 1041813 - RNA, 19 nt, Artificial Sequence
  Description of Artificial Sequence: Synthetic oligonucleotide
auuaugccaucagcugcca

SEQ ID NO: 1041814 - RNA, 19 nt, Artificial Sequence
  Description of Artificial Sequence: Synthetic oligonucleotide
agagcuccauccaaacuuu

SEQ ID NO: 1041815 - RNA, 19 nt, Artificial Sequence
  Description of Artificial Sequence: Synthetic oligonucleotide
uguccgcaguuccgcggcc

SEQ ID NO: 1041816 - RNA, 19 nt, Artificial Sequence
  Description of Artificial Sequence: Synthetic oligonucleotide
cugagccgcgcgcacguug

SEQ ID NO: 1041817 - RNA, 19 nt, Artificial Sequence
  Description of Artificial Sequence: Synthetic oligonucleotide
auguuuuaauccaguucaa

SEQ ID NO: 1041818 - RNA, 19 nt, Artificial Sequence
  Description of Artificial Sequence: Synthetic oligonucleotide
uccuagcuauggagggauc

SEQ ID NO: 1041819 - RNA, 19 nt, Artificial Sequence
  Description of Artificial Sequence: Synthetic oligonucleotide
uggacacgucaaguccaag

SEQ ID NO: 1041820 - RNA, 19 nt, Artificial Sequence
  Description of Artificial Sequence: Synthetic oligonucleotide
gucgacacacagugggaaa

SEQ ID NO: 1041821 - RNA, 19 nt, Artificial Sequence
  Description of Artificial Sequence: Synthetic oligonucleotide
cacucccugcacgaagcgc

SEQ ID NO: 1041822 - RNA, 19 nt, Artificial Sequence
  Description of Artificial Sequence: Synthetic oligonucleotide
gcgcacguuguccucuccg

SEQ ID NO: 1041823 - RNA, 19 nt, Artificial Sequence
  Description of Artificial Sequence: Synthetic oligonucleotide
cuguucacgcucugcgaga

SEQ ID NO: 1041824 - RNA, 19 nt, Artificial Sequence
  Description of Artificial Sequence: Synthetic oligonucleotide
caucaaagccagugauuaa

SEQ ID NO: 1041825 - RNA, 19 nt, Artificial Sequence
  Description of Artificial Sequence: Synthetic oligonucleotide
gcugaucuacauaaguucu

SEQ ID NO: 1041826 - RNA, 19 nt, Artificial Sequence
  Description of Artificial Sequence: Synthetic oligonucleotide
uuccgcggccccgagcccc

SEQ ID NO: 1041827 - RNA, 19 nt, Artificial Sequence
  Description of Artificial Sequence: Synthetic oligonucleotide
uuggagcggucgagguucu

SEQ ID NO: 1041828 - RNA, 19 nt, Artificial Sequence
  Description of Artificial Sequence: Synthetic oligonucleotide
aggguuuguuggggcugcc

SEQ ID NO: 1041829 - RNA, 19 nt, Artificial Sequence
  Description of Artificial Sequence: Synthetic oligonucleotide
ugccucgccaguagcccau

SEQ ID NO: 1041830 - RNA, 19 nt, Artificial Sequence
  Description of Artificial Sequence: Synthetic oligonucleotide
gagacggauguugagcaau

SEQ ID NO: 1041831 - RNA, 19 nt, Artificial Sequence
  Description of Artificial Sequence: Synthetic oligonucleotide
ggaaacugacacaacggua

SEQ ID NO: 1041832 - RNA, 19 nt, Artificial Sequence
  Description of Artificial Sequence: Synthetic oligonucleotide
agccagugauuaauaaaua

SEQ ID NO: 1041833 - RNA, 19 nt, Artificial Sequence
  Description of Artificial Sequence: Synthetic oligonucleotide
gcccggcugaucuacauaa

SEQ ID NO: 1041834 - RNA, 19 nt, Artificial Sequence
  Description of Artificial Sequence: Synthetic oligonucleotide
caacgcccggcugaucuac

SEQ ID NO: 1041835 - RNA, 19 nt, Artificial Sequence
  Description of Artificial Sequence: Synthetic oligonucleotide
cucguacgagccagaagaa

SEQ ID NO: 1041836 - RNA, 19 nt, Artificial Sequence
  Description of Artificial Sequence: Synthetic oligonucleotide
gcgcuagcagcaucaggag

SEQ ID NO: 1041837 - RNA, 19 nt, Artificial Sequence
  Description of Artificial Sequence: Synthetic oligonucleotide
gcggucgagguucuccagc

SEQ ID NO: 1041838 - RNA, 19 nt, Artificial Sequence
  Description of Artificial Sequence: Synthetic oligonucleotide
guagcacggugugcucagg

SEQ ID NO: 1041839 - RNA, 19 nt, Artificial Sequence
  Description of Artificial Sequence: Synthetic oligonucleotide
acgaggcagagcgguagca

SEQ ID NO: 1041840 - RNA, 19 nt, Artificial Sequence
  Description of Artificial Sequence: Synthetic oligonucleotide
cacgcaugacauggagaac

SEQ ID NO: 1041841 - RNA, 19 nt, Artificial Sequence
  Description of Artificial Sequence: Synthetic oligonucleotide
aggucgacacacaguggga

SEQ ID NO: 1041842 - RNA, 19 nt, Artificial Sequence
  Description of Artificial Sequence: Synthetic oligonucleotide
cgcucagucagccuggaca

SEQ ID NO: 1041843 - RNA, 19 nt, Artificial Sequence
  Description of Artificial Sequence: Synthetic oligonucleotide
acggugugcucaggcucac

SEQ ID NO: 1041844 - RNA, 19 nt, Artificial Sequence
  Description of Artificial Sequence: Synthetic oligonucleotide
gugcaugcgugcacacccc

SEQ ID NO: 1041845 - RNA, 19 nt, Artificial Sequence
  Description of Artificial Sequence: Synthetic oligonucleotide
gagcgguagcacggugugc

SEQ ID NO: 1041846 - RNA, 19 nt, Artificial Sequence
  Description of Artificial Sequence: Synthetic oligonucleotide
cagagcgguagcacggugu

SEQ ID NO: 1041847 - RNA, 19 nt, Artificial Sequence
  Description of Artificial Sequence: Synthetic oligonucleotide
agggaucaccaaagaacaa

SEQ ID NO: 1041848 - RNA, 19 nt, Artificial Sequence
  Description of Artificial Sequence: Synthetic oligonucleotide
gacggauguugagcaaucu

SEQ ID NO: 1041849 - RNA, 19 nt, Artificial Sequence
  Description of Artificial Sequence: Synthetic oligonucleotide
gcuauggagggaucaccaa

SEQ ID NO: 1041850 - RNA, 19 nt, Artificial Sequence
  Description of Artificial Sequence: Synthetic oligonucleotide
agcuaagaccagggaaaua

SEQ ID NO: 1041851 - RNA, 19 nt, Artificial Sequence
  Description of Artificial Sequence: Synthetic oligonucleotide
aacgcccggcugaucuaca

SEQ ID NO: 1041852 - RNA, 19 nt, Artificial Sequence
  Description of Artificial Sequence: Synthetic oligonucleotide
acgcccggcugaucuacau

SEQ ID NO: 1041853 - RNA, 19 nt, Artificial Sequence
  Description of Artificial Sequence: Synthetic oligonucleotide
ccauccaggugacaaugca

SEQ ID NO: 1041854 - RNA, 19 nt, Artificial Sequence
  Description of Artificial Sequence: Synthetic oligonucleotide
caguuccgcggccccgagc

SEQ ID NO: 1041855 - RNA, 19 nt, Artificial Sequence
  Description of Artificial Sequence: Synthetic oligonucleotide
cugccucgccaguagccca

SEQ ID NO: 1041856 - RNA, 19 nt, Artificial Sequence
  Description of Artificial Sequence: Synthetic oligonucleotide
uuacuucaugagggauuua

SEQ ID NO: 1041857 - RNA, 19 nt, Artificial Sequence
  Description of Artificial Sequence: Synthetic oligonucleotide
ccuagcuauggagggauca

SEQ ID NO: 1041858 - RNA, 19 nt, Artificial Sequence
  Description of Artificial Sequence: Synthetic oligonucleotide
augacucguacgagccaga

SEQ ID NO: 1041859 - RNA, 19 nt, Artificial Sequence
  Description of Artificial Sequence: Synthetic oligonucleotide
gggcugaaguacugugaca

SEQ ID NO: 1041860 - RNA, 19 nt, Artificial Sequence
  Description of Artificial Sequence: Synthetic oligonucleotide
guccuagcuauggagggau

SEQ ID NO: 1041861 - RNA, 19 nt, Artificial Sequence
  Description of Artificial Sequence: Synthetic oligonucleotide
guccgcaguuccgcggccc

SEQ ID NO: 1041862 - RNA, 19 nt, Artificial Sequence
  Description of Artificial Sequence: Synthetic oligonucleotide
ccacgaggcagagcgguag

SEQ ID NO: 1041863 - RNA, 19 nt, Artificial Sequence
  Description of Artificial Sequence: Synthetic oligonucleotide
gcagagcgguagcacggug

SEQ ID NO: 1041864 - RNA, 19 nt, Artificial Sequence
  Description of Artificial Sequence: Synthetic oligonucleotide
cagguuggacacgucaagu

SEQ ID NO: 1041865 - RNA, 19 nt, Artificial Sequence
  Description of Artificial Sequence: Synthetic oligonucleotide
gcuggccgcgcgccggugg

SEQ ID NO: 1041866 - RNA, 19 nt, Artificial Sequence
  Description of Artificial Sequence: Synthetic oligonucleotide
ccauagccauccaggugac

SEQ ID NO: 1041867 - RNA, 19 nt, Artificial Sequence
  Description of Artificial Sequence: Synthetic oligonucleotide
gggccuuaaggucgacaca

SEQ ID NO: 1041868 - RNA, 19 nt, Artificial Sequence
  Description of Artificial Sequence: Synthetic oligonucleotide
ccuugucuguccuagcuau

SEQ ID NO: 1041869 - RNA, 19 nt, Artificial Sequence
  Description of Artificial Sequence: Synthetic oligonucleotide
cucuccgaacaggcuguuc

SEQ ID NO: 1041870 - RNA, 19 nt, Artificial Sequence
  Description of Artificial Sequence: Synthetic oligonucleotide
acccaaugucagagauaag

SEQ ID NO: 1041871 - RNA, 19 nt, Artificial Sequence
  Description of Artificial Sequence: Synthetic oligonucleotide
ugcaaacgaugugcuucuu

SEQ ID NO: 1041872 - RNA, 19 nt, Artificial Sequence
  Description of Artificial Sequence: Synthetic oligonucleotide
agcgcucagucagccugga

SEQ ID NO: 1041873 - RNA, 19 nt, Artificial Sequence
  Description of Artificial Sequence: Synthetic oligonucleotide
gcaaucucaccugguucuc

SEQ ID NO: 1041874 - RNA, 19 nt, Artificial Sequence
  Description of Artificial Sequence: Synthetic oligonucleotide
gccuucacuuguccuugga

SEQ ID NO: 1041875 - RNA, 19 nt, Artificial Sequence
  Description of Artificial Sequence: Synthetic oligonucleotide
ccucgccaguagcccaugg

SEQ ID NO: 1041876 - RNA, 19 nt, Artificial Sequence
  Description of Artificial Sequence: Synthetic oligonucleotide
caccacgaggcagagcggu

SEQ ID NO: 1041877 - RNA, 19 nt, Artificial Sequence
  Description of Artificial Sequence: Synthetic oligonucleotide
ggcucacccucauacuuau

SEQ ID NO: 1041878 - RNA, 19 nt, Artificial Sequence
  Description of Artificial Sequence: Synthetic oligonucleotide
cauagccauccaggugaca

SEQ ID NO: 1041879 - RNA, 19 nt, Artificial Sequence
  Description of Artificial Sequence: Synthetic oligonucleotide
ggcuuucuauuguguugaa

SEQ ID NO: 1041880 - RNA, 19 nt, Artificial Sequence
  Description of Artificial Sequence: Synthetic oligonucleotide
agcacccuguugagacgga

SEQ ID NO: 1041881 - RNA, 19 nt, Artificial Sequence
  Description of Artificial Sequence: Synthetic oligonucleotide
gccgguggcuguucuuguc

SEQ ID NO: 1041882 - RNA, 19 nt, Artificial Sequence
  Description of Artificial Sequence: Synthetic oligonucleotide
gagccgcgcgcacguuguc

SEQ ID NO: 1041883 - RNA, 19 nt, Artificial Sequence
  Description of Artificial Sequence: Synthetic oligonucleotide
gcaguuccgcggccccgag

SEQ ID NO: 1041884 - RNA, 19 nt, Artificial Sequence
  Description of Artificial Sequence: Synthetic oligonucleotide
gccuuaaggucgacacaca

SEQ ID NO: 1041885 - RNA, 19 nt, Artificial Sequence
  Description of Artificial Sequence: Synthetic oligonucleotide
accacgaggcagagcggua

SEQ ID NO: 1041886 - RNA, 19 nt, Artificial Sequence
  Description of Artificial Sequence: Synthetic oligonucleotide
ucugagccgcgcgcacguu

SEQ ID NO: 1041887 - RNA, 19 nt, Artificial Sequence
  Description of Artificial Sequence: Synthetic oligonucleotide
cgaggcagagcgguagcac

SEQ ID NO: 1041888 - RNA, 19 nt, Artificial Sequence
  Description of Artificial Sequence: Synthetic oligonucleotide
uggagcggucgagguucuc

SEQ ID NO: 1041889 - RNA, 19 nt, Artificial Sequence
  Description of Artificial Sequence: Synthetic oligonucleotide
cucuuuagaccaggcugau

SEQ ID NO: 1041890 - RNA, 19 nt, Artificial Sequence
  Description of Artificial Sequence: Synthetic oligonucleotide
cgcacguuguccucuccga

SEQ ID NO: 1041891 - RNA, 19 nt, Artificial Sequence
  Description of Artificial Sequence: Synthetic oligonucleotide
gcucacccucauacuuaug

SEQ ID NO: 1041892 - RNA, 19 nt, Artificial Sequence
  Description of Artificial Sequence: Synthetic oligonucleotide
gccgcgcgcacguuguccu

SEQ ID NO: 1041893 - RNA, 19 nt, Artificial Sequence
  Description of Artificial Sequence: Synthetic oligonucleotide
ggccgcgcgccgguggcug

SEQ ID NO: 1041894 - RNA, 19 nt, Artificial Sequence
  Description of Artificial Sequence: Synthetic oligonucleotide
ggcagagcgguagcacggu

SEQ ID NO: 1041895 - RNA, 19 nt, Artificial Sequence
  Description of Artificial Sequence: Synthetic oligonucleotide
ccgcaguuccgcggccccg

SEQ ID NO: 1041896 - RNA, 19 nt, Artificial Sequence
  Description of Artificial Sequence: Synthetic oligonucleotide
ccaugggcccugucaugaa

SEQ ID NO: 1041897 - RNA, 19 nt, Artificial Sequence
  Description of Artificial Sequence: Synthetic oligonucleotide
gccucgccaguagcccaug

SEQ ID NO: 1041898 - RNA, 19 nt, Artificial Sequence
  Description of Artificial Sequence: Synthetic oligonucleotide
cgcgcacguuguccucucc

SEQ ID NO: 1041899 - RNA, 19 nt, Artificial Sequence
  Description of Artificial Sequence: Synthetic oligonucleotide
ccaacgcccggcugaucua

SEQ ID NO: 1041900 - RNA, 19 nt, Artificial Sequence
  Description of Artificial Sequence: Synthetic oligonucleotide
gcacccuguugagacggau

SEQ ID NO: 1041901 - RNA, 19 nt, Artificial Sequence
  Description of Artificial Sequence: Synthetic oligonucleotide
gcccugucaugaaguagau

SEQ ID NO: 1041902 - RNA, 19 nt, Artificial Sequence
  Description of Artificial Sequence: Synthetic oligonucleotide
ccaguagcccaugggcccu

SEQ ID NO: 1041903 - RNA, 19 nt, Artificial Sequence
  Description of Artificial Sequence: Synthetic oligonucleotide
cggugugcucaggcucacc

SEQ ID NO: 1041904 - RNA, 19 nt, Artificial Sequence
  Description of Artificial Sequence: Synthetic oligonucleotide
cgaagcgcucagucagccu

SEQ ID NO: 1041905 - RNA, 19 nt, Artificial Sequence
  Description of Artificial Sequence: Synthetic oligonucleotide
ccugcacgaagcgcucagu

SEQ ID NO: 1041906 - RNA, 19 nt, Artificial Sequence
  Description of Artificial Sequence: Synthetic oligonucleotide
cgcccggcugaucuacaua

SEQ ID NO: 1041907 - RNA, 19 nt, Artificial Sequence
  Description of Artificial Sequence: Synthetic oligonucleotide
gcgcgccgguggcuguucu

SEQ ID NO: 1041908 - RNA, 19 nt, Artificial Sequence
  Description of Artificial Sequence: Synthetic oligonucleotide
cccuguugagacggauguu

SEQ ID NO: 1041909 - RNA, 19 nt, Artificial Sequence
  Description of Artificial Sequence: Synthetic oligonucleotide
gccgcgcgccgguggcugu

SEQ ID NO: 1041910 - RNA, 19 nt, Artificial Sequence
  Description of Artificial Sequence: Synthetic oligonucleotide
cgcgcgcacguuguccucu

SEQ ID NO: 1041911 - RNA, 19 nt, Artificial Sequence
  Description of Artificial Sequence: Synthetic oligonucleotide
cgcgcgccgguggcuguuc

SEQ ID NO: 1041912 - RNA, 19 nt, Artificial Sequence
  Description of Artificial Sequence: Synthetic oligonucleotide
gggcccgggugggauuguu

SEQ ID NO: 1041913 - RNA, 19 nt, Artificial Sequence
  Description of Artificial Sequence: Synthetic oligonucleotide
ccucuccgaacaggcuguu

SEQ ID NO: 1041914 - RNA, 19 nt, Artificial Sequence
  Description of Artificial Sequence: Synthetic oligonucleotide
cgcgccgguggcuguucuu

SEQ ID NO: 1041915 - RNA, 19 nt, Artificial Sequence
  Description of Artificial Sequence: Synthetic oligonucleotide
uucuaauuuguauaaaugg

SEQ ID NO: 1041916 - RNA, 19 nt, Artificial Sequence
  Description of Artificial Sequence: Synthetic oligonucleotide
aaaccuaaauucuccaacc

SEQ ID NO: 1041917 - RNA, 19 nt, Artificial Sequence
  Description of Artificial Sequence: Synthetic oligonucleotide
gaucguaguacucaaaggg

SEQ ID NO: 1041918 - RNA, 19 nt, Artificial Sequence
  Description of Artificial Sequence: Synthetic oligonucleotide
gauacuuuccuuuggauag

SEQ ID NO: 1041919 - RNA, 19 nt, Artificial Sequence
  Description of Artificial Sequence: Synthetic oligonucleotide
uuugagauaacuguacucg

SEQ ID NO: 1041920 - RNA, 19 nt, Artificial Sequence
  Description of Artificial Sequence: Synthetic oligonucleotide
uaugaaguuaccuaguaac

SEQ ID NO: 1041921 - RNA, 19 nt, Artificial Sequence
  Description of Artificial Sequence: Synthetic oligonucleotide
cuuacaaauggauagggag

SEQ ID NO: 1041922 - RNA, 19 nt, Artificial Sequence
  Description of Artificial Sequence: Synthetic oligonucleotide
ucuuuacuuagccagauga

SEQ ID NO: 1041923 - RNA, 19 nt, Artificial Sequence
  Description of Artificial Sequence: Synthetic oligonucleotide
aaugguacuaccuacuaau

SEQ ID NO: 1041924 - RNA, 19 nt, Artificial Sequence
  Description of Artificial Sequence: Synthetic oligonucleotide
uuucuaauuuguauaaaug

SEQ ID NO: 1041925 - RNA, 19 nt, Artificial Sequence
  Description of Artificial Sequence: Synthetic oligonucleotide
aaccuauucuuuuaacuuc

SEQ ID NO: 1041926 - RNA, 19 nt, Artificial Sequence
  Description of Artificial Sequence: Synthetic oligonucleotide
uaaagauauguguagauaa

SEQ ID NO: 1041927 - RNA, 19 nt, Artificial Sequence
  Description of Artificial Sequence: Synthetic oligonucleotide
ugggauaacagguauauac

SEQ ID NO: 1041928 - RNA, 19 nt, Artificial Sequence
  Description of Artificial Sequence: Synthetic oligonucleotide
uguggaacugguaaggugc

SEQ ID NO: 1041929 - RNA, 19 nt, Artificial Sequence
  Description of Artificial Sequence: Synthetic oligonucleotide
uuauuaauccaacuuaaaa

SEQ ID NO: 1041930 - RNA, 19 nt, Artificial Sequence
  Description of Artificial Sequence: Synthetic oligonucleotide
uuuuacagcccuaaagugc

SEQ ID NO: 1041931 - RNA, 19 nt, Artificial Sequence
  Description of Artificial Sequence: Synthetic oligonucleotide
auuagcuacaucuuggaga

SEQ ID NO: 1041932 - RNA, 19 nt, Artificial Sequence
  Description of Artificial Sequence: Synthetic oligonucleotide
gauaggaugauuuugagau

SEQ ID NO: 1041933 - RNA, 19 nt, Artificial Sequence
  Description of Artificial Sequence: Synthetic oligonucleotide
agugccaugcauuuuacag

SEQ ID NO: 1041934 - RNA, 19 nt, Artificial Sequence
  Description of Artificial Sequence: Synthetic oligonucleotide
uguauaaaugguacuaccu

SEQ ID NO: 1041935 - RNA, 19 nt, Artificial Sequence
  Description of Artificial Sequence: Synthetic oligonucleotide
aaugaaccauaucuacugg

SEQ ID NO: 1041936 - RNA, 19 nt, Artificial Sequence
  Description of Artificial Sequence: Synthetic oligonucleotide
aauguguacauuaaguccu

SEQ ID NO: 1041937 - RNA, 19 nt, Artificial Sequence
  Description of Artificial Sequence: Synthetic oligonucleotide
aucaauagcuguuaaauaa

SEQ ID NO: 1041938 - RNA, 19 nt, Artificial Sequence
  Description of Artificial Sequence: Synthetic oligonucleotide
aggaguguccauuugauug

SEQ ID NO: 1041939 - RNA, 19 nt, Artificial Sequence
  Description of Artificial Sequence: Synthetic oligonucleotide
uuagcuacaucuuggagac

SEQ ID NO: 1041940 - RNA, 19 nt, Artificial Sequence
  Description of Artificial Sequence: Synthetic oligonucleotide
ucuguccuacaacacaugg

SEQ ID NO: 1041941 - RNA, 19 nt, Artificial Sequence
  Description of Artificial Sequence: Synthetic oligonucleotide
uauaaaugguacuaccuac

SEQ ID NO: 1041942 - RNA, 19 nt, Artificial Sequence
  Description of Artificial Sequence: Synthetic oligonucleotide
uccuacaacacaugguugg

SEQ ID NO: 1041943 - RNA, 19 nt, Artificial Sequence
  Description of Artificial Sequence: Synthetic oligonucleotide
uagauguuauuguagaacu

SEQ ID NO: 1041944 - RNA, 19 nt, Artificial Sequence
  Description of Artificial Sequence: Synthetic oligonucleotide
ucuaauaacugcuggauua

SEQ ID NO: 1041945 - RNA, 19 nt, Artificial Sequence
  Description of Artificial Sequence: Synthetic oligonucleotide
uauguguagauaaucaaua

SEQ ID NO: 1041946 - RNA, 19 nt, Artificial Sequence
  Description of Artificial Sequence: Synthetic oligonucleotide
agguauauaccgcuauacc

SEQ ID NO: 1041947 - RNA, 19 nt, Artificial Sequence
  Description of Artificial Sequence: Synthetic oligonucleotide
uccacauuauagaaagugc

SEQ ID NO: 1041948 - RNA, 19 nt, Artificial Sequence
  Description of Artificial Sequence: Synthetic oligonucleotide
uccaauuuacaauugaauu

SEQ ID NO: 1041949 - RNA, 19 nt, Artificial Sequence
  Description of Artificial Sequence: Synthetic oligonucleotide
caaugaaccauaucuacug

SEQ ID NO: 1041950 - RNA, 19 nt, Artificial Sequence
  Description of Artificial Sequence: Synthetic oligonucleotide
augauaccuauguaacacc

SEQ ID NO: 1041951 - RNA, 19 nt, Artificial Sequence
  Description of Artificial Sequence: Synthetic oligonucleotide
uucagauucucaauucagc

SEQ ID NO: 1041952 - RNA, 19 nt, Artificial Sequence
  Description of Artificial Sequence: Synthetic oligonucleotide
ucaaagauacuuuccuuug

SEQ ID NO: 1041953 - RNA, 19 nt, Artificial Sequence
  Description of Artificial Sequence: Synthetic oligonucleotide
gaugauaccuauguaacac

SEQ ID NO: 1041954 - RNA, 19 nt, Artificial Sequence
  Description of Artificial Sequence: Synthetic oligonucleotide
uuguauaaaugguacuacc

SEQ ID NO: 1041955 - RNA, 19 nt, Artificial Sequence
  Description of Artificial Sequence: Synthetic oligonucleotide
uauacagcaaaaucugggu

SEQ ID NO: 1041956 - RNA, 19 nt, Artificial Sequence
  Description of Artificial Sequence: Synthetic oligonucleotide
gguauauaccgcuauaccc

SEQ ID NO: 1041957 - RNA, 19 nt, Artificial Sequence
  Description of Artificial Sequence: Synthetic oligonucleotide
gauguucuguccuacaaca

SEQ ID NO: 1041958 - RNA, 19 nt, Artificial Sequence
  Description of Artificial Sequence: Synthetic oligonucleotide
auaacuguacucgacgagg

SEQ ID NO: 1041959 - RNA, 19 nt, Artificial Sequence
  Description of Artificial Sequence: Synthetic oligonucleotide
aguuuggccuuagacaugc

SEQ ID NO: 1041960 - RNA, 19 nt, Artificial Sequence
  Description of Artificial Sequence: Synthetic oligonucleotide
uccaggaauuaccucaaag

SEQ ID NO: 1041961 - RNA, 19 nt, Artificial Sequence
  Description of Artificial Sequence: Synthetic oligonucleotide
ugauaccuauguaacacca

SEQ ID NO: 1041962 - RNA, 19 nt, Artificial Sequence
  Description of Artificial Sequence: Synthetic oligonucleotide
uaacuguacucgacgaggg

SEQ ID NO: 1041963 - RNA, 19 nt, Artificial Sequence
  Description of Artificial Sequence: Synthetic oligonucleotide
aacaacgcaugauauucug

SEQ ID NO: 1041964 - RNA, 19 nt, Artificial Sequence
  Description of Artificial Sequence: Synthetic oligonucleotide
uucuuacaaauggauaggg

SEQ ID NO: 1041965 - RNA, 19 nt, Artificial Sequence
  Description of Artificial Sequence: Synthetic oligonucleotide
uuaggauuauuaauccaac

SEQ ID NO: 1041966 - RNA, 19 nt, Artificial Sequence
  Description of Artificial Sequence: Synthetic oligonucleotide
uccuuaggauuauuaaucc

SEQ ID NO: 1041967 - RNA, 19 nt, Artificial Sequence
  Description of Artificial Sequence: Synthetic oligonucleotide
uauuuaguucuguuggaga

SEQ ID NO: 1041968 - RNA, 19 nt, Artificial Sequence
  Description of Artificial Sequence: Synthetic oligonucleotide
ucgaguugguguaggaggg

SEQ ID NO: 1041969 - RNA, 19 nt, Artificial Sequence
  Description of Artificial Sequence: Synthetic oligonucleotide
ggauaacagguauauaccg

SEQ ID NO: 1041970 - RNA, 19 nt, Artificial Sequence
  Description of Artificial Sequence: Synthetic oligonucleotide
uuuuaguuggagucucucc

SEQ ID NO: 1041971 - RNA, 19 nt, Artificial Sequence
  Description of Artificial Sequence: Synthetic oligonucleotide
ucaugaaugugaaugucuc

SEQ ID NO: 1041972 - RNA, 19 nt, Artificial Sequence
  Description of Artificial Sequence: Synthetic oligonucleotide
ugauccaauuuacaauuga

SEQ ID NO: 1041973 - RNA, 19 nt, Artificial Sequence
  Description of Artificial Sequence: Synthetic oligonucleotide
uagccuagaagucuuguac

SEQ ID NO: 1041974 - RNA, 19 nt, Artificial Sequence
  Description of Artificial Sequence: Synthetic oligonucleotide
auagcuaccuccaaaagga

SEQ ID NO: 1041975 - RNA, 19 nt, Artificial Sequence
  Description of Artificial Sequence: Synthetic oligonucleotide
cuuagacaugcuauguagc

SEQ ID NO: 1041976 - RNA, 19 nt, Artificial Sequence
  Description of Artificial Sequence: Synthetic oligonucleotide
gauaacuguacucgacgag

SEQ ID NO: 1041977 - RNA, 19 nt, Artificial Sequence
  Description of Artificial Sequence: Synthetic oligonucleotide
uaauaaagauauguguaga

SEQ ID NO: 1041978 - RNA, 19 nt, Artificial Sequence
  Description of Artificial Sequence: Synthetic oligonucleotide
ugauuuugagauaacugua

SEQ ID NO: 1041979 - RNA, 19 nt, Artificial Sequence
  Description of Artificial Sequence: Synthetic oligonucleotide
aggauuauuaauccaacuu

SEQ ID NO: 1041980 - RNA, 19 nt, Artificial Sequence
  Description of Artificial Sequence: Synthetic oligonucleotide
uauauaccgcuauacccag

SEQ ID NO: 1041981 - RNA, 19 nt, Artificial Sequence
  Description of Artificial Sequence: Synthetic oligonucleotide
gauguuauuguagaacuga

SEQ ID NO: 1041982 - RNA, 19 nt, Artificial Sequence
  Description of Artificial Sequence: Synthetic oligonucleotide
aauuaccucaaagauacuu

SEQ ID NO: 1041983 - RNA, 19 nt, Artificial Sequence
  Description of Artificial Sequence: Synthetic oligonucleotide
auuuaguucuguuggagaa

SEQ ID NO: 1041984 - RNA, 19 nt, Artificial Sequence
  Description of Artificial Sequence: Synthetic oligonucleotide
cuuaggauuauuaauccaa

SEQ ID NO: 1041985 - RNA, 19 nt, Artificial Sequence
  Description of Artificial Sequence: Synthetic oligonucleotide
gauaacagguauauaccgc

SEQ ID NO: 1041986 - RNA, 19 nt, Artificial Sequence
  Description of Artificial Sequence: Synthetic oligonucleotide
uuuguauaaaugguacuac

SEQ ID NO: 1041987 - RNA, 19 nt, Artificial Sequence
  Description of Artificial Sequence: Synthetic oligonucleotide
cacaaugaaccauaucuac

SEQ ID NO: 1041988 - RNA, 19 nt, Artificial Sequence
  Description of Artificial Sequence: Synthetic oligonucleotide
acaugguugggccaaacca

SEQ ID NO: 1041989 - RNA, 19 nt, Artificial Sequence
  Description of Artificial Sequence: Synthetic oligonucleotide
aaccauaucuacuggggaa

SEQ ID NO: 1041990 - RNA, 19 nt, Artificial Sequence
  Description of Artificial Sequence: Synthetic oligonucleotide
uuauguagauguuauugua

SEQ ID NO: 1041991 - RNA, 19 nt, Artificial Sequence
  Description of Artificial Sequence: Synthetic oligonucleotide
aaccuaaauucuccaaccu

SEQ ID NO: 1041992 - RNA, 19 nt, Artificial Sequence
  Description of Artificial Sequence: Synthetic oligonucleotide
gauauucuggaaggcacgg

SEQ ID NO: 1041993 - RNA, 19 nt, Artificial Sequence
  Description of Artificial Sequence: Synthetic oligonucleotide
uuugaccucauuacuggac

SEQ ID NO: 1041994 - RNA, 19 nt, Artificial Sequence
  Description of Artificial Sequence: Synthetic oligonucleotide
acaguuuccauaccggaga

SEQ ID NO: 1041995 - RNA, 19 nt, Artificial Sequence
  Description of Artificial Sequence: Synthetic oligonucleotide
ugagauaacuguacucgac

SEQ ID NO: 1041996 - RNA, 19 nt, Artificial Sequence
  Description of Artificial Sequence: Synthetic oligonucleotide
ggauuaaggagcaagcucc

SEQ ID NO: 1041997 - RNA, 19 nt, Artificial Sequence
  Description of Artificial Sequence: Synthetic oligonucleotide
uugaccucauuacuggacu

SEQ ID NO: 1041998 - RNA, 19 nt, Artificial Sequence
  Description of Artificial Sequence: Synthetic oligonucleotide
aacuguacucgacgagggg

SEQ ID NO: 1041999 - RNA, 19 nt, Artificial Sequence
  Description of Artificial Sequence: Synthetic oligonucleotide
guagauguuauuguagaac

SEQ ID NO: 1042000 - RNA, 19 nt, Artificial Sequence
  Description of Artificial Sequence: Synthetic oligonucleotide
uaacuuugcuuauaugauc

SEQ ID NO: 1042001 - RNA, 19 nt, Artificial Sequence
  Description of Artificial Sequence: Synthetic oligonucleotide
aaugauuaauaaagauaug

SEQ ID NO: 1042002 - RNA, 19 nt, Artificial Sequence
  Description of Artificial Sequence: Synthetic oligonucleotide
uguuauuguagaacugaau

SEQ ID NO: 1042003 - RNA, 19 nt, Artificial Sequence
  Description of Artificial Sequence: Synthetic oligonucleotide
caauaaugauuaauaaaga

SEQ ID NO: 1042004 - RNA, 19 nt, Artificial Sequence
  Description of Artificial Sequence: Synthetic oligonucleotide
uguauaccuggcuucgggc

SEQ ID NO: 1042005 - RNA, 19 nt, Artificial Sequence
  Description of Artificial Sequence: Synthetic oligonucleotide
ucuguuggagaauucuggu

SEQ ID NO: 1042006 - RNA, 19 nt, Artificial Sequence
  Description of Artificial Sequence: Synthetic oligonucleotide
auuuguauaaaugguacua

SEQ ID NO: 1042007 - RNA, 19 nt, Artificial Sequence
  Description of Artificial Sequence: Synthetic oligonucleotide
agauauguguagauaauca

SEQ ID NO: 1042008 - RNA, 19 nt, Artificial Sequence
  Description of Artificial Sequence: Synthetic oligonucleotide
uaccucaaagauacuuucc

SEQ ID NO: 1042009 - RNA, 19 nt, Artificial Sequence
  Description of Artificial Sequence: Synthetic oligonucleotide
aagauacuuuccuuuggau

SEQ ID NO: 1042010 - RNA, 19 nt, Artificial Sequence
  Description of Artificial Sequence: Synthetic oligonucleotide
uucucucgaggagaaagcg

SEQ ID NO: 1042011 - RNA, 19 nt, Artificial Sequence
  Description of Artificial Sequence: Synthetic oligonucleotide
ugcuggauuaaggagcaag

SEQ ID NO: 1042012 - RNA, 19 nt, Artificial Sequence
  Description of Artificial Sequence: Synthetic oligonucleotide
gagacgacguaacagggca

SEQ ID NO: 1042013 - RNA, 19 nt, Artificial Sequence
  Description of Artificial Sequence: Synthetic oligonucleotide
auaaucaauagcuguuaaa

SEQ ID NO: 1042014 - RNA, 19 nt, Artificial Sequence
  Description of Artificial Sequence: Synthetic oligonucleotide
guagauaaucaauagcugu

SEQ ID NO: 1042015 - RNA, 19 nt, Artificial Sequence
  Description of Artificial Sequence: Synthetic oligonucleotide
uuuacuuagccagaugaua

SEQ ID NO: 1042016 - RNA, 19 nt, Artificial Sequence
  Description of Artificial Sequence: Synthetic oligonucleotide
agcaguaugaaguuaccua

SEQ ID NO: 1042017 - RNA, 19 nt, Artificial Sequence
  Description of Artificial Sequence: Synthetic oligonucleotide
agauacuuuccuuuggaua

SEQ ID NO: 1042018 - RNA, 19 nt, Artificial Sequence
  Description of Artificial Sequence: Synthetic oligonucleotide
guauauaccgcuauaccca

SEQ ID NO: 1042019 - RNA, 19 nt, Artificial Sequence
  Description of Artificial Sequence: Synthetic oligonucleotide
uaaaugguacuaccuacua

SEQ ID NO: 1042020 - RNA, 19 nt, Artificial Sequence
  Description of Artificial Sequence: Synthetic oligonucleotide
guguagauaaucaauagcu

SEQ ID NO: 1042021 - RNA, 19 nt, Artificial Sequence
  Description of Artificial Sequence: Synthetic oligonucleotide
uugagauaacuguacucga

SEQ ID NO: 1042022 - RNA, 19 nt, Artificial Sequence
  Description of Artificial Sequence: Synthetic oligonucleotide
uacuuagccagaugauacc

SEQ ID NO: 1042023 - RNA, 19 nt, Artificial Sequence
  Description of Artificial Sequence: Synthetic oligonucleotide
uuagccagaugauaccuau

SEQ ID NO: 1042024 - RNA, 19 nt, Artificial Sequence
  Description of Artificial Sequence: Synthetic oligonucleotide
aguguuuuacacaugccca

SEQ ID NO: 1042025 - RNA, 19 nt, Artificial Sequence
  Description of Artificial Sequence: Synthetic oligonucleotide
uggaacaauaaugauuaau

SEQ ID NO: 1042026 - RNA, 19 nt, Artificial Sequence
  Description of Artificial Sequence: Synthetic oligonucleotide
uccuguccguaucauacug

SEQ ID NO: 1042027 - RNA, 19 nt, Artificial Sequence
  Description of Artificial Sequence: Synthetic oligonucleotide
ucgucuaggagaaucccuc

SEQ ID NO: 1042028 - RNA, 19 nt, Artificial Sequence
  Description of Artificial Sequence: Synthetic oligonucleotide
guagauaggaugauuuuga

SEQ ID NO: 1042029 - RNA, 19 nt, Artificial Sequence
  Description of Artificial Sequence: Synthetic oligonucleotide
guccguaucauacuguuaa

SEQ ID NO: 1042030 - RNA, 19 nt, Artificial Sequence
  Description of Artificial Sequence: Synthetic oligonucleotide
guauaccuggcuucgggcc

SEQ ID NO: 1042031 - RNA, 19 nt, Artificial Sequence
  Description of Artificial Sequence: Synthetic oligonucleotide
ugucucagauguucugucc

SEQ ID NO: 1042032 - RNA, 19 nt, Artificial Sequence
  Description of Artificial Sequence: Synthetic oligonucleotide
uuucucucagucucuuuga

SEQ ID NO: 1042033 - RNA, 19 nt, Artificial Sequence
  Description of Artificial Sequence: Synthetic oligonucleotide
aguaugaaguuaccuagua

SEQ ID NO: 1042034 - RNA, 19 nt, Artificial Sequence
  Description of Artificial Sequence: Synthetic oligonucleotide
ggaguguccauuugauugg

SEQ ID NO: 1042035 - RNA, 19 nt, Artificial Sequence
  Description of Artificial Sequence: Synthetic oligonucleotide
aguccuuuaagaaaagcau

SEQ ID NO: 1042036 - RNA, 19 nt, Artificial Sequence
  Description of Artificial Sequence: Synthetic oligonucleotide
uguaacaacgcaugauauu

SEQ ID NO: 1042037 - RNA, 19 nt, Artificial Sequence
  Description of Artificial Sequence: Synthetic oligonucleotide
augcauuaacugcuaagca

SEQ ID NO: 1042038 - RNA, 19 nt, Artificial Sequence
  Description of Artificial Sequence: Synthetic oligonucleotide
guauaaaugguacuaccua

SEQ ID NO: 1042039 - RNA, 19 nt, Artificial Sequence
  Description of Artificial Sequence: Synthetic oligonucleotide
cucgcuuccaucgucuagg

SEQ ID NO: 1042040 - RNA, 19 nt, Artificial Sequence
  Description of Artificial Sequence: Synthetic oligonucleotide
ggcuguauagccuagaagu

SEQ ID NO: 1042041 - RNA, 19 nt, Artificial Sequence
  Description of Artificial Sequence: Synthetic oligonucleotide
ugcgaguacuucauggcaa

SEQ ID NO: 1042042 - RNA, 19 nt, Artificial Sequence
  Description of Artificial Sequence: Synthetic oligonucleotide
aguuaccuaguaacuuugc

SEQ ID NO: 1042043 - RNA, 19 nt, Artificial Sequence
  Description of Artificial Sequence: Synthetic oligonucleotide
uauaccuggcuucgggccu

SEQ ID NO: 1042044 - RNA, 19 nt, Artificial Sequence
  Description of Artificial Sequence: Synthetic oligonucleotide
ugugagucgaguuggugua

SEQ ID NO: 1042045 - RNA, 19 nt, Artificial Sequence
  Description of Artificial Sequence: Synthetic oligonucleotide
ggaacaauaaugauuaaua

SEQ ID NO: 1042046 - RNA, 19 nt, Artificial Sequence
  Description of Artificial Sequence: Synthetic oligonucleotide
ggauuauuaauccaacuua

SEQ ID NO: 1042047 - RNA, 19 nt, Artificial Sequence
  Description of Artificial Sequence: Synthetic oligonucleotide
uauacccagucggagagcu

SEQ ID NO: 1042048 - RNA, 19 nt, Artificial Sequence
  Description of Artificial Sequence: Synthetic oligonucleotide
ugaaguuaccuaguaacuu

SEQ ID NO: 1042049 - RNA, 19 nt, Artificial Sequence
  Description of Artificial Sequence: Synthetic oligonucleotide
auaaaugguacuaccuacu

SEQ ID NO: 1042050 - RNA, 19 nt, Artificial Sequence
  Description of Artificial Sequence: Synthetic oligonucleotide
auaaagauauguguagaua

SEQ ID NO: 1042051 - RNA, 19 nt, Artificial Sequence
  Description of Artificial Sequence: Synthetic oligonucleotide
uuugauuggccugcgagua

SEQ ID NO: 1042052 - RNA, 19 nt, Artificial Sequence
  Description of Artificial Sequence: Synthetic oligonucleotide
auuacuggacuggaaucuc

SEQ ID NO: 1042053 - RNA, 19 nt, Artificial Sequence
  Description of Artificial Sequence: Synthetic oligonucleotide
ccuuagacaugcuauguag

SEQ ID NO: 1042054 - RNA, 19 nt, Artificial Sequence
  Description of Artificial Sequence: Synthetic oligonucleotide
caacgcaugauauucugga

SEQ ID NO: 1042055 - RNA, 19 nt, Artificial Sequence
  Description of Artificial Sequence: Synthetic oligonucleotide
gaaccauaucuacugggga

SEQ ID NO: 1042056 - RNA, 19 nt, Artificial Sequence
  Description of Artificial Sequence: Synthetic oligonucleotide
uccauaccggagacuaacc

SEQ ID NO: 1042057 - RNA, 19 nt, Artificial Sequence
  Description of Artificial Sequence: Synthetic oligonucleotide
accauaucuacuggggaag

SEQ ID NO: 1042058 - RNA, 19 nt, Artificial Sequence
  Description of Artificial Sequence: Synthetic oligonucleotide
uuugcaggugacucgcuuc

SEQ ID NO: 1042059 - RNA, 19 nt, Artificial Sequence
  Description of Artificial Sequence: Synthetic oligonucleotide
uugcuuauaugauccaauu

SEQ ID NO: 1042060 - RNA, 19 nt, Artificial Sequence
  Description of Artificial Sequence: Synthetic oligonucleotide
gaagggaucguaguacuca

SEQ ID NO: 1042061 - RNA, 19 nt, Artificial Sequence
  Description of Artificial Sequence: Synthetic oligonucleotide
uaauaacugcuggauuaag

SEQ ID NO: 1042062 - RNA, 19 nt, Artificial Sequence
  Description of Artificial Sequence: Synthetic oligonucleotide
ggagacuaaccucagugug

SEQ ID NO: 1042063 - RNA, 19 nt, Artificial Sequence
  Description of Artificial Sequence: Synthetic oligonucleotide
uuguuuuauguagauguua

SEQ ID NO: 1042064 - RNA, 19 nt, Artificial Sequence
  Description of Artificial Sequence: Synthetic oligonucleotide
auacuuuccuuuggauagc

SEQ ID NO: 1042065 - RNA, 19 nt, Artificial Sequence
  Description of Artificial Sequence: Synthetic oligonucleotide
uuugagucaggguuacaua

SEQ ID NO: 1042066 - RNA, 19 nt, Artificial Sequence
  Description of Artificial Sequence: Synthetic oligonucleotide
aguccuguaacaacgcaug

SEQ ID NO: 1042067 - RNA, 19 nt, Artificial Sequence
  Description of Artificial Sequence: Synthetic oligonucleotide
aagggaucguaguacucaa

SEQ ID NO: 1042068 - RNA, 19 nt, Artificial Sequence
  Description of Artificial Sequence: Synthetic oligonucleotide
uagaacugaaugaggucuc

SEQ ID NO: 1042069 - RNA, 19 nt, Artificial Sequence
  Description of Artificial Sequence: Synthetic oligonucleotide
cuguacucgacgaggggag

SEQ ID NO: 1042070 - RNA, 19 nt, Artificial Sequence
  Description of Artificial Sequence: Synthetic oligonucleotide
gcuauacccagucggagag

SEQ ID NO: 1042071 - RNA, 19 nt, Artificial Sequence
  Description of Artificial Sequence: Synthetic oligonucleotide
auaucuacuggggaaggga

SEQ ID NO: 1042072 - RNA, 19 nt, Artificial Sequence
  Description of Artificial Sequence: Synthetic oligonucleotide
gugaaccucggucauuagc

SEQ ID NO: 1042073 - RNA, 19 nt, Artificial Sequence
  Description of Artificial Sequence: Synthetic oligonucleotide
aggaggaguguccauuuga

SEQ ID NO: 1042074 - RNA, 19 nt, Artificial Sequence
  Description of Artificial Sequence: Synthetic oligonucleotide
uuaguucuguuggagaauu

SEQ ID NO: 1042075 - RNA, 19 nt, Artificial Sequence
  Description of Artificial Sequence: Synthetic oligonucleotide
gguaaggugcuguuugacc

SEQ ID NO: 1042076 - RNA, 19 nt, Artificial Sequence
  Description of Artificial Sequence: Synthetic oligonucleotide
uuccauaccggagacuaac

SEQ ID NO: 1042077 - RNA, 19 nt, Artificial Sequence
  Description of Artificial Sequence: Synthetic oligonucleotide
cuuuggauagcuaccucca

SEQ ID NO: 1042078 - RNA, 19 nt, Artificial Sequence
  Description of Artificial Sequence: Synthetic oligonucleotide
cuacaucuuggagacgacg

SEQ ID NO: 1042079 - RNA, 19 nt, Artificial Sequence
  Description of Artificial Sequence: Synthetic oligonucleotide
agagugccuggagaugucc

SEQ ID NO: 1042080 - RNA, 19 nt, Artificial Sequence
  Description of Artificial Sequence: Synthetic oligonucleotide
auaccggagacuaaccuca

SEQ ID NO: 1042081 - RNA, 19 nt, Artificial Sequence
  Description of Artificial Sequence: Synthetic oligonucleotide
uggcucugucuuuauuuag

SEQ ID NO: 1042082 - RNA, 19 nt, Artificial Sequence
  Description of Artificial Sequence: Synthetic oligonucleotide
uguuuuacacaugcccaga

SEQ ID NO: 1042083 - RNA, 19 nt, Artificial Sequence
  Description of Artificial Sequence: Synthetic oligonucleotide
agcuaccuccaaaaggaac

SEQ ID NO: 1042084 - RNA, 19 nt, Artificial Sequence
  Description of Artificial Sequence: Synthetic oligonucleotide
gggcagaaugauuuucugg

SEQ ID NO: 1042085 - RNA, 19 nt, Artificial Sequence
  Description of Artificial Sequence: Synthetic oligonucleotide
uggccuuagacaugcuaug

SEQ ID NO: 1042086 - RNA, 19 nt, Artificial Sequence
  Description of Artificial Sequence: Synthetic oligonucleotide
ugacucgcuuccaucgucu

SEQ ID NO: 1042087 - RNA, 19 nt, Artificial Sequence
  Description of Artificial Sequence: Synthetic oligonucleotide
acuuagccagaugauaccu

SEQ ID NO: 1042088 - RNA, 19 nt, Artificial Sequence
  Description of Artificial Sequence: Synthetic oligonucleotide
acaacgcaugauauucugg

SEQ ID NO: 1042089 - RNA, 19 nt, Artificial Sequence
  Description of Artificial Sequence: Synthetic oligonucleotide
agcaagcucccauaauccu

SEQ ID NO: 1042090 - RNA, 19 nt, Artificial Sequence
  Description of Artificial Sequence: Synthetic oligonucleotide
auaccgcuauacccagucg

SEQ ID NO: 1042091 - RNA, 19 nt, Artificial Sequence
  Description of Artificial Sequence: Synthetic oligonucleotide
acaugcccagaauguguac

SEQ ID NO: 1042092 - RNA, 19 nt, Artificial Sequence
  Description of Artificial Sequence: Synthetic oligonucleotide
auguaacaccacuaccaca

SEQ ID NO: 1042093 - RNA, 19 nt, Artificial Sequence
  Description of Artificial Sequence: Synthetic oligonucleotide
cugaguccuguaacaacgc

SEQ ID NO: 1042094 - RNA, 19 nt, Artificial Sequence
  Description of Artificial Sequence: Synthetic oligonucleotide
cuuugaugggcuguugcug

SEQ ID NO: 1042095 - RNA, 19 nt, Artificial Sequence
  Description of Artificial Sequence: Synthetic oligonucleotide
accuaaauucuccaaccua

SEQ ID NO: 1042096 - RNA, 19 nt, Artificial Sequence
  Description of Artificial Sequence: Synthetic oligonucleotide
uagaagucuuguacuuacu

SEQ ID NO: 1042097 - RNA, 19 nt, Artificial Sequence
  Description of Artificial Sequence: Synthetic oligonucleotide
gaaguuaccuaguaacuuu

SEQ ID NO: 1042098 - RNA, 19 nt, Artificial Sequence
  Description of Artificial Sequence: Synthetic oligonucleotide
aucauacuguuaauuucuc

SEQ ID NO: 1042099 - RNA, 19 nt, Artificial Sequence
  Description of Artificial Sequence: Synthetic oligonucleotide
cuguggaacugguaaggug

SEQ ID NO: 1042100 - RNA, 19 nt, Artificial Sequence
  Description of Artificial Sequence: Synthetic oligonucleotide
ugcauuuuacagcccuaaa

SEQ ID NO: 1042101 - RNA, 19 nt, Artificial Sequence
  Description of Artificial Sequence: Synthetic oligonucleotide
ucucgaggagaaagcguug

SEQ ID NO: 1042102 - RNA, 19 nt, Artificial Sequence
  Description of Artificial Sequence: Synthetic oligonucleotide
uaaggagcaagcucccaua

SEQ ID NO: 1042103 - RNA, 19 nt, Artificial Sequence
  Description of Artificial Sequence: Synthetic oligonucleotide
agggcagaaugauuuucug

SEQ ID NO: 1042104 - RNA, 19 nt, Artificial Sequence
  Description of Artificial Sequence: Synthetic oligonucleotide
aucguaguacucaaaggga

SEQ ID NO: 1042105 - RNA, 19 nt, Artificial Sequence
  Description of Artificial Sequence: Synthetic oligonucleotide
uuuaguucuguuggagaau

SEQ ID NO: 1042106 - RNA, 19 nt, Artificial Sequence
  Description of Artificial Sequence: Synthetic oligonucleotide
cacaugguugggccaaacc

SEQ ID NO: 1042107 - RNA, 19 nt, Artificial Sequence
  Description of Artificial Sequence: Synthetic oligonucleotide
uugggccaaaccauaugaa

SEQ ID NO: 1042108 - RNA, 19 nt, Artificial Sequence
  Description of Artificial Sequence: Synthetic oligonucleotide
gaguugguguaggaggggc

SEQ ID NO: 1042109 - RNA, 19 nt, Artificial Sequence
  Description of Artificial Sequence: Synthetic oligonucleotide
auguagauaggaugauuuu

SEQ ID NO: 1042110 - RNA, 19 nt, Artificial Sequence
  Description of Artificial Sequence: Synthetic oligonucleotide
gcaugcauuaacugcuaag

SEQ ID NO: 1042111 - RNA, 19 nt, Artificial Sequence
  Description of Artificial Sequence: Synthetic oligonucleotide
gagacuaaccucaguguga

SEQ ID NO: 1042112 - RNA, 19 nt, Artificial Sequence
  Description of Artificial Sequence: Synthetic oligonucleotide
agucaggguuacauauagc

SEQ ID NO: 1042113 - RNA, 19 nt, Artificial Sequence
  Description of Artificial Sequence: Synthetic oligonucleotide
gccugcgaguacuucaugg

SEQ ID NO: 1042114 - RNA, 19 nt, Artificial Sequence
  Description of Artificial Sequence: Synthetic oligonucleotide
cucgaggagaaagcguugc

SEQ ID NO: 1042115 - RNA, 19 nt, Artificial Sequence
  Description of Artificial Sequence: Synthetic oligonucleotide
agaaagcguugcuucauuu

SEQ ID NO: 1042116 - RNA, 19 nt, Artificial Sequence
  Description of Artificial Sequence: Synthetic oligonucleotide
ucgaggagaaagcguugcu

SEQ ID NO: 1042117 - RNA, 19 nt, Artificial Sequence
  Description of Artificial Sequence: Synthetic oligonucleotide
uaaggugcuguuugaccuc

SEQ ID NO: 1042118 - RNA, 19 nt, Artificial Sequence
  Description of Artificial Sequence: Synthetic oligonucleotide
ugcaugcauuaacugcuaa

SEQ ID NO: 1042119 - RNA, 19 nt, Artificial Sequence
  Description of Artificial Sequence: Synthetic oligonucleotide
cuuccaucgucuaggagaa

SEQ ID NO: 1042120 - RNA, 19 nt, Artificial Sequence
  Description of Artificial Sequence: Synthetic oligonucleotide
uacccagucggagagcuuc

SEQ ID NO: 1042121 - RNA, 19 nt, Artificial Sequence
  Description of Artificial Sequence: Synthetic oligonucleotide
acucgcuuccaucgucuag

SEQ ID NO: 1042122 - RNA, 19 nt, Artificial Sequence
  Description of Artificial Sequence: Synthetic oligonucleotide
acggcagacacaguguagu

SEQ ID NO: 1042123 - RNA, 19 nt, Artificial Sequence
  Description of Artificial Sequence: Synthetic oligonucleotide
gccuuaaacuccugguucc

SEQ ID NO: 1042124 - RNA, 19 nt, Artificial Sequence
  Description of Artificial Sequence: Synthetic oligonucleotide
gcaguucaugugaagacag

SEQ ID NO: 1042125 - RNA, 19 nt, Artificial Sequence
  Description of Artificial Sequence: Synthetic oligonucleotide
caccacuaccacacacugg

SEQ ID NO: 1042126 - RNA, 19 nt, Artificial Sequence
  Description of Artificial Sequence: Synthetic oligonucleotide
agacuaaccucagugugaa

SEQ ID NO: 1042127 - RNA, 19 nt, Artificial Sequence
  Description of Artificial Sequence: Synthetic oligonucleotide
caucgucuaggagaauccc

SEQ ID NO: 1042128 - RNA, 19 nt, Artificial Sequence
  Description of Artificial Sequence: Synthetic oligonucleotide
ucucagauguucuguccua

SEQ ID NO: 1042129 - RNA, 19 nt, Artificial Sequence
  Description of Artificial Sequence: Synthetic oligonucleotide
ugugaaccucggucauuag

SEQ ID NO: 1042130 - RNA, 19 nt, Artificial Sequence
  Description of Artificial Sequence: Synthetic oligonucleotide
uacuuuccuuuggauagcu

SEQ ID NO: 1042131 - RNA, 19 nt, Artificial Sequence
  Description of Artificial Sequence: Synthetic oligonucleotide
guuugaccucauuacugga

SEQ ID NO: 1042132 - RNA, 19 nt, Artificial Sequence
  Description of Artificial Sequence: Synthetic oligonucleotide
uuuccauaccggagacuaa

SEQ ID NO: 1042133 - RNA, 19 nt, Artificial Sequence
  Description of Artificial Sequence: Synthetic oligonucleotide
gacgaggggagccuguucu

SEQ ID NO: 1042134 - RNA, 19 nt, Artificial Sequence
  Description of Artificial Sequence: Synthetic oligonucleotide
aggaugauuuugagauaac

SEQ ID NO: 1042135 - RNA, 19 nt, Artificial Sequence
  Description of Artificial Sequence: Synthetic oligonucleotide
aagagugccuggagauguc

SEQ ID NO: 1042136 - RNA, 19 nt, Artificial Sequence
  Description of Artificial Sequence: Synthetic oligonucleotide
augugaagacaguuuccau

SEQ ID NO: 1042137 - RNA, 19 nt, Artificial Sequence
  Description of Artificial Sequence: Synthetic oligonucleotide
gcuggauuaaggagcaagc

SEQ ID NO: 1042138 - RNA, 19 nt, Artificial Sequence
  Description of Artificial Sequence: Synthetic oligonucleotide
aaagggaacaggagccuua

SEQ ID NO: 1042139 - RNA, 19 nt, Artificial Sequence
  Description of Artificial Sequence: Synthetic oligonucleotide
uguccguaucauacuguua

SEQ ID NO: 1042140 - RNA, 19 nt, Artificial Sequence
  Description of Artificial Sequence: Synthetic oligonucleotide
accaauuacacagguucau

SEQ ID NO: 1042141 - RNA, 19 nt, Artificial Sequence
  Description of Artificial Sequence: Synthetic oligonucleotide
ugguaaggugcuguuugac

SEQ ID NO: 1042142 - RNA, 19 nt, Artificial Sequence
  Description of Artificial Sequence: Synthetic oligonucleotide
uaacugcuaagcaguucau

SEQ ID NO: 1042143 - RNA, 19 nt, Artificial Sequence
  Description of Artificial Sequence: Synthetic oligonucleotide
guuacagugccaugcauuu

SEQ ID NO: 1042144 - RNA, 19 nt, Artificial Sequence
  Description of Artificial Sequence: Synthetic oligonucleotide
caccaauuacacagguuca

SEQ ID NO: 1042145 - RNA, 19 nt, Artificial Sequence
  Description of Artificial Sequence: Synthetic oligonucleotide
ccaucgucuaggagaaucc

SEQ ID NO: 1042146 - RNA, 19 nt, Artificial Sequence
  Description of Artificial Sequence: Synthetic oligonucleotide
cuaguaacuuugcuuauau

SEQ ID NO: 1042147 - RNA, 19 nt, Artificial Sequence
  Description of Artificial Sequence: Synthetic oligonucleotide
ccugcgaguacuucauggc

SEQ ID NO: 1042148 - RNA, 19 nt, Artificial Sequence
  Description of Artificial Sequence: Synthetic oligonucleotide
cacggcagacacaguguag

SEQ ID NO: 1042149 - RNA, 19 nt, Artificial Sequence
  Description of Artificial Sequence: Synthetic oligonucleotide
uagcuaccuccaaaaggaa

SEQ ID NO: 1042150 - RNA, 19 nt, Artificial Sequence
  Description of Artificial Sequence: Synthetic oligonucleotide
ggcucuaauaacugcugga

SEQ ID NO: 1042151 - RNA, 19 nt, Artificial Sequence
  Description of Artificial Sequence: Synthetic oligonucleotide
aucgucuaggagaaucccu

SEQ ID NO: 1042152 - RNA, 19 nt, Artificial Sequence
  Description of Artificial Sequence: Synthetic oligonucleotide
gaaagcguugcuucauuuu

SEQ ID NO: 1042153 - RNA, 19 nt, Artificial Sequence
  Description of Artificial Sequence: Synthetic oligonucleotide
uguacucgacgaggggagc

SEQ ID NO: 1042154 - RNA, 19 nt, Artificial Sequence
  Description of Artificial Sequence: Synthetic oligonucleotide
cuaaccucagugugaaccu

SEQ ID NO: 1042155 - RNA, 19 nt, Artificial Sequence
  Description of Artificial Sequence: Synthetic oligonucleotide
cugcgaguacuucauggca

SEQ ID NO: 1042156 - RNA, 19 nt, Artificial Sequence
  Description of Artificial Sequence: Synthetic oligonucleotide
agucggagagcuucccuuu

SEQ ID NO: 1042157 - RNA, 19 nt, Artificial Sequence
  Description of Artificial Sequence: Synthetic oligonucleotide
guacucgacgaggggagcc

SEQ ID NO: 1042158 - RNA, 19 nt, Artificial Sequence
  Description of Artificial Sequence: Synthetic oligonucleotide
accucauuacuggacugga

SEQ ID NO: 1042159 - RNA, 19 nt, Artificial Sequence
  Description of Artificial Sequence: Synthetic oligonucleotide
uuggcuccugugagucgag

SEQ ID NO: 1042160 - RNA, 19 nt, Artificial Sequence
  Description of Artificial Sequence: Synthetic oligonucleotide
gagucgaguugguguagga

SEQ ID NO: 1042161 - RNA, 19 nt, Artificial Sequence
  Description of Artificial Sequence: Synthetic oligonucleotide
uugaugggcuguugcugaa

SEQ ID NO: 1042162 - RNA, 19 nt, Artificial Sequence
  Description of Artificial Sequence: Synthetic oligonucleotide
ucgcuuccaucgucuagga

SEQ ID NO: 1042163 - RNA, 19 nt, Artificial Sequence
  Description of Artificial Sequence: Synthetic oligonucleotide
gugacucgcuuccaucguc

SEQ ID NO: 1042164 - RNA, 19 nt, Artificial Sequence
  Description of Artificial Sequence: Synthetic oligonucleotide
uggcugaguccuguaacaa

SEQ ID NO: 1042165 - RNA, 19 nt, Artificial Sequence
  Description of Artificial Sequence: Synthetic oligonucleotide
cuuuacuuagccagaugau

SEQ ID NO: 1042166 - RNA, 19 nt, Artificial Sequence
  Description of Artificial Sequence: Synthetic oligonucleotide
auagcccaaguuuggccuu

SEQ ID NO: 1042167 - RNA, 19 nt, Artificial Sequence
  Description of Artificial Sequence: Synthetic oligonucleotide
aggggagccuguucuuaca

SEQ ID NO: 1042168 - RNA, 19 nt, Artificial Sequence
  Description of Artificial Sequence: Synthetic oligonucleotide
cacaugcccagaaugugua

SEQ ID NO: 1042169 - RNA, 19 nt, Artificial Sequence
  Description of Artificial Sequence: Synthetic oligonucleotide
gguuacauauagcccaagu

SEQ ID NO: 1042170 - RNA, 19 nt, Artificial Sequence
  Description of Artificial Sequence: Synthetic oligonucleotide
cuuagccagaugauaccua

SEQ ID NO: 1042171 - RNA, 19 nt, Artificial Sequence
  Description of Artificial Sequence: Synthetic oligonucleotide
guaacaccacuaccacaca

SEQ ID NO: 1042172 - RNA, 19 nt, Artificial Sequence
  Description of Artificial Sequence: Synthetic oligonucleotide
cucucgaggagaaagcguu

SEQ ID NO: 1042173 - RNA, 19 nt, Artificial Sequence
  Description of Artificial Sequence: Synthetic oligonucleotide
accgcuauacccagucgga

SEQ ID NO: 1042174 - RNA, 19 nt, Artificial Sequence
  Description of Artificial Sequence: Synthetic oligonucleotide
cuauacccagucggagagc

SEQ ID NO: 1042175 - RNA, 19 nt, Artificial Sequence
  Description of Artificial Sequence: Synthetic oligonucleotide
gcuaccuccaaaaggaacu

SEQ ID NO: 1042176 - RNA, 19 nt, Artificial Sequence
  Description of Artificial Sequence: Synthetic oligonucleotide
gaaccucggucauuagcua

SEQ ID NO: 1042177 - RNA, 19 nt, Artificial Sequence
  Description of Artificial Sequence: Synthetic oligonucleotide
ggagacgacguaacagggc

SEQ ID NO: 1042178 - RNA, 19 nt, Artificial Sequence
  Description of Artificial Sequence: Synthetic oligonucleotide
gagcaguaugaaguuaccu

SEQ ID NO: 1042179 - RNA, 19 nt, Artificial Sequence
  Description of Artificial Sequence: Synthetic oligonucleotide
agcccuaaagugccaccaa

SEQ ID NO: 1042180 - RNA, 19 nt, Artificial Sequence
  Description of Artificial Sequence: Synthetic oligonucleotide
ccuuaggauuauuaaucca

SEQ ID NO: 1042181 - RNA, 19 nt, Artificial Sequence
  Description of Artificial Sequence: Synthetic oligonucleotide
caagagugccuggagaugu

SEQ ID NO: 1042182 - RNA, 19 nt, Artificial Sequence
  Description of Artificial Sequence: Synthetic oligonucleotide
gcuguauagccuagaaguc

SEQ ID NO: 1042183 - RNA, 19 nt, Artificial Sequence
  Description of Artificial Sequence: Synthetic oligonucleotide
gugugaaccucggucauua

SEQ ID NO: 1042184 - RNA, 19 nt, Artificial Sequence
  Description of Artificial Sequence: Synthetic oligonucleotide
gacuaaccucagugugaac

SEQ ID NO: 1042185 - RNA, 19 nt, Artificial Sequence
  Description of Artificial Sequence: Synthetic oligonucleotide
ccuuaggcaagagugccug

SEQ ID NO: 1042186 - RNA, 19 nt, Artificial Sequence
  Description of Artificial Sequence: Synthetic oligonucleotide
acguaacagggcagaauga

SEQ ID NO: 1042187 - RNA, 19 nt, Artificial Sequence
  Description of Artificial Sequence: Synthetic oligonucleotide
agacgacguaacagggcag

SEQ ID NO: 1042188 - RNA, 19 nt, Artificial Sequence
  Description of Artificial Sequence: Synthetic oligonucleotide
gugagucgaguugguguag

SEQ ID NO: 1042189 - RNA, 19 nt, Artificial Sequence
  Description of Artificial Sequence: Synthetic oligonucleotide
cacuaccacacacuggagu

SEQ ID NO: 1042190 - RNA, 19 nt, Artificial Sequence
  Description of Artificial Sequence: Synthetic oligonucleotide
cuguccuacaacacauggu

SEQ ID NO: 1042191 - RNA, 19 nt, Artificial Sequence
  Description of Artificial Sequence: Synthetic oligonucleotide
ccauaucuacuggggaagg

SEQ ID NO: 1042192 - RNA, 19 nt, Artificial Sequence
  Description of Artificial Sequence: Synthetic oligonucleotide
augguacuaccuacuaaua

SEQ ID NO: 1042193 - RNA, 19 nt, Artificial Sequence
  Description of Artificial Sequence: Synthetic oligonucleotide
aacacaugguugggccaaa

SEQ ID NO: 1042194 - RNA, 19 nt, Artificial Sequence
  Description of Artificial Sequence: Synthetic oligonucleotide
aggguuacauauagcccaa

SEQ ID NO: 1042195 - RNA, 19 nt, Artificial Sequence
  Description of Artificial Sequence: Synthetic oligonucleotide
cuggauuaaggagcaagcu

SEQ ID NO: 1042196 - RNA, 19 nt, Artificial Sequence
  Description of Artificial Sequence: Synthetic oligonucleotide
cucuugugugcugggauaa

SEQ ID NO: 1042197 - RNA, 19 nt, Artificial Sequence
  Description of Artificial Sequence: Synthetic oligonucleotide
caacacaugguugggccaa

SEQ ID NO: 1042198 - RNA, 19 nt, Artificial Sequence
  Description of Artificial Sequence: Synthetic oligonucleotide
augguugggccaaaccaua

SEQ ID NO: 1042199 - RNA, 19 nt, Artificial Sequence
  Description of Artificial Sequence: Synthetic oligonucleotide
gagaaagcguugcuucauu

SEQ ID NO: 1042200 - RNA, 19 nt, Artificial Sequence
  Description of Artificial Sequence: Synthetic oligonucleotide
cagcccuaaagugccacca

SEQ ID NO: 1042201 - RNA, 19 nt, Artificial Sequence
  Description of Artificial Sequence: Synthetic oligonucleotide
gcaagagugccuggagaug

SEQ ID NO: 1042202 - RNA, 19 nt, Artificial Sequence
  Description of Artificial Sequence: Synthetic oligonucleotide
auauaccgcuauacccagu

SEQ ID NO: 1042203 - RNA, 19 nt, Artificial Sequence
  Description of Artificial Sequence: Synthetic oligonucleotide
gaacugguaaggugcuguu

SEQ ID NO: 1042204 - RNA, 19 nt, Artificial Sequence
  Description of Artificial Sequence: Synthetic oligonucleotide
auguguacauuaaguccuu

SEQ ID NO: 1042205 - RNA, 19 nt, Artificial Sequence
  Description of Artificial Sequence: Synthetic oligonucleotide
agugugaaccucggucauu

SEQ ID NO: 1042206 - RNA, 19 nt, Artificial Sequence
  Description of Artificial Sequence: Synthetic oligonucleotide
gagaggaggaguguccauu

SEQ ID NO: 1042207 - RNA, 19 nt, Artificial Sequence
  Description of Artificial Sequence: Synthetic oligonucleotide
acucgacgaggggagccug

SEQ ID NO: 1042208 - RNA, 19 nt, Artificial Sequence
  Description of Artificial Sequence: Synthetic oligonucleotide
cuguccguaucauacuguu

SEQ ID NO: 1042209 - RNA, 19 nt, Artificial Sequence
  Description of Artificial Sequence: Synthetic oligonucleotide
ugcccagaauguguacauu

SEQ ID NO: 1042210 - RNA, 19 nt, Artificial Sequence
  Description of Artificial Sequence: Synthetic oligonucleotide
gccuuagacaugcuaugua

SEQ ID NO: 1042211 - RNA, 19 nt, Artificial Sequence
  Description of Artificial Sequence: Synthetic oligonucleotide
agcccaaguuuggccuuag

SEQ ID NO: 1042212 - RNA, 19 nt, Artificial Sequence
  Description of Artificial Sequence: Synthetic oligonucleotide
guaacagggcagaaugauu

SEQ ID NO: 1042213 - RNA, 19 nt, Artificial Sequence
  Description of Artificial Sequence: Synthetic oligonucleotide
cccagaauguguacauuaa

SEQ ID NO: 1042214 - RNA, 19 nt, Artificial Sequence
  Description of Artificial Sequence: Synthetic oligonucleotide
cugcaugcauuaacugcua

SEQ ID NO: 1042215 - RNA, 19 nt, Artificial Sequence
  Description of Artificial Sequence: Synthetic oligonucleotide
gcucuaauaacugcuggau

SEQ ID NO: 1042216 - RNA, 19 nt, Artificial Sequence
  Description of Artificial Sequence: Synthetic oligonucleotide
ucgacgaggggagccuguu

SEQ ID NO: 1042217 - RNA, 19 nt, Artificial Sequence
  Description of Artificial Sequence: Synthetic oligonucleotide
ggcucugucuuuauuuagu

SEQ ID NO: 1042218 - RNA, 19 nt, Artificial Sequence
  Description of Artificial Sequence: Synthetic oligonucleotide
gguuacagugccaugcauu

SEQ ID NO: 1042219 - RNA, 19 nt, Artificial Sequence
  Description of Artificial Sequence: Synthetic oligonucleotide
agggaucguaguacucaaa

SEQ ID NO: 1042220 - RNA, 19 nt, Artificial Sequence
  Description of Artificial Sequence: Synthetic oligonucleotide
gaauuaccucaaagauacu

SEQ ID NO: 1042221 - RNA, 19 nt, Artificial Sequence
  Description of Artificial Sequence: Synthetic oligonucleotide
ccacuaccacacacuggag

SEQ ID NO: 1042222 - RNA, 19 nt, Artificial Sequence
  Description of Artificial Sequence: Synthetic oligonucleotide
guggaacugguaaggugcu

SEQ ID NO: 1042223 - RNA, 19 nt, Artificial Sequence
  Description of Artificial Sequence: Synthetic oligonucleotide
cagucggagagcuucccuu

SEQ ID NO: 1042224 - RNA, 19 nt, Artificial Sequence
  Description of Artificial Sequence: Synthetic oligonucleotide
gcacggcagacacagugua

SEQ ID NO: 1042225 - RNA, 19 nt, Artificial Sequence
  Description of Artificial Sequence: Synthetic oligonucleotide
gcuacaucuuggagacgac

SEQ ID NO: 1042226 - RNA, 19 nt, Artificial Sequence
  Description of Artificial Sequence: Synthetic oligonucleotide
ggaggaguguccauuugau

SEQ ID NO: 1042227 - RNA, 19 nt, Artificial Sequence
  Description of Artificial Sequence: Synthetic oligonucleotide
ccgcuauacccagucggag

SEQ ID NO: 1042228 - RNA, 19 nt, Artificial Sequence
  Description of Artificial Sequence: Synthetic oligonucleotide
cgcuauacccagucggaga

SEQ ID NO: 1042229 - RNA, 19 nt, Artificial Sequence
  Description of Artificial Sequence: Synthetic oligonucleotide
ggugacucgcuuccaucgu

SEQ ID NO: 1042230 - RNA, 19 nt, Artificial Sequence
  Description of Artificial Sequence: Synthetic oligonucleotide
ggccugcgaguacuucaug

SEQ ID NO: 1042231 - RNA, 19 nt, Artificial Sequence
  Description of Artificial Sequence: Synthetic oligonucleotide
ggccuuagacaugcuaugu

SEQ ID NO: 1042232 - RNA, 19 nt, Artificial Sequence
  Description of Artificial Sequence: Synthetic oligonucleotide
ccuagaagucuuguacuua

SEQ ID NO: 1042233 - RNA, 19 nt, Artificial Sequence
  Description of Artificial Sequence: Synthetic oligonucleotide
ggagucucuccuguccgua

SEQ ID NO: 1042234 - RNA, 19 nt, Artificial Sequence
  Description of Artificial Sequence: Synthetic oligonucleotide
gcccuaaagugccaccaau

SEQ ID NO: 1042235 - RNA, 19 nt, Artificial Sequence
  Description of Artificial Sequence: Synthetic oligonucleotide
gucggagagcuucccuuuu

SEQ ID NO: 1042236 - RNA, 19 nt, Artificial Sequence
  Description of Artificial Sequence: Synthetic oligonucleotide
cucgacgaggggagccugu

SEQ ID NO: 1042237 - RNA, 19 nt, Artificial Sequence
  Description of Artificial Sequence: Synthetic oligonucleotide
cccagucggagagcuuccc

SEQ ID NO: 1042238 - RNA, 19 nt, Artificial Sequence
  Description of Artificial Sequence: Synthetic oligonucleotide
gauuggccugcgaguacuu

SEQ ID NO: 1042239 - RNA, 19 nt, Artificial Sequence
  Description of Artificial Sequence: Synthetic oligonucleotide
cggagacuaaccucagugu

SEQ ID NO: 1042240 - RNA, 19 nt, Artificial Sequence
  Description of Artificial Sequence: Synthetic oligonucleotide
cguaacagggcagaaugau

SEQ ID NO: 1042241 - RNA, 19 nt, Artificial Sequence
  Description of Artificial Sequence: Synthetic oligonucleotide
ccguaucauacuguuaauu

SEQ ID NO: 1042242 - RNA, 19 nt, Artificial Sequence
  Description of Artificial Sequence: Synthetic oligonucleotide
cugcuggauuaaggagcaa

SEQ ID NO: 1042243 - RNA, 19 nt, Artificial Sequence
  Description of Artificial Sequence: Synthetic oligonucleotide
cggucauuagcuacaucuu

SEQ ID NO: 1042244 - RNA, 19 nt, Artificial Sequence
  Description of Artificial Sequence: Synthetic oligonucleotide
aauaguaacaaaucaacac

SEQ ID NO: 1042245 - RNA, 19 nt, Artificial Sequence
  Description of Artificial Sequence: Synthetic oligonucleotide
aaauggauaguuuucagac

SEQ ID NO: 1042246 - RNA, 19 nt, Artificial Sequence
  Description of Artificial Sequence: Synthetic oligonucleotide
uuuagguaggacaagaugg

SEQ ID NO: 1042247 - RNA, 19 nt, Artificial Sequence
  Description of Artificial Sequence: Synthetic oligonucleotide
aacaguugugcuuuuaugc

SEQ ID NO: 1042248 - RNA, 19 nt, Artificial Sequence
  Description of Artificial Sequence: Synthetic oligonucleotide
uguuauacaaauaaggcca

SEQ ID NO: 1042249 - RNA, 19 nt, Artificial Sequence
  Description of Artificial Sequence: Synthetic oligonucleotide
aaauuaguuaguuaguucu

SEQ ID NO: 1042250 - RNA, 19 nt, Artificial Sequence
  Description of Artificial Sequence: Synthetic oligonucleotide
auaugcauacauuacaugg

SEQ ID NO: 1042251 - RNA, 19 nt, Artificial Sequence
  Description of Artificial Sequence: Synthetic oligonucleotide
auguuauacaaauaaggcc

SEQ ID NO: 1042252 - RNA, 19 nt, Artificial Sequence
  Description of Artificial Sequence: Synthetic oligonucleotide
aaaauuaguuaguuaguuc

SEQ ID NO: 1042253 - RNA, 19 nt, Artificial Sequence
  Description of Artificial Sequence: Synthetic oligonucleotide
uuuaguuaaaaucuuuaca

SEQ ID NO: 1042254 - RNA, 19 nt, Artificial Sequence
  Description of Artificial Sequence: Synthetic oligonucleotide
aauucugacacuuuuaaua

SEQ ID NO: 1042255 - RNA, 19 nt, Artificial Sequence
  Description of Artificial Sequence: Synthetic oligonucleotide
gauaaauuuugcuaucucc

SEQ ID NO: 1042256 - RNA, 19 nt, Artificial Sequence
  Description of Artificial Sequence: Synthetic oligonucleotide
aaugaaucaaaugauauau

SEQ ID NO: 1042257 - RNA, 19 nt, Artificial Sequence
  Description of Artificial Sequence: Synthetic oligonucleotide
aucgaaacuuuauuaaccc

SEQ ID NO: 1042258 - RNA, 19 nt, Artificial Sequence
  Description of Artificial Sequence: Synthetic oligonucleotide
agaguuucaagguacuccc

SEQ ID NO: 1042259 - RNA, 19 nt, Artificial Sequence
  Description of Artificial Sequence: Synthetic oligonucleotide
auauauguuauacaaauaa

SEQ ID NO: 1042260 - RNA, 19 nt, Artificial Sequence
  Description of Artificial Sequence: Synthetic oligonucleotide
uuguauauagaacagugac

SEQ ID NO: 1042261 - RNA, 19 nt, Artificial Sequence
  Description of Artificial Sequence: Synthetic oligonucleotide
uuaacauucucuauagcug

SEQ ID NO: 1042262 - RNA, 19 nt, Artificial Sequence
  Description of Artificial Sequence: Synthetic oligonucleotide
aaaaguugaagucccaaca

SEQ ID NO: 1042263 - RNA, 19 nt, Artificial Sequence
  Description of Artificial Sequence: Synthetic oligonucleotide
aauuuaguguucuuguaca

SEQ ID NO: 1042264 - RNA, 19 nt, Artificial Sequence
  Description of Artificial Sequence: Synthetic oligonucleotide
uaucgaaacuuuauuaacc

SEQ ID NO: 1042265 - RNA, 19 nt, Artificial Sequence
  Description of Artificial Sequence: Synthetic oligonucleotide
aaaguugaagucccaacag

SEQ ID NO: 1042266 - RNA, 19 nt, Artificial Sequence
  Description of Artificial Sequence: Synthetic oligonucleotide
agcuguguuauacaguggc

SEQ ID NO: 1042267 - RNA, 19 nt, Artificial Sequence
  Description of Artificial Sequence: Synthetic oligonucleotide
guauauagaacagugaccc

SEQ ID NO: 1042268 - RNA, 19 nt, Artificial Sequence
  Description of Artificial Sequence: Synthetic oligonucleotide
aagccaacaauacacuuag

SEQ ID NO: 1042269 - RNA, 19 nt, Artificial Sequence
  Description of Artificial Sequence: Synthetic oligonucleotide
uaauuaugauuauaaaucu

SEQ ID NO: 1042270 - RNA, 19 nt, Artificial Sequence
  Description of Artificial Sequence: Synthetic oligonucleotide
uguauauagaacagugacc

SEQ ID NO: 1042271 - RNA, 19 nt, Artificial Sequence
  Description of Artificial Sequence: Synthetic oligonucleotide
uuauaaaucucuuuaguua

SEQ ID NO: 1042272 - RNA, 19 nt, Artificial Sequence
  Description of Artificial Sequence: Synthetic oligonucleotide
uauaaaucucuuuaguuaa

SEQ ID NO: 1042273 - RNA, 19 nt, Artificial Sequence
  Description of Artificial Sequence: Synthetic oligonucleotide
uggccaauaagguagaugu

SEQ ID NO: 1042274 - RNA, 19 nt, Artificial Sequence
  Description of Artificial Sequence: Synthetic oligonucleotide
acuaaggccaaguucucgc

SEQ ID NO: 1042275 - RNA, 19 nt, Artificial Sequence
  Description of Artificial Sequence: Synthetic oligonucleotide
ucugacacuuuuaauauuc

SEQ ID NO: 1042276 - RNA, 19 nt, Artificial Sequence
  Description of Artificial Sequence: Synthetic oligonucleotide
aaaguagcucacucccucc

SEQ ID NO: 1042277 - RNA, 19 nt, Artificial Sequence
  Description of Artificial Sequence: Synthetic oligonucleotide
aauaagguagauguuguca

SEQ ID NO: 1042278 - RNA, 19 nt, Artificial Sequence
  Description of Artificial Sequence: Synthetic oligonucleotide
uaugagaguuucaagguac

SEQ ID NO: 1042279 - RNA, 19 nt, Artificial Sequence
  Description of Artificial Sequence: Synthetic oligonucleotide
aaaagugaggcuuccuuca

SEQ ID NO: 1042280 - RNA, 19 nt, Artificial Sequence
  Description of Artificial Sequence: Synthetic oligonucleotide
uguaucgaaacuuuauuaa

SEQ ID NO: 1042281 - RNA, 19 nt, Artificial Sequence
  Description of Artificial Sequence: Synthetic oligonucleotide
auuaugauuauaaaucucu

SEQ ID NO: 1042282 - RNA, 19 nt, Artificial Sequence
  Description of Artificial Sequence: Synthetic oligonucleotide
uuuuaugcagccacguggc

SEQ ID NO: 1042283 - RNA, 19 nt, Artificial Sequence
  Description of Artificial Sequence: Synthetic oligonucleotide
aaguuaaugaacccuuccu

SEQ ID NO: 1042284 - RNA, 19 nt, Artificial Sequence
  Description of Artificial Sequence: Synthetic oligonucleotide
agaaucaaagaguagcaca

SEQ ID NO: 1042285 - RNA, 19 nt, Artificial Sequence
  Description of Artificial Sequence: Synthetic oligonucleotide
gaugcaaccccauuucugc

SEQ ID NO: 1042286 - RNA, 19 nt, Artificial Sequence
  Description of Artificial Sequence: Synthetic oligonucleotide
gauacccuuggacauaaag

SEQ ID NO: 1042287 - RNA, 19 nt, Artificial Sequence
  Description of Artificial Sequence: Synthetic oligonucleotide
aaaugaaucaaaugauaua

SEQ ID NO: 1042288 - RNA, 19 nt, Artificial Sequence
  Description of Artificial Sequence: Synthetic oligonucleotide
uacacuuagaucagaguca

SEQ ID NO: 1042289 - RNA, 19 nt, Artificial Sequence
  Description of Artificial Sequence: Synthetic oligonucleotide
uuuguggauagcuuuaguc

SEQ ID NO: 1042290 - RNA, 19 nt, Artificial Sequence
  Description of Artificial Sequence: Synthetic oligonucleotide
guguacucaagcuugacug

SEQ ID NO: 1042291 - RNA, 19 nt, Artificial Sequence
  Description of Artificial Sequence: Synthetic oligonucleotide
uguggauagcuuuagucug

SEQ ID NO: 1042292 - RNA, 19 nt, Artificial Sequence
  Description of Artificial Sequence: Synthetic oligonucleotide
ugcauaguauauuaaaaua

SEQ ID NO: 1042293 - RNA, 19 nt, Artificial Sequence
  Description of Artificial Sequence: Synthetic oligonucleotide
uuguggauagcuuuagucu

SEQ ID NO: 1042294 - RNA, 19 nt, Artificial Sequence
  Description of Artificial Sequence: Synthetic oligonucleotide
ucaagguagauucucaguu

SEQ ID NO: 1042295 - RNA, 19 nt, Artificial Sequence
  Description of Artificial Sequence: Synthetic oligonucleotide
uucuuauuguauauagaac

SEQ ID NO: 1042296 - RNA, 19 nt, Artificial Sequence
  Description of Artificial Sequence: Synthetic oligonucleotide
aucuaggauacccuuggac

SEQ ID NO: 1042297 - RNA, 19 nt, Artificial Sequence
  Description of Artificial Sequence: Synthetic oligonucleotide
agauaaauuuugcuaucuc

SEQ ID NO: 1042298 - RNA, 19 nt, Artificial Sequence
  Description of Artificial Sequence: Synthetic oligonucleotide
uuuguuaugagaguuucaa

SEQ ID NO: 1042299 - RNA, 19 nt, Artificial Sequence
  Description of Artificial Sequence: Synthetic oligonucleotide
aaaguagaaucaaagagua

SEQ ID NO: 1042300 - RNA, 19 nt, Artificial Sequence
  Description of Artificial Sequence: Synthetic oligonucleotide
uccaauuuaguguucuugu

SEQ ID NO: 1042301 - RNA, 19 nt, Artificial Sequence
  Description of Artificial Sequence: Synthetic oligonucleotide
ucuaaugcacaaacacucc

SEQ ID NO: 1042302 - RNA, 19 nt, Artificial Sequence
  Description of Artificial Sequence: Synthetic oligonucleotide
uugcauaguauauuaaaau

SEQ ID NO: 1042303 - RNA, 19 nt, Artificial Sequence
  Description of Artificial Sequence: Synthetic oligonucleotide
guauacagaggcuggagag

SEQ ID NO: 1042304 - RNA, 19 nt, Artificial Sequence
  Description of Artificial Sequence: Synthetic oligonucleotide
aacguuugaaggauguauc

SEQ ID NO: 1042305 - RNA, 19 nt, Artificial Sequence
  Description of Artificial Sequence: Synthetic oligonucleotide
ucaguugcauuuagguagg

SEQ ID NO: 1042306 - RNA, 19 nt, Artificial Sequence
  Description of Artificial Sequence: Synthetic oligonucleotide
uuucaagguacuccccacg

SEQ ID NO: 1042307 - RNA, 19 nt, Artificial Sequence
  Description of Artificial Sequence: Synthetic oligonucleotide
uguauacagaggcuggaga

SEQ ID NO: 1042308 - RNA, 19 nt, Artificial Sequence
  Description of Artificial Sequence: Synthetic oligonucleotide
cuauagcuguguuauacag

SEQ ID NO: 1042309 - RNA, 19 nt, Artificial Sequence
  Description of Artificial Sequence: Synthetic oligonucleotide
accaaaagaggcuguguac

SEQ ID NO: 1042310 - RNA, 19 nt, Artificial Sequence
  Description of Artificial Sequence: Synthetic oligonucleotide
cucgguucaagagaaaagg

SEQ ID NO: 1042311 - RNA, 19 nt, Artificial Sequence
  Description of Artificial Sequence: Synthetic oligonucleotide
aaauuaugcaagguuacaa

SEQ ID NO: 1042312 - RNA, 19 nt, Artificial Sequence
  Description of Artificial Sequence: Synthetic oligonucleotide
aagaacugauuccuaaaau

SEQ ID NO: 1042313 - RNA, 19 nt, Artificial Sequence
  Description of Artificial Sequence: Synthetic oligonucleotide
acguuugaaggauguaucg

SEQ ID NO: 1042314 - RNA, 19 nt, Artificial Sequence
  Description of Artificial Sequence: Synthetic oligonucleotide
caauuuaguguucuuguac

SEQ ID NO: 1042315 - RNA, 19 nt, Artificial Sequence
  Description of Artificial Sequence: Synthetic oligonucleotide
uucacaugaggacuaguga

SEQ ID NO: 1042316 - RNA, 19 nt, Artificial Sequence
  Description of Artificial Sequence: Synthetic oligonucleotide
ugguauugguuucuggggc

SEQ ID NO: 1042317 - RNA, 19 nt, Artificial Sequence
  Description of Artificial Sequence: Synthetic oligonucleotide
uauaugucaguuuaacauu

SEQ ID NO: 1042318 - RNA, 19 nt, Artificial Sequence
  Description of Artificial Sequence: Synthetic oligonucleotide
uggcgaaucaucuaggaua

SEQ ID NO: 1042319 - RNA, 19 nt, Artificial Sequence
  Description of Artificial Sequence: Synthetic oligonucleotide
uauacaguggcuguuuugu

SEQ ID NO: 1042320 - RNA, 19 nt, Artificial Sequence
  Description of Artificial Sequence: Synthetic oligonucleotide
uuaaauucugacacuuuua

SEQ ID NO: 1042321 - RNA, 19 nt, Artificial Sequence
  Description of Artificial Sequence: Synthetic oligonucleotide
auggaaaguagaaucaaag

SEQ ID NO: 1042322 - RNA, 19 nt, Artificial Sequence
  Description of Artificial Sequence: Synthetic oligonucleotide
ggguauuucgaauaaauuc

SEQ ID NO: 1042323 - RNA, 19 nt, Artificial Sequence
  Description of Artificial Sequence: Synthetic oligonucleotide
uucucuauagcuguguuau

SEQ ID NO: 1042324 - RNA, 19 nt, Artificial Sequence
  Description of Artificial Sequence: Synthetic oligonucleotide
ugcuaaguccuuuugugga

SEQ ID NO: 1042325 - RNA, 19 nt, Artificial Sequence
  Description of Artificial Sequence: Synthetic oligonucleotide
uacccuuggacauaaagua

SEQ ID NO: 1042326 - RNA, 19 nt, Artificial Sequence
  Description of Artificial Sequence: Synthetic oligonucleotide
uugcauuuagguaggacaa

SEQ ID NO: 1042327 - RNA, 19 nt, Artificial Sequence
  Description of Artificial Sequence: Synthetic oligonucleotide
aaaauuaugcaagguuaca

SEQ ID NO: 1042328 - RNA, 19 nt, Artificial Sequence
  Description of Artificial Sequence: Synthetic oligonucleotide
guauaugucaguuuaacau

SEQ ID NO: 1042329 - RNA, 19 nt, Artificial Sequence
  Description of Artificial Sequence: Synthetic oligonucleotide
auaagguagauguugucau

SEQ ID NO: 1042330 - RNA, 19 nt, Artificial Sequence
  Description of Artificial Sequence: Synthetic oligonucleotide
auaugucaguuuaacauuc

SEQ ID NO: 1042331 - RNA, 19 nt, Artificial Sequence
  Description of Artificial Sequence: Synthetic oligonucleotide
gacauagacagcaucagga

SEQ ID NO: 1042332 - RNA, 19 nt, Artificial Sequence
  Description of Artificial Sequence: Synthetic oligonucleotide
auuuaguguucuuguacag

SEQ ID NO: 1042333 - RNA, 19 nt, Artificial Sequence
  Description of Artificial Sequence: Synthetic oligonucleotide
aacuuugacaaagccaaca

SEQ ID NO: 1042334 - RNA, 19 nt, Artificial Sequence
  Description of Artificial Sequence: Synthetic oligonucleotide
uugaaggauguaucgaaac

SEQ ID NO: 1042335 - RNA, 19 nt, Artificial Sequence
  Description of Artificial Sequence: Synthetic oligonucleotide
uagaucagagucaaauaaa

SEQ ID NO: 1042336 - RNA, 19 nt, Artificial Sequence
  Description of Artificial Sequence: Synthetic oligonucleotide
uguguacucaagcuugacu

SEQ ID NO: 1042337 - RNA, 19 nt, Artificial Sequence
  Description of Artificial Sequence: Synthetic oligonucleotide
acuuagaucagagucaaau

SEQ ID NO: 1042338 - RNA, 19 nt, Artificial Sequence
  Description of Artificial Sequence: Synthetic oligonucleotide
uuaguuaguucugaaauuu

SEQ ID NO: 1042339 - RNA, 19 nt, Artificial Sequence
  Description of Artificial Sequence: Synthetic oligonucleotide
uguguuauacaguggcugu

SEQ ID NO: 1042340 - RNA, 19 nt, Artificial Sequence
  Description of Artificial Sequence: Synthetic oligonucleotide
gauagcuuuagucuggagu

SEQ ID NO: 1042341 - RNA, 19 nt, Artificial Sequence
  Description of Artificial Sequence: Synthetic oligonucleotide
acaagcacagaaccuaugu

SEQ ID NO: 1042342 - RNA, 19 nt, Artificial Sequence
  Description of Artificial Sequence: Synthetic oligonucleotide
ucuauagcuguguuauaca

SEQ ID NO: 1042343 - RNA, 19 nt, Artificial Sequence
  Description of Artificial Sequence: Synthetic oligonucleotide
ucuaaacguuugaaggaug

SEQ ID NO: 1042344 - RNA, 19 nt, Artificial Sequence
  Description of Artificial Sequence: Synthetic oligonucleotide
ugauacagaucaaugccuc

SEQ ID NO: 1042345 - RNA, 19 nt, Artificial Sequence
  Description of Artificial Sequence: Synthetic oligonucleotide
aguugugcuuuuaugcagc

SEQ ID NO: 1042346 - RNA, 19 nt, Artificial Sequence
  Description of Artificial Sequence: Synthetic oligonucleotide
ugaugcaaccccauuucug

SEQ ID NO: 1042347 - RNA, 19 nt, Artificial Sequence
  Description of Artificial Sequence: Synthetic oligonucleotide
aggucaguugcauuuaggu

SEQ ID NO: 1042348 - RNA, 19 nt, Artificial Sequence
  Description of Artificial Sequence: Synthetic oligonucleotide
uuguuaugagaguuucaag

SEQ ID NO: 1042349 - RNA, 19 nt, Artificial Sequence
  Description of Artificial Sequence: Synthetic oligonucleotide
gauuuacacaacccuugcc

SEQ ID NO: 1042350 - RNA, 19 nt, Artificial Sequence
  Description of Artificial Sequence: Synthetic oligonucleotide
uuauuguauauagaacagu

SEQ ID NO: 1042351 - RNA, 19 nt, Artificial Sequence
  Description of Artificial Sequence: Synthetic oligonucleotide
ucaacacucuuuucaaagu

SEQ ID NO: 1042352 - RNA, 19 nt, Artificial Sequence
  Description of Artificial Sequence: Synthetic oligonucleotide
uuaugagaguuucaaggua

SEQ ID NO: 1042353 - RNA, 19 nt, Artificial Sequence
  Description of Artificial Sequence: Synthetic oligonucleotide
aauccuaaagguggguucu

SEQ ID NO: 1042354 - RNA, 19 nt, Artificial Sequence
  Description of Artificial Sequence: Synthetic oligonucleotide
gcugguauugguuucuggg

SEQ ID NO: 1042355 - RNA, 19 nt, Artificial Sequence
  Description of Artificial Sequence: Synthetic oligonucleotide
uuccaauuuaguguucuug

SEQ ID NO: 1042356 - RNA, 19 nt, Artificial Sequence
  Description of Artificial Sequence: Synthetic oligonucleotide
ugaggucaauggaaaguag

SEQ ID NO: 1042357 - RNA, 19 nt, Artificial Sequence
  Description of Artificial Sequence: Synthetic oligonucleotide
ugucauaaagguguccuac

SEQ ID NO: 1042358 - RNA, 19 nt, Artificial Sequence
  Description of Artificial Sequence: Synthetic oligonucleotide
auguaucgaaacuuuauua

SEQ ID NO: 1042359 - RNA, 19 nt, Artificial Sequence
  Description of Artificial Sequence: Synthetic oligonucleotide
uuugugcaaacaugaugag

SEQ ID NO: 1042360 - RNA, 19 nt, Artificial Sequence
  Description of Artificial Sequence: Synthetic oligonucleotide
uuuggcgaaucaucuagga

SEQ ID NO: 1042361 - RNA, 19 nt, Artificial Sequence
  Description of Artificial Sequence: Synthetic oligonucleotide
ucgguucaagagaaaagga

SEQ ID NO: 1042362 - RNA, 19 nt, Artificial Sequence
  Description of Artificial Sequence: Synthetic oligonucleotide
cugcuaaguccuuuugugg

SEQ ID NO: 1042363 - RNA, 19 nt, Artificial Sequence
  Description of Artificial Sequence: Synthetic oligonucleotide
uggacauaaaguagcucac

SEQ ID NO: 1042364 - RNA, 19 nt, Artificial Sequence
  Description of Artificial Sequence: Synthetic oligonucleotide
ucgaaacuuuauuaaccca

SEQ ID NO: 1042365 - RNA, 19 nt, Artificial Sequence
  Description of Artificial Sequence: Synthetic oligonucleotide
auuacaagcacagaaccua

SEQ ID NO: 1042366 - RNA, 19 nt, Artificial Sequence
  Description of Artificial Sequence: Synthetic oligonucleotide
uucaagguacuccccacgu

SEQ ID NO: 1042367 - RNA, 19 nt, Artificial Sequence
  Description of Artificial Sequence: Synthetic oligonucleotide
ggguucuuauuguauauag

SEQ ID NO: 1042368 - RNA, 19 nt, Artificial Sequence
  Description of Artificial Sequence: Synthetic oligonucleotide
uuaguuaguuaguucugaa

SEQ ID NO: 1042369 - RNA, 19 nt, Artificial Sequence
  Description of Artificial Sequence: Synthetic oligonucleotide
cuuuggcgaaucaucuagg

SEQ ID NO: 1042370 - RNA, 19 nt, Artificial Sequence
  Description of Artificial Sequence: Synthetic oligonucleotide
gacuguauacagaggcugg

SEQ ID NO: 1042371 - RNA, 19 nt, Artificial Sequence
  Description of Artificial Sequence: Synthetic oligonucleotide
uaguuaguuaguucugaaa

SEQ ID NO: 1042372 - RNA, 19 nt, Artificial Sequence
  Description of Artificial Sequence: Synthetic oligonucleotide
ucaucaaaauuaguuaguu

SEQ ID NO: 1042373 - RNA, 19 nt, Artificial Sequence
  Description of Artificial Sequence: Synthetic oligonucleotide
aauggaaaguagaaucaaa

SEQ ID NO: 1042374 - RNA, 19 nt, Artificial Sequence
  Description of Artificial Sequence: Synthetic oligonucleotide
aaagccaacaauacacuua

SEQ ID NO: 1042375 - RNA, 19 nt, Artificial Sequence
  Description of Artificial Sequence: Synthetic oligonucleotide
auuaguuaguuaguucuga

SEQ ID NO: 1042376 - RNA, 19 nt, Artificial Sequence
  Description of Artificial Sequence: Synthetic oligonucleotide
guuauacaaauaaggccag

SEQ ID NO: 1042377 - RNA, 19 nt, Artificial Sequence
  Description of Artificial Sequence: Synthetic oligonucleotide
uguacucaagcuugacugu

SEQ ID NO: 1042378 - RNA, 19 nt, Artificial Sequence
  Description of Artificial Sequence: Synthetic oligonucleotide
ucgcauuaggucaggauua

SEQ ID NO: 1042379 - RNA, 19 nt, Artificial Sequence
  Description of Artificial Sequence: Synthetic oligonucleotide
caagguacuccccacguuc

SEQ ID NO: 1042380 - RNA, 19 nt, Artificial Sequence
  Description of Artificial Sequence: Synthetic oligonucleotide
uuuuguggauagcuuuagu

SEQ ID NO: 1042381 - RNA, 19 nt, Artificial Sequence
  Description of Artificial Sequence: Synthetic oligonucleotide
uucuaaacguuugaaggau

SEQ ID NO: 1042382 - RNA, 19 nt, Artificial Sequence
  Description of Artificial Sequence: Synthetic oligonucleotide
uggagugagaaauguugcu

SEQ ID NO: 1042383 - RNA, 19 nt, Artificial Sequence
  Description of Artificial Sequence: Synthetic oligonucleotide
caguugugcuuuuaugcag

SEQ ID NO: 1042384 - RNA, 19 nt, Artificial Sequence
  Description of Artificial Sequence: Synthetic oligonucleotide
auacccuuggacauaaagu

SEQ ID NO: 1042385 - RNA, 19 nt, Artificial Sequence
  Description of Artificial Sequence: Synthetic oligonucleotide
acagaaccuaugugagaac

SEQ ID NO: 1042386 - RNA, 19 nt, Artificial Sequence
  Description of Artificial Sequence: Synthetic oligonucleotide
uaguuaguucugaaauuuc

SEQ ID NO: 1042387 - RNA, 19 nt, Artificial Sequence
  Description of Artificial Sequence: Synthetic oligonucleotide
ugcaagguuacaaggucau

SEQ ID NO: 1042388 - RNA, 19 nt, Artificial Sequence
  Description of Artificial Sequence: Synthetic oligonucleotide
agugaggucaauggaaagu

SEQ ID NO: 1042389 - RNA, 19 nt, Artificial Sequence
  Description of Artificial Sequence: Synthetic oligonucleotide
uagaaucaaagaguagcac

SEQ ID NO: 1042390 - RNA, 19 nt, Artificial Sequence
  Description of Artificial Sequence: Synthetic oligonucleotide
uccuuuuguggauagcuuu

SEQ ID NO: 1042391 - RNA, 19 nt, Artificial Sequence
  Description of Artificial Sequence: Synthetic oligonucleotide
uguuuugugcaaacaugau

SEQ ID NO: 1042392 - RNA, 19 nt, Artificial Sequence
  Description of Artificial Sequence: Synthetic oligonucleotide
gaaacuuuauuaacccaga

SEQ ID NO: 1042393 - RNA, 19 nt, Artificial Sequence
  Description of Artificial Sequence: Synthetic oligonucleotide
uugaugcaaccccauuucu

SEQ ID NO: 1042394 - RNA, 19 nt, Artificial Sequence
  Description of Artificial Sequence: Synthetic oligonucleotide
ugcauacauuacaugguau

SEQ ID NO: 1042395 - RNA, 19 nt, Artificial Sequence
  Description of Artificial Sequence: Synthetic oligonucleotide
aucuuagaguauaugucag

SEQ ID NO: 1042396 - RNA, 19 nt, Artificial Sequence
  Description of Artificial Sequence: Synthetic oligonucleotide
cuguguuauacaguggcug

SEQ ID NO: 1042397 - RNA, 19 nt, Artificial Sequence
  Description of Artificial Sequence: Synthetic oligonucleotide
caacaguugugcuuuuaug

SEQ ID NO: 1042398 - RNA, 19 nt, Artificial Sequence
  Description of Artificial Sequence: Synthetic oligonucleotide
guagaaucaaagaguagca

SEQ ID NO: 1042399 - RNA, 19 nt, Artificial Sequence
  Description of Artificial Sequence: Synthetic oligonucleotide
uuaugcagccacguggcca

SEQ ID NO: 1042400 - RNA, 19 nt, Artificial Sequence
  Description of Artificial Sequence: Synthetic oligonucleotide
uaugcagccacguggccaa

SEQ ID NO: 1042401 - RNA, 19 nt, Artificial Sequence
  Description of Artificial Sequence: Synthetic oligonucleotide
uuuaugcagccacguggcc

SEQ ID NO: 1042402 - RNA, 19 nt, Artificial Sequence
  Description of Artificial Sequence: Synthetic oligonucleotide
gaucaaugccucccugggc

SEQ ID NO: 1042403 - RNA, 19 nt, Artificial Sequence
  Description of Artificial Sequence: Synthetic oligonucleotide
uuggcgaaucaucuaggau

SEQ ID NO: 1042404 - RNA, 19 nt, Artificial Sequence
  Description of Artificial Sequence: Synthetic oligonucleotide
caggacuaaggccaaguuc

SEQ ID NO: 1042405 - RNA, 19 nt, Artificial Sequence
  Description of Artificial Sequence: Synthetic oligonucleotide
augaaucaaaugauauaug

SEQ ID NO: 1042406 - RNA, 19 nt, Artificial Sequence
  Description of Artificial Sequence: Synthetic oligonucleotide
guuuccgguggcuggagug

SEQ ID NO: 1042407 - RNA, 19 nt, Artificial Sequence
  Description of Artificial Sequence: Synthetic oligonucleotide
gauguaucgaaacuuuauu

SEQ ID NO: 1042408 - RNA, 19 nt, Artificial Sequence
  Description of Artificial Sequence: Synthetic oligonucleotide
guggauagcuuuagucugg

SEQ ID NO: 1042409 - RNA, 19 nt, Artificial Sequence
  Description of Artificial Sequence: Synthetic oligonucleotide
aagucccaacaguugugcu

SEQ ID NO: 1042410 - RNA, 19 nt, Artificial Sequence
  Description of Artificial Sequence: Synthetic oligonucleotide
guauuucgaauaaauucuc

SEQ ID NO: 1042411 - RNA, 19 nt, Artificial Sequence
  Description of Artificial Sequence: Synthetic oligonucleotide
cuuagaucagagucaaaua

SEQ ID NO: 1042412 - RNA, 19 nt, Artificial Sequence
  Description of Artificial Sequence: Synthetic oligonucleotide
ccuuuggcgaaucaucuag

SEQ ID NO: 1042413 - RNA, 19 nt, Artificial Sequence
  Description of Artificial Sequence: Synthetic oligonucleotide
cucuuuaguuaaauaugca

SEQ ID NO: 1042414 - RNA, 19 nt, Artificial Sequence
  Description of Artificial Sequence: Synthetic oligonucleotide
acucgguucaagagaaaag

SEQ ID NO: 1042415 - RNA, 19 nt, Artificial Sequence
  Description of Artificial Sequence: Synthetic oligonucleotide
gguauugguuucuggggcc

SEQ ID NO: 1042416 - RNA, 19 nt, Artificial Sequence
  Description of Artificial Sequence: Synthetic oligonucleotide
agaaaauggcucagccggg

SEQ ID NO: 1042417 - RNA, 19 nt, Artificial Sequence
  Description of Artificial Sequence: Synthetic oligonucleotide
caugacgcuaagcagaggu

SEQ ID NO: 1042418 - RNA, 19 nt, Artificial Sequence
  Description of Artificial Sequence: Synthetic oligonucleotide
auacaguggcuguuuugug

SEQ ID NO: 1042419 - RNA, 19 nt, Artificial Sequence
  Description of Artificial Sequence: Synthetic oligonucleotide
uguuauacaguggcuguuu

SEQ ID NO: 1042420 - RNA, 19 nt, Artificial Sequence
  Description of Artificial Sequence: Synthetic oligonucleotide
uuauacaaauaaggccagu

SEQ ID NO: 1042421 - RNA, 19 nt, Artificial Sequence
  Description of Artificial Sequence: Synthetic oligonucleotide
ucucgcauuaggucaggau

SEQ ID NO: 1042422 - RNA, 19 nt, Artificial Sequence
  Description of Artificial Sequence: Synthetic oligonucleotide
uaaggccaaguucucgcau

SEQ ID NO: 1042423 - RNA, 19 nt, Artificial Sequence
  Description of Artificial Sequence: Synthetic oligonucleotide
aguucucgcauuaggucag

SEQ ID NO: 1042424 - RNA, 19 nt, Artificial Sequence
  Description of Artificial Sequence: Synthetic oligonucleotide
cuaaacguuugaaggaugu

SEQ ID NO: 1042425 - RNA, 19 nt, Artificial Sequence
  Description of Artificial Sequence: Synthetic oligonucleotide
gucagccgcaaagaaaaug

SEQ ID NO: 1042426 - RNA, 19 nt, Artificial Sequence
  Description of Artificial Sequence: Synthetic oligonucleotide
uggauaguuuucagacaaa

SEQ ID NO: 1042427 - RNA, 19 nt, Artificial Sequence
  Description of Artificial Sequence: Synthetic oligonucleotide
accuaugugagaacuuugu

SEQ ID NO: 1042428 - RNA, 19 nt, Artificial Sequence
  Description of Artificial Sequence: Synthetic oligonucleotide
gacgcuaagcagaggucag

SEQ ID NO: 1042429 - RNA, 19 nt, Artificial Sequence
  Description of Artificial Sequence: Synthetic oligonucleotide
aaccuuuaguuaaaaucuu

SEQ ID NO: 1042430 - RNA, 19 nt, Artificial Sequence
  Description of Artificial Sequence: Synthetic oligonucleotide
acacuuagaucagagucaa

SEQ ID NO: 1042431 - RNA, 19 nt, Artificial Sequence
  Description of Artificial Sequence: Synthetic oligonucleotide
uugucauaaagguguccua

SEQ ID NO: 1042432 - RNA, 19 nt, Artificial Sequence
  Description of Artificial Sequence: Synthetic oligonucleotide
cgaaucaucuaggauaccc

SEQ ID NO: 1042433 - RNA, 19 nt, Artificial Sequence
  Description of Artificial Sequence: Synthetic oligonucleotide
gaaaauggcucagccggga

SEQ ID NO: 1042434 - RNA, 19 nt, Artificial Sequence
  Description of Artificial Sequence: Synthetic oligonucleotide
ugcaaccccauuucugcua

SEQ ID NO: 1042435 - RNA, 19 nt, Artificial Sequence
  Description of Artificial Sequence: Synthetic oligonucleotide
guuaguuaguucugaaauu

SEQ ID NO: 1042436 - RNA, 19 nt, Artificial Sequence
  Description of Artificial Sequence: Synthetic oligonucleotide
ugaggacuagugaggucaa

SEQ ID NO: 1042437 - RNA, 19 nt, Artificial Sequence
  Description of Artificial Sequence: Synthetic oligonucleotide
uggauagcuuuagucugga

SEQ ID NO: 1042438 - RNA, 19 nt, Artificial Sequence
  Description of Artificial Sequence: Synthetic oligonucleotide
agccgcaaagaaaauggcu

SEQ ID NO: 1042439 - RNA, 19 nt, Artificial Sequence
  Description of Artificial Sequence: Synthetic oligonucleotide
ggcgaaucaucuaggauac

SEQ ID NO: 1042440 - RNA, 19 nt, Artificial Sequence
  Description of Artificial Sequence: Synthetic oligonucleotide
uaaacguuugaaggaugua

SEQ ID NO: 1042441 - RNA, 19 nt, Artificial Sequence
  Description of Artificial Sequence: Synthetic oligonucleotide
ugccaaacacaugacgcua

SEQ ID NO: 1042442 - RNA, 19 nt, Artificial Sequence
  Description of Artificial Sequence: Synthetic oligonucleotide
gugcuuuuaugcagccacg

SEQ ID NO: 1042443 - RNA, 19 nt, Artificial Sequence
  Description of Artificial Sequence: Synthetic oligonucleotide
augcaaccccauuucugcu

SEQ ID NO: 1042444 - RNA, 19 nt, Artificial Sequence
  Description of Artificial Sequence: Synthetic oligonucleotide
cuaaggccaaguucucgca

SEQ ID NO: 1042445 - RNA, 19 nt, Artificial Sequence
  Description of Artificial Sequence: Synthetic oligonucleotide
uggguucuuauuguauaua

SEQ ID NO: 1042446 - RNA, 19 nt, Artificial Sequence
  Description of Artificial Sequence: Synthetic oligonucleotide
agaguccuugacccaucug

SEQ ID NO: 1042447 - RNA, 19 nt, Artificial Sequence
  Description of Artificial Sequence: Synthetic oligonucleotide
cagcgcggcggguauuucg

SEQ ID NO: 1042448 - RNA, 19 nt, Artificial Sequence
  Description of Artificial Sequence: Synthetic oligonucleotide
gcuuuuaugcagccacgug

SEQ ID NO: 1042449 - RNA, 19 nt, Artificial Sequence
  Description of Artificial Sequence: Synthetic oligonucleotide
aagcuaagcucaggaggca

SEQ ID NO: 1042450 - RNA, 19 nt, Artificial Sequence
  Description of Artificial Sequence: Synthetic oligonucleotide
cuaggauacccuuggacau

SEQ ID NO: 1042451 - RNA, 19 nt, Artificial Sequence
  Description of Artificial Sequence: Synthetic oligonucleotide
gugauacagaucaaugccu

SEQ ID NO: 1042452 - RNA, 19 nt, Artificial Sequence
  Description of Artificial Sequence: Synthetic oligonucleotide
ggggccgucagccgcaaag

SEQ ID NO: 1042453 - RNA, 19 nt, Artificial Sequence
  Description of Artificial Sequence: Synthetic oligonucleotide
augagaguuucaagguacu

SEQ ID NO: 1042454 - RNA, 19 nt, Artificial Sequence
  Description of Artificial Sequence: Synthetic oligonucleotide
gcauuuagguaggacaaga

SEQ ID NO: 1042455 - RNA, 19 nt, Artificial Sequence
  Description of Artificial Sequence: Synthetic oligonucleotide
acaacccuugccagagaag

SEQ ID NO: 1042456 - RNA, 19 nt, Artificial Sequence
  Description of Artificial Sequence: Synthetic oligonucleotide
agcuuuagucuggaguaaa

SEQ ID NO: 1042457 - RNA, 19 nt, Artificial Sequence
  Description of Artificial Sequence: Synthetic oligonucleotide
uagcuuuagucuggaguaa

SEQ ID NO: 1042458 - RNA, 19 nt, Artificial Sequence
  Description of Artificial Sequence: Synthetic oligonucleotide
uggcaagaacugauuccua

SEQ ID NO: 1042459 - RNA, 19 nt, Artificial Sequence
  Description of Artificial Sequence: Synthetic oligonucleotide
gguuggcauuaaaagugag

SEQ ID NO: 1042460 - RNA, 19 nt, Artificial Sequence
  Description of Artificial Sequence: Synthetic oligonucleotide
ggucaguugcauuuaggua

SEQ ID NO: 1042461 - RNA, 19 nt, Artificial Sequence
  Description of Artificial Sequence: Synthetic oligonucleotide
gcaagaacugauuccuaaa

SEQ ID NO: 1042462 - RNA, 19 nt, Artificial Sequence
  Description of Artificial Sequence: Synthetic oligonucleotide
uaggauacccuuggacaua

SEQ ID NO: 1042463 - RNA, 19 nt, Artificial Sequence
  Description of Artificial Sequence: Synthetic oligonucleotide
guauugguuucuggggcca

SEQ ID NO: 1042464 - RNA, 19 nt, Artificial Sequence
  Description of Artificial Sequence: Synthetic oligonucleotide
caacccuugccagagaagu

SEQ ID NO: 1042465 - RNA, 19 nt, Artificial Sequence
  Description of Artificial Sequence: Synthetic oligonucleotide
ccgucagccgcaaagaaaa

SEQ ID NO: 1042466 - RNA, 19 nt, Artificial Sequence
  Description of Artificial Sequence: Synthetic oligonucleotide
agaaccuaugugagaacuu

SEQ ID NO: 1042467 - RNA, 19 nt, Artificial Sequence
  Description of Artificial Sequence: Synthetic oligonucleotide
cauuuagguaggacaagau

SEQ ID NO: 1042468 - RNA, 19 nt, Artificial Sequence
  Description of Artificial Sequence: Synthetic oligonucleotide
cagaaccuaugugagaacu

SEQ ID NO: 1042469 - RNA, 19 nt, Artificial Sequence
  Description of Artificial Sequence: Synthetic oligonucleotide
ccaaacacaugacgcuaag

SEQ ID NO: 1042470 - RNA, 19 nt, Artificial Sequence
  Description of Artificial Sequence: Synthetic oligonucleotide
aggauguaucgaaacuuua

SEQ ID NO: 1042471 - RNA, 19 nt, Artificial Sequence
  Description of Artificial Sequence: Synthetic oligonucleotide
cggagcaugaaugugacga

SEQ ID NO: 1042472 - RNA, 19 nt, Artificial Sequence
  Description of Artificial Sequence: Synthetic oligonucleotide
cuaaagguggguucuuauu

SEQ ID NO: 1042473 - RNA, 19 nt, Artificial Sequence
  Description of Artificial Sequence: Synthetic oligonucleotide
gaaccgacgcccaagccau

SEQ ID NO: 1042474 - RNA, 19 nt, Artificial Sequence
  Description of Artificial Sequence: Synthetic oligonucleotide
cuguguacucaagcuugac

SEQ ID NO: 1042475 - RNA, 19 nt, Artificial Sequence
  Description of Artificial Sequence: Synthetic oligonucleotide
cacguucuuccggagcaug

SEQ ID NO: 1042476 - RNA, 19 nt, Artificial Sequence
  Description of Artificial Sequence: Synthetic oligonucleotide
ccaaguggauuuacacaac

SEQ ID NO: 1042477 - RNA, 19 nt, Artificial Sequence
  Description of Artificial Sequence: Synthetic oligonucleotide
auggcucagccgggaaccg

SEQ ID NO: 1042478 - RNA, 19 nt, Artificial Sequence
  Description of Artificial Sequence: Synthetic oligonucleotide
guacucaagcuugacugua

SEQ ID NO: 1042479 - RNA, 19 nt, Artificial Sequence
  Description of Artificial Sequence: Synthetic oligonucleotide
cuaaguccuuuuguggaua

SEQ ID NO: 1042480 - RNA, 19 nt, Artificial Sequence
  Description of Artificial Sequence: Synthetic oligonucleotide
caagguagauucucaguuu

SEQ ID NO: 1042481 - RNA, 19 nt, Artificial Sequence
  Description of Artificial Sequence: Synthetic oligonucleotide
cuagcugcauauacaguuu

SEQ ID NO: 1042482 - RNA, 19 nt, Artificial Sequence
  Description of Artificial Sequence: Synthetic oligonucleotide
ccgcaaagaaaauggcuca

SEQ ID NO: 1042483 - RNA, 19 nt, Artificial Sequence
  Description of Artificial Sequence: Synthetic oligonucleotide
gaggcccguccagaccgcg

SEQ ID NO: 1042484 - RNA, 19 nt, Artificial Sequence
  Description of Artificial Sequence: Synthetic oligonucleotide
ggauguaucgaaacuuuau

SEQ ID NO: 1042485 - RNA, 19 nt, Artificial Sequence
  Description of Artificial Sequence: Synthetic oligonucleotide
ggguuggcauuaaaaguga

SEQ ID NO: 1042486 - RNA, 19 nt, Artificial Sequence
  Description of Artificial Sequence: Synthetic oligonucleotide
agcgcggcggguauuucga

SEQ ID NO: 1042487 - RNA, 19 nt, Artificial Sequence
  Description of Artificial Sequence: Synthetic oligonucleotide
acgcuaagcagaggucagu

SEQ ID NO: 1042488 - RNA, 19 nt, Artificial Sequence
  Description of Artificial Sequence: Synthetic oligonucleotide
uggcucagccgggaaccga

SEQ ID NO: 1042489 - RNA, 19 nt, Artificial Sequence
  Description of Artificial Sequence: Synthetic oligonucleotide
ccaauuuaguguucuugua

SEQ ID NO: 1042490 - RNA, 19 nt, Artificial Sequence
  Description of Artificial Sequence: Synthetic oligonucleotide
gcggcggguauuucgaaua

SEQ ID NO: 1042491 - RNA, 19 nt, Artificial Sequence
  Description of Artificial Sequence: Synthetic oligonucleotide
acguggccaauaagguaga

SEQ ID NO: 1042492 - RNA, 19 nt, Artificial Sequence
  Description of Artificial Sequence: Synthetic oligonucleotide
gcuaaguccuuuuguggau

SEQ ID NO: 1042493 - RNA, 19 nt, Artificial Sequence
  Description of Artificial Sequence: Synthetic oligonucleotide
ggacauaaaguagcucacu

SEQ ID NO: 1042494 - RNA, 19 nt, Artificial Sequence
  Description of Artificial Sequence: Synthetic oligonucleotide
agcagcgcggcggguauuu

SEQ ID NO: 1042495 - RNA, 19 nt, Artificial Sequence
  Description of Artificial Sequence: Synthetic oligonucleotide
agccaacaauacacuuaga

SEQ ID NO: 1042496 - RNA, 19 nt, Artificial Sequence
  Description of Artificial Sequence: Synthetic oligonucleotide
auccuaaagguggguucuu

SEQ ID NO: 1042497 - RNA, 19 nt, Artificial Sequence
  Description of Artificial Sequence: Synthetic oligonucleotide
ccuuggacauaaaguagcu

SEQ ID NO: 1042498 - RNA, 19 nt, Artificial Sequence
  Description of Artificial Sequence: Synthetic oligonucleotide
cacuuagaucagagucaaa

SEQ ID NO: 1042499 - RNA, 19 nt, Artificial Sequence
  Description of Artificial Sequence: Synthetic oligonucleotide
ccccacguucuuccggagc

SEQ ID NO: 1042500 - RNA, 19 nt, Artificial Sequence
  Description of Artificial Sequence: Synthetic oligonucleotide
aaccgacgcccaagccaug

SEQ ID NO: 1042501 - RNA, 19 nt, Artificial Sequence
  Description of Artificial Sequence: Synthetic oligonucleotide
ucccaacaguugugcuuuu

SEQ ID NO: 1042502 - RNA, 19 nt, Artificial Sequence
  Description of Artificial Sequence: Synthetic oligonucleotide
ggacuaaggccaaguucuc

SEQ ID NO: 1042503 - RNA, 19 nt, Artificial Sequence
  Description of Artificial Sequence: Synthetic oligonucleotide
guguuauacaguggcuguu

SEQ ID NO: 1042504 - RNA, 19 nt, Artificial Sequence
  Description of Artificial Sequence: Synthetic oligonucleotide
cgggaaccgacgcccaagc

SEQ ID NO: 1042505 - RNA, 19 nt, Artificial Sequence
  Description of Artificial Sequence: Synthetic oligonucleotide
gcuguguuauacaguggcu

SEQ ID NO: 1042506 - RNA, 19 nt, Artificial Sequence
  Description of Artificial Sequence: Synthetic oligonucleotide
gccgucagccgcaaagaaa

SEQ ID NO: 1042507 - RNA, 19 nt, Artificial Sequence
  Description of Artificial Sequence: Synthetic oligonucleotide
ccuaaagguggguucuuau

SEQ ID NO: 1042508 - RNA, 19 nt, Artificial Sequence
  Description of Artificial Sequence: Synthetic oligonucleotide
ggauggaaauggauaguuu

SEQ ID NO: 1042509 - RNA, 19 nt, Artificial Sequence
  Description of Artificial Sequence: Synthetic oligonucleotide
gugaccccaaguggauuua

SEQ ID NO: 1042510 - RNA, 19 nt, Artificial Sequence
  Description of Artificial Sequence: Synthetic oligonucleotide
cgcauuaggucaggauuac

SEQ ID NO: 1042511 - RNA, 19 nt, Artificial Sequence
  Description of Artificial Sequence: Synthetic oligonucleotide
ccgggaaccgacgcccaag

SEQ ID NO: 1042512 - RNA, 19 nt, Artificial Sequence
  Description of Artificial Sequence: Synthetic oligonucleotide
ggcggguauuucgaauaaa

SEQ ID NO: 1042513 - RNA, 19 nt, Artificial Sequence
  Description of Artificial Sequence: Synthetic oligonucleotide
gcgaaucaucuaggauacc

SEQ ID NO: 1042514 - RNA, 19 nt, Artificial Sequence
  Description of Artificial Sequence: Synthetic oligonucleotide
agccgggaaccgacgccca

SEQ ID NO: 1042515 - RNA, 19 nt, Artificial Sequence
  Description of Artificial Sequence: Synthetic oligonucleotide
ggccaguuuugcauaguau

SEQ ID NO: 1042516 - RNA, 19 nt, Artificial Sequence
  Description of Artificial Sequence: Synthetic oligonucleotide
gggccagauccaacuuuga

SEQ ID NO: 1042517 - RNA, 19 nt, Artificial Sequence
  Description of Artificial Sequence: Synthetic oligonucleotide
gcuaucuccuuuggcgaau

SEQ ID NO: 1042518 - RNA, 19 nt, Artificial Sequence
  Description of Artificial Sequence: Synthetic oligonucleotide
aggggccgucagccgcaaa

SEQ ID NO: 1042519 - RNA, 19 nt, Artificial Sequence
  Description of Artificial Sequence: Synthetic oligonucleotide
gcaagccugaggggccguc

SEQ ID NO: 1042520 - RNA, 19 nt, Artificial Sequence
  Description of Artificial Sequence: Synthetic oligonucleotide
ggcuggagugagaaauguu

SEQ ID NO: 1042521 - RNA, 19 nt, Artificial Sequence
  Description of Artificial Sequence: Synthetic oligonucleotide
cagugaccccaaguggauu

SEQ ID NO: 1042522 - RNA, 19 nt, Artificial Sequence
  Description of Artificial Sequence: Synthetic oligonucleotide
gccgggaaccgacgcccaa

SEQ ID NO: 1042523 - RNA, 19 nt, Artificial Sequence
  Description of Artificial Sequence: Synthetic oligonucleotide
ccgacgcccaagccaugga

SEQ ID NO: 1042524 - RNA, 19 nt, Artificial Sequence
  Description of Artificial Sequence: Synthetic oligonucleotide
cccaacaguugugcuuuua

SEQ ID NO: 1042525 - RNA, 19 nt, Artificial Sequence
  Description of Artificial Sequence: Synthetic oligonucleotide
cggcggguauuucgaauaa

SEQ ID NO: 1042526 - RNA, 19 nt, Artificial Sequence
  Description of Artificial Sequence: Synthetic oligonucleotide
gcagcgcggcggguauuuc

SEQ ID NO: 1042527 - RNA, 19 nt, Artificial Sequence
  Description of Artificial Sequence: Synthetic oligonucleotide
cgcggcggguauuucgaau

SEQ ID NO: 1042528 - RNA, 19 nt, Artificial Sequence
  Description of Artificial Sequence: Synthetic oligonucleotide
ccguccagaccgcgcgugu

SEQ ID NO: 1042529 - RNA, 19 nt, Artificial Sequence
  Description of Artificial Sequence: Synthetic oligonucleotide
aaugauaagagggagagcc

SEQ ID NO: 1042530 - RNA, 19 nt, Artificial Sequence
  Description of Artificial Sequence: Synthetic oligonucleotide
uguguuaggauacagauga

SEQ ID NO: 1042531 - RNA, 19 nt, Artificial Sequence
  Description of Artificial Sequence: Synthetic oligonucleotide
aacauucaaacaaauaagc

SEQ ID NO: 1042532 - RNA, 19 nt, Artificial Sequence
  Description of Artificial Sequence: Synthetic oligonucleotide
ucagguuuaaggcaaaggg

SEQ ID NO: 1042533 - RNA, 19 nt, Artificial Sequence
  Description of Artificial Sequence: Synthetic oligonucleotide
uuugcaacuaaacacagug

SEQ ID NO: 1042534 - RNA, 19 nt, Artificial Sequence
  Description of Artificial Sequence: Synthetic oligonucleotide
aauggacuuccacagaggc

SEQ ID NO: 1042535 - RNA, 19 nt, Artificial Sequence
  Description of Artificial Sequence: Synthetic oligonucleotide
aauucaugacaccuggagc

SEQ ID NO: 1042536 - RNA, 19 nt, Artificial Sequence
  Description of Artificial Sequence: Synthetic oligonucleotide
agaauauuaguuuaagaag

SEQ ID NO: 1042537 - RNA, 19 nt, Artificial Sequence
  Description of Artificial Sequence: Synthetic oligonucleotide
acuaauuacacuuaccuca

SEQ ID NO: 1042538 - RNA, 19 nt, Artificial Sequence
  Description of Artificial Sequence: Synthetic oligonucleotide
aauaugcacccuuuaaaac

SEQ ID NO: 1042539 - RNA, 19 nt, Artificial Sequence
  Description of Artificial Sequence: Synthetic oligonucleotide
ucuacagugggacacuucg

SEQ ID NO: 1042540 - RNA, 19 nt, Artificial Sequence
  Description of Artificial Sequence: Synthetic oligonucleotide
uaguaaacuagaaugaacu

SEQ ID NO: 1042541 - RNA, 19 nt, Artificial Sequence
  Description of Artificial Sequence: Synthetic oligonucleotide
uaagggacuaauaaagacc

SEQ ID NO: 1042542 - RNA, 19 nt, Artificial Sequence
  Description of Artificial Sequence: Synthetic oligonucleotide
ugaagaggaaugauaagag

SEQ ID NO: 1042543 - RNA, 19 nt, Artificial Sequence
  Description of Artificial Sequence: Synthetic oligonucleotide
uuaccaaaauucaugacac

SEQ ID NO: 1042544 - RNA, 19 nt, Artificial Sequence
  Description of Artificial Sequence: Synthetic oligonucleotide
aauggaucauaguaauguc

SEQ ID NO: 1042545 - RNA, 19 nt, Artificial Sequence
  Description of Artificial Sequence: Synthetic oligonucleotide
agauuugugagacccacac

SEQ ID NO: 1042546 - RNA, 19 nt, Artificial Sequence
  Description of Artificial Sequence: Synthetic oligonucleotide
ucuagagaugcauuggucc

SEQ ID NO: 1042547 - RNA, 19 nt, Artificial Sequence
  Description of Artificial Sequence: Synthetic oligonucleotide
auggguauagauugguccc

SEQ ID NO: 1042548 - RNA, 19 nt, Artificial Sequence
  Description of Artificial Sequence: Synthetic oligonucleotide
aauagagguacugaaggag

SEQ ID NO: 1042549 - RNA, 19 nt, Artificial Sequence
  Description of Artificial Sequence: Synthetic oligonucleotide
aauaaagaccaaucacaag

SEQ ID NO: 1042550 - RNA, 19 nt, Artificial Sequence
  Description of Artificial Sequence: Synthetic oligonucleotide
auaguauuugucucuagag

SEQ ID NO: 1042551 - RNA, 19 nt, Artificial Sequence
  Description of Artificial Sequence: Synthetic oligonucleotide
aaaaguaaguaggagcgag

SEQ ID NO: 1042552 - RNA, 19 nt, Artificial Sequence
  Description of Artificial Sequence: Synthetic oligonucleotide
acuucgugcagauagcuuc

SEQ ID NO: 1042553 - RNA, 19 nt, Artificial Sequence
  Description of Artificial Sequence: Synthetic oligonucleotide
uauuaguuuaagaagggua

SEQ ID NO: 1042554 - RNA, 19 nt, Artificial Sequence
  Description of Artificial Sequence: Synthetic oligonucleotide
uuuuacacuugguugauac

SEQ ID NO: 1042555 - RNA, 19 nt, Artificial Sequence
  Description of Artificial Sequence: Synthetic oligonucleotide
aguuaagggacuaauaaag

SEQ ID NO: 1042556 - RNA, 19 nt, Artificial Sequence
  Description of Artificial Sequence: Synthetic oligonucleotide
aguaggagcgagcaacugc

SEQ ID NO: 1042557 - RNA, 19 nt, Artificial Sequence
  Description of Artificial Sequence: Synthetic oligonucleotide
uuaagggacuaauaaagac

SEQ ID NO: 1042558 - RNA, 19 nt, Artificial Sequence
  Description of Artificial Sequence: Synthetic oligonucleotide
ucaauuacgugggaguugg

SEQ ID NO: 1042559 - RNA, 19 nt, Artificial Sequence
  Description of Artificial Sequence: Synthetic oligonucleotide
agaggauuucacuccaccc

SEQ ID NO: 1042560 - RNA, 19 nt, Artificial Sequence
  Description of Artificial Sequence: Synthetic oligonucleotide
gagcuagagaaguuaaggg

SEQ ID NO: 1042561 - RNA, 19 nt, Artificial Sequence
  Description of Artificial Sequence: Synthetic oligonucleotide
auaugcacccuuuaaaaca

SEQ ID NO: 1042562 - RNA, 19 nt, Artificial Sequence
  Description of Artificial Sequence: Synthetic oligonucleotide
uaagguagaacaucuaaaa

SEQ ID NO: 1042563 - RNA, 19 nt, Artificial Sequence
  Description of Artificial Sequence: Synthetic oligonucleotide
cauggguauagauuggucc

SEQ ID NO: 1042564 - RNA, 19 nt, Artificial Sequence
  Description of Artificial Sequence: Synthetic oligonucleotide
aauuacgugggaguugggg

SEQ ID NO: 1042565 - RNA, 19 nt, Artificial Sequence
  Description of Artificial Sequence: Synthetic oligonucleotide
uaagaauauuaguuuaaga

SEQ ID NO: 1042566 - RNA, 19 nt, Artificial Sequence
  Description of Artificial Sequence: Synthetic oligonucleotide
uguguguuaggauacagau

SEQ ID NO: 1042567 - RNA, 19 nt, Artificial Sequence
  Description of Artificial Sequence: Synthetic oligonucleotide
uguuaggauacagaugagg

SEQ ID NO: 1042568 - RNA, 19 nt, Artificial Sequence
  Description of Artificial Sequence: Synthetic oligonucleotide
agagcuagagaaguuaagg

SEQ ID NO: 1042569 - RNA, 19 nt, Artificial Sequence
  Description of Artificial Sequence: Synthetic oligonucleotide
guaauggacuuccacagag

SEQ ID NO: 1042570 - RNA, 19 nt, Artificial Sequence
  Description of Artificial Sequence: Synthetic oligonucleotide
ucuauagucuauauuuuau

SEQ ID NO: 1042571 - RNA, 19 nt, Artificial Sequence
  Description of Artificial Sequence: Synthetic oligonucleotide
gaaggaacuucccugggag

SEQ ID NO: 1042572 - RNA, 19 nt, Artificial Sequence
  Description of Artificial Sequence: Synthetic oligonucleotide
uauuugucucuagagaugc

SEQ ID NO: 1042573 - RNA, 19 nt, Artificial Sequence
  Description of Artificial Sequence: Synthetic oligonucleotide
uuaggauacagaugaggag

SEQ ID NO: 1042574 - RNA, 19 nt, Artificial Sequence
  Description of Artificial Sequence: Synthetic oligonucleotide
acugggguuaccaaaauuc

SEQ ID NO: 1042575 - RNA, 19 nt, Artificial Sequence
  Description of Artificial Sequence: Synthetic oligonucleotide
aaguuaagggacuaauaaa

SEQ ID NO: 1042576 - RNA, 19 nt, Artificial Sequence
  Description of Artificial Sequence: Synthetic oligonucleotide
aagggacuaauaaagacca

SEQ ID NO: 1042577 - RNA, 19 nt, Artificial Sequence
  Description of Artificial Sequence: Synthetic oligonucleotide
uagucuauauuuuauuauc

SEQ ID NO: 1042578 - RNA, 19 nt, Artificial Sequence
  Description of Artificial Sequence: Synthetic oligonucleotide
uggaccaacagacaacugu

SEQ ID NO: 1042579 - RNA, 19 nt, Artificial Sequence
  Description of Artificial Sequence: Synthetic oligonucleotide
aaaguaaguaggagcgagc

SEQ ID NO: 1042580 - RNA, 19 nt, Artificial Sequence
  Description of Artificial Sequence: Synthetic oligonucleotide
uaaguccagauacaguuac

SEQ ID NO: 1042581 - RNA, 19 nt, Artificial Sequence
  Description of Artificial Sequence: Synthetic oligonucleotide
caacuaaacacaguggacc

SEQ ID NO: 1042582 - RNA, 19 nt, Artificial Sequence
  Description of Artificial Sequence: Synthetic oligonucleotide
aauuuggggaaaguaaggu

SEQ ID NO: 1042583 - RNA, 19 nt, Artificial Sequence
  Description of Artificial Sequence: Synthetic oligonucleotide
gacuaauaaagaccaauca

SEQ ID NO: 1042584 - RNA, 19 nt, Artificial Sequence
  Description of Artificial Sequence: Synthetic oligonucleotide
ucgccauggguauagauug

SEQ ID NO: 1042585 - RNA, 19 nt, Artificial Sequence
  Description of Artificial Sequence: Synthetic oligonucleotide
acuuucuguuuacaaguac

SEQ ID NO: 1042586 - RNA, 19 nt, Artificial Sequence
  Description of Artificial Sequence: Synthetic oligonucleotide
cuuccauagagcuagagaa

SEQ ID NO: 1042587 - RNA, 19 nt, Artificial Sequence
  Description of Artificial Sequence: Synthetic oligonucleotide
gauaguauuugucucuaga

SEQ ID NO: 1042588 - RNA, 19 nt, Artificial Sequence
  Description of Artificial Sequence: Synthetic oligonucleotide
ugguuuggugccaugaaga

SEQ ID NO: 1042589 - RNA, 19 nt, Artificial Sequence
  Description of Artificial Sequence: Synthetic oligonucleotide
agcuagagaaguuaaggga

SEQ ID NO: 1042590 - RNA, 19 nt, Artificial Sequence
  Description of Artificial Sequence: Synthetic oligonucleotide
gagcauaaggguaacuggg

SEQ ID NO: 1042591 - RNA, 19 nt, Artificial Sequence
  Description of Artificial Sequence: Synthetic oligonucleotide
aagaaggguaaguuaggcu

SEQ ID NO: 1042592 - RNA, 19 nt, Artificial Sequence
  Description of Artificial Sequence: Synthetic oligonucleotide
uauagauuggucccuggaa

SEQ ID NO: 1042593 - RNA, 19 nt, Artificial Sequence
  Description of Artificial Sequence: Synthetic oligonucleotide
ugaucacaaauaugcaccc

SEQ ID NO: 1042594 - RNA, 19 nt, Artificial Sequence
  Description of Artificial Sequence: Synthetic oligonucleotide
caguaauggacuuccacag

SEQ ID NO: 1042595 - RNA, 19 nt, Artificial Sequence
  Description of Artificial Sequence: Synthetic oligonucleotide
uuuacaaguacaggagcag

SEQ ID NO: 1042596 - RNA, 19 nt, Artificial Sequence
  Description of Artificial Sequence: Synthetic oligonucleotide
agauagcuuccauagagcu

SEQ ID NO: 1042597 - RNA, 19 nt, Artificial Sequence
  Description of Artificial Sequence: Synthetic oligonucleotide
uuaggauuuaaguccagau

SEQ ID NO: 1042598 - RNA, 19 nt, Artificial Sequence
  Description of Artificial Sequence: Synthetic oligonucleotide
agcuaucccaggaauaacc

SEQ ID NO: 1042599 - RNA, 19 nt, Artificial Sequence
  Description of Artificial Sequence: Synthetic oligonucleotide
gaauuuggggaaaguaagg

SEQ ID NO: 1042600 - RNA, 19 nt, Artificial Sequence
  Description of Artificial Sequence: Synthetic oligonucleotide
acagugggacacuucgugc

SEQ ID NO: 1042601 - RNA, 19 nt, Artificial Sequence
  Description of Artificial Sequence: Synthetic oligonucleotide
cuaagaauauuaguuuaag

SEQ ID NO: 1042602 - RNA, 19 nt, Artificial Sequence
  Description of Artificial Sequence: Synthetic oligonucleotide
uuccauagagcuagagaag

SEQ ID NO: 1042603 - RNA, 19 nt, Artificial Sequence
  Description of Artificial Sequence: Synthetic oligonucleotide
guaaguaggagcgagcaac

SEQ ID NO: 1042604 - RNA, 19 nt, Artificial Sequence
  Description of Artificial Sequence: Synthetic oligonucleotide
acacuugguugauacacuc

SEQ ID NO: 1042605 - RNA, 19 nt, Artificial Sequence
  Description of Artificial Sequence: Synthetic oligonucleotide
gccuauaaaaggcacaacc

SEQ ID NO: 1042606 - RNA, 19 nt, Artificial Sequence
  Description of Artificial Sequence: Synthetic oligonucleotide
ucauguaaagucaggggau

SEQ ID NO: 1042607 - RNA, 19 nt, Artificial Sequence
  Description of Artificial Sequence: Synthetic oligonucleotide
uuaguuuaagaaggguaag

SEQ ID NO: 1042608 - RNA, 19 nt, Artificial Sequence
  Description of Artificial Sequence: Synthetic oligonucleotide
uguagcagggaaggcaugg

SEQ ID NO: 1042609 - RNA, 19 nt, Artificial Sequence
  Description of Artificial Sequence: Synthetic oligonucleotide
accaaaauucaugacaccu

SEQ ID NO: 1042610 - RNA, 19 nt, Artificial Sequence
  Description of Artificial Sequence: Synthetic oligonucleotide
aaguaaguaggagcgagca

SEQ ID NO: 1042611 - RNA, 19 nt, Artificial Sequence
  Description of Artificial Sequence: Synthetic oligonucleotide
gcagauagcuuccauagag

SEQ ID NO: 1042612 - RNA, 19 nt, Artificial Sequence
  Description of Artificial Sequence: Synthetic oligonucleotide
uggagcauaaggguaacug

SEQ ID NO: 1042613 - RNA, 19 nt, Artificial Sequence
  Description of Artificial Sequence: Synthetic oligonucleotide
aagacacuuggaucuccgg

SEQ ID NO: 1042614 - RNA, 19 nt, Artificial Sequence
  Description of Artificial Sequence: Synthetic oligonucleotide
uaggauuuaaguccagaua

SEQ ID NO: 1042615 - RNA, 19 nt, Artificial Sequence
  Description of Artificial Sequence: Synthetic oligonucleotide
uguaagaacccuggcaggc

SEQ ID NO: 1042616 - RNA, 19 nt, Artificial Sequence
  Description of Artificial Sequence: Synthetic oligonucleotide
aggaauaaccucuuaguua

SEQ ID NO: 1042617 - RNA, 19 nt, Artificial Sequence
  Description of Artificial Sequence: Synthetic oligonucleotide
ugcaauggaucauaguaau

SEQ ID NO: 1042618 - RNA, 19 nt, Artificial Sequence
  Description of Artificial Sequence: Synthetic oligonucleotide
uacugaaggaggcucagau

SEQ ID NO: 1042619 - RNA, 19 nt, Artificial Sequence
  Description of Artificial Sequence: Synthetic oligonucleotide
guuaggauacagaugagga

SEQ ID NO: 1042620 - RNA, 19 nt, Artificial Sequence
  Description of Artificial Sequence: Synthetic oligonucleotide
accucuuaguuauuuccuc

SEQ ID NO: 1042621 - RNA, 19 nt, Artificial Sequence
  Description of Artificial Sequence: Synthetic oligonucleotide
uccauagagcuagagaagu

SEQ ID NO: 1042622 - RNA, 19 nt, Artificial Sequence
  Description of Artificial Sequence: Synthetic oligonucleotide
acacuuguagcagggaagg

SEQ ID NO: 1042623 - RNA, 19 nt, Artificial Sequence
  Description of Artificial Sequence: Synthetic oligonucleotide
ggauagagcagggaaaagg

SEQ ID NO: 1042624 - RNA, 19 nt, Artificial Sequence
  Description of Artificial Sequence: Synthetic oligonucleotide
caggaaggaacuucccugg

SEQ ID NO: 1042625 - RNA, 19 nt, Artificial Sequence
  Description of Artificial Sequence: Synthetic oligonucleotide
gauacaguuacuuucuguu

SEQ ID NO: 1042626 - RNA, 19 nt, Artificial Sequence
  Description of Artificial Sequence: Synthetic oligonucleotide
cucgcagaggauuucacuc

SEQ ID NO: 1042627 - RNA, 19 nt, Artificial Sequence
  Description of Artificial Sequence: Synthetic oligonucleotide
ucggaauagagguacugaa

SEQ ID NO: 1042628 - RNA, 19 nt, Artificial Sequence
  Description of Artificial Sequence: Synthetic oligonucleotide
guugauacacucucaauua

SEQ ID NO: 1042629 - RNA, 19 nt, Artificial Sequence
  Description of Artificial Sequence: Synthetic oligonucleotide
aagaccaaucacaaggaaa

SEQ ID NO: 1042630 - RNA, 19 nt, Artificial Sequence
  Description of Artificial Sequence: Synthetic oligonucleotide
gacauuacuggggagggac

SEQ ID NO: 1042631 - RNA, 19 nt, Artificial Sequence
  Description of Artificial Sequence: Synthetic oligonucleotide
cagggaugugguuuggugc

SEQ ID NO: 1042632 - RNA, 19 nt, Artificial Sequence
  Description of Artificial Sequence: Synthetic oligonucleotide
auugguccacagcaacugg

SEQ ID NO: 1042633 - RNA, 19 nt, Artificial Sequence
  Description of Artificial Sequence: Synthetic oligonucleotide
aagccuauaaaaggcacaa

SEQ ID NO: 1042634 - RNA, 19 nt, Artificial Sequence
  Description of Artificial Sequence: Synthetic oligonucleotide
gacucaagagugguuaggc

SEQ ID NO: 1042635 - RNA, 19 nt, Artificial Sequence
  Description of Artificial Sequence: Synthetic oligonucleotide
ugacaccuggagcagaaaa

SEQ ID NO: 1042636 - RNA, 19 nt, Artificial Sequence
  Description of Artificial Sequence: Synthetic oligonucleotide
aguacaggagcagaauuug

SEQ ID NO: 1042637 - RNA, 19 nt, Artificial Sequence
  Description of Artificial Sequence: Synthetic oligonucleotide
agaccaaucacaaggaaaa

SEQ ID NO: 1042638 - RNA, 19 nt, Artificial Sequence
  Description of Artificial Sequence: Synthetic oligonucleotide
uaaguaggagcgagcaacu

SEQ ID NO: 1042639 - RNA, 19 nt, Artificial Sequence
  Description of Artificial Sequence: Synthetic oligonucleotide
uuuacacuugguugauaca

SEQ ID NO: 1042640 - RNA, 19 nt, Artificial Sequence
  Description of Artificial Sequence: Synthetic oligonucleotide
gaaaggguaguaaacuaga

SEQ ID NO: 1042641 - RNA, 19 nt, Artificial Sequence
  Description of Artificial Sequence: Synthetic oligonucleotide
aaugaacuuguuucaugua

SEQ ID NO: 1042642 - RNA, 19 nt, Artificial Sequence
  Description of Artificial Sequence: Synthetic oligonucleotide
gaagacacuuggaucuccg

SEQ ID NO: 1042643 - RNA, 19 nt, Artificial Sequence
  Description of Artificial Sequence: Synthetic oligonucleotide
aggagcgagcaacugcugg

SEQ ID NO: 1042644 - RNA, 19 nt, Artificial Sequence
  Description of Artificial Sequence: Synthetic oligonucleotide
ugguuaggccagcuguagg

SEQ ID NO: 1042645 - RNA, 19 nt, Artificial Sequence
  Description of Artificial Sequence: Synthetic oligonucleotide
ucuccggggagaaaguaaa

SEQ ID NO: 1042646 - RNA, 19 nt, Artificial Sequence
  Description of Artificial Sequence: Synthetic oligonucleotide
ugaccccuccucuacagug

SEQ ID NO: 1042647 - RNA, 19 nt, Artificial Sequence
  Description of Artificial Sequence: Synthetic oligonucleotide
cacuaauuacacuuaccuc

SEQ ID NO: 1042648 - RNA, 19 nt, Artificial Sequence
  Description of Artificial Sequence: Synthetic oligonucleotide
aucacaaggaaaaggccag

SEQ ID NO: 1042649 - RNA, 19 nt, Artificial Sequence
  Description of Artificial Sequence: Synthetic oligonucleotide
aaggcauggagaagaacug

SEQ ID NO: 1042650 - RNA, 19 nt, Artificial Sequence
  Description of Artificial Sequence: Synthetic oligonucleotide
ucgcagaggauuucacucc

SEQ ID NO: 1042651 - RNA, 19 nt, Artificial Sequence
  Description of Artificial Sequence: Synthetic oligonucleotide
auauuaguuuaagaagggu

SEQ ID NO: 1042652 - RNA, 19 nt, Artificial Sequence
  Description of Artificial Sequence: Synthetic oligonucleotide
caaauaugcacccuuuaaa

SEQ ID NO: 1042653 - RNA, 19 nt, Artificial Sequence
  Description of Artificial Sequence: Synthetic oligonucleotide
aagucacaaugcugaucac

SEQ ID NO: 1042654 - RNA, 19 nt, Artificial Sequence
  Description of Artificial Sequence: Synthetic oligonucleotide
acucugaccccuccucuac

SEQ ID NO: 1042655 - RNA, 19 nt, Artificial Sequence
  Description of Artificial Sequence: Synthetic oligonucleotide
uuacaaguacaggagcaga

SEQ ID NO: 1042656 - RNA, 19 nt, Artificial Sequence
  Description of Artificial Sequence: Synthetic oligonucleotide
gugucuuaaggucugggga

SEQ ID NO: 1042657 - RNA, 19 nt, Artificial Sequence
  Description of Artificial Sequence: Synthetic oligonucleotide
gguuauaguaggucacucc

SEQ ID NO: 1042658 - RNA, 19 nt, Artificial Sequence
  Description of Artificial Sequence: Synthetic oligonucleotide
ugaaggaggcucagauuug

SEQ ID NO: 1042659 - RNA, 19 nt, Artificial Sequence
  Description of Artificial Sequence: Synthetic oligonucleotide
aguuuaagaaggguaaguu

SEQ ID NO: 1042660 - RNA, 19 nt, Artificial Sequence
  Description of Artificial Sequence: Synthetic oligonucleotide
guuuaagaaggguaaguua

SEQ ID NO: 1042661 - RNA, 19 nt, Artificial Sequence
  Description of Artificial Sequence: Synthetic oligonucleotide
gucaaaagggacuccagaa

SEQ ID NO: 1042662 - RNA, 19 nt, Artificial Sequence
  Description of Artificial Sequence: Synthetic oligonucleotide
aggcauggagaagaacugc

SEQ ID NO: 1042663 - RNA, 19 nt, Artificial Sequence
  Description of Artificial Sequence: Synthetic oligonucleotide
aaggguaacugggguuacc

SEQ ID NO: 1042664 - RNA, 19 nt, Artificial Sequence
  Description of Artificial Sequence: Synthetic oligonucleotide
gguucuguaagaacccugg

SEQ ID NO: 1042665 - RNA, 19 nt, Artificial Sequence
  Description of Artificial Sequence: Synthetic oligonucleotide
gugguuuggugccaugaag

SEQ ID NO: 1042666 - RNA, 19 nt, Artificial Sequence
  Description of Artificial Sequence: Synthetic oligonucleotide
cuucgugcagauagcuucc

SEQ ID NO: 1042667 - RNA, 19 nt, Artificial Sequence
  Description of Artificial Sequence: Synthetic oligonucleotide
uaccaaaauucaugacacc

SEQ ID NO: 1042668 - RNA, 19 nt, Artificial Sequence
  Description of Artificial Sequence: Synthetic oligonucleotide
gugacauuacuggggaggg

SEQ ID NO: 1042669 - RNA, 19 nt, Artificial Sequence
  Description of Artificial Sequence: Synthetic oligonucleotide
aggagcagaauuuggggaa

SEQ ID NO: 1042670 - RNA, 19 nt, Artificial Sequence
  Description of Artificial Sequence: Synthetic oligonucleotide
cuacucacccacucugacc

SEQ ID NO: 1042671 - RNA, 19 nt, Artificial Sequence
  Description of Artificial Sequence: Synthetic oligonucleotide
uaagagggagagccuuugc

SEQ ID NO: 1042672 - RNA, 19 nt, Artificial Sequence
  Description of Artificial Sequence: Synthetic oligonucleotide
uccggggagaaaguaaaca

SEQ ID NO: 1042673 - RNA, 19 nt, Artificial Sequence
  Description of Artificial Sequence: Synthetic oligonucleotide
aaguacaggagcagaauuu

SEQ ID NO: 1042674 - RNA, 19 nt, Artificial Sequence
  Description of Artificial Sequence: Synthetic oligonucleotide
cuagagaugcauuggucca

SEQ ID NO: 1042675 - RNA, 19 nt, Artificial Sequence
  Description of Artificial Sequence: Synthetic oligonucleotide
ucacaaauaugcacccuuu

SEQ ID NO: 1042676 - RNA, 19 nt, Artificial Sequence
  Description of Artificial Sequence: Synthetic oligonucleotide
guuaagggacuaauaaaga

SEQ ID NO: 1042677 - RNA, 19 nt, Artificial Sequence
  Description of Artificial Sequence: Synthetic oligonucleotide
acuaagaauauuaguuuaa

SEQ ID NO: 1042678 - RNA, 19 nt, Artificial Sequence
  Description of Artificial Sequence: Synthetic oligonucleotide
ugcacccuuuaaaacagua

SEQ ID NO: 1042679 - RNA, 19 nt, Artificial Sequence
  Description of Artificial Sequence: Synthetic oligonucleotide
aacugggguuaccaaaauu

SEQ ID NO: 1042680 - RNA, 19 nt, Artificial Sequence
  Description of Artificial Sequence: Synthetic oligonucleotide
acucucaauuacgugggag

SEQ ID NO: 1042681 - RNA, 19 nt, Artificial Sequence
  Description of Artificial Sequence: Synthetic oligonucleotide
agcagaaaaguaaguagga

SEQ ID NO: 1042682 - RNA, 19 nt, Artificial Sequence
  Description of Artificial Sequence: Synthetic oligonucleotide
uaagaacccuggcaggcau

SEQ ID NO: 1042683 - RNA, 19 nt, Artificial Sequence
  Description of Artificial Sequence: Synthetic oligonucleotide
aggaaggaacuucccuggg

SEQ ID NO: 1042684 - RNA, 19 nt, Artificial Sequence
  Description of Artificial Sequence: Synthetic oligonucleotide
caggguuauaguaggucac

SEQ ID NO: 1042685 - RNA, 19 nt, Artificial Sequence
  Description of Artificial Sequence: Synthetic oligonucleotide
caauggaucauaguaaugu

SEQ ID NO: 1042686 - RNA, 19 nt, Artificial Sequence
  Description of Artificial Sequence: Synthetic oligonucleotide
gauacacucucaauuacgu

SEQ ID NO: 1042687 - RNA, 19 nt, Artificial Sequence
  Description of Artificial Sequence: Synthetic oligonucleotide
aggcaugaagcccaucgga

SEQ ID NO: 1042688 - RNA, 19 nt, Artificial Sequence
  Description of Artificial Sequence: Synthetic oligonucleotide
gaggauuucacuccacccu

SEQ ID NO: 1042689 - RNA, 19 nt, Artificial Sequence
  Description of Artificial Sequence: Synthetic oligonucleotide
cucuagagaugcauugguc

SEQ ID NO: 1042690 - RNA, 19 nt, Artificial Sequence
  Description of Artificial Sequence: Synthetic oligonucleotide
cauugguccacagcaacug

SEQ ID NO: 1042691 - RNA, 19 nt, Artificial Sequence
  Description of Artificial Sequence: Synthetic oligonucleotide
gcucagauuugugagaccc

SEQ ID NO: 1042692 - RNA, 19 nt, Artificial Sequence
  Description of Artificial Sequence: Synthetic oligonucleotide
aaggcgacuugcuuccuua

SEQ ID NO: 1042693 - RNA, 19 nt, Artificial Sequence
  Description of Artificial Sequence: Synthetic oligonucleotide
auacaguuacuuucuguuu

SEQ ID NO: 1042694 - RNA, 19 nt, Artificial Sequence
  Description of Artificial Sequence: Synthetic oligonucleotide
guauagauuggucccugga

SEQ ID NO: 1042695 - RNA, 19 nt, Artificial Sequence
  Description of Artificial Sequence: Synthetic oligonucleotide
gaagccuauaaaaggcaca

SEQ ID NO: 1042696 - RNA, 19 nt, Artificial Sequence
  Description of Artificial Sequence: Synthetic oligonucleotide
guaagguagaacaucuaaa

SEQ ID NO: 1042697 - RNA, 19 nt, Artificial Sequence
  Description of Artificial Sequence: Synthetic oligonucleotide
uucaagucuauagucuaua

SEQ ID NO: 1042698 - RNA, 19 nt, Artificial Sequence
  Description of Artificial Sequence: Synthetic oligonucleotide
acaccuggagcagaaaagu

SEQ ID NO: 1042699 - RNA, 19 nt, Artificial Sequence
  Description of Artificial Sequence: Synthetic oligonucleotide
acucgcagaggauuucacu

SEQ ID NO: 1042700 - RNA, 19 nt, Artificial Sequence
  Description of Artificial Sequence: Synthetic oligonucleotide
cuccuacucacccacucug

SEQ ID NO: 1042701 - RNA, 19 nt, Artificial Sequence
  Description of Artificial Sequence: Synthetic oligonucleotide
gggguuaccaaaauucaug

SEQ ID NO: 1042702 - RNA, 19 nt, Artificial Sequence
  Description of Artificial Sequence: Synthetic oligonucleotide
agagacccggauuggcaag

SEQ ID NO: 1042703 - RNA, 19 nt, Artificial Sequence
  Description of Artificial Sequence: Synthetic oligonucleotide
auagugcugcaguaaugga

SEQ ID NO: 1042704 - RNA, 19 nt, Artificial Sequence
  Description of Artificial Sequence: Synthetic oligonucleotide
auaagagggagagccuuug

SEQ ID NO: 1042705 - RNA, 19 nt, Artificial Sequence
  Description of Artificial Sequence: Synthetic oligonucleotide
gucuauagucuauauuuua

SEQ ID NO: 1042706 - RNA, 19 nt, Artificial Sequence
  Description of Artificial Sequence: Synthetic oligonucleotide
ggguuaccaaaauucauga

SEQ ID NO: 1042707 - RNA, 19 nt, Artificial Sequence
  Description of Artificial Sequence: Synthetic oligonucleotide
gagccuuugcccagaaggc

SEQ ID NO: 1042708 - RNA, 19 nt, Artificial Sequence
  Description of Artificial Sequence: Synthetic oligonucleotide
ccuauaaaaggcacaacca

SEQ ID NO: 1042709 - RNA, 19 nt, Artificial Sequence
  Description of Artificial Sequence: Synthetic oligonucleotide
gaaugauaagagggagagc

SEQ ID NO: 1042710 - RNA, 19 nt, Artificial Sequence
  Description of Artificial Sequence: Synthetic oligonucleotide
acccggauuggcaagaggu

SEQ ID NO: 1042711 - RNA, 19 nt, Artificial Sequence
  Description of Artificial Sequence: Synthetic oligonucleotide
cugcaauggaucauaguaa

SEQ ID NO: 1042712 - RNA, 19 nt, Artificial Sequence
  Description of Artificial Sequence: Synthetic oligonucleotide
gguauagauuggucccugg

SEQ ID NO: 1042713 - RNA, 19 nt, Artificial Sequence
  Description of Artificial Sequence: Synthetic oligonucleotide
gcugcaguaauggacuucc

SEQ ID NO: 1042714 - RNA, 19 nt, Artificial Sequence
  Description of Artificial Sequence: Synthetic oligonucleotide
agccuguguguuaggauac

SEQ ID NO: 1042715 - RNA, 19 nt, Artificial Sequence
  Description of Artificial Sequence: Synthetic oligonucleotide
ucucaauuacgugggaguu

SEQ ID NO: 1042716 - RNA, 19 nt, Artificial Sequence
  Description of Artificial Sequence: Synthetic oligonucleotide
ccccauacaccugugaugg

SEQ ID NO: 1042717 - RNA, 19 nt, Artificial Sequence
  Description of Artificial Sequence: Synthetic oligonucleotide
ggacuaauaaagaccaauc

SEQ ID NO: 1042718 - RNA, 19 nt, Artificial Sequence
  Description of Artificial Sequence: Synthetic oligonucleotide
aguccagauacaguuacuu

SEQ ID NO: 1042719 - RNA, 19 nt, Artificial Sequence
  Description of Artificial Sequence: Synthetic oligonucleotide
aaugcuccuggagcauaag

SEQ ID NO: 1042720 - RNA, 19 nt, Artificial Sequence
  Description of Artificial Sequence: Synthetic oligonucleotide
aguaaguaggagcgagcaa

SEQ ID NO: 1042721 - RNA, 19 nt, Artificial Sequence
  Description of Artificial Sequence: Synthetic oligonucleotide
auagagcuagagaaguuaa

SEQ ID NO: 1042722 - RNA, 19 nt, Artificial Sequence
  Description of Artificial Sequence: Synthetic oligonucleotide
guuaggccagcuguaggag

SEQ ID NO: 1042723 - RNA, 19 nt, Artificial Sequence
  Description of Artificial Sequence: Synthetic oligonucleotide
aaguaggagcgagcaacug

SEQ ID NO: 1042724 - RNA, 19 nt, Artificial Sequence
  Description of Artificial Sequence: Synthetic oligonucleotide
gacacuucgugcagauagc

SEQ ID NO: 1042725 - RNA, 19 nt, Artificial Sequence
  Description of Artificial Sequence: Synthetic oligonucleotide
aaccugcaauggaucauag

SEQ ID NO: 1042726 - RNA, 19 nt, Artificial Sequence
  Description of Artificial Sequence: Synthetic oligonucleotide
gguuaggccagcuguagga

SEQ ID NO: 1042727 - RNA, 19 nt, Artificial Sequence
  Description of Artificial Sequence: Synthetic oligonucleotide
gcaggguuauaguagguca

SEQ ID NO: 1042728 - RNA, 19 nt, Artificial Sequence
  Description of Artificial Sequence: Synthetic oligonucleotide
agacauggacacugguggu

SEQ ID NO: 1042729 - RNA, 19 nt, Artificial Sequence
  Description of Artificial Sequence: Synthetic oligonucleotide
gacccggauuggcaagagg

SEQ ID NO: 1042730 - RNA, 19 nt, Artificial Sequence
  Description of Artificial Sequence: Synthetic oligonucleotide
cugaaggaggcucagauuu

SEQ ID NO: 1042731 - RNA, 19 nt, Artificial Sequence
  Description of Artificial Sequence: Synthetic oligonucleotide
ccugcaauggaucauagua

SEQ ID NO: 1042732 - RNA, 19 nt, Artificial Sequence
  Description of Artificial Sequence: Synthetic oligonucleotide
cucaauuacgugggaguug

SEQ ID NO: 1042733 - RNA, 19 nt, Artificial Sequence
  Description of Artificial Sequence: Synthetic oligonucleotide
guguguuaggauacagaug

SEQ ID NO: 1042734 - RNA, 19 nt, Artificial Sequence
  Description of Artificial Sequence: Synthetic oligonucleotide
agccuauaaaaggcacaac

SEQ ID NO: 1042735 - RNA, 19 nt, Artificial Sequence
  Description of Artificial Sequence: Synthetic oligonucleotide
gcuggauaguauuugucuc

SEQ ID NO: 1042736 - RNA, 19 nt, Artificial Sequence
  Description of Artificial Sequence: Synthetic oligonucleotide
ggagggauguaaagaaaag

SEQ ID NO: 1042737 - RNA, 19 nt, Artificial Sequence
  Description of Artificial Sequence: Synthetic oligonucleotide
gguaacugggguuaccaaa

SEQ ID NO: 1042738 - RNA, 19 nt, Artificial Sequence
  Description of Artificial Sequence: Synthetic oligonucleotide
aggguaacugggguuacca

SEQ ID NO: 1042739 - RNA, 19 nt, Artificial Sequence
  Description of Artificial Sequence: Synthetic oligonucleotide
uggggaggguuuuggcugc

SEQ ID NO: 1042740 - RNA, 19 nt, Artificial Sequence
  Description of Artificial Sequence: Synthetic oligonucleotide
uaacugggguuaccaaaau

SEQ ID NO: 1042741 - RNA, 19 nt, Artificial Sequence
  Description of Artificial Sequence: Synthetic oligonucleotide
cuuaggauuuaaguccaga

SEQ ID NO: 1042742 - RNA, 19 nt, Artificial Sequence
  Description of Artificial Sequence: Synthetic oligonucleotide
uggguauagauuggucccu

SEQ ID NO: 1042743 - RNA, 19 nt, Artificial Sequence
  Description of Artificial Sequence: Synthetic oligonucleotide
gguuaccaaaauucaugac

SEQ ID NO: 1042744 - RNA, 19 nt, Artificial Sequence
  Description of Artificial Sequence: Synthetic oligonucleotide
gauuggucccuggaaccug

SEQ ID NO: 1042745 - RNA, 19 nt, Artificial Sequence
  Description of Artificial Sequence: Synthetic oligonucleotide
cauagagcuagagaaguua

SEQ ID NO: 1042746 - RNA, 19 nt, Artificial Sequence
  Description of Artificial Sequence: Synthetic oligonucleotide
acugaaggaggcucagauu

SEQ ID NO: 1042747 - RNA, 19 nt, Artificial Sequence
  Description of Artificial Sequence: Synthetic oligonucleotide
acuugcuuccuuaggauuu

SEQ ID NO: 1042748 - RNA, 19 nt, Artificial Sequence
  Description of Artificial Sequence: Synthetic oligonucleotide
caucggaauagagguacug

SEQ ID NO: 1042749 - RNA, 19 nt, Artificial Sequence
  Description of Artificial Sequence: Synthetic oligonucleotide
agauuggucccuggaaccu

SEQ ID NO: 1042750 - RNA, 19 nt, Artificial Sequence
  Description of Artificial Sequence: Synthetic oligonucleotide
aggguuauaguaggucacu

SEQ ID NO: 1042751 - RNA, 19 nt, Artificial Sequence
  Description of Artificial Sequence: Synthetic oligonucleotide
cucucaauuacgugggagu

SEQ ID NO: 1042752 - RNA, 19 nt, Artificial Sequence
  Description of Artificial Sequence: Synthetic oligonucleotide
aggauacagaugaggaggu

SEQ ID NO: 1042753 - RNA, 19 nt, Artificial Sequence
  Description of Artificial Sequence: Synthetic oligonucleotide
ugucgccauggguauagau

SEQ ID NO: 1042754 - RNA, 19 nt, Artificial Sequence
  Description of Artificial Sequence: Synthetic oligonucleotide
caggggauagagcagggaa

SEQ ID NO: 1042755 - RNA, 19 nt, Artificial Sequence
  Description of Artificial Sequence: Synthetic oligonucleotide
cagugucuuaaggucuggg

SEQ ID NO: 1042756 - RNA, 19 nt, Artificial Sequence
  Description of Artificial Sequence: Synthetic oligonucleotide
gguaguaaacuagaaugaa

SEQ ID NO: 1042757 - RNA, 19 nt, Artificial Sequence
  Description of Artificial Sequence: Synthetic oligonucleotide
accugcaauggaucauagu

SEQ ID NO: 1042758 - RNA, 19 nt, Artificial Sequence
  Description of Artificial Sequence: Synthetic oligonucleotide
cuagagaaguuaagggacu

SEQ ID NO: 1042759 - RNA, 19 nt, Artificial Sequence
  Description of Artificial Sequence: Synthetic oligonucleotide
cccacuaauuacacuuacc

SEQ ID NO: 1042760 - RNA, 19 nt, Artificial Sequence
  Description of Artificial Sequence: Synthetic oligonucleotide
acuccagaaaggguaguaa

SEQ ID NO: 1042761 - RNA, 19 nt, Artificial Sequence
  Description of Artificial Sequence: Synthetic oligonucleotide
agggcugucgccaugggua

SEQ ID NO: 1042762 - RNA, 19 nt, Artificial Sequence
  Description of Artificial Sequence: Synthetic oligonucleotide
ggaagccuauaaaaggcac

SEQ ID NO: 1042763 - RNA, 19 nt, Artificial Sequence
  Description of Artificial Sequence: Synthetic oligonucleotide
ucaugacaccuggagcaga

SEQ ID NO: 1042764 - RNA, 19 nt, Artificial Sequence
  Description of Artificial Sequence: Synthetic oligonucleotide
ggcgacuugcuuccuuagg

SEQ ID NO: 1042765 - RNA, 19 nt, Artificial Sequence
  Description of Artificial Sequence: Synthetic oligonucleotide
acagugucuuaaggucugg

SEQ ID NO: 1042766 - RNA, 19 nt, Artificial Sequence
  Description of Artificial Sequence: Synthetic oligonucleotide
aggcgacuugcuuccuuag

SEQ ID NO: 1042767 - RNA, 19 nt, Artificial Sequence
  Description of Artificial Sequence: Synthetic oligonucleotide
agguucuguaagaacccug

SEQ ID NO: 1042768 - RNA, 19 nt, Artificial Sequence
  Description of Artificial Sequence: Synthetic oligonucleotide
gaaccugcaauggaucaua

SEQ ID NO: 1042769 - RNA, 19 nt, Artificial Sequence
  Description of Artificial Sequence: Synthetic oligonucleotide
gcgacuugcuuccuuagga

SEQ ID NO: 1042770 - RNA, 19 nt, Artificial Sequence
  Description of Artificial Sequence: Synthetic oligonucleotide
aguuggggaggagucaaaa

SEQ ID NO: 1042771 - RNA, 19 nt, Artificial Sequence
  Description of Artificial Sequence: Synthetic oligonucleotide
uuugcccagaaggcgacuu

SEQ ID NO: 1042772 - RNA, 19 nt, Artificial Sequence
  Description of Artificial Sequence: Synthetic oligonucleotide
uccuccgggguggggaggg

SEQ ID NO: 1042773 - RNA, 19 nt, Artificial Sequence
  Description of Artificial Sequence: Synthetic oligonucleotide
guaggagcgagcaacugcu

SEQ ID NO: 1042774 - RNA, 19 nt, Artificial Sequence
  Description of Artificial Sequence: Synthetic oligonucleotide
agcuuccauagagcuagag

SEQ ID NO: 1042775 - RNA, 19 nt, Artificial Sequence
  Description of Artificial Sequence: Synthetic oligonucleotide
cagggcccacuaauuacac

SEQ ID NO: 1042776 - RNA, 19 nt, Artificial Sequence
  Description of Artificial Sequence: Synthetic oligonucleotide
caauuacgugggaguuggg

SEQ ID NO: 1042777 - RNA, 19 nt, Artificial Sequence
  Description of Artificial Sequence: Synthetic oligonucleotide
aaguaagguagaacaucua

SEQ ID NO: 1042778 - RNA, 19 nt, Artificial Sequence
  Description of Artificial Sequence: Synthetic oligonucleotide
ccacuaauuacacuuaccu

SEQ ID NO: 1042779 - RNA, 19 nt, Artificial Sequence
  Description of Artificial Sequence: Synthetic oligonucleotide
gcaacuaaacacaguggac

SEQ ID NO: 1042780 - RNA, 19 nt, Artificial Sequence
  Description of Artificial Sequence: Synthetic oligonucleotide
augauaagagggagagccu

SEQ ID NO: 1042781 - RNA, 19 nt, Artificial Sequence
  Description of Artificial Sequence: Synthetic oligonucleotide
aaggguaaguuaggcuuua

SEQ ID NO: 1042782 - RNA, 19 nt, Artificial Sequence
  Description of Artificial Sequence: Synthetic oligonucleotide
ggcaaagggaagccuauaa

SEQ ID NO: 1042783 - RNA, 19 nt, Artificial Sequence
  Description of Artificial Sequence: Synthetic oligonucleotide
cucuacagugggacacuuc

SEQ ID NO: 1042784 - RNA, 19 nt, Artificial Sequence
  Description of Artificial Sequence: Synthetic oligonucleotide
cccaucggaauagagguac

SEQ ID NO: 1042785 - RNA, 19 nt, Artificial Sequence
  Description of Artificial Sequence: Synthetic oligonucleotide
aggacucgcagaggauuuc

SEQ ID NO: 1042786 - RNA, 19 nt, Artificial Sequence
  Description of Artificial Sequence: Synthetic oligonucleotide
guaguaggagggauguaaa

SEQ ID NO: 1042787 - RNA, 19 nt, Artificial Sequence
  Description of Artificial Sequence: Synthetic oligonucleotide
ggaaggaacuucccuggga

SEQ ID NO: 1042788 - RNA, 19 nt, Artificial Sequence
  Description of Artificial Sequence: Synthetic oligonucleotide
agggcccacuaauuacacu

SEQ ID NO: 1042789 - RNA, 19 nt, Artificial Sequence
  Description of Artificial Sequence: Synthetic oligonucleotide
ggauuuaaguccagauaca

SEQ ID NO: 1042790 - RNA, 19 nt, Artificial Sequence
  Description of Artificial Sequence: Synthetic oligonucleotide
ucacuccacccucccuucu

SEQ ID NO: 1042791 - RNA, 19 nt, Artificial Sequence
  Description of Artificial Sequence: Synthetic oligonucleotide
guaagaacccuggcaggca

SEQ ID NO: 1042792 - RNA, 19 nt, Artificial Sequence
  Description of Artificial Sequence: Synthetic oligonucleotide
gguacugaaggaggcucag

SEQ ID NO: 1042793 - RNA, 19 nt, Artificial Sequence
  Description of Artificial Sequence: Synthetic oligonucleotide
auggacuuccacagaggca

SEQ ID NO: 1042794 - RNA, 19 nt, Artificial Sequence
  Description of Artificial Sequence: Synthetic oligonucleotide
gacucgcagaggauuucac

SEQ ID NO: 1042795 - RNA, 19 nt, Artificial Sequence
  Description of Artificial Sequence: Synthetic oligonucleotide
ugcugcaguaauggacuuc

SEQ ID NO: 1042796 - RNA, 19 nt, Artificial Sequence
  Description of Artificial Sequence: Synthetic oligonucleotide
uucgugcagauagcuucca

SEQ ID NO: 1042797 - RNA, 19 nt, Artificial Sequence
  Description of Artificial Sequence: Synthetic oligonucleotide
guguuaggauacagaugag

SEQ ID NO: 1042798 - RNA, 19 nt, Artificial Sequence
  Description of Artificial Sequence: Synthetic oligonucleotide
gcugucgccauggguauag

SEQ ID NO: 1042799 - RNA, 19 nt, Artificial Sequence
  Description of Artificial Sequence: Synthetic oligonucleotide
acuucccugggagcagaag

SEQ ID NO: 1042800 - RNA, 19 nt, Artificial Sequence
  Description of Artificial Sequence: Synthetic oligonucleotide
gcaauggaucauaguaaug

SEQ ID NO: 1042801 - RNA, 19 nt, Artificial Sequence
  Description of Artificial Sequence: Synthetic oligonucleotide
agacagacugcuggauagu

SEQ ID NO: 1042802 - RNA, 19 nt, Artificial Sequence
  Description of Artificial Sequence: Synthetic oligonucleotide
gacacuggugguggguaga

SEQ ID NO: 1042803 - RNA, 19 nt, Artificial Sequence
  Description of Artificial Sequence: Synthetic oligonucleotide
acauuacuggggagggaca

SEQ ID NO: 1042804 - RNA, 19 nt, Artificial Sequence
  Description of Artificial Sequence: Synthetic oligonucleotide
caaguacaggagcagaauu

SEQ ID NO: 1042805 - RNA, 19 nt, Artificial Sequence
  Description of Artificial Sequence: Synthetic oligonucleotide
ggguaaguuaggcuuuaaa

SEQ ID NO: 1042806 - RNA, 19 nt, Artificial Sequence
  Description of Artificial Sequence: Synthetic oligonucleotide
cagacugcuggauaguauu

SEQ ID NO: 1042807 - RNA, 19 nt, Artificial Sequence
  Description of Artificial Sequence: Synthetic oligonucleotide
gagacccggauuggcaaga

SEQ ID NO: 1042808 - RNA, 19 nt, Artificial Sequence
  Description of Artificial Sequence: Synthetic oligonucleotide
aucuccggggagaaaguaa

SEQ ID NO: 1042809 - RNA, 19 nt, Artificial Sequence
  Description of Artificial Sequence: Synthetic oligonucleotide
gcagaauuuggggaaagua

SEQ ID NO: 1042810 - RNA, 19 nt, Artificial Sequence
  Description of Artificial Sequence: Synthetic oligonucleotide
gcccacuaauuacacuuac

SEQ ID NO: 1042811 - RNA, 19 nt, Artificial Sequence
  Description of Artificial Sequence: Synthetic oligonucleotide
agugguuaggccagcugua

SEQ ID NO: 1042812 - RNA, 19 nt, Artificial Sequence
  Description of Artificial Sequence: Synthetic oligonucleotide
cagcuaucccaggaauaac

SEQ ID NO: 1042813 - RNA, 19 nt, Artificial Sequence
  Description of Artificial Sequence: Synthetic oligonucleotide
agacccggauuggcaagag

SEQ ID NO: 1042814 - RNA, 19 nt, Artificial Sequence
  Description of Artificial Sequence: Synthetic oligonucleotide
caggcauagugcugcagua

SEQ ID NO: 1042815 - RNA, 19 nt, Artificial Sequence
  Description of Artificial Sequence: Synthetic oligonucleotide
ggaggagucaaaagggacu

SEQ ID NO: 1042816 - RNA, 19 nt, Artificial Sequence
  Description of Artificial Sequence: Synthetic oligonucleotide
gcauagugcugcaguaaug

SEQ ID NO: 1042817 - RNA, 19 nt, Artificial Sequence
  Description of Artificial Sequence: Synthetic oligonucleotide
gggacuaauaaagaccaau

SEQ ID NO: 1042818 - RNA, 19 nt, Artificial Sequence
  Description of Artificial Sequence: Synthetic oligonucleotide
gggcccacuaauuacacuu

SEQ ID NO: 1042819 - RNA, 19 nt, Artificial Sequence
  Description of Artificial Sequence: Synthetic oligonucleotide
ccauggguauagauugguc

SEQ ID NO: 1042820 - RNA, 19 nt, Artificial Sequence
  Description of Artificial Sequence: Synthetic oligonucleotide
ccuguguguuaggauacag

SEQ ID NO: 1042821 - RNA, 19 nt, Artificial Sequence
  Description of Artificial Sequence: Synthetic oligonucleotide
gaaggguaaguuaggcuuu

SEQ ID NO: 1042822 - RNA, 19 nt, Artificial Sequence
  Description of Artificial Sequence: Synthetic oligonucleotide
ccggggagaaaguaaacaa

SEQ ID NO: 1042823 - RNA, 19 nt, Artificial Sequence
  Description of Artificial Sequence: Synthetic oligonucleotide
ggguuauaguaggucacuc

SEQ ID NO: 1042824 - RNA, 19 nt, Artificial Sequence
  Description of Artificial Sequence: Synthetic oligonucleotide
gcauaaggguaacuggggu

SEQ ID NO: 1042825 - RNA, 19 nt, Artificial Sequence
  Description of Artificial Sequence: Synthetic oligonucleotide
gugagacccacaccuccaa

SEQ ID NO: 1042826 - RNA, 19 nt, Artificial Sequence
  Description of Artificial Sequence: Synthetic oligonucleotide
ggcaugaagcccaucggaa

SEQ ID NO: 1042827 - RNA, 19 nt, Artificial Sequence
  Description of Artificial Sequence: Synthetic oligonucleotide
guaaugcuccuggagcaua

SEQ ID NO: 1042828 - RNA, 19 nt, Artificial Sequence
  Description of Artificial Sequence: Synthetic oligonucleotide
ggcuccuacucacccacuc

SEQ ID NO: 1042829 - RNA, 19 nt, Artificial Sequence
  Description of Artificial Sequence: Synthetic oligonucleotide
cacuugguugauacacucu

SEQ ID NO: 1042830 - RNA, 19 nt, Artificial Sequence
  Description of Artificial Sequence: Synthetic oligonucleotide
gauaagagggagagccuuu

SEQ ID NO: 1042831 - RNA, 19 nt, Artificial Sequence
  Description of Artificial Sequence: Synthetic oligonucleotide
cccggauuggcaagaggug

SEQ ID NO: 1042832 - RNA, 19 nt, Artificial Sequence
  Description of Artificial Sequence: Synthetic oligonucleotide
ggaaaguaagguagaacau

SEQ ID NO: 1042833 - RNA, 19 nt, Artificial Sequence
  Description of Artificial Sequence: Synthetic oligonucleotide
gucgccauggguauagauu

SEQ ID NO: 1042834 - RNA, 19 nt, Artificial Sequence
  Description of Artificial Sequence: Synthetic oligonucleotide
caguuacuuucuguuuaca

SEQ ID NO: 1042835 - RNA, 19 nt, Artificial Sequence
  Description of Artificial Sequence: Synthetic oligonucleotide
gcagggcccacuaauuaca

SEQ ID NO: 1042836 - RNA, 19 nt, Artificial Sequence
  Description of Artificial Sequence: Synthetic oligonucleotide
guggguagagacccggauu

SEQ ID NO: 1042837 - RNA, 19 nt, Artificial Sequence
  Description of Artificial Sequence: Synthetic oligonucleotide
cuugcuuccuuaggauuua

SEQ ID NO: 1042838 - RNA, 19 nt, Artificial Sequence
  Description of Artificial Sequence: Synthetic oligonucleotide
gguccacagcaacugggaa

SEQ ID NO: 1042839 - RNA, 19 nt, Artificial Sequence
  Description of Artificial Sequence: Synthetic oligonucleotide
cuacagugggacacuucgu

SEQ ID NO: 1042840 - RNA, 19 nt, Artificial Sequence
  Description of Artificial Sequence: Synthetic oligonucleotide
ccagcuaucccaggaauaa

SEQ ID NO: 1042841 - RNA, 19 nt, Artificial Sequence
  Description of Artificial Sequence: Synthetic oligonucleotide
cacucucaauuacguggga

SEQ ID NO: 1042842 - RNA, 19 nt, Artificial Sequence
  Description of Artificial Sequence: Synthetic oligonucleotide
ggacucgcagaggauuuca

SEQ ID NO: 1042843 - RNA, 19 nt, Artificial Sequence
  Description of Artificial Sequence: Synthetic oligonucleotide
agggacuaauaaagaccaa

SEQ ID NO: 1042844 - RNA, 19 nt, Artificial Sequence
  Description of Artificial Sequence: Synthetic oligonucleotide
gaaggcgacuugcuuccuu

SEQ ID NO: 1042845 - RNA, 19 nt, Artificial Sequence
  Description of Artificial Sequence: Synthetic oligonucleotide
aucccaggaauaaccucuu

SEQ ID NO: 1042846 - RNA, 19 nt, Artificial Sequence
  Description of Artificial Sequence: Synthetic oligonucleotide
aggguaaguuaggcuuuaa

SEQ ID NO: 1042847 - RNA, 19 nt, Artificial Sequence
  Description of Artificial Sequence: Synthetic oligonucleotide
agaaggcgacuugcuuccu

SEQ ID NO: 1042848 - RNA, 19 nt, Artificial Sequence
  Description of Artificial Sequence: Synthetic oligonucleotide
gcaugaagcccaucggaau

SEQ ID NO: 1042849 - RNA, 19 nt, Artificial Sequence
  Description of Artificial Sequence: Synthetic oligonucleotide
gaggacucgcagaggauuu

SEQ ID NO: 1042850 - RNA, 19 nt, Artificial Sequence
  Description of Artificial Sequence: Synthetic oligonucleotide
ggaaaaggccagcuauuuu

SEQ ID NO: 1042851 - RNA, 19 nt, Artificial Sequence
  Description of Artificial Sequence: Synthetic oligonucleotide
gaguuggggaggagucaaa

SEQ ID NO: 1042852 - RNA, 19 nt, Artificial Sequence
  Description of Artificial Sequence: Synthetic oligonucleotide
cgccauggguauagauugg

SEQ ID NO: 1042853 - RNA, 19 nt, Artificial Sequence
  Description of Artificial Sequence: Synthetic oligonucleotide
caccuccaacaagggcucc

SEQ ID NO: 1042854 - RNA, 19 nt, Artificial Sequence
  Description of Artificial Sequence: Synthetic oligonucleotide
caccagcuaucccaggaau

SEQ ID NO: 1042855 - RNA, 19 nt, Artificial Sequence
  Description of Artificial Sequence: Synthetic oligonucleotide
guccuccgggguggggagg

SEQ ID NO: 1042856 - RNA, 19 nt, Artificial Sequence
  Description of Artificial Sequence: Synthetic oligonucleotide
ggugguuguccuggagaca

SEQ ID NO: 1042857 - RNA, 19 nt, Artificial Sequence
  Description of Artificial Sequence: Synthetic oligonucleotide
cccgacucaagagugguua

SEQ ID NO: 1042858 - RNA, 19 nt, Artificial Sequence
  Description of Artificial Sequence: Synthetic oligonucleotide
ccuggagcauaaggguaac

SEQ ID NO: 1042859 - RNA, 19 nt, Artificial Sequence
  Description of Artificial Sequence: Synthetic oligonucleotide
gccauggguauagauuggu

SEQ ID NO: 1042860 - RNA, 19 nt, Artificial Sequence
  Description of Artificial Sequence: Synthetic oligonucleotide
cacuggugguggguagaga

SEQ ID NO: 1042861 - RNA, 19 nt, Artificial Sequence
  Description of Artificial Sequence: Synthetic oligonucleotide
cagggcugucgccaugggu

SEQ ID NO: 1042862 - RNA, 19 nt, Artificial Sequence
  Description of Artificial Sequence: Synthetic oligonucleotide
ggcccacuaauuacacuua

SEQ ID NO: 1042863 - RNA, 19 nt, Artificial Sequence
  Description of Artificial Sequence: Synthetic oligonucleotide
cugaccccuccucuacagu

SEQ ID NO: 1042864 - RNA, 19 nt, Artificial Sequence
  Description of Artificial Sequence: Synthetic oligonucleotide
gguaaugcuccuggagcau

SEQ ID NO: 1042865 - RNA, 19 nt, Artificial Sequence
  Description of Artificial Sequence: Synthetic oligonucleotide
gggagagccuuugcccaga

SEQ ID NO: 1042866 - RNA, 19 nt, Artificial Sequence
  Description of Artificial Sequence: Synthetic oligonucleotide
cuggagcauaaggguaacu

SEQ ID NO: 1042867 - RNA, 19 nt, Artificial Sequence
  Description of Artificial Sequence: Synthetic oligonucleotide
gggaggguuuuggcugcac

SEQ ID NO: 1042868 - RNA, 19 nt, Artificial Sequence
  Description of Artificial Sequence: Synthetic oligonucleotide
gggguguaguaggagggau

SEQ ID NO: 1042869 - RNA, 19 nt, Artificial Sequence
  Description of Artificial Sequence: Synthetic oligonucleotide
cugucgccauggguauaga

SEQ ID NO: 1042870 - RNA, 19 nt, Artificial Sequence
  Description of Artificial Sequence: Synthetic oligonucleotide
gcaagaggugcuggugacu

SEQ ID NO: 1042871 - RNA, 19 nt, Artificial Sequence
  Description of Artificial Sequence: Synthetic oligonucleotide
ccauagagcuagagaaguu

SEQ ID NO: 1042872 - RNA, 19 nt, Artificial Sequence
  Description of Artificial Sequence: Synthetic oligonucleotide
cuggggaucugggcaugcu

SEQ ID NO: 1042873 - RNA, 19 nt, Artificial Sequence
  Description of Artificial Sequence: Synthetic oligonucleotide
ggaugugguuuggugccau

SEQ ID NO: 1042874 - RNA, 19 nt, Artificial Sequence
  Description of Artificial Sequence: Synthetic oligonucleotide
ccaucggaauagagguacu

SEQ ID NO: 1042875 - RNA, 19 nt, Artificial Sequence
  Description of Artificial Sequence: Synthetic oligonucleotide
ggcugucgccauggguaua

SEQ ID NO: 1042876 - RNA, 19 nt, Artificial Sequence
  Description of Artificial Sequence: Synthetic oligonucleotide
ccucuacagugggacacuu

SEQ ID NO: 1042877 - RNA, 19 nt, Artificial Sequence
  Description of Artificial Sequence: Synthetic oligonucleotide
ccccgacucaagagugguu

SEQ ID NO: 1042878 - RNA, 19 nt, Artificial Sequence
  Description of Artificial Sequence: Synthetic oligonucleotide
ugaaauucaauacuaaugg

SEQ ID NO: 1042879 - RNA, 19 nt, Artificial Sequence
  Description of Artificial Sequence: Synthetic oligonucleotide
agaaauuuuacccacagcg

SEQ ID NO: 1042880 - RNA, 19 nt, Artificial Sequence
  Description of Artificial Sequence: Synthetic oligonucleotide
uauaaauugaucuauagaa

SEQ ID NO: 1042881 - RNA, 19 nt, Artificial Sequence
  Description of Artificial Sequence: Synthetic oligonucleotide
aaauucaauacuaaugggc

SEQ ID NO: 1042882 - RNA, 19 nt, Artificial Sequence
  Description of Artificial Sequence: Synthetic oligonucleotide
aguuuagcuaaauauaaac

SEQ ID NO: 1042883 - RNA, 19 nt, Artificial Sequence
  Description of Artificial Sequence: Synthetic oligonucleotide
acgucaaagaaucagauuc

SEQ ID NO: 1042884 - RNA, 19 nt, Artificial Sequence
  Description of Artificial Sequence: Synthetic oligonucleotide
aauaaaucuaacaauagca

SEQ ID NO: 1042885 - RNA, 19 nt, Artificial Sequence
  Description of Artificial Sequence: Synthetic oligonucleotide
aauaccaacaaagaacacg

SEQ ID NO: 1042886 - RNA, 19 nt, Artificial Sequence
  Description of Artificial Sequence: Synthetic oligonucleotide
uaaauugaucuauagaacc

SEQ ID NO: 1042887 - RNA, 19 nt, Artificial Sequence
  Description of Artificial Sequence: Synthetic oligonucleotide
acuuagauuaaugagaagg

SEQ ID NO: 1042888 - RNA, 19 nt, Artificial Sequence
  Description of Artificial Sequence: Synthetic oligonucleotide
aaauuuuacccacagcguc

SEQ ID NO: 1042889 - RNA, 19 nt, Artificial Sequence
  Description of Artificial Sequence: Synthetic oligonucleotide
aacgaaauccacuggaccg

SEQ ID NO: 1042890 - RNA, 19 nt, Artificial Sequence
  Description of Artificial Sequence: Synthetic oligonucleotide
ugaauugugagacaucugc

SEQ ID NO: 1042891 - RNA, 19 nt, Artificial Sequence
  Description of Artificial Sequence: Synthetic oligonucleotide
acaauuguugcguaucucc

SEQ ID NO: 1042892 - RNA, 19 nt, Artificial Sequence
  Description of Artificial Sequence: Synthetic oligonucleotide
cuaacaauagcacuuuucg

SEQ ID NO: 1042893 - RNA, 19 nt, Artificial Sequence
  Description of Artificial Sequence: Synthetic oligonucleotide
uuuaaugaaucugugagug

SEQ ID NO: 1042894 - RNA, 19 nt, Artificial Sequence
  Description of Artificial Sequence: Synthetic oligonucleotide
uuauaaauugaucuauaga

SEQ ID NO: 1042895 - RNA, 19 nt, Artificial Sequence
  Description of Artificial Sequence: Synthetic oligonucleotide
aaccaugucauacugucag

SEQ ID NO: 1042896 - RNA, 19 nt, Artificial Sequence
  Description of Artificial Sequence: Synthetic oligonucleotide
uaugagacgucaaagaauc

SEQ ID NO: 1042897 - RNA, 19 nt, Artificial Sequence
  Description of Artificial Sequence: Synthetic oligonucleotide
uauuauacauuaauuuaca

SEQ ID NO: 1042898 - RNA, 19 nt, Artificial Sequence
  Description of Artificial Sequence: Synthetic oligonucleotide
acaauagcacuuuucgccc

SEQ ID NO: 1042899 - RNA, 19 nt, Artificial Sequence
  Description of Artificial Sequence: Synthetic oligonucleotide
aauuucaucugggagaucu

SEQ ID NO: 1042900 - RNA, 19 nt, Artificial Sequence
  Description of Artificial Sequence: Synthetic oligonucleotide
ugucauuuaaugaaucugu

SEQ ID NO: 1042901 - RNA, 19 nt, Artificial Sequence
  Description of Artificial Sequence: Synthetic oligonucleotide
uuaauuaacauaacaguuu

SEQ ID NO: 1042902 - RNA, 19 nt, Artificial Sequence
  Description of Artificial Sequence: Synthetic oligonucleotide
ugaucaacgaaauccacug

SEQ ID NO: 1042903 - RNA, 19 nt, Artificial Sequence
  Description of Artificial Sequence: Synthetic oligonucleotide
auaaaucuaacaauagcac

SEQ ID NO: 1042904 - RNA, 19 nt, Artificial Sequence
  Description of Artificial Sequence: Synthetic oligonucleotide
aauacuaaugggcauggaa

SEQ ID NO: 1042905 - RNA, 19 nt, Artificial Sequence
  Description of Artificial Sequence: Synthetic oligonucleotide
uuuaugagacgucaaagaa

SEQ ID NO: 1042906 - RNA, 19 nt, Artificial Sequence
  Description of Artificial Sequence: Synthetic oligonucleotide
gaaacuuagauuaaugaga

SEQ ID NO: 1042907 - RNA, 19 nt, Artificial Sequence
  Description of Artificial Sequence: Synthetic oligonucleotide
  modified_base (14)..(14): a, c, u, g, unknown or other
aaagguuaacuggnguugg

SEQ ID NO: 1042908 - RNA, 19 nt, Artificial Sequence
  Description of Artificial Sequence: Synthetic oligonucleotide
uaaaucuaacaauagcacu

SEQ ID NO: 1042909 - RNA, 19 nt, Artificial Sequence
  Description of Artificial Sequence: Synthetic oligonucleotide
uuugaauugugagacaucu

SEQ ID NO: 1042910 - RNA, 19 nt, Artificial Sequence
  Description of Artificial Sequence: Synthetic oligonucleotide
ugucacaggaguuuguuug

SEQ ID NO: 1042911 - RNA, 19 nt, Artificial Sequence
  Description of Artificial Sequence: Synthetic oligonucleotide
auaaauugaucuauagaac

SEQ ID NO: 1042912 - RNA, 19 nt, Artificial Sequence
  Description of Artificial Sequence: Synthetic oligonucleotide
ugauauuagaagcaucuau

SEQ ID NO: 1042913 - RNA, 19 nt, Artificial Sequence
  Description of Artificial Sequence: Synthetic oligonucleotide
augucuccgugucagagcc

SEQ ID NO: 1042914 - RNA, 19 nt, Artificial Sequence
  Description of Artificial Sequence: Synthetic oligonucleotide
ugagcaguaauucaugcau

SEQ ID NO: 1042915 - RNA, 19 nt, Artificial Sequence
  Description of Artificial Sequence: Synthetic oligonucleotide
aauuccacuggaaagccuc

SEQ ID NO: 1042916 - RNA, 19 nt, Artificial Sequence
  Description of Artificial Sequence: Synthetic oligonucleotide
  modified_base (10)..(10): a, c, u, g, unknown or other
guuaacuggnguuggaaac

SEQ ID NO: 1042917 - RNA, 19 nt, Artificial Sequence
  Description of Artificial Sequence: Synthetic oligonucleotide
  modified_base (2)..(2): a, c, u, g, unknown or other
gnguuggaaacuuagauua

SEQ ID NO: 1042918 - RNA, 19 nt, Artificial Sequence
  Description of Artificial Sequence: Synthetic oligonucleotide
ucaagcucuagaacaauug

SEQ ID NO: 1042919 - RNA, 19 nt, Artificial Sequence
  Description of Artificial Sequence: Synthetic oligonucleotide
ugaaucauggaaaggcaug

SEQ ID NO: 1042920 - RNA, 19 nt, Artificial Sequence
  Description of Artificial Sequence: Synthetic oligonucleotide
uguaaguuucccaucuggc

SEQ ID NO: 1042921 - RNA, 19 nt, Artificial Sequence
  Description of Artificial Sequence: Synthetic oligonucleotide
ggaaacuuagauuaaugag

SEQ ID NO: 1042922 - RNA, 19 nt, Artificial Sequence
  Description of Artificial Sequence: Synthetic oligonucleotide
uauuagaagcaucuauugu

SEQ ID NO: 1042923 - RNA, 19 nt, Artificial Sequence
  Description of Artificial Sequence: Synthetic oligonucleotide
uaugcaacauauacuuaag

SEQ ID NO: 1042924 - RNA, 19 nt, Artificial Sequence
  Description of Artificial Sequence: Synthetic oligonucleotide
acggaagcgucuuuuaaac

SEQ ID NO: 1042925 - RNA, 19 nt, Artificial Sequence
  Description of Artificial Sequence: Synthetic oligonucleotide
uuugauaauuuagucaccu

SEQ ID NO: 1042926 - RNA, 19 nt, Artificial Sequence
  Description of Artificial Sequence: Synthetic oligonucleotide
aauugugagacaucugcaa

SEQ ID NO: 1042927 - RNA, 19 nt, Artificial Sequence
  Description of Artificial Sequence: Synthetic oligonucleotide
ucuagaacaauuguugcgu

SEQ ID NO: 1042928 - RNA, 19 nt, Artificial Sequence
  Description of Artificial Sequence: Synthetic oligonucleotide
uccguugaaauucaauacu

SEQ ID NO: 1042929 - RNA, 19 nt, Artificial Sequence
  Description of Artificial Sequence: Synthetic oligonucleotide
aauccagcggccuacaaua

SEQ ID NO: 1042930 - RNA, 19 nt, Artificial Sequence
  Description of Artificial Sequence: Synthetic oligonucleotide
uuucagauggauuccguca

SEQ ID NO: 1042931 - RNA, 19 nt, Artificial Sequence
  Description of Artificial Sequence: Synthetic oligonucleotide
uguaauagccggauuuucu

SEQ ID NO: 1042932 - RNA, 19 nt, Artificial Sequence
  Description of Artificial Sequence: Synthetic oligonucleotide
gaguuuguuugcuaugugc

SEQ ID NO: 1042933 - RNA, 19 nt, Artificial Sequence
  Description of Artificial Sequence: Synthetic oligonucleotide
aagucucauuuuaugagac

SEQ ID NO: 1042934 - RNA, 19 nt, Artificial Sequence
  Description of Artificial Sequence: Synthetic oligonucleotide
  modified_base (4)..(4): a, c, u, g, unknown or other
uggnguuggaaacuuagau

SEQ ID NO: 1042935 - RNA, 19 nt, Artificial Sequence
  Description of Artificial Sequence: Synthetic oligonucleotide
uugaucuauagaaccaugu

SEQ ID NO: 1042936 - RNA, 19 nt, Artificial Sequence
  Description of Artificial Sequence: Synthetic oligonucleotide
acuuaagucucuguuuccc

SEQ ID NO: 1042937 - RNA, 19 nt, Artificial Sequence
  Description of Artificial Sequence: Synthetic oligonucleotide
aaaucuaacaauagcacuu

SEQ ID NO: 1042938 - RNA, 19 nt, Artificial Sequence
  Description of Artificial Sequence: Synthetic oligonucleotide
cucuagaacaauuguugcg

SEQ ID NO: 1042939 - RNA, 19 nt, Artificial Sequence
  Description of Artificial Sequence: Synthetic oligonucleotide
ugagacgucaaagaaucag

SEQ ID NO: 1042940 - RNA, 19 nt, Artificial Sequence
  Description of Artificial Sequence: Synthetic oligonucleotide
guacugcugaacuuuaugc

SEQ ID NO: 1042941 - RNA, 19 nt, Artificial Sequence
  Description of Artificial Sequence: Synthetic oligonucleotide
auaugugcaacauggauuu

SEQ ID NO: 1042942 - RNA, 19 nt, Artificial Sequence
  Description of Artificial Sequence: Synthetic oligonucleotide
aaucauggaaaggcaugcc

SEQ ID NO: 1042943 - RNA, 19 nt, Artificial Sequence
  Description of Artificial Sequence: Synthetic oligonucleotide
uuuagucaccuggauaagg

SEQ ID NO: 1042944 - RNA, 19 nt, Artificial Sequence
  Description of Artificial Sequence: Synthetic oligonucleotide
uuaugagacgucaaagaau

SEQ ID NO: 1042945 - RNA, 19 nt, Artificial Sequence
  Description of Artificial Sequence: Synthetic oligonucleotide
aaugaucaacgaaauccac

SEQ ID NO: 1042946 - RNA, 19 nt, Artificial Sequence
  Description of Artificial Sequence: Synthetic oligonucleotide
cuaaagaucugcaguggcc

SEQ ID NO: 1042947 - RNA, 19 nt, Artificial Sequence
  Description of Artificial Sequence: Synthetic oligonucleotide
ucaauacuaaugggcaugg

SEQ ID NO: 1042948 - RNA, 19 nt, Artificial Sequence
  Description of Artificial Sequence: Synthetic oligonucleotide
uaaagaucugcaguggccc

SEQ ID NO: 1042949 - RNA, 19 nt, Artificial Sequence
  Description of Artificial Sequence: Synthetic oligonucleotide
aggacgacuucccacacuc

SEQ ID NO: 1042950 - RNA, 19 nt, Artificial Sequence
  Description of Artificial Sequence: Synthetic oligonucleotide
uuuugauaauuuagucacc

SEQ ID NO: 1042951 - RNA, 19 nt, Artificial Sequence
  Description of Artificial Sequence: Synthetic oligonucleotide
auuuaugcauuucuuaauu

SEQ ID NO: 1042952 - RNA, 19 nt, Artificial Sequence
  Description of Artificial Sequence: Synthetic oligonucleotide
agaacaauuguugcguauc

SEQ ID NO: 1042953 - RNA, 19 nt, Artificial Sequence
  Description of Artificial Sequence: Synthetic oligonucleotide
aucaacgaaauccacugga

SEQ ID NO: 1042954 - RNA, 19 nt, Artificial Sequence
  Description of Artificial Sequence: Synthetic oligonucleotide
ucccuuaauuucuugauau

SEQ ID NO: 1042955 - RNA, 19 nt, Artificial Sequence
  Description of Artificial Sequence: Synthetic oligonucleotide
uaaugggcauggaauauga

SEQ ID NO: 1042956 - RNA, 19 nt, Artificial Sequence
  Description of Artificial Sequence: Synthetic oligonucleotide
cuuagauuaaugagaagga

SEQ ID NO: 1042957 - RNA, 19 nt, Artificial Sequence
  Description of Artificial Sequence: Synthetic oligonucleotide
gaaucugugagugauuuga

SEQ ID NO: 1042958 - RNA, 19 nt, Artificial Sequence
  Description of Artificial Sequence: Synthetic oligonucleotide
ugaucuauagaaccauguc

SEQ ID NO: 1042959 - RNA, 19 nt, Artificial Sequence
  Description of Artificial Sequence: Synthetic oligonucleotide
uaauuuagucaccuggaua

SEQ ID NO: 1042960 - RNA, 19 nt, Artificial Sequence
  Description of Artificial Sequence: Synthetic oligonucleotide
caauuguugcguaucuccg

SEQ ID NO: 1042961 - RNA, 19 nt, Artificial Sequence
  Description of Artificial Sequence: Synthetic oligonucleotide
agccagaaauuuuacccac

SEQ ID NO: 1042962 - RNA, 19 nt, Artificial Sequence
  Description of Artificial Sequence: Synthetic oligonucleotide
aacaccaggacgacuuccc

SEQ ID NO: 1042963 - RNA, 19 nt, Artificial Sequence
  Description of Artificial Sequence: Synthetic oligonucleotide
uguaaauuuugaagccuga

SEQ ID NO: 1042964 - RNA, 19 nt, Artificial Sequence
  Description of Artificial Sequence: Synthetic oligonucleotide
aaguccacucgcugaaauc

SEQ ID NO: 1042965 - RNA, 19 nt, Artificial Sequence
  Description of Artificial Sequence: Synthetic oligonucleotide
uuagauuaaugagaaggac

SEQ ID NO: 1042966 - RNA, 19 nt, Artificial Sequence
  Description of Artificial Sequence: Synthetic oligonucleotide
auauacuuaagucucuguu

SEQ ID NO: 1042967 - RNA, 19 nt, Artificial Sequence
  Description of Artificial Sequence: Synthetic oligonucleotide
ugucauacugucaguauau

SEQ ID NO: 1042968 - RNA, 19 nt, Artificial Sequence
  Description of Artificial Sequence: Synthetic oligonucleotide
uuuguuugcuaugugcuga

SEQ ID NO: 1042969 - RNA, 19 nt, Artificial Sequence
  Description of Artificial Sequence: Synthetic oligonucleotide
agcuaaauauaaacucugc

SEQ ID NO: 1042970 - RNA, 19 nt, Artificial Sequence
  Description of Artificial Sequence: Synthetic oligonucleotide
guaauagccggauuuucug

SEQ ID NO: 1042971 - RNA, 19 nt, Artificial Sequence
  Description of Artificial Sequence: Synthetic oligonucleotide
gaaucauggaaaggcaugc

SEQ ID NO: 1042972 - RNA, 19 nt, Artificial Sequence
  Description of Artificial Sequence: Synthetic oligonucleotide
acacucacgauguaaauuu

SEQ ID NO: 1042973 - RNA, 19 nt, Artificial Sequence
  Description of Artificial Sequence: Synthetic oligonucleotide
cacguuuuauaaauuauga

SEQ ID NO: 1042974 - RNA, 19 nt, Artificial Sequence
  Description of Artificial Sequence: Synthetic oligonucleotide
aagauuauuuucggcaggu

SEQ ID NO: 1042975 - RNA, 19 nt, Artificial Sequence
  Description of Artificial Sequence: Synthetic oligonucleotide
aacaccacgcaaucgugcu

SEQ ID NO: 1042976 - RNA, 19 nt, Artificial Sequence
  Description of Artificial Sequence: Synthetic oligonucleotide
ucaacgaaauccacuggac

SEQ ID NO: 1042977 - RNA, 19 nt, Artificial Sequence
  Description of Artificial Sequence: Synthetic oligonucleotide
aacuuagauuaaugagaag

SEQ ID NO: 1042978 - RNA, 19 nt, Artificial Sequence
  Description of Artificial Sequence: Synthetic oligonucleotide
ucuggauaugugcaacaug

SEQ ID NO: 1042979 - RNA, 19 nt, Artificial Sequence
  Description of Artificial Sequence: Synthetic oligonucleotide
aauuuuacccacagcgucu

SEQ ID NO: 1042980 - RNA, 19 nt, Artificial Sequence
  Description of Artificial Sequence: Synthetic oligonucleotide
gaucaacgaaauccacugg

SEQ ID NO: 1042981 - RNA, 19 nt, Artificial Sequence
  Description of Artificial Sequence: Synthetic oligonucleotide
aagucuguuggcugaucag

SEQ ID NO: 1042982 - RNA, 19 nt, Artificial Sequence
  Description of Artificial Sequence: Synthetic oligonucleotide
aacaauuguugcguaucuc

SEQ ID NO: 1042983 - RNA, 19 nt, Artificial Sequence
  Description of Artificial Sequence: Synthetic oligonucleotide
acaaagaacacggaagcgu

SEQ ID NO: 1042984 - RNA, 19 nt, Artificial Sequence
  Description of Artificial Sequence: Synthetic oligonucleotide
uuuaugcauuucuuaauua

SEQ ID NO: 1042985 - RNA, 19 nt, Artificial Sequence
  Description of Artificial Sequence: Synthetic oligonucleotide
agcaguaauucaugcaugu

SEQ ID NO: 1042986 - RNA, 19 nt, Artificial Sequence
  Description of Artificial Sequence: Synthetic oligonucleotide
aguuauuauuauaaauuga

SEQ ID NO: 1042987 - RNA, 19 nt, Artificial Sequence
  Description of Artificial Sequence: Synthetic oligonucleotide
caagauuauuuucggcagg

SEQ ID NO: 1042988 - RNA, 19 nt, Artificial Sequence
  Description of Artificial Sequence: Synthetic oligonucleotide
gagauauaaugaucaacga

SEQ ID NO: 1042989 - RNA, 19 nt, Artificial Sequence
  Description of Artificial Sequence: Synthetic oligonucleotide
  modified_base (9)..(9): a, c, u, g, unknown or other
uuaacuggnguuggaaacu

SEQ ID NO: 1042990 - RNA, 19 nt, Artificial Sequence
  Description of Artificial Sequence: Synthetic oligonucleotide
caacgaaauccacuggacc

SEQ ID NO: 1042991 - RNA, 19 nt, Artificial Sequence
  Description of Artificial Sequence: Synthetic oligonucleotide
uggauuccgucacgcaugg

SEQ ID NO: 1042992 - RNA, 19 nt, Artificial Sequence
  Description of Artificial Sequence: Synthetic oligonucleotide
uuaaugagaaggacuccuc

SEQ ID NO: 1042993 - RNA, 19 nt, Artificial Sequence
  Description of Artificial Sequence: Synthetic oligonucleotide
ucuuuguucaacugcucaa

SEQ ID NO: 1042994 - RNA, 19 nt, Artificial Sequence
  Description of Artificial Sequence: Synthetic oligonucleotide
uuaaugaaucugugaguga

SEQ ID NO: 1042995 - RNA, 19 nt, Artificial Sequence
  Description of Artificial Sequence: Synthetic oligonucleotide
uguugcguaucuccguuga

SEQ ID NO: 1042996 - RNA, 19 nt, Artificial Sequence
  Description of Artificial Sequence: Synthetic oligonucleotide
uuuucagauggauuccguc

SEQ ID NO: 1042997 - RNA, 19 nt, Artificial Sequence
  Description of Artificial Sequence: Synthetic oligonucleotide
aucuauagaaccaugucau

SEQ ID NO: 1042998 - RNA, 19 nt, Artificial Sequence
  Description of Artificial Sequence: Synthetic oligonucleotide
uggugcaagcucauagcag

SEQ ID NO: 1042999 - RNA, 19 nt, Artificial Sequence
  Description of Artificial Sequence: Synthetic oligonucleotide
aaaggcaugccaaguccac

SEQ ID NO: 1043000 - RNA, 19 nt, Artificial Sequence
  Description of Artificial Sequence: Synthetic oligonucleotide
uggaaagccuccuaauguc

SEQ ID NO: 1043001 - RNA, 19 nt, Artificial Sequence
  Description of Artificial Sequence: Synthetic oligonucleotide
aacacguuuuauaaauuau

SEQ ID NO: 1043002 - RNA, 19 nt, Artificial Sequence
  Description of Artificial Sequence: Synthetic oligonucleotide
uguaugguuuaaaguugug

SEQ ID NO: 1043003 - RNA, 19 nt, Artificial Sequence
  Description of Artificial Sequence: Synthetic oligonucleotide
acacguuuuauaaauuaug

SEQ ID NO: 1043004 - RNA, 19 nt, Artificial Sequence
  Description of Artificial Sequence: Synthetic oligonucleotide
uacuaaugggcauggaaua

SEQ ID NO: 1043005 - RNA, 19 nt, Artificial Sequence
  Description of Artificial Sequence: Synthetic oligonucleotide
ugguuuaaaguugugcaaa

SEQ ID NO: 1043006 - RNA, 19 nt, Artificial Sequence
  Description of Artificial Sequence: Synthetic oligonucleotide
ccuacaauacaguucuucc

SEQ ID NO: 1043007 - RNA, 19 nt, Artificial Sequence
  Description of Artificial Sequence: Synthetic oligonucleotide
aaucgugcuguaacuuugg

SEQ ID NO: 1043008 - RNA, 19 nt, Artificial Sequence
  Description of Artificial Sequence: Synthetic oligonucleotide
uuuguuguaauagccggau

SEQ ID NO: 1043009 - RNA, 19 nt, Artificial Sequence
  Description of Artificial Sequence: Synthetic oligonucleotide
ucucaagucuguuggcuga

SEQ ID NO: 1043010 - RNA, 19 nt, Artificial Sequence
  Description of Artificial Sequence: Synthetic oligonucleotide
guuugcuaugugcugagca

SEQ ID NO: 1043011 - RNA, 19 nt, Artificial Sequence
  Description of Artificial Sequence: Synthetic oligonucleotide
cugagauauaaugaucaac

SEQ ID NO: 1043012 - RNA, 19 nt, Artificial Sequence
  Description of Artificial Sequence: Synthetic oligonucleotide
cacgcaaucgugcuguaac

SEQ ID NO: 1043013 - RNA, 19 nt, Artificial Sequence
  Description of Artificial Sequence: Synthetic oligonucleotide
  modified_base (6)..(6): a, c, u, g, unknown or other
acuggnguuggaaacuuag

SEQ ID NO: 1043014 - RNA, 19 nt, Artificial Sequence
  Description of Artificial Sequence: Synthetic oligonucleotide
auacuaaugggcauggaau

SEQ ID NO: 1043015 - RNA, 19 nt, Artificial Sequence
  Description of Artificial Sequence: Synthetic oligonucleotide
uugaauugugagacaucug

SEQ ID NO: 1043016 - RNA, 19 nt, Artificial Sequence
  Description of Artificial Sequence: Synthetic oligonucleotide
auguaaauuuugaagccug

SEQ ID NO: 1043017 - RNA, 19 nt, Artificial Sequence
  Description of Artificial Sequence: Synthetic oligonucleotide
guuuguuugcuaugugcug

SEQ ID NO: 1043018 - RNA, 19 nt, Artificial Sequence
  Description of Artificial Sequence: Synthetic oligonucleotide
ucucauuuuaugagacguc

SEQ ID NO: 1043019 - RNA, 19 nt, Artificial Sequence
  Description of Artificial Sequence: Synthetic oligonucleotide
caaucgugcuguaacuuug

SEQ ID NO: 1043020 - RNA, 19 nt, Artificial Sequence
  Description of Artificial Sequence: Synthetic oligonucleotide
gagccagaaauuuuaccca

SEQ ID NO: 1043021 - RNA, 19 nt, Artificial Sequence
  Description of Artificial Sequence: Synthetic oligonucleotide
gacgacuucccacacucac

SEQ ID NO: 1043022 - RNA, 19 nt, Artificial Sequence
  Description of Artificial Sequence: Synthetic oligonucleotide
augcaacauauacuuaagu

SEQ ID NO: 1043023 - RNA, 19 nt, Artificial Sequence
  Description of Artificial Sequence: Synthetic oligonucleotide
ugggagaucuuugaauugu

SEQ ID NO: 1043024 - RNA, 19 nt, Artificial Sequence
  Description of Artificial Sequence: Synthetic oligonucleotide
caguaauucaugcauguaa

SEQ ID NO: 1043025 - RNA, 19 nt, Artificial Sequence
  Description of Artificial Sequence: Synthetic oligonucleotide
cgugcuguaacuuugguuc

SEQ ID NO: 1043026 - RNA, 19 nt, Artificial Sequence
  Description of Artificial Sequence: Synthetic oligonucleotide
aggcauguaaguuucccau

SEQ ID NO: 1043027 - RNA, 19 nt, Artificial Sequence
  Description of Artificial Sequence: Synthetic oligonucleotide
gauuccgucacgcaugggu

SEQ ID NO: 1043028 - RNA, 19 nt, Artificial Sequence
  Description of Artificial Sequence: Synthetic oligonucleotide
agcgucuuuuaaacuauac

SEQ ID NO: 1043029 - RNA, 19 nt, Artificial Sequence
  Description of Artificial Sequence: Synthetic oligonucleotide
uuccgucacgcaugggugg

SEQ ID NO: 1043030 - RNA, 19 nt, Artificial Sequence
  Description of Artificial Sequence: Synthetic oligonucleotide
aagccuccuaaugucuccg

SEQ ID NO: 1043031 - RNA, 19 nt, Artificial Sequence
  Description of Artificial Sequence: Synthetic oligonucleotide
ugugcaacauggauuucua

SEQ ID NO: 1043032 - RNA, 19 nt, Artificial Sequence
  Description of Artificial Sequence: Synthetic oligonucleotide
cagaaauuuuacccacagc

SEQ ID NO: 1043033 - RNA, 19 nt, Artificial Sequence
  Description of Artificial Sequence: Synthetic oligonucleotide
aucugggagaucuuugaau

SEQ ID NO: 1043034 - RNA, 19 nt, Artificial Sequence
  Description of Artificial Sequence: Synthetic oligonucleotide
acauauacuuaagucucug

SEQ ID NO: 1043035 - RNA, 19 nt, Artificial Sequence
  Description of Artificial Sequence: Synthetic oligonucleotide
augucauacugucaguaua

SEQ ID NO: 1043036 - RNA, 19 nt, Artificial Sequence
  Description of Artificial Sequence: Synthetic oligonucleotide
ggauuucuacauuauucug

SEQ ID NO: 1043037 - RNA, 19 nt, Artificial Sequence
  Description of Artificial Sequence: Synthetic oligonucleotide
cagugaacaggccaucgug

SEQ ID NO: 1043038 - RNA, 19 nt, Artificial Sequence
  Description of Artificial Sequence: Synthetic oligonucleotide
cugcacuaaagaucugcag

SEQ ID NO: 1043039 - RNA, 19 nt, Artificial Sequence
  Description of Artificial Sequence: Synthetic oligonucleotide
augaucaacgaaauccacu

SEQ ID NO: 1043040 - RNA, 19 nt, Artificial Sequence
  Description of Artificial Sequence: Synthetic oligonucleotide
ugaacaggccaucgugaac

SEQ ID NO: 1043041 - RNA, 19 nt, Artificial Sequence
  Description of Artificial Sequence: Synthetic oligonucleotide
cauuuuaugagacgucaaa

SEQ ID NO: 1043042 - RNA, 19 nt, Artificial Sequence
  Description of Artificial Sequence: Synthetic oligonucleotide
gagacgucaaagaaucaga

SEQ ID NO: 1043043 - RNA, 19 nt, Artificial Sequence
  Description of Artificial Sequence: Synthetic oligonucleotide
gaauugugagacaucugca

SEQ ID NO: 1043044 - RNA, 19 nt, Artificial Sequence
  Description of Artificial Sequence: Synthetic oligonucleotide
cuuuucgcccugaaucaug

SEQ ID NO: 1043045 - RNA, 19 nt, Artificial Sequence
  Description of Artificial Sequence: Synthetic oligonucleotide
cuaaugggcauggaauaug

SEQ ID NO: 1043046 - RNA, 19 nt, Artificial Sequence
  Description of Artificial Sequence: Synthetic oligonucleotide
auuguugcguaucuccguu

SEQ ID NO: 1043047 - RNA, 19 nt, Artificial Sequence
  Description of Artificial Sequence: Synthetic oligonucleotide
auugaucuauagaaccaug

SEQ ID NO: 1043048 - RNA, 19 nt, Artificial Sequence
  Description of Artificial Sequence: Synthetic oligonucleotide
ucacaccuucgucucaagu

SEQ ID NO: 1043049 - RNA, 19 nt, Artificial Sequence
  Description of Artificial Sequence: Synthetic oligonucleotide
ugccaaguccacucgcuga

SEQ ID NO: 1043050 - RNA, 19 nt, Artificial Sequence
  Description of Artificial Sequence: Synthetic oligonucleotide
uaguguguuaucagucuuu

SEQ ID NO: 1043051 - RNA, 19 nt, Artificial Sequence
  Description of Artificial Sequence: Synthetic oligonucleotide
gaacaccacgcaaucgugc

SEQ ID NO: 1043052 - RNA, 19 nt, Artificial Sequence
  Description of Artificial Sequence: Synthetic oligonucleotide
accucuauaguuauauuuu

SEQ ID NO: 1043053 - RNA, 19 nt, Artificial Sequence
  Description of Artificial Sequence: Synthetic oligonucleotide
aagcucuagaacaauuguu

SEQ ID NO: 1043054 - RNA, 19 nt, Artificial Sequence
  Description of Artificial Sequence: Synthetic oligonucleotide
ucaacugcucaagcucuag

SEQ ID NO: 1043055 - RNA, 19 nt, Artificial Sequence
  Description of Artificial Sequence: Synthetic oligonucleotide
ucgugaacaccacgcaauc

SEQ ID NO: 1043056 - RNA, 19 nt, Artificial Sequence
  Description of Artificial Sequence: Synthetic oligonucleotide
aacacggaagcgucuuuua

SEQ ID NO: 1043057 - RNA, 19 nt, Artificial Sequence
  Description of Artificial Sequence: Synthetic oligonucleotide
auuuagaauuacaaauauu

SEQ ID NO: 1043058 - RNA, 19 nt, Artificial Sequence
  Description of Artificial Sequence: Synthetic oligonucleotide
gguuccaauaaccaggggu

SEQ ID NO: 1043059 - RNA, 19 nt, Artificial Sequence
  Description of Artificial Sequence: Synthetic oligonucleotide
gaaauuuuacccacagcgu

SEQ ID NO: 1043060 - RNA, 19 nt, Artificial Sequence
  Description of Artificial Sequence: Synthetic oligonucleotide
aaagaacacggaagcgucu

SEQ ID NO: 1043061 - RNA, 19 nt, Artificial Sequence
  Description of Artificial Sequence: Synthetic oligonucleotide
gaaaggcaugccaagucca

SEQ ID NO: 1043062 - RNA, 19 nt, Artificial Sequence
  Description of Artificial Sequence: Synthetic oligonucleotide
uccagcggccuacaauaca

SEQ ID NO: 1043063 - RNA, 19 nt, Artificial Sequence
  Description of Artificial Sequence: Synthetic oligonucleotide
ggaagcgucuuuuaaacua

SEQ ID NO: 1043064 - RNA, 19 nt, Artificial Sequence
  Description of Artificial Sequence: Synthetic oligonucleotide
cuuuguuguaauagccgga

SEQ ID NO: 1043065 - RNA, 19 nt, Artificial Sequence
  Description of Artificial Sequence: Synthetic oligonucleotide
guaaguuucccaucuggcu

SEQ ID NO: 1043066 - RNA, 19 nt, Artificial Sequence
  Description of Artificial Sequence: Synthetic oligonucleotide
agccugagauauaaugauc

SEQ ID NO: 1043067 - RNA, 19 nt, Artificial Sequence
  Description of Artificial Sequence: Synthetic oligonucleotide
cacuuuucgcccugaauca

SEQ ID NO: 1043068 - RNA, 19 nt, Artificial Sequence
  Description of Artificial Sequence: Synthetic oligonucleotide
guuccaauaaccaggggua

SEQ ID NO: 1043069 - RNA, 19 nt, Artificial Sequence
  Description of Artificial Sequence: Synthetic oligonucleotide
uugcguaucuccguugaaa

SEQ ID NO: 1043070 - RNA, 19 nt, Artificial Sequence
  Description of Artificial Sequence: Synthetic oligonucleotide
gauggauuccgucacgcau

SEQ ID NO: 1043071 - RNA, 19 nt, Artificial Sequence
  Description of Artificial Sequence: Synthetic oligonucleotide
ucacgcauggguggaaaga

SEQ ID NO: 1043072 - RNA, 19 nt, Artificial Sequence
  Description of Artificial Sequence: Synthetic oligonucleotide
uguugguguuguuggccgc

SEQ ID NO: 1043073 - RNA, 19 nt, Artificial Sequence
  Description of Artificial Sequence: Synthetic oligonucleotide
uaaccagggguagaggaau

SEQ ID NO: 1043074 - RNA, 19 nt, Artificial Sequence
  Description of Artificial Sequence: Synthetic oligonucleotide
caauaccaacaaagaacac

SEQ ID NO: 1043075 - RNA, 19 nt, Artificial Sequence
  Description of Artificial Sequence: Synthetic oligonucleotide
aagaacacggaagcgucuu

SEQ ID NO: 1043076 - RNA, 19 nt, Artificial Sequence
  Description of Artificial Sequence: Synthetic oligonucleotide
uccaauaaccagggguaga

SEQ ID NO: 1043077 - RNA, 19 nt, Artificial Sequence
  Description of Artificial Sequence: Synthetic oligonucleotide
ugcuaugugcugagcagua

SEQ ID NO: 1043078 - RNA, 19 nt, Artificial Sequence
  Description of Artificial Sequence: Synthetic oligonucleotide
auggauuccgucacgcaug

SEQ ID NO: 1043079 - RNA, 19 nt, Artificial Sequence
  Description of Artificial Sequence: Synthetic oligonucleotide
cauguaaguuucccaucug

SEQ ID NO: 1043080 - RNA, 19 nt, Artificial Sequence
  Description of Artificial Sequence: Synthetic oligonucleotide
uagucaccuggauaaggaa

SEQ ID NO: 1043081 - RNA, 19 nt, Artificial Sequence
  Description of Artificial Sequence: Synthetic oligonucleotide
auuuagucaccuggauaag

SEQ ID NO: 1043082 - RNA, 19 nt, Artificial Sequence
  Description of Artificial Sequence: Synthetic oligonucleotide
uuguugcguaucuccguug

SEQ ID NO: 1043083 - RNA, 19 nt, Artificial Sequence
  Description of Artificial Sequence: Synthetic oligonucleotide
gugaacaccacgcaaucgu

SEQ ID NO: 1043084 - RNA, 19 nt, Artificial Sequence
  Description of Artificial Sequence: Synthetic oligonucleotide
ugcaagcucauagcaguac

SEQ ID NO: 1043085 - RNA, 19 nt, Artificial Sequence
  Description of Artificial Sequence: Synthetic oligonucleotide
gugcuguaacuuugguucc

SEQ ID NO: 1043086 - RNA, 19 nt, Artificial Sequence
  Description of Artificial Sequence: Synthetic oligonucleotide
caggaguuuguuugcuaug

SEQ ID NO: 1043087 - RNA, 19 nt, Artificial Sequence
  Description of Artificial Sequence: Synthetic oligonucleotide
auuccgucacgcaugggug

SEQ ID NO: 1043088 - RNA, 19 nt, Artificial Sequence
  Description of Artificial Sequence: Synthetic oligonucleotide
gucuccugugcucagucuc

SEQ ID NO: 1043089 - RNA, 19 nt, Artificial Sequence
  Description of Artificial Sequence: Synthetic oligonucleotide
cacgcauggguggaaagac

SEQ ID NO: 1043090 - RNA, 19 nt, Artificial Sequence
  Description of Artificial Sequence: Synthetic oligonucleotide
acgacuucccacacucacg

SEQ ID NO: 1043091 - RNA, 19 nt, Artificial Sequence
  Description of Artificial Sequence: Synthetic oligonucleotide
cuggugcaagcucauagca

SEQ ID NO: 1043092 - RNA, 19 nt, Artificial Sequence
  Description of Artificial Sequence: Synthetic oligonucleotide
gucuccgugucagagccag

SEQ ID NO: 1043093 - RNA, 19 nt, Artificial Sequence
  Description of Artificial Sequence: Synthetic oligonucleotide
aucgugaacaccacgcaau

SEQ ID NO: 1043094 - RNA, 19 nt, Artificial Sequence
  Description of Artificial Sequence: Synthetic oligonucleotide
ccagcggccuacaauacag

SEQ ID NO: 1043095 - RNA, 19 nt, Artificial Sequence
  Description of Artificial Sequence: Synthetic oligonucleotide
  modified_base (13)..(13): a, c, u, g, unknown or other
aagguuaacuggnguugga

SEQ ID NO: 1043096 - RNA, 19 nt, Artificial Sequence
  Description of Artificial Sequence: Synthetic oligonucleotide
acgcaaucgugcuguaacu

SEQ ID NO: 1043097 - RNA, 19 nt, Artificial Sequence
  Description of Artificial Sequence: Synthetic oligonucleotide
acgcauggguggaaagacc

SEQ ID NO: 1043098 - RNA, 19 nt, Artificial Sequence
  Description of Artificial Sequence: Synthetic oligonucleotide
acaaaaccucccucuguau

SEQ ID NO: 1043099 - RNA, 19 nt, Artificial Sequence
  Description of Artificial Sequence: Synthetic oligonucleotide
agacgucaaagaaucagau

SEQ ID NO: 1043100 - RNA, 19 nt, Artificial Sequence
  Description of Artificial Sequence: Synthetic oligonucleotide
gauucaccucuauaguuau

SEQ ID NO: 1043101 - RNA, 19 nt, Artificial Sequence
  Description of Artificial Sequence: Synthetic oligonucleotide
agcacuuuucgcccugaau

SEQ ID NO: 1043102 - RNA, 19 nt, Artificial Sequence
  Description of Artificial Sequence: Synthetic oligonucleotide
agucaccuggauaaggaau

SEQ ID NO: 1043103 - RNA, 19 nt, Artificial Sequence
  Description of Artificial Sequence: Synthetic oligonucleotide
acacggaagcgucuuuuaa

SEQ ID NO: 1043104 - RNA, 19 nt, Artificial Sequence
  Description of Artificial Sequence: Synthetic oligonucleotide
ccaauaaccagggguagag

SEQ ID NO: 1043105 - RNA, 19 nt, Artificial Sequence
  Description of Artificial Sequence: Synthetic oligonucleotide
aguguguuaucagucuuuu

SEQ ID NO: 1043106 - RNA, 19 nt, Artificial Sequence
  Description of Artificial Sequence: Synthetic oligonucleotide
  modified_base (5)..(5): a, c, u, g, unknown or other
cuggnguuggaaacuuaga

SEQ ID NO: 1043107 - RNA, 19 nt, Artificial Sequence
  Description of Artificial Sequence: Synthetic oligonucleotide
uuguuguaauagccggauu

SEQ ID NO: 1043108 - RNA, 19 nt, Artificial Sequence
  Description of Artificial Sequence: Synthetic oligonucleotide
gccaucgugaacaccacgc

SEQ ID NO: 1043109 - RNA, 19 nt, Artificial Sequence
  Description of Artificial Sequence: Synthetic oligonucleotide
gucauacugucaguauaug

SEQ ID NO: 1043110 - RNA, 19 nt, Artificial Sequence
  Description of Artificial Sequence: Synthetic oligonucleotide
cacggaagcgucuuuuaaa

SEQ ID NO: 1043111 - RNA, 19 nt, Artificial Sequence
  Description of Artificial Sequence: Synthetic oligonucleotide
  modified_base (12)..(12): a, c, u, g, unknown or other
agguuaacuggnguuggaa

SEQ ID NO: 1043112 - RNA, 19 nt, Artificial Sequence
  Description of Artificial Sequence: Synthetic oligonucleotide
gcuuaggccacucuggaua

SEQ ID NO: 1043113 - RNA, 19 nt, Artificial Sequence
  Description of Artificial Sequence: Synthetic oligonucleotide
gcaaaggcauguaaguuuc

SEQ ID NO: 1043114 - RNA, 19 nt, Artificial Sequence
  Description of Artificial Sequence: Synthetic oligonucleotide
gaacuuuaugcaaaacuuu

SEQ ID NO: 1043115 - RNA, 19 nt, Artificial Sequence
  Description of Artificial Sequence: Synthetic oligonucleotide
cucagaccaaggucuugug

SEQ ID NO: 1043116 - RNA, 19 nt, Artificial Sequence
  Description of Artificial Sequence: Synthetic oligonucleotide
  modified_base (8)..(8): a, c, u, g, unknown or other
uaacuggnguuggaaacuu

SEQ ID NO: 1043117 - RNA, 19 nt, Artificial Sequence
  Description of Artificial Sequence: Synthetic oligonucleotide
uucuacugauaaacacguu

SEQ ID NO: 1043118 - RNA, 19 nt, Artificial Sequence
  Description of Artificial Sequence: Synthetic oligonucleotide
caagcucuagaacaauugu

SEQ ID NO: 1043119 - RNA, 19 nt, Artificial Sequence
  Description of Artificial Sequence: Synthetic oligonucleotide
uguuggccgcaaaggcaug

SEQ ID NO: 1043120 - RNA, 19 nt, Artificial Sequence
  Description of Artificial Sequence: Synthetic oligonucleotide
caccucuauaguuauauuu

SEQ ID NO: 1043121 - RNA, 19 nt, Artificial Sequence
  Description of Artificial Sequence: Synthetic oligonucleotide
uggccgcaaaggcauguaa

SEQ ID NO: 1043122 - RNA, 19 nt, Artificial Sequence
  Description of Artificial Sequence: Synthetic oligonucleotide
gaaccaugucauacuguca

SEQ ID NO: 1043123 - RNA, 19 nt, Artificial Sequence
  Description of Artificial Sequence: Synthetic oligonucleotide
uaucuccguugaaauucaa

SEQ ID NO: 1043124 - RNA, 19 nt, Artificial Sequence
  Description of Artificial Sequence: Synthetic oligonucleotide
uccgugucagagccagaaa

SEQ ID NO: 1043125 - RNA, 19 nt, Artificial Sequence
  Description of Artificial Sequence: Synthetic oligonucleotide
auuuuacccacagcgucua

SEQ ID NO: 1043126 - RNA, 19 nt, Artificial Sequence
  Description of Artificial Sequence: Synthetic oligonucleotide
cuagaacaauuguugcgua

SEQ ID NO: 1043127 - RNA, 19 nt, Artificial Sequence
  Description of Artificial Sequence: Synthetic oligonucleotide
uccuuaacaccaggacgac

SEQ ID NO: 1043128 - RNA, 19 nt, Artificial Sequence
  Description of Artificial Sequence: Synthetic oligonucleotide
caucgugaacaccacgcaa

SEQ ID NO: 1043129 - RNA, 19 nt, Artificial Sequence
  Description of Artificial Sequence: Synthetic oligonucleotide
  modified_base (7)..(7): a, c, u, g, unknown or other
aacuggnguuggaaacuua

SEQ ID NO: 1043130 - RNA, 19 nt, Artificial Sequence
  Description of Artificial Sequence: Synthetic oligonucleotide
uuucgcccugaaucaugga

SEQ ID NO: 1043131 - RNA, 19 nt, Artificial Sequence
  Description of Artificial Sequence: Synthetic oligonucleotide
  modified_base (3)..(3): a, c, u, g, unknown or other
ggnguuggaaacuuagauu

SEQ ID NO: 1043132 - RNA, 19 nt, Artificial Sequence
  Description of Artificial Sequence: Synthetic oligonucleotide
cugaaucauggaaaggcau

SEQ ID NO: 1043133 - RNA, 19 nt, Artificial Sequence
  Description of Artificial Sequence: Synthetic oligonucleotide
gaaauccacuggaccggug

SEQ ID NO: 1043134 - RNA, 19 nt, Artificial Sequence
  Description of Artificial Sequence: Synthetic oligonucleotide
gacgucaaagaaucagauu

SEQ ID NO: 1043135 - RNA, 19 nt, Artificial Sequence
  Description of Artificial Sequence: Synthetic oligonucleotide
aucuccguugaaauucaau

SEQ ID NO: 1043136 - RNA, 19 nt, Artificial Sequence
  Description of Artificial Sequence: Synthetic oligonucleotide
uccgucacgcaugggugga

SEQ ID NO: 1043137 - RNA, 19 nt, Artificial Sequence
  Description of Artificial Sequence: Synthetic oligonucleotide
ggccaucgugaacaccacg

SEQ ID NO: 1043138 - RNA, 19 nt, Artificial Sequence
  Description of Artificial Sequence: Synthetic oligonucleotide
agaacacggaagcgucuuu

SEQ ID NO: 1043139 - RNA, 19 nt, Artificial Sequence
  Description of Artificial Sequence: Synthetic oligonucleotide
cagauucaccucuauaguu

SEQ ID NO: 1043140 - RNA, 19 nt, Artificial Sequence
  Description of Artificial Sequence: Synthetic oligonucleotide
uccucagaccaaggucuug

SEQ ID NO: 1043141 - RNA, 19 nt, Artificial Sequence
  Description of Artificial Sequence: Synthetic oligonucleotide
uagcacuuuucgcccugaa

SEQ ID NO: 1043142 - RNA, 19 nt, Artificial Sequence
  Description of Artificial Sequence: Synthetic oligonucleotide
ugucuccgugucagagcca

SEQ ID NO: 1043143 - RNA, 19 nt, Artificial Sequence
  Description of Artificial Sequence: Synthetic oligonucleotide
gccuacaauacaguucuuc

SEQ ID NO: 1043144 - RNA, 19 nt, Artificial Sequence
  Description of Artificial Sequence: Synthetic oligonucleotide
caugucauacugucaguau

SEQ ID NO: 1043145 - RNA, 19 nt, Artificial Sequence
  Description of Artificial Sequence: Synthetic oligonucleotide
gggagaucuuugaauugug

SEQ ID NO: 1043146 - RNA, 19 nt, Artificial Sequence
  Description of Artificial Sequence: Synthetic oligonucleotide
agauuauuuucggcagguu

SEQ ID NO: 1043147 - RNA, 19 nt, Artificial Sequence
  Description of Artificial Sequence: Synthetic oligonucleotide
gcaugccaaguccacucgc

SEQ ID NO: 1043148 - RNA, 19 nt, Artificial Sequence
  Description of Artificial Sequence: Synthetic oligonucleotide
aagcgucuuuuaaacuaua

SEQ ID NO: 1043149 - RNA, 19 nt, Artificial Sequence
  Description of Artificial Sequence: Synthetic oligonucleotide
gguuuaaaguugugcaaau

SEQ ID NO: 1043150 - RNA, 19 nt, Artificial Sequence
  Description of Artificial Sequence: Synthetic oligonucleotide
uuaggccacucuggauaug

SEQ ID NO: 1043151 - RNA, 19 nt, Artificial Sequence
  Description of Artificial Sequence: Synthetic oligonucleotide
agccuccuaaugucuccgu

SEQ ID NO: 1043152 - RNA, 19 nt, Artificial Sequence
  Description of Artificial Sequence: Synthetic oligonucleotide
auagcacuuuucgcccuga

SEQ ID NO: 1043153 - RNA, 19 nt, Artificial Sequence
  Description of Artificial Sequence: Synthetic oligonucleotide
ccguugaaauucaauacua

SEQ ID NO: 1043154 - RNA, 19 nt, Artificial Sequence
  Description of Artificial Sequence: Synthetic oligonucleotide
aggccaucgugaacaccac

SEQ ID NO: 1043155 - RNA, 19 nt, Artificial Sequence
  Description of Artificial Sequence: Synthetic oligonucleotide
augagacgucaaagaauca

SEQ ID NO: 1043156 - RNA, 19 nt, Artificial Sequence
  Description of Artificial Sequence: Synthetic oligonucleotide
gucaccuggauaaggaauu

SEQ ID NO: 1043157 - RNA, 19 nt, Artificial Sequence
  Description of Artificial Sequence: Synthetic oligonucleotide
agcgucuaucuggccagug

SEQ ID NO: 1043158 - RNA, 19 nt, Artificial Sequence
  Description of Artificial Sequence: Synthetic oligonucleotide
guugcguaucuccguugaa

SEQ ID NO: 1043159 - RNA, 19 nt, Artificial Sequence
  Description of Artificial Sequence: Synthetic oligonucleotide
gcaagcucauagcaguacu

SEQ ID NO: 1043160 - RNA, 19 nt, Artificial Sequence
  Description of Artificial Sequence: Synthetic oligonucleotide
cgcccugaaucauggaaag

SEQ ID NO: 1043161 - RNA, 19 nt, Artificial Sequence
  Description of Artificial Sequence: Synthetic oligonucleotide
caauagcacuuuucgcccu

SEQ ID NO: 1043162 - RNA, 19 nt, Artificial Sequence
  Description of Artificial Sequence: Synthetic oligonucleotide
cccacacucacgauguaaa

SEQ ID NO: 1043163 - RNA, 19 nt, Artificial Sequence
  Description of Artificial Sequence: Synthetic oligonucleotide
gcgucuaucuggccaguga

SEQ ID NO: 1043164 - RNA, 19 nt, Artificial Sequence
  Description of Artificial Sequence: Synthetic oligonucleotide
uuggccgcaaaggcaugua

SEQ ID NO: 1043165 - RNA, 19 nt, Artificial Sequence
  Description of Artificial Sequence: Synthetic oligonucleotide
gaacacggaagcgucuuuu

SEQ ID NO: 1043166 - RNA, 19 nt, Artificial Sequence
  Description of Artificial Sequence: Synthetic oligonucleotide
gcggccuacaauacaguuc

SEQ ID NO: 1043167 - RNA, 19 nt, Artificial Sequence
  Description of Artificial Sequence: Synthetic oligonucleotide
uucccacacucacgaugua

SEQ ID NO: 1043168 - RNA, 19 nt, Artificial Sequence
  Description of Artificial Sequence: Synthetic oligonucleotide
caauacuaaugggcaugga

SEQ ID NO: 1043169 - RNA, 19 nt, Artificial Sequence
  Description of Artificial Sequence: Synthetic oligonucleotide
ggaaagccuccuaaugucu

SEQ ID NO: 1043170 - RNA, 19 nt, Artificial Sequence
  Description of Artificial Sequence: Synthetic oligonucleotide
cauggguggaaagaccaau

SEQ ID NO: 1043171 - RNA, 19 nt, Artificial Sequence
  Description of Artificial Sequence: Synthetic oligonucleotide
cacacucacgauguaaauu

SEQ ID NO: 1043172 - RNA, 19 nt, Artificial Sequence
  Description of Artificial Sequence: Synthetic oligonucleotide
caccacgcaaucgugcugu

SEQ ID NO: 1043173 - RNA, 19 nt, Artificial Sequence
  Description of Artificial Sequence: Synthetic oligonucleotide
gcaaucgugcuguaacuuu

SEQ ID NO: 1043174 - RNA, 19 nt, Artificial Sequence
  Description of Artificial Sequence: Synthetic oligonucleotide
cggccuacaauacaguucu

SEQ ID NO: 1043175 - RNA, 19 nt, Artificial Sequence
  Description of Artificial Sequence: Synthetic oligonucleotide
ccaucgugaacaccacgca

SEQ ID NO: 1043176 - RNA, 19 nt, Artificial Sequence
  Description of Artificial Sequence: Synthetic oligonucleotide
guuggccgcaaaggcaugu

SEQ ID NO: 1043177 - RNA, 19 nt, Artificial Sequence
  Description of Artificial Sequence: Synthetic oligonucleotide
cgucuaucuggccagugaa

SEQ ID NO: 1043178 - RNA, 19 nt, Artificial Sequence
  Description of Artificial Sequence: Synthetic oligonucleotide
cacucacgauguaaauuuu

SEQ ID NO: 1043179 - RNA, 19 nt, Artificial Sequence
  Description of Artificial Sequence: Synthetic oligonucleotide
accacgcaaucgugcugua

SEQ ID NO: 1043180 - RNA, 19 nt, Artificial Sequence
  Description of Artificial Sequence: Synthetic oligonucleotide
gcuaugugcugagcaguaa

SEQ ID NO: 1043181 - RNA, 19 nt, Artificial Sequence
  Description of Artificial Sequence: Synthetic oligonucleotide
ggauuccgucacgcauggg

SEQ ID NO: 1043182 - RNA, 19 nt, Artificial Sequence
  Description of Artificial Sequence: Synthetic oligonucleotide
ggcugaucagcaggcugga

SEQ ID NO: 1043183 - RNA, 19 nt, Artificial Sequence
  Description of Artificial Sequence: Synthetic oligonucleotide
caggacgacuucccacacu

SEQ ID NO: 1043184 - RNA, 19 nt, Artificial Sequence
  Description of Artificial Sequence: Synthetic oligonucleotide
cagcggccuacaauacagu

SEQ ID NO: 1043185 - RNA, 19 nt, Artificial Sequence
  Description of Artificial Sequence: Synthetic oligonucleotide
ggacgacuucccacacuca

SEQ ID NO: 1043186 - RNA, 19 nt, Artificial Sequence
  Description of Artificial Sequence: Synthetic oligonucleotide
ccucagaccaaggucuugu

SEQ ID NO: 1043187 - RNA, 19 nt, Artificial Sequence
  Description of Artificial Sequence: Synthetic oligonucleotide
cucccucuguaugguuuaa

SEQ ID NO: 1043188 - RNA, 19 nt, Artificial Sequence
  Description of Artificial Sequence: Synthetic oligonucleotide
ggcuuaggccacucuggau

SEQ ID NO: 1043189 - RNA, 19 nt, Artificial Sequence
  Description of Artificial Sequence: Synthetic oligonucleotide
gcguaucuccguugaaauu

SEQ ID NO: 1043190 - RNA, 19 nt, Artificial Sequence
  Description of Artificial Sequence: Synthetic oligonucleotide
ccacacucacgauguaaau

SEQ ID NO: 1043191 - RNA, 19 nt, Artificial Sequence
  Description of Artificial Sequence: Synthetic oligonucleotide
cggaagcgucuuuuaaacu

SEQ ID NO: 1043192 - RNA, 19 nt, Artificial Sequence
  Description of Artificial Sequence: Synthetic oligonucleotide
ccuuaacaccaggacgacu

SEQ ID NO: 1043193 - RNA, 19 nt, Artificial Sequence
  Description of Artificial Sequence: Synthetic oligonucleotide
ccgcaaaggcauguaaguu

SEQ ID NO: 1043194 - RNA, 19 nt, Artificial Sequence
  Description of Artificial Sequence: Synthetic oligonucleotide
ccacgcaaucgugcuguaa

SEQ ID NO: 1043195 - RNA, 19 nt, Artificial Sequence
  Description of Artificial Sequence: Synthetic oligonucleotide
cgucacgcauggguggaaa

SEQ ID NO: 1043196 - RNA, 19 nt, Artificial Sequence
  Description of Artificial Sequence: Synthetic oligonucleotide
cgaaauccacuggaccggu

SEQ ID NO: 1043197 - RNA, 19 nt, Artificial Sequence
  Description of Artificial Sequence: Synthetic oligonucleotide
cgcaaucgugcuguaacuu

SEQ ID NO: 1043198 - RNA, 19 nt, Artificial Sequence
  Description of Artificial Sequence: Synthetic oligonucleotide
ccgucacgcauggguggaa

SEQ ID NO: 1043199 - RNA, 19 nt, Artificial Sequence
  Description of Artificial Sequence: Synthetic oligonucleotide
ccacuggaccggugauuuu

SEQ ID NO: 1043200 - RNA, 19 nt, Artificial Sequence
  Description of Artificial Sequence: Synthetic oligonucleotide
  modified_base (1)..(1): a, c, u, g, unknown or other
nguuggaaacuuagauuaa

SEQ ID NO: 1043201 - RNA, 19 nt, Artificial Sequence
  Description of Artificial Sequence: Synthetic oligonucleotide
aauagaagaaugcuugacc

SEQ ID NO: 1043202 - RNA, 19 nt, Artificial Sequence
  Description of Artificial Sequence: Synthetic oligonucleotide
gaaucaagagacuaaaugc

SEQ ID NO: 1043203 - RNA, 19 nt, Artificial Sequence
  Description of Artificial Sequence: Synthetic oligonucleotide
uuaacaagaaaguaccagg

SEQ ID NO: 1043204 - RNA, 19 nt, Artificial Sequence
  Description of Artificial Sequence: Synthetic oligonucleotide
uuaugcacuaacuucauag

SEQ ID NO: 1043205 - RNA, 19 nt, Artificial Sequence
  Description of Artificial Sequence: Synthetic oligonucleotide
uacauaaacaaaacgagcu

SEQ ID NO: 1043206 - RNA, 19 nt, Artificial Sequence
  Description of Artificial Sequence: Synthetic oligonucleotide
guaaaauuaaguuaugcac

SEQ ID NO: 1043207 - RNA, 19 nt, Artificial Sequence
  Description of Artificial Sequence: Synthetic oligonucleotide
aauguuguuugaguuaccc

SEQ ID NO: 1043208 - RNA, 19 nt, Artificial Sequence
  Description of Artificial Sequence: Synthetic oligonucleotide
ucgauaaccauccugauaa

SEQ ID NO: 1043209 - RNA, 19 nt, Artificial Sequence
  Description of Artificial Sequence: Synthetic oligonucleotide
ugaguuacccugaaaauag

SEQ ID NO: 1043210 - RNA, 19 nt, Artificial Sequence
  Description of Artificial Sequence: Synthetic oligonucleotide
aacaaaacgagcuucaaua

SEQ ID NO: 1043211 - RNA, 19 nt, Artificial Sequence
  Description of Artificial Sequence: Synthetic oligonucleotide
agugacugaaaacugcacc

SEQ ID NO: 1043212 - RNA, 19 nt, Artificial Sequence
  Description of Artificial Sequence: Synthetic oligonucleotide
ugaacaagugauaacgaag

SEQ ID NO: 1043213 - RNA, 19 nt, Artificial Sequence
  Description of Artificial Sequence: Synthetic oligonucleotide
gauuauguggucucaaaag

SEQ ID NO: 1043214 - RNA, 19 nt, Artificial Sequence
  Description of Artificial Sequence: Synthetic oligonucleotide
aaaccaauaaugcauuaca

SEQ ID NO: 1043215 - RNA, 19 nt, Artificial Sequence
  Description of Artificial Sequence: Synthetic oligonucleotide
aucagugcauagcagaagc

SEQ ID NO: 1043216 - RNA, 19 nt, Artificial Sequence
  Description of Artificial Sequence: Synthetic oligonucleotide
agagacuaaaugcuaacac

SEQ ID NO: 1043217 - RNA, 19 nt, Artificial Sequence
  Description of Artificial Sequence: Synthetic oligonucleotide
aguguuaacaagaaaguac

SEQ ID NO: 1043218 - RNA, 19 nt, Artificial Sequence
  Description of Artificial Sequence: Synthetic oligonucleotide
uguuguuugaguuacccug

SEQ ID NO: 1043219 - RNA, 19 nt, Artificial Sequence
  Description of Artificial Sequence: Synthetic oligonucleotide
aaguaaaucuuugguaccc

SEQ ID NO: 1043220 - RNA, 19 nt, Artificial Sequence
  Description of Artificial Sequence: Synthetic oligonucleotide
acgagcuucaauaauaccc

SEQ ID NO: 1043221 - RNA, 19 nt, Artificial Sequence
  Description of Artificial Sequence: Synthetic oligonucleotide
uuacccugaaaauagaaga

SEQ ID NO: 1043222 - RNA, 19 nt, Artificial Sequence
  Description of Artificial Sequence: Synthetic oligonucleotide
gaugcaucccuucauagag

SEQ ID NO: 1043223 - RNA, 19 nt, Artificial Sequence
  Description of Artificial Sequence: Synthetic oligonucleotide
aacaaguaccaucacaccu

SEQ ID NO: 1043224 - RNA, 19 nt, Artificial Sequence
  Description of Artificial Sequence: Synthetic oligonucleotide
auuacagugaucucggcug

SEQ ID NO: 1043225 - RNA, 19 nt, Artificial Sequence
  Description of Artificial Sequence: Synthetic oligonucleotide
aaaguaccaggucugaugu

SEQ ID NO: 1043226 - RNA, 19 nt, Artificial Sequence
  Description of Artificial Sequence: Synthetic oligonucleotide
aaagggaggccccuuuacc

SEQ ID NO: 1043227 - RNA, 19 nt, Artificial Sequence
  Description of Artificial Sequence: Synthetic oligonucleotide
gaaacaaguaccaucacac

SEQ ID NO: 1043228 - RNA, 19 nt, Artificial Sequence
  Description of Artificial Sequence: Synthetic oligonucleotide
uaauccacuauguaucucc

SEQ ID NO: 1043229 - RNA, 19 nt, Artificial Sequence
  Description of Artificial Sequence: Synthetic oligonucleotide
ucagggguauuauagcucg

SEQ ID NO: 1043230 - RNA, 19 nt, Artificial Sequence
  Description of Artificial Sequence: Synthetic oligonucleotide
aagugcauaagguggcugg

SEQ ID NO: 1043231 - RNA, 19 nt, Artificial Sequence
  Description of Artificial Sequence: Synthetic oligonucleotide
ugucuaagcccacaaagcc

SEQ ID NO: 1043232 - RNA, 19 nt, Artificial Sequence
  Description of Artificial Sequence: Synthetic oligonucleotide
gaagaucacaaucagagaa

SEQ ID NO: 1043233 - RNA, 19 nt, Artificial Sequence
  Description of Artificial Sequence: Synthetic oligonucleotide
aaaauuaaguuaugcacua

SEQ ID NO: 1043234 - RNA, 19 nt, Artificial Sequence
  Description of Artificial Sequence: Synthetic oligonucleotide
auacauaaacaaaacgagc

SEQ ID NO: 1043235 - RNA, 19 nt, Artificial Sequence
  Description of Artificial Sequence: Synthetic oligonucleotide
aaaccuauuguccugguuu

SEQ ID NO: 1043236 - RNA, 19 nt, Artificial Sequence
  Description of Artificial Sequence: Synthetic oligonucleotide
augcacuaacuucauaggc

SEQ ID NO: 1043237 - RNA, 19 nt, Artificial Sequence
  Description of Artificial Sequence: Synthetic oligonucleotide
caaaauugcacagagcagc

SEQ ID NO: 1043238 - RNA, 19 nt, Artificial Sequence
  Description of Artificial Sequence: Synthetic oligonucleotide
auaacgaagggaugucacc

SEQ ID NO: 1043239 - RNA, 19 nt, Artificial Sequence
  Description of Artificial Sequence: Synthetic oligonucleotide
aacgagcuucaauaauacc

SEQ ID NO: 1043240 - RNA, 19 nt, Artificial Sequence
  Description of Artificial Sequence: Synthetic oligonucleotide
aacaugaagaucacaauca

SEQ ID NO: 1043241 - RNA, 19 nt, Artificial Sequence
  Description of Artificial Sequence: Synthetic oligonucleotide
gaauacugcacacagggca

SEQ ID NO: 1043242 - RNA, 19 nt, Artificial Sequence
  Description of Artificial Sequence: Synthetic oligonucleotide
aaucaagagacuaaaugcu

SEQ ID NO: 1043243 - RNA, 19 nt, Artificial Sequence
  Description of Artificial Sequence: Synthetic oligonucleotide
aauguucaaauccaugaua

SEQ ID NO: 1043244 - RNA, 19 nt, Artificial Sequence
  Description of Artificial Sequence: Synthetic oligonucleotide
gaaaguaccaggucugaug

SEQ ID NO: 1043245 - RNA, 19 nt, Artificial Sequence
  Description of Artificial Sequence: Synthetic oligonucleotide
uguuccuccacuuggaagu

SEQ ID NO: 1043246 - RNA, 19 nt, Artificial Sequence
  Description of Artificial Sequence: Synthetic oligonucleotide
uccacuaagcccuugugug

SEQ ID NO: 1043247 - RNA, 19 nt, Artificial Sequence
  Description of Artificial Sequence: Synthetic oligonucleotide
aaacgagcuucaauaauac

SEQ ID NO: 1043248 - RNA, 19 nt, Artificial Sequence
  Description of Artificial Sequence: Synthetic oligonucleotide
ugcaucgugucucaggggc

SEQ ID NO: 1043249 - RNA, 19 nt, Artificial Sequence
  Description of Artificial Sequence: Synthetic oligonucleotide
aaguuaugcacuaacuuca

SEQ ID NO: 1043250 - RNA, 19 nt, Artificial Sequence
  Description of Artificial Sequence: Synthetic oligonucleotide
ugcugaaaugucaauggug

SEQ ID NO: 1043251 - RNA, 19 nt, Artificial Sequence
  Description of Artificial Sequence: Synthetic oligonucleotide
aagaaggagguccaccucu

SEQ ID NO: 1043252 - RNA, 19 nt, Artificial Sequence
  Description of Artificial Sequence: Synthetic oligonucleotide
ucacaaucagagaaagggc

SEQ ID NO: 1043253 - RNA, 19 nt, Artificial Sequence
  Description of Artificial Sequence: Synthetic oligonucleotide
guuaacaagaaaguaccag

SEQ ID NO: 1043254 - RNA, 19 nt, Artificial Sequence
  Description of Artificial Sequence: Synthetic oligonucleotide
uaugaacaagugauaacga

SEQ ID NO: 1043255 - RNA, 19 nt, Artificial Sequence
  Description of Artificial Sequence: Synthetic oligonucleotide
gguauuauagcucguacug

SEQ ID NO: 1043256 - RNA, 19 nt, Artificial Sequence
  Description of Artificial Sequence: Synthetic oligonucleotide
augaacuuagucauuacag

SEQ ID NO: 1043257 - RNA, 19 nt, Artificial Sequence
  Description of Artificial Sequence: Synthetic oligonucleotide
uccagaugaacuuagucau

SEQ ID NO: 1043258 - RNA, 19 nt, Artificial Sequence
  Description of Artificial Sequence: Synthetic oligonucleotide
ugaggugcauaccaggaca

SEQ ID NO: 1043259 - RNA, 19 nt, Artificial Sequence
  Description of Artificial Sequence: Synthetic oligonucleotide
aguaccaucacaccuccug

SEQ ID NO: 1043260 - RNA, 19 nt, Artificial Sequence
  Description of Artificial Sequence: Synthetic oligonucleotide
caaguauguccgaacaucc

SEQ ID NO: 1043261 - RNA, 19 nt, Artificial Sequence
  Description of Artificial Sequence: Synthetic oligonucleotide
uguugcaaugacuugugcu

SEQ ID NO: 1043262 - RNA, 19 nt, Artificial Sequence
  Description of Artificial Sequence: Synthetic oligonucleotide
agacaacagaggaacaucc

SEQ ID NO: 1043263 - RNA, 19 nt, Artificial Sequence
  Description of Artificial Sequence: Synthetic oligonucleotide
uucauagagaagcuuugga

SEQ ID NO: 1043264 - RNA, 19 nt, Artificial Sequence
  Description of Artificial Sequence: Synthetic oligonucleotide
ccaauaaugcauuacagug

SEQ ID NO: 1043265 - RNA, 19 nt, Artificial Sequence
  Description of Artificial Sequence: Synthetic oligonucleotide
auaaccauccugauaagag

SEQ ID NO: 1043266 - RNA, 19 nt, Artificial Sequence
  Description of Artificial Sequence: Synthetic oligonucleotide
uauuauagcucguacuguc

SEQ ID NO: 1043267 - RNA, 19 nt, Artificial Sequence
  Description of Artificial Sequence: Synthetic oligonucleotide
cagcacagaaacaaguacc

SEQ ID NO: 1043268 - RNA, 19 nt, Artificial Sequence
  Description of Artificial Sequence: Synthetic oligonucleotide
gaaggacuaauccacuaug

SEQ ID NO: 1043269 - RNA, 19 nt, Artificial Sequence
  Description of Artificial Sequence: Synthetic oligonucleotide
accauuugcagcuuccuug

SEQ ID NO: 1043270 - RNA, 19 nt, Artificial Sequence
  Description of Artificial Sequence: Synthetic oligonucleotide
acaagguaacuccugcagg

SEQ ID NO: 1043271 - RNA, 19 nt, Artificial Sequence
  Description of Artificial Sequence: Synthetic oligonucleotide
augcauuacagugaucucg

SEQ ID NO: 1043272 - RNA, 19 nt, Artificial Sequence
  Description of Artificial Sequence: Synthetic oligonucleotide
cucguacuguccaaaaggg

SEQ ID NO: 1043273 - RNA, 19 nt, Artificial Sequence
  Description of Artificial Sequence: Synthetic oligonucleotide
ucuguggcggugaauacug

SEQ ID NO: 1043274 - RNA, 19 nt, Artificial Sequence
  Description of Artificial Sequence: Synthetic oligonucleotide
uguccgaacauccuuguuc

SEQ ID NO: 1043275 - RNA, 19 nt, Artificial Sequence
  Description of Artificial Sequence: Synthetic oligonucleotide
uaaccauccugauaagagc

SEQ ID NO: 1043276 - RNA, 19 nt, Artificial Sequence
  Description of Artificial Sequence: Synthetic oligonucleotide
uuauagcucguacugucca

SEQ ID NO: 1043277 - RNA, 19 nt, Artificial Sequence
  Description of Artificial Sequence: Synthetic oligonucleotide
ugaccaaaccaauaaugca

SEQ ID NO: 1043278 - RNA, 19 nt, Artificial Sequence
  Description of Artificial Sequence: Synthetic oligonucleotide
uccugauaagagcagacaa

SEQ ID NO: 1043279 - RNA, 19 nt, Artificial Sequence
  Description of Artificial Sequence: Synthetic oligonucleotide
uagucuguugcaaugacuu

SEQ ID NO: 1043280 - RNA, 19 nt, Artificial Sequence
  Description of Artificial Sequence: Synthetic oligonucleotide
aagggaugucaccaaaaca

SEQ ID NO: 1043281 - RNA, 19 nt, Artificial Sequence
  Description of Artificial Sequence: Synthetic oligonucleotide
cagagugccaucgauaacc

SEQ ID NO: 1043282 - RNA, 19 nt, Artificial Sequence
  Description of Artificial Sequence: Synthetic oligonucleotide
aaaacgagcuucaauaaua

SEQ ID NO: 1043283 - RNA, 19 nt, Artificial Sequence
  Description of Artificial Sequence: Synthetic oligonucleotide
ucggaugaggugcauacca

SEQ ID NO: 1043284 - RNA, 19 nt, Artificial Sequence
  Description of Artificial Sequence: Synthetic oligonucleotide
aacuuagucauuacagucu

SEQ ID NO: 1043285 - RNA, 19 nt, Artificial Sequence
  Description of Artificial Sequence: Synthetic oligonucleotide
ugcuugaccaaaccaauaa

SEQ ID NO: 1043286 - RNA, 19 nt, Artificial Sequence
  Description of Artificial Sequence: Synthetic oligonucleotide
uguauguggcaacuggaac

SEQ ID NO: 1043287 - RNA, 19 nt, Artificial Sequence
  Description of Artificial Sequence: Synthetic oligonucleotide
agugauaacgaagggaugu

SEQ ID NO: 1043288 - RNA, 19 nt, Artificial Sequence
  Description of Artificial Sequence: Synthetic oligonucleotide
agaaugcuugaccaaacca

SEQ ID NO: 1043289 - RNA, 19 nt, Artificial Sequence
  Description of Artificial Sequence: Synthetic oligonucleotide
uguacuuuguggucagagc

SEQ ID NO: 1043290 - RNA, 19 nt, Artificial Sequence
  Description of Artificial Sequence: Synthetic oligonucleotide
agaguuguacuuugugguc

SEQ ID NO: 1043291 - RNA, 19 nt, Artificial Sequence
  Description of Artificial Sequence: Synthetic oligonucleotide
ggugucuaagcccacaaag

SEQ ID NO: 1043292 - RNA, 19 nt, Artificial Sequence
  Description of Artificial Sequence: Synthetic oligonucleotide
uaccaggacaugaauggcc

SEQ ID NO: 1043293 - RNA, 19 nt, Artificial Sequence
  Description of Artificial Sequence: Synthetic oligonucleotide
auuauagcucguacugucc

SEQ ID NO: 1043294 - RNA, 19 nt, Artificial Sequence
  Description of Artificial Sequence: Synthetic oligonucleotide
ucuguugcaaugacuugug

SEQ ID NO: 1043295 - RNA, 19 nt, Artificial Sequence
  Description of Artificial Sequence: Synthetic oligonucleotide
cauaugaacaagugauaac

SEQ ID NO: 1043296 - RNA, 19 nt, Artificial Sequence
  Description of Artificial Sequence: Synthetic oligonucleotide
uuugaguuacccugaaaau

SEQ ID NO: 1043297 - RNA, 19 nt, Artificial Sequence
  Description of Artificial Sequence: Synthetic oligonucleotide
guauguggcaacuggaaca

SEQ ID NO: 1043298 - RNA, 19 nt, Artificial Sequence
  Description of Artificial Sequence: Synthetic oligonucleotide
agaugaacuuagucauuac

SEQ ID NO: 1043299 - RNA, 19 nt, Artificial Sequence
  Description of Artificial Sequence: Synthetic oligonucleotide
auguaucucccacaaaccu

SEQ ID NO: 1043300 - RNA, 19 nt, Artificial Sequence
  Description of Artificial Sequence: Synthetic oligonucleotide
acaaguaccaucacaccuc

SEQ ID NO: 1043301 - RNA, 19 nt, Artificial Sequence
  Description of Artificial Sequence: Synthetic oligonucleotide
ucaccaaaacaauguaugu

SEQ ID NO: 1043302 - RNA, 19 nt, Artificial Sequence
  Description of Artificial Sequence: Synthetic oligonucleotide
uccaaaagggugcuggcaa

SEQ ID NO: 1043303 - RNA, 19 nt, Artificial Sequence
  Description of Artificial Sequence: Synthetic oligonucleotide
guuacccugaaaauagaag

SEQ ID NO: 1043304 - RNA, 19 nt, Artificial Sequence
  Description of Artificial Sequence: Synthetic oligonucleotide
cuucugaaccaacaugaag

SEQ ID NO: 1043305 - RNA, 19 nt, Artificial Sequence
  Description of Artificial Sequence: Synthetic oligonucleotide
agaucacaaucagagaaag

SEQ ID NO: 1043306 - RNA, 19 nt, Artificial Sequence
  Description of Artificial Sequence: Synthetic oligonucleotide
gcucguacuguccaaaagg

SEQ ID NO: 1043307 - RNA, 19 nt, Artificial Sequence
  Description of Artificial Sequence: Synthetic oligonucleotide
aaccauccugauaagagca

SEQ ID NO: 1043308 - RNA, 19 nt, Artificial Sequence
  Description of Artificial Sequence: Synthetic oligonucleotide
ggagcaucccuucugaacc

SEQ ID NO: 1043309 - RNA, 19 nt, Artificial Sequence
  Description of Artificial Sequence: Synthetic oligonucleotide
ucucggaugaggugcauac

SEQ ID NO: 1043310 - RNA, 19 nt, Artificial Sequence
  Description of Artificial Sequence: Synthetic oligonucleotide
uaacgaagggaugucacca

SEQ ID NO: 1043311 - RNA, 19 nt, Artificial Sequence
  Description of Artificial Sequence: Synthetic oligonucleotide
acacagugaggaaaguggc

SEQ ID NO: 1043312 - RNA, 19 nt, Artificial Sequence
  Description of Artificial Sequence: Synthetic oligonucleotide
ugaagaucacaaucagaga

SEQ ID NO: 1043313 - RNA, 19 nt, Artificial Sequence
  Description of Artificial Sequence: Synthetic oligonucleotide
aaguaggugucuaagccca

SEQ ID NO: 1043314 - RNA, 19 nt, Artificial Sequence
  Description of Artificial Sequence: Synthetic oligonucleotide
cacaagguaacuccugcag

SEQ ID NO: 1043315 - RNA, 19 nt, Artificial Sequence
  Description of Artificial Sequence: Synthetic oligonucleotide
guccgaacauccuuguucc

SEQ ID NO: 1043316 - RNA, 19 nt, Artificial Sequence
  Description of Artificial Sequence: Synthetic oligonucleotide
acaagugauaacgaaggga

SEQ ID NO: 1043317 - RNA, 19 nt, Artificial Sequence
  Description of Artificial Sequence: Synthetic oligonucleotide
uggcaaguauguccgaaca

SEQ ID NO: 1043318 - RNA, 19 nt, Artificial Sequence
  Description of Artificial Sequence: Synthetic oligonucleotide
gugacugaaaacugcacca

SEQ ID NO: 1043319 - RNA, 19 nt, Artificial Sequence
  Description of Artificial Sequence: Synthetic oligonucleotide
uugaguuacccugaaaaua

SEQ ID NO: 1043320 - RNA, 19 nt, Artificial Sequence
  Description of Artificial Sequence: Synthetic oligonucleotide
augaacaagugauaacgaa

SEQ ID NO: 1043321 - RNA, 19 nt, Artificial Sequence
  Description of Artificial Sequence: Synthetic oligonucleotide
caugaauggccgaaagaac

SEQ ID NO: 1043322 - RNA, 19 nt, Artificial Sequence
  Description of Artificial Sequence: Synthetic oligonucleotide
gauaacgaagggaugucac

SEQ ID NO: 1043323 - RNA, 19 nt, Artificial Sequence
  Description of Artificial Sequence: Synthetic oligonucleotide
acaaaacgagcuucaauaa

SEQ ID NO: 1043324 - RNA, 19 nt, Artificial Sequence
  Description of Artificial Sequence: Synthetic oligonucleotide
aggaagugcauaagguggc

SEQ ID NO: 1043325 - RNA, 19 nt, Artificial Sequence
  Description of Artificial Sequence: Synthetic oligonucleotide
aguaaaucuuugguacccg

SEQ ID NO: 1043326 - RNA, 19 nt, Artificial Sequence
  Description of Artificial Sequence: Synthetic oligonucleotide
cauuacagucugaaucaag

SEQ ID NO: 1043327 - RNA, 19 nt, Artificial Sequence
  Description of Artificial Sequence: Synthetic oligonucleotide
ccucugaccacccugagcc

SEQ ID NO: 1043328 - RNA, 19 nt, Artificial Sequence
  Description of Artificial Sequence: Synthetic oligonucleotide
agcagagugccaucgauaa

SEQ ID NO: 1043329 - RNA, 19 nt, Artificial Sequence
  Description of Artificial Sequence: Synthetic oligonucleotide
agaguguuaacaagaaagu

SEQ ID NO: 1043330 - RNA, 19 nt, Artificial Sequence
  Description of Artificial Sequence: Synthetic oligonucleotide
uuacagugaucucggcugc

SEQ ID NO: 1043331 - RNA, 19 nt, Artificial Sequence
  Description of Artificial Sequence: Synthetic oligonucleotide
aauacccuuugaaaugacu

SEQ ID NO: 1043332 - RNA, 19 nt, Artificial Sequence
  Description of Artificial Sequence: Synthetic oligonucleotide
auaccaggacaugaauggc

SEQ ID NO: 1043333 - RNA, 19 nt, Artificial Sequence
  Description of Artificial Sequence: Synthetic oligonucleotide
uggaccauugcuugcuucu

SEQ ID NO: 1043334 - RNA, 19 nt, Artificial Sequence
  Description of Artificial Sequence: Synthetic oligonucleotide
gaucacaaucagagaaagg

SEQ ID NO: 1043335 - RNA, 19 nt, Artificial Sequence
  Description of Artificial Sequence: Synthetic oligonucleotide
agaaggacuaauccacuau

SEQ ID NO: 1043336 - RNA, 19 nt, Artificial Sequence
  Description of Artificial Sequence: Synthetic oligonucleotide
aaggacuaauccacuaugu

SEQ ID NO: 1043337 - RNA, 19 nt, Artificial Sequence
  Description of Artificial Sequence: Synthetic oligonucleotide
ugcaucccuucauagagaa

SEQ ID NO: 1043338 - RNA, 19 nt, Artificial Sequence
  Description of Artificial Sequence: Synthetic oligonucleotide
aguauguccgaacauccuu

SEQ ID NO: 1043339 - RNA, 19 nt, Artificial Sequence
  Description of Artificial Sequence: Synthetic oligonucleotide
aagagcagacaaaauugca

SEQ ID NO: 1043340 - RNA, 19 nt, Artificial Sequence
  Description of Artificial Sequence: Synthetic oligonucleotide
accucugaccacccugagc

SEQ ID NO: 1043341 - RNA, 19 nt, Artificial Sequence
  Description of Artificial Sequence: Synthetic oligonucleotide
agugcauaagguggcuggc

SEQ ID NO: 1043342 - RNA, 19 nt, Artificial Sequence
  Description of Artificial Sequence: Synthetic oligonucleotide
aagaucacaaucagagaaa

SEQ ID NO: 1043343 - RNA, 19 nt, Artificial Sequence
  Description of Artificial Sequence: Synthetic oligonucleotide
caagugauaacgaagggau

SEQ ID NO: 1043344 - RNA, 19 nt, Artificial Sequence
  Description of Artificial Sequence: Synthetic oligonucleotide
ugauaagagcagacaaaau

SEQ ID NO: 1043345 - RNA, 19 nt, Artificial Sequence
  Description of Artificial Sequence: Synthetic oligonucleotide
agaugcaucccuucauaga

SEQ ID NO: 1043346 - RNA, 19 nt, Artificial Sequence
  Description of Artificial Sequence: Synthetic oligonucleotide
acaaaauugcacagagcag

SEQ ID NO: 1043347 - RNA, 19 nt, Artificial Sequence
  Description of Artificial Sequence: Synthetic oligonucleotide
aaccuauuguccugguuuu

SEQ ID NO: 1043348 - RNA, 19 nt, Artificial Sequence
  Description of Artificial Sequence: Synthetic oligonucleotide
ugauaacgaagggauguca

SEQ ID NO: 1043349 - RNA, 19 nt, Artificial Sequence
  Description of Artificial Sequence: Synthetic oligonucleotide
ucugaccacccugagccgg

SEQ ID NO: 1043350 - RNA, 19 nt, Artificial Sequence
  Description of Artificial Sequence: Synthetic oligonucleotide
uguggcggugaauacugca

SEQ ID NO: 1043351 - RNA, 19 nt, Artificial Sequence
  Description of Artificial Sequence: Synthetic oligonucleotide
ccaugauacaaacagugac

SEQ ID NO: 1043352 - RNA, 19 nt, Artificial Sequence
  Description of Artificial Sequence: Synthetic oligonucleotide
gacaugaauggccgaaaga

SEQ ID NO: 1043353 - RNA, 19 nt, Artificial Sequence
  Description of Artificial Sequence: Synthetic oligonucleotide
guacccgugaacagaaugc

SEQ ID NO: 1043354 - RNA, 19 nt, Artificial Sequence
  Description of Artificial Sequence: Synthetic oligonucleotide
gauaaccauccugauaaga

SEQ ID NO: 1043355 - RNA, 19 nt, Artificial Sequence
  Description of Artificial Sequence: Synthetic oligonucleotide
guacuuuguggucagagcu

SEQ ID NO: 1043356 - RNA, 19 nt, Artificial Sequence
  Description of Artificial Sequence: Synthetic oligonucleotide
aucauauagaagagcaaga

SEQ ID NO: 1043357 - RNA, 19 nt, Artificial Sequence
  Description of Artificial Sequence: Synthetic oligonucleotide
aguagccggcagcagauca

SEQ ID NO: 1043358 - RNA, 19 nt, Artificial Sequence
  Description of Artificial Sequence: Synthetic oligonucleotide
agcucguacuguccaaaag

SEQ ID NO: 1043359 - RNA, 19 nt, Artificial Sequence
  Description of Artificial Sequence: Synthetic oligonucleotide
uacacuccauaugaacaag

SEQ ID NO: 1043360 - RNA, 19 nt, Artificial Sequence
  Description of Artificial Sequence: Synthetic oligonucleotide
cugagaguuguacuuugug

SEQ ID NO: 1043361 - RNA, 19 nt, Artificial Sequence
  Description of Artificial Sequence: Synthetic oligonucleotide
ucaguagccggcagcagau

SEQ ID NO: 1043362 - RNA, 19 nt, Artificial Sequence
  Description of Artificial Sequence: Synthetic oligonucleotide
caugauacaaacagugacu

SEQ ID NO: 1043363 - RNA, 19 nt, Artificial Sequence
  Description of Artificial Sequence: Synthetic oligonucleotide
ggaugaggugcauaccagg

SEQ ID NO: 1043364 - RNA, 19 nt, Artificial Sequence
  Description of Artificial Sequence: Synthetic oligonucleotide
uggcggugaauacugcaca

SEQ ID NO: 1043365 - RNA, 19 nt, Artificial Sequence
  Description of Artificial Sequence: Synthetic oligonucleotide
gugucuaagcccacaaagc

SEQ ID NO: 1043366 - RNA, 19 nt, Artificial Sequence
  Description of Artificial Sequence: Synthetic oligonucleotide
auguuguuugaguuacccu

SEQ ID NO: 1043367 - RNA, 19 nt, Artificial Sequence
  Description of Artificial Sequence: Synthetic oligonucleotide
cagugaggaaaguggcugg

SEQ ID NO: 1043368 - RNA, 19 nt, Artificial Sequence
  Description of Artificial Sequence: Synthetic oligonucleotide
ucguacuguccaaaagggu

SEQ ID NO: 1043369 - RNA, 19 nt, Artificial Sequence
  Description of Artificial Sequence: Synthetic oligonucleotide
aaauuaaguuaugcacuaa

SEQ ID NO: 1043370 - RNA, 19 nt, Artificial Sequence
  Description of Artificial Sequence: Synthetic oligonucleotide
gaagaaugcuugaccaaac

SEQ ID NO: 1043371 - RNA, 19 nt, Artificial Sequence
  Description of Artificial Sequence: Synthetic oligonucleotide
uauguccgaacauccuugu

SEQ ID NO: 1043372 - RNA, 19 nt, Artificial Sequence
  Description of Artificial Sequence: Synthetic oligonucleotide
ugcauaccaggacaugaau

SEQ ID NO: 1043373 - RNA, 19 nt, Artificial Sequence
  Description of Artificial Sequence: Synthetic oligonucleotide
caugaagaucacaaucaga

SEQ ID NO: 1043374 - RNA, 19 nt, Artificial Sequence
  Description of Artificial Sequence: Synthetic oligonucleotide
ugagcucucggaugaggug

SEQ ID NO: 1043375 - RNA, 19 nt, Artificial Sequence
  Description of Artificial Sequence: Synthetic oligonucleotide
aacgaagggaugucaccaa

SEQ ID NO: 1043376 - RNA, 19 nt, Artificial Sequence
  Description of Artificial Sequence: Synthetic oligonucleotide
guauguccgaacauccuug

SEQ ID NO: 1043377 - RNA, 19 nt, Artificial Sequence
  Description of Artificial Sequence: Synthetic oligonucleotide
aucucggcugcaucguguc

SEQ ID NO: 1043378 - RNA, 19 nt, Artificial Sequence
  Description of Artificial Sequence: Synthetic oligonucleotide
gagccaaucagugcauagc

SEQ ID NO: 1043379 - RNA, 19 nt, Artificial Sequence
  Description of Artificial Sequence: Synthetic oligonucleotide
cucagggguauuauagcuc

SEQ ID NO: 1043380 - RNA, 19 nt, Artificial Sequence
  Description of Artificial Sequence: Synthetic oligonucleotide
ugccaugggaacagcacaa

SEQ ID NO: 1043381 - RNA, 19 nt, Artificial Sequence
  Description of Artificial Sequence: Synthetic oligonucleotide
uacccgugaacagaaugcc

SEQ ID NO: 1043382 - RNA, 19 nt, Artificial Sequence
  Description of Artificial Sequence: Synthetic oligonucleotide
gaauggccgaaagaaccag

SEQ ID NO: 1043383 - RNA, 19 nt, Artificial Sequence
  Description of Artificial Sequence: Synthetic oligonucleotide
gguacccgugaacagaaug

SEQ ID NO: 1043384 - RNA, 19 nt, Artificial Sequence
  Description of Artificial Sequence: Synthetic oligonucleotide
uggagaaaauacacuccau

SEQ ID NO: 1043385 - RNA, 19 nt, Artificial Sequence
  Description of Artificial Sequence: Synthetic oligonucleotide
uacccuuugaaaugacuuu

SEQ ID NO: 1043386 - RNA, 19 nt, Artificial Sequence
  Description of Artificial Sequence: Synthetic oligonucleotide
gaguuguacuuugugguca

SEQ ID NO: 1043387 - RNA, 19 nt, Artificial Sequence
  Description of Artificial Sequence: Synthetic oligonucleotide
uaggugucuaagcccacaa

SEQ ID NO: 1043388 - RNA, 19 nt, Artificial Sequence
  Description of Artificial Sequence: Synthetic oligonucleotide
cugauugccaugggaacag

SEQ ID NO: 1043389 - RNA, 19 nt, Artificial Sequence
  Description of Artificial Sequence: Synthetic oligonucleotide
ugccuuggauacaggggag

SEQ ID NO: 1043390 - RNA, 19 nt, Artificial Sequence
  Description of Artificial Sequence: Synthetic oligonucleotide
auacccuuugaaaugacuu

SEQ ID NO: 1043391 - RNA, 19 nt, Artificial Sequence
  Description of Artificial Sequence: Synthetic oligonucleotide
acggcucagagcuggacca

SEQ ID NO: 1043392 - RNA, 19 nt, Artificial Sequence
  Description of Artificial Sequence: Synthetic oligonucleotide
aagugauaacgaagggaug

SEQ ID NO: 1043393 - RNA, 19 nt, Artificial Sequence
  Description of Artificial Sequence: Synthetic oligonucleotide
acuaagcccuuguguggcg

SEQ ID NO: 1043394 - RNA, 19 nt, Artificial Sequence
  Description of Artificial Sequence: Synthetic oligonucleotide
aggacuaauccacuaugua

SEQ ID NO: 1043395 - RNA, 19 nt, Artificial Sequence
  Description of Artificial Sequence: Synthetic oligonucleotide
aucgauaaccauccugaua

SEQ ID NO: 1043396 - RNA, 19 nt, Artificial Sequence
  Description of Artificial Sequence: Synthetic oligonucleotide
caaccucagaaugaucuug

SEQ ID NO: 1043397 - RNA, 19 nt, Artificial Sequence
  Description of Artificial Sequence: Synthetic oligonucleotide
uauagcucguacuguccaa

SEQ ID NO: 1043398 - RNA, 19 nt, Artificial Sequence
  Description of Artificial Sequence: Synthetic oligonucleotide
cgacauauguuccaaacac

SEQ ID NO: 1043399 - RNA, 19 nt, Artificial Sequence
  Description of Artificial Sequence: Synthetic oligonucleotide
gaccaaaccaauaaugcau

SEQ ID NO: 1043400 - RNA, 19 nt, Artificial Sequence
  Description of Artificial Sequence: Synthetic oligonucleotide
cacggcucagagcuggacc

SEQ ID NO: 1043401 - RNA, 19 nt, Artificial Sequence
  Description of Artificial Sequence: Synthetic oligonucleotide
gcaagcacggcucagagcu

SEQ ID NO: 1043402 - RNA, 19 nt, Artificial Sequence
  Description of Artificial Sequence: Synthetic oligonucleotide
guugcaaugacuugugcuu

SEQ ID NO: 1043403 - RNA, 19 nt, Artificial Sequence
  Description of Artificial Sequence: Synthetic oligonucleotide
gaaccagaaauaucauaua

SEQ ID NO: 1043404 - RNA, 19 nt, Artificial Sequence
  Description of Artificial Sequence: Synthetic oligonucleotide
agagguagcaugagcucuc

SEQ ID NO: 1043405 - RNA, 19 nt, Artificial Sequence
  Description of Artificial Sequence: Synthetic oligonucleotide
aaguauguccgaacauccu

SEQ ID NO: 1043406 - RNA, 19 nt, Artificial Sequence
  Description of Artificial Sequence: Synthetic oligonucleotide
cacuaagcccuuguguggc

SEQ ID NO: 1043407 - RNA, 19 nt, Artificial Sequence
  Description of Artificial Sequence: Synthetic oligonucleotide
agucugaaucaagagacua

SEQ ID NO: 1043408 - RNA, 19 nt, Artificial Sequence
  Description of Artificial Sequence: Synthetic oligonucleotide
caaugacuugugcuuuaag

SEQ ID NO: 1043409 - RNA, 19 nt, Artificial Sequence
  Description of Artificial Sequence: Synthetic oligonucleotide
ggagaaaauacacuccaua

SEQ ID NO: 1043410 - RNA, 19 nt, Artificial Sequence
  Description of Artificial Sequence: Synthetic oligonucleotide
uuguuugaguuacccugaa

SEQ ID NO: 1043411 - RNA, 19 nt, Artificial Sequence
  Description of Artificial Sequence: Synthetic oligonucleotide
gauacaggggagcaucccu

SEQ ID NO: 1043412 - RNA, 19 nt, Artificial Sequence
  Description of Artificial Sequence: Synthetic oligonucleotide
ugguaagccaguggcugag

SEQ ID NO: 1043413 - RNA, 19 nt, Artificial Sequence
  Description of Artificial Sequence: Synthetic oligonucleotide
aggcucagaacauggccca

SEQ ID NO: 1043414 - RNA, 19 nt, Artificial Sequence
  Description of Artificial Sequence: Synthetic oligonucleotide
ggacaugaauggccgaaag

SEQ ID NO: 1043415 - RNA, 19 nt, Artificial Sequence
  Description of Artificial Sequence: Synthetic oligonucleotide
gaagugaugcugaggcuca

SEQ ID NO: 1043416 - RNA, 19 nt, Artificial Sequence
  Description of Artificial Sequence: Synthetic oligonucleotide
cauaagguggcuggcccag

SEQ ID NO: 1043417 - RNA, 19 nt, Artificial Sequence
  Description of Artificial Sequence: Synthetic oligonucleotide
gguuuuguagucuguugca

SEQ ID NO: 1043418 - RNA, 19 nt, Artificial Sequence
  Description of Artificial Sequence: Synthetic oligonucleotide
aguuacccugaaaauagaa

SEQ ID NO: 1043419 - RNA, 19 nt, Artificial Sequence
  Description of Artificial Sequence: Synthetic oligonucleotide
cuuuguugucugauugcca

SEQ ID NO: 1043420 - RNA, 19 nt, Artificial Sequence
  Description of Artificial Sequence: Synthetic oligonucleotide
ggaagugaugcugaggcuc

SEQ ID NO: 1043421 - RNA, 19 nt, Artificial Sequence
  Description of Artificial Sequence: Synthetic oligonucleotide
agggcagccgugaugagca

SEQ ID NO: 1043422 - RNA, 19 nt, Artificial Sequence
  Description of Artificial Sequence: Synthetic oligonucleotide
aagugaugcugaggcucac

SEQ ID NO: 1043423 - RNA, 19 nt, Artificial Sequence
  Description of Artificial Sequence: Synthetic oligonucleotide
accacccugagccgggaug

SEQ ID NO: 1043424 - RNA, 19 nt, Artificial Sequence
  Description of Artificial Sequence: Synthetic oligonucleotide
gaucuugaauggaggcagc

SEQ ID NO: 1043425 - RNA, 19 nt, Artificial Sequence
  Description of Artificial Sequence: Synthetic oligonucleotide
gagguagcaugagcucucg

SEQ ID NO: 1043426 - RNA, 19 nt, Artificial Sequence
  Description of Artificial Sequence: Synthetic oligonucleotide
gauugccaugggaacagca

SEQ ID NO: 1043427 - RNA, 19 nt, Artificial Sequence
  Description of Artificial Sequence: Synthetic oligonucleotide
gccagaaggacuaauccac

SEQ ID NO: 1043428 - RNA, 19 nt, Artificial Sequence
  Description of Artificial Sequence: Synthetic oligonucleotide
cuguugcaaugacuugugc

SEQ ID NO: 1043429 - RNA, 19 nt, Artificial Sequence
  Description of Artificial Sequence: Synthetic oligonucleotide
uaagcccuuguguggcgug

SEQ ID NO: 1043430 - RNA, 19 nt, Artificial Sequence
  Description of Artificial Sequence: Synthetic oligonucleotide
aagccugcugaaaugucaa

SEQ ID NO: 1043431 - RNA, 19 nt, Artificial Sequence
  Description of Artificial Sequence: Synthetic oligonucleotide
cacuauguaucucccacaa

SEQ ID NO: 1043432 - RNA, 19 nt, Artificial Sequence
  Description of Artificial Sequence: Synthetic oligonucleotide
cacagaguguuaacaagaa

SEQ ID NO: 1043433 - RNA, 19 nt, Artificial Sequence
  Description of Artificial Sequence: Synthetic oligonucleotide
caggcccgacauauguucc

SEQ ID NO: 1043434 - RNA, 19 nt, Artificial Sequence
  Description of Artificial Sequence: Synthetic oligonucleotide
aucaagagacuaaaugcua

SEQ ID NO: 1043435 - RNA, 19 nt, Artificial Sequence
  Description of Artificial Sequence: Synthetic oligonucleotide
ugcaaugacuugugcuuua

SEQ ID NO: 1043436 - RNA, 19 nt, Artificial Sequence
  Description of Artificial Sequence: Synthetic oligonucleotide
acuauguaucucccacaaa

SEQ ID NO: 1043437 - RNA, 19 nt, Artificial Sequence
  Description of Artificial Sequence: Synthetic oligonucleotide
guggucagagcugguaagc

SEQ ID NO: 1043438 - RNA, 19 nt, Artificial Sequence
  Description of Artificial Sequence: Synthetic oligonucleotide
ccaaucagugcauagcaga

SEQ ID NO: 1043439 - RNA, 19 nt, Artificial Sequence
  Description of Artificial Sequence: Synthetic oligonucleotide
gguggcaauguuguuugag

SEQ ID NO: 1043440 - RNA, 19 nt, Artificial Sequence
  Description of Artificial Sequence: Synthetic oligonucleotide
gaagaagaaggagguccac

SEQ ID NO: 1043441 - RNA, 19 nt, Artificial Sequence
  Description of Artificial Sequence: Synthetic oligonucleotide
cugaccacccugagccggg

SEQ ID NO: 1043442 - RNA, 19 nt, Artificial Sequence
  Description of Artificial Sequence: Synthetic oligonucleotide
gaaccaacaugaagaucac

SEQ ID NO: 1043443 - RNA, 19 nt, Artificial Sequence
  Description of Artificial Sequence: Synthetic oligonucleotide
cauuacagugaucucggcu

SEQ ID NO: 1043444 - RNA, 19 nt, Artificial Sequence
  Description of Artificial Sequence: Synthetic oligonucleotide
gggguauuauagcucguac

SEQ ID NO: 1043445 - RNA, 19 nt, Artificial Sequence
  Description of Artificial Sequence: Synthetic oligonucleotide
ggacuaauccacuauguau

SEQ ID NO: 1043446 - RNA, 19 nt, Artificial Sequence
  Description of Artificial Sequence: Synthetic oligonucleotide
auguauguggcaacuggaa

SEQ ID NO: 1043447 - RNA, 19 nt, Artificial Sequence
  Description of Artificial Sequence: Synthetic oligonucleotide
ggcucagggguauuauagc

SEQ ID NO: 1043448 - RNA, 19 nt, Artificial Sequence
  Description of Artificial Sequence: Synthetic oligonucleotide
agaagcaagcacggcucag

SEQ ID NO: 1043449 - RNA, 19 nt, Artificial Sequence
  Description of Artificial Sequence: Synthetic oligonucleotide
auaaugcauuacagugauc

SEQ ID NO: 1043450 - RNA, 19 nt, Artificial Sequence
  Description of Artificial Sequence: Synthetic oligonucleotide
ggugcauaccaggacauga

SEQ ID NO: 1043451 - RNA, 19 nt, Artificial Sequence
  Description of Artificial Sequence: Synthetic oligonucleotide
guaaaucuuugguacccgu

SEQ ID NO: 1043452 - RNA, 19 nt, Artificial Sequence
  Description of Artificial Sequence: Synthetic oligonucleotide
uagcucguacuguccaaaa

SEQ ID NO: 1043453 - RNA, 19 nt, Artificial Sequence
  Description of Artificial Sequence: Synthetic oligonucleotide
ccacuaagcccuugugugg

SEQ ID NO: 1043454 - RNA, 19 nt, Artificial Sequence
  Description of Artificial Sequence: Synthetic oligonucleotide
cugagccgggaugagcugc

SEQ ID NO: 1043455 - RNA, 19 nt, Artificial Sequence
  Description of Artificial Sequence: Synthetic oligonucleotide
accauccugauaagagcag

SEQ ID NO: 1043456 - RNA, 19 nt, Artificial Sequence
  Description of Artificial Sequence: Synthetic oligonucleotide
guggcggugaauacugcac

SEQ ID NO: 1043457 - RNA, 19 nt, Artificial Sequence
  Description of Artificial Sequence: Synthetic oligonucleotide
ggcucccaggcucagaaca

SEQ ID NO: 1043458 - RNA, 19 nt, Artificial Sequence
  Description of Artificial Sequence: Synthetic oligonucleotide
auagcucguacuguccaaa

SEQ ID NO: 1043459 - RNA, 19 nt, Artificial Sequence
  Description of Artificial Sequence: Synthetic oligonucleotide
acaggggagcaucccuucu

SEQ ID NO: 1043460 - RNA, 19 nt, Artificial Sequence
  Description of Artificial Sequence: Synthetic oligonucleotide
guagccggcagcagaucag

SEQ ID NO: 1043461 - RNA, 19 nt, Artificial Sequence
  Description of Artificial Sequence: Synthetic oligonucleotide
caguggcugaggucaggcc

SEQ ID NO: 1043462 - RNA, 19 nt, Artificial Sequence
  Description of Artificial Sequence: Synthetic oligonucleotide
gugauaacgaagggauguc

SEQ ID NO: 1043463 - RNA, 19 nt, Artificial Sequence
  Description of Artificial Sequence: Synthetic oligonucleotide
auggccgaaagaaccagaa

SEQ ID NO: 1043464 - RNA, 19 nt, Artificial Sequence
  Description of Artificial Sequence: Synthetic oligonucleotide
gugcauaagguggcuggcc

SEQ ID NO: 1043465 - RNA, 19 nt, Artificial Sequence
  Description of Artificial Sequence: Synthetic oligonucleotide
aggcccgacauauguucca

SEQ ID NO: 1043466 - RNA, 19 nt, Artificial Sequence
  Description of Artificial Sequence: Synthetic oligonucleotide
ugauugccaugggaacagc

SEQ ID NO: 1043467 - RNA, 19 nt, Artificial Sequence
  Description of Artificial Sequence: Synthetic oligonucleotide
gaguuacccugaaaauaga

SEQ ID NO: 1043468 - RNA, 19 nt, Artificial Sequence
  Description of Artificial Sequence: Synthetic oligonucleotide
acuuccaaguaggugucua

SEQ ID NO: 1043469 - RNA, 19 nt, Artificial Sequence
  Description of Artificial Sequence: Synthetic oligonucleotide
uguggcgugucuggucugu

SEQ ID NO: 1043470 - RNA, 19 nt, Artificial Sequence
  Description of Artificial Sequence: Synthetic oligonucleotide
cucggaugaggugcauacc

SEQ ID NO: 1043471 - RNA, 19 nt, Artificial Sequence
  Description of Artificial Sequence: Synthetic oligonucleotide
ccaaaagggugcuggcaag

SEQ ID NO: 1043472 - RNA, 19 nt, Artificial Sequence
  Description of Artificial Sequence: Synthetic oligonucleotide
cagaaggacuaauccacua

SEQ ID NO: 1043473 - RNA, 19 nt, Artificial Sequence
  Description of Artificial Sequence: Synthetic oligonucleotide
agggguauuauagcucgua

SEQ ID NO: 1043474 - RNA, 19 nt, Artificial Sequence
  Description of Artificial Sequence: Synthetic oligonucleotide
ggcggugaauacugcacac

SEQ ID NO: 1043475 - RNA, 19 nt, Artificial Sequence
  Description of Artificial Sequence: Synthetic oligonucleotide
uccgaacauccuuguuccu

SEQ ID NO: 1043476 - RNA, 19 nt, Artificial Sequence
  Description of Artificial Sequence: Synthetic oligonucleotide
ggcuuccagaugaacuuag

SEQ ID NO: 1043477 - RNA, 19 nt, Artificial Sequence
  Description of Artificial Sequence: Synthetic oligonucleotide
accuauuguccugguuuug

SEQ ID NO: 1043478 - RNA, 19 nt, Artificial Sequence
  Description of Artificial Sequence: Synthetic oligonucleotide
cacagucaucucccacaag

SEQ ID NO: 1043479 - RNA, 19 nt, Artificial Sequence
  Description of Artificial Sequence: Synthetic oligonucleotide
gcgugucuggucuguggcg

SEQ ID NO: 1043480 - RNA, 19 nt, Artificial Sequence
  Description of Artificial Sequence: Synthetic oligonucleotide
gcccuguagcagaagaccc

SEQ ID NO: 1043481 - RNA, 19 nt, Artificial Sequence
  Description of Artificial Sequence: Synthetic oligonucleotide
cugcaccccugucugguuc

SEQ ID NO: 1043482 - RNA, 19 nt, Artificial Sequence
  Description of Artificial Sequence: Synthetic oligonucleotide
ggaagauuauguggucuca

SEQ ID NO: 1043483 - RNA, 19 nt, Artificial Sequence
  Description of Artificial Sequence: Synthetic oligonucleotide
cuccacuaagcccuugugu

SEQ ID NO: 1043484 - RNA, 19 nt, Artificial Sequence
  Description of Artificial Sequence: Synthetic oligonucleotide
ugguggcaauguuguuuga

SEQ ID NO: 1043485 - RNA, 19 nt, Artificial Sequence
  Description of Artificial Sequence: Synthetic oligonucleotide
ugccaucgauaaccauccu

SEQ ID NO: 1043486 - RNA, 19 nt, Artificial Sequence
  Description of Artificial Sequence: Synthetic oligonucleotide
augcuaacacuggaagauu

SEQ ID NO: 1043487 - RNA, 19 nt, Artificial Sequence
  Description of Artificial Sequence: Synthetic oligonucleotide
auacaggggagcaucccuu

SEQ ID NO: 1043488 - RNA, 19 nt, Artificial Sequence
  Description of Artificial Sequence: Synthetic oligonucleotide
augcaucccuucauagaga

SEQ ID NO: 1043489 - RNA, 19 nt, Artificial Sequence
  Description of Artificial Sequence: Synthetic oligonucleotide
gcucagggguauuauagcu

SEQ ID NO: 1043490 - RNA, 19 nt, Artificial Sequence
  Description of Artificial Sequence: Synthetic oligonucleotide
aggugcauaccaggacaug

SEQ ID NO: 1043491 - RNA, 19 nt, Artificial Sequence
  Description of Artificial Sequence: Synthetic oligonucleotide
aggagacaacagaggaaca

SEQ ID NO: 1043492 - RNA, 19 nt, Artificial Sequence
  Description of Artificial Sequence: Synthetic oligonucleotide
ccgugaacagaaugccaag

SEQ ID NO: 1043493 - RNA, 19 nt, Artificial Sequence
  Description of Artificial Sequence: Synthetic oligonucleotide
ggauacaggggagcauccc

SEQ ID NO: 1043494 - RNA, 19 nt, Artificial Sequence
  Description of Artificial Sequence: Synthetic oligonucleotide
cugaaucaagagacuaaau

SEQ ID NO: 1043495 - RNA, 19 nt, Artificial Sequence
  Description of Artificial Sequence: Synthetic oligonucleotide
gugcauaccaggacaugaa

SEQ ID NO: 1043496 - RNA, 19 nt, Artificial Sequence
  Description of Artificial Sequence: Synthetic oligonucleotide
cacagugaggaaaguggcu

SEQ ID NO: 1043497 - RNA, 19 nt, Artificial Sequence
  Description of Artificial Sequence: Synthetic oligonucleotide
ccaugggaacagcacaauc

SEQ ID NO: 1043498 - RNA, 19 nt, Artificial Sequence
  Description of Artificial Sequence: Synthetic oligonucleotide
ccgacauauguuccaaaca

SEQ ID NO: 1043499 - RNA, 19 nt, Artificial Sequence
  Description of Artificial Sequence: Synthetic oligonucleotide
caggacaugaauggccgaa

SEQ ID NO: 1043500 - RNA, 19 nt, Artificial Sequence
  Description of Artificial Sequence: Synthetic oligonucleotide
gguaagccaguggcugagg

SEQ ID NO: 1043501 - RNA, 19 nt, Artificial Sequence
  Description of Artificial Sequence: Synthetic oligonucleotide
gggaugagcugcucucuuc

SEQ ID NO: 1043502 - RNA, 19 nt, Artificial Sequence
  Description of Artificial Sequence: Synthetic oligonucleotide
ggaaaguggcuggaacuuc

SEQ ID NO: 1043503 - RNA, 19 nt, Artificial Sequence
  Description of Artificial Sequence: Synthetic oligonucleotide
aaguaccaucacaccuccu

SEQ ID NO: 1043504 - RNA, 19 nt, Artificial Sequence
  Description of Artificial Sequence: Synthetic oligonucleotide
cugcugaaaugucaauggu

SEQ ID NO: 1043505 - RNA, 19 nt, Artificial Sequence
  Description of Artificial Sequence: Synthetic oligonucleotide
agagcacaggcccgacaua

SEQ ID NO: 1043506 - RNA, 19 nt, Artificial Sequence
  Description of Artificial Sequence: Synthetic oligonucleotide
gucuccacuaagcccuugu

SEQ ID NO: 1043507 - RNA, 19 nt, Artificial Sequence
  Description of Artificial Sequence: Synthetic oligonucleotide
ggucuguggcggugaauac

SEQ ID NO: 1043508 - RNA, 19 nt, Artificial Sequence
  Description of Artificial Sequence: Synthetic oligonucleotide
caccucugaccacccugag

SEQ ID NO: 1043509 - RNA, 19 nt, Artificial Sequence
  Description of Artificial Sequence: Synthetic oligonucleotide
gcacuaacuucauaggcuu

SEQ ID NO: 1043510 - RNA, 19 nt, Artificial Sequence
  Description of Artificial Sequence: Synthetic oligonucleotide
uggcucccaggcucagaac

SEQ ID NO: 1043511 - RNA, 19 nt, Artificial Sequence
  Description of Artificial Sequence: Synthetic oligonucleotide
ggaccauugcuugcuucug

SEQ ID NO: 1043512 - RNA, 19 nt, Artificial Sequence
  Description of Artificial Sequence: Synthetic oligonucleotide
ccgaacauccuuguuccuc

SEQ ID NO: 1043513 - RNA, 19 nt, Artificial Sequence
  Description of Artificial Sequence: Synthetic oligonucleotide
cggaugaggugcauaccag

SEQ ID NO: 1043514 - RNA, 19 nt, Artificial Sequence
  Description of Artificial Sequence: Synthetic oligonucleotide
gccgggaugagcugcucuc

SEQ ID NO: 1043515 - RNA, 19 nt, Artificial Sequence
  Description of Artificial Sequence: Synthetic oligonucleotide
ccaggcacagaguguuaac

SEQ ID NO: 1043516 - RNA, 19 nt, Artificial Sequence
  Description of Artificial Sequence: Synthetic oligonucleotide
ccccuuuaccaguucugac

SEQ ID NO: 1043517 - RNA, 19 nt, Artificial Sequence
  Description of Artificial Sequence: Synthetic oligonucleotide
auaagguggcuggcccaga

SEQ ID NO: 1043518 - RNA, 19 nt, Artificial Sequence
  Description of Artificial Sequence: Synthetic oligonucleotide
gaggugcauaccaggacau

SEQ ID NO: 1043519 - RNA, 19 nt, Artificial Sequence
  Description of Artificial Sequence: Synthetic oligonucleotide
gucuguggcggugaauacu

SEQ ID NO: 1043520 - RNA, 19 nt, Artificial Sequence
  Description of Artificial Sequence: Synthetic oligonucleotide
gaggccccuuuaccaguuc

SEQ ID NO: 1043521 - RNA, 19 nt, Artificial Sequence
  Description of Artificial Sequence: Synthetic oligonucleotide
gcacaggcccgacauaugu

SEQ ID NO: 1043522 - RNA, 19 nt, Artificial Sequence
  Description of Artificial Sequence: Synthetic oligonucleotide
guguggcgugucuggucug

SEQ ID NO: 1043523 - RNA, 19 nt, Artificial Sequence
  Description of Artificial Sequence: Synthetic oligonucleotide
gccuuggauacaggggagc

SEQ ID NO: 1043524 - RNA, 19 nt, Artificial Sequence
  Description of Artificial Sequence: Synthetic oligonucleotide
gcagagugccaucgauaac

SEQ ID NO: 1043525 - RNA, 19 nt, Artificial Sequence
  Description of Artificial Sequence: Synthetic oligonucleotide
ugaccacccugagccggga

SEQ ID NO: 1043526 - RNA, 19 nt, Artificial Sequence
  Description of Artificial Sequence: Synthetic oligonucleotide
ccacaagguaacuccugca

SEQ ID NO: 1043527 - RNA, 19 nt, Artificial Sequence
  Description of Artificial Sequence: Synthetic oligonucleotide
caucgauaaccauccugau

SEQ ID NO: 1043528 - RNA, 19 nt, Artificial Sequence
  Description of Artificial Sequence: Synthetic oligonucleotide
cgauaaccauccugauaag

SEQ ID NO: 1043529 - RNA, 19 nt, Artificial Sequence
  Description of Artificial Sequence: Synthetic oligonucleotide
ggucaggccugugggcucc

SEQ ID NO: 1043530 - RNA, 19 nt, Artificial Sequence
  Description of Artificial Sequence: Synthetic oligonucleotide
gcggugaauacugcacaca

SEQ ID NO: 1043531 - RNA, 19 nt, Artificial Sequence
  Description of Artificial Sequence: Synthetic oligonucleotide
cccuucauagagaagcuuu

SEQ ID NO: 1043532 - RNA, 19 nt, Artificial Sequence
  Description of Artificial Sequence: Synthetic oligonucleotide
gccccuuuaccaguucuga

SEQ ID NO: 1043533 - RNA, 19 nt, Artificial Sequence
  Description of Artificial Sequence: Synthetic oligonucleotide
ccuuggauacaggggagca

SEQ ID NO: 1043534 - RNA, 19 nt, Artificial Sequence
  Description of Artificial Sequence: Synthetic oligonucleotide
ccaaaccaauaaugcauua

SEQ ID NO: 1043535 - RNA, 19 nt, Artificial Sequence
  Description of Artificial Sequence: Synthetic oligonucleotide
guggcgugucuggucugug

SEQ ID NO: 1043536 - RNA, 19 nt, Artificial Sequence
  Description of Artificial Sequence: Synthetic oligonucleotide
gugaucucggcugcaucgu

SEQ ID NO: 1043537 - RNA, 19 nt, Artificial Sequence
  Description of Artificial Sequence: Synthetic oligonucleotide
ggcccacugugcccagaag

SEQ ID NO: 1043538 - RNA, 19 nt, Artificial Sequence
  Description of Artificial Sequence: Synthetic oligonucleotide
gcaaugacuugugcuuuaa

SEQ ID NO: 1043539 - RNA, 19 nt, Artificial Sequence
  Description of Artificial Sequence: Synthetic oligonucleotide
gagugccaucgauaaccau

SEQ ID NO: 1043540 - RNA, 19 nt, Artificial Sequence
  Description of Artificial Sequence: Synthetic oligonucleotide
caccccugucugguucaag

SEQ ID NO: 1043541 - RNA, 19 nt, Artificial Sequence
  Description of Artificial Sequence: Synthetic oligonucleotide
cagcagccccagugcuaag

SEQ ID NO: 1043542 - RNA, 19 nt, Artificial Sequence
  Description of Artificial Sequence: Synthetic oligonucleotide
cuaagcccuuguguggcgu

SEQ ID NO: 1043543 - RNA, 19 nt, Artificial Sequence
  Description of Artificial Sequence: Synthetic oligonucleotide
cccugagccgggaugagcu

SEQ ID NO: 1043544 - RNA, 19 nt, Artificial Sequence
  Description of Artificial Sequence: Synthetic oligonucleotide
cagccgugaugagcagaug

SEQ ID NO: 1043545 - RNA, 19 nt, Artificial Sequence
  Description of Artificial Sequence: Synthetic oligonucleotide
ccccugucugguucaagga

SEQ ID NO: 1043546 - RNA, 19 nt, Artificial Sequence
  Description of Artificial Sequence: Synthetic oligonucleotide
ggcagccgugaugagcaga

SEQ ID NO: 1043547 - RNA, 19 nt, Artificial Sequence
  Description of Artificial Sequence: Synthetic oligonucleotide
cacaggcccgacauauguu

SEQ ID NO: 1043548 - RNA, 19 nt, Artificial Sequence
  Description of Artificial Sequence: Synthetic oligonucleotide
cauccagcucagccuuucu

SEQ ID NO: 1043549 - RNA, 19 nt, Artificial Sequence
  Description of Artificial Sequence: Synthetic oligonucleotide
cagggguauuauagcucgu

SEQ ID NO: 1043550 - RNA, 19 nt, Artificial Sequence
  Description of Artificial Sequence: Synthetic oligonucleotide
ccaggacaugaauggccga

SEQ ID NO: 1043551 - RNA, 19 nt, Artificial Sequence
  Description of Artificial Sequence: Synthetic oligonucleotide
gggcagccgugaugagcag

SEQ ID NO: 1043552 - RNA, 19 nt, Artificial Sequence
  Description of Artificial Sequence: Synthetic oligonucleotide
cugacaggcucagggguau

SEQ ID NO: 1043553 - RNA, 19 nt, Artificial Sequence
  Description of Artificial Sequence: Synthetic oligonucleotide
ggcccgacauauguuccaa

SEQ ID NO: 1043554 - RNA, 19 nt, Artificial Sequence
  Description of Artificial Sequence: Synthetic oligonucleotide
gcccgacauauguuccaaa

SEQ ID NO: 1043555 - RNA, 19 nt, Artificial Sequence
  Description of Artificial Sequence: Synthetic oligonucleotide
caucgugucucaggggcuu

SEQ ID NO: 1043556 - RNA, 19 nt, Artificial Sequence
  Description of Artificial Sequence: Synthetic oligonucleotide
agccaggcacagaguguua

SEQ ID NO: 1043557 - RNA, 19 nt, Artificial Sequence
  Description of Artificial Sequence: Synthetic oligonucleotide
ggcagccaggccugagagu

SEQ ID NO: 1043558 - RNA, 19 nt, Artificial Sequence
  Description of Artificial Sequence: Synthetic oligonucleotide
ccagugcuaaggcugccuu

SEQ ID NO: 1043559 - RNA, 19 nt, Artificial Sequence
  Description of Artificial Sequence: Synthetic oligonucleotide
gcuggaccauugcuugcuu

SEQ ID NO: 1043560 - RNA, 19 nt, Artificial Sequence
  Description of Artificial Sequence: Synthetic oligonucleotide
ccgugaugagcagaugcau

SEQ ID NO: 1043561 - RNA, 19 nt, Artificial Sequence
  Description of Artificial Sequence: Synthetic oligonucleotide
ccgggaugagcugcucucu

SEQ ID NO: 1043562 - RNA, 19 nt, Artificial Sequence
  Description of Artificial Sequence: Synthetic oligonucleotide
cggcugcaucgugucucag

SEQ ID NO: 1043563 - RNA, 19 nt, Artificial Sequence
  Description of Artificial Sequence: Synthetic oligonucleotide
uauaaaauuagauuguucc

SEQ ID NO: 1043564 - RNA, 19 nt, Artificial Sequence
  Description of Artificial Sequence: Synthetic oligonucleotide
aauaaacuaaucuggaauc

SEQ ID NO: 1043565 - RNA, 19 nt, Artificial Sequence
  Description of Artificial Sequence: Synthetic oligonucleotide
uuaucauaaagaaagauac

SEQ ID NO: 1043566 - RNA, 19 nt, Artificial Sequence
  Description of Artificial Sequence: Synthetic oligonucleotide
aauacuauguaauuuggcu

SEQ ID NO: 1043567 - RNA, 19 nt, Artificial Sequence
  Description of Artificial Sequence: Synthetic oligonucleotide
agagaaauaucccuguugc

SEQ ID NO: 1043568 - RNA, 19 nt, Artificial Sequence
  Description of Artificial Sequence: Synthetic oligonucleotide
aaucuaagcaucugaacac

SEQ ID NO: 1043569 - RNA, 19 nt, Artificial Sequence
  Description of Artificial Sequence: Synthetic oligonucleotide
uuugcaacaacugaggagg

SEQ ID NO: 1043570 - RNA, 19 nt, Artificial Sequence
  Description of Artificial Sequence: Synthetic oligonucleotide
acauaaaucucacaagccc

SEQ ID NO: 1043571 - RNA, 19 nt, Artificial Sequence
  Description of Artificial Sequence: Synthetic oligonucleotide
auaaaauuagauuguuccc

SEQ ID NO: 1043572 - RNA, 19 nt, Artificial Sequence
  Description of Artificial Sequence: Synthetic oligonucleotide
uuaaaugacuuacaaauac

SEQ ID NO: 1043573 - RNA, 19 nt, Artificial Sequence
  Description of Artificial Sequence: Synthetic oligonucleotide
ucaaggaccaauaaaauuc

SEQ ID NO: 1043574 - RNA, 19 nt, Artificial Sequence
  Description of Artificial Sequence: Synthetic oligonucleotide
uaaucuaagcaucugaaca

SEQ ID NO: 1043575 - RNA, 19 nt, Artificial Sequence
  Description of Artificial Sequence: Synthetic oligonucleotide
aaucucacaagcccugugc

SEQ ID NO: 1043576 - RNA, 19 nt, Artificial Sequence
  Description of Artificial Sequence: Synthetic oligonucleotide
uuauacuucugccaaacag

SEQ ID NO: 1043577 - RNA, 19 nt, Artificial Sequence
  Description of Artificial Sequence: Synthetic oligonucleotide
aaggagguaggacuuauac

SEQ ID NO: 1043578 - RNA, 19 nt, Artificial Sequence
  Description of Artificial Sequence: Synthetic oligonucleotide
cucuaauaaacuaaucugg

SEQ ID NO: 1043579 - RNA, 19 nt, Artificial Sequence
  Description of Artificial Sequence: Synthetic oligonucleotide
ucucuaauaaacuaaucug

SEQ ID NO: 1043580 - RNA, 19 nt, Artificial Sequence
  Description of Artificial Sequence: Synthetic oligonucleotide
aguaaagagaaaugaaauc

SEQ ID NO: 1043581 - RNA, 19 nt, Artificial Sequence
  Description of Artificial Sequence: Synthetic oligonucleotide
aauuaaaggggcauucacc

SEQ ID NO: 1043582 - RNA, 19 nt, Artificial Sequence
  Description of Artificial Sequence: Synthetic oligonucleotide
aaaauuagauuguucccag

SEQ ID NO: 1043583 - RNA, 19 nt, Artificial Sequence
  Description of Artificial Sequence: Synthetic oligonucleotide
uauugcauggcaauucccg

SEQ ID NO: 1043584 - RNA, 19 nt, Artificial Sequence
  Description of Artificial Sequence: Synthetic oligonucleotide
uguaucacguucuacaaug

SEQ ID NO: 1043585 - RNA, 19 nt, Artificial Sequence
  Description of Artificial Sequence: Synthetic oligonucleotide
aauuagauuguucccagcu

SEQ ID NO: 1043586 - RNA, 19 nt, Artificial Sequence
  Description of Artificial Sequence: Synthetic oligonucleotide
agaaucauuaguccacacc

SEQ ID NO: 1043587 - RNA, 19 nt, Artificial Sequence
  Description of Artificial Sequence: Synthetic oligonucleotide
uguuuauauuuucugagga

SEQ ID NO: 1043588 - RNA, 19 nt, Artificial Sequence
  Description of Artificial Sequence: Synthetic oligonucleotide
cuauaaagaaccuaaucug

SEQ ID NO: 1043589 - RNA, 19 nt, Artificial Sequence
  Description of Artificial Sequence: Synthetic oligonucleotide
ucuauagccacacaagaac

SEQ ID NO: 1043590 - RNA, 19 nt, Artificial Sequence
  Description of Artificial Sequence: Synthetic oligonucleotide
uauugcucagaaauauucg

SEQ ID NO: 1043591 - RNA, 19 nt, Artificial Sequence
  Description of Artificial Sequence: Synthetic oligonucleotide
ugacuuacaaauacuaugu

SEQ ID NO: 1043592 - RNA, 19 nt, Artificial Sequence
  Description of Artificial Sequence: Synthetic oligonucleotide
uuuuaaucuaagcaucuga

SEQ ID NO: 1043593 - RNA, 19 nt, Artificial Sequence
  Description of Artificial Sequence: Synthetic oligonucleotide
uuauucuuuuacaagggca

SEQ ID NO: 1043594 - RNA, 19 nt, Artificial Sequence
  Description of Artificial Sequence: Synthetic oligonucleotide
uuuuacaagggcaucuaag

SEQ ID NO: 1043595 - RNA, 19 nt, Artificial Sequence
  Description of Artificial Sequence: Synthetic oligonucleotide
aaacaugccaacuucaguu

SEQ ID NO: 1043596 - RNA, 19 nt, Artificial Sequence
  Description of Artificial Sequence: Synthetic oligonucleotide
gaaucauuaguccacacca

SEQ ID NO: 1043597 - RNA, 19 nt, Artificial Sequence
  Description of Artificial Sequence: Synthetic oligonucleotide
aaccuaaucugguauaugu

SEQ ID NO: 1043598 - RNA, 19 nt, Artificial Sequence
  Description of Artificial Sequence: Synthetic oligonucleotide
acaccuauggauuccacac

SEQ ID NO: 1043599 - RNA, 19 nt, Artificial Sequence
  Description of Artificial Sequence: Synthetic oligonucleotide
ugauuucugacauggacag

SEQ ID NO: 1043600 - RNA, 19 nt, Artificial Sequence
  Description of Artificial Sequence: Synthetic oligonucleotide
aaauuagauuguucccagc

SEQ ID NO: 1043601 - RNA, 19 nt, Artificial Sequence
  Description of Artificial Sequence: Synthetic oligonucleotide
uguaauuuggcuuauuauu

SEQ ID NO: 1043602 - RNA, 19 nt, Artificial Sequence
  Description of Artificial Sequence: Synthetic oligonucleotide
accacuuuaaaugacuuac

SEQ ID NO: 1043603 - RNA, 19 nt, Artificial Sequence
  Description of Artificial Sequence: Synthetic oligonucleotide
auuaaaggggcauucacca

SEQ ID NO: 1043604 - RNA, 19 nt, Artificial Sequence
  Description of Artificial Sequence: Synthetic oligonucleotide
uuuaaucuaagcaucugaa

SEQ ID NO: 1043605 - RNA, 19 nt, Artificial Sequence
  Description of Artificial Sequence: Synthetic oligonucleotide
aaagccucauguuagaauu

SEQ ID NO: 1043606 - RNA, 19 nt, Artificial Sequence
  Description of Artificial Sequence: Synthetic oligonucleotide
uauaguguaaaauuugcuu

SEQ ID NO: 1043607 - RNA, 19 nt, Artificial Sequence
  Description of Artificial Sequence: Synthetic oligonucleotide
auacuuauaucaaagaacu

SEQ ID NO: 1043608 - RNA, 19 nt, Artificial Sequence
  Description of Artificial Sequence: Synthetic oligonucleotide
ucauuaguccacaccauag

SEQ ID NO: 1043609 - RNA, 19 nt, Artificial Sequence
  Description of Artificial Sequence: Synthetic oligonucleotide
uuuugcaacaacugaggag

SEQ ID NO: 1043610 - RNA, 19 nt, Artificial Sequence
  Description of Artificial Sequence: Synthetic oligonucleotide
auucauuuaacuccagucu

SEQ ID NO: 1043611 - RNA, 19 nt, Artificial Sequence
  Description of Artificial Sequence: Synthetic oligonucleotide
aaagaaccuaaucugguau

SEQ ID NO: 1043612 - RNA, 19 nt, Artificial Sequence
  Description of Artificial Sequence: Synthetic oligonucleotide
uguugcaucacauuccacu

SEQ ID NO: 1043613 - RNA, 19 nt, Artificial Sequence
  Description of Artificial Sequence: Synthetic oligonucleotide
accucuuugcaucuguggc

SEQ ID NO: 1043614 - RNA, 19 nt, Artificial Sequence
  Description of Artificial Sequence: Synthetic oligonucleotide
uacauaaaucucacaagcc

SEQ ID NO: 1043615 - RNA, 19 nt, Artificial Sequence
  Description of Artificial Sequence: Synthetic oligonucleotide
caaauacuauguaauuugg

SEQ ID NO: 1043616 - RNA, 19 nt, Artificial Sequence
  Description of Artificial Sequence: Synthetic oligonucleotide
aggaauauaguguaaaauu

SEQ ID NO: 1043617 - RNA, 19 nt, Artificial Sequence
  Description of Artificial Sequence: Synthetic oligonucleotide
agagaaaugaaaucaagua

SEQ ID NO: 1043618 - RNA, 19 nt, Artificial Sequence
  Description of Artificial Sequence: Synthetic oligonucleotide
accuauguuguccacagag

SEQ ID NO: 1043619 - RNA, 19 nt, Artificial Sequence
  Description of Artificial Sequence: Synthetic oligonucleotide
auauguuuauauuuucuga

SEQ ID NO: 1043620 - RNA, 19 nt, Artificial Sequence
  Description of Artificial Sequence: Synthetic oligonucleotide
uacagaaucacuucuuuaa

SEQ ID NO: 1043621 - RNA, 19 nt, Artificial Sequence
  Description of Artificial Sequence: Synthetic oligonucleotide
auauugcucagaaauauuc

SEQ ID NO: 1043622 - RNA, 19 nt, Artificial Sequence
  Description of Artificial Sequence: Synthetic oligonucleotide
uucuuuuacagaaucacuu

SEQ ID NO: 1043623 - RNA, 19 nt, Artificial Sequence
  Description of Artificial Sequence: Synthetic oligonucleotide
uauucuuuuacaagggcau

SEQ ID NO: 1043624 - RNA, 19 nt, Artificial Sequence
  Description of Artificial Sequence: Synthetic oligonucleotide
uaggcaauguaccauacaa

SEQ ID NO: 1043625 - RNA, 19 nt, Artificial Sequence
  Description of Artificial Sequence: Synthetic oligonucleotide
  modified_base (4)..(4): a, c, u, g, unknown or other
uucngggccagccuaacgc

SEQ ID NO: 1043626 - RNA, 19 nt, Artificial Sequence
  Description of Artificial Sequence: Synthetic oligonucleotide
uguaugguuaccacauggc

SEQ ID NO: 1043627 - RNA, 19 nt, Artificial Sequence
  Description of Artificial Sequence: Synthetic oligonucleotide
ucacguucuacaaugcaug

SEQ ID NO: 1043628 - RNA, 19 nt, Artificial Sequence
  Description of Artificial Sequence: Synthetic oligonucleotide
ggaaucuaauuauaaagcc

SEQ ID NO: 1043629 - RNA, 19 nt, Artificial Sequence
  Description of Artificial Sequence: Synthetic oligonucleotide
agggcaucuaaguuuuacc

SEQ ID NO: 1043630 - RNA, 19 nt, Artificial Sequence
  Description of Artificial Sequence: Synthetic oligonucleotide
uuuauaucagcugugguua

SEQ ID NO: 1043631 - RNA, 19 nt, Artificial Sequence
  Description of Artificial Sequence: Synthetic oligonucleotide
aagaaucauuaguccacac

SEQ ID NO: 1043632 - RNA, 19 nt, Artificial Sequence
  Description of Artificial Sequence: Synthetic oligonucleotide
caaaguuacaugaucaaga

SEQ ID NO: 1043633 - RNA, 19 nt, Artificial Sequence
  Description of Artificial Sequence: Synthetic oligonucleotide
cacaccauaggcaauguac

SEQ ID NO: 1043634 - RNA, 19 nt, Artificial Sequence
  Description of Artificial Sequence: Synthetic oligonucleotide
ugcaugacaaggauuuuca

SEQ ID NO: 1043635 - RNA, 19 nt, Artificial Sequence
  Description of Artificial Sequence: Synthetic oligonucleotide
uuagauuguucccagcuau

SEQ ID NO: 1043636 - RNA, 19 nt, Artificial Sequence
  Description of Artificial Sequence: Synthetic oligonucleotide
ggugacaaggcauaacacg

SEQ ID NO: 1043637 - RNA, 19 nt, Artificial Sequence
  Description of Artificial Sequence: Synthetic oligonucleotide
aguuucuauagccacacaa

SEQ ID NO: 1043638 - RNA, 19 nt, Artificial Sequence
  Description of Artificial Sequence: Synthetic oligonucleotide
caccauaacuccaaacacg

SEQ ID NO: 1043639 - RNA, 19 nt, Artificial Sequence
  Description of Artificial Sequence: Synthetic oligonucleotide
uuaaucuaagcaucugaac

SEQ ID NO: 1043640 - RNA, 19 nt, Artificial Sequence
  Description of Artificial Sequence: Synthetic oligonucleotide
gaggccguggcuuagagca

SEQ ID NO: 1043641 - RNA, 19 nt, Artificial Sequence
  Description of Artificial Sequence: Synthetic oligonucleotide
accaggaugacacaccucu

SEQ ID NO: 1043642 - RNA, 19 nt, Artificial Sequence
  Description of Artificial Sequence: Synthetic oligonucleotide
caaggaccaauaaaauucc

SEQ ID NO: 1043643 - RNA, 19 nt, Artificial Sequence
  Description of Artificial Sequence: Synthetic oligonucleotide
acuuauacuucugccaaac

SEQ ID NO: 1043644 - RNA, 19 nt, Artificial Sequence
  Description of Artificial Sequence: Synthetic oligonucleotide
caucacauuccacugaaac

SEQ ID NO: 1043645 - RNA, 19 nt, Artificial Sequence
  Description of Artificial Sequence: Synthetic oligonucleotide
accuauggauuccacacuc

SEQ ID NO: 1043646 - RNA, 19 nt, Artificial Sequence
  Description of Artificial Sequence: Synthetic oligonucleotide
cacguauuuuauugcaugg

SEQ ID NO: 1043647 - RNA, 19 nt, Artificial Sequence
  Description of Artificial Sequence: Synthetic oligonucleotide
ugcagugacuauuuuaauc

SEQ ID NO: 1043648 - RNA, 19 nt, Artificial Sequence
  Description of Artificial Sequence: Synthetic oligonucleotide
aaaccugauuuucacguau

SEQ ID NO: 1043649 - RNA, 19 nt, Artificial Sequence
  Description of Artificial Sequence: Synthetic oligonucleotide
aguuaaagcuucuugcaaa

SEQ ID NO: 1043650 - RNA, 19 nt, Artificial Sequence
  Description of Artificial Sequence: Synthetic oligonucleotide
aacaccuauggauuccaca

SEQ ID NO: 1043651 - RNA, 19 nt, Artificial Sequence
  Description of Artificial Sequence: Synthetic oligonucleotide
uaccauacaagcacugcca

SEQ ID NO: 1043652 - RNA, 19 nt, Artificial Sequence
  Description of Artificial Sequence: Synthetic oligonucleotide
aacugaggagguucuuuuc

SEQ ID NO: 1043653 - RNA, 19 nt, Artificial Sequence
  Description of Artificial Sequence: Synthetic oligonucleotide
gacaaggcauaacacgaag

SEQ ID NO: 1043654 - RNA, 19 nt, Artificial Sequence
  Description of Artificial Sequence: Synthetic oligonucleotide
uacuugaucacagugccac

SEQ ID NO: 1043655 - RNA, 19 nt, Artificial Sequence
  Description of Artificial Sequence: Synthetic oligonucleotide
aagguugaaagaaucauua

SEQ ID NO: 1043656 - RNA, 19 nt, Artificial Sequence
  Description of Artificial Sequence: Synthetic oligonucleotide
agcuauacuuauaucaaag

SEQ ID NO: 1043657 - RNA, 19 nt, Artificial Sequence
  Description of Artificial Sequence: Synthetic oligonucleotide
acguauuuuauugcauggc

SEQ ID NO: 1043658 - RNA, 19 nt, Artificial Sequence
  Description of Artificial Sequence: Synthetic oligonucleotide
agggugacaaggcauaaca

SEQ ID NO: 1043659 - RNA, 19 nt, Artificial Sequence
  Description of Artificial Sequence: Synthetic oligonucleotide
uauagccacacaagaacac

SEQ ID NO: 1043660 - RNA, 19 nt, Artificial Sequence
  Description of Artificial Sequence: Synthetic oligonucleotide
guuucuauagccacacaag

SEQ ID NO: 1043661 - RNA, 19 nt, Artificial Sequence
  Description of Artificial Sequence: Synthetic oligonucleotide
uuuuauugcauggcaauuc

SEQ ID NO: 1043662 - RNA, 19 nt, Artificial Sequence
  Description of Artificial Sequence: Synthetic oligonucleotide
uucuauagccacacaagaa

SEQ ID NO: 1043663 - RNA, 19 nt, Artificial Sequence
  Description of Artificial Sequence: Synthetic oligonucleotide
uccacauagaggcuuguaa

SEQ ID NO: 1043664 - RNA, 19 nt, Artificial Sequence
  Description of Artificial Sequence: Synthetic oligonucleotide
uaaauagcaaaaccacuuu

SEQ ID NO: 1043665 - RNA, 19 nt, Artificial Sequence
  Description of Artificial Sequence: Synthetic oligonucleotide
auacuucugccaaacagac

SEQ ID NO: 1043666 - RNA, 19 nt, Artificial Sequence
  Description of Artificial Sequence: Synthetic oligonucleotide
accauacaagcacugccac

SEQ ID NO: 1043667 - RNA, 19 nt, Artificial Sequence
  Description of Artificial Sequence: Synthetic oligonucleotide
aggacuuauacuucugcca

SEQ ID NO: 1043668 - RNA, 19 nt, Artificial Sequence
  Description of Artificial Sequence: Synthetic oligonucleotide
uuugcauguugcaucacau

SEQ ID NO: 1043669 - RNA, 19 nt, Artificial Sequence
  Description of Artificial Sequence: Synthetic oligonucleotide
ucugagguauauggaaagg

SEQ ID NO: 1043670 - RNA, 19 nt, Artificial Sequence
  Description of Artificial Sequence: Synthetic oligonucleotide
uucaaggaccaauaaaauu

SEQ ID NO: 1043671 - RNA, 19 nt, Artificial Sequence
  Description of Artificial Sequence: Synthetic oligonucleotide
agauuguucccagcuauac

SEQ ID NO: 1043672 - RNA, 19 nt, Artificial Sequence
  Description of Artificial Sequence: Synthetic oligonucleotide
uguaaucuugcagugacua

SEQ ID NO: 1043673 - RNA, 19 nt, Artificial Sequence
  Description of Artificial Sequence: Synthetic oligonucleotide
uauaaagccucauguuaga

SEQ ID NO: 1043674 - RNA, 19 nt, Artificial Sequence
  Description of Artificial Sequence: Synthetic oligonucleotide
uuauugcauggcaauuccc

SEQ ID NO: 1043675 - RNA, 19 nt, Artificial Sequence
  Description of Artificial Sequence: Synthetic oligonucleotide
gaugacacaccucuuugca

SEQ ID NO: 1043676 - RNA, 19 nt, Artificial Sequence
  Description of Artificial Sequence: Synthetic oligonucleotide
uucccagcuauacuuauau

SEQ ID NO: 1043677 - RNA, 19 nt, Artificial Sequence
  Description of Artificial Sequence: Synthetic oligonucleotide
uuccucucuaauaaacuaa

SEQ ID NO: 1043678 - RNA, 19 nt, Artificial Sequence
  Description of Artificial Sequence: Synthetic oligonucleotide
cuaaucuggaaucuaauua

SEQ ID NO: 1043679 - RNA, 19 nt, Artificial Sequence
  Description of Artificial Sequence: Synthetic oligonucleotide
uaucacguucuacaaugca

SEQ ID NO: 1043680 - RNA, 19 nt, Artificial Sequence
  Description of Artificial Sequence: Synthetic oligonucleotide
uuccgcuucauuucuuugc

SEQ ID NO: 1043681 - RNA, 19 nt, Artificial Sequence
  Description of Artificial Sequence: Synthetic oligonucleotide
uucaccaggaugacacacc

SEQ ID NO: 1043682 - RNA, 19 nt, Artificial Sequence
  Description of Artificial Sequence: Synthetic oligonucleotide
aggcauaacacgaagggug

SEQ ID NO: 1043683 - RNA, 19 nt, Artificial Sequence
  Description of Artificial Sequence: Synthetic oligonucleotide
cuaagcaucugaacacaag

SEQ ID NO: 1043684 - RNA, 19 nt, Artificial Sequence
  Description of Artificial Sequence: Synthetic oligonucleotide
gucugagguauauggaaag

SEQ ID NO: 1043685 - RNA, 19 nt, Artificial Sequence
  Description of Artificial Sequence: Synthetic oligonucleotide
uaaguuuuaccuucugguu

SEQ ID NO: 1043686 - RNA, 19 nt, Artificial Sequence
  Description of Artificial Sequence: Synthetic oligonucleotide
caacaugacaaacuugcuc

SEQ ID NO: 1043687 - RNA, 19 nt, Artificial Sequence
  Description of Artificial Sequence: Synthetic oligonucleotide
uaaagaaccuaaucuggua

SEQ ID NO: 1043688 - RNA, 19 nt, Artificial Sequence
  Description of Artificial Sequence: Synthetic oligonucleotide
uccucucuaauaaacuaau

SEQ ID NO: 1043689 - RNA, 19 nt, Artificial Sequence
  Description of Artificial Sequence: Synthetic oligonucleotide
uucacaccuauguugucca

SEQ ID NO: 1043690 - RNA, 19 nt, Artificial Sequence
  Description of Artificial Sequence: Synthetic oligonucleotide
cacaaguugguacaucuuc

SEQ ID NO: 1043691 - RNA, 19 nt, Artificial Sequence
  Description of Artificial Sequence: Synthetic oligonucleotide
acgcugugaacaccuaugg

SEQ ID NO: 1043692 - RNA, 19 nt, Artificial Sequence
  Description of Artificial Sequence: Synthetic oligonucleotide
acuaaucuggaaucuaauu

SEQ ID NO: 1043693 - RNA, 19 nt, Artificial Sequence
  Description of Artificial Sequence: Synthetic oligonucleotide
guaggacuuauacuucugc

SEQ ID NO: 1043694 - RNA, 19 nt, Artificial Sequence
  Description of Artificial Sequence: Synthetic oligonucleotide
uuaaaggggcauucaccag

SEQ ID NO: 1043695 - RNA, 19 nt, Artificial Sequence
  Description of Artificial Sequence: Synthetic oligonucleotide
gacaaacuugcucacaugu

SEQ ID NO: 1043696 - RNA, 19 nt, Artificial Sequence
  Description of Artificial Sequence: Synthetic oligonucleotide
aaacuaaucuggaaucuaa

SEQ ID NO: 1043697 - RNA, 19 nt, Artificial Sequence
  Description of Artificial Sequence: Synthetic oligonucleotide
uccgcuucauuucuuugca

SEQ ID NO: 1043698 - RNA, 19 nt, Artificial Sequence
  Description of Artificial Sequence: Synthetic oligonucleotide
aguaagugaccagagaaau

SEQ ID NO: 1043699 - RNA, 19 nt, Artificial Sequence
  Description of Artificial Sequence: Synthetic oligonucleotide
uucuuuuacaagggcaucu

SEQ ID NO: 1043700 - RNA, 19 nt, Artificial Sequence
  Description of Artificial Sequence: Synthetic oligonucleotide
cugugcucggcacauauug

SEQ ID NO: 1043701 - RNA, 19 nt, Artificial Sequence
  Description of Artificial Sequence: Synthetic oligonucleotide
aaguuacaugaucaagaaa

SEQ ID NO: 1043702 - RNA, 19 nt, Artificial Sequence
  Description of Artificial Sequence: Synthetic oligonucleotide
aggaccaauaaaauuccuc

SEQ ID NO: 1043703 - RNA, 19 nt, Artificial Sequence
  Description of Artificial Sequence: Synthetic oligonucleotide
uaaagccucauguuagaau

SEQ ID NO: 1043704 - RNA, 19 nt, Artificial Sequence
  Description of Artificial Sequence: Synthetic oligonucleotide
gcacauauggcucaguuuc

SEQ ID NO: 1043705 - RNA, 19 nt, Artificial Sequence
  Description of Artificial Sequence: Synthetic oligonucleotide
auaucuuaaacagaacauu

SEQ ID NO: 1043706 - RNA, 19 nt, Artificial Sequence
  Description of Artificial Sequence: Synthetic oligonucleotide
aagaaccuaaucugguaua

SEQ ID NO: 1043707 - RNA, 19 nt, Artificial Sequence
  Description of Artificial Sequence: Synthetic oligonucleotide
cucucuaauaaacuaaucu

SEQ ID NO: 1043708 - RNA, 19 nt, Artificial Sequence
  Description of Artificial Sequence: Synthetic oligonucleotide
aacgcugugaacaccuaug

SEQ ID NO: 1043709 - RNA, 19 nt, Artificial Sequence
  Description of Artificial Sequence: Synthetic oligonucleotide
cauaacacgaagggugagg

SEQ ID NO: 1043710 - RNA, 19 nt, Artificial Sequence
  Description of Artificial Sequence: Synthetic oligonucleotide
ucaccaggaugacacaccu

SEQ ID NO: 1043711 - RNA, 19 nt, Artificial Sequence
  Description of Artificial Sequence: Synthetic oligonucleotide
cauguuagaauuuaaguuu

SEQ ID NO: 1043712 - RNA, 19 nt, Artificial Sequence
  Description of Artificial Sequence: Synthetic oligonucleotide
uguaccauacaagcacugc

SEQ ID NO: 1043713 - RNA, 19 nt, Artificial Sequence
  Description of Artificial Sequence: Synthetic oligonucleotide
acaaggcauaacacgaagg

SEQ ID NO: 1043714 - RNA, 19 nt, Artificial Sequence
  Description of Artificial Sequence: Synthetic oligonucleotide
cacauagaggcuuguaauc

SEQ ID NO: 1043715 - RNA, 19 nt, Artificial Sequence
  Description of Artificial Sequence: Synthetic oligonucleotide
gaugcuuuccgcuucauuu

SEQ ID NO: 1043716 - RNA, 19 nt, Artificial Sequence
  Description of Artificial Sequence: Synthetic oligonucleotide
aggaugacacaccucuuug

SEQ ID NO: 1043717 - RNA, 19 nt, Artificial Sequence
  Description of Artificial Sequence: Synthetic oligonucleotide
aaauaucccuguugcugca

SEQ ID NO: 1043718 - RNA, 19 nt, Artificial Sequence
  Description of Artificial Sequence: Synthetic oligonucleotide
ugugaacaccuauggauuc

SEQ ID NO: 1043719 - RNA, 19 nt, Artificial Sequence
  Description of Artificial Sequence: Synthetic oligonucleotide
uuacaagggcaucuaaguu

SEQ ID NO: 1043720 - RNA, 19 nt, Artificial Sequence
  Description of Artificial Sequence: Synthetic oligonucleotide
gaacauucauuuaacucca

SEQ ID NO: 1043721 - RNA, 19 nt, Artificial Sequence
  Description of Artificial Sequence: Synthetic oligonucleotide
auaaagaaccuaaucuggu

SEQ ID NO: 1043722 - RNA, 19 nt, Artificial Sequence
  Description of Artificial Sequence: Synthetic oligonucleotide
guuaccacauggcaguguc

SEQ ID NO: 1043723 - RNA, 19 nt, Artificial Sequence
  Description of Artificial Sequence: Synthetic oligonucleotide
uagaggcuuguaaucuugc

SEQ ID NO: 1043724 - RNA, 19 nt, Artificial Sequence
  Description of Artificial Sequence: Synthetic oligonucleotide
uaaucuugcagugacuauu

SEQ ID NO: 1043725 - RNA, 19 nt, Artificial Sequence
  Description of Artificial Sequence: Synthetic oligonucleotide
auuuuaaucuaagcaucug

SEQ ID NO: 1043726 - RNA, 19 nt, Artificial Sequence
  Description of Artificial Sequence: Synthetic oligonucleotide
aaggcauaacacgaagggu

SEQ ID NO: 1043727 - RNA, 19 nt, Artificial Sequence
  Description of Artificial Sequence: Synthetic oligonucleotide
cacugcuuggcacugcacc

SEQ ID NO: 1043728 - RNA, 19 nt, Artificial Sequence
  Description of Artificial Sequence: Synthetic oligonucleotide
cucagaaauauucguuuuc

SEQ ID NO: 1043729 - RNA, 19 nt, Artificial Sequence
  Description of Artificial Sequence: Synthetic oligonucleotide
ugugcucggcacauauugc

SEQ ID NO: 1043730 - RNA, 19 nt, Artificial Sequence
  Description of Artificial Sequence: Synthetic oligonucleotide
guuuauauuuucugaggaa

SEQ ID NO: 1043731 - RNA, 19 nt, Artificial Sequence
  Description of Artificial Sequence: Synthetic oligonucleotide
auaacacgaagggugagga

SEQ ID NO: 1043732 - RNA, 19 nt, Artificial Sequence
  Description of Artificial Sequence: Synthetic oligonucleotide
uaaucugguauauguuuau

SEQ ID NO: 1043733 - RNA, 19 nt, Artificial Sequence
  Description of Artificial Sequence: Synthetic oligonucleotide
  modified_base (10)..(10): a, c, u, g, unknown or other
gaggcauucngggccagcc

SEQ ID NO: 1043734 - RNA, 19 nt, Artificial Sequence
  Description of Artificial Sequence: Synthetic oligonucleotide
guaugguuaccacauggca

SEQ ID NO: 1043735 - RNA, 19 nt, Artificial Sequence
  Description of Artificial Sequence: Synthetic oligonucleotide
gaucacagugccacacugg

SEQ ID NO: 1043736 - RNA, 19 nt, Artificial Sequence
  Description of Artificial Sequence: Synthetic oligonucleotide
ucacauguaugguuaccac

SEQ ID NO: 1043737 - RNA, 19 nt, Artificial Sequence
  Description of Artificial Sequence: Synthetic oligonucleotide
gucuacuaacucuuggaca

SEQ ID NO: 1043738 - RNA, 19 nt, Artificial Sequence
  Description of Artificial Sequence: Synthetic oligonucleotide
aaccacuuuaaaugacuua

SEQ ID NO: 1043739 - RNA, 19 nt, Artificial Sequence
  Description of Artificial Sequence: Synthetic oligonucleotide
agccuaacgcugugaacac

SEQ ID NO: 1043740 - RNA, 19 nt, Artificial Sequence
  Description of Artificial Sequence: Synthetic oligonucleotide
  modified_base (5)..(5): a, c, u, g, unknown or other
auucngggccagccuaacg

SEQ ID NO: 1043741 - RNA, 19 nt, Artificial Sequence
  Description of Artificial Sequence: Synthetic oligonucleotide
gugacaaggcauaacacga

SEQ ID NO: 1043742 - RNA, 19 nt, Artificial Sequence
  Description of Artificial Sequence: Synthetic oligonucleotide
agaggccguggcuuagagc

SEQ ID NO: 1043743 - RNA, 19 nt, Artificial Sequence
  Description of Artificial Sequence: Synthetic oligonucleotide
auuagauuguucccagcua

SEQ ID NO: 1043744 - RNA, 19 nt, Artificial Sequence
  Description of Artificial Sequence: Synthetic oligonucleotide
aaguacccaguaagugacc

SEQ ID NO: 1043745 - RNA, 19 nt, Artificial Sequence
  Description of Artificial Sequence: Synthetic oligonucleotide
uaaacuaaucuggaaucua

SEQ ID NO: 1043746 - RNA, 19 nt, Artificial Sequence
  Description of Artificial Sequence: Synthetic oligonucleotide
cuugaucacagugccacac

SEQ ID NO: 1043747 - RNA, 19 nt, Artificial Sequence
  Description of Artificial Sequence: Synthetic oligonucleotide
ccuauaaagaaccuaaucu

SEQ ID NO: 1043748 - RNA, 19 nt, Artificial Sequence
  Description of Artificial Sequence: Synthetic oligonucleotide
aucauuaguccacaccaua

SEQ ID NO: 1043749 - RNA, 19 nt, Artificial Sequence
  Description of Artificial Sequence: Synthetic oligonucleotide
augccaacuucaguuaaag

SEQ ID NO: 1043750 - RNA, 19 nt, Artificial Sequence
  Description of Artificial Sequence: Synthetic oligonucleotide
ucaagcacuuugucacagc

SEQ ID NO: 1043751 - RNA, 19 nt, Artificial Sequence
  Description of Artificial Sequence: Synthetic oligonucleotide
auaggcaauguaccauaca

SEQ ID NO: 1043752 - RNA, 19 nt, Artificial Sequence
  Description of Artificial Sequence: Synthetic oligonucleotide
cuaaucugguauauguuua

SEQ ID NO: 1043753 - RNA, 19 nt, Artificial Sequence
  Description of Artificial Sequence: Synthetic oligonucleotide
ugccaaacagacagcucca

SEQ ID NO: 1043754 - RNA, 19 nt, Artificial Sequence
  Description of Artificial Sequence: Synthetic oligonucleotide
gccaccauaacuccaaaca

SEQ ID NO: 1043755 - RNA, 19 nt, Artificial Sequence
  Description of Artificial Sequence: Synthetic oligonucleotide
ugaacaccuauggauucca

SEQ ID NO: 1043756 - RNA, 19 nt, Artificial Sequence
  Description of Artificial Sequence: Synthetic oligonucleotide
uuguaaucuugcagugacu

SEQ ID NO: 1043757 - RNA, 19 nt, Artificial Sequence
  Description of Artificial Sequence: Synthetic oligonucleotide
uggcuuagagcauccuucu

SEQ ID NO: 1043758 - RNA, 19 nt, Artificial Sequence
  Description of Artificial Sequence: Synthetic oligonucleotide
caguaaagagaaaugaaau

SEQ ID NO: 1043759 - RNA, 19 nt, Artificial Sequence
  Description of Artificial Sequence: Synthetic oligonucleotide
aaucuugcagugacuauuu

SEQ ID NO: 1043760 - RNA, 19 nt, Artificial Sequence
  Description of Artificial Sequence: Synthetic oligonucleotide
cccagcuauacuuauauca

SEQ ID NO: 1043761 - RNA, 19 nt, Artificial Sequence
  Description of Artificial Sequence: Synthetic oligonucleotide
gacaaggcugacagguucc

SEQ ID NO: 1043762 - RNA, 19 nt, Artificial Sequence
  Description of Artificial Sequence: Synthetic oligonucleotide
  modified_base (3)..(3): a, c, u, g, unknown or other
ucngggccagccuaacgcu

SEQ ID NO: 1043763 - RNA, 19 nt, Artificial Sequence
  Description of Artificial Sequence: Synthetic oligonucleotide
gauuccacacucaagcacu

SEQ ID NO: 1043764 - RNA, 19 nt, Artificial Sequence
  Description of Artificial Sequence: Synthetic oligonucleotide
gcuauacuuauaucaaaga

SEQ ID NO: 1043765 - RNA, 19 nt, Artificial Sequence
  Description of Artificial Sequence: Synthetic oligonucleotide
cagccuaacgcugugaaca

SEQ ID NO: 1043766 - RNA, 19 nt, Artificial Sequence
  Description of Artificial Sequence: Synthetic oligonucleotide
ucuucccggagcgaggaca

SEQ ID NO: 1043767 - RNA, 19 nt, Artificial Sequence
  Description of Artificial Sequence: Synthetic oligonucleotide
cuuugcauguugcaucaca

SEQ ID NO: 1043768 - RNA, 19 nt, Artificial Sequence
  Description of Artificial Sequence: Synthetic oligonucleotide
uaacgcugugaacaccuau

SEQ ID NO: 1043769 - RNA, 19 nt, Artificial Sequence
  Description of Artificial Sequence: Synthetic oligonucleotide
cugcaguaaagagaaauga

SEQ ID NO: 1043770 - RNA, 19 nt, Artificial Sequence
  Description of Artificial Sequence: Synthetic oligonucleotide
guauuuuauugcauggcaa

SEQ ID NO: 1043771 - RNA, 19 nt, Artificial Sequence
  Description of Artificial Sequence: Synthetic oligonucleotide
agcagcuugcgcccacacg

SEQ ID NO: 1043772 - RNA, 19 nt, Artificial Sequence
  Description of Artificial Sequence: Synthetic oligonucleotide
aaucauuaguccacaccau

SEQ ID NO: 1043773 - RNA, 19 nt, Artificial Sequence
  Description of Artificial Sequence: Synthetic oligonucleotide
ggauuccacacucaagcac

SEQ ID NO: 1043774 - RNA, 19 nt, Artificial Sequence
  Description of Artificial Sequence: Synthetic oligonucleotide
auguaucacguucuacaau

SEQ ID NO: 1043775 - RNA, 19 nt, Artificial Sequence
  Description of Artificial Sequence: Synthetic oligonucleotide
auuuuauugcauggcaauu

SEQ ID NO: 1043776 - RNA, 19 nt, Artificial Sequence
  Description of Artificial Sequence: Synthetic oligonucleotide
uuacaauuaaaggggcauu

SEQ ID NO: 1043777 - RNA, 19 nt, Artificial Sequence
  Description of Artificial Sequence: Synthetic oligonucleotide
gaaccuaaucugguauaug

SEQ ID NO: 1043778 - RNA, 19 nt, Artificial Sequence
  Description of Artificial Sequence: Synthetic oligonucleotide
uguucccagcuauacuuau

SEQ ID NO: 1043779 - RNA, 19 nt, Artificial Sequence
  Description of Artificial Sequence: Synthetic oligonucleotide
agcgaggacacgcuccaca

SEQ ID NO: 1043780 - RNA, 19 nt, Artificial Sequence
  Description of Artificial Sequence: Synthetic oligonucleotide
agaaccuaaucugguauau

SEQ ID NO: 1043781 - RNA, 19 nt, Artificial Sequence
  Description of Artificial Sequence: Synthetic oligonucleotide
aacauucauuuaacuccag

SEQ ID NO: 1043782 - RNA, 19 nt, Artificial Sequence
  Description of Artificial Sequence: Synthetic oligonucleotide
cauuucuuugcauguugca

SEQ ID NO: 1043783 - RNA, 19 nt, Artificial Sequence
  Description of Artificial Sequence: Synthetic oligonucleotide
uuauaucagcugugguuau

SEQ ID NO: 1043784 - RNA, 19 nt, Artificial Sequence
  Description of Artificial Sequence: Synthetic oligonucleotide
ucacaagcccugugcucgg

SEQ ID NO: 1043785 - RNA, 19 nt, Artificial Sequence
  Description of Artificial Sequence: Synthetic oligonucleotide
acaagcacugccaccauaa

SEQ ID NO: 1043786 - RNA, 19 nt, Artificial Sequence
  Description of Artificial Sequence: Synthetic oligonucleotide
uguuguccacagagcagcu

SEQ ID NO: 1043787 - RNA, 19 nt, Artificial Sequence
  Description of Artificial Sequence: Synthetic oligonucleotide
gguacaucuucuguacaag

SEQ ID NO: 1043788 - RNA, 19 nt, Artificial Sequence
  Description of Artificial Sequence: Synthetic oligonucleotide
ugcucggcacauauugcuc

SEQ ID NO: 1043789 - RNA, 19 nt, Artificial Sequence
  Description of Artificial Sequence: Synthetic oligonucleotide
cucacauguaugguuacca

SEQ ID NO: 1043790 - RNA, 19 nt, Artificial Sequence
  Description of Artificial Sequence: Synthetic oligonucleotide
ucucacaagcccugugcuc

SEQ ID NO: 1043791 - RNA, 19 nt, Artificial Sequence
  Description of Artificial Sequence: Synthetic oligonucleotide
aucuggaaucuaauuauaa

SEQ ID NO: 1043792 - RNA, 19 nt, Artificial Sequence
  Description of Artificial Sequence: Synthetic oligonucleotide
ggacuuauacuucugccaa

SEQ ID NO: 1043793 - RNA, 19 nt, Artificial Sequence
  Description of Artificial Sequence: Synthetic oligonucleotide
ccuauguuguccacagagc

SEQ ID NO: 1043794 - RNA, 19 nt, Artificial Sequence
  Description of Artificial Sequence: Synthetic oligonucleotide
cacacucaagcacuuuguc

SEQ ID NO: 1043795 - RNA, 19 nt, Artificial Sequence
  Description of Artificial Sequence: Synthetic oligonucleotide
aaggaccaauaaaauuccu

SEQ ID NO: 1043796 - RNA, 19 nt, Artificial Sequence
  Description of Artificial Sequence: Synthetic oligonucleotide
auaucagcugugguuauuu

SEQ ID NO: 1043797 - RNA, 19 nt, Artificial Sequence
  Description of Artificial Sequence: Synthetic oligonucleotide
cuucugccaaacagacagc

SEQ ID NO: 1043798 - RNA, 19 nt, Artificial Sequence
  Description of Artificial Sequence: Synthetic oligonucleotide
augacacaccucuuugcau

SEQ ID NO: 1043799 - RNA, 19 nt, Artificial Sequence
  Description of Artificial Sequence: Synthetic oligonucleotide
caaaacagccuccuauaaa

SEQ ID NO: 1043800 - RNA, 19 nt, Artificial Sequence
  Description of Artificial Sequence: Synthetic oligonucleotide
guaucacguucuacaaugc

SEQ ID NO: 1043801 - RNA, 19 nt, Artificial Sequence
  Description of Artificial Sequence: Synthetic oligonucleotide
gauuguucccagcuauacu

SEQ ID NO: 1043802 - RNA, 19 nt, Artificial Sequence
  Description of Artificial Sequence: Synthetic oligonucleotide
acucaagcacuuugucaca

SEQ ID NO: 1043803 - RNA, 19 nt, Artificial Sequence
  Description of Artificial Sequence: Synthetic oligonucleotide
gaaaccugauuuucacgua

SEQ ID NO: 1043804 - RNA, 19 nt, Artificial Sequence
  Description of Artificial Sequence: Synthetic oligonucleotide
cucggcacauauugcucag

SEQ ID NO: 1043805 - RNA, 19 nt, Artificial Sequence
  Description of Artificial Sequence: Synthetic oligonucleotide
gugaacaccuauggauucc

SEQ ID NO: 1043806 - RNA, 19 nt, Artificial Sequence
  Description of Artificial Sequence: Synthetic oligonucleotide
auaaagccucauguuagaa

SEQ ID NO: 1043807 - RNA, 19 nt, Artificial Sequence
  Description of Artificial Sequence: Synthetic oligonucleotide
gcugacagguuccugcaug

SEQ ID NO: 1043808 - RNA, 19 nt, Artificial Sequence
  Description of Artificial Sequence: Synthetic oligonucleotide
uugcaacaacugaggaggu

SEQ ID NO: 1043809 - RNA, 19 nt, Artificial Sequence
  Description of Artificial Sequence: Synthetic oligonucleotide
ugcucacauguaugguuac

SEQ ID NO: 1043810 - RNA, 19 nt, Artificial Sequence
  Description of Artificial Sequence: Synthetic oligonucleotide
agucugagguauauggaaa

SEQ ID NO: 1043811 - RNA, 19 nt, Artificial Sequence
  Description of Artificial Sequence: Synthetic oligonucleotide
gcugugaacaccuauggau

SEQ ID NO: 1043812 - RNA, 19 nt, Artificial Sequence
  Description of Artificial Sequence: Synthetic oligonucleotide
gcaacaacugaggagguuc

SEQ ID NO: 1043813 - RNA, 19 nt, Artificial Sequence
  Description of Artificial Sequence: Synthetic oligonucleotide
cuuauacuucugccaaaca

SEQ ID NO: 1043814 - RNA, 19 nt, Artificial Sequence
  Description of Artificial Sequence: Synthetic oligonucleotide
ccaccauaacuccaaacac

SEQ ID NO: 1043815 - RNA, 19 nt, Artificial Sequence
  Description of Artificial Sequence: Synthetic oligonucleotide
accauaggcaauguaccau

SEQ ID NO: 1043816 - RNA, 19 nt, Artificial Sequence
  Description of Artificial Sequence: Synthetic oligonucleotide
ccacaaggaagcucuuugg

SEQ ID NO: 1043817 - RNA, 19 nt, Artificial Sequence
  Description of Artificial Sequence: Synthetic oligonucleotide
gacuuauacuucugccaaa

SEQ ID NO: 1043818 - RNA, 19 nt, Artificial Sequence
  Description of Artificial Sequence: Synthetic oligonucleotide
acuugaucacagugccaca

SEQ ID NO: 1043819 - RNA, 19 nt, Artificial Sequence
  Description of Artificial Sequence: Synthetic oligonucleotide
uugcauguugcaucacauu

SEQ ID NO: 1043820 - RNA, 19 nt, Artificial Sequence
  Description of Artificial Sequence: Synthetic oligonucleotide
ucccggagcgaggacacgc

SEQ ID NO: 1043821 - RNA, 19 nt, Artificial Sequence
  Description of Artificial Sequence: Synthetic oligonucleotide
ggacaaggcugacagguuc

SEQ ID NO: 1043822 - RNA, 19 nt, Artificial Sequence
  Description of Artificial Sequence: Synthetic oligonucleotide
uucccguuuuauucuuuua

SEQ ID NO: 1043823 - RNA, 19 nt, Artificial Sequence
  Description of Artificial Sequence: Synthetic oligonucleotide
auguaccauacaagcacug

SEQ ID NO: 1043824 - RNA, 19 nt, Artificial Sequence
  Description of Artificial Sequence: Synthetic oligonucleotide
ccugcgacccuucagucug

SEQ ID NO: 1043825 - RNA, 19 nt, Artificial Sequence
  Description of Artificial Sequence: Synthetic oligonucleotide
cagcuauacuuauaucaaa

SEQ ID NO: 1043826 - RNA, 19 nt, Artificial Sequence
  Description of Artificial Sequence: Synthetic oligonucleotide
cucgcacaacuucuuucug

SEQ ID NO: 1043827 - RNA, 19 nt, Artificial Sequence
  Description of Artificial Sequence: Synthetic oligonucleotide
uggacaaggcugacagguu

SEQ ID NO: 1043828 - RNA, 19 nt, Artificial Sequence
  Description of Artificial Sequence: Synthetic oligonucleotide
ucccagcuauacuuauauc

SEQ ID NO: 1043829 - RNA, 19 nt, Artificial Sequence
  Description of Artificial Sequence: Synthetic oligonucleotide
cagcguuggcuucugcuuc

SEQ ID NO: 1043830 - RNA, 19 nt, Artificial Sequence
  Description of Artificial Sequence: Synthetic oligonucleotide
aaccugauuuucacguauu

SEQ ID NO: 1043831 - RNA, 19 nt, Artificial Sequence
  Description of Artificial Sequence: Synthetic oligonucleotide
uauaucagcugugguuauu

SEQ ID NO: 1043832 - RNA, 19 nt, Artificial Sequence
  Description of Artificial Sequence: Synthetic oligonucleotide
acuauguaauuuggcuuau

SEQ ID NO: 1043833 - RNA, 19 nt, Artificial Sequence
  Description of Artificial Sequence: Synthetic oligonucleotide
gggcaucuaaguuuuaccu

SEQ ID NO: 1043834 - RNA, 19 nt, Artificial Sequence
  Description of Artificial Sequence: Synthetic oligonucleotide
  modified_base (9)..(9): a, c, u, g, unknown or other
aggcauucngggccagccu

SEQ ID NO: 1043835 - RNA, 19 nt, Artificial Sequence
  Description of Artificial Sequence: Synthetic oligonucleotide
caagcacuuugucacagcu

SEQ ID NO: 1043836 - RNA, 19 nt, Artificial Sequence
  Description of Artificial Sequence: Synthetic oligonucleotide
acaagcccugugcucggca

SEQ ID NO: 1043837 - RNA, 19 nt, Artificial Sequence
  Description of Artificial Sequence: Synthetic oligonucleotide
gcaauguaccauacaagca

SEQ ID NO: 1043838 - RNA, 19 nt, Artificial Sequence
  Description of Artificial Sequence: Synthetic oligonucleotide
aauucccguuuuauucuuu

SEQ ID NO: 1043839 - RNA, 19 nt, Artificial Sequence
  Description of Artificial Sequence: Synthetic oligonucleotide
ucacaccuauguuguccac

SEQ ID NO: 1043840 - RNA, 19 nt, Artificial Sequence
  Description of Artificial Sequence: Synthetic oligonucleotide
  modified_base (2)..(2): a, c, u, g, unknown or other
cngggccagccuaacgcug

SEQ ID NO: 1043841 - RNA, 19 nt, Artificial Sequence
  Description of Artificial Sequence: Synthetic oligonucleotide
cagaggccguggcuuagag

SEQ ID NO: 1043842 - RNA, 19 nt, Artificial Sequence
  Description of Artificial Sequence: Synthetic oligonucleotide
cugugaacaccuauggauu

SEQ ID NO: 1043843 - RNA, 19 nt, Artificial Sequence
  Description of Artificial Sequence: Synthetic oligonucleotide
gguaggacuuauacuucug

SEQ ID NO: 1043844 - RNA, 19 nt, Artificial Sequence
  Description of Artificial Sequence: Synthetic oligonucleotide
cagcuugcgcccacacggc

SEQ ID NO: 1043845 - RNA, 19 nt, Artificial Sequence
  Description of Artificial Sequence: Synthetic oligonucleotide
cccguuuuauucuuuuaca

SEQ ID NO: 1043846 - RNA, 19 nt, Artificial Sequence
  Description of Artificial Sequence: Synthetic oligonucleotide
gugcucggcacauauugcu

SEQ ID NO: 1043847 - RNA, 19 nt, Artificial Sequence
  Description of Artificial Sequence: Synthetic oligonucleotide
gaacaccuauggauuccac

SEQ ID NO: 1043848 - RNA, 19 nt, Artificial Sequence
  Description of Artificial Sequence: Synthetic oligonucleotide
aagccucauguuagaauuu

SEQ ID NO: 1043849 - RNA, 19 nt, Artificial Sequence
  Description of Artificial Sequence: Synthetic oligonucleotide
auacuugaucacagugcca

SEQ ID NO: 1043850 - RNA, 19 nt, Artificial Sequence
  Description of Artificial Sequence: Synthetic oligonucleotide
ccguuuuauucuuuuacaa

SEQ ID NO: 1043851 - RNA, 19 nt, Artificial Sequence
  Description of Artificial Sequence: Synthetic oligonucleotide
ggcucgcacaacuucuuuc

SEQ ID NO: 1043852 - RNA, 19 nt, Artificial Sequence
  Description of Artificial Sequence: Synthetic oligonucleotide
gcucggcacauauugcuca

SEQ ID NO: 1043853 - RNA, 19 nt, Artificial Sequence
  Description of Artificial Sequence: Synthetic oligonucleotide
guaagugaccagagaaaua

SEQ ID NO: 1043854 - RNA, 19 nt, Artificial Sequence
  Description of Artificial Sequence: Synthetic oligonucleotide
cacaccuauguuguccaca

SEQ ID NO: 1043855 - RNA, 19 nt, Artificial Sequence
  Description of Artificial Sequence: Synthetic oligonucleotide
auacaagcacugccaccau

SEQ ID NO: 1043856 - RNA, 19 nt, Artificial Sequence
  Description of Artificial Sequence: Synthetic oligonucleotide
ggcauaacacgaaggguga

SEQ ID NO: 1043857 - RNA, 19 nt, Artificial Sequence
  Description of Artificial Sequence: Synthetic oligonucleotide
ucuuugcauguugcaucac

SEQ ID NO: 1043858 - RNA, 19 nt, Artificial Sequence
  Description of Artificial Sequence: Synthetic oligonucleotide
gggugaggacaacccagag

SEQ ID NO: 1043859 - RNA, 19 nt, Artificial Sequence
  Description of Artificial Sequence: Synthetic oligonucleotide
ucggcacauauugcucaga

SEQ ID NO: 1043860 - RNA, 19 nt, Artificial Sequence
  Description of Artificial Sequence: Synthetic oligonucleotide
ggacacgcuccacaagcac

SEQ ID NO: 1043861 - RNA, 19 nt, Artificial Sequence
  Description of Artificial Sequence: Synthetic oligonucleotide
guaaucuugcagugacuau

SEQ ID NO: 1043862 - RNA, 19 nt, Artificial Sequence
  Description of Artificial Sequence: Synthetic oligonucleotide
  modified_base (6)..(6): a, c, u, g, unknown or other
cauucngggccagccuaac

SEQ ID NO: 1043863 - RNA, 19 nt, Artificial Sequence
  Description of Artificial Sequence: Synthetic oligonucleotide
cagggugacaaggcauaac

SEQ ID NO: 1043864 - RNA, 19 nt, Artificial Sequence
  Description of Artificial Sequence: Synthetic oligonucleotide
gcgcccacacggcagcugg

SEQ ID NO: 1043865 - RNA, 19 nt, Artificial Sequence
  Description of Artificial Sequence: Synthetic oligonucleotide
aauuugcuucaaggaccaa

SEQ ID NO: 1043866 - RNA, 19 nt, Artificial Sequence
  Description of Artificial Sequence: Synthetic oligonucleotide
aggacaacccagaggccgu

SEQ ID NO: 1043867 - RNA, 19 nt, Artificial Sequence
  Description of Artificial Sequence: Synthetic oligonucleotide
aggacacgcuccacaagca

SEQ ID NO: 1043868 - RNA, 19 nt, Artificial Sequence
  Description of Artificial Sequence: Synthetic oligonucleotide
acguucuacaaugcauguu

SEQ ID NO: 1043869 - RNA, 19 nt, Artificial Sequence
  Description of Artificial Sequence: Synthetic oligonucleotide
gggugacaaggcauaacac

SEQ ID NO: 1043870 - RNA, 19 nt, Artificial Sequence
  Description of Artificial Sequence: Synthetic oligonucleotide
ccaaacacgggaaggaggu

SEQ ID NO: 1043871 - RNA, 19 nt, Artificial Sequence
  Description of Artificial Sequence: Synthetic oligonucleotide
cacguucuacaaugcaugu

SEQ ID NO: 1043872 - RNA, 19 nt, Artificial Sequence
  Description of Artificial Sequence: Synthetic oligonucleotide
  modified_base (8)..(8): a, c, u, g, unknown or other
ggcauucngggccagccua

SEQ ID NO: 1043873 - RNA, 19 nt, Artificial Sequence
  Description of Artificial Sequence: Synthetic oligonucleotide
gcucgcacaacuucuuucu

SEQ ID NO: 1043874 - RNA, 19 nt, Artificial Sequence
  Description of Artificial Sequence: Synthetic oligonucleotide
ccuaaucugguauauguuu

SEQ ID NO: 1043875 - RNA, 19 nt, Artificial Sequence
  Description of Artificial Sequence: Synthetic oligonucleotide
caccaggaugacacaccuc

SEQ ID NO: 1043876 - RNA, 19 nt, Artificial Sequence
  Description of Artificial Sequence: Synthetic oligonucleotide
cuccagucugagguauaug

SEQ ID NO: 1043877 - RNA, 19 nt, Artificial Sequence
  Description of Artificial Sequence: Synthetic oligonucleotide
ccuaacgcugugaacaccu

SEQ ID NO: 1043878 - RNA, 19 nt, Artificial Sequence
  Description of Artificial Sequence: Synthetic oligonucleotide
caacugaggagguucuuuu

SEQ ID NO: 1043879 - RNA, 19 nt, Artificial Sequence
  Description of Artificial Sequence: Synthetic oligonucleotide
gaaggagguaggacuuaua

SEQ ID NO: 1043880 - RNA, 19 nt, Artificial Sequence
  Description of Artificial Sequence: Synthetic oligonucleotide
cauggcaauucccguuuua

SEQ ID NO: 1043881 - RNA, 19 nt, Artificial Sequence
  Description of Artificial Sequence: Synthetic oligonucleotide
cacacugggcucgcacaac

SEQ ID NO: 1043882 - RNA, 19 nt, Artificial Sequence
  Description of Artificial Sequence: Synthetic oligonucleotide
ggcaucuaaguuuuaccuu

SEQ ID NO: 1043883 - RNA, 19 nt, Artificial Sequence
  Description of Artificial Sequence: Synthetic oligonucleotide
acacggcagcuggcaagac

SEQ ID NO: 1043884 - RNA, 19 nt, Artificial Sequence
  Description of Artificial Sequence: Synthetic oligonucleotide
acacaccucuuugcaucug

SEQ ID NO: 1043885 - RNA, 19 nt, Artificial Sequence
  Description of Artificial Sequence: Synthetic oligonucleotide
ccagccuaacgcugugaac

SEQ ID NO: 1043886 - RNA, 19 nt, Artificial Sequence
  Description of Artificial Sequence: Synthetic oligonucleotide
cuaacgcugugaacaccua

SEQ ID NO: 1043887 - RNA, 19 nt, Artificial Sequence
  Description of Artificial Sequence: Synthetic oligonucleotide
cggagcgaggacacgcucc

SEQ ID NO: 1043888 - RNA, 19 nt, Artificial Sequence
  Description of Artificial Sequence: Synthetic oligonucleotide
gccagccuaacgcugugaa

SEQ ID NO: 1043889 - RNA, 19 nt, Artificial Sequence
  Description of Artificial Sequence: Synthetic oligonucleotide
caguuucuauagccacaca

SEQ ID NO: 1043890 - RNA, 19 nt, Artificial Sequence
  Description of Artificial Sequence: Synthetic oligonucleotide
cacaagcccugugcucggc

SEQ ID NO: 1043891 - RNA, 19 nt, Artificial Sequence
  Description of Artificial Sequence: Synthetic oligonucleotide
ccacauagaggcuuguaau

SEQ ID NO: 1043892 - RNA, 19 nt, Artificial Sequence
  Description of Artificial Sequence: Synthetic oligonucleotide
caccuauggauuccacacu

SEQ ID NO: 1043893 - RNA, 19 nt, Artificial Sequence
  Description of Artificial Sequence: Synthetic oligonucleotide
aucccuguugcugcacaua

SEQ ID NO: 1043894 - RNA, 19 nt, Artificial Sequence
  Description of Artificial Sequence: Synthetic oligonucleotide
guucccagcuauacuuaua

SEQ ID NO: 1043895 - RNA, 19 nt, Artificial Sequence
  Description of Artificial Sequence: Synthetic oligonucleotide
gcgaggacacgcuccacaa

SEQ ID NO: 1043896 - RNA, 19 nt, Artificial Sequence
  Description of Artificial Sequence: Synthetic oligonucleotide
caauucccguuuuauucuu

SEQ ID NO: 1043897 - RNA, 19 nt, Artificial Sequence
  Description of Artificial Sequence: Synthetic oligonucleotide
cccaguaagugaccagaga

SEQ ID NO: 1043898 - RNA, 19 nt, Artificial Sequence
  Description of Artificial Sequence: Synthetic oligonucleotide
caccuauguuguccacaga

SEQ ID NO: 1043899 - RNA, 19 nt, Artificial Sequence
  Description of Artificial Sequence: Synthetic oligonucleotide
  modified_base (11)..(11): a, c, u, g, unknown or other
ggaggcauucngggccagc

SEQ ID NO: 1043900 - RNA, 19 nt, Artificial Sequence
  Description of Artificial Sequence: Synthetic oligonucleotide
  modified_base (7)..(7): a, c, u, g, unknown or other
gcauucngggccagccuaa

SEQ ID NO: 1043901 - RNA, 19 nt, Artificial Sequence
  Description of Artificial Sequence: Synthetic oligonucleotide
gagcgaggacacgcuccac

SEQ ID NO: 1043902 - RNA, 19 nt, Artificial Sequence
  Description of Artificial Sequence: Synthetic oligonucleotide
ugcgacccuucagucuguu

SEQ ID NO: 1043903 - RNA, 19 nt, Artificial Sequence
  Description of Artificial Sequence: Synthetic oligonucleotide
gccguggcuuagagcaucc

SEQ ID NO: 1043904 - RNA, 19 nt, Artificial Sequence
  Description of Artificial Sequence: Synthetic oligonucleotide
ggccguggcuuagagcauc

SEQ ID NO: 1043905 - RNA, 19 nt, Artificial Sequence
  Description of Artificial Sequence: Synthetic oligonucleotide
gguuaccacauggcagugu

SEQ ID NO: 1043906 - RNA, 19 nt, Artificial Sequence
  Description of Artificial Sequence: Synthetic oligonucleotide
cuauguaauuuggcuuauu

SEQ ID NO: 1043907 - RNA, 19 nt, Artificial Sequence
  Description of Artificial Sequence: Synthetic oligonucleotide
ccggagcgaggacacgcuc

SEQ ID NO: 1043908 - RNA, 19 nt, Artificial Sequence
  Description of Artificial Sequence: Synthetic oligonucleotide
aggccguggcuuagagcau

SEQ ID NO: 1043909 - RNA, 19 nt, Artificial Sequence
  Description of Artificial Sequence: Synthetic oligonucleotide
ccacaccauaggcaaugua

SEQ ID NO: 1043910 - RNA, 19 nt, Artificial Sequence
  Description of Artificial Sequence: Synthetic oligonucleotide
cugcgacccuucagucugu

SEQ ID NO: 1043911 - RNA, 19 nt, Artificial Sequence
  Description of Artificial Sequence: Synthetic oligonucleotide
ggcugacagguuccugcau

SEQ ID NO: 1043912 - RNA, 19 nt, Artificial Sequence
  Description of Artificial Sequence: Synthetic oligonucleotide
cacgcuccacaagcaccaa

SEQ ID NO: 1043913 - RNA, 19 nt, Artificial Sequence
  Description of Artificial Sequence: Synthetic oligonucleotide
gcauggcaauucccguuuu

SEQ ID NO: 1043914 - RNA, 19 nt, Artificial Sequence
  Description of Artificial Sequence: Synthetic oligonucleotide
cccggagcgaggacacgcu

SEQ ID NO: 1043915 - RNA, 19 nt, Artificial Sequence
  Description of Artificial Sequence: Synthetic oligonucleotide
ccgcuucauuucuuugcau

SEQ ID NO: 1043916 - RNA, 19 nt, Artificial Sequence
  Description of Artificial Sequence: Synthetic oligonucleotide
gcgacccuucagucuguuu

SEQ ID NO: 1043917 - RNA, 19 nt, Artificial Sequence
  Description of Artificial Sequence: Synthetic oligonucleotide
ccguggcuuagagcauccu

SEQ ID NO: 1043918 - RNA, 19 nt, Artificial Sequence
  Description of Artificial Sequence: Synthetic oligonucleotide
ucuaagaacauucuggaag

SEQ ID NO: 1043919 - RNA, 19 nt, Artificial Sequence
  Description of Artificial Sequence: Synthetic oligonucleotide
cacuaggucaucaagaugg

SEQ ID NO: 1043920 - RNA, 19 nt, Artificial Sequence
  Description of Artificial Sequence: Synthetic oligonucleotide
aagaugacacccuggaacg

SEQ ID NO: 1043921 - RNA, 19 nt, Artificial Sequence
  Description of Artificial Sequence: Synthetic oligonucleotide
guuuauuccaguuggguag

SEQ ID NO: 1043922 - RNA, 19 nt, Artificial Sequence
  Description of Artificial Sequence: Synthetic oligonucleotide
aggaugucuguuaagaucc

SEQ ID NO: 1043923 - RNA, 19 nt, Artificial Sequence
  Description of Artificial Sequence: Synthetic oligonucleotide
acaaguaguaacuauggga

SEQ ID NO: 1043924 - RNA, 19 nt, Artificial Sequence
  Description of Artificial Sequence: Synthetic oligonucleotide
aucaagauggguuucuguc

SEQ ID NO: 1043925 - RNA, 19 nt, Artificial Sequence
  Description of Artificial Sequence: Synthetic oligonucleotide
ugugcauagagaaggaagu

SEQ ID NO: 1043926 - RNA, 19 nt, Artificial Sequence
  Description of Artificial Sequence: Synthetic oligonucleotide
acaacugaauucugcgucc

SEQ ID NO: 1043927 - RNA, 19 nt, Artificial Sequence
  Description of Artificial Sequence: Synthetic oligonucleotide
cugccuaaaaccuuccugg

SEQ ID NO: 1043928 - RNA, 19 nt, Artificial Sequence
  Description of Artificial Sequence: Synthetic oligonucleotide
agagaaggaaguuuccguc

SEQ ID NO: 1043929 - RNA, 19 nt, Artificial Sequence
  Description of Artificial Sequence: Synthetic oligonucleotide
cucuaugaccucuuggugg

SEQ ID NO: 1043930 - RNA, 19 nt, Artificial Sequence
  Description of Artificial Sequence: Synthetic oligonucleotide
accagcucaacacagacca

SEQ ID NO: 1043931 - RNA, 19 nt, Artificial Sequence
  Description of Artificial Sequence: Synthetic oligonucleotide
uccacugucguccucucgg

SEQ ID NO: 1043932 - RNA, 19 nt, Artificial Sequence
  Description of Artificial Sequence: Synthetic oligonucleotide
aagaggacgaggcacuuca

SEQ ID NO: 1043933 - RNA, 19 nt, Artificial Sequence
  Description of Artificial Sequence: Synthetic oligonucleotide
ucugccuaaaaccuuccug

SEQ ID NO: 1043934 - RNA, 19 nt, Artificial Sequence
  Description of Artificial Sequence: Synthetic oligonucleotide
guaacuaugggagaacaag

SEQ ID NO: 1043935 - RNA, 19 nt, Artificial Sequence
  Description of Artificial Sequence: Synthetic oligonucleotide
ucuugagagccucguaacg

SEQ ID NO: 1043936 - RNA, 19 nt, Artificial Sequence
  Description of Artificial Sequence: Synthetic oligonucleotide
uuaagauccgaugcagugg

SEQ ID NO: 1043937 - RNA, 19 nt, Artificial Sequence
  Description of Artificial Sequence: Synthetic oligonucleotide
ugggauuucaaccccggcc

SEQ ID NO: 1043938 - RNA, 19 nt, Artificial Sequence
  Description of Artificial Sequence: Synthetic oligonucleotide
uuuccgucagcucuguuca

SEQ ID NO: 1043939 - RNA, 19 nt, Artificial Sequence
  Description of Artificial Sequence: Synthetic oligonucleotide
uuguagaagccaaaugaca

SEQ ID NO: 1043940 - RNA, 19 nt, Artificial Sequence
  Description of Artificial Sequence: Synthetic oligonucleotide
cuuguagaagccaaaugac

SEQ ID NO: 1043941 - RNA, 19 nt, Artificial Sequence
  Description of Artificial Sequence: Synthetic oligonucleotide
guucauauccccugacucg

SEQ ID NO: 1043942 - RNA, 19 nt, Artificial Sequence
  Description of Artificial Sequence: Synthetic oligonucleotide
aggucuaagaacauucugg

SEQ ID NO: 1043943 - RNA, 19 nt, Artificial Sequence
  Description of Artificial Sequence: Synthetic oligonucleotide
guuaagauccgaugcagug

SEQ ID NO: 1043944 - RNA, 19 nt, Artificial Sequence
  Description of Artificial Sequence: Synthetic oligonucleotide
ucccaauuccuucacaacu

SEQ ID NO: 1043945 - RNA, 19 nt, Artificial Sequence
  Description of Artificial Sequence: Synthetic oligonucleotide
ucuaugaccucuugguggc

SEQ ID NO: 1043946 - RNA, 19 nt, Artificial Sequence
  Description of Artificial Sequence: Synthetic oligonucleotide
gagucugacacccauucug

SEQ ID NO: 1043947 - RNA, 19 nt, Artificial Sequence
  Description of Artificial Sequence: Synthetic oligonucleotide
gucuguuaagauccgaugc

SEQ ID NO: 1043948 - RNA, 19 nt, Artificial Sequence
  Description of Artificial Sequence: Synthetic oligonucleotide
acagguaggcacuuggcag

SEQ ID NO: 1043949 - RNA, 19 nt, Artificial Sequence
  Description of Artificial Sequence: Synthetic oligonucleotide
uuccccuacagucauguca

SEQ ID NO: 1043950 - RNA, 19 nt, Artificial Sequence
  Description of Artificial Sequence: Synthetic oligonucleotide
agcuagagcacacugccag

SEQ ID NO: 1043951 - RNA, 19 nt, Artificial Sequence
  Description of Artificial Sequence: Synthetic oligonucleotide
ugucauacaccuucuugag

SEQ ID NO: 1043952 - RNA, 19 nt, Artificial Sequence
  Description of Artificial Sequence: Synthetic oligonucleotide
auagagaaggaaguuuccg

SEQ ID NO: 1043953 - RNA, 19 nt, Artificial Sequence
  Description of Artificial Sequence: Synthetic oligonucleotide
agagccucguaacggaugg

SEQ ID NO: 1043954 - RNA, 19 nt, Artificial Sequence
  Description of Artificial Sequence: Synthetic oligonucleotide
ucaguacugcauuacaaaa

SEQ ID NO: 1043955 - RNA, 19 nt, Artificial Sequence
  Description of Artificial Sequence: Synthetic oligonucleotide
uacuuguagaagccaaaug

SEQ ID NO: 1043956 - RNA, 19 nt, Artificial Sequence
  Description of Artificial Sequence: Synthetic oligonucleotide
cacugcaacaaguaguaac

SEQ ID NO: 1043957 - RNA, 19 nt, Artificial Sequence
  Description of Artificial Sequence: Synthetic oligonucleotide
ugucuguuaagauccgaug

SEQ ID NO: 1043958 - RNA, 19 nt, Artificial Sequence
  Description of Artificial Sequence: Synthetic oligonucleotide
ugucgaacuuccaggaugu

SEQ ID NO: 1043959 - RNA, 19 nt, Artificial Sequence
  Description of Artificial Sequence: Synthetic oligonucleotide
ucuuuggauggaagcaaag

SEQ ID NO: 1043960 - RNA, 19 nt, Artificial Sequence
  Description of Artificial Sequence: Synthetic oligonucleotide
uagagaaggaaguuuccgu

SEQ ID NO: 1043961 - RNA, 19 nt, Artificial Sequence
  Description of Artificial Sequence: Synthetic oligonucleotide
acucucuaugaccucuugg

SEQ ID NO: 1043962 - RNA, 19 nt, Artificial Sequence
  Description of Artificial Sequence: Synthetic oligonucleotide
guagacacacggcugacug

SEQ ID NO: 1043963 - RNA, 19 nt, Artificial Sequence
  Description of Artificial Sequence: Synthetic oligonucleotide
gaacguguugguuuuguca

SEQ ID NO: 1043964 - RNA, 19 nt, Artificial Sequence
  Description of Artificial Sequence: Synthetic oligonucleotide
ugacauaggucaagugugc

SEQ ID NO: 1043965 - RNA, 19 nt, Artificial Sequence
  Description of Artificial Sequence: Synthetic oligonucleotide
ucucuaugaccucuuggug

SEQ ID NO: 1043966 - RNA, 19 nt, Artificial Sequence
  Description of Artificial Sequence: Synthetic oligonucleotide
cuugagagccucguaacgg

SEQ ID NO: 1043967 - RNA, 19 nt, Artificial Sequence
  Description of Artificial Sequence: Synthetic oligonucleotide
aggaggucuaagaacauuc

SEQ ID NO: 1043968 - RNA, 19 nt, Artificial Sequence
  Description of Artificial Sequence: Synthetic oligonucleotide
cauagagaaggaaguuucc

SEQ ID NO: 1043969 - RNA, 19 nt, Artificial Sequence
  Description of Artificial Sequence: Synthetic oligonucleotide
agcuggaacccacugcaac

SEQ ID NO: 1043970 - RNA, 19 nt, Artificial Sequence
  Description of Artificial Sequence: Synthetic oligonucleotide
ugaaguucgucaguacugc

SEQ ID NO: 1043971 - RNA, 19 nt, Artificial Sequence
  Description of Artificial Sequence: Synthetic oligonucleotide
uguauaggauguguggaca

SEQ ID NO: 1043972 - RNA, 19 nt, Artificial Sequence
  Description of Artificial Sequence: Synthetic oligonucleotide
aguuuauuccaguugggua

SEQ ID NO: 1043973 - RNA, 19 nt, Artificial Sequence
  Description of Artificial Sequence: Synthetic oligonucleotide
ggaggucucagcuagagca

SEQ ID NO: 1043974 - RNA, 19 nt, Artificial Sequence
  Description of Artificial Sequence: Synthetic oligonucleotide
uccccugacucgcagcugg

SEQ ID NO: 1043975 - RNA, 19 nt, Artificial Sequence
  Description of Artificial Sequence: Synthetic oligonucleotide
gugacauaggucaagugug

SEQ ID NO: 1043976 - RNA, 19 nt, Artificial Sequence
  Description of Artificial Sequence: Synthetic oligonucleotide
cugacucgcagcuggaacc

SEQ ID NO: 1043977 - RNA, 19 nt, Artificial Sequence
  Description of Artificial Sequence: Synthetic oligonucleotide
gacgaggcacuucaguuug

SEQ ID NO: 1043978 - RNA, 19 nt, Artificial Sequence
  Description of Artificial Sequence: Synthetic oligonucleotide
agacauucccuccccuccc

SEQ ID NO: 1043979 - RNA, 19 nt, Artificial Sequence
  Description of Artificial Sequence: Synthetic oligonucleotide
gaggucuaagaacauucug

SEQ ID NO: 1043980 - RNA, 19 nt, Artificial Sequence
  Description of Artificial Sequence: Synthetic oligonucleotide
acucacgcgguugucauac

SEQ ID NO: 1043981 - RNA, 19 nt, Artificial Sequence
  Description of Artificial Sequence: Synthetic oligonucleotide
cacaacugaauucugcguc

SEQ ID NO: 1043982 - RNA, 19 nt, Artificial Sequence
  Description of Artificial Sequence: Synthetic oligonucleotide
uggagucugacacccauuc

SEQ ID NO: 1043983 - RNA, 19 nt, Artificial Sequence
  Description of Artificial Sequence: Synthetic oligonucleotide
ugccuaaaaccuuccuggg

SEQ ID NO: 1043984 - RNA, 19 nt, Artificial Sequence
  Description of Artificial Sequence: Synthetic oligonucleotide
guauaggauguguggacag

SEQ ID NO: 1043985 - RNA, 19 nt, Artificial Sequence
  Description of Artificial Sequence: Synthetic oligonucleotide
ggacacuaaacccagcagc

SEQ ID NO: 1043986 - RNA, 19 nt, Artificial Sequence
  Description of Artificial Sequence: Synthetic oligonucleotide
acucaugagcugaaguucg

SEQ ID NO: 1043987 - RNA, 19 nt, Artificial Sequence
  Description of Artificial Sequence: Synthetic oligonucleotide
auauccccugacucgcagc

SEQ ID NO: 1043988 - RNA, 19 nt, Artificial Sequence
  Description of Artificial Sequence: Synthetic oligonucleotide
acaguucauauccccugac

SEQ ID NO: 1043989 - RNA, 19 nt, Artificial Sequence
  Description of Artificial Sequence: Synthetic oligonucleotide
uggacaguagccuggcaca

SEQ ID NO: 1043990 - RNA, 19 nt, Artificial Sequence
  Description of Artificial Sequence: Synthetic oligonucleotide
uccucuugagggaugggga

SEQ ID NO: 1043991 - RNA, 19 nt, Artificial Sequence
  Description of Artificial Sequence: Synthetic oligonucleotide
aguaguaacuaugggagaa

SEQ ID NO: 1043992 - RNA, 19 nt, Artificial Sequence
  Description of Artificial Sequence: Synthetic oligonucleotide
cucagcuagagcacacugc

SEQ ID NO: 1043993 - RNA, 19 nt, Artificial Sequence
  Description of Artificial Sequence: Synthetic oligonucleotide
agucgaguggcccugccug

SEQ ID NO: 1043994 - RNA, 19 nt, Artificial Sequence
  Description of Artificial Sequence: Synthetic oligonucleotide
agccuagucugcucucugc

SEQ ID NO: 1043995 - RNA, 19 nt, Artificial Sequence
  Description of Artificial Sequence: Synthetic oligonucleotide
ucacaacugaauucugcgu

SEQ ID NO: 1043996 - RNA, 19 nt, Artificial Sequence
  Description of Artificial Sequence: Synthetic oligonucleotide
uucugcgucccuccagccg

SEQ ID NO: 1043997 - RNA, 19 nt, Artificial Sequence
  Description of Artificial Sequence: Synthetic oligonucleotide
guuuccgucagcucuguuc

SEQ ID NO: 1043998 - RNA, 19 nt, Artificial Sequence
  Description of Artificial Sequence: Synthetic oligonucleotide
accaaggacaaugugggcu

SEQ ID NO: 1043999 - RNA, 19 nt, Artificial Sequence
  Description of Artificial Sequence: Synthetic oligonucleotide
cugacacaggacaucucgg

SEQ ID NO: 1044000 - RNA, 19 nt, Artificial Sequence
  Description of Artificial Sequence: Synthetic oligonucleotide
uccgaggcuaccuuccucu

SEQ ID NO: 1044001 - RNA, 19 nt, Artificial Sequence
  Description of Artificial Sequence: Synthetic oligonucleotide
ccaccaaggacaauguggg

SEQ ID NO: 1044002 - RNA, 19 nt, Artificial Sequence
  Description of Artificial Sequence: Synthetic oligonucleotide
ugggagaacaagucaggac

SEQ ID NO: 1044003 - RNA, 19 nt, Artificial Sequence
  Description of Artificial Sequence: Synthetic oligonucleotide
gggauuucaaccccggccc

SEQ ID NO: 1044004 - RNA, 19 nt, Artificial Sequence
  Description of Artificial Sequence: Synthetic oligonucleotide
uucuuuggauggaagcaaa

SEQ ID NO: 1044005 - RNA, 19 nt, Artificial Sequence
  Description of Artificial Sequence: Synthetic oligonucleotide
gauccgaugcaguggcaag

SEQ ID NO: 1044006 - RNA, 19 nt, Artificial Sequence
  Description of Artificial Sequence: Synthetic oligonucleotide
cugucauuggccgagugug

SEQ ID NO: 1044007 - RNA, 19 nt, Artificial Sequence
  Description of Artificial Sequence: Synthetic oligonucleotide
ucgucaguacugcauuaca

SEQ ID NO: 1044008 - RNA, 19 nt, Artificial Sequence
  Description of Artificial Sequence: Synthetic oligonucleotide
gaauucugcgucccuccag

SEQ ID NO: 1044009 - RNA, 19 nt, Artificial Sequence
  Description of Artificial Sequence: Synthetic oligonucleotide
cauucgagccgccacacuc

SEQ ID NO: 1044010 - RNA, 19 nt, Artificial Sequence
  Description of Artificial Sequence: Synthetic oligonucleotide
uauuccaguuggguagagg

SEQ ID NO: 1044011 - RNA, 19 nt, Artificial Sequence
  Description of Artificial Sequence: Synthetic oligonucleotide
guggacaguagccuggcac

SEQ ID NO: 1044012 - RNA, 19 nt, Artificial Sequence
  Description of Artificial Sequence: Synthetic oligonucleotide
uuucgcuccggggugggcg

SEQ ID NO: 1044013 - RNA, 19 nt, Artificial Sequence
  Description of Artificial Sequence: Synthetic oligonucleotide
gaugcaguggcaaggugac

SEQ ID NO: 1044014 - RNA, 19 nt, Artificial Sequence
  Description of Artificial Sequence: Synthetic oligonucleotide
ggcgguguucuuuggaugg

SEQ ID NO: 1044015 - RNA, 19 nt, Artificial Sequence
  Description of Artificial Sequence: Synthetic oligonucleotide
uuuauuccaguuggguaga

SEQ ID NO: 1044016 - RNA, 19 nt, Artificial Sequence
  Description of Artificial Sequence: Synthetic oligonucleotide
gacacccauucugagcugg

SEQ ID NO: 1044017 - RNA, 19 nt, Artificial Sequence
  Description of Artificial Sequence: Synthetic oligonucleotide
guuguuucgcuccggggug

SEQ ID NO: 1044018 - RNA, 19 nt, Artificial Sequence
  Description of Artificial Sequence: Synthetic oligonucleotide
acugucauuggccgagugu

SEQ ID NO: 1044019 - RNA, 19 nt, Artificial Sequence
  Description of Artificial Sequence: Synthetic oligonucleotide
gacucaugagcugaaguuc

SEQ ID NO: 1044020 - RNA, 19 nt, Artificial Sequence
  Description of Artificial Sequence: Synthetic oligonucleotide
gcaacaaguaguaacuaug

SEQ ID NO: 1044021 - RNA, 19 nt, Artificial Sequence
  Description of Artificial Sequence: Synthetic oligonucleotide
aacggauggagcccugaaa

SEQ ID NO: 1044022 - RNA, 19 nt, Artificial Sequence
  Description of Artificial Sequence: Synthetic oligonucleotide
acgcgguugucauacaccu

SEQ ID NO: 1044023 - RNA, 19 nt, Artificial Sequence
  Description of Artificial Sequence: Synthetic oligonucleotide
augcuaaccaaagcauggg

SEQ ID NO: 1044024 - RNA, 19 nt, Artificial Sequence
  Description of Artificial Sequence: Synthetic oligonucleotide
ggucuaagaacauucugga

SEQ ID NO: 1044025 - RNA, 19 nt, Artificial Sequence
  Description of Artificial Sequence: Synthetic oligonucleotide
ugcuaaaggaggucacccu

SEQ ID NO: 1044026 - RNA, 19 nt, Artificial Sequence
  Description of Artificial Sequence: Synthetic oligonucleotide
cauggagucggcccuggcc

SEQ ID NO: 1044027 - RNA, 19 nt, Artificial Sequence
  Description of Artificial Sequence: Synthetic oligonucleotide
aguucgucaguacugcauu

SEQ ID NO: 1044028 - RNA, 19 nt, Artificial Sequence
  Description of Artificial Sequence: Synthetic oligonucleotide
gaggucaggaggucuaaga

SEQ ID NO: 1044029 - RNA, 19 nt, Artificial Sequence
  Description of Artificial Sequence: Synthetic oligonucleotide
gagaccgcagguugguggc

SEQ ID NO: 1044030 - RNA, 19 nt, Artificial Sequence
  Description of Artificial Sequence: Synthetic oligonucleotide
ucgaacuuccaggaugucu

SEQ ID NO: 1044031 - RNA, 19 nt, Artificial Sequence
  Description of Artificial Sequence: Synthetic oligonucleotide
aaaggaggucacccucuca

SEQ ID NO: 1044032 - RNA, 19 nt, Artificial Sequence
  Description of Artificial Sequence: Synthetic oligonucleotide
cacgcgguugucauacacc

SEQ ID NO: 1044033 - RNA, 19 nt, Artificial Sequence
  Description of Artificial Sequence: Synthetic oligonucleotide
aggagggccgguuguuucg

SEQ ID NO: 1044034 - RNA, 19 nt, Artificial Sequence
  Description of Artificial Sequence: Synthetic oligonucleotide
acacacuaggucaucaaga

SEQ ID NO: 1044035 - RNA, 19 nt, Artificial Sequence
  Description of Artificial Sequence: Synthetic oligonucleotide
cauacaccuucuugagagc

SEQ ID NO: 1044036 - RNA, 19 nt, Artificial Sequence
  Description of Artificial Sequence: Synthetic oligonucleotide
ugggcggggugcuaaagga

SEQ ID NO: 1044037 - RNA, 19 nt, Artificial Sequence
  Description of Artificial Sequence: Synthetic oligonucleotide
aacugaauucugcgucccu

SEQ ID NO: 1044038 - RNA, 19 nt, Artificial Sequence
  Description of Artificial Sequence: Synthetic oligonucleotide
ucacgcgguugucauacac

SEQ ID NO: 1044039 - RNA, 19 nt, Artificial Sequence
  Description of Artificial Sequence: Synthetic oligonucleotide
acauaggucaagugugcau

SEQ ID NO: 1044040 - RNA, 19 nt, Artificial Sequence
  Description of Artificial Sequence: Synthetic oligonucleotide
ccucguaacggauggagcc

SEQ ID NO: 1044041 - RNA, 19 nt, Artificial Sequence
  Description of Artificial Sequence: Synthetic oligonucleotide
ucagacauucccuccccuc

SEQ ID NO: 1044042 - RNA, 19 nt, Artificial Sequence
  Description of Artificial Sequence: Synthetic oligonucleotide
aggacugacucaugagcug

SEQ ID NO: 1044043 - RNA, 19 nt, Artificial Sequence
  Description of Artificial Sequence: Synthetic oligonucleotide
cacccucucaugcaugggc

SEQ ID NO: 1044044 - RNA, 19 nt, Artificial Sequence
  Description of Artificial Sequence: Synthetic oligonucleotide
uaaaggaggucacccucuc

SEQ ID NO: 1044045 - RNA, 19 nt, Artificial Sequence
  Description of Artificial Sequence: Synthetic oligonucleotide
ugucauuggccgaguguga

SEQ ID NO: 1044046 - RNA, 19 nt, Artificial Sequence
  Description of Artificial Sequence: Synthetic oligonucleotide
aaggacaaugugggcucac

SEQ ID NO: 1044047 - RNA, 19 nt, Artificial Sequence
  Description of Artificial Sequence: Synthetic oligonucleotide
ucucaugcaugggcgaagc

SEQ ID NO: 1044048 - RNA, 19 nt, Artificial Sequence
  Description of Artificial Sequence: Synthetic oligonucleotide
gaggaggucucagcuagag

SEQ ID NO: 1044049 - RNA, 19 nt, Artificial Sequence
  Description of Artificial Sequence: Synthetic oligonucleotide
ggcacuucaguuugggcug

SEQ ID NO: 1044050 - RNA, 19 nt, Artificial Sequence
  Description of Artificial Sequence: Synthetic oligonucleotide
aaguucgucaguacugcau

SEQ ID NO: 1044051 - RNA, 19 nt, Artificial Sequence
  Description of Artificial Sequence: Synthetic oligonucleotide
ugaggccccuucaugcgca

SEQ ID NO: 1044052 - RNA, 19 nt, Artificial Sequence
  Description of Artificial Sequence: Synthetic oligonucleotide
uggaacccacugcaacaag

SEQ ID NO: 1044053 - RNA, 19 nt, Artificial Sequence
  Description of Artificial Sequence: Synthetic oligonucleotide
uagacacacggcugacugc

SEQ ID NO: 1044054 - RNA, 19 nt, Artificial Sequence
  Description of Artificial Sequence: Synthetic oligonucleotide
ucccagccgacaaacaguu

SEQ ID NO: 1044055 - RNA, 19 nt, Artificial Sequence
  Description of Artificial Sequence: Synthetic oligonucleotide
uucgucaguacugcauuac

SEQ ID NO: 1044056 - RNA, 19 nt, Artificial Sequence
  Description of Artificial Sequence: Synthetic oligonucleotide
caucagacauucccucccc

SEQ ID NO: 1044057 - RNA, 19 nt, Artificial Sequence
  Description of Artificial Sequence: Synthetic oligonucleotide
uucugccuaaaaccuuccu

SEQ ID NO: 1044058 - RNA, 19 nt, Artificial Sequence
  Description of Artificial Sequence: Synthetic oligonucleotide
agccgagacugacacagga

SEQ ID NO: 1044059 - RNA, 19 nt, Artificial Sequence
  Description of Artificial Sequence: Synthetic oligonucleotide
caagauggguuucugucga

SEQ ID NO: 1044060 - RNA, 19 nt, Artificial Sequence
  Description of Artificial Sequence: Synthetic oligonucleotide
cagagugagccuugggcug

SEQ ID NO: 1044061 - RNA, 19 nt, Artificial Sequence
  Description of Artificial Sequence: Synthetic oligonucleotide
guauucccagccgacaaac

SEQ ID NO: 1044062 - RNA, 19 nt, Artificial Sequence
  Description of Artificial Sequence: Synthetic oligonucleotide
cugacacccauucugagcu

SEQ ID NO: 1044063 - RNA, 19 nt, Artificial Sequence
  Description of Artificial Sequence: Synthetic oligonucleotide
uguuggcgguguucuuugg

SEQ ID NO: 1044064 - RNA, 19 nt, Artificial Sequence
  Description of Artificial Sequence: Synthetic oligonucleotide
agguauucccagccgacaa

SEQ ID NO: 1044065 - RNA, 19 nt, Artificial Sequence
  Description of Artificial Sequence: Synthetic oligonucleotide
agccucguaacggauggag

SEQ ID NO: 1044066 - RNA, 19 nt, Artificial Sequence
  Description of Artificial Sequence: Synthetic oligonucleotide
cauauccccugacucgcag

SEQ ID NO: 1044067 - RNA, 19 nt, Artificial Sequence
  Description of Artificial Sequence: Synthetic oligonucleotide
cucccaauuccuucacaac

SEQ ID NO: 1044068 - RNA, 19 nt, Artificial Sequence
  Description of Artificial Sequence: Synthetic oligonucleotide
uggcgguguucuuuggaug

SEQ ID NO: 1044069 - RNA, 19 nt, Artificial Sequence
  Description of Artificial Sequence: Synthetic oligonucleotide
cuugccuugaggccccuuc

SEQ ID NO: 1044070 - RNA, 19 nt, Artificial Sequence
  Description of Artificial Sequence: Synthetic oligonucleotide
uaagaacauucuggaagcu

SEQ ID NO: 1044071 - RNA, 19 nt, Artificial Sequence
  Description of Artificial Sequence: Synthetic oligonucleotide
agcaugcuaaccaaagcau

SEQ ID NO: 1044072 - RNA, 19 nt, Artificial Sequence
  Description of Artificial Sequence: Synthetic oligonucleotide
ugacucgcagcuggaaccc

SEQ ID NO: 1044073 - RNA, 19 nt, Artificial Sequence
  Description of Artificial Sequence: Synthetic oligonucleotide
uaacggauggagcccugaa

SEQ ID NO: 1044074 - RNA, 19 nt, Artificial Sequence
  Description of Artificial Sequence: Synthetic oligonucleotide
uucgcuccggggugggcgg

SEQ ID NO: 1044075 - RNA, 19 nt, Artificial Sequence
  Description of Artificial Sequence: Synthetic oligonucleotide
cucguaacggauggagccc

SEQ ID NO: 1044076 - RNA, 19 nt, Artificial Sequence
  Description of Artificial Sequence: Synthetic oligonucleotide
gcgguugucauacaccuuc

SEQ ID NO: 1044077 - RNA, 19 nt, Artificial Sequence
  Description of Artificial Sequence: Synthetic oligonucleotide
acccacugcaacaaguagu

SEQ ID NO: 1044078 - RNA, 19 nt, Artificial Sequence
  Description of Artificial Sequence: Synthetic oligonucleotide
gaaguucgucaguacugca

SEQ ID NO: 1044079 - RNA, 19 nt, Artificial Sequence
  Description of Artificial Sequence: Synthetic oligonucleotide
guaguaacuaugggagaac

SEQ ID NO: 1044080 - RNA, 19 nt, Artificial Sequence
  Description of Artificial Sequence: Synthetic oligonucleotide
uuguuucgcuccggggugg

SEQ ID NO: 1044081 - RNA, 19 nt, Artificial Sequence
  Description of Artificial Sequence: Synthetic oligonucleotide
ucggguuggaggugugugu

SEQ ID NO: 1044082 - RNA, 19 nt, Artificial Sequence
  Description of Artificial Sequence: Synthetic oligonucleotide
ucauauccccugacucgca

SEQ ID NO: 1044083 - RNA, 19 nt, Artificial Sequence
  Description of Artificial Sequence: Synthetic oligonucleotide
ugagagccucguaacggau

SEQ ID NO: 1044084 - RNA, 19 nt, Artificial Sequence
  Description of Artificial Sequence: Synthetic oligonucleotide
ugguuuugucacuggccac

SEQ ID NO: 1044085 - RNA, 19 nt, Artificial Sequence
  Description of Artificial Sequence: Synthetic oligonucleotide
caggucggcuccacugucg

SEQ ID NO: 1044086 - RNA, 19 nt, Artificial Sequence
  Description of Artificial Sequence: Synthetic oligonucleotide
agcagccuagucugcucuc

SEQ ID NO: 1044087 - RNA, 19 nt, Artificial Sequence
  Description of Artificial Sequence: Synthetic oligonucleotide
ccagccgagacugacacag

SEQ ID NO: 1044088 - RNA, 19 nt, Artificial Sequence
  Description of Artificial Sequence: Synthetic oligonucleotide
agggccgguuguuucgcuc

SEQ ID NO: 1044089 - RNA, 19 nt, Artificial Sequence
  Description of Artificial Sequence: Synthetic oligonucleotide
gagacugacacaggacauc

SEQ ID NO: 1044090 - RNA, 19 nt, Artificial Sequence
  Description of Artificial Sequence: Synthetic oligonucleotide
accaguagacacacggcug

SEQ ID NO: 1044091 - RNA, 19 nt, Artificial Sequence
  Description of Artificial Sequence: Synthetic oligonucleotide
auaggauguguggacagua

SEQ ID NO: 1044092 - RNA, 19 nt, Artificial Sequence
  Description of Artificial Sequence: Synthetic oligonucleotide
gcuaaaggaggucacccuc

SEQ ID NO: 1044093 - RNA, 19 nt, Artificial Sequence
  Description of Artificial Sequence: Synthetic oligonucleotide
guggcggugacagguaggc

SEQ ID NO: 1044094 - RNA, 19 nt, Artificial Sequence
  Description of Artificial Sequence: Synthetic oligonucleotide
uuauuccaguuggguagag

SEQ ID NO: 1044095 - RNA, 19 nt, Artificial Sequence
  Description of Artificial Sequence: Synthetic oligonucleotide
gacauaggucaagugugca

SEQ ID NO: 1044096 - RNA, 19 nt, Artificial Sequence
  Description of Artificial Sequence: Synthetic oligonucleotide
ggacgugucaccaguagac

SEQ ID NO: 1044097 - RNA, 19 nt, Artificial Sequence
  Description of Artificial Sequence: Synthetic oligonucleotide
gagagccucguaacggaug

SEQ ID NO: 1044098 - RNA, 19 nt, Artificial Sequence
  Description of Artificial Sequence: Synthetic oligonucleotide
uucgagccgccacacucac

SEQ ID NO: 1044099 - RNA, 19 nt, Artificial Sequence
  Description of Artificial Sequence: Synthetic oligonucleotide
aagauggguuucugucgaa

SEQ ID NO: 1044100 - RNA, 19 nt, Artificial Sequence
  Description of Artificial Sequence: Synthetic oligonucleotide
aggaggucacccucucaug

SEQ ID NO: 1044101 - RNA, 19 nt, Artificial Sequence
  Description of Artificial Sequence: Synthetic oligonucleotide
gaugucuguuaagauccga

SEQ ID NO: 1044102 - RNA, 19 nt, Artificial Sequence
  Description of Artificial Sequence: Synthetic oligonucleotide
guggcaaggugacauaggu

SEQ ID NO: 1044103 - RNA, 19 nt, Artificial Sequence
  Description of Artificial Sequence: Synthetic oligonucleotide
gucgaguggcccugccugg

SEQ ID NO: 1044104 - RNA, 19 nt, Artificial Sequence
  Description of Artificial Sequence: Synthetic oligonucleotide
cauaggucaagugugcaua

SEQ ID NO: 1044105 - RNA, 19 nt, Artificial Sequence
  Description of Artificial Sequence: Synthetic oligonucleotide
ugguguucauggagucggc

SEQ ID NO: 1044106 - RNA, 19 nt, Artificial Sequence
  Description of Artificial Sequence: Synthetic oligonucleotide
cuaccuuccucuugaggga

SEQ ID NO: 1044107 - RNA, 19 nt, Artificial Sequence
  Description of Artificial Sequence: Synthetic oligonucleotide
acacucacgcgguugucau

SEQ ID NO: 1044108 - RNA, 19 nt, Artificial Sequence
  Description of Artificial Sequence: Synthetic oligonucleotide
gagugcgggacaggguggg

SEQ ID NO: 1044109 - RNA, 19 nt, Artificial Sequence
  Description of Artificial Sequence: Synthetic oligonucleotide
uccgaugcaguggcaaggu

SEQ ID NO: 1044110 - RNA, 19 nt, Artificial Sequence
  Description of Artificial Sequence: Synthetic oligonucleotide
gugaccccuggucaccugc

SEQ ID NO: 1044111 - RNA, 19 nt, Artificial Sequence
  Description of Artificial Sequence: Synthetic oligonucleotide
ccgacaaacaguucauauc

SEQ ID NO: 1044112 - RNA, 19 nt, Artificial Sequence
  Description of Artificial Sequence: Synthetic oligonucleotide
ucguaacggauggagcccu

SEQ ID NO: 1044113 - RNA, 19 nt, Artificial Sequence
  Description of Artificial Sequence: Synthetic oligonucleotide
gucuaagaacauucuggaa

SEQ ID NO: 1044114 - RNA, 19 nt, Artificial Sequence
  Description of Artificial Sequence: Synthetic oligonucleotide
cacaagcagccuagucugc

SEQ ID NO: 1044115 - RNA, 19 nt, Artificial Sequence
  Description of Artificial Sequence: Synthetic oligonucleotide
agauccgaugcaguggcaa

SEQ ID NO: 1044116 - RNA, 19 nt, Artificial Sequence
  Description of Artificial Sequence: Synthetic oligonucleotide
caugggcgaagcugggcug

SEQ ID NO: 1044117 - RNA, 19 nt, Artificial Sequence
  Description of Artificial Sequence: Synthetic oligonucleotide
ugaccccuggucaccugca

SEQ ID NO: 1044118 - RNA, 19 nt, Artificial Sequence
  Description of Artificial Sequence: Synthetic oligonucleotide
gguucugccuaaaaccuuc

SEQ ID NO: 1044119 - RNA, 19 nt, Artificial Sequence
  Description of Artificial Sequence: Synthetic oligonucleotide
gucauuggccgagugugac

SEQ ID NO: 1044120 - RNA, 19 nt, Artificial Sequence
  Description of Artificial Sequence: Synthetic oligonucleotide
guuggcgguguucuuugga

SEQ ID NO: 1044121 - RNA, 19 nt, Artificial Sequence
  Description of Artificial Sequence: Synthetic oligonucleotide
ugcgcacaaacuccauguu

SEQ ID NO: 1044122 - RNA, 19 nt, Artificial Sequence
  Description of Artificial Sequence: Synthetic oligonucleotide
caggacugacucaugagcu

SEQ ID NO: 1044123 - RNA, 19 nt, Artificial Sequence
  Description of Artificial Sequence: Synthetic oligonucleotide
uguuucgcuccgggguggg

SEQ ID NO: 1044124 - RNA, 19 nt, Artificial Sequence
  Description of Artificial Sequence: Synthetic oligonucleotide
ggcuaccuuccucuugagg

SEQ ID NO: 1044125 - RNA, 19 nt, Artificial Sequence
  Description of Artificial Sequence: Synthetic oligonucleotide
acucgcagcuggaacccac

SEQ ID NO: 1044126 - RNA, 19 nt, Artificial Sequence
  Description of Artificial Sequence: Synthetic oligonucleotide
ccagccgacaaacaguuca

SEQ ID NO: 1044127 - RNA, 19 nt, Artificial Sequence
  Description of Artificial Sequence: Synthetic oligonucleotide
ugccagacagggagcgaga

SEQ ID NO: 1044128 - RNA, 19 nt, Artificial Sequence
  Description of Artificial Sequence: Synthetic oligonucleotide
gcaugcuaaccaaagcaug

SEQ ID NO: 1044129 - RNA, 19 nt, Artificial Sequence
  Description of Artificial Sequence: Synthetic oligonucleotide
aggacccaaccagggaccg

SEQ ID NO: 1044130 - RNA, 19 nt, Artificial Sequence
  Description of Artificial Sequence: Synthetic oligonucleotide
gguuguuucgcuccggggu

SEQ ID NO: 1044131 - RNA, 19 nt, Artificial Sequence
  Description of Artificial Sequence: Synthetic oligonucleotide
gggaucagggccugucugc

SEQ ID NO: 1044132 - RNA, 19 nt, Artificial Sequence
  Description of Artificial Sequence: Synthetic oligonucleotide
ggcgagguauucccagccg

SEQ ID NO: 1044133 - RNA, 19 nt, Artificial Sequence
  Description of Artificial Sequence: Synthetic oligonucleotide
ucgagccgccacacucacg

SEQ ID NO: 1044134 - RNA, 19 nt, Artificial Sequence
  Description of Artificial Sequence: Synthetic oligonucleotide
gcgcacaaacuccauguug

SEQ ID NO: 1044135 - RNA, 19 nt, Artificial Sequence
  Description of Artificial Sequence: Synthetic oligonucleotide
cuaaaggaggucacccucu

SEQ ID NO: 1044136 - RNA, 19 nt, Artificial Sequence
  Description of Artificial Sequence: Synthetic oligonucleotide
cuacagucaugucacugaa

SEQ ID NO: 1044137 - RNA, 19 nt, Artificial Sequence
  Description of Artificial Sequence: Synthetic oligonucleotide
cucggguuggaggugugug

SEQ ID NO: 1044138 - RNA, 19 nt, Artificial Sequence
  Description of Artificial Sequence: Synthetic oligonucleotide
cgagccgccacacucacgc

SEQ ID NO: 1044139 - RNA, 19 nt, Artificial Sequence
  Description of Artificial Sequence: Synthetic oligonucleotide
ggugcuaaaggaggucacc

SEQ ID NO: 1044140 - RNA, 19 nt, Artificial Sequence
  Description of Artificial Sequence: Synthetic oligonucleotide
gagguauucccagccgaca

SEQ ID NO: 1044141 - RNA, 19 nt, Artificial Sequence
  Description of Artificial Sequence: Synthetic oligonucleotide
ccuacagucaugucacuga

SEQ ID NO: 1044142 - RNA, 19 nt, Artificial Sequence
  Description of Artificial Sequence: Synthetic oligonucleotide
aggucggcuccacugucgu

SEQ ID NO: 1044143 - RNA, 19 nt, Artificial Sequence
  Description of Artificial Sequence: Synthetic oligonucleotide
cucugccuaggaagccagg

SEQ ID NO: 1044144 - RNA, 19 nt, Artificial Sequence
  Description of Artificial Sequence: Synthetic oligonucleotide
cucucaugcaugggcgaag

SEQ ID NO: 1044145 - RNA, 19 nt, Artificial Sequence
  Description of Artificial Sequence: Synthetic oligonucleotide
cuagucugcucucugccua

SEQ ID NO: 1044146 - RNA, 19 nt, Artificial Sequence
  Description of Artificial Sequence: Synthetic oligonucleotide
auucgagccgccacacuca

SEQ ID NO: 1044147 - RNA, 19 nt, Artificial Sequence
  Description of Artificial Sequence: Synthetic oligonucleotide
guucugccuaaaaccuucc

SEQ ID NO: 1044148 - RNA, 19 nt, Artificial Sequence
  Description of Artificial Sequence: Synthetic oligonucleotide
gugguucugccuaaaaccu

SEQ ID NO: 1044149 - RNA, 19 nt, Artificial Sequence
  Description of Artificial Sequence: Synthetic oligonucleotide
gguuccgaggcuaccuucc

SEQ ID NO: 1044150 - RNA, 19 nt, Artificial Sequence
  Description of Artificial Sequence: Synthetic oligonucleotide
uuccgucagcucuguucag

SEQ ID NO: 1044151 - RNA, 19 nt, Artificial Sequence
  Description of Artificial Sequence: Synthetic oligonucleotide
ccucuugagggauggggag

SEQ ID NO: 1044152 - RNA, 19 nt, Artificial Sequence
  Description of Artificial Sequence: Synthetic oligonucleotide
cacucucuaugaccucuug

SEQ ID NO: 1044153 - RNA, 19 nt, Artificial Sequence
  Description of Artificial Sequence: Synthetic oligonucleotide
aggacaagaccagcaugcu

SEQ ID NO: 1044154 - RNA, 19 nt, Artificial Sequence
  Description of Artificial Sequence: Synthetic oligonucleotide
ccgagugcgggacagggug

SEQ ID NO: 1044155 - RNA, 19 nt, Artificial Sequence
  Description of Artificial Sequence: Synthetic oligonucleotide
gcugguguucauggagucg

SEQ ID NO: 1044156 - RNA, 19 nt, Artificial Sequence
  Description of Artificial Sequence: Synthetic oligonucleotide
cgagaccgcagguuggugg

SEQ ID NO: 1044157 - RNA, 19 nt, Artificial Sequence
  Description of Artificial Sequence: Synthetic oligonucleotide
ggauuucaaccccggcccc

SEQ ID NO: 1044158 - RNA, 19 nt, Artificial Sequence
  Description of Artificial Sequence: Synthetic oligonucleotide
ccgagacugacacaggaca

SEQ ID NO: 1044159 - RNA, 19 nt, Artificial Sequence
  Description of Artificial Sequence: Synthetic oligonucleotide
gggcgagguauucccagcc

SEQ ID NO: 1044160 - RNA, 19 nt, Artificial Sequence
  Description of Artificial Sequence: Synthetic oligonucleotide
aggagucgaguggcccugc

SEQ ID NO: 1044161 - RNA, 19 nt, Artificial Sequence
  Description of Artificial Sequence: Synthetic oligonucleotide
agaaggcucuccagagaug

SEQ ID NO: 1044162 - RNA, 19 nt, Artificial Sequence
  Description of Artificial Sequence: Synthetic oligonucleotide
guagccuggcacagagccc

SEQ ID NO: 1044163 - RNA, 19 nt, Artificial Sequence
  Description of Artificial Sequence: Synthetic oligonucleotide
ucgaguggcccugccuggc

SEQ ID NO: 1044164 - RNA, 19 nt, Artificial Sequence
  Description of Artificial Sequence: Synthetic oligonucleotide
ggaugucuguuaagauccg

SEQ ID NO: 1044165 - RNA, 19 nt, Artificial Sequence
  Description of Artificial Sequence: Synthetic oligonucleotide
acacuaaacccagcagcaa

SEQ ID NO: 1044166 - RNA, 19 nt, Artificial Sequence
  Description of Artificial Sequence: Synthetic oligonucleotide
gcauugugcaggucggcuc

SEQ ID NO: 1044167 - RNA, 19 nt, Artificial Sequence
  Description of Artificial Sequence: Synthetic oligonucleotide
agggugguucugccuaaaa

SEQ ID NO: 1044168 - RNA, 19 nt, Artificial Sequence
  Description of Artificial Sequence: Synthetic oligonucleotide
cagccgagacugacacagg

SEQ ID NO: 1044169 - RNA, 19 nt, Artificial Sequence
  Description of Artificial Sequence: Synthetic oligonucleotide
guucgucaguacugcauua

SEQ ID NO: 1044170 - RNA, 19 nt, Artificial Sequence
  Description of Artificial Sequence: Synthetic oligonucleotide
ccugacucgcagcuggaac

SEQ ID NO: 1044171 - RNA, 19 nt, Artificial Sequence
  Description of Artificial Sequence: Synthetic oligonucleotide
uggagcccugaaagaugac

SEQ ID NO: 1044172 - RNA, 19 nt, Artificial Sequence
  Description of Artificial Sequence: Synthetic oligonucleotide
acccaaccagggaccgucc

SEQ ID NO: 1044173 - RNA, 19 nt, Artificial Sequence
  Description of Artificial Sequence: Synthetic oligonucleotide
gccuaaaaccuuccuggga

SEQ ID NO: 1044174 - RNA, 19 nt, Artificial Sequence
  Description of Artificial Sequence: Synthetic oligonucleotide
ggaucagggccugucugcc

SEQ ID NO: 1044175 - RNA, 19 nt, Artificial Sequence
  Description of Artificial Sequence: Synthetic oligonucleotide
cagccuagucugcucucug

SEQ ID NO: 1044176 - RNA, 19 nt, Artificial Sequence
  Description of Artificial Sequence: Synthetic oligonucleotide
gggacgugucaccaguaga

SEQ ID NO: 1044177 - RNA, 19 nt, Artificial Sequence
  Description of Artificial Sequence: Synthetic oligonucleotide
ccuaaaaccuuccugggau

SEQ ID NO: 1044178 - RNA, 19 nt, Artificial Sequence
  Description of Artificial Sequence: Synthetic oligonucleotide
ggacaaugugggcucacaa

SEQ ID NO: 1044179 - RNA, 19 nt, Artificial Sequence
  Description of Artificial Sequence: Synthetic oligonucleotide
guacuuguagaagccaaau

SEQ ID NO: 1044180 - RNA, 19 nt, Artificial Sequence
  Description of Artificial Sequence: Synthetic oligonucleotide
ucggcuccacugucguccu

SEQ ID NO: 1044181 - RNA, 19 nt, Artificial Sequence
  Description of Artificial Sequence: Synthetic oligonucleotide
agcgagaccgcagguuggu

SEQ ID NO: 1044182 - RNA, 19 nt, Artificial Sequence
  Description of Artificial Sequence: Synthetic oligonucleotide
ccaguagacacacggcuga

SEQ ID NO: 1044183 - RNA, 19 nt, Artificial Sequence
  Description of Artificial Sequence: Synthetic oligonucleotide
cacacucacgcgguuguca

SEQ ID NO: 1044184 - RNA, 19 nt, Artificial Sequence
  Description of Artificial Sequence: Synthetic oligonucleotide
cucucugccuaggaagcca

SEQ ID NO: 1044185 - RNA, 19 nt, Artificial Sequence
  Description of Artificial Sequence: Synthetic oligonucleotide
gccgagugugacuucuuca

SEQ ID NO: 1044186 - RNA, 19 nt, Artificial Sequence
  Description of Artificial Sequence: Synthetic oligonucleotide
gguauucccagccgacaaa

SEQ ID NO: 1044187 - RNA, 19 nt, Artificial Sequence
  Description of Artificial Sequence: Synthetic oligonucleotide
ggggugcuaaaggagguca

SEQ ID NO: 1044188 - RNA, 19 nt, Artificial Sequence
  Description of Artificial Sequence: Synthetic oligonucleotide
guaacggauggagcccuga

SEQ ID NO: 1044189 - RNA, 19 nt, Artificial Sequence
  Description of Artificial Sequence: Synthetic oligonucleotide
cgaugcaguggcaagguga

SEQ ID NO: 1044190 - RNA, 19 nt, Artificial Sequence
  Description of Artificial Sequence: Synthetic oligonucleotide
gcgagguauucccagccga

SEQ ID NO: 1044191 - RNA, 19 nt, Artificial Sequence
  Description of Artificial Sequence: Synthetic oligonucleotide
caggagucgaguggcccug

SEQ ID NO: 1044192 - RNA, 19 nt, Artificial Sequence
  Description of Artificial Sequence: Synthetic oligonucleotide
caguagacacacggcugac

SEQ ID NO: 1044193 - RNA, 19 nt, Artificial Sequence
  Description of Artificial Sequence: Synthetic oligonucleotide
gcucacaagcagccuaguc

SEQ ID NO: 1044194 - RNA, 19 nt, Artificial Sequence
  Description of Artificial Sequence: Synthetic oligonucleotide
ccucccaauuccuucacaa

SEQ ID NO: 1044195 - RNA, 19 nt, Artificial Sequence
  Description of Artificial Sequence: Synthetic oligonucleotide
ccgguuguuucgcuccggg

SEQ ID NO: 1044196 - RNA, 19 nt, Artificial Sequence
  Description of Artificial Sequence: Synthetic oligonucleotide
cuuccccuacagucauguc

SEQ ID NO: 1044197 - RNA, 19 nt, Artificial Sequence
  Description of Artificial Sequence: Synthetic oligonucleotide
cagggccggggcucugugc

SEQ ID NO: 1044198 - RNA, 19 nt, Artificial Sequence
  Description of Artificial Sequence: Synthetic oligonucleotide
ccaauuccuucacaacuga

SEQ ID NO: 1044199 - RNA, 19 nt, Artificial Sequence
  Description of Artificial Sequence: Synthetic oligonucleotide
ggccgguuguuucgcuccg

SEQ ID NO: 1044200 - RNA, 19 nt, Artificial Sequence
  Description of Artificial Sequence: Synthetic oligonucleotide
gccgacaaacaguucauau

SEQ ID NO: 1044201 - RNA, 19 nt, Artificial Sequence
  Description of Artificial Sequence: Synthetic oligonucleotide
gcuagagcacacugccaga

SEQ ID NO: 1044202 - RNA, 19 nt, Artificial Sequence
  Description of Artificial Sequence: Synthetic oligonucleotide
gagucgaguggcccugccu

SEQ ID NO: 1044203 - RNA, 19 nt, Artificial Sequence
  Description of Artificial Sequence: Synthetic oligonucleotide
ccccaucagacauucccuc

SEQ ID NO: 1044204 - RNA, 19 nt, Artificial Sequence
  Description of Artificial Sequence: Synthetic oligonucleotide
gccucguaacggauggagc

SEQ ID NO: 1044205 - RNA, 19 nt, Artificial Sequence
  Description of Artificial Sequence: Synthetic oligonucleotide
ggccauucgagccgccaca

SEQ ID NO: 1044206 - RNA, 19 nt, Artificial Sequence
  Description of Artificial Sequence: Synthetic oligonucleotide
cguguugguuuugucacug

SEQ ID NO: 1044207 - RNA, 19 nt, Artificial Sequence
  Description of Artificial Sequence: Synthetic oligonucleotide
cgagguauucccagccgac

SEQ ID NO: 1044208 - RNA, 19 nt, Artificial Sequence
  Description of Artificial Sequence: Synthetic oligonucleotide
gcaugggcgaagcugggcu

SEQ ID NO: 1044209 - RNA, 19 nt, Artificial Sequence
  Description of Artificial Sequence: Synthetic oligonucleotide
ggccgagugugacuucuuc

SEQ ID NO: 1044210 - RNA, 19 nt, Artificial Sequence
  Description of Artificial Sequence: Synthetic oligonucleotide
gggccauucgagccgccac

SEQ ID NO: 1044211 - RNA, 19 nt, Artificial Sequence
  Description of Artificial Sequence: Synthetic oligonucleotide
ggagucgaguggcccugcc

SEQ ID NO: 1044212 - RNA, 19 nt, Artificial Sequence
  Description of Artificial Sequence: Synthetic oligonucleotide
cugcgucccuccagccgag

SEQ ID NO: 1044213 - RNA, 19 nt, Artificial Sequence
  Description of Artificial Sequence: Synthetic oligonucleotide
aguuuccgucagcucuguu

SEQ ID NO: 1044214 - RNA, 19 nt, Artificial Sequence
  Description of Artificial Sequence: Synthetic oligonucleotide
ggcuuuguauaggaugugu

SEQ ID NO: 1044215 - RNA, 19 nt, Artificial Sequence
  Description of Artificial Sequence: Synthetic oligonucleotide
guccucucggaagaacucu

SEQ ID NO: 1044216 - RNA, 19 nt, Artificial Sequence
  Description of Artificial Sequence: Synthetic oligonucleotide
caaccagggaccguccugu

SEQ ID NO: 1044217 - RNA, 19 nt, Artificial Sequence
  Description of Artificial Sequence: Synthetic oligonucleotide
cauuggccgagugugacuu

SEQ ID NO: 1044218 - RNA, 19 nt, Artificial Sequence
  Description of Artificial Sequence: Synthetic oligonucleotide
gcauggggcgagguauucc

SEQ ID NO: 1044219 - RNA, 19 nt, Artificial Sequence
  Description of Artificial Sequence: Synthetic oligonucleotide
uggccgagugugacuucuu

SEQ ID NO: 1044220 - RNA, 19 nt, Artificial Sequence
  Description of Artificial Sequence: Synthetic oligonucleotide
agaggaggucucagcuaga

SEQ ID NO: 1044221 - RNA, 19 nt, Artificial Sequence
  Description of Artificial Sequence: Synthetic oligonucleotide
cgucaguacugcauuacaa

SEQ ID NO: 1044222 - RNA, 19 nt, Artificial Sequence
  Description of Artificial Sequence: Synthetic oligonucleotide
cgaggcacuucaguuuggg

SEQ ID NO: 1044223 - RNA, 19 nt, Artificial Sequence
  Description of Artificial Sequence: Synthetic oligonucleotide
gccgagacugacacaggac

SEQ ID NO: 1044224 - RNA, 19 nt, Artificial Sequence
  Description of Artificial Sequence: Synthetic oligonucleotide
gggugcuaaaggaggucac

SEQ ID NO: 1044225 - RNA, 19 nt, Artificial Sequence
  Description of Artificial Sequence: Synthetic oligonucleotide
ggugggcggggugcuaaag

SEQ ID NO: 1044226 - RNA, 19 nt, Artificial Sequence
  Description of Artificial Sequence: Synthetic oligonucleotide
auccccugacucgcagcug

SEQ ID NO: 1044227 - RNA, 19 nt, Artificial Sequence
  Description of Artificial Sequence: Synthetic oligonucleotide
cgguuguuucgcuccgggg

SEQ ID NO: 1044228 - RNA, 19 nt, Artificial Sequence
  Description of Artificial Sequence: Synthetic oligonucleotide
ggaccguccugugccagac

SEQ ID NO: 1044229 - RNA, 19 nt, Artificial Sequence
  Description of Artificial Sequence: Synthetic oligonucleotide
ggagggccgguuguuucgc

SEQ ID NO: 1044230 - RNA, 19 nt, Artificial Sequence
  Description of Artificial Sequence: Synthetic oligonucleotide
guuccgaggcuaccuuccu

SEQ ID NO: 1044231 - RNA, 19 nt, Artificial Sequence
  Description of Artificial Sequence: Synthetic oligonucleotide
gacucgcagcuggaaccca

SEQ ID NO: 1044232 - RNA, 19 nt, Artificial Sequence
  Description of Artificial Sequence: Synthetic oligonucleotide
ccguccugugccagacagg

SEQ ID NO: 1044233 - RNA, 19 nt, Artificial Sequence
  Description of Artificial Sequence: Synthetic oligonucleotide
guuucgcuccggggugggc

SEQ ID NO: 1044234 - RNA, 19 nt, Artificial Sequence
  Description of Artificial Sequence: Synthetic oligonucleotide
gagucggcccuggccccag

SEQ ID NO: 1044235 - RNA, 19 nt, Artificial Sequence
  Description of Artificial Sequence: Synthetic oligonucleotide
ggaagcuggcagccccuca

SEQ ID NO: 1044236 - RNA, 19 nt, Artificial Sequence
  Description of Artificial Sequence: Synthetic oligonucleotide
ggacgaggcacuucaguuu

SEQ ID NO: 1044237 - RNA, 19 nt, Artificial Sequence
  Description of Artificial Sequence: Synthetic oligonucleotide
gugcauagagaaggaaguu

SEQ ID NO: 1044238 - RNA, 19 nt, Artificial Sequence
  Description of Artificial Sequence: Synthetic oligonucleotide
ggcgaagcugggcuggagu

SEQ ID NO: 1044239 - RNA, 19 nt, Artificial Sequence
  Description of Artificial Sequence: Synthetic oligonucleotide
cugggccauucgagccgcc

SEQ ID NO: 1044240 - RNA, 19 nt, Artificial Sequence
  Description of Artificial Sequence: Synthetic oligonucleotide
cgagugugacuucuucauc

SEQ ID NO: 1044241 - RNA, 19 nt, Artificial Sequence
  Description of Artificial Sequence: Synthetic oligonucleotide
cacugucguccucucggaa

SEQ ID NO: 1044242 - RNA, 19 nt, Artificial Sequence
  Description of Artificial Sequence: Synthetic oligonucleotide
cagccgacaaacaguucau

SEQ ID NO: 1044243 - RNA, 19 nt, Artificial Sequence
  Description of Artificial Sequence: Synthetic oligonucleotide
ggagucugacacccauucu

SEQ ID NO: 1044244 - RNA, 19 nt, Artificial Sequence
  Description of Artificial Sequence: Synthetic oligonucleotide
gggaagaggacgaggcacu

SEQ ID NO: 1044245 - RNA, 19 nt, Artificial Sequence
  Description of Artificial Sequence: Synthetic oligonucleotide
aucucggguuggaggugug

SEQ ID NO: 1044246 - RNA, 19 nt, Artificial Sequence
  Description of Artificial Sequence: Synthetic oligonucleotide
agugcgggacaggguggga

SEQ ID NO: 1044247 - RNA, 19 nt, Artificial Sequence
  Description of Artificial Sequence: Synthetic oligonucleotide
gaaggagggccgguuguuu

SEQ ID NO: 1044248 - RNA, 19 nt, Artificial Sequence
  Description of Artificial Sequence: Synthetic oligonucleotide
cagggaccguccugugcca

SEQ ID NO: 1044249 - RNA, 19 nt, Artificial Sequence
  Description of Artificial Sequence: Synthetic oligonucleotide
accgcagguugguggcauu

SEQ ID NO: 1044250 - RNA, 19 nt, Artificial Sequence
  Description of Artificial Sequence: Synthetic oligonucleotide
cagcuggaacccacugcaa

SEQ ID NO: 1044251 - RNA, 19 nt, Artificial Sequence
  Description of Artificial Sequence: Synthetic oligonucleotide
caucucggguuggaggugu

SEQ ID NO: 1044252 - RNA, 19 nt, Artificial Sequence
  Description of Artificial Sequence: Synthetic oligonucleotide
cucacgcgguugucauaca

SEQ ID NO: 1044253 - RNA, 19 nt, Artificial Sequence
  Description of Artificial Sequence: Synthetic oligonucleotide
cucgcagcuggaacccacu

SEQ ID NO: 1044254 - RNA, 19 nt, Artificial Sequence
  Description of Artificial Sequence: Synthetic oligonucleotide
ccguggcggugacagguag

SEQ ID NO: 1044255 - RNA, 19 nt, Artificial Sequence
  Description of Artificial Sequence: Synthetic oligonucleotide
gucgaacuuccaggauguc

SEQ ID NO: 1044256 - RNA, 19 nt, Artificial Sequence
  Description of Artificial Sequence: Synthetic oligonucleotide
ccgagugugacuucuucau

SEQ ID NO: 1044257 - RNA, 19 nt, Artificial Sequence
  Description of Artificial Sequence: Synthetic oligonucleotide
gccacacucacgcgguugu

SEQ ID NO: 1044258 - RNA, 19 nt, Artificial Sequence
  Description of Artificial Sequence: Synthetic oligonucleotide
cgaggcuaccuuccucuug

SEQ ID NO: 1044259 - RNA, 19 nt, Artificial Sequence
  Description of Artificial Sequence: Synthetic oligonucleotide
ugcgucccuccagccgaga

SEQ ID NO: 1044260 - RNA, 19 nt, Artificial Sequence
  Description of Artificial Sequence: Synthetic oligonucleotide
gggaccguccugugccaga

SEQ ID NO: 1044261 - RNA, 19 nt, Artificial Sequence
  Description of Artificial Sequence: Synthetic oligonucleotide
gcaaggugacauaggucaa

SEQ ID NO: 1044262 - RNA, 19 nt, Artificial Sequence
  Description of Artificial Sequence: Synthetic oligonucleotide
gccgguuguuucgcuccgg

SEQ ID NO: 1044263 - RNA, 19 nt, Artificial Sequence
  Description of Artificial Sequence: Synthetic oligonucleotide
ccgaugcaguggcaaggug

SEQ ID NO: 1044264 - RNA, 19 nt, Artificial Sequence
  Description of Artificial Sequence: Synthetic oligonucleotide
ugcacccaccaaggacaau

SEQ ID NO: 1044265 - RNA, 19 nt, Artificial Sequence
  Description of Artificial Sequence: Synthetic oligonucleotide
cuccggcacuggcuuguca

SEQ ID NO: 1044266 - RNA, 19 nt, Artificial Sequence
  Description of Artificial Sequence: Synthetic oligonucleotide
gagggccgguuguuucgcu

SEQ ID NO: 1044267 - RNA, 19 nt, Artificial Sequence
  Description of Artificial Sequence: Synthetic oligonucleotide
cacucacgcgguugucaua

SEQ ID NO: 1044268 - RNA, 19 nt, Artificial Sequence
  Description of Artificial Sequence: Synthetic oligonucleotide
caggaggucuaagaacauu

SEQ ID NO: 1044269 - RNA, 19 nt, Artificial Sequence
  Description of Artificial Sequence: Synthetic oligonucleotide
ccaggaugucuguuaagau

SEQ ID NO: 1044270 - RNA, 19 nt, Artificial Sequence
  Description of Artificial Sequence: Synthetic oligonucleotide
ccgcagguugguggcauug

SEQ ID NO: 1044271 - RNA, 19 nt, Artificial Sequence
  Description of Artificial Sequence: Synthetic oligonucleotide
ccuggaacguguugguuuu

SEQ ID NO: 1044272 - RNA, 19 nt, Artificial Sequence
  Description of Artificial Sequence: Synthetic oligonucleotide
cgguuccgaggcuaccuuc

SEQ ID NO: 1044273 - RNA, 19 nt, Artificial Sequence
  Description of Artificial Sequence: Synthetic oligonucleotide
ccaggagucgaguggcccu

SEQ ID NO: 1044274 - RNA, 19 nt, Artificial Sequence
  Description of Artificial Sequence: Synthetic oligonucleotide
gcgguguucuuuggaugga

SEQ ID NO: 1044275 - RNA, 19 nt, Artificial Sequence
  Description of Artificial Sequence: Synthetic oligonucleotide
gcgagaccgcagguuggug

SEQ ID NO: 1044276 - RNA, 19 nt, Artificial Sequence
  Description of Artificial Sequence: Synthetic oligonucleotide
cccagccgacaaacaguuc

SEQ ID NO: 1044277 - RNA, 19 nt, Artificial Sequence
  Description of Artificial Sequence: Synthetic oligonucleotide
gcggugacagguaggcacu

SEQ ID NO: 1044278 - RNA, 19 nt, Artificial Sequence
  Description of Artificial Sequence: Synthetic oligonucleotide
gggccgagugcgggacagg

SEQ ID NO: 1044279 - RNA, 19 nt, Artificial Sequence
  Description of Artificial Sequence: Synthetic oligonucleotide
cagggugguucugccuaaa

SEQ ID NO: 1044280 - RNA, 19 nt, Artificial Sequence
  Description of Artificial Sequence: Synthetic oligonucleotide
gcagccuagucugcucucu

SEQ ID NO: 1044281 - RNA, 19 nt, Artificial Sequence
  Description of Artificial Sequence: Synthetic oligonucleotide
ccucucaugcaugggcgaa

SEQ ID NO: 1044282 - RNA, 19 nt, Artificial Sequence
  Description of Artificial Sequence: Synthetic oligonucleotide
ggggugggcggggugcuaa

SEQ ID NO: 1044283 - RNA, 19 nt, Artificial Sequence
  Description of Artificial Sequence: Synthetic oligonucleotide
ggagucggcccuggcccca

SEQ ID NO: 1044284 - RNA, 19 nt, Artificial Sequence
  Description of Artificial Sequence: Synthetic oligonucleotide
gcaaugcgguuccgaggcu

SEQ ID NO: 1044285 - RNA, 19 nt, Artificial Sequence
  Description of Artificial Sequence: Synthetic oligonucleotide
gggagcgagaccgcagguu

SEQ ID NO: 1044286 - RNA, 19 nt, Artificial Sequence
  Description of Artificial Sequence: Synthetic oligonucleotide
ccacugcaacaaguaguaa

SEQ ID NO: 1044287 - RNA, 19 nt, Artificial Sequence
  Description of Artificial Sequence: Synthetic oligonucleotide
cccguggcggugacaggua

SEQ ID NO: 1044288 - RNA, 19 nt, Artificial Sequence
  Description of Artificial Sequence: Synthetic oligonucleotide
gcuccggcacuggcuuguc

SEQ ID NO: 1044289 - RNA, 19 nt, Artificial Sequence
  Description of Artificial Sequence: Synthetic oligonucleotide
ggacccaaccagggaccgu

SEQ ID NO: 1044290 - RNA, 19 nt, Artificial Sequence
  Description of Artificial Sequence: Synthetic oligonucleotide
gccgagugcgggacagggu

SEQ ID NO: 1044291 - RNA, 19 nt, Artificial Sequence
  Description of Artificial Sequence: Synthetic oligonucleotide
ccagcucaacacagaccau

SEQ ID NO: 1044292 - RNA, 19 nt, Artificial Sequence
  Description of Artificial Sequence: Synthetic oligonucleotide
ccccuacagucaugucacu

SEQ ID NO: 1044293 - RNA, 19 nt, Artificial Sequence
  Description of Artificial Sequence: Synthetic oligonucleotide
ccgaggcuaccuuccucuu

SEQ ID NO: 1044294 - RNA, 19 nt, Artificial Sequence
  Description of Artificial Sequence: Synthetic oligonucleotide
gcccagcuuccaguuuauu

SEQ ID NO: 1044295 - RNA, 19 nt, Artificial Sequence
  Description of Artificial Sequence: Synthetic oligonucleotide
uguaauauuuacaagguag

SEQ ID NO: 1044296 - RNA, 19 nt, Artificial Sequence
  Description of Artificial Sequence: Synthetic oligonucleotide
uuagguaagacauugagag

SEQ ID NO: 1044297 - RNA, 19 nt, Artificial Sequence
  Description of Artificial Sequence: Synthetic oligonucleotide
aagaacaccccauacuucc

SEQ ID NO: 1044298 - RNA, 19 nt, Artificial Sequence
  Description of Artificial Sequence: Synthetic oligonucleotide
uuaaaugcuagcuuguuag

SEQ ID NO: 1044299 - RNA, 19 nt, Artificial Sequence
  Description of Artificial Sequence: Synthetic oligonucleotide
augaaggcaacuuaauucc

SEQ ID NO: 1044300 - RNA, 19 nt, Artificial Sequence
  Description of Artificial Sequence: Synthetic oligonucleotide
uuauggagcacaaugaaga

SEQ ID NO: 1044301 - RNA, 19 nt, Artificial Sequence
  Description of Artificial Sequence: Synthetic oligonucleotide
aauggaaccuuccaguucu

SEQ ID NO: 1044302 - RNA, 19 nt, Artificial Sequence
  Description of Artificial Sequence: Synthetic oligonucleotide
ucuugguaaauuauggagc

SEQ ID NO: 1044303 - RNA, 19 nt, Artificial Sequence
  Description of Artificial Sequence: Synthetic oligonucleotide
agauuacuaaaagagaaac

SEQ ID NO: 1044304 - RNA, 19 nt, Artificial Sequence
  Description of Artificial Sequence: Synthetic oligonucleotide
uuucagagggaauauaagc

SEQ ID NO: 1044305 - RNA, 19 nt, Artificial Sequence
  Description of Artificial Sequence: Synthetic oligonucleotide
aacauacuaagguuucuuc

SEQ ID NO: 1044306 - RNA, 19 nt, Artificial Sequence
  Description of Artificial Sequence: Synthetic oligonucleotide
aauacuuuacuuaucucag

SEQ ID NO: 1044307 - RNA, 19 nt, Artificial Sequence
  Description of Artificial Sequence: Synthetic oligonucleotide
uguuuaacaauccaacauc

SEQ ID NO: 1044308 - RNA, 19 nt, Artificial Sequence
  Description of Artificial Sequence: Synthetic oligonucleotide
aucuugguaaauuauggag

SEQ ID NO: 1044309 - RNA, 19 nt, Artificial Sequence
  Description of Artificial Sequence: Synthetic oligonucleotide
aacucuucguuccuuccgc

SEQ ID NO: 1044310 - RNA, 19 nt, Artificial Sequence
  Description of Artificial Sequence: Synthetic oligonucleotide
ugaagauuacuaaaagaga

SEQ ID NO: 1044311 - RNA, 19 nt, Artificial Sequence
  Description of Artificial Sequence: Synthetic oligonucleotide
aaaggaucgcgcuggcucc

SEQ ID NO: 1044312 - RNA, 19 nt, Artificial Sequence
  Description of Artificial Sequence: Synthetic oligonucleotide
aauauaagcuuauaauauu

SEQ ID NO: 1044313 - RNA, 19 nt, Artificial Sequence
  Description of Artificial Sequence: Synthetic oligonucleotide
aagacauugagagguauuc

SEQ ID NO: 1044314 - RNA, 19 nt, Artificial Sequence
  Description of Artificial Sequence: Synthetic oligonucleotide
uacaaauuggaguauguac

SEQ ID NO: 1044315 - RNA, 19 nt, Artificial Sequence
  Description of Artificial Sequence: Synthetic oligonucleotide
uuaacaauccaacauccuc

SEQ ID NO: 1044316 - RNA, 19 nt, Artificial Sequence
  Description of Artificial Sequence: Synthetic oligonucleotide
aauuggaguauguacugca

SEQ ID NO: 1044317 - RNA, 19 nt, Artificial Sequence
  Description of Artificial Sequence: Synthetic oligonucleotide
aaugcuccacaccuacagc

SEQ ID NO: 1044318 - RNA, 19 nt, Artificial Sequence
  Description of Artificial Sequence: Synthetic oligonucleotide
aacaggugucuuuugaugu

SEQ ID NO: 1044319 - RNA, 19 nt, Artificial Sequence
  Description of Artificial Sequence: Synthetic oligonucleotide
aauuauggagcacaaugaa

SEQ ID NO: 1044320 - RNA, 19 nt, Artificial Sequence
  Description of Artificial Sequence: Synthetic oligonucleotide
aaauuggaguauguacugc

SEQ ID NO: 1044321 - RNA, 19 nt, Artificial Sequence
  Description of Artificial Sequence: Synthetic oligonucleotide
aaguucaccucucuuaaga

SEQ ID NO: 1044322 - RNA, 19 nt, Artificial Sequence
  Description of Artificial Sequence: Synthetic oligonucleotide
uauucaauuugacacaauu

SEQ ID NO: 1044323 - RNA, 19 nt, Artificial Sequence
  Description of Artificial Sequence: Synthetic oligonucleotide
uacuuuacuuaucucagcu

SEQ ID NO: 1044324 - RNA, 19 nt, Artificial Sequence
  Description of Artificial Sequence: Synthetic oligonucleotide
aaccuuacuuguauaaaac

SEQ ID NO: 1044325 - RNA, 19 nt, Artificial Sequence
  Description of Artificial Sequence: Synthetic oligonucleotide
aggauccaaauccagucgc

SEQ ID NO: 1044326 - RNA, 19 nt, Artificial Sequence
  Description of Artificial Sequence: Synthetic oligonucleotide
ucagauuccggcaaaccca

SEQ ID NO: 1044327 - RNA, 19 nt, Artificial Sequence
  Description of Artificial Sequence: Synthetic oligonucleotide
gaagauuacuaaaagagaa

SEQ ID NO: 1044328 - RNA, 19 nt, Artificial Sequence
  Description of Artificial Sequence: Synthetic oligonucleotide
aaauuauggagcacaauga

SEQ ID NO: 1044329 - RNA, 19 nt, Artificial Sequence
  Description of Artificial Sequence: Synthetic oligonucleotide
ucauggaauacucugugaa

SEQ ID NO: 1044330 - RNA, 19 nt, Artificial Sequence
  Description of Artificial Sequence: Synthetic oligonucleotide
cacaccuacagcuuuagac

SEQ ID NO: 1044331 - RNA, 19 nt, Artificial Sequence
  Description of Artificial Sequence: Synthetic oligonucleotide
gaaugcuccacaccuacag

SEQ ID NO: 1044332 - RNA, 19 nt, Artificial Sequence
  Description of Artificial Sequence: Synthetic oligonucleotide
uauaagcuuauaauauuaa

SEQ ID NO: 1044333 - RNA, 19 nt, Artificial Sequence
  Description of Artificial Sequence: Synthetic oligonucleotide
uaaaggaucgcgcuggcuc

SEQ ID NO: 1044334 - RNA, 19 nt, Artificial Sequence
  Description of Artificial Sequence: Synthetic oligonucleotide
auacuuuacuuaucucagc

SEQ ID NO: 1044335 - RNA, 19 nt, Artificial Sequence
  Description of Artificial Sequence: Synthetic oligonucleotide
acacaacuuauacugaaug

SEQ ID NO: 1044336 - RNA, 19 nt, Artificial Sequence
  Description of Artificial Sequence: Synthetic oligonucleotide
uggaauacucugugaaacg

SEQ ID NO: 1044337 - RNA, 19 nt, Artificial Sequence
  Description of Artificial Sequence: Synthetic oligonucleotide
aucaagcucauuuguuggc

SEQ ID NO: 1044338 - RNA, 19 nt, Artificial Sequence
  Description of Artificial Sequence: Synthetic oligonucleotide
aaacacaacuuauacugaa

SEQ ID NO: 1044339 - RNA, 19 nt, Artificial Sequence
  Description of Artificial Sequence: Synthetic oligonucleotide
aauaaugucaggauccaaa

SEQ ID NO: 1044340 - RNA, 19 nt, Artificial Sequence
  Description of Artificial Sequence: Synthetic oligonucleotide
agaucuugguaaauuaugg

SEQ ID NO: 1044341 - RNA, 19 nt, Artificial Sequence
  Description of Artificial Sequence: Synthetic oligonucleotide
uauacugaaugcuccacac

SEQ ID NO: 1044342 - RNA, 19 nt, Artificial Sequence
  Description of Artificial Sequence: Synthetic oligonucleotide
uucccguuuuagaagacag

SEQ ID NO: 1044343 - RNA, 19 nt, Artificial Sequence
  Description of Artificial Sequence: Synthetic oligonucleotide
aagagaaccuuacuuguau

SEQ ID NO: 1044344 - RNA, 19 nt, Artificial Sequence
  Description of Artificial Sequence: Synthetic oligonucleotide
agucaaaacauuguaauau

SEQ ID NO: 1044345 - RNA, 19 nt, Artificial Sequence
  Description of Artificial Sequence: Synthetic oligonucleotide
cacaacuuauacugaaugc

SEQ ID NO: 1044346 - RNA, 19 nt, Artificial Sequence
  Description of Artificial Sequence: Synthetic oligonucleotide
uuaagaucuugguaaauua

SEQ ID NO: 1044347 - RNA, 19 nt, Artificial Sequence
  Description of Artificial Sequence: Synthetic oligonucleotide
uuauacugaaugcuccaca

SEQ ID NO: 1044348 - RNA, 19 nt, Artificial Sequence
  Description of Artificial Sequence: Synthetic oligonucleotide
ucaauuugacacaauucuc

SEQ ID NO: 1044349 - RNA, 19 nt, Artificial Sequence
  Description of Artificial Sequence: Synthetic oligonucleotide
cuuuagacccucaauguuc

SEQ ID NO: 1044350 - RNA, 19 nt, Artificial Sequence
  Description of Artificial Sequence: Synthetic oligonucleotide
uuuagacccucaauguucu

SEQ ID NO: 1044351 - RNA, 19 nt, Artificial Sequence
  Description of Artificial Sequence: Synthetic oligonucleotide
auucaauuugacacaauuc

SEQ ID NO: 1044352 - RNA, 19 nt, Artificial Sequence
  Description of Artificial Sequence: Synthetic oligonucleotide
caucaagcucauuuguugg

SEQ ID NO: 1044353 - RNA, 19 nt, Artificial Sequence
  Description of Artificial Sequence: Synthetic oligonucleotide
auacugaaugcuccacacc

SEQ ID NO: 1044354 - RNA, 19 nt, Artificial Sequence
  Description of Artificial Sequence: Synthetic oligonucleotide
accuccaucugacaguggg

SEQ ID NO: 1044355 - RNA, 19 nt, Artificial Sequence
  Description of Artificial Sequence: Synthetic oligonucleotide
uuugcccggagaaugaagu

SEQ ID NO: 1044356 - RNA, 19 nt, Artificial Sequence
  Description of Artificial Sequence: Synthetic oligonucleotide
agagacagcuuucuucuuc

SEQ ID NO: 1044357 - RNA, 19 nt, Artificial Sequence
  Description of Artificial Sequence: Synthetic oligonucleotide
guuuaacaauccaacaucc

SEQ ID NO: 1044358 - RNA, 19 nt, Artificial Sequence
  Description of Artificial Sequence: Synthetic oligonucleotide
uguuggcagaucuggaucc

SEQ ID NO: 1044359 - RNA, 19 nt, Artificial Sequence
  Description of Artificial Sequence: Synthetic oligonucleotide
uguacaaauuggaguaugu

SEQ ID NO: 1044360 - RNA, 19 nt, Artificial Sequence
  Description of Artificial Sequence: Synthetic oligonucleotide
ugguaaauuauggagcaca

SEQ ID NO: 1044361 - RNA, 19 nt, Artificial Sequence
  Description of Artificial Sequence: Synthetic oligonucleotide
auuccggcaaacccauugc

SEQ ID NO: 1044362 - RNA, 19 nt, Artificial Sequence
  Description of Artificial Sequence: Synthetic oligonucleotide
acaacuuauacugaaugcu

SEQ ID NO: 1044363 - RNA, 19 nt, Artificial Sequence
  Description of Artificial Sequence: Synthetic oligonucleotide
ugacaagagaaccuuacuu

SEQ ID NO: 1044364 - RNA, 19 nt, Artificial Sequence
  Description of Artificial Sequence: Synthetic oligonucleotide
ucuaaggcgguacugggaa

SEQ ID NO: 1044365 - RNA, 19 nt, Artificial Sequence
  Description of Artificial Sequence: Synthetic oligonucleotide
augauugaggaggucaugg

SEQ ID NO: 1044366 - RNA, 19 nt, Artificial Sequence
  Description of Artificial Sequence: Synthetic oligonucleotide
gauuccggcaaacccauug

SEQ ID NO: 1044367 - RNA, 19 nt, Artificial Sequence
  Description of Artificial Sequence: Synthetic oligonucleotide
acauacuaagguuucuucu

SEQ ID NO: 1044368 - RNA, 19 nt, Artificial Sequence
  Description of Artificial Sequence: Synthetic oligonucleotide
aaacucugacgcaaacacc

SEQ ID NO: 1044369 - RNA, 19 nt, Artificial Sequence
  Description of Artificial Sequence: Synthetic oligonucleotide
uuuaacaauccaacauccu

SEQ ID NO: 1044370 - RNA, 19 nt, Artificial Sequence
  Description of Artificial Sequence: Synthetic oligonucleotide
cuuauuugcccggagaaug

SEQ ID NO: 1044371 - RNA, 19 nt, Artificial Sequence
  Description of Artificial Sequence: Synthetic oligonucleotide
uagucauucaaaacuuccu

SEQ ID NO: 1044372 - RNA, 19 nt, Artificial Sequence
  Description of Artificial Sequence: Synthetic oligonucleotide
ugcuaaaggaucgcgcugg

SEQ ID NO: 1044373 - RNA, 19 nt, Artificial Sequence
  Description of Artificial Sequence: Synthetic oligonucleotide
auuguaauauuuacaaggu

SEQ ID NO: 1044374 - RNA, 19 nt, Artificial Sequence
  Description of Artificial Sequence: Synthetic oligonucleotide
uagaucacugcuauugauc

SEQ ID NO: 1044375 - RNA, 19 nt, Artificial Sequence
  Description of Artificial Sequence: Synthetic oligonucleotide
aaugcuagcuuguuagcuu

SEQ ID NO: 1044376 - RNA, 19 nt, Artificial Sequence
  Description of Artificial Sequence: Synthetic oligonucleotide
aaaugcuagcuuguuagcu

SEQ ID NO: 1044377 - RNA, 19 nt, Artificial Sequence
  Description of Artificial Sequence: Synthetic oligonucleotide
ucugacgcaaacaccgaug

SEQ ID NO: 1044378 - RNA, 19 nt, Artificial Sequence
  Description of Artificial Sequence: Synthetic oligonucleotide
agacucaucaagcucauuu

SEQ ID NO: 1044379 - RNA, 19 nt, Artificial Sequence
  Description of Artificial Sequence: Synthetic oligonucleotide
uuaauuccagugcuugaac

SEQ ID NO: 1044380 - RNA, 19 nt, Artificial Sequence
  Description of Artificial Sequence: Synthetic oligonucleotide
aagucaaaaucaucaucga

SEQ ID NO: 1044381 - RNA, 19 nt, Artificial Sequence
  Description of Artificial Sequence: Synthetic oligonucleotide
aagucaaaacauuguaaua

SEQ ID NO: 1044382 - RNA, 19 nt, Artificial Sequence
  Description of Artificial Sequence: Synthetic oligonucleotide
ucgaagaacaccccauacu

SEQ ID NO: 1044383 - RNA, 19 nt, Artificial Sequence
  Description of Artificial Sequence: Synthetic oligonucleotide
uuuuauggcuugcuuucug

SEQ ID NO: 1044384 - RNA, 19 nt, Artificial Sequence
  Description of Artificial Sequence: Synthetic oligonucleotide
uagguaagacauugagagg

SEQ ID NO: 1044385 - RNA, 19 nt, Artificial Sequence
  Description of Artificial Sequence: Synthetic oligonucleotide
agggaauauaagcuuauaa

SEQ ID NO: 1044386 - RNA, 19 nt, Artificial Sequence
  Description of Artificial Sequence: Synthetic oligonucleotide
uacuuguauaaaacuacaa

SEQ ID NO: 1044387 - RNA, 19 nt, Artificial Sequence
  Description of Artificial Sequence: Synthetic oligonucleotide
gucauagucaucgucgaag

SEQ ID NO: 1044388 - RNA, 19 nt, Artificial Sequence
  Description of Artificial Sequence: Synthetic oligonucleotide
ugcuuuguuuaacaaucca

SEQ ID NO: 1044389 - RNA, 19 nt, Artificial Sequence
  Description of Artificial Sequence: Synthetic oligonucleotide
aacuuccugcaaccgauug

SEQ ID NO: 1044390 - RNA, 19 nt, Artificial Sequence
  Description of Artificial Sequence: Synthetic oligonucleotide
auaaugucaggauccaaau

SEQ ID NO: 1044391 - RNA, 19 nt, Artificial Sequence
  Description of Artificial Sequence: Synthetic oligonucleotide
ucaucauguagagucagcu

SEQ ID NO: 1044392 - RNA, 19 nt, Artificial Sequence
  Description of Artificial Sequence: Synthetic oligonucleotide
gaaccuuacuuguauaaaa

SEQ ID NO: 1044393 - RNA, 19 nt, Artificial Sequence
  Description of Artificial Sequence: Synthetic oligonucleotide
accuuacuuguauaaaacu

SEQ ID NO: 1044394 - RNA, 19 nt, Artificial Sequence
  Description of Artificial Sequence: Synthetic oligonucleotide
uuauuugcccggagaauga

SEQ ID NO: 1044395 - RNA, 19 nt, Artificial Sequence
  Description of Artificial Sequence: Synthetic oligonucleotide
auuauggagcacaaugaag

SEQ ID NO: 1044396 - RNA, 19 nt, Artificial Sequence
  Description of Artificial Sequence: Synthetic oligonucleotide
gaucuugguaaauuaugga

SEQ ID NO: 1044397 - RNA, 19 nt, Artificial Sequence
  Description of Artificial Sequence: Synthetic oligonucleotide
cugucuacuugaauggaac

SEQ ID NO: 1044398 - RNA, 19 nt, Artificial Sequence
  Description of Artificial Sequence: Synthetic oligonucleotide
aacggcuuuugguuuccuc

SEQ ID NO: 1044399 - RNA, 19 nt, Artificial Sequence
  Description of Artificial Sequence: Synthetic oligonucleotide
uggaguauguacugcagau

SEQ ID NO: 1044400 - RNA, 19 nt, Artificial Sequence
  Description of Artificial Sequence: Synthetic oligonucleotide
uacuugaauggaaccuucc

SEQ ID NO: 1044401 - RNA, 19 nt, Artificial Sequence
  Description of Artificial Sequence: Synthetic oligonucleotide
uuucuugccgucuuuucuc

SEQ ID NO: 1044402 - RNA, 19 nt, Artificial Sequence
  Description of Artificial Sequence: Synthetic oligonucleotide
caaaccgcucaucauguag

SEQ ID NO: 1044403 - RNA, 19 nt, Artificial Sequence
  Description of Artificial Sequence: Synthetic oligonucleotide
uuguaauauuuacaaggua

SEQ ID NO: 1044404 - RNA, 19 nt, Artificial Sequence
  Description of Artificial Sequence: Synthetic oligonucleotide
acuuauacugaaugcucca

SEQ ID NO: 1044405 - RNA, 19 nt, Artificial Sequence
  Description of Artificial Sequence: Synthetic oligonucleotide
uacuuaucucagcuauucc

SEQ ID NO: 1044406 - RNA, 19 nt, Artificial Sequence
  Description of Artificial Sequence: Synthetic oligonucleotide
aaccgcucaucauguagag

SEQ ID NO: 1044407 - RNA, 19 nt, Artificial Sequence
  Description of Artificial Sequence: Synthetic oligonucleotide
acagguccgggacagcacg

SEQ ID NO: 1044408 - RNA, 19 nt, Artificial Sequence
  Description of Artificial Sequence: Synthetic oligonucleotide
acuaagguuucuucuuucu

SEQ ID NO: 1044409 - RNA, 19 nt, Artificial Sequence
  Description of Artificial Sequence: Synthetic oligonucleotide
ucauuuguuggcagaucug

SEQ ID NO: 1044410 - RNA, 19 nt, Artificial Sequence
  Description of Artificial Sequence: Synthetic oligonucleotide
agagguauucccguuuuag

SEQ ID NO: 1044411 - RNA, 19 nt, Artificial Sequence
  Description of Artificial Sequence: Synthetic oligonucleotide
gguauucccguuuuagaag

SEQ ID NO: 1044412 - RNA, 19 nt, Artificial Sequence
  Description of Artificial Sequence: Synthetic oligonucleotide
uuguuggcagaucuggauc

SEQ ID NO: 1044413 - RNA, 19 nt, Artificial Sequence
  Description of Artificial Sequence: Synthetic oligonucleotide
ugcugcuaaaggaucgcgc

SEQ ID NO: 1044414 - RNA, 19 nt, Artificial Sequence
  Description of Artificial Sequence: Synthetic oligonucleotide
ucgucaaagucaaaaucau

SEQ ID NO: 1044415 - RNA, 19 nt, Artificial Sequence
  Description of Artificial Sequence: Synthetic oligonucleotide
guauucccguuuuagaaga

SEQ ID NO: 1044416 - RNA, 19 nt, Artificial Sequence
  Description of Artificial Sequence: Synthetic oligonucleotide
ggcaacuuaauuccagugc

SEQ ID NO: 1044417 - RNA, 19 nt, Artificial Sequence
  Description of Artificial Sequence: Synthetic oligonucleotide
uggauccucaaaaggcuca

SEQ ID NO: 1044418 - RNA, 19 nt, Artificial Sequence
  Description of Artificial Sequence: Synthetic oligonucleotide
uccaaauccagucgcgguc

SEQ ID NO: 1044419 - RNA, 19 nt, Artificial Sequence
  Description of Artificial Sequence: Synthetic oligonucleotide
acggcuuuugguuuccucu

SEQ ID NO: 1044420 - RNA, 19 nt, Artificial Sequence
  Description of Artificial Sequence: Synthetic oligonucleotide
caagaguauucaauuugac

SEQ ID NO: 1044421 - RNA, 19 nt, Artificial Sequence
  Description of Artificial Sequence: Synthetic oligonucleotide
gaaccgcggaagccgaucg

SEQ ID NO: 1044422 - RNA, 19 nt, Artificial Sequence
  Description of Artificial Sequence: Synthetic oligonucleotide
auauaagcuuauaauauua

SEQ ID NO: 1044423 - RNA, 19 nt, Artificial Sequence
  Description of Artificial Sequence: Synthetic oligonucleotide
uuaucugggucgucaaagu

SEQ ID NO: 1044424 - RNA, 19 nt, Artificial Sequence
  Description of Artificial Sequence: Synthetic oligonucleotide
agacccucaauguucuuca

SEQ ID NO: 1044425 - RNA, 19 nt, Artificial Sequence
  Description of Artificial Sequence: Synthetic oligonucleotide
aaaccgcucaucauguaga

SEQ ID NO: 1044426 - RNA, 19 nt, Artificial Sequence
  Description of Artificial Sequence: Synthetic oligonucleotide
ugggugggcaacaguaccc

SEQ ID NO: 1044427 - RNA, 19 nt, Artificial Sequence
  Description of Artificial Sequence: Synthetic oligonucleotide
ugacggagcaggcacucgc

SEQ ID NO: 1044428 - RNA, 19 nt, Artificial Sequence
  Description of Artificial Sequence: Synthetic oligonucleotide
ugguucacaucugaugagc

SEQ ID NO: 1044429 - RNA, 19 nt, Artificial Sequence
  Description of Artificial Sequence: Synthetic oligonucleotide
aguagucauucaaaacuuc

SEQ ID NO: 1044430 - RNA, 19 nt, Artificial Sequence
  Description of Artificial Sequence: Synthetic oligonucleotide
caauuugacacaauucucu

SEQ ID NO: 1044431 - RNA, 19 nt, Artificial Sequence
  Description of Artificial Sequence: Synthetic oligonucleotide
uugaugucgucuugaggug

SEQ ID NO: 1044432 - RNA, 19 nt, Artificial Sequence
  Description of Artificial Sequence: Synthetic oligonucleotide
cugucggcuuauuugcccg

SEQ ID NO: 1044433 - RNA, 19 nt, Artificial Sequence
  Description of Artificial Sequence: Synthetic oligonucleotide
ucacugcuauugaucaucu

SEQ ID NO: 1044434 - RNA, 19 nt, Artificial Sequence
  Description of Artificial Sequence: Synthetic oligonucleotide
uaucugggucgucaaaguc

SEQ ID NO: 1044435 - RNA, 19 nt, Artificial Sequence
  Description of Artificial Sequence: Synthetic oligonucleotide
uaagacauugagagguauu

SEQ ID NO: 1044436 - RNA, 19 nt, Artificial Sequence
  Description of Artificial Sequence: Synthetic oligonucleotide
uaaggcgguacugggaaug

SEQ ID NO: 1044437 - RNA, 19 nt, Artificial Sequence
  Description of Artificial Sequence: Synthetic oligonucleotide
ucuacuugaauggaaccuu

SEQ ID NO: 1044438 - RNA, 19 nt, Artificial Sequence
  Description of Artificial Sequence: Synthetic oligonucleotide
gaauggaaccuuccaguuc

SEQ ID NO: 1044439 - RNA, 19 nt, Artificial Sequence
  Description of Artificial Sequence: Synthetic oligonucleotide
uccggcaaacccauugccu

SEQ ID NO: 1044440 - RNA, 19 nt, Artificial Sequence
  Description of Artificial Sequence: Synthetic oligonucleotide
accgauugcugucuacuug

SEQ ID NO: 1044441 - RNA, 19 nt, Artificial Sequence
  Description of Artificial Sequence: Synthetic oligonucleotide
uucuuucuaaggcgguacu

SEQ ID NO: 1044442 - RNA, 19 nt, Artificial Sequence
  Description of Artificial Sequence: Synthetic oligonucleotide
ucuuucuaaggcgguacug

SEQ ID NO: 1044443 - RNA, 19 nt, Artificial Sequence
  Description of Artificial Sequence: Synthetic oligonucleotide
cuccaucugacagugggcc

SEQ ID NO: 1044444 - RNA, 19 nt, Artificial Sequence
  Description of Artificial Sequence: Synthetic oligonucleotide
uucuugccgucuuuucucc

SEQ ID NO: 1044445 - RNA, 19 nt, Artificial Sequence
  Description of Artificial Sequence: Synthetic oligonucleotide
ucgucuugaggugacucag

SEQ ID NO: 1044446 - RNA, 19 nt, Artificial Sequence
  Description of Artificial Sequence: Synthetic oligonucleotide
gacagggacaaguucaccu

SEQ ID NO: 1044447 - RNA, 19 nt, Artificial Sequence
  Description of Artificial Sequence: Synthetic oligonucleotide
uucaacucuucguuccuuc

SEQ ID NO: 1044448 - RNA, 19 nt, Artificial Sequence
  Description of Artificial Sequence: Synthetic oligonucleotide
auccguucgaccugcuuug

SEQ ID NO: 1044449 - RNA, 19 nt, Artificial Sequence
  Description of Artificial Sequence: Synthetic oligonucleotide
ugggcaacaguacccucug

SEQ ID NO: 1044450 - RNA, 19 nt, Artificial Sequence
  Description of Artificial Sequence: Synthetic oligonucleotide
ggguagaucacugcuauug

SEQ ID NO: 1044451 - RNA, 19 nt, Artificial Sequence
  Description of Artificial Sequence: Synthetic oligonucleotide
uacagcuuuagacccucaa

SEQ ID NO: 1044452 - RNA, 19 nt, Artificial Sequence
  Description of Artificial Sequence: Synthetic oligonucleotide
uuauccucuuugcucucac

SEQ ID NO: 1044453 - RNA, 19 nt, Artificial Sequence
  Description of Artificial Sequence: Synthetic oligonucleotide
cuuauacugaaugcuccac

SEQ ID NO: 1044454 - RNA, 19 nt, Artificial Sequence
  Description of Artificial Sequence: Synthetic oligonucleotide
uccucaugauugaggaggu

SEQ ID NO: 1044455 - RNA, 19 nt, Artificial Sequence
  Description of Artificial Sequence: Synthetic oligonucleotide
ucaucgagagcagcaauaa

SEQ ID NO: 1044456 - RNA, 19 nt, Artificial Sequence
  Description of Artificial Sequence: Synthetic oligonucleotide
ccuccucaaacucugacgc

SEQ ID NO: 1044457 - RNA, 19 nt, Artificial Sequence
  Description of Artificial Sequence: Synthetic oligonucleotide
cuacuugaauggaaccuuc

SEQ ID NO: 1044458 - RNA, 19 nt, Artificial Sequence
  Description of Artificial Sequence: Synthetic oligonucleotide
aguucaccucucuuaagau

SEQ ID NO: 1044459 - RNA, 19 nt, Artificial Sequence
  Description of Artificial Sequence: Synthetic oligonucleotide
aacacaacuuauacugaau

SEQ ID NO: 1044460 - RNA, 19 nt, Artificial Sequence
  Description of Artificial Sequence: Synthetic oligonucleotide
ugagagguauucccguuuu

SEQ ID NO: 1044461 - RNA, 19 nt, Artificial Sequence
  Description of Artificial Sequence: Synthetic oligonucleotide
aguuuaaaugcuagcuugu

SEQ ID NO: 1044462 - RNA, 19 nt, Artificial Sequence
  Description of Artificial Sequence: Synthetic oligonucleotide
ucccguucgcgccacacgu

SEQ ID NO: 1044463 - RNA, 19 nt, Artificial Sequence
  Description of Artificial Sequence: Synthetic oligonucleotide
uugaccuucugggugggca

SEQ ID NO: 1044464 - RNA, 19 nt, Artificial Sequence
  Description of Artificial Sequence: Synthetic oligonucleotide
ugaaugcuccacaccuaca

SEQ ID NO: 1044465 - RNA, 19 nt, Artificial Sequence
  Description of Artificial Sequence: Synthetic oligonucleotide
auccaaauccagucgcggu

SEQ ID NO: 1044466 - RNA, 19 nt, Artificial Sequence
  Description of Artificial Sequence: Synthetic oligonucleotide
auuggaguauguacugcag

SEQ ID NO: 1044467 - RNA, 19 nt, Artificial Sequence
  Description of Artificial Sequence: Synthetic oligonucleotide
ugucggcuuauuugcccgg

SEQ ID NO: 1044468 - RNA, 19 nt, Artificial Sequence
  Description of Artificial Sequence: Synthetic oligonucleotide
gucgaagaacaccccauac

SEQ ID NO: 1044469 - RNA, 19 nt, Artificial Sequence
  Description of Artificial Sequence: Synthetic oligonucleotide
cuucuuucuaaggcgguac

SEQ ID NO: 1044470 - RNA, 19 nt, Artificial Sequence
  Description of Artificial Sequence: Synthetic oligonucleotide
accucucuuaagaucuugg

SEQ ID NO: 1044471 - RNA, 19 nt, Artificial Sequence
  Description of Artificial Sequence: Synthetic oligonucleotide
ccgcucaucauguagaguc

SEQ ID NO: 1044472 - RNA, 19 nt, Artificial Sequence
  Description of Artificial Sequence: Synthetic oligonucleotide
gcuccgguggaccaagugg

SEQ ID NO: 1044473 - RNA, 19 nt, Artificial Sequence
  Description of Artificial Sequence: Synthetic oligonucleotide
uuaucucagcuauucccau

SEQ ID NO: 1044474 - RNA, 19 nt, Artificial Sequence
  Description of Artificial Sequence: Synthetic oligonucleotide
ggaccaaguggaaagagac

SEQ ID NO: 1044475 - RNA, 19 nt, Artificial Sequence
  Description of Artificial Sequence: Synthetic oligonucleotide
gggaauauaagcuuauaau

SEQ ID NO: 1044476 - RNA, 19 nt, Artificial Sequence
  Description of Artificial Sequence: Synthetic oligonucleotide
aaccgcggaagccgaucgg

SEQ ID NO: 1044477 - RNA, 19 nt, Artificial Sequence
  Description of Artificial Sequence: Synthetic oligonucleotide
aagccgaucggcagcucac

SEQ ID NO: 1044478 - RNA, 19 nt, Artificial Sequence
  Description of Artificial Sequence: Synthetic oligonucleotide
ucuccggaaccgcggaagc

SEQ ID NO: 1044479 - RNA, 19 nt, Artificial Sequence
  Description of Artificial Sequence: Synthetic oligonucleotide
accgcggaagccgaucggc

SEQ ID NO: 1044480 - RNA, 19 nt, Artificial Sequence
  Description of Artificial Sequence: Synthetic oligonucleotide
gauggacucgcaaucccac

SEQ ID NO: 1044481 - RNA, 19 nt, Artificial Sequence
  Description of Artificial Sequence: Synthetic oligonucleotide
agcuccuuuucuugccguc

SEQ ID NO: 1044482 - RNA, 19 nt, Artificial Sequence
  Description of Artificial Sequence: Synthetic oligonucleotide
ucgucgaagaacaccccau

SEQ ID NO: 1044483 - RNA, 19 nt, Artificial Sequence
  Description of Artificial Sequence: Synthetic oligonucleotide
cagauggacucgcaauccc

SEQ ID NO: 1044484 - RNA, 19 nt, Artificial Sequence
  Description of Artificial Sequence: Synthetic oligonucleotide
acuuuacuuaucucagcua

SEQ ID NO: 1044485 - RNA, 19 nt, Artificial Sequence
  Description of Artificial Sequence: Synthetic oligonucleotide
gagguuaucugggucguca

SEQ ID NO: 1044486 - RNA, 19 nt, Artificial Sequence
  Description of Artificial Sequence: Synthetic oligonucleotide
ucuucucuauaaagggcuu

SEQ ID NO: 1044487 - RNA, 19 nt, Artificial Sequence
  Description of Artificial Sequence: Synthetic oligonucleotide
ugaugucgucuugagguga

SEQ ID NO: 1044488 - RNA, 19 nt, Artificial Sequence
  Description of Artificial Sequence: Synthetic oligonucleotide
gaucugucaccuccaucug

SEQ ID NO: 1044489 - RNA, 19 nt, Artificial Sequence
  Description of Artificial Sequence: Synthetic oligonucleotide
uggacucgcaaucccacuu

SEQ ID NO: 1044490 - RNA, 19 nt, Artificial Sequence
  Description of Artificial Sequence: Synthetic oligonucleotide
caaguucaccucucuuaag

SEQ ID NO: 1044491 - RNA, 19 nt, Artificial Sequence
  Description of Artificial Sequence: Synthetic oligonucleotide
cugacgcaaacaccgauga

SEQ ID NO: 1044492 - RNA, 19 nt, Artificial Sequence
  Description of Artificial Sequence: Synthetic oligonucleotide
agaaccuuacuuguauaaa

SEQ ID NO: 1044493 - RNA, 19 nt, Artificial Sequence
  Description of Artificial Sequence: Synthetic oligonucleotide
cucgcucuccggaaccgcg

SEQ ID NO: 1044494 - RNA, 19 nt, Artificial Sequence
  Description of Artificial Sequence: Synthetic oligonucleotide
uccugucggcuuauuugcc

SEQ ID NO: 1044495 - RNA, 19 nt, Artificial Sequence
  Description of Artificial Sequence: Synthetic oligonucleotide
ucggcuuauuugcccggag

SEQ ID NO: 1044496 - RNA, 19 nt, Artificial Sequence
  Description of Artificial Sequence: Synthetic oligonucleotide
ucgcucuccggaaccgcgg

SEQ ID NO: 1044497 - RNA, 19 nt, Artificial Sequence
  Description of Artificial Sequence: Synthetic oligonucleotide
gaacaccccauacuuccuc

SEQ ID NO: 1044498 - RNA, 19 nt, Artificial Sequence
  Description of Artificial Sequence: Synthetic oligonucleotide
ggcaugacggagcaggcac

SEQ ID NO: 1044499 - RNA, 19 nt, Artificial Sequence
  Description of Artificial Sequence: Synthetic oligonucleotide
cauggaauacucugugaaa

SEQ ID NO: 1044500 - RNA, 19 nt, Artificial Sequence
  Description of Artificial Sequence: Synthetic oligonucleotide
ggguugacaccuuggguag

SEQ ID NO: 1044501 - RNA, 19 nt, Artificial Sequence
  Description of Artificial Sequence: Synthetic oligonucleotide
gcuauugaucaucugcauc

SEQ ID NO: 1044502 - RNA, 19 nt, Artificial Sequence
  Description of Artificial Sequence: Synthetic oligonucleotide
gucgcgguccugaaacugg

SEQ ID NO: 1044503 - RNA, 19 nt, Artificial Sequence
  Description of Artificial Sequence: Synthetic oligonucleotide
ucucacuuuugggccgugg

SEQ ID NO: 1044504 - RNA, 19 nt, Artificial Sequence
  Description of Artificial Sequence: Synthetic oligonucleotide
acccauugccucuucuccu

SEQ ID NO: 1044505 - RNA, 19 nt, Artificial Sequence
  Description of Artificial Sequence: Synthetic oligonucleotide
aucggcagcucaccggugu

SEQ ID NO: 1044506 - RNA, 19 nt, Artificial Sequence
  Description of Artificial Sequence: Synthetic oligonucleotide
cacaauucucugcuuucuc

SEQ ID NO: 1044507 - RNA, 19 nt, Artificial Sequence
  Description of Artificial Sequence: Synthetic oligonucleotide
gucauggaauacucuguga

SEQ ID NO: 1044508 - RNA, 19 nt, Artificial Sequence
  Description of Artificial Sequence: Synthetic oligonucleotide
aaggaucgcgcuggcuccg

SEQ ID NO: 1044509 - RNA, 19 nt, Artificial Sequence
  Description of Artificial Sequence: Synthetic oligonucleotide
uaucucagcuauucccaua

SEQ ID NO: 1044510 - RNA, 19 nt, Artificial Sequence
  Description of Artificial Sequence: Synthetic oligonucleotide
cuccgguggaccaagugga

SEQ ID NO: 1044511 - RNA, 19 nt, Artificial Sequence
  Description of Artificial Sequence: Synthetic oligonucleotide
gacaccuuggguagaucac

SEQ ID NO: 1044512 - RNA, 19 nt, Artificial Sequence
  Description of Artificial Sequence: Synthetic oligonucleotide
uugguaaauuauggagcac

SEQ ID NO: 1044513 - RNA, 19 nt, Artificial Sequence
  Description of Artificial Sequence: Synthetic oligonucleotide
caucgucgaagaacacccc

SEQ ID NO: 1044514 - RNA, 19 nt, Artificial Sequence
  Description of Artificial Sequence: Synthetic oligonucleotide
auuugcccggagaaugaag

SEQ ID NO: 1044515 - RNA, 19 nt, Artificial Sequence
  Description of Artificial Sequence: Synthetic oligonucleotide
ugcugucuacuugaaugga

SEQ ID NO: 1044516 - RNA, 19 nt, Artificial Sequence
  Description of Artificial Sequence: Synthetic oligonucleotide
gaugucgucuugaggugac

SEQ ID NO: 1044517 - RNA, 19 nt, Artificial Sequence
  Description of Artificial Sequence: Synthetic oligonucleotide
cugcuaaaggaucgcgcug

SEQ ID NO: 1044518 - RNA, 19 nt, Artificial Sequence
  Description of Artificial Sequence: Synthetic oligonucleotide
ucaccggugucucccguuc

SEQ ID NO: 1044519 - RNA, 19 nt, Artificial Sequence
  Description of Artificial Sequence: Synthetic oligonucleotide
aaacaccgaugaaggcaac

SEQ ID NO: 1044520 - RNA, 19 nt, Artificial Sequence
  Description of Artificial Sequence: Synthetic oligonucleotide
agcucugcgggcccagaug

SEQ ID NO: 1044521 - RNA, 19 nt, Artificial Sequence
  Description of Artificial Sequence: Synthetic oligonucleotide
ccaguucugcauuauccag

SEQ ID NO: 1044522 - RNA, 19 nt, Artificial Sequence
  Description of Artificial Sequence: Synthetic oligonucleotide
uccaucugacagugggccu

SEQ ID NO: 1044523 - RNA, 19 nt, Artificial Sequence
  Description of Artificial Sequence: Synthetic oligonucleotide
uucgaccugcuuugcggug

SEQ ID NO: 1044524 - RNA, 19 nt, Artificial Sequence
  Description of Artificial Sequence: Synthetic oligonucleotide
uugccgucuuuucuccagu

SEQ ID NO: 1044525 - RNA, 19 nt, Artificial Sequence
  Description of Artificial Sequence: Synthetic oligonucleotide
ccagucgcgguccugaaac

SEQ ID NO: 1044526 - RNA, 19 nt, Artificial Sequence
  Description of Artificial Sequence: Synthetic oligonucleotide
ucgcgguccugaaacugga

SEQ ID NO: 1044527 - RNA, 19 nt, Artificial Sequence
  Description of Artificial Sequence: Synthetic oligonucleotide
gucgucuugaggugacuca

SEQ ID NO: 1044528 - RNA, 19 nt, Artificial Sequence
  Description of Artificial Sequence: Synthetic oligonucleotide
ggauccaaauccagucgcg

SEQ ID NO: 1044529 - RNA, 19 nt, Artificial Sequence
  Description of Artificial Sequence: Synthetic oligonucleotide
gguagaucacugcuauuga

SEQ ID NO: 1044530 - RNA, 19 nt, Artificial Sequence
  Description of Artificial Sequence: Synthetic oligonucleotide
ucgaccugcuuugcgguga

SEQ ID NO: 1044531 - RNA, 19 nt, Artificial Sequence
  Description of Artificial Sequence: Synthetic oligonucleotide
cugcugcuaaaggaucgcg

SEQ ID NO: 1044532 - RNA, 19 nt, Artificial Sequence
  Description of Artificial Sequence: Synthetic oligonucleotide
agauggacucgcaauccca

SEQ ID NO: 1044533 - RNA, 19 nt, Artificial Sequence
  Description of Artificial Sequence: Synthetic oligonucleotide
auggacucgcaaucccacu

SEQ ID NO: 1044534 - RNA, 19 nt, Artificial Sequence
  Description of Artificial Sequence: Synthetic oligonucleotide
gaucgcgcuggcuccggug

SEQ ID NO: 1044535 - RNA, 19 nt, Artificial Sequence
  Description of Artificial Sequence: Synthetic oligonucleotide
gcucccuuccucaaugucc

SEQ ID NO: 1044536 - RNA, 19 nt, Artificial Sequence
  Description of Artificial Sequence: Synthetic oligonucleotide
ugacgcaaacaccgaugaa

SEQ ID NO: 1044537 - RNA, 19 nt, Artificial Sequence
  Description of Artificial Sequence: Synthetic oligonucleotide
agccaucacugcucccuuc

SEQ ID NO: 1044538 - RNA, 19 nt, Artificial Sequence
  Description of Artificial Sequence: Synthetic oligonucleotide
caugauugaggaggucaug

SEQ ID NO: 1044539 - RNA, 19 nt, Artificial Sequence
  Description of Artificial Sequence: Synthetic oligonucleotide
acacagguccgggacagca

SEQ ID NO: 1044540 - RNA, 19 nt, Artificial Sequence
  Description of Artificial Sequence: Synthetic oligonucleotide
aaauccagucgcgguccug

SEQ ID NO: 1044541 - RNA, 19 nt, Artificial Sequence
  Description of Artificial Sequence: Synthetic oligonucleotide
cguucgaccugcuuugcgg

SEQ ID NO: 1044542 - RNA, 19 nt, Artificial Sequence
  Description of Artificial Sequence: Synthetic oligonucleotide
cucuccggaaccgcggaag

SEQ ID NO: 1044543 - RNA, 19 nt, Artificial Sequence
  Description of Artificial Sequence: Synthetic oligonucleotide
cauguagagucagcuguuc

SEQ ID NO: 1044544 - RNA, 19 nt, Artificial Sequence
  Description of Artificial Sequence: Synthetic oligonucleotide
ggcuuauuugcccggagaa

SEQ ID NO: 1044545 - RNA, 19 nt, Artificial Sequence
  Description of Artificial Sequence: Synthetic oligonucleotide
cucaaaccgcucaucaugu

SEQ ID NO: 1044546 - RNA, 19 nt, Artificial Sequence
  Description of Artificial Sequence: Synthetic oligonucleotide
agccgaucggcagcucacc

SEQ ID NO: 1044547 - RNA, 19 nt, Artificial Sequence
  Description of Artificial Sequence: Synthetic oligonucleotide
aguauguacugcagaugga

SEQ ID NO: 1044548 - RNA, 19 nt, Artificial Sequence
  Description of Artificial Sequence: Synthetic oligonucleotide
agucgcgguccugaaacug

SEQ ID NO: 1044549 - RNA, 19 nt, Artificial Sequence
  Description of Artificial Sequence: Synthetic oligonucleotide
agagggaauauaagcuuau

SEQ ID NO: 1044550 - RNA, 19 nt, Artificial Sequence
  Description of Artificial Sequence: Synthetic oligonucleotide
cucuucguuccuuccgcuc

SEQ ID NO: 1044551 - RNA, 19 nt, Artificial Sequence
  Description of Artificial Sequence: Synthetic oligonucleotide
guagcugacaagagaaccu

SEQ ID NO: 1044552 - RNA, 19 nt, Artificial Sequence
  Description of Artificial Sequence: Synthetic oligonucleotide
uugacacaauucucugcuu

SEQ ID NO: 1044553 - RNA, 19 nt, Artificial Sequence
  Description of Artificial Sequence: Synthetic oligonucleotide
aggcucaagaguauucaau

SEQ ID NO: 1044554 - RNA, 19 nt, Artificial Sequence
  Description of Artificial Sequence: Synthetic oligonucleotide
cucccguucgcgccacacg

SEQ ID NO: 1044555 - RNA, 19 nt, Artificial Sequence
  Description of Artificial Sequence: Synthetic oligonucleotide
cugaaggaccauggugacc

SEQ ID NO: 1044556 - RNA, 19 nt, Artificial Sequence
  Description of Artificial Sequence: Synthetic oligonucleotide
gaucuguuugggcuuuggu

SEQ ID NO: 1044557 - RNA, 19 nt, Artificial Sequence
  Description of Artificial Sequence: Synthetic oligonucleotide
ccugucggcuuauuugccc

SEQ ID NO: 1044558 - RNA, 19 nt, Artificial Sequence
  Description of Artificial Sequence: Synthetic oligonucleotide
auggagcacaaugaagauu

SEQ ID NO: 1044559 - RNA, 19 nt, Artificial Sequence
  Description of Artificial Sequence: Synthetic oligonucleotide
acucucagauuccggcaaa

SEQ ID NO: 1044560 - RNA, 19 nt, Artificial Sequence
  Description of Artificial Sequence: Synthetic oligonucleotide
guagaucacugcuauugau

SEQ ID NO: 1044561 - RNA, 19 nt, Artificial Sequence
  Description of Artificial Sequence: Synthetic oligonucleotide
uccagucgcgguccugaaa

SEQ ID NO: 1044562 - RNA, 19 nt, Artificial Sequence
  Description of Artificial Sequence: Synthetic oligonucleotide
ucaaaccgcucaucaugua

SEQ ID NO: 1044563 - RNA, 19 nt, Artificial Sequence
  Description of Artificial Sequence: Synthetic oligonucleotide
uuucaacucuucguuccuu

SEQ ID NO: 1044564 - RNA, 19 nt, Artificial Sequence
  Description of Artificial Sequence: Synthetic oligonucleotide
gguaaauuauggagcacaa

SEQ ID NO: 1044565 - RNA, 19 nt, Artificial Sequence
  Description of Artificial Sequence: Synthetic oligonucleotide
cacagguccgggacagcac

SEQ ID NO: 1044566 - RNA, 19 nt, Artificial Sequence
  Description of Artificial Sequence: Synthetic oligonucleotide
ggcgguacugggaaugagc

SEQ ID NO: 1044567 - RNA, 19 nt, Artificial Sequence
  Description of Artificial Sequence: Synthetic oligonucleotide
ccguuuuagaagacaggug

SEQ ID NO: 1044568 - RNA, 19 nt, Artificial Sequence
  Description of Artificial Sequence: Synthetic oligonucleotide
gcagauggacucgcaaucc

SEQ ID NO: 1044569 - RNA, 19 nt, Artificial Sequence
  Description of Artificial Sequence: Synthetic oligonucleotide
gccacacguggguacacag

SEQ ID NO: 1044570 - RNA, 19 nt, Artificial Sequence
  Description of Artificial Sequence: Synthetic oligonucleotide
guacugcagauggacucgc

SEQ ID NO: 1044571 - RNA, 19 nt, Artificial Sequence
  Description of Artificial Sequence: Synthetic oligonucleotide
ugcaaccgauugcugucua

SEQ ID NO: 1044572 - RNA, 19 nt, Artificial Sequence
  Description of Artificial Sequence: Synthetic oligonucleotide
caugacggagcaggcacuc

SEQ ID NO: 1044573 - RNA, 19 nt, Artificial Sequence
  Description of Artificial Sequence: Synthetic oligonucleotide
uccgguggaccaaguggaa

SEQ ID NO: 1044574 - RNA, 19 nt, Artificial Sequence
  Description of Artificial Sequence: Synthetic oligonucleotide
acguggguacacagguccg

SEQ ID NO: 1044575 - RNA, 19 nt, Artificial Sequence
  Description of Artificial Sequence: Synthetic oligonucleotide
augacggagcaggcacucg

SEQ ID NO: 1044576 - RNA, 19 nt, Artificial Sequence
  Description of Artificial Sequence: Synthetic oligonucleotide
uuugggccguggcuggguu

SEQ ID NO: 1044577 - RNA, 19 nt, Artificial Sequence
  Description of Artificial Sequence: Synthetic oligonucleotide
aggagguuaucugggucgu

SEQ ID NO: 1044578 - RNA, 19 nt, Artificial Sequence
  Description of Artificial Sequence: Synthetic oligonucleotide
cacugcuauugaucaucug

SEQ ID NO: 1044579 - RNA, 19 nt, Artificial Sequence
  Description of Artificial Sequence: Synthetic oligonucleotide
caucugacagugggccugc

SEQ ID NO: 1044580 - RNA, 19 nt, Artificial Sequence
  Description of Artificial Sequence: Synthetic oligonucleotide
gcucaucauguagagucag

SEQ ID NO: 1044581 - RNA, 19 nt, Artificial Sequence
  Description of Artificial Sequence: Synthetic oligonucleotide
gcugcuaaaggaucgcgcu

SEQ ID NO: 1044582 - RNA, 19 nt, Artificial Sequence
  Description of Artificial Sequence: Synthetic oligonucleotide
ucuuucugugaggcaugac

SEQ ID NO: 1044583 - RNA, 19 nt, Artificial Sequence
  Description of Artificial Sequence: Synthetic oligonucleotide
ccgauugcugucuacuuga

SEQ ID NO: 1044584 - RNA, 19 nt, Artificial Sequence
  Description of Artificial Sequence: Synthetic oligonucleotide
ggaucuguuugggcuuugg

SEQ ID NO: 1044585 - RNA, 19 nt, Artificial Sequence
  Description of Artificial Sequence: Synthetic oligonucleotide
cacucgcucuccggaaccg

SEQ ID NO: 1044586 - RNA, 19 nt, Artificial Sequence
  Description of Artificial Sequence: Synthetic oligonucleotide
cuuuugggccguggcuggg

SEQ ID NO: 1044587 - RNA, 19 nt, Artificial Sequence
  Description of Artificial Sequence: Synthetic oligonucleotide
caccggugucucccguucg

SEQ ID NO: 1044588 - RNA, 19 nt, Artificial Sequence
  Description of Artificial Sequence: Synthetic oligonucleotide
ucaccucucuuaagaucuu

SEQ ID NO: 1044589 - RNA, 19 nt, Artificial Sequence
  Description of Artificial Sequence: Synthetic oligonucleotide
agguccgggacagcacguc

SEQ ID NO: 1044590 - RNA, 19 nt, Artificial Sequence
  Description of Artificial Sequence: Synthetic oligonucleotide
cauagucaucgucgaagaa

SEQ ID NO: 1044591 - RNA, 19 nt, Artificial Sequence
  Description of Artificial Sequence: Synthetic oligonucleotide
ucggcagcucaccgguguc

SEQ ID NO: 1044592 - RNA, 19 nt, Artificial Sequence
  Description of Artificial Sequence: Synthetic oligonucleotide
ucucccguucgcgccacac

SEQ ID NO: 1044593 - RNA, 19 nt, Artificial Sequence
  Description of Artificial Sequence: Synthetic oligonucleotide
ucgcgccacacguggguac

SEQ ID NO: 1044594 - RNA, 19 nt, Artificial Sequence
  Description of Artificial Sequence: Synthetic oligonucleotide
cccagauggcuccuucagg

SEQ ID NO: 1044595 - RNA, 19 nt, Artificial Sequence
  Description of Artificial Sequence: Synthetic oligonucleotide
guucgaccugcuuugcggu

SEQ ID NO: 1044596 - RNA, 19 nt, Artificial Sequence
  Description of Artificial Sequence: Synthetic oligonucleotide
gccgaucggcagcucaccg

SEQ ID NO: 1044597 - RNA, 19 nt, Artificial Sequence
  Description of Artificial Sequence: Synthetic oligonucleotide
caggcacucgcucuccgga

SEQ ID NO: 1044598 - RNA, 19 nt, Artificial Sequence
  Description of Artificial Sequence: Synthetic oligonucleotide
gccguggcuggguugacac

SEQ ID NO: 1044599 - RNA, 19 nt, Artificial Sequence
  Description of Artificial Sequence: Synthetic oligonucleotide
cucaucaagcucauuuguu

SEQ ID NO: 1044600 - RNA, 19 nt, Artificial Sequence
  Description of Artificial Sequence: Synthetic oligonucleotide
gagggaauauaagcuuaua

SEQ ID NO: 1044601 - RNA, 19 nt, Artificial Sequence
  Description of Artificial Sequence: Synthetic oligonucleotide
ugccgucuuuucuccaguu

SEQ ID NO: 1044602 - RNA, 19 nt, Artificial Sequence
  Description of Artificial Sequence: Synthetic oligonucleotide
gcaggcacucgcucuccgg

SEQ ID NO: 1044603 - RNA, 19 nt, Artificial Sequence
  Description of Artificial Sequence: Synthetic oligonucleotide
gagagguauucccguuuua

SEQ ID NO: 1044604 - RNA, 19 nt, Artificial Sequence
  Description of Artificial Sequence: Synthetic oligonucleotide
gcuaaaggaucgcgcuggc

SEQ ID NO: 1044605 - RNA, 19 nt, Artificial Sequence
  Description of Artificial Sequence: Synthetic oligonucleotide
uccguucgaccugcuuugc

SEQ ID NO: 1044606 - RNA, 19 nt, Artificial Sequence
  Description of Artificial Sequence: Synthetic oligonucleotide
ccguucgcgccacacgugg

SEQ ID NO: 1044607 - RNA, 19 nt, Artificial Sequence
  Description of Artificial Sequence: Synthetic oligonucleotide
cuccucaaacucugacgca

SEQ ID NO: 1044608 - RNA, 19 nt, Artificial Sequence
  Description of Artificial Sequence: Synthetic oligonucleotide
ggacucgcaaucccacuuc

SEQ ID NO: 1044609 - RNA, 19 nt, Artificial Sequence
  Description of Artificial Sequence: Synthetic oligonucleotide
ccgaucggcagcucaccgg

SEQ ID NO: 1044610 - RNA, 19 nt, Artificial Sequence
  Description of Artificial Sequence: Synthetic oligonucleotide
uggguagaucacugcuauu

SEQ ID NO: 1044611 - RNA, 19 nt, Artificial Sequence
  Description of Artificial Sequence: Synthetic oligonucleotide
cuggcuccgguggaccaag

SEQ ID NO: 1044612 - RNA, 19 nt, Artificial Sequence
  Description of Artificial Sequence: Synthetic oligonucleotide
guacugggaaugagcucug

SEQ ID NO: 1044613 - RNA, 19 nt, Artificial Sequence
  Description of Artificial Sequence: Synthetic oligonucleotide
acugaaugcuccacaccua

SEQ ID NO: 1044614 - RNA, 19 nt, Artificial Sequence
  Description of Artificial Sequence: Synthetic oligonucleotide
uuagacccucaauguucuu

SEQ ID NO: 1044615 - RNA, 19 nt, Artificial Sequence
  Description of Artificial Sequence: Synthetic oligonucleotide
acucugacgcaaacaccga

SEQ ID NO: 1044616 - RNA, 19 nt, Artificial Sequence
  Description of Artificial Sequence: Synthetic oligonucleotide
aggcaugacggagcaggca

SEQ ID NO: 1044617 - RNA, 19 nt, Artificial Sequence
  Description of Artificial Sequence: Synthetic oligonucleotide
gcacucgcucuccggaacc

SEQ ID NO: 1044618 - RNA, 19 nt, Artificial Sequence
  Description of Artificial Sequence: Synthetic oligonucleotide
aggugucuuuugaugucgu

SEQ ID NO: 1044619 - RNA, 19 nt, Artificial Sequence
  Description of Artificial Sequence: Synthetic oligonucleotide
aggcacucgcucuccggaa

SEQ ID NO: 1044620 - RNA, 19 nt, Artificial Sequence
  Description of Artificial Sequence: Synthetic oligonucleotide
guccgggacagcacgucac

SEQ ID NO: 1044621 - RNA, 19 nt, Artificial Sequence
  Description of Artificial Sequence: Synthetic oligonucleotide
gcaaccgauugcugucuac

SEQ ID NO: 1044622 - RNA, 19 nt, Artificial Sequence
  Description of Artificial Sequence: Synthetic oligonucleotide
caaccgauugcugucuacu

SEQ ID NO: 1044623 - RNA, 19 nt, Artificial Sequence
  Description of Artificial Sequence: Synthetic oligonucleotide
ugcauccguucgaccugcu

SEQ ID NO: 1044624 - RNA, 19 nt, Artificial Sequence
  Description of Artificial Sequence: Synthetic oligonucleotide
cagauuccggcaaacccau

SEQ ID NO: 1044625 - RNA, 19 nt, Artificial Sequence
  Description of Artificial Sequence: Synthetic oligonucleotide
gacccucaauguucuucaa

SEQ ID NO: 1044626 - RNA, 19 nt, Artificial Sequence
  Description of Artificial Sequence: Synthetic oligonucleotide
ucgcgcuggcuccggugga

SEQ ID NO: 1044627 - RNA, 19 nt, Artificial Sequence
  Description of Artificial Sequence: Synthetic oligonucleotide
uucgcgccacacgugggua

SEQ ID NO: 1044628 - RNA, 19 nt, Artificial Sequence
  Description of Artificial Sequence: Synthetic oligonucleotide
gguggaccaaguggaaaga

SEQ ID NO: 1044629 - RNA, 19 nt, Artificial Sequence
  Description of Artificial Sequence: Synthetic oligonucleotide
gaucggcagcucaccggug

SEQ ID NO: 1044630 - RNA, 19 nt, Artificial Sequence
  Description of Artificial Sequence: Synthetic oligonucleotide
ggcuccgguggaccaagug

SEQ ID NO: 1044631 - RNA, 19 nt, Artificial Sequence
  Description of Artificial Sequence: Synthetic oligonucleotide
aggaucgcgcuggcuccgg

SEQ ID NO: 1044632 - RNA, 19 nt, Artificial Sequence
  Description of Artificial Sequence: Synthetic oligonucleotide
guucgcgccacacgugggu

SEQ ID NO: 1044633 - RNA, 19 nt, Artificial Sequence
  Description of Artificial Sequence: Synthetic oligonucleotide
cuccacaccuacagcuuua

SEQ ID NO: 1044634 - RNA, 19 nt, Artificial Sequence
  Description of Artificial Sequence: Synthetic oligonucleotide
ccgucuuuucuccaguuua

SEQ ID NO: 1044635 - RNA, 19 nt, Artificial Sequence
  Description of Artificial Sequence: Synthetic oligonucleotide
gcuuuagacccucaauguu

SEQ ID NO: 1044636 - RNA, 19 nt, Artificial Sequence
  Description of Artificial Sequence: Synthetic oligonucleotide
gguccgggacagcacguca

SEQ ID NO: 1044637 - RNA, 19 nt, Artificial Sequence
  Description of Artificial Sequence: Synthetic oligonucleotide
ccguucgaccugcuuugcg

SEQ ID NO: 1044638 - RNA, 19 nt, Artificial Sequence
  Description of Artificial Sequence: Synthetic oligonucleotide
auccagucgcgguccugaa

SEQ ID NO: 1044639 - RNA, 19 nt, Artificial Sequence
  Description of Artificial Sequence: Synthetic oligonucleotide
gcucaagaguauucaauuu

SEQ ID NO: 1044640 - RNA, 19 nt, Artificial Sequence
  Description of Artificial Sequence: Synthetic oligonucleotide
caucaucgagagcagcaau

SEQ ID NO: 1044641 - RNA, 19 nt, Artificial Sequence
  Description of Artificial Sequence: Synthetic oligonucleotide
gucggcuuauuugcccgga

SEQ ID NO: 1044642 - RNA, 19 nt, Artificial Sequence
  Description of Artificial Sequence: Synthetic oligonucleotide
ggugggcaacaguacccuc

SEQ ID NO: 1044643 - RNA, 19 nt, Artificial Sequence
  Description of Artificial Sequence: Synthetic oligonucleotide
uggcuccgguggaccaagu

SEQ ID NO: 1044644 - RNA, 19 nt, Artificial Sequence
  Description of Artificial Sequence: Synthetic oligonucleotide
cucugacgcaaacaccgau

SEQ ID NO: 1044645 - RNA, 19 nt, Artificial Sequence
  Description of Artificial Sequence: Synthetic oligonucleotide
ggaaccgcggaagccgauc

SEQ ID NO: 1044646 - RNA, 19 nt, Artificial Sequence
  Description of Artificial Sequence: Synthetic oligonucleotide
cuucguuccuuccgcuccu

SEQ ID NO: 1044647 - RNA, 19 nt, Artificial Sequence
  Description of Artificial Sequence: Synthetic oligonucleotide
cgcggaagccgaucggcag

SEQ ID NO: 1044648 - RNA, 19 nt, Artificial Sequence
  Description of Artificial Sequence: Synthetic oligonucleotide
ccucucuuaagaucuuggu

SEQ ID NO: 1044649 - RNA, 19 nt, Artificial Sequence
  Description of Artificial Sequence: Synthetic oligonucleotide
ggaggucauggaauacucu

SEQ ID NO: 1044650 - RNA, 19 nt, Artificial Sequence
  Description of Artificial Sequence: Synthetic oligonucleotide
cguucgcgccacacguggg

SEQ ID NO: 1044651 - RNA, 19 nt, Artificial Sequence
  Description of Artificial Sequence: Synthetic oligonucleotide
ggacaaguucaccucucuu

SEQ ID NO: 1044652 - RNA, 19 nt, Artificial Sequence
  Description of Artificial Sequence: Synthetic oligonucleotide
cucucacuuuugggccgug

SEQ ID NO: 1044653 - RNA, 19 nt, Artificial Sequence
  Description of Artificial Sequence: Synthetic oligonucleotide
gguugacaccuuggguaga

SEQ ID NO: 1044654 - RNA, 19 nt, Artificial Sequence
  Description of Artificial Sequence: Synthetic oligonucleotide
gcuuauuugcccggagaau

SEQ ID NO: 1044655 - RNA, 19 nt, Artificial Sequence
  Description of Artificial Sequence: Synthetic oligonucleotide
cgcucaucauguagaguca

SEQ ID NO: 1044656 - RNA, 19 nt, Artificial Sequence
  Description of Artificial Sequence: Synthetic oligonucleotide
cccguucgcgccacacgug

SEQ ID NO: 1044657 - RNA, 19 nt, Artificial Sequence
  Description of Artificial Sequence: Synthetic oligonucleotide
cuuugcggugaguccuuuu

SEQ ID NO: 1044658 - RNA, 19 nt, Artificial Sequence
  Description of Artificial Sequence: Synthetic oligonucleotide
cagucgcgguccugaaacu

SEQ ID NO: 1044659 - RNA, 19 nt, Artificial Sequence
  Description of Artificial Sequence: Synthetic oligonucleotide
ggagguuaucugggucguc

SEQ ID NO: 1044660 - RNA, 19 nt, Artificial Sequence
  Description of Artificial Sequence: Synthetic oligonucleotide
cagguccgggacagcacgu

SEQ ID NO: 1044661 - RNA, 19 nt, Artificial Sequence
  Description of Artificial Sequence: Synthetic oligonucleotide
gugggugguuguacaaauu

SEQ ID NO: 1044662 - RNA, 19 nt, Artificial Sequence
  Description of Artificial Sequence: Synthetic oligonucleotide
cggcuuauuugcccggaga

SEQ ID NO: 1044663 - RNA, 19 nt, Artificial Sequence
  Description of Artificial Sequence: Synthetic oligonucleotide
cgcgguccugaaacuggag

SEQ ID NO: 1044664 - RNA, 19 nt, Artificial Sequence
  Description of Artificial Sequence: Synthetic oligonucleotide
agauuccggcaaacccauu

SEQ ID NO: 1044665 - RNA, 19 nt, Artificial Sequence
  Description of Artificial Sequence: Synthetic oligonucleotide
gcuccacaccuacagcuuu

SEQ ID NO: 1044666 - RNA, 19 nt, Artificial Sequence
  Description of Artificial Sequence: Synthetic oligonucleotide
ccgaugaaggcaacuuaau

SEQ ID NO: 1044667 - RNA, 19 nt, Artificial Sequence
  Description of Artificial Sequence: Synthetic oligonucleotide
cucaccggugucucccguu

SEQ ID NO: 1044668 - RNA, 19 nt, Artificial Sequence
  Description of Artificial Sequence: Synthetic oligonucleotide
gcccggagaaugaagucau

SEQ ID NO: 1044669 - RNA, 19 nt, Artificial Sequence
  Description of Artificial Sequence: Synthetic oligonucleotide
ccgcggaagccgaucggca

SEQ ID NO: 1044670 - RNA, 19 nt, Artificial Sequence
  Description of Artificial Sequence: Synthetic oligonucleotide
cgucgaagaacaccccaua

SEQ ID NO: 1044671 - RNA, 19 nt, Artificial Sequence
  Description of Artificial Sequence: Synthetic oligonucleotide
gccgucuuuucuccaguuu

SEQ ID NO: 1044672 - RNA, 19 nt, Artificial Sequence
  Description of Artificial Sequence: Synthetic oligonucleotide
gcucuccggaaccgcggaa

SEQ ID NO: 1044673 - RNA, 19 nt, Artificial Sequence
  Description of Artificial Sequence: Synthetic oligonucleotide
cgaucggcagcucaccggu

SEQ ID NO: 1044674 - RNA, 19 nt, Artificial Sequence
  Description of Artificial Sequence: Synthetic oligonucleotide
gcaugacggagcaggcacu

SEQ ID NO: 1044675 - RNA, 19 nt, Artificial Sequence
  Description of Artificial Sequence: Synthetic oligonucleotide
gucucccguucgcgccaca

SEQ ID NO: 1044676 - RNA, 19 nt, Artificial Sequence
  Description of Artificial Sequence: Synthetic oligonucleotide
ccgguggaccaaguggaaa

SEQ ID NO: 1044677 - RNA, 19 nt, Artificial Sequence
  Description of Artificial Sequence: Synthetic oligonucleotide
gcgccacacguggguacac

SEQ ID NO: 1044678 - RNA, 19 nt, Artificial Sequence
  Description of Artificial Sequence: Synthetic oligonucleotide
ggaucgcgcuggcuccggu

SEQ ID NO: 1044679 - RNA, 19 nt, Artificial Sequence
  Description of Artificial Sequence: Synthetic oligonucleotide
gcucaccggugucucccgu

SEQ ID NO: 1044680 - RNA, 19 nt, Artificial Sequence
  Description of Artificial Sequence: Synthetic oligonucleotide
cggcaaacccauugccucu

SEQ ID NO: 1044681 - RNA, 19 nt, Artificial Sequence
  Description of Artificial Sequence: Synthetic oligonucleotide
cgcucuccggaaccgcgga

SEQ ID NO: 1044682 - RNA, 19 nt, Artificial Sequence
  Description of Artificial Sequence: Synthetic oligonucleotide
gcuuugcggugaguccuuu

SEQ ID NO: 1044683 - RNA, 19 nt, Artificial Sequence
  Description of Artificial Sequence: Synthetic oligonucleotide
cggaaccgcggaagccgau

SEQ ID NO: 1044684 - RNA, 19 nt, Artificial Sequence
  Description of Artificial Sequence: Synthetic oligonucleotide
cgggcccagauggcuccuu

SEQ ID NO: 1044685 - RNA, 19 nt, Artificial Sequence
  Description of Artificial Sequence: Synthetic oligonucleotide
aaugaucagagcuggauac

SEQ ID NO: 1044686 - RNA, 19 nt, Artificial Sequence
  Description of Artificial Sequence: Synthetic oligonucleotide
agaggaacgaguuuagucc

SEQ ID NO: 1044687 - RNA, 19 nt, Artificial Sequence
  Description of Artificial Sequence: Synthetic oligonucleotide
aaggagaucggucacagag

SEQ ID NO: 1044688 - RNA, 19 nt, Artificial Sequence
  Description of Artificial Sequence: Synthetic oligonucleotide
uguaguugggcucugacag

SEQ ID NO: 1044689 - RNA, 19 nt, Artificial Sequence
  Description of Artificial Sequence: Synthetic oligonucleotide
gauacgauggauaaccucg

SEQ ID NO: 1044690 - RNA, 19 nt, Artificial Sequence
  Description of Artificial Sequence: Synthetic oligonucleotide
aagagaacgagguagagau

SEQ ID NO: 1044691 - RNA, 19 nt, Artificial Sequence
  Description of Artificial Sequence: Synthetic oligonucleotide
uaccaaaugacucuggcgc

SEQ ID NO: 1044692 - RNA, 19 nt, Artificial Sequence
  Description of Artificial Sequence: Synthetic oligonucleotide
uuacgguacaccaagaaac

SEQ ID NO: 1044693 - RNA, 19 nt, Artificial Sequence
  Description of Artificial Sequence: Synthetic oligonucleotide
uuuaccaugacccaccauc

SEQ ID NO: 1044694 - RNA, 19 nt, Artificial Sequence
  Description of Artificial Sequence: Synthetic oligonucleotide
gaagguugcagucauuacg

SEQ ID NO: 1044695 - RNA, 19 nt, Artificial Sequence
  Description of Artificial Sequence: Synthetic oligonucleotide
aacgaguuuaguccugggc

SEQ ID NO: 1044696 - RNA, 19 nt, Artificial Sequence
  Description of Artificial Sequence: Synthetic oligonucleotide
uauggcauguuuuaugcag

SEQ ID NO: 1044697 - RNA, 19 nt, Artificial Sequence
  Description of Artificial Sequence: Synthetic oligonucleotide
uuuaguaccaaaugacucu

SEQ ID NO: 1044698 - RNA, 19 nt, Artificial Sequence
  Description of Artificial Sequence: Synthetic oligonucleotide
uuuuaguaccaaaugacuc

SEQ ID NO: 1044699 - RNA, 19 nt, Artificial Sequence
  Description of Artificial Sequence: Synthetic oligonucleotide
uggagaacagaacugaggu

SEQ ID NO: 1044700 - RNA, 19 nt, Artificial Sequence
  Description of Artificial Sequence: Synthetic oligonucleotide
aaugacucuggcgcgaccc

SEQ ID NO: 1044701 - RNA, 19 nt, Artificial Sequence
  Description of Artificial Sequence: Synthetic oligonucleotide
agcuccucgacccagacuc

SEQ ID NO: 1044702 - RNA, 19 nt, Artificial Sequence
  Description of Artificial Sequence: Synthetic oligonucleotide
gacaguaucagucacuauc

SEQ ID NO: 1044703 - RNA, 19 nt, Artificial Sequence
  Description of Artificial Sequence: Synthetic oligonucleotide
aaugcuggcuuaccuuacc

SEQ ID NO: 1044704 - RNA, 19 nt, Artificial Sequence
  Description of Artificial Sequence: Synthetic oligonucleotide
uuggagaacagaacugagg

SEQ ID NO: 1044705 - RNA, 19 nt, Artificial Sequence
  Description of Artificial Sequence: Synthetic oligonucleotide
acaucaauuccacugcuag

SEQ ID NO: 1044706 - RNA, 19 nt, Artificial Sequence
  Description of Artificial Sequence: Synthetic oligonucleotide
uuuagaaccucuaguggug

SEQ ID NO: 1044707 - RNA, 19 nt, Artificial Sequence
  Description of Artificial Sequence: Synthetic oligonucleotide
uuaccuuaccaccugcaag

SEQ ID NO: 1044708 - RNA, 19 nt, Artificial Sequence
  Description of Artificial Sequence: Synthetic oligonucleotide
uguggacuuaucacugucg

SEQ ID NO: 1044709 - RNA, 19 nt, Artificial Sequence
  Description of Artificial Sequence: Synthetic oligonucleotide
uagauccugguucacaccc

SEQ ID NO: 1044710 - RNA, 19 nt, Artificial Sequence
  Description of Artificial Sequence: Synthetic oligonucleotide
gagaacgagguagagaugc

SEQ ID NO: 1044711 - RNA, 19 nt, Artificial Sequence
  Description of Artificial Sequence: Synthetic oligonucleotide
gaacauaccuucucggggc

SEQ ID NO: 1044712 - RNA, 19 nt, Artificial Sequence
  Description of Artificial Sequence: Synthetic oligonucleotide
ugucugaacucgaacuggg

SEQ ID NO: 1044713 - RNA, 19 nt, Artificial Sequence
  Description of Artificial Sequence: Synthetic oligonucleotide
uuauggauuccccuggcac

SEQ ID NO: 1044714 - RNA, 19 nt, Artificial Sequence
  Description of Artificial Sequence: Synthetic oligonucleotide
uggaacauaccuucucggg

SEQ ID NO: 1044715 - RNA, 19 nt, Artificial Sequence
  Description of Artificial Sequence: Synthetic oligonucleotide
guauuuacaacagcagggg

SEQ ID NO: 1044716 - RNA, 19 nt, Artificial Sequence
  Description of Artificial Sequence: Synthetic oligonucleotide
cugaacucgaacugggccg

SEQ ID NO: 1044717 - RNA, 19 nt, Artificial Sequence
  Description of Artificial Sequence: Synthetic oligonucleotide
accaugaggucuuaagcuc

SEQ ID NO: 1044718 - RNA, 19 nt, Artificial Sequence
  Description of Artificial Sequence: Synthetic oligonucleotide
acgaguuuaguccugggca

SEQ ID NO: 1044719 - RNA, 19 nt, Artificial Sequence
  Description of Artificial Sequence: Synthetic oligonucleotide
guaucagucacuaucgcug

SEQ ID NO: 1044720 - RNA, 19 nt, Artificial Sequence
  Description of Artificial Sequence: Synthetic oligonucleotide
acauguugggacccaggcc

SEQ ID NO: 1044721 - RNA, 19 nt, Artificial Sequence
  Description of Artificial Sequence: Synthetic oligonucleotide
aguuauggauuccccuggc

SEQ ID NO: 1044722 - RNA, 19 nt, Artificial Sequence
  Description of Artificial Sequence: Synthetic oligonucleotide
aacugagguucuccugccc

SEQ ID NO: 1044723 - RNA, 19 nt, Artificial Sequence
  Description of Artificial Sequence: Synthetic oligonucleotide
cacugaguggccaugggcc

SEQ ID NO: 1044724 - RNA, 19 nt, Artificial Sequence
  Description of Artificial Sequence: Synthetic oligonucleotide
cuuggaguguuuuguacag

SEQ ID NO: 1044725 - RNA, 19 nt, Artificial Sequence
  Description of Artificial Sequence: Synthetic oligonucleotide
ugagacuggccccaagacc

SEQ ID NO: 1044726 - RNA, 19 nt, Artificial Sequence
  Description of Artificial Sequence: Synthetic oligonucleotide
aguaucagucacuaucgcu

SEQ ID NO: 1044727 - RNA, 19 nt, Artificial Sequence
  Description of Artificial Sequence: Synthetic oligonucleotide
gacauguugggacccaggc

SEQ ID NO: 1044728 - RNA, 19 nt, Artificial Sequence
  Description of Artificial Sequence: Synthetic oligonucleotide
gagguagagaugcucucgg

SEQ ID NO: 1044729 - RNA, 19 nt, Artificial Sequence
  Description of Artificial Sequence: Synthetic oligonucleotide
caggaauuaaucagugcag

SEQ ID NO: 1044730 - RNA, 19 nt, Artificial Sequence
  Description of Artificial Sequence: Synthetic oligonucleotide
ugggugaggguacuuacug

SEQ ID NO: 1044731 - RNA, 19 nt, Artificial Sequence
  Description of Artificial Sequence: Synthetic oligonucleotide
gguauggcauguuuuaugc

SEQ ID NO: 1044732 - RNA, 19 nt, Artificial Sequence
  Description of Artificial Sequence: Synthetic oligonucleotide
ucugaggcggcacuacugc

SEQ ID NO: 1044733 - RNA, 19 nt, Artificial Sequence
  Description of Artificial Sequence: Synthetic oligonucleotide
uagcugguaaguccauugg

SEQ ID NO: 1044734 - RNA, 19 nt, Artificial Sequence
  Description of Artificial Sequence: Synthetic oligonucleotide
uucuuaccacuucacagga

SEQ ID NO: 1044735 - RNA, 19 nt, Artificial Sequence
  Description of Artificial Sequence: Synthetic oligonucleotide
auaggcaaucugcacugac

SEQ ID NO: 1044736 - RNA, 19 nt, Artificial Sequence
  Description of Artificial Sequence: Synthetic oligonucleotide
guugcagucauuacgguac

SEQ ID NO: 1044737 - RNA, 19 nt, Artificial Sequence
  Description of Artificial Sequence: Synthetic oligonucleotide
agcugguaaguccauuggg

SEQ ID NO: 1044738 - RNA, 19 nt, Artificial Sequence
  Description of Artificial Sequence: Synthetic oligonucleotide
ugcccuacaacaccaugag

SEQ ID NO: 1044739 - RNA, 19 nt, Artificial Sequence
  Description of Artificial Sequence: Synthetic oligonucleotide
auuacgguacaccaagaaa

SEQ ID NO: 1044740 - RNA, 19 nt, Artificial Sequence
  Description of Artificial Sequence: Synthetic oligonucleotide
ggaacauaccuucucgggg

SEQ ID NO: 1044741 - RNA, 19 nt, Artificial Sequence
  Description of Artificial Sequence: Synthetic oligonucleotide
uuaguaccaaaugacucug

SEQ ID NO: 1044742 - RNA, 19 nt, Artificial Sequence
  Description of Artificial Sequence: Synthetic oligonucleotide
cucuaguggugguacaggg

SEQ ID NO: 1044743 - RNA, 19 nt, Artificial Sequence
  Description of Artificial Sequence: Synthetic oligonucleotide
uuagaaccucuaguggugg

SEQ ID NO: 1044744 - RNA, 19 nt, Artificial Sequence
  Description of Artificial Sequence: Synthetic oligonucleotide
uggaguguuuuguacaguc

SEQ ID NO: 1044745 - RNA, 19 nt, Artificial Sequence
  Description of Artificial Sequence: Synthetic oligonucleotide
gucacuaucgcuggucucg

SEQ ID NO: 1044746 - RNA, 19 nt, Artificial Sequence
  Description of Artificial Sequence: Synthetic oligonucleotide
ucuggcgcgacccggaaac

SEQ ID NO: 1044747 - RNA, 19 nt, Artificial Sequence
  Description of Artificial Sequence: Synthetic oligonucleotide
uacgguacaccaagaaacu

SEQ ID NO: 1044748 - RNA, 19 nt, Artificial Sequence
  Description of Artificial Sequence: Synthetic oligonucleotide
gguggaacauaccuucucg

SEQ ID NO: 1044749 - RNA, 19 nt, Artificial Sequence
  Description of Artificial Sequence: Synthetic oligonucleotide
ugcuaggcugggauaaugc

SEQ ID NO: 1044750 - RNA, 19 nt, Artificial Sequence
  Description of Artificial Sequence: Synthetic oligonucleotide
agaaggagggcuugccccg

SEQ ID NO: 1044751 - RNA, 19 nt, Artificial Sequence
  Description of Artificial Sequence: Synthetic oligonucleotide
accaaaugacucuggcgcg

SEQ ID NO: 1044752 - RNA, 19 nt, Artificial Sequence
  Description of Artificial Sequence: Synthetic oligonucleotide
ugugauaggcaaucugcac

SEQ ID NO: 1044753 - RNA, 19 nt, Artificial Sequence
  Description of Artificial Sequence: Synthetic oligonucleotide
gauaaccucggcauuuggc

SEQ ID NO: 1044754 - RNA, 19 nt, Artificial Sequence
  Description of Artificial Sequence: Synthetic oligonucleotide
accccucuugcgcugacgc

SEQ ID NO: 1044755 - RNA, 19 nt, Artificial Sequence
  Description of Artificial Sequence: Synthetic oligonucleotide
cagaggaacgaguuuaguc

SEQ ID NO: 1044756 - RNA, 19 nt, Artificial Sequence
  Description of Artificial Sequence: Synthetic oligonucleotide
ucacccugcaccuugcuuc

SEQ ID NO: 1044757 - RNA, 19 nt, Artificial Sequence
  Description of Artificial Sequence: Synthetic oligonucleotide
caucaauuccacugcuagg

SEQ ID NO: 1044758 - RNA, 19 nt, Artificial Sequence
  Description of Artificial Sequence: Synthetic oligonucleotide
auaaugcuggcuuaccuua

SEQ ID NO: 1044759 - RNA, 19 nt, Artificial Sequence
  Description of Artificial Sequence: Synthetic oligonucleotide
agaucggucacagagcacu

SEQ ID NO: 1044760 - RNA, 19 nt, Artificial Sequence
  Description of Artificial Sequence: Synthetic oligonucleotide
uuuaguccugggcagccac

SEQ ID NO: 1044761 - RNA, 19 nt, Artificial Sequence
  Description of Artificial Sequence: Synthetic oligonucleotide
ugugggaccucuccucucc

SEQ ID NO: 1044762 - RNA, 19 nt, Artificial Sequence
  Description of Artificial Sequence: Synthetic oligonucleotide
acugucgcugucugaacuc

SEQ ID NO: 1044763 - RNA, 19 nt, Artificial Sequence
  Description of Artificial Sequence: Synthetic oligonucleotide
ggaauuaaucagugcagag

SEQ ID NO: 1044764 - RNA, 19 nt, Artificial Sequence
  Description of Artificial Sequence: Synthetic oligonucleotide
gagacuggccccaagacca

SEQ ID NO: 1044765 - RNA, 19 nt, Artificial Sequence
  Description of Artificial Sequence: Synthetic oligonucleotide
uaguaccaaaugacucugg

SEQ ID NO: 1044766 - RNA, 19 nt, Artificial Sequence
  Description of Artificial Sequence: Synthetic oligonucleotide
uaggcaaucugcacugacu

SEQ ID NO: 1044767 - RNA, 19 nt, Artificial Sequence
  Description of Artificial Sequence: Synthetic oligonucleotide
ucuaguggugguacaggga

SEQ ID NO: 1044768 - RNA, 19 nt, Artificial Sequence
  Description of Artificial Sequence: Synthetic oligonucleotide
guggacuuaucacugucgc

SEQ ID NO: 1044769 - RNA, 19 nt, Artificial Sequence
  Description of Artificial Sequence: Synthetic oligonucleotide
ugaacucgaacugggccgg

SEQ ID NO: 1044770 - RNA, 19 nt, Artificial Sequence
  Description of Artificial Sequence: Synthetic oligonucleotide
guacuuacugccguggccc

SEQ ID NO: 1044771 - RNA, 19 nt, Artificial Sequence
  Description of Artificial Sequence: Synthetic oligonucleotide
caguuauggauuccccugg

SEQ ID NO: 1044772 - RNA, 19 nt, Artificial Sequence
  Description of Artificial Sequence: Synthetic oligonucleotide
ugaggguacuuacugccgu

SEQ ID NO: 1044773 - RNA, 19 nt, Artificial Sequence
  Description of Artificial Sequence: Synthetic oligonucleotide
acuaucgcuggucucgcug

SEQ ID NO: 1044774 - RNA, 19 nt, Artificial Sequence
  Description of Artificial Sequence: Synthetic oligonucleotide
auuccccuggcacaagcag

SEQ ID NO: 1044775 - RNA, 19 nt, Artificial Sequence
  Description of Artificial Sequence: Synthetic oligonucleotide
gaguaggccucauucucag

SEQ ID NO: 1044776 - RNA, 19 nt, Artificial Sequence
  Description of Artificial Sequence: Synthetic oligonucleotide
gacccggaaacgcaguuac

SEQ ID NO: 1044777 - RNA, 19 nt, Artificial Sequence
  Description of Artificial Sequence: Synthetic oligonucleotide
acgauggauaaccucggca

SEQ ID NO: 1044778 - RNA, 19 nt, Artificial Sequence
  Description of Artificial Sequence: Synthetic oligonucleotide
ggacuuaucacugucgcug

SEQ ID NO: 1044779 - RNA, 19 nt, Artificial Sequence
  Description of Artificial Sequence: Synthetic oligonucleotide
ucaauuccacugcuaggcu

SEQ ID NO: 1044780 - RNA, 19 nt, Artificial Sequence
  Description of Artificial Sequence: Synthetic oligonucleotide
ugaucagagcuggauacga

SEQ ID NO: 1044781 - RNA, 19 nt, Artificial Sequence
  Description of Artificial Sequence: Synthetic oligonucleotide
uacaacaccaugaggucuu

SEQ ID NO: 1044782 - RNA, 19 nt, Artificial Sequence
  Description of Artificial Sequence: Synthetic oligonucleotide
aagccauuagcugguaagu

SEQ ID NO: 1044783 - RNA, 19 nt, Artificial Sequence
  Description of Artificial Sequence: Synthetic oligonucleotide
acccagacucuuucuuacc

SEQ ID NO: 1044784 - RNA, 19 nt, Artificial Sequence
  Description of Artificial Sequence: Synthetic oligonucleotide
cuaucgcuggucucgcugc

SEQ ID NO: 1044785 - RNA, 19 nt, Artificial Sequence
  Description of Artificial Sequence: Synthetic oligonucleotide
aacauaccuucucggggca

SEQ ID NO: 1044786 - RNA, 19 nt, Artificial Sequence
  Description of Artificial Sequence: Synthetic oligonucleotide
aggaauuaaucagugcaga

SEQ ID NO: 1044787 - RNA, 19 nt, Artificial Sequence
  Description of Artificial Sequence: Synthetic oligonucleotide
gguagagaugcucucgggc

SEQ ID NO: 1044788 - RNA, 19 nt, Artificial Sequence
  Description of Artificial Sequence: Synthetic oligonucleotide
gguucguuuguugucaaag

SEQ ID NO: 1044789 - RNA, 19 nt, Artificial Sequence
  Description of Artificial Sequence: Synthetic oligonucleotide
agcuggauacgauggauaa

SEQ ID NO: 1044790 - RNA, 19 nt, Artificial Sequence
  Description of Artificial Sequence: Synthetic oligonucleotide
cacaagcagguaagggugg

SEQ ID NO: 1044791 - RNA, 19 nt, Artificial Sequence
  Description of Artificial Sequence: Synthetic oligonucleotide
ucauuacgguacaccaaga

SEQ ID NO: 1044792 - RNA, 19 nt, Artificial Sequence
  Description of Artificial Sequence: Synthetic oligonucleotide
ucuaggcaguuauggauuc

SEQ ID NO: 1044793 - RNA, 19 nt, Artificial Sequence
  Description of Artificial Sequence: Synthetic oligonucleotide
ugagcugcuucggggaagg

SEQ ID NO: 1044794 - RNA, 19 nt, Artificial Sequence
  Description of Artificial Sequence: Synthetic oligonucleotide
gaacgaguuuaguccuggg

SEQ ID NO: 1044795 - RNA, 19 nt, Artificial Sequence
  Description of Artificial Sequence: Synthetic oligonucleotide
cagucauuacgguacacca

SEQ ID NO: 1044796 - RNA, 19 nt, Artificial Sequence
  Description of Artificial Sequence: Synthetic oligonucleotide
gaacugagguucuccugcc

SEQ ID NO: 1044797 - RNA, 19 nt, Artificial Sequence
  Description of Artificial Sequence: Synthetic oligonucleotide
cuagauccugguucacacc

SEQ ID NO: 1044798 - RNA, 19 nt, Artificial Sequence
  Description of Artificial Sequence: Synthetic oligonucleotide
gccauuagcugguaagucc

SEQ ID NO: 1044799 - RNA, 19 nt, Artificial Sequence
  Description of Artificial Sequence: Synthetic oligonucleotide
uacgauggauaaccucggc

SEQ ID NO: 1044800 - RNA, 19 nt, Artificial Sequence
  Description of Artificial Sequence: Synthetic oligonucleotide
agagcauccaauggggagu

SEQ ID NO: 1044801 - RNA, 19 nt, Artificial Sequence
  Description of Artificial Sequence: Synthetic oligonucleotide
ugggcucugacaguaucag

SEQ ID NO: 1044802 - RNA, 19 nt, Artificial Sequence
  Description of Artificial Sequence: Synthetic oligonucleotide
ugcgcugacgcagggagcc

SEQ ID NO: 1044803 - RNA, 19 nt, Artificial Sequence
  Description of Artificial Sequence: Synthetic oligonucleotide
gcaguuauggauuccccug

SEQ ID NO: 1044804 - RNA, 19 nt, Artificial Sequence
  Description of Artificial Sequence: Synthetic oligonucleotide
agacaucaauuccacugcu

SEQ ID NO: 1044805 - RNA, 19 nt, Artificial Sequence
  Description of Artificial Sequence: Synthetic oligonucleotide
uaaugcuggcuuaccuuac

SEQ ID NO: 1044806 - RNA, 19 nt, Artificial Sequence
  Description of Artificial Sequence: Synthetic oligonucleotide
ugacuugcggauguuggac

SEQ ID NO: 1044807 - RNA, 19 nt, Artificial Sequence
  Description of Artificial Sequence: Synthetic oligonucleotide
agucacuaucgcuggucuc

SEQ ID NO: 1044808 - RNA, 19 nt, Artificial Sequence
  Description of Artificial Sequence: Synthetic oligonucleotide
gcuucggugcugcagagcc

SEQ ID NO: 1044809 - RNA, 19 nt, Artificial Sequence
  Description of Artificial Sequence: Synthetic oligonucleotide
auacgauggauaaccucgg

SEQ ID NO: 1044810 - RNA, 19 nt, Artificial Sequence
  Description of Artificial Sequence: Synthetic oligonucleotide
agaccaggaauuaaucagu

SEQ ID NO: 1044811 - RNA, 19 nt, Artificial Sequence
  Description of Artificial Sequence: Synthetic oligonucleotide
uuguuuugaggguguugug

SEQ ID NO: 1044812 - RNA, 19 nt, Artificial Sequence
  Description of Artificial Sequence: Synthetic oligonucleotide
cuugcuucggugcugcaga

SEQ ID NO: 1044813 - RNA, 19 nt, Artificial Sequence
  Description of Artificial Sequence: Synthetic oligonucleotide
gaaccucuaguggugguac

SEQ ID NO: 1044814 - RNA, 19 nt, Artificial Sequence
  Description of Artificial Sequence: Synthetic oligonucleotide
caccuagugccccucuucc

SEQ ID NO: 1044815 - RNA, 19 nt, Artificial Sequence
  Description of Artificial Sequence: Synthetic oligonucleotide
ggaaacgcaguuacaaaug

SEQ ID NO: 1044816 - RNA, 19 nt, Artificial Sequence
  Description of Artificial Sequence: Synthetic oligonucleotide
agagcccugugauaggcaa

SEQ ID NO: 1044817 - RNA, 19 nt, Artificial Sequence
  Description of Artificial Sequence: Synthetic oligonucleotide
uggacuuaucacugucgcu

SEQ ID NO: 1044818 - RNA, 19 nt, Artificial Sequence
  Description of Artificial Sequence: Synthetic oligonucleotide
uagagaaggagggcuugcc

SEQ ID NO: 1044819 - RNA, 19 nt, Artificial Sequence
  Description of Artificial Sequence: Synthetic oligonucleotide
ugaggacauguugggaccc

SEQ ID NO: 1044820 - RNA, 19 nt, Artificial Sequence
  Description of Artificial Sequence: Synthetic oligonucleotide
uucggugcugcagagcccu

SEQ ID NO: 1044821 - RNA, 19 nt, Artificial Sequence
  Description of Artificial Sequence: Synthetic oligonucleotide
cugagacuggccccaagac

SEQ ID NO: 1044822 - RNA, 19 nt, Artificial Sequence
  Description of Artificial Sequence: Synthetic oligonucleotide
aacucgaacugggccgggg

SEQ ID NO: 1044823 - RNA, 19 nt, Artificial Sequence
  Description of Artificial Sequence: Synthetic oligonucleotide
gguacuuacugccguggcc

SEQ ID NO: 1044824 - RNA, 19 nt, Artificial Sequence
  Description of Artificial Sequence: Synthetic oligonucleotide
uggcuuaccuuaccaccug

SEQ ID NO: 1044825 - RNA, 19 nt, Artificial Sequence
  Description of Artificial Sequence: Synthetic oligonucleotide
accccaugguggaacauac

SEQ ID NO: 1044826 - RNA, 19 nt, Artificial Sequence
  Description of Artificial Sequence: Synthetic oligonucleotide
uggugguauggcauguuuu

SEQ ID NO: 1044827 - RNA, 19 nt, Artificial Sequence
  Description of Artificial Sequence: Synthetic oligonucleotide
augacucuggcgcgacccg

SEQ ID NO: 1044828 - RNA, 19 nt, Artificial Sequence
  Description of Artificial Sequence: Synthetic oligonucleotide
cuuacugccguggcccacg

SEQ ID NO: 1044829 - RNA, 19 nt, Artificial Sequence
  Description of Artificial Sequence: Synthetic oligonucleotide
gaggguacuuacugccgug

SEQ ID NO: 1044830 - RNA, 19 nt, Artificial Sequence
  Description of Artificial Sequence: Synthetic oligonucleotide
aauggggaguccucaucuu

SEQ ID NO: 1044831 - RNA, 19 nt, Artificial Sequence
  Description of Artificial Sequence: Synthetic oligonucleotide
ucagucacuaucgcugguc

SEQ ID NO: 1044832 - RNA, 19 nt, Artificial Sequence
  Description of Artificial Sequence: Synthetic oligonucleotide
guagagaugcucucgggcu

SEQ ID NO: 1044833 - RNA, 19 nt, Artificial Sequence
  Description of Artificial Sequence: Synthetic oligonucleotide
ucggucacagagcacugua

SEQ ID NO: 1044834 - RNA, 19 nt, Artificial Sequence
  Description of Artificial Sequence: Synthetic oligonucleotide
ggagaucggucacagagca

SEQ ID NO: 1044835 - RNA, 19 nt, Artificial Sequence
  Description of Artificial Sequence: Synthetic oligonucleotide
aggguacuuacugccgugg

SEQ ID NO: 1044836 - RNA, 19 nt, Artificial Sequence
  Description of Artificial Sequence: Synthetic oligonucleotide
ugggauaaugcuggcuuac

SEQ ID NO: 1044837 - RNA, 19 nt, Artificial Sequence
  Description of Artificial Sequence: Synthetic oligonucleotide
cugcccuacaacaccauga

SEQ ID NO: 1044838 - RNA, 19 nt, Artificial Sequence
  Description of Artificial Sequence: Synthetic oligonucleotide
caguaucagucacuaucgc

SEQ ID NO: 1044839 - RNA, 19 nt, Artificial Sequence
  Description of Artificial Sequence: Synthetic oligonucleotide
acgguacaccaagaaacuc

SEQ ID NO: 1044840 - RNA, 19 nt, Artificial Sequence
  Description of Artificial Sequence: Synthetic oligonucleotide
uggauaaccucggcauuug

SEQ ID NO: 1044841 - RNA, 19 nt, Artificial Sequence
  Description of Artificial Sequence: Synthetic oligonucleotide
guaaggguggugguauggc

SEQ ID NO: 1044842 - RNA, 19 nt, Artificial Sequence
  Description of Artificial Sequence: Synthetic oligonucleotide
cugacuuugggugagggua

SEQ ID NO: 1044843 - RNA, 19 nt, Artificial Sequence
  Description of Artificial Sequence: Synthetic oligonucleotide
aaccucuaguggugguaca

SEQ ID NO: 1044844 - RNA, 19 nt, Artificial Sequence
  Description of Artificial Sequence: Synthetic oligonucleotide
gugaggguacuuacugccg

SEQ ID NO: 1044845 - RNA, 19 nt, Artificial Sequence
  Description of Artificial Sequence: Synthetic oligonucleotide
aggcaguuauggauucccc

SEQ ID NO: 1044846 - RNA, 19 nt, Artificial Sequence
  Description of Artificial Sequence: Synthetic oligonucleotide
augcuggcuuaccuuacca

SEQ ID NO: 1044847 - RNA, 19 nt, Artificial Sequence
  Description of Artificial Sequence: Synthetic oligonucleotide
gaggaacgaguuuaguccu

SEQ ID NO: 1044848 - RNA, 19 nt, Artificial Sequence
  Description of Artificial Sequence: Synthetic oligonucleotide
ucuuaccacuucacaggaa

SEQ ID NO: 1044849 - RNA, 19 nt, Artificial Sequence
  Description of Artificial Sequence: Synthetic oligonucleotide
accucuaguggugguacag

SEQ ID NO: 1044850 - RNA, 19 nt, Artificial Sequence
  Description of Artificial Sequence: Synthetic oligonucleotide
cuuaccacuucacaggaau

SEQ ID NO: 1044851 - RNA, 19 nt, Artificial Sequence
  Description of Artificial Sequence: Synthetic oligonucleotide
ugcggauguuggacuugcg

SEQ ID NO: 1044852 - RNA, 19 nt, Artificial Sequence
  Description of Artificial Sequence: Synthetic oligonucleotide
cacccugcaccuugcuucg

SEQ ID NO: 1044853 - RNA, 19 nt, Artificial Sequence
  Description of Artificial Sequence: Synthetic oligonucleotide
cuagagaaggagggcuugc

SEQ ID NO: 1044854 - RNA, 19 nt, Artificial Sequence
  Description of Artificial Sequence: Synthetic oligonucleotide
cauuacgguacaccaagaa

SEQ ID NO: 1044855 - RNA, 19 nt, Artificial Sequence
  Description of Artificial Sequence: Synthetic oligonucleotide
ggaacgaguuuaguccugg

SEQ ID NO: 1044856 - RNA, 19 nt, Artificial Sequence
  Description of Artificial Sequence: Synthetic oligonucleotide
guuauggauuccccuggca

SEQ ID NO: 1044857 - RNA, 19 nt, Artificial Sequence
  Description of Artificial Sequence: Synthetic oligonucleotide
gcuccuaccccucuugcgc

SEQ ID NO: 1044858 - RNA, 19 nt, Artificial Sequence
  Description of Artificial Sequence: Synthetic oligonucleotide
gaguuuaguccugggcagc

SEQ ID NO: 1044859 - RNA, 19 nt, Artificial Sequence
  Description of Artificial Sequence: Synthetic oligonucleotide
uggcauguuuuaugcagua

SEQ ID NO: 1044860 - RNA, 19 nt, Artificial Sequence
  Description of Artificial Sequence: Synthetic oligonucleotide
cugucgcugucugaacucg

SEQ ID NO: 1044861 - RNA, 19 nt, Artificial Sequence
  Description of Artificial Sequence: Synthetic oligonucleotide
cuguaguugggcucugaca

SEQ ID NO: 1044862 - RNA, 19 nt, Artificial Sequence
  Description of Artificial Sequence: Synthetic oligonucleotide
caccaugaggucuuaagcu

SEQ ID NO: 1044863 - RNA, 19 nt, Artificial Sequence
  Description of Artificial Sequence: Synthetic oligonucleotide
ggaaggagaucggucacag

SEQ ID NO: 1044864 - RNA, 19 nt, Artificial Sequence
  Description of Artificial Sequence: Synthetic oligonucleotide
guauggcauguuuuaugca

SEQ ID NO: 1044865 - RNA, 19 nt, Artificial Sequence
  Description of Artificial Sequence: Synthetic oligonucleotide
uuuuaccaugacccaccau

SEQ ID NO: 1044866 - RNA, 19 nt, Artificial Sequence
  Description of Artificial Sequence: Synthetic oligonucleotide
cauccaauggggaguccuc

SEQ ID NO: 1044867 - RNA, 19 nt, Artificial Sequence
  Description of Artificial Sequence: Synthetic oligonucleotide
caugacccaccauccugcc

SEQ ID NO: 1044868 - RNA, 19 nt, Artificial Sequence
  Description of Artificial Sequence: Synthetic oligonucleotide
uugcuucggugcugcagag

SEQ ID NO: 1044869 - RNA, 19 nt, Artificial Sequence
  Description of Artificial Sequence: Synthetic oligonucleotide
cagugccugagguaucuuc

SEQ ID NO: 1044870 - RNA, 19 nt, Artificial Sequence
  Description of Artificial Sequence: Synthetic oligonucleotide
ggaugggaaccccauggug

SEQ ID NO: 1044871 - RNA, 19 nt, Artificial Sequence
  Description of Artificial Sequence: Synthetic oligonucleotide
ggauaaccucggcauuugg

SEQ ID NO: 1044872 - RNA, 19 nt, Artificial Sequence
  Description of Artificial Sequence: Synthetic oligonucleotide
gcagucauuacgguacacc

SEQ ID NO: 1044873 - RNA, 19 nt, Artificial Sequence
  Description of Artificial Sequence: Synthetic oligonucleotide
auggauaaccucggcauuu

SEQ ID NO: 1044874 - RNA, 19 nt, Artificial Sequence
  Description of Artificial Sequence: Synthetic oligonucleotide
ugcggcacugucugucugu

SEQ ID NO: 1044875 - RNA, 19 nt, Artificial Sequence
  Description of Artificial Sequence: Synthetic oligonucleotide
cccuacaacaccaugaggu

SEQ ID NO: 1044876 - RNA, 19 nt, Artificial Sequence
  Description of Artificial Sequence: Synthetic oligonucleotide
cuaguggugguacagggau

SEQ ID NO: 1044877 - RNA, 19 nt, Artificial Sequence
  Description of Artificial Sequence: Synthetic oligonucleotide
uucugcggcacugucuguc

SEQ ID NO: 1044878 - RNA, 19 nt, Artificial Sequence
  Description of Artificial Sequence: Synthetic oligonucleotide
uacuuacugccguggccca

SEQ ID NO: 1044879 - RNA, 19 nt, Artificial Sequence
  Description of Artificial Sequence: Synthetic oligonucleotide
ucacuaucgcuggucucgc

SEQ ID NO: 1044880 - RNA, 19 nt, Artificial Sequence
  Description of Artificial Sequence: Synthetic oligonucleotide
ggaucaucagcuggggagc

SEQ ID NO: 1044881 - RNA, 19 nt, Artificial Sequence
  Description of Artificial Sequence: Synthetic oligonucleotide
ccaagaccaggaauuaauc

SEQ ID NO: 1044882 - RNA, 19 nt, Artificial Sequence
  Description of Artificial Sequence: Synthetic oligonucleotide
uaucgcuggucucgcugcu

SEQ ID NO: 1044883 - RNA, 19 nt, Artificial Sequence
  Description of Artificial Sequence: Synthetic oligonucleotide
ucucgggcuuccuguguca

SEQ ID NO: 1044884 - RNA, 19 nt, Artificial Sequence
  Description of Artificial Sequence: Synthetic oligonucleotide
acugcugcugcugcugcug

SEQ ID NO: 1044885 - RNA, 19 nt, Artificial Sequence
  Description of Artificial Sequence: Synthetic oligonucleotide
uccggucugaggcggcacu

SEQ ID NO: 1044886 - RNA, 19 nt, Artificial Sequence
  Description of Artificial Sequence: Synthetic oligonucleotide
gaaggagggcuugccccgg

SEQ ID NO: 1044887 - RNA, 19 nt, Artificial Sequence
  Description of Artificial Sequence: Synthetic oligonucleotide
cuaggcaguuauggauucc

SEQ ID NO: 1044888 - RNA, 19 nt, Artificial Sequence
  Description of Artificial Sequence: Synthetic oligonucleotide
ccuagugccccucuuccag

SEQ ID NO: 1044889 - RNA, 19 nt, Artificial Sequence
  Description of Artificial Sequence: Synthetic oligonucleotide
cuucggugcugcagagccc

SEQ ID NO: 1044890 - RNA, 19 nt, Artificial Sequence
  Description of Artificial Sequence: Synthetic oligonucleotide
cugacuugcggauguugga

SEQ ID NO: 1044891 - RNA, 19 nt, Artificial Sequence
  Description of Artificial Sequence: Synthetic oligonucleotide
caaagaagagaacgaggua

SEQ ID NO: 1044892 - RNA, 19 nt, Artificial Sequence
  Description of Artificial Sequence: Synthetic oligonucleotide
uugcgcugacgcagggagc

SEQ ID NO: 1044893 - RNA, 19 nt, Artificial Sequence
  Description of Artificial Sequence: Synthetic oligonucleotide
gggucaucuggcucucccg

SEQ ID NO: 1044894 - RNA, 19 nt, Artificial Sequence
  Description of Artificial Sequence: Synthetic oligonucleotide
ccuacaacaccaugagguc

SEQ ID NO: 1044895 - RNA, 19 nt, Artificial Sequence
  Description of Artificial Sequence: Synthetic oligonucleotide
gacuuaucacugucgcugu

SEQ ID NO: 1044896 - RNA, 19 nt, Artificial Sequence
  Description of Artificial Sequence: Synthetic oligonucleotide
ggaagguugcagucauuac

SEQ ID NO: 1044897 - RNA, 19 nt, Artificial Sequence
  Description of Artificial Sequence: Synthetic oligonucleotide
ggcuccuaccccucuugcg

SEQ ID NO: 1044898 - RNA, 19 nt, Artificial Sequence
  Description of Artificial Sequence: Synthetic oligonucleotide
agucauuacgguacaccaa

SEQ ID NO: 1044899 - RNA, 19 nt, Artificial Sequence
  Description of Artificial Sequence: Synthetic oligonucleotide
auccaauggggaguccuca

SEQ ID NO: 1044900 - RNA, 19 nt, Artificial Sequence
  Description of Artificial Sequence: Synthetic oligonucleotide
caaaugacucuggcgcgac

SEQ ID NO: 1044901 - RNA, 19 nt, Artificial Sequence
  Description of Artificial Sequence: Synthetic oligonucleotide
acuuacugccguggcccac

SEQ ID NO: 1044902 - RNA, 19 nt, Artificial Sequence
  Description of Artificial Sequence: Synthetic oligonucleotide
gauuccccuggcacaagca

SEQ ID NO: 1044903 - RNA, 19 nt, Artificial Sequence
  Description of Artificial Sequence: Synthetic oligonucleotide
gucugaggcggcacuacug

SEQ ID NO: 1044904 - RNA, 19 nt, Artificial Sequence
  Description of Artificial Sequence: Synthetic oligonucleotide
accuagugccccucuucca

SEQ ID NO: 1044905 - RNA, 19 nt, Artificial Sequence
  Description of Artificial Sequence: Synthetic oligonucleotide
auggauuccccuggcacaa

SEQ ID NO: 1044906 - RNA, 19 nt, Artificial Sequence
  Description of Artificial Sequence: Synthetic oligonucleotide
ggcggcacaacuccaggac

SEQ ID NO: 1044907 - RNA, 19 nt, Artificial Sequence
  Description of Artificial Sequence: Synthetic oligonucleotide
ugacaguaucagucacuau

SEQ ID NO: 1044908 - RNA, 19 nt, Artificial Sequence
  Description of Artificial Sequence: Synthetic oligonucleotide
ccaggcuagacagacauca

SEQ ID NO: 1044909 - RNA, 19 nt, Artificial Sequence
  Description of Artificial Sequence: Synthetic oligonucleotide
cugcugcugcugcugcugg

SEQ ID NO: 1044910 - RNA, 19 nt, Artificial Sequence
  Description of Artificial Sequence: Synthetic oligonucleotide
aggacauguugggacccag

SEQ ID NO: 1044911 - RNA, 19 nt, Artificial Sequence
  Description of Artificial Sequence: Synthetic oligonucleotide
gaaggagaucggucacaga

SEQ ID NO: 1044912 - RNA, 19 nt, Artificial Sequence
  Description of Artificial Sequence: Synthetic oligonucleotide
cgaguuuaguccugggcag

SEQ ID NO: 1044913 - RNA, 19 nt, Artificial Sequence
  Description of Artificial Sequence: Synthetic oligonucleotide
cacgccgcggccagugccc

SEQ ID NO: 1044914 - RNA, 19 nt, Artificial Sequence
  Description of Artificial Sequence: Synthetic oligonucleotide
ugcccaccucaugugcggg

SEQ ID NO: 1044915 - RNA, 19 nt, Artificial Sequence
  Description of Artificial Sequence: Synthetic oligonucleotide
uccuaccccucuugcgcug

SEQ ID NO: 1044916 - RNA, 19 nt, Artificial Sequence
  Description of Artificial Sequence: Synthetic oligonucleotide
gucuagauccugguucaca

SEQ ID NO: 1044917 - RNA, 19 nt, Artificial Sequence
  Description of Artificial Sequence: Synthetic oligonucleotide
agaaccucuagugguggua

SEQ ID NO: 1044918 - RNA, 19 nt, Artificial Sequence
  Description of Artificial Sequence: Synthetic oligonucleotide
ugggcgguccagcugucuu

SEQ ID NO: 1044919 - RNA, 19 nt, Artificial Sequence
  Description of Artificial Sequence: Synthetic oligonucleotide
uacugcugcugcugcugcu

SEQ ID NO: 1044920 - RNA, 19 nt, Artificial Sequence
  Description of Artificial Sequence: Synthetic oligonucleotide
gguugcagucauuacggua

SEQ ID NO: 1044921 - RNA, 19 nt, Artificial Sequence
  Description of Artificial Sequence: Synthetic oligonucleotide
uaccccucuugcgcugacg

SEQ ID NO: 1044922 - RNA, 19 nt, Artificial Sequence
  Description of Artificial Sequence: Synthetic oligonucleotide
gauggauaaccucggcauu

SEQ ID NO: 1044923 - RNA, 19 nt, Artificial Sequence
  Description of Artificial Sequence: Synthetic oligonucleotide
ggauaaugcuggcuuaccu

SEQ ID NO: 1044924 - RNA, 19 nt, Artificial Sequence
  Description of Artificial Sequence: Synthetic oligonucleotide
cugcuaggcugggauaaug

SEQ ID NO: 1044925 - RNA, 19 nt, Artificial Sequence
  Description of Artificial Sequence: Synthetic oligonucleotide
auaccuucucggggcaucu

SEQ ID NO: 1044926 - RNA, 19 nt, Artificial Sequence
  Description of Artificial Sequence: Synthetic oligonucleotide
cucuugcgcugacgcaggg

SEQ ID NO: 1044927 - RNA, 19 nt, Artificial Sequence
  Description of Artificial Sequence: Synthetic oligonucleotide
cauuuggcccacacaaggu

SEQ ID NO: 1044928 - RNA, 19 nt, Artificial Sequence
  Description of Artificial Sequence: Synthetic oligonucleotide
ggacagugagcaaagggaa

SEQ ID NO: 1044929 - RNA, 19 nt, Artificial Sequence
  Description of Artificial Sequence: Synthetic oligonucleotide
ggcuuaccuuaccaccugc

SEQ ID NO: 1044930 - RNA, 19 nt, Artificial Sequence
  Description of Artificial Sequence: Synthetic oligonucleotide
gggcggaucaucagcuggg

SEQ ID NO: 1044931 - RNA, 19 nt, Artificial Sequence
  Description of Artificial Sequence: Synthetic oligonucleotide
gcccuacaacaccaugagg

SEQ ID NO: 1044932 - RNA, 19 nt, Artificial Sequence
  Description of Artificial Sequence: Synthetic oligonucleotide
ggguacuuacugccguggc

SEQ ID NO: 1044933 - RNA, 19 nt, Artificial Sequence
  Description of Artificial Sequence: Synthetic oligonucleotide
gagcuggauacgauggaua

SEQ ID NO: 1044934 - RNA, 19 nt, Artificial Sequence
  Description of Artificial Sequence: Synthetic oligonucleotide
uccucgacccagacucuuu

SEQ ID NO: 1044935 - RNA, 19 nt, Artificial Sequence
  Description of Artificial Sequence: Synthetic oligonucleotide
cucuaggcaguuauggauu

SEQ ID NO: 1044936 - RNA, 19 nt, Artificial Sequence
  Description of Artificial Sequence: Synthetic oligonucleotide
caucagcuggggagcuggc

SEQ ID NO: 1044937 - RNA, 19 nt, Artificial Sequence
  Description of Artificial Sequence: Synthetic oligonucleotide
ugucuagauccugguucac

SEQ ID NO: 1044938 - RNA, 19 nt, Artificial Sequence
  Description of Artificial Sequence: Synthetic oligonucleotide
cccuuggaguguuuuguac

SEQ ID NO: 1044939 - RNA, 19 nt, Artificial Sequence
  Description of Artificial Sequence: Synthetic oligonucleotide
ugcugcugcugcugcugga

SEQ ID NO: 1044940 - RNA, 19 nt, Artificial Sequence
  Description of Artificial Sequence: Synthetic oligonucleotide
ggcgguccagcugucuucg

SEQ ID NO: 1044941 - RNA, 19 nt, Artificial Sequence
  Description of Artificial Sequence: Synthetic oligonucleotide
agguucguuuguugucaaa

SEQ ID NO: 1044942 - RNA, 19 nt, Artificial Sequence
  Description of Artificial Sequence: Synthetic oligonucleotide
aggaacgaguuuaguccug
